United States Patent Application Publication US 2017/0114356 A1 - sequence listing, part 63

SEQ ID NO: 85052 - DNA, 5541 bp, Zea Mays
cgaaactaacctttccaatctattcggcaggatctgctttgcgacgctgtcaaaggaactcgctcgaccaccgaaccccccttgccctagcgctccccgcctccgcctctcgccgccggcgagatgatccctgtcagcgccgatatccctgtggagctgcgcttccttctcgaatgcgccaccggctccaacttcgactccattcggctcgagctctgccagttagttgacagtggcttggatggatgcattttggtgctccgagtatgtctgaatcaaatgttgctaaatgctggggaggtcaagaacctccagttgcaacaaaagcttctatctgatgttttcagatattgtttacataagacctgcttcacaactagtttttgtgaggcgctggcaacgatagccttgacggatgattttcttgaaagcttgacaaatctgctggagctctcagttgctgagaaaattggtgttggacttgcgctgtcagattctgaggactcagagatgaagcaaaaaggtagtcatttctgtgtgagtctagtgacatcatatcttcttctcttattttcagatggtcattgatatcgcctcttctgttccagggcaatggttttcaattgctcaaattgaaaagctgtgtacgagtcatatccaatctctatcaaatggtcaaattcatgaaattgtcatgtttctgcatcagtctgatggcctgtcaaagcatatggacacttttaataatattatatctctactaaaagtcacggagaggccattttttgtacctgttacgaatggagattttgatagccaagcaaatccttcaagacatttggagatgtactttggtagcacaaatgatgattttgagtcacttctgtctgaaattgggaaagagataagcatggctgacattgtagccgagttaggttacggatttactgttgacagcactcactgtaaggaaatactttccattgtggagcctcttgatgatatcgccatatctaagttgcttggggctgttgtcggcactcatattggtcttggagaggcccataacacatatgcaacatttgtatctgctattcgtaatagccacacgaatgactcacctcagccgactaaatggaacacagatgtccttgtggactcaatcaatgaacttgccccaagtacaaactgggtgcgtgtaattgaatatcttgatcatgagggtttcaatatacctgatgaagcgagcttttatctattgatgtctatatacgagtgtgcttgcaaggatccatttccacttcatgctgtttgtgggtcattgtgggaaaacacagaaggccagatatcgttcttaaagcatgcagtttgtgctccatctgataaatttacatttgcacattcttctagacacctggcatttcaggacttggcaggccctagtcaaggcaatcatgcttggttctgccttgaccttctagaagttttatgccaactagctgaagttgggtacactgcatctgtacgatcaatgcttgagtatccactgggacattgccctgagctcttacttgttggtgttagccatatcagtaccgtgtataatcttctccaaaatgaagtactgtcctgcgtatttcctgctttactgaaggatccaacaaagcgcaatgtagtgaattatctctggcatacaaactcatatctcacacttcaaggttttgttgatgctcataatgatccagattgtttgctaagaattgttgatgtttgtcatgacttgaagattctgtcgactgtccttgattctactccatttgcattttccattaaattggctgctgcttccttgaggaaagactatagtaatcttgagaaatggctgactgaaaagctatctctttatggaaaaggttttgttgaggaatgtgtgaattttctgaaagcaactatgagcaacacagattacgtcttagagggcacgacacaacctcaatctattgtcagaaacatatattgggagtcttcttatgccttcataaaggttctccagtctcactcggggcagctcttgtcagatgcaatattggatgaaataaggaaactgtgtgtttcgtttgaatcgaggaatcctagctctgctgtaagagagcttgctaattcagacggagggtcagatgacattgaagtagaggctaatgcatattttcaacacatgttctctggacagataagtgttgattccatgatacaaatgcttgggcgcttcaaagaatctacagataagagggaggtatcaattttcaactgtatgatctcaaatctttttaaagaatatacattcttccccaagtatcctgataagcagcttaagatagcagctgttctgtttgatgtttatgtttggtacatcagcactggaacagtttatggaccgtgtcatagagtggccacgatactgtaattacatattgcagatctcacatcttcgtggaacacatttagaaatggtttctgttattgagagagccctagccaaaatctcctcaagtcaaaatgagccaaatgttggcaacctgctttctgcagagcagcatgtttctggttcatcatccatggaaggcatagaggcatctgaatcatcatggttgatgggtaccatcccaagtcaactaggaaggcctctttcttctcctttgcaacataggcagcagggtcttctctcggagaggtctgaggtttctatgaattcactgaataagagcaatttatccagtcagcctccccttgcttcatcgtctgctgatttgactattaattcaaagacaactgctccaccctctttactagcttcacctcatcagtctatcagtgtgtcaacgagtgtgcatgttggatttctgcgttctcgaagtaccccaggattaccgaggcagccttcatatactactggatttgggactgctttgaatatagagacgcttgttgcagcagcggaacaaagagatataccaattgagacacctccacctgaagttcaggacaagattctttttatgatcaacaatatatccatctcaaacatggaagctaaggcaaaggaatttaatgagggcaagcattgaaccaaatttccatgatctgtatttgaagttctttgataaattaaactcaaaatccttgaacaaggaaatgctgaaggctacgtatgagaactgcaaggtcttgttaagatcagaccttatcaaatctagttctgaggagcgttccttgctaaaaaacttaggcagctggttgggcaagttcaccattggtaggaaccaggcactaagggctaaggagattgacccaaaatctcttattgtggaggcgtacgagaaaggattgatgattgcggtcataccattcacttcaaagattcttgaaccttgccagtcaagtatcgcatatcgtcctccaaatccctggaccattggaattctaagtctacttgctgaaatttataatcttccaaacctgaagatgaatctgaaatttgatatcgaggttctgtttaagaatcttacagttgacatgaaggatgtgaaaccaacttccctgcttaaagatcgtctgcgcgaggtcgaaggaaatccggatttttcaaataaagatgttactacctctcaaacccctgtggttccagaagttcttccagggactattccttcatcaactcatgttgaactgcagcctgagatcaatattacatcccgagctatgagtcttccaaatatactcaatcagtatgtggctcctgtccgtctacccacaaacagcacggtagaagctgacaaagttgctctgatgatgcctgagcaagtgtcctccttgacccaggttttgccagcacaaacacaatcaccatcaccatctccattctctgttaatcagcttatggcagctattccacgtgatgagatatgcttcaaaataaacccaaagcttggctcaattggtccacaattgcagtatagcaaaattatggatttggctttggataaggctaacagggagataatactccctgttattcaaagaagtgtgacaatagcaagccgaactacaaaagaacttatcctgaaggattatgcactggagtctgataacaatatgataactcgatctgcacatttgatggttggaacattagccggaagtcttgcccatgttacttgcaaggaacctcttcgtgtcgcactatattccaatcttcggaatctcattcaaaaccttatgagtggcagtgaaactatcgagcaaattattcacatgctagtcaacgataatctggatcttggctgtgccatcattgaggctgtggcaacacgtcaggctgttgaattgattgatgcagaaatagcccagtcattttcacaacaaaggaaacaaagagagggcggtggtcctacatatcatgaaacttttgcttatgctcaagggccgtttgctcgtgtacctgaagcattaagttctaagcctgggcatttatctgcttcccaacagagagtgtacgaggactttgttcatgtatggcatccccacaatcaaaatgtgggagctacaggttctggtctgtctggtgttgctactgtctcgagtactcttggtgtacttcgagcttacagtccaaattcgacatcagcatcctccagtaatttgtcaactgtccatatgggtggactaacatgtataactcagccgacagaactggggtctgaggatactgttatcgcacaatttttgagtaatcctgcccaagttggaccaagcgagtctcctgtcctatttagtggaacagttggtgctgcatctacattttctccattggcatctaatgaccttcctgaaataagtgctatggtgccccctccatcaacatctgctgatcgtctgggatctattttacctgaacctttgaatactggggatgctttggagagatacaaacaggttgctcagaagctggaagccttgattgctaatgatggtaaacatgtggaaattcagtctgttattgcagaagttcctgatatgttacgccggtgtgttagccgtgatgaggctgcattagtagtagcgcaaaaggttttcaaaagtttgtacgataatgcatcaaatagtgcttatgtctcctggcttctagcaaccttaattgcaatacgagatgtctgcaagcttgttgtcaaagagttaacaagttgggtaatatattcagatgaagagaagaagtttaacattgaaatcatttttggccttattcattccaagttgctgaatcttggggagtacaacgttcatttgacaaagctaattgatgggggaagaaataaggttgcaacggagtttgcaatgtctcttgtccaaacattgattacacaagatcctgttagcatatcagagcttcacaatgttgttgatgcaatatcgaaagttctagctgcccaggtaaacaaagaggaaagcattgctaatgaaactacactaattgatccaaatcag

SEQ ID NO: 85053 - DNA, 5590 bp, Zea Mays
cgaaactaacctttccaatctattcggcaggatctgctttgcgacgctgtcaaaggaactcgctcgaccaccgaaccccccttgccctagcgctccccgcctccgcctctcgccgccggcgagatgatccctgtcagcgccgatatccctgtggagctgcgcttccttctcgaatgcgccaccggctccaacttcgactccattcggctcgagctctgccagttagttgacagtggcttggatggatgcattttggtgctccgagtatgtctgaatcaaatgttgctaaatgctggggaggtcaagaacctccagttgcaacaaaagcttctatctgatgttttcagatattgtttacataagacctgcttcacaactagtttttgtgaggcgctggcaacgatagccttgacggatgattttcttgaaagcttgacaaatctgctggagctctcagttgctgagaaaattggtgttggacttgcgctgtcagattctgaggactcagagatgaagcaaaaaggtagtcatttctgtgtgagtctagtgacatcatatcttcttctcttattttcagatggtcattgatatcgcctcttctgttccagggcaatggttttcaattgctcaaattgaaaagctgtgtacgagtcatatccaatctctatcaaatggtcaaattcatgaaattgtcatgtttctgcatcagtctgatggcctgtcaaagcatatggacacttttaataatattatatctctactaaaagtcacggagaggccattttttgtacctgttacgaatggagattttgatagccaagcaaatccttcaagacatttggagatgtactttggtagcacaaatgatgattttgagtcacttctgtctgaaattgggaaagagataagcatggctgacattgtagccgagttaggttacggatttactgttgacagcactcactgtaaggaaatactttccattgtggagcctcttgatgatatcgccatatctaagttgcttggggctgttgtcggcactcatattggtcttggagaggcccataacacatatgcaacatttgtatctgctattcgtaatagccacacgaatgactcacctcagccgactaaatggaacacagatgtccttgtggactcaatcaatgaacttgccccaagtacaaactgggtgcgtgtaattgaatatcttgatcatgagggtttcaatatacctgatgaagcgagcttttatctattgatgtctatatacgagtgtgcttgcaaggatccatttccacttcatgctgtttgtgggtcattgtgggaaaacacagaaggccagatatcgttcttaaagcatgcagtttgtgctccatctgataaatttacatttgcacattcttctagacacctggcatttcaggacttggcaggccctagtcaaggcaatcatgcttggttctgccttgaccttctagaagttttatgccaactagctgaagttgggtacactgcatctgtacgatcaatgcttgagtatccactgggacattgccctgagctcttacttgttggtgttagccatatcagtaccgtgtataatcttctccaaaatgaagtactgtcctgcgtatttcctgctttactgaaggatccaacaaagcgcaatgtagtgaattatctctggcatacaaactcatatctcacacttcaaggttttgttgatgctcataatgatccagattgtttgctaagaattgttgatgtttgtcatgacttgaagattctgtcgactgtccttgattctactccatttgcattttccattaaattggctgctgcttccttgaggaaagactatagtaatcttgagaaatggctgactgaaaagctatctctttatggaaaaggttttgttgaggaatgtgtgaattttctgaaagcaactatgagcaacacagattacgtcttagagggcacgacacaacctcaatctattgtcagaaacatatattgggagtcttcttatgccttcataaaggttctccagtctcactcggggcagctcttgtcagatgcaatattggatgaaataaggaaactgtgtgtttcgtttgaatcgaggaatcctagctctgctgtaagagagcttgctaattcagacggagggtcagatgacattgaagtagaggctaatgcatattttcaacacatgttctctggacagataagtgttgattccatgatacaaatgcttgggcgcttcaaagaatctacagataagagggaggtatcaattttcaactgtatgatctcaaatctttttaaagaatatacattcttccccaagtatcctgataagcagcttaagatagcagctgttctgtttggatctcttattaaacatcaacttgtggctcactccgaacttggaattgctctgcgtggtgttcgtgatgccttacgcaaacctgttgattcaaagatgtttatgtttggtacatcagcactggaacagtttatggaccgtgtcatagagtggccacgatactgtaattacatattgcagatctcacatcttcgtggaacacatttagaaatggtttctgttattgagagagccctagccaaaatctcctcaagtcaaaatgagccaaatgttggcaacctgctttctgcagagcagcatgtttctggttcatcatccatggaaggcatagaggcatctgaatcatcatggttgatgggtaccatcccaagtcaactaggaaggcctctttcttctcctttgcaacataggcagcagggtcttctctcggagaggtctgaggtttctatgaattcactgaataagagcaatttatccagtcagcctccccttgcttcatcgtctgctgatttgactattaattcaaagacaactgctccaccctctttactagcttcacctcatcagtctatcagtgtgtcaacgagtgtgcatgttggatttctgcgttctcgaagtaccccaggattaccgaggcagccttcatatactactggatttgggactgctttgaatatagagacgcttgttgcagcagcggaacaaagagatataccaattgagacacctccacctgaagttcaggacaagattctttttatgatcaacaatatatccatctcaaacatggaagctaaggcaaaggaatttaatgaggtcatacaggaacaacattatccttggtttgcacaatacatggtcatgaaaagggcaagcattgaaccaaatttccatgatctgtatttgaagttctttgataaattaaactcaaaatccttgaacaaggaaatgctgaaggctacgtatgagaactgcaaggtcttgttaagatcagaccttatcaaatctagttctgaggagcgttccttgctaaaaaacttaggcagctggttgggcaagttcaccattggtaggaaccaggcactaagggctaaggagattgacccaaaatctcttattgtggaggcgtacgagaaaggattgatgattgcggtcataccattcacttcaaagattcttgaaccttgccagtcaagtatcgcatatcgtcctccaaatccctggaccattggaattctaagtctacttgctgaaatttataatcttccaaacctgaagatgaatctgaaatttgatatcgaggttctgtttaagaatcttacagttgacatgaaggatgtgaaaccaacttccctgcttaaagatcgtctgcgcgaggtcgaaggaaatccggatttttcaaataaagatgttactacctctcaaacccctgtggttccagaagttcttccagggactattccttcatcaactcatgttgaactgcagcctgagatcaatattacatcccgagctatgagtcttccaaatatactcaatcagtatgtggctcctgtccgtctacccacaaacagcacggtagaagctgacaaagttgctctgatgatgcctgagcaagtgtcctccttgacccagcttatggcagctattccacgtgatgagatatgcttcaaaataaacccaaagcttggctcaattggtccacaattgcagtatagcaaaattatggatttggctttggataaggctaacagggagataatactccctgttattcaaagaagtgtgacaatagcaagccgaactacaaaagaacttatcctgaaggattatgcactggagtctgataacaatatgataactcgatctgcacatttgatggttggaacattagccggaagtcttgcccatgttacttgcaaggaacctcttcgtgtcgcactatattccaatcttcggaatctcattcaaaaccttatgagtggcagtgaaactatcgagcaaattattcacatgctagtcaacgataatctggatcttggctgtgccatcattgaggctgtggcaacacgtcaggctgttgaattgattgatgcagaaatagcccagtcattttcacaacaaaggaaacaaagagagggcggtggtcctacatatcatgaaacttttgcttatgctcaagggccgtttgctcgtgtacctgaagcattaagttctaagcctgggcatttatctgcttcccaacagagagtgtacgaggactttgttcatgtatggcatccccacaatcaaaatgtgggagctacaggttctggtctgtctggtgttgctactgtctcgagtactcttggtgtacttcgagcttacagtccaaattcgacatcagcatcctccagtaatttgtcaactgtccatatgggtggactaacatgtataactcagccgacagaactggggtctgaggatactgttatcgcacaatttttgagtaatcctgcccaagttggaccaagcgagtctcctgtcctatttagtggaacagttggtgctgcatctacattttctccattggcatctaatgaccttcctgaaataagtgctatggtgccccctccatcaacatctgctgatcgtctgggatctattttacctgaacctttgaatactggggatgctttggagagatacaaacaggttgctcagaagtctgttattgcagaagttcctgatatgttacgccggtgtgttagccgtgatgaggctgcattagtagtagcgcaaaaggttttcaaaagtttgtacgataatgcatcaaatagtgcttatgtctcctggcttctagcaaccttaattgcaatacgagatgtctgcaagcttgttgtcaaagagttaacaagttgggtaatatattcagatgaagagaagaagtttaacattgaaatcatttttggccttattcattccaagttgctgaatcttggggagtacaacgttcatttgacaaagctaattgatgggggaagaaataaggttgcaacggagtttgcaatgtctcttgtccaaacattgattacacaagatcctgttagcatatcagagcttcacaatgttgttgatgcaatatcgaaagttctagctgcccaggtaaacaaagaggaaagcattgctaatgaaactacactaattgatccaaatcag

SEQ ID NO: 85054 - DNA, 5609 bp, Zea Mays
atcgaaactaacctttccaatctattcggcaggatctgctttgcgacgctgtcaaaggaactcgctcgaccaccgaaccccccttgccctagcgctccccgcctccgcctctcgccgccggcgagatgatccctgtcagcgccgatatccctgtggagctgcgcttccttctcgaatgcgccaccggctccaacttcgactccattcggctcgagctctgccagttagttgacagtggcttggatggatgcattttggtgctccgagtatgtctgaatcaaatgttgctaaatgctggggaggtcaagaacctccagttgcaacaaaagcttctatctgatgttttcagatattgtttacataagacctgcttcacaactagtttttgtgaggcgctggcaacgatagccttgacggatgattttcttgaaagcttgacaaatctgctggagctctcagttgctgagaaaattggtgttggacttgcgctgtcagattctgaggactcagagatgaagcaaaaaggtagtcatttctgtatggtcattgatatcgcctcttctgttccagggcaatggttttcaattgctcaaattgaaaagctgtgtacgagtcatatccaatctctatcaaatggtcaaattcatgaaattgtcatgtttctgcatcagtctgatggcctgtcaaagcatatggacacttttaataatattatatctctactaaaagtcacggagaggccattttttgtacctgttacgaatggagattttgatagccaagcaaatccttcaagacatttggagatgtactttggtagcacaaatgatgattttgagtcacttctgtctgaaattgggaaagagataagcatggctgacattgtagccgagttaggttacggatttactgttgacagcactcactgtaaggaaatactttccattgtggagcctcttgatgatatcgccatatctaagttgcttggggctgttgtcggcactcatattggtcttggagaggcccataacacatatgcaacatttgtatctgctattcgtaatagccacacgaatgactcacctcagccgactaaatggaacacagatgtccttgtggactcaatcaatgaacttgccccaagtacaaactgggtgcgtgtaattgaatatcttgatcatgagggtttcaatatacctgatgaagcgagcttttatctattgatgtctatatacgagtgtgcttgcaaggatccatttccacttcatgctgtttgtgggtcattgtgggaaaacacagaaggccagatatcgttcttaaagcatgcagtttgtgctccatctgataaatttacatttgcacattcttctagacacctggcatttcaggacttggcaggccctagtcaaggcaatcatgcttggttctgccttgaccttctagaagttttatgccaactagctgaagttgggtacactgcatctgtacgatcaatgcttgagtatccactgggacattgccctgagctcttacttgttggtgttagccatatcagtaccgtgtataatcttctccaaaatgaagtactgtcctgcgtatttcctgctttactgaaggatccaacaaagcgcaatgtagtgaattatctctggcatacaaactcatatctcacacttcaaggttttgttgatgctcataatgatccagattgtttgctaagaattgttgatgtttgtcatgacttgaagattctgtcgactgtccttgattctactccatttgcattttccattaaattggctgctgcttccttgaggaaagactatagtaatcttgagaaatggctgactgaaaagctatctctttatggaaaaggttttgttgaggaatgtgtgaattttctgaaagcaactatgagcaacacagattacgtcttagagggcacgacacaacctcaatctattgtcagaaacatatattgggagtcttcttatgccttcataaaggtctacatggttctccagtctcactcggggcagctcttgtcagatgcaatattggatgaaataaggaaactgtgtgtttcgtttgaatcgaggaatcctagctctgctgtaagagagcttgctaattcagacggagggtcagatgacattgaagtagaggctaatgcatattttcaacacatgttctctggacagataagtgttgattccatgatacaaatgcttgggcgcttcaaagaatctacagataagagggaggtatcaattttcaactgtatgatctcaaatctttttaaagaatatacattcttccccaagtatcctgataagcagcttaagatagcagctgttctgtttgcatgtggcggctcttcatttgaaggcacctcatcattaccactgtcattacaactggagagccgggcaacaactgaagggtcgtgcgaaactggagagatgtttatgtttggtacatcagcactggaacagtttatggaccgtgtcatagagtggccacgatactgtaattacatattgcagatctcacatcttcgtggaacacatttagaaatggtttctgttattgagagagccctagccaaaatctcctcaagtcaaaatgagccaaatgttggcaacctgctttctgcagagcagcatgtttctggttcatcatccatggaaggcatagaggcatctgaatcatcatggttgatgggtaccatcccaagtcaactaggaaggcctctttcttctcctttgcaacataggcagcagggtcttctctcggagaggtctgaggtttctatgaattcactgaataagagcaatttatccagtcagcctccccttgcttcatcgtctgctgatttgactattaattcaaagacaactgctccaccctctttactagcttcacctcatcagtctatcagtgtgtcaacgagtgtgcatgttggatttctgcgttctcgaagtaccccaggattaccgaggcagccttcatatactactggatttgggactgctttgaatatagagacgcttgttgcagcagcggaacaaagagatataccaattgagacacctccacctgaagttcaggacaagattctttttatgatcaacaatatatccatctcaaacatggaagctaaggcaaaggaatttaatgaggtcatacaggaacaacattatccttggtttgcacaatacatggtcatgaaaagggcaagcattgaaccaaatttccatgatctgtatttgaagttctttgataaattaaactcaaaatccttgaacaaggaaatgctgaaggctacgtatgagaactgcaaggtcttgttaagatcagaccttatcaaatctagttctgaggagcgttccttgctaaaaaacttaggcagctggttgggcaagttcaccattggtaggaaccaggcactaagggctaaggagattgacccaaaatctcttattgtggaggcgtacgagaaaggattgatgattgcggtcataccattcacttcaaagattcttgaaccttgccagtcaagtatcgcatatcgtcctccaaatccctggaccattggaattctaagtctacttgctgaaatttataatcttccaaacctgaagatgaatctgaaatttgatatcgaggttctgtttaagaatcttacagttgacatgaaggatgtgaaaccaacttccctgcttaaagatcgtctgcgcgaggtcgaaggaaatccggatttttcaaataaagatgttactacctctcaaacccctgtggttccagaagttcttccagggactattccttcatcaactcatgttgaactgcagcctgagatcaatattacatcccgagctatgagtcttccaaatatactcaatcagtatgtggctcctgtccgtctacccacaaacagcacggtagaagctgacaaagttgctctgatgatgcctgagcaagtgtcctccttgacccagcttatggcagctattccacgtgatgagatatgcttcaaaataaacccaaagcttggctcaattggtccacaattgcagtatagcaaaattatggatttggctttggataaggctaacagggagataatactccctgttattcaaagaagtgtgacaatagcaagccgaactacaaaagaacttatcctgaaggattatgcactggagtctgataacaatatgataactcgatctgcacatttgatggttggaacattagccggaagtcttgcccatgttacttgcaaggaacctcttcgtgtcgcactatattccaatcttcggaatctcattcaaaaccttatgagtggcagtgaaactatcgagcaaattattcacatgctagtcaacgataatctggatcttggctgtgccatcattgaggctgtggcaacacgtcaggctgttgaattgattgatgcagaaatagcccagtcattttcacaacaaaggaaacaaagagagggcggtggtcctacatatcatgaaacttttgcttatgctcaagggccgtttgctcgtgtacctgaagcattaagttctaagcctgggcatttatctgcttcccaacagagagtgtacgaggactttgttcatgtatggcatccccacaatcaaaatgtgggagctacaggttctggtctgtctggtgttgctactgtctcgagtactcttggtgtacttcgagcttacagtccaaattcgacatcagcatcctccagtaatttgtcaactgtccatatgggtggactaacatgtataactcagccgacagaactggggtctgaggatactgttatcgcacaatttttgagtaatcctgcccaagttggaccaagcgagtctcctgtcctatttagtggaacagttggtgctgcatctacattttctccattggcatctaatgaccttcctgaaataagtgctatggtgccccctccatcaacatctgctgatcgtctgggatctattttacctgaacctttgaatactggggatgctttggagagatacaaacaggttgctcagaagctggaagccttgattgctaatgatggtaaacatgtggaaattcagtctgttattgcagaagttcctgatatgttacgccggtgtgttagccgtgatgaggctgcattagtagtagcgcaaaaggttttcaaaagtttgtacgataatgcatcaaatagtgcttatgtctcctggcttctagcaaccttaattgcaatacgagatgtctgcaagcttgttgtcaaagagttaacaagttgggtaatatattcagatgaagagaagaagtttaacattgaaatcatttttggccttattcattccaagttgctgaatcttggggagtacaacgttcatttgacaaagctaattgatgggggaagaaataaggttgcaacggagtttgcaatgtctcttgtccaaacattgattacacaagatcctgttagcatatcagagcttcacaatgttgttgatgcaatatcgaaagttctagctgcccaggtaaacaaagaggaaagcattgctaatgaaactacactaattgatccaaatcag

SEQ ID NO: 85055 - DNA, 5706 bp, Zea Mays
atcgaaactaacctttccaatctattcggcaggatctgctttgcgacgctgtcaaaggaactcgctcgaccaccgaaccccccttgccctagcgctccccgcctccgcctctcgccgccggcgagatgatccctgtcagcgccgatatccctgtggagctgcgcttccttctcgaatgcgccaccggctccaacttcgactccattcggctcgagctctgccagttagttgacagtggcttggatggatgcattttggtgctccgagtatgtctgaatcaaatgttgctaaatgctggggaggtcaagaacctccagttgcaacaaaagcttctatctgatgttttcagatattgtttacataagacctgcttcacaactagtttttgtgaggcgctggcaacgatagccttgacggatgattttcttgaaagcttgacaaatctgctggagctctcagttgctgagaaaattggtgttggacttgcgctgtcagattctgaggactcagagatgaagcaaaaaggtagtcatttctgtgtgagtctagtgacatcatatcttcttctcttattttcagatggtcattgatatcgcctcttctgttccagggcaatggttttcaattgctcaaattgaaaagctgtgtacgagtcatatccaatctctatcaaatggtcaaattcatgaaattgtcatgtttctgcatcagtctgatggcctgtcaaagcatatggacacttttaataatattatatctctactaaaagtcacggagaggccattttttgtacctgttacgaatggagattttgatagccaagcaaatccttcaagacatttggagatgtactttggtagcacaaatgatgattttgagtcacttctgtctgaaattgggaaagagataagcatggctgacattgtagccgagttaggttacggatttactgttgacagcactcactgtaaggaaatactttccattgtggagcctcttgatgatatcgccatatctaagttgcttggggctgttgtcggcactcatattggtcttggagaggcccataacacatatgcaacatttgtatctgctattcgtaatagccacacgaatgactcacctcagccgactaaatggaacacagatgtccttgtggactcaatcaatgaacttgccccaagtacaaactgggtgcgtgtaattgaatatcttgatcatgagggtttcaatatacctgatgaagcgagcttttatctattgatgtctatatacgagtgtgcttgcaaggatccatttccacttcatgctgtttgtgggtcattgtgggaaaacacagaaggccagatatcgttcttaaagcatgcagtttgtgctccatctgataaatttacatttgcacattcttctagacacctggcatttcaggacttggcaggccctagtcaaggcaatcatgcttggttctgccttgaccttctagaagttttatgccaactagctgaagttgggtacactgcatctgtacgatcaatgcttgagtatccactgggacattgccctgagctcttacttgttggtgttagccatatcagtaccgtgtataatcttctccaaaatgaagtactgtcctgcgtatttcctgctttactgaaggatccaacaaagcgcaatgtagtgaattatctctggcatacaaactcatatctcacacttcaaggttttgttgatgctcataatgatccagattgtttgctaagaattgttgatgtttgtcatgacttgaagattctgtcgactgtccttgattctactccatttgcattttccattaaattggctgctgcttccttgaggaaagactatagtaatcttgagaaatggctgactgaaaagctatctctttatggaaaaggttttgttgaggaatgtgtgaattttctgaaagcaactatgagcaacacagattacgtcttagagggcacgacacaacctcaatctattgtcagaaacatatattgggagtcttcttatgccttcataaaggttctccagtctcactcggggcagctcttgtcagatgcaatattggatgaaataaggaaactgtgtgtttcgtttgaatcgaggaatcctagctctgctgtaagagagcttgctaattcagacggagggtcagatgacattgaagtagaggctaatgcatattttcaacacatgttctctggacagataagtgttgattccatgatacaaatgcttgggcgcttcaaagaatctacagataagagggaggtatcaattttcaactgtatgatctcaaatctttttaaagaatatacattcttccccaagtatcctgataagcagcttaagatagcagctgttctgtttggatctcttattaaacatcaacttgtggctcactccgaacttggaattgctctgcgtggtgttcgtgatgccttacgcaaacctgttgattcaaagatgtttatgtttggtacatcagcactggaacagtttatggaccgtgtcatagagtggccacgatactgtaattacatattgcagatctcacatcttcgtggaacacatttagaaatggtttctgttattgagagagccctagccaaaatctcctcaagtcaaaatgagccaaatgttggcaacctgctttctgcagagcagcatgtttctggttcatcatccatggaaggcatagaggcatctgaatcatcatggttgatgggtaccatcccaagtcaactaggaaggcctctttcttctcctttgcaacataggcagcagggtcttctctcggagaggtctgaggtttctatgaattcactgaataagagcaatttatccagtcagcctccccttgcttcatcgtctgctgatttgactattaattcaaagacaactgctccaccctctttactagcttcacctcatcagtctatcagtgtgtcaacgagtgtgcatgttggatttctgcgttctcgaagtaccccaggattaccgaggcagccttcatatactactggatttgggactgctttgaatatagagacgcttgttgcagcagcggaacaaagagatataccaattgagacacctccacctgaagttcaggacaagattctttttatgatcaacaatatatccatctcaaacatggaagctaaggcaaaggaatttaatgaggtcatacaggaacaacattatccttggtttgcacaatacatggtcatgaaaagggcaagcattgaaccaaatttccatgatctgtatttgaagttctttgataaattaaactcaaaatccttgaacaaggaaatgctgaaggctacgtatgagaactgcaaggtcttgttaagatcagaccttatcaaatctagttctgaggagcgttccttgctaaaaaacttaggcagctggttgggcaagttcaccattggtaggaaccaggcactaagggctaaggagattgacccaaaatctcttattgtggaggcgtacgagaaaggattgatgattgcggtcataccattcacttcaaagattcttgaaccttgccagtcaagtatcgcatatcgtcctccaaatccctggaccattggaattctaagtctacttgctgaaatttataatcttccaaacctgaagatgaatctgaaatttgatatcgaggttctgtttaagaatcttacagttgacatgaaggatgtgaaaccaacttccctgcttaaagatcgtctgcgcgaggtcgaaggaaatccggatttttcaaataaagatgttactacctctcaaacccctgtggttccagaagttcttccagggactattccttcatcaactcatgttgaactgcagcctgagatcaatattacatcccgagctatgagtcttccaaatatactcaatcagtatgtggctcctgtccgtctacccacaaacagcacggtagaagctgacaaagttgctctgatgatgcctgagcaagtgtcctccttgacccagcttatggcagctattccacgtgatgagatatgcttcaaaataaacccaaagcttggctcaattggtccacaattgcagtatagcaaaattatggatttggctttggataaggctaacagggagataatactccctgttattcaaagaagtgtgacaatagcaagccgaactacaaaagaacttatcctgaaggattatgcactggagtctgataacaatatgataactcgatctgcacatttgatggttggaacattagccggaagtcttgcccatgttacttgcaaggaacctcttcgtgtcgcactatattccaatcttcggaatctcattcaaaaccttatgagtggcagtgaaactatcgagcaaattattcacatgctagtcaacgataatctggatcttggctgtgccatcattgaggctgtggcaacacgtcaggctgttgaattgattgatgcagaaatagcccagtcattttcacaacaaaggaaacaaagagagggcggtggtcctacatatcatgaaacttttgcttatgctcaagggccgtttgctcgtgtacctgaagcattaagttctaagcctgggcatttatctgcttcccaacagagagtgtacgaggactttgttcatgtatggcatccccacaatcaaaatgtgggagctacaggttctggtctgtctggtgttgctactgtctcgagtactcttggtgtacttcgagcttacagtccaaattcgacatcagcatcctccagtaatttgtcaactgtccatatgggtggactaacatgtataactcagccgacagaactggggtctgaggatactgttatcgcacaatttttgagtaatcctgcccaagttggaccaagcgagtctcctgtcctatttagtggaacagttggtgctgcatctacattttctccattggcatctaatgaccttcctgttagtgaaataagtgctatggtgccccctccatcaacatctgctgatcgtctgggatctattttacctgaacctttgaatactggggatgctttggagagatacaaacaggttgctcagaagctggaagccttgattgctaatgatggtaaacatgtggaaattcagtctgttattgcagaagttcctgatatgttacgccggtgtgttagccgtgatgaggctgcattagtagtagcgcaaaaggttttcaaaagtttgtacgataatgcatcaaatagtgcttatgtctcctggcttctagcaaccttaattgcaatacgagatgtctgcaagcttgttgtcaaagagttaacaagttgggtaatatattcagatgaagagaagaagtttaacattgaaatcatttttggccttattcattccaagttgctgaatcttggggagtacaacgttcatttgacaaagctaattgatgggggaagaaataaggttgcaacggagtttgcaatgtctcttgtccaaacattgattacacaagatcctgttagcatatcagagcttcacaatgttgttgatgcaatatcgaaacttgcatggggaccaggttcacctgaatcgttgcaacaattgattgggatcgcaaggaataatgttctagctgcccaggtaaacaaagaggaaagcattgctaatgaaactacactaattgatccaaatcag

SEQ ID NO: 85056 - DNA, 5669 bp, Zea Mays
atcgaaactaacctttccaatctattcggcaggatctgctttgcgacgctgtcaaaggaactcgctcgaccaccgaaccccccttgccctagcgctccccgcctccgcctctcgccgccggcgagatgatccctgtcagcgccgatatccctgtggagctgcgcttccttctcgaatgcgccaccggctccaacttcgactccattcggctcgagctctgccagttagttgacagtggcttggatggatgcattttggtgctccgagtatgtctgaatcaaatgttgctaaatgctggggaggtcaagaacctccagttgcaacaaaagcttctatctgatgttttcagatattgtttacataagacctgcttcacaactagtttttgtgaggcgctggcaacgatagccttgacggatgattttcttgaaagcttgacaaatctgctggagctctcagttgctgagaaaattggtgttggacttgcgctgtcagattctgaggactcagagatgaagcaaaaagggcaatggttttcaattgctcaaattgaaaagctgtgtacgagtcatatccaatctctatcaaatggtcaaattcatgaaattgtcatgtttctgcatcagtctgatggcctgtcaaagcatatggacacttttaataatattatatctctactaaaagtcacggagaggccattttttgtacctgttacgaatggagattttgatagccaagcaaatccttcaagacatttggagatgtactttggtagcacaaatgatgattttgagtcacttctgtctgaaattgggaaagagataagcatggctgacattgtagccgagttaggttacggatttactgttgacagcactcactgtaaggaaatactttccattgtggagcctcttgatgatatcgccatatctaagttgcttggggctgttgtcggcactcatattggtcttggagaggcccataacacatatgcaacatttgtatctgctattcgtaatagccacacgaatgactcacctcagccgactaaatggaacacagatgtccttgtggactcaatcaatgaacttgccccaagtacaaactgggtgcgtgtaattgaatatcttgatcatgagggtttcaatatacctgatgaagcgagcttttatctattgatgtctatatacgagtgtgcttgcaaggatccatttccacttcatgctgtttgtgggtcattgtgggaaaacacagaaggccagatatcgttcttaaagcatgcagtttgtgctccatctgataaatttacatttgcacattcttctagacacctggcatttcaggacttggcaggccctagtcaaggcaatcatgcttggttctgccttgaccttctagaagttttatgccaactagctgaagttgggtacactgcatctgtacgatcaatgcttgagtatccactgggacattgccctgagctcttacttgttggtgttagccatatcagtaccgtgtataatcttctccaaaatgaagtactgtcctgcgtatttcctgctttactgaaggatccaacaaagcgcaatgtagtgaattatctctggcatacaaactcatatctcacacttcaaggttttgttgatgctcataatgatccagattgtttgctaagaattgttgatgtttgtcatgacttgaagattctgtcgactgtccttgattctactccatttgcattttccattaaattggctgctgcttccttgaggaaagactatagtaatcttgagaaatggctgactgaaaagctatctctttatggaaaaggttttgttgaggaatgtgtgaattttctgaaagcaactatgagcaacacagattacgtcttagagggcacgacacaacctcaatctattgtcagaaacatatattgggagtcttcttatgccttcataaaggttctccagtctcactcggggcagctcttgtcagatgcaatattggatgaaataaggaaactgtgtgtttcgtttgaatcgaggaatcctagctctgctgtaagagagcttgctaattcagacggagggtcagatgacattgaagtagaggctaatgcatattttcaacacatgttctctggacagataagtgttgattccatgatacaaatgcttgggcgcttcaaagaatctacagataagagggaggtatcaattttcaactgtatgatctcaaatctttttaaagaatatacattcttccccaagtatcctgataagcagcttaagatagcagctgttctgtttggatctcttattaaacatcaacttgtggctcactccgaacttggaattgctctgcgtggtgttcgtgatgccttacgcaaacctgttgattcaaagatgtttatgtttggtacatcagcactggaacagtttatggaccgtgtcatagagtggccacgatactgtaattacatattgcagatctcacatcttcgtggaacacatttagaaatggtttctgttattgagagagccctagccaaaatctcctcaagtcaaaatgagccaaatgttggcaacctgctttctgcagagcagcatgtttctggttcatcatccatggaaggcatagaggcatctgaatcatcatggttgatgggtaccatcccaagtcaactaggaaggcctctttcttctcctttgcaacataggcagcagggtcttctctcggagaggtctgaggtttctatgaattcactgaataagagcaatttatccagtcagcctccccttgcttcatcgtctgctgatttgactattaattcaaagacaactgctccaccctctttactagcttcacctcatcagtctatcagtgtgtcaacgagtgtgcatgttggatttctgcgttctcgaagtaccccaggattaccgaggcagccttcatatactactggatttgggactgctttgaatatagagacgcttgttgcagcagcggaacaaagagatataccaattgagacacctccacctgaagttcaggacaagattctttttatgatcaacaatatatccatctcaaacatggaagctaaggcaaaggaatttaatgaggtcatacaggaacaacattatccttggtttgcacaatacatggtcatgaaaagggcaagcattgaaccaaatttccatgatctgtatttgaagttctttgataaattaaactcaaaatccttgaacaaggaaatgctgaaggctacgtatgagaactgcaaggtcttgttaagatcagaccttatcaaatctagttctgaggagcgttccttgctaaaaaacttaggcagctggttgggcaagttcaccattggtaggaaccaggcactaagggctaaggagattgacccaaaatctcttattgtggaggcgtacgagaaaggattgatgattgcggtcataccattcacttcaaagattcttgaaccttgccagtcaagtatcgcatatcgtcctccaaatccctggaccattggaattctaagtctacttgctgaaatttataatcttccaaacctgaagatgaatctgaaatttgatatcgaggttctgtttaagaatcttacagttgacatgaaggatgtgaaaccaacttccctgcttaaagatcgtctgcgcgaggtcgaaggaaatccggatttttcaaataaagatgttactacctctcaaacccctgtggttccagaagttcttccagggactattccttcatcaactcatgttgaactgcagcctgagatcaatattacatcccgagctatgagtcttccaaatatactcaatcagtatgtggctcctgtccgtctacccacaaacagcacggtagaagctgacaaagttgctctgatgatgcctgagcaagtgtcctccttgacccaggttttgccagcacaaacacaatcaccatcaccatctccattctctgttaatcagcttatggcagctattccacgtgatgagatatgcttcaaaataaacccaaagcttggctcaattggtccacaattgcagtatagcaaaattatggatttggctttggataaggctaacagggagataatactccctgttattcaaagaagtgtgacaatagcaagccgaactacaaaagaacttatcctgaaggattatgcactggagtctgataacaatatgataactcgatctgcacatttgatggttggaacattagccggaagtcttgcccatgttacttgcaaggaacctcttcgtgtcgcactatattccaatcttcggaatctcattcaaaaccttatgagtggcagtgaaactatcgagcaaattattcacatgctagtcaacgataatctggatcttggctgtgccatcattgaggctgtggcaacacgtcaggctgttgaattgattgatgcagaaatagcccagtcattttcacaacaaaggaaacaaagagagggcggtggtcctacatatcatgaaacttttgcttatgctcaagggccgtttgctcgtgtacctgaagcattaagttctaagcctgggcatttatctgcttcccaacagagagtgtacgaggactttgttcatgtatggcatccccacaatcaaaatgtgggagctacaggttctggtctgtctggtgttgctactgtctcgagtactcttggtgtacttcgagcttacagtccaaattcgacatcagcatcctccagtaatttgtcaactgtccatatgggtggactaacatgtataactcagccgacagaactggggtctgaggatactgttatcgcacaatttttgagtaatcctgcccaagttggaccaagcgagtctcctgtcctatttagtggaacagttggtgctgcatctacattttctccattggcatctaatgaccttcctgaaataagtgctatggtgccccctccatcaacatctgctgatcgtctgggatctattttacctgaacctttgaatactggggatgctttggagagatacaaacaggttgctcagaagctggaagccttgattgctaatgatggtaaacatgtggaaattcagtctgttattgcagaagttcctgatatgttacgccggtgtgttagccgtgatgaggctgcattagtagtagcgcaaaaggttttcaaaagtttgtacgataatgcatcaaatagtgcttatgtctcctggcttctagcaaccttaattgcaatacgagatgtctgcaagcttgttgtcaaagagttaacaagttgggtaatatattcagatgaagagaagaagtttaacattgaaatcatttttggccttattcattccaagttgctgaatcttggggagtacaacgttcatttgacaaagctaattgatgggggaagaaataaggttgcaacggagtttgcaatgtctcttgtccaaacattgattacacaagatcctgttagcatatcagagcttcacaatgttgttgatgcaatatcgaaacttgcatggggaccaggttcacctgaatcgttgcaacaattgattgggatcgcaaggaataatgttctagctgcccaggtaaacaaagaggaaagcattgctaatgaaactacactaattgatccaaatcag

SEQ ID NO: 85057 - DNA, 5633 bp, Zea Mays
cgaggatcgaaactaacctttccaatctattcggcaggatctgctttgcgacgctgtcaaaggaactcgctcgaccaccgaaccccccttgccctagcgctccccgcctccgcctctcgccgccggcgagatgatccctgtcagcgccgatatccctgtggagctgcgcttccttctcgaatgcgccaccggctccaacttcgactccattcggctcgagctctgccagttagttgacagtggcttggatggatgcattttggtgctccgagtatgtctgaatcaaatgttgctaaatgctggggaggtcaagaacctccagttgcaacaaaagcttctatctgatgttttcagatattgtttacataagacctgcttcacaactagtttttgtgaggcgctggcaacgatagccttgacggatgattttcttgaaagcttgacaaatctgctggagctctcagttgctgagaaaattggtgttggacttgcgctgtcagattctgaggactcagagatgaagcaaaaaggtagtcatttctgtgtgagtctagtgacatcatatcttcttctcttattttcagatggtcattgatatcgcctcttctgttccagggcaatggttttcaattgctcaaattgaaaagctgtgtacgagtcatatccaatctctatcaaatggtcaaattcatgaaattgtcatgtttctgcatcagtctgatggcctgtcaaagcatatggacacttttaataatattatatctctactaaaagtcacggagaggccattttttgtacctgttacgaatggagattttgatagccaagcaaatccttcaagacatttggagatgtactttggtagcacaaatgatgattttgagtcacttctgtctgaaattgggaaagagataagcatggctgacattgtagccgagttaggttacggatttactgttgacagcactcactgtaaggaaatactttccattgtggagcctcttgatgatatcgccatatctaagttgcttggggctgttgtcggcactcatattggtcttggagaggcccataacacatatgcaacatttgtatctgctattcgtaatagccacacgaatgactcacctcagccgactaaatggaacacagatgtccttgtggactcaatcaatgaacttgccccaagtacaaactgggtgcgtgtaattgaatatcttgatcatgagggtttcaatatacctgatgaagcgagcttttatctattgatgtctatatacgagtgtgcttgcaaggatccatttccacttcatgctgtttgtgggtcattgtgggaaaacacagaaggccagatatcgttcttaaagcatgcagtttgtgctccatctgataaatttacatttgcacattcttctagacacctggcatttcaggacttggcaggccctagtcaaggcaatcatgcttggttctgccttgaccttctagaagttttatgccaactagctgaagttgggtacactgcatctgtacgatcaatgcttgagtatccactgggacattgccctgagctcttacttgttggtgttagccatatcagtaccgtgtataatcttctccaaaatgaagtactgtcctgcgtatttcctgctttactgaaggatccaacaaagcgcaatgtagtgaattatctctggcatacaaactcatatctcacacttcaaggttttgttgatgctcataatgatccagattgtttgctaagaattgttgatgtttgtcatgacttgaagattctgtcgactgtccttgattctactccatttgcattttccattaaattggctgctgcttccttgaggaaagactatagtaatcttgagaaatggctgactgaaaagctatctctttatggaaaaggttttgttgaggaatgtgtgaattttctgaaagcaactatgagcaacacagattacgtcttagagggcacgacacaacctcaatctattgtcagaaacatatattgggagtcttcttatgccttcataaagtctcactcggggcagctcttgtcagatgcaatattggatgaaataaggaaactgtgtgtttcgtttgaatcgaggaatcctagctctgctgtaagagagcttgctaattcagacggagggtcagatgacattgaagtagaggctaatgcatattttcaacacatgttctctggacagataagtgttgattccatgatacaaatgcttgggcgcttcaaagaatctacagataagagggaggtatcaattttcaactgtatgatctcaaatctttttaaagaatatacattcttccccaagtatcctgataagcagcttaagatagcagctgttctgtttggatctcttattaaacatcaacttgtggctcactccgaacttggaattgctctgcgtggtgttcgtgatgccttacgcaaacctgttgattcaaagatgtttatgtttggtacatcagcactggaacagtttatggaccgtgtcatagagtggccacgatactgtaattacatattgcagatctcacatcttcgtggaacacatttagaaatggtttctgttattgagagagccctagccaaaatctcctcaagtcaaaatgagccaaatgttggcaacctgctttctgcagagcagcatgtttctggttcatcatccatggaaggcatagaggcatctgaatcatcatggttgatgggtaccatcccaagtcaactaggaaggcctctttcttctcctttgcaacataggcagcagggtcttctctcggagaggtctgaggtttctatgaattcactgaataagagcaatttatccagtcagcctccccttgcttcatcgtctgctgatttgactattaattcaaagacaactgctccaccctctttactagcttcacctcatcagtctatcagtgtgtcaacgagtgtgcatgttggatttctgcgttctcgaagtaccccaggattaccgaggcagccttcatatactactggatttgggactgctttgaatatagagacgcttgttgcagcagcggaacaaagagatataccaattgagacacctccacctgaagttcaggacaagattctttttatgatcaacaatatatccatctcaaacatggaagctaaggcaaaggaatttaatgaggtcatacaggaacaacattatccttggtttgcacaatacatggtcatgaaaagggcaagcattgaaccaaatttccatgatctgtatttgaagttctttgataaattaaactcaaaatccttgaacaaggaaatgctgaaggctacgtatgagaactgcaaggtcttgttaagatcagaccttatcaaatctagttctgaggagcgttccttgctaaaaaacttaggcagctggttgggcaagttcaccattggtaggaaccaggcactaagggctaaggagattgacccaaaatctcttattgtggaggcgtacgagaaaggattgatgattgcggtcataccattcacttcaaagattcttgaaccttgccagtcaagtatcgcatatcgtcctccaaatccctggaccattggaattctaagtctacttgctgaaatttataatcttccaaacctgaagatgaatctgaaatttgatatcgaggttctgtttaagaatcttacagttgacatgaaggatgtgaaaccaacttccctgcttaaagatcgtctgcgcgaggtcgaaggaaatccggatttttcaaataaagatgttactacctctcaaacccctgtggttccagaagttcttccagggactattccttcatcaactcatgttgaactgcagcctgagatcaatattacatcccgagctatgagtcttccaaatatactcaatcagtatgtggctcctgtccgtctacccacaaacagcacggtagaagctgacaaagttgctctgatgatgcctgagcaagtgtcctccttgacccagcttatggcagctattccacgtgatgagatatgcttcaaaataaacccaaagcttggctcaattggtccacaattgcagtatagcaaaattatggatttggctttggataaggctaacagggagataatactccctgttattcaaagaagtgtgacaatagcaagccgaactacaaaagaacttatcctgaaggattatgcactggagtctgataacaatatgataactcgatctgcacatttgatggttggaacattagccggaagtcttgcccatgttacttgcaaggaacctcttcgtgtcgcactatattccaatcttcggaatctcattcaaaaccttatgagtggcagtgaaactatcgagcaaattattcacatgctagtcaacgataatctggatcttggctgtgccatcattgaggctgtggcaacacgtcaggctgttgaattgattgatgcagaaatagcccagtcattttcacaacaaaggaaacaaagagagggcggtggtcctacatatcatgaaacttttgcttatgctcaagggccgtttgctcgtgtacctgaagcattaagttctaagcctgggcatttatctgcttcccaacagagagtgtacgaggactttgttcatgtatggcatccccacaatcaaaatgtgggagctacaggttctggtctgtctggtgttgctactgtctcgagtactcttggtgtacttcgagcttacagtccaaattcgacatcagcatcctccagtaatttgtcaactgtccatatgggtggactaacatgtataactcagccgacagaactggggtctgaggatactgttatcgcacaatttttgagtaatcctgcccaagttggaccaagcgagtctcctgtcctatttagtggaacagttggtgctgcatctacattttctccattggcatctaatgaccttcctgaaataagtgctatggtgccccctccatcaacatctgctgatcgtctgggatctattttacctgaacctttgaatactggggatgctttggagagatacaaacaggttgctcagaagctggaagccttgattgctaatgatggtaaacatgtggaaattcagtctgttattgcagaagttcctgatatgttacgccggtgtgttagccgtgatgaggctgcattagtagtagcgcaaaaggttttcaaaagtttgtacgataatgcatcaaatagtgcttatgtctcctggcttctagcaaccttaattgcaatacgagatgtctgcaagcttgttgtcaaagagttaacaagttgggtaatatattcagatgaagagaagaagtttaacattgaaatcatttttggccttattcattccaagttgctgaatcttggggagtacaacgttcatttgacaaagctaattgatgggggaagaaataaggttgcaacggagtttgcaatgtctcttgtccaaacattgattacacaagatcctgttagcatatcagagcttcacaatgttgttgatgcaatatcgaaagttctagctgcccaggtaaacaaagaggaaagcattgctaatgaaactacactaattgatccaaatcag

SEQ ID NO: 85058 - DNA, 5645 bp, Zea Mays
cgaggatcgaaactaacctttccaatctattcggcaggatctgctttgcgacgctgtcaaaggaactcgctcgaccaccgaaccccccttgccctagcgctccccgcctccgcctctcgccgccggcgagatgatccctgtcagcgccgatatccctgtggagctgcgcttccttctcgaatgcgccaccggctccaacttcgactccattcggctcgagctctgccagttagttgacagtggcttggatggatgcattttggtgctccgagtatgtctgaatcaaatgttgctaaatgctggggaggtcaagaacctccagttgcaacaaaagcttctatctgatgttttcagatattgtttacataagacctgcttcacaactagtttttgtgaggcgctggcaacgatagccttgacggatgattttcttgaaagcttgacaaatctgctggagctctcagttgctgagaaaattggtgttggacttgcgctgtcagattctgaggactcagagatgaagcaaaaaggtagtcatttctgtgtgagtctagtgacatcatatcttcttctcttattttcagatggtcattgatatcgcctcttctgttccagggcaatggttttcaattgctcaaattgaaaagctgtgtacgagtcatatccaatctctatcaaatggtcaaattcatgaaattgtcatgtttctgcatcagtctgatggcctgtcaaagcatatggacacttttaataatattatatctctactaaaagtcacggagaggccattttttgtacctgttacgaatggagattttgatagccaagcaaatccttcaagacatttggagatgtactttggtagcacaaatgatgattttgagtcacttctgtctgaaattgggaaagagataagcatggctgacattgtagccgagttaggttacggatttactgttgacagcactcactgtaaggaaatactttccattgtggagcctcttgatgatatcgccatatctaagttgcttggggctgttgtcggcactcatattggtcttggagaggcccataacacatatgcaacatttgtatctgctattcgtaatagccacacgaatgactcacctcagccgactaaatggaacacagatgtccttgtggactcaatcaatgaacttgccccaagtacaaactgggtgcgtgtaattgaatatcttgatcatgagggtttcaatatacctgatgaagcgagcttttatctattgatgtctatatacgagtgtgcttgcaaggatccatttccacttcatgctgtttgtgggtcattgtgggaaaacacagaaggccagatatcgttcttaaagcatgcagtttgtgctccatctgataaatttacatttgcacattcttctagacacctggcatttcaggacttggcaggccctagtcaaggcaatcatgcttggttctgccttgaccttctagaagttttatgccaactagctgaagttgggtacactgcatctgtacgatcaatgcttgagtatccactgggacattgccctgagctcttacttgttggtgttagccatatcagtaccgtgtataatcttctccaaaatgaagtactgtcctgcgtatttcctgctttactgaaggatccaacaaagcgcaatgtagtgaattatctctggcatacaaactcatatctcacacttcaaggttttgttgatgctcataatgatccagattgtttgctaagaattgttgatgtttgtcatgacttgaagattctgtcgactgtccttgattctactccatttgcattttccattaaattggctgctgcttccttgaggaaagactatagtaatcttgagaaatggctgactgaaaagctatctctttatggaaaaggttttgttgaggaatgtgtgaattttctgaaagcaactatgagcaacacagattacgtcttagagggcacgacacaacctcaatctattgtcagaaacatatattgggagtcttcttatgccttcataaaggttctccagtctcactcggggcagctcttgtcagatgcaatattggatgaaataaggaaactgtgtgtttcgtttgaatcgaggaatcctagctctgctgtaagagagcttgctaattcagacggagggtcagatgacattgaagtagaggctaatgcatattttcaacacatgttctctggacagataagtgttgattccatgatacaaatgcttgggcgcttcaaagaatctacagataagagggaggtatcaattttcaactgtatgatctcaaatctttttaaagaatatacattcttccccaagtatcctgataagcagcttaagatagcagctgttctgtttgcatgtggcggctcttcatttgaaggcacctcatcattaccactgtcattacaactggagagccgggcaacaactgaagggtcgtgcgaaactggagagatgtttatgtttggtacatcagcactggaacagtttatggaccgtgtcatagagtggccacgatactgtaattacatattgcagatctcacatcttcgtggaacacatttagaaatggtttctgttattgagagagccctagccaaaatctcctcaagtcaaaatgagccaaatgttggcaacctgctttctgcagagcagcatgtttctggttcatcatccatggaaggcatagaggcatctgaatcatcatggttgatgggtaccatcccaagtcaactaggaaggcctctttcttctcctttgcaacataggcagcagggtcttctctcggagaggtctgaggtttctatgaattcactgaataagagcaatttatccagtcagcctccccttgcttcatcgtctgctgatttgactattaattcaaagacaactgctccaccctctttactagcttcacctcatcagtctatcagtgtgtcaacgagtgtgcatgttggatttctgcgttctcgaagtaccccaggattaccgaggcagccttcatatactactggatttgggactgctttgaatatagagacgcttgttgcagcagcggaacaaagagatataccaattgagacacctccacctgaagttcaggacaagattctttttatgatcaacaatatatccatctcaaacatggaagctaaggcaaaggaatttaatgaggtcatacaggaacaacattatccttggtttgcacaatacatggtcatgaaaagggcaagcattgaaccaaatttccatgatctgtatttgaagttctttgataaattaaactcaaaatccttgaacaaggaaatgctgaaggctacgtatgagaactgcaaggtcttgttaagatcagaccttatcaaatctagttctgaggagcgttccttgctaaaaaacttaggcagctggttgggcaagttcaccattggtaggaaccaggcactaagggctaaggagattgacccaaaatctcttattgtggaggcgtacgagaaaggattgatgattgcggtcataccattcacttcaaagattcttgaaccttgccagtcaagtatcgcatatcgtcctccaaatccctggaccattggaattctaagtctacttgctgaaatttataatcttccaaacctgaagatgaatctgaaatttgatatcgaggttctgtttaagaatcttacagttgacatgaaggatgtgaaaccaacttccctgcttaaagatcgtctgcgcgaggtcgaaggaaatccggatttttcaaataaagatgttactacctctcaaacccctgtggttccagaagttcttccagggactattccttcatcaactcatgttgaactgcagcctgagatcaatattacatcccgagctatgagtcttccaaatatactcaatcagtatgtggctcctgtccgtctacccacaaacagcacggtagaagctgacaaagttgctctgatgatgcctgagcaagtgtcctccttgacccagcttatggcagctattccacgtgatgagatatgcttcaaaataaacccaaagcttggctcaattggtccacaattgcagtatagcaaaattatggatttggctttggataaggctaacagggagataatactccctgttattcaaagaagtgtgacaatagcaagccgaactacaaaagaacttatcctgaaggattatgcactggagtctgataacaatatgataactcgatctgcacatttgatggttggaacattagccggaagtcttgcccatgttacttgcaaggaacctcttcgtgtcgcactatattccaatcttcggaatctcattcaaaaccttatgagtggcagtgaaactatcgagcaaattattcacatgctagtcaacgataatctggatcttggctgtgccatcattgaggctgtggcaacacgtcaggctgttgaattgattgatgcagaaatagcccagtcattttcacaacaaaggaaacaaagagagggcggtggtcctacatatcatgaaacttttgcttatgctcaagggccgtttgctcgtgtacctgaagcattaagttctaagcctgggcatttatctgcttcccaacagagagtgtacgaggactttgttcatgtatggcatccccacaatcaaaatgtgggagctacaggttctggtctgtctggtgttgctactgtctcgagtactcttggtgtacttcgagcttacagtccaaattcgacatcagcatcctccagtaatttgtcaactgtccatatgggtggactaacatgtataactcagccgacagaactggggtctgaggatactgttatcgcacaatttttgagtaatcctgcccaagttggaccaagcgagtctcctgtcctatttagtggaacagttggtgctgcatctacattttctccattggcatctaatgaccttcctgaaataagtgctatggtgccccctccatcaacatctgctgatcgtctgggatctattttacctgaacctttgaatactggggatgctttggagagatacaaacaggttgctcagaagctggaagccttgattgctaatgatggtaaacatgtggaaattcagtctgttattgcagaagttcctgatatgttacgccggtgtgttagccgtgatgaggctgcattagtagtagcgcaaaaggttttcaaaagtttgtacgataatgcatcaaatagtgcttatgtctcctggcttctagcaaccttaattgcaatacgagatgtctgcaagcttgttgtcaaagagttaacaagttgggtaatatattcagatgaagagaagaagtttaacattgaaatcatttttggccttattcattccaagttgctgaatcttggggagtacaacgttcatttgacaaagctaattgatgggggaagaaataaggttgcaacggagtttgcaatgtctcttgtccaaacattgattacacaagatcctgttagcatatcagagcttcacaatgttgttgatgcaatatcgaaagttctagctgcccaggtaaacaaagaggaaagcattgctaatgaaactacactaattgatccaaatcag

SEQ ID NO: 85059 - DNA, 5229 bp, Zea Mays
atcgaaactaacctttccaatctattcggcaggatctgctttgcgacgctgtcaaaggaactcgctcgaccaccgaaccccccttgccctagcgctccccgcctccgcctctcgccgccggcgagatgatccctgtcagcgccgatatccctgtggagctgcgcttccttctcgaatgcgccaccggctccaacttcgactccattcggctcgagctctgccagttagttgacagtggcttggatggatgcattttggtgctccgagtatgtctgaatcaaatgttgctaaatgctggggaggtcaagaacctccagttgcaacaaaagcttctatctgatgttttcagatattgtttacataagacctgcttcacaactagtttttgtgaggcgctggcaacgatagccttgacggatgattttcttgaaagcttgacaaatctgctggagctctcagttgctgagaaaattggtgttggacttgcgctgtcagattctgaggactcagagatgaagcaaaaagggcaatggttttcaattgctcaaattgaaaagctgtgtacgagtcatatccaatctctatcaaatggtcaaattcatgaaattgtcatgtttctgcatcagtctgatggcctgtcaaagcatatggacacttttaataatattatatctctactaaaagtcacggagaggccattttttgtacctgttacgaatggagattttgatagccaagcaaatccttcaagacatttggagatgtactttggtagcacaaatgatgattttgagtcacttctgtctgaaattgggaaagagataagcatggctgacattgtagccgagttaggttacggatttactgttgacagcactcactgtaaggaaatactttccattgtggagcctcttgatgatatcgccatatctaagttgcttggggctgttgtcggcactcatattggtcttggagaggcccataacacatatgcaacatttgtatctgctattcgtaatagccacacgaatgactcacctcagccgactaaatggaacacagatgtccttgtggactcaatcaatgaacttgccccaagtacaaactgggtgcgtgtaattgaatatcttgatcatgagggtttcaatatacctgatgaagcgagcttttatctattgatgtctatatacgagtgtgcttgcaaggatccatttccacttcatgctgtttgtgggtcattgtgggaaaacacagaaggccagatatcgttcttaaagcatgcagtttgtgctccatctgataaatttacatttgcacattcttctagacacctggcatttcaggacttggcaggccctagtcaaggcaatcatgcttggttctgccttgaccttctagaagttttatgccaactagctgaagttgggtacactgcatctgtacgatcaatgcttgagtatccactgggacattgccctgagctcttacttgttggtgttagccatatcagtaccgtgtataatcttctccaaaatgaagtactgtcctgcgtatttcctgctttactgaaggatccaacaaagcgcaatgtagtgaattatctctggcatacaaactcatatctcacacttcaaggttttgttgatgctcataatgatccagattgtttgctaagaattgttgatgtttgtcatgacttgaagattctgtcgactgtccttgattctactccatttgcattttccattaaattggctgctgcttccttgaggaaagactatagtaatcttgagaaatggctgactgaaaagctatctctttatggaaaaggttttgttgaggaatgtgtgaattttctgaaagcaactatgagcaacacagattacgtcttagagggcacgacacaacctcaatctattgtcagaaacatatattgggagtcttcttatgccttcataaaggttctccagtctcactcggggcagctcttgtcagatgcaatattggatgaaataaggaaactgtgtgtttcgtttgaatcgaggaatcctagctctgctgtaagagagcttgctaattcagacggagggtcagatgacattgaagtagaggctaatgcatattttcaacacatgttctctggacagataagtgttgattccatgatacaaatgcttgggcgcttcaaagaatctacagataagagggaggtatcaattttcaactgtatgatctcaaatctttttaaagaatatacattcttccccaagtatcctgataagcagcttaagatagcagctgttctgtttggatctcttattaaacatcaacttgtggctcactccgaacttggaattgctctgcgtggtgttcgtgatgccttacgcaaacctgttgattcaaagatgtttatgtttggtacatcagcactggaacagtttatggaccgtgtcatagagtggccacgatactgtaattacatattgcagatctcacatcttcgtggaacacatttagaaatggtttctgttattgagagagccctagccaaaatctcctcaagtcaaaatgagccaaatgttggcaacctgctttctgcagagcagcatgtttctggttcatcatccatggaaggcatagaggcatctgaatcatcatggttgatgggtaccatcccaagtcaactaggaaggcctctttcttctcctttgcaacataggcagcagggtcttctctcggagaggtctgaggtttctatgaattcactgaataagagcaatttatccagtcagcctccccttgcttcatcgtctgctgatttgactattaattcaaagacaactgctccaccctctttactagcttcacctcatcagtctatcagtgtgtcaacgagtgtgcatgttggatttctgcgttctcgaagtaccccaggattaccgaggcagccttcatatactactggatttgggactgctttgaatatagagacgcttgttgcagcagcggaacaaagagatataccaattgagacacctccacctgaagttcaggacaagattctttttatgatcaacaatatatccatctcaaacatggaagctaaggcaaaggaatttaatgaggtcatacaggaacaacattatccttggtttgcacaatacatggtcatgaaaagggcaagcattgaaccaaatttccatgatctgtatttgaagttctttgataaattaaactcaaaatccttgaacaaggaaatgctgaaggctacgtatgagaactgcaaggtcttgttaagatcagaccttatcaaatctagttctgaggagcgttccttgctaaaaaacttaggcagctggttgggcaagttcaccattggtaggaaccaggcactaagggctaaggagattgacccaaaatctcttattgtggaggcgtacgagaaaggattgatgattgcggtcataccattcacttcaaagattcttgaaccttgccagtcaagtatcgcatatcgtcctccaaatccctggaccattggaattctaagtctacttgctgaaatttataatcttccaaacctgaagatgaatctgaaatttgatatcgaggttctgtttaagaatcttacagttgacatgaaggatgtgaaaccaacttccctgcttaaagatcgtctgcgcgaggtcgaaggaaatccggatttttcaaataaagatgttactacctctcaaacccctgtggttccagaagttcttccagggactattccttcatcaactcatgttgaactgcagcctgagatcaatattacatcccgagctatgagtcttccaaatatactcaatcagtatgtggctcctgtccgtctacccacaaacagcacggtagaagctgacaaagttgctctgatgatgcctgagcaagtgtcctccttgacccaggttttgccagcacaaacacaatcaccatcaccatctccattctctgttaatcagcttatggcagctattccacgtgatgagatatgcttcaaaataaacccaaagcttggctcaattggtccacaattgcagtatagcaaaattatggatttggctttggataaggctaacagggagataatactccctgttattcaaagaagtgtgacaatagcaagccgaactacaaaagaacttatcctgaaggattatgcactggagtctgataacaatatgataactcgatctgcacatttgatggttggaacattagccggaagtcttgcccatgttacttgcaaggaacctcttcgtgtcgcactatattccaatcttcggaatctcattcaaaaccttatgagtggcagtgaaactatcgagcaaattattcacatgctagtcaacgataatctggatcttggctgtgccatcattgaggctgtggcaacacgtcaggctgttgaattgattgatgcagaaatagcccagtcattttcacaacaaaggaaacaaagagagggcggtggtcctacatatcatgaaacttttgcttatgctcaagggccgtttgctcgtgtacctgaagcattaagttctaagcctgggcatttatctgcttcccaacagagagtgtacgaggactttgttcatgtatggcatccccacaatcaaaatgtgggagctacaggttctggtctgtctggtgttgctactgtctcgagtactcttggtgtacttcgagcttacagtccaaattcgacatcagcatcctccagtaatttgtcaactgtccatatgggtggactaacatgtataactcagccgacagaactggggtctgaggatactgttatcgcacaatttttgagtaatcctgcccaagttggaccaagcgagtctcctgtcctatttagtggaacagttggtgctgcatctacattttctccattggcatctaatgaccttcctgaaataagtgctatggtgccccctccatcaacatctgctgatcgtctgggatctattttacctgaacctttgaatactggggatgctttggagagatacaaacaggttgctcagaagtacctagttatcccttaattggggatgggtacttgaaacccgaatggggatgggtatgggatgagttttgcacccatgatggggatgagtttgggatgctataacccgatggagaattccccattgacatctctactcgtgcttgatagggaggtttgag

SEQ ID NO: 85060 - DNA, 3157 bp, Zea Mays
tcgaaactaacctttccaatctattcggcaggatctgctttgcgacgctgtcaaaggaactcgctcgaccaccgaaccccccttgccctagcgctccccgcctccgcctctcgccgccggcgagatgatccctgtcagcgccgatatccctgtggagctgcgcttccttctcgaatgcgccaccggctccaacttcgactccattcggctcgagctctgccagttagttgacagtggcttggatggatgcattttggtgctccgagtatgtctgaatcaaatgttgctaaatgctggggaggtcaagaacctccagttgcaacaaaagcttctatctgatgttttcagatattgtttacataagacctgcttcacaactagtttttgtgaggcgctggcaacgatagccttgacggatgattttcttgaaagcttgacaaatctgctggagctctcagttgctgagaaaattggtgttggacttgcgctgtcagattctgaggactcagagatgaagcaaaaaggtagtcatttctgtatggtcattgatatcgcctcttctgttccagggcaatggttttcaattgctcaaattgaaaagctgtgtacgagtcatatccaatctctatcaaatggtcaaattcatgaaattgtcatgtttctgcatcagtctgatggcctgtcaaagcatatggacacttttaataatattatatctctactaaaagtcacggagaggccattttttgtacctgttacgaatggagattttgatagccaagcaaatccttcaagacatttggagatgtactttggtagcacaaatgatgattttgagtcacttctgtctgaaattgggaaagagataagcatggctgacattgtagccgagttaggttacggatttactgttgacagcactcactgtaaggaaatactttccattgtggagcctcttgatgatatcgccatatctaagttgcttggggctgttgtcggcactcatattggtcttggagaggcccataacacatatgcaacatttgtatctgctattcgtaatagccacacgaatgactcacctcagccgactaaatggaacacagatgtccttgtggactcaatcaatgaacttgccccaagtacaaactgggtgcgtgtaattgaatatcttgatcatgagggtttcaatatacctgatgaagcgagcttttatctattgatgtctatatacgagtgtgcttgcaaggatccatttccacttcatgctgtttgtgggtcattgtgggaaaacacagaaggccagatatcgttcttaaagcatgcagtttgtgctccatctgataaatttacatttgcacattcttctagacacctggcatttcaggacttggcaggccctagtcaaggcaatcatgcttggttctgccttgaccttctagaagttttatgccaactagctgaagttgggtacactgcatctgtacgatcaatgcttgagtatccactgggacattgccctgagctcttacttgttggtgttagccatatcagtaccgtgtataatcttctccaaaatgaagtactgtcctgcgtatttcctgctttactgaaggatccaacaaagcgcaatgtagtgaattatctctggcatacaaactcatatctcacacttcaaggttttgttgatgctcataatgatccagattgtttgctaagaattgttgatgtttgtcatgacttgaagattctgtcgactgtccttgattctactccatttgcattttccattaaattggctgctgcttccttgaggaaagactatagtaatcttgagaaatggctgactgaaaagctatctctttatggaaaaggttttgttgaggaatgtgtgaattttctgaaagcaactatgagcaacacagattacgtcttagagggcacgacacaacctcaatctattgtcagaaacatatattgggagtcttcttatgccttcataaagtctcactcggggcagctcttgtcagatgcaatattggatgaaataaggaaactgtgtgtttcgtttgaatcgaggaatcctagctctgctgtaagagagcttgctaattcagacggagggtcagatgacattgaagtagaggctaatgcatattttcaacacatgttctctggacagataagtgttgattccatgatacaaatgcttgggcgcttcaaagaatctacagataagagggaggtatcaattttcaactgtatgatctcaaatctttttaaagaatatacattcttccccaagtatcctgataagcagcttaagatagcagctgttctgtttggatctcttattaaacatcaacttgtggctcactccgaacttggaattgctctgcgtggtgttcgtgatgccttacgcaaacctgttgattcaaagatgtttatgtttggtacatcagcactggaacagtttatggaccgtgtcatagagtggccacgatactgtaattacatattgcagatctcacatcttcgtggaacacatttagaaatggtttctgttattgagagagccctagccaaaatctcctcaagtcaaaatgagccaaatgttggcaacctgctttctgcagagcagcatgtttctggttcatcatccatggaaggcatagaggcatctgaatcatcatggttgatgggtaccatcccaagtcaactaggaaggcctctttcttctcctttgcaacataggcagcagggtcttctctcggagaggtctgaggtttctatgaattcactgaataagagcaatttatccagtcagcctccccttgcttcatcgtctgctgatttgactattaattcaaagttacactgttttattgaatacgcaggagacctgcgtattaatatattaaggacaaaaaggtccaatgtggaccaagtacaatagagcatccttacggtggccagaatatagcgtacaagaacacctccgtgaaaaaacacatgctagacaagctcgacccacaattagaaaaaaaccctactctatggtaacagctcctcaatctggacaaagcggaaggctttgcccccagatatagaccaaaaacctacctcttccctggctgcctgcaaaacacagtcaatg

SEQ ID NO: 85061 - DNA, 1313 bp, Zea Mays
attagagaagagaaatagacaaccagcggtattcttcatatttatctctttgttttcagttttattttagttaaggggtaaagggtcgtattcgctagcgtttgagaaggagcatcatccccagccgaacgcacagcaatctggtccaacatccctgcctattcctcaaaggccatggtggccgctggtcgtcatgcaccagtgccaccaaggtatctccgtccagatctggccgcggatgtcgtcgttgccgacgacgcgacgaccatccccatcatcgacttccagcgactgctgctggtcgacccagaggaatctgcgcgcctccatgcggcctgccaggactggggcttcttccagaagatgtgcacgcagctgataaaccacggtgttccggacgatgtgatggaggcgatgaaggccagcatccagtcattcttcgcgcttcctgcggaggccaagcagcagtaccgtcagcaggcaggccagctggaggggtacggccagctgttcgtcgtctccgaggaccagaagctggactgggccgacgtcctctacctcaacacgcagccgcccgagcaccggaacctcagcttctggcctgctggtgagagcttcaggcagacgctggacacctactccgccgccgtcaagcacgtcgccgaccgcctgctgggagccatgtacatgaacctgggcctccagctgagcatcatggacatggacccggagcggggtgccgggatacagtcggtcaaccagctccagggcctgcagatcaagaggccgcccgacggcggcggtgcctgggcctggcttcccgtcacgccgctgcagggcgccttcgtcgtcaacgtcggggacgtcctcgagatcttcaccaacgggaggtacaggagcgtcgagcaccgggctctagtcaacgcccacacggagcgcttgtccatcgcggcgttccactctcccagcatccatgccaccatagggccgctgccggagctcctcggggaccaggaggtgcccaagtataagacgctggaccaccaaagcttcattacgctcttcttctccgccaagctccagggcaagagcttcttggaacggatgaagaagctttcgtagagccaatcggacggaccggaaagttaagcaggccgacgtaaagtcggattacatgttatcggttcggccatagcaatatagcacgcatgtatgtccggattaatttggtgaccgacgagactagttttgtctaccaattcacttttacatcgatttttaaatataaaaaacttacaaaacctgtattagag

SEQ ID NO: 85062 - DNA, 1091 bp, Zea Mays
aatgggattgggaatccatatcatccaccaaccgcccccacccagtctgagtctgagtcagaggtacccacccactcatccgtccgtccatccaatgcgatggtgtcgttggcgcgccggccgctctccgccgccgtacctgcgggcaacctcctcggcatccatctcttccggtgccccgacgccgttggcatcgtcgccaagctctcggaatgcatcgcctcccgcggtggcaacatccacagcgtcgacgtcttcgtccccgacgacaaacccgtcttctactcccgcagtgagtttacctacaatccaaggctctggccgcgtcatgagctccacaaggatttcctcaatctctcccgctgcttcaatgcgcaaacctccaccgtacgagttcccgatcttgaccccaaatacaacatctccatcctcgcatcaaagcaggaccactgcttgttcgatttgctctatagatggcaagaaggcaggcttccagtacacattaattgtgtcattagaggcatggaatcccataccactacttacccaccgcacctgccaacaaaagagagaaagagatcttggaattgatccagggtacagattttgttgtgctggcaagatacatgcagatactctcagaaaacctgttaaaagcatatggtaaagacattatcaatattcatcatggccttcttccctcatttaagggagggaatccttcaagacaggccttcagtgctggggtgaagttaatcggggcaactagccatttcgttactccagaacttgatgctgggccaatcattgaacagatggttgaacgagtctctcaccgagacacgttacagagttttgttgtcaagtctgagaaccttgagaagcagtgcttagcagaggctatcaagtcatattgcgagcttcgtgtcctaccatatgaactcaggaagactgtcgtgttctgatctgagctccctttattttctgtcttattgtacttttatatggattgataaaatgaattttttagcttaaatatatccatcccctcgacattattttaggtaagaaattcccaaagtgctttgatt

SEQ ID NO: 85063 - DNA, 1095 bp, Zea Mays
aatgggattgggaatccatatcatccaccaaccgcccccacccagtctgagtctgagtcagaggtacccacccactcatccgtccgtccatccaatgcgatggtgtcgttggcgcgccggccgctctccgccgccgtacctgcgggcaacctcctcggcatccatctcttccggtgccccgacgccgttggcatcgtcgccaagctctcggaatgcatcgcctcccgcggtggcaacatccacagcgtcgacgtcttcgtccccgacgacaaacccgtcttctactcccgcaggtattgagtttacctacaatccaaggctctggccgcgtcatgagctccacaaggatttcctcaatctctcccgctgcttcaatgcgcaaacctccaccgtacgagttcccgatcttgaccccaaatacaacatctccatcctcgcatcaaagcaggaccactgcttgttcgatttgctctatagatggcaagaaggcaggcttccagtacacattaattgtgtcattagaggcatggaatcccataccactacttacccaccgcacctgccaacaaaagagagaaagagatcttggaattgatccagggtacagattttgttgtgctggcaagatacatgcagatactctcagaaaacctgttaaaagcatatggtaaagacattatcaatattcatcatggccttcttccctcatttaagggagggaatccttcaagacaggccttcagtgctggggtgaagttaatcggggcaactagccatttcgttactccagaacttgatgctgggccaatcattgaacagatggttgaacgagtctctcaccgagacacgttacagagttttgttgtcaagtctgagaaccttgagaagcagtgcttagcagaggctatcaagtcatattgcgagcttcgtgtcctaccatatgaactcaggaagactgtcgtgttctgatctgagctccctttattttctgtcttattgtacttttatatggattgataaaatgaattttttagcttaaatatatccatcccctcgacattattttaggtaagaaattcccaaagtgctttgatt

SEQ ID NO: 85064 - DNA, 979 bp, Zea Mays
ggcctgatcagggcccggcgtgcttcatgtaagctccggcccgatcgatgagaggagtcagacggaggcaaggccggggtcggcagcagaggggagcagagagatctcattctccgatccgcccaggccaccatggcggaggatgctacgagcagccacccgtcacgctacgtcaagctcaccaaggaccaggacgcccccgccgaggacatccgccccggcgagctcaaccagccagttcacgtcccgcagcagctcgaaggccggaggtgtagcgagtgcggtcaggtcctgcccgagagctacgagccgcccgccgacgagccctggaccaccgggatcttcggatgcaccgatgacccagagacctgccgaactggattgttttgcccctgcgtgctgtttgggcgcaacgttgaggctgttagggaggacatcccttggacaactccttgcgtgtgccatgctgtattcgttgaaggagggatcacgctggcgattctgacggcgatatttcacggtgttgatccgaggacgtcattcctgattggagaaggtctggtgttcagctggtggttatgtgctacctacactggcatcttccgccaggggcttcagaggaaatatcatctcaaggagcatcgcgagaggacgggacggcttgcagagaacaacgcagtgcccatgacggttgtgaacccgcctccggtgcaagagatgagcatgctggaggaggtggaggagaagggagcagagaagagtgaacacgatgatgtggaggtcattcctctatagataatagggtcggagtccgagtgaggatagcactagcagcatcagatgacgatcacaacttctggtcattcctctatagttagttagttattgatctttcaacaacaaaatgtggtggtgtggcaactgtccatttttattatcccaaataataatactgtactacgttacggcccacgcccaa

SEQ ID NO: 85065 - DNA, 2671 bp, Zea Mays
catgggcagatggggcttggcaaaaccctacaagcgatttctctattgagctatctcaagatccaccgtattgcacctggaccatttctggtcttatgtcctctaagcgtcacagatgggtggctgtcagaattcagtaaattctgtccttccttcagggtgatgcagtatgtaggtggtaagcttcaccgccgtgaccttcggaggaccatctatgaagatgtacagaaagcttccacatcatctcgatcctttgaattaccatttgatgtgctcatgacaacgtatgacatagccttgatggatcaagatttcctttcacaaatcccctggcactatgcagttattgatgaagctcaacgtcttaaaaatccatccagtgtactgtataatgtccttgagcaacgtttcatcatgccaagacgtctactactaacaggcacacctatccagaacaatctttctgaattatgggctttgatgcacttttgtttgccttcaatatttggaaagctggatgagttcctttctacatttaaggaagcaggggaatcactgacaggtgatgaagctaataaagcaaaaggccaattcaagatcattaaacatgtactcaaggcatttatgctacgtaggacaaaatttttactaatcgagagtggaattctggcgctgcctccactaactgagctaacagtgatggtgccgttgacacagttacaaaagaagctttacatgtcagtgttgcggaaagagctgccaacacttatttcatttgctagaggatcatctcgccaccagtctttgcaaaacattgttatacaactgaggaaagtttgcagtcacccatatctgttcagtggcattgaacctgagccttatgtggaaggggaacatttaattcaggctagtggaaagctcattgtcctagatcttatcctgaagaagctccatgaatgcggacatcgtgttttgctatttgctcagatgacccagacactggacattcttcaggattttctagagctacgcaattacacttatgagcgcctggatggttcagtacgtgctgaggaacggtttgcagcaataagaaatttcagttctcaatctacaaaaggtcttatcagagatgataatcgaagtgaagcatttgttttcatgatatcaactagagcaggtggtgtggggcttaatctcattggtgccgatactgttatattttatgaacaagattggaatcctcaagctgacaaacaggctctacagcgcgctcaccgcattggacagctgaatcatgtcttgtcaataaatttggtgtcacagcgcacaattgaagaggtcataatgcgaagagccgacagaaaacttaagcttagccataatattattggagaagaagacgggactgatgggaagggaggagatccaggaattgaagctagtgacatgagatcaattatctttggcttgcacctgtttgatccagcagatacagctacagaaacaatcgatgaggatataactgctgagacattcagtgtcgagaaactggcaaagttaaaaacaatgtctgaaaaggttgtcatgatgcgtagccatgagtcttctgaaaaggatgaacgagcatttgagatcaatccaaatatgactgatgacagtggaactgtgattagaagggcttctgattctatccgcattgatcctgggctaaatgaagctgcatacctatcctgggtcaagaagttcaaagaggcttccatttctagtgaagatgccacagttggatttggaaggcaaagagcagcgcctgaagaaaagctcctgaaacatgatgttaacaagcaaaaaatagaagaaaagagattggccaaatgggaaagtttgggttaccagacactagcagttaaggaacctgatatcacagcaagccagaatatttcagacgcgggatccatccaatttgtatatggagattgtactaatccttcaaaagtttgtcccgcaaagcctgccatcatattcagctgcatagataattctgggacttgggggcatggagggatgtttgatgctttgactagtctgtcgacatgcattccagatgcttatcaccgtgcttctgaatttgatgatctccacatgggcgatcttcacttgattcagcttgatgcggctatccacatgccccgaattggttaccaaggtggctcccaacgatcagaatggtatacaatagaacgcctgctcaggaaacactcatctctccatggaatcgacatttttgtatactactttcagcgacgacagacagattgccagattgtaacccaggtaggtcatgctgacgattcgacccaagcgtagggatgtctctgtaaaaacccactacatcagaagaatctgggattatgtgtagctagctgcaacaatttgtcttttctttttcttttactgccccttctctctgggaccaaaacgcctatgaatagatgagggagccaaatgaattaggttttagtacatttagctaagaggtgtatgtatgtacaagtgttgtttgcatctgcagtctcttttgatgaaaatctatgtggcatttatattgcttgatttttgttttttgatttggtctattttagacctctttttcttcttcttaacatatatg

SEQ ID NO: 85066 - DNA, 2803 bp, Zea Mays
catgggcagatggggcttggcaaaaccctacaagcgatttctctattgagctatctcaagatccaccgtattgcacctggaccatttcatgggtggctgtcagaattcagtaaattctgtccttccttcagggtgatgcagtatgtaggtggtaagcttcaccgccgtgaccttcggaggaccatctatgaagatgtacagaaagcttccacatcatctcgatcctttgaattaccatttgatgtgctcatgacaacgtatgacatagccttgatggatcaagatttcctttcacaaatcccctggcactatgcagttattgatgaagctcaacgtcttaaaaatccatccagtgtactgtataatgtccttgagcaacgtttcatcatgccaagacgtctactactaacaggcacacctatccagaacaatctttctgaattatgggctttgatgcacttttgtttgccttcaatatttggaaagctggatgagttcctttctacatttaaggaagcaggggaatcactgacaggtgatgaagctaataaagcaaaaggccaattcaagatcattaaacatgtactcaaggcatttatgctacgtaggacaaaatttttactaatcgagagtggaattctggcgctgcctccactaactgagctaacagtgatggtgccgttgacacagttacaaaagaagctttacatgtcagtgttgcggaaagagctgccaacacttatttcatttgctagaggatcatctcgccaccagtctttgcaaaacattgttatacaactgaggaaagtttgcagtcacccatatctgttcagtggcattgaacctgagccttatgtggaaggggaacatttaattcaggctagtggaaagctcattgtcctagatcttatcctgaagaagctccatgaatgcggacatcgtgttttgctatttgctcagatgacccagacactggacattcttcaggattttctagagctacgcaattacacttatgagcgcctggatggttcagtacgtgctgaggaacggtttgcagcaataagaaatttcagttctcaatctacaaaaggtcttatcagagatgataatcgaagtgaagcatttgttttcatgatatcaactagagcaggtggtgtggggcttaatctcattggtgccgatactgttatattttatgaacaagattggaatcctcaagctgacaaacaggctctacagcgcgctcaccgcattggacagctgaatcatgtcttgtcaataaatttggtgtcacagcgcacaattgaagaggtcataatgcgaagagccgacagaaaacttaagcttagccataatattattggagaagaagacgggactgatgggaagggaggagatccaggaattgaagctagtgacatgagatcaattatctttggcttgcacctgtttgatccagcagatacagctacagaaacaatcgatgaggatataactgctgagacattcagtgtcgagaaactggcaaagttaaaaacaatgtctgaaaaggttgtcatgatgcgtagccatgagtcttctgaaaaggatgaacgagcatttgagatcaatccaaatatgactgatgacagtggaactgtgattagaagggcttctgattctatccgcattgatcctgggctaaatgaagctgcatacctatcctgggtcaagaagttcaaagaggcttccatttctagtgaagatgccacagttggatttggaaggcaaagagcagcgcctgaagaaaagctcctgaaacatgatgttaacaagcaaaaaatagaagaaaagagattggccaaatgggaaagtttgggttaccagacactagcagttaaggaacctgatatcacagcaagccagaatatttcagacgcgggatccatccaatttgtatatggagattgtactaatccttcaaaagtttgtcccgcaaagcctgccatcatattcagctgcatagataattctgggacttgggggcatggagggatgtttgatgctttgactagtctgtcgacatgcattccagatgcttatcaccgtgcttctgaatttgatgatctccacatgggcgatcttcacttgattcagcttgatgaaggcaactgtacccggagtttggatgcacctttatgggttgcactagctatcgttcagtcttacaatccgaggcgtaaagttccgagaagtgaaatctccatgtctgatttggagctctgtatatcaaaagcagccttctcagctgctcagcattctgcggctatccacatgccccgaattggttaccaaggtggctcccaacgatcagaatggtatacaatagaacgcctgctcaggaaacactcatctctccatggaatcgacatttttgtatactactttcagcgacgacagacagattgccagattgtaacccaggtaggtcatgctgacgattcgacccaagcgtagggatgtctctgtaaaaacccactacatcagaagaatctgggattatgtgtagctagctgcaacaatttgtcttttctttttcttttactgccccttctctctgggaccaaaacgcctatgaatagatgagggagccaaatgaattaggttttagtacatttagctaagaggtgtatgtatgtacaagtgttgtttgcatctgcagtctcttttgatgaaaatctatgtggcatttatattgcttgatttttgttttttgatttggtctattttagacctctttttcttcttcttaacatatatg

SEQ ID NO: 85067 - DNA, 2860 bp, Zea Mays
ctcattctatgtctattccgttcgctcgcaggtgatgagatggggcttggcaaaaccctacaagcgatttctctattgagctatctcaagatccaccgtattgcacctggaccatttctggtcttatgtcctctaagcgtcacagatgggtggctgtcagaattcagtaaattctgtccttccttcagggtgatgcagtatgtaggtggtaagcttcaccgccgtgaccttcggaggaccatctatgaagatgtacagaaagcttccacatcatctcgatcctttgaattaccatttgatgtgctcatgacaacgtatgacatagccttgatggatcaagatttcctttcacaaatcccctggcactatgcagttattgatgaagctcaacgtcttaaaaatccatccagtgtactgtataatgtccttgagcaacgtttcatcatgccaagacgtctactactaacaggcacacctatccagaacaatctttctgaattatgggctttgatgcacttttgtttgccttcaatatttggaaagctggatgagttcctttctacatttaaggaagcaggggaatcactgacaggtgatgaagctaataaagcaaaaggccaattcaagatcattaaacatgtactcaaggcatttatgctacgtaggacaaaatttttactaatcgagagtggaattctggcgctgcctccactaactgagctaacagtgatggtgccgttgacacagttacaaaagaagctttacatgtcagtgttgcggaaagagctgccaacacttatttcatttgctagaggatcatctcgccaccagtctttgcaaaacattgttatacaactgaggaaagtttgcagtcacccatatctgttcagtggcattgaacctgagccttatgtggaaggggaacatttaattcaggctagtggaaagctcattgtcctagatcttatcctgaagaagctccatgaatgcggacatcgtgttttgctatttgctcagatgacccagacactggacattcttcaggattttctagagctacgcaattacacttatgagcgcctggatggttcagtacgtgctgaggaacggtttgcagcaataagaaatttcagttctcaatctacaaaaggtcttatcagagatgataatcgaagtgaagcatttgttttcatgatatcaactagagcaggtggtgtggggcttaatctcattggtgccgatactgttatattttatgaacaagattggaatcctcaagctgacaaacaggctctacagcgcgctcaccgcattggacagctgaatcatgtcttgtcaataaatttggtgtcacagcgcacaattgaagaggtcataatgcgaagagccgacagaaaacttaagcttagccataatattattggagaagaagacgggactgatgggaagggaggagatccaggaattgaagctagtgacatgagatcaattatctttggcttgcacctgtttgatccagcagatacagctacagaaacaatcgatgaggatataactgctgagacattcagtgtcgagaaactggcaaagttaaaaacaatgtctgaaaaggttgtcatgatgcgtagccatgagtcttctgaaaaggatgaacgagcatttgagatcaatccaaatatgactgatgacagtggaactgtgattagaagggcttctgattctatccgcattgatcctgggctaaatgaagctgcatacctatcctgggtcaagaagttcaaagaggcttccatttctagtgaagatgccacagttggatttggaaggcaaagagcagcgcctgaagaaaagctcctgaaacatgatgttaacaagcaaaaaatagaagaaaagagattggccaaatgggaaagtttgggttaccagacactagcagttaaggaacctgatatcacagcaagccagaatatttcagacgcgggatccatccaatttgtatatggagattgtactaatccttcaaaagtttgtcccgcaaagcctgccatcatattcagctgcatagataattctgggacttgggggcatggagggatgtttgatgctttgactagtctgtcgacatgcattccagatgcttatcaccgtgcttctgaatttgatgatctccacatgggcgatcttcacttgattcagcttgatgaaggcaactgtacccggagtttggatgcacctttatgggttgcactagctatcgttcagtcttacaatccgaggcgtaaagttccgagaagtgaaatctccatgtctgatttggagctctgtatatcaaaagcagccttctcagctgctcagcattctgcggctatccacatgccccgaattggttaccaaggtggctcccaacgatcagaatggtatacaatagaacgcctgctcaggaaacactcatctctccatggaatcgacatttttgtatactactttcagcgacgacagacagattgccagattgtaacccaggtaggtcatgctgacgattcgacccaagcgtagggatgtctctgtaaaaacccactacatcagaagaatctgggattatgtgtagctagctgcaacaatttgtcttttctttttcttttactgccccttctctctgggaccaaaacgcctatgaatagatgagggagccaaatgaattaggttttagtacatttagctaagaggtgtatgtatgtacaagtgttgtttgcatctgcagtctcttttgatgaaaatctatgtggcatttatattgcttgatttttgttttttgatttggtctattttagacctctttttcttcttcttaacatatatg

SEQ ID NO: 85068 - DNA, 2831 bp, Zea Mays
ctctccgccgacgcccaggacaaaggaatccgcctcccggacctcgggcgtcacggccgacctcaagccgcaccagctccatggcgtcgcctggctcatccgccgctatcgcctcggcgtcaacgtcgtactcgatggggcttggcaaaaccctacaagcgatttctctattgagctatctcaagatccaccgtattgcacctggaccatttctggtcttatgtcctctaagcgtcacagatgggtggctgtcagaattcagtaaattctgtccttccttcagggtgatgcagtatgtaggtggtaagcttcaccgccgtgaccttcggaggaccatctatgaagatgtacagaaagcttccacatcatctcgatcctttgaattaccatttgatgtgctcatgacaacgtatgacatagccttgatggatcaagatttcctttcacaaatcccctggcactatgcagttattgatgaagctcaacgtcttaaaaatccatccagtgtactgtataatgtccttgagcaacgtttcatcatgccaagacgtctactactaacaggcacacctatccagaacaatctttctgaattatgggctttgatgcacttttgtttgccttcaatatttggaaagctggatgagttcctttctacatttaaggaagcaggggaatcactgacaggtgatgaagctaataaagcaaaaggccaattcaagatcattaaacatgtactcaaggcatttatgctacgtaggacaaaatttttactaatcgagagtggaattctggcgctgcctccactaactgagctaacagtgtatggttctttgcttcaggatggtgccgttgacacagttacaaaagaagctttacatgtcagtgttgcggaaagagctgccaacacttatttcatttgctagaggatcatctcgccaccagtctttgcaaaacattgttatacaactgaggaaagtttgcagtcacccatatctgttcagtggcattgaacctgagccttatgtggaaggggaacatttaattcaggattttctagagctacgcaattacacttatgagcgcctggatggttcagtacgtgctgaggaacggtttgcagcaataagaaatttcagttctcaatctacaaaaggtcttatcagagatgataatcgaagtgaagcatttgttttcatgatatcaactagagcaggttatattttatgaacaagattggaatcctcaagctgacaaacaggctctacagcgcgctcaccgcattggacagctgaatcatgtcttgtcaataaatttggtgtcacagcgcacaattgaagaggtcataatgcgaagagccgacagaaaacttaagcttagccataatattattggagaagaagacgggactgatgggaagggaggagatccaggaattgaagctagtgacatgagatcaattatctttggcttgcacctgtttgatccagcagatacagctacagaaacaatcgatgaggatataactgctgagacattcagtgtcgagaaactggcaaagttaaaaacaatgtctgaaaaggttgtcatgatgcgtagccatgagtcttctgaaaaggatgaacgagcatttgagatcaatccaaatatgactgatgacagtggaactgtgattagaagggcttctgattctatccgcattgatcctgggctaaatgaagctgcatacctatcctgggtcaagaagttcaaagaggcttccatttctagtgaagatgccacagttggatttggaaggcaaagagcagcgcctgaagaaaagctcctgaaacatgatgttaacaagcaaaaaatagaagaaaagagattggccaaatgggaaagtttgggttaccagacactagcagttaaggaacctgatatcacagcaagccagaatatttcagacgcgggatccatccaatttgtatatggagattgtactaatccttcaaaagtttgtcccgcaaagcctgccatcatattcagctgcatagataattctgggacttgggggcatggagggatgtttgatgctttgactagtctgtcgacatgcattccagatgcttatcaccgtgcttctgaatttgatgatctccacatgggcgatcttcacttgattcagcttgatgaaggcaactgtacccggagtttggatgcacctttatgggttgcactagctatcgttcagtcttacaatccgaggcgtaaagttccgagaagtgaaatctccatgtctgatttggagctctgtatatcaaaagcagccttctcagctgctcagcattctgcggctatccacatgccccgaattggttaccaaggtggctcccaacgatcagaatggtatacaatagaacgcctgctcaggaaacactcatctctccatggaatcgacatttttgtatactactttcagcgacgacagacagattgccagattgtaacccaggtaggtcatgctgacgattcgacccaagcgtagggatgtctctgtaaaaacccactacatcagaagaatctgggattatgtgtagctagctgcaacaatttgtcttttctttttcttttactgccccttctctctgggaccaaaacgcctatgaatagatgagggagccaaatgaattaggttttagtacatttagctaagaggtgtatgtatgtacaagtgttgtttgcatctgcagtctcttttgatgaaaatctatgtggcatttatattgcttgatttttgttttttgatttggtctattttagacctctttttcttcttcttaacatatatg

SEQ ID NO: 85069 - DNA, 3217 bp, Zea Mays
ctctccgccgacgcccaggacaaaggaatccgcctcccggacctcgggcgtcacggccgacctcaagccgcaccagctccatggcgtcgcctggctcatccgccgctatcgcctcggcgtcaacgtcgtactcgatggggcttggcaaaaccctacaagcgatttctctattgagctatctcaagatccaccgtattgcacctggaccatttcgtgcgtatcctacaagtgatttcttttatttttttaattacattggattttatcgtgctactacttgaattttgatcacgtaagcttacccgtgcagtggtcttatgtcctctaagcgtcacagatgggtggctgtcagaattcagtaaattctgtccttccttcagggtgatgcagtatgtaggtggtaagcttcaccgccgtgaccttcggaggaccatctatgaagatgtacagaaagcttccacatcatctcgatcctttgaattaccatttgatgtgctcatgacaacgtatgacatagccttgatggatcaagatttcctttcacaaatcccctggcactatgcagttattgatgaagctcaacgtcttaaaaatccatccagtgtactgtataatgtccttgagcaacgtttcatcatgccaagacgtctactactaacaggcacacctatccagaacaatctttctgaattatgggctttgatgcacttttgtttgccttcaatatttggaaagctggatgagttcctttctacatttaaggaagcaggggaatcactgacaggtgatgaagctaataaagcaaaaggccaattcaagatcattaaacatgtactcaaggcatttatgctacgtaggacaaaatttttactaatcgagagtggaattctggcgctgcctccactaactgagctaacagtgtatggttctttgcttcaggatggtgccgttgacacagttacaaaagaagctttacatgtcagtgttgcggaaagagctgccaacacttatttcatttgctagaggatcatctcgccaccagtctttgcaaaacattgttatacaactgaggaaagtttgcagtcacccatatctgttcagtggcattgaacctgagccttatgtggaaggggaacatttaattcaggctagtggaaagctcattgtcctagatcttatcctgaagaagctccatgaatgcggacatcgtgttttgctatttgctcagatgacccagacactggacattcttcaggattttctagagctacgcaattacacttatgagcgcctggatggttcagtacgtgctgaggaacggtttgcagcaataagaaatttcagttctcaatctacaaaaggtcttatcagagatgataatcgaagtgaagcatttgttttcatgatatcaactagagcaggtggtgtggggcttaatctcattggtgccgatactgtgagtttcattgaacatgataatattgctactctgatgactatgattttgcctacgagatctagtaatattttatctatattaattaaatatgtttttagtaccaagcaaacagctgctaatgatggcaatgaaccttatttatatgttatccatgcttattgggatgattggtttaggttatattttatgaacaagattggaatcctcaagctgacaaacaggctctacagcgcgctcaccgcattggacagctgaatcatgtcttgtcaataaatttggtgtcacagcgcacaattgaagaggtcataatgcgaagagccgacagaaaacttaagcttagccataatattattggagaagaagacgggactgatgggaagggaggagatccaggaattgaagctagtgacatgagatcaattatctttggcttgcacctgtttgatccagcagatacagctacagaaacaatcgatgaggatataactgctgagacattcagtgtcgagaaactggcaaagttaaaaacaatgtctgaaaaggttgtcatgatgcgtagccatgagtcttctgaaaaggatgaacgagcatttgagatcaatccaaatatgactgatgacagtggaactgtgattagaagggcttctgattctatccgcattgatcctgggctaaatgaagctgcatacctatcctgggtcaagaagttcaaagaggcttccatttctagtgaagatgccacagttggatttggaaggcaaagagcagcgcctgaagaaaagctcctgaaacatgatgttaacaagcaaaaaatagaagaaaagagattggccaaatgggaaagtttgggttaccagacactagcagttaaggaacctgatatcacagcaagccagaatatttcagacgcgggatccatccaatttgtatatggagattgtactaatccttcaaaagtttgtcccgcaaagcctgccatcatattcagctgcatagataattctgggacttgggggcatggagggatgtttgatgctttgactagtctgtcgacatgcattccagatgcttatcaccgtgcttctgaatttgatgatctccacatgggcgatcttcacttgattcagcttgatgaaggcaactgtacccggagtttggatgcacctttatgggttgcactagctatcgttcagtcttacaatccgaggcgtaaagttccgagaagtgaaatctccatgtctgatttggagctctgtatatcaaaagcagccttctcagctgctcagcattctggtggctcccaacgatcagaatggtatacaatagaacgcctgctcaggaaacactcatctctccatggaatcgacatttttgtatactactttcagcgacgacagacagattgccagattgtaacccaggtaggtcatgctgacgattcgacccaagcgtagggatgtctctgtaaaaacccactacatcagaagaatctgggattatgtgtagctagctgcaacaatttgtcttttctttttcttttactgccccttctctctgggaccaaaacgcctatgaatagatgagggagccaaatgaattaggttttagtacatttagctaagaggtgtatgtatgtacaagtgttgtttgcatctgcagtctcttttgatgaaaatctatgtggcatttatattgcttgatttttgttttttgatttggtctattttagacctctttttcttcttcttaacatatatg

SEQ ID NO: 85070 - DNA, 2876 bp, Zea Mays
ctctccgccgacgcccaggacaaaggaatccgcctcccggacctcgggcgtcacggccgacctcaagccgcaccagctccatggcgtcgcctggctcatccgccgctatcgcctcggcgtcaacgtcgtactcgtggtcttatgtcctctaagcgtcacagatgggtggctgtcagaattcagtaaattctgtccttccttcagggtgatgcagtatgtaggtggtaagcttcaccgccgtgaccttcggaggaccatctatgaagatgtacagaaagcttccacatcatctcgatcctttgaattaccatttgatgtgctcatgacaacgtatgacatagccttgatggatcaagatttcctttcacaaatcccctggcactatgcagttattgatgaagctcaacgtcttaaaaatccatccagtgtactgtataatgtccttgagcaacgtttcatcatgccaagacgtctactactaacaggcacacctatccagaacaatctttctgaattatgggctttgatgcacttttgtttgccttcaatatttggaaagctggatgagttcctttctacatttaaggaagcaggggaatcactgacaggtgatgaagctaataaagcaaaaggccaattcaagatcattaaacatgtactcaaggcatttatgctacgtaggacaaaatttttactaatcgagagtggaattctggcgctgcctccactaactgagctaacagtgatggtgccgttgacacagttacaaaagaagctttacatgtcagtgttgcggaaagagctgccaacacttatttcatttgctagaggatcatctcgccaccagtctttgcaaaacattgttatacaactgaggaaagtttgcagtcacccatatctgttcagtggcattgaacctgagccttatgtggaaggggaacatttaattcaggctagtggaaagctcattgtcctagatcttatcctgaagaagctccatgaatgcggacatcgtgttttgctatttgctcagatgacccagacactggacattcttcaggattttctagagctacgcaattacacttatgagcgcctggatggttcagtacgtgctgaggaacggtttgcagcaataagaaatttcagttctcaatctacaaaaggtcttatcagagatgataatcgaagtgaagcatttgttttcatgatatcaactagagcaggtggtgtggggcttaatctcattggtgccgatactgttatattttatgaacaagattggaatcctcaagctgacaaacaggctctacagcgcgctcaccgcattggacagctgaatcatgtcttgtcaataaatttggtgtcacagcgcacaattgaagaggtcataatgcgaagagccgacagaaaacttaagcttagccataatattattggagaagaagacgggactgatgggaagggaggagatccaggaattgaagctagtgacatgagatcaattatctttggcttgcacctgtttgatccagcagatacagctacagaaacaatcgatgaggatataactgctgagacattcagtgtcgagaaactggcaaagttaaaaacaatgtctgaaaaggttgtcatgatgcgtagccatgagtcttctgaaaaggatgaacgagcatttgagatcaatccaaatatgactgatgacagtggaactgtgattagaagggcttctgattctatccgcattgatcctgggctaaatgaagctgcatacctatcctgggtcaagaagttcaaagaggcttccatttctagtgaagatgccacagttggatttggaaggcaaagagcagcgcctgaagaaaagctcctgaaacatgatgttaacaagcaaaaaatagaagaaaagagattggccaaatgggaaagtttgggttaccagacactagcagttaaggaacctgatatcacagcaagccagaatatttcagacgcgggatccatccaatttgtatatggagattgtactaatccttcaaaagtttgtcccgcaaagcctgccatcatattcagctgcatagataattctgggacttgggggcatggagggatgtttgatgctttgactagtctgtcgacatgcattccagatgcttatcaccgtgcttctgaatttgatgatctccacatgggcgatcttcacttgattcagcttgatgaaggcaactgtacccggagtttggatgcacctttatgggttgcactagctatcgttcagtcttacaatccgaggcgtaaagttccgagaagtgaaatctccatgtctgatttggagctctgtatatcaaaagcagccttctcagctgctcagcattctgcggctatccacatgccccgaattggttaccaaggtggctcccaacgatcagaatggtatacaatagaacgcctgctcaggaaacactcatctctccatggaatcgacatttttgtatactactttcagcgacgacagacagattgccagattgtaacccaggtaggtcatgctgacgattcgacccaagcgtagggatgtctctgtaaaaacccactacatcagaagaatctgggattatgtgtagctagctgcaacaatttgtcttttctttttcttttactgccccttctctctgggaccaaaacgcctatgaatagatgagggagccaaatgaattaggttttagtacatttagctaagaggtgtatgtatgtacaagtgttgtttgcatctgcagtctcttttgatgaaaatctatgtggcatttatattgcttgatttttgttttttgatttggtctattttagacctctttttcttcttcttaacatatatg

SEQ ID NO: 85071 - DNA, 2916 bp, Zea Mays
ctctccgccgacgcccaggacaaaggaatccgcctcccggacctcgggcgtcacggccgacctcaagccgcaccagctccatggcgtcgcctggctcatccgccgctatcgcctcggcgtcaacgtcgtactcgtggtcttatgtcctctaagcgtcacagatgggtggctgtcagaattcagtaaattctgtccttccttcagggtgatgcagtatgtaggtggtaagcttcaccgccgtgaccttcggaggaccatctatgaagatgtacagaaagcttccacatcatctcgatcctttgaattaccatttgatgtgctcatgacaacgtatgacatagccttgatggatcaagatttcctttcacaaatcccctggcactatgcagttattgatgaagctcaacgtcttaaaaatccatccagtgtgagcagacacttaatctttgtactgtataatgtccttgagcaacgtttcatcatgccaagacgtctactactaacaggcacacctatccagaacaatctttctgaattatgggctttgatgcacttttgtttgccttcaatatttggaaagctggatgagttcctttctacatttaaggaagcaggggaatcactgacaggtgatgaagctaataaagcaaaaggccaattcaagatcattaaacatgtactcaaggcatttatgctacgtaggacaaaatttttactaatcgagagtggaattctggcgctgcctccactaactgagctaacagtgtatggttctttgcttcaggatggtgccgttgacacagttacaaaagaagctttacatgtcagtgttgcggaaagagctgccaacacttatttcatttgctagaggatcatctcgccaccagtctttgcaaaacattgttatacaactgaggaaagtttgcagtcacccatatctgttcagtggcattgaacctgagccttatgtggaaggggaacatttaattcaggctagtggaaagctcattgtcctagatcttatcctgaagaagctccatgaatgcggacatcgtgttttgctatttgctcagatgacccagacactggacattcttcaggattttctagagctacgcaattacacttatgagcgcctggatggttcagtacgtgctgaggaacggtttgcagcaataagaaatttcagttctcaatctacaaaaggtcttatcagagatgataatcgaagtgaagcatttgttttcatgatatcaactagagcaggtggtgtggggcttaatctcattggtgccgatactgttatattttatgaacaagattggaatcctcaagctgacaaacaggctctacagcgcgctcaccgcattggacagctgaatcatgtcttgtcaataaatttggtgtcacagcgcacaattgaagaggtcataatgcgaagagccgacagaaaacttaagcttagccataatattattggagaagaagacgggactgatgggaagggaggagatccaggaattgaagctagtgacatgagatcaattatctttggcttgcacctgtttgatccagcagatacagctacagaaacaatcgatgaggatataactgctgagacattcagtgtcgagaaactggcaaagttaaaaacaatgtctgaaaaggttgtcatgatgcgtagccatgagtcttctgaaaaggatgaacgagcatttgagatcaatccaaatatgactgatgacagtggaactgtgattagaagggcttctgattctatccgcattgatcctgggctaaatgaagctgcatacctatcctgggtcaagaagttcaaagaggcttccatttctagtgaagatgccacagttggatttggaaggcaaagagcagcgcctgaagaaaagctcctgaaacatgatgttaacaagcaaaaaatagaagaaaagagattggccaaatgggaaagtttgggttaccagacactagcagttaaggaacctgatatcacagcaagccagaatatttcagacgcgggatccatccaatttgtatatggagattgtactaatccttcaaaagtttgtcccgcaaagcctgccatcatattcagctgcatagataattctgggacttgggggcatggagggatgtttgatgctttgactagtctgtcgacatgcattccagatgcttatcaccgtgcttctgaatttgatgatctccacatgggcgatcttcacttgattcagcttgatgaaggcaactgtacccggagtttggatgcacctttatgggttgcactagctatcgttcagtcttacaatccgaggcgtaaagttccgagaagtgaaatctccatgtctgatttggagctctgtatatcaaaagcagccttctcagctgctcagcattctgcggctatccacatgccccgaattggttaccaaggtggctcccaacgatcagaatggtatacaatagaacgcctgctcaggaaacactcatctctccatggaatcgacatttttgtatactactttcagcgacgacagacagattgccagattgtaacccaggtaggtcatgctgacgattcgacccaagcgtagggatgtctctgtaaaaacccactacatcagaagaatctgggattatgtgtagctagctgcaacaatttgtcttttctttttcttttactgccccttctctctgggaccaaaacgcctatgaatagatgagggagccaaatgaattaggttttagtacatttagctaagaggtgtatgtatgtacaagtgttgtttgcatctgcagtctcttttgatgaaaatctatgtggcatttatattgcttgatttttgttttttgatttggtctattttagacctctttttcttcttcttaacatatatg

SEQ ID NO: 85072 - DNA, 2955 bp, Zea Mays
ctctccgccgacgcccaggacaaaggaatccgcctcccggacctcgggcgtcacggccgacctcaagccgcaccagctccatggcgtcgcctggctcatccgccgctatcgcctcggcgtcaacgtcgtactcgatggggcttggcaaaaccctacaagcgatttctctattgagctatctcaagatccaccgtattgcacctggaccatttctggtcttatgtcctctaagcgtcacagatgggtggctgtcagaattcagtaaattctgtccttccttcagggtgatgcagtatgtaggtggtaagcttcaccgccgtgaccttcggaggaccatctatgaagatgtacagaaagcttccacatcatctcgatcctttgaattaccatttgatgtgctcatgacaacgtatgacatagccttgatggatcaagatttcctttcacaaatcccctggcactatgcagttattgatgaagctcaacgtcttaaaaatccatccagtgtactgtataatgtccttgagcaacgtttcatcatgccaagacgtctactactaacaggcacacctatccagaacaatctttctgaattatgggctttgatgcacttttgtttgccttcaatatttggaaagctggatgagttcctttctacatttaaggaagcaggggaatcactgacaggtgatgaagctaataaagcaaaaggccaattcaagatcattaaacatgtactcaaggcatttatgctacgtaggacaaaatttttactaatcgagagtggaattctggcgctgcctccactaactgagctaacagtgatggtgccgttgacacagttacaaaagaagctttacatgtcagtgttgcggaaagagctgccaacacttatttcatttgctagaggatcatctcgccaccagtctttgcaaaacattgttatacaactgaggaaagtttgcagtcacccatatctgttcagtggcattgaacctgagccttatgtggaaggggaacatttaattcaggctagtggaaagctcattgtcctagatcttatcctgaagaagctccatgaatgcggacatcgtgttttgctatttgctcagatgacccagacactggacattcttcaggattttctagagctacgcaattacacttatgagcgcctggatggttcagtacgtgctgaggaacggtttgcagcaataagaaatttcagttctcaatctacaaaaggtcttatcagagatgataatcgaagtgaagcatttgttttcatgatatcaactagagcaggtggtgtggggcttaatctcattggtgccgatactgttatattttatgaacaagattggaatcctcaagctgacaaacaggctctacagcgcgctcaccgcattggacagctgaatcatgtcttgtcaataaatttggtgtcacagcgcacaattgaagaggtcataatgcgaagagccgacagaaaacttaagcttagccataatattattggagaagaagacgggactgatgggaagggaggagatccaggaattgaagctagtgacatgagatcaattatctttggcttgcacctgtttgatccagcagatacagctacagaaacaatcgatgaggatataactgctgagacattcagtgtcgagaaactggcaaagttaaaaacaatgtctgaaaaggttgtcatgatgcgtagccatgagtcttctgaaaaggatgaacgagcatttgagatcaatccaaatatgactgatgacagtggaactgtgattagaagggcttctgattctatccgcattgatcctgggctaaatgaagctgcatacctatcctgggtcaagaagttcaaagaggcttccatttctagtgaagatgccacagttggatttggaaggcaaagagcagcgcctgaagaaaagctcctgaaacatgatgttaacaagcaaaaaatagaagaaaagagattggccaaatgggaaagtttgggttaccagacactagcagttaaggaacctgatatcacagcaagccagaatatttcagacgcgggatccatccaatttgtatatggagattgtactaatccttcaaaagtttgtcccgcaaagcctgccatcatattcagctgcatagataattctgggacttgggggcatggagggatgtttgatgctttgactagtctgtcgacatgcattccagatgcttatcaccgtgcttctgaatttgatgatctccacatgggcgatcttcacttgattcagcttgatgaaggcaactgtacccggagtttggatgcacctttatgggttgcactagctatcgttcagtcttacaatccgaggcgtaaagttccgagaagtgaaatctccatgtctgatttggagctctgtatatcaaaagcagccttctcagctgctcagcattctgcggctatccacatgccccgaattggttaccaaggtggctcccaacgatcagaatggtatacaatagaacgcctgctcaggaaacactcatctctccatggaatcgacatttttgtatactactttcagcgacgacagacagattgccagattgtaacccaggtaggtcatgctgacgattcgacccaagcgtagggatgtctctgtaaaaacccactacatcagaagaatctgggattatgtgtagctagctgcaacaatttgtcttttctttttcttttactgccccttctctctgggaccaaaacgcctatgaatagatgagggagccaaatgaattaggttttagtacatttagctaagaggtgtatgtatgtacaagtgttgtttgcatctgcagtctcttttgatgaaaatctatgtggcatttatattgcttgatttttgttttttgatttggtctattttagacctctttttcttcttcttaacatatatg

SEQ ID NO: 85073 - DNA, 2936 bp, Zea Mays
ctctccgccgacgcccaggacaaaggaatccgcctcccggacctcgggcgtcacggccgacctcaagccgcaccagctccatggcgtcgcctggctcatccgccgctatcgcctcggcgtcaacgtcgtactcgatggggcttggcaaaaccctacaagcgatttctctattgagctatctcaagatccaccgtattgcacctggaccatttccgtcacagatgggtggctgtcagaattcagtaaattctgtccttccttcagggtgatgcagtatgtaggtggtaagcttcaccgccgtgaccttcggaggaccatctatgaagatgtacagaaagcttccacatcatctcgatcctttgaattaccatttgatgtgctcatgacaacgtatgacatagccttgatggatcaagatttcctttcacaaatcccctggcactatgcagttattgatgaagctcaacgtcttaaaaatccatccagtgtactgtataatgtccttgagcaacgtttcatcatgccaagacgtctactactaacaggcacacctatccagaacaatctttctgaattatgggctttgatgcacttttgtttgccttcaatatttggaaagctggatgagttcctttctacatttaaggaagcaggggaatcactgacaggtgatgaagctaataaagcaaaaggccaattcaagatcattaaacatgtactcaaggcatttatgctacgtaggacaaaatttttactaatcgagagtggaattctggcgctgcctccactaactgagctaacagtgatggtgccgttgacacagttacaaaagaagctttacatgtcagtgttgcggaaagagctgccaacacttatttcatttgctagaggatcatctcgccaccagtctttgcaaaacattgttatacaactgaggaaagtttgcagtcacccatatctgttcagtggcattgaacctgagccttatgtggaaggggaacatttaattcaggctagtggaaagctcattgtcctagatcttatcctgaagaagctccatgaatgcggacatcgtgttttgctatttgctcagatgacccagacactggacattcttcaggattttctagagctacgcaattacacttatgagcgcctggatggttcagtacgtgctgaggaacggtttgcagcaataagaaatttcagttctcaatctacaaaaggtcttatcagagatgataatcgaagtgaagcatttgttttcatgatatcaactagagcaggtggtgtggggcttaatctcattggtgccgatactgttatattttatgaacaagattggaatcctcaagctgacaaacaggctctacagcgcgctcaccgcattggacagctgaatcatgtcttgtcaataaatttggtgtcacagcgcacaattgaagaggtcataatgcgaagagccgacagaaaacttaagcttagccataatattattggagaagaagacgggactgatgggaagggaggagatccaggaattgaagctagtgacatgagatcaattatctttggcttgcacctgtttgatccagcagatacagctacagaaacaatcgatgaggatataactgctgagacattcagtgtcgagaaactggcaaagttaaaaacaatgtctgaaaaggttgtcatgatgcgtagccatgagtcttctgaaaaggatgaacgagcatttgagatcaatccaaatatgactgatgacagtggaactgtgattagaagggcttctgattctatccgcattgatcctgggctaaatgaagctgcatacctatcctgggtcaagaagttcaaagaggcttccatttctagtgaagatgccacagttggatttggaaggcaaagagcagcgcctgaagaaaagctcctgaaacatgatgttaacaagcaaaaaatagaagaaaagagattggccaaatgggaaagtttgggttaccagacactagcagttaaggaacctgatatcacagcaagccagaatatttcagacgcgggatccatccaatttgtatatggagattgtactaatccttcaaaagtttgtcccgcaaagcctgccatcatattcagctgcatagataattctgggacttgggggcatggagggatgtttgatgctttgactagtctgtcgacatgcattccagatgcttatcaccgtgcttctgaatttgatgatctccacatgggcgatcttcacttgattcagcttgatgaaggcaactgtacccggagtttggatgcacctttatgggttgcactagctatcgttcagtcttacaatccgaggcgtaaagttccgagaagtgaaatctccatgtctgatttggagctctgtatatcaaaagcagccttctcagctgctcagcattctgcggctatccacatgccccgaattggttaccaaggtggctcccaacgatcagaatggtatacaatagaacgcctgctcaggaaacactcatctctccatggaatcgacatttttgtatactactttcagcgacgacagacagattgccagattgtaacccaggtaggtcatgctgacgattcgacccaagcgtagggatgtctctgtaaaaacccactacatcagaagaatctgggattatgtgtagctagctgcaacaatttgtcttttctttttcttttactgccccttctctctgggaccaaaacgcctatgaatagatgagggagccaaatgaattaggttttagtacatttagctaagaggtgtatgtatgtacaagtgttgtttgcatctgcagtctcttttgatgaaaatctatgtggcatttatattgcttgatttttgttttttgatttggtctattttagacctctttttcttcttcttaacatatatg

SEQ ID NO: 85074 - DNA, 2843 bp, Zea Mays
ctctccgccgacgcccaggacaaaggaatccgcctcccggacctcgggcgtcacggccgacctcaagccgcaccagctccatggcgtcgcctggctcatccgccgctatcgcctcggcgtcaacgtcgtactcgtggtcttatgtcctctaagcgtcacagatgggtggctgtcagaattcagtaaattctgtccttccttcagggtgatgcagtatgtaggtggtaagcttcaccgccgtgaccttcggaggaccatctatgaagatgaattaccatttgatgtgctcatgacaacgtatgacatagccttgatggatcaagatttcctttcacaaatcccctggcactatgcagttattgatgaagctcaacgtcttaaaaatccatccagtgtactgtataatgtccttgagcaacgtttcatcatgccaagacgtctactactaacaggcacacctatccagaacaatctttctgaattatgggctttgatgcacttttgtttgccttcaatatttggaaagctggatgagttcctttctacatttaaggaagcaggggaatcactgacaggtgatgaagctaataaagcaaaaggccaattcaagatcattaaacatgtactcaaggcatttatgctacgtaggacaaaatttttactaatcgagagtggaattctggcgctgcctccactaactgagctaacagtgatggtgccgttgacacagttacaaaagaagctttacatgtcagtgttgcggaaagagctgccaacacttatttcatttgctagaggatcatctcgccaccagtctttgcaaaacattgttatacaactgaggaaagtttgcagtcacccatatctgttcagtggcattgaacctgagccttatgtggaaggggaacatttaattcaggctagtggaaagctcattgtcctagatcttatcctgaagaagctccatgaatgcggacatcgtgttttgctatttgctcagatgacccagacactggacattcttcaggattttctagagctacgcaattacacttatgagcgcctggatggttcagtacgtgctgaggaacggtttgcagcaataagaaatttcagttctcaatctacaaaaggtcttatcagagatgataatcgaagtgaagcatttgttttcatgatatcaactagagcaggtggtgtggggcttaatctcattggtgccgatactgttatattttatgaacaagattggaatcctcaagctgacaaacaggctctacagcgcgctcaccgcattggacagctgaatcatgtcttgtcaataaatttggtgtcacagcgcacaattgaagaggtcataatgcgaagagccgacagaaaacttaagcttagccataatattattggagaagaagacgggactgatgggaagggaggagatccaggaattgaagctagtgacatgagatcaattatctttggcttgcacctgtttgatccagcagatacagctacagaaacaatcgatgaggatataactgctgagacattcagtgtcgagaaactggcaaagttaaaaacaatgtctgaaaaggttgtcatgatgcgtagccatgagtcttctgaaaaggatgaacgagcatttgagatcaatccaaatatgactgatgacagtggaactgtgattagaagggcttctgattctatccgcattgatcctgggctaaatgaagctgcatacctatcctgggtcaagaagttcaaagaggcttccatttctagtgaagatgccacagttggatttggaaggcaaagagcagcgcctgaagaaaagctcctgaaacatgatgttaacaagcaaaaaatagaagaaaagagattggccaaatgggaaagtttgggttaccagacactagcagttaaggaacctgatatcacagcaagccagaatatttcagacgcgggatccatccaatttgtatatggagattgtactaatccttcaaaagtttgtcccgcaaagcctgccatcatattcagctgcatagataattctgggacttgggggcatggagggatgtttgatgctttgactagtctgtcgacatgcattccagatgcttatcaccgtgcttctgaatttgatgatctccacatgggcgatcttcacttgattcagcttgatgaaggcaactgtacccggagtttggatgcacctttatgggttgcactagctatcgttcagtcttacaatccgaggcgtaaagttccgagaagtgaaatctccatgtctgatttggagctctgtatatcaaaagcagccttctcagctgctcagcattctgcggctatccacatgccccgaattggttaccaaggtggctcccaacgatcagaatggtatacaatagaacgcctgctcaggaaacactcatctctccatggaatcgacatttttgtatactactttcagcgacgacagacagattgccagattgtaacccaggtaggtcatgctgacgattcgacccaagcgtagggatgtctctgtaaaaacccactacatcagaagaatctgggattatgtgtagctagctgcaacaatttgtcttttctttttcttttactgccccttctctctgggaccaaaacgcctatgaatagatgagggagccaaatgaattaggttttagtacatttagctaagaggtgtatgtatgtacaagtgttgtttgcatctgcagtctcttttgatgaaaatctatgtggcatttatattgcttgatttttgttttttgatttggtctattttagacctctttttcttcttcttaacatatatg

SEQ ID NO: 85075 - DNA, 2922 bp, Zea Mays
ctctccgccgacgcccaggacaaaggaatccgcctcccggacctcgggcgtcacggccgacctcaagccgcaccagctccatggcgtcgcctggctcatccgccgctatcgcctcggcgtcaacgtcgtactcgatggggcttggcaaaaccctacaagcgatttctctattgagctatctcaagatccaccgtattgcacctggaccatttctggtcttatgtcctctaagcgtcacagatgggtggctgtcagaattcagtaaattctgtccttccttcagggtgatgcagtatgtaggtggtaagcttcaccgccgtgaccttcggaggaccatctatgaagatgaattaccatttgatgtgctcatgacaacgtatgacatagccttgatggatcaagatttcctttcacaaatcccctggcactatgcagttattgatgaagctcaacgtcttaaaaatccatccagtgtactgtataatgtccttgagcaacgtttcatcatgccaagacgtctactactaacaggcacacctatccagaacaatctttctgaattatgggctttgatgcacttttgtttgccttcaatatttggaaagctggatgagttcctttctacatttaaggaagcaggggaatcactgacaggtgatgaagctaataaagcaaaaggccaattcaagatcattaaacatgtactcaaggcatttatgctacgtaggacaaaatttttactaatcgagagtggaattctggcgctgcctccactaactgagctaacagtgatggtgccgttgacacagttacaaaagaagctttacatgtcagtgttgcggaaagagctgccaacacttatttcatttgctagaggatcatctcgccaccagtctttgcaaaacattgttatacaactgaggaaagtttgcagtcacccatatctgttcagtggcattgaacctgagccttatgtggaaggggaacatttaattcaggctagtggaaagctcattgtcctagatcttatcctgaagaagctccatgaatgcggacatcgtgttttgctatttgctcagatgacccagacactggacattcttcaggattttctagagctacgcaattacacttatgagcgcctggatggttcagtacgtgctgaggaacggtttgcagcaataagaaatttcagttctcaatctacaaaaggtcttatcagagatgataatcgaagtgaagcatttgttttcatgatatcaactagagcaggtggtgtggggcttaatctcattggtgccgatactgttatattttatgaacaagattggaatcctcaagctgacaaacaggctctacagcgcgctcaccgcattggacagctgaatcatgtcttgtcaataaatttggtgtcacagcgcacaattgaagaggtcataatgcgaagagccgacagaaaacttaagcttagccataatattattggagaagaagacgggactgatgggaagggaggagatccaggaattgaagctagtgacatgagatcaattatctttggcttgcacctgtttgatccagcagatacagctacagaaacaatcgatgaggatataactgctgagacattcagtgtcgagaaactggcaaagttaaaaacaatgtctgaaaaggttgtcatgatgcgtagccatgagtcttctgaaaaggatgaacgagcatttgagatcaatccaaatatgactgatgacagtggaactgtgattagaagggcttctgattctatccgcattgatcctgggctaaatgaagctgcatacctatcctgggtcaagaagttcaaagaggcttccatttctagtgaagatgccacagttggatttggaaggcaaagagcagcgcctgaagaaaagctcctgaaacatgatgttaacaagcaaaaaatagaagaaaagagattggccaaatgggaaagtttgggttaccagacactagcagttaaggaacctgatatcacagcaagccagaatatttcagacgcgggatccatccaatttgtatatggagattgtactaatccttcaaaagtttgtcccgcaaagcctgccatcatattcagctgcatagataattctgggacttgggggcatggagggatgtttgatgctttgactagtctgtcgacatgcattccagatgcttatcaccgtgcttctgaatttgatgatctccacatgggcgatcttcacttgattcagcttgatgaaggcaactgtacccggagtttggatgcacctttatgggttgcactagctatcgttcagtcttacaatccgaggcgtaaagttccgagaagtgaaatctccatgtctgatttggagctctgtatatcaaaagcagccttctcagctgctcagcattctgcggctatccacatgccccgaattggttaccaaggtggctcccaacgatcagaatggtatacaatagaacgcctgctcaggaaacactcatctctccatggaatcgacatttttgtatactactttcagcgacgacagacagattgccagattgtaacccaggtaggtcatgctgacgattcgacccaagcgtagggatgtctctgtaaaaacccactacatcagaagaatctgggattatgtgtagctagctgcaacaatttgtcttttctttttcttttactgccccttctctctgggaccaaaacgcctatgaatagatgagggagccaaatgaattaggttttagtacatttagctaagaggtgtatgtatgtacaagtgttgtttgcatctgcagtctcttttgatgaaaatctatgtggcatttatattgcttgatttttgttttttgatttggtctattttagacctctttttcttcttcttaacatatatg

SEQ ID NO: 85076 - DNA, 2939 bp, Zea Mays
ctctccgccgacgcccaggacaaaggaatccgcctcccggacctcgggcgtcacggccgacctcaagccgcaccagctccatggcgtcgcctggctcatccgccgctatcgcctcggcgtcaacgtcgtactcgatggggcttggcaaaaccctacaagcgatttctctattgagctatctcaagatccaccgtattgcacctggaccatttctggtcttatgtcctctaagcgtcacagatgggtggctgtcagaattcagtaaattctgtccttccttcagggtgatgcagtatgtaggtggtaagcttcaccgccgtgaccttcggaggaccatctatgaagatgtacagaaagcttccacatcatctcgatcctttgaattaccatttgatgtgctcatgacaacgtatgacatagccttgatggatcaagatttcctttcacaaatcccctggcactatgcagttattgatgaagctcaacgtcttaaaaatccatccagtgtactgtataatgtccttgagcaacgtttcatcatgccaagacgtctactactaacaggcacacctatccagaacaatctttctgaattatgggctttgatgcacttttgtttgccttcaatatttggaaagctggatgagttcctttctacatttaaggaagcaggggaatcactgacaggtgatgaagctaataaagcaaaaggccaattcaagatcattaaacatgtactcaaggcatttatgctacgtaggacaaaatttttactaatcgagagtggaattctggcgctgcctccactaactgagctaacagtgtatggttctttgcttcaggatggtgccgttgacacagttacaaaagaagctttacatgtcagtgttgcggaaagagctgccaacacttatttcatttgctagaggatcatctcgccaccagtctttgcaaaacattgttatacaactgaggaaagtttgcagtcacccatatctgttcagtggcattgaacctgagccttatgtggaaggggaacatttaattcaggctagtggaaagctcattgtcctagatcttatcctgaagaagctccatgaatgcggacatcgtgttttgctatttgctcagatgacccagacactggacattcttcaggattttctagagctacgcaattacacttatgagcgcctggatggttcagtacgtgctgaggaacggtttgcagcaataagaaatttcagttctcaatctacaaaaggtcttatcagagatgataatcgaagtgaagcatttgttttcatgatatcaactagagcaggttatattttatgaacaagattggaatcctcaagctgacaaacaggctctacagcgcgctcaccgcattggacagctgaatcatgtcttgtcaataaatttggtgtcacagcgcacaattgaagaggtcataatgcgaagagccgacagaaaacttaagcttagccataatattattggagaagaagacgggactgatgggaagggaggagatccaggaattgaagctagtgacatgagatcaattatctttggcttgcacctgtttgatccagcagatacagctacagaaacaatcgatgaggatataactgctgagacattcagtgtcgagaaactggcaaagttaaaaacaatgtctgaaaaggttgtcatgatgcgtagccatgagtcttctgaaaaggatgaacgagcatttgagatcaatccaaatatgactgatgacagtggaactgtgattagaagggcttctgattctatccgcattgatcctgggctaaatgaagctgcatacctatcctgggtcaagaagttcaaagaggcttccatttctagtgaagatgccacagttggatttggaaggcaaagagcagcgcctgaagaaaagctcctgaaacatgatgttaacaagcaaaaaatagaagaaaagagattggccaaatgggaaagtttgggttaccagacactagcagttaaggaacctgatatcacagcaagccagaatatttcagacgcgggatccatccaatttgtatatggagattgtactaatccttcaaaagtttgtcccgcaaagcctgccatcatattcagctgcatagataattctgggacttgggggcatggagggatgtttgatgctttgactagtctgtcgacatgcattccagatgcttatcaccgtgcttctgaatttgatgatctccacatgggcgatcttcacttgattcagcttgatgaaggcaactgtacccggagtttggatgcacctttatgggttgcactagctatcgttcagtcttacaatccgaggcgtaaagttccgagaagtgaaatctccatgtctgatttggagctctgtatatcaaaagcagccttctcagctgctcagcattctgcggctatccacatgccccgaattggttaccaaggtggctcccaacgatcagaatggtatacaatagaacgcctgctcaggaaacactcatctctccatggaatcgacatttttgtatactactttcagcgacgacagacagattgccagattgtaacccaggtaggtcatgctgacgattcgacccaagcgtagggatgtctctgtaaaaacccactacatcagaagaatctgggattatgtgtagctagctgcaacaatttgtcttttctttttcttttactgccccttctctctgggaccaaaacgcctatgaatagatgagggagccaaatgaattaggttttagtacatttagctaagaggtgtatgtatgtacaagtgttgtttgcatctgcagtctcttttgatgaaaatctatgtggcatttatattgcttgatttttgttttttgatttggtctattttagacctctttttcttcttcttaacatatatg

SEQ ID NO: 85077 - DNA, 3289 bp, Zea Mays
ctctccgccgacgcccaggacaaaggaatccgcctcccggacctcgggcgtcacggccgacctcaagccgcaccagctccatggcgtcgcctggctcatccgccgctatcgcctcggcgtcaacgtcgtactcgatggggcttggcaaaaccctacaagcgatttctctattgagctatctcaagatccaccgtattgcacctggaccatttctggtcttatgtcctctaagcgtcacagatgggtggctgtcagaattcagtaaattctgtccttccttcagggtgatgcagtatgtaggtggtaagcttcaccgccgtgaccttcggaggaccatctatgaagatgtacagaaagcttccacatcatctcgatcctttgaattaccatttgatgtgctcatgacaacgtatgacatagccttgatggatcaagatttcctttcacaaatcccctggcactatgcagttattgatgaagctcaacgtcttaaaaatccatccagtgtactgtataatgtccttgagcaacgtttcatcatgccaagacgtctactactaacaggcacacctatccagaacaatctttctgaattatgggctttgatgcacttttgtttgccttcaatatttggaaagctggatgagttcctttctacatttaaggaagcaggggaatcactgacaggtgatgaagctaataaagcaaaaggccaattcaagatcattaaacatgtactcaaggcatttatgctacgtaggacaaaatttttactaatcgagagtggaattctggcgctgcctccactaactgagctaacagtgatggtgccgttgacacagttacaaaagaagctttacatgtcagtgttgcggaaagagctgccaacacttatttcatttgctagaggatcatctcgccaccagtctttgcaaaacattgttatacaactgaggaaagtttgcagtcacccatatctgttcagtggcattgaacctgagccttatgtggaaggggaacatttaattcaggctagtggaaagctcattgtcctagatcttatcctgaagaagctccatgaatgcggacatcgtgttttgctatttgctcagatgacccagacactggacattcttcaggattttctagagctacgcaattacacttatgagcgcctggatggttcagtacgtgctgaggaacggtttgcagcaataagaaatttcagttctcaatctacaaaaggtcttatcagagatgataatcgaagtgaagcatttgttttcatgatatcaactagagcaggtggtgtggggcttaatctcattggtgccgatactgttatattttatgaacaagattggaatcctcaagctgacaaacaggctctacagcgcgctcaccgcattggacagctgaatcatgtcttgtcaataaatttggtgtcacagcgcacaattgaagaggtcataatgcgaagagccgacagaaaacttaagcttagccataatattattggagaagaagacgggactgatgggaagggaggagatccaggaattgaagctagtgacatgagatcaattatctttggcttgcacctgtttgatccagcagatacagctacagaaacaatcgatgaggatataactgctgagacattcagtgtcgagaaactggcaaagttaaaaacaatgtctgaaaaggttgtcatgatgcgtagccatgagtcttctgaaaaggatgaacgagcatttgagatcaatccaaatatgactgatgacagtggaactgtgattagaagggcttctgattctatccgcattgatcctgggctaaatgaagctgcatacctatcctgggtcaagaagttcaaagaggcttccatttctagtgaagatgccacagttggatttggaaggcaaagagcagcgcctgaagaaaagctcctgaaacatgatgttaacaagcaaaaaatagaagaaaagagattggccaaatgggaaagtttgggttaccagacactagcagttaaggaacctgatatcacagcaagccagaatatttcagacgcgggatccatccaatttgtatatggagattgtactaatccttcaaaagtttgtcccgcaaagcctgccatcatattcagctgcatagataattctgggacttgggggcatggagggatgtttgatgctttgactagtctgtcgacatgcattccagatgcttatcaccgtgcttctgaatttgatgatctccacatgggcgatcttcacttgattcagcttgatgaaggcaactgtacccggagtttggatgcacctttatgggttgcactagctatcgttcagtcttacaatccgaggcgtaaagttccgagaagtgaaatctccatgtctgatttggagctctgtatatcaaaagcagccttctcagctgctcagcattctggtattgttctcgtttggttccttaatatagaattgtttagcaatctaaagcatgccttggaatatcggaatgccactcatctcttcagcaacgcatgccagttgtcaaaatgtatgttgtttcaagtaatatgtacgcaccaaaaaatcctgttcagcctaaacgtctatttgatttcttaattataaaccgtgagagcatgtttgtatagctattttaaatttataatcctatggctcctcttttgcattgaagtactgaacttatgcaattatctctttagctactatcaggttcggttattttgttttcattatttttctcctctctgaagcggctatccacatgccccgaattggttaccaaggtggctcccaacgatcagaatggtatacaatagaacgcctgctcaggaaacactcatctctccatggaatcgacatttttgtatactactttcagcgacgacagacagattgccagattgtaacccaggtaggtcatgctgacgattcgacccaagcgtagggatgtctctgtaaaaacccactacatcagaagaatctgggattatgtgtagctagctgcaacaatttgtcttttctttttcttttactgccccttctctctgggaccaaaacgcctatgaatagatgagggagccaaatgaattaggttttagtacatttagctaagaggtgtatgtatgtacaagtgttgtttgcatctgcagtctcttttgatgaaaatctatgtggcatttatattgcttgatttttgttttttgatttggtctattttagacctctttttcttcttcttaacatatatg

SEQ ID NO: 85078 - DNA, 2896 bp, Zea Mays
  misc_feature (1)..(1): n is a, c, g, or t
nctctccgccgacgcccaggacaaaggaatccgcctcccggacctcgggcgtcacggccgacctcaagccgcaccagctccatggcgtcgcctggctcatccgccgctatcgcctcggcgtcaacgtcgtactcgtggtcttatgtcctctaagcgtcacagatgggtggctgtcagaattcagtaaattctgtccttccttcagggtgatgcagtatgtaggtggtaagcttcaccgccgtgaccttcggaggaccatctatgaagatgtacagaaagcttccacatcatctcgatcctttgaattaccatttgatgtgctcatgacaacgtatgacatagccttgatggatcaagatttcctttcacaaatcccctggcactatgcagttattgatgaagctcaacgtcttaaaaatccatccagtgtactgtataatgtccttgagcaacgtttcatcatgccaagacgtctactactaacaggcacacctatccagaacaatctttctgaattatgggctttgatgcacttttgtttgccttcaatatttggaaagctggatgagttcctttctacatttaaggaagcaggggaatcactgacaggtgatgaagctaataaagcaaaaggccaattcaagatcattaaacatgtactcaaggcatttatgctacgtaggacaaaatttttactaatcgagagtggaattctggcgctgcctccactaactgagctaacagtgtatggttctttgcttcaggatggtgccgttgacacagttacaaaagaagctttacatgtcagtgttgcggaaagagctgccaacacttatttcatttgctagaggatcatctcgccaccagtctttgcaaaacattgttatacaactgaggaaagtttgcagtcacccatatctgttcagtggcattgaacctgagccttatgtggaaggggaacatttaattcaggctagtggaaagctcattgtcctagatcttatcctgaagaagctccatgaatgcggacatcgtgttttgctatttgctcagatgacccagacactggacattcttcaggattttctagagctacgcaattacacttatgagcgcctggatggttcagtacgtgctgaggaacggtttgcagcaataagaaatttcagttctcaatctacaaaaggtcttatcagagatgataatcgaagtgaagcatttgttttcatgatatcaactagagcaggtggtgtggggcttaatctcattggtgccgatactgttatattttatgaacaagattggaatcctcaagctgacaaacaggctctacagcgcgctcaccgcattggacagctgaatcatgtcttgtcaataaatttggtgtcacagcgcacaattgaagaggtcataatgcgaagagccgacagaaaacttaagcttagccataatattattggagaagaagacgggactgatgggaagggaggagatccaggaattgaagctagtgacatgagatcaattatctttggcttgcacctgtttgatccagcagatacagctacagaaacaatcgatgaggatataactgctgagacattcagtgtcgagaaactggcaaagttaaaaacaatgtctgaaaaggttgtcatgatgcgtagccatgagtcttctgaaaaggatgaacgagcatttgagatcaatccaaatatgactgatgacagtggaactgtgattagaagggcttctgattctatccgcattgatcctgggctaaatgaagctgcatacctatcctgggtcaagaagttcaaagaggcttccatttctagtgaagatgccacagttggatttggaaggcaaagagcagcgcctgaagaaaagctcctgaaacatgatgttaacaagcaaaaaatagaagaaaagagattggccaaatgggaaagtttgggttaccagacactagcagttaaggaacctgatatcacagcaagccagaatatttcagacgcgggatccatccaatttgtatatggagattgtactaatccttcaaaagtttgtcccgcaaagcctgccatcatattcagctgcatagataattctgggacttgggggcatggagggatgtttgatgctttgactagtctgtcgacatgcattccagatgcttatcaccgtgcttctgaatttgatgatctccacatgggcgatcttcacttgattcagcttgatgaaggcaactgtacccggagtttggatgcacctttatgggttgcactagctatcgttcagtcttacaatccgaggcgtaaagttccgagaagtgaaatctccatgtctgatttggagctctgtatatcaaaagcagccttctcagctgctcagcattctgcggctatccacatgccccgaattggttaccaaggtggctcccaacgatcagaatggtatacaatagaacgcctgctcaggaaacactcatctctccatggaatcgacatttttgtatactactttcagcgacgacagacagattgccagattgtaacccaggtaggtcatgctgacgattcgacccaagcgtagggatgtctctgtaaaaacccactacatcagaagaatctgggattatgtgtagctagctgcaacaatttgtcttttctttttcttttactgccccttctctctgggaccaaaacgcctatgaatagatgagggagccaaatgaattaggttttagtacatttagctaagaggtgtatgtatgtacaagtgttgtttgcatctgcagtctcttttgatgaaaatctatgtggcatttatattgcttgatttttgttttttgatttggtctattttagacctctttttcttcttcttaacatatatg

SEQ ID NO: 85079 - DNA, 664 bp, Zea Mays
ctgccgtctccttcccttctctctctcgccgatcttgcctcttgcctgggagatctccttgcctgaacctcagcgccggacgcaagcttcgtaccgaggccctgctggtacctagcgtcagtagcttgttgcttcctgccccattcccggattcatggtgaagggaattgaccgagaagtgctgctgccaaaagatgggcaccaggaagtggctgaggtcgcgctgcagctggggaagtactgcatagatgaccccgtcaagtccccgccgggcggacggaggatggttattcgtactgccaaaagaatgggaggttgtgtactgctcggtgccaacctcgccgggcgggctctaccggacgcccttggccgcctggtattcaaaaccgacgagatggtccaggcggtggaagcgcctgacgtggtcaggaacaaggtgtcgttctccgtctttggcctagagggcgcagtgtcattgaaaggtaagctgaatgtgctggacagtaaatggattcaggtcgtgtttgaagcgccggaactgaaggtcggctccttggggtttcagtacggtggcgagagcgaagtcaagctggagaagggaaggagatgggagaagacaacagcgcgcggacggaggatagttattcgttctctcaacgattaa

SEQ ID NO: 85080 - DNA, 1912 bp, Zea Mays
cagcgaccgagcgaaccctccccttcctccgcctcccattcccaaaattttcaccgcacgccctctcgctctcctcggctaaccgcgacgacgacccccgaagcttcgcgaagcttcctgggcctccccccgcggccgcccctccctagatcgccgcctctggcagcggcgaggctgcatcgcgagggcggtggaggctggaggagccgggccacggggtcgacgaaggcgagactagggtttgggtttggtgtccagctgcatcggtcggcgccctgtgagggagaaggatgcatatgatgcggcggctcaagagcatcgcctccggccgctcgtccgtctccgatccgggtggtgactctggctccaaaaggccaaaatttgagcaggatggagcaggggatattgttattgagccacacttaactgaggccaagcctgtccggatagaccaagaatcatcatcatcatctaatagggatgctgaggcaagcacatctactagcatgaagcctgttaaaactgaagaaccagtagcagatcttcttcccaaagaattgaatgatatgacaattagtgacgataaagctgatgaccataatgataaggaaggtgaaggtgttactcttgatgggaatggagccgagacaggacagataattgtgacaacaataggaggtcataatgggaagccaaagcagaaggtctcatacatggcggaacgggttgttggtactggttcgtttggtatagttttccaggcaaaatgcttggaaactggtgagacggtggcgataaaaaaggtgttacaagataagcgctacaagaatagagagctccagactatgcagttgcttgaccacccaaatgtagttcagctgaagcatcacttcttttcaacaactcaaaggggagaagtttacctcaacctagtacttgaattcgtatctgagacagtttatcgtgttgccaaatactacaaccggatgaaccagcgtgtacccatattatatgttaagttatatgcatatcagatgtgccgtgcccttgcttacatccatcgtgttgtcggtgtgtgtcaccgtgatattaaacctcaaaatctactggtcaatcctcatacacatcaacttaagatttgcgattttgggagcgctaaaaaattgggctcctgaactaatatttggagctacggagtataccactgcaatcgatatctggtctgttggctgtgtagtggctgagcttctgattggtcagcctttgtttcctggtgaaagtggtgttgatcaactggtggaaatcataaagattttgggtactccaacaagagaggaaatcaggtgcatgaatccaaattattctgaattcaagttccctcagataaaagcccatccatggcacaagctttttggtaagcgcatgccacctgaagctgttgatctcgtgtcaaggctacttcagtactcaccaaacctgcgctgcactgctgttgatgcttgtgcccatccattctttgatgagctgcgggaccccaaggtctgcttgccaagtggacgaccgctgccagcgctgttcgacttcacagcagccgaactcgaagggctcccaatcgagcttgtccatcggatcgttcctgaacacatgaggaagtgaaccggtggtggacgtgctggagagatccctgtttcgtgagggcatgctatggaggagcgatgtagctagcgaacgccttgctagatgtaaagagggctgaaagttccttgattgggcgtgtcaccaaggttcatgctgaacaagagaattcagagtgctgtgctgtgcttgcttcgttagctggagatcaacaggatgtcagttttgatctgcttgcgcgtggtttcttttttttttttacgtcatcaacgacact

SEQ ID NO: 85081 - DNA, 2095 bp, Zea Mays
atctagtggtgcagcgaccgagcgaaccctccccttcctccgcctcccattcccaaaattttcaccgcacgccctctcgctctcctcggctaaccgcgacgacgacccccgaagcttcgcgaagcttcctgggcctccccccgcggccgcccctccctagatcgccgcctctggcagcggcgaggctgcatcgcgagggcggtggaggctggaggagccgggccacggggtcgacgaaggcgagactagggtttgggtttggtgtccagctgcatcggtcggcgccctgtgagggagaaggatgcatatgatgcggcggctcaagagcatcgcctccggccgctcgtccgtctccgatccgtaaaggataatgacaggttctggtcagtctattggttcaaaaaaaagttcattcgggaaggatttaacctatggattagtcaggaaatggctcccgttcacaaaaaaagaagaagaaggacatggggtggtgactctggctccaaaaggccaaaatttgagcaggatggagcaggggatattgttattgagccacacttaactgaggccaagcctgtccggatagaccaagaatcatcatcatcatctaatagggatgctgaggcaagcacatctactagcatgaagcctgttaaaactgaagaaccagtagcagatcttcttcccaaagaattgaatgatatgacaattagtgacgataaagctgatgaccataatgataaggaaggtgaaggtgttactcttgatgggaatggagccgagacaggacagataattgtgacaacaataggaggtcataatgggaagccaaagcagaaggtctcatacatggcggaacgggttgttggtactggttcgtttggtatagttttccaggcaaaatgcttggaaactggtgagacggtggcgataaaaaaggtgttacaagataagcgctacaagaatagagagctccagactatgcagttgcttgaccacccaaatgtagttcagctgaagcatcacttcttttcaacaactcaaaggggagaagtttacctcaacctagtacttgaattcgtatctgagacagtttatcgtgttgccaaatactacaaccggatgaaccagcgtgtacccatattatatgttaagttatatgcatatcagatgtgccgtgcccttgcttacatccatcgtgttgtcggtgtgtgtcaccgtgatattaaacctcaaaatctactggtcaatcctcatacacatcaacttaagatttgcgattttgggagcgctaaaaaattggtccctggtgagcctaacatatcgtacatttgctcgcggtattatagggctcctgaactaatatttggagctacggagtataccactgcaatcgatatctggtctgttggctgtgtagtggctgagcttctgattggtcagcctttgtttcctggtgaaagtggtgttgatcaactggtggaaatcataaagattttgggtactccaacaagagaggaaatcaggtgcatgaatccaaattattctgaattcaagttccctcagataaaagcccatccatggcacaagctttttggtaagcgcatgccacctgaagctgttgatctcgtgtcaaggctacttcagtactcaccaaacctgcgctgcactgctgttgatgcttgtgcccatccattctttgatgagctgcgggaccccaaggtctgcttgccaagtggacgaccgctgccagcgctgttcgacttcacagcagccgaactcgaagggctcccaatcgagcttgtccatcggatcgttcctgaacacatgaggaagtgaaccggtggtggacgtgctggagagatccctgtttcgtgagggcatgctatggaggagcgatgtagctagcgaacgccttgctagatgtaaagagggctgaaagttccttgattgggcgtgtcaccaaggttcatgctgaacaagagaattcagagtgctgtgctgtgcttgcttcgttagctggagatcaacaggatgtcagttttgatctgcttgcgcgtggtttcttttttttttttacgtcatcaacgacact

SEQ ID NO: 85082 - DNA, 2306 bp, Zea Mays
gagaaatctagtggtgcagcgaccgagcgaaccctccccttcctccgcctcccattcccaaaattttcaccgcacgccctctcgctctcctcggctaaccgcgacgacgacccccgaagcttcgcgaagcttcctgggcctccccccgcggccgcccctccctagatcgccgcctctggcagcggcgaggctgcatcgcgagggcggtggaggctggaggagccgggccacggggtcgacgaaggcgagactagggtttgggtttggtgtccagctgcatcggtcggcgccctgtgagggagaaggatgcatatgatgcggcggctcaagagcatcgcctccggccgctcgtccgtctccgatccgggtggtgactctggctccaaaaggccaaaatttgagcaggatggagcaggggatattgttattgagccacacttaactgaggccaagcctgtccggatagaccaagaatcatcatcatcatctaatagggatgctgaggcaagcacatctactagcatgaagcctgttaaaactgaagaaccagtagcagatcttcttcccaaagaattgaatgatatgacaattagtgacgataaagctgatgaccataatgataaggaaggtgaaggtgttactcttgatgggaatggagccgagacaggacagataattgtgacaacaataggaggtcataatgggaagccaaagcagaaggtctcatacatggcggaacgggttgttggtactggttcgtttggtatagttttccaggcaaaatgcttggaaactggtgagacggtggcgataaaaaaggtgttacaagataagcgctacaagaatagagagctccagactatgcagttgcttgaccacccaaatgtagttcagctgaagcatcacttcttttcaacaactcaaaggggagaagtttacctcaacctagtacttgaattcgtatctgagacagtttatcgtgttgccaaatactacaaccggatgaaccagcgtgtacccatattatatgttaagttatatgcatatcagatgtgccgtgcccttgcttacatccatcgtgttgtcggtgtgtgtcaccgtgatattaaacctcaaaatctactggtcaatcctcatacacatcaacttaagatttgcgattttgggagcgctaaaaaattgggctcctgaactaatatttggagctacggagtataccactgcaatcgatatctggtctgttggctgtgtagtggctgagcttctgattggtcaggtataggatctcaatcctacaggtttaccttgcttccagctgattattatgccaattgctaaccattttctgagagggaagcaattttgttttaccattgtaaaatctgtcttttttgggccaattatataaattacaaaattgcatttttggattttatggacattatgatttgatcaactcccagttaattgagacacttgctatctgctgacaaaatattgttgatgtccactgggccccccccaattgcagcctttgtttcctggtgaaagtggtgttgatcaactggtggaaatcataaagattttgggtactccaacaagagaggaaatcaggtgcatgaatccaaattattctgaattcaagttccctcagataaaagcccatccatggcacaagctttttggtaagcgcatgccacctgaagctgttgatctcgtgtcaaggctacttcagtactcaccaaacctgcgctgcactgctgttgatgcttgtgcccatccattctttgatgagctgcgggaccccaaggtctgcttgccaagtggacgaccgctgccagcgctgttcgacttcacagcagccgaactcgaagggctcccaatcgagcttgtccatcggatcgttcctgaacacatgaggaagtgaaccggtggtggacgtgctggagagatccctgtttcgtgagggcatgctatggaggagcgatgtagctagcgaacgccttgctagatgtaaagagggctgaaagttccttgattgggcgtgtcaccaaggtgaccctagagggcaggcaaaccttacgtttgcttgttgcccatggtggaaatcggcttgtacctttcgcaatcgcatcttgtgtatcgacgatgacttaggggctgctgttgtattgtcaggttcatgctgaacaagagaattcagagtgctgtgctgtgcttgcttcgttagctggagatcaacaggatgtcagttttgatctgcttgcgcgtggtttcttttttttttttacgtcatcaacgacact

SEQ ID NO: 85083 - DNA, 3392 bp, Zea Mays
attttactcatggaatgagtttcatttccaaggaaataaacatgccctagaggaaatccaaatcatctagaagcaccggccggtcgtcacagccaaggcaacaaaagaccagtaacgggcagtgctcggtagtagaggacaattattgttagttgcagccttgcaggcagcaaagcaccgggaccaggacgccggccgcttcccgggttataaaagtcaacagcctccgcccaccaccctgtcggctaagcaagctaaaggtaaccccccccaaacctcaccgccgatcccaccgcccggcgccgcgttctatggcctacacctcctccctcaacctcccaaagcacctcctcctccccagcccccgccggacaaggcacaggccttcctccttcgtccccaccgccgcggccaaggtcaacggtgacgcgcccgagaggccggcgcccaacggcaaggcacgcatcaacggccagggcaagaagggagtgaacgggcatgcggaccggatccacctctcggtgagcacgggcggcggaggccaggacggctccggcctgcgcgtggcgttccagggcgcgccgggcgcctacagcgagttcgcggccaagacggcgctgcccggctgcgacacggtcccgtgccgcgccttcgcggacgcgctggctgccgtggagcgcggcggcgccgaccgcgccatcctccccgtggagtccaccatggaggggacggcgctgcgcaactacgacctgctcctgcggcacggcctggtggtggtgcaggagatcaacctgttcgtgcactactgcctgctggccatgcccggggtgcgcgccgccgaggtgcggcgggtgatcagccaccccatggcgctggcgcactgcgggcgcgcgctggcccgcctcggggtggaccgcgagcccgtggaggacacggcgggcgccgtggagatgctgcggtccaagcggatgctggacacagccgccatcgccagcccgcgcgccgccgacctgtacgggctccaggtcctcgcgcacgggctccaggacgagtcctggaacgtgacgcgattcctgctcctctccaggccgccgtcgcctgtggccgtggcgctgggcgtggacgccgacgccaagaccagcatggtggtcgcgcaccggggcggctccatggtggtcgtgctcaaggtgctctccgccttctcctcccgcaacatcaacctcaccaagctggaggtcatcaacaacgaaggcgctggatccggaccaggcgagcggccgccggtggtgatactggacacgagcgcccggggcgcacccacgctgcgcgccttcccgcacgtcctctacgtggactgcgagggcgccgcgcacgacccgcgcgtccgcgaggccatccaggagatggagaggttcgccgtcttcgtgcgcgtgcttggatgctacgccgccgactccaccgtctacgatctgcagtgagctctcagatatgatctagctactacttactattcagaagagaaagcagcgcgtaatttctgtacagatgcaataagaagaatcttccttcctataattatttgccaacaaggtctgctttttagcgactagttctaatcttgtttatagattgtgtcctcttttcttttgcttgcaagatgattggagcccccgttggtagtaacataacatcgcaagcaaggggcggtggtcccgtgctcgttggtggtagttgcgtccagacattagtgtaccgtccatggcacatgctatgttccttatggtcgtggaagaaaataaaacaaaaatctcaccaaacgtaccactcggtgataagtgcgtctcctgatcctctgcactctatgatcacccccctccatagccacaataataaataaataaataaatatataaataaataaatattccaaccacgaccgccgtttcccaatatctgatgtgctcatgtgcagatgccacatggccggctcaatgatttctgtttgatcagctactctccactaaatcacccaattgctttagaactgttaagaaaccagtttggaccccgaaggcccatgtggcccatctagccgaaaccctaactatgcactatatatagaggaggacactaccatttgttgtaaccagtgaacagaatacatgaatgagaatatcagttcctcctatatctttgtgtcttccgtctttatgagttaagaagcctttggactacattcggtagcaaagggttcttaacacgttatcatcacgaatgctctcaacagaagttcgcaaagtaagtaggaaggctctgtatctcttgaatctctttttattccctctagaaaaacacagcacacaaggaaagagaaaagtagcatcccaagcagattttttttcaccggcacgaagctgttggaactttgaatacgctcattgattttactgcatcatcgaaagaaagaaaaaaaagaatggcaacacagtgctaaggttgacgtcgttgccgcactagcaagcaaactacgaccttaactcgtagtgcaggagcgagacgcacacctgccaggctgccacctcgctgccgccgcagcacgggtgcgggcgctggcaccaccgccaaaacgccaacgcgtgaacccaacccactccaaggcagtgcatactcgtggtcacgcgcgtgcgcaagctcagtcgctgccgctccacggtccacagcaaagcgcgctgcctcgccgtcgttggagcgcgggcgcagggcgccgccgtcgcaacacggtcgcgcaagcgtgcgagcgcgggctcgccgccgccgtctcgccaccgaaggagagtgcgggcaccgtgccggccgccgctgccccgcaggcgagcatcccggccggaccgccgatgccaccgcgagcaggcacaagcgcgcgggcaaggaccgccgccgctatgacaggcgagccgcagccgccgtaagccagcaggccatgcgggcgagcaggttgcgctcccgtccaaacacaagtggctactccagtgctcccatccgcaattagatgagagaaaatgagagtaagaaagaaagaaaaaaagaggagagaacaacggtggcggctggataggggaaccctaatagcgcccccttcgtaggttgaaatgggcctcacatgtctagcaggcttcataaattttatagacaaaaggtttttcaattacactatggaccaaaaaaaaaaggaagaagttcaacactacctcttgaactatagaaaaggttcaaaataaccatgaaaatgatgagaaatattttcatgcagtaattgagatcgaaattattgcctatttatgtatttatatattgtactatttatttggcatgatactatgaataaatattac

SEQ ID NO: 85084 - DNA, 1456 bp, Zea Mays
gccgtggcaccaccatccatgccgaggcgaggggttgttggtggcattgattatggattcaccggtgaagttaaaaaaatagatgtttcacggataagagaaaggcttgatagagacagcatagttgttgtgagcaacatggggtactccagcgcaggagaggtcttgaattgcaatacctatgaagttgctacagcatgtgctttatccatagaggcggacaagcttatttgcattgttgatggccaaatatttgatgagcatggtagagtcaatcgttttatgtctattgaagaagcagatatgttgatcagaacacgtgctaagcagagtgaaattgctgcaaattatgtgaaggttgttgatgaggaggacatcaatcatgtccgctgcctcccaatgaaacatggtacagaacatgggtttgctattggcggggaggagcgcttgagcaggtcaaatggttacctatcagagttagcagcggcagcatacgtatgccatggtggtgtccaaagagtgcatatcatagatggtactgttggtggagcattgttgctagaactattcactagagatggtgttggaacgatgatagctagggatatgtatgaaggaacaagaatggccagagaggaagatctttctggtattagaaagatcattcgtcctctagaagaatctggtgtcctggtgcgccgaacagatcaagagcttcttgaagcattgacatcatttattgtcgtggaaagagatggctcaatcatagcgtgtgctgccctcttcccttttcttgaggataaatctggggaagttgctgctattgctgtatctgaagaatgtcgaggccaaggtcaaggagacaaattacttgattacgttgagaagaaggctttgtcccttggacttgagaaactattcttgcttaccacaaggacagcggattggtttgttcgtcgcggctttaaggagtgctcgttcgattccctgcctttggtgaggagaaaacgtatcgacctctcgcgcgggtcaaaatattacatgaagtggctccaggcagcagaggttgggcatatggctgccgacggttttgccatgagatgatgagtgctgcaaacaagcatctctacgaatctagtcgatggacgtgaggtttctttatgagctgtgcagtcgcttatacatcgtagaaatgtatatttattgtgcaagaaaataatcagtcaataatcgaagatgtggttgtgtttcttgagttgatttcttcttgagcatagcaatgctcaaaagagttgttgatctgcacactgctgacaaagcctgcacgactgcgctttttaaactgataaatacttagctgcaaattcagcaatgttcttgttgagctccctccatcgcctcctctagaaaaaatgcgtatgttacgcactgtcatatctatcatgttcaactaaga

SEQ ID NO: 85085 - DNA, 1804 bp, Zea Mays
cttcttcccaatgggtttcatttcattctctatccagtgtgagagatgttctgagtaatctatatgattaggcaggatatatcccttcttcatggtctcgggatcaaatttgttcttgttcctggaacacatgtccagattgataagctcttggctgagagagggaagaaggctaagtatgctggtcgctaccgcattactgattcagattcattagatgctgcaatggaggcagctggccgaatacggctaactatagaagcgaagctgtctcctggaccaccaatgttaaatctccgtaggcatggtgttaatggccgttggcatgaaatctctgataatgttgcaagtggaaatttccttggtgctaagaggcgaggggttgttggtggcattgattatggattcaccggtgaagttaaaaaaatagatgtttcacggataagagaaaggcttgatagagacagcatagttgttgtgagcaacatggggtactccagcgcaggagaggtcttgaattgcaatacctatgaagttgctacagcatgtgctttatccatagaggcggacaagcttatttgcattgttgatggccaaatatttgatgagcatggtagagtcaatcgttttatgtctattgaagaagcagatatgttgatcagaacacgtgctaagcagagtgaaattgctgcaaattatgtgaaggttgttgatgaggaggacatcaatcatgtccgctgcctcccaatgaaacatggtacagaacatgggtttgctattggcggggaggagcgcttgagcaggtcaaatggttacctatcagagttagcagcggcagcatacgtatgccatggtggtgtccaaagagtgcatatcatagatggtactgttggtggagcattgttgctagaactattcactagagatggtgttggaacgatgatagctagggatatgtatgaaggaacaagaatggccagagaggaagatctttctggtattagaaagatcattcgtcctctagaagaatctggtgtcctggtgcgccgaacagatcaagagcttcttgaagcattgacatcatttattgtcgtggaaagagatggctcaatcatagcgtgtgctgccctcttcccttttcttgaggataaatctggggaagttgctgctattgctgtatctgaagaatgtcgaggccaaggtcaaggagacaaattacttgattacgttgagaagaaggctttgtcccttggacttgagaaactattcttgcttaccacaaggacagcggattggtttgttcgtcgcggctttaaggagtgctcgttcgattccctgcctttggtgaggagaaaacgtatcgacctctcgcgcgggtcaaaatattacatgaagtggctccaggcagcagaggttgggcatatggctgccgacggttttgccatgagatgatgagtgctgcaaacaagcatctctacgaatctagtcgatggacgtgaggtttctttatgagctgtgcagtcgcttatacatcgtagaaatgtatatttattgtgcaagaaaataatcagtcaataatcgaagatgtggttgtgtttcttgagttgatttcttcttgagcatagcaatgctcaaaagagttgttgatctgcacactgctgacaaagcctgcacgactgcgctttttaaactgataaatacttagctgcaaattcagcaatgttcttgttgagctccctccatcgcctcctctagaaaaaatgcgtatgttacgcactgtcatatctatcatgttcaactaaga

SEQ ID NO: 85086 - DNA, 2119 bp, Zea Mays
caaccccaaccacggacccggactggctgtccgcctatcacccgccactattgctcttgcagcctgcttctctccccccttctcgccgcgtacgcacgggtcgcacgcacgcacaccccgttcgtgccacactgccacctaacccccctcccccacgatcccgaggctactagcactaggcgtcgtcctcggcagcaacggcggctgggctcccgccgatggcggcgtccctcgccgccgccgcctctcgcctcgccgccaccggcggcgagttgtcgtggtcggcgcggccctgccccgggagtctcgtggcgagcttccccagcgccgggcggctccggcgccccgcttcgggcgtgcggtgcggaggtggggttttgcccgcggccgcggggacgggggcggaagcggaggaagggggccgcttcgttggctggttccgggaggcgtggccttacatccggggccaccggggcagcaccttcgtcgtcgtcatctccggggaggtcatcgccggcccgcacctcgacggcattctgcaggatatatcccttcttcatggtctcgggatcaaatttgttcttgttcctggaacacatgtccagattgataagctcttggctgagagagggaagaaggctaagtatgctggtcgctaccgcattactgattcagattcattagatgctgcaatggaggcagctggccgaatacggctaactatagaagcgaagctgtctcctggaccaccaatgttaaatctccgtaggcatggtgttaatggccgttggcatgaaatctctgataatgttgcaagtggaaatttccttggtgctaagtacctatgaagttgctacagcatgtgctttatccatagaggcggacaagcttatttgcattgttgatggccaaatatttgatgagcatggtagagtcaatcgttttatgtctattgaagaagcagatatgttgatcagaacacgtgctaagcagagtgaaattgctgcaaattatgtgaaggttgttgatgaggaggacatcaatcatgtccgctgcctcccaatgaaacatggtacagaacatgggtttgctattggcggggaggagcgcttgagcaggtcaaatggttacctatcagagttagcagcggcagcatacgtatgccatggtggtgtccaaagagtgcatatcatagatggtactgttggtggagcattgttgctagaactattcactagagatggtgttggaacgatgatagctagggatatgtatgaaggaacaagaatggccagagaggaagatctttctggtattagaaagatcattcgtcctctagaagaatctggtgtcctggtgcgccgaacagatcaagagcttcttgaagcattgacatcatttattgtcgtggaaagagatggctcaatcatagcgtgtgctgccctcttcccttttcttgaggataaatctggggaagttgctgctattgctgtatctgaagaatgtcgaggccaaggtcaaggagacaaattacttgattacgttgagaagaaggctttgtcccttggacttgagaaactattcttgcttaccacaaggacagcggattggtttgttcgtcgcggctttaaggagtgctcgttcgattccctgcctttggtgaggagaaaacgtatcgacctctcgcgcgggtcaaaatattacatgaagtggctccaggcagcagaggttgggcatatggctgccgacggttttgccatgagatgatgagtgctgcaaacaagcatctctacgaatctagtcgatggacgtgaggtttctttatgagctgtgcagtcgcttatacatcgtagaaatgtatatttattgtgcaagaaaataatcagtcaataatcgaagatgtggttgtgtttcttgagttgatttcttcttgagcatagcaatgctcaaaagagttgttgatctgcacactgctgacaaagcctgcacgactgcgctttttaaactgataaatacttagctgcaaattcagcaatgttcttgttgagctccctccatcgcctcctctagaaaaaatgcgtatgttacgcactgtcatatctatcatgttcaactaaga

SEQ ID NO: 85087 - DNA, 2344 bp, Zea Mays
ccaaccccaaccacggacccggactggctgtccgcctatcacccgccactattgctcttgcagcctgcttctctccccccttctcgccgcgtacgcacgggtcgcacgcacgcacaccccgttcgtgccacactgccacctaacccccctcccccacgatcccgaggctactagcactaggcgtcgtcctcggcagcaacggcggctgggctcccgccgatggcggcgtccctcgccgccgccgcctctcgcctcgccgccaccggcggcgagttgtcgtggtcggcgcggccctgccccgggagtctcgtggcgagcttccccagcgccgggcggctccggcgccccgcttcgggcgtgcggtgcggaggtggggttttgcccgcggccgcggggacgggggcggaagcggaggaagggggccgcttcgttggctggttccgggaggcgtggccttacatccggggccaccggggcagcaccttcgtcgtcgtcatctccggggaggtcatcgccggcccgcacctcgacggcattctgcaggatatatcccttcttcatggtctcgggatcaaatttgttcttgttcctggaacacatgtccagattgataagctcttggctgagagagggaagaaggctaagtatgctggtcgctaccgcattactgattcagattcattagatgctgcaatggaggcagctggccgaatacggctaactatagaagcgaagctgtctcctggaccaccaatgttaaatctccgtaggcatggtgttaatggccgttggcatgaaatctctgataatgttgcaagtggaaatttccttggtgctaagaggcgaggggttgttggtggcattgattatggattcaccggtgaagttaaaaaaatagatgtttcacggataagagaaaggcttgatagagacagcatagttgttgtgagcaacatggggtactccagcgcaggagaggtcttgaattgcaatacctatgaagttgctacagcatgtgctttatccatagaggcggacaagcttatttgcattgttgatggccaaatatttgatgagcatggtagagtcaatcgttttatgtctattgaagaagcagatatgttgatcagaacacgtgctaagcagagtgaaattgctgcaaattatgtgaaggttgttgatgaggaggacatcaatcatgtccgctgcctcccaatgaaacatggtacagaacatggtatgaatggaagggaccatattaatgggtatactgcatcttttcggaatggtgtgggtttcaatgatggaaatggtctgtctggtgagcaagggtttgctattggcggggaggagcgcttgagcaggtcaaatggttacctatcagagttagcagcggcagcatacgtatgccatggtggtgtccaaagagtgcatatcatagatggtactgttggtggagcattgttgctagaactattcactagagatggtgttggaacgatgatagctagggatatgtatgaaggaacaagaatggccagagaggaagatctttctggtattagaaagatcattcgtcctctagaagaatctggtgtcctggtgcgccgaacagatcaagagcttcttgaagcattgacatcatttattgtcgtggaaagagatggctcaatcatagcgtgtgctgccctcttcccttttcttgaggataaatctggggaagttgctgctattgctgtatctgaagaatgtcgaggccaagattacgttgagaagaaggctttgtcccttggacttgagaaactattcttgcttaccacaaggacagcggattggtttgttcgtcgcggctttaaggagtgctcgttcgattccctgcctttggtgaggagaaaacgtatcgacctctcgcgcgggtcaaaatattacatgaagtggctccaggcagcagaggttgggcatatggctgccgacggttttgccatgagatgatgagtgctgcaaacaagcatctctacgaatctagtcgatggacgtgaggtttctttatgagctgtgcagtcgcttatacatcgtagaaatgtatatttattgtgcaagaaaataatcagtcaataatcgaagatgtggttgtgtttcttgagttgatttcttcttgagcatagcaatgctcaaaagagttgttgatctgcacactgctgacaaagcctgcacgactgcgctttttaaactgataaatacttagctgcaaattcagcaatgttcttgttgagctccctccatcgcctcctctagaaaaaatgcgtatgttacgcactgtcatatctatcatgttcaactaaga

SEQ ID NO: 85088 - DNA, 2416 bp, Zea Mays
ggaaaagtccaaggcaagatgaccaggacgggggcggacgccggacgcgccaccgcggcgtgtgtatataaaatgcccctcctctgctcctccccagtctccacttcccccaaaccccggccgaccaaccccaaccacggacccggactggctgtccgcctatcacccgccactattgctcttgcagcctgcttctctccccccttctcgccgcgtacgcacgggtcgcacgcacgcacaccccgttcgtgccacactgccacctaacccccctcccccacgatcccgaggctactagcactaggcgtcgtcctcggcagcaacggcggctgggctcccgccgatggcggcgtccctcgccgccgccgcctctcgcctcgccgccaccggcggcgagttgtcgtggtcggcgcggccctgccccgggagtctcgtggcgagcttccccagcgccgggcggctccggcgccccgcttcgggcgtgcggtgcggaggtggggttttgcccgcggccgcggggacgggggcggaagcggaggaagggggccgcttcgttggctggttccgggaggcgtggccttacatccggggccaccggggcagcaccttcgtcgtcgtcatctccggggaggtcatcgccggcccgcacctcgacggcattctgcaggatatatcccttcttcatggtctcgggatcaaatttgttcttgttcctggaacacatgtccagattgataagctcttggctgagagagggaagaaggctaagtatgctggtcgctaccgcattactgattcagattcattagatgctgcaatggaggcagctggccgaatacggctaactatagaagcgaagctgtctcctggaccaccaatgttaaatctccgtaggcatggtgttaatggccgttggcatgaaatctctgataatgttgcaagtggaaatttccttggtgctaagaggcgaggggttgttggtggcattgattatggattcaccggtgaagttaaaaaaatagatgtttcacggataagagaaaggcttgatagagacagcatagttgttgtgagcaacatggggtactccagcgcaggagaggtcttgaattgcaatacctatgaagttgctacagcatgtgctttatccatagaggcggacaagcttatttgcattgttgatggccaaatatttgatgagcatggtagagtcaatcgttttatgtctattgaagaagcagatatgttgatcagaacacgtgctaagcagagtgaaattgctgcaaattatgtgaaggttgttgatgaggaggacatcaatcatgtccgctgcctcccaatgaaacatggtacagaacatggtatgaatggaagggaccatattaatgggtatactgcatcttttcggaatggtgtgggtttcaatgatggaaatggtctgtctggtgagcaagggtttgctattggcggggaggagcgcttgagcaggtcaaatggttacctatcagagttagcagcggcagcatacgtatgccatggtggtgtccaaagagtgcatatcatagatggtactgttggtggagcattgttgctagaactattcactagagatggtgttggaacgatgatagctagggatatgtatgaaggaacaagaatggccagagaggaagatctttctggtattagaaagatcattcgtcctctagaagaatctggtgtcctggtgcgccgaacagatcaagagcttcttgaagcattgacatcatttattgtcgtggaaagagatggctcaatcatagcgtgtgctgccctcttcccttttcttgaggataaatctggggaagttgctgctattgctgtatctgaagaatgtcgaggccaaggtcaaggagacaaattacttggtttgttcgtcgcggctttaaggagtgctcgttcgattccctgcctttggtgaggagaaaacgtatcgacctctcgcgcgggtcaaaatattacatgaagtggctccaggcagcagaggttgggcatatggctgccgacggttttgccatgagatgatgagtgctgcaaacaagcatctctacgaatctagtcgatggacgtgaggtttctttatgagctgtgcagtcgcttatacatcgtagaaatgtatatttattgtgcaagaaaataatcagtcaataatcgaagatgtggttgtgtttcttgagttgatttcttcttgagcatagcaatgctcaaaagagttgttgatctgcacactgctgacaaagcctgcacgactgcgctttttaaactgataaatacttagctgcaaattcagcaatgttcttgttgagctccctccatcgcctcctctagaaaaaatgcgtatgttacgcactgtcatatctatcatgttcaactaaga

SEQ ID NO: 85089 - DNA, 6918 bp, Zea Mays
gaaaaggatgaaaaacagaattctttggaactattgttaagacggattgaagggctacaatatgaaatggatgaaaaagtagatcttgttgaagtgttaactcgtcaagttgaaaatctgcagcgagagcgtgatgagctcagaaaagatattgagcaattatgtatgcaacaagctgggcctggttatgtttctgttgcaactcgaatgcttactcagagctttggaacaggatattgagaacctccagaaaaagttaggtggttgcttaagagagaatcaaaatttgcaagaggagcttgctgaagcttatcgaattaagagccagcttgctgagttacatggtgctgcactatcaaagaacaaggatcttgaaaagcaagtaagatttttccagagcagtgtcgctcaagcgtttgctgaacgggacagttcattaatggagtgtgagaaagcaaaagagcgggaagaagcagtgtcaagaaagtttgctgattttgaggaaaggatgagagaatatcaatcagagattgatgaacagaaacacttaaatgatgacttgcagagagaactgacagaactgaaggcacatacagaattgtccttgaaagttattctaaaattctatgaccttcgttgcagagactctggatgttcttcaagccttactattgaagagaagtgttcaatccttcttggtgattctgctgacaattggagttttagctctgatggcggaacctcaactttgaagacttatgcagttatgctttgttcccagtttctcattcaacatactgctcaatacatggatagaaaacatccgtattattgatggaagtcataaatttagtgctaatcttctcatttgtcctattcagtaagttatagttcagtatgattgtcatgttctatttgacctaattgtgtcatgtacttgagtaatacaacatgacttgcaggccctaatttgttttcaagaactgtttattgattttttttccagttgatttggtcctaaaccaaagtgctttgcatagttaaggcgagtgtttgacccccgccttaccttcgaagcggtaaagtgtaaggcgagacaacaccttaatcatatataaatataggaaaatatagaaaattagtcttgaatagaagtacgaaagtaccaaacagaagtctataagttcaatataagcaaacataataggctaaaagtccaacataagtaggttctgatactctcatctctcaagttctgatacatcatcaaactcatcaaaaatgggaggattactgtcttcttcgcgttctctcccaccggatatatcatcatcttcactcacattcaagtcatctttcgcatgattggttgccgcgtcctacccgcccagactcgcggcatgcgttggccgggcgcgagcgagtgtttggttgccgcacccacgccctccggactgcatgtgcgcatgcagtttagtgctttttttcgccgttctgcctgcaagcgtggagaagccggaaattaccttcgctgggggaccaggcccgcacgaggcaggcacgtgacagaccggcaaccaatcagcccccttgtggatctggctcaaagtcttcgtccatggcacctccctcttcttcttacggcctcattcttgcatgctttctctatgtaaggccagaactttgtctctgactagcttgccttggaaggttgtgccctcgaagcgactccgatgctctagtagcaacatcaacatgatccatcatgtgaggtcaacaatattatcattgtccctgctggggtgtaccactgatgagtatccactcgttgtcccaatcaaaatcctcaataattaatgggtcatagcttgtgccggctttctccctcatttgaaacctacttcgcatcttttgattgtatgaaacatagaccaagtcattcaaccttttatgcaacaacaagtttctcttctttgtatgtatagtaagtaacaaacccaacctaaataagtagcaagaaatagattgaagctagtaaacataagcgaagtagcaaaaaatggacttacaaattcaaatgtgcttcaattcctctcacaaccggatgaggaagcacaaagtctaaccagtaaccacacgcttggcaaacctttgaaattcatatgctcggccgccatatgaacgttatcaatcaactacgcagatgcaaacagcgacacggtcacacacataggtatacaacagcaggaaagaataaaaaaagatgtgctgaaattagcaatcagccaagcatatagtactttagagggctctttgcttgaatgttttcaagtgccaacttgtttgaaaaatagaccctctatgatcttcataatgcatggcatgctcattaatcttcgaccgtatttcttcattggactccattcttgctagcacataattgaaacaactcctcagctttacaacatatctatcatctccctttggatggcaaagaattttcccaggttcaaataaagtgcagcaccatacgatggatggtccatttgtttcatccaacgaccctcaataatgtccataattttttcagcaatgcttgcttgttttgtgtagggaagctaagccttttctcttttgcaacatccattagtgctgcaatttatgtcatgtatgttttttcatctccatcaactgccctaagcactataagaagtgccaaagctctgaggcaatcttcaactgaagaccaaaaagtcttagctagaataatattacaccccccttccagcctctgtctttgccaacttgttgcagttccatgcatctcacaaaaagtgctctcaaggcatcttgatgtttatgtagacttttcaaagtaaggaatgtggcaaaacgagtggctgctggtcttaaaggatccccctcctatcttctccctcattgcacttagaattcctccatgcctataaataaaagtggtgactcttttggcttgtgcaattagtctttcaaatatccaatatcctccaccatgaggtccaaacaatgtgcagtacaaggaccctagaacaatgttaaaatactatccattagaagcctacccactgccttatatttttttctcgaatacgcaggagagctgcgtatcaattcattaatagtagaggagaaatatatatacaagaaaaaggcccacacacttgcacacacccactaggaacagaactgcaagaacatttgcgcctgttacagcacagaaacgaccctacacaacaactaaaatcggtatgccgtagcctccagaagctgcagatccttggcccctgctgcactccaacacaaaatctcatcaccagccaagcacaaggcagcagccaatcgtggaggtttgcgaccaaagacattcatttctgtgtctccacaaggtccatgcccctaagattatgagagagttaaaacctttctgaatggagcttcgcatagagctggaagaactgctccaccaatccaaaaaggaggtcgcctcaggctgaggggcaagaagtgccaaacccattcggctaagaaaaaagaaccagaactgacacgaaaagagacaggagacaagaaggcgatatagcgtttcacgttcttggtcacacaacacacaagcttcagggtgtggcagattcgtcctttcaagtcgatcagatgtccaacacctattgtgggcagccaaccacatgaagaaggcacatttaggcggcacccacaatttccagatacgctcccatggttcaaagaacaacgagctctgcatgagagcatcatatgccgatcttgctgaatatgccctgacggagagaggctccaaaaatgtctatccggcatttccagcacccctggctgaagctgcaccacgtgtatagcctctcaaataccaagaaactcttgctaactctgccaagaaataactccatggatatcgtggacccatcttgaatctgttagagcatctaggaccatccttcgattagctattctggtgggaatcatactatgtataagtggtgctagttcctttaaccgctgcctcatcaaccatctatcctcccaaaacaaggtggtgctaccatcgcctagttcagtagtcacggccatgttgaaaattccttgcacctgtttatttgcttgtagcttgaaggcagcccatggtctctgtcagcctttggctttgtggaagcagcctccttagtggtttggtatgaacctgaagaccgcctatcatccacaacctattcagggattctctggagcatgcttgcgaccttcccaaccacttttggcatgttttgggcttagttgtagctggttgcctaaactgaaaggcggctctcctccgtttagcagctgtcccggaacttggctgcacaacggagcaatcagattcattctgtcctagcctctgcccctgcacctgcccatgtactggaccaatgttataaggaaaataggcctgttcctcttcttctccaagtaagctgtcatctcttttctaatctcagtggtggtgttgaaacacatgactgtcctcatatcccccggcaaggtgttctttataccttttaattccttctttgttaccatgttgcatcggatgcatgtcaccttatcctgattccctatttctgtccaataaccgtacttccagcctgggtcattgaattttgcctctggatcttgcatggggtgataaggatcaacatcaatgggagcagcagcagcggatgcggatcagacactctccatgacaatggcttactctgtacaggtggatagtaagaaaaaggcaaaggttcagctcactaattaacatcagagagtggggaacagagcagcacggaggcccattatcttgcaccggatttaaagcagagggctgctgctaggatgctggcctgcccgccctgtctggctgcgccagcgccacccctcctgcgtggccacaccccactcctccctgtctgcgcctgcatgccttgcttggcccgtgccgcccacctcgctgtgccgcccgtcctgcctggtcacgccactcctcacccctccttcgaacagaacaggcgcaccgcgcaactcagcctttgaacagagcagcctccgcccacaaccagccgccttttcattcccttattcccataatgcgacaccctagaaccgctttacggacgtctgaggtgccagagcgactagacggtaaggaagatgccttagtgtcaatcttaaggcgggtaaatcacctcattttttctgaccgccttaccgcctaagggacgccttaatagtttgcattagagattttcccttcaatgtatttgacattttttgtaggcatctttagaagaggagaaagagtcacttaaagctaaaatatcgaagctgcaaagcaacctaagaatgggccttgaaattgaacaacatttgcaaagaaatgcacgaatattagagaaaagacaggcactgtatgatggattcctgagaaatggattgtccgaacttcaaaagttctacacatgtcaaaaggctgaaattatgaaaatattggaagaagaatcgttgcggttgatgaaagttgttgcagagattcaggataaactaactgaaatttgtatcaacactgaagttagtgaccaccctgccgatgagattcaatgttgtgacagcagttgtaaagatgtgcatgttactaaagatatcagtcctagcacatgtcgtaagagtgattatcctgctgatcttaactccgtgtcgtttgatgaatctaaagcacttgcacaagccttacaggagaagatggaagcacttatgctcttctcacaggaacaagaaagatacctattagagaaacagagagacctgattgttatcgaggaactccagaagaacttatctcaagttaaagatgaaaaggtgaaggtcctgatggaattaacaaaactaaaagaacaatatttgctattgaagggctctgctgtcaaggaaggtcatgatactggtgattcatctaaactcattcctgggcatgaccaacaagggatgctgaagactatgctgaagaggacatctttaagacactggatgaggaaagaaagtaatactattggacatgggagctctgatggaaatgatcatacagtttgcaaagaacattcagtggatgttgcaagattaagagttgaaaatgctatgcttcttgaaggtgttggtactgttgagcatctcacttcttcagtgcatagactgcatattgtgcttttgaaggcttatgatgatatcaagtcagctgatcctttggagagtacctttgaagcgctcaacagtcttataactgaagcaaaccttatgaagacagctcttaatgtggttcttcctgtaagctggtccggggattcatcagatgcaattaaatatgaagctatgtgcgatccatctgattcacctaaatcgaagtctgggaaagtagacccgctctcttctgcaggcatggagatggtggagctactaatattggctgctgagattctcaaggagagctttctggtgaagaaataaggcctccatgtaaggacgagtatggctctccttgtttgtttagaagcatgcaatttaatccttaatttttttgggtgtatatacttaaactgattgctaaaagtgcactactagattatttcggatgtagagaaagagccgaatgtgcactgtaatttacggttcgctgctattgatgtgtcttgtgttggtagactaaaggatttaagagccatgtgtacaaaattcagtttacaagcaaagatcaaagaatagacatgaactagggaaagagaaagaaaaacaaactgaaagttccatacctaaaagcgtcggcactggttgtcg

SEQ ID NO: 85090 - DNA, 2523 bp, Zea Mays
gaaaaggatgaaaaacagaattctttggaactattgttaagacggattgaagggctacaatatgaaatggatgaaaaagtagatcttgttgaagtgttaactcgtcaagttgaaaatctgcagcgagagcgtgatgagctcagaaaagatattgagcaattatgtatgcaacaagctgggcctggttatgtttctgttgcaactcgaatgcttactcagaggacagcagctttggaacaggatattgagaacctccagaaaaagttaggtggttgcttaagagagaatcaaaatttgcaagaggagcttgctgaagcttatcgaattaagagccagcttgctgagttacatggtgctgcactatcaaagaacaaggatcttgaaaagcaagtaagatttttccagagcagtgtcgctcaagcgtttgctgaacgggacagttcattaatggagtgtgagaaagcaaaagagcgggaagaagcagtgtcaagaaagtttgctgattttgaggaaaggatgagagaatatcaatcagagattgatgaacagaaacacttaaatgatgacttgcagagagaactgacagaactgaaggcacatacagaattgtccttgaaagttattctaaaattctatgaccttcgttgcagagactctggatgttcttcaagccttactattgaagagaagtgttcaatccttcttggtgattctgctgacaattggagttttagctctgatggcggaacctcaactttgaagcatctttagaagaggagaaagagtcacttaaagctaaaatatcgaagctgcaaagcaacctaagaatgggccttgaaattgaacaacatttgcaaagaaatgcacgaatattagagaaaagacaggcactgtatgatggattcctgagaaatggattgtccgaacttcaaaagttctacacatgtcaaaaggctgaaattatgaaaatattggaagaagaatcgttgcggttgatgaaagttgttgcagagattcaggataaactaactgaaatttgtatcaacactgaagttagtgaccaccctgccgatgagattcaatgttgtgacagcagttgtaaagatgtgcatgttactaaagatatcagtcctagcacatgtcgtaagagtgattatcctgctgatcttaactccgtgtcgtttgatgaatctaaagcacttgcacaagccttacaggagaagatggaagcacttatgctcttctcacaggaacaagaaagatacctattagagaaacagagagacctgattgttatcgaggaactccagaagaacttatctcaagtagtacctctagaattcctacttgtcattatttttcaatcacaacgtactatatgacgagtgttctaaatagtacaagtatggtttgtcatgaagttgatacttcataccattactattttgtgcattttgctcctagctgttggaaaggttaaagatgaaaaggtgaaggtcctgatggaattaacaaaactaaaagaacaatatttgctattgaagggctctgctgtcaaggaaggtcatgatactggtgattcatctaaactcattcctgggcatgaccaacaagggatgctgaagactatgctgaagaggacatctttaagacactggatgaggaaagaaagtaatactattggacatgggagctctgatggaaatgatcatacagtttgcaaagaacattcagtggatgttgcaagattaagagttgaaaatgctatgcttcttgaaggtgttggtactgttgagcatctcacttcttcagtgcatagactgcatattgtgcttttgaaggcagggcaggattttttttggttgtattactaggtgataactttcataccaacaaacatgtcaggcttatgatgatatcaagtcagctgatcctttggagagtacctttgaagcgctcaacagtcttataactgaagcaaaccttatgaagacagctcttaatgtggttcttcctgtaagctggtccggggattcatcagatgcaattaaatatgaagctatgtgcgatccatctgattcacctaaatcgaagtctgggaaagtagacccgctctcttctgcaggcatggagatggtggagctactaatattggctgctgagattctcaaggagagctttctggtgaagaaataaggcctccatgtaaggacgagtatggctctccttgtttgtttagaagcatgcaatttaatccttaatttttttgggtgtatatacttaaactgattgctaaaagtgcactactagattatttcggatgtagagaaagagccgaatgtgcactgtaatttacggttcgctgctattgatgtgtcttgtgttggtagactaaaggatttaagagccatgtgtacaaaattcagtttacaagcaaagatcaaagaatagacatgaactagggaaagagaaagaaaaacaaactgaaagttccatacctaaaagcgtcggcactggttgtcg

SEQ ID NO: 85091 - DNA, 2363 bp, Zea Mays
gaaaaggatgaaaaacagaattctttggaactattgttaagacggattgaagggctacaatatgaaatggatgaaaaagtagatcttgttgaagtgttaactcgtcaagttgaaaatctgcagcgagagcgtgatgagctcagaaaagatattgagcaattatgtatgcaacaagctgggcctggttatgtttctgttgcaactcgaatgcttactcagaggatattgagaacctccagaaaaagttaggtggttgcttaagagagaatcaaaatttgcaagaggagcttgctgaagcttatcgaattaagagccagcttgctgagttacatggtgctgcactatcaaagaacaaggatcttgaaaagcaagtaagatttttccagagcagtgtcgctcaagcgtttgctgaacgggacagttcattaatggagtgtgagaaagcaaaagagcgggaagaagcagtgtcaagaaagtttgctgattttgaggaaaggatgagagaatatcaatcagagattgatgaacagaaacacttaaatgatgacttgcagagagaactgacagaactgaaggcacatacagaattgtccttgaaagttattctaaaattctatgaccttcgttgcagagactctggatgttcttcaagccttactattgaagagaagtgttcaatccttcttggtgattctgctgacaattggagttttagctctgatggcggaacctcaactttgaagtacattgcatctttagaagaggagaaagagtcacttaaagctaaaatatcgaagctgcaaagcaacctaagaatgggccttgaaattgaacaacatttgcaaagaaatgcacgaatattagagaaaagacaggtacaattctgaagtattgtattgttctttctcatgacctctttaattgtatactttggagtgcaggcactgtatgatggattcctgagaaatggattgtccgaacttcaaaagttctacacatgtcaaaaggctgaaattatgaaaatattggaagaagaatcgttgcggttgatgaaagttgttgcagagattcaggataaactaactgaaatttgtatcaacactgaagttagtgaccaccctgccgatgagattcaatgttgtgacagcagttgtaaagatgtgcatgttactaaagatatcagtcctagcacatgtcgtaagagtgattatcctgctgatcttaactccgtgtcgtttgatgaatctaaagcacttgcacaagccttacaggagaagatggaagcacttatgctcttctcacaggaacaagaaagatacctattagagaaacagagagacctgattgttatcgaggaactccagaagaacttatctcaagttaaagatgaaaaggtgaaggtcctgatggaattaacaaaactaaaagaacaatatttgctattgaagggctctgctgtcaaggaaggtcatgatactggtgattcatctaaactcattcctgggcatgaccaacaagggatgctgaagactatgctgaagaggacatctttaagacactggatgaggaaagaaagtaatactattggacatgggagctctgatggaaatgatcatacagtttgcaaagaacattcagtggatgttgcaagattaagagttgaaaatgctatgcttcttgaaggtgttggtactgttgagcatctcacttcttcagtgcatagactgcatattgtgcttttgaaggcttatgatgatatcaagtcagctgatcctttggagagtacctttgaagcgctcaacagtcttataactgaagcaaaccttatgaagacagctcttaatgtggttcttcctgtaagctggtccggggattcatcagatgcaattaaatatgaagctatgtgcgatccatctgattcacctaaatcgaagtctgggaaagtagacccgctctcttctgcaggcatggagatggtggagctactaatattggctgctgagattctcaaggagagctttctggtgaagaaataaggcctccatgtaaggacgagtatggctctccttgtttgtttagaagcatgcaatttaatccttaatttttttgggtgtatatacttaaactgattgctaaaagtgcactactagattatttcggatgtagagaaagagccgaatgtgcactgtaatttacggttcgctgctattgatgtgtcttgtgttggtagactaaaggatttaagagccatgtgtacaaaattcagtttacaagcaaagatcaaagaatagacatgaactagggaaagagaaagaaaaacaaactgaaagttccatacctaaaagcgtcggcactggttgtcg

SEQ ID NO: 85092 - DNA, 6982 bp, Zea Mays
gaaaaggatgaaaaacagaattctttggaactattgttaagacggattgaagggctacaatatgaaatggatgaaaaagtagatcttgttgaagtgttaactcgtcaagttgaaaatctgcagcgagagcgtgatgagctcagaaaagatattgagcaattatgtatgcaacaagctgggcctggttatgtttctgttgcaactcgaatgcttactcagagctttggaacaggatattgagaacctccagaaaaagttaggtggttgcttaagagagaatcaaaatttgcaagaggagcttgctgaagcttatcgaattaagagccagcttgctgagttacatggtgctgcactatcaaagaacaaggatcttgaaaagcaagtaagatttttccagagcagtgtcgctcaagcgtttgctgaacgggacagttcattaatggagtgtgagaaagcaaaagagcgggaagaagcagtgtcaagaaagtttgctgattttgaggaaaggatgagagaatatcaatcagagattgatgaacagaaacacttaaatgatgacttgcagagagaactgacagaactgaaggcacatacagaattgtccttgaaagttattctaaaattctatgaccttcgttgcagagactctggatgttcttcaagccttactattgaagagaagtgttcaatccttcttggtgattctgctgacaattggagttttagctctgatggcggaacctcaactttgaagacttatgcagttatgctttgttcccagtttctcattcaacatactgctcaatacatggatagaaaacatccgtattattgatggaagtcataaatttagtgctaatcttctcatttgtcctattcagtaagttatagttcagtatgattgtcatgttctatttgacctaattgtgtcatgtacttgagtaatacaacatgacttgcaggccctaatttgttttcaagaactgtttattgattttttttccagttgatttggtcctaaaccaaagtgctttgcatagttaaggcgagtgtttgacccccgccttaccttcgaagcggtaaagtgtaaggcgagacaacaccttaatcatatataaatataggaaaatatagaaaattagtcttgaatagaagtacgaaagtaccaaacagaagtctataagttcaatataagcaaacataataggctaaaagtccaacataagtaggttctgatactctcatctctcaagttctgatacatcatcaaactcatcaaaaatgggaggattactgtcttcttcgcgttctctcccaccggatatatcatcatcttcactcacattcaagtcatctttcgcatgattggttgccgcgtcctacccgcccagactcgcggcatgcgttggccgggcgcgagcgagtgtttggttgccgcacccacgccctccggactgcatgtgcgcatgcagtttagtgctttttttcgccgttctgcctgcaagcgtggagaagccggaaattaccttcgctgggggaccaggcccgcacgaggcaggcacgtgacagaccggcaaccaatcagcccccttgtggatctggctcaaagtcttcgtccatggcacctccctcttcttcttacggcctcattcttgcatgctttctctatgtaaggccagaactttgtctctgactagcttgccttggaaggttgtgccctcgaagcgactccgatgctctagtagcaacatcaacatgatccatcatgtgaggtcaacaatattatcattgtccctgctggggtgtaccactgatgagtatccactcgttgtcccaatcaaaatcctcaataattaatgggtcatagcttgtgccggctttctccctcatttgaaacctacttcgcatcttttgattgtatgaaacatagaccaagtcattcaaccttttatgcaacaacaagtttctcttctttgtatgtatagtaagtaacaaacccaacctaaataagtagcaagaaatagattgaagctagtaaacataagcgaagtagcaaaaaatggacttacaaattcaaatgtgcttcaattcctctcacaaccggatgaggaagcacaaagtctaaccagtaaccacacgcttggcaaacctttgaaattcatatgctcggccgccatatgaacgttatcaatcaactacgcagatgcaaacagcgacacggtcacacacataggtatacaacagcaggaaagaataaaaaaagatgtgctgaaattagcaatcagccaagcatatagtactttagagggctctttgcttgaatgttttcaagtgccaacttgtttgaaaaatagaccctctatgatcttcataatgcatggcatgctcattaatcttcgaccgtatttcttcattggactccattcttgctagcacataattgaaacaactcctcagctttacaacatatctatcatctccctttggatggcaaagaattttcccaggttcaaataaagtgcagcaccatacgatggatggtccatttgtttcatccaacgaccctcaataatgtccataattttttcagcaatgcttgcttgttttgtgtagggaagctaagccttttctcttttgcaacatccattagtgctgcaatttatgtcatgtatgttttttcatctccatcaactgccctaagcactataagaagtgccaaagctctgaggcaatcttcaactgaagaccaaaaagtcttagctagaataatattacaccccccttccagcctctgtctttgccaacttgttgcagttccatgcatctcacaaaaagtgctctcaaggcatcttgatgtttatgtagacttttcaaagtaaggaatgtggcaaaacgagtggctgctggtcttaaaggatccccctcctatcttctccctcattgcacttagaattcctccatgcctataaataaaagtggtgactcttttggcttgtgcaattagtctttcaaatatccaatatcctccaccatgaggtccaaacaatgtgcagtacaaggaccctagaacaatgttaaaatactatccattagaagcctacccactgccttatatttttttctcgaatacgcaggagagctgcgtatcaattcattaatagtagaggagaaatatatatacaagaaaaaggcccacacacttgcacacacccactaggaacagaactgcaagaacatttgcgcctgttacagcacagaaacgaccctacacaacaactaaaatcggtatgccgtagcctccagaagctgcagatccttggcccctgctgcactccaacacaaaatctcatcaccagccaagcacaaggcagcagccaatcgtggaggtttgcgaccaaagacattcatttctgtgtctccacaaggtccatgcccctaagattatgagagagttaaaacctttctgaatggagcttcgcatagagctggaagaactgctccaccaatccaaaaaggaggtcgcctcaggctgaggggcaagaagtgccaaacccattcggctaagaaaaaagaaccagaactgacacgaaaagagacaggagacaagaaggcgatatagcgtttcacgttcttggtcacacaacacacaagcttcagggtgtggcagattcgtcctttcaagtcgatcagatgtccaacacctattgtgggcagccaaccacatgaagaaggcacatttaggcggcacccacaatttccagatacgctcccatggttcaaagaacaacgagctctgcatgagagcatcatatgccgatcttgctgaatatgccctgacggagagaggctccaaaaatgtctatccggcatttccagcacccctggctgaagctgcaccacgtgtatagcctctcaaataccaagaaactcttgctaactctgccaagaaataactccatggatatcgtggacccatcttgaatctgttagagcatctaggaccatccttcgattagctattctggtgggaatcatactatgtataagtggtgctagttcctttaaccgctgcctcatcaaccatctatcctcccaaaacaaggtggtgctaccatcgcctagttcagtagtcacggccatgttgaaaattccttgcacctgtttatttgcttgtagcttgaaggcagcccatggtctctgtcagcctttggctttgtggaagcagcctccttagtggtttggtatgaacctgaagaccgcctatcatccacaacctattcagggattctctggagcatgcttgcgaccttcccaaccacttttggcatgttttgggcttagttgtagctggttgcctaaactgaaaggcggctctcctccgtttagcagctgtcccggaacttggctgcacaacggagcaatcagattcattctgtcctagcctctgcccctgcacctgcccatgtactggaccaatgttataaggaaaataggcctgttcctcttcttctccaagtaagctgtcatctcttttctaatctcagtggtggtgttgaaacacatgactgtcctcatatcccccggcaaggtgttctttataccttttaattccttctttgttaccatgttgcatcggatgcatgtcaccttatcctgattccctatttctgtccaataaccgtacttccagcctgggtcattgaattttgcctctggatcttgcatggggtgataaggatcaacatcaatgggagcagcagcagcggatgcggatcagacactctccatgacaatggcttactctgtacaggtggatagtaagaaaaaggcaaaggttcagctcactaattaacatcagagagtggggaacagagcagcacggaggcccattatcttgcaccggatttaaagcagagggctgctgctaggatgctggcctgcccgccctgtctggctgcgccagcgccacccctcctgcgtggccacaccccactcctccctgtctgcgcctgcatgccttgcttggcccgtgccgcccacctcgctgtgccgcccgtcctgcctggtcacgccactcctcacccctccttcgaacagaacaggcgcaccgcgcaactcagcctttgaacagagcagcctccgcccacaaccagccgccttttcattcccttattcccataatgcgacaccctagaaccgctttacggacgtctgaggtgccagagcgactagacggtaaggaagatgccttagtgtcaatcttaaggcgggtaaatcacctcattttttctgaccgccttaccgcctaagggacgccttaatagtttgcattagagattttcccttcaatgtatttgacattttttgtaggcatctttagaagaggagaaagagtcacttaaagctaaaatatcgaagctgcaaagcaacctaagaatgggccttgaaattgaacaacatttgcaaagaaatgcacgaatattagagaaaagacaggcactgtatgatggattcctgagaaatggattgtccgaacttcaaaagttctacacatgtcaaaaggctgaaattatgaaaatattggaagaagaatcgttgcggttgatgaaagttgttgcagagattcaggataaactaactgaaatttgtatcaacactgaagttagtgaccaccctgccgatgagattcaatgttgtgacagcagttgtaaagatgtgcatgttactaaagatatcagtcctagcacatgtcgtaagagtgattatcctgctgatcttaactccgtgtcgtttgatgaatctaaagcacttgcacaagccttacaggagaagatggaagcacttatgctcttctcacaggaacaagaaagatacctattagagaaacagagagacctgattgttatcgaggaactccagaagaacttatctcaagttaaagatgaaaaggtgaaggtcctgatggaattaacaaaactaaaagaacaatatttgctattgaagggctctgctgtcaaggaaggtcatgatactggtgattcatctaaactcattcctgggcatgaccaacaagggatgctgaagactatgctgaagaggacatctttaagacactggatgaggaaagaaagtaatactattggacatgggagctctgatggaaatgatcatacagtttgcaaagaacattcagtggatgttgcaagattaagagttgaaaatgctatgcttcttgaaggtgttggtactgttgagcatctcacttcttcagtgcatagactgcatattgtgcttttgaaggcagggcaggattttttttggttgtattactaggtgataactttcataccaacaaacatgtcaggcttatgatgatatcaagtcagctgatcctttggagagtacctttgaagcgctcaacagtcttataactgaagcaaaccttatgaagacagctcttaatgtggttcttcctgtaagctggtccggggattcatcagatgcaattaaatatgaagctatgtgcgatccatctgattcacctaaatcgaagtctgggaaagtagacccgctctcttctgcaggcatggagatggtggagctactaatattggctgctgagattctcaaggagagctttctggtgaagaaataaggcctccatgtaaggacgagtatggctctccttgtttgtttagaagcatgcaatttaatccttaatttttttgggtgtatatacttaaactgattgctaaaagtgcactactagattatttcggatgtagagaaagagccgaatgtgcactgtaatttacggttcgctgctattgatgtgtcttgtgttggtagactaaaggatttaagagccatgtgtacaaaattcagtttacaagcaaagatcaaagaatagacatgaactagggaaagagaaagaaaaacaaactgaaagttccatacctaaaagcgtcggcactggttgtcg

SEQ ID NO: 85093 - DNA, 2466 bp, Zea Mays
gaaaaggatgaaaaacagaattctttggaactattgttaagacggattgaagggctacaatatgaaatggatgaaaaagtagatcttgttgaagtgttaactcgtcaagttgaaaatctgcagcgagagcgtgatgagctcagaaaagatattgagcaattatgtatgcaacaagctgggcctggttatgtttctgttgcaactcgaatgcttactcagaggacagcagctttggaacaggatattgagaacctccagaaaaagttaggtggttgcttaagagagaatcaaaatttgcaagaggagcttgctgaagcttatcgaattaagagccagcttgctgagttacatggtgctgcactatcaaagaacaaggatcttgaaaagcaagtaagatttttccagagcagtgtcgctcaagcgtttgctgaacgggacagttcattaatggagtgtgagaaagcaaaagagcgggaagaagcagtgtcaagaaagtttgctgattttgaggaaaggatgagagaatatcaatcagagattgatgaacagaaacacttaaatgatgacttgcagagagaactgacagaactgaaggcacatacagaattgtccttgaaagttattctaaaattctatgaccttcgttgcagagactctggatgttcttcaagccttactattgaagagaagtgttcaatccttcttggtgattctgctgacaattggagttttagctctgatggcggaacctcaactttgaagtacattgcatctttagaagaggagaaagagtcacttaaagctaaaatatcgaagctgcaaagcaacctaagaatgggccttgaaattgaacaacatttgcaaagaaatgcacgaatattagagaaaagacaggcactgtatgatggattcctgagaaatggattgtccgaacttcaaaagttctacacatgtcaaaaggctgaaattatgaaaatattggaagaagaatcgttgcggttgatgaaagttgttgcagagattcaggataaactaactgaaatttgtatcaacactgaagttagtgaccaccctgccgatgagattcaatgttgtgacagcagttgtaaagatgtgcatgttactaaagatatcagtcctagcacatgtcgtaagagtgattatcctgctgatcttaactccgtgtcgtttgatgaatctaaagcacttgcacaagccttacaggagaagatggaagcacttatgctcttctcacaggaacaagaaagatacctattagagaaacagagagacctgattgttatcgaggaactccagaagaacttatctcaagtagtacctctagaattcctacttgtcattatttttcaatcacaacgtactatatgacgagtgttctaaatagtacaagtatggtttgtcatgaagttgatacttcataccattactattttgtgcattttgctcctagctgttggaaaggttaaagatgaaaaggtgaaggtcctgatggaattaacaaaactaaaagaacaatatttgctattgaagggctctgctgtcaaggaaggtcatgatactggtgattcatctaaactcattcctgggcatgaccaacaagggatgctgaagactatgctgaagaggacatctttaagacactggatgaggaaagaaagtaatactattggacatgggagctctgatggaaatgatcatacagtttgcaaagaacattcagtggatgttgcaagattaagagttgaaaatgctatgcttcttgaaggtgttggtactgttgagcatctcacttcttcagtgcatagactgcatattgtgcttttgaaggcttatgatgatatcaagtcagctgatcctttggagagtacctttgaagcgctcaacagtcttataactgaagcaaaccttatgaagacagctcttaatgtggttcttcctgtaagctggtccggggattcatcagatgcaattaaatatgaagctatgtgcgatccatctgattcacctaaatcgaagtctgggaaagtagacccgctctcttctgcaggcatggagatggtggagctactaatattggctgctgagattctcaaggagagctttctggtgaagaaataaggcctccatgtaaggacgagtatggctctccttgtttgtttagaagcatgcaatttaatccttaatttttttgggtgtatatacttaaactgattgctaaaagtgcactactagattatttcggatgtagagaaagagccgaatgtgcactgtaatttacggttcgctgctattgatgtgtcttgtgttggtagactaaaggatttaagagccatgtgtacaaaattcagtttacaagcaaagatcaaagaatagacatgaactagggaaagagaaagaaaaacaaactgaaagttccatacctaaaagcgtcggcactggttgtcg

SEQ ID NO: 85094 - DNA, 7578 bp, Zea Mays
gaaatttcttcattgcaagcgtctactttctctctctctctctctctctctcgttgcccccgcatactctctgtcttgggcgctctctgtctctggtggcggcgagtagcatactctctgtcttgggcgctctgtctctggtggcgacgactcgccgccgccgccgccgcgataggccacgcctcctggtcgccatttccggatccttaccgacgacgcgcacccaccaccccatctttttccgttcctgctgtgcgacacacaaaccctagctgtatcgggtgggctgtgaaatggaccaagctgcagattcctctgaactgcttcgtcgcatcgaggagctccagcgcgaaaaggatgaaaaacagaattctttggaactattgttaagacggattgaagggctacaatatgaaatggatgaaaaagtagatcttgttgaagtgttaactcgtcaagttgaaaatctgcagcgagagcgtgatgagctcagaaaagatattgagcaattatgtatgcaacaagctgggcctggttatgtttctgttgcaactcgaatgcttactcagaggacagcagctttggaacaggatattgagaacctccagaaaaagttaggtggttgcttaagagagaatcaaaatttgcaagaggagcttgctgaagcttatcgaattaagagccagcttgctgagttacatggtgctgcactatcaaagaacaaggatcttgaaaagcaagtaagatttttccagagcagtgtcgctcaagcgtttgctgaacgggacagttcattaatggagtgtgagaaagcaaaagagcgggaagaagcagtgtcaagaaagtttgctgattttgaggaaaggatgagagaatatcaatcagagattgatgaacagaaacacttaaatgatgacttgcagagagaactgacagaactgaaggcacatacagaattgtccttgaaagttattctaaaattctatgaccttcgttgcagagactctggatgttcttcaagccttactattgaagagaagtgttcaatccttcttggtgattctgctgacaattggagttttagctctgatggcggaacctcaactttgaagtacattgtaaaccacccttatccattataaagaatgattcatatttaagtatgcgatctgtttttttttttgcatttgtattgcaagatacaaattctctgtggcactaaacatcatctggcgcagagccagaaaattatagatatggggacgaaatgctaaaaaataaattattagaaggcaaaatcagcattttcattgaattttatgtgcataagaggaacttatctatcataacagagtgcttgatcctccctccttccgcccctgaacatgttaatgcattgttggctaattggcttgttcagttttattctgggaactaaatgaatgcagaaggtaggaaatgatgaaactttgctggcatctgtttcaggacttatgcagttatgctttgttcccagtttctcattcaacatactgctcaatacatggatagaaaacatccgtattattgatggaagtcataaatttagtgctaatcttctcatttgtcctattcagtaagttatagttcagtatgattgtcatgttctatttgacctaattgtgtcatgtacttgagtaatacaacatgacttgcaggccctaatttgttttcaagaactgtttattgattttttttccagttgatttggtcctaaaccaaagtgctttgcatagttaaggcgagtgtttgacccccgccttaccttcgaagcggtaaagtgtaaggcgagacaacaccttaatcatatataaatataggaaaatatagaaaattagtcttgaatagaagtacgaaagtaccaaacagaagtctataagttcaatataagcaaacataataggctaaaagtccaacataagtaggttctgatactctcatctctcaagttctgatacatcatcaaactcatcaaaaatgggaggattactgtcttcttcgcgttctctcccaccggatatatcatcatcttcactcacattcaagtcatctttcgcatgattggttgccgcgtcctacccgcccagactcgcggcatgcgttggccgggcgcgagcgagtgtttggttgccgcacccacgccctccggactgcatgtgcgcatgcagtttagtgctttttttcgccgttctgcctgcaagcgtggagaagccggaaattaccttcgctgggggaccaggcccgcacgaggcaggcacgtgacagaccggcaaccaatcagcccccttgtggatctggctcaaagtcttcgtccatggcacctccctcttcttcttacggcctcattcttgcatgctttctctatgtaaggccagaactttgtctctgactagcttgccttggaaggttgtgccctcgaagcgactccgatgctctagtagcaacatcaacatgatccatcatgtgaggtcaacaatattatcattgtccctgctggggtgtaccactgatgagtatccactcgttgtcccaatcaaaatcctcaataattaatgggtcatagcttgtgccggctttctccctcatttgaaacctacttcgcatcttttgattgtatgaaacatagaccaagtcattcaaccttttatgcaacaacaagtttctcttctttgtatgtatagtaagtaacaaacccaacctaaataagtagcaagaaatagattgaagctagtaaacataagcgaagtagcaaaaaatggacttacaaattcaaatgtgcttcaattcctctcacaaccggatgaggaagcacaaagtctaaccagtaaccacacgcttggcaaacctttgaaattcatatgctcggccgccatatgaacgttatcaatcaactacgcagatgcaaacagcgacacggtcacacacataggtatacaacagcaggaaagaataaaaaaagatgtgctgaaattagcaatcagccaagcatatagtactttagagggctctttgcttgaatgttttcaagtgccaacttgtttgaaaaatagaccctctatgatcttcataatgcatggcatgctcattaatcttcgaccgtatttcttcattggactccattcttgctagcacataattgaaacaactcctcagctttacaacatatctatcatctccctttggatggcaaagaattttcccaggttcaaataaagtgcagcaccatacgatggatggtccatttgtttcatccaacgaccctcaataatgtccataattttttcagcaatgcttgcttgttttgtgtagggaagctaagccttttctcttttgcaacatccattagtgctgcaatttatgtcatgtatgttttttcatctccatcaactgccctaagcactataagaagtgccaaagctctgaggcaatcttcaactgaagaccaaaaagtcttagctagaataatattacaccccccttccagcctctgtctttgccaacttgttgcagttccatgcatctcacaaaaagtgctctcaaggcatcttgatgtttatgtagacttttcaaagtaaggaatgtggcaaaacgagtggctgctggtcttaaaggatccccctcctatcttctccctcattgcacttagaattcctccatgcctataaataaaagtggtgactcttttggcttgtgcaattagtctttcaaatatccaatatcctccaccatgaggtccaaacaatgtgcagtacaaggaccctagaacaatgttaaaatactatccattagaagcctacccactgccttatatttttttctcgaatacgcaggagagctgcgtatcaattcattaatagtagaggagaaatatatatacaagaaaaaggcccacacacttgcacacacccactaggaacagaactgcaagaacatttgcgcctgttacagcacagaaacgaccctacacaacaactaaaatcggtatgccgtagcctccagaagctgcagatccttggcccctgctgcactccaacacaaaatctcatcaccagccaagcacaaggcagcagccaatcgtggaggtttgcgaccaaagacattcatttctgtgtctccacaaggtccatgcccctaagattatgagagagttaaaacctttctgaatggagcttcgcatagagctggaagaactgctccaccaatccaaaaaggaggtcgcctcaggctgaggggcaagaagtgccaaacccattcggctaagaaaaaagaaccagaactgacacgaaaagagacaggagacaagaaggcgatatagcgtttcacgttcttggtcacacaacacacaagcttcagggtgtggcagattcgtcctttcaagtcgatcagatgtccaacacctattgtgggcagccaaccacatgaagaaggcacatttaggcggcacccacaatttccagatacgctcccatggttcaaagaacaacgagctctgcatgagagcatcatatgccgatcttgctgaatatgccctgacggagagaggctccaaaaatgtctatccggcatttccagcacccctggctgaagctgcaccacgtgtatagcctctcaaataccaagaaactcttgctaactctgccaagaaataactccatggatatcgtggacccatcttgaatctgttagagcatctaggaccatccttcgattagctattctggtgggaatcatactatgtataagtggtgctagttcctttaaccgctgcctcatcaaccatctatcctcccaaaacaaggtggtgctaccatcgcctagttcagtagtcacggccatgttgaaaattccttgcacctgtttatttgcttgtagcttgaaggcagcccatggtctctgtcagcctttggctttgtggaagcagcctccttagtggtttggtatgaacctgaagaccgcctatcatccacaacctattcagggattctctggagcatgcttgcgaccttcccaaccacttttggcatgttttgggcttagttgtagctggttgcctaaactgaaaggcggctctcctccgtttagcagctgtcccggaacttggctgcacaacggagcaatcagattcattctgtcctagcctctgcccctgcacctgcccatgtactggaccaatgttataaggaaaataggcctgttcctcttcttctccaagtaagctgtcatctcttttctaatctcagtggtggtgttgaaacacatgactgtcctcatatcccccggcaaggtgttctttataccttttaattccttctttgttaccatgttgcatcggatgcatgtcaccttatcctgattccctatttctgtccaataaccgtacttccagcctgggtcattgaattttgcctctggatcttgcatggggtgataaggatcaacatcaatgggagcagcagcagcggatgcggatcagacactctccatgacaatggcttactctgtacaggtggatagtaagaaaaaggcaaaggttcagctcactaattaacatcagagagtggggaacagagcagcacggaggcccattatcttgcaccggatttaaagcagagggctgctgctaggatgctggcctgcccgccctgtctggctgcgccagcgccacccctcctgcgtggccacaccccactcctccctgtctgcgcctgcatgccttgcttggcccgtgccgcccacctcgctgtgccgcccgtcctgcctggtcacgccactcctcacccctccttcgaacagaacaggcgcaccgcgcaactcagcctttgaacagagcagcctccgcccacaaccagccgccttttcattcccttattcccataatgcgacaccctagaaccgctttacggacgtctgaggtgccagagcgactagacggtaaggaagatgccttagtgtcaatcttaaggcgggtaaatcacctcattttttctgaccgccttaccgcctaagggacgccttaatagtttgcattagagattttcccttcaatgtatttgacattttttgtaggcatctttagaagaggagaaagagtcacttaaagctaaaatatcgaagctgcaaagcaacctaagaatgggccttgaaattgaacaacatttgcaaagaaatgcacgaatattagagaaaagacaggcactgtatgatggattcctgagaaatggattgtccgaacttcaaaagttctacacatgtcaaaaggctgaaattatgaaaatattggaagaagaatcgttgcggttgatgaaagttgttgcagagattcaggataaactaactgaaatttgtatcaacactgaagttagtgaccaccctgccgatgagattcaatgttgtgacagcagttgtaaagatgtgcatgttactaaagatatcagtcctagcacatgtcgtaagatggaagcacttatgctcttctcacaggaacaagaaagatacctattagagaaacagagagacctgattgttatcgaggaactccagaagaacttatctcaagttaaagatgaaaaggtgaaggtcctgatggaattaacaaaactaaaagaacaatatttgctattgaagggctctgctgtcaaggaaggtcatgatactggtgattcatctaaactcattcctgggcatgaccaacaagggatgctgaagactatgctgaagaggacatctttaagacactggatgaggaaagaaagtaatactattggacatgggagctctgatggaaatgatcatacagtttgcaaagaacattcagtggatgttgcaagattaagagttgaaaatgctatgcttcttgaaggtgttggtactgttgagcatctcacttcttcagtgcatagactgcatattgtgcttttgaaggcttatgatgatatcaagtcagctgatcctttggagagtacctttgaagcgctcaacagtcttataactgaagcaaaccttatgaagacagctcttaatgtggttcttcctgtaagctggtccggggattcatcagatgcaattaaatatgaagctatgtgcgatccatctgattcacctaaatcgaagtctgggaaagtagacccgctctcttctgcaggcatggagatggtggagctactaatattggctgctgagattctcaaggagagctttctggtgaagaaataaggcctccatgtaaggacgagtatggctctccttgtttgtttagaagcatgcaatttaatccttaatttttttgggtgtatatacttaaactgattgctaaaagtgcactactagattatttcggatgtagagaaagagccgaatgtgcactgtaatttacggttcgctgctattgatgtgtcttgtgttggtagactaaaggatttaagagccatgtgtacaaaattcagtttacaagcaaagatcaaagaatagacatgaactagggaaagagaaagaaaaacaaactgaaagttccatacctaaaagcgtcggcactggttgtcg

SEQ ID NO: 85095 - DNA, 5405 bp, Zea Mays
gaaatttcttcattgcaagcgtctactttctctctctctctctctctctctcgttgcccccgcatactctctgtcttgggcgctctctgtctctggtggcggcgagtagcatactctctgtcttgggcgctctgtctctggtggcgacgactcgccgccgccgccgccgcgataggccacgcctcctggtcgccatttccggatccttaccgacgacgcgcacccaccaccccatctttttccgttcctgctgtgcgacacacaaaccctagctgtatcgggtgggctgtgaaatggaccaagctgcagattcctctgaactgcttcgtcgcatcgaggagctccagcgcgaaaaggatgaaaaacagaattctttggaactattgttaagacggattgaagggctacaatatgaaatggatgaaaaagtagatcttgttgaagtgttaactcgtcaagttgaaaatctgcagcgagagcgtgatgagctcagaaaagatattgagcaattatgtatgcaacaagctgggcctggttatgtttctgttgcaactcgaatgcttactcagaggacagcagctttggaacaggatattgagaacctccagaaaaagttaggtggttgcttaagagagaatcaaaatttgcaagaggagcttgctgaagcttatcgaattaagagccagcttgctgagttacatggtgctgcactatcaaagaacaaggatcttgaaaagcaagtaagatttttccagagcagtgtcgctcaagcgtttgctgaacgggacagttcattaatggagtgtgagaaagcaaaagagcgggaagaagcagtgtcaagaaagtttgctgattttgaggaaaggatgagagaatatcaatcagagattgatgaacagaaacacttaaatgatgacttgcagagagaactgacagaactgaaggcacatacagaattgtccttgaaagttattctaaaattctatgaccttcgttgcagagactctggatgttcttcaagccttactattgaagagaagtgttcaatccttcttggtgattctgctgacaattggagttttagctctgatggcggaacctcaactttgaagtacattgcatcttgatgtttatgtagacttttcaaagtaaggaatgtggcaaaacgagtggctgctggtcttaaaggatccccctcctatcttctccctcattgcacttagaattcctccatgcctataaataaaagtggtgactcttttggcttgtgcaattagtctttcaaatatccaatatcctccaccatgaggtccaaacaatgtgcagtacaaggaccctagaacaatgttaaaatactatccattagaagcctacccactgccttatatttttttctcgaatacgcaggagagctgcgtatcaattcattaatagtagaggagaaatatatatacaagaaaaaggcccacacacttgcacacacccactaggaacagaactgcaagaacatttgcgcctgttacagcacagaaacgaccctacacaacaactaaaatcggtatgccgtagcctccagaagctgcagatccttggcccctgctgcactccaacacaaaatctcatcaccagccaagcacaaggcagcagccaatcgtggaggtttgcgaccaaagacattcatttctgtgtctccacaaggtccatgcccctaagattatgagagagttaaaacctttctgaatggagcttcgcatagagctggaagaactgctccaccaatccaaaaaggaggtcgcctcaggctgaggggcaagaagtgccaaacccattcggctaagaaaaaagaaccagaactgacacgaaaagagacaggagacaagaaggcgatatagcgtttcacgttcttggtcacacaacacacaagcttcagggtgtggcagattcgtcctttcaagtcgatcagatgtccaacacctattgtgggcagccaaccacatgaagaaggcacatttaggcggcacccacaatttccagatacgctcccatggttcaaagaacaacgagctctgcatgagagcatcatatgccgatcttgctgaatatgccctgacggagagaggctccaaaaatgtctatccggcatttccagcacccctggctgaagctgcaccacgtgtatagcctctcaaataccaagaaactcttgctaactctgccaagaaataactccatggatatcgtggacccatcttgaatctgttagagcatctaggaccatccttcgattagctattctggtgggaatcatactatgtataagtggtgctagttcctttaaccgctgcctcatcaaccatctatcctcccaaaacaaggtggtgctaccatcgcctagttcagtagtcacggccatgttgaaaattccttgcacctgtttatttgcttgtagcttgaaggcagcccatggtctctgtcagcctttggctttgtggaagcagcctccttagtggtttggtatgaacctgaagaccgcctatcatccacaacctattcagggattctctggagcatgcttgcgaccttcccaaccacttttggcatgttttgggcttagttgtagctggttgcctaaactgaaaggcggctctcctccgtttagcagctgtcccggaacttggctgcacaacggagcaatcagattcattctgtcctagcctctgcccctgcacctgcccatgtactggaccaatgttataaggaaaataggcctgttcctcttcttctccaagtaagctgtcatctcttttctaatctcagtggtggtgttgaaacacatgactgtcctcatatcccccggcaaggtgttctttataccttttaattccttctttgttaccatgttgcatcggatgcatgtcaccttatcctgattccctatttctgtccaataaccgtacttccagcctgggtcattgaattttgcctctggatcttgcatggggtgataaggatcaacatcaatgggagcagcagcagcggatgcggatcagacactctccatgacaatggcttactctgtacaggtggatagtaagaaaaaggcaaaggttcagctcactaattaacatcagagagtggggaacagagcagcacggaggcccattatcttgcaccggatttaaagcagagggctgctgctaggatgctggcctgcccgccctgtctggctgcgccagcgccacccctcctgcgtggccacaccccactcctccctgtctgcgcctgcatgccttgcttggcccgtgccgcccacctcgctgtgccgcccgtcctgcctggtcacgccactcctcacccctccttcgaacagaacaggcgcaccgcgcaactcagcctttgaacagagcagcctccgcccacaaccagccgccttttcattcccttattcccataatgcgacaccctagaaccgctttacggacgtctgaggtgccagagcgactagacggtaaggaagatgccttagtgtcaatcttaaggcgggtaaatcacctcattttttctgaccgccttaccgcctaagggacgccttaatagtttgcattagagattttcccttcaatgtatttgacattttttgtaggcatctttagaagaggagaaagagtcacttaaagctaaaatatcgaagctgcaaagcaacctaagaatgggccttgaaattgaacaacatttgcaaagaaatgcacgaatattagagaaaagacaggcactgtatgatggattcctgagaaatggattgtccgaacttcaaaagttctacacatgtcaaaaggctgaaattatgaaaatattggaagaagaatcgttgcggttgatgaaagttgttgcagagattcaggataaactaactgaaatttgtatcaacactgaagttagtgaccaccctgccgatgagattcaatgttgtgacagcagttgtaaagatgtgcatgttactaaagatatcagtcctagcacatgtcgtaagagtgattatcctgctgatcttaactccgtgtcgtttgatgaatctaaagcacttgcacaagccttacaggagaagatggaagcacttatgctcttctcacaggaacaagaaagatacctattagagaaacagagagacctgattgttatcgaggaactccagaagaacttatctcaagtagtacctctagaattcctacttgtcattatttttcaatcacaacgtactatatgacgagtgttctaaatagtacaagtatggtttgtcatgaagttgatacttcataccattactattttgtgcattttgctcctagctgttggaaaggttaaagatgaaaaggtgaaggtcctgatggaattaacaaaactaaaagaacaatatttgctattgaagggctctgctgtcaaggaaggtcatgatactggtgattcatctaaactcattcctgggcatgaccaacaagggatgctgaagactatgctgaagaggacatctttaagacactggatgaggaaagaaagtaatactattggacatgggagctctgatggaaatgatcatacagtttgcaaagaacattcagtggatgttgcaagattaagagttgaaaatgctatgcttcttgaaggtgttggtactgttgagcatctcacttcttcagtgcatagactgcatattgtgcttttgaaggcagggcaggattttttttggttgtattactaggtgataactttcataccaacaaacatgtcaggcttatgatgatatcaagtcagctgatcctttggagagtacctttgaagcgctcaacagtcttataactgaagcaaaccttatgaagacagctcttaatgtggttcttcctgtaagctggtccggggattcatcagatgcaattaaatatgaagctatgtgcgatccatctgattcacctaaatcgaagtctgggaaagtagacccgctctcttctgcaggcatggagatggtggagctactaatattggctgctgagattctcaaggagagctttctggtgaagaaataaggcctccatgtaaggacgagtatggctctccttgtttgtttagaagcatgcaatttaatccttaatttttttgggtgtatatacttaaactgattgctaaaagtgcactactagattatttcggatgtagagaaagagccgaatgtgcactgtaatttacggttcgctgctattgatgtgtcttgtgttggtagactaaaggatttaagagccatgtgtacaaaattcagtttacaagcaaagatcaaagaatagacatgaactagggaaagagaaagaaaaacaaactgaaagttccatacctaaaagcgtcggcactggttgtcg

SEQ ID NO: 85096 - DNA, 2581 bp, Zea Mays
gaaatttcttcattgcaagcgtctactttctctctctctctctctctctctcgttgcccccgcatactctctgtcttgggcgctctctgtctctggtggcggcgagtagcatactctctgtcttgggcgctctgtctctggtggcgacgactcgccgccgccgccgccgcgataggccacgcctcctggtcgccatttccggatccttaccgacgacgcgcacccaccaccccatctttttccgttcctgctgtgcgacacacaaaccctagcaaaaggatgaaaaacagaattctttggaactattgttaagacggattgaagggctacaatatgaaatggatgaaaaagtagatcttgttgaagtgttaactcgtcaagttgaaaatctgcagcgagagcgtgatgagctcagaaaagatattgagcaattatgtatgcaacaagctgggcctggttatgtttctgttgcaactcgaatgcttactcagaggacagcagctttggaacaggatattgagaacctccagaaaaagttaggtggttgcttaagagagaatcaaaatttgcaagaggagcttgctgaagcttatcgaattaagagccagcttgctgagttacatggtgctgcactatcaaagaacaaggatcttgaaaagcaagtaagatttttccagagcagtgtcgctcaagcgtttgctgaacgggacagttcattaatggagtgtgagaaagcaaaagagcgggaagaagcagtgtcaagaaagtttgctgattttgaggaaaggatgagagaatatcaatcagagattgatgaacagaaacacttaaatgatgacttgcagagagaactgacagaactgaaggcacatacagaattgtccttgaaagttattctaaaattctatgaccttcgttgcagagactctggatgttcttcaagccttactattgaagagaagtgttcaatccttcttggtgattctgctgacaattggagttttagctctgatggcggaacctcaactttgaagcatctttagaagaggagaaagagtcacttaaagctaaaatatcgaagctgcaaagcaacctaagaatgggccttgaaattgaacaacatttgcaaagaaatgcacgaatattagagaaaagacaggcactgtatgatggattcctgagaaatggattgtccgaacttcaaaagttctacacatgtcaaaaggctgaaattatgaaaatattggaagaagaatcgttgcggttgatgaaagttgttgcagagattcaggataaactaactgaaatttgtatcaacactgaagttagtgaccaccctgccgatgagattcaatgttgtgacagcagttgtaaagatgtgcatgttactaaagatatcagtcctagcacatgtcgtaagagtgattatcctgctgatcttaactccgtgtcgtttgatgaatctaaagcacttgcacaagccttacaggagaagatggaagcacttatgctcttctcacaggaacaagaaagatacctattagagaaacagagagacctgattgttatcgaggaactccagaagaacttatctcaagttaaagatgaaaaggtgaaggtcctgatggaattaacaaaactaaaagaacaatatttgctattgaagggctctgctgtcaaggaaggtcatgatactggtgattcatctaaactcattcctgggcatgaccaacaagggatgctgaagactatgctgaagaggacatctttaagacactggatgaggaaagaaagtaatactattggacatgggagctctgatggaaatgatcatacagtttgcaaagaacattcagtggatgttgcaagattaagagttgaaaatgctatgcttcttgaaggtgttggtactgttgagcatctcacttcttcagtgcatagactgcatattgtgcttttgaaggcttatgatgatatcaagtcagctgatcctttggagagtacctttgaagcgctcaacagtcttataactgaagcaaaccttatgaagacagctcttaatgtggttcttcctgtaagctggtccggggattcatcagatgcaattaaatatgaagctatgtgcgatccatctgattcacctaaatcgaagtctgggaaagtagacccgctctcttctgcaggcatggagatggtggagctactaatattggctgctgagattctcaaggagagctttctggtgaagaaataaggcctccatgtaaggacgagtatggctctccttgtttgtttagaagcatgcaatttaatccttaatttttttgggtgtatatacttaaactgattgctaaaagtgcactactagattatttcggatgtagagaaagagccgaatgtgcactgtaatttacggttcgctgctattgatgtgtcttgtgttggtagactaaaggatttaagagccatgtgtacaaaattcagtttacaagcaaagatcaaagaatagacatgaactagggaaagagaaagaaaaacaaactgaaagttccatacctaaaagcgtcggcactggttgtcg

SEQ ID NO: 85097 - DNA, 7863 bp, Zea Mays
gaaatttcttcattgcaagcgtctactttctctctctctctctctctctctcgttgcccccgcatactctctgtcttgggcgctctctgtctctggtggcggcgagtagcatactctctgtcttgggcgctctgtctctggtggcgacgactcgccgccgccgccgccgcgataggccacgcctcctggtcgccatttccggatccttaccgacgacgcgcacccaccaccccatctttttccgttcctgctgtgcgacacacaaaccctagctgtatcgggtgggctgtgaaatggaccaagctgcagattcctctgaactgcttcgtcgcatcgaggagctccagcgcgaaaaggatgaaaaacagaattctttggaactattgttaagacggattgaagggctacaatatgaaatggatgaaaaagtagatcttgttgaagtgttaactcgtcaagttgaaaatctgcagcgagagcgtgatgagctcagaaaagatattgagcaattatgtatgcaacaagctgggcctggttatgtttctgttgcaactcgaatgcttactcagaggacagcagctttggaacaggatattgagaacctccagaaaaagttaggtggttgcttaagagagaatcaaaatttgcaagaggagcttgctgaagcttatcgaattaagagccagcttgctgagttacatggtgctgcactatcaaagaacaaggatcttgaaaagcaagtaagatttttccagagcagtgtcgctcaagcgtttgctgaacgggacagttcattaatggagtgtgagaaagcaaaagagcgggaagaagcagtgtcaagaaagtttgctgattttgaggaaaggatgagagaatatcaatcagagattgatgaacagaaacacttaaatgatgacttgcagagagaactgacagaactgaaggcacatacagaattgtccttgaaagttattctaaaattctatgaccttcgttgcagagactctggatgttcttcaagccttactattgaagagaagtgttcaatccttcttggtgattctgctgacaattggagttttagctctgatggcggaacctcaactttgaagtacattgacttatgcagttatgctttgttcccagtttctcattcaacatactgctcaatacatggatagaaaacatccgtattattgatggaagtcataaatttagtgctaatcttctcatttgtcctattcagtaagttatagttcagtatgattgtcatgttctatttgacctaattgtgtcatgtacttgagtaatacaacatgacttgcaggccctaatttgttttcaagaactgtttattgattttttttccagttgatttggtcctaaaccaaagtgctttgcatagttaaggcgagtgtttgacccccgccttaccttcgaagcggtaaagtgtaaggcgagacaacaccttaatcatatataaatataggaaaatatagaaaattagtcttgaatagaagtacgaaagtaccaaacagaagtctataagttcaatataagcaaacataataggctaaaagtccaacataagtaggttctgatactctcatctctcaagttctgatacatcatcaaactcatcaaaaatgggaggattactgtcttcttcgcgttctctcccaccggatatatcatcatcttcactcacattcaagtcatctttcgcatgattggttgccgcgtcctacccgcccagactcgcggcatgcgttggccgggcgcgagcgagtgtttggttgccgcacccacgccctccggactgcatgtgcgcatgcagtttagtgctttttttcgccgttctgcctgcaagcgtggagaagccggaaattaccttcgctgggggaccaggcccgcacgaggcaggcacgtgacagaccggcaaccaatcagcccccttgtggatctggctcaaagtcttcgtccatggcacctccctcttcttcttacggcctcattcttgcatgctttctctatgtaaggccagaactttgtctctgactagcttgccttggaaggttgtgccctcgaagcgactccgatgctctagtagcaacatcaacatgatccatcatgtgaggtcaacaatattatcattgtccctgctggggtgtaccactgatgagtatccactcgttgtcccaatcaaaatcctcaataattaatgggtcatagcttgtgccggctttctccctcatttgaaacctacttcgcatcttttgattgtatgaaacatagaccaagtcattcaaccttttatgcaacaacaagtttctcttctttgtatgtatagtaagtaacaaacccaacctaaataagtagcaagaaatagattgaagctagtaaacataagcgaagtagcaaaaaatggacttacaaattcaaatgtgcttcaattcctctcacaaccggatgaggaagcacaaagtctaaccagtaaccacacgcttggcaaacctttgaaattcatatgctcggccgccatatgaacgttatcaatcaactacgcagatgcaaacagcgacacggtcacacacataggtatacaacagcaggaaagaataaaaaaagatgtgctgaaattagcaatcagccaagcatatagtactttagagggctctttgcttgaatgttttcaagtgccaacttgtttgaaaaatagaccctctatgatcttcataatgcatggcatgctcattaatcttcgaccgtatttcttcattggactccattcttgctagcacataattgaaacaactcctcagctttacaacatatctatcatctccctttggatggcaaagaattttcccaggttcaaataaagtgcagcaccatacgatggatggtccatttgtttcatccaacgaccctcaataatgtccataattttttcagcaatgcttgcttgttttgtgtagggaagctaagccttttctcttttgcaacatccattagtgctgcaatttatgtcatgtatgttttttcatctccatcaactgccctaagcactataagaagtgccaaagctctgaggcaatcttcaactgaagaccaaaaagtcttagctagaataatattacaccccccttccagcctctgtctttgccaacttgttgcagttccatgcatctcacaaaaagtgctctcaaggcatcttgatgtttatgtagacttttcaaagtaaggaatgtggcaaaacgagtggctgctggtcttaaaggatccccctcctatcttctccctcattgcacttagaattcctccatgcctataaataaaagtggtgactcttttggcttgtgcaattagtctttcaaatatccaatatcctccaccatgaggtccaaacaatgtgcagtacaaggaccctagaacaatgttaaaatactatccattagaagcctacccactgccttatatttttttctcgaatacgcaggagagctgcgtatcaattcattaatagtagaggagaaatatatatacaagaaaaaggcccacacacttgcacacacccactaggaacagaactgcaagaacatttgcgcctgttacagcacagaaacgaccctacacaacaactaaaatcggtatgccgtagcctccagaagctgcagatccttggcccctgctgcactccaacacaaaatctcatcaccagccaagcacaaggcagcagccaatcgtggaggtttgcgaccaaagacattcatttctgtgtctccacaaggtccatgcccctaagattatgagagagttaaaacctttctgaatggagcttcgcatagagctggaagaactgctccaccaatccaaaaaggaggtcgcctcaggctgaggggcaagaagtgccaaacccattcggctaagaaaaaagaaccagaactgacacgaaaagagacaggagacaagaaggcgatatagcgtttcacgttcttggtcacacaacacacaagcttcagggtgtggcagattcgtcctttcaagtcgatcagatgtccaacacctattgtgggcagccaaccacatgaagaaggcacatttaggcggcacccacaatttccagatacgctcccatggttcaaagaacaacgagctctgcatgagagcatcatatgccgatcttgctgaatatgccctgacggagagaggctccaaaaatgtctatccggcatttccagcacccctggctgaagctgcaccacgtgtatagcctctcaaataccaagaaactcttgctaactctgccaagaaataactccatggatatcgtggacccatcttgaatctgttagagcatctaggaccatccttcgattagctattctggtgggaatcatactatgtataagtggtgctagttcctttaaccgctgcctcatcaaccatctatcctcccaaaacaaggtggtgctaccatcgcctagttcagtagtcacggccatgttgaaaattccttgcacctgtttatttgcttgtagcttgaaggcagcccatggtctctgtcagcctttggctttgtggaagcagcctccttagtggtttggtatgaacctgaagaccgcctatcatccacaacctattcagggattctctggagcatgcttgcgaccttcccaaccacttttggcatgttttgggcttagttgtagctggttgcctaaactgaaaggcggctctcctccgtttagcagctgtcccggaacttggctgcacaacggagcaatcagattcattctgtcctagcctctgcccctgcacctgcccatgtactggaccaatgttataaggaaaataggcctgttcctcttcttctccaagtaagctgtcatctcttttctaatctcagtggtggtgttgaaacacatgactgtcctcatatcccccggcaaggtgttctttataccttttaattccttctttgttaccatgttgcatcggatgcatgtcaccttatcctgattccctatttctgtccaataaccgtacttccagcctgggtcattgaattttgcctctggatcttgcatggggtgataaggatcaacatcaatgggagcagcagcagcggatgcggatcagacactctccatgacaatggcttactctgtacaggtggatagtaagaaaaaggcaaaggttcagctcactaattaacatcagagagtggggaacagagcagcacggaggcccattatcttgcaccggatttaaagcagagggctgctgctaggatgctggcctgcccgccctgtctggctgcgccagcgccacccctcctgcgtggccacaccccactcctccctgtctgcgcctgcatgccttgcttggcccgtgccgcccacctcgctgtgccgcccgtcctgcctggtcacgccactcctcacccctccttcgaacagaacaggcgcaccgcgcaactcagcctttgaacagagcagcctccgcccacaaccagccgccttttcattcccttattcccataatgcgacaccctagaaccgctttacggacgtctgaggtgccagagcgactagacggtaaggaagatgccttagtgtcaatcttaaggcgggtaaatcacctcattttttctgaccgccttaccgcctaagggacgccttaatagtttgcattagagattttcccttcaatgtatttgacattttttgtaggcatctttagaagaggagaaagagtcacttaaagctaaaatatcgaagctgcaaagcaacctaagaatgggccttgaaattgaacaacatttgcaaagaaatgcacgaatattagagaaaagacaggtacaattctgaagtattgtattgttctttctcatgacctctttaattgtatactttggagtgcaggcactgtatgatggattcctgagaaatggattgtccgaacttcaaaagttctacacatgtcaaaaggctgaaattatgaaaatattggaagaagaatcgttgcggttgatgaaagttgttgcagagattcaggataaactaactgaaatttgtatcaacactgaagttagtgaccaccctgccgatgagattcaatgttgtgacagcagttgtaaagatgtgcatgttactaaagatatcagtcctagcacatgtcgtaagagtgattatcctgctgatcttaactccgtgtcgtttgatgaatctaaagcacttgcacaagccttacaggagaagatggaagcacttatgctcttctcacaggaacaagaaagatacctattagagaaacagagagacctgattgttatcgaggaactccagaagaacttatctcaagtagtacctctagaattcctacttgtcattatttttcaatcacaacgtactatatgacgagtgttctaaatagtacaagtatggtttgtcatgaagttgatacttcataccattactattttgtgcattttgctcctagctgttggaaaggtaaaactgaaccatatgattcttttcgaaagtatggattaaatgactagagttagttttgaagtttgaacttggatttttcttagggaagttcgtcaatatattatggacttgactattcacactgctaacactggtggtttgccagtagtgtcatccttgataagttgatatacagtaattagtcacatttacttctttagtatatgacctatttttaggtgtgagtttctgttgcacatcagcacactttagtgttggatgagtgtgtcgcttgactacttcatcttatgtgtacaggttaaagatgaaaaggtgaaggtcctgatggaattaacaaaactaaaagaacaatatttgctattgaagggctctgctgtcaaggaaggtcatgatactggtgattcatctaaactcattcctgggcatgaccaacaagggatgctgaagactatgctgaagaggacatctttaagacactggatgaggaaagaaagtaatactattggacatgggagctctgatggaaatgatcatacagtttgcaaagaacattcagtggatgttgcaagattaagagttgaaaatgctatgcttcttgaaggtgttggtactgttgagcatctcacttcttcagtgcatagactgcatattgtgcttttgaaggcagggcaggattttttttggttgtattactaggtgataactttcataccaacaaacatgtcaggcttatgatgatatcaagtcagctgatcctttggagagtacctttgaagcgctcaacagtcttataactgaagcaaaccttatgaagacagctcttaatgtggttcttcctgtaagctggtccggggattcatcagatgcaattaaatatgaagctatgtgcgatccatctgattcacctaaatcgaagtctgggaaagtagacccgctctcttctgcaggcatggagatggtggagctactaatattggctgctgagattctcaaggagagctttctggtgaagaaataaggcctccatgtaaggacgagtatggctctccttgtttgtttagaagcatgcaatttaatccttaatttttttgggtgtatatacttaaactgattgctaaaagtgcactactagattatttcggatgtagagaaagagccgaatgtgcactgtaatttacggttcgctgctattgatgtgtcttgtgttggtagactaaaggatttaagagccatgtgtacaaaattcagtttacaagcaaagatcaaagaatagacatgaactagggaaagagaaagaaaaacaaactgaaagttccatacctaaaagcgtcggcactggttgtcg

SEQ ID NO: 85098 - DNA, 8137 bp, Zea Mays
gaaatttcttcattgcaagcgtctactttctctctctctctctctctctctcgttgcccccgcatactctctgtcttgggcgctctctgtctctggtggcggcgagtagcatactctctgtcttgggcgctctgtctctggtggcgacgactcgccgccgccgccgccgcgataggccacgcctcctggtcgccatttccggatccttaccgacgacgcgcacccaccaccccatctttttccgttcctgctgtgcgacacacaaaccctagctgtatcgggtgggctgtgaaatggaccaagctgcagattcctctgaactgcttcgtcgcatcgaggagctccagcgcgaaaaggatgaaaaacagaattctttggaactattgttaagacggattgaagggctacaatatgaaatggatgaaaaagtagatcttgttgaagtgttaactcgtcaagttgaaaatctgcagcgagagcgtgatgagctcagaaaagatattgagcaattatgtatgcaacaagctgggcctggttatgtttctgttgcaactcgaatgcttactcagaggacagcagctttggaacaggatattgagaacctccagaaaaagttaggtggttgcttaagagagaatcaaaatttgcaagaggagcttgctgaagcttatcgaattaagagccagcttgctgagttacatggtgctgcactatcaaagaacaaggatcttgaaaagcaagtaagatttttccagagcagtgtcgctcaagcgtttgctgaacgggacagttcattaatggagtgtgagaaagcaaaagagcgggaagaagcagtgtcaagaaagtttgctgattttgaggaaaggatgagagaatatcaatcagagattgatgaacagaaacacttaaatgatgacttgcagagagaactgacagaactgaaggcacatacagaattgtccttgaaaagactctggatgttcttcaagccttactattgaagagaagtgttcaatccttcttggtgattctgctgacaattggagttttagctctgatggcggaacctcaactttgaagtacattgtaaaccacccttatccattataaagaatgattcatatttaagtatgcgatctgtttttttttttgcatttgtattgcaagatacaaattctctgtggcactaaacatcatctggcgcagagccagaaaattatagatatggggacgaaatgctaaaaaataaattattagaaggcaaaatcagcattttcattgaattttatgtgcataagaggaacttatctatcataacagagtgcttgatcctccctccttccgcccctgaacatgttaatgcattgttggctaattggcttgttcagttttattctgggaactaaatgaatgcagaaggtaggaaatgatgaaactttgctggcatctgtttcaggacttatgcagttatgctttgttcccagtttctcattcaacatactgctcaatacatggatagaaaacatccgtattattgatggaagtcataaatttagtgctaatcttctcatttgtcctattcagtaagttatagttcagtatgattgtcatgttctatttgacctaattgtgtcatgtacttgagtaatacaacatgacttgcaggccctaatttgttttcaagaactgtttattgattttttttccagttgatttggtcctaaaccaaagtgctttgcatagttaaggcgagtgtttgacccccgccttaccttcgaagcggtaaagtgtaaggcgagacaacaccttaatcatatataaatataggaaaatatagaaaattagtcttgaatagaagtacgaaagtaccaaacagaagtctataagttcaatataagcaaacataataggctaaaagtccaacataagtaggttctgatactctcatctctcaagttctgatacatcatcaaactcatcaaaaatgggaggattactgtcttcttcgcgttctctcccaccggatatatcatcatcttcactcacattcaagtcatctttcgcatgattggttgccgcgtcctacccgcccagactcgcggcatgcgttggccgggcgcgagcgagtgtttggttgccgcacccacgccctccggactgcatgtgcgcatgcagtttagtgctttttttcgccgttctgcctgcaagcgtggagaagccggaaattaccttcgctgggggaccaggcccgcacgaggcaggcacgtgacagaccggcaaccaatcagcccccttgtggatctggctcaaagtcttcgtccatggcacctccctcttcttcttacggcctcattcttgcatgctttctctatgtaaggccagaactttgtctctgactagcttgccttggaaggttgtgccctcgaagcgactccgatgctctagtagcaacatcaacatgatccatcatgtgaggtcaacaatattatcattgtccctgctggggtgtaccactgatgagtatccactcgttgtcccaatcaaaatcctcaataattaatgggtcatagcttgtgccggctttctccctcatttgaaacctacttcgcatcttttgattgtatgaaacatagaccaagtcattcaaccttttatgcaacaacaagtttctcttctttgtatgtatagtaagtaacaaacccaacctaaataagtagcaagaaatagattgaagctagtaaacataagcgaagtagcaaaaaatggacttacaaattcaaatgtgcttcaattcctctcacaaccggatgaggaagcacaaagtctaaccagtaaccacacgcttggcaaacctttgaaattcatatgctcggccgccatatgaacgttatcaatcaactacgcagatgcaaacagcgacacggtcacacacataggtatacaacagcaggaaagaataaaaaaagatgtgctgaaattagcaatcagccaagcatatagtactttagagggctctttgcttgaatgttttcaagtgccaacttgtttgaaaaatagaccctctatgatcttcataatgcatggcatgctcattaatcttcgaccgtatttcttcattggactccattcttgctagcacataattgaaacaactcctcagctttacaacatatctatcatctccctttggatggcaaagaattttcccaggttcaaataaagtgcagcaccatacgatggatggtccatttgtttcatccaacgaccctcaataatgtccataattttttcagcaatgcttgcttgttttgtgtagggaagctaagccttttctcttttgcaacatccattagtgctgcaatttatgtcatgtatgttttttcatctccatcaactgccctaagcactataagaagtgccaaagctctgaggcaatcttcaactgaagaccaaaaagtcttagctagaataatattacaccccccttccagcctctgtctttgccaacttgttgcagttccatgcatctcacaaaaagtgctctcaaggcatcttgatgtttatgtagacttttcaaagtaaggaatgtggcaaaacgagtggctgctggtcttaaaggatccccctcctatcttctccctcattgcacttagaattcctccatgcctataaataaaagtggtgactcttttggcttgtgcaattagtctttcaaatatccaatatcctccaccatgaggtccaaacaatgtgcagtacaaggaccctagaacaatgttaaaatactatccattagaagcctacccactgccttatatttttttctcgaatacgcaggagagctgcgtatcaattcattaatagtagaggagaaatatatatacaagaaaaaggcccacacacttgcacacacccactaggaacagaactgcaagaacatttgcgcctgttacagcacagaaacgaccctacacaacaactaaaatcggtatgccgtagcctccagaagctgcagatccttggcccctgctgcactccaacacaaaatctcatcaccagccaagcacaaggcagcagccaatcgtggaggtttgcgaccaaagacattcatttctgtgtctccacaaggtccatgcccctaagattatgagagagttaaaacctttctgaatggagcttcgcatagagctggaagaactgctccaccaatccaaaaaggaggtcgcctcaggctgaggggcaagaagtgccaaacccattcggctaagaaaaaagaaccagaactgacacgaaaagagacaggagacaagaaggcgatatagcgtttcacgttcttggtcacacaacacacaagcttcagggtgtggcagattcgtcctttcaagtcgatcagatgtccaacacctattgtgggcagccaaccacatgaagaaggcacatttaggcggcacccacaatttccagatacgctcccatggttcaaagaacaacgagctctgcatgagagcatcatatgccgatcttgctgaatatgccctgacggagagaggctccaaaaatgtctatccggcatttccagcacccctggctgaagctgcaccacgtgtatagcctctcaaataccaagaaactcttgctaactctgccaagaaataactccatggatatcgtggacccatcttgaatctgttagagcatctaggaccatccttcgattagctattctggtgggaatcatactatgtataagtggtgctagttcctttaaccgctgcctcatcaaccatctatcctcccaaaacaaggtggtgctaccatcgcctagttcagtagtcacggccatgttgaaaattccttgcacctgtttatttgcttgtagcttgaaggcagcccatggtctctgtcagcctttggctttgtggaagcagcctccttagtggtttggtatgaacctgaagaccgcctatcatccacaacctattcagggattctctggagcatgcttgcgaccttcccaaccacttttggcatgttttgggcttagttgtagctggttgcctaaactgaaaggcggctctcctccgtttagcagctgtcccggaacttggctgcacaacggagcaatcagattcattctgtcctagcctctgcccctgcacctgcccatgtactggaccaatgttataaggaaaataggcctgttcctcttcttctccaagtaagctgtcatctcttttctaatctcagtggtggtgttgaaacacatgactgtcctcatatcccccggcaaggtgttctttataccttttaattccttctttgttaccatgttgcatcggatgcatgtcaccttatcctgattccctatttctgtccaataaccgtacttccagcctgggtcattgaattttgcctctggatcttgcatggggtgataaggatcaacatcaatgggagcagcagcagcggatgcggatcagacactctccatgacaatggcttactctgtacaggtggatagtaagaaaaaggcaaaggttcagctcactaattaacatcagagagtggggaacagagcagcacggaggcccattatcttgcaccggatttaaagcagagggctgctgctaggatgctggcctgcccgccctgtctggctgcgccagcgccacccctcctgcgtggccacaccccactcctccctgtctgcgcctgcatgccttgcttggcccgtgccgcccacctcgctgtgccgcccgtcctgcctggtcacgccactcctcacccctccttcgaacagaacaggcgcaccgcgcaactcagcctttgaacagagcagcctccgcccacaaccagccgccttttcattcccttattcccataatgcgacaccctagaaccgctttacggacgtctgaggtgccagagcgactagacggtaaggaagatgccttagtgtcaatcttaaggcgggtaaatcacctcattttttctgaccgccttaccgcctaagggacgccttaatagtttgcattagagattttcccttcaatgtatttgacattttttgtaggcatctttagaagaggagaaagagtcacttaaagctaaaatatcgaagctgcaaagcaacctaagaatgggccttgaaattgaacaacatttgcaaagaaatgcacgaatattagagaaaagacaggtacaattctgaagtattgtattgttctttctcatgacctctttaattgtatactttggagtgcaggcactgtatgatggattcctgagaaatggattgtccgaacttcaaaagttctacacatgtcaaaaggctgaaattatgaaaatattggaagaagaatcgttgcggttgatgaaagttgttgcagagattcaggataaactaactgaaatttgtatcaacactgaagttagtgaccaccctgccgatgagattcaatgttgtgacagcagttgtaaagatgtgcatgttactaaagatatcagtcctagcacatgtcgtaagagtgattatcctgctgatcttaactccgtgtcgtttgatgaatctaaagcacttgcacaagccttacaggagaagatggaagcacttatgctcttctcacaggaacaagaaagatacctattagagaaacagagagacctgattgttatcgaggaactccagaagaacttatctcaagtagtacctctagaattcctacttgtcattatttttcaatcacaacgtactatatgacgagtgttctaaatagtacaagtatggtttgtcatgaagttgatacttcataccattactattttgtgcattttgctcctagctgttggaaaggtaaaactgaaccatatgattcttttcgaaagtatggattaaatgactagagttagttttgaagtttgaacttggatttttcttagggaagttcgtcaatatattatggacttgactattcacactgctaacactggtggtttgccagtagtgtcatccttgataagttgatatacagtaattagtcacatttacttctttagtatatgacctatttttaggtgtgagtttctgttgcacatcagcacactttagtgttggatgagtgtgtcgcttgactacttcatcttatgtgtacaggttaaagatgaaaaggtgaaggtcctgatggaattaacaaaactaaaagaacaatatttgctattgaagggctctgctgtcaaggaaggtcatgatactggtgattcatctaaactcattcctgggcatgaccaacaagggatgctgaagactatgctgaagaggacatctttaagacactggatgaggaaagaaagtaatactattggacatgggagctctgatggaaatgatcatacagtttgcaaagaacattcagtggatgttgcaagattaagagttgaaaatgctatgcttcttgaaggtgttggtactgttgagcatctcacttcttcagtgcatagactgcatattgtgcttttgaaggcttatgatgatatcaagtcagctgatcctttggagagtacctttgaagcgctcaacagtcttataactgaagcaaaccttatgaagacagctcttaatgtggttcttcctgtaagctggtccggggattcatcagatgcaattaaatatgaagctatgtgcgatccatctgattcacctaaatcgaagtctgggaaagtagacccgctctcttctgcaggcatggagatggtggagctactaatattggctgctgagattctcaaggagagctttctggtgaagaaataaggcctccatgtaaggacgagtatggctctccttgtttgtttagaagcatgcaatttaatccttaatttttttgggtgtatatacttaaactgattgctaaaagtgcactactagattatttcggatgtagagaaagagccgaatgtgcactgtaatttacggttcgctgctattgatgtgtcttgtgttggtagactaaaggatttaagagccatgtgtacaaaattcagtttacaagcaaagatcaaagaatagacatgaactagggaaagagaaagaaaaacaaactgaaagttccatacctaaaagcgtcggcactggttgtcg

SEQ ID NO: 85099 - DNA, 2723 bp, Zea Mays
gaaatttcttcattgcaagcgtctactttctctctctctctctctctctctcgttgcccccgcatactctctgtcttgggcgctctctgtctctggtggcggcgagtagcatactctctgtcttgggcgctctgtctctggtggcgacgactcgccgccgccgccgccgcgataggccacgcctcctggtcgccatttccggatccttaccgacgacgcgcacccaccaccccatctttttccgttcctgctgtgcgacacacaaaccctagctgtatcgggtgggctgtgaaatggaccaagctgcagattcctctgaactgcttcgtcgcatcgaggagctccagcgcgaaaaggatgaaaaacagaattctttggaactattgttaagacggattgaagggctacaatatgaaatggatgaaaaagtagatcttgttgaagtgttaactcgtcaagttgaaaatctgcagcgagagcgtgatgagctcagaaaagatattgagcaattatgtatgcaacaagctgggcctggttatgtttctgttgcaactcgaatgcttactcagaggacagcagctttggaacaggatattgagaacctccagaaaaagttaggtggttgcttaagagagaatcaaaatttgcaagaggagcttgctgaagcttatcgaattaagagccagcttgctgagttacatggtgctgcactatcaaagaacaaggatcttgaaaagcaagtaagatttttccagagcagtgtcgctcaagcgtttgctgaacgggacagttcattaatggagtgtgagaaagcaaaagagcgggaagaagcagtgtcaagaaagtttgctgattttgaggaaaggatgagagaatatcaatcagagattgatgaacagaaacacttaaatgatgacttgcagagagaactgacagaactgaaggcacatacagaattgtccttgaaagttattctaaaattctatgaccttcgttgcagagactctggatgttcttcaagccttactattgaagagaagtgttcaatccttcttggtgattctgctgacaattggagttttagctctgatggcggaacctcaactttgaagcatctttagaagaggagaaagagtcacttaaagctaaaatatcgaagctgcaaagcaacctaagaatgggccttgaaattgaacaacatttgcaaagaaatgcacgaatattagagaaaagacaggcactgtatgatggattcctgagaaatggattgtccgaacttcaaaagttctacacatgtcaaaaggctgaaattatgaaaatattggaagaagaatcgttgcggttgatgaaagttgttgcagagattcaggataaactaactgaaatttgtatcaacactgaagttagtgaccaccctgccgatgagattcaatgttgtgacagcagttgtaaagatgtgcatgttactaaagatatcagtcctagcacatgtcgtaagagtgattatcctgctgatcttaactccgtgtcgtttgatgaatctaaagcacttgcacaagccttacaggagaagatggaagcacttatgctcttctcacaggaacaagaaagatacctattagagaaacagagagacctgattgttatcgaggaactccagaagaacttatctcaagttaaagatgaaaaggtgaaggtcctgatggaattaacaaaactaaaagaacaatatttgctattgaagggctctgctgtcaaggaaggtcatgatactggtgattcatctaaactcattcctgggcatgaccaacaagggatgctgaagactatgctgaagaggacatctttaagacactggatgaggaaagaaagtaatactattggacatgggagctctgatggaaatgatcatacagtttgcaaagaacattcagtggatgttgcaagattaagagttgaaaatgctatgcttcttgaaggtgttggtactgttgagcatctcacttcttcagtgcatagactgcatattgtgcttttgaaggcagggcaggattttttttggttgtattactaggtgataactttcataccaacaaacatgtcaggcttatgatgatatcaagtcagctgatcctttggagagtacctttgaagcgctcaacagtcttataactgaagcaaaccttatgaagacagctcttaatgtggttcttcctgtaagctggtccggggattcatcagatgcaattaaatatgaagctatgtgcgatccatctgattcacctaaatcgaagtctgggaaagtagacccgctctcttctgcaggcatggagatggtggagctactaatattggctgctgagattctcaaggagagctttctggtgaagaaataaggcctccatgtaaggacgagtatggctctccttgtttgtttagaagcatgcaatttaatccttaatttttttgggtgtatatacttaaactgattgctaaaagtgcactactagattatttcggatgtagagaaagagccgaatgtgcactgtaatttacggttcgctgctattgatgtgtcttgtgttggtagactaaaggatttaagagccatgtgtacaaaattcagtttacaagcaaagatcaaagaatagacatgaactagggaaagagaaagaaaaacaaactgaaagttccatacctaaaagcgtcggcactggttgtcg

SEQ ID NO: 85100 - DNA, 8163 bp, Zea Mays
gaaatttcttcattgcaagcgtctactttctctctctctctctctctctctcgttgcccccgcatactctctgtcttgggcgctctctgtctctggtggcggcgagtagcatactctctgtcttgggcgctctgtctctggtggcgacgactcgccgccgccgccgccgcgataggccacgcctcctggtcgccatttccggatccttaccgacgacgcgcacccaccaccccatctttttccgttcctgctgtgcgacacacaaaccctagctgtatcgggtgggctgtgaaatggaccaagctgcagattcctctgaactgcttcgtcgcatcgaggagctccagcgcgaaaaggatgaaaaacagaattctttggaactattgttaagacggattgaagggctacaatatgaaatggatgaaaaagtagatcttgttgaagtgttaactcgtcaagttgaaaatctgcagcgagagcgtgatgagctcagaaaagatattgagcaattatgtatgcaacaagctgggcctggttatgtttctgttgcaactcgaatgcttactcagaggacagcagctttggaacaggatattgagaacctccagaaaaagttaggtggttgcttaagagagaatcaaaatttgcaagaggagcttgctgaagcttatcgaattaagagccagcttgctgagttacatggtgctgcactatcaaagaacaaggatcttgaaaagcaagtaagatttttccagagcagtgtcgctcaagcgtttgctgaacgggacagttcattaatggagtgtgagaaagcaaaagagcgggaagaagcagtgtcaagaaagtttgctgattttgaggaaaggatgagagaatatcaatcagagattgatgaacagaaacacttaaatgatgacttgcagagagaactgacagaactgaaggcacatacagaattgtccttgaaagttattctaaaattctatgaccttcgttgcagagactctggatgttcttcaagccttactattgaagagaagtgttcaatccttcttggtgattctgctgacaattggagttttagctctgatggcggaacctcaactttgaagtacattgtaaaccacccttatccattataaagaatgattcatatttaagtatgcgatctgtttttttttttgcatttgtattgcaagatacaaattctctgtggcactaaacatcatctggcgcagagccagaaaattatagatatggggacgaaatgctaaaaaataaattattagaaggcaaaatcagcattttcattgaattttatgtgcataagaggaacttatctatcataacagagtgcttgatcctccctccttccgcccctgaacatgttaatgcattgttggctaattggcttgttcagttttattctgggaactaaatgaatgcagaaggtaggaaatgatgaaactttgctggcatctgtttcaggacttatgcagttatgctttgttcccagtttctcattcaacatactgctcaatacatggatagaaaacatccgtattattgatggaagtcataaatttagtgctaatcttctcatttgtcctattcagtaagttatagttcagtatgattgtcatgttctatttgacctaattgtgtcatgtacttgagtaatacaacatgacttgcaggccctaatttgttttcaagaactgtttattgattttttttccagttgatttggtcctaaaccaaagtgctttgcatagttaaggcgagtgtttgacccccgccttaccttcgaagcggtaaagtgtaaggcgagacaacaccttaatcatatataaatataggaaaatatagaaaattagtcttgaatagaagtacgaaagtaccaaacagaagtctataagttcaatataagcaaacataataggctaaaagtccaacataagtaggttctgatactctcatctctcaagttctgatacatcatcaaactcatcaaaaatgggaggattactgtcttcttcgcgttctctcccaccggatatatcatcatcttcactcacattcaagtcatctttcgcatgattggttgccgcgtcctacccgcccagactcgcggcatgcgttggccgggcgcgagcgagtgtttggttgccgcacccacgccctccggactgcatgtgcgcatgcagtttagtgctttttttcgccgttctgcctgcaagcgtggagaagccggaaattaccttcgctgggggaccaggcccgcacgaggcaggcacgtgacagaccggcaaccaatcagcccccttgtggatctggctcaaagtcttcgtccatggcacctccctcttcttcttacggcctcattcttgcatgctttctctatgtaaggccagaactttgtctctgactagcttgccttggaaggttgtgccctcgaagcgactccgatgctctagtagcaacatcaacatgatccatcatgtgaggtcaacaatattatcattgtccctgctggggtgtaccactgatgagtatccactcgttgtcccaatcaaaatcctcaataattaatgggtcatagcttgtgccggctttctccctcatttgaaacctacttcgcatcttttgattgtatgaaacatagaccaagtcattcaaccttttatgcaacaacaagtttctcttctttgtatgtatagtaagtaacaaacccaacctaaataagtagcaagaaatagattgaagctagtaaacataagcgaagtagcaaaaaatggacttacaaattcaaatgtgcttcaattcctctcacaaccggatgaggaagcacaaagtctaaccagtaaccacacgcttggcaaacctttgaaattcatatgctcggccgccatatgaacgttatcaatcaactacgcagatgcaaacagcgacacggtcacacacataggtatacaacagcaggaaagaataaaaaaagatgtgctgaaattagcaatcagccaagcatatagtactttagagggctctttgcttgaatgttttcaagtgccaacttgtttgaaaaatagaccctctatgatcttcataatgcatggcatgctcattaatcttcgaccgtatttcttcattggactccattcttgctagcacataattgaaacaactcctcagctttacaacatatctatcatctccctttggatggcaaagaattttcccaggttcaaataaagtgcagcaccatacgatggatggtccatttgtttcatccaacgaccctcaataatgtccataattttttcagcaatgcttgcttgttttgtgtagggaagctaagccttttctcttttgcaacatccattagtgctgcaatttatgtcatgtatgttttttcatctccatcaactgccctaagcactataagaagtgccaaagctctgaggcaatcttcaactgaagaccaaaaagtcttagctagaataatattacaccccccttccagcctctgtctttgccaacttgttgcagttccatgcatctcacaaaaagtgctctcaaggcatcttgatgtttatgtagacttttcaaagtaaggaatgtggcaaaacgagtggctgctggtcttaaaggatccccctcctatcttctccctcattgcacttagaattcctccatgcctataaataaaagtggtgactcttttggcttgtgcaattagtctttcaaatatccaatatcctccaccatgaggtccaaacaatgtgcagtacaaggaccctagaacaatgttaaaatactatccattagaagcctacccactgccttatatttttttctcgaatacgcaggagagctgcgtatcaattcattaatagtagaggagaaatatatatacaagaaaaaggcccacacacttgcacacacccactaggaacagaactgcaagaacatttgcgcctgttacagcacagaaacgaccctacacaacaactaaaatcggtatgccgtagcctccagaagctgcagatccttggcccctgctgcactccaacacaaaatctcatcaccagccaagcacaaggcagcagccaatcgtggaggtttgcgaccaaagacattcatttctgtgtctccacaaggtccatgcccctaagattatgagagagttaaaacctttctgaatggagcttcgcatagagctggaagaactgctccaccaatccaaaaaggaggtcgcctcaggctgaggggcaagaagtgccaaacccattcggctaagaaaaaagaaccagaactgacacgaaaagagacaggagacaagaaggcgatatagcgtttcacgttcttggtcacacaacacacaagcttcagggtgtggcagattcgtcctttcaagtcgatcagatgtccaacacctattgtgggcagccaaccacatgaagaaggcacatttaggcggcacccacaatttccagatacgctcccatggttcaaagaacaacgagctctgcatgagagcatcatatgccgatcttgctgaatatgccctgacggagagaggctccaaaaatgtctatccggcatttccagcacccctggctgaagctgcaccacgtgtatagcctctcaaataccaagaaactcttgctaactctgccaagaaataactccatggatatcgtggacccatcttgaatctgttagagcatctaggaccatccttcgattagctattctggtgggaatcatactatgtataagtggtgctagttcctttaaccgctgcctcatcaaccatctatcctcccaaaacaaggtggtgctaccatcgcctagttcagtagtcacggccatgttgaaaattccttgcacctgtttatttgcttgtagcttgaaggcagcccatggtctctgtcagcctttggctttgtggaagcagcctccttagtggtttggtatgaacctgaagaccgcctatcatccacaacctattcagggattctctggagcatgcttgcgaccttcccaaccacttttggcatgttttgggcttagttgtagctggttgcctaaactgaaaggcggctctcctccgtttagcagctgtcccggaacttggctgcacaacggagcaatcagattcattctgtcctagcctctgcccctgcacctgcccatgtactggaccaatgttataaggaaaataggcctgttcctcttcttctccaagtaagctgtcatctcttttctaatctcagtggtggtgttgaaacacatgactgtcctcatatcccccggcaaggtgttctttataccttttaattccttctttgttaccatgttgcatcggatgcatgtcaccttatcctgattccctatttctgtccaataaccgtacttccagcctgggtcattgaattttgcctctggatcttgcatggggtgataaggatcaacatcaatgggagcagcagcagcggatgcggatcagacactctccatgacaatggcttactctgtacaggtggatagtaagaaaaaggcaaaggttcagctcactaattaacatcagagagtggggaacagagcagcacggaggcccattatcttgcaccggatttaaagcagagggctgctgctaggatgctggcctgcccgccctgtctggctgcgccagcgccacccctcctgcgtggccacaccccactcctccctgtctgcgcctgcatgccttgcttggcccgtgccgcccacctcgctgtgccgcccgtcctgcctggtcacgccactcctcacccctccttcgaacagaacaggcgcaccgcgcaactcagcctttgaacagagcagcctccgcccacaaccagccgccttttcattcccttattcccataatgcgacaccctagaaccgctttacggacgtctgaggtgccagagcgactagacggtaaggaagatgccttagtgtcaatcttaaggcgggtaaatcacctcattttttctgaccgccttaccgcctaagggacgccttaatagtttgcattagagattttcccttcaatgtatttgacattttttgtaggcatctttagaagaggagaaagagtcacttaaagctaaaatatcgaagctgcaaagcaacctaagaatgggccttgaaattgaacaacatttgcaaagaaatgcacgaatattagagaaaagacaggcactgtatgatggattcctgagaaatggattgtccgaacttcaaaagttctacacatgtcaaaaggctgaaattatgaaaatattggaagaagaatcgttgcggttgatgaaagttgttgcagagattcaggataaactaactgaaatttgtatcaacactgaagttagtgaccaccctgccgatgagattcaatgttgtgacagcagttgtaaagatgtgcatgttactaaagatatcagtcctagcacatgtcgtaagagtgattatcctgctgatcttaactccgtgtcgtttgatgaatctaaagcacttgcacaagccttacaggagaagatggaagcacttatgctcttctcacaggaacaagaaagatacctattagagaaacagagagacctgattgttatcgaggaactccagaagaacttatctcaagtagtacctctagaattcctacttgtcattatttttcaatcacaacgtactatatgacgagtgttctaaatagtacaagtatggtttgtcatgaagttgatacttcataccattactattttgtgcattttgctcctagctgttggaaaggtaaaactgaaccatatgattcttttcgaaagtatggattaaatgactagagttagttttgaagtttgaacttggatttttcttagggaagttcgtcaatatattatggacttgactattcacactgctaacactggtggtttgccagtagtgtcatccttgataagttgatatacagtaattagtcacatttacttctttagtatatgacctatttttaggtgtgagtttctgttgcacatcagcacactttagtgttggatgagtgtgtcgcttgactacttcatcttatgtgtacaggttaaagatgaaaaggtgaaggtcctgatggaattaacaaaactaaaagaacaatatttgctattgaagggctctgctgtcaaggaaggtcatgatactggtgattcatctaaactcattcctgggcatgaccaacaagggatgctgaagactatgctgaagaggacatctttaagacactggatgaggaaagaaagtaatactattggacatgggagctctgatggaaatgatcatacagtttgcaaagaacattcagtggatgttgcaagattaagagttgaaaatgctatgcttcttgaaggtgttggtactgttgagcatctcacttcttcagtgcatagactgcatattgtgcttttgaagggcaggattttttttggttgtattactaggtgataactttcataccaacaaacatgtcaggcttatgatgatatcaagtcagctgatcctttggagagtacctttgaagcgctcaacagtcttataactgaagcaaaccttatgaagacagctcttaatgtggttcttcctgtaagctggtccggggattcatcagatgcaattaaatatgaagctatgtgcgatccatctgattcacctaaatcgaagtctgggaaagtagacccgctctcttctgcaggcatggagatggtggagctactaatattggctgctgagattctcaaggagagctttctggtgaagaaataaggcctccatgtaaggacgagtatggctctccttgtttgtttagaagcatgcaatttaatccttaatttttttgggtgtatatacttaaactgattgctaaaagtgcactactagattatttcggatgtagagaaagagccgaatgtgcactgtaatttacggttcgctgctattgatgtgtcttgtgttggtagactaaaggatttaagagccatgtgtacaaaattcagtttacaagcaaagatcaaagaatagacatgaactagggaaagagaaagaaaaacaaactgaaagttccatacctaaaagcgtcggcactggttgtcg

SEQ ID NO: 85101 - DNA, 2666 bp, Zea Mays
gaaatttcttcattgcaagcgtctactttctctctctctctctctctctctcgttgcccccgcatactctctgtcttgggcgctctctgtctctggtggcggcgagtagcatactctctgtcttgggcgctctgtctctggtggcgacgactcgccgccgccgccgccgcgataggccacgcctcctggtcgccatttccggatccttaccgacgacgcgcacccaccaccccatctttttccgttcctgctgtgcgacacacaaaccctagctgtatcgggtgggctgtgaaatggaccaagctgcagattcctctgaactgcttcgtcgcatcgaggagctccagcgcgaaaaggatgaaaaacagaattctttggaactattgttaagacggattgaagggctacaatatgaaatggatgaaaaagtagatcttgttgaagtgttaactcgtcaagttgaaaatctgcagcgagagcgtgatgagctcagaaaagatattgagcaattatgtatgcaacaagctgggcctggttatgtttctgttgcaactcgaatgcttactcagaggacagcagctttggaacaggatattgagaacctccagaaaaagttaggtggttgcttaagagagaatcaaaatttgcaagaggagcttgctgaagcttatcgaattaagagccagcttgctgagttacatggtgctgcactatcaaagaacaaggatcttgaaaagcaagtaagatttttccagagcagtgtcgctcaagcgtttgctgaacgggacagttcattaatggagtgtgagaaagcaaaagagcgggaagaagcagtgtcaagaaagtttgctgattttgaggaaaggatgagagaatatcaatcagagattgatgaacagaaacacttaaatgatgacttgcagagagaactgacagaactgaaggcacatacagaattgtccttgaaagttattctaaaattctatgaccttcgttgcagagactctggatgttcttcaagccttactattgaagagaagtgttcaatccttcttggtgattctgctgacaattggagttttagctctgatggcggaacctcaactttgaagtacattgcatctttagaagaggagaaagagtcacttaaagctaaaatatcgaagctgcaaagcaacctaagaatgggccttgaaattgaacaacatttgcaaagaaatgcacgaatattagagaaaagacaggcactgtatgatggattcctgagaaatggattgtccgaacttcaaaagttctacacatgtcaaaaggctgaaattatgaaaatattggaagaagaatcgttgcggttgatgaaagttgttgcagagattcaggataaactaactgaaatttgtatcaacactgaagttagtgaccaccctgccgatgagattcaatgttgtgacagcagttgtaaagatgtgcatgttactaaagatatcagtcctagcacatgtcgtaagagtgattatcctgctgatcttaactccgtgtcgtttgatgaatctaaagcacttgcacaagccttacaggagaagatggaagcacttatgctcttctcacaggaacaagaaagatacctattagagaaacagagagacctgattgttatcgaggaactccagaagaacttatctcaagttaaagatgaaaaggtgaaggtcctgatggaattaacaaaactaaaagaacaatatttgctattgaagggctctgctgtcaaggaaggtcatgatactggtgattcatctaaactcattcctgggcatgaccaacaagggatgctgaagactatgctgaagaggacatctttaagacactggatgaggaaagaaagtaatactattggacatgggagctctgatggaaatgatcatacagtttgcaaagaacattcagtggatgttgcaagattaagagttgaaaatgctatgcttcttgaaggtgttggtactgttgagcatctcacttcttcagtgcatagactgcatattgtgcttttgaaggcttatgatgatatcaagtcagctgatcctttggagagtacctttgaagcgctcaacagtcttataactgaagcaaaccttatgaagacagctcttaatgtggttcttcctgtaagctggtccggggattcatcagatgcaattaaatatgaagctatgtgcgatccatctgattcacctaaatcgaagtctgggaaagtagacccgctctcttctgcaggcatggagatggtggagctactaatattggctgctgagattctcaaggagagctttctggtgaagaaataaggcctccatgtaaggacgagtatggctctccttgtttgtttagaagcatgcaatttaatccttaatttttttgggtgtatatacttaaactgattgctaaaagtgcactactagattatttcggatgtagagaaagagccgaatgtgcactgtaatttacggttcgctgctattgatgtgtcttgtgttggtagactaaaggatttaagagccatgtgtacaaaattcagtttacaagcaaagatcaaagaatagacatgaactagggaaagagaaagaaaaacaaactgaaagttccatacctaaaagcgtcggcactggttgtcg

SEQ ID NO: 85102 - DNA, 7265 bp, Zea Mays
gaaatttcttcattgcaagcgtctactttctctctctctctctctctctctcgttgcccccgcatactctctgtcttgggcgctctctgtctctggtggcggcgagtagcatactctctgtcttgggcgctctgtctctggtggcgacgactcgccgccgccgccgccgcgataggccacgcctcctggtcgccatttccggatccttaccgacgacgcgcacccaccaccccatctttttccgttcctgctgtgcgacacacaaaccctagctgtatcgggtgggctgtgaaatggaccaagctgcagattcctctgaactgcttcgtcgcatcgaggagctccagcgcgaaaaggatgaaaaacagaattctttggaactattgttaagacggattgaagggctacaatatgaaatggatgaaaaagtagatcttgttgaagtgttaactcgtcaagttgaaaatctgcagcgagagcgtgatgagctcagaaaagatattgagcaattatgtatgcaacaagctgggcctggttatgtttctgttgcaactcgaatgcttactcagaggacagcagctttggaacaggatattgagaacctccagaaaaagttaggtggttgcttaagagagaatcaaaatttgcaagaggagcttgctgaagcttatcgaattaagagccagcttgctgagttacatggtgctgcactatcaaagaacaaggatcttgaaaagcaagtaagatttttccagagcagtgtcgctcaagcgtttgctgaacgggacagttcattaatggagtgtgagaaagcaaaagagcgggaagaagcagtgtcaagaaagtttgctgattttgaggaaaggatgagagaatatcaatcagagattgatgaacagaaacacttaaatgatgacttgcagagagaactgacagaactgaaggcacatacagaattgtccttgaaagttattctaaaattctatgaccttcgttgcagagactctggatgttcttcaagccttactattgaagagaagtgttcaatccttcttggtgattctgctgacaattggagttttagctctgatggcggaacctcaactttgaagacttatgcagttatgctttgttcccagtttctcattcaacatactgctcaatacatggatagaaaacatccgtattattgatggaagtcataaatttagtgctaatcttctcatttgtcctattcagtaagttatagttcagtatgattgtcatgttctatttgacctaattgtgtcatgtacttgagtaatacaacatgacttgcaggccctaatttgttttcaagaactgtttattgattttttttccagttgatttggtcctaaaccaaagtgctttgcatagttaaggcgagtgtttgacccccgccttaccttcgaagcggtaaagtgtaaggcgagacaacaccttaatcatatataaatataggaaaatatagaaaattagtcttgaatagaagtacgaaagtaccaaacagaagtctataagttcaatataagcaaacataataggctaaaagtccaacataagtaggttctgatactctcatctctcaagttctgatacatcatcaaactcatcaaaaatgggaggattactgtcttcttcgcgttctctcccaccggatatatcatcatcttcactcacattcaagtcatctttcgcatgattggttgccgcgtcctacccgcccagactcgcggcatgcgttggccgggcgcgagcgagtgtttggttgccgcacccacgccctccggactgcatgtgcgcatgcagtttagtgctttttttcgccgttctgcctgcaagcgtggagaagccggaaattaccttcgctgggggaccaggcccgcacgaggcaggcacgtgacagaccggcaaccaatcagcccccttgtggatctggctcaaagtcttcgtccatggcacctccctcttcttcttacggcctcattcttgcatgctttctctatgtaaggccagaactttgtctctgactagcttgccttggaaggttgtgccctcgaagcgactccgatgctctagtagcaacatcaacatgatccatcatgtgaggtcaacaatattatcattgtccctgctggggtgtaccactgatgagtatccactcgttgtcccaatcaaaatcctcaataattaatgggtcatagcttgtgccggctttctccctcatttgaaacctacttcgcatcttttgattgtatgaaacatagaccaagtcattcaaccttttatgcaacaacaagtttctcttctttgtatgtatagtaagtaacaaacccaacctaaataagtagcaagaaatagattgaagctagtaaacataagcgaagtagcaaaaaatggacttacaaattcaaatgtgcttcaattcctctcacaaccggatgaggaagcacaaagtctaaccagtaaccacacgcttggcaaacctttgaaattcatatgctcggccgccatatgaacgttatcaatcaactacgcagatgcaaacagcgacacggtcacacacataggtatacaacagcaggaaagaataaaaaaagatgtgctgaaattagcaatcagccaagcatatagtactttagagggctctttgcttgaatgttttcaagtgccaacttgtttgaaaaatagaccctctatgatcttcataatgcatggcatgctcattaatcttcgaccgtatttcttcattggactccattcttgctagcacataattgaaacaactcctcagctttacaacatatctatcatctccctttggatggcaaagaattttcccaggttcaaataaagtgcagcaccatacgatggatggtccatttgtttcatccaacgaccctcaataatgtccataattttttcagcaatgcttgcttgttttgtgtagggaagctaagccttttctcttttgcaacatccattagtgctgcaatttatgtcatgtatgttttttcatctccatcaactgccctaagcactataagaagtgccaaagctctgaggcaatcttcaactgaagaccaaaaagtcttagctagaataatattacaccccccttccagcctctgtctttgccaacttgttgcagttccatgcatctcacaaaaagtgctctcaaggcatcttgatgtttatgtagacttttcaaagtaaggaatgtggcaaaacgagtggctgctggtcttaaaggatccccctcctatcttctccctcattgcacttagaattcctccatgcctataaataaaagtggtgactcttttggcttgtgcaattagtctttcaaatatccaatatcctccaccatgaggtccaaacaatgtgcagtacaaggaccctagaacaatgttaaaatactatccattagaagcctacccactgccttatatttttttctcgaatacgcaggagagctgcgtatcaattcattaatagtagaggagaaatatatatacaagaaaaaggcccacacacttgcacacacccactaggaacagaactgcaagaacatttgcgcctgttacagcacagaaacgaccctacacaacaactaaaatcggtatgccgtagcctccagaagctgcagatccttggcccctgctgcactccaacacaaaatctcatcaccagccaagcacaaggcagcagccaatcgtggaggtttgcgaccaaagacattcatttctgtgtctccacaaggtccatgcccctaagattatgagagagttaaaacctttctgaatggagcttcgcatagagctggaagaactgctccaccaatccaaaaaggaggtcgcctcaggctgaggggcaagaagtgccaaacccattcggctaagaaaaaagaaccagaactgacacgaaaagagacaggagacaagaaggcgatatagcgtttcacgttcttggtcacacaacacacaagcttcagggtgtggcagattcgtcctttcaagtcgatcagatgtccaacacctattgtgggcagccaaccacatgaagaaggcacatttaggcggcacccacaatttccagatacgctcccatggttcaaagaacaacgagctctgcatgagagcatcatatgccgatcttgctgaatatgccctgacggagagaggctccaaaaatgtctatccggcatttccagcacccctggctgaagctgcaccacgtgtatagcctctcaaataccaagaaactcttgctaactctgccaagaaataactccatggatatcgtggacccatcttgaatctgttagagcatctaggaccatccttcgattagctattctggtgggaatcatactatgtataagtggtgctagttcctttaaccgctgcctcatcaaccatctatcctcccaaaacaaggtggtgctaccatcgcctagttcagtagtcacggccatgttgaaaattccttgcacctgtttatttgcttgtagcttgaaggcagcccatggtctctgtcagcctttggctttgtggaagcagcctccttagtggtttggtatgaacctgaagaccgcctatcatccacaacctattcagggattctctggagcatgcttgcgaccttcccaaccacttttggcatgttttgggcttagttgtagctggttgcctaaactgaaaggcggctctcctccgtttagcagctgtcccggaacttggctgcacaacggagcaatcagattcattctgtcctagcctctgcccctgcacctgcccatgtactggaccaatgttataaggaaaataggcctgttcctcttcttctccaagtaagctgtcatctcttttctaatctcagtggtggtgttgaaacacatgactgtcctcatatcccccggcaaggtgttctttataccttttaattccttctttgttaccatgttgcatcggatgcatgtcaccttatcctgattccctatttctgtccaataaccgtacttccagcctgggtcattgaattttgcctctggatcttgcatggggtgataaggatcaacatcaatgggagcagcagcagcggatgcggatcagacactctccatgacaatggcttactctgtacaggtggatagtaagaaaaaggcaaaggttcagctcactaattaacatcagagagtggggaacagagcagcacggaggcccattatcttgcaccggatttaaagcagagggctgctgctaggatgctggcctgcccgccctgtctggctgcgccagcgccacccctcctgcgtggccacaccccactcctccctgtctgcgcctgcatgccttgcttggcccgtgccgcccacctcgctgtgccgcccgtcctgcctggtcacgccactcctcacccctccttcgaacagaacaggcgcaccgcgcaactcagcctttgaacagagcagcctccgcccacaaccagccgccttttcattcccttattcccataatgcgacaccctagaaccgctttacggacgtctgaggtgccagagcgactagacggtaaggaagatgccttagtgtcaatcttaaggcgggtaaatcacctcattttttctgaccgccttaccgcctaagggacgccttaatagtttgcattagagattttcccttcaatgtatttgacattttttgtaggcatctttagaagaggagaaagagtcacttaaagctaaaatatcgaagctgcaaagcaacctaagaatgggccttgaaattgaacaacatttgcaaagaaatgcacgaatattagagaaaagacaggcactgtatgatggattcctgagaaatggattgtccgaacttcaaaagttctacacatgtcaaaaggctgaaattatgaaaatattggaagaagaatcgttgcggttgatgaaagttgttgcagagattcaggataaactaactgaaatttgtatcaacactgaagttagtgaccaccctgccgatgagattcaatgttgtgacagcagttgtaaagatgtgcatgttactaaagatatcagtcctagcacatgtcgtaagatggaagcacttatgctcttctcacaggaacaagaaagatacctattagagaaacagagagacctgattgttatcgaggaactccagaagaacttatctcaagttaaagatgaaaaggtgaaggtcctgatggaattaacaaaactaaaagaacaatatttgctattgaagggctctgctgtcaaggaaggtcatgatactggtgattcatctaaactcattcctgggcatgaccaacaagggatgctgaagactatgctgaagaggacatctttaagacactggatgaggaaagaaagtaatactattggacatgggagctctgatggaaatgatcatacagtttgcaaagaacattcagtggatgttgcaagattaagagttgaaaatgctatgcttcttgaaggtgttggtactgttgagcatctcacttcttcagtgcatagactgcatattgtgcttttgaaggcagggcaggattttttttggttgtattactaggtgataactttcataccaacaaacatgtcaggcttatgatgatatcaagtcagctgatcctttggagagtacctttgaagcgctcaacagtcttataactgaagcaaaccttatgaagacagctcttaatgtggttcttcctgtaagctggtccggggattcatcagatgcaattaaatatgaagctatgtgcgatccatctgattcacctaaatcgaagtctgggaaagtagacccgctctcttctgcaggcatggagatggtggagctactaatattggctgctgagattctcaaggagagctttctggtgaagaaataaggcctccatgtaaggacgagtatggctctccttgtttgtttagaagcatgcaatttaatccttaatttttttgggtgtatatacttaaactgattgctaaaagtgcactactagattatttcggatgtagagaaagagccgaatgtgcactgtaatttacggttcgctgctattgatgtgtcttgtgttggtagactaaaggatttaagagccatgtgtacaaaattcagtttacaagcaaagatcaaagaatagacatgaactagggaaagagaaagaaaaacaaactgaaagttccatacctaaaagcgtcggcactggttgtcg

SEQ ID NO: 85103 - DNA, 7236 bp, Zea Mays
gaaatttcttcattgcaagcgtctactttctctctctctctctctctctctcgttgcccccgcatactctctgtcttgggcgctctctgtctctggtggcggcgagtagcatactctctgtcttgggcgctctgtctctggtggcgacgactcgccgccgccgccgccgcgataggccacgcctcctggtcgccatttccggatccttaccgacgacgcgcacccaccaccccatctttttccgttcctgctgtgcgacacacaaaccctagctgtatcgggtgggctgtgaaatggaccaagctgcagattcctctgaactgcttcgtcgcatcgaggagctccagcgcgaaaaggatgaaaaacagaattctttggaactattgttaagacggattgaagggctacaatatgaaatggatgaaaaagtagatcttgttgaagtgttaactcgtcaagttgaaaatctgcagcgagagcgtgatgagctcagaaaagatattgagcaattatgtatgcaacaagctgggcctggttatgtttctgttgcaactcgaatgcttactcagagctttggaacaggatattgagaacctccagaaaaagttaggtggttgcttaagagagaatcaaaatttgcaagaggagcttgctgaagcttatcgaattaagagccagcttgctgagttacatggtgctgcactatcaaagaacaaggatcttgaaaagcaagtaagatttttccagagcagtgtcgctcaagcgtttgctgaacgggacagttcattaatggagtgtgagaaagcaaaagagcgggaagaagcagtgtcaagaaagtttgctgattttgaggaaaggatgagagaatatcaatcagagattgatgaacagaaacacttaaatgatgacttgcagagagaactgacagaactgaaggcacatacagaattgtccttgaaaagactctggatgttcttcaagccttactattgaagagaagtgttcaatccttcttggtgattctgctgacaattggagttttagctctgatggcggaacctcaactttgaagacttatgcagttatgctttgttcccagtttctcattcaacatactgctcaatacatggatagaaaacatccgtattattgatggaagtcataaatttagtgctaatcttctcatttgtcctattcagtaagttatagttcagtatgattgtcatgttctatttgacctaattgtgtcatgtacttgagtaatacaacatgacttgcaggccctaatttgttttcaagaactgtttattgattttttttccagttgatttggtcctaaaccaaagtgctttgcatagttaaggcgagtgtttgacccccgccttaccttcgaagcggtaaagtgtaaggcgagacaacaccttaatcatatataaatataggaaaatatagaaaattagtcttgaatagaagtacgaaagtaccaaacagaagtctataagttcaatataagcaaacataataggctaaaagtccaacataagtaggttctgatactctcatctctcaagttctgatacatcatcaaactcatcaaaaatgggaggattactgtcttcttcgcgttctctcccaccggatatatcatcatcttcactcacattcaagtcatctttcgcatgattggttgccgcgtcctacccgcccagactcgcggcatgcgttggccgggcgcgagcgagtgtttggttgccgcacccacgccctccggactgcatgtgcgcatgcagtttagtgctttttttcgccgttctgcctgcaagcgtggagaagccggaaattaccttcgctgggggaccaggcccgcacgaggcaggcacgtgacagaccggcaaccaatcagcccccttgtggatctggctcaaagtcttcgtccatggcacctccctcttcttcttacggcctcattcttgcatgctttctctatgtaaggccagaactttgtctctgactagcttgccttggaaggttgtgccctcgaagcgactccgatgctctagtagcaacatcaacatgatccatcatgtgaggtcaacaatattatcattgtccctgctggggtgtaccactgatgagtatccactcgttgtcccaatcaaaatcctcaataattaatgggtcatagcttgtgccggctttctccctcatttgaaacctacttcgcatcttttgattgtatgaaacatagaccaagtcattcaaccttttatgcaacaacaagtttctcttctttgtatgtatagtaagtaacaaacccaacctaaataagtagcaagaaatagattgaagctagtaaacataagcgaagtagcaaaaaatggacttacaaattcaaatgtgcttcaattcctctcacaaccggatgaggaagcacaaagtctaaccagtaaccacacgcttggcaaacctttgaaattcatatgctcggccgccatatgaacgttatcaatcaactacgcagatgcaaacagcgacacggtcacacacataggtatacaacagcaggaaagaataaaaaaagatgtgctgaaattagcaatcagccaagcatatagtactttagagggctctttgcttgaatgttttcaagtgccaacttgtttgaaaaatagaccctctatgatcttcataatgcatggcatgctcattaatcttcgaccgtatttcttcattggactccattcttgctagcacataattgaaacaactcctcagctttacaacatatctatcatctccctttggatggcaaagaattttcccaggttcaaataaagtgcagcaccatacgatggatggtccatttgtttcatccaacgaccctcaataatgtccataattttttcagcaatgcttgcttgttttgtgtagggaagctaagccttttctcttttgcaacatccattagtgctgcaatttatgtcatgtatgttttttcatctccatcaactgccctaagcactataagaagtgccaaagctctgaggcaatcttcaactgaagaccaaaaagtcttagctagaataatattacaccccccttccagcctctgtctttgccaacttgttgcagttccatgcatctcacaaaaagtgctctcaaggcatcttgatgtttatgtagacttttcaaagtaaggaatgtggcaaaacgagtggctgctggtcttaaaggatccccctcctatcttctccctcattgcacttagaattcctccatgcctataaataaaagtggtgactcttttggcttgtgcaattagtctttcaaatatccaatatcctccaccatgaggtccaaacaatgtgcagtacaaggaccctagaacaatgttaaaatactatccattagaagcctacccactgccttatatttttttctcgaatacgcaggagagctgcgtatcaattcattaatagtagaggagaaatatatatacaagaaaaaggcccacacacttgcacacacccactaggaacagaactgcaagaacatttgcgcctgttacagcacagaaacgaccctacacaacaactaaaatcggtatgccgtagcctccagaagctgcagatccttggcccctgctgcactccaacacaaaatctcatcaccagccaagcacaaggcagcagccaatcgtggaggtttgcgaccaaagacattcatttctgtgtctccacaaggtccatgcccctaagattatgagagagttaaaacctttctgaatggagcttcgcatagagctggaagaactgctccaccaatccaaaaaggaggtcgcctcaggctgaggggcaagaagtgccaaacccattcggctaagaaaaaagaaccagaactgacacgaaaagagacaggagacaagaaggcgatatagcgtttcacgttcttggtcacacaacacacaagcttcagggtgtggcagattcgtcctttcaagtcgatcagatgtccaacacctattgtgggcagccaaccacatgaagaaggcacatttaggcggcacccacaatttccagatacgctcccatggttcaaagaacaacgagctctgcatgagagcatcatatgccgatcttgctgaatatgccctgacggagagaggctccaaaaatgtctatccggcatttccagcacccctggctgaagctgcaccacgtgtatagcctctcaaataccaagaaactcttgctaactctgccaagaaataactccatggatatcgtggacccatcttgaatctgttagagcatctaggaccatccttcgattagctattctggtgggaatcatactatgtataagtggtgctagttcctttaaccgctgcctcatcaaccatctatcctcccaaaacaaggtggtgctaccatcgcctagttcagtagtcacggccatgttgaaaattccttgcacctgtttatttgcttgtagcttgaaggcagcccatggtctctgtcagcctttggctttgtggaagcagcctccttagtggtttggtatgaacctgaagaccgcctatcatccacaacctattcagggattctctggagcatgcttgcgaccttcccaaccacttttggcatgttttgggcttagttgtagctggttgcctaaactgaaaggcggctctcctccgtttagcagctgtcccggaacttggctgcacaacggagcaatcagattcattctgtcctagcctctgcccctgcacctgcccatgtactggaccaatgttataaggaaaataggcctgttcctcttcttctccaagtaagctgtcatctcttttctaatctcagtggtggtgttgaaacacatgactgtcctcatatcccccggcaaggtgttctttataccttttaattccttctttgttaccatgttgcatcggatgcatgtcaccttatcctgattccctatttctgtccaataaccgtacttccagcctgggtcattgaattttgcctctggatcttgcatggggtgataaggatcaacatcaatgggagcagcagcagcggatgcggatcagacactctccatgacaatggcttactctgtacaggtggatagtaagaaaaaggcaaaggttcagctcactaattaacatcagagagtggggaacagagcagcacggaggcccattatcttgcaccggatttaaagcagagggctgctgctaggatgctggcctgcccgccctgtctggctgcgccagcgccacccctcctgcgtggccacaccccactcctccctgtctgcgcctgcatgccttgcttggcccgtgccgcccacctcgctgtgccgcccgtcctgcctggtcacgccactcctcacccctccttcgaacagaacaggcgcaccgcgcaactcagcctttgaacagagcagcctccgcccacaaccagccgccttttcattcccttattcccataatgcgacaccctagaaccgctttacggacgtctgaggtgccagagcgactagacggtaaggaagatgccttagtgtcaatcttaaggcgggtaaatcacctcattttttctgaccgccttaccgcctaagggacgccttaatagtttgcattagagattttcccttcaatgtatttgacattttttgtaggcatctttagaagaggagaaagagtcacttaaagctaaaatatcgaagctgcaaagcaacctaagaatgggccttgaaattgaacaacatttgcaaagaaatgcacgaatattagagaaaagacaggcactgtatgatggattcctgagaaatggattgtccgaacttcaaaagttctacacatgtcaaaaggctgaaattatgaaaatattggaagaagaatcgttgcggttgatgaaagttgttgcagagattcaggataaactaactgaaatttgtatcaacactgaagttagtgaccaccctgccgatgagattcaatgttgtgacagcagttgtaaagatgtgcatgttactaaagatatcagtcctagcacatgtcgtaagagtgattatcctgctgatcttaactccgtgtcgtttgatgaatctaaagcacttgcacaagccttacaggagaagatggaagcacttatgctcttctcacaggaacaagaaagatacctattagagaaacagagagacctgattgttatcgaggaactccagaagaacttatctcaagttaaagatgaaaaggtgaaggtcctgatggaattaacaaaactaaaagaacaatatttgctattgaagggctctgctgtcaaggaaggtcatgatactggtgattcatctaaactcattcctgggcatgaccaacaagggatgctgaagactatgctgaagaggacatctttaagacactggatgaggaaagaaagtaatactattggacatgggagctctgatggaaatgatcatacagtttgcaaagaacattcagtggatgttgcaagattaagagttgaaaatgctatgcttcttgaaggtgttggtactgttgagcatctcacttcttcagtgcatagactgcatattgtgcttttgaaggcttatgatgatatcaagtcagctgatcctttggagagtacctttgaagcgctcaacagtcttataactgaagcaaaccttatgaagacagctcttaatgtggttcttcctgtaagctggtccggggattcatcagatgcaattaaatatgaagctatgtgcgatccatctgattcacctaaatcgaagtctgggaaagtagacccgctctcttctgcaggcatggagatggtggagctactaatattggctgctgagattctcaaggagagctttctggtgaagaaataaggcctccatgtaaggacgagtatggctctccttgtttgtttagaagcatgcaatttaatccttaatttttttgggtgtatatacttaaactgattgctaaaagtgcactactagattatttcggatgtagagaaagagccgaatgtgcactgtaatttacggttcgctgctattgatgtgtcttgtgttggtagactaaaggatttaagagccatgtgtacaaaattcagtttacaagcaaagatcaaagaatagacatgaactagggaaagagaaagaaaaacaaactgaaagttccatacctaaaagcgtcggcactggttgtcg

SEQ ID NO: 85104 - DNA, 7569 bp, Zea Mays
gaaatttcttcattgcaagcgtctactttctctctctctctctctctctctcgttgcccccgcatactctctgtcttgggcgctctctgtctctggtggcggcgagtagcatactctctgtcttgggcgctctgtctctggtggcgacgactcgccgccgccgccgccgcgataggccacgcctcctggtcgccatttccggatccttaccgacgacgcgcacccaccaccccatctttttccgttcctgctgtgcgacacacaaaccctagctgtatcgggtgggctgtgaaatggaccaagctgcagattcctctgaactgcttcgtcgcatcgaggagctccagcgcgaaaaggatgaaaaacagaattctttggaactattgttaagacggattgaagggctacaatatgaaatggatgaaaaagtagatcttgttgaagtgttaactcgtcaagttgaaaatctgcagcgagagcgtgatgagctcagaaaagatattgagcaattatgtatgcaacaagctgggcctggttatgtttctgttgcaactcgaatgcttactcagaggacagcagctttggaacaggatattgagaacctccagaaaaagttaggtggttgcttaagagagaatcaaaatttgcaagaggagcttgctgaagcttatcgaattaagagccagcttgctgagttacatggtgctgcactatcaaagtgtgagaaagcaaaagagcgggaagaagcagtgtcaagaaagtttgctgattttgaggaaaggatgagagaatatcaatcagagattgatgaacagaaacacttaaatgatgacttgcagagagaactgacagaactgaaggcacatacagaattgtccttgaaagttattctaaaattctatgaccttcgttgcagagactctggatgttcttcaagccttactattgaagagaagtgttcaatccttcttggtgattctgctgacaattggagttttagctctgatggcggaacctcaactttgaagtacattgtaaaccacccttatccattataaagaatgattcatatttaagtatgcgatctgtttttttttttgcatttgtattgcaagatacaaattctctgtggcactaaacatcatctggcgcagagccagaaaattatagatatggggacgaaatgctaaaaaataaattattagaaggcaaaatcagcattttcattgaattttatgtgcataagaggaacttatctatcataacagagtgcttgatcctccctccttccgcccctgaacatgttaatgcattgttggctaattggcttgttcagttttattctgggaactaaatgaatgcagaaggtaggaaatgatgaaactttgctggcatctgtttcaggacttatgcagttatgctttgttcccagtttctcattcaacatactgctcaatacatggatagaaaacatccgtattattgatggaagtcataaatttagtgctaatcttctcatttgtcctattcagtaagttatagttcagtatgattgtcatgttctatttgacctaattgtgtcatgtacttgagtaatacaacatgacttgcaggccctaatttgttttcaagaactgtttattgattttttttccagttgatttggtcctaaaccaaagtgctttgcatagttaaggcgagtgtttgacccccgccttaccttcgaagcggtaaagtgtaaggcgagacaacaccttaatcatatataaatataggaaaatatagaaaattagtcttgaatagaagtacgaaagtaccaaacagaagtctataagttcaatataagcaaacataataggctaaaagtccaacataagtaggttctgatactctcatctctcaagttctgatacatcatcaaactcatcaaaaatgggaggattactgtcttcttcgcgttctctcccaccggatatatcatcatcttcactcacattcaagtcatctttcgcatgattggttgccgcgtcctacccgcccagactcgcggcatgcgttggccgggcgcgagcgagtgtttggttgccgcacccacgccctccggactgcatgtgcgcatgcagtttagtgctttttttcgccgttctgcctgcaagcgtggagaagccggaaattaccttcgctgggggaccaggcccgcacgaggcaggcacgtgacagaccggcaaccaatcagcccccttgtggatctggctcaaagtcttcgtccatggcacctccctcttcttcttacggcctcattcttgcatgctttctctatgtaaggccagaactttgtctctgactagcttgccttggaaggttgtgccctcgaagcgactccgatgctctagtagcaacatcaacatgatccatcatgtgaggtcaacaatattatcattgtccctgctggggtgtaccactgatgagtatccactcgttgtcccaatcaaaatcctcaataattaatgggtcatagcttgtgccggctttctccctcatttgaaacctacttcgcatcttttgattgtatgaaacatagaccaagtcattcaaccttttatgcaacaacaagtttctcttctttgtatgtatagtaagtaacaaacccaacctaaataagtagcaagaaatagattgaagctagtaaacataagcgaagtagcaaaaaatggacttacaaattcaaatgtgcttcaattcctctcacaaccggatgaggaagcacaaagtctaaccagtaaccacacgcttggcaaacctttgaaattcatatgctcggccgccatatgaacgttatcaatcaactacgcagatgcaaacagcgacacggtcacacacataggtatacaacagcaggaaagaataaaaaaagatgtgctgaaattagcaatcagccaagcatatagtactttagagggctctttgcttgaatgttttcaagtgccaacttgtttgaaaaatagaccctctatgatcttcataatgcatggcatgctcattaatcttcgaccgtatttcttcattggactccattcttgctagcacataattgaaacaactcctcagctttacaacatatctatcatctccctttggatggcaaagaattttcccaggttcaaataaagtgcagcaccatacgatggatggtccatttgtttcatccaacgaccctcaataatgtccataattttttcagcaatgcttgcttgttttgtgtagggaagctaagccttttctcttttgcaacatccattagtgctgcaatttatgtcatgtatgttttttcatctccatcaactgccctaagcactataagaagtgccaaagctctgaggcaatcttcaactgaagaccaaaaagtcttagctagaataatattacaccccccttccagcctctgtctttgccaacttgttgcagttccatgcatctcacaaaaagtgctctcaaggcatcttgatgtttatgtagacttttcaaagtaaggaatgtggcaaaacgagtggctgctggtcttaaaggatccccctcctatcttctccctcattgcacttagaattcctccatgcctataaataaaagtggtgactcttttggcttgtgcaattagtctttcaaatatccaatatcctccaccatgaggtccaaacaatgtgcagtacaaggaccctagaacaatgttaaaatactatccattagaagcctacccactgccttatatttttttctcgaatacgcaggagagctgcgtatcaattcattaatagtagaggagaaatatatatacaagaaaaaggcccacacacttgcacacacccactaggaacagaactgcaagaacatttgcgcctgttacagcacagaaacgaccctacacaacaactaaaatcggtatgccgtagcctccagaagctgcagatccttggcccctgctgcactccaacacaaaatctcatcaccagccaagcacaaggcagcagccaatcgtggaggtttgcgaccaaagacattcatttctgtgtctccacaaggtccatgcccctaagattatgagagagttaaaacctttctgaatggagcttcgcatagagctggaagaactgctccaccaatccaaaaaggaggtcgcctcaggctgaggggcaagaagtgccaaacccattcggctaagaaaaaagaaccagaactgacacgaaaagagacaggagacaagaaggcgatatagcgtttcacgttcttggtcacacaacacacaagcttcagggtgtggcagattcgtcctttcaagtcgatcagatgtccaacacctattgtgggcagccaaccacatgaagaaggcacatttaggcggcacccacaatttccagatacgctcccatggttcaaagaacaacgagctctgcatgagagcatcatatgccgatcttgctgaatatgccctgacggagagaggctccaaaaatgtctatccggcatttccagcacccctggctgaagctgcaccacgtgtatagcctctcaaataccaagaaactcttgctaactctgccaagaaataactccatggatatcgtggacccatcttgaatctgttagagcatctaggaccatccttcgattagctattctggtgggaatcatactatgtataagtggtgctagttcctttaaccgctgcctcatcaaccatctatcctcccaaaacaaggtggtgctaccatcgcctagttcagtagtcacggccatgttgaaaattccttgcacctgtttatttgcttgtagcttgaaggcagcccatggtctctgtcagcctttggctttgtggaagcagcctccttagtggtttggtatgaacctgaagaccgcctatcatccacaacctattcagggattctctggagcatgcttgcgaccttcccaaccacttttggcatgttttgggcttagttgtagctggttgcctaaactgaaaggcggctctcctccgtttagcagctgtcccggaacttggctgcacaacggagcaatcagattcattctgtcctagcctctgcccctgcacctgcccatgtactggaccaatgttataaggaaaataggcctgttcctcttcttctccaagtaagctgtcatctcttttctaatctcagtggtggtgttgaaacacatgactgtcctcatatcccccggcaaggtgttctttataccttttaattccttctttgttaccatgttgcatcggatgcatgtcaccttatcctgattccctatttctgtccaataaccgtacttccagcctgggtcattgaattttgcctctggatcttgcatggggtgataaggatcaacatcaatgggagcagcagcagcggatgcggatcagacactctccatgacaatggcttactctgtacaggtggatagtaagaaaaaggcaaaggttcagctcactaattaacatcagagagtggggaacagagcagcacggaggcccattatcttgcaccggatttaaagcagagggctgctgctaggatgctggcctgcccgccctgtctggctgcgccagcgccacccctcctgcgtggccacaccccactcctccctgtctgcgcctgcatgccttgcttggcccgtgccgcccacctcgctgtgccgcccgtcctgcctggtcacgccactcctcacccctccttcgaacagaacaggcgcaccgcgcaactcagcctttgaacagagcagcctccgcccacaaccagccgccttttcattcccttattcccataatgcgacaccctagaaccgctttacggacgtctgaggtgccagagcgactagacggtaaggaagatgccttagtgtcaatcttaaggcgggtaaatcacctcattttttctgaccgccttaccgcctaagggacgccttaatagtttgcattagagattttcccttcaatgtatttgacattttttgtaggcatctttagaagaggagaaagagtcacttaaagctaaaatatcgaagctgcaaagcaacctaagaatgggccttgaaattgaacaacatttgcaaagaaatgcacgaatattagagaaaagacaggcactgtatgatggattcctgagaaatggattgtccgaacttcaaaagttctacacatgtcaaaaggctgaaattatgaaaatattggaagaagaatcgttgcggttgatgaaagttgttgcagagattcaggataaactaactgaaatttgtatcaacactgaagttagtgaccaccctgccgatgagattcaatgttgtgacagcagttgtaaagatgtgcatgttactaaagatatcagtcctagcacatgtcgtaagagtgattatcctgctgatcttaactccgtgtcgtttgatgaatctaaagcacttgcacaagccttacaggagaagatggaagcacttatgctcttctcacaggaacaagaaagatacctattagagaaacagagagacctgattgttatcgaggaactccagaagaacttatctcaagttaaagatgaaaaggtgaaggtcctgatggaattaacaaaactaaaagaacaatatttgctattgaagggctctgctgtcaaggaaggtcatgatactggtgattcatctaaactcattcctgggcatgaccaacaagggatgctgaagactatgctgaagaggacatctttaagacactggatgaggaaagaaagtaatactattggacatgggagctctgatggaaatgatcatacagtttgcaaagaacattcagtggatgttgcaagattaagagttgaaaatgctatgcttcttgaaggtgttggtactgttgagcatctcacttcttcagtgcatagactgcatattgtgcttttgaaggcttatgatgatatcaagtcagctgatcctttggagagtacctttgaagcgctcaacagtcttataactgaagcaaaccttatgaagacagctcttaatgtggttcttcctgtaagctggtccggggattcatcagatgcaattaaatatgaagctatgtgcgatccatctgattcacctaaatcgaagtctgggaaagtagacccgctctcttctgcaggcatggagatggtggagctactaatattggctgctgagattctcaaggagagctttctggtgaagaaataaggcctccatgtaaggacgagtatggctctccttgtttgtttagaagcatgcaatttaatccttaatttttttgggtgtatatacttaaactgattgctaaaagtgcactactagattatttcggatgtagagaaagagccgaatgtgcactgtaatttacggttcgctgctattgatgtgtcttgtgttggtagactaaaggatttaagagccatgtgtacaaaattcagtttacaagcaaagatcaaagaatagacatgaactagggaaagagaaagaaaaacaaactgaaagttccatacctaaaagcgtcggcactggttgtcg

SEQ ID NO: 85105 - DNA, 7645 bp, Zea Mays
gaaatttcttcattgcaagcgtctactttctctctctctctctctctctctcgttgcccccgcatactctctgtcttgggcgctctctgtctctggtggcggcgagtagcatactctctgtcttgggcgctctgtctctggtggcgacgactcgccgccgccgccgccgcgataggccacgcctcctggtcgccatttccggatccttaccgacgacgcgcacccaccaccccatctttttccgttcctgctgtgcgacacacaaaccctagctgtatcgggtgggctgtgaaatggaccaagctgcagattcctctgaactgcttcgtcgcatcgaggagctccagcgcgaaaaggatgaaaaacagaattctttggaactattgttaagacggattgaagggctacaatatgaaatggatgaaaaagtagatcttgttgaagtgttaactcgtcaagttgaaaatctgcagcgagagcgtgatgagctcagaaaagatattgagcaattatgtatgcaacaagctgggcctggttatgtttctgttgcaactcgaatgcttactcagagctttggaacaggatattgagaacctccagaaaaagttaggtggttgcttaagagagaatcaaaatttgcaagaggagcttgctgaagcttatcgaattaagagccagcttgctgagttacatggtgctgcactatcaaagaacaaggatcttgaaaagcaagtaagatttttccagagcagtgtcgctcaagcgtttgctgaacgggacagttcattaatggagtgtgagaaagcaaaagagcgggaagaagcagtgtcaagaaagtttgctgattttgaggaaaggatgagagaatatcaatcagagattgatgaacagaaacacttaaatgatgacttgcagagagaactgacagaactgaaggcacatacagaattgtccttgaaagttattctaaaattctatgaccttcgttgcagagactctggatgttcttcaagccttactattgaagagaagtgttcaatccttcttggtgattctgctgacaattggagttttagctctgatggcggaacctcaactttgaagtacattgtaaaccacccttatccattataaagaatgattcatatttaagtatgcgatctgtttttttttttgcatttgtattgcaagatacaaattctctgtggcactaaacatcatctggcgcagagccagaaaattatagatatggggacgaaatgctaaaaaataaattattagaaggcaaaatcagcattttcattgaattttatgtgcataagaggaacttatctatcataacagagtgcttgatcctccctccttccgcccctgaacatgttaatgcattgttggctaattggcttgttcagttttattctgggaactaaatgaatgcagaaggtaggaaatgatgaaactttgctggcatctgtttcaggacttatgcagttatgctttgttcccagtttctcattcaacatactgctcaatacatggatagaaaacatccgtattattgatggaagtcataaatttagtgctaatcttctcatttgtcctattcagtaagttatagttcagtatgattgtcatgttctatttgacctaattgtgtcatgtacttgagtaatacaacatgacttgcaggccctaatttgttttcaagaactgtttattgattttttttccagttgatttggtcctaaaccaaagtgctttgcatagttaaggcgagtgtttgacccccgccttaccttcgaagcggtaaagtgtaaggcgagacaacaccttaatcatatataaatataggaaaatatagaaaattagtcttgaatagaagtacgaaagtaccaaacagaagtctataagttcaatataagcaaacataataggctaaaagtccaacataagtaggttctgatactctcatctctcaagttctgatacatcatcaaactcatcaaaaatgggaggattactgtcttcttcgcgttctctcccaccggatatatcatcatcttcactcacattcaagtcatctttcgcatgattggttgccgcgtcctacccgcccagactcgcggcatgcgttggccgggcgcgagcgagtgtttggttgccgcacccacgccctccggactgcatgtgcgcatgcagtttagtgctttttttcgccgttctgcctgcaagcgtggagaagccggaaattaccttcgctgggggaccaggcccgcacgaggcaggcacgtgacagaccggcaaccaatcagcccccttgtggatctggctcaaagtcttcgtccatggcacctccctcttcttcttacggcctcattcttgcatgctttctctatgtaaggccagaactttgtctctgactagcttgccttggaaggttgtgccctcgaagcgactccgatgctctagtagcaacatcaacatgatccatcatgtgaggtcaacaatattatcattgtccctgctggggtgtaccactgatgagtatccactcgttgtcccaatcaaaatcctcaataattaatgggtcatagcttgtgccggctttctccctcatttgaaacctacttcgcatcttttgattgtatgaaacatagaccaagtcattcaaccttttatgcaacaacaagtttctcttctttgtatgtatagtaagtaacaaacccaacctaaataagtagcaagaaatagattgaagctagtaaacataagcgaagtagcaaaaaatggacttacaaattcaaatgtgcttcaattcctctcacaaccggatgaggaagcacaaagtctaaccagtaaccacacgcttggcaaacctttgaaattcatatgctcggccgccatatgaacgttatcaatcaactacgcagatgcaaacagcgacacggtcacacacataggtatacaacagcaggaaagaataaaaaaagatgtgctgaaattagcaatcagccaagcatatagtactttagagggctctttgcttgaatgttttcaagtgccaacttgtttgaaaaatagaccctctatgatcttcataatgcatggcatgctcattaatcttcgaccgtatttcttcattggactccattcttgctagcacataattgaaacaactcctcagctttacaacatatctatcatctccctttggatggcaaagaattttcccaggttcaaataaagtgcagcaccatacgatggatggtccatttgtttcatccaacgaccctcaataatgtccataattttttcagcaatgcttgcttgttttgtgtagggaagctaagccttttctcttttgcaacatccattagtgctgcaatttatgtcatgtatgttttttcatctccatcaactgccctaagcactataagaagtgccaaagctctgaggcaatcttcaactgaagaccaaaaagtcttagctagaataatattacaccccccttccagcctctgtctttgccaacttgttgcagttccatgcatctcacaaaaagtgctctcaaggcatcttgatgtttatgtagacttttcaaagtaaggaatgtggcaaaacgagtggctgctggtcttaaaggatccccctcctatcttctccctcattgcacttagaattcctccatgcctataaataaaagtggtgactcttttggcttgtgcaattagtctttcaaatatccaatatcctccaccatgaggtccaaacaatgtgcagtacaaggaccctagaacaatgttaaaatactatccattagaagcctacccactgccttatatttttttctcgaatacgcaggagagctgcgtatcaattcattaatagtagaggagaaatatatatacaagaaaaaggcccacacacttgcacacacccactaggaacagaactgcaagaacatttgcgcctgttacagcacagaaacgaccctacacaacaactaaaatcggtatgccgtagcctccagaagctgcagatccttggcccctgctgcactccaacacaaaatctcatcaccagccaagcacaaggcagcagccaatcgtggaggtttgcgaccaaagacattcatttctgtgtctccacaaggtccatgcccctaagattatgagagagttaaaacctttctgaatggagcttcgcatagagctggaagaactgctccaccaatccaaaaaggaggtcgcctcaggctgaggggcaagaagtgccaaacccattcggctaagaaaaaagaaccagaactgacacgaaaagagacaggagacaagaaggcgatatagcgtttcacgttcttggtcacacaacacacaagcttcagggtgtggcagattcgtcctttcaagtcgatcagatgtccaacacctattgtgggcagccaaccacatgaagaaggcacatttaggcggcacccacaatttccagatacgctcccatggttcaaagaacaacgagctctgcatgagagcatcatatgccgatcttgctgaatatgccctgacggagagaggctccaaaaatgtctatccggcatttccagcacccctggctgaagctgcaccacgtgtatagcctctcaaataccaagaaactcttgctaactctgccaagaaataactccatggatatcgtggacccatcttgaatctgttagagcatctaggaccatccttcgattagctattctggtgggaatcatactatgtataagtggtgctagttcctttaaccgctgcctcatcaaccatctatcctcccaaaacaaggtggtgctaccatcgcctagttcagtagtcacggccatgttgaaaattccttgcacctgtttatttgcttgtagcttgaaggcagcccatggtctctgtcagcctttggctttgtggaagcagcctccttagtggtttggtatgaacctgaagaccgcctatcatccacaacctattcagggattctctggagcatgcttgcgaccttcccaaccacttttggcatgttttgggcttagttgtagctggttgcctaaactgaaaggcggctctcctccgtttagcagctgtcccggaacttggctgcacaacggagcaatcagattcattctgtcctagcctctgcccctgcacctgcccatgtactggaccaatgttataaggaaaataggcctgttcctcttcttctccaagtaagctgtcatctcttttctaatctcagtggtggtgttgaaacacatgactgtcctcatatcccccggcaaggtgttctttataccttttaattccttctttgttaccatgttgcatcggatgcatgtcaccttatcctgattccctatttctgtccaataaccgtacttccagcctgggtcattgaattttgcctctggatcttgcatggggtgataaggatcaacatcaatgggagcagcagcagcggatgcggatcagacactctccatgacaatggcttactctgtacaggtggatagtaagaaaaaggcaaaggttcagctcactaattaacatcagagagtggggaacagagcagcacggaggcccattatcttgcaccggatttaaagcagagggctgctgctaggatgctggcctgcccgccctgtctggctgcgccagcgccacccctcctgcgtggccacaccccactcctccctgtctgcgcctgcatgccttgcttggcccgtgccgcccacctcgctgtgccgcccgtcctgcctggtcacgccactcctcacccctccttcgaacagaacaggcgcaccgcgcaactcagcctttgaacagagcagcctccgcccacaaccagccgccttttcattcccttattcccataatgcgacaccctagaaccgctttacggacgtctgaggtgccagagcgactagacggtaaggaagatgccttagtgtcaatcttaaggcgggtaaatcacctcattttttctgaccgccttaccgcctaagggacgccttaatagtttgcattagagattttcccttcaatgtatttgacattttttgtaggcatctttagaagaggagaaagagtcacttaaagctaaaatatcgaagctgcaaagcaacctaagaatgggccttgaaattgaacaacatttgcaaagaaatgcacgaatattagagaaaagacaggcactgtatgatggattcctgagaaatggattgtccgaacttcaaaagttctacacatgtcaaaaggctgaaattatgaaaatattggaagaagaatcgttgcggttgatgaaagttgttgcagagattcaggataaactaactgaaatttgtatcaacactgaagttagtgaccaccctgccgatgagattcaatgttgtgacagcagttgtaaagatgtgcatgttactaaagatatcagtcctagcacatgtcgtaagagtgattatcctgctgatcttaactccgtgtcgtttgatgaatctaaagcacttgcacaagccttacaggagaagatggaagcacttatgctcttctcacaggaacaagaaagatacctattagagaaacagagagacctgattgttatcgaggaactccagaagaacttatctcaagttaaagatgaaaaggtgaaggtcctgatggaattaacaaaactaaaagaacaatatttgctattgaagggctctgctgtcaaggaaggtcatgatactggtgattcatctaaactcattcctgggcatgaccaacaagggatgctgaagactatgctgaagaggacatctttaagacactggatgaggaaagaaagtaatactattggacatgggagctctgatggaaatgatcatacagtttgcaaagaacattcagtggatgttgcaagattaagagttgaaaatgctatgcttcttgaaggtgttggtactgttgagcatctcacttcttcagtgcatagactgcatattgtgcttttgaaggcttatgatgatatcaagtcagctgatcctttggagagtacctttgaagcgctcaacagtcttataactgaagcaaaccttatgaagacagctcttaatgtggttcttcctgtaagctggtccggggattcatcagatgcaattaaatatgaagctatgtgcgatccatctgattcacctaaatcgaagtctgggaaagtagacccgctctcttctgcaggcatggagatggtggagctactaatattggctgctgagattctcaaggagagctttctggtgaagaaataaggcctccatgtaaggacgagtatggctctccttgtttgtttagaagcatgcaatttaatccttaatttttttgggtgtatatacttaaactgattgctaaaagtgcactactagattatttcggatgtagagaaagagccgaatgtgcactgtaatttacggttcgctgctattgatgtgtcttgtgttggtagactaaaggatttaagagccatgtgtacaaaattcagtttacaagcaaagatcaaagaatagacatgaactagggaaagagaaagaaaaacaaactgaaagttccatacctaaaagcgtcggcactggttgtcg

SEQ ID NO: 85106 - DNA, 7697 bp, Zea Mays
gaacgggttaccgaaatttcttcattgcaagcgtctactttctctctctctctctctctctctcgttgcccccgcatactctctgtcttgggcgctctctgtctctggtggcggcgagtagcatactctctgtcttgggcgctctgtctctggtggcgacgactcgccgccgccgccgccgcgataggccacgcctcctggtcgccatttccggatccttaccgacgacgcgcacccaccaccccatctttttccgttcctgctgtgcgacacacaaaccctagctgtatcgggtgggctgtgaaatggaccaagctgcagattcctctgaactgcttcgtcgcatcgaggagctccagcgcgaaaaggatgaaaaacagaattctttggaactattgttaagacggattgaagggctacaatatgaaatggatgaaaaagtagatcttgttgaagtgttaactcgtcaagttgaaaatctgcagcgagagcgtgatgagctcagaaaagatattgagcaattatgtatgcaacaagctgggcctggttatgtttctgttgcaactcgaatgcttactcagaggacagcagctttggaacaggatattgagaacctccagaaaaagttaggtggttgcttaagagagaatcaaaatttgcaagaggagcttgctgaagcttatcgaattaagagccagcttgctgagttacatggtgctgcactatcaaagaacaaggatcttgaaaagcaagtaagatttttccagagcagtgtcgctcaagcgtttgctgaacgggacagttcattaatggagtgtgagaaagcaaaagagcgggaagaagcagtgtcaagaaagtttgctgattttgaggaaaggatgagagaatatcaatcagagattgatgaacagaaacacttaaatgatgacttgcagagagaactgacagaactgaaggcacatacagaattgtccttgaaaagactctggatgttcttcaagccttactattgaagagaagtgttcaatccttcttggtgattctgctgacaattggagttttagctctgatggcggaacctcaactttgaagtacattgtaaaccacccttatccattataaagaatgattcatatttaagtatgcgatctgtttttttttttgcatttgtattgcaagatacaaattctctgtggcactaaacatcatctggcgcagagccagaaaattatagatatggggacgaaatgctaaaaaataaattattagaaggcaaaatcagcattttcattgaattttatgtgcataagaggaacttatctatcataacagagtgcttgatcctccctccttccgcccctgaacatgttaatgcattgttggctaattggcttgttcagttttattctgggaactaaatgaatgcagaaggtaggaaatgatgaaactttgctggcatctgtttcaggacttatgcagttatgctttgttcccagtttctcattcaacatactgctcaatacatggatagaaaacatccgtattattgatggaagtcataaatttagtgctaatcttctcatttgtcctattcagtaagttatagttcagtatgattgtcatgttctatttgacctaattgtgtcatgtacttgagtaatacaacatgacttgcaggccctaatttgttttcaagaactgtttattgattttttttccagttgatttggtcctaaaccaaagtgctttgcatagttaaggcgagtgtttgacccccgccttaccttcgaagcggtaaagtgtaaggcgagacaacaccttaatcatatataaatataggaaaatatagaaaattagtcttgaatagaagtacgaaagtaccaaacagaagtctataagttcaatataagcaaacataataggctaaaagtccaacataagtaggttctgatactctcatctctcaagttctgatacatcatcaaactcatcaaaaatgggaggattactgtcttcttcgcgttctctcccaccggatatatcatcatcttcactcacattcaagtcatctttcgcatgattggttgccgcgtcctacccgcccagactcgcggcatgcgttggccgggcgcgagcgagtgtttggttgccgcacccacgccctccggactgcatgtgcgcatgcagtttagtgctttttttcgccgttctgcctgcaagcgtggagaagccggaaattaccttcgctgggggaccaggcccgcacgaggcaggcacgtgacagaccggcaaccaatcagcccccttgtggatctggctcaaagtcttcgtccatggcacctccctcttcttcttacggcctcattcttgcatgctttctctatgtaaggccagaactttgtctctgactagcttgccttggaaggttgtgccctcgaagcgactccgatgctctagtagcaacatcaacatgatccatcatgtgaggtcaacaatattatcattgtccctgctggggtgtaccactgatgagtatccactcgttgtcccaatcaaaatcctcaataattaatgggtcatagcttgtgccggctttctccctcatttgaaacctacttcgcatcttttgattgtatgaaacatagaccaagtcattcaaccttttatgcaacaacaagtttctcttctttgtatgtatagtaagtaacaaacccaacctaaataagtagcaagaaatagattgaagctagtaaacataagcgaagtagcaaaaaatggacttacaaattcaaatgtgcttcaattcctctcacaaccggatgaggaagcacaaagtctaaccagtaaccacacgcttggcaaacctttgaaattcatatgctcggccgccatatgaacgttatcaatcaactacgcagatgcaaacagcgacacggtcacacacataggtatacaacagcaggaaagaataaaaaaagatgtgctgaaattagcaatcagccaagcatatagtactttagagggctctttgcttgaatgttttcaagtgccaacttgtttgaaaaatagaccctctatgatcttcataatgcatggcatgctcattaatcttcgaccgtatttcttcattggactccattcttgctagcacataattgaaacaactcctcagctttacaacatatctatcatctccctttggatggcaaagaattttcccaggttcaaataaagtgcagcaccatacgatggatggtccatttgtttcatccaacgaccctcaataatgtccataattttttcagcaatgcttgcttgttttgtgtagggaagctaagccttttctcttttgcaacatccattagtgctgcaatttatgtcatgtatgttttttcatctccatcaactgccctaagcactataagaagtgccaaagctctgaggcaatcttcaactgaagaccaaaaagtcttagctagaataatattacaccccccttccagcctctgtctttgccaacttgttgcagttccatgcatctcacaaaaagtgctctcaaggcatcttgatgtttatgtagacttttcaaagtaaggaatgtggcaaaacgagtggctgctggtcttaaaggatccccctcctatcttctccctcattgcacttagaattcctccatgcctataaataaaagtggtgactcttttggcttgtgcaattagtctttcaaatatccaatatcctccaccatgaggtccaaacaatgtgcagtacaaggaccctagaacaatgttaaaatactatccattagaagcctacccactgccttatatttttttctcgaatacgcaggagagctgcgtatcaattcattaatagtagaggagaaatatatatacaagaaaaaggcccacacacttgcacacacccactaggaacagaactgcaagaacatttgcgcctgttacagcacagaaacgaccctacacaacaactaaaatcggtatgccgtagcctccagaagctgcagatccttggcccctgctgcactccaacacaaaatctcatcaccagccaagcacaaggcagcagccaatcgtggaggtttgcgaccaaagacattcatttctgtgtctccacaaggtccatgcccctaagattatgagagagttaaaacctttctgaatggagcttcgcatagagctggaagaactgctccaccaatccaaaaaggaggtcgcctcaggctgaggggcaagaagtgccaaacccattcggctaagaaaaaagaaccagaactgacacgaaaagagacaggagacaagaaggcgatatagcgtttcacgttcttggtcacacaacacacaagcttcagggtgtggcagattcgtcctttcaagtcgatcagatgtccaacacctattgtgggcagccaaccacatgaagaaggcacatttaggcggcacccacaatttccagatacgctcccatggttcaaagaacaacgagctctgcatgagagcatcatatgccgatcttgctgaatatgccctgacggagagaggctccaaaaatgtctatccggcatttccagcacccctggctgaagctgcaccacgtgtatagcctctcaaataccaagaaactcttgctaactctgccaagaaataactccatggatatcgtggacccatcttgaatctgttagagcatctaggaccatccttcgattagctattctggtgggaatcatactatgtataagtggtgctagttcctttaaccgctgcctcatcaaccatctatcctcccaaaacaaggtggtgctaccatcgcctagttcagtagtcacggccatgttgaaaattccttgcacctgtttatttgcttgtagcttgaaggcagcccatggtctctgtcagcctttggctttgtggaagcagcctccttagtggtttggtatgaacctgaagaccgcctatcatccacaacctattcagggattctctggagcatgcttgcgaccttcccaaccacttttggcatgttttgggcttagttgtagctggttgcctaaactgaaaggcggctctcctccgtttagcagctgtcccggaacttggctgcacaacggagcaatcagattcattctgtcctagcctctgcccctgcacctgcccatgtactggaccaatgttataaggaaaataggcctgttcctcttcttctccaagtaagctgtcatctcttttctaatctcagtggtggtgttgaaacacatgactgtcctcatatcccccggcaaggtgttctttataccttttaattccttctttgttaccatgttgcatcggatgcatgtcaccttatcctgattccctatttctgtccaataaccgtacttccagcctgggtcattgaattttgcctctggatcttgcatggggtgataaggatcaacatcaatgggagcagcagcagcggatgcggatcagacactctccatgacaatggcttactctgtacaggtggatagtaagaaaaaggcaaaggttcagctcactaattaacatcagagagtggggaacagagcagcacggaggcccattatcttgcaccggatttaaagcagagggctgctgctaggatgctggcctgcccgccctgtctggctgcgccagcgccacccctcctgcgtggccacaccccactcctccctgtctgcgcctgcatgccttgcttggcccgtgccgcccacctcgctgtgccgcccgtcctgcctggtcacgccactcctcacccctccttcgaacagaacaggcgcaccgcgcaactcagcctttgaacagagcagcctccgcccacaaccagccgccttttcattcccttattcccataatgcgacaccctagaaccgctttacggacgtctgaggtgccagagcgactagacggtaaggaagatgccttagtgtcaatcttaaggcgggtaaatcacctcattttttctgaccgccttaccgcctaagggacgccttaatagtttgcattagagattttcccttcaatgtatttgacattttttgtaggcatctttagaagaggagaaagagtcacttaaagctaaaatatcgaagctgcaaagcaacctaagaatgggccttgaaattgaacaacatttgcaaagaaatgcacgaatattagagaaaagacaggcactgtatgatggattcctgagaaatggattgtccgaacttcaaaagttctacacatgtcaaaaggctgaaattatgaaaatattggaagaagaatcgttgcggttgatgaaagttgttgcagagattcaggataaactaactgaaatttgtatcaacactgaagttagtgaccaccctgccgatgagattcaatgttgtgacagcagttgtaaagatgtgcatgttactaaagatatcagtcctagcacatgtcgtaagagtgattatcctgctgatcttaactccgtgtcgtttgatgaatctaaagcacttgcacaagccttacaggagaagatggaagcacttatgctcttctcacaggaacaagaaagatacctattagagaaacagagagacctgattgttatcgaggaactccagaagaacttatctcaagttaaagatgaaaaggtgaaggtcctgatggaattaacaaaactaaaagaacaatatttgctattgaagggctctgctgtcaaggaaggtcatgatactggtgattcatctaaactcattcctgggcatgaccaacaagggatgctgaagactatgctgaagaggacatctttaagacactggatgaggaaagaaagtaatactattggacatgggagctctgatggaaatgatcatacagtttgcaaagaacattcagtggatgttgcaagattaagagttgaaaatgctatgcttcttgaaggtgttggtactgttgagcatctcacttcttcagtgcatagactgcatattgtgcttttgaaggcagggcaggattttttttggttgtattactaggtgataactttcataccaacaaacatgtcaggcttatgatgatatcaagtcagctgatcctttggagagtacctttgaagcgctcaacagtcttataactgaagcaaaccttatgaagacagctcttaatgtggttcttcctgtaagctggtccggggattcatcagatgcaattaaatatgaagctatgtgcgatccatctgattcacctaaatcgaagtctgggaaagtagacccgctctcttctgcaggcatggagatggtggagctactaatattggctgctgagattctcaaggagagctttctggtgaagaaataaggcctccatgtaaggacgagtatggctctccttgtttgtttagaagcatgcaatttaatccttaatttttttgggtgtatatacttaaactgattgctaaaagtgcactactagattatttcggatgtagagaaagagccgaatgtgcactgtaatttacggttcgctgctattgatgtgtcttgtgttggtagactaaaggatttaagagccatgtgtacaaaattcagtttacaagcaaagatcaaagaatagacatgaactagggaaagagaaagaaaaacaaactgaaagttccatacctaaaagcgtcggcactggttgtcg

SEQ ID NO: 85107 - DNA, 7655 bp, Zea Mays
agtactttgccattgcgaacgggttaccgaaatttcttcattgcaagcgtctactttctctctctctctctctctctctcgttgcccccgcatactctctgtcttgggcgctctctgtctctggtggcggcgagtagcatactctctgtcttgggcgctctgtctctggtggcgacgactcgccgccgccgccgccgcgataggccacgcctcctggtcgccatttccggatccttaccgacgacgcgcacccaccaccccatctttttccgttcctgctgtgcgacacacaaaccctagctgtatcgggtgggctgtgaaatggaccaagctgcagattcctctgaactgcttcgtcgcatcgaggagctccagcgcgaaaaggatgaaaaacagaattctttggaactattgttaagacggattgaagggctacaatatgaaatggatgaaaaagtagatcttgttgaagtgttaactcgtcaagttgaaaatctgcagcgagagcgtgatgagctcagaaaagatattgagcaattatgtatgcaacaagctgggcctggttatgtttctgttgcaactcgaatgcttactcagaggtacgtccatatctaatttaatctttcatttgtgttcactgtgcaaacaaagcaatatttttgttgtaactattcaggacagcagctttggaacaggatattgagaacctccagaaaaagttaggtggttgcttaagagagaatcaaaatttgcaagaggagcttgctgaagcttatcgaattaagagccagcttgctgagttacatggtgctgcactatcaaagaacaaggatcttgaaaagcaagtaagatttttccagagcagtgtcgctcaagcgtttgctgaacgggacagttcattaatggagtgtgagaaagcaaaagagcgggaagaagcagtgtcaagaaagtttgctgattttgaggaaaggttattctaaaattctatgaccttcgttgcagagactctggatgttcttcaagccttactattgaagagaagtgttcaatccttcttggtgattctgctgacaattggagttttagctctgatggcggaacctcaactttgaagtacattgtaaaccacccttatccattataaagaatgattcatatttaagtatgcgatctgtttttttttttgcatttgtattgcaagatacaaattctctgtggcactaaacatcatctggcgcagagccagaaaattatagatatggggacgaaatgctaaaaaataaattattagaaggcaaaatcagcattttcattgaattttatgtgcataagaggaacttatctatcataacagagtgcttgatcctccctccttccgcccctgaacatgttaatgcattgttggctaattggcttgttcagttttattctgggaactaaatgaatgcagaaggtaggaaatgatgaaactttgctggcatctgtttcaggacttatgcagttatgctttgttcccagtttctcattcaacatactgctcaatacatggatagaaaacatccgtattattgatggaagtcataaatttagtgctaatcttctcatttgtcctattcagtaagttatagttcagtatgattgtcatgttctatttgacctaattgtgtcatgtacttgagtaatacaacatgacttgcaggccctaatttgttttcaagaactgtttattgattttttttccagttgatttggtcctaaaccaaagtgctttgcatagttaaggcgagtgtttgacccccgccttaccttcgaagcggtaaagtgtaaggcgagacaacaccttaatcatatataaatataggaaaatatagaaaattagtcttgaatagaagtacgaaagtaccaaacagaagtctataagttcaatataagcaaacataataggctaaaagtccaacataagtaggttctgatactctcatctctcaagttctgatacatcatcaaactcatcaaaaatgggaggattactgtcttcttcgcgttctctcccaccggatatatcatcatcttcactcacattcaagtcatctttcgcatgattggttgccgcgtcctacccgcccagactcgcggcatgcgttggccgggcgcgagcgagtgtttggttgccgcacccacgccctccggactgcatgtgcgcatgcagtttagtgctttttttcgccgttctgcctgcaagcgtggagaagccggaaattaccttcgctgggggaccaggcccgcacgaggcaggcacgtgacagaccggcaaccaatcagcccccttgtggatctggctcaaagtcttcgtccatggcacctccctcttcttcttacggcctcattcttgcatgctttctctatgtaaggccagaactttgtctctgactagcttgccttggaaggttgtgccctcgaagcgactccgatgctctagtagcaacatcaacatgatccatcatgtgaggtcaacaatattatcattgtccctgctggggtgtaccactgatgagtatccactcgttgtcccaatcaaaatcctcaataattaatgggtcatagcttgtgccggctttctccctcatttgaaacctacttcgcatcttttgattgtatgaaacatagaccaagtcattcaaccttttatgcaacaacaagtttctcttctttgtatgtatagtaagtaacaaacccaacctaaataagtagcaagaaatagattgaagctagtaaacataagcgaagtagcaaaaaatggacttacaaattcaaatgtgcttcaattcctctcacaaccggatgaggaagcacaaagtctaaccagtaaccacacgcttggcaaacctttgaaattcatatgctcggccgccatatgaacgttatcaatcaactacgcagatgcaaacagcgacacggtcacacacataggtatacaacagcaggaaagaataaaaaaagatgtgctgaaattagcaatcagccaagcatatagtactttagagggctctttgcttgaatgttttcaagtgccaacttgtttgaaaaatagaccctctatgatcttcataatgcatggcatgctcattaatcttcgaccgtatttcttcattggactccattcttgctagcacataattgaaacaactcctcagctttacaacatatctatcatctccctttggatggcaaagaattttcccaggttcaaataaagtgcagcaccatacgatggatggtccatttgtttcatccaacgaccctcaataatgtccataattttttcagcaatgcttgcttgttttgtgtagggaagctaagccttttctcttttgcaacatccattagtgctgcaatttatgtcatgtatgttttttcatctccatcaactgccctaagcactataagaagtgccaaagctctgaggcaatcttcaactgaagaccaaaaagtcttagctagaataatattacaccccccttccagcctctgtctttgccaacttgttgcagttccatgcatctcacaaaaagtgctctcaaggcatcttgatgtttatgtagacttttcaaagtaaggaatgtggcaaaacgagtggctgctggtcttaaaggatccccctcctatcttctccctcattgcacttagaattcctccatgcctataaataaaagtggtgactcttttggcttgtgcaattagtctttcaaatatccaatatcctccaccatgaggtccaaacaatgtgcagtacaaggaccctagaacaatgttaaaatactatccattagaagcctacccactgccttatatttttttctcgaatacgcaggagagctgcgtatcaattcattaatagtagaggagaaatatatatacaagaaaaaggcccacacacttgcacacacccactaggaacagaactgcaagaacatttgcgcctgttacagcacagaaacgaccctacacaacaactaaaatcggtatgccgtagcctccagaagctgcagatccttggcccctgctgcactccaacacaaaatctcatcaccagccaagcacaaggcagcagccaatcgtggaggtttgcgaccaaagacattcatttctgtgtctccacaaggtccatgcccctaagattatgagagagttaaaacctttctgaatggagcttcgcatagagctggaagaactgctccaccaatccaaaaaggaggtcgcctcaggctgaggggcaagaagtgccaaacccattcggctaagaaaaaagaaccagaactgacacgaaaagagacaggagacaagaaggcgatatagcgtttcacgttcttggtcacacaacacacaagcttcagggtgtggcagattcgtcctttcaagtcgatcagatgtccaacacctattgtgggcagccaaccacatgaagaaggcacatttaggcggcacccacaatttccagatacgctcccatggttcaaagaacaacgagctctgcatgagagcatcatatgccgatcttgctgaatatgccctgacggagagaggctccaaaaatgtctatccggcatttccagcacccctggctgaagctgcaccacgtgtatagcctctcaaataccaagaaactcttgctaactctgccaagaaataactccatggatatcgtggacccatcttgaatctgttagagcatctaggaccatccttcgattagctattctggtgggaatcatactatgtataagtggtgctagttcctttaaccgctgcctcatcaaccatctatcctcccaaaacaaggtggtgctaccatcgcctagttcagtagtcacggccatgttgaaaattccttgcacctgtttatttgcttgtagcttgaaggcagcccatggtctctgtcagcctttggctttgtggaagcagcctccttagtggtttggtatgaacctgaagaccgcctatcatccacaacctattcagggattctctggagcatgcttgcgaccttcccaaccacttttggcatgttttgggcttagttgtagctggttgcctaaactgaaaggcggctctcctccgtttagcagctgtcccggaacttggctgcacaacggagcaatcagattcattctgtcctagcctctgcccctgcacctgcccatgtactggaccaatgttataaggaaaataggcctgttcctcttcttctccaagtaagctgtcatctcttttctaatctcagtggtggtgttgaaacacatgactgtcctcatatcccccggcaaggtgttctttataccttttaattccttctttgttaccatgttgcatcggatgcatgtcaccttatcctgattccctatttctgtccaataaccgtacttccagcctgggtcattgaattttgcctctggatcttgcatggggtgataaggatcaacatcaatgggagcagcagcagcggatgcggatcagacactctccatgacaatggcttactctgtacaggtggatagtaagaaaaaggcaaaggttcagctcactaattaacatcagagagtggggaacagagcagcacggaggcccattatcttgcaccggatttaaagcagagggctgctgctaggatgctggcctgcccgccctgtctggctgcgccagcgccacccctcctgcgtggccacaccccactcctccctgtctgcgcctgcatgccttgcttggcccgtgccgcccacctcgctgtgccgcccgtcctgcctggtcacgccactcctcacccctccttcgaacagaacaggcgcaccgcgcaactcagcctttgaacagagcagcctccgcccacaaccagccgccttttcattcccttattcccataatgcgacaccctagaaccgctttacggacgtctgaggtgccagagcgactagacggtaaggaagatgccttagtgtcaatcttaaggcgggtaaatcacctcattttttctgaccgccttaccgcctaagggacgccttaatagtttgcattagagattttcccttcaatgtatttgacattttttgtaggcatctttagaagaggagaaagagtcacttaaagctaaaatatcgaagctgcaaagcaacctaagaatgggccttgaaattgaacaacatttgcaaagaaatgcacgaatattagagaaaagacaggcactgtatgatggattcctgagaaatggattgtccgaacttcaaaagttctacacatgtcaaaaggctgaaattatgaaaatattggaagaagaatcgttgcggttgatgaaagttgttgcagagattcaggataaactaactgaaatttgtatcaacactgaagttagtgaccaccctgccgatgagattcaatgttgtgacagcagttgtaaagatgtgcatgttactaaagatatcagtcctagcacatgtcgtaagagtgattatcctgctgatcttaactccgtgtcgtttgatgaatctaaagcacttgcacaagccttacaggagaagatggaagcacttatgctcttctcacaggaacaagaaagatacctattagagaaacagagagacctgattgttatcgaggaactccagaagaacttatctcaagttaaagatgaaaaggtgaaggtcctgatggaattaacaaaactaaaagaacaatatttgctattgaagggctctgctgtcaaggaaggtcatgatactggtgattcatctaaactcattcctgggcatgaccaacaagggatgctgaagactatgctgaagaggacatctttaagacactggatgaggaaagaaagtaatactattggacatgggagctctgatggaaatgatcatacagtttgcaaagaacattcagtggatgttgcaagattaagagttgaaaatgctatgcttcttgaaggtgttggtactgttgagcatctcacttcttcagtgcatagactgcatattgtgcttttgaaggcttatgatgatatcaagtcagctgatcctttggagagtacctttgaagcgctcaacagtcttataactgaagcaaaccttatgaagacagctcttaatgtggttcttcctgtaagctggtccggggattcatcagatgcaattaaatatgaagctatgtgcgatccatctgattcacctaaatcgaagtctgggaaagtagacccgctctcttctgcaggcatggagatggtggagctactaatattggctgctgagattctcaaggagagctttctggtgaagaaataaggcctccatgtaaggacgagtatggctctccttgtttgtttagaagcatgcaatttaatccttaatttttttgggtgtatatacttaaactgattgctaaaagtgcactactagattatttcggatgtagagaaagagccgaatgtgcactgtaatttacggttcgctgctattgatgtgtcttgtgttggtagactaaaggatttaagagccatgtgtacaaaattcagtttacaagcaaagatcaaagaatagacatgaactagggaaagagaaagaaaaacaaactgaaagttccatacctaaaagcgtcggcactggttgtcg

SEQ ID NO: 85108 - DNA, 7699 bp, Zea Mays
ctctacttctctagtagtagtactttgccattgcgaacgggttaccgaaatttcttcattgcaagcgtctactttctctctctctctctctctctctcgttgcccccgcatactctctgtcttgggcgctctctgtctctggtggcggcgagtagcatactctctgtcttgggcgctctgtctctggtggcgacgactcgccgccgccgccgccgcgataggccacgcctcctggtcgccatttccggatccttaccgacgacgcgcacccaccaccccatctttttccgttcctgctgtgcgacacacaaaccctagctgtatcgggtgggctgtgaaatggaccaagctgcagattcctctgaactgcttcgtcgcatcgaggagctccagcgcgaaaaggatgaaaaacagaattctttggaactattgttaagacggattgaagggctacaatatgaaatggatgaaaaagtagatcttgttgaagtgttaactcgtcaagttgaaaatctgcagcgagagcgtgatgagctcagaaaagatattgagcaattatgtatgcaacaagctgggcctggttatgtttctgttgcaactcgaatgcttactcagaggacagcagctttggaacaggatattgagaacctccagaaaaagttaggtggttgcttaagagagaatcaaaatttgcaagaggagcttgctgaagcttatcgaattaagagccagcttgctgagttacatggtgctgcactatcaaagaacaaggatcttgaaaagcaagtaagatttttccagagcagtgtcgctcaagcgtttgctgaacgggacagttcattaatggagtgtgagaaagcaaaagagcgggaagaagcagtgtcaagaaagtttgctgattttgaggaaaggatgagagaatatcaatcagagattgatgaacagaaacacttaaatgatgacttgcagagagaactgacagaactgaaggcacatacagaattgtccttgaaagttattctaaaattctatgaccttcgttgcagagactctggatgttcttcaagccttactattgaagagaagtgttcaatccttcttggtgattctgctgacaattggagttttagctctgatggcggaacctcaactttgaagtacattgtaaaccacccttatccattataaagaatgattcatatttaagtatgcgatctgtttttttttttgcatttgtattgcaagatacaaattctctgtggcactaaacatcatctggcgcagagccagaaaattatagatatggggacgaaatgctaaaaaataaattattagaaggcaaaatcagcattttcattgaattttatgtgcataagaggaacttatctatcataacagagtgcttgatcctccctccttccgcccctgaacatgttaatgcattgttggctaattggcttgttcagttttattctgggaactaaatgaatgcagaaggtaggaaatgatgaaactttgctggcatctgtttcaggacttatgcagttatgctttgttcccagtttctcattcaacatactgctcaatacatggatagaaaacatccgtattattgatggaagtcataaatttagtgctaatcttctcatttgtcctattcagtaagttatagttcagtatgattgtcatgttctatttgacctaattgtgtcatgtacttgagtaatacaacatgacttgcaggccctaatttgttttcaagaactgtttattgattttttttccagttgatttggtcctaaaccaaagtgctttgcatagttaaggcgagtgtttgacccccgccttaccttcgaagcggtaaagtgtaaggcgagacaacaccttaatcatatataaatataggaaaatatagaaaattagtcttgaatagaagtacgaaagtaccaaacagaagtctataagttcaatataagcaaacataataggctaaaagtccaacataagtaggttctgatactctcatctctcaagttctgatacatcatcaaactcatcaaaaatgggaggattactgtcttcttcgcgttctctcccaccggatatatcatcatcttcactcacattcaagtcatctttcgcatgattggttgccgcgtcctacccgcccagactcgcggcatgcgttggccgggcgcgagcgagtgtttggttgccgcacccacgccctccggactgcatgtgcgcatgcagtttagtgctttttttcgccgttctgcctgcaagcgtggagaagccggaaattaccttcgctgggggaccaggcccgcacgaggcaggcacgtgacagaccggcaaccaatcagcccccttgtggatctggctcaaagtcttcgtccatggcacctccctcttcttcttacggcctcattcttgcatgctttctctatgtaaggccagaactttgtctctgactagcttgccttggaaggttgtgccctcgaagcgactccgatgctctagtagcaacatcaacatgatccatcatgtgaggtcaacaatattatcattgtccctgctggggtgtaccactgatgagtatccactcgttgtcccaatcaaaatcctcaataattaatgggtcatagcttgtgccggctttctccctcatttgaaacctacttcgcatcttttgattgtatgaaacatagaccaagtcattcaaccttttatgcaacaacaagtttctcttctttgtatgtatagtaagtaacaaacccaacctaaataagtagcaagaaatagattgaagctagtaaacataagcgaagtagcaaaaaatggacttacaaattcaaatgtgcttcaattcctctcacaaccggatgaggaagcacaaagtctaaccagtaaccacacgcttggcaaacctttgaaattcatatgctcggccgccatatgaacgttatcaatcaactacgcagatgcaaacagcgacacggtcacacacataggtatacaacagcaggaaagaataaaaaaagatgtgctgaaattagcaatcagccaagcatatagtactttagagggctctttgcttgaatgttttcaagtgccaacttgtttgaaaaatagaccctctatgatcttcataatgcatggcatgctcattaatcttcgaccgtatttcttcattggactccattcttgctagcacataattgaaacaactcctcagctttacaacatatctatcatctccctttggatggcaaagaattttcccaggttcaaataaagtgcagcaccatacgatggatggtccatttgtttcatccaacgaccctcaataatgtccataattttttcagcaatgcttgcttgttttgtgtagggaagctaagccttttctcttttgcaacatccattagtgctgcaatttatgtcatgtatgttttttcatctccatcaactgccctaagcactataagaagtgccaaagctctgaggcaatcttcaactgaagaccaaaaagtcttagctagaataatattacaccccccttccagcctctgtctttgccaacttgttgcagttccatgcatctcacaaaaagtgctctcaaggcatcttgatgtttatgtagacttttcaaagtaaggaatgtggcaaaacgagtggctgctggtcttaaaggatccccctcctatcttctccctcattgcacttagaattcctccatgcctataaataaaagtggtgactcttttggcttgtgcaattagtctttcaaatatccaatatcctccaccatgaggtccaaacaatgtgcagtacaaggaccctagaacaatgttaaaatactatccattagaagcctacccactgccttatatttttttctcgaatacgcaggagagctgcgtatcaattcattaatagtagaggagaaatatatatacaagaaaaaggcccacacacttgcacacacccactaggaacagaactgcaagaacatttgcgcctgttacagcacagaaacgaccctacacaacaactaaaatcggtatgccgtagcctccagaagctgcagatccttggcccctgctgcactccaacacaaaatctcatcaccagccaagcacaaggcagcagccaatcgtggaggtttgcgaccaaagacattcatttctgtgtctccacaaggtccatgcccctaagattatgagagagttaaaacctttctgaatggagcttcgcatagagctggaagaactgctccaccaatccaaaaaggaggtcgcctcaggctgaggggcaagaagtgccaaacccattcggctaagaaaaaagaaccagaactgacacgaaaagagacaggagacaagaaggcgatatagcgtttcacgttcttggtcacacaacacacaagcttcagggtgtggcagattcgtcctttcaagtcgatcagatgtccaacacctattgtgggcagccaaccacatgaagaaggcacatttaggcggcacccacaatttccagatacgctcccatggttcaaagaacaacgagctctgcatgagagcatcatatgccgatcttgctgaatatgccctgacggagagaggctccaaaaatgtctatccggcatttccagcacccctggctgaagctgcaccacgtgtatagcctctcaaataccaagaaactcttgctaactctgccaagaaataactccatggatatcgtggacccatcttgaatctgttagagcatctaggaccatccttcgattagctattctggtgggaatcatactatgtataagtggtgctagttcctttaaccgctgcctcatcaaccatctatcctcccaaaacaaggtggtgctaccatcgcctagttcagtagtcacggccatgttgaaaattccttgcacctgtttatttgcttgtagcttgaaggcagcccatggtctctgtcagcctttggctttgtggaagcagcctccttagtggtttggtatgaacctgaagaccgcctatcatccacaacctattcagggattctctggagcatgcttgcgaccttcccaaccacttttggcatgttttgggcttagttgtagctggttgcctaaactgaaaggcggctctcctccgtttagcagctgtcccggaacttggctgcacaacggagcaatcagattcattctgtcctagcctctgcccctgcacctgcccatgtactggaccaatgttataaggaaaataggcctgttcctcttcttctccaagtaagctgtcatctcttttctaatctcagtggtggtgttgaaacacatgactgtcctcatatcccccggcaaggtgttctttataccttttaattccttctttgttaccatgttgcatcggatgcatgtcaccttatcctgattccctatttctgtccaataaccgtacttccagcctgggtcattgaattttgcctctggatcttgcatggggtgataaggatcaacatcaatgggagcagcagcagcggatgcggatcagacactctccatgacaatggcttactctgtacaggtggatagtaagaaaaaggcaaaggttcagctcactaattaacatcagagagtggggaacagagcagcacggaggcccattatcttgcaccggatttaaagcagagggctgctgctaggatgctggcctgcccgccctgtctggctgcgccagcgccacccctcctgcgtggccacaccccactcctccctgtctgcgcctgcatgccttgcttggcccgtgccgcccacctcgctgtgccgcccgtcctgcctggtcacgccactcctcacccctccttcgaacagaacaggcgcaccgcgcaactcagcctttgaacagagcagcctccgcccacaaccagccgccttttcattcccttattcccataatgcgacaccctagaaccgctttacggacgtctgaggtgccagagcgactagacggtaaggaagatgccttagtgtcaatcttaaggcgggtaaatcacctcattttttctgaccgccttaccgcctaagggacgccttaatagtttgcattagagattttcccttcaatgtatttgacattttttgtaggcatctttagaagaggagaaagagtcacttaaagctaaaatatcgaagctgcaaagcaacctaagaatgggccttgaaattgaacaacatttgcaaagaaatgcacgaatattagagaaaagacaggcactgtatgatggattcctgagaaatggattgtccgaacttcaaaagttctacacatgtcaaaaggctgaaattatgaaaatattggaagaagaatcgttgcggttgatgaaagttgttgcagagattcaggataaactaactgaaatttgtatcaacactgaagttagtgaccaccctgccgatgagattcaatgttgtgacagcagttgtaaagatgtgcatgttactaaagatatcagtcctagcacatgtcgtaagagtgattatcctgctgatcttaactccgtgtcgtttgatgaatctaaagcacttgcacaagccttacaggagaagatggaagcacttatgctcttctcacaggaacaagaaagatacctattagagaaacagagagacctgattgttatcgaggaactccagaagaacttatctcaagttaaagatgaaaaggtgaaggtcctgatggaattaacaaaactaaaagaacaatatttgctattgaagggctctgctgtcaaggaaggtcatgatactggtgattcatctaaactcattcctgggcatgaccaacaagggatgctgaagactatgctgaagaggacatctttaagacactggatgaggaaagaaagtaatactattggacatgggagctctgatggaaatgatcatacagtttgcaaagaacattcagtggatgttgcaagattaagagttgaaaatgctatgcttcttgaaggtgttggtactgttgagcatctcacttcttcagtgcatagactgcatattgtgcttttgaaggcttatgatgatatcaagtcagctgatcctttggagagtacctttgaagcgctcaacagtcttataactgaagcaaaccttatgaagacagctcttaatgtggttcttcctgtaagctggtccggggattcatcagatgcaattaaatatgaagctatgtgcgatccatctgattcacctaaatcgaagtctgggaaagtagacccgctctcttctgcaggcatggagatggtggagctactaatattggctgctgagattctcaaggagagctttctggtgaagaaataaggcctccatgtaaggacgagtatggctctccttgtttgtttagaagcatgcaatttaatccttaatttttttgggtgtatatacttaaactgattgctaaaagtgcactactagattatttcggatgtagagaaagagccgaatgtgcactgtaatttacggttcgctgctattgatgtgtcttgtgttggtagactaaaggatttaagagccatgtgtacaaaattcagtttacaagcaaagatcaaagaatagacatgaactagggaaagagaaagaaaaacaaactgaaagttccatacctaaaagcgtcggcactggttgtcg

SEQ ID NO: 85109 - DNA, 7673 bp, Zea Mays
gtccatctctacttctctagtagtagtactttgccattgcgaacgggttaccgaaatttcttcattgcaagcgtctactttctctctctctctctctctctctcgttgcccccgcatactctctgtcttgggcgctctctgtctctggtggcggcgagtagcatactctctgtcttgggcgctctgtctctggtggcgacgactcgccgccgccgccgccgcgataggccacgcctcctggtcgccatttccggatccttaccgacgacgcgcacccaccaccccatctttttccgttcctgctgtgcgacacacaaaccctagctgtatcgggtgggctgtgaaatggaccaagctgcagattcctctgaactgcttcgtcgcatcgaggagctccagcgcgaaaaggatgaaaaacagaattctttggaactattgttaagacggattgaagggctacaatatgaaatggatgaaaaagtagatcttgttgaagtgttaactcgtcaagttgaaaatctgcagcgagagcgtgatgagctcagaaaagatattgagcaattatgtatgcaacaagctgggcctggttatgtttctgttgcaactcgaatgcttactcagaggacagcagctttggaacaggatattgagaacctccagaaaaagttaggtggttgcttaagagagaatcaaaatttgcaagaggagcttgctgaagcttatcgaattaagagccagcttgctgagttacatggtgctgcactatcaaagaacaaggatcttgaaaagcaagtaagatttttccagagcagtgtcgctcaagcgtttgctgaacgggacagttcattaatggagtgtgagaaagcaaaagagcgggaagaagcagtgtcaagaaagtttgctgattttgaggaaaggatgagagaatatcaatcagagattgatgaacagaaacacttaaatgatgacttgcagagagaactgacagaactgaaggcacatacagaattgtccttgaaaagactctggatgttcttcaagccttactattgaagagaagtgttcaatccttcttggtgattctgctgacaattggagttttagctctgatggcggaacctcaactttgaagtacattgtaaaccacccttatccattataaagaatgattcatatttaagtatgcgatctgtttttttttttgcatttgtattgcaagatacaaattctctgtggcactaaacatcatctggcgcagagccagaaaattatagatatggggacgaaatgctaaaaaataaattattagaaggcaaaatcagcattttcattgaattttatgtgcataagaggaacttatctatcataacagagtgcttgatcctccctccttccgcccctgaacatgttaatgcattgttggctaattggcttgttcagttttattctgggaactaaatgaatgcagaaggtaggaaatgatgaaactttgctggcatctgtttcaggacttatgcagttatgctttgttcccagtttctcattcaacatactgctcaatacatggatagaaaacatccgtattattgatggaagtcataaatttagtgctaatcttctcatttgtcctattcagtaagttatagttcagtatgattgtcatgttctatttgacctaattgtgtcatgtacttgagtaatacaacatgacttgcaggccctaatttgttttcaagaactgtttattgattttttttccagttgatttggtcctaaaccaaagtgctttgcatagttaaggcgagtgtttgacccccgccttaccttcgaagcggtaaagtgtaaggcgagacaacaccttaatcatatataaatataggaaaatatagaaaattagtcttgaatagaagtacgaaagtaccaaacagaagtctataagttcaatataagcaaacataataggctaaaagtccaacataagtaggttctgatactctcatctctcaagttctgatacatcatcaaactcatcaaaaatgggaggattactgtcttcttcgcgttctctcccaccggatatatcatcatcttcactcacattcaagtcatctttcgcatgattggttgccgcgtcctacccgcccagactcgcggcatgcgttggccgggcgcgagcgagtgtttggttgccgcacccacgccctccggactgcatgtgcgcatgcagtttagtgctttttttcgccgttctgcctgcaagcgtggagaagccggaaattaccttcgctgggggaccaggcccgcacgaggcaggcacgtgacagaccggcaaccaatcagcccccttgtggatctggctcaaagtcttcgtccatggcacctccctcttcttcttacggcctcattcttgcatgctttctctatgtaaggccagaactttgtctctgactagcttgccttggaaggttgtgccctcgaagcgactccgatgctctagtagcaacatcaacatgatccatcatgtgaggtcaacaatattatcattgtccctgctggggtgtaccactgatgagtatccactcgttgtcccaatcaaaatcctcaataattaatgggtcatagcttgtgccggctttctccctcatttgaaacctacttcgcatcttttgattgtatgaaacatagaccaagtcattcaaccttttatgcaacaacaagtttctcttctttgtatgtatagtaagtaacaaacccaacctaaataagtagcaagaaatagattgaagctagtaaacataagcgaagtagcaaaaaatggacttacaaattcaaatgtgcttcaattcctctcacaaccggatgaggaagcacaaagtctaaccagtaaccacacgcttggcaaacctttgaaattcatatgctcggccgccatatgaacgttatcaatcaactacgcagatgcaaacagcgacacggtcacacacataggtatacaacagcaggaaagaataaaaaaagatgtgctgaaattagcaatcagccaagcatatagtactttagagggctctttgcttgaatgttttcaagtgccaacttgtttgaaaaatagaccctctatgatcttcataatgcatggcatgctcattaatcttcgaccgtatttcttcattggactccattcttgctagcacataattgaaacaactcctcagctttacaacatatctatcatctccctttggatggcaaagaattttcccaggttcaaataaagtgcagcaccatacgatggatggtccatttgtttcatccaacgaccctcaataatgtccataattttttcagcaatgcttgcttgttttgtgtagggaagctaagccttttctcttttgcaacatccattagtgctgcaatttatgtcatgtatgttttttcatctccatcaactgccctaagcactataagaagtgccaaagctctgaggcaatcttcaactgaagaccaaaaagtcttagctagaataatattacaccccccttccagcctctgtctttgccaacttgttgcagttccatgcatctcacaaaaagtgctctcaaggcatcttgatgtttatgtagacttttcaaagtaaggaatgtggcaaaacgagtggctgctggtcttaaaggatccccctcctatcttctccctcattgcacttagaattcctccatgcctataaataaaagtggtgactcttttggcttgtgcaattagtctttcaaatatccaatatcctccaccatgaggtccaaacaatgtgcagtacaaggaccctagaacaatgttaaaatactatccattagaagcctacccactgccttatatttttttctcgaatacgcaggagagctgcgtatcaattcattaatagtagaggagaaatatatatacaagaaaaaggcccacacacttgcacacacccactaggaacagaactgcaagaacatttgcgcctgttacagcacagaaacgaccctacacaacaactaaaatcggtatgccgtagcctccagaagctgcagatccttggcccctgctgcactccaacacaaaatctcatcaccagccaagcacaaggcagcagccaatcgtggaggtttgcgaccaaagacattcatttctgtgtctccacaaggtccatgcccctaagattatgagagagttaaaacctttctgaatggagcttcgcatagagctggaagaactgctccaccaatccaaaaaggaggtcgcctcaggctgaggggcaagaagtgccaaacccattcggctaagaaaaaagaaccagaactgacacgaaaagagacaggagacaagaaggcgatatagcgtttcacgttcttggtcacacaacacacaagcttcagggtgtggcagattcgtcctttcaagtcgatcagatgtccaacacctattgtgggcagccaaccacatgaagaaggcacatttaggcggcacccacaatttccagatacgctcccatggttcaaagaacaacgagctctgcatgagagcatcatatgccgatcttgctgaatatgccctgacggagagaggctccaaaaatgtctatccggcatttccagcacccctggctgaagctgcaccacgtgtatagcctctcaaataccaagaaactcttgctaactctgccaagaaataactccatggatatcgtggacccatcttgaatctgttagagcatctaggaccatccttcgattagctattctggtgggaatcatactatgtataagtggtgctagttcctttaaccgctgcctcatcaaccatctatcctcccaaaacaaggtggtgctaccatcgcctagttcagtagtcacggccatgttgaaaattccttgcacctgtttatttgcttgtagcttgaaggcagcccatggtctctgtcagcctttggctttgtggaagcagcctccttagtggtttggtatgaacctgaagaccgcctatcatccacaacctattcagggattctctggagcatgcttgcgaccttcccaaccacttttggcatgttttgggcttagttgtagctggttgcctaaactgaaaggcggctctcctccgtttagcagctgtcccggaacttggctgcacaacggagcaatcagattcattctgtcctagcctctgcccctgcacctgcccatgtactggaccaatgttataaggaaaataggcctgttcctcttcttctccaagtaagctgtcatctcttttctaatctcagtggtggtgttgaaacacatgactgtcctcatatcccccggcaaggtgttctttataccttttaattccttctttgttaccatgttgcatcggatgcatgtcaccttatcctgattccctatttctgtccaataaccgtacttccagcctgggtcattgaattttgcctctggatcttgcatggggtgataaggatcaacatcaatgggagcagcagcagcggatgcggatcagacactctccatgacaatggcttactctgtacaggtggatagtaagaaaaaggcaaaggttcagctcactaattaacatcagagagtggggaacagagcagcacggaggcccattatcttgcaccggatttaaagcagagggctgctgctaggatgctggcctgcccgccctgtctggctgcgccagcgccacccctcctgcgtggccacaccccactcctccctgtctgcgcctgcatgccttgcttggcccgtgccgcccacctcgctgtgccgcccgtcctgcctggtcacgccactcctcacccctccttcgaacagaacaggcgcaccgcgcaactcagcctttgaacagagcagcctccgcccacaaccagccgccttttcattcccttattcccataatgcgacaccctagaaccgctttacggacgtctgaggtgccagagcgactagacggtaaggaagatgccttagtgtcaatcttaaggcgggtaaatcacctcattttttctgaccgccttaccgcctaagggacgccttaatagtttgcattagagattttcccttcaatgtatttgacattttttgtaggcatctttagaagaggagaaagagtcacttaaagctaaaatatcgaagctgcaaagcaacctaagaatgggccttgaaattgaacaacatttgcaaagaaatgcacgaatattagagaaaagacaggcactgtatgatggattcctgagaaatggattgtccgaacttcaaaagttctacacatgtcaaaaggctgaaattatgaaaatattggaagaagaatcgttgcggttgatgaaagttgttgcagagattcaggataaactaactgaaatttgtatcaacactgaagttagtgaccaccctgccgatgagattcaatgttgtgacagcagttgtaaagatgtgcatgttactaaagatatcagtcctagcacatgtcgtaagagtgattatcctgctgatcttaactccgtgtcgtttgatgaatctaaagcacttgcacaagccttacaggagaagatggaagcacttatgctcttctcacaggaacaagaaagatacctattagagaaacagagagacctgattgttatcgaggaactccagaagaacttatctcaagttaaagatgaaaaggtgaaggtcctgatggaattaacaaaactaaaagaacaatatttgctattgaagggctctgctgtcaaggaaggtcatgatactggtgattcatctaaactcattcctgggcatgaccaacaagggatgctgaagactatgctgaagaggacatctttaagacactggatgaggaaagaaagtaatactattggacatgggagctctgatggaaatgatcatacagtttgcaaagaacattcagtggatgttgcaagattaagagttgaaaatgctatgcttcttgaaggtgttggtactgttgagcatctcacttcttcagtgcatagactgcatattgtgcttttgaaggcttatgatgatatcaagtcagctgatcctttggagagtacctttgaagcgctcaacagtcttataactgaagcaaaccttatgaagacagctcttaatgtggttcttcctgtaagctggtccggggattcatcagatgcaattaaatatgaagctatgtgcgatccatctgattcacctaaatcgaagtctgggaaagtagacccgctctcttctgcaggcatggagatggtggagctactaatattggctgctgagattctcaaggagagctttctggtgaagaaataaggcctccatgtaaggacgagtatggctctccttgtttgtttagaagcatgcaatttaatccttaatttttttgggtgtatatacttaaactgattgctaaaagtgcactactagattatttcggatgtagagaaagagccgaatgtgcactgtaatttacggttcgctgctattgatgtgtcttgtgttggtagactaaaggatttaagagccatgtgtacaaaattcagtttacaagcaaagatcaaagaatagacatgaactagggaaagagaaagaaaaacaaactgaaagttccatacctaaaagcgtcggcactggttgtcg

SEQ ID NO: 85110 - DNA, 7332 bp, Zea Mays
atctgtccatctctacttctctagtagtagtactttgccattgcgaacgggttaccgaaatttcttcattgcaagcgtctactttctctctctctctctctctctctcgttgcccccgcatactctctgtcttgggcgctctctgtctctggtggcggcgagtagcatactctctgtcttgggcgctctgtctctggtggcgacgactcgccgccgccgccgccgcgataggccacgcctcctggtcgccatttccggatccttaccgacgacgcgcacccaccaccccatctttttccgttcctgctgtgcgacacacaaaccctagctgtatcgggtgggctgtgaaatggaccaagctgcagattcctctgaactgcttcgtcgcatcgaggagctccagcgcgaaaaggatgaaaaacagaattctttggaactattgttaagacggattgaagggctacaatatgaaatggatgaaaaagtagatcttgttgaagtgttaactcgtcaagttgaaaatctgcagcgagagcgtgatgagctcagaaaagatattgagcaattatgtatgcaacaagctgggcctggttatgtttctgttgcaactcgaatgcttactcagaggacagcagctttggaacaggatattgagaacctccagaaaaagttaggtggttgcttaagagagaatcaaaatttgcaagaggagcttgctgaagcttatcgaattaagagccagcttgctgagttacatggtgctgcactatcaaagaacaaggatcttgaaaagcaagtaagatttttccagagcagtgtcgctcaagcgtttgctgaacgggacagttcattaatggagtgtgagaaagcaaaagagcgggaagaagcagtgtcaagaaagtttgctgattttgaggaaaggatgagagaatatcaatcagagattgatgaacagaaacacttaaatgatgacttgcagagagaactgacagaactgaaggcacatacagaattgtccttgaaagttattctaaaattctatgaccttcgttgcagagactctggatgttcttcaagccttactattgaagagaagtgttcaatccttcttggtgattctgctgacaattggagttttagctctgatggcggaacctcaactttgaagacttatgcagttatgctttgttcccagtttctcattcaacatactgctcaatacatggatagaaaacatccgtattattgatggaagtcataaatttagtgctaatcttctcatttgtcctattcagtaagttatagttcagtatgattgtcatgttctatttgacctaattgtgtcatgtacttgagtaatacaacatgacttgcaggccctaatttgttttcaagaactgtttattgattttttttccagttgatttggtcctaaaccaaagtgctttgcatagttaaggcgagtgtttgacccccgccttaccttcgaagcggtaaagtgtaaggcgagacaacaccttaatcatatataaatataggaaaatatagaaaattagtcttgaatagaagtacgaaagtaccaaacagaagtctataagttcaatataagcaaacataataggctaaaagtccaacataagtaggttctgatactctcatctctcaagttctgatacatcatcaaactcatcaaaaatgggaggattactgtcttcttcgcgttctctcccaccggatatatcatcatcttcactcacattcaagtcatctttcgcatgattggttgccgcgtcctacccgcccagactcgcggcatgcgttggccgggcgcgagcgagtgtttggttgccgcacccacgccctccggactgcatgtgcgcatgcagtttagtgctttttttcgccgttctgcctgcaagcgtggagaagccggaaattaccttcgctgggggaccaggcccgcacgaggcaggcacgtgacagaccggcaaccaatcagcccccttgtggatctggctcaaagtcttcgtccatggcacctccctcttcttcttacggcctcattcttgcatgctttctctatgtaaggccagaactttgtctctgactagcttgccttggaaggttgtgccctcgaagcgactccgatgctctagtagcaacatcaacatgatccatcatgtgaggtcaacaatattatcattgtccctgctggggtgtaccactgatgagtatccactcgttgtcccaatcaaaatcctcaataattaatgggtcatagcttgtgccggctttctccctcatttgaaacctacttcgcatcttttgattgtatgaaacatagaccaagtcattcaaccttttatgcaacaacaagtttctcttctttgtatgtatagtaagtaacaaacccaacctaaataagtagcaagaaatagattgaagctagtaaacataagcgaagtagcaaaaaatggacttacaaattcaaatgtgcttcaattcctctcacaaccggatgaggaagcacaaagtctaaccagtaaccacacgcttggcaaacctttgaaattcatatgctcggccgccatatgaacgttatcaatcaactacgcagatgcaaacagcgacacggtcacacacataggtatacaacagcaggaaagaataaaaaaagatgtgctgaaattagcaatcagccaagcatatagtactttagagggctctttgcttgaatgttttcaagtgccaacttgtttgaaaaatagaccctctatgatcttcataatgcatggcatgctcattaatcttcgaccgtatttcttcattggactccattcttgctagcacataattgaaacaactcctcagctttacaacatatctatcatctccctttggatggcaaagaattttcccaggttcaaataaagtgcagcaccatacgatggatggtccatttgtttcatccaacgaccctcaataatgtccataattttttcagcaatgcttgcttgttttgtgtagggaagctaagccttttctcttttgcaacatccattagtgctgcaatttatgtcatgtatgttttttcatctccatcaactgccctaagcactataagaagtgccaaagctctgaggcaatcttcaactgaagaccaaaaagtcttagctagaataatattacaccccccttccagcctctgtctttgccaacttgttgcagttccatgcatctcacaaaaagtgctctcaaggcatcttgatgtttatgtagacttttcaaagtaaggaatgtggcaaaacgagtggctgctggtcttaaaggatccccctcctatcttctccctcattgcacttagaattcctccatgcctataaataaaagtggtgactcttttggcttgtgcaattagtctttcaaatatccaatatcctccaccatgaggtccaaacaatgtgcagtacaaggaccctagaacaatgttaaaatactatccattagaagcctacccactgccttatatttttttctcgaatacgcaggagagctgcgtatcaattcattaatagtagaggagaaatatatatacaagaaaaaggcccacacacttgcacacacccactaggaacagaactgcaagaacatttgcgcctgttacagcacagaaacgaccctacacaacaactaaaatcggtatgccgtagcctccagaagctgcagatccttggcccctgctgcactccaacacaaaatctcatcaccagccaagcacaaggcagcagccaatcgtggaggtttgcgaccaaagacattcatttctgtgtctccacaaggtccatgcccctaagattatgagagagttaaaacctttctgaatggagcttcgcatagagctggaagaactgctccaccaatccaaaaaggaggtcgcctcaggctgaggggcaagaagtgccaaacccattcggctaagaaaaaagaaccagaactgacacgaaaagagacaggagacaagaaggcgatatagcgtttcacgttcttggtcacacaacacacaagcttcagggtgtggcagattcgtcctttcaagtcgatcagatgtccaacacctattgtgggcagccaaccacatgaagaaggcacatttaggcggcacccacaatttccagatacgctcccatggttcaaagaacaacgagctctgcatgagagcatcatatgccgatcttgctgaatatgccctgacggagagaggctccaaaaatgtctatccggcatttccagcacccctggctgaagctgcaccacgtgtatagcctctcaaataccaagaaactcttgctaactctgccaagaaataactccatggatatcgtggacccatcttgaatctgttagagcatctaggaccatccttcgattagctattctggtgggaatcatactatgtataagtggtgctagttcctttaaccgctgcctcatcaaccatctatcctcccaaaacaaggtggtgctaccatcgcctagttcagtagtcacggccatgttgaaaattccttgcacctgtttatttgcttgtagcttgaaggcagcccatggtctctgtcagcctttggctttgtggaagcagcctccttagtggtttggtatgaacctgaagaccgcctatcatccacaacctattcagggattctctggagcatgcttgcgaccttcccaaccacttttggcatgttttgggcttagttgtagctggttgcctaaactgaaaggcggctctcctccgtttagcagctgtcccggaacttggctgcacaacggagcaatcagattcattctgtcctagcctctgcccctgcacctgcccatgtactggaccaatgttataaggaaaataggcctgttcctcttcttctccaagtaagctgtcatctcttttctaatctcagtggtggtgttgaaacacatgactgtcctcatatcccccggcaaggtgttctttataccttttaattccttctttgttaccatgttgcatcggatgcatgtcaccttatcctgattccctatttctgtccaataaccgtacttccagcctgggtcattgaattttgcctctggatcttgcatggggtgataaggatcaacatcaatgggagcagcagcagcggatgcggatcagacactctccatgacaatggcttactctgtacaggtggatagtaagaaaaaggcaaaggttcagctcactaattaacatcagagagtggggaacagagcagcacggaggcccattatcttgcaccggatttaaagcagagggctgctgctaggatgctggcctgcccgccctgtctggctgcgccagcgccacccctcctgcgtggccacaccccactcctccctgtctgcgcctgcatgccttgcttggcccgtgccgcccacctcgctgtgccgcccgtcctgcctggtcacgccactcctcacccctccttcgaacagaacaggcgcaccgcgcaactcagcctttgaacagagcagcctccgcccacaaccagccgccttttcattcccttattcccataatgcgacaccctagaaccgctttacggacgtctgaggtgccagagcgactagacggtaaggaagatgccttagtgtcaatcttaaggcgggtaaatcacctcattttttctgaccgccttaccgcctaagggacgccttaatagtttgcattagagattttcccttcaatgtatttgacattttttgtaggcatctttagaagaggagaaagagtcacttaaagctaaaatatcgaagctgcaaagcaacctaagaatgggccttgaaattgaacaacatttgcaaagaaatgcacgaatattagagaaaagacaggcactgtatgatggattcctgagaaatggattgtccgaacttcaaaagttctacacatgtcaaaaggctgaaattatgaaaatattggaagaagaatcgttgcggttgatgaaagttgttgcagagattcaggataaactaactgaaatttgtatcaacactgaagttagtgaccaccctgccgatgagattcaatgttgtgacagcagttgtaaagatgtgcatgttactaaagatatcagtcctagcacatgtcgtaagagtgattatcctgctgatcttaactccgtgtcgtttgatgaatctaaagcacttgcacaagccttacaggagaagatggaagcacttatgctcttctcacaggaacaagaaagatacctattagagaaacagagagacctgattgttatcgaggaactccagaagaacttatctcaagttaaagatgaaaaggtgaaggtcctgatggaattaacaaaactaaaagaacaatatttgctattgaagggctctgctgtcaaggaaggtcatgatactggtgattcatctaaactcattcctgggcatgaccaacaagggatgctgaagactatgctgaagaggacatctttaagacactggatgaggaaagaaagtaatactattggacatgggagctctgatggaaatgatcatacagtttgcaaagaacattcagtggatgttgcaagattaagagttgaaaatgctatgcttcttgaaggtgttggtactgttgagcatctcacttcttcagtgcatagactgcatattgtgcttttgaaggcttatgatgatatcaagtcagctgatcctttggagagtacctttgaagcgctcaacagtcttataactgaagcaaaccttatgaagacagctcttaatgtggttcttcctgtaagctggtccggggattcatcagatgcaattaaatatgaagctatgtgcgatccatctgattcacctaaatcgaagtctgggaaagtagacccgctctcttctgcaggcatggagatggtggagctactaatattggctgctgagattctcaaggagagctttctggtgaagaaataaggcctccatgtaaggacgagtatggctctccttgtttgtttagaagcatgcaatttaatccttaatttttttgggtgtatatacttaaactgattgctaaaagtgcactactagattatttcggatgtagagaaagagccgaatgtgcactgtaatttacggttcgctgctattgatgtgtcttgtgttggtagactaaaggatttaagagccatgtgtacaaaattcagtttacaagcaaagatcaaagaatagacatgaactagggaaagagaaagaaaaacaaactgaaagttccatacctaaaagcgtcggcactggttgtcg

SEQ ID NO: 85111 - DNA, 7778 bp, Zea Mays
ttaccatctgtccatctctacttctctagtagtagtactttgccattgcgaacgggttaccgaaatttcttcattgcaagcgtctactttctctctctctctctctctctctcgttgcccccgcatactctctgtcttgggcgctctctgtctctggtggcggcgagtagcatactctctgtcttgggcgctctgtctctggtggcgacgactcgccgccgccgccgccgcgataggccacgcctcctggtcgccatttccggatccttaccgacgacgcgcacccaccaccccatctttttccgttcctgctgtgcgacacacaaaccctagctgtatcgggtgggctgtgaaatggaccaagctgcagattcctctgaactgcttcgtcgcatcgaggagctccagcgcgaaaaggatgaaaaacagaattctttggaactattgttaagacggattgaagggctacaatatgaaatggatgaaaaagtagatcttgttgaagtgttaactcgtcaagttgaaaatctgcagcgagagcgtgatgagctcagaaaagatattgagcaattatgtatgcaacaagctgggcctggttatgtttctgttgcaactcgaatgcttactcagaggacagcagctttggaacaggatattgagaacctccagaaaaagttaggtggttgcttaagagagaatcaaaatttgcaagaggagcttgctgaagcttatcgaattaagagccagcttgctgagttacatggtgctgcactatcaaagaacaaggatcttgaaaagcaagtaagatttttccagagcagtgtcgctcaagcgtttgctgaacgggacagttcattaatggagtgtgagaaagcaaaagagcgggaagaagcagtgtcaagaaagtttgctgattttgaggaaaggatgagagaatatcaatcagagattgatgaacagaaacacttaaatgatgacttgcagagagaactgacagaactgaaggcacatacagaattgtccttgaaagttattctaaaattctatgaccttcgttgcagagactctggatgttcttcaagccttactattgaagagaagtgttcaatccttcttggtgattctgctgacaattggagttttagctctgatggcggaacctcaactttgaagtacattgtaaaccacccttatccattataaagaatgattcatatttaagtatgcgatctgtttttttttttgcatttgtattgcaagatacaaattctctgtggcactaaacatcatctggcgcagagccagaaaattatagatatggggacgaaatgctaaaaaataaattattagaaggcaaaatcagcattttcattgaattttatgtgcataagaggaacttatctatcataacagagtgcttgatcctccctccttccgcccctgaacatgttaatgcattgttggctaattggcttgttcagttttattctgggaactaaatgaatgcagaaggtaggaaatgatgaaactttgctggcatctgtttcaggacttatgcagttatgctttgttcccagtttctcattcaacatactgctcaatacatggatagaaaacatccgtattattgatggaagtcataaatttagtgctaatcttctcatttgtcctattcagtaagttatagttcagtatgattgtcatgttctatttgacctaattgtgtcatgtacttgagtaatacaacatgacttgcaggccctaatttgttttcaagaactgtttattgattttttttccagttgatttggtcctaaaccaaagtgctttgcatagttaaggcgagtgtttgacccccgccttaccttcgaagcggtaaagtgtaaggcgagacaacaccttaatcatatataaatataggaaaatatagaaaattagtcttgaatagaagtacgaaagtaccaaacagaagtctataagttcaatataagcaaacataataggctaaaagtccaacataagtaggttctgatactctcatctctcaagttctgatacatcatcaaactcatcaaaaatgggaggattactgtcttcttcgcgttctctcccaccggatatatcatcatcttcactcacattcaagtcatctttcgcatgattggttgccgcgtcctacccgcccagactcgcggcatgcgttggccgggcgcgagcgagtgtttggttgccgcacccacgccctccggactgcatgtgcgcatgcagtttagtgctttttttcgccgttctgcctgcaagcgtggagaagccggaaattaccttcgctgggggaccaggcccgcacgaggcaggcacgtgacagaccggcaaccaatcagcccccttgtggatctggctcaaagtcttcgtccatggcacctccctcttcttcttacggcctcattcttgcatgctttctctatgtaaggccagaactttgtctctgactagcttgccttggaaggttgtgccctcgaagcgactccgatgctctagtagcaacatcaacatgatccatcatgtgaggtcaacaatattatcattgtccctgctggggtgtaccactgatgagtatccactcgttgtcccaatcaaaatcctcaataattaatgggtcatagcttgtgccggctttctccctcatttgaaacctacttcgcatcttttgattgtatgaaacatagaccaagtcattcaaccttttatgcaacaacaagtttctcttctttgtatgtatagtaagtaacaaacccaacctaaataagtagcaagaaatagattgaagctagtaaacataagcgaagtagcaaaaaatggacttacaaattcaaatgtgcttcaattcctctcacaaccggatgaggaagcacaaagtctaaccagtaaccacacgcttggcaaacctttgaaattcatatgctcggccgccatatgaacgttatcaatcaactacgcagatgcaaacagcgacacggtcacacacataggtatacaacagcaggaaagaataaaaaaagatgtgctgaaattagcaatcagccaagcatatagtactttagagggctctttgcttgaatgttttcaagtgccaacttgtttgaaaaatagaccctctatgatcttcataatgcatggcatgctcattaatcttcgaccgtatttcttcattggactccattcttgctagcacataattgaaacaactcctcagctttacaacatatctatcatctccctttggatggcaaagaattttcccaggttcaaataaagtgcagcaccatacgatggatggtccatttgtttcatccaacgaccctcaataatgtccataattttttcagcaatgcttgcttgttttgtgtagggaagctaagccttttctcttttgcaacatccattagtgctgcaatttatgtcatgtatgttttttcatctccatcaactgccctaagcactataagaagtgccaaagctctgaggcaatcttcaactgaagaccaaaaagtcttagctagaataatattacaccccccttccagcctctgtctttgccaacttgttgcagttccatgcatctcacaaaaagtgctctcaaggcatcttgatgtttatgtagacttttcaaagtaaggaatgtggcaaaacgagtggctgctggtcttaaaggatccccctcctatcttctccctcattgcacttagaattcctccatgcctataaataaaagtggtgactcttttggcttgtgcaattagtctttcaaatatccaatatcctccaccatgaggtccaaacaatgtgcagtacaaggaccctagaacaatgttaaaatactatccattagaagcctacccactgccttatatttttttctcgaatacgcaggagagctgcgtatcaattcattaatagtagaggagaaatatatatacaagaaaaaggcccacacacttgcacacacccactaggaacagaactgcaagaacatttgcgcctgttacagcacagaaacgaccctacacaacaactaaaatcggtatgccgtagcctccagaagctgcagatccttggcccctgctgcactccaacacaaaatctcatcaccagccaagcacaaggcagcagccaatcgtggaggtttgcgaccaaagacattcatttctgtgtctccacaaggtccatgcccctaagattatgagagagttaaaacctttctgaatggagcttcgcatagagctggaagaactgctccaccaatccaaaaaggaggtcgcctcaggctgaggggcaagaagtgccaaacccattcggctaagaaaaaagaaccagaactgacacgaaaagagacaggagacaagaaggcgatatagcgtttcacgttcttggtcacacaacacacaagcttcagggtgtggcagattcgtcctttcaagtcgatcagatgtccaacacctattgtgggcagccaaccacatgaagaaggcacatttaggcggcacccacaatttccagatacgctcccatggttcaaagaacaacgagctctgcatgagagcatcatatgccgatcttgctgaatatgccctgacggagagaggctccaaaaatgtctatccggcatttccagcacccctggctgaagctgcaccacgtgtatagcctctcaaataccaagaaactcttgctaactctgccaagaaataactccatggatatcgtggacccatcttgaatctgttagagcatctaggaccatccttcgattagctattctggtgggaatcatactatgtataagtggtgctagttcctttaaccgctgcctcatcaaccatctatcctcccaaaacaaggtggtgctaccatcgcctagttcagtagtcacggccatgttgaaaattccttgcacctgtttatttgcttgtagcttgaaggcagcccatggtctctgtcagcctttggctttgtggaagcagcctccttagtggtttggtatgaacctgaagaccgcctatcatccacaacctattcagggattctctggagcatgcttgcgaccttcccaaccacttttggcatgttttgggcttagttgtagctggttgcctaaactgaaaggcggctctcctccgtttagcagctgtcccggaacttggctgcacaacggagcaatcagattcattctgtcctagcctctgcccctgcacctgcccatgtactggaccaatgttataaggaaaataggcctgttcctcttcttctccaagtaagctgtcatctcttttctaatctcagtggtggtgttgaaacacatgactgtcctcatatcccccggcaaggtgttctttataccttttaattccttctttgttaccatgttgcatcggatgcatgtcaccttatcctgattccctatttctgtccaataaccgtacttccagcctgggtcattgaattttgcctctggatcttgcatggggtgataaggatcaacatcaatgggagcagcagcagcggatgcggatcagacactctccatgacaatggcttactctgtacaggtggatagtaagaaaaaggcaaaggttcagctcactaattaacatcagagagtggggaacagagcagcacggaggcccattatcttgcaccggatttaaagcagagggctgctgctaggatgctggcctgcccgccctgtctggctgcgccagcgccacccctcctgcgtggccacaccccactcctccctgtctgcgcctgcatgccttgcttggcccgtgccgcccacctcgctgtgccgcccgtcctgcctggtcacgccactcctcacccctccttcgaacagaacaggcgcaccgcgcaactcagcctttgaacagagcagcctccgcccacaaccagccgccttttcattcccttattcccataatgcgacaccctagaaccgctttacggacgtctgaggtgccagagcgactagacggtaaggaagatgccttagtgtcaatcttaaggcgggtaaatcacctcattttttctgaccgccttaccgcctaagggacgccttaatagtttgcattagagattttcccttcaatgtatttgacattttttgtaggcatctttagaagaggagaaagagtcacttaaagctaaaatatcgaagctgcaaagcaacctaagaatgggccttgaaattgaacaacatttgcaaagaaatgcacgaatattagagaaaagacaggcactgtatgatggattcctgagaaatggattgtccgaacttcaaaagttctacacatgtcaaaaggctgaaattatgaaaatattggaagaagaatcgttgcggttgatgaaagttgttgcagagattcaggataaactaactgaaatttgtatcaacactgaagttagtgaccaccctgccgatgagattcaatgttgtgacagcagttgtaaagatgtgcatgttactaaagatatcagtcctagcacatgtcgtaagagtgattatcctgctgatcttaactccgtgtcgtttgatgaatctaaagcacttgcacaagccttacaggagaagatggaagcacttatgctcttctcacaggaacaagaaagatacctattagagaaacagagagacctgattgttatcgaggaactccagaagaacttatctcaagttaaagatgaaaaggtgaaggtcctgatggaattaacaaaactaaaagaacaatatttgctattgaagggctctgctgtcaaggaaggtcatgatactggtgattcatctaaactcattcctgggcatgaccaacaagggatgctgaagactatgctgaagaggacatctttaagacactggatgaggaaagaaagtaatactattggacatgggagctctgatggaaatgatcatacagtttgcaaagaacattcagtggatgttgcaagattaagagttgaaaatgctatgcttcttgaaggtgttggtactgttgagcatctcacttcttcagtgcatagactgcatattgtgcttttgaaggcagggcaggattttttttggttgtattactaggtgataactttcataccaacaaacatgtcaggcttatgatgatatcaagtcagctgatcctttggagagtacctttgaagcgctcaacagtcttataactgaagcaaaccttatgaagacagctcttaatgtggttcttcctgtaagctggtccggggattcatcagatgcaattaaatatgaagctatgtgcgatccatctgattcacctaaatcgaagtctgggaaagtagacccgctctcttctgcaggcatggagatggtggagctactaatattggctgctgagattctcaaggagagctttctggtgaagaaataaggcctccatgtaaggacgagtatggctctccttgtttgtttagaagcatgcaatttaatccttaatttttttgggtgtatatacttaaactgattgctaaaagtgcactactagattatttcggatgtagagaaagagccgaatgtgcactgtaatttacggttcgctgctattgatgtgtcttgtgttggtagactaaaggatttaagagccatgtgtacaaaattcagtttacaagcaaagatcaaagaatagacatgaactagggaaagagaaagaaaaacaaactgaaagttccatacctaaaagcgtcggcactggttgtcg

SEQ ID NO: 85112 - DNA, 1732 bp, Zea Mays
gaaaaggatgaaaaacagaattctttggaactattgttaagacggattgaagggctacaatatgaaatggatgaaaaagtagatcttgttgaagtgttaactcgtcaagttgaaaatctgcagcgagagcgtgatgagctcagaaaagatattgagcaattatgtatgcaacaagctgggcctggttatgtttctgttgcaactcgaatgcttactcagaggacagcagctttggaacaggatattgagaacctccagaaaaagttaggtggttgcttaagagagaatcaaaatttgcaagaggagcttgctgaagcttatcgaattaagagccagcttgctgagttacatggtgctgcactatcaaagaacaaggatcttgaaaagcaagtaagatttttccagagcagtgtcgctcaagcgtttgctgaacgggacagttcattaatggagtgtgagaaagcaaaagagcgggaagaagcagtgtcaagaaagtttgctgattttgaggaaaggatgagagaatatcaatcagagattgatgaacagaaacacttaaatgatgacttgcagagagaactgacagaactgaaggcacatacagaattgtccttgaaagttattctaaaattctatgaccttcgttgcagagactctggatgttcttcaagccttactattgaagagaagtgttcaatccttcttggtgattctgctgacaattggagttttagctctgatggcggaacctcaactttgaagtacattgcatctttagaagaggagaaagagtcacttaaagctaaaatatcgaagctgcaaagcaacctaagaatgggccttgaaattgaacaacatttgcaaagaaatgcacgaatattagagaaaagacaggcactgtatgatggattcctgagaaatggattgtccgaacttcaaaagttctacacatgtcaaaaggctgaaattatgaaaatattggaagaagaatcgttgcggttgatgaaagttgttgcagagattcaggataaactaactgaaatttgtatcaacactgaagttagtgaccaccctgccgatgagattcaatgttgtgacagcagttgtaaagatgtgcatgttactaaagatatcagtcctagcacatgtcgtaagagtgattatcctgctgatcttaactccgtgtcgtttgatgaatctaaagcacttgcacaagccttacaggagaagatggaagcacttatgctcttctcacaggaacaagaaagatacctattagagaaacagagagacctgattgttatcgaggaactccagaagaacttatctcaagtagtacctctagaattcctacttgtcattatttttcaatcacaacgtactatatgacgagtgttctaaatagtacaagtatggtttgtcatgaagttgatacttcataccattactattttgtgcattttgctcctagctgttggaaaggtaaaactgaaccatatgattcttttcgaaagtatggattaaatgactagagttagttttgaagtttgaacttggatttttcttagggaagttcgtcaatatattatggacttgactattcacactgctaacactggtggtttgccagtagtgtcatccttgataagttgatatacagtaattagtcacatttacttctttagtatatgacctatttttaggtgtgagtttctgttgcacatcagcacac

SEQ ID NO: 85113 - DNA, 6692 bp, Zea Mays
gaaatttcttcattgcaagcgtctactttctctctctctctctctctctctcgttgcccccgcatactctctgtcttgggcgctctctgtctctggtggcggcgagtagcatactctctgtcttgggcgctctgtctctggtggcgacgactcgccgccgccgccgccgcgataggccacgcctcctggtcgccatttccggatccttaccgacgacgcgcacccaccaccccatctttttccgttcctgctgtgcgacacacaaaccctagctgtatcgggtgggctgtgaaatggaccaagctgcagattcctctgaactgcttcgtcgcatcgaggagctccagcgcgaaaaggatgaaaaacagaattctttggaactattgttaagacggattgaagggctacaatatgaaatggatgaaaaagtagatcttgttgaagtgttaactcgtcaagttgaaaatctgcagcgagagcgtgatgagctcagaaaagatattgagcaattatgtatgcaacaagctgggcctggttatgtttctgttgcaactcgaatgcttactcagaggacagcagctttggaacaggatattgagaacctccagaaaaagttaggtggttgcttaagagagaatcaaaatttgcaagaggagcttgctgaagcttatcgaattaagagccagcttgctgagttacatggtgctgcactatcaaagaacaaggatcttgaaaagcaagtaagatttttccagagcagtgtcgctcaagcgtttgctgaacgggacagttcattaatggagtgtgagaaagcaaaagagcgggaagaagcagtgtcaagaaagtttgctgattttgaggaaaggatgagagaatatcaatcagagattgatgaacagaaacacttaaatgatgacttgcagagagaactgacagaactgaaggcacatacagaattgtccttgaaagttattctaaaattctatgaccttcgttgcagagactctggatgttcttcaagccttactattgaagagaagtgttcaatccttcttggtgattctgctgacaattggagttttagctctgatggcggaacctcaactttgaagacttatgcagttatgctttgttcccagtttctcattcaacatactgctcaatacatggatagaaaacatccgtattattgatggaagtcataaatttagtgctaatcttctcatttgtcctattcagtaagttatagttcagtatgattgtcatgttctatttgacctaattgtgtcatgtacttgagtaatacaacatgacttgcaggccctaatttgttttcaagaactgtttattgattttttttccagttgatttggtcctaaaccaaagtgctttgcatagttaaggcgagtgtttgacccccgccttaccttcgaagcggtaaagtgtaaggcgagacaacaccttaatcatatataaatataggaaaatatagaaaattagtcttgaatagaagtacgaaagtaccaaacagaagtctataagttcaatataagcaaacataataggctaaaagtccaacataagtaggttctgatactctcatctctcaagttctgatacatcatcaaactcatcaaaaatgggaggattactgtcttcttcgcgttctctcccaccggatatatcatcatcttcactcacattcaagtcatctttcgcatgattggttgccgcgtcctacccgcccagactcgcggcatgcgttggccgggcgcgagcgagtgtttggttgccgcacccacgccctccggactgcatgtgcgcatgcagtttagtgctttttttcgccgttctgcctgcaagcgtggagaagccggaaattaccttcgctgggggaccaggcccgcacgaggcaggcacgtgacagaccggcaaccaatcagcccccttgtggatctggctcaaagtcttcgtccatggcacctccctcttcttcttacggcctcattcttgcatgctttctctatgtaaggccagaactttgtctctgactagcttgccttggaaggttgtgccctcgaagcgactccgatgctctagtagcaacatcaacatgatccatcatgtgaggtcaacaatattatcattgtccctgctggggtgtaccactgatgagtatccactcgttgtcccaatcaaaatcctcaataattaatgggtcatagcttgtgccggctttctccctcatttgaaacctacttcgcatcttttgattgtatgaaacatagaccaagtcattcaaccttttatgcaacaacaagtttctcttctttgtatgtatagtaagtaacaaacccaacctaaataagtagcaagaaatagattgaagctagtaaacataagcgaagtagcaaaaaatggacttacaaattcaaatgtgcttcaattcctctcacaaccggatgaggaagcacaaagtctaaccagtaaccacacgcttggcaaacctttgaaattcatatgctcggccgccatatgaacgttatcaatcaactacgcagatgcaaacagcgacacggtcacacacataggtatacaacagcaggaaagaataaaaaaagatgtgctgaaattagcaatcagccaagcatatagtactttagagggctctttgcttgaatgttttcaagtgccaacttgtttgaaaaatagaccctctatgatcttcataatgcatggcatgctcattaatcttcgaccgtatttcttcattggactccattcttgctagcacataattgaaacaactcctcagctttacaacatatctatcatctccctttggatggcaaagaattttcccaggttcaaataaagtgcagcaccatacgatggatggtccatttgtttcatccaacgaccctcaataatgtccataattttttcagcaatgcttgcttgttttgtgtagggaagctaagccttttctcttttgcaacatccattagtgctgcaatttatgtcatgtatgttttttcatctccatcaactgccctaagcactataagaagtgccaaagctctgaggcaatcttcaactgaagaccaaaaagtcttagctagaataatattacaccccccttccagcctctgtctttgccaacttgttgcagttccatgcatctcacaaaaagtgctctcaaggcatcttgatgtttatgtagacttttcaaagtaaggaatgtggcaaaacgagtggctgctggtcttaaaggatccccctcctatcttctccctcattgcacttagaattcctccatgcctataaataaaagtggtgactcttttggcttgtgcaattagtctttcaaatatccaatatcctccaccatgaggtccaaacaatgtgcagtacaaggaccctagaacaatgttaaaatactatccattagaagcctacccactgccttatatttttttctcgaatacgcaggagagctgcgtatcaattcattaatagtagaggagaaatatatatacaagaaaaaggcccacacacttgcacacacccactaggaacagaactgcaagaacatttgcgcctgttacagcacagaaacgaccctacacaacaactaaaatcggtatgccgtagcctccagaagctgcagatccttggcccctgctgcactccaacacaaaatctcatcaccagccaagcacaaggcagcagccaatcgtggaggtttgcgaccaaagacattcatttctgtgtctccacaaggtccatgcccctaagattatgagagagttaaaacctttctgaatggagcttcgcatagagctggaagaactgctccaccaatccaaaaaggaggtcgcctcaggctgaggggcaagaagtgccaaacccattcggctaagaaaaaagaaccagaactgacacgaaaagagacaggagacaagaaggcgatatagcgtttcacgttcttggtcacacaacacacaagcttcagggtgtggcagattcgtcctttcaagtcgatcagatgtccaacacctattgtgggcagccaaccacatgaagaaggcacatttaggcggcacccacaatttccagatacgctcccatggttcaaagaacaacgagctctgcatgagagcatcatatgccgatcttgctgaatatgccctgacggagagaggctccaaaaatgtctatccggcatttccagcacccctggctgaagctgcaccacgtgtatagcctctcaaataccaagaaactcttgctaactctgccaagaaataactccatggatatcgtggacccatcttgaatctgttagagcatctaggaccatccttcgattagctattctggtgggaatcatactatgtataagtggtgctagttcctttaaccgctgcctcatcaaccatctatcctcccaaaacaaggtggtgctaccatcgcctagttcagtagtcacggccatgttgaaaattccttgcacctgtttatttgcttgtagcttgaaggcagcccatggtctctgtcagcctttggctttgtggaagcagcctccttagtggtttggtatgaacctgaagaccgcctatcatccacaacctattcagggattctctggagcatgcttgcgaccttcccaaccacttttggcatgttttgggcttagttgtagctggttgcctaaactgaaaggcggctctcctccgtttagcagctgtcccggaacttggctgcacaacggagcaatcagattcattctgtcctagcctctgcccctgcacctgcccatgtactggaccaatgttataaggaaaataggcctgttcctcttcttctccaagtaagctgtcatctcttttctaatctcagtggtggtgttgaaacacatgactgtcctcatatcccccggcaaggtgttctttataccttttaattccttctttgttaccatgttgcatcggatgcatgtcaccttatcctgattccctatttctgtccaataaccgtacttccagcctgggtcattgaattttgcctctggatcttgcatggggtgataaggatcaacatcaatgggagcagcagcagcggatgcggatcagacactctccatgacaatggcttactctgtacaggtggatagtaagaaaaaggcaaaggttcagctcactaattaacatcagagagtggggaacagagcagcacggaggcccattatcttgcaccggatttaaagcagagggctgctgctaggatgctggcctgcccgccctgtctggctgcgccagcgccacccctcctgcgtggccacaccccactcctccctgtctgcgcctgcatgccttgcttggcccgtgccgcccacctcgctgtgccgcccgtcctgcctggtcacgccactcctcacccctccttcgaacagaacaggcgcaccgcgcaactcagcctttgaacagagcagcctccgcccacaaccagccgccttttcattcccttattcccataatgcgacaccctagaaccgctttacggacgtctgaggtgccagagcgactagacggtaaggaagatgccttagtgtcaatcttaaggcgggtaaatcacctcattttttctgaccgccttaccgcctaagggacgccttaatagtttgcattagagattttcccttcaatgtatttgacattttttgtaggcatctttagaagaggagaaagagtcacttaaagctaaaatatcgaagctgcaaagcaacctaagaatgggccttgaaattgaacaacatttgcaaagaaatgcacgaatattagagaaaagacaggcactgtatgatggattcctgagaaatggattgtccgaacttcaaaagttctacacatgtcaaaaggctgaaattatgaaaatattggaagaagaatcgttgcggttgatgaaagttgttgcagagattcaggataaactaactgaaatttgtatcaacactgaagttagtgaccaccctgccgatgagattcaatgttgtgacagcagttgtaaagatgtgcatgttactaaagatatcagtcctagcacatgtcgtaagagtgattatcctgctgatcttaactccgtgtcgtttgatgaatctaaagcacttgcacaagccttacaggagaagatggaagcacttatgctcttctcacaggaacaagaaagatacctattagagaaacagagagacctgattgttatcgaggaactccagaagaacttatctcaagtagtacctctagaattcctacttgtcattatttttcaatcacaacgtactatatgacgagtgttctaaatagtacaagtatggtttgtcatgaagttgatacttcataccattactattttgtgcattttgctcctagctgttggaaaggtaaaactgaaccatatgattcttttcgaaagtatggattaaatgactagagttagttttgaagtttgaacttggatttttcttagggaagttcgtcaatatattatggacttgactattcacactgctaacactggtggtttgccagtagtgtcatccttgataagttgatatacagtaattagtcacatttacttctttagtatatgacctatttttaggtgtgagtttctgttgcacatcagcacac

SEQ ID NO: 85114 - DNA, 528 bp, Zea Mays
aggcagcgacggcgcacacacgtactgaggctggcacgtgggtccgcataccagtgaaagggtgaggagcgagcgcgagcgtgcggctgaccggtgggccctacgtgttggcgccaatcggatagctgtggtgcgcgtatgagtggttaggtgggtcgggcagggaattgggcctaatgccagttttcctttttttctttcttatttttatttttattttttattttcttttctttctttccaaattcaaacttaaatttcaatttaaattcaatttttttttggcaaatttgtcttcatgttaaatgttcaatttgaacatagtatgggataaatctatttatttataaatttattttgtcttgtatagtatttctctctttccttttcctaggttatttcaaatttcctaatttacaaattatattaaatccccattttaggtcttaacatataattatattaatattgttagtattaaatgcacaaacacataaactttagcatgatgcataaattatcttttgg

SEQ ID NO: 85115 - DNA, 375 bp, Zea Mays
ccacaaaccaaataaaaaaataaggagtaagaagaagatagatcaattcattcctcaaaccaaacacacccttaaggttgtgaatttgatcttggccatgctataggacacaatgataccatagcacgtcggcgctcttaggtcatgtataatcccatttaatttaatatagggtttttgaagggagcccgtcatcaccgacaactggggtggactcttcgagggcgatgacgctgccaacaccgagatcatcgacgacggagctgttcgatgaggcgcagaaggtgaccagcaacgcgtgcgtgcgcgctcctccatcacacgggaaacctccgccgcctgttctacctcaacaggctccaccgcaactctgag

SEQ ID NO: 85116 - DNA, 247 bp, Zea Mays
ctccttttctgttttttttttttactttcttatttttggctgagttcataaagttcaaattcaaatttaaatttaaacaaattctaaatgcacattcaaaattccaatatgatgcaaagtatatttatttattattcctatttctctaaataaacatgcttcaacacataaagaatgaatcatacaattaaataattaagtacccttcttgtattattaaatagagttagtaataacttatttcaag

SEQ ID NO: 85117 - DNA, 229 bp, Zea Mays
agcataacaggtaatatttatattgtgaaattcttgtacaagcataatagttaatatttctatagttaatctgataatattctgattttttcaggcttcatgctatgatgaaagagaagataggtggagagcttgttagatggaatgccacgaggtttggcacactttttttgttcctacagagtttttgggacagacaagacaagttccaagcttggatggtgtctag

SEQ ID NO: 85118 - DNA, 995 bp, Zea Mays
agtttctactatgtgaattatatgtctttatatcttgtatgagcttcatgtttcccctccttgttatgctagttttcaaaggaggtgctgccagatttttttcttgctttatattctttctttattacatctcttgtgttgagtaagtttagtggatgaggtttatggtattatccattctgtgtgaccagtggggtgttacaaagggtttgatcggcccgaggcaagagggaatcacggcttgtgggtaaagtgcacaacctctgcagagtgttatgaaagtgatatatcagtcgtgctcgcagttatgagcggccaagggagctccattgattagagatacttgatcagagatgtatggtttacaggtggtgatgaggatgatggttatgattatgcttatggtattggtaagtggtattctttccatttggaaaggttacgtttgggttaataacttgggttaatgctaaaacctggctttctactcgtaaataataacctgaccaactaaaagcaactgcttgacttaactccacataaagctagtctactacagccaaacgggacattttgctgagtatgttgatgtgtactcacccttgctttacacaccaaaccccccaggttgtccgcgttgcaaccactgctcaggtgaagatgaagtcgtggaggaggacttccaggagttccaagagtacgatgagttctaggcgtgggttagcggcaaacccctagtcggctgcctgtgtaggtcgtgtgtatctatgtttcttttccgcactttgattattgttaaagactatgtgaatgtctcggacatcatgatgtaatcaactattgtaccctcttttatgtcattatttaagtactatgtgatgatgtccagttatgtaaatgatgtgtacgtgaattgctaatcctggcacgtacatggttcgcattcggtttgtcttctaaaaccgggtgtgacacttattctagctcaaacttag

SEQ ID NO: 85119 - DNA, 121 bp, Zea Mays
gttgcgagttcgaacctcactatttactacaaaacatatagatttgattcaaaatgataggacaatgggtaaggtaataggtagggttggaaagttgtttctagaatttaaaaaaatgttt

SEQ ID NO: 85120 - DNA, 256 bp, Zea Mays
cttcatcatatctgtactagtatgaggagccctcatgaccaatcttcttgcatatctgacatgttggtttagattgttggcctccttgctttgagaaggtggaatttagtgcaaaattctgtggagggccttcatgcccacggcctctattacggagaccaccacgacttctgcctctccctcgtccacgagcagcggaatttgctgagggctggaactaatcaccaccataattttcttgatacatctccatgcg

SEQ ID NO: 85121 - DNA, 2805 bp, Zea Mays
ctaacctcagccatcattgcttgattatatagaagatgagatgagtcacattgattacataaaagctcattagagcttagctaatcagataggagccttggcagccgcacacacctgttgagctgctcaaggtctttaatgactataattaactagcacaagtaactaggagagtgcttaggaaacaggacttaataacaacatttctccccctaaggcctgtttcaactgatcttgatctccttgatcccaattctgcttctcatatcttccaacttggtcttgcccaaagctttggtcagtatatcagcaagctgatctgcagtgggaataaattctgttttgatgctaccttcttccacacagtccctgatgaagtgatgcttgattctaatatgtttgctcctgtcatggaaaacaggattctttgccaaagctagagcagatttattgtctactctaagttccaccacctcaacttctcttcccaatagttctgcaaacaaccttgacaaccacaaggcttgggttgcagctgttgtcattgccacatattcagcctcacagcttgacaatgcaacaactctctgcttgatagattgccagctgaccagactgtttccaaggaaaaacaaacatccagtagtgcttctacttgtatcaatatctccagccaagtctgagtcactataacccacaagtcttgccttgcctgtcattctagtatagcatagcccatgatctagagtacctgtcacatatctcaagatcctttttacagcctgaagatgttcagctgttggcttctccagaaatctgctaacataccctacagcaaaagccaaatctggccttgtgtgcactagatatctcagactaccaactagtcttctatactgagttggatttacctcctttgctgtactttccttgctcagtttcaacctttcttccatgggggtggtagctggattacagtctgccataccaccgagctcaagtatctttttagcataatgagtctgtttcagagtaatgcttccctctgattgtcttacctcaaccccaagatagaaagacaacagacccaattcactcatttcgaatgtctgcttcatttttgccttgaaagcttcaatcttctgctgattgactccagtgatgatcaaatcatcaacatagactccaattatcagcaaagaatcacctgaacctttcctgtacatggcagcctcatatacattctgctcaaaacccatctgcttgagagtcaaatcaagtttggcattccacgcccgaggagcctgtcttaggccatacaatgccttgtgtaacctgtacactttcttctcttctcctgatacttcaaaacctggtggctgagtaacataaacctcttccttgagttctccattcagaaatgcagacttcacatccatgtgatgtactgtccaaccttcttgtgctgctagagcaagtaaaacacgtactgattccattcttgcaactggtgcaaaagcatcttcatagtcaatcccttccttctgaacaaagccacgggccacaagtcttgccttgtgcctgatcacagcaccatgttcatccttcttcaatttaaacacccacttcaatgaaattgggcgatgacctggactaggagtaacaagttcccaagtcccattccgctcaactgagctcagctcttccttcattgctgcctgccaatctggatcatcttttgcctcttcatagcttgtgggctcaccggcatgagtgaggtttagttttgcaaacaacctctgtgccggcaaaggggttggctgattaccaataatatcatggaccttcctataacgaagctcttcaccatcatgacaagcatccaccctttcactatcattctccagaggagtcacatgctctatctgcgggcttgctggagctggtgtaggtgttctaggtgacacaggcacctctgtctccacttcggattcctctgcttctgctgcagactctcctgcactcaccaaagggagactaggtgatgtaggatgtggctgaagaggtggtgagggtaacactgaactttctgcttcaggaaactcttctgcccatggaaactcgacaacaaaatcgctgcatgctgcctctgaagtacctgctgccgctgatgcccagtcccagccacgtccttcatcaaataccacatcacggctgactcgcacgcgctgggacactggatcaaatacacgatatgccttggccccttctgcatagccaatgaacactccagccttaccgcgatcatcaagtttctggagctgagtaagctgccgggtataagccacgcagccaaataccttgagatggccaattgttggtgcgcggccatgccatgcctcatacggagttacattcttcagcgcctttgttggagatcgattcagaatatgcacagccgtcatcacagcctccccccaaaaccgagaaggcatctggcgttgcttgagcagggctcgtgccatggccaccacagtttgattcctgcgctcaaccacaccattctgttgcggtgaataaggagcactgaaatgccttttaataccttcattggcgcagtatgcggcgaactccgcgacggtgaattccccgccattgtcggtgcgcaggaccttcaacttgcgcccactttccacctctgctgccgccttgatcttcttgattgcttctgccgctgcgtcctttgatggcagcaacacagcccacataaaacgggtggcatcatcaacgagcagcaggatgtag

SEQ ID NO: 85122 - DNA, 1179 bp, Zea Mays
ctcccttcttttcctttctgcatcgtgctttccactgctcctcagtgtacaacagcttgccattgatggccaccggctcggtcaatatttgttcttcgcgattgtccactgccttaagccttccagtcacctcctcaagagtcagtgcctcaaaatcaaggaactgctcaatggcgacgacgatctgcgagtacttagctggcaccgtgcgcaggaatttctccaccacgcgctcctcggtgatgtccctatcgccatggatgacaagctgctggtgcagagttgacaaccgcacagcaaagtcatccacttgctcaccaggattgacgctgatgttctcccagtcacggcggaggcgctgcagtgttgctcgacggaccctgtccacgccgatgcgggtcgcagcgatggcgtcccatgcctccttcgccgtagccttgtcgagcagtgggagacccatctccttgggtacagccccgacaatcacctccagtgcgcgtctgtcatcgcggaactggacaggaccgccttcaatggcgtcccaaagatcgcgcgcctgcatcctcagcttcatggtctggctccactcgtagtagttcgtcttgtccagcattggccacgacgtgccgctgccggagtcgcggtacaccacccttccttgcggcgactcgtagcgagcgccgccacggcagcgccttcggtcccgtagtggtgactgcgagcgcctcctatctcgcggtggagtcctcatgcgcctgttcctctctgtttcctcttcctcctcccagacctcctcatcttctcccttctcggcggcgatttcggcccgcagctcctgcgccgtccttgccgctgcctctgctgcagccgctgcctgcttcgctgcctggactgccagcgtcgctgcttcctctgcagccttcaggcgtgcagcccggctggagaagtcgcccagctctccctcgctggttcccttggccttgagcctggcagcgcgctcagcagaagtcgacatgagtagagaagagaggggtcggccttgagactctcaggtgtctaacctaagctctggtaccaaatgttagaggtaaacagagtggttttgccggaggtactaacctcagccatcattgcttgattatatagaagatgagatgagtcacattgattacataaaag

SEQ ID NO: 85123 - DNA, 629 bp, Zea Mays
attcattttcctttgcaacctcatccgagcatgtttctacaacaatattctcaacaagaacttggttgcaggagttagaatcatcaattaaatcaaagcaagaagtagaagcatcctttttaataatttcaggaatttcaactaaagatgctgctggggtgctaccgatgttttcaagcttagtagttagcttattattgtgtatgctaagaatttccattttctctagcaaattttcaatagcttcttgggagctagctaacttagccttaagtttttcattctttttaataagaccatcatcagtagcagtggatggagcacttgactctaatagctcaattttagttgacagctcacaatttaggtttgcaaaagtttcaaatttttcaagcaatcctttgtaatcattttgggagctaatcaacttatttttcaaaattttaagttgagctttttgcttagtgcaaacattctggaaaaatttaacggcatccgcaagttcatctacagagggctttccctcaccatcatcatcactactactatcatcactagaggatggaatgctcattttacctcttgccataaggcatttgtgtgatgaccgtgatgagcgtgatgaggac

SEQ ID NO: 85124 - DNA, 726 bp, Zea Mays
taaatcatacacaagacatctatatgacaatagaatcacaaaatagtagagttacataacttccacaagtccacaaagcacacaagaaaacagagacaaagtactagagttacataaattacagtccaacttcacaattcacaatttaatactttatcaccaaagtcataaacaaaagcacaaacaacaacagtctgcagctcgccagcaaggctccagcctccaagtctccaaccttcaaggtctgcagctccactacttcataacttcacaaggtctgcactctgcagtctgcagctcgccaagtccaactgtccaaggcagcaagcctccactcgagcacatgcaagtctgcaacctggtaggctggtagcctggtaccagcaggcagcagcaaggtaataaattataccaacttaccaagttactaactgctagcatgcactaataaacaaatgaagcattgtctttgtctggttaacctatacatatgaagcatgaactaataaacaaatgaactagacgatccgaactaataatcagctaataatcagcacttcagcagctgccagcatgtccaaatggaggagaatgaattccctataaaatttaaaaaactagcagctgccggcacgaactaataatcagcactaataatcaacggctgctggtgcgccgtgcgcttgtgtgcgactgcacggtgccgccgctggccgcctacgcctg

SEQ ID NO: 85125 - DNA, 1657 bp, Zea Mays
cgtatgtacacactccattgatacatgaagcgaggcatcacgacatacatctaatacctcgacaacgcacccgtgttaagaataaaacaatcttcacgaacaactaattcaaccaatccattcatcagatcagtcaataaaaatagcaaatcagcttaccgttccaacagctgactcgaatccgcgagatcgataatgattttccgatcctggcaatttgtcgagcgcttggcaggtgctacacgaacttcacgcacaccaccatccaatctttcgacatcttcacttggggattcttttgtccgtgcgatcacaattcggaggcatcacggagggaccggcatcgagacggggcgacggaacaacgacgaactagcgagttgaaccacggcgagtgatattttgacgtggatgagcaatggtaactggcggacacggaacggcgaagtgaggtgtgcggtcagctagcaaagatgaatgtgtgcggcacggaagcgaaaacagaacttgatggccagcttggagactcgacgagacggtaacatcacggcgacgtgcagccaaggcgcgtggaactcgtagggccagatcttggcgaggacgagcacacacgatgtgacgacaacgacgataaccggcgaggtcgacgacgcgatggggattaagacccagcgagtcgagagggcgtgctgacgagcaggaagccgcgtaagcactggacagggaaaacgacgggctcaacagcgtccgtggccagagcgagcaccagagaaaaacagcggcaaccagcgtccacggcgaggtccgagcgtccagagttttttttgccgagggcgtacagagagggatgcacaaatcctgggcgcgatggtggccatagccaagcagaagggcgcgactgcgcgcagaggagctcggctaccatggcgagttggacaaccgcggcactggggctgggcgcgggagggcgcggctagaggagcgagctaagggagcttcggccggccagcagcggagaggaacgagcgcccgagctgccgagcgatgtgagcaacgacaaggtcgacggtcggcggcacggaggaatggaggaaaccaagatcagccgtgacagagaagctgcgatagcaagataaacagccgtctaacagccacgacgaagcgagtgttggatgagctcgacgaacggcgacgcgaagagtaaggcgagctccacatcaacggcaacggtacagtatcgacaagaacgccgcgcgcagctatgggcgagctcgaagccgagcgctgggcagggagcaggcgtggctggggaagacagaacgcggccatccatcggggaatccgtgtcttgttgaagctgagcacatgggagagggagctcggcacggccagggagggcattgagctcgtgcggccagggaagagggagactgccgtgccatgggagggacttcggcaggtcgcgcagggaagcagaggcagtgacggccaggcgccatgggtgggcagagtggaactcggttgcttgcaggggagatggagaggacgcagggacgcgcgagatacgacgagtcagccatggcgagcaggagctgttgcagggaccgagcgccggcgttaagggctggggcgagagcggccggacagaggagcgcgg

SEQ ID NO: 85126 - DNA, 477 bp, Zea Mays
aaacaaacgaagtgtcactctaaccatatatagtcatgttgtttatttctgtactgcagatgttagctgcactagctgcagacgtgtcactcttattattccctaatcaaaactcaatttcattttttctaatttatttgtatcctaacctttcatctactccagattctccctggagggcgagggaattgaggagcagccaagcccaatcaaagatggagtcacaatcagatataacttggagtccaatttattcagactgtttcgagcattgtatttgtaccagtaaaacacgcacagcgcttctatattacacgtgaatcagctgctcgctttccacttcatcaccaggatggcaggatctcttcataaccacaaatattagcttttgtattctaaggctctgttccaatctcgtgagataaactttagcagtttttatttagctattttagccatttgtaatctaaacaggag

SEQ ID NO: 85127 - DNA, 748 bp, Zea Mays
ctctgttctctctctcccctaactctctctctcctctctgctctctctcacgctcgcgtgagccgctgcccagccgcctctgcaccgagcgtgcagacgagcctcgaccttcccgcgccagcaagccaggcagccgaccgaaccgcgccagggagcgagctcctgccccgttcgttcacccacggcagtaatggagcttcaatcgcgaccattattctccctgcgttatggagttcaaggcacttgtttcttttctttggaaaccgacgcatctatggcacttgaagacagccgacgccctattgaagctctccctggcagactcttcttcttccctccctctctctataaaaggcagcagagcctctctcccatcctccctacccgagctctctcccattcctcgcactctctcactcgccgttcgtcgccgaagttcgccggagttcgtcaccaccggagcccgtggagttcgccggagctacgccatccgccgtccgtagtcaagcccctgctcttctccatccggccgaaactcgtcgattcatccccgtcacacgcacgaacccaaggttgaagacaaaccaaattattttgtgtgttttataaaagtactttttgatttgattcatgagttgtatattttatttgttgtaatatgaacacatgtgattcacgatttatgtatatgtgtgcgttatggaatttgttagagatatacgattattagtgcaccgttatatttcat

SEQ ID NO: 85128 - DNA, 164 bp, Zea Mays
aaatcagtagcgaatctagccgataatatgatcggggtcatgaagagcagctttgctatatcatataaaatcttatgaactttaacagtattttactaaaggatttataaaatttatcggggtcggctgaccccgataaacccccctagattcgcccctgaagt

SEQ ID NO: 85129 - DNA, 129 bp, Zea Mays
ccggcggcacactccctatcttcccttcgcaaccggcggtcgaccctggcccttccccgctccgccagcaagcatgtgggcctaggccacgccgccaccgcgagtaggtgagcatgcactggttccgac

SEQ ID NO: 85130 - DNA, 2501 bp, Zea Mays
tcgccaccaccttccgcgctcccatggccgccttctgcctcgcgctgcgccgcagcgccgcttgtatgtggcccgcgcgtcggcccagccgctcgaggtctgcgctaaggagtccatcaccgtccttggcttcctcggagactgtaagctctctctctctcgcgcgctggctaaatgtagtccatagaatgcaaggtgaactgacaacaatgctggttgcgtcgccagctatttggatgaggggagagttttctcgatttaatttgctgcattaagagtgcaacttcaaatgctagatttatttcacatttagagtgtattggtatttgattttcgtgttggtatcatgatccgtatgtggtttatgaagacacgtgaaaaaaaaacataataacctgaaattgcatgagatgagatgtgcagcattagacatgtctgccacctggatgtagttattttagcacatagtttagtcctgcaatctgcaccaagccacttctgtggtaaacagtgtttgactttagtgcacttgttttatccatcatcttggtgacaatacaaaccgtgtctattctctggatcatgtagccaacaacaatgcttggcgaaggttgggtgattggtattttcagtatttttttggtgaagtctattattatgtactccctccgttcttttttatttgttgtgttttagttcaaaactaaactagcgggccacaaatattcgagaacggaggtagtagtacaatatattaagagatgtacatgtcgaggttatctttggagtgaaatctcttgcttgattaaaattttgtcgcctgccctacacctcttttaagttttattggggactatataatttgttaatgccttaatgacaaaaaatgattctgggctcaagatacgatgctttcctggtttctatatgcttaagagcaagtataataagttgatataggtgggctgtgagcgatgtcacatcggatttgtggtgacatgaaagaaagataaatagagataagagaagtaggttgtccactaatagccagctaaaagtgggttgttcatggacttcaaggcactttgtgagagacagagatagaccaaatattaaatgtacaacttgtatcttcaccacattgtatgagaccaaatattaaattgatgagatggtagctgtggcagaacctcccaagtaatcgggcccacatgcacctgtcctcgtctcaaagacctcagacggctatgcatgtgcatcagataacttaacaggatttgtccgagtgttttagggaccccggataaaccacttataactaggatcacaagattaagtaaacacaattcacacaccaacacatgcagcggaatttctttattacaataaggttacaatttagtacaagattacattatacatatcggggtgattacaaaaaaatgattcaaaggattaccctttgaaatgttataaaatatttgtaagtttgaaatacatgctaacttaagttaccatcctcaataagaagtatagaagagctacttagacctataagaaggccgtgcccaccggcggccggcgcttagcaccatccatagcagcacacgatcaatacctgcaacggtgggttcaaagaaccctgagtacgaaggtacttttgcaagtcttacccgacaaaagaaaaaactcttaaggatatgttggcttaaagggattcaaggtaaagctcatcaagtttcaaagactctttttgcagaaaagcttactagaagtggatccttaaggcaaacttttacttagcaagttgagttctttcctgattctagatttgcctaatctagagcattcacttgtcctatactagcttccttttaccaaattcttgttccacttattaactacgatgcaggtcccgagaagtaacggcgatccgaatcgattaatacccagctggggatctccaaccacacgacatatgtagcacttaacccttgcatatgtcaactcgcactcgggtttctcaataccagaatgggttcacgccacctgagagcacatatactccaccgtccagcctcttgccgcggagggtaaacgctactctcgccatctctccactcacattgcgtgtgaaaggatcacgatgcccaagaggggggggggtgaattgggcttttctaaaaatcaacacaaattaaaacctaagcaagagctaagcaagatcccaacttcaccccaacaactagcactaagaatataatactagaaatgcaacaaagctaagacaatacttcaaatacttgctaaacaaatacacaatgtaaagtgcttgaattaagtgcggaatgtaaagcaaagtttagaagactcctccaatttttcccgaggtatcgaagagtcggcactctccactagtcctcgttggagcacccgcgcaagggtattgctcccccttggtcctcgcaagaaccaagtgctcactacgagatgatcctttg

SEQ ID NO: 85131 - DNA, 1245 bp, Zea Mays
ctccttcctgcgtcatttgttgagcgctataaattttgtttccagatcagacttcacagggatgatgccaatggcatggggtactcctttctataccggttcagcagaaaagagagagagggaggctactacagtctagtgatctagttacggagcaaacttaaggaatatgacagtagggtttgcgttttagcaatcatggacacgttaagtgtaggtcgcatgtgtttttttatttttgtgactaattgttgaaagtacatgagacctgacctgctggctcaaacctccctcccctcctaataatttatgtgtttgccgcctctctccggactccggccggcagcaggcccccatgacaggtctagtcgaccgactgatcgatcggggcgccagcgatgatggctttggaggtcgcggcgggcatggaaaggcagcgggcgcgcatgatggtgcgcccgagcggaggggcagcgcgggatggccggccacgggggccactcatcacccccacccccaccccagaaaccacgggagccaataaacaatccaacaaaaggcgggcacccttcgtgcgactcccggagccgcgcgtggcgcttgccagttgttgccaccgtcctggcgcctggcggtcgagcactagccgcggttgggttgggctcggcagttcgcgcccttcgccgcccaggcagcgcgcgcagctaagcttagctttcggtcggcacccaccagcctttgcctttgccgcgcccgcgctgctgggaggaggaggggtcacgtcgcgtggtccaggcccggccggcgcccaaagccgcctacacgccggcccgccacctcagtttggcgcgggatggctggcccggccgggcgctgccatggcacgtcgcagatgctgcgccagagctctggtggctggactggaccgccggggctaatagctactagtactcattcatggtcatggctgaactgaagatcttttttttggggggctacccttccttgtctcgtcgtgtttcctttgcatcgtctcacggctactcgaagatagggccgtgctagctccactatcgctgctttatctctctctcgctcgttcttatctcgacgccttgattgagatcgactctgaacgaggaagatctctgagcctgacgcatcaacggcttgctgtcgtgcgtggcgtggcgtggcgtgcggatcgaccgatctttctgcgggcaactcaagtcgagcttggag

SEQ ID NO: 85132 - DNA, 225 bp, Zea Mays
gagaaatcctaagtggacgtgagctgtgtgctcactcccactctgtttaatagggcgaattcagttttttttgttttgttttttaaaagatctttttttttcttttccaaatttaaacggagaaaataacaccggccagtcagatggcgtgacgttatcaacccaacgggcactaccgatggacccttatcgatagcgccgtcagtcctaacacaccgattgata

SEQ ID NO: 85133 - DNA, 365 bp, Zea Mays
cattcgccagtaaaatagtagaattttggttagactcgtgcgccggggtcgggagttgacgcgtgagcgagttgggccgtggttcttgatccggcccactaatccccctaaccctagccgccccttcccctaattcccttccccttgtgcagctgcccccctccctctctagcctttggccgccatcccctccccctaattccctctctcttgtgcagccgcccccccatcccctcaaccctagccgccaccccctcccatctcctgctctccaagtgatgtccttcctcgccgaatcttcttcgtgtgggtgcaagttccgattggagaattggtgggaggaagtaaggaggaagagaggaacc

SEQ ID NO: 85134 - DNA, 267 bp, Zea Mays
aatgaggggagtagcagcacgtccactttcactctcataataacgctgcccatgcgcagccatgatttaattagaaacttgttgtcaaaggatgtttgtttttttactagtcgtgcgtattggttaattcagttcatgtcgtatgtttaacttccctttgctagccgtttaataatacttagaatgttttttgtcatgatatatgtttatacactgttgccccctcctttatgctattttgcaaaggagatgctgtcgaaattttat

SEQ ID NO: 85135 - DNA, 650 bp, Zea Mays
cacgaatccgcatgaccttctccttcgccgtcgaccaccgtcgaagtgctccacacctacacaccacaagccgtcagatatggttgcacaacacataactcatgcctcggtcagtctatgactcaacccgacacactactcgttgacaatcactcatcacaaacccgaaccaagggacaaatcaaccttgtgttcgcaatctcccccttgatcagtgcattgtcaacaccaccacatgaacatatatcagcagaagaagaaagaagaggagaaactcactcaaatgaccaaaagccagacaaaagccaaaataggtcatctagagtgagcaaagcttggtccacaaagaaatgggcaacaattcaacacgaccaagcgaaagaagctagtcctcaagatgaggcaaaagaagggctcaacaccactagccagcagtcaaaacccccatcggagcacaaaatcagcataaaagatgaaatcaaagctagttcctccagaaagaggcaaatagctcaatacaactagcaaaagctcaatttcttcctccttcaaatttcacccccttgataggagtacaagaaaaatccagaattctcaaaaatccagaatctctcccccaatactctagaccccatcaatccagaatttct

SEQ ID NO: 85136 - DNA, 266 bp, Zea Mays
gttttgccgagagggtcagcagcaacatgaaaccggagcttgaaactcgctaccgctcgcaccatgatcagtggcggaggagaaccattgccatctgcccagccgatgccctcatcccctagaaccgagcaagcaaccacgtcatagcagaaacagagagggtgagagaaagttgggaaggcgggcggctgcgttgagctgtagccgcgccgtgcccagaacctcgggttcatcctcatcggtcgctgcggtgcttctacaggaca

SEQ ID NO: 85137 - DNA, 934 bp, Zea Mays
gtaccggttcgtttaaaaatattaagtgatcctcgacgttgatttctaatcggacggcttaggttcgaagataccccttcgcctcggcatttaatctaatgagcccctgctctttttttgtaattagcccgccgtccaccgtagttcaattagtattgcagatcggtcctgtttttcacaatttagaccctgggctttgtaaaatttgtagccacaacccttgtgtcctttggaatttataaaataaattcagatttcgatttttagtttagaaataattctagaaactagtttaattcatatttaactcattttaactctaaattgacccattccagttgcaataattttgtattaatattttctatccactaataacactgtttagccatgaaactggaattgaaattgttcattaggattaatctattctaagcactaaataatttcggaaattcataacttaataatcgtagctctgaatttagtgattcttgttcctacgatctcgttacgacgcgtagattattatcatgcagtttgctcttatgattggtgtgatgttaattttgtctataccatgtttgtttgtattgctacgactagcgtgaggacacgtgtcacctgaagagcaagttggtacctggaatctcaagtgccaggcaagttgtgcccttgatcacttcttttacccactcatgttctaattaatcataatgatctgcataggttaatttgatgggacccaataggttaccctagtttgtctatctttataccttgtttaccactgaactttttgggtagtacttgttagtgctttatgtagttttgggtatgaagatacattattcatgatcacacttttattatctgtttattatcactgttcatgataagatcattatgttaattggaacatggagaaccaccc

SEQ ID NO: 85138 - DNA, 148 bp, Zea Mays
ccggcagcacctcccttgatagaagcataacagggggaaaacatagagttcatacatgatataaaagagataattcacgtagtagaatctaaaagcaaaagtggtgaaacacattcatgaccaaataaaaggataggtaactcagccc

SEQ ID NO: 85139 - DNA, 249 bp, Zea Mays
atgaagtgggagaagagaaggggagagtcaagtatatataggcagttgagctggtcctcaggaccagttcaaccgcccccatgggccagttcagctggttctgaccagtgtggtcagagaaccagaaatagcagagggaagatgcaaaaaaattcaaatttctgacgcaggattctgaaaaagtgtactgcagagattccatgcaaaaaaaaaaaacaaaaccaagtgtctgcgcagatgagaccggac

SEQ ID NO: 85140 - DNA, 277 bp, Zea Mays
ggtcgctccatgttccaattaacataatgatcttatcatgaacaataaatagcaactgataacaaaagtatgaataatatgtatctcaatgcccaaatccacatatagcactagcaagtactacccagaaagtttagtggtaagcaaggcataaagatagacaaactagggtaacctattaggtcccatcaaattaacctatgcagatcattatgattaattagaacatgagtgggtaaaagaagtgatcaagggcacaacttgcctgggacttgag

SEQ ID NO: 85141 - DNA, 406 bp, Zea Mays
atagtggctcaggatcgaatgtcacatctttactacataacaggagttctatacaaaataaatagataattacattataaggagacaacggtccagcaacccaaagttgactgggagacgacgacctagacctctcacgaactcgacacagcatccttcatgcgcctcatcctgtggtacctgttcttgacctgtggggggggtgtgagacagcaagagtgagctcacatacgttcatcgctcaacaagttgtggggaataatgtgtatgaactcgccaaaggtgggagctcatgtgaagtgtaaggcttaccaaagaggatggttagagctgagcattgcttttaaagttggtcaaaattttattagcaattactaagtataagtaaataccaacccaattaaat

SEQ ID NO: 85142 - DNA, 373 bp, Zea Mays
ggacggagagcggggctcgactacggacagcgagtacgtggctccggtgaactccggcgacgaacggcacactccggcgaactccacgggctccggcaacgagcggcgaactccggcgaacagcaacgaacgacggcgtcgagcagtgcaatggtgagctagagagatggggcgcttgggtaggcaggagagaagagagagctctgctgtccccatttatagagagaaggaggggagaagaagagtctgccagggaggtcatgaggtgccgcaggcttcaaatgccgtcaatatgtcggttactaatggagaaataataggaataagaaacggatgaaataaatcgccatgaagcaagaaacggacgacggtt

SEQ ID NO: 85143 - DNA, 1715 bp, Zea Mays
atcggcatccgaataaccaattaaatcaaatatggatccccgagtgtaccaaagcccaaacttaggagtatgaactaaatatctcaagattcgttttacggccgtaaggtgagcttccttagggtcggcttggaatcttgcacacatgcatgcggaaagcataatgtccggtcgagatgcacataaatagagtaaagaacctatcatcgaccgttataccttttgatctacggatttacctcccgtgtcgaggtcgagatgcccattggttcccatgggtgtcttgatgggcttggcatccttcattccaaacttgtttagaatgtcttgaatgtactttgtttggctaataaaggtgccttcctggagttgcttcacttgaaatcccaagaagtacttcaactcccccatcatagacatctcgaatttctttatcatgatcctactaaattcctcacatgtagattcgttagtagacccaaatataatatcatcaacataaatttggcatacaaacaaatcattgtcaagagttttagtaaataaagtaggatcggcctttccaactttgaagccattagtgataaggaaatctcttaggcattcataccatgctcttagggcttgcttgagcccatagagcgccttagagagttaatatacatggttagggtactcactatcttcaaagccgggaggttgctcaacatagacctcttccttgattggtccattgaggaaggcacttttcacatccatttggtaaagcttaaagccatgataagtagcataggcaagtaatatgcgaattgactcaagcctagctacgggtgcataggtttcaccgaaatccaaacgttcgacttgtgaataccccttggctacaagtcgggctttgttccttgtcaccacaccatgctcatcttgcttgttgcggaagacccacttggttcctacaacattttgattaggacgtggaactaaatgccatacctcgttcctagtgaaattgttgagctcctcttgcatcgccatcacccaatccgaatcttgcagtgcttcctctaccctatgtggctcaatataggaaacaaaagagtaatgttcacaaaaatgtgcaacacgagatctagtggttacccccttatgaatgtcgccgaggatggtgtcgacagggtgatctccttggattgcttggtggactcttgggtgtggcagtctttttggttcttcatcctccttgtcttgatcatttgcatctctcccttgatcattgccgtcatcttgaggtggctcatctccttgatcttctccttcatcatcttgagcctcatccccatttagagtgggtggagatgcttgtgtggagaaggatggttgatcttgtgcttgtgaaggctcttcggattccttaggacacacatccccaatggacatgttccttagctcgacgcacggagcctcttcatcacctagctcattaagatcaacttgctctgcttgggagccgttagtctcatcaaacgcaatgtcacaagaaacttcaacttgtcctgaggacttgttaaagactctatatgcccttgtgtttaaatcatatcctagtaaaaagccttatacagtcttaggagcaaatttagattttctacctcttttaacaagaataaaacatttgctaccaaagactctaaaatatgaaacattgggctttttac

SEQ ID NO: 85144 - DNA, 324 bp, Zea Mays
gccctcctcctcaaggaagccttcgatttgagagttcttgaactctgttccgttgtcgcttcttattttcttgatccttaagccgaactcgttttgagcccgtctcaagaatccctttaaggtctcttgggtatgagatttttcctgcaaaaagaacacccaagtgaagcgagaataatcatccacaataactagacagtacttactcccgccgatgcttatgtaagcaatctgtccgaataggtccatgtgtaggagctcgagtggtctgtcggtcgtcatgatgttcttatgtggatgatgaacaccaacttgcttccctgc

SEQ ID NO: 85145 - DNA, 1573 bp, Zea Mays
cctctaacactcccttaaatgctattgaatcgtcacttcttctaaagatagtgacacctacatccgtaaaaagacagttgtaacccattttgcataattgcgaaactgaaagcaagttgtaatctaaagaatctacgaggaaaacatttgaaatggaatggtcaggtgatatagctattttacccaatcctttgaccaaaccttgatttccatctccgactgtgatagctcattggggatcttggtttttctcataggaggagaacatcttttctcccctgtcatatggtttgtgcacccgctatcgatgatccaacttgagcccccggatgcatagacctacaaaacaagtttagttcttgattttaggtacccaaatggttttgggtcctttgacattagatacaagaacattgggtacccaaacacaagtctttgaccccttgtgcttgcccccaacatatttggcaactaccttgccggatttgttagttaaaacataagatgcatcaaacgttttaaatgaaattttagaatcatttgatgcaataggagttttcttcttaggcaatttagcacgggttgattgcctagagctggaagtctcacccttatacataaaagcatgattagggccagagtgagacttcctagagtgaattctcctaattttgctctcggtataaccggcaggttacaaaatgtaaccctcgttatcctgaggcatgggagccttgccctttacaaagttagacaatcttttaggaggggcactaagtttgacattgtcccccttttggaagccaatgccatccttgatgccatagcgtctcccactatagaacatgcttctagcaaatttaaatttttcattttccaagtcatgctcattaatttttgcattaagttgagctatgtgatcattttatttcttaattaaagctaggtgatcatgaatagcatcaatattaatgtctctacatctagtacaaatggaaacatgttcaacggtatgtagagggtttgcaagattttagttcaacaatcttagcatgcaaaatatcattttcacttctaagattggaaattgtaacattgcaaacatctaattctttagccttagtaattaatttttcattgtcatttctaaggctagcaagagaaacattcaattcttcaatcttagcaagtagattaacattatcgtctctaagattgggaattgaaatatcacaaacatttgaatcaaccttagcaattaaactagcattgtcatttctaaggttggaaataatgtcatggcaagtgcttagctcactagatagtttttcacatttttctacttctagagcataagcattcttaaccttaacatgcttcttattttccttaattaggaagtcctcttgggagtccaagagttcatccttctcatgaatggcactaattaattcattcaatttttctttttgttgcatgttaaggttggcaaaaagaatacgcaaattatcctccttatcactagcattattctcatcactagaggtttcatatttagtggaggattttgatt

SEQ ID NO: 85146 - DNA, 301 bp, Zea Mays
gcggcggcggctgggaatttcctcggggagcgcgcgcggctggggctcaaggagctgggcctaatgggccatttagggttagggttagatttgttttttttcttttttttctttttttaattccgaaatatatttttaaatagctctaaaatttataaaaattgcaccaaaactatttataaataaaatacttgtttttagactaataattattatattatttacttatgatattaattactaggtttttctttaaaaaggagttgataataaacattccgataagcaatcaagtgcatgc

SEQ ID NO: 85147 - DNA, 678 bp, Zea Mays
taataactaaattcattatttttaattgatggtttttatggcgttacagtgttttcctttcttataatttctcccgtttgcgaggaatctccacaacttggagcctctcgcccttacaattgatgatcacaaagaagcacagaagtaagggaggggagagaaacacacacaagactcaaagcaagagcacaatcacgcacacaaagccacaacttgagctcacaacacaactcgaggagttctctactcaaattgtgctcaagtcacaatctcaaagaatcaaatgcgcgagaatggagtcttggtgcttaggaatgatcaaggaatgcttgggtgtctccttcatgcgcttaggggcctcttttattgccccaaggcagctaggagccgttggaggcaatctgggaaggcaattcttgccttctgtcgggtggcgcaccgaacagtccggtgcaccaccggacaggtactgttcagtgtccggtgcagatcgccttcctaaaatggcacagccgaccattgcagagttgtagtcattggcgcaccggacaatgtccggtgcacaccagacagtccggtgcctcctgccgaccgttggagcgagccacgcgtcgcccacggatttggcggccgaccgttgtgttggcggtcgttggctcaccggacagtccagtgcac

SEQ ID NO: 85148 - DNA, 274 bp, Zea Mays
ttccgacccacggaataagtaaaataacgttaaaagtagtggtatttcacttgcgcccggaggctcccacttatcctacacctctcaagtcatttcacaaagtcggactagagtcaagctcaacagggtcttctttccccgctgattccgccaagcccgttcccttggctgtggtttcgctggatagtagacagggacagtgggaatctcgttaatccattcatgcgcgtcactaattagatgacgaggcatttggctaccttaagagagtcat

SEQ ID NO: 85149 - DNA, 323 bp, Zea Mays
ggtgtgtacaaagggcagggacgtagtcaacgcgagctgatgactcgcgcttactaggcattcctcgttgaagaccaacaattgcaatgatctatccccatcacgatgaaatttcccaagattacccgggcctgtcggccaaggctatatactcgttggatacatcagtgtagcgcgcgtgcggcccagaacatctaagggcatcacagacctgttattgcctcaaacttccgtggcctaaacggccatagtccctctaagaagctaactacggagggatggctccgcatagctagttagcaggctgaggtctcgttcgttaa

SEQ ID NO: 85150 - DNA, 243 bp, Zea Mays
gatcttggcgccgaccccttggtacgaattttgcagacgcgggggcggcggcgcagatgccaggaggtcggcgccaagatctatggcgccgaccccctgacacgtcggctgccaggtcagattgtccggcgtcaatagtattggcgccggcacacacaagctcggcgccaatgatgacggcgccgagctaagggtccattttttgaaatgaaactgccaggggcataaatgtgggaaaaaaac

SEQ ID NO: 85151 - DNA, 227 bp, Zea Mays
aggcccccgctcccgcgcccgccaccaaggccgccgccccggccccgaccacgcctgctcccgtcgccactccccccgcggcgacgcctcccgccgctgatgcgcccgtgcccgccgtggcgccggcccccgagaccaagcccgtcaaggcccccgcccccgcgctggccaagaagaagaagccgtcgtccccctcctccaaggacaagatgacgaagggcgcgtcc

SEQ ID NO: 85152 - DNA, 270 bp, Zea Mays
cgagttctgtagctagagcttgtaacccgagcgggggcgttaaggtggcgtttgaatgctttgcgataatttctgggccttgggctcgttgtgacattggccggcttgcccatcccaagttgctcactgcccactttcaacggtggcaggataacaagccgctgcactttgagcccggctcaggcccagaacctcactaagcaaaccaccatcttttttttatttttgcatgcccactttcacaactgatttacctttgttactcaatcc

SEQ ID NO: 85153 - DNA, 1572 bp, Zea Mays
caacaaacccgacgcgaatctcgtggagtcgcgcccgtaaagctaaccgacccattccctggccctatatgagtgtccgcaaatcgccccttgaataccgagcggagaatccagtcgccatcgagagacccaaggaacaaggacgccgccgcgcggaaaactcgtcgtcgccgccaatcctcgctcccatcgccaatggggcctgggggtcaacccagggggcttcgtcccatcgtcggggttgtgcccgtggccaagttgggggggaaacgaccattatggcgagcccaattgcacaccgaagattgtaatccacatcgaatccgcccttgacgcggtcagagatctctgcgcccctattctccggtaagacccccctctagtcctcgccatcctcctagctccgctagcacctatcgtagtcgaggttagggccccgtggctgcagattgtcatcaccaacgttggcgtcgccgccggagttgtgggcgccatcgcgttatgcggctctgggggggagacatgggtcggcccttggttctgagatttgcggtcaggattagatggaaggagtagtgtggtcgtatgtgttctgaaccgttcgatttgaacagagggtggtgatgaagcgcgccttcatttaatcgcggtcgtagaacttggatcgggcggacgccaaaacataccggttcgcagggctcagatctaatcgggagcgttgaaaatagatcgcgcggcccagataataagacaccccttggccagagaattatgcaaaagagacctcatagagttattaaatcaacccgcggttcgctggtagtcaaaagaaattacaactgagccccgatgtttacaaatagaaccctacacttcacagtaatgatgcgcgcagtccggacagcgaataaaatcagagaaattcatttataaaatgattttttatgtaaaagtaattgtaggaacttgtgtaaatcctagaaaattcattttaacttctttttagtccatttcaattcctataatttggtaataatattatctatcactgagtaacactgttctagcatgaaaacactattaaaatttatcacgcaattatttttgtaccaaacacataaggacttcagaaattcataactcacaatccgtagctccaaattgatccattccagttgcaataattctgttttaatattgttcatcatctagtacctttgtttagccatgaaacttgaattaaaataatccacttgatttattctatattaaacacttaatagcttcggaaattcctaactccttcgttttaattccgaattgactcgttctagttacgttagtttcgtataaatatttactacgcagtaacaacattaattataccatattgcataattttataattagatatttatttatcatgtgtctactaagattagctcttctaaatcataactaacctgatcatagttataatgtggttgaaacatgatctcaagtcaagtataacctagattaaagttgaattgattatttagagtatattttcttatatgatgtataataatc

SEQ ID NO: 85154 - DNA, 1198 bp, Zea Mays
ctggaatctcaagtcccaggcaagttgtgcccttgatcacttctttttacccaatcatgttctgattaatcataatgatctgcatagtttaattttgatgggacccaataggttaccctagtttgactatctttataccttgtttaccactgaattcttggatagtacctgttattgctatatggggttttatgtatatagatacatattattcattatcatacttttattatcagttgttatttactgttcatgataagatcattatgttaattggaacatggagcgaccacccgggaaaacagtgctaccacaagggtggtatgggacgcccttggctgactaattaggaaagctagtggaggactaccttacccaaaaggggcaagggcagtaggggagtgatcagtgtagggaggcccttgggttgattttgctgcgatggcggtcaagcgaggggtccttgcattagagcttcctataaactgtagcgggttttctgaagctagtggaactttgtaaaggcctcgtactgttaccctgcctcgcttccttgatagaggtgtatggggcccatacaacctcgtggcagatgggtaacatgacttgtggataaagatgtgcaacctctacagagtataaaaccggtatactagtcgtgatcacggtcatgagcagctcggaccctcacatgattaatttatggaactaaatgcaatttgtcatatgtattgcatcgcaggtgttgttattacttttgttctactacttaattgggttgatatttacttatacttagtaattgctaataaaattttgaccaactttaaaagcaatgcgcagcttcaaccatctcctttggtaagccttacacttcacataagctctcgcctttagcgagttcatgcacattattccccacaacttgtttagctatgaacgtatgtgagctcactcttgctgtctcacacccccccacaggtcaagaacagataccgcaggatgaggcgcatggaggatgctgtgacgagtacgtgagaggtctaggccgtcgtctcccagtcaactttgggttgctggatcgtgtcttcatatgatgtaactatttatttattttgtacagaactcctattatatagtaaagatgtgacattcgtttctgtaccactattcatcatatgtgtgagacttggtccca

SEQ ID NO: 85155 - DNA, 1381 bp, Zea Mays
cgccatagcgagataccagatacgctgaactctttataatacgttggcctctacctgacctagctcggcgccattgaccacggacgcgcagagctgcatgactcgatccagcggcgagaatgtcggatttgaaaactgcgcggccccaccacgtatcatcggatgcaactgcctgcatgcctagcggtcacatccttcatgttttttggttggtaaaaaatgatggacgttgatggcagcactgtgatcccatcgcatgcatagcacgtcacagtgatttattccagtacgagcagttgaccaagcaaaaaaacgcgtccatcatttgcaaaaaaaaaaaaaaacgtgtccatcatttcaggtgaaagtctgaactaatccacagtttgctccaacaaatttaccactgcaaaagtgcaaacaagtaattcgactggattactggaacgtggacgtgccccatcagaaaaacaaagtcaacatccacgtaaccttttcgtttggctgccttcttgtcagttccagatccgatgaacaaaaattttgcaatcagagaagagatttttcatatcatcagctattatattcccaacatacgtacttgttattcagtggtatatttccaacatgtcttattatacccctcttatcaactttaatgcaaattaaattaggatcaactgtttttaccaagcaatttgcttcgtacggaaataaatcacggtgatgtgctatggatgcggtgggactagagttgctgccatcaacgtccattatttttgacaaagaaaagaactcatgcatgaaggatgagaccgcgctagagacatgcaagttggatgcggcatcaattctcgccgccggaagcgttgcaatcgtcagccgtgagctcggcgccgtgatctatgacgccaagctaagcatagacgccatcgtagcatgagtagtccagtgtgtatctattacctcgacattataagtcatgacgccgagacatattatattgtcgtcatgatttatagcgcccagcaaaaggcctaaaaacgacattaaatcgtcaaaggtctaaacatgaatttgtttcaaaaaaagaccaactacaaaaaaaaaattaggcatatttgcgttaatgaaggattcccaaatcctctatagcttacgtcagctgacggcaacaattagtatttgaaattttgttacatggttacggtcgtaataatctggcggcgtgcaggcacatgcaagtgtcttgatgcttttcgcgtgtggaaccaaattgtgagctgtaccggcttcccaagatttctacgtgctactttagttgatatgcagggtcgtcagtttttttagctttctaccaaaaaaatcagcaccattcaac

SEQ ID NO: 85156 - DNA, 559 bp, Zea Mays
catgcatagtaccgatataggcctaaagccaccggcccattctaagtatagtattgaccgaatatcctttttggaaaaaaataaaatactgaacaaacagttctacttctgggaggttgagagtaccattggtcgccaggagaaggacgatgacaactcatgtattcagaagattatccatcgttggcctttcctttaaaatgtactaacaccttttgtagcgagctgtcagatttttccatttcagtgatcctgtttgatggctctccagaaggaactgcggtcttgctgggacaaccgagttgctcggctcggaacaaaccagacaactagatttgccccccaaaattaggaaaaaaaaagtactagctttctcacagggaaaggaacgctcaagaaagggagaccagggggggcaaacctgctcgtgccacggcacgagtggaagcagcagagctccgcttgaggccaacatggtgtgcagtctccttcgacgagcatttgcgaccaagaggccggggctacctagatctggaagctctgctcatttgagacggag

SEQ ID NO: 85157 - DNA, 1649 bp, Zea Mays
ccagaatccaagatataattcgtatttcgtaatcaaacttacaaatataacttttatatatatgtctatatttattaccatacatcggaccgcacagaaaaataaggtgacgagattttcttattgcagaaagcagccgagtggagtgggcttccaagatggaaaccgtactacgtgcggcggcgttctgttaaaatggaaactaaactccctcgtgctttaatttgctcgaatagtaatatccctcttttatttagtcttcattgagactgagattaacctcttcctcggatgctcttcatgaatggcgcgtcgtctatctagtcggcctccgcttgtcctgctgtcgaccctcggccttcctctcttcgaccttgcattggcctgggcagtgactgtgacacgttcaccgtctttgatctctccgacctcggcctaggcagccatgccggatcctgaggaggatggccgcgccggcgtcgtggcttcaggtggccgataaacgtcagccagccagtgcatgatgggcgagaagctgtcagggaaaaaaaaaagaaaccgaaaatcacgtttgtcggtgggactcagttttttacttatcagccatggcggctggcggagctgcaggacctggcgacggcgatccacctgctgttgtcggcgcgggcgcgggcgctggtgctgcagtcgccaccgacggggcagtagcaggagctacgtggacacggagcaggacgacatgcggtactggcggcgcaccaatcaaccagcatcaacgggaaagacgacgtttgtggtcgcagtgtgtgagggaggtttatctgtgtcgatggagattgaaggaggggccgttcgtttccattggaataaacccggtttcgttccaactcatcaaaatttatataaattagagaagtaatccggctaggaattattccgggtctccaatccgtgaaaaccgaacaaggccggagggattttgccattcaagcaaagtcagaggagggagtttcgtttccattctaacagaccccgcggcaaggtttctaataacaaaaaaaaaatatatcaagatctactgaccaaagcagagaaatggtccggacatcatcgaaattctagaacaacgcatccatccgtctgggcggagcaccccacggcagctcgtcgccggtgaggaacatcaaggcgatgagggccagggcaagcacagcaagaacggctgacaccatgattcagggaaagcaagcgaacctccttgccgcaccgggggccgccagcacggccggcgccggggccaatgaggatgatgcatatgaggtataagggcgggagcgaggtgatgagcaaagcgacggcggcttcgaggacggggctgagcgcgcggccggaccccgtcggggaagtcaagcagcggcttgagaatgtgggcgatgcccatcgccacgcagacagacgcgtctttgaggttggccatcgcctcgcctcgcgcaccagctgcgtcctgtttcgtaggagagcacacagacgcgtcagctgctcgaccggtgacgagaggagagctcggagcagagaagacggtgagcaagattagctggacgctcgaaaacgagagctcgattggctcgatctcgtggtgcaagaaccgc

SEQ ID NO: 85158 - DNA, 4340 bp, Zea Mays
ggccggtccggggggatcgtctgtgccactggaatcagttggcggcgattgcggggggcgtggtgatcggggaggcggcgaatttctcgccggacttctccctccgccgcggagtcgctgcgcttcgtggattggccctccgtgctacaataccctggtaagttttccccctcacgtgttcgccgtagccatcccttcatgtagcagaagttaagtagggattgagtgcactcatgactcatgcacccagtcatgcacctccggcgagtgcgccgtcgggtgggattacccttcgtcgtggctacgaggcaggaggaggaagacgtagcgtgcgctgtaggatcgagcatctacgacttggattagacaatagcgtaccggttcgcaaatcgatctgggccatagatcattccggcaggggccaagattagatagtggagaaaattcctttaatgccatccaaacttataccaatcccttcaatgccatcagattttatagcttcccttcaatgccatcaaatttaaattctaatcccttaaatgccattgccgttagtttcaagttaacgccgttagttatatttaaagcaaatccctccaatgccatcaaaatctataccgatcccttcaatgccactagaaattggttcgatctatttgagttttaaaaatttcagaatagaaaattttttgaacccaaaaattttgaaacgcaaatataccacattgattttaaaatttatctccatctgttatcattagtgtttgttgttagtttgaaaaaatattaggaatcaaatagaccgaacagatatagcggagtaatttttggtgtttacaaaataatatgtactgcagtttttaaaaagtgtggaattggtacatatttttttattctagaatttttaaaatccaaatagtttaaaccaatttctagtggcattgaagagattgatatagatttttgatggcattagagagatttgctttaaatataactaacggcgttaacttgaaactaacggcaatggcatttaagggattagaatttaaatttgatggcattgaagggaagctataaaacctgatggcattgaagggattagtataagtttggatggcattgaagagattttctctagatagtgatgtattccttcgcatagatgaatggacatcgtggatctacgatccttcggcacagattagatctggcttcattaaaccgtgattgtcgatctccgatctagcgggcagcgttgcataccagttcgagttaagtatgggacagatctgggtgctcgggttatgatcagactgccgaccttatcccgtaccccttcggccagatgattttcttaaagagaccctaatgaatctgggaatcaacccacactccaccataactgtagtctgagtctacgaaattttacacgctagaccctgaactctctgttaattgtgcgcacggtcctaaaagaagaaaatcagatttaaatacatttgagaaataccttttaatgaataaataattgcagaaacttaaataattcatagaaaaattattttaactcattttcagtatattccagttcctataactttgtaataatattgtttatcatttagtgccactgttttaacacgaaacccacagtagaattgacccctcaattaattttgtaccaaacacttaagaacttctgaaaatcataacttaaaatccgtaactccgaatttagtgattcttatttctacgatctcatttcgatgcgtagattattattatgtattttgtattcatgtttggtgtgattttaatttctgctataccatgtttgtttgtattgttgcgagtagaagagcaagccacagaggatctgagtgttcagtaggtagaagttgctgagcatgagctcagtgaaggcaagttatgcctttaagcacttttatttacccagtaatgttctttataatcattatatcatgcataatcttaattttgatgggacccaataggtcaccctagcctggttatcttttcaccttgtttacccgtgaatttttgggtagtcattgctattgctatatatggttttgagtgttgagataactattacacttgatcattctttattactgttctatttttgttcatgataagataactatgttaattggaacatcgagcttaacttgagaaacacatgccaccacaagggtggaatgggacgctcttggctgactaactagagaagctagtggaggactaccttacccaaaaggggcaagggtagtaggggagtaggcgtgtagggaggttctcaggttgattttgctgcgatggcggtcagacgggtgattcctgcattgctcgtcctagaaactgtagcgggttttctgaagctagtggaactttgtaaatgcctcgtagtggatccctagccattcaccttggtagtgtctaaggatctaactaaccctggcgagatgggatacatgacttgtgggtacaatgtacaacctctacacagtgtaaaactggtatactagccgtgctcacgatcatgagtagctcaagactctcgcatgattaaattatggaattaaattcaatttgtcatttgtatcacattggtatttattattaactttgatctattattactctagtttggtatttacttacatttagtaactactaataaaatttgaccaacttattaaaagcaatgctcagctttaacccctactattgatcagccttacacttcacatgaactcccacctttggtgagttcatgcacattattcccaactgaaagtcgcctagagggggggtgaatagggcgaatatgaaatttaacaacttaagcacaactacaagccgggttagcgttagaaatataaaggagtccgagagagggtgtaaaaacaaatcacaagcgaataagaagtgagacacaaggatttgttttaccgaggttcagttcttgcaaacctactccccgttgaggtggtcacaaagaccgggtctctttcaaccctttccctctctcaaacggtccctcggaccgagtgagcttctcttctcaatcaaacgggaaccaaacttccccgcaaggaccaccacacaattggtgtttcttgccttgattacaattgagatgatcgcaagaaagaatgagagaaagaagcaatccaagcgcaagagctcaaaagaacacaacaaatctctctcactaataactaaagccttgtgtggaattgggagaggatttgatctatttggtgtgtctagtattgaatgttatagctcttgtaaggtgtagaagtgtggaaacttggatgacttgaatgtgggggtggttggggtatttatagccccaaccaccaaacttgaccgttggtggaggctgctctcgacgggcgcaccggacagtccggtgcgccaccggacactgtccggtgcgccagccacgtcacctggccgttgggttccgaccgttggagctctgacttgggggcccgcctggctgtccggtggtgcaccggacaggccctgtaggctgtccggtgtgccacccgcgcgtgctctgctcctctgcgcgcgcaggcgcgcatttaatgcgttgcagttgaccgttgcgcgcgaagtagtcgttgctccgctgtcacaccggacagtccggtgaattatagcgaagcggattcccgaagctagcgagttcagagttgctctcccttggggcaccggacactgtccggtggtgcaccggacagtccggtgaattatagcgaagcgcctctgaaaattcccgaaggtgaggagttcagcttgaagtcccgtggtgcaccggacagtccggtgcgccagaccagggcacacttcggttgtcccttgctgtctttgtttgaacccttttcttggtctttttattggcttattgtgaacctttggcacctgtagaacttatagactagagcaaactagttagtctaattatttgtgttgggcaattcaaccaccaaaatcaattaggaaataggtgtaagcttaattccctttcacccacaacttgttgagctatgatcttttgtgagctcactcttccgatatataagccccccacaggtgaagaggaggtggtccaagaggagctgccctataatgaagagtacgagttgatctaggtggcatctcacagtcagctttgtggcgccaaggaactatacttagttcactttattattgtcatttatttttgtaagacttctgctatgtaacaatgacatttatgatatttgtgacatttatctctatacactttgtcatta

SEQ ID NO: 85159 - DNA, 50 bp, Zea Mays
gtttagaggacgctgccggagggcgtagaggaccattcgatcctctatat

SEQ ID NO: 85160 - DNA, 353 bp, Zea Mays
gtcaagcccgacgcagtgcacggtctctccgtgtttggtacccgcaacaagttctcgctttccaactccatttccggtcgcttccccaacccccctcatcttctcacttccccagagtccgaactacgagcgagcggctgcgattcccagcgtccgagcgccccggcgccggtctcctacgcggggaaggaccgggcctcggactgctacggcgccggatgagcgagcaagtctgtttctttgggcaagctatcggtcgatgtggcagcggagtagagtactggacgggcggggccacatgaggttcggcttccggaagggtggaagacgagatggcgctcacgaaggcagag

SEQ ID NO: 85161 - DNA, 1244 bp, Zea Mays
tagagataaatgtcacataacatcagagtaattattacatagcggaagacttattacaaaataaaggaataaccataaaacgaactaaggatcgtcggcgccaatgtcgactgagaaacgccacctagatcaagtcgaatgcctcagtgttaggcggctcctcttcgaccaccggttcttctcctgtgggggggtgtgtgagacagcaagagtgagctcacatacgttcatagctcaacaagtcgtggggaataaggtggcatgaactcaccaaaggtgggagttcatgtagtgtaaggttgatcaatgaaataaagactgaggctgagcattgcttttataagttggtcaaaattttattagcaattactaagtgtaagtaaataccaaaccttaataataataaagaacagtaatagtaaaataatcccaaatgcgatgcaaatgtcaaattaaatttaagttccataattaatcatgtgagggtccgagccgctcatgaccgtgagcacggctagtatactagttttacactctgcagaggtcgcacatctttacccacaagtcatgttacccatctgccaagagatggccaatcccttacacctctaccgaggaggcgaggcagggtaacactacgaggcctttacaaagttctactagcttcagaaatcccgctacagtttataggaagctccagtgcagggttcttgcctgaccgccatcgcagcaaaatcaacccaaggacctccctacactgaccactcccctactgcccttgcccctttcgggtaaggaagatatccactagctttcctagttaatcagccaagggcgtcccattatacccttgtggtagcactgttttcccgggtggtcgctccatgttcccattaacataatgatcttaacatgcatagtaataataaacagataataaagatgtagttatgaataaagtatcttcatacccaaatccacataaagcaatagcaggtactacccaaagaaatatttcagtggtaaacaaggtataaagatagccaaaactagggtaacctattaggtcccatcaaaattaacctatgcagatcattataattaacaagaacatggctgggaaaagtaagtgatcaagggcacaacttgcctggcacttgagatccagttaccagggtgaacttcaggtgacttgaaacctcgcgctagtcgtagcaatacaaacaaaatggtatagataaaat

SEQ ID NO: 85162 - DNA, 2715 bp, Zea Mays
cttcgcatcactaaacagcacctgtcagagctggcgattcttacaagcaccaacccttcgctactgtaacaccccggagtccacaaacaccccggaatgctactgaacaacacttctgacatctatatataaaattttgacagcacccctttgcaaaattgcataaatgagggggggcaacagtgtataaacatatatcatgataaaaacatactaagtattattaatcggctagcaaagagaagttaaacatacgacatgaactgaattaactagtgcgcacgactagttaaaagaaacaaactctctttgacaataagtttctaattaaatcatggctgcgtctgggcagcgttattgtgagagtgaaagtggacgtgctgctactcccctcattcccaacatgtatcaagtacctgcattgagtaatgcaagagtgagatgacacatctcagcaagtaaaataatatcaaattgtttaaccacataagaacattgttttaccaccacttgattccacaactttcttattacgacggtgcaacacgtatacaacgtacaacacacctagtcaccacacctcgcaggtagaaaccacaatagtaacatagtaatgtcacacttcatatatacctcatgagtgcaaatgtctgcaaatgcaaggatgacttctaccttcatacctctaaggatatgaagccgcatcatacccctcctcgggcaacgtacaattctaaaaatgtactagtacggtcggaccataagatcacgacataacttcaaaatgcaagatggatgatgcgatgtgcatgtcatgcctacaacacttcatataacgtgattcaaaaaagatacttcaacttcatccaagatgggaatcaaccacatatatcataaccaaattatgatcatccacaatattagacaattgagaattaatacttccaaacaaataaacttcatcatagaattcaatgattaacataattaaaacttatgcatactcaatgacagggaataggatgcaaagcaaacggtagcaaccaccactatatttacttgcctttaccggaagttcgggcaaatccctaagtacgatccggaagtccaacacctgttttttgacacacaacttagtgcaccaatttcacataatcaggctcataaacgacgccgcacctatgcacaaactcaaaccccgccgcgggttacatctctccccacacccaccaaactgcagcggcgctgcttaataatttcataactttaaaattatgacagcagtggtaacaaacaaaaactctagagtcatctacataaaattccccacaagttttgtatacaatttataattaaattccaacatctaattagcccaaaatagtccacaagatgaaccctgtaatctgtttttttgtcttttggacagcgacatacccggattcaaacagcgatatcttttaaaatataattccaaatcaagtgcataagtactcattggaaagataagacaaagccctacatgattataatactggttaacactaattacccacgaaaaattcccagaaactgctaatactactgctgttcacccacctgaaaaatctgtttcttttggacagcaacataaccggattcaaacaacgatatctgctaaattataactccgaatcgagcgcataagtactcgttggaaaggtatgacaaagctctacatgattctcccactgatccccactaattgcccacgaaaaattcccagaaactgctaatactactgttgttcacccacctgaaaaatctgtttcttttggacagcaacataaccggattcaaacaaagatatcttctaaattataactccgaatcgagcgcataagtactcgttggaaaggtatgacaaagctctacatgattctcccactgatccccactaattgcccacgaaaaattcccagaaatccctagaactactgctgttcgcccttccacaaaaattctggacagcacctctaccgattcgcatagataaacatataatcaattgaattttagcgcaaaaacatagataacttcaagatcaccttgagttccacctttttcctccttccttcctcccaccaattctccaattgaaacttgcacccacacgaagaagatccgacgaggaagaacgacacttggagaagaggagatgggggtggcggctagggttgaggagatggctgctgcaaaaaacttgagaatggagagggggcggctgcagcacttggggaagagagaagagggaagaggggggagggtgacggccaaaggagggaaggggggtggctgctcacaagggccttaagagagggggcggctagggttttgggggggaaaagtgggcttcccaccgccggatcgcgatcaacggcccaaaaccattcctacgccagagctctcgacccccgcgcactgcgcacacatcaaacataaattttactgttttacagatgtttacctcctaaaattccaaaccccccatagcacgggacccgcaagagaaaacaaagaaaaaaagagtaaacttcaatttctcttctttttgaaaattgggtatcacactctacccccccttaaaaagaattcgacctcgaattccgatgcttctatcggaacgacaaaggaaagattaatgaaccaacaaaactcacacataaaggaaagttc

SEQ ID NO: 85163 - DNA, 287 bp, Zea Mays
caaaaattctggacagcacctctaccgattcgcatagataaacatataatcaattgaattttagcgcaaaaacatagataacttcaagatcaccttgagttccacctttttcctccttccttcctcccaccaattctccaattgaaacttgcacccacatgaagaagatccgacgaggaagaacgacacttggagaagaggagatggggggtggcggctagggttgaggagatggctgctgcaaaaaacttgagaatggagagggggcggctgcagcacttggggaa

SEQ ID NO: 85164 - DNA, 790 bp, Zea Mays
gacactccttccaggtaatctgttcttttgatttgtagtagtattggtagttcttggctgagatatgatatttatgcataaaaatagctcttgggtgagatctgttcttcgtctgatctagtatagttgttcgctgagatctggtagttgttggctgagatatggtagttgttggctaatttctctcctctgagatctggtagttgttggctgagatctgttcttcgtctgatttgagctctccctcttgcatgcacccatttcacccctctcagatctggtatagtttgctaatttgttatataaaaatagtttctggtgtaggattttgctgcaaagtaccatgttgttagtgttcctcggatgattttagggttttagggttttgctactgtaggaaacgagtgacgcctaagagggggggtgaattaggacttctaaaactttcgctaaactaggccacaattaaatccctagagcaaaacctatgcaaatagacaaactagaatgtgcaaactaggttttgtctaagtgttgctatctctaccgcaaaggctaagtttcaatctacactagatatgtatgaatacaagattgaaacttaaatgcttaatattaatgcggaaacttaaaaagcaaagtagagaagcaaactctcgtggatgacgccgatatttttaccgaggtatccggaaccgtgcaaggtcccgactaatcctcgttggtgcccctacgcgaagggaagcccacgcgagggccaagcacctcggtcgagtaactccgtagagag

SEQ ID NO: 85165 - DNA, 749 bp, Zea Mays
cggcgcggtcatcagtagggtaaaactaacctgtctcacgacggtctaaacccagctcacgttccctattggtgggtgaacaatccaacacttggtgaattctgcttcacaatgataggaagagccgacatcgaaggatcaaaaagcaacgtcgctatgaacgcttggctgccacaagccagttatccctgtggtaacttttctgacacctctagcttcaaactccgaaggtctaaaggatcgataggccacgctttcacggttcgtattcgtactggaaatcagaatcaaacgagcttttacccttttgttccacacgagatttctgttctcgttgagctcatcttaggacacctgcgttatcttttaacagatgtgccgccccagccaaactccccacctgacaatgtcttccgcccggatcggcccggcgaggccgggccttggagccaaaaggaggggcggtgccccgcttccgacccacggaataagtaaaataacgttaaaagtagtggtatttcacttgcgcccggaggctcccacttatcctacacctctcaagtcatttcacaaagtcggactagagtcaagctcaacagggtcttctttccccgctgattccgccaagcccgttcccttggctgtggtttcgctggatagtagacagggacagtgggaatctcgttaatccattcatgcgcgtcactaattagatgacgaggcatttggctaccttaagagagtcatag

SEQ ID NO: 85166 - DNA, 164 bp, Zea Mays
gttattattattaaatgcgcaaacaaaacttcaatatgatgtctggcttatttttttcagacattttggtctcttagttatggttaatcccatgttcaaataaatagaggcaaaatatataaggagatttactcttttctcaatgtttacaaagtgggtattac

SEQ ID NO: 85167 - DNA, 1912 bp, Zea Mays
agttaaagggtcctcggtcagcacgcctacatacgcgttaatccttaaccaacctgggtagaacatcacctgttcctaacccaagtctcaatttaagcatttccatccttaggattgtgtctgttccttaggatgaaagagcatcacagggaactttgcagtaagatcccactattgctccaaaagaaaatattcttgcgggtagaagccatcctctcccgggttaaattgaggacaacctctatccacaagatctaagcaaggctaagcatttttgtaaatcataattttgatacttcacagaagtatctataaaggtatggatatcaaggaaagcaatgcatcaaagggtttcaagtaactcctatgaacctaatgcacatttcactagacttaagtgtgtaaaaagtatttaaaacacaaggaaaggggttgcatgcaccggggcttgcctgggtaacactaggttagtgttgttagacgatgtccacttgacaatcctcttcaggtttgtccattagcatcatcctgtggattggcccatgcttggggtcgacttgggtcgttcttcgcatcacacgattaattaacgtacttgaatgaaatgcattatgcacatgaatgcatataaacgagaatattacaaactaaatagtgctacgcgatagcgaatttaacacctagcggtgaggcgttgtacaattgtgtacgcaaacactagttattaatatacgactgtgcgcaataattacgcttctcgaacctaacgcaaacatcacgaacaacaaattatacacatgaaatacaattagcctaatcacaacttatcagttaattaattaaattctgaattaatccctttctttataaattatactacatctttataagtgattaaaatatttcatcatcacacatgcctactaaaattctactcgatccactaattcagctaagtgactgaaatagcgaaataattcgctatagctgaatctggctcgataatcgcaagaactgcgaagtcgacgagagtttcgtgactcacacaatttatcgagcaccttaatgcacctcgtactagcacatcaatttatgcaacgatcgaactattttggataatttatcagcttaccgtttcaatagccgactcaaatccacgagatcggtagtgattttccgatctagtcaattgtcgagcgcctgggaaatatcgcactattaacttcgtcttcacccgattcttgggatttcttggggatgcacgaacgacgacaaaatcaatgatgcggacgcgtgatgagacaggatctgtagagatgtgtgtaagggtgccaaaaatcgacggcgtgattcgagaaggctgggcacgtcccagcgcacaacacgacgtcgagggcctagtgacgcagctgctgttggaggaagcgcggctgcagagctcagcacaggagctggcgcggttctgtacggatgcgagcagggagcatcgcgcgcgcaagggagagctggagatggccggcggccgtcgcgtaggaagctagacgccgagcgccatggaacttcgcggcaggaagcagagaagggagctcgacgcgagctggagccggaaaccgagcagggaggcagagaccttcacggcgcggtgcagggaggtggaacgagcggccgccatgggagggagccgtccgtgggagcagagcagaggatttgctgcgcaaagaagaagaacgcacggctggagataaagattgctaagcgctgaaaatatccagggagcagatgatttgctgctgcgcggagagcttcagggaggaacttgacggcggccatggcagagaaggagctcgacggaaatgagcgcaccagccacggtgagcagaggctgcgcgcgacgggattttatccccgagct

SEQ ID NO: 85168 - DNA, 828 bp, Zea Mays
gaggttccgtcacagctggtatcggagcgtagcccttctttgcagatattatgaggcatcttcaaaaggattttctaaaattcttacctagaaactttcttcctttcttacctaagtattctgaagagtttatcttaaaagaccagataggaagagtgcaacgtatagaaggatgaatcaactaaggttgattctgtatttacacatgcatcatgtcatacaaactttaaattaaaccccctatgtagctaccttgttcatacatttttagtaagtagagtgttccgttgctcttctctgaagatgaatcaacaagaagcccctaccagagttggagagtttctacgagattttggtgttccagtggtcctgtggcgactacttcaagaagtcggatatatcgaaacacccaagtaccagtggtcacgcactgttcttagaggacaaccatggtatgaggtggtagtgcgtattccagaacgtgctagaaagccatcttggccacattggatgttccatgctgaaggaatgactccttgggaaggtgctcaggtagctgccttagaggcgctaacaaccatttgttaccagaaatgggaagaaatacaagccacatctatgaggttgttccctgcagttgccttaagtgacccattggtgtatcatcaccaggcccgattattggaaagcattcctattgggcatgattctgtagaatcggcatctgctcgagtattgatggccgtgctagagttgcagcttactcgagggcacagtcgtcaaaagtggaagcagttgtacactgggagttatgcagcatttaagatg

SEQ ID NO: 85169 - DNA, 298 bp, Zea Mays
ggcagtttgctggagccaggggtagtagacttcgcgcttccccgtgccatcttaacctcgcagcgcgggtccccgaccctcacgaacgcccgacgtttctgcgacgcgtcttggcgatccttctccatcactgtcgagacaacagcagcaacattacgtccgtaaggaaaaatcttcatctcacgagctaatcgagacgtacacatgtcctcgccggccgcccggggaattggaacattcctaggccagcggcccccggtaaccttcaacactcgcgcggaagattcctggagctcgg

SEQ ID NO: 85170 - DNA, 461 bp, Zea Mays
caaaatttttatatggatattatacaatatttagaagcctagggtagagtttaaattgatttggaccttgtttgatcaccaaaccccaaaacaccccccctgccctatgaactcctttaccgactccggaaaccctaagttcccggaactccgtgaaggaaagttgtattcaagacataaataataagtttatgctatctttgcatcctcatgagcatcccatggcatccattcttatacatatgtatggttatgattagaacgagaagaagaggtagaagtaactgaagaggagacaccacaaccacatttggacactcaggccgggaatagtttctacttcgacatttgtggacctgagcctgattcacctgtgaacgaaggcaagccccggtgcatttgccaccttccttgctatttcaaaatctttctcacttgattgctgcattaggtgataggag

SEQ ID NO: 85171 - DNA, 941 bp, Zea Mays
tttcaataccattttcagccgtcgctgccatcgctgccgtccaccagaaagccgaccgtctggaaggtctactcttcgatggtgtgatgtgttgtgggtgctctcttccatggacgaccgtctggaaggtctactattctggaagattattaccgcatgcctctgcatccgatagaccaaaggcatcagacttgcttagtgtgtgtgtgagcctgtttcgtgcctgcggatgatgtgtgatgtctagcaaaaccagctctccgtctccgcttgtccagtccactgtgattcggacagattgctccaggtagcaacctacctggtccagacacagctctagcgaaaggacatttctctacgaagtagtgggtgggtggagtcgagagtggagctttccaagctcctttcatgtagattgttcttccagctccaaaagttgtagacttactgcagaccgtaatctatcttgcaggagccagagaagaagaaactgcatcatggtggcgggcccatatagctagctcttccagatgactttcgggacgtttgaagccgtgtatatatgtcctgcaaactggatgttgatggcagacttgatcgagtgctcccctgagctatcgcgtatccttgtcatcattctggccaccttggtcctcctgctgagcttcgcggatagcactctgtatacatagggtctcggccatactcataactcaagagccacagttcatctttgtctagagttagggttttattacctaaccctagtatacagatcgaatcacatagattgtttaagggctatggatctgtgtatccgcggccaagaatcaagtttaagggcctgtttggtatggctccagagcaaaactccaaggaggagctggccagagcatgccaaacactctaactccagagttgtaaactctatagagtttttg

SEQ ID NO: 85172 - DNA, 271 bp, Zea Mays
gcctgccgccgcgggctcgccgccggcatcgatctatttggaaggcggctctgtggggtatccgcccacctccgagcccagtttccacgaggaaacccgcccgatctccagacgtctggcggctatcccgacttgtcttctcctactcgtgtggtcggcgatgctagtgtacccatcatgtccattcctccattcgtgattcacacagctcagtccaccgtcttgaaaacttgtaaaatttgcattgtggagaaattccattccctctgga

SEQ ID NO: 85173 - DNA, 545 bp, Zea Mays
aacataccactcgatcggggtagcaaaaggaccgctgtatctcaaaccatagaacatgctgttagatgaagacttttacttgaaagggcctgtcattcttcaactaaccaactccttccacttttactccgctgaatgcctatctcctgcactagcacttttactcgatcgcgtgtagacctgtcattctttgtctagactttgtccaactcaggtacacagacatactacgtagacaatgtcatacctaggaagattatgcaatattcaatagaaacaagattcctgcctttgttgtctaattgctcgatgcagagaagtttatgcgggggagtaactgtctgcaacattgaaagcaaaggctgaattcaatacatcggtcactgaggcattggtgaagtcccaatcctggccatagtaaaaggtcacaactgtagacctgctcattctttgtctagcctttgtcaattcaaggtacacatactacgtagtagacggtgtcatacctaggaagattaagcaaggtccaataaaaaagattccgg

SEQ ID NO: 85174 - DNA, 597 bp, Zea Mays
aaatgaaagatctgctggctgagcatgccatctttagttcactagacaagggaatagttcgtttaaaattggtgtggcgacagtgaaagtttaaggtatgtttggtttgatgactaagttgtcatactttgtttaacttttctgtctaaatttggttcttcaatttagacgactaattttaagtaaagtgtggcataattagccgcgaatcaaacaggcctttacttttacactatccgtacaaactagaaagtatgatataaactgaaagtttttttacactatctttattcgagttggtgcctgataagactaataagaactgcataggtatgtgtttatctgcagatggtctgtttatctgccagtagcataaactgtcttgaaagtgtacaggttgcagattgtatgttcatctgcaggcagctcaatggaatctatttgtctgtattctgaataaagtgcttgtttgtatattcagttattacaagggatagaagctgtcaagtgtttcatgtaagctggatagactgatgtctgaaaaactattatttgtgtgtcactcggctgaaacaagtggtttgtactgaaacttgg

SEQ ID NO: 85175 - DNA, 1098 bp, Zea Mays
ggccactccaagcaaaacacccaaggtaccccatatagcaccaccattcaaaacatgggtccattattggtcttaattaacacaagaacttctaccttggactaattgtctaaggaaactacacaatttgacatcaagcatgaaacaacatgcaatgaagctcaaagcaagtcatagatgcaatcaacactacaatttcacaccatcaaattgggacgcaactatacatcaacatcaatgtcttaagacaacactcttttatgaaggggtaatatgcactaagcacaattcttaccaacttcaataattaattttaattaaatggtgaaacatccacacctgacgaatgtataagaagatcaaacacctcacctcaaagcaccatgaaacaagtagttctattgaaacaaaactcctaatcttcctaaaccttattcttgccatcatgaaaagataatcatgtaatctaacattctttgcaccccgcaaaagggagaaaatctatagaactaatggagcaataaagccaacaagaagcgaataacattctgcgcggcataggtcatcgaagaaatgccaaaagctccacaaagagcactgacagcacaataacacaatacttggttaaccaatgtcactatacttcatccaacaactcaactaagaaaaatatccaaaccagtgaggttaacctacacataatataagttttcatctactgtagttcataaacttacatttcattctatcatacgatgcactcaaagtaccagacatacaaagtcaataataacccctaatccttcacacatttgacaaacatattaagctgatgtaaaaaccacatcatctaggagtaggtgactagccacacccaaccaactctaggctaggcaatgacttccttcaaaccaatagataggtggtctaaaaaaatggctccacaagcatgcatcgaaaagggaaccatcagatcctcaatgtatcaatacataatcaatggatcaagagaatcaaagatttattctacaattagtatgactaacaggcaaccactttaaaccacatctaggctttgtggcaactaaaacacacaat

SEQ ID NO: 85176 - DNA, 254 bp, Zea Mays
ttgggtcggattcggcccagccgagggaggggggagttttctctttttcttttctttttctaattctaattcctttcttttccttttttctatttttgtttctttttgtttctttttcctttgagaccaaaaatattttctaagtgatcttgagtgagaaaatatagtctatgtgaggtgctctaattatttcaagtgtatgcacatgagaaggggttctaagggtagagtttaagggagaaaaataaaataag

SEQ ID NO: 85177 - DNA, 439 bp, Zea Mays
gaacatattaccccttgtttttccccttctaggttccagtcttaccacagaaaggagtacaaatagagccctgctgtgctcctgttattcacctagcaggatcatcatgcctgaccattcctccatgccttgatcaagccttcggcttttccccatctcatgtgttcccttgccaaatcctgaaccgaagctgcccctcgaagtggtgaccacacccagccgagtgctcaccctcaccatggccaggattcttcgaaggttgtctcggccgtgtggtgcccgttccctactcctcgcagaattcccagaagaagatgaaattcaagaagtagtttctgaagaggagtctgctaaagtgcctgctcatcaagtggatgaagctatctaactaaaggttgggtagaaggatctagaacctcttcactacaacaaaggcaag

SEQ ID NO: 85178 - DNA, 873 bp, Zea Mays
cattgccacacccggttttgaaggtaaaccgaatgcaaaccatgtacgtgccaggatcagtaattcacgtacacagcgattacataaatgactcatcatagcataatgcttcgaattacaataaagagtaagtaataatattacagactagagtcatttacataatataaatcaaagtacacagaatcaaaacgtagccaacgtaaataaacccaccacaggcagctgactgggggaggtcgctagcctaatcctcgaactcatcgaagtcctggaactcccggagattcgcctcgacaccattctccttcttctttacctgagcatagattgcaccaaagacaacctggtgatttgtgaaagcaagggtgagtacacatcaacgtactcaactaatgtcctgtttggctgtagtggactagctttatgtggagttaagtcaagcagttgcttttagttggtcaggttattattactagtagaaagccaggttttagcgttaacccaagttattaactcaaagtaccctttccaaatggaaagaataccacttaccattaccatagtcataatcataaccattatcctcatcaccacctgaaaaccatacatctctgatcaagtatctctaatcaatggagctcccttggccgctcataaccgcgagcacggctgatatatcagtttcataacactctgcagaggttgcgcactttacccacaagtcgtgattccctcttgcctcgggccgatcaaacccttaaacactaccaaggtgaataggcagtgtctcactatgtagcctttacaaagattccccagggttgtagccgcccgttaggtttcctaaatgcaccgcactcctcccgaagg

SEQ ID NO: 85179 - DNA, 731 bp, Zea Mays
ctcgggctaagacccggaagacggcgaactccgctccgcccgaccccagggctcggactcgggctaagacccggaagatgacgaaactccgcctcgcccgaccccagggctcggactccgccctggcctcggccgaacgacttccgcctcgcccgaccccttggctcgggctcggccacggcaacagaaggcagactcaacctcggcttcggaggaaaccccacgtcgccctgcctagggcacagaccgccacgtcaacaggaggcgccatcatcatcccaccccgaatcgactcgggtcacggagaacaagaccgacgtctcatccggccagctccgccagagaggcaatgatggcactccacaagctctatgacaacggcggcccccagctctcttacggaagcaggacaacgtcagcagggactcgaccgctccaacagctgtccctccatcaggctccgccgcacctccgacagccacgacatcacgccagcagggtgcccagatctctccggctgccacattggcatgtacctagggcgctagctctccctccgctagacacgtagcactctgctacatccccattgtacacctggatcctctccttacgactataaaaggaaggaccagggccttctcagaaaaggttggccgcgcgggaccgaggacgggacaggcgctctcttggggccgctcgcttccctcacccgcgtggacgcttgtaac

SEQ ID NO: 85180 - DNA, 499 bp, Zea Mays
ccaaagcaaaaggaccgcaccaccacctaatttttaaaattggagattttcaattgataaatttcaaattggtatcttatgtgttcaaaaggggagaaaatagtatttcaaaaatgatatatcaaaaccctcttgaacactaagaggaggatctcatttagggggagtttttgtttagtcaaaggaaaagcatttgaaacagggggagaaaatttcaaatcttgaaaatgctttgcaaaatcttattcatttacctttgactatttgcaaaagaactttgaaaaggatttacaaaatagtttgcaaaaacaaaacatgtggtgcaagcgtggtccaaaatgttaaaaataaagaaacaatccatgcatatcttgtaagtatttatattgcctaaattccaagcaacctttgcacttacattatgcaaactagttcaattatgcacttctatatttgctttggtttgtgttggcattgttggggcgaaggcgaagacgcc

SEQ ID NO: 85181 - DNA, 324 bp, Zea Mays
gagccctataatgaggggtacgagttaatctaggtggcgtctcccagttagcttgatggcgcaaaggaataattatttagttcattttagtgtcatcatctatttttgtaagacttccgctatgtaataatgatacttgtgacatttatctctatacactttgtcattatatgtgatgttcttctttggcgcacatatgagacgcacccggctttatcccttaaatccaggtgtgacacataagaccaccaaaaataaacttttgcaccgttttacactgtaaattgtattgtttgtatagtgtagtttgaacatgggtatgag

SEQ ID NO: 85182 - DNA, 392 bp, Zea Mays
ccgcgctgtccatcttcaaacagggggacctcatggtcgtcgccaatgtcgccgactctcgggttgttctgggcaccgacatgccatccagctcatcatccacctgaagctcaacctgccacgtaagtcactactgatcggccatggattcttgtgtgttgggacgacgggcgttgctgacattgtgtgagtgtcctcgaacaagatgtatgtagaggagtagcacatccggtggtgtaactgctaggtgtactacctcgctgatgagcccggggtgcacttcgtttggcagcccagccaagagtcatcggtactcggcatgtcttgcgtgttcgatgactacaatatcaaggactatggcatcatcttggctctagaggtgacgcagagga

SEQ ID NO: 85183 - DNA, 808 bp, Zea Mays
ctaaagcctaagctttgataccaactgtaacaccccgagatccacaaacaccctagaatgctactaaactacacttctaacattcgtatataaaattttgacagcatctcttttgaaaattgcataaacggggaagcaacaaagtataaatagatatcatgataagaaaacgtaattgacattaataatctactagcaatggaaagacaaccataacagcatgaactaaattaaccagtgcacacaactagttagaaacaaacatcctttgacaagaagcttctaattaaatcatgattgcgcctaagcagcgttattatgagagtgaaggtggatgtgttgctacttcccacttccctggatgagcaacaagcacctgcattgagtaatgcaagagtgagatgaaacatctcagcaagcgaattgttttgacgagatatttaaaccacaaattgaattaataaacattttaaaagaatcacaattaagatcagaaatacttgtagatatagaactcagtagtcccaatataaccaataccatctcatttcctcgaacaaccacaataggttctataacacttccctgcgtcaacaaaacctgcaaatatcacttcaatgtatgcataggagtgcaaagtgtaggtactctgtcttcatacctatgagggtataaaaccacaacatctgcaaatatcacttcaatgaatgcatatgaatgcaatgcatatgtcctctgccttcatacctctaagggtatgaagccgcatcgtacccctcctcgggcaacgtacgatgctaagttgtac

SEQ ID NO: 85184 - DNA, 289 bp, Zea Mays
catcatcaatatatgattgagcattagtataatgcaagcaagtaaagcatcagcatagagtccaattatgaaagaatccaatacttctgaatattagagtgtaggcaatagaaataataggctagaacggaagcaaccaccgctacattcacttgccttcatcgaagaagaaaaatgtactaggcatgatctggagtgtagccacctgctatcgggcataaaacttagtacaaatatttcacaaacattttccaacaatcaacaaaacattcctacacttgaaaccaag

SEQ ID NO: 85185 - DNA, 545 bp, Zea Mays
agaggtgttacagccttcccccctaaaaagaaatctcgtcccgagatttaaaagtctaggcttagtaatggaaaaggaaacgtgtcacggacttatttcctaatttctcttacaaggtaggggaggtgttttgttttacttaaccacgatgttgttcaacacctctaaggcagttacctgagctccttcccaaggagtcattcctttagcatggaacatccaatgtggccaagatggttttctagcacgttctggaatacgcactactactcataccatggttgtcctctaagaatagtgtgcgacagcatttctctaagggggaaatcttttattagcatagttcttagcatgatgcatgtataattacagaatcaaccttagttgattcaaccttctatacattgcactcttcctatctggtctttaaaacaaactcttcagaaacacttaggtaagaagggaagaaattttctagataagtctttagaaaattctttttgaagatgcctcataatatctgtagagatgggcttcgctccgat

SEQ ID NO: 85186 - DNA, 537 bp, Zea Mays
agcagctctactttagaccagttcttctccaaattccatatagatttaaggctaggttacttaatcaaagtcacactcctcacatagctttataatttttttacaatgaccaccttcaaaatgtttatagatcagaagttataaaggaccaaaactgcctagttgctactattttcagcaattccaatctgagctcaaaactgaactttgatgatttactccaattttcttcacacaacatgggaatctccaaataagaaattcattcactttttcaagctccacaactttgatatatggacttttgtcaaattacttctagattttgaattcctcttttgggctagttttagtgtttcacatgttcttcattttcttcaagtgtttcttccacttgctctacctttgaaaacaaggttgccataaactctaggacttgcctttagcacttgaagtttccaagtcaatttgttacttgctcaagagttgacctactcttgtctagcttaagccaagtccttaaactaaactctaaac

SEQ ID NO: 85187 - DNA, 522 bp, Zea Mays
ccctgttttacttagccacccacgtaagctctctgtgccctctatccagagagccctcttgtaacaacactcacatactcaccaggacgtagggtattacgcacttctaagcggcccgaacctgtaaatcttgtccattgtccctcgtgcgatcggcacgaaccattttgctacagtcgtcgataccgtcctactcctaaaaacaccttgaggggcaaccccgggtgtgcgatcggacccaaaacaccgacagcctgcaaaacacacataaggccacaactccaacgaagccggtaaaaaaaagaaaaagaaaaaaaaaccgaagtctagctcaacgtacctgacttagtgtctccttcatctccttcagccggtgggacacagcacccgcctcgtccctgacagcagtgagtgtcggcatctcgccgccggcactaagagcaccgcccttcgcctttggcactacgacagccgtcgtggtagccgcggcaggcggaacaacaacaagttggccttcgtctg

SEQ ID NO: 85188 - DNA, 372 bp, Zea Mays
cgacctggcctggccggccgaaagcctagccgcccgcaagcccacagcggacggcgacggctgtgtgcctgtgtgtgtgtgtggtgtgcagtgcagtgcagcgcgcactgtgctgcacgcgcaaaggcgttgctgcatgccccctttgtacctgccgagcaataagtggcagcttgagctgggcaaggccaagcagagcagcccacaacgcactcgatgcgtgcctgcctgcctgcttgctcgcaagccgcaacgcaccacgaggaaaggccatgcccgttcactcacgatccagtcgctgctggattgcatgtgtgcagcagcagctctttgtcgatccgcaaccacgcgtcgtcttcctgttcttgctcc

SEQ ID NO: 85189 - DNA, 504 bp, Zea Mays
taaggcaacattctgctaacattctcttcagtgccactgtgccagtgatgacggccaaaccaaacgactggtaaatccttctctcagtaagcactaagcagcggcgacggctccaattcctccacagctctccgtgctcgctgcaccttcagccatgtgccatagccttgcagccttgcaggcagtggccatctacatcctgggtgtcgttacgtccttcgctgccctctgcatcagacagtctgcagttagattagaaccaaggaccgccctcctctcatcgggaccacggcatgctccggaatctggatagacggtcaagaacttggacgatcatgtggagtacgcgatcgcccatcgccaccagccggctggccggtcttcccaggacgtacacagtgggatgatggcaccaaatagcaagagcttgctttgtagcattagtatactcggcatggtaacctaacttttaagcatacttatactgaaacttgttattctaag

SEQ ID NO: 85190 - DNA, 579 bp, Zea Mays
gcgatttgttgattgttggcaaatgtttgtgaaatatttgtactaagttttatgcccgctagcaggtggctacactccggatcatgcctagtacatctttcttcctcgatgaaggcaagtgaatgtagcagtggtttctaccgttttgacttgttgtttttttatcgcctacactctaatattcagaattatggaattctttcataattgaactctatggtgatgctttacttgattgtattatactgatgctcaatcgtatattgatgatgattatggttcaagtatgacccatgagattaatttacacccgtgaaggcagataaagtattatttgaggtttgtatcgtatctgaaggcagatgaagtattatttgatgtttgttttgtatctgaaggaagtgaagtgtattgataaatgcagcatgccatatgcattacatgattcatttgcatctgaagtttggtcgtgacctatggtccgaccgtaccggtacaacttagcatcgtacgttgcccgaggaggggtacgatgcgacttcatacccttagaggtatgaaggcagaggacatatgcat

SEQ ID NO: 85191 - DNA, 398 bp, Zea Mays
cgggccccatctgacagtgaaaggatgagtggcgcgggatggagatgggctgcgcgcgcgctggaatgacttagtgggccgaaatgaatggagtcggcccagctgcagggttttggtttttttgttttttttttcttttttttctgtttttcctcccctttaatttctaggattcaaatttgaattcaagtttaactgtgaatttatattcattttaaatgtacaatttgaacccaaataaggagatctaactattttctttatacttattttctttatctttgtttagtgttctttcttctctttctcaaattcttgaattttcctttgagagtttaaattccaatttggatttttttaaacatatttcttttcttttatattattttatgttgtca

SEQ ID NO: 85192 - DNA, 136 bp, Zea Mays
ccctttttgttccacacgagatttctgttctcgttgagctcatcttaggacaccttgcggttatcttttaacagatgtgccgcccccagccaaactccccacctgacaatgtcttccgcccggatcggcccggcga

SEQ ID NO: 85193 - DNA, 37 bp, Zea Mays
gccctgttattgcctcaaacttccgtggcctaaaacg

SEQ ID NO: 85194 - DNA, 738 bp, Zea Mays
ggcgcggtcatcagtagggtaaaactaacctgtctcacgacggtctaaacccagctcacgttccctattggtgggtgaacaatccaacacttggtgaattctgcttcacaatgataggaagagccgacatcgaaggatcaaaaagcaacgtcgctatgaacgcttggctgccacaagccagttatccctgtggtaacttttctgacacctctagcttcaaactccgaaggtctaaaggatcgataggccacgctttcacggttcgtattcgtactggaaatcagaatcaaacgagcttttacccttttgttccacacgagatttctgttctcgttgagctcatcttaggacacctgcgttatcttttaacagatgtgccgccccagccaaactccccacctgacaatgtcttccgcccggatcggcccggcgaggccgggccttggagccaaaaggaggggcggtgccccgcttccgacccacggaataagtaaaataacgttaaaagtagtggtatttcacttgcgcccggaggctcccacttatcctacacctctcaagtcatttcacaaagtcggactagagtcaagctcaacagggtcttctttccccgctgattccgccaagcccgttcccttggctgtggtttcgctggatagtagacagggacagtgggaatctcgttaatccattcatgcgcgtcactaattagatgacgaggcatttggctaccttaag

SEQ ID NO: 85195 - DNA, 321 bp, Zea Mays
gtcatcagtagggtaaaactaacctgtctcacgacggtctaaacccagctcacgttccctattggtgggtgaacaatccaacacttggtgaattctgcttcacaatgataggaagagccgacatcgaaggatcaaaaagcaacgtcgctatgaacgcttggctgccacaagccagttatccctgtggtaacttttctgacacctctagcttcaaactccgaaggtctaaaggatcgataggccacgctttcacggttcgtattcgtactggaaatcagaatcaaacgagcttttacccttttgttccacacgagatttctg

SEQ ID NO: 85196 - DNA, 604 bp, Zea Mays
cttctccacgagctgagctcgcccttccctgcttgccgccatctcccaggacgcgctcgcctcggccaccgtcgtcggccgccgttcccagcagctcccaccttcgtcggatcactgacttcggccgtgcacgcgctcagcttcgacatggcgtccaagcagcagcgccctagcgcgtctcctttgcccgccgtgcccttcaccatctagtcgtcaatagctcgctgccgcccatggtcgtcgatctcgtcctcgcctcctgtccgtgcgggcagtccatcctgttcctagcagcgaaagcctagcccctgcggcaagctgcctgctcgatggaatgctcagccgctcatcggatctgcgcagcccctatgcgacatcacaaactccgctcgttgtcgatgccgcgcttcgtacatcgtctgtttgtcacacccgggttttaggtaccaagacccgggcgcaaacataatcattaggtgtgctggtaccaagtctcacacatatgatgaatcatgacacaaaatcgaatgtcacatctttattatataatatgagttctttacaaaataaataaataattacattataaggagacaatggtcca

SEQ ID NO: 85197 - DNA, 144 bp, Zea Mays
accactaacgaagacgccttcaccttctaggcgggcggcagccatcagacggcagcggtcgtggccccgacccccggtcgcgggtgccaccggaaggacaggagcagggccagcgatcggggcacgacgaggagccagtgcagc

SEQ ID NO: 85198 - DNA, 424 bp, Zea Mays
atcaaacaacatagagttttgacaagtccacaatttttaaatctaaaggcctaaaacactaatggatgatgaccactaagtagcttttggattttaactaaagcagaccaaccgatgctgcttaccttcaactgatttggaccacgataaatagctattcaagattattaatctaaacgatcgatattcatttatgggatttaaccgagcacccaatatagaatacgactactagagcaaagtatcgacttctttaaacaactatcatttgacacaagaaattctgaaaatgactaccaccaaaacattcagaacaagaaattgacggttaccagatgatgctatttgctccccactacttggagtggcaaacaacattcatctgacacataatcgatttctaaatattgaatataatgattac

SEQ ID NO: 85199 - DNA, 473 bp, Zea Mays
taaagtgtactttgtaaaagtcttccgctctatctccaatgtgtgtgtatcaaatgtgattactgtaatatacctgttatgtgggagatccttgggatgatgagttccagttgacgaactcggtagccttgttaagttacctggtacacgtgcacagccatctgaggccattaaggcaaggattggtgcatgtgggcctgataacttgggagggctgtcacataattcactatcccgcattacataattaaaacctaaggattgactagctttgtatttaccttgtccttgattaccttttgggttattatgtttagcttcatgctattgctttactttaatcaacgaacatgatgagaacatttatgatatgatgaagatatctttattacgatgatgaacttgtgatactttaggggactcaggttgtttcctgagtacctctccgtaaggacctgttcgttgagagacta

SEQ ID NO: 85200 - DNA, 1880 bp, Zea Mays
cctcaatcgaagacaccacaacagaatagcggcgccaggtttctcggtcgggccgctccaaccgccgttgcccgggtgtgcgggtcagactccatgctataaagagctgagccccgtacccctggaacccttggaccatctctcgccacccagaacaaggtaacctcgtcgccatcaccatagttgtggagcaccgccgcagttggcgaggtgagatcccgcggggcctcttcaatccgagtctgggggtggcagggtccctagcgcaaccaagtgggttcggttgtggggaccggtggcacgcggagtacctcagagtggcggcaattgctcgccgatgcatgccctctggtgcggactacgcctcttcgtgggcagcgaactccacatctctgacttaggtgagacccctctccgcatgttcgccatcttcccctctaggtttagcaccggacaattttaggtttggggtgtttgggcatcggattgcgtgtccgccggcgaagctccatcgcggcctcgcgggtatgccatgcggcgctgtcgtgttcttctgggatgggagatatggtcacgtcagtcgattgctcgcttaacggctgcaattagatcaaatgtaccccttcgcgcataacgatccgggttgccgattcttgatcaggcggtcaaaatcaaatccggatatcggtttgggtaggtgtaacataagtcattcgattcagatcaaacgggtgtgtggatgggggcctaataagatctcggccgtaggtttctgatccgattgtccacatagcataccgcttcgatttaagaagggtctaatccaggccgttgaatctgatcgggcagtcataaccgaaccataccccttcgtcgtagtatttttgcataagagaccctcgactttaatccattcaacccgccgtccatcctttcataaggaatattacgcagggaacctaaagttagcgaaaacaaacctgatcttcctagaaactatgtgcccaatccagaattattaggaatactctgaattaaataagaaaatgggtttttagtgtaaaataaatctggaaacttgtttaattcatattaaatccattttagctccaaattgatcaattccggttgctataaattcatattaatattgtttatcatctgataaccctattttgttatgaaacataggtaggaattatgcacttaatttcttctgtatccaacatttaaatcttcagtaaatcgtaactctgtaaccgtaacttcgattttagcgattctcgaacccacgatctcgtaacatcgcgtagaatattattatgcagtttgtgcttatgtttggtgtgatgttaatttttacctattccatgtttgtttgtattgctacgaatagcagtgaggtcacgacaatctgaagatcatcctggtgcttggaatcttgagtctcacacaagttgtgcccttgatcactctttttttacctaataatgttcgctgttaatcactgtgacatgctcaggttaatttgatgggacctaataggttttcctagcattgtttatccctcaccttgcaaacagatgaactattgggtagatttgttatcgctctacctggttttgggaaactaatattttattatgagcatgttccaattatgttgttgtttaattattgttaatgataagataatattgttaattggaacatggagaaccacccgggaaaacagtgctaccacaagggtggtatgggacgcccttggatgactaattacgaaagctagtggaggactaccttacccgaaaggggcaagggcggtaggggagtggtcgttgtagggaggttctcgggatgattttgctgcgatggcggtt

SEQ ID NO: 85201 - DNA, 166 bp, Zea Mays
cttaatttgtcatatgcattgcatcgcgggtgttgttatcaattttgatctattacttatttgggttggtatctacttacacttagtaaatgctaataaaattttgaccaactgtaaaagcaatgctcaactttaaccatcctctttggtaagccttacacttgag

SEQ ID NO: 85202 - DNA, 323 bp, Zea Mays
tgcagccgcagtaccgatcgtgatggcagtcgaattattagcttccttactcactcactcacgcaccaaccaaacatatagcaatggcacatgacatgatgagtcctagactcctgctccggacaaagcatccagctatggtggcctgttacagtacggcgcgcagcagttattgcagttgcaagcatgattgctcagatatctttgtctttgtttccttgtgccctccacctacctacctatcgcaaccgtataggtagtgcctctccatcgatctatgatttgtctcaacagctagctgtcttgattagattgtgtgcgcg

SEQ ID NO: 85203 - DNA, 896 bp, Zea Mays
gtcctggttttttttgccatggcatccgagaacgggaatccttcgtccactgttagatgttgactcgactgacaagaaggatctagagctttcctctactcttcgcaggcaggccgcggaagctgctgactttcaccaccgacccgccgccaacgccggcacttgccagaccgccacgcgaatgaaacggagcgatgatgtcgtggtagtagtacaattttttttcccgcacgccgcatctttttacgtgcgtttggttcacatgattgaagcagagaaacggtcaaggtagacttgtcagagggctcaatggcagtagccgtcacccctgcgcagaggaaggataggattcatggcaaaagggagctcagcctcttcctccttcaacatcttagattagtatcaatgttctagtttattatttaagtttctttttttctctctcactatagacagagagcagttctgtttatgttagagaggtattaccaagttttttttaaaatttttattgaagattttacttatctaattataaaaaaagattagcaagctgatcctcttatcttgcatggtgacaaaggtttactgtcttcttttattttttagttagttagtttatatttagttgtaaatggatatatgtatgatccaaattttttctaaagatatgtttgaagacttcaagtatatagttatatataaaaacactggtttaaaatactggttttacccttgccttactgctccatcccagagaagccaccgttggctgacccctctcccagcctataaaagggagagacaggtctcagagcaaggagatcaaaaggagagagtttttgaggaaaccagacgccttcagacggacacgaacccacaaggacgaataggag

SEQ ID NO: 85204 - DNA, 335 bp, Zea Mays
ggcgtacagagggtcacgggatgccttgcagctctgagccgtttcatctcgcgcctcggcgaaagaggcctgcctctgtaccgcctcttaagaaaggccgagtgcctcacttggacccctgaggccgaggaaaccctcgggaacctgaaggcgctcctcacgaacgcacccatcttggtgccccccgcggccggagaagccctcttgatctacgtcgccgctaacactcaggtggtcagcgccgcgatcatggttgagagacgagaagaggggcatgcgctgcccatccagagaccagtctacttcatcagtgaggtactgtccgaaaccaagat

SEQ ID NO: 85205 - DNA, 441 bp, Zea Mays
cgccagtgacataggtgattcacgagtgcggcaggtggtcggcgtgggtaatcgctagttgggccggcctgaggaatcggtttggacccatgcacgggggtccttttttcttttttttttctttttattttttgtttccctttttcatcttttccaaattcaagctttcaattccaatttaaatccaaatctttgtgacaaatttgccttcacattaaaaatgtttattttgaacatagtatgggataatttaatttatatatatttttactttgttctaaacaatatttctctattttcctttttctaacagtttccaatttcctaattgtgccattgggataaatctaaattctcaaatcattactatatttttattagtgtcaccatttgttggaacttgctttctgttgcaaggggatccaacgggggtgaacagtg

SEQ ID NO: 85206 - DNA, 155 bp, Zea Mays
aaaaaaagagttgctgctcacgctaacggattggtggtggtacctttgcttaggatgcaatgcaaatcttaaggtgacttcagaacctacgctctgagtgcttcttaattgtactattaattagtataatttcgctccacaagatttgcgctagc

SEQ ID NO: 85207 - DNA, 397 bp, Zea Mays
tgaagcttcctccagcatttttaagcccctcaggcatccgaagatagcaatatgtgccactgggggtgttgggggcctgcttcgtcgccaaaggtcctgtcagatgaagcaccttcgaaaagtcagaacaagaacaatgccgaagctaccagtcaggaagcttcgtagtatattttaaaatgcaccgacttaaagatgtgatgaccaatcggcccatgataaactgtgtaataattgtaatcatttgtagaggacatgaatgtaaattcacataggctgcgccctgttcctataaataggtgaacagtacccccgtactattcatgctttcgcatcgcatttgtatcttcgtattcagtcaagctcaaggtgcaaatgtaatttagtttaactttca

SEQ ID NO: 85208 - DNA, 1070 bp, Zea Mays
caaatgtttttacaatagaagctattcttcttttaaaactgcttctgcagcttcgtttagcagtcgattaacagcttcgtccagaatagcttcggccactttagtaacttcatcttctttttctgcttctaggttggccgtcaactcgaggggctctggaggaggagatagttcagctgcgatataaaacgtaaataagtccgaagttgcaaaattagtaaataaagttaaaaagttattaagtaatacctattcgcctctcaagttccgccgctttctcagctgccttcgtcgcttcttttgaatcatgggaatctttttcactcttttttatcatctcgtgcgccatccctcggccgccattctcccagatatcagtaaagaattttccgccaattaagcttgcttcggccgagggatcttttgtatcttcaatagataaagtagcttcggcttgagccaaagctttcacatggtcgcagcctgatttctctaaaatagctgcgattcccctggcacccgagaaagcacaaatatccccgcgaccactcaaaacttcttcaaaagcttcagcttcgttattgatccaatcaattgggcctttaggatcaccccttacgaagttgtcttcgttagaaaatgcgccaacattggcgaaactagtttttattttcttaacacactctatagacttttcatagcacctctccttggatgcacgaagttcatcaactgttttttgtaagtggttcctccaatatacactaatatctcgatcagcctttgcaacaccgcatttttctttagcttcgaatagctgtttccgaagatcttcgatttcgtatttttgagcttcagcttgggctttggaagcaacttcgtcttcttttattttgttcaacaatgagtgtaatattttatctttttcaagacgaacgttccttagttcaatcacttcggaacgaaggttgttcaaggctatggtatacccttcatcttcggcacttttttgtgccctgagggcgttgctaagaataaggccctgcaaaaaatgcgatattaagtgtaag

SEQ ID NO: 85209 - DNA, 620 bp, Zea Mays
cgaatgcgaaccatgtatgtgccaggatcagaaactcacatacaaagcgattacatagttggacatcatcacacattgctcaaaataatagcggaaatggtactttattacatcaagatgtccaagacatccacagagtcattaacttaacatagtcataatcataatcaaagtgcggaatacgaaatgtagatgataagaccttcacaggcagctgactaggggcttgcaactaaacatgactagaactcatcgtagttcagaaactcttaaaagtcgtccatgttgccttcatcttgatacacccagcccaggtggggttggccgaggcccaacaaattagggttgcccagagcccaacagttcattaagcacacccaactcaggggaaggccaatcgccccaaaagactagtccaatgggggaagggtggctctcccttttaaagtggcttcctcctcccaagttaagcgaggtgggataattctgaggctcacacggtcgccgtccgactacaattgggccaactgggccaattgcgtctttgccaacgggtaatagtggaggatttcctcatcattcccaccttcttaaaatgggtcgtagctctgataccagat

SEQ ID NO: 85210 - DNA, 285 bp, Zea Mays
gtcatgagcagctcaggactctctgatgattaaattatggaacctaaactcaatttgtcatttgcatttgcatgggtttattattaattttgttctttattattattatggtttggtatttacttacacctagtaactgctaataaaactttgaccaacttataaaagcaatgctcagctttaacccctgtcattgataagccttacacttcacgtgagctcccacctttggcaagttcatgcacattattccccacaacttgttgagcgatgaacgtatgtgag

SEQ ID NO: 85211 - DNA, 341 bp, Zea Mays
aggagaagtacatgtgcttcaagaggagccacacaacgaggagttcgacttgatctaggtggcgtctcccagttgactttatggcaccaaggatggactttagtttgttttatatttatcttttattttgtaagacttcctctatgtaacaagtattctgattatattgtgacattcatccctaaacactctgttcttatatgtgttgtcttctttggcgcatatatgagatgcacctggctttgtcccttaaatccgggtgtgacagcggcgagatttctcatcgacgttcaccactgccgcagatccgcctcgcggcgtggtcagcactgctgtcgcct

SEQ ID NO: 85212 - DNA, 662 bp, Zea Mays
atttgattcattcatgccaaagcatgtgctttgtttgattcgatttgcaaatctaacttttggattatgttttgcaagaaaatatcattttgaaaaataatagtgaattgttaaaaatagatatatttaataagacatgtattttgatatggttaatcattttgtatgtaattatttgcaaaaaatctcacttttatgctttttttaagcacgttttattttaataatgagatttgccctaaaactatttatttagtaacttctctacgttactattattttggaatatatataatttctgagtttaaaaaaaagagaaaataatttcaaaaaaaaagaaaaaaaccaaaaacaaaacgcacacacgcacacatctgttttttaagaaaaaacaaattgagaaaaaaaatacatacggactcactccactagtgcccgctcggctagtagtccgcacctagccatcttacacacgtgacccactctgcctctctctttcttactatgacgcaagggccccacacattaggtgcttctttatctcccagttccagccgttcctctgtagtcctcgtacattgaacgtcgtgtgctgccgttcttcgccgcctcacctccccagcgccccttcgcctccacagaacgccgccctaccggaaaac

SEQ ID NO: 85213 - DNA, 253 bp, Zea Mays
acgtgatgcggaggaaaagagccaagttaacctcaaaatggtgcaaggagtggtcttcttcacacgacgatgtcgtcagtcggaccaacctgaagagggacagacggagcacgtatcagaataaaggctggtcgccaagtggacgtcatctaacaaacactaacgtagtgtttattccaggcaagccccggtttatgcaaccccttttcttgtgtttttaaatgatttttacacactttaagtctagaaaaat

SEQ ID NO: 85214 - DNA, 649 bp, Zea Mays
cttatccttccaaactgactagctgattttctgcttttatttctctcaaactctaaccaccctagagttgctggccgtctgccccttttgccgccctaagtcggcagtgatactgagtgccggtcataacatctctcccaccctccaaaaataactcgtccttgagctggacaacaggattacgggggtgggggatctttcgtcgcagccaccccgttgtcgtcggcggtcacctcaaggtagaagagacgttgacagtgatggcctcatacaaacggctcatgaggctggctaggggcctgacatttcggtgcgctggcgctcgtgctaaattgggccaacgactaggaatgctgggtcaagcagataagttagttaggctttcttcttttcccgtttttctaatttcattttatttatcaaatttcatacttaagtaagtttttcaaatttcaatttaaatgcaaaattcaaaagaccgagcatgatatgcaaagttccctttatttatttatttaatacttattaaacaattgcttttaagtatgaaattcaaacacccaaaaataggtattttttaagaaggataaattctaatttatagaatcctttattaagaaatgatttaacttaaatttttagagagcac

SEQ ID NO: 85215 - DNA, 193 bp, Zea Mays
gagaagaacatgtggttcaagaggagccacacaacgaggagtttgacttgatctaggtggcgtctcccagtcgactttatggcgccaaggatggattttagttcattttatatttatcttttattttgtaagacttccgctatgtaataagtattctgatgatattgtgacatttatctctatacactctgtt

SEQ ID NO: 85216 - DNA, 149 bp, Zea Mays
ggtagagtagggtatgcgcgaaagagaggttgcgagttcgaatctcaatattcacaaaatatgtaaatttgattcaaaataataataataataatgaaaaattatagggtgatgggtatggtaatggggtagtggttggagagttgttc

SEQ ID NO: 85217 - DNA, 343 bp, Zea Mays
aaaagggctaaaaaacaaaaaattcggtcggtattccttttttatattcattttcttttctgtttttttttgtttttcctatttctttcatatttctaaattccagttttcttttttttcttctccaaatttagtttgaatttaaaattccttttatgactttggcaatcaaatgcagcaacacaaaataccaacatgatgcataatttaattatttacatatttttacactaatttttagttcctttagttagataaaatgcgtaaattattcattttaagaagatgttgtttaaatgtgtatttaaattaaaggttcatcccaagttttattaaccttttt

SEQ ID NO: 85218 - DNA, 939 bp, Zea Mays
cttagatatccctaagttaatctacctttcgcatttctaaacccatcgtacttcacttatttttaacactaccacaacgcacctgcgctaaatacgaggattattacgactaataattctagttaatccaaccataggatagacttacaaaaattataaatcggctcaccagcatcaaacgtgatccaatactcgtacgaacgctgataaatcctggctcaagctttctgtcatgcatttggtgaacaccatgctgttggctccatcttcacccgactcttgggatttcttgccgacgcacggaatgacgatgaacaaggcgaagctcgacgacacacaaagctatcatcccctagttgagcattccatcgagcatcgaatatgcgatgcacggaacagtactgtcttcactatccttagcgtgatatcgaggatccaccgacggccagacgctagcggtgaattgcggatgcgacgtgacagagagacgcgacgcggtggaattggataagcgccaacgagcagggaaactttgcgcgcacggcgaacagaggagcacggcgcgatggggaattaaagccgagcgaagaaaattcgcacgcgcgactagaaggaattgggaagctacggcgctggaggaacttcatggcacgtaaacaccagagaacttgacggcgaagcgtgcgcaaggagacacgcgcgcgcaggaaaattcacggcgcggcggtgagggaaataaaaagcagctgtgcgcagggctgcacccgagcgcagggcgagctcggcgagcggggcgcgcaggagctggagctcgatcaggggcgcggctatggttggggacgccgagcggctggagaaaaaaaacttgacgcagctcgcgcagtgaacaagcaggtgagcgcgtgagcagagggaggcgcgcagggcagagaacagctt

SEQ ID NO: 85219 - DNA, 167 bp, Zea Mays
ccaatggcctcgactgctgcttcaactccatttgccactctaattgttcttcggccctttgggagcctttggcttgtacggagtcccactctctagtagatactgcaggaattcagggcactttctcttgtaatgacctgtcttcttgcaatagaggcaggtatcag

SEQ ID NO: 85220 - DNA, 785 bp, Zea Mays
tttattccagtaaccattgattgtagataatgtggtgtaatgctgaattatgaacttcgatgaaataggtgtcctccattctttaggtaacctattaaggtcttatatggtgtttgctcttgtgcttgatgtgtcgatagaaggttagtgacttgtttgcctaaacccaaaattaggccatgttcttatctggtaaacctagacccaaatttgaatttaccattatccctccttgactaaaatcatgtaaatgaatgcttagataatttcctttgttgtacataaagtgtacccaagtttaaaacaaggatctcaagtcatgtctcctttcaaaaccattcccttgttccgttggtgcaagctgatatccctaattccattttgcctcttcttgaggatcatgtcattattttatcaacccaacccagaaaagacaggtttgatcattttcttgagtttgatgcctttggtttccccatacctatcgaaggcataccaacttaatccttgaccttgtgatctctgcgatgggcatagacatatgcttggggctgaaataacagtctcccaccgtactcctttcattcagtttaggttatggccatgtcttgttcatttcatcgggccatgatctatttggctctctacttgtaactatttttataggtggagtaattctttgtatattgtcacccttactcaattcatttgtgtcgcgtgaaatttcttattggttacgtctggtaatggcgttatgactaaaattgatgatgtcgcgacgaaac

SEQ ID NO: 85221 - DNA, 338 bp, Zea Mays
ttgcatacaccggggcttgcctggaataaacactacgttagtgttgttaggcgacgtccacttggcgagcatcctttggcttggcactcgttcagattatccatcttccagttcgtccatcagcatcatcctgcggattagcccacgcttggggtcaacttggctcttgtcctccacatctcgtgattaataagcgtacctaaatgatttgcataatgcaatgaatgcatataagtaggaatagcacaaatctaaatagtgttacgcgataacgaattaaacaactagcggcgaggcgttgtactattttatatgaaaacactagttatcgacgtacg

SEQ ID NO: 85222 - DNA, 2438 bp, Zea Mays
gcgagctcagcatccatctccttgctcgcccctgctcacgctcggaactcccatggctggcgcttggcctcagctcgccgcgctctgccgaggcccctgctcccacgcgtgtccccggctccctactcgcccggctcggattttgctcctgcgcaagtgaatcgcccggcccggcttggacaccatgtcaagtcccctgcgtggtgcccgggattttgtagcgcgtccctgtttgtcgtctgtccacgcgtcatgcgtggatcaacgaaacaaaaatctgcgtgtcgtcgagtccgtcattttcctcatctagtgcttgcgtggccttacccgaaccgcgctgccgttgacgcaacacagggttaattcgctgctctgttcaactcgtcgagtcctaggaatatgtgcgcacgtcttagttgccgccaaatatcttcgtgccccacacactcatctttgctagctgatcatgcatctcagttctttgttccgagtccgccagttgtcattgctcatccgcgtcatgacatcattcgtcgtggttcagctcgctagttcgtcgttgtttcgtcatctcgatgccaatccctacatgacatctccgaattatgatcgcgcggtcaaaagaatccccaagaaagatgtccaaagatttgatggtggtgtgcgtgaagttcgtgtggcccctacaaatcgctcgacaaattgtttgaatcggaaaatcattaccgatctcgcggattcgagtcagctgttggaagggtacgataattaatcgcgtgatgctgaagatgagccaagtcgaccccaagcgcgggctactccgcatggtgatgctgatggacaaatctgaagatggataaactgaacaagtatctgaacaaaagttgatcgtcaagtggtcgtcgtctaacaaacactaacgtagtgtttattccaggcaagccccggtgcatgcaaccccttccttgtgtttttaaataatttttacacactttaaatcttgcgaaatgtgcattaggtttataggagttgcttggaaaccctttgaagcattgccttccttgatatccatacctttatagatacttctgatgaagtatcaaaatatgatttaccaaaaatgcttatctctgcttagatcttgtggatagaggttgtcttttgcattaaggcctacctcaggggttatcctgaggaaggatgacttctacctgcaagaatattttcattgggagcgtggttggatcttactgcaacgttccctataatgctcttttcatcctaaggaatacaaacaatcctaaggatggaagtacttaaatcgggacttgggctaggaacaggtgttgttctacccaggttgattaaggattctactgaatgtaggcttgatgatcgaggaccttttaaccgatcacatgcctcgtcatgggtaagctttgcctcgggcagactaataccagaataagataacacataatgggagtggagagatggcgatagtagcgtgtaccctccgtggcaagaggctggacggtggtgtatctgtgctctcggttggcgtgagcctgatctggtcttaagaaccccggtggcgagttgacatatgcaagggttaagttctacatatgtcatgtgattggagatccctagctgggtattaatcgattcggatcgccgttacttctcggacatgaagacttggtcactgccctgcaatctaggtcatggatggaatcttaatgtgcaaaaatcatgttggattgattaatgtgatggtgaaattagactagatgcaaacaaggtctattaatacttaatctagaattaaaatgttgaaagtaaggactcactttagtaagctatttctgcaaaagtatctaagttgattcttgctaaagccttttccttgattcctatttaaccagcatatccttgagagtcttttctttagtcgggtaagtcttgcttagtacttgcgtacttagggttttacccattgttgttgtaggttatgagtcacttgattgtgattggtgttaagcgccggtgggcacggccttcttataagtctaagtacttcttctatacttcttattgaggatggtcacttaagctagcatatatttcaaacttataaacaatttacaacagttcaaagttatttctttgaatcacttttgtaatcactccgatcatgtacattgtaaaacttgatgtaacatgtaaaatttggtaataagatttccgctgcaaaattgttggtgtgtgatttgtgtttacttaatcccgcggttctggttgtaagtggtttatccgaggtccttggggcactcggacagatcctgttaagttacctggtgcacatgcatagccgtctgaggtctttgagacaagggcaggtgtatgtgggtccaataacttgggaggttctg

SEQ ID NO: 85223 - DNA, 600 bp, Zea Mays
attaactctttaaactgtgtatcttaattacttgatttacctatttatctaaatcgatcatcacaatatacgcattctaaattaataatatttattgagaccaacaattctatttaatctatttatagacctagttgactggaatacgaatcaacttacccttattttatccgactggaaaccacgaaatcgacgacttgttcgagcttttgtcgagcacttggtgaatatcacactgctagcttcggcttcacctgattcttgggatttcttacgaatgacgacgaccttcgattgaagtcttcgaccgagcacttgataagcgatgcacagggaccttgcttatttctgcataacgtccgggattcggggttcgacgagatcgggcagggaagaacgaggttcgatgggctcgacgacaatacgggagggtgacgtatatagagctgcaggtctggcgagctgacgcaagtgatggagatagccacgtacggcagacagtctatgaatttaggtgttttatcgaataggcgggatgcgaggagccgagcaatcacttgaacatggtcgacggcgaggtctgccgagagagaatatcgg

SEQ ID NO: 85224 - DNA, 341 bp, Zea Mays
caagcaggagctcacgactaggagcatgaccagagggaggagcaccggcgagctggagcaacgcgcagggagcaaccaagactgggcgccatggggacgaaggccgggctgctcggccagcaaaagaactcgcgcggggaaggagcctcgacgagatcatggtcggagggacgctggggtggagttgggcgcgccaggggagaaaccatgagagatctgcccgcgtccatggcaaacgcagagcgcgatcctgtgcacgccactggaggaagaagacaagggacacgcagagaaatccagggcgcacgcgggacaggaagaacgccgggaggaagaagacg

SEQ ID NO: 85225 - DNA, 64 bp, Zea Mays
gttgataaattctggttcgggcttgtcgtcgaacatctgacaggtgttgagatcttccgccccc

SEQ ID NO: 85226 - DNA, 627 bp, Zea Mays
gagatcgcgtgtggcaactagattcactccaacaagcaattgagagggatacagtgcacaatcgattgcaagatgtggtgtagaagtgttgttaccttcgagtgaaacttataatgccgagtaaagaggcaaagcatgaccggagatgggatgacgatggcgaggggatgcgataagaatcaaataccatggggcggcggacccagcgggtggtccatatggtccacggcacaccctaagatcacataagtgtagatagcacagtggtgtaagtgttatattttaaacttggtggtcaaggttcaagtcatgttgatccttgttttttgtttgttttttttattttttttttggcacaccctaaacatagcagctgggtccgccactgccatgggccaagttgtcgaaggcagtacaagtcccaccggtgcacatcatgagcgtctagagtgctagtaaagctgaaggggccaaaagcaaaggctcaggtgctttggtgagagcagaacatgctctgatgttttggctggcggtgttggggtgtggctttgctaaaggtccttaatctaatgaatctcaaccatcttcgagtttgttgcaggaatagcagagtgaccttcatcgtag

SEQ ID NO: 85227 - DNA, 364 bp, Zea Mays
gaagataatgacggagaaatatagtaaggtcgaaacatgcattaaacctaaatttggaaaattgagatttgaagaaaaataggaaggatactacacaaattgaagtaaataaatttataacaataattaagacccttctataccactatgcctattttgtacattaattggaatacaagattcacagcattgtttgaattcaaattcgaatttcaaactaaaaaggaaaaacaaaacaaaaaaaataaataagaaaaagaaaagagataacatgcttacctgggccgttttcacctacggtcggcccagtaacccttccgcgcagcccattttcctccccacgccctaaacccgtcgactgctt

SEQ ID NO: 85228 - DNA, 1227 bp, Zea Mays
cgggtcgttgcctctgggagcaggggcttggactgctggtgcaggcggtgctaaagctgacgatccagttgcgaaggctagtgattgtgccaacggggtaggcgtaggcaaaaactcctctgagttgtcttccagaataactctattctccacacaaatgcgagggagatccacagggatttccttgactaccaccagttagacgggaacttgctgtggcggagggatgtagttggtgttggtccgggtggtttggattgtacgaaccatctacaagagaaaatgtcaacttagttgaattttaaagaggtaaggttaataaaataattttgtaagaacaaaattatgatgttttgaacagactaggttttcaatttctaactagtctaaggatctagagtcagcatagctttgataccacttatgtcacacccggttctgggggcaaaaccgaatgcatagcatatgtggccaggatccatttttccatacatatgttgatgtcacaagtgtaatatgtcaaaagacaatgcaataaaggcgaaaagagagtagagtaactttattgcatcatctggatcatagtatcttaaacaagtttcataatcaaatacggcggaattaaacatggacactcttccacaggaaggtgactagcgcatcgttagactcaaaattcatcaacgtcatctgcgaagtcttcgtcatcaccctctgatcaaaatattagcaagggtgagctcacttatggtcggggctcagcaagtgggggaaataacacaagttaacaaggtaggttatggataaatggtaaacattttagttggtcaatattttattagcaacacatgtcttactaataagtgtgtatcccaaatttcccaattaatcaaaggcataagattatatcaacaacacttaaatgaaatcacttaagcaaaccactggtagatactcatatcacgatttattttccatctttaagttcaattatcatgtgagggtccaggttgctcttaaccgtgagcacgactgacatatcagttttacactctgtagaggtggtacaactttactcataagctgtgtatcccatctagcctgggttgatcggacccataaacactgccgaggtgaatggctagggatccactatgaggctttcacaaaacatccttagtacaaagccacccgctaaggtttccacgtcagtactgatggccctct

SEQ ID NO: 85229 - DNA, 343 bp, Zea Mays
agttaactcactcttgattctgttaatttttattggtgcgtccaagaacgaagtcaggcccgtttggatcatttgaattgaattctatttaataatcatgatttaagcatatatcaattaagctaagctaattatatagaatatatttatatgctgaatttctactgtacgagagcgagtcgaagagcatgccataaattatagaatagaaatataaactggtgatacataaaatcaatttttattcctcgctctacaaatttaagataggcttatgtttaaactttgaaaaatggtagaatatcaaattccaaactaaataagatactctactaagtagatt

SEQ ID NO: 85230 - DNA, 264 bp, Zea Mays
aaaaaaagttgatcacattgttctagaatctaaaatttaggaataagattacatggctggtcattaagtagtgagaattaaagaataacataaggtatatatactagacaacgtctgattagttcataagcaagtatttccattttaaccaatatatctttgttgtcaatttcagcaggcttagcatcaataactacaattgcttcctcaaaatataactttataaagagaggattaaaaaaagaccccacagggttacggcgc

SEQ ID NO: 85231 - DNA, 1178 bp, Zea Mays
cacaatcttaggacgggtgaccgaccaggaagtcttctcgagtgcgcataagtgaggacaaagtgcgcacaaaagactcgtgttgatctgtggggatggtctatgatcctaaaggctgccaagagtaaatatcgtcggtcggggagtaggcgtggtgttacaaatggtataagagccgaccctcgcggtttcacaggcgtgtatgggctaggagttcgggcatatggcacatgtgggcctggagtggtcacatggaaatagcatatgacgacactggacacacaatcgtggccaagaggggaggttcctagcttagggttgaccgacaaggacgtcggtctgctaaaggggtggattgtgatatcctgcccctaatggatggtgatatcctagcctagggcttaatagaattaatagagtactcataccaacaagatgcatcttcttttttggaagcgtatcttgaaggaacctccagattaagagtgcttggcctagagaaatcttgggatgggtgactgaccgaaaagtattcttaggtgtgcataagaacaaagtgcgcacaaaagactcgtgttggtctgtggagatgttatatgatcctaaagggttgctaggagtaagtaccgccagtctgggagtggacgaggtgttacaccgatgtatgtgtcgtcactatcaccgtgagaagcacacgtttgagggaagggaagcttcgtgagagctaggaggccatcttgtcgtcatcgaagccatacatcgaagaggagttgctacacagcgagcacgacaagagggttccgagctagcacaggagtgaatgtgcggaggcagcggtagcgagcccaccacatttagcaaatgaagaatacatcctctatcgtagcagagattttagcgcgacatgctggaggaagaaaggagcccaaacactaaatgtagcgaactgaacggtttattgtgtcctgctggagatagcttaaagtgtagaagactttgtggatatagtcttagagatgttgctagatgttgctcacttgcatgcaatgataacgtaaacggtagacgaacgatgaggctatatttagtgtttagacgtgtttaaacgaaattaaacggtctaaacaattttatactatagcaacattttagcaagattactttcactaacctttttt

SEQ ID NO: 85232 - DNA, 233 bp, Zea Mays
agaacatcaatgcttaattgcaagtcaatgttgtaattcttgagaagaagtcatggaagcttataagaagaaaggatgggctctaacaaatcctttacctaatttaccaggtatatcaactattttacctagatttattcaggaaagtttacatttagcctttctttgggagaatcttactttttaacttatggtgcacaattagtccacttcttttgagaacaaggaggttc

SEQ ID NO: 85233 - DNA, 1226 bp, Zea Mays
cttacatctagtaattgctaataaaatttgaccaacttattaaaagcaatgctcaactttaacccctattttggtgagttcatgcacattattccccacgacttgtttagctatgatcttttgtgagctcaatcttgcgatatataacccccccacaggagaagaataggtggcctaggaggagccacacaatgaggagttcgacttgatctaggtggcgtctcctagtcgactttatggcgccaaggatgggctttagtttgatttatatttatcttttattttgtaagactttcgctatgtaattaatacttttatgatattgtgacatttgtctctatacactctgttattatatgtgttgtcttctttggcgcatatatgagatgcacccgactttatcccttaaatccgggtgtgacagaattggtatcagaggaaatgttgactgtaggacaaaacctagatggaaatggacaaaacccttacctacttatcttactctgattctttctatacttatcttgatcctgtctcaccttttgtagttatactctgattactcttatcttttctactctaagacaagatggatttcacaccttagaatcctacatttatgactttttttaagagataggagacttaagacaaaattaaaactattttctctatttaaaaatgttggatgcttcttctgatgataaatgcctgatttgcttctttgattgattgaaacattatagttggacatcttagcatgtaccaccataaggtaatgtattagatttagtaggtgacacactaatctacttagctaataaatcccccaaagtaacatgattcgtaattactttccttgtctacaattctttcttaccatttgtttctaactcagatggtcaataccaggaagggtggtggaattgatctacccccaatcgacacaatcggagggtacttagacaacaacaacaacaagcagagatggatcttccaaatgctccaccagtcgtggctgatccagcagttgcagcccaggtgcggataatgcaacatatggctgatactatggcggatatgcacgcgcagatgcgacatgagcgtcaggagatgcgccaagagagggaggagatgcgccaggagcgaagggtgcaacaacagcaagcaccactgccaccaccaccaccaccagttccaccccgggacaagcaccgggagttcat

SEQ ID NO: 85234 - DNA, 526 bp, Zea Mays
agactgataaagatcaagaagaaagaatttctgtcgcttaagcatgggagcatgtgagtcagcgagtacaacgacagattcattcaactatccaaatatgcaccggatgaagtggctgaggatgagagaaagcaggaacacttcatcgaaggactcaatggaccttggcagtatgctctagtggttcacacctttccatcatttcagaggttgtttgacacggccctagccattgaacacaagtgtgttcagccaggggacatgaagaggaaggcgatatcccagggtcaggggagcagcaatgttcgtcctcgctatgttccaccccagggtacaccggttcgcactggaggaggccagcgtccagctcagtacacaccacagggcactccaccgactcatcaggctgcccccactggcaccccggtgaaattctcaggacagagtgctggtaccacatgctacaagtgtggtaagacagggcattatgctaatgtttgtccgcagaggattgctactacacctg

SEQ ID NO: 85235 - DNA, 146 bp, Zea Mays
gtgacagtggccggtgagcagcggtcggttcgacgcgtaggggctcaatggtcaggttcggtgcctaggggctcagcatcatcaacattctctttggcatgtggtacaagagttgatagaggacaaggcccgatttcccatgaagt

SEQ ID NO: 85236 - DNA, 265 bp, Zea Mays
ctatatctaccactgatcatgaatatcttgttgtaaaacaaagccatccactagctcctagatttactgtgcttagagcatctcccacaattttcaacacattcacaatcttgattttgagcaaaattgcaaaaacaataactatctccaacaacaacatgcatgtcttctttgttcgtagtaaaaaatcagacagtccccatgttcgaagtttttattgaatggatgaccacatgtggttctcttatttaaatgtggatggttt

SEQ ID NO: 85237 - DNA, 240 bp, Zea Mays
aaatccgtggccgcggcatcccctgggccattggcgagctgcatcaccgaacagagggttagagaaaggaagcgagatccaccgcgaacgaatcacgggtacgccatcgatagagactcgacagcgagtctgggagcttcgtcggttaccctgggacgcgttcgatgcggcaccggggtcgatggccaacctggtggcggggaatttctcgccgtcgcgcagcgacgccatgaatccgtc

SEQ ID NO: 85238 - DNA, 674 bp, Zea Mays
aagaagcgcttgagggtttcttcggttttagatttgtgacagccctcccaagttatcaggcccacatgcaccaacccttgccattaacggcctcagatggctgtgcacgtgtaccgggtaacttaacaaggctatcgagttcatcaactcgaactcatcatcccaaggatcttccacattcatgcatattacagtaatcacactcgatacacacacacttcggagataaagcggaagactttacaaaacatattttacatttccaaagctcaagttttacaatataaaaagaattgtaattattacaagtcctgatagtactcgaagtgcataacttaactacaataattggaagggtgaagcctttccaaagagatatataaaaaccttctaagcttcaagtcctccacaagaagtaactaacccaaagataagggaataaaatttctcctacaaaaacaacaagggataaaaccctaagtatgcaattactcagcaagacttacccgactaaagaaaagactctcaagggtatgctggcttttgggaatcaaggtaaagctcatcaaagttcaaggacaaattttgcagaaaagcttactagaagtgggtccttaagccaaattttatttcacaagttagtttattacctgaatcttctagcctgaatctag

SEQ ID NO: 85239 - DNA, 214 bp, Zea Mays
cttgatacatgttgggaatgaggggagtagcagcacgtccactttcactctcacaatagcgctgccgaggtgcaaccatgatttaattagaaatttattgtcaaaggaagcttgtttttttaactagtcgtgcgcactagttaattcagttcatgttgtatgtttaactactctttgctagccgattaatagtacttagtatgtttttgtcatg

SEQ ID NO: 85240 - DNA, 207 bp, Zea Mays
agaacctttttactttcccgcccacgcccctctttctccacgaacggctcaacctcttcacataagttgcaatcacaccagaccagcagttgcaatcacaccagaccagcagttgcaatcattgttttgtttaacagatttttggacatagttatatagaagttgcaatcacaccagaccagcagttgtacttacaccagaaagcag

SEQ ID NO: 85241 - DNA, 537 bp, Zea Mays
cgaatttaaactaagaacgtgggtacccacgttcttcaacaaacccatgaacttaactcaattaagaacgtcgttacccacgttcttaaattaacccacgaacatttattagtttcttgtagtgtaggagccttgtgccggtgcaccacccgcacacccatgcacccgggcctgcactaaggtatatacaaccaaaataaaaagaggaaaaggaaagaaaaaacaagagaaacaaactcatctcaaagctagctacactcacaacatagggtgtgtttgggtggtgacttggcgtagacgtgccggccaggcagatgcatccaaccgccaggcagtcaaaatcgatggcctagggagctgcttggcctaggcagatttaccaggatctcaaccaaacaagcccatactcttcaagggtcatccactaaccatgcaaagctagaaccgaggttgtgtctatccataagcagtgtttttttgtaagaacacgacacaaaacaacgtcatcgttgccatgacccaaccaacaaagtccag

SEQ ID NO: 85242 - DNA, 215 bp, Zea Mays
ctttctctttgtagatctagctactcatcatcagcaggatcccgctagaaacgttcggccacctgtcccacgacatcttgtacggcctcccgggcggcgtcttcagagtcggccaccggaccagcgatcaccggctccaaggagatggccgggtcatggctccggaagcatgtcaggatgtactcgatcatctcgctacggaggcgacgcctgga

SEQ ID NO: 85243 - DNA, 418 bp, Zea Mays
atgagaagcttattttggagatattggcctttattgaatttttgcaagcttatggcaaggtgatttttctctaccttgacttttgcacaaggtcatttttctctaagcctctcattgtcatgaatcaactcactatcaacatctttgctttctatgaaaatgtttcctttggtggttgcatccctcaagtatttctttaatttcttattttcaagagacacgacctcaaaattttttcaagaaactcttcatgatggctagattcatcaactatgcttaaatcatcataagaggttgctacatcaagcttaataacagggttaatagcctcatgtgtgtcaatagataaaagctcataggcaacaagaagattatcatgatgaactttattttttgtgtaatcctcttttatcttgac

SEQ ID NO: 85244 - DNA, 1007 bp, Zea Mays
gtcatatttagcaatcaaggacttattttcatctttaagcttgtcacattttgccttagattttctaatgacttgagtatattccttaagcaattcggctagctcatcataggtaggggaagcatactcgtaatcactatcactaccacaatcaacatcactaggatcatcattttgtaccttccgttcacctttagccataaggtataggtgtgtaggggatgatggtgatggtggtggtgatgagaaatcaacggcgatggcggcgaacttttcatcatattcttcgcttgaggaagagtcgcttgtagatttaatatcagtgagccaatcaccaacaatgtacactttcccacctcttcccttgtggaacctcttttgtttgccatcctttttgttgaaaattttcttttccttcttctcatcttcactttcatcattttcttgcccttgaatttgtttttcttgggcctggtgcattgatgagaaagatggccaagctctccacaattgtagcaattcatttccgagattggttttctcttgctactaggggaaaaacttttctttcttgaatcaaatgtgatgccttctcgatttagcttcttcaacaatcttgttgttttcttcaccatcaaggcaatattgacatcaccaaggtcatcatcacttgaaatatcttcttctactagaactttcgttttgcccttcttctcttgatttgctttgagagccaaatctttcttcttggaagaagagccatctttgtcattgaagtgcatgtacatttcatgagcattgatctttcccaatatttgagatggcgtggcagtagaaagatccatttggtgaagcacggtgacaatgtggctgtaattctaggtgggcaacacactgagaatctttctcacaacatctggtagagagatttgtgtgaatcccaagccgtttacttcgactacaagaattttgagccatgggtgcatatcatttgcattttcattttg

SEQ ID NO: 85245 - DNA, 1345 bp, Zea Mays
cattttttatgatttctcactctattgaagatatccttgcaaaggcccctaaaaagagtgtttttggccttcgcattccgtttctcataattaacttcaccgaagagatttgtgggatctctaggttgggggaacctttgggtagcggcgcgatagactccaatatctatggcctctaagtaagcttccatacaaattttccaatatgaaaaatcgtcaccatcaaatatgggacaaggttcatccccatcggacatcattactctagcggtaaagctaaactaggagcaacacgactttaataccaattgaaaggatcataatgcccaagaggtgggtgcattgatcttctctaaattttcttgcaaaagattaaaccctaaacgagagcctaacttcacccaacgacttagatagatcacaaaatctaggaaactctaagcaaaccataagtcgtcatggggtgtgtgctcaaaagtaaatgcgaaaactagagaaagggctagaaaactcctctaatttttcccgaggtatcggagagtcgacactctccactagtcctcattggagcactcgcgcaaggatatcgttcccccttagtccttgctccagagcagctacaacctgttctaactcaggtttttctaaatcgatttcgattccaattcttttgtgggctattgagtgacacctagcactagttttgagtgagtacatgcaccgacactacactagacatctcttggtcaaactacacatccacaacccctctttatagtacaaccaaagttaaaataaaagtcctaactgtatagtaagtgtcccacagctccttcgatacttaggatagatagaccatcatcttttgatttgccttttcaggcgtcatttcaagtttcatctaagggattgttttcaccttttggaagcgcaattccatgcattgtgcccgaacttaccacatactctgtaaaacacatgttagtcacaatattcttacgttgcattaatcactaaaattaactagaggcctagatgctttcaaatgcacaaatgcaaaagtcctagacctacgccttctctttctgtctcttattttcttcgctactcttggtagagtggtgtcgcatcccgagagcaggaagatatcaaccttgtgtccccatgagttttctaggaaattgccatatccacgtatccatatcctttcgatattgatacgcttatctatatcctttctgcttaagttgcctgagttcacaacacgtgttttatttgtggctgcaagtcattgatttattacaagattcatgtaatcttgttgattgaggtatctctttgtaat

SEQ ID NO: 85246 - DNA, 866 bp, Zea Mays
cctagggtttccccaagaaattgtgcaagaagagatggggaagaacatctccttgatcctctcttccccttcaactcaatgtgctcctcctcttttcgatccttgctgtgcggggggagatctagagggaggaggaagccgtggagaggggctgccatgggaggagaggacagccagcccaagggaaaaggagagaggggtggccaagtgtgggagggggggaaggggtggcggccaagcaggggcaaaagggggaaaaggccaccactagggttttctttgcgggagaaaagaagcgacgccacagatgactccgacttagcatccaacggcccacaacccttttcccacatccacgcaccgaagatcaacctttggcaacatttttttgggatattacactctaccccccttaaaaagaattcgtccactccaaacaaaacatccatggtaccccatataacaccaccattccaaaacatgggtccattattggtcttaattaacacaagaacttcgaccttagactaaatgtctaaggaaactacaccacctgacatcaagcatgaaccaacatgtaatgaagctcaaaccaagtcatagatgcaatcaacactacgatttcacaacatcgaatttggatgcagccatacatccgcatcaatgtcttaaaacgacactctttgatgaaggggtaatatgcactaagcacaacctttaccaacttcaacaattcattttaatttaatggtgaaacatccacaccagatgaatgtataagaagatcaaacacctcacctcacagcaccacgaaacaattagttctattgaaacaaaactcctaatcttcctaaaccttgttcttg

SEQ ID NO: 85247 - DNA, 229 bp, Zea Mays
atacctagggtttcccaagaaattctgcaagaagagatggggaagaacatctccttgatcctctcttccccttcaactcaatgtgttcctcctcttctcgatccttgctgcgcggggggagatctagagggaggaggaagccgtgaagaggggctgccatgggaggagaggacagccagcccaagggaaaaggagagaggggcggccaagtgtgggagggggggggaag

SEQ ID NO: 85248 - DNA, 170 bp, Zea Mays
ccgcatagtgggcgagcccgcgcccggccgctccttcccttccacctccgaccacccttggtcacgaacgcgccatcacgccaccgtcggtcctgcccgccctcgggttgccccgctgccgccccttggccgccgtcttcttcgccagtggtgagcgccctcccctagcc

SEQ ID NO: 85249 - DNA, 165 bp, Zea Mays
agcccttctccagtactggcggaatcaccattgtcgccttctccgacgccagcgtgttgcaccccacgacgtatggcctcctttcctctacgctcgtcggcccaagcatgctacctctagcagccacctctgcggtcccgctaaccgctgccgggctgctcgcag

SEQ ID NO: 85250 - DNA, 92 bp, Zea Mays
gtctttgttgctccccatcttactcatccccttctctcggttcgtcgcttcactagtgacaaccattgttctatagagttcgatccctgggg

SEQ ID NO: 85251 - DNA, 482 bp, Zea Mays
ctcagtcatcctggacctgacgtggtgtcccagctctctagtcgctctgacatctcttgcagttagtgtccatctagacacctctgtcatttttgtcagcttgctcgtcactctcgtcttccttttcccacttccacgttcagagctgctcaggcctttgatcaagttcattgtgatctctggacctctcatgtcctcagcctttcgggttacaaatactacatggtcattctggatgacttctctcattttctttggactttcccatttcggctaaagttcgacatgttcaccaccctcacttcttcacctgggtctccacccagtttcgtcgcccggtccatgccctccagtgtgataatggtcgcgagttcgacaacaactctcgctccttcctcacccatggcgtctagttgcgcctctcctgcccctacacctcttctcagaagaggtcgggtcgaacccatcattcgcaccaccac

SEQ ID NO: 85252 - DNA, 966 bp, Zea Mays
catgttcctaggcgtcaacctcgtctcctgggccgccaagcggcagcccgtcgtctcccgctccagcgcagaggccaagtactgcgatgtggccaacggcatggcaatggccaattggctacgccagcttctccaggagctccacagccccctctagcgcgccaccctcgtctactgcgacaacgccaagcgaggtctacctctccaccaatcccgtgcaacatcatcacacgaagcacgtggagatcgacatgcacttcgtccgcgagcgtgccgctgccagtgacgttcgggttctcagcgtcccaaccatgctacagttcgccgacatcttcaacaatgggctatcgtcgagtgtattcgccgatttttcgatctagtctcaacatctgtacaggatagagttgagaatgtgggtggtgttagagtacccgtttagggttttggggttagcccattgtaattacagttacccctgtgtaatgggctaggaccaacaacatgagtctattaatacaactcccaaccctgagttagggtttcattccaacttatttaagtaggaataatctcccttcgtacgtctggcgtcctctccatgcgtgttccctccctacagcgctcgagcgttctagagccacgtggcaataataaaaaataatatggagggagaaagatattataaatatctatataataataatttgaaaataaaaactaacaataacaaatgaaaatttttgaataagacgaaccggtccaattagtgtcaaaaaaaagtcaggcgaatcataaattggaaccgtagcaatgtgcgggcaataataaatgaaaatttttgaataagacaaccagtcaaaaattagtgtaaaaaagtcaaacgaatcataaattaaaacggaagaaataatatatagaaaccgtagcaatgcacggacagttaactagttaatttgaacatgtgat

SEQ ID NO: 85253 - DNA, 2371 bp, Zea Mays
ctttctcttatgttgtttgtgatggttatgggtgttcttaatagtctttttagggcagctgaaagcagggggctgttacaaggtttagaggaagctagggtccggaataggctttcgatctacgctgatgatgtggtgttttttgttaaacctttggttgaagacctgaattgtgttagattgattttggattgctttggtgaagcaacggggctggtaacaaatctgcgcaaaagttttgctataccaattaggtgtgatgggctggaggttcaggctggctgtaatattttgcaatgcagctcgggatcctttccgtgcagctatttggggctgcctatctctgataagaagctaaggagaagggagtttatggtgtgggttgataagattgctgaccggcttcccaactggaaggctcgtttgctcagtctggctggtaggacagcgttagtgaggcatgtgctctcggcgattcctgtttatctccttatggccagagtgttcccaaatgggtgatcaagtccatcaataaaatccggagggggtttctatggaaaggaaggaagaatgttaacggtgaaagctgtcttgttccttgggagatagttacaaggcctcaaaaaaatggcggcctgagtttctaatttacaattcaaaagttgggctttataggtgaaatggttatggctgcaaaaaactgatccgtccagaccatggcatggaatgaatcttcctattcagcagcaagtaagacagcttttcaatctttcggtcttaactatggtcgaaaatgggaccaccactcttttttggttagataaatggttgaatgggaaggctatctttgaaattgcaccagatgttgtctgtttggtggacagtagagtcagctctaccaggacggttgctcaggctatggacaactggcgatgggttagggatattgggagtcatctttctctggttgggctgcagctgtatttgaagttatgggatgtaattggagaggtgacgctttcacaggaggcgggcaggcttgtttggaggcacacggcttctgggcagttctcctcaaagtcctgttacaatgccttcttcttggggtccatctcctttgagccttggaaacgattgtggaagacttgggccccctaaatgcaagtttttcctttggttggctataaggaataaatgttggactacagacagactccaaaggagaggtttgcaatacccggtgtgttgtcccttatgtgatcaggagcaggaaacagttcagcatatcctctgcacctgcagtttttctagggatttttggcacctcattttgtcgtccatcgggcttggcaacctcactccgattgttgctgaacagtcatttgctgagtggtgggggaaggtttctaaaaaagtgcataggtgcaagaggaagggcttcaatactgtcattattcttggagcttggtgcttatggctcactcgtaatattttttgatggagtgagcccttccattagttcgactaagaggttgtttttagatgaattgatcagttggaataaggcgggagcgaagcatttagacagtttggggattattgtcaccttaaatagggtctagtagggcctgtcaggcttcccctcccctatgttttcaccttgctggggtgctggagaggaggcttgagggtttggtcttggtctgtttttctttttctgccctctgtgtgttgtatttcggtccactttggacctttcctctcttaatataatgatgcgcagctctcctgcgcgttcgagaaaaaaatgtaaagtagtaaaaatggtaaaaccacttttgctgactttcttgtatgcaaggctgcctaatctgaaattttggacctggaaataatatattctctgtttatgcttttatttcacatatattgcttggaaaatggtttaatgtgtagaaatacattgatgcatgctaaaaatatgaactcagttttgataagtagatttgttagttaaaataaccttgctgtttttgtaaagtaatgtttccctgttatgtgttaacttgttctctaagtaatctaaaaatgaaagtagataaaggataagtgtgcataaatgatgaaacaaatgaagtcatcttttctattttgtgaaagtatatatggtggttaatgtcccttgaagttgggaaatgtgttaagcttgtttttcatctctatacatgttatgcaccccttaacctccacccttgtgttgtatgatgtgatgtttactccatattcttgcatcatccatgttcataacattctcatgagcactgcgaagaaccagcaagagggagaaggggaaggggcgcgttgaatcagg

SEQ ID NO: 85254 - DNA, 86 bp, Zea Mays
tagcctgctaaataacatacacgtcggcttgcctattattattgcaatctgagacacaacatacactacaacatttttataaacac

SEQ ID NO: 85255 - DNA, 299 bp, Zea Mays
ctcggccacgcgtaggaatgcgccgaacagtggcagaaccggcccaagcgccatgtttctccttgtcttttttattttttggttttttcttttttttatttttatttctagatttcaaatttgaattccaaacttgttgtgagtttcacctttagcctgaatatataaatttagatactggtctaaaataatttctttatttatatttttattttctctatatgttatagtattttccttctctttctcttttctttgttattttcatttccatactttcaaattaggtcttaattccc

SEQ ID NO: 85256 - DNA, 106 bp, Zea Mays
cacccgccctaaatcctgagatgaggaggggcttaggcgttttgcttgatcgttggaatgaacgggaagaacgcaagaacacacaaggatttagagtggttcgggc

SEQ ID NO: 85257 - DNA, 808 bp, Zea Mays
gtcgagttcctccaagctgtgagctcggtcctaaacccagcctggtttccagcgcccctcctccaccacctcgcacctccggtcgctcctcctcctctccatgtccgctgaccacggacaccgtcgagctttgggccctgctcgccgtctgtccgtgcatccgtccggccacctagaaggtccgagctcgcccatgccaagctccctcggcgtccctcccatggtcgcgccctcctccaagctggcgtcgacctcccatcacccatcttcttcaagctgctggacaccgctcgcccctcgatgcggtcctactctagactcctgctcgctgacacacgcaatttcaccggtgaggctatgtgcaccattgccttaccactgctgaagttctagtggcgcgcgcaatctccctggctcaagtgacctacgtgtcacacccggttttgaaggtgaaccgaatacgaaccatgtacgtgccaggatcagaaactcacgtacacatcgattacataattggacatcatcacacaatgctcgaaataaatagcggaaaggtactttaattacatcaagatgtccaagacatccatggagtctaatacataaccattgtctttcacataaatatcaaagtgcacagaaaacgaaatgtagatgacaagcctacacaggcagctgactgggggtttgccactaagaataaactagagaactcgtcgtagtcctgtaactcctcaaagtcctccatgttaccaacatctcctcctgagcactaagtgcagtggggacaacctgggcggggtggttt

SEQ ID NO: 85258 - DNA, 197 bp, Zea Mays
ggaattcggcccaatacgaatggctttcttattttctttttcttttttttctttttttcttttctcatttttttgatttcgaatttcaatttaaatttggttgtgacttgcacatatatcaatgtacaaattagaatcttatgataaaaagaatatttagttttttatatatatgtacttcctttattttatatgat

SEQ ID NO: 85259 - DNA, 454 bp, Zea Mays
ctccactattacccgttggcaaagacgcaattggcccagttggcccaattgtagtcggacagcgaccgtgtgagcctcagaattatcccacctcgcttaacttgggaggaggaagccactttaaaagggagagccacccttcccccattggactagtcttttggggcgattgggcctttccctgagttgggtgtgcttaatgaactgttgggctccgggcaaccctaatttgttgggcctcggccaaccccacctgggctgggtgtatcatctggtatcagagctagggcccattttaagaaggtgggaatgatgaggacatcctccagtattacccgttggcaaagacgtaattggcccagttggcccaattgtagtcggacgacgaccgtgtgagcctcaaaattatcccacctcgcttaacttgggaggaggaagccactttaaaagggag

SEQ ID NO: 85260 - DNA, 140 bp, Zea Mays
gcgcaacggcgacctgggccagagccgcccgcggccaggaggtctgcgtggccaacagagggactttgcaagcagccatggaagctggggcgaccgggcagagaagggagaagcaaagagagagcgcgcatagggagaca

SEQ ID NO: 85261 - DNA, 62 bp, Zea Mays
cgcccgcacacgcacatcttgcaaaaaggaccccgcgctccaactaaatcaatatcggcacg

SEQ ID NO: 85262 - DNA, 413 bp, Zea Mays
ctcccactgatccctactaattgcccacgaaaaatttccagaaatcactagaactactgctgttcgtccacccactaaatttctggacagcacctctaccaaatcgcataggtaaacatgtaaccaattggattgcagcacaaatacaacaaaatgatcacgaaaatcaccttgggttcctcctttcctccttcttttcttccttcttcctccctccaaactcccatggaagactcacacccacacgacggacaccaagcggggaggctccaccttggagaggaagaggtggggggggggggctagggttgaggggtggcgctgcaatcacttggggaagaagaagaaggattggggcggctgcaagagtggaagagagaggggaggggcggccaaaggggtgggagagtgag

SEQ ID NO: 85263 - DNA, 798 bp, Zea Mays
tagaactcgtcatattcctggaactcctcgaagtcatccatgttgccagcatcacctcttgagcattgggtgcactggggacaacctagggtgggggtggtgtgtaaagcaagggtgagtacacagcaatgtactcagcaaatgtcccgtttggctaaagtggactagttgtatatggagttgtgtaacaccccggggtccaccaacaccctggaatgctactaaacatcacttctgacatctatatataaaatttcggcagcatcccccttgcaaaattgcataaatgagggggcaacagtgtataaacatatatcatgacaaaaacatactaagtattattaatcggctagcaacgataagttaaacatacgacatgaagtgaattaactagtgcgcacgactagttaaaaaaaacaaacttcctttgacaacaagtttctaattaaatcatggctgtgcctgggcagcgttattgtgagagtgaaagtggacgtgctgctactcccctcattcccaacatgtatcaagtacctgcattgagtaatgcaagagtgagatgacacatctcagcaagtaaaataatatcaaactgtttaaccacataagaacattgtttaccaccacttgattccacaaccttcttattacgaaggtgcagcacgtatacaacgtacaacacacctagtcaccacacctcgcaggtagaaaccacaatagtaacatagtaatgtcacacttcatatatacctcatgagtgcaaatgtctgcaaatgcaaggatgacttctgccttcat

SEQ ID NO: 85264 - DNA, 386 bp, Zea Mays
ttatcttttaccagatgtgccgccccagccaaactccccacctgacaatgtcttccgcccggatcggcccggcgaggccgggccttggagccaaaaggaggggcggtgccccgcttccgacccacggaataagtaaaataacgttaaaagtagtggtatttcacttgcgcccggaggctcccacttatcctacacctctcaagtcatttcacaaagtcggactagagtcaagctcaacagggtcttctttccccgctgattccgccaagcccgttcccttggctgtggtttcgctggatagtagacagggacagtgggaatctcgttaatccattcatgcgcgtcactaattagatgacgaggcatttggctaccttaagagagtc

SEQ ID NO: 85265 - DNA, 89 bp, Zea Mays
gggggtatatttattgatgtgacgagtagtttagaaaatgctagtttgcatggaggatgtattgttaagacatgagtgtcggagttcat

SEQ ID NO: 85266 - DNA, 50 bp, Zea Mays
cttcctatattttacttatgaatgtgaactatgttattgtaatcctttcc

SEQ ID NO: 85267 - DNA, 1120 bp, Zea Mays
gtgtgctgaattttggtagtctcaccccttcaaaaatatcaagttaagtttgtttgagtctgcccacagtgaagttttatttgcttctgcttctgcctatatccagtgaataggtgggatattttaacagtgagctcacccaagttcaatgttttgagttgtgtctatgaacttgggtggaggtggttcatgagagccacgtatggtaaccctgttgtgctgacatctttgggattcctcttcatcgagttgtggttaagcttgatggttccctcccccttgctctacatatattcggtggctgcaaactgaattcagtgaagccccctttctacacttaaatctagccaaggttctctacatatgagaggtgttcctggtgtccccaagactacacagcccctcccagtctcaaagtggatctgctctagagttcgagcatcagttcctgtgtctgtggtaacaacagccaccatcctcccacctcaccgtggccaggtaacttcaagggtttcctcggtcgagttgtgcatgttttgtgctctgcataagatagagaagctcatatgatggtgaacagatctccttaagagagttttgttggacgctatataaaaattgcagtaaaagctgtctaaagttggattgtcatgcttcacacgtaactgaattttttattcggttctgaggactgaattgtagcagtatgcctagtttgggattaatttgtgactgattcatggggttttggatttaagtttccatagcaaagctagagaacatagtaaagagagtaagttttgtaaagtgaggtggacttggttccacataaatttgggagtaaaagtggccaaaagatggaccgtcaggtgtggggattcagacttagaataatatttaagtctgaatttgtatgtttttattcaattttgggtccttgtggtaattaatccaagaagaaatggggtaggaatgctatagcaaagtgaaagaccatgtcaaggagagcaagtttcatacaaagaatgggcttgctactgtatagagttggcagcaaaaaggtgccccaaacttctctatcaaagtgggtgcagtgctgtttcagttcactgaaactgaa

SEQ ID NO: 85268 - DNA, 305 bp, Zea Mays
gcgaggtagagaaggagagaagagtaggggagagagagaagagagataggggagagaagaagcacaggcggcggtggctggaaaatgagtgcctgacgcgcgcacataggaaatagatgggccctggtgggccggctagggttagaagatttttgtttttttttctttttttaatttcgaaatacatttttatatagctcaaaaattcataaaaattcatcaaaattatttataaataacatatttatttttagactagtaattattatattatttaattataatattaattactaggatttttc

SEQ ID NO: 85269 - DNA, 360 bp, Zea Mays
gggagatggtgcgtgggtcccgtgtgacagtgaaacggcgcgagtcaaatgcagctggcgaatggggcccgcagtgcagtaagtgcccggtggctggcgtgtgagtagtgactgcgaaatgaggcccacctattggcgcgttaaacccagaggtgggctgcacggtggtaaggagattagtgggccgagtcacgcaaattccagcccaagagactcccttttccttttcttttcttttttatattttctgttttgtttttcctttttattttttaattccaatttcaaattcaaatttttgtggcaaatttgttctcggatcaaatatgaaattttgaatattctagcatgagatgaatc

SEQ ID NO: 85270 - DNA, 905 bp, Zea Mays
caccacgggttcccacgatgacacgtcggcgctgcgccgattcggcgaagcgagacgcggagacagtcgaaccgctcagatcaacggcgcagcatggggctgctgcggtggaccggcaccgctgcgcagatcgggtcgacgctggcgacacggacgggatctcatggctgctgctgcagcgcgcagcttgctgcgcaggtcggcgatggagttcgctgcgcgacgatggagcgaggtagtggcaggaacgtccgacagcaaggcaagggaggagctcgctgccggggactgctcgccatggttgctgagctagcagcagggggaaacttcggccaaggaggaaaaaaaatagggcgagctctgctggaatttctgggtgccgtccaaggaagctgctgccgctgctttgcgtagtagcccggccaggggaggaagaagggcagagggcacgcagggaggtggaggtgccatgggagggggcaagcagagctgctgctcagccatgggagagagggggcgctggggaagctgctgctcggcaaggaagcttgggaagggggacgccatggctgctggtttccatgggagggcgagtgttggtgaagacagcaacggggaaggaggaagatagcgtggggaagactgcaggaggcgccatggccagccgacggtgtggccgagcagggaggctccccacgccctacagggggaggtgtcacaagggaggccaccatgggagagagggcagcggcgatctgctgttgtggggaggcgtgccgagcaccatggcgaggaggaggagccgagctccctgcttgctgtcgtgtgggagaaggggacaacgaaaatgtgtgcgtcggctgaagtagaagagagggagaagggttgtggcggctagggaaaat

SEQ ID NO: 85271 - DNA, 1214 bp, Zea Mays
ctgaatcttcagttaggaatttttaaattcacaagtctgaatctgtccaaatctggacagatctgttgtgttagcacttttaaccttgctaagtgttgaatcttgttgaggtgaaaatatcaaagttgtagagcactttctaaactttccagaaagtcctagtttaatatttttgaactaataattgaaaagttatgatcaaaacaagtaacgactgtattgctgtccaaaaatctgcaagtgagcaaatgaatgtttaattcaccctatttgctaaaaatgtttggttgacacttaagtaatgtagacttgccatgactaagcttaataatgcacatgtgtcatgttttgtatgtttcttgctctagttgattatgatatatgagttccgtagttagtgatgcctatgtcgtattccagcttacgttgtcttggttggacttgtgtggtcggtgatgcttttgcgcgattaataggagaactaataaaaagccgtatccaaataaataaaatgtgcgtgtacttgtcatatcgtatttgtgttgcgtaaataaataaaatgtggtcgtcttgttaatggtgttaatgatgaacgccgataacgtacgaatagctagcgcttgcgtatagtcgtggcggtgtcttacaattaaatgttagtttgctaccatgtatttatatagcttgtgatatttttcattgtattcatacatatgcatcctgcatctcatttaggaccgagaggtgacgaccgtgcaagtgatgtggtgccaaccacaagatgcagttggtggacgtactgaaggatggtggacttaaccagtggatgctcgccaagcgagtacctcccccagcaaacactatctaagtgttaaaaattaaaggcaagccccggttttatgcataaccgtttatatatgctattttactacacttaatgtttgtaggtttgtactgtgcacttaagtgtaggagttgactgaaaccctagttgcatgaactcaggattcctttttgagatggatactagtatgctaggtcgagtagctgctttattaattagggatctcggtagaagtcgagtgatttttctagcactcgcgcgaggtcaggaaattgattgtatccacttcttatcacaatgatgctggtttgtggacaacaatccatggggattggttgtccacgggataaaaattggaataaggattaag

SEQ ID NO: 85272 - DNA, 279 bp, Zea Mays
ttattctttagagttttgagttctaccacgttttggtcaccacgagatccaccatcaccataaacatctctggttcgtttttgccaccacagatacatctcatgtcagatttggaagtttaaatacaatctagaaagcttatcttatcttctttccaacggatctgaccttgcctcaaaattcattctgatttaaaggggctgttagcaatatccttattgtttgggttgtcataataaaaaaagggtttaggcccctgcaaaaaaagaagaaaaaaaa

SEQ ID NO: 85273 - DNA, 585 bp, Zea Mays
ctttacttggatcagctcgtgcggtactcgtactgaatgccggttaatccggatctgagtgaaacaaactcaactttgtgggcgagatcgtgccccgccgttcgggtcctaagattcctcagggctataaagaaaagcatcaagcagcctcttccatcctgccatcgcgattcacgcggccggctcaacaaaccccgtaaagcgctcgtcaccaacgccgtagataccgcctcggaactcgccagggccgttcctacttcgacgagattcgttccatgccgaggggtatttagacggggccacccaggagagaaagagagggatagagagatctgctcgccgccatatttgtgcagctcgtgctctggatttgttccgccacaccatactgagaagaggatttgagagagagaggggtggagcgtgccagcgtggtcgcgattgctcctcatcgccaagcgtggtccggtggggacctggcaaggggcgccacgacgaaaggactgggcttcctcgtcgtgtgcagaagacgaactgggcggccacggagcgtatcagctcgtgcctgtgcagtgccacggtaag

SEQ ID NO: 85274 - DNA, 308 bp, Zea Mays
gtcatctgaaaagcaagctggtaactggaatctcaagtgtcaggcaagttgtgcccttgatcacttctttttacccagtcatgttctgattaatcataatgatctgcataggttaattttgatgggacccaataggttaccccagtttgactagctttataccttgattatcaccacactttttgggtagtacctgctattgctttatgtggttatgggtatggagatacattttattcatgattatacttttattatcagttgttatttactgttcatgataagatcattatgttaatcggaacatg

SEQ ID NO: 85275 - DNA, 739 bp, Zea Mays
caaaaacaaaactatttttttatttatatgcttgaatgcttgttcttatgatattctcctgatttggatctttgattgagtgtgatgggttgtggatcaatatccacaattacatctgcatatacatataggtataaatataaataaataaaattcataagataactaaacaacctggtttatcctccattaaagtctatctatttcatatagatcccgcatatcttaaaagaccctctcttatcttaattggtccatcttatcttaaaagatactctcttgtcttaatagactcatcttatcttgaaaagattttatctcattctaatagatctaactgacctcaaaagattctatcttatctttatgaatccatcttatcctaataagcatacttatctgccctagtttaacaaccatgatctaatgtaaattaattagatcttaactagtctaatctagtcatatccaatctactctagagcctgatctaatctaatgtgatctagttaaacggattagtgatactggtagaaaagattagaccctactggccaggtattaacttaacttcgcacattagaccaactcaaccatgggcataagatccaacctagccaatagagtcatgatggattgcataatttgtctatccccacctaacatcaaaacaaactttttacctacatagtgtagtctatcccacccatatctatcttaaccatattcctcaacctcg

SEQ ID NO: 85276 - DNA, 2748 bp, Zea Mays
gtttgatatattttcagttgctttggtcactaaaacatctccccctttggaatcaaacaccgaaaaggaagacattaaaagcatataggaagcaaaaagacttgccctctaaaggatttactacttgtagctctaaaaacttactccccctaaacgagtgttctccacctttaaaagaatattctcccttttgtcatagacaaagatatactccccctgtcgaagatcctctacttaggaaaaacatgaaaaagagagggacaagacatgattgattagacttactccccctatgcataggtaaaagatatattttggaaacatatgcatttatagcaacacgagaagcataagatttgtaatatagtataatcaaattctagagaagacatgtaaatgatacaaattgtggaatgaaaccacttgtggaatcaattaaaaattctagtagatttgcagtggaagcttattgtctttctctggggactccattttccttcaatgagactactacacataatagacttgaaaacaagtattagtctcaaagacttagattatagagtaacctgccctaaaagtgtgcatacatgttttgaatacttgtaggagacctgcactttgattttgatatcaagaggggcaaattatctataatcggagcattgacacatataagtcaaaatgacaccatttgaagaataccactagtaggatataaactttgaagcattagtgtcatttacttaggaatgttaaataagctatttgccatgcttaactaaacattttaaaccatgtaggtttgctcaagaatatgaattgaaaacaagcattcctaccatatgattgacctagtatgcatgtaattataatcaaaagtaaataccacatgtaaaaactaggcatgtaaggtaaaaactataaaaatagatacacatatctaaaaacaatgaaatgcaataaatctagttaccttagtcatgggtggggaatttgggtccaaagtattcactaacctacttggcaatagacttgatccaatatgatgcatcccatgatatacatcccaattttgccaagtctccaaattctccgaagtcctttggacttctcacttccctcttgggatccaaaccttcttggtgccttttatggttgagataatctcctttggcacccagatgcgttagggcccctttcattattggcttgcttgttagccttaattgctatcacctttccattctttttcttcttgatcaaatatggtgtagcggccttttttaccatcttgctgatgtaggtgttggagattttgtttgttggcttgagctcttgcttttgcttatccttggtcttcgccttgcattggtaagacttgtggcattctgtaacaccccgggatccacaaacaccccagaatgctactaaactacacatctaatattcatatataaaatttcgacagcatctcctttgaaaattgcataaatgggggaagcaacaaagtataaatagatatcatgataagaaaacatataagacattaataatctgctagcaatgggaagacaaccataacaacatgaactgaattaatcagtgcgcacgactagttaaaaacaaacatcctttgacaagaagtttctaattaaatcatggcggcgtctgggcagcattattatgagaatgaaggtggatgtgctgctacttcccactccccttgatgagcaacaagcacctgcattgagtaatgcaagagtgagatgaaacatctcagcaagctaattgttctgacgagatatttaaaccacaaattgaattcatcaacattttaaaagagtcacaattaaaaatcagaaatgcttgtagatatagaactcagtagtcccactataaccaataccatctcatttcctcgaacaaccataataggttctataacacttccctgcgtcaacaatacctgcaaatatcacttcaatgtatgcataggaatgcaatgtgtaggtactctatcttcatacctctgggggtataaaaccacatcatctgcaaatatcacttcaatgaatgcatatgaatgcaatgcatatgtcctctgccttcatacctctaagggtatgaagccgcatcgtaccccttctcgggcaacgtacgatgctaagttgtaccggtacggtcggaccataggtcacgacaaaacttcatatgcaaatgagtcatgcaatgtatatggcatgctacatttatcaataaacttcacttccttcagatacaacacaaacctcaaataatacttcatttaccttcagatacaataccaacctcaaataatacttcatttaccttcaggggtgtgaattaatctcaggagtcatactcaaatcataatcatcatcaatatatgattgagcatcagtataatgcaagcaagtaaagcatcaccatagagtccaattatgaaagaatctgatacttctgaatattagagtgtaggcgatagaaataacaggtcagaacggaagcaaccaccgctacattcacttgccttcatcgaagaagaagaaatgtactagacatgatctggagtgtagccacctgctagtgggcataaaacttagtacaaatatttcacaaacattttccatcaatcaacaaaacactcctacacttgaaaccaagacccagtggaaagactcccaccctgaaccacatgccatacagcagcaacgctgtttgtta

SEQ ID NO: 85277 - DNA, 2921 bp, Zea Mays
gttagtctgaagctaggaaaaataccgaagctatgaagcaattaaaatacctatgcgctttgcacgctcagcagcctcttcggctctcttggcttcttctcgggcttcatgggattctttctcgttcttctttatagcttcgttggctaattctcggtcgcctttcatccaaatatcggagtagaatttcccgcccatcagagtagcctcagccgagggatccttcgtattctctaaagtaaagacagcctctgtctgggttgcagctttaacatgttcacagccagatttttccaaaattgccgcaacccctctggcaccagcgaagacgcagaaatcactactgtcgctaaggatctcgtcaaaggcttcagcttcttcgctgatccattcgatgattccttcgggatcgcccataataaatttttgtttagatgagtatgcacccaccttagcaaaatgatctttcaacttcttagcgcaatccaagaattttttgtaatatctttccttcgattctcgaagctcatctacattcttttgtagccttgcgctagtacattcacttatttcttagttttctttagctacctcaaaatccacgttcttttccacaagttttttctttaagttttcaatttcagttctatgagcttcggactatgcaacaagattggcttcgctagccttaactctgtctaccaaggaaagcagaattttatccttctctatggcttcattcctcagtttgataacctctgaacgaaggttaccaagggctatttgacaactttcatcctcaacatttttctgtgctcttaaagtgttgctcaagattaagccctacaaaaaagggaggaggaggatcaacacaagagtaaaagatgcaaaaataatctgcttataagtcaacaacatctgtaccttcagactattgtaagcaaggctgtctgcgaggtcatccttcgacattgctgaaagaccaacttcgagcttcagaaatcctatgtttcttgccatctcccgacatacaaatatttccttattatccggtcggaggcagtacaaaaagtcatcttcatcggtgccattgtacatgtaacaccccaagatcctcaaacacccagaatgctactaaactacacatctaacattcatatataaaatttcgacagcatcccctttgaaaattacataaatggggaagcaacaaaatataaacatatatcatgataagagaacataatagacattaataatctgctagcaatggaaagacaaccataacggcatgaactaaatcaactagtgcgcacaactagttagaaacaacatcctttgacaagaagtttctaattaaatcatgattgcgcctaagcagcgttattatgagagtgaaggtggatgagctgctacttcccacttcccttgatgagcaacaagcacctgcattgagtaatgcaagagtgagatgaaacatctcagcaagcgaattgttttgataagatatttaaaccacaaattgaattaatcaacattttaaaataatcacaattaagatcagaaattcttgtagatatagaactcagtagtctcaatataaccaataccatctcatttccttaaacaaccacaatagtttgtataacacttctctgcgtcaacaatacctgcaaatatcacttcaatgtatgcataggaacacaaagtgtaggtactctgtcttcatacctctgagggtataaaaccacatcatatgcaaatatcacttcaatgaatgcatatgaatgcaatgcatatgtcctctgccttcatacctctaagggtatgaagccgcatcgtacccctcctcgggcaacgtacgatgctaagttgtaccggtacggtcggaccataggtcacgacccaacttcagatgcaagtgaatcatgcaatgtatatggcatgctgcatttatcaatatacttcacttccttcacatacaatacaacctcaaataatacttcatttaccttcaaatacaatatcaacctcaaataatacttcatttaccttcaggggtgtgaattaatctcatgagtcatactcgaatcataatcatcatcaatatatgattgagcatcagtataatgcaagcaagtaaagcatcaccatagagtccaattatgaaagaatccaatacttctgaatattagagtgtaggcaatagaaataacaggtcagaacggaagcaaccaccgctacattcacttgccttcattgaagaagaaaaatgtactaggcatgatctggagtgtagccacctgctagcgggcataaaacttagtacaaatatttcacaaacatttgccaacaatcaacaaatcgatcctacacctgaaaccaagacctggtggaaaacctcccactctgaaccacatgccatacaacaacaatgttgtttgttaattttgtatctttaaaattataacagtgctgatatcaaacaaatactccatgagtatctacacaaaatattctacaacttcggtattcgacggataattaaattctcccatctataagttctaaaacatctaacaagataactgactgaatctgttttagacagcagcatagttaactttcaaaattcgatatctcacaaactactcaacccaaaatcatgaaagtctgctgaaagtaagaacttttatccctctacaaaagtctccatagctgggagagccaattcggccatttacttgatgaaaccttccagtgaacagacccgctcatttctgtcaggctaacagaaacagccacagtaaaacaaacataactggagtttcataattcatatgaatgcactctttaacaatctggaaagcttatgaaattatctacatcttttcttacaaacccaaggtttaattctgttg

SEQ ID NO: 85278 - DNA, 320 bp, Zea Mays
attccacaaaaccacataaaaattcaggttataccttatgccagcacccttttgagcctcgcactttctttcaataatctgcattgttgaatttgtgtgcttgctcgtcatttgttgctggttgcattgtgtttttttcaccatccttctttcttccaccattcaaaccctaacgtgccgccacaatctcccgtttcatcacaccacaaaccgagtcaacaccgcttccttatttgtctccttcggttacgtaaaaaaacagaaacaaaaaaagaaaagaaaaaaaagaaaacgaaagagaaaggatagaaccagagaac

SEQ ID NO: 85279 - DNA, 282 bp, Zea Mays
gcgtcatttgttgctggttggattgtgtttttttcactatccttatttcttccaccattcaaaccctagcgcgccgccaccatctcccgtttgatcacgccacaaaccgagccaacgccgcttccttatttttctccttcggttacgtaaaaaaaacagaaacaaaaaaaaatgaaaagaaaaaaaacgaaagagaaaggatagaaccaaggaacaaacaaaaaatagggaaaggaaacaaagcggttgtctcatctcggtcgtttttgaccataacttgag

SEQ ID NO: 85280 - DNA, 381 bp, Zea Mays
gtcaacaagctcctgtaaaaatttcagattttttgaacaaccgagcgaaaagttatgcccggtttaaggaaggtacctcaagttatggttaaaaacgaccgagatgagacaaccgctttgtttcgtttccctatttttttgtttgttctctggttctatcctttctcttttgttttctttttttattttcttttttttttgtttctatttttttacgtaaccgatggagaaaaacaaggaagaggcactgactcggtttgtggcatgatcaaacgggagatggtggcggcgcgctagagtttgaatggtggaagaaagaaggatggtgaaaaaaacacaatgcaaccagcaacaaatgacgtgcaagcacacaaattcaac

SEQ ID NO: 85281 - DNA, 332 bp, Zea Mays
gttctatcctttctctttcattttcttttttttcttttctttttttttgtttctgtttttttttacgtaaccgaaggagaaaaacaaggaagcggcgttgactcggtttgtggcgtgatcaaacgggagatggtggcggcgcgctagggtttgaatggtggaagaaagaaggatggtgaaaaaacacgcaatgcaaccaacaacaaatgacgcgcaaacacgcaaattcaacaatgcagattagtgaaagaaagtgtgaggctcaaaagggtgctgggataaggtctaacctgaatttttatgtggttttgtggacattatgagaaaaaaac

SEQ ID NO: 85282 - DNA, 293 bp, Zea Mays
tctctttcgttttattttcttttttttcttttctttttttgtttctattttttttgacgtaaccgaacgagaaaaacaaggaagcggcgtttactcggtttgtggcgtgatcaaatgagagatggtggcggcgcgctagggtttgaatggtggaagaaaaaaggatggtgaaaaaaacacaatgcaaccaacaacaaatgatgcgcaaacacacaaattcaataatgcagattattgaaagaaagtgcgaggctcaaaagggtgctgggataaggtctaacctgaatttttat

SEQ ID NO: 85283 - DNA, 151 bp, Zea Mays
gttttttttacgtaaccgaaggagaaaaacaaggaagcagcgttgactcagtttgtggcgtgatcaaacgggagttggtggcggcgcgctagggtttgaatggtggaagaaagaaggatggtgaaaaaacacaatgcaaccaacaacaaat

SEQ ID NO: 85284 - DNA, 283 bp, Zea Mays
gagacaaccgctttgtttcctttccctatttttttgtttgttctcttgttctatcctttctctttcgttttcttttttttttcttttctttttttttgtttctgtttttttgatgtaaccgaaggagaaaaacaaggaagcggcgttgactcggtttgtggcgtgatcaaacgggagatggtggcggcgcgctagggtttgaatggtggaagaaagagggaaggtgaaaaaacacaattcaaccagcaacaaatgatgcgcaaacacacaaattcaacaatgc

SEQ ID NO: 85285 - DNA, 434 bp, Zea Mays
aaaaatttcagattttttgaacaaccgagcgaaaagttaagcccggtttaaggaaggtacctcaggttgtggttaaaaacgactgagatgagacaatcgctttgtttcctttccctatttttttgtttgttctctggttctatcctttctctttcgttttctttttttcttttctttttttttgtttctatttttttgacgtaaccgaaggagaaaaacaaggaagtggcgttgactcggttcgtggcatgatcaaacaggagatggtggcggcacgctagggtttgaatggtggaagaaagaagaatggtgaaaaaaacacaatgcaaccagcaacaaatgacgcgcaagcacacaaatttaacaatgcagattattgaaagaaagtgcgagcctcaaaagggtgctgggataaggtctaacctgaattttta

SEQ ID NO: 85286 - DNA, 288 bp, Zea Mays
ctggttctatcctttctcttttgttttcttttttttcttttctttttttgtttctgttttttttacgtaactgaaggagaaaacaaggaagcggtgttgactcggtttgtgccgtgatcaaacgggagatggtggcggcgcgctagggtttgaatggtggaagaaagaaggatggtgaaaaaaaacacaatgcaaccagcaacaaatgacgcgtaagcacacaaattcaacaatgcagattattgaaagaaagtgcgaggctcaaaagggtgctgggataaggtctaa

SEQ ID NO: 85287 - DNA, 321 bp, Zea Mays
cctttccctatttttttgtttgttctctggttctatcctttctctttcgttttttttcttttctttttttttgtttctgttttttttacgtaaccgaaggagaaaacaaggaagcgacgttgactcggtttgtggcgtgctcaaacgggagatggtggtggcgcactagggtttgaatggtggaagaaagaaggatggtgaaaaaaacacaatgcaaccagcaacaaatgacgcgcaagcacacaaattcaacaatgcagattattgaaagaaagtgcgaggctcaaaagggtgctgggataaggtctaacctgaattttt

SEQ ID NO: 85288 - DNA, 342 bp, Zea Mays
gtttgttctctgtttctatcctttctctttcgttttatttttttcttttctttttttgtttctgttttttttgacgtaaccgaaggtgaaaaacaaggaagcggcgttgactcggtttgtggcgtgatcaaacgggagatggtggcggcgcgctagggtttgaatggtggaagaaagaatgatggtgaaaaaaaacacaatgcaaccagcaacaaatgacgcggaagcacacaaattcaacaatgcagattattgaaagaaagtgcgaggctcaaaagggtgatgggataaggtctaacctaaatttttctgtggttttgtggactgtaggacaaaaaaaac

SEQ ID NO: 85289 - DNA, 305 bp, Zea Mays
ccgagatcagacaaccgctttgtttcctttccctattttttgtttgttctctggttctatcctttctctttcgtattcttttttttcttttctttttttttgtttctgttttttttacgtaaccgaaggagaaaaacaaggaagcggcgttgactcggtttgtggcgtgatcaaacgggggatggtggcgacgcgctagggtttgaatggtggaagaaagaaggatggtgaaaaaaacacaatgcaactagcaacaaatgacgcgcaagcacataaattcaacaatgcagattattgaaagaaag

SEQ ID NO: 85290 - DNA, 691 bp, Zea Mays
caactccctgtggttaccgaccttgctgatgcgagatcggtctgatctcagaatggtgtcaacaagctcctgtaaaaatttcagattttttgaacaaccgagcgaaaagttatgcccggtttaaggaaggtaccccaagttatggttaaatacgaccgagatgagacaaccgctttgtttcctttccctatttttttgtttgttctctggttctatcctttctctttcgttttctttttttcttttctttttttttgtttctgtttttttttacgtaaccgaaggagaaaaacaaggaagcgacgttgactcggtttgtggcgtgatcaaacgggagatggtggcggtgcgctaggatttgaatggtggaagaaagaaggatggtgaaaaaaacacaatgcaaccagcaacaaatgacgtgcaagcacacaaattcaacaatgcagattattaaaagaaagtgtgaggctcaaaagggtgctgggataaggtctaacctgaatttttatgtggttttgtggactgtgggagaaaaaacactcgataaactagttcaattctaagtaacctttgcacttggatttagtgataagtgagagagatatgttgtgttcttttgagctcttgcgcttggattgcttctttctctcattctttcttgcgatcaactcaattgtaaccgaggcaagag

SEQ ID NO: 85291 - DNA, 369 bp, Zea Mays
aaccgctttgtttcctttccctattttttgtttgcgttctggttcaatcctttctctttcgttttcttttttttcttttcttttttttgtttttgtttttttttttttgacgtaaccgaaggagaaaaacaaggaagcggcgttgactcggtttgtggcgtgatcaaacgggagatggtggcggcgcgctagggtttaaatggtggaagaaagaaggatggtgaaaaaacacaatgcaaccagcaacaaatgacgcgcaagcacacaaattcaacaatacagattattgaaagaaagtgcgaggctcaaaagggtgctgggataaggtctaacctgaatttttatgtagttttgtggactctaggagaa

SEQ ID NO: 85292 - DNA, 354 bp, Zea Mays
gtcaacaagctcctgtaaaaatttcagattttttgaacaaccgagcgaaaagttatgcccggtttaaggaaggtacctcaagttatggttaaaaacgaccgagatgagacaaccgctttgtctccttccctatttttttgtttgttctctggttctatcctttctctttcgttttcttttttttctttttttttgtttctgcttttttttgacgtaaccgaaggagaaaaacaaggaagcggcgttgactcggtttgtggcgtgatcaaacgggagatggtggcggcgtgatagggtttgaatggtggaagaaagaaggatggtgaaaaaaacgcaatgcaaccagcaacaaat

SEQ ID NO: 85293 - DNA, 412 bp, Zea Mays
gtaaaaatttcagattttttgaacaaccgagcgaaaagttatgcccggtttaaagaaggtacctcaagttatggttaaaaacgaccgagatgagacaaccgctttgtttcctttccctattttttttgtttgttctctggttctatcctttctctttccttttcttttttcttttctttttttttgtttctgtttttttttgacataaccgaaggagaaaaacaaggaagcggcgttgactcggtttgtggcgttatcaaacaggagatggtggcggcgcgctagggtttgaatggtggaagaaagaaggatggtgaaaaaacacaatgcaaccagcaacaaatgacacgcaagcacacaaattcaacaatgcagattattgaaagaaagtgcgaggctcaaaagggtgctg

SEQ ID NO: 85294 - DNA, 375 bp, Zea Mays
gagacaaccgctttgtttcctttccctatttttttgtttgttctctggttctatcctttctctttcgttttcttttttttcttttcttttttttgtttctgttttttttacgtaaccgaaggagaaaaacaaggaagcggcgttgactcggtttgtggcgtgatcaaacgggagatggtggcggcgcgctagggtttgaatggtggaagaaagaaggatggtgaaaaaaacacaatacaaccagcaacaaatgacgcgcaagcacacaaattcaacaatgcagattgttgaaagaaagtgcgaggctcaaaagggtgctgggataaggtctaacctgaatttttatgtggttttgtgggttgtaggagaaaaaac

SEQ ID NO: 85295 - DNA, 275 bp, Zea Mays
tcgttttcttttttttcttttttttgtttctgttttttttacgtaaccgaaggagaaaaacaaagaagcggcgttgactcggtttgtggcatgatcaaacgggagatggtggcggcgcgctagggtttgaatggtggaagaaagaaggatggtgaaaaaaacacaatgcaaccagcaacaaatgacgcacaagcacacaaattcaacaatgcaggttattgaaagaaagtgtgaggctcaaaagggtgctgggataaggtctaacctgaattttt

SEQ ID NO: 85296 - DNA, 361 bp, Zea Mays
accgctttgtttcctttccctatgtttttttgtttgttctctggttctatcctttctctttcgttttcttttttcttttcttttttttgtttctattttttttacgtaaccgaaggagaaaaacaaggaagaggcggtgactcggtttgtggcgtgatcaaacgggagatggtggcgacgcgctagggtttgaatggtggaagaaagaaggatggtgaaaaaacacactgcaaccagcaacaaatgacgcgcaagcacacaaattcaacaatgcagattattgaaagaaagtgtgaggctcaaaagggtgctgggataaggtgtaacctgaatttttatgtggttttgtggactgtaggag

SEQ ID NO: 85297 - DNA, 245 bp, Zea Mays
acgatcgagatgagacaaccgctttgtttcctttccctatttttttgtttgttctctggttctatcctttctctttcgttttgttttttttttcttttctttttttttgtttctgctttttttatgtaaccgaaggagaaaaacaaggaagcggtgttgactcggtttgtggcgtgatcaaacgggagatggtggcggcgcgctagggtttgaatggtggaagaaagaaggatggtgaaaaaaac

SEQ ID NO: 85298 - DNA, 404 bp, Zea Mays
gcagggcccgcttgtcagcgcgagatgggctggcgtgggccaccaggactgaggttggaactgggccgatggtgaggattcggcccacgtcgcaaggagaggtcctttctctttttttatttttattttctccattttcttcttttttttctaatttctaaatttcaaatccaaatttggttttgaattggcactccagttttaatgaacacacataagaatttggaatgattgcagatctataattttatttatttatttattttaccatatctataacaatgattttgaatacaccaattatactcacacaaaggtacaataagaaattcatatataatatttattatttattaaaagatactttagcttaaatattttagaagatatttgtaaatgcatta

SEQ ID NO: 85299 - DNA, 1078 bp, Zea Mays
ttggccattaggtgagtgtagatatgatttggggtaaaaggaagttaattattggagacttttattccgggtggtggatcttgattcatctgaagatcttgtatctttcattgctgaagttaacctttctcttgggtttgattcaaggaccatcaattgtggtattaggtgtcattatctgagttgggacagcaattataggtacatagggtaggcagattaaactgagttttgctttgcttttgggatgaatgagttgggcaacctataacataggctaggtcgtggtttctcggatgaattggtctaagacacaagtttaggtttagaatccattcgcatgaagatggtttagttaatacttgaggtagatcagaattttccatttaaattaaaacagaggagttatgcaaccatcaaatggttaaggtagtggcataaggctgagttggtcggttattcttaatttagtgccgagtgaatcaagttagaacaggtggatagggtctaatccatgttacaagtattaattaatctgtttgagtgggtcacattgggttagttcagattagatggaactagattagtttagcataactagatttgactagataagacctaattaattttggattagattaggtcgaaagggggtctaggcatgaccagattaatctagataatatctacttattttattttagaatagattgtgtcagtcacaccattcggagataagcaaagtggtggagataagtatgcttattaggacaagatgagtctctaggaataagatagaatcttttcgagataagatgaatcaattaaggtaagaaagaatcttttaagatcaaataggtcaattaatatatgagagaatcttttaagataagatggattatttaaaataagatagatttctttaggttaagagggaatccaatatagtaagagtgagtcttttgagataagagggatctatataaaatagatacactttaatggaggataatctaagttgtttagttatctaatgaattttatttatatctatacgtatatgtagaagtaatttgtg

SEQ ID NO: 85300 - DNA, 614 bp, Zea Mays
ggcttgttgagtttttggttgcatcggttgtgtcgagttgctggtcttagtttattcctttagagttttgagttctaccacgttttggtcaccacgagatccaccatcaccataaacatctctggttcgtttttgccaccacggatacatctcatgtccgatttggaagtttaaatacaatctggaaagcttatcttatcttctttccaacggatctgaccttgtctcaaaattcattctgagggctccgcaatcatcgtagagatttctggactttctatattaacaagatttgttaaatctgatttaaaggggctgttagcaatatccttattgtttgggttgtcatagtgaaaaaagggtttaggcccctgcaaaaaaaaagaaaaaaagaaaataaaaaaaaagaaaagaagaagaaagaagggggctgaatctctaaatatgttgtttctctttgtgctatgctagttgttctttttcagtgactacctttgtgcctaggctcacgtctctagcatggtttagcctaggaccagcacagtaccatcgttgaacgattattcagcttgcttttgtaactaacgtggtactagtgtattccttgcttcagc

SEQ ID NO: 85301 - DNA, 314 bp, Zea Mays
gttttttcaccatccttctttcttccaccattcaaaccctatcgcgccgccaccatctcccgtttgatcacgccacaaaccgagtcaacgtcgcttccctgtttttttctccttcggttacgttaaaaaaacagaaacaaaaaaaaaggtcgacatctcccgtttcatcatgccacaaaccgagtcaacgccgcttccttgtttttctccttcggttacgtaaaaaaaagaaacaaaaaaagatctacagcttccgtttgatcaagccacaaaccgagtcaacgccgcttccttgtttttctccttcggttacg

SEQ ID NO: 85302 - DNA, 317 bp, Zea Mays
ttaacgaataagatatttaaaaaaataaaagaaatgaattttgaaattaagaaaaagaaaacaactcaactcaacacattcacgtacacatctattaaaaaaagaaaaaaaaatatataaaactaaatgcttggacgtccgctggggccaacagcctctagcccatctgcccatgcgtgacgctgacgcacctctccctctcttttccaatgtatgacatacgggccccactctagcactgttcttcttttttattcttctcgcacgaacggtcgcgcttcgccgtctctctccctgctgcaagcgcgagcagccgc

SEQ ID NO: 85303 - DNA, 417 bp, Zea Mays
agaggctgaccaggctggcccgcctgtcggcaccgtgaactagatttgggctgcgcgcagtgagatggtgggccggctcagggagtttgagcccaaatgcagttttcttttttttttgtttttattttctgttttcttttatttctaattcatttgaatttaaattttgaattcatcttaagtgcaaattcaagttcgtgtttaactgtgcaatttggtcacaccatcatgtgatgaagttattttatactgaataatattttcatggttttattttcaagttaggggttaaattccatggatccattgatttattgttaatgacacatttattttattatccacaaatgcacaatcaggtaaaactcagcatgatgcaagatttatttaggtgtttttttggttatttaatttttt

SEQ ID NO: 85304 - DNA, 395 bp, Zea Mays
cttatgaagttataaacaagcgcgcatggcgcgctcaatatactagtgatgtatagtattcgagaacaaggaccaacattatactatatagagaaaataaatatataaataaagaaacttttttagaccagtatttgaatttgtgtatttagactaaatgtgaaactcacaacaaaattggaatttaaaattgaagtctaaaaaaaataaaagaaaagaaagaaaagaaaacagaaagaaaaaaaaaaagaaaaagacctacagaccgaccttgggcccaatgcggtgctcccggcccactatttgcgccgtggccctggtgggagagatggagcttcgatgggtgggccccgcctgccagactcaactctgcattgacgtgtggaccagctttg

SEQ ID NO: 85305 - DNA, 223 bp, Zea Mays
ccgcccctcccctctctcttccactcttgcagccgccccaatccctctccttcttccccaagtgattgcagcgccacccttcaaccctagccccccccacctcttcctctccaaggtggagcctccccgcttggtgtccgtcgtgtgggtgcgagtcttccatgggagtttggagggaggaagaaggaagaaaagaaggagggaaggaggaacccaaggtgat

SEQ ID NO: 85306 - DNA, 228 bp, Zea Mays
cttagtgcctccttcacctccttcagccggcgggacacaacgctcgcctcatccctaacagccgcgagtgccgacatctcgcctccggcactaagagcaccgcccttcgccttcggcactacggcagccgccgtggtcgccgcggcaggcgcaacaatagcaagttggccttcgtccgaccctgcgacgtatcaacgaattaaaaaaaaagaaaaaaaacgagccaac

SEQ ID NO: 85307 - DNA, 241 bp, Zea Mays
ggctggttgggccggattcggcccagccgagggagggggggagttttctctttttcttttctttttctaattctaattcctttcttttcctttttctatttttgtttctttttgtttctttttcctttgagaccaaaaatattttctaagtgatcttgagtgagaaatatagtctatgtgaggtgctctaattatttcaagtgtatgcatatgagaaggggttctaagggtagagtttaag

SEQ ID NO: 85308 - DNA, 287 bp, Zea Mays
tattaatgtgtaaatgcgggtagataaattataaagtgagtaggacatagataggtcagcagacacttgccttcaccaaccagttgctgctcaggatcttctcctgcaactcccccagactccgcaaatgaaccgttatctatacgagtacatataaacattcacatctttaaatccaaaagaacagtacaccatacaaggaaacaattcaattagacacgcacgtgacacgtagtttgcatttacgactactcgcgagggaaaggaaatgcaacgactgaggctac

SEQ ID NO: 85309 - DNA, 689 bp, Zea Mays
aaaaattttcagccgccactctcttcctcctcccacgcgcagcagcatggcaccctttcttcctccctgctccacggcagcaggcatggggcttggcttctctctcccatggtgagcaggccctctccttccccatgggcgcgcccccttcaggcttggctgcagggacagcgccctcctttccctctgctgtccaggcgcggacgcccctttcccatggccgagctcaagctgccgggacccgacgcggcgcccctctgttgcaggtcgagcgtcctccttgctcctcctcctagcgagcggctgcagcagggagcctttctcccctacgcgctggagctccttgggccgacctcggcgaggtccatgtccatggcgacgcagcagctccattcctccatggccatggcgccccctccctcctcttccctgccgcggcgaggaaacgccggaactcgtgccctctctctggtttgggtggagcagcgccttcccctgctatctcctccccgacgcccgttggagatggcacccaatagccccggcaccttcctttgcttcgtctcgctgccaccgctgcgcacgtgccaagtgttcgacaaaatgtcgagggagacgtgttgttgcagcactgtcggcgctcaccggttggttgctgtttttgcgcagccccaacatcatcgtcgatc

SEQ ID NO: 85310 - DNA, 317 bp, Zea Mays
gttttgcgaggagaaggcaagccgctcaacgctcgtcggacgtgcggggctatgcacaaatcggaatcgccatcgttcttacaaacaccgattgggtttgtttttggtgagccggtgcatgtcgctctcgattgactcgattaataaattatatagatgtgtgtaaaatgtttcggtattacgcattggtaggatcacatttgtgattggagaacaagaggttgtttgatgtgtgcgatttgtagtttgtataattatgttttggtcgatgtggtgtacattggtgtttgaatatatgtgggtataaaatgttttgg

SEQ ID NO: 85311 - DNA, 298 bp, Zea Mays
cccgtctcctctgcttgctcggcgcccgtctcctatggcgtctggcagccgcttctctctgcgcgctgcgtttttttatttattccccaagtttccagtcatggcgtgctctccctgctcgcctggccggagcgccctgcgctctgctcgcccatggagtttgctgagctccatttctgctcggtcgtgcccctaccgagtctcccatggccgtaccctgggattcgccggagtctgcttccctcgccgcgcgctgcttcttcccatggcacgactgccctgctctatttgacggacg

SEQ ID NO: 85312 - DNA, 357 bp, Zea Mays
gtagtgcaggcggcggcggctggctgggaaagccagagcgcgcgcgacagtagtgcttagggtttggggtcttgggcccctagtgggccggttgggttagatttaggtttttttctttttttttctaattccgagatgcatttttaaagagctcgaaaaatcataaaaattcaccaaaaatatttataaataaaaatacttgtttttagactaataattactatattacttaattattattttaattactaggatttccttttaaaaggaagttaataacaatcatccgataatcaatcaagcgcatacaaagaaaatgatcaaaatgcaaataaataattaatcacttaaaaaaat

SEQ ID NO: 85313 - DNA, 172 bp, Zea Mays
gttgggttagatttaggttttttttttctttttttttctaattccgagatgcatttttaaagagctcgaaaaatcataaaaattcaccaaaaatatttataaatgaaatacttgtttttagactaataattactatattacttaattattattttaattactaggatttcct

SEQ ID NO: 85314 - DNA, 57 bp, Zea Mays
caccattattcctgcttttcgttgcttttggcagcctcgtcgtcgggtgtgggagac

SEQ ID NO: 85315 - DNA, 1576 bp, Zea Mays
ccaaccatgccatttaattagctactaaccaaggaatataactactaaaaggaaatatcattgacttaatcatataatttaacctacctttcgtattactaaatccatcgtacttcacttatttttaacactaccacaacgcgcctgcgctaaatacgaggattattacgactaataattatatttaatccaatcattagataaacttacaaaaagtataaatcggctcaccagcatcaaacgcgacccaatactcgtacgaatgctgataaatcctggctcgagcttgtcgtcgaacatctgacgagtgtcgtgcgacttcactttcttctccataccttccggtgatttctcttaaaccagcgacgatcaacgaggtttgcaaagacgacaagagggcgaaaaccatctatcacaacaactctctaccccgcaaatagcataaaaacagccatatgaagcagtgttaagatcttccgccctcatgacccagatggggctgaccacgaggaggcgaaacacgacgagacgcgtatcggaagagttactgagattaaagatgccgacatgcgccatggcgaggaagagatggaagatgagcacatgaagggaaacaacgatgttgtcgcacacagcgcgaaggcgaacgacaacgacacggatagtgttggacatggacgaatccattcagagcttcaaatcgacggccaccaggtcacgacaccaagaagaatgcacaaagccaagaggctgtgccggtaaatggagctcacacggacgcaaggacgacatccacagcgaacgcacaggggaataactccctggcagagcaacgtggacgtagggtgagctgagacggcgaatacgagtggagctgcaaagttgctcgcgcgtcgtggcgcagggagctggggcatgaactgggcagagaaagccgggcgatccagggactacgacgagggagaaactcggcagggcacagatggcgggacctcagcacaggacgagcgcaggggagttcgtggctacgcgtggatgggcgggctggagcgccgcgacgagcgcaggggcgcgtcacaggcgagggcgagctgccacagggaggaagaagatggagaagggccgcagcgctgggggttcgacgcgccgtgacgagtagagagatgtggcgctgcacagaggagggagatgaaggagagagagccgctatgggaaagggaggagaactgggcgcgacgctggaccaaatccgagctggagcagggagataagcacggcattgggacagaaccgagcggtcgagcgccagcagccagggaggagcgaccgacagaggagcacggcgcgcgcacagagcacagaagctgggcgcgaccatggactgggagatgggcgccgagcgtgcagggtggagagggaggggcacgacaccagggagctgcgcggccaggctgcgtgtagggagccggcgcggccatggcgagcaaggagcgcgcgcacaggaagcaggtcgggcgcggcagcaggtgcggcaccagggagaagacgagggcgctgggagccgggaggagcagag

SEQ ID NO: 85316 - DNA, 548 bp, Zea Mays
ctgcttcccactgctcccaacctgctccctactctctaacccctcaggaatcacttcacagcctttttgccaaacgatttttgtcgaatagattcacttctgctagagaatcaataggaataactctattagagaatcggctctcggagctagagaatcatggagcggagctatgccaaacgagccctaagaataaagcataagagcatctgcaatagttatgtaaagaactccctaaatatgaatttaagaagttttcgggggaaaactcttctccaacagttatgtaaagcaggtccttaaatttataaactctctacaaaacccaatttgatccctacatttaccaacctcattgggactccctaaatcaatgttggttctaaattcatcgcggaaaccatatttcgaccaccgttttgcgttgtcccccgtcctgttgaccacaaacctatctccagtgccctgtggtaccttcatgtcgtcgccacgaccttcactcgaccttgcaagacgttatataagattgttgatgtgctagctcaatt

SEQ ID NO: 85317 - DNA, 215 bp, Zea Mays
ctcccttcgccccgtctgtcaaccccgagcacccccgcgggtaagcacgatgacagagaattggcgtgtggtgatggcagcccctaaaatctccgtatgtccgcggcggcgatcaaaacggtgcgcaacgctctacttggtggcggcgaaccctaaggcactcgagcagtagggcacacgaccaacttttatccgctacgggtctgcgattggtg

SEQ ID NO: 85318 - DNA, 556 bp, Zea Mays
acatcttacaggttacatgaagctaaaaacctaggaaaattcttttccaagaagtcttgagtctcccaggtagcttcatctccagtatgctggttccattgtagcttatagaatttaagagtcctttttcgggtgatcctatccttttgatccaaaactcgaatgggatgttctgaataagtcaaatctggttccaagacaacaaccaccacatcgatggttcgatcaggaacccgaaggcacttcttcaattgagatacatggaacacattatgtactgcggataatgtttctagcagttgaagtcggtatgccactaatccgcatttttcaagaatgggaaacgagccaatgtatcggggtgccagctttgcttttacctcgaatcgattaacacccttcattggtgatactttcaggtacacatgatctttgacttgaaagaacaagggtcggcatcgtttgtgtgcataacttttctgccgagcttgagctttctttcaagtggtgcattatctgttgaacctttgcttctgtttccttgactaagtcaggc

SEQ ID NO: 85319 - DNA, 675 bp, Zea Mays
atagcggaagtcttacaaaataaaaagataaatataaaaggatctaaaatccatcgttggtgccaaaaagtcaactgggagacgccacctagattgaatcgaattcgtcgatgtgtggctccacttgaaccacctgttcttctcctatggggggtgtgagacagcatgggtgagctcacacatgttcatcgctcaacaagttgtggagaataatgtacatgaactcaccaaaggtgggagttcatgtgaagtgtaaggctgatcaacaaaataaaggttgaagttgagcatttcttttataatttggtcaaaattttattagcaattactaagtataagtaaataccaaaccttagcaataataagtaaaagtaataataaaataatcccaatgcgatgcaaatgacaaattgaattttaattccatagattaatcatgtgagggtccgagctgctcatgaccgtgagcacggctagtataccagttttacactctgcagtggttgcacatctttacccacaagtcatgttacccatctgctaaggggtcatgaatcccatacacctctaccaaggaagcgaggcagggtaacactacgagacctttacaaagttccactagcttcagaaaacccgctagagtttatatgaagctccaatgcagggatccctcgc

SEQ ID NO: 85320 - DNA, 502 bp, Zea Mays
tcatgaacataaataacataacagaataattggaacatggatgtaaatgaaatattaacccaaaaaccgtgtaagcaatagcataactacccaatgattcaggggtaaacaaggtaaaaagataaacagtctagggtgacctattgggtcccatcaaaattaaacctatgcatgaatagtgataataaagaacattattgggtaacaaaagtggtcatgggcacaatttgcctgacacttgagattccagtaccagggtgattcttcagatcctcgtgatctcactgctagtcgtagcaatacaaataaacatggtatatacaaaattaatatcacaccaaacataagtacaaactgaataataatgatctacgcgtcgctacgagatcgtgggatcgagaactactaagatcggagttatggttaaggagttgtgatttaaccatttaaactatgttatcacttggttagtataaatcatatgagggattattctataaat

SEQ ID NO: 85321 - DNA, 1148 bp, Zea Mays
tgcatagtaaatatttatactgtgacagccctcccaagttatcaggtccacgtgcaccaatccttgccattaacggtctcagatggctatgcacgtgtaccgtataacttaacaaggctatcaagttcaacaacttgaaaccattatccgagagatctcccacattcatgtatatttcagtaataacattcgatacaaacacacttcggagatttataaaacattttttattccaaaactcaagttttacatgctagaaagatttataattattacaagtcctaatatactcaaagtgcataacttattacaaaagtaggaaggtagaacccttccaaagctcatacataaacctagctagtcctcctccagaactggatgcgccctccagccacaggaactcctagaaagctcctcataacctacaacaacatgggttcgaaaaccctgagtacgtagtgtactttcgcaagtcttacccgactaaggaaaaaatgactctcaaggatatgctggttaaataggaatcaaggaaaaggctttagcaagaatcaaattaaatacttttgcagaaatagcttactaaagtgagtccttactttcaatagtttaacgccagattaaatattaataaactctagttgcatctagtctaatttcaccatctcatcaatacaacatcatttttattcataatgtttacatcctaacttaggttgcaggtcagagatcaagtctccactgtccggggatataacggtgatccgaatcgatttactcagctgaggatctctaaccacacgacatatgtagcactcaacccttgcatatgtcaaccgttcccacagatcctctacaacgtgaaccgatcctcgctacccaggagcacagtactcctccgtccagccactagccaggagggtacacgctactcccaccatctcccacgcccaatgcgcggttgtctttccacgtatgtaatagccgggttcaagcttaccctgtcccatatctagggcatgttgccagttaagatagtccttgatcatacaggcctacatacgcatccaatccttaattaacctgggtggagcatcacctgttcctagcccaagtctcgagttaagtacttccacccttaggattgt

SEQ ID NO: 85322 - DNA, 238 bp, Zea Mays
aggccagcaactccctagaatgttctggctatggtgtggtgaacttggtggttgtggtcatcacaaacacaggaagacaacgcacacagctctggacagtgccaacttggtggcagtgggagaggagctttggcttgcaatacacatgaatccctcacaccactgcgagctttggctagaacaccagggcagagggaaatcttcaccgaaccagcacttaaataaagggcaggaaggc

SEQ ID NO: 85323 - DNA, 207 bp, Zea Mays
ctgttttctatttctttcttttctatttttttacatgcaaattttaaattacattctgtgttgagatttcaagaaatacatccacactcatagttatgtatttttatactaattgtttaatccatttgcaccaaacatgcagtacgtaaattatttatgttaacaaaatattgttttaaatgtgttgttaaattaagggttcatcca

SEQ ID NO: 85324 - DNA, 356 bp, Zea Mays
ataaaattaaaagtgattttatagcaacctagaggcttgagatggttttctcaaatacttcaccctaaggactagtttgttgagcgaacatctgggacaatagtgctaccatgatggtggtgtcggacgttcttagctgactaacttcaagaactaaagggtagtttgcttcgccatcatgccataaagggtgtctagggcatattcctcgatctgccaaggatgggtgcttttgttagttgccaccttagaggggagtcctatgcttaggaattggagaaacctaacaggcgactatacctttgggaaatctttgtaaagcctacataataaaactctaccaactcatcttgaaa

SEQ ID NO: 85325 - DNA, 685 bp, Zea Mays
gtgaaaccttgccgactcaccttggtagtgtttgagggtttgatcaacccgaggcataaagggatcacaacttgtgggtaaagtgtgcaacctctgcagagtgttagaaattgatatatcagccgagctcacggttaagagtagccttgggatcctcttttattagaagaactttggatacttctatgatgatggttaacaatgatgttatgaaatctgatctctggtatttcctctttgaggaggcacttctgggtaataactgggtttattactaaaacttggctctactaataataataaatacttgaccaactaaaagcaactgttaacttcaaccccacatacagctagtccactttagccaaacgggacatttgctgagtacattgatgtgtactcacccttgctttataaaccaccaccaccccaggttgtccccactgtactcaacgctcaggaggtgatgctggcaacatggatgacttcgaggagtttcaggactacgacgagttctagttctttcttagtggcaaacccccagtcagttgcctgtgtaggcttagcttctacgttccgtatttccacaatttgatagttatgttaaagacaatgtttatgtaatagactctatggatgtcttggacatcttaatgtaattaaagtacctttccgttatttaatt

SEQ ID NO: 85326 - DNA, 306 bp, Zea Mays
ggtgtttttgcttatgcacactctttttctatttttttctctgattttttttcttttttttttctttgttttatgcatttttttgcacttgcccttttattttctctttttctcacaaaagtgacgcaaaaacaagatataacacaagagtatcaaaaaattctcatatgtctattacagattttcttctcgaacttcaacatactttttgacaaatttagagacctcaaacgtataaactcacaacacaaaagttgttggctacctttttatctttgttttaggtatatgaaacacctattttgg

SEQ ID NO: 85327 - DNA, 565 bp, Zea Mays
ccaagtctcacacatatgatgcatagtggtacaggatcgaatgtcacatctttactatataacaggagttctatacaaaataattaaataattacatcatatgaggaaacgatccagcaacccaaagttgactgggagacgacggcctagaccactcacgaactcatcacagcatcctccatgtgcctcatcctgcggtacctgttcttgacctgtgggggggtgtgagacagcaagagtgagctcacatacgttcatcgctcaacaagttgtggggaataatgtgaatgaactcgccaaaggtgggagttcatgtgaagtgtaaggcttaccaaagaggatggttagagctgagcattgcttttaaggttggtcaaaatttttttagcaattactaaatataagtaaataccaacccaattaaatagtagaacagaagtaacaacatcacctgcgatgcaatgcatatgacaaattgaatttaagttccatcaattaatcatgtgagggtccgagctgctcatgatcgtgagcacggctagtataccagttttacactctgcag

SEQ ID NO: 85328 - DNA, 378 bp, Zea Mays
acggcagtgaatcggtgaaagggggcgcggccagagactgcccgatggggcccagtcgtcggcacgcgatggaggaatagcggcatgggccgcgcggtgatgaagctgagtgggccgaattggagggagtctggcctaggtatgtttttcttttttctttttttttttattttctgttttcccattttattcttaattcatttgaattcaaatttttgaatttaactcaggtgccaattcaaattcgtgttaaccatgcaatttggtcattcccacatatggtgaagttatttaattataatattattttgtattaaataatattcctttctctcctctattttcatggttttattttcaagttagagtttaaattct

SEQ ID NO: 85329 - DNA, 172 bp, Zea Mays
ccctcttccatcttctttctcctcaaacctttgcagccctcaccacccaaaaccctagcccccccccatttctcttccccccttcaaggtgcagccctcccgcgtgttctccgtcgtgtggctgcgatctcaattggagtttggagggaggaagaaaggaggaagggaagaa

SEQ ID NO: 85330 - DNA, 540 bp, Zea Mays
attaatcttcctaataacctttgaacgtctcttttgcatgtcggctctcccaatttatcaattgcttccaccttttttggatcaatctcaatcccgtgctcatgcaccataaagcctaaaaacttaccagccgacactccgaatgcgcatttgaggggattcatctttaaaccatactttcgcatcctccccaatgccaaccgtaaatcggctaaatggtcactgaaagcagccgatttcaccacaacatcatcaatgtagatttctaacacaatgcccaaaagatcatgaaaaataaggttcatggcccgttgatatgttgcaccagcattctttaatccaaatgtcatcacaacccattcaaacaaccccacaaaaccagggcaacgaaaggctgtcttagatacatcctcttcggccataaaaatctggttataccctgcattaccgtccaaaaaactaatgattttattccctgaagcctgattaacaagttcatcggctataggcattgggtattcatctttcggggtggccctg

SEQ ID NO: 85331 - DNA, 363 bp, Zea Mays
ttcggcttactcgaatgtgttggcacgagagagattacaattcagcgtgaacagtatgatgctactgttcatctatttataggcacaagacgtagcctggataaaattacattcatgaccttcaacatttgtttataatcataacttaaatcactagggtctatctggtcttttcatcttttgcttgatctaaaccgaagctgatggcagcttcggcacttgtcatcgttgctttcaagcgaggtcttcgtcttgaggaccttcggtagaaagaaggaaatctccataatcactttgccgatggtgtctttgtgttgaggaccttcgggagagaagaagacacccaacaggtagcattttaat

SEQ ID NO: 85332 - DNA, 362 bp, Zea Mays
gagcggtccacggtggaggaggaggtccggtgagcgattccaggggcccggctaaccaatcgcgcccggtgaggccttgaacgtcttccggggaaccgagtgaagctccacgagtacttttcgaggcccggacggtggtgttcaagtgggaccacaatggcggcgacactccctcccttccttgccaacagtggactatggcgcttgggcaacagatgtgggcgtaggcggatgagaagaggggtcacgatggtcgagcttttatggcccgaggaggagaggtcccgaccgacatattcccccgcgattcccgacggcgggtttagcggcgtttgttaggtccatgcggccgttgatgcgag

SEQ ID NO: 85333 - DNA, 400 bp, Zea Mays
gtggagtttacatgtttgtgcattaaataaaacaataaggataataataataagttaatattttttcgaagttggactaaaaaccctaaatggaaattagggtttgaaaataaggaaaagagaagagatacgaaaatataaataatatatataaacaaatatcttcagacttatcacttttaattgcacaaatatagtttgtaaatgaggagccaccaagttggaatttgaattgaaatttaaattgagattcaaataagaggaaaatggaaaagaaaaagaaaaaaaaataaaaataaaaatcacaagcagtcgtgtgggccgaatcttcatttctcagcccatttgcttcgcccgcgccagcccaacatcgcgcccagccgcacgctcaccgcgctcc

SEQ ID NO: 85334 - DNA, 285 bp, Zea Mays
cgagatgccggcactcattgctcttagtgccggaggcgggtgctgtgtcccgccggctgaaggagatgaaggaggcgctaagtcaggtacgttgagctagacttcgtttttttttgttttttgtttttttatatatcggcttcgttggggctgtggtcttatgtgtgttttgcaggcggctgacttcgcagaccgcacggcgtcgggggccctcacggcagttgtgtctgccgaagtcgagagacttcggacgcaacatgctgacgccgtccgggagaagtcggc

SEQ ID NO: 85335 - DNA, 87 bp, Zea Mays
tccggccgcgtactatgatcttggcgtagacgaggatgacgatcgacgacttgttccagcttttgtctaacacttggtgaatatcac

SEQ ID NO: 85336 - DNA, 194 bp, Zea Mays
ttggccgtcgccccccttccatctcctcctctctcaatccttgcagccacaccaccaagccctagccgcccccccatctcctcctcccaaggtgtcattccttgccgctcggatcgtcgtcgcgtggtgcgaatcttcaatcgttttggtggagggaagaagggaggaaggaaagggggagaatccaaggtgat

SEQ ID NO: 85337 - DNA, 203 bp, Zea Mays
aaaaacaacagtcaaaacggtagcaacccctgctacattcacttgccttcatcgaagaagaaagatgtactaggcatgatccggagtgtagccaccaattcttggagaggaacgacgatgatgggcgacggtatgcccttatctcccctctcttctcttcttttttcttcctctcttctcttggggcaaggcacaaaagggtg

SEQ ID NO: 85338 - DNA, 364 bp, Zea Mays
cttgagggtacccctaattatggtccccgacaaggtgcaaccagagtctattaatatttaatctggcattaaaatattgaaagtaaggactcactttagtaagctttttctgcaaaagtatctaagttgctaaaagcctctccttgattcctaaatccagcatatccttgagagtctttttccttagtcgggtaagacttgcaaaagtacacttcgtactcagggctttgtcccatgttgttttaggtgaagaacctatggacctttgctacttttgtgcaaaggtggttcccaagcaggaggaagaaccgaaaatcgcagtttgttgctgtggatggtgctaagtgccggtgggctcggcctt

SEQ ID NO: 85339 - DNA, 312 bp, Zea Mays
ctaaatttctggacagcacctctaccaaatcgcataggtaaacatgtaaccaattggattgcagcacaaatacaacaaaatgatcacaaaaatcaccttgggttcctcctttcctccttcttttcttccttcttcctccctccaatctcccatggaagactcgcacctacacgacggacaccaagcggggaggctccaccttggagaggaagaggtgggggggctagggttaaggggtggcgctgcaatcacttggggaagaaggagagggattggggcggctgcaagagtggaagagagaggggaggggcg

SEQ ID NO: 85340 - DNA, 1208 bp, Zea Mays
ttcagtcagttatcttgtcagatgttttagaacttgtagatggcagaatttaattatctattgaatactgaagttgtagagtattttgtgtagatactcctagagtatttgtttgatatcaccgctgttttaattttaaagatacaaaattaacaaacaacgttgctgctgtatggcatgtggttcagggtgggagtctttccactgggtcttggtttcaagcgtaggagtgttttgttgattgatggcaaatgtttgtgaaatatttgtactaagttttatgcccactagcaggtggctacactccagatcatgtctagtacatttcttcttcttcgatgaaggcaagtgaatgtagcggtggttgcttccgttctgacctgttatttctatcgcctacactctaatattcagaagtatcagattctttcctaattggactctatggtgatgctttacttgcttgcattatactgatgctcaatcatatattgatgatgattatgatttgagtatgactcatgagattaattcacacccctgaaggtaaatgaagtattatttgaggttggtattgtatctgaaggtaaatgaagtattatttgatgtttgtgttgtatctgaaggaagtgaagtttattgataaatgtagcatgccatatacattgcatgactcatttgcatatgaagttttgtcgtgacctatggtccgaccgtactggtacaacttagcatcgtacgttgcccgagaaggggtacgatgcggcttcatacccttagaggtatgaaggcagaggacatatgcattgcattcatatgcattcattgaagtgatatttgcagatgatgtggttttatacccccagaggtatgaagatagagtacctacacattgcattcgtatgcatacattgaagtgatatttgcaggtattgttgacgcagggaagtgttatagaacctattgtggttgttcgaggaaatgagatggtattggttatagtgggactactgagttctacatctacaagcatttctgatttttaattgtgactcttttaaaatgttgatgaattcaatttgtggtttaaatatctcgtcagaacaattagcttgctgagatgtttcatctcactcttgcattactcaatgcaggtgcttgttgctcatcaaggggagtgggaagtagcagcacatccaccttcattc

SEQ ID NO: 85341 - DNA, 2517 bp, Zea Mays
ctaagtcgctaatgggaactgacaaacatttggacctcaacatgggaggtaactttatagatcaaaaggtaaatcggtctatgatatgttccttgctttatctttgtgcaagtagcccgaatattatgctttttgtttacatatgtgctaggtttcaatccgaccccaaggaatgtcaccttgtggatgtaaagcgtattcttcgatatttagttcatacaccttacatcgggctctggtatcgtaagggatgtgacagacatttgacttgattggatactcagactccaactatgttgggtgcaaggttgataggaagagcacatcagggacttgtcagtttctaggaaggtccctggtgtcttagagctcaaagaaacaaaccaatgttgccctatccaccgctgaggccaggtatgttgccacaggtcagtgttgcatgcaactactttgaatgaggcaaaccctccgggactttggatataatcttgcaaagtcccactactatgtgataatgggagtgcaatcctcttgacagataatcccattgaacacaaccgcactaagaacatagacatccggcatcacattctgagagaccactagcaaagggggatatcaatgtttgccatgttagcaccgatcataagctagccgatatcttcaccaagcctttagatgacaaaaggttttgtaagctgcgtactgagctaaatgttttagattcacggaacttagcatacatgtgtttttatgcctttgatcatgttattttaagcttaattgtctttattgcttattttggtgctcaagttgtacaatgtcatccccaaatctcacaagtccttgtgcaatgatgcagatgtttagggggacgatatgctacaacttgaccctttgagactaatatgtttgcttaagtgattttgatgtagtctcaagggtagattgaaagggaaatggtggacatgggcaaaaggaagggcttccactacataatggtatcaatgtaccttgttcaagttgcccttggagttcattgccttcttgctcttaattcataatttttggtgagcaatgaggtttaagaccactagtttctccgttttggtgcttaatgccaaaggggagaagttaaggccaaagtaactagatcaactgccacttgtgtatttcaaaagttattgtgttttgaacatgtatttttgatcaaaaccctcttaacagcaagaggagccctttgattgcaaaaactacactcttgtgggggagaaatctttttatgagaaaaagggggagctttttgtttttttatcaaaactagtctttgaaaatggtttgatttgcaaaaataaagtgacttgacttagaagtaagaaaatgaatttgttttgcaaaaataaatcaagtgatggcaaaatgatccaaatatgccaaatcctatacttattctattggtagttaatttgacttcaatctgcaaaagttggctcatacttggttatgttagatcattttaagttgttttaggtgtgttggcataaatcaccaaaaggggagattgaaagggaaatgtgcccttagggccattcctagttgttttggtgattaaatgctcaacacatcactatgaactaacgcttctcatatgagcatgaacaccggtgtttagaaagcaaattgaagcaatcaagtccaaaagattgaggaaaataagaaaaacacttttgggcttgagaatgcgcatattgcaaatctctatggacggtatgggatctcaaagtgataaaggtatgtttctagtacttagtcaattgttttagatgctaatcatatttgtctaagtgctagggatcatctaaagtctagccaaaagaagcaaaaggaagttggcacaaaaaggaaaaggttgggctggtcggggcagcaccggacggtctagtgtcaccaccggataatcctatgacagtacggtctaagtggtcgctcttgggctcgaccaggccccactcgctataattcacaggacggtttgtgcggagcgctggacagtccagtgtgatggacagccaacggctaaacgccacgtcagctggctccaacggtcagatgagcaccgaacagtccggtgcccgtctgagaaggaacatgaccaatcagtgaatctccgactattgtgttgtgcactgtctggtgcacccatagacatagaaggctgggagcttccaaatgaagctctaacgactcctaggctccttggggctataaaagggacccctaggcacatggagcatgtactcaagcatcacaagagcatactacaatttggagactccgcgacaacgcttctgacttgttagagagagatttgagcgcgtgtttgagctgtgactttgttattttgatttgtgtgctctgttctttgcttgtgtgcgtggtgttgctgcaattgtgctcttgtgagcgtttctactcccctccttactctggatttgattgtaatcaaattgtgtaaag

SEQ ID NO: 85342 - DNA, 501 bp, Zea Mays
gtcagagagcgaggaaaagtggtgcggcaagggggtgactgacgtgcagaacccggatgtcagggcgaccgagcgcgcgttatgggccatcggacgcaaggtgttgagtgggctggaagtgacatttcggcccacgcgcgttttattcttttctttttcttttctttttttgttttcttttctttttatttttgaatatccaatttaaatccaaattttgttaggagtttttataccaagattaaatttacaattctaaaatgtcagtatggacatgtatatttatttatatatttttcttcacattataaatagggtttttcttttcccctctcttgttttctaattcattttcaatttctagcttgcaaattaggttaaatctcattcccaatcattaatgtatttttgtttttattattattaaatgcacaaataaataaactccaacatgatgcactattccctttatttaatacggttattagtggtcaaggtgac

SEQ ID NO: 85343 - DNA, 177 bp, Zea Mays
gaaacatgtactaagctactacatagggggtttaacttaaaattgtatgtcatgatgcatgctcgtcctattcgtcctcacaattcttgccaacatatagtggctatcacgttctatgacggtggcatacctactcactccgtcattgaacactagtcgtactttcctagggtttag

SEQ ID NO: 85344 - DNA, 171 bp, Zea Mays
ccctttccttcctcccttcttccctccaccaaaacgattgaagactcgcaccacgatgacgatgatccgagcggcaaggattggcaccttgggaggaggggattgagaggggggggctagggtttggtggctgcaagaattgagagaggaggagatgggcagggggcggcg

SEQ ID NO: 85345 - DNA, 366 bp, Zea Mays
ttcccttaattcctcacgaaaaaaacacataaactgctagactactgctgttcacccaccacctaaaattctggacagcccccctctaccccaatcgcaaacgcaacctctaatcaattaaattgcagcgcaaatgaacaagggatgaacacaaaaatcaccttggattctccccctttccttcctcccttcttccctccaccaaaacgattgaagactcgcaccacgatgacgatgatccgagcggcaaggattggcaccttgggaggatgggattgagagggggggctagggtttggtggctgcaagaattgagagaggaggagatgggcaggggggcggcggccaaggggaaagagaagtggg

SEQ ID NO: 85346 - DNA, 942 bp, Zea Mays
accgaataggggatttgggagggaaatggttggaggcttatgggtgcgatcaactatacaatatatcggacagacctattctcgtcgctaatgatgctgtaataaccaaaatcaaaagaagggtgcaacgtagaagatgaagagaacacatcaagcaaacgtcaggatcaaaacaagactgcatatatatggacccagccaacgcaaactctcggcttcctgagaaacactctgcgcatcatcagttgcattgcgatgaattcagctacagagcttactttcagcttcaacttttgttcgaatttgggaggtgcaaagttgaattgtagggaagagaggacaagataaaagcaggaaacagaagataccaatgcaaggcttttacagaaatttcggacgaagatgcccagattcgctgtgaagcttacttcttccttgcatccaaagggaaaaggcgcgccggtcggccggtgccttctcttcgccagtgtaggcgcctgcctgccgctccatgaccactcgttctagtgttcatttccgcgcacagagaccaacgcagcattgctttcctcaaagatgcatggccagagttccacatctgcagcatctctcttttgatgaaggtgtcttgaggaataatttcacctttagcttttaactatggactctttttaaactaaagatgatgtttggagtgtttgggctcgagctggaatggaactgcacgctagtttcactgtgtactggtctctctcacccactgctcgatcgcctggctacctgtgtggcactacttcctagctagctaaaagccatgcatggcctgtgagtagctgtgccaccatgtcttctgtgtacaagactacaagtacaaggtgtatatttttgtgtcatgtttgtatacgcctcctgggctcctggctttctttcaaccgagtggac

SEQ ID NO: 85347 - DNA, 478 bp, Zea Mays
ctttcttccaccattcaaaccctagcgcgccgccatcatctcccgtttgatcacgccacaaaccgagtcaatgcagtttccttgtttttctccttcggttacgtaaaaaaaaaacagaaacaaaaaaagaaaaagaaagagaaaggatagaaccagagaacaaacaaaaaatagggaaaggaaacaaagcggttgtctcatctcggtcgttttaaccataacttgaggtaccttccttaaacgggcataacttttcgcttggttgttcaaaaaatctgaaatttttacaggagcttgttgacaccattctgaggccaggaaaataaagaaaaaaattgtcaaaaaaattcaggaaaataaataaaaaaattcgtcaaagctcttgcacgcttttcagagaacttgctctttttctgtagaccacatctgatctctgttttaggtgaaacttggtgtagctcctattttgttgcctctt

SEQ ID NO: 85348 - DNA, 77 bp, Zea Mays
taggtgatgaaactgctgagttctgctgtttctgttccaaggtggttcccaagcaggaggaggagaactaagactta

SEQ ID NO: 85349 - DNA, 133 bp, Zea Mays
acagatcctaccccccttacaaagaatctcgtcctcgagatttaagatctagggaaaaggtggagaaaatctatgcgaagctcttcttccctctcccaagtagcttcatcttcaccgtggtggctccattgcg

SEQ ID NO: 85350 - DNA, 408 bp, Zea Mays
cagcaaggtgagagaaagaatggggctccctgccagccagctgggcctagtcgtccttggccactgggctgctcggccactcgccgccggcttgccggccggattgatggcggcgcaaggctgggtggcagcagggcagaccgcagcaccagctcgtgcgcagcgcacgcttgccggagcaacgtgccgccggtgtggctaccaggatagcgtaccgatgtcttcggagtccaccggcgtggggcaggaacgacgcctgacacgtgatggggaaagcacagcttccgtggggtccaaggcttgcacacgctcagggcgagactaggccgcggaccgggcgtggtgtcagctactgctagtgagaggagaagatagcagagagaaaacagaggtaggagacaagaatag

SEQ ID NO: 85351 - DNA, 384 bp, Zea Mays
caataatctgcattgttgaatttgtgtgcttgcgcgtcatttgttgctggttgcattgtgttttttttcaccatccttctttctttcaccattcaaaccctagcgtgccaccaccatctcccgtttgatcacgccacaaaccgagtcaacaccgcttccttatttttctccttcggttacgtaaaaaaaacagaaaaaaaagaaaaaaaagaaaaagaaagagaaaggatagaaccagagaacaaacaaaaaaaatagggaaaggaaacaaagcggttgtctcatcttggtcgttttaaccataacttgagctaccttccttaaaccgggcataacttttcgctcgttgttcaaaaaatctaaaatttttacaggagcttgttg

SEQ ID NO: 85352 - DNA, 396 bp, Zea Mays
ccgattccctgggcgctggtgtatatataggtacagaccgtggcctcacgccatcttcaagccgtcacgaacatcttggaggaggacggagggatcaaccaccgagagagcacgtagcttggagagagagggatccgaccgatcgcacgaccgccgtcgcggaggcctcgtgtgcgcgctgctgtcaacctgcctccatgttgttgctccaagccagtcaacggcctctcgcgttgctcgtcgctcccagcacgcggcctcgcgccctcgcccagttttgctctcccttcgtcgctttgtggatctgccagcgtctgggcatagcggcgccgccgtcctcagatcagagggtaggagaacccgcgggcaccgttggatctccggccgacggatgcg

SEQ ID NO: 85353 - DNA, 546 bp, Zea Mays
ccaaaagttgatctacggtgcgtggatgtgggaaagggttgtgggccgttggatgcaaaggcagaagtcatctggggcgtcggttcttttctcccacaaaaccctaggtggccaccccttttccctccaccccctctcttggccgccaccctcccccctttttcccttggttggccaccccctctcctcccatggcagccgcccaccatttcttcctcctccctagatctcccctcccccacgcagcaaggatcgagaagaggaggagcaagatggattgaagaggaagagaggatcaaggagatgttctacccccccccccatctattgcagattttcttggggaaaccctaggtaaggatgggatccttgttcctccatataattatgtgcttttggaggttgtggatcatgtggattgaagaattagaggttggattagatgtggggttaggttttgatctcgaatttaatttctgaagagtagcagattcgacagtttctgttcataccagttttccgtggtcttagtggcctcaaaaaaat

SEQ ID NO: 85354 - DNA, 2838 bp, Zea Mays
tcgtacgttgcccgagaaggggtacgatgcggcttcatacccttagaggtatgaaggcagaggacatatgcattgcattcatatgcattcattgaagtggtatttgtagatggtgtggttttatactctaagaggtatgaaggcagaggacttacacattgcattactatgcatacatcgaagtgatatttgcaggtattgttgacgcaggaaagtgttatacaacctattgtggttgttcgaggaaattatatggcattggttattttgggactattgagttctatatctacaagtatttctgatctcaattgtgatccctttaaaatgttgattagttcaatttttttggtttaaatatctcgtcgaaacaattcacttgctgagatgtttcatctcactcttgcattactcaatgcaggtacttgattcatgttggaaataaggggagtagcagcacatccaccttcactctcataataacgctgcccacgcacaaccatgatttaattagaaacttcttgtcaaaggatgtttgtttttaactagtcatgcacactagttaattcagttcatgacgttatggttatcttcccattgctagcagattattaatgtctagtatgttttcttattatgatatctgtttatactttgttgcttccacgtttatgcaaattttcaaaggagatgctgtcgaaattttatatatgaatgttagttgtgtagtttagtagcattctggggtgtttgtggatcccggggtgttacagttggtaccaaagcataggctttagattcttggcaatttgaagataaatttgacacacttgcacatataggaagggtatgggtacaaatatctttgatatatattaatgtctttgaagtgtaggtgacaataatttcacccctccccattcctttatggtgatgtggtaagttgtttatgacttaatgcctgatataatttatctctaaatctttatattgttttattaatgcatttgatatcgctggtcttttgtgagattgaagttgttattatgcctgtgatatacaagtatgcctatgttgttttcactatgtttttcatggttgagttttattacaataatattgttatatatgcttgattgaggatgtttctaagaggagtgtgaattgtgtgttttgggttacaaggtaaccatcaatttgaatttaagttgttgagcggttggtggatagttccaactatctttgcaaagaatgattgtttatgtcgagaaaccatttctgaaagaaatgaatattggtacttttataggaattttgggggaagtctttacctagctagaatggcttacatgtctctcttctattgtgtgttttagtagccacaaagcctagatgtggtttaaagtggttgcatgttagtcatgctagttgtagaataaatctttgattttctggatccatggattatgtattaatacattgaggatcagatagttctctccccgatgcatgcttgtggagccattgttggaccacctatctattggtttgaatgaagccagtgcctagcctagagttggttgtgtgtggttagtcacctattcctaaatgatgtggtttttacatcagcttgagatgtttgtcaaatgtgtgaaggattacagggttattattgaccttgtatgtctggtactttgagtgcatcgtatgatagaatgaaatgtaagtttatgaactacagtagatgaagacttatattatgtgtaggttaacctcactagtttggatatttttcttagttgagttgttggatgaagtatagtgacagtggttaaccaagtattgtgttgttgtgctatcagtgctttttgtggagcttttggcatttcttcgatgacatgtgccgcgcagaatgttattggcttcttattggctttattgctccattagttctgtagattttctcccttttgcggggtgcaaagaatgttagattacatgattatcttttcatgatggcaagaataaggtttaggaagattaggagttttgtttcaatagaactacttgtttcgtggtgctttgaggtgaggtgtttgatcttcttatacattcgtcgggtgtggatgtttcaccatttaattaaaattaattgttgaagttggtaagggttgtgcttagtgcatattaccccttcataaaagagtgttgtcttaagacattgatgttgatgtatagttgcatccaaatttgatggtgtgaaattgtagtgttgattgcatctatgacttgctttgagcttcattgcatgttgtttcatgcttgatgtcaggttgtgtagtttcctcagacaattagtccaaggtagaagttcttgtgttaattaagaccagtaatggacccatcttttgaatgatggtgatggggtaccttgggtgttttgcttggagtggccgaattcgaggacgaattctttttaagtggggtagagtgtaatatccccaaaacatttttcgaccaaaagttgatctacggtgcgtggatgtgggaaagggttgtgggccgttggatgcaaaggcagaagtcatctggggcgtcggttcttttctcccacaaaaccctaggtggccaccccttttccctccaccccctctcttggccgccaccctcccccctttttcccttggatggccaccccctctcctcccatggcagccgcccaccatttcttcctcctccctagatctccccctcccccacgcagcaaggatcgagaagaggagtagcaagatggattgaagaggaagagaggatcaaggagatgttctaccccccatc

SEQ ID NO: 85355 - DNA, 1013 bp, Zea Mays
aaaggataaacgttcttaatgacagtagaattccatgatttttggttgagtagtttgtgagatatcgaattttgaagttaactacgctgctgtctgaaacagattcagtcagttatcttgttagaggttttagaacttgtagatggcagaatttaattatccattgaataccgaagttgtagagtattttgtgtagatactcctagattatttgtttgctatcacaactgttataattttaaagatacaaaattaacaaacagcgctgctgctgtatgtcatgtggttcagggtgggagtctttccaccaggtcttggtttcaagtgtaggagcgatttgttgattgttgtcaaatgtttgtgaaatatttgtactaagttttatgcccgctagcaggtggctacactccagatcatgcatagtacatttcttcttcttcgatgaaggcaagtgaatgtagcagtggttgcttccgttctgacctgttatttctattgcctacactctaatattcagaagtattggattctttcataattggactctatggtgatgctttacttgcttgcattatgctgatgctcaatcatatattgacgatgataatgattcgagtatgactcgtgagattaattcacacccctgaaggtaaatgaagtattatttgaggttggtattgtatctaaaggtaaatgaagtattatttgaggttgtattgtatgtgaagaaagtgaagtatattgataaatgcagcatgccatatacattgcatgattcacttgcatctgaagttttgtcgtgacctatggtccgaccgtaccggtacaacttagcatcgtacgttgcccgagaaggggtacgatgcggcttcatacccttagaggtatgaaggcagaggacatatgcattgcattcattgaagtggtatttgtagatggtgtggttttatactctaagaggtatgaaggcagaggacttacacattgcattactatgcatacatcgaagtgat

SEQ ID NO: 85356 - DNA, 322 bp, Zea Mays
agttctaccacgttttggtcaccacgagatccaccatcaccataaacatctctggttcgtttttgccaccacggatacatctcatgtccgatttggaagtttaaatacaatctggaaagcttatcttatcttctttccaacggatccaaccttgtctcaaaattcattctgagcgctccgcaatcatcgtagagatttctggactttctatattaacaagatttgttaaatctgatttaaaggggttgttagcaatatctttattgtttgggttgtcatagtgaaaaaagggtttaggtccctgcaaaaaaaacataagaag

SEQ ID NO: 85357 - DNA, 322 bp, Zea Mays
cgcgggggagggaggaggcggccgcgacatgggccagacttggcccagcagggggaaggagagcttttttttctttttctttttatttttgataactcatttccattttgtttctttttctttttgaacaaaacatttagtggataatctaggtgttggaaaataaaatctaagtgaggtgcttgtgatcaaacaaagtgtatgcatatgatgggcaaaatctaagggagttttgggatagaagataagaaaagggggggtagattagggtttctaacctgggttagaattatgggatgttacaattttgccctaggtcaat

SEQ ID NO: 85358 - DNA, 357 bp, Zea Mays
cacaaaactatctaaacgaaatttagtcaaaatcgtaaacctcggattctccgtttcgtgattcggaaaatagagtgtgtagccgtttgccgtatagtgtgtcgaccctttgtttatcgctaaaaatcttaattctcaaatatctgcgaatttctaaaaaaagaaaagaaaaaccaaaaaaagaaaatatcctcgcgccacgccgctttggctctgggataaaaatcctgtcgcccagcctctgtcttctcctcgccgcgtgccaggccttcttctctccctccctcctctgctggtgcgcgccccatcgccttgagctccaacgtcgcacgccctgtttctctctcccctgcgcac

SEQ ID NO: 85359 - DNA, 403 bp, Zea Mays
agatgaatccatatggataagttagaatcttttgaggtcagttagatctattaggatgagataaaatactttcaagataagatgagtctattaagataagagagaatcttgtagataagatggatatattaaactagatatattttaatgggggtattcttagtttgtatagtcatcttatgtttttatatatatttatgcctatacgtatatgtagatgtaattgtggacattactccacaaccatcacactcaatcaaagatccaaatcaaacaagtatcataagaacaaacattgaagcacatagatacctacaaaaatagttttgtttttgttcctaagagtaggtctcctattcccaaaagtcactttagatacacgatttcaaagtgtgaaatcaac

SEQ ID NO: 85360 - DNA, 854 bp, Zea Mays
tctatatagtttattcaaaaagtacttctagtcttacgatgattattttctcccattttttttcttagagaacatttttatttagttcctgagatgaattttctctagatccaaaaatagggttttagggtgctacaaatcctaccccccttaatcagaaatctcgtcctcgagatttgtgagaaaatggatacagaaggattggtttgtaattcggcttttagtctataactggttcaaaatctagagtctttttttgtcaatggtgggtgattatgagagcatagatatccaaatacttattatgtgggataaaagatggataggttagggcaagaatagccaggggtaagaaagtttatggtgaggaagaactccgtgttggatggcaatgcatcaaaagatccagtttaacttctctccttccttgacgaggttgagcttttccctcttgagcatgggtgtctccaagaggttaagatagatcagtaggttatagctaggtagagggtttagtaggtggctatatgatagttgggattagttatataaccaattatgtaggtcaagttgtttgtgtatggctaagtcgatctaagtcaccaatttagacttaagtgaattaggagtatggccgagttgatctaagatctcaaactggtttataggagcagggtctaatgtatttactcagcattaaccaatcctatttgagtgacttccaataggcttgatcataataaattagataggattgggtatgactagaatagactagattagatcatggttgctacaatagtgtggaataaatatgtctattagggcaagatgaatccatatggataagttag

SEQ ID NO: 85361 - DNA, 647 bp, Zea Mays
tggaatcataacactagtgtctcaagatcaatagggttcactccgttcaagcttttattcggggatgaagcaataacaccggaagaagcaagaacattatgtcacacccggattttaggggttcaaaacccgggcgcgaacataatcaccaggtgtgctgggaccaagtctcacacatatgatgaatcatggcacaggatcgaatgtcacatctttactatataacaggaattctatacaaaataaataattacattataaggagacaacggtccagcaacccaaagttgactgggagacgacggcctagatccctcacgaacacatcgcagcatcctccatgcgcctcatccagtggtacctgttcttgacctgtgggggggtgtgagacagcaagagtgagctcacatacgttcatcgctcaacaagttgtggggaataatgtgcatgaactcgccaaaggcgggagctcacgtgaagtgtaaggcttaccaaagaagatggttgaagctaagcattgcttttaaagttggtcaaaattttattagcaattactaagtataagtaaataccagcccaattaatatagtagaacagaagtaacaacatcacctgctatgcaatgcatatgacaaattgaatttaag

SEQ ID NO: 85362 - DNA, 205 bp, Zea Mays
ctcacttttgccccttggctggtcgccccctctccccccattgcagcagccctccaatacttcttcctccctagatctccccccacgcaacaaggatcgagaagaggaggaacaagatggattgaagaggaagagaggatcaaggagatgtgctacccccatctcttgcagatttttcttagggaaaaccctaggtaaggatggg

SEQ ID NO: 85363 - DNA, 3125 bp, Zea Mays
gaatccgttttaaatacattagggtaggatacaggatgagctactatccatccgtatctgtccgttttcacccctacatactgctgcagccgcccggattttgtggtgcactgctgtgtcacgcgccgcctcgccctccgtagatttatcaattgttacttacccggtggtagatcttacacctgcttgataggttcttctcctgccactccacttgttttgcatctgtagctagctgctcgatttggtaatcagctggagcgagaaacatgagacatggttggtggcgtgtagtctagagcgagaaaccgaagagatcaaatgagctatttctatctgttggaataataagtggatagccgataaagagcatgaacatagtgccctccgttcagctttgtttttttttgttttttaaatagatatccaatttagttcagttcatctcgtcaattcatttttttattttcttgtgcatctactacctcactctagacacacacaattagggagaggaagggagaacaaaacacacaagttcttggtgctgctgaactgacttgcagtgtgctgctttttcttaatttatagaagggaaaattttgtacaagtacatctattgtactcttattctaactactatttagtaatagctagatgttacttactggctgtaaattttgaagaaaaatgtttagctagagcaactcaactatggcgaccttctaatccatgacttcatgccattatgtattgcggagtttacttgtccttgcgcttttagcttatcaatatgatttttgttagttatatttccttttccaaaattatcaatatgcacaagttgttgatagggatgcaaacaatcggtgtgttgattacttcaccgtttatcaggtgccagagtggttgtaggcgagttcagcttctatgcacatggaggggaatgcgtcgaagtggttacaagtgtataagctgaaacatggatttagtgattgggggaagtttacacaagtagttagggagaagttcggagtggacgaataccctcaagctatgagagatttggttaatgtgacccaacaacaaggagtggaggaatactctcaagcttttgatgatatcagatatgccgctactttgcacaattctgagttggatgagaccctatttgtgacacactatattaaggggttgtaacctgaaattcagaaccaagtcatggctcagatgcctaagacaatggataaggcgaagaggttggccaaggtgtatcaggagattgtagagaagaatagagttagaaatcaaaagggactggttctcaaaactcaggttgcaggagtaaggggagagaatagggaaggaatattgtatcctgagttcaggtagttgagggaatatagaagagcgaatgggttgtgttttatttgtggagataaatttgagccaggccatcaagcaaaatgtccgaagagggtggtaactcaactacataatctgatcgtggaagacatgggtctagttttgactgatgaagtattgcagaagttggagaatgaggagaagtgtgtggaggagtttggcacataatgtgacggatgtatgagggtccaagctctgattcagaatcagatgttggtcatgctcattgattctggtagttctgcaacctttatcatccagagaattgtagcaaaattggggttggtcactgaagattgctccactgtgcgggttaatgtggcaaatgaaacagctatgatcagtgataaaagagttaaggagatagtgtggagttctggggggcacctgtacaacactgctatgaggttgttggatttggaagcatatgatgtgatcctagggtatgattggttgaaggctcagagtcctatggagtgtgactggaataacaaggtgttaacctttactgatcaatgaaagatggtaaggttacagggtgatgctagagaggtgtaggaagtgcgacaagtatctgtgttgcaactggagaaatggatgaagggagaggaagtctaggtatttgtgcttctggagtaggttacaaaagaaatagttgggaaaaatgatgcagttctacgggagattttaaaggaattagaagatgtttttgttgtgccttcgaaattgcctctaatcaggccttatgaccatcacattcctctgttgccagggtctatttcggtaaactcaaggccttatagatattctctagctcacaaaactgagatttaaaagcaaattactgaactgctagcagcagggttgatagtccctagtgtcagttctttttcttctctagttttacttgtgcaaaaaaaggatggcagctggaggttctgtatagattactagaagttaaatggaatgactataaagaacatatttcctatgcttatggtggatgagatactagatgaattagttggtgcccagtatttcactagtcttgacatgacagcaggatatcaccaaattcggatgggacctgaggatgaatacatgactgcttttaaaacacatcatggccattataagttttgagtgatgccttttgatctcactaatgcaccagctagcttccagtgtgccatgaactcagtgttggagacttttcttagaaaatttgttatggttttcttggatgatattctcatctacatccctagtttggaagtgcattatcagcatatcaggatggtgttggccaagctgagagagcactagtttttctttaagatgaagaaatgcacttttgtgaagcatgaactcaaatatttggggcatgtgatttcaagagatggggtggccacagactctagtaaaactgaagctatgttgtcctggaaacaacctatgaatgtgatagagttgaggggattcttaggtttaacaggctattacaggaaatttgtgaaagattatggtattatggctagacctcttactaggttgttgcaaaaacaacaagtgtttcagtggtctgaagacgctcaggttgcttttcaggagttgaaacaggatatggcttcaacaccggttcttgccctacccaagtttgatcttcctttcacagtcgagacagatgcatcagatgtggg

SEQ ID NO: 85364 - DNA, 2944 bp, Zea Mays
cttggtttgagcttcattacatgttggttcatgcttgatgtcaggtggtgtagtttccttagacatttagtctgaggtcgaagttcttgtgttaattaagaccaataatggacccatgttttgcaatggtggtgttatatggggtaccatggatgttttgtttggagtggacgaattcgaggacgaattccttttaaggggggtagagtgtaatatcccaaaaaaatgttgccaaaggttgatcttcagtgcgtggatgtgggaaaagggttgtgggccgttggatgctaagtcggagtcatctgtggcgtcgcttcttttctttcgcaaagaaaaccctagtggtggcattttcccccttttgcccctacttggccgccacccctttcccccccctcccacacttggccgcccctctctacttttcccttgggctggctgtcctctcctcccatggcagcccctctcgatgatttcctcctccctctagatctccccacgcgcagcaaggatcgagaagaggaggagcacattgagttgaaggggaagagaggatcaaggagatgttcttccccatctcttcttgcagaatttcttggggaaaccctaggtatggatgagatccttgttcctccctgtaattatgtgcttttggaggttgtggatcatgggaattaaaggattagaggttggattagatgtggggttaggttttgatctcgaatttagttttctgcagaatggcagattcaacagtttctgttaatcccagttttctgtggtcttagaggcctcaaaaaaataaaacgtctatatataagtcgtagataatttgtagatctttccgtggccgcgaagaacacctcaatcggacatcagatcagagagttattgcagtttgattatagcagtttttcagtctcttaattctgtgcagaatctgttctcttaagatttaagcaattttatcaatagaattaaaccttgggtttgtaagaaaaaatgtatataatttcataagctttccagattgttaaagagtgcattcatatgaattatgaaactccagttatgtttgttttactgtggctgtttctgttagcctgatagaaatgagcgggtctgttcactggtaggtttcatcaagtaaatggccgaattggctctcccagctatggagacttttgtagagggataaaatttcttactttcagcagaatttcatgatttttggttgagtagtttgtgagatatcgaattttgaaagttaactatgctgctgtctaaaacagattcagtcagttatcttgttagatgttttagaacttatagatggcagaatttaattatccatcgaataccgaagttgtagaatattttgtgtagatactcatggagtatttgtttgatatcaccacttttataattttaaagatacaaaattaacaaacaacattgttgttgtatgacatgtggttcagagtgggaggttttccaccaggtcttggtttcaggtgtaggatcgatttgttgattgttggcaaatgtttgtgaaatatttgtactaagttttatgcccgctagcaggtggctacactccagatcatgcctagtacatttttcttcttcaatgaaggcaagtgaatgtagcggtggttgcttccgttctgacctgttatttctattgcctacactctaatattcagaagtattggattctttcataattggactctatggtgatgctttacttgcttgcattatactgatgctcaatcatatattgatgatgattatgattcgagtatgactcatgagattaattcacacccctgaaggtaaatgaagtattatttgaggttggtattgtatctgaaggtaaatgaagtattatttgaggttgtattgtatgtgaaggaagtgaagtatattgataaatgcagcatgccatatacattgcatgattcacttgcatctgaagttgggtcgtgacctatggtccgaccgtaccggtacaacttagcatcgtacgttgcccgaggaggggtacgatgcggcttcatacccttagaggtatgaaggcagaggacatatgcattgcattcatatgcattcattgaagtgatatttgcatatgatgtggttttatacccttagaggtatgaagacagagtacctacactttgtgttcctatgcatacattgaagtgatatttgcaggtattgttgatgcatggaagtgttatacaaactattgtggttgtttaaggaaatgagatggtattggttatattgagactactgagttctatatctacaagaatttctgatcttaattgtgattcttttaaaatgttgattaattcaatttgtggtttaaatatcttgtcaaaacaattcgcttgctgagatgtttcatctcactcttgcattactcaatgcaggtgcttgttgctcatcaagggaagtgggaagtagcagcacatccaccttcactctcataataacgctgcttaggcgcagtcatgatttaattagaaacttcttgtcaaaagatgttgtttctaactagttgtgcgcactggttgatttagttcatgccgttatggttgtctttccattgctagcagattattaatgtctattatgttctcttatcatgatatctatttatattttgttgcttccccatttatgtaattttcaaaggggatgctgtcgaaattttatatatgaatgttagatgtgtagtttagtaggattctgggtgtttgaggatcctggggtgttacaaatttacttgatctacttttcattgggtagttttaaattgtgtgcactagtagcatatccactcggccacgacaaaatggatcaactcttgatgctttcatctaaagatcaaatgctcttcacgaagtttcttagacttgacaaaccctct

SEQ ID NO: 85365 - DNA, 484 bp, Zea Mays
aaaatgcgtagtcacttattctctctccatccaagcatatgggagattgtggagaatggaatgaaatttgatagctcggatagtcctatgcttataaatgaacaaattcatagaaatgcacaagctactactgttctcttagcatctttgtgcagggaagagtacaataaggtgagtggcttggacaatgccaagcagatatgggacaccctcaagatctctcacgaggggaacgacatcaccatgctcaccaagatggagttggtggagggcgagcttggacgattcgccatgataaggggagaggagccaactcaaacttacaaccggctcaagacccttgtcaacaaaataaggagctacggaagcacgcgttggacggaccacgacgtcgtccgcctactactcaggtcctttaccgttcttgatcctcatctcgtgaacaatattcgtgagaatcccaggtacacgatgatgacgcccg

SEQ ID NO: 85366 - DNA, 722 bp, Zea Mays
caaaatcatcacactgcatttacttctgcaactgtagctactgttggattctaacaacaggaaaacaataatggcattcagtactgaaagcgctttctaacagaatattcgagcacactaaccacatatacaaggcattcagtgtttctatttggtaatgtttttctcaggagcgaccgatgaagaggggcgactcgaagaatcaggagcaacattcacatctgccactatgtcgtcaggaacaatcacaccaggtctcctcattaagattcgccccgcgcgaatggctttgtccatagctctgtcgcgctgggccctcaaagtagcggaagtgtcttcagcagccttgacagccagccgagcagcttctagctcctggacgactgatctcttggaagcgcgcagatccttgatgatggaatctttgctcgacaccaattgcctaaggcaaatcatatcatccagggactcttgcagcttataacgatgattatccaagtcctccatggtgaaacgatggctcctctccaagatagtcaacgagttgctggcatcgcgatataacttgtcaaggttgtcacgagaagttgcaagggcatgtttttcctcctgcagacaagaatcagttctccaacgtcaagcaagcattaagaacacagcagagaaagtcaagtaaagcttaattcattggccaccttttcagagtcaagctgagcattgag

SEQ ID NO: 85367 - DNA, 5666 bp, Zea Mays
cgaaggaacccccaaatcatgggaattcagttggtgacttgatgaaggattaccaaccgaagtaatctacagagcatcagtgggaaccaattcagcgtcaccagcagaaatcaaaactctgtcatcaggcgcgccggcctctaaggtgacctcctgacccgaagctcgtgctgctgccatgcaaccagaatgtggaggagaagacccgatgtaaaaccccaggatccacaaacaccctgaaatgctactaaactacacaactaacattcatatataaaatttcgacagcatctcctttggaaattttcataaacgtggaagcaacagagtataaacagatatcatgataagaaaacatactaggcattaataatctgctagcaatgggaagataaccataacgacataaactgaattaactagtgtgcacgactagttaaaaacaaacatccttgacaagaagtttctaattaaatcatggttgtgcctgggtagcgttattatgagagtgaaggtggacgtgctactacttctctcattcccaacatgaatcaagtacctgcattgagtaatgcaagagtgagatgaaacatctcagcaagtaaattattttgacgagatatttaaaccaaaagaattgaattaatcaacattttaaaagggatcacaattgagatcagaaatacttgtagatatagaactcaatagtctcaaaataaccaatgtcatctcgtttcctcgaacgaccacaataggttgtataacacttccctcttagagtataaaaccacaccatctgcaaatatcacttcaatgaatgcatatgaatgcaatgcatatgtcctctgccttcatacctctaagggtatgaagccgcatcgtacccctcctcgggcaacgtacgatgctaagttgtaccggtacggtcggaccataggtcacgacaaaacttcagatgtaagtgaatcatgcaatgtatatggcatgttgcatttatcaatatacttcacttccttcaaatacaatacaaacctcaaacaatacttcgtttaccttcagatacaatacaaacctcaaataatacttcgtttaccttcagatataatacaaacctcaaataatacttcattcaccttcaggagtgtgaattaatctcgtgggtcttactcgaatcatcatcatcatcaatatatgattaagcatcaatataatacaatcaagtaaagcatcaccatagagttcaattacgaaagaattcgatgattctgaatattagagtgtaggcgatgaaacaacaagtcaaaacggtagcaaccaccgctacattcacttgcgttcatcgaagaagaaaatgtactaagcatgatccggagcataaccacctgttgcggggcataaaacttagtacaaatatttcataaacatttgccaacaatcaacaaatcgttcctacgcttgaaaccaagacctggtgaaaagactcccaccctgaaccacatgtcaaacagcagcagcgctgtttgttaattttgtatctttaaaattataacagtggtggtatcaaacaaatactctaggagtatctacacaaaatactctacaacttcggtattcaatggataattaaattttgccatctataagttctaaaacatccgacaagataactgagtgaatctgttttagacagcagcatagttaaattcaaaattcgatatctcccaaactactcaaccacaaattatgaaattttgctggcagtaagaacatttatccctctaccaaagtctccatagttggaggagccaatttggcaatttactatatgaaacccaccagtgaacagacctgctcggtttttgccaggcaaacaggaacagccacagtaaaataaacataactggagtttcaaaattcatatgaatacactatttattaatctggaaagcttatgaaattatatacaacttctcttactaaccaaaatttcaattctgttgatagaattgtctaaatctcatgagaacagattctacacataattatgagactggaaaactgttataatcaaactgcaattactctctaacctgatgtccgattgagatgttctttgcggtcacggaatgatatctaaattatctacaactcataaatagactttttattttttttgaggcccctaagaccacggaaaactggtatgaataaaaactatcgaatctgtcattctgcagggactaatttcgagatcaaaaatctaatcccccatctaatccaacataaagggctaattgtagggcctaaaactcatccaaaacaaggtaaaacatccatcaagtggggacaatggagagaggaaaggaaatccaaccaattcttgaagaggaacgatgacgacgacaggcgagtgtgtgccctaatcttccctctcttctctcccttgttcttcctctcttctcttggggcaaggcacaaaaggggatggctgctagggtgggaggacgtggctgctagggttagggaggtataaatagaagaaaactcccccaaccctaatatccaatggctcagatcgaccgccacttgaaaaaacacattcagactccaaacaaggcaaactagtagtcgatcgaaatcgtctcaacgatatctatgcatctacggtctccgatcatcagtaggacacaccatattagaattttaaacatggtttggtttttagggtattatattctaccccccttaaaagaattcgtcctcgaattcagccacaaatcaagacattcaccaacggtaaaactcggtcaaacaccctaaatagactcatatagtagactagtagccttgacgagatcatgaaaagagtttttcaagaaataacctctaagtcggactaatttaccaaagaaaatgacacaccttgacaacaatcataaaacaatataaaacgaattcccaaggcattgtcataggtgcaatcaacactaggatttgccatcattgaatttggatgcagctatacatcaagatcaatgtcttaaaacaacactctttttatgaagaggtaatatgcactaagagcaacccttaccaacttcaacaattcattttaattcaattgtcaaacatccacaccagatgaatgtctaagaagatcaaacacctcacatcaaagcaccacgaaacaagtagttccattgaaacaaaactcctaatcttcataaaccttgttcttgacgtcatgaaaaagataatcatgtaatctaacgttctttacaccccacaaaaggtagaaagtctacagaactaatggagcaataaagccaacaagaagccaataacattctgtgcggcacagttcatcgaacaaatgccaaaaactctacaaagagcagtgacagcacaacaacaacacaatactttgcttaactaatgtcaccatacttcatccaacaactcaactaaaaaaatatccaaactagtaaggttaacctacacataatataagtcttcatctactgtagttcagaaacttacatttcattccatcctacgatgcactcaaagtaccagacatacatggtcaataataaccctgtaatccttcacacacatgacaaacatctcaatctgatgtaagaacaacatcatttagaaataggtgactaaccacacccaaccaactctaggctaggcaatgacttcattcaaaccaatagataagtggtccaacaatggctccacaagcatgcatcagggagataaccatcagatcctcaacgtattaatatataatcaatggatcaagaaaataaaagatttattctacaattagcatgactaacatgcaaccactttaaaccacatctaggctttgtggctactaaaacacaagatagaagggagacatgtaatccactctggctagctatgtaaagactttccccccaaaatccatataaaagtaccaatatttatttctttcagaactggtttctcggaataaacaatcattccttgcaaagatagttggagctatccaccaaccgccaaacaacttaaatccaaatcgatggttaccttgtaacccaaaacatgcaattcacactcctcttggaaacatcctcaatcaaacatatataacaatattattgtaataaaactcaaccatgaaaaacatgttgaaaacgacataggcatacatgtatatcacaagcataataacgacttcaatctcacaaaagaacagcgatatcaatcgtattaataaacaatatcaaaatttagaaatgaattatatcaggcattaagtcattaacaacataccacatcaccataaaggattagggatggtgaaattatttcatctgcacttcaaagacattaacatatatcaaagatatttgaacccacacccttcctatatgtgcaagtgtgtcaaatttatcttcaaattgccaagaatctaaagcctatgctttgataccaactgtaacaccccaggatccacaaactccccgaaatgctactaaagtacacaactaacattcataaataaaatttcgacagcatctcctttggaaatttgcataaacgtggaagcaacagagtataaacagatatcatgataagaaaacatactaggcattaataatctgctagcaatgggaagataaccataacgacataaactgaattaactagtgtgcacgactagttaaaaacaaacatccttgacaagaagtttcttattaaatcatggttgtgcctgggcagcgttattatgagagtgaaggtggacgtgctactacttctctcattcccaacatgaatcaagtacctgcattgagtaatgcaagagtgagatgaaacatctcagcaagtaaattattttgacgagatatttaaagcaaaagaattgaattaatcaacattttaaaagggatcacaattgagatcagaaatacttgtagatatagaactcaatagtcccaaaataaccaatgccatctcatttcctcgaacgaccacaataggttgtataaaacttccctcttagagtataaaaccacaccatctgcaaatatcacttcaatgaatgcatatgaatgcaatgcatatgtcctctgccttcgtacctctaagggtatgaagccgcatcgtacccctcctcgggcaacgtacgatgctaagttgtaccggtacggtcggaccataggtcacgacaaaacttcagatgcaagtgaatcatgcaatgtatatggcatgttgtatttatcaatatacttcacttccttcaaatacaatacaaacctcaaacaatacttcgtttaccttcagatacaataaaaacctcaaataatacttcgtttaccttcagatataatacaaacctcaaataatacttcattcaccttcaggagtgtgaattaatctcgtgggtcttactcgaatcatcatcatcatcatcaatatatgattaagcatcaatataatacaatcaagtaaagcatcaccatagagttcaattacaaaagaattcgatgattctgaatattagagtgtaggcgatgaaacaacaagtcaaaacggtagcaaccaccgctacattcacttgccttcatcgaagaagaaaatgtactaagcatgatccggagcataac

SEQ ID NO: 85368 - DNA, 351 bp, Zea Mays
taactttatgtcagatcccctggataaagaagtacataactgggtagtcatacccaacagcttcttcatcaactttctttacccagagagtggcatagaactgagccactacttcgtcgttctaggggtactccatagtcattatgtttttcaacctctttctctctaagttacggagagctgacgtcatgtcagcatctcccatattctcacacccctcccagtcaataaaacgatgtctaacgactgggtgcttcttagacatgatgatggaattataaaaatcagcctgaaaaaggtttcagaaccgagagtcctggacactaggatgtctgggtgtgagagtgggat

SEQ ID NO: 85369 - DNA, 193 bp, Zea Mays
cccacacccttggccgcagccccctcccatttcctcctccctcaaaccattgcagccacaccaccctaaaccctagccgccgccgcctctctccaaggtgaagccctcccgcgtggttctccatcgtgtggcgatctcaattggagtttggagggaggaagaaggaaggagaaagggaagaatcaaaggtgat

SEQ ID NO: 85370 - DNA, 921 bp, Zea Mays
gaaatttcgacagcatctcctttgaaaattgcataaatggggaagcaacaaagtataaatagatatcatgataagaaaacataatcgacattaataatctgctagcaatgggaagacaaccataacagcatgaactaaattaaccagtgctcacaactagttagaaacaaacatcctttgacaagaagcttctaattaaatcatgactgcgcctaagcagcgttattatgagagtgaaggtggatgtgctgctacttcccacttccctggatgagcaacaagcacctgcattgagtaatgcaagagtgagatgaaacatctcagcaagcgaattgttttgacgagatatttaaaccacaaattgaattaatcaacattttaaaaaaatcacaattaagatcagaaatacttgtagatatagaactcagtagtcccaatataaccaataccatctcatttcctcgaacaaccacaataggttctataacacttccctgcgtcaacaaaacctgcaaatatcacttcaatgtatgcataggagtgcaaagtgtaggtactctgtcttcatacctctgagggtataaaaccacatcatctgtaaatatcacttcaatgaatgcatatgaatgcaatgcatatgtcctctgccttcatacctctaagggtatgaagccggtacggtcggaccataggtcacgacccaacttcagatgcaagtgaatcatgcaatgtatatggcatgctgcatttatcaatatacttcacttccttcacatacaatacaacctcaaataatacttcatttaccttcagatacaataccaacctcaaataatacttcatttaccttcagatacaataccaacctcaaataatacttcatttaccttcaggggtgtgaattaatctcatgagtcatac

SEQ ID NO: 85371 - DNA, 1132 bp, Zea Mays
ctacaacttcttttaccaacccacattccaattctgttgataaaattgcctaactcttaagagaacagattctgcacagaattatgagactaaaaaactgctataatcaaacagcaataactttctgttctgatgtccgattgaggtgttcttcgcgaccacggaaagatctacaaattatctacgacgcatatatagatcttttatttttttgaggccactaagaccacggaaaactggcattaacagaaactgttgaatctgccatactgcagaaattaaattcgagatcaaaacctaaccccacatctaatccaacctctaatccttcaatccacatgatccacaacctccaaaagcacataattatagggaggaacaaggatctcatccttacctagggtttccccaagaaaatctgcaagagatggggtagaacatctccttgatcctctcttcctcttcaatccatcttgctcctcctcatcttgatccttgctgcgtggggggagatctagagggaggaggaagcagtggagggcggctgcaaggggaagggggaggggcggccaagggtggagaaaagggggggttggcggccaagaaaagggaaaaagggagggggcgaccactagggttttgtgggagaaagaaacgacgcctcagatgtctcctgactttgcatccaacggcccacaactctttccctcatccacgcaccgaagaccatcttttggtcaatatttttttgggatattacactctaccccccttaaaaagaattcgtcctcgaattcgaccactctaggcaaaacacccaaggtaccccatatagcaccaccattcgaaacatgggtccattattgttcttaattaacacaagaacttctaccttagactaattgtctaaggaaactacacaacctgacatcaagcatgaaccaacatgtaattaagctcaaatcaagttatagatgcaatcaacactacgatttcataacatcgaatttggatgcagccatacatcagcatcaatgtcttaaaacgacactcttttatgaaggggtaatatgcactaagcacaacctttaccaacttcaacaattcattttaagtcaatggtgaaacatcc

SEQ ID NO: 85372 - DNA, 161 bp, Zea Mays
ctagggtttccccaagaaaatctgcaagagatggggtagaacatctccttgatcctctcttcctcttcaatccatcttgctcctcctcatcttgatccttgctgcgtgggggggagatctagagggaggaggaagcagtggagggcggctgcaaggggaag

SEQ ID NO: 85373 - DNA, 223 bp, Zea Mays
aggagatgaaggaggcgctaattcaggtacgttgagctagacttcggttttcttttttttctttttttttaccggctgcgccggggctgtggtcttatgtgtgtcttgtaggcggctgacttcgcagaccacgcggcgtcgggggccctgacggcagctgtgtctgccgaagtcgagagacttcggacgcaacatgctgacgccgtccgggagaagtcggccg

SEQ ID NO: 85374 - DNA, 1157 bp, Zea Mays
cacaacccggacgatgtggcgccgacgtggcaccgagctcgacgccaagatctatggcgccgagctcggatgtgtaatcacaaagcttgtctagctcagtcggtagagcgtaaggctcttaaccttgaggttgtgggtttgagccccatcgtgggcgttcaatactttttgaaagggaattaggcttacacctctttcctaattgattttggtggttgaattgcccaacacaaataattggactaactagtttgctctagtctataagttctacaggtgccaaaggttcacaacaagccaataaaaaggccaaagatgggttcaaataatggagcaaaagacatcacaaaaggcaccctggtctggcgcaccagactgtccggtgtgccaccggacagcgtccggtgcaccactggacattgtccggtgcaccagggaactcgacgctgaactcgctaccttcgggaaaatgggaggccgctctgctataattcaccggactgtccggtgaagcaccagacagtgtccggtgtcacaccagactgtccggtgtgccagcggagcaacggctacttcgcgcgcaacggtcgactgcaacgcatttaatacgcgcctgcgcgcgcagaggtcagagcacgcgcagttggcgcaccggacagtctacaggatctgtccggtgcaccaccggacagcccagaggccccaccagtcagagctccaacggtcgaaccctaacgaccggatgacgtgactggcgcaccggacagtgtccggtggcgcaccggactgtccagtgcgccatgcgacatcagtcttccaacggccatattttggtggttggggctataaataccccaaccaccccacattcaatggcatccaagttttccaccttcaacacattacaagagctatagcattcaattctagacacaaccaaagaaatcaaatcctctcccaagtccggaatcactccaaatcaaatagtgactagagagagtgacatttgtgttcatttgagctcttgcgcttggattgcttcttttctttctcattcttcttgtgatcatactcaattgtaaccgaggcaagagacaccaattgtgtggtggtccttgcgggaactttgtgttccgtttgattgagaagagaagctc

SEQ ID NO: 85375 - DNA, 343 bp, Zea Mays
ggaatttgtaatcgaattgcagccaggtactgcacccatatccagaagatcatataggatggcacctaaggagctagcagaactgaagactcagttgcaagacttgctcaataaaggtttcattcgcccgagttcatcgccttggggttgtcctgctatctttgtgaaaaagaaggatcaaacgctccggttatgtgtagactatcgaccacttaatgaggtgaccatcaaaaataaatatcctcttccgcgcattgatttgttgttcgatcagctttctggagctaaagtgttttccaagattgaccttagatcaggttatcaccagataaggattcgtccg

SEQ ID NO: 85376 - DNA, 1626 bp, Zea Mays
gaaagagttacacaactcattaggaaccaaactagttcatagttctgcttatcatcctcaaacaagtggacagactgagagagtgaatcagattctagaagatatgttgagagcatgtgttcttgctttctcaacaaagtgggatgaatgcttaccattggcagagttttcgtataacaatggttatcaggaaagcataagaatggcaccttttgaagccctttatggtcgaaggtgtaggacaccattaaattggtcagagccgggggagagatgtttctttggacctgatcttgtaaaagaagcggaggaaaaggttcaagtgatccaacgaaatctgcaggtggcacaatctcgtcaaaagagttacgccgataaaagacgccgatctctggtttttcaagttggagatcatgtgtatttaaaagtgtcaccaatgaagggtgttagtcgttttggtgtcaaagggaaactagcacctcggtatgttggtccgtttccagtgatcgaacggtgtggacctgtggcctataaagtgcaactgccagagaatctttcagcagtgcataacatattccacgtgtcacagttaaagaaatgtcttcgagtccccgagcatgttgttgaagtttcagatgtcaaccttgaaccagacttgacctactcagaatatcccataaaagttttggatcaaaaggatcgagttactcgaagaaaggtgattaagttttataaggtacagtggaaccaacatttagaagatgaagccacgtgggagtcggaagactatctaatggagaaatttcctgagtttctagtcacttgtaaaccttaagttttgagtaaattatatttgatgtaaaccaacagggacacacccctaccatgtaagagaaaatgtaagataagttggtgacgcatttccttttccattacttggcctcgaaatttaatctcgggacgagattccttttaggggggaaggatgtaacacccctggtgttatgagaactaaaaatttgtcatgtcatcatatgcacttgcattaacttgtttgatacacctagaatgcattcattagggtaacaaattttcaaaagggtggattgtgtcatttcgaagagagcaagagaaattcagagacctcgtttgaaatctagtacaagcaaacaacttttaaaccaatggaaatttggacatgagctatatacaccaaagttgggtttgagcataaggctaaccttgctttcagtaggatgcaataaattgatgaaacacttgaagcagatcaagtccaattttaactctaaactagcccaaaagtggattttaagatctagctatgttttgctaaaagttcatatataaaagttgtggagcttggaaaagtgaacaattttcatatttgaagctctcctagtggtgtgggagaatttgaagtaattcgcaaaagttcagacttggttcattttggaatcagcccaaaacagttttgtttatctatttttgaatccctgtaacttttaatccatgagtattttgaaaacagttgctataacaaacctgtagagtaactataagagaacaatgtttatgaaatgtggtagccctaaaaccatattaaac

SEQ ID NO: 85377 - DNA, 417 bp, Zea Mays
aaataatacatttagttattaatagtaattatggtaatgacttttttaagtgtttgttatttatttgcatttgtaatgatttttggttgctcataattgattttgaatattgaacatcatttcttcttaaatgaaaaactaaataaataatataataattattggtccaaaaattaatattttatttataaaaacttttggtttaatcattatgaattttagggttatttaaaaatatatttcgaatttagaaaaaggaaatagaaaaaaagaaaaaaagaaaaaaaactaaaacctaacctaactaatggcccaaggcccatcaggaagcagccgccctgttgggccttgacctagccgccgccccatcctctccctggtagccgccgccccctgcacttctccccctcccctttt

SEQ ID NO: 85378 - DNA, 144 bp, Zea Mays
gggttcttcccttcctccttccttcttcctcccttcaaactccaattgagatcgcagccacacgacggagaaccacgcgggagggctgcaccttggagggggggaagagaaatgggggggcggctagggttttgggtggtgagg

SEQ ID NO: 85379 - DNA, 357 bp, Zea Mays
gggagaagttcctggcggttggggaaacaggaagcaggagcgacggcggctggcttgggagctaggcgcgcgcggctagggttagggatattgggctaatggggcgattcggctgggtagattaggattaggttttgtttttttctttttttttctaatttcgaaaatacctactcaaataatcataaaattcataataatcaaactaaaattatttataaatttataaataaaatattaattcttggactaatatttattatattatttatgtgaattttcctttaagaagaaatgatattcaatattcaaaatcaatcacgagcattcaaaaatcattctaaaggcgaataaata

SEQ ID NO: 85380 - DNA, 402 bp, Zea Mays
gacaaaatcgcgccgcacggcggagctccatgcaatctggcacagctaatcactcgagaagctctcccccatccttgaccttgccctcttgagtccgcactcgccgcactattagagacccgtattcctcttctttcgaagtaacccgagagcctggcatgacccaaggaaaaacacggtgaggaagagggaaggccaggagcgccgtcgtagccactgcgtgtgattgtcgccgttcgaccattgggggtatgcagggatcgcctgtgcatgcagattcgggataggaacctgccgtgatgaatcgtgggcgggccgccgtcaaattcctcaccgaagctcagaacaggggcgacatacccccttctcgtgggcggagctcggtgcaccatcaacgtcggt

SEQ ID NO: 85381 - DNA, 1391 bp, Zea Mays
aaaactcataacttgtaattcgtaactccgcatttagtgattcttgttcctatgatctcgtttcgatgtgtagattattattatgtattttgtattcatatttggtatgatgttaatttaacctttgtaccatgtttgtttctattgtggcgagtagacgagcaagtgattgaggatacaggtgttcagtaggtagaagttgctgagcaggagctcattgaaggcaagttgtgcccttgaccacatttatttacccaataatgttttctataatcaatttatcatgcataggcttaattttgatgggacccaataggtcaccctagttttgtcctctttacaccttgtttacccctgaacttttgggtagtctttgctattgctatatatggttttgggtgtgagataactattacacatggtcattctttattattgttctatttcttttcatgataagactattatgataattgggacatggagcttaacctgagaaacatgtgccaccacaagggtggaatgaaatgcccttagctgactaactaggaaagctagtggaggactaccttacccaaaaggggcaagggcagtaggggagtaggcgtgtagggaggttctcaagttgattttgctgcgatggtggtcaaacgggggattcctgcattgctcttcctagaactgtagcaggttttctaaagctagtggaactttgtaaaggcctcgtagtggatccctagccattcacctcagcagtgtctaagggccttgcaaactctggtttgacgggatacatgactttgtgggtacagggtacaacatctgcagagtgtaaaactggaatactagacgtgctcggggtcatgagtagctcaggactctcacatgattaatttatggaattaaattcaatttgtcatttgcattgcattgtggtttattgttaattttgatctattattactctggtttggcatcaacttacatttagtgactgctaataagacttgaccaacttattaaaagcaatgctcagctttaacccttatttgttgatcagccttacgcctcacataaactcccacctttggtgagttcatgcacattattccccacaacttgttgagctatgatcttttgtgagctcacccttgcgatatataaacctccacatgagaagaataggtggtccaggaggagccctacaacgaagagtacgatctcatctaggtggcgtctcccagtcagcttgatggcgccaaggaataatgtttagttcgctttattgttatcatttatttctgtaagacttccactatgtaataatgatacttgtgatatttatctctatacactttgtcagtatatgtgatgttcttctttggcgcaca

SEQ ID NO: 85382 - DNA, 7476 bp, Zea Mays
tggaattcggcccagccgagggagggggtgaggtttttccttttccttttctttttctaattctaatccctttcttctcctttttctatttttgtttcttttttattctttttctttggagaccaaaaatattttctaaatgatcttgagtgagaaacatagtctatgtgaggtgctctaattatttcaagtgtatgcacatgaagaggggttctaagggtagggttaatggagaaaggtaaaataaggggggaaggaatttaggaggttagggtttcaaatattgggtgggattttgggatgttacaaacctaccccacttaaaggaatctcgccctcgagatttagactggatttgagaaaagataagggtattccctcctcaaggagtcctcactctcccaggtagcttcctcttctccttctttgctccactgaactttacagagcttcacctctgaggtgcgggtctttctgactgctgaatcaagaatcttcactggtttttcacggtactgaaggtctttctgaatctgtactgtctcttcttcgatgtgactttctggtgcttgcaagcatttgcggagctgggatacgtgaaacacattgtggatgtcagacatggattccggtaattccagacggtatgctgcgggtcctaccctgcgaatgatgggatagggacctacgaaacgcggggctagcttcccttttacttggaacctcctgacaccacgcattggagaaaccttgaggtagacgaagtctcctttctcaaatcggagttccctccgcctgttgtctgcataactcttctgccgactctgagcttctagtaaccttctgcagatcagtgcaactttctcttccgcctctttgacaaaggcaggtccttctagtgctttttcccctacattggaccacatgagagtggtctggcatttccgtccatacagtgcctcgaatggcgacatcttgatgctggcctgatagctattgttgtatgagaattctgcgtagggtagactggattcccaacttctatcaaaagctaacacgcatgctcttaacaaatcttcaaggactttgttgactctttctgtctgcccatcggtctgagggtgataagcggtactgaaatctagcttggtgcccatagctttctgaaggcttgtctagaacttggatgtgaactgggttcccctgtctgacactatcttccttgggatgccatggagtctgactatctccttgagataaatccgggcaagggtggctcctccaaaggtagttttcactgggatgaaatgggctaccttggtgaggcgatctattattacccagatggaatcattccctttttgcgtccggggcagttcggttacgaagtccatgcctatttcttcccacttccattcaggtatcggaaggggttgtaataggcctgcaggcttttggtgttcggccttcgtccgttggcagatgtcacatcgggccacatactgagctatctctttcttcatccctttccaccagtatttggttttgaggtccaggtacatcttggtagttcctgggtggatggagtaggccgagtcgtgagcttccttgagtaggacctctcgagcctccccttttggtacacacagacggtatttgaactaaaggactccttggtcatccgtcctgaggtccgggagttgtcccttgcgggctttctccacaagtcctgctgtctcttagtctagacgttgagctttgcgtatgaggtcttccagcattggtttgacttcgagactgtcgttgtttcccagacatgcatttagttgctgattctttcttccaatcctctaaaaggttggttccttttaatccgaatggttttcgactgagggcgtcggctaccacgttggccttcccggggtgatagtgaatttctaggtcataatccttgatcagctccaaccatcttcgctgacggaggttgagatctggttgagtgaatatatacttcagactcttgtgatcggtgaaaatgtggcatttgtttctgattaggtaatgcctccatatcttcaaggcatgcactatggctgccaattccaaatcatgggtggggtaattctgttcgtgcggtttgagtaggcgtgatgcgtaagcaatgactttctcattttgcattagaacacaccctaagccttgcctcgaggcatcacagaagacgacagaatcttgatgaatatctggcagtgatagaacgggtgctgtcgtgagtttctcctttatgacctggaaactcccttcacattttggggtccacacaaatttatggtttttcttgagaagttctgtcattggtcttgctatgctggagaatcctttgatgaagcggcggtagtaccctgccattcctaggaagcttcgaacttcactgacgttggttggctgcctccattttgatattgcttccaccttggaagggtccacttctatcccttctgcggttaagatatgcccaaggaaggctatcttttccaaccagaattcacatttactgagtttagcataaagttggtgtgttctgagttttccgaggacgatccgaaggtgacgcttatggtcttcgcaattcttggagtagataaggatgtagtcaatgaagactacgacaaacttatctagctcttccataaacactttattcatgaggttcatgaaaaaggcgggtgcgtttgtcagtccgaacggcatcactgtgaattcatattgcccgtaccgggtgacaaatgcagtcttttggatgtctgcttccttgatccttaattggtggtaaccagaccttaggtctatcttggagaagtacttggctccttgaagctgatcgaagaagtcgtcaatccgaggaagcggatacttgttcttgatggtaacttcatttaacgatcggtaatcaatacacattctcatgcttccatctttcttggtgacgaacaggactggtgctccccaaggtgatgagctgggatgaatgtatcccttttgctgaagatctgcgatttgaagcttcagttctgccaactcggtcggagccatgcggtatggtctcttcgcgatgggcgccgttccagggatcagatctatgtagaactccacttctctttctggtggcattcctggtaactcttctggaaacacatccatgaattcttctaccactgatatactttctgtcgctagattgaacatcattgggtcactggcgggtggctgtgcctgacaagagactaactttccctgctggtcggtgaggaggactgtcttgtctgcgcaactgatgatgcctttgtgtttagttagccaatccattcccaggatcacatcaattcctttggatggcaagacggttaagtctgccaggaatattaccccacttaaaaggattctgacttgggagtattttagctggcatagaaggtcggaccctggggttcgggtgactaagggaatctccagaggagtagagggaatgccatgcttttccacaaaactagtggctatgaaggagtgggatgctccagaatcgaaaagtacggtagcgggagtaaattcaacaaggaactcaccgagcactactcctggagcctgctgagcttcctgggcatcgacgtgatttactcgtgcccttccttggtacggagccttgatctactggcggacggcggagggcgccttgggggcggatgctgaggtattcttggggccattcaccgagttggagtaggcgggtcctggtggcttcagctgcggacagttgttcttgaagtgactgggatcaccacagtgccaacacgcatttgccgggggttggttgcttgccactgagggggaatggaaagagctctgactttgctggctgaatcgtgacggagtgggtccagctggtctactgaagtttggccccttgggtggaaacccatatgatcgagtcttctggtgccggtcttgctgctgagcccggaggacttggaactttcttttgggatgccctttttcctcctcctttgccctttcaacttgcatggccttgttggacaggtgagagaaactgaggaagtcttggctaccagaattgtcttgagttctggcctaagtcccttcaggaaacgggccatcttcttgccctcggtactgacgtcatctggcgcatagcgggctaattccgtgaacttgtgcacatattcgctgacagatcttccgtcttgagtcaattctcggaactcgtcctccttaacctatacaagtccttggggcacatggtgctcccggaaagctgcttcaaattccgcccaggtagcatctctgatggtgacgttgaaggtgtcccaccaggctaaggccatcccggaaagttgatgggcagccagttgaacacgctgattttctgggcaaccgatggcttccaactttcttttgatagtgcgcatccaatcgtcggcatcgaggggattgctcgatccggcgaacgtgggaggcttgagtctcaggaaatcccccattctgtcttgcggtcttccaccatttggccgttgattttccagatttcgagtgaggacctcgatgagtcgggtttgattggctagaacttgggctaggtctaagggtagtggtgggggtgcggggaggtgggtttcactttcctctctaacggcttccccttcagctctcaggggaaaccctgctccaatcccggaggcggtaggcgtggttttatccgaagccatctgccaggtaagagagtcactaacatgcacatgcaaattgttttcaaccaagttattttattcattacaccagcacaatacaagcataagactactacaggtggagctacacgagagtgttccccgaggtactaccgaacaccttctctaaggtgtccccaaactccttgagaagatcatcaaggcttgctagggatagatcctcggcgtcggaccaatcatctaccctggggggaggtggggctggaggggtcttcttcttcttcttctccgtttggcatcctcggttggtggtcttcttctggattttctttttgggggcgagcttctttagcttcttgtcatagtccatctttaaggttcgataagcctcacgggtgttggcctcctcgccttctgctatgtcgagacactcttggagggatgccttctcttgcttaagttctctgacttgccgctctaggctttccacccgggagtttaggtgggtgcagtgggaggagaggtcatcgtagtggttgtcgagggtgtggaggtatccggccatgtagacaatggtggggtcatcctcagtgggatctctccctgacagagcctgaagtcttttcctccaggtgggggtatttttgttgctgggtgggaaataacgaaggggggtttcagagatctcttggatgtagttttggcatagctgtttaagggcttttcgggctacactttggcaagtgtctgggaagcggtgtccggtgaagttgacttggaagggagggtggtttgggtagtttcggctttctcccaggtagactgccttagagcacttttctatactattttcgtggtattccttccagacatattcgggcttcttacggatccccatgcgtagcgcacaactccgtaagaggtgagggaatccttcttcccctgagcaataggatgtcctaataacctaggagtcttccatctggtagaagaaaagaagggtctgttaatatcggggaaaggggagagtgcttcttgggggtaagaggtgttttcttgttaaggcaactttttaaggtcagggctgcggtctacggccagtcctacaggctctgataccacctgaagcatcccgatcctttgggactcaaatgtgatacaattactagtcccaggaggctagtaaccacattcattacttcaaatggttacagagtctgaataatgttattacaataccgagagatacaagctcgaaagtgagccaaaaaacataaagcgcagtggaagataaaatagcccaggccacaggcagaactgggtgaagacacagccccatcaatcaagcatagcagaaaagaagtcttcagctgctgaaaaacataaataaatctgggtgaatacactaggtattccgcaagcccacccggctcccgtaaagagaaagtgacctataaggtacatgctttatatggtggagttgaggtcactcatgctttttcagagaaaggcagtattcgttgattatggttttcccaagacaatagaagtaacacttacttgaccaccactgagcttcctgctcccgtggtaccactttcctttcggaacatacacacacatttccctgttcccggttgtagtagaaacactaattgtcataccataccagactcgtccataccagtggacacggactattcgaataggtttagactctgcgcagaggggtacactttacccactagtccggctctgcaatctcatggccaatgagacccgaatccgaaactctttccttccttgtacgtccgaaccttaacggttataccgaaaggagtcaggccaccgccatgtccaaaccgaacaaaacattccccctccttatcctcccggtgctccccagccttcataaccctggggttggaccgtatgagttcagatcgagtggctgcccacacagcctcgagtggttgtactttttgtgagtacaggtaatgaaagatgacaaaccggtccttatacgagaggacaatccttctactcacgcctgaaccagctgagccaacaccttaggccctcccctaaaccagggagtccctgatcatcctactcaccaggtgacgagggtgagtacccttcatcgcacacttttggaaaacatgtcacttatacccttttacttgccccatatcttttagtcaaagtaatagttaatgcgggcttctctcatgctcaccatgcaattcgattcccatcccataatctaggcttaggcagtggtagagagaaataggtaaataatgcatcaagggaaggatggacttgccttcgtcaaagctttcctggcacaagaggttaatctcggaggggtcgggctcttgcccctcttccggagctataagttccggaggatccgatccctcttccgctaatcaaacacagataataacagtacatcaaacatagtgaccttgtggggtgtgcaaatttttatactttattatttttgtgccctaataatttatttgaacaatttttggtgcataaaatattagcatctaaatatatatgagaaaatgggaaaaagaaaagggaaaagaaaagaataaaggatttccagccagctgggccggggggtgatttttggcccaccaggcgcgagcgcgcgcgggggcgcgcttgcggcccagttggcccggctgcgagggag

SEQ ID NO: 85383 - DNA, 6268 bp, Zea Mays
ggaagcggcgcgagagggaggggatgaggcgctgacgggtggggcccgggtgtcagcggaagggagccgcgcgcggttgggccgcctgggccgaggagagagggggggaagaggtgcgggcgcgcgtgggtttggctggaattcggcccagccgagggagggggtgaggtttttccttttctttttctttttctaattctaatccctttcttctcctttttctatttttgtttctttttgattctttttctttggagaccaaaaatattttctaaatgatcttgagtgagaaacatagtctatgtgaggtgctctaattatttcaattgtatgcacatgaagaggggttctaagggtagggttaagggagaaaggtaaaataagggggggaggaatttaggaggttagggtttcaaatcttgggtgggattttggaatgttacagatttgcagtgatttttccatgatgaaccactcaagacgtcatcccttaatgctatccttgagggggatatcgagatactccactttcctcccccgtcgaagctctaaacttacgccatcgacaagctgatgctgccctccagccatcacggaccgacagtgatagagatacctccagagtccgaagtgggggagaattccaagaaaagcctcgcacagatgtacgaaaatggcaacttgaagaatagagttagggtttaagtgtgtcagattcaagtcgtaaaaatcaaggagaccacggaaaaaaggagagatgggaagagcgagtctgcggataagaaacgagacgtaaacaacagattcatgggtatcctctgtcagaacagtgaccccgctgcagattcgccaagaacagagttcctttggcggcaaaaccccaatctcaacaaggtgaaggtcggattcagagataatagacatgtgattaccagcaaacggaagctggctgttgggatcgatgggagggatgatggcagctgcctcttccgcttgggatccattgcaatctctcgggcggaatgagcgggctcagaattttgcggaagcagaggagcggctgaggaaaaaagagaagttagggctcggaaatcaaaatagcacgtcggcacgagtataaatgggtctcttggatctggcattatctctaaagtgccagatcaccactcggagaacctcagtcatcagctattgtgtcccagttacctgatgagattgttgagtatttcaggagacttaacctggggatagttgctcacactgaaggagttactattgatgtggaacctaccttggagtaagaaatccacaaaggacaaattggtgatgctaagatacaagagattaaggatctgattactgagggtagaggtccagagtttatggaggatgagcaaggcaccatatggttcaaggacagaatatgtgttcctgatattgaaagccttcgtgagactattttaaaggggtcccatgactcggattattccattcatcctggtagtaccaagatgtatcaggatttgaagcagaaatactggtggtatggattaaagagagatgtggctacacatgtggctatgtgcgatgcgtttcaaagagttaaggctgaacaccagaggccagctagactactacacccgcataaaatacccaagtggaagtgggaagagattggtatggatttcattactggattgcctcgcacctagaaaggatatgatgatatatgggtgattgtggatagattgactaaagtagctcattttattccgatcgagactacttataaaggctcacaactggcagagttatatatggctcggattgtgtgtttacatggagtaccaaagaagatcgtgtctaatcaaggttcatagtttacctcaaggttctggagaagctttcatgagaatatgaatacaaagttgaactttagtacggcttatcaccctcagactgatggacaaaccgaaaagactaatcaagtgttggaagatatattgagagcttgtgcccttcagcatggaggaagttaggataagagtctaccttatgctgagttttcatataataatagttatcaggccagtctgaagatgtcaccttttgaggctttatatggcaggaagtgtaggactcctctatattaggatcagactggagaaagacagttctttgggcctgaactgattcaagaggcagaagaacaagttcgtctaattcaggagaatttgagggtagctcaaaccaagcaaaagagctatgctgataatagaaggagaccattggaatttgaggaaggagattatgtttacctcaaggtgtcaccacttcgtggaatgaggagattcaaagtcaagggcaaattgtccccttgctttattggaccattcatggtctttaggcgagttggggagatggcataccaactcaaactatatgataatctatcggatgtgcataatgtattccatttgtctcaacttaagaagtgtctccgtgtccctgaggaacaattaccaatggaagagctcagtgttcagggtgatctaacatacacggagtatccagtcaagattcttgatacattgactcaaattacaagaaataaggtgataaagatatgcaaagtgcaatggagtcaccatggagaagatgaagccacttgggagcgagaagaagagcttcacatagattttccccatcttttccctagaccttcttaaatctcgaggacaagattcttgttaagggggtaggatttgtgatactcaaaagtgtaataaagagaatagagataatctcaatagtttgtggcctctactattcattacatgtgatcaaccttagttaaaagtggaacaagaacaaggaacacataaataacatatgcatcatgctagaatttttattgtgagtgcattatttgtgataatataaaaataacataaaaagaaatattttaaagtccaaagtagaatttgacatataaaagaaatccaagaaaaggaaagaaagaaaattttatgtgagtaaaaataatataaaattaataaataaaaatattatttctatactagaattttaatgtgacacctgactcaagggtggagctcataagcagattcaaattcaaatttgaattaaaaaatatttatgaataagaaaaacaaaaaataaaaattaaaagaaaaagagaaaagaaccccaactgggctcactcttgcgatttctgcccaacttcgccctcccctccgcgcggccaggtgaatgcaacgcgcgcgctttgggccgctggccggtgggtccgggtggactcacaacccgcatactcgggcatgggagttgtctcactaaagcgtgggtccgaagggcggaacggtaactcgcgtgctctgcggactcgtggggacgctgcacaatgggacccatgcatcagcgctccttcttcctcggatcgtgacgacgggcatggctttcgagcgagctgaacggatctcaccgccacgactggcgtagggttcactcggactgttgggatgttgaccgtataagtgcgtgcgctcggtgccgagaccactcctcgccccacctagccacatccacgccgccgtcgagattctcagtgcgccgccaccagagcgtaagggagagtcgctgctgttgcattttccggccacaatcgtagaagctgtcgggctgtgaagctttgtagtaccctctggcggacacccattgcaactggtggcggatttagccatcagggcggccccgattgctcgtcgtcgttcaaatccagccacgggctgccattaaccgcggggcatcctctctccatctcctttcctggtaagaattcctctctagggttcgctattcactctgcaatgcgtaggagcttttggattgggagattgggtcgtgcgcgcgcggaatggttatcttgccggtgtgggcgcgccgcgggctacgggggattggtcgggtcgcttggtggccattggatccaccaaggatggctcagattagaatcaggacaccgtttcacgtaattgtgatctgggccgtagatgccaaattggacgagtgaagctgggactcggttatgagaagcgcagacgatagatctttgatccaacggtggggatcacgtaccgttttaatttatgtaagatctaatccgggccatcggttctggaactagtggccaatatcacaccataccccttcgctgaggtagtttagcataagagaccctaggatctttatttatcaacccgccatcctatgcgactgttctctgtgtcttacgaattttaccccgaaccccctatctttcctggtaaatgaggcccagtccagtgctgatttaaattgaataaatgaattagaaaatagatttttaatataaaataagtgctagaatgtgtataattcatagaaaattcatatgaactccgaattgatccattccagtttctaaaattttgtaaaatattatctagcacttagaatctctgttttgacatgaaaacggtaagaaaaataatttctcacttaatcctattttaagcacataaaatctttgaaaattcatatcttaaaatctataactccaaaaattatgattcctgttcctaggattttattttaatgtgtagtttattattatgtattttgtttacatgtttggtgtgatgttaattttctctatatattgtgcttgtttgtattgtggcgagtagaagagcctgtgactgaggatcctggtgcccagcagatagaagtagctgagcaggagctcattgaaggcaagttgtgcccttgaccacttttgttacccaataatgttctttataatcatttaccatgcattgacttaattttgatgggacccgataggtcaccctagattgtttatctctttaccttgttatccctgaatcacttgggtagttttgctattgctttacatggttttgggataatattttgttatatccatgttctagttattttgttattctatttatgttcatgtcaagatcattaatgttaattggaacatggagcttaacttgagaaacacgtgccaccacaagggtagtatgggatgcccttggttgactaattaggaaagctaatggaagactaccttactcgaaaggggcaagggcagtaggggagttgcatgcaaggaggttcatgggttgattttgctgcgatggcggtcagacaggggattcttgcaagtgctcttcccataaactgtagcaggttttcagaagctagtggaactttgtaaaggcctcgtagtgttgccctgcctcgcttccttggtagaggtgtatgagactcgcgatcccttggtagatgggtaacatgacttgtgggtacagggtacaacctctgcagagtgtaaaactggtatactagccgtgctcgcggtcatgagcagctcaggactctcgcatgattaatttatggaacttaaattcaatttgttatttgcattgcatgggattatttattaattttgttctattatttttattaaggtttggtatttacttacatttagtaactgctaataaaattttgaccaactacttaaaagcaatgctcagctttaacccatgttgttgattagccttacacatcacatgaactcccacctttggtgagttcatgccactggttccccacaacttgttgagctatgatcatgtgtgagctcactcttgctgtctcacaccccccacaggagaagaacaagtggttctggaggagccataaagcgaggagtttgatctgatctaggtagcgtttccccagttgacttgcgccaaggatgatccttagttcgttttatatttaccttttattttgtaataagacttccgctatgtaataaatactctgatgttattgtgacatttatctctatacactctgttattatatatgttgtcttcttggcgtatgtatgagatgcacccggctttgttccttaaagtccgggtgtgacaacagcggcgtaacacactcaacaacctccacaatactttttcccttgtctaggaaactaaaatctccctgcatgggctcaatcatcggaacctgcgtaggtaccaagtcagtgtcagtacacaccccgacatgacatctacaaaagtattcgacccccacccttacacatgcacatcaccctaaacttcgccagcagaacggtgagaagtctccgtagcgctgggctcgcctatat

SEQ ID NO: 85384 - DNA, 1062 bp, Zea Mays
catggttttagatcaaatgtaatcagcctagaaatcaagcatgaatacaaatagtaaggagctgtgtactaaataaaataacaaaatttaacacatgtaaacaaccttaacaaatagagatataattaggcacaaatatatacttgatgctgaatttaacaacacactgaaacccagactgtcacgttgtctcactacaccgctatcatcaatgagcatacaaatccaccaacaatagtgcaatcacacccaagtatataatactagcagattgtacaaaattaaatagtaaataaagtgaggcaacgggcaactcacaacacgtagattgtctatgtgggaagaccaactcagcgaacatgaagttctgtcccagaaaaccaataccgccgctcacgtccgagcccgcacatcgggaggttgacagagatactagagccgctgtgaggccgtgggacatgtccacagcaccaacccgagaagaggaacaccgcacagtagggagcccaaacaccaggccacggtggacaataaccagaggaacacatcaccacacaggcacacaagtgaagcagtgagtatgggagaaccgcactacacaagagcagcaccacctccaccttcttccaatcaccaccagcaagatgatcacaagatgccatggaccgaatggatccgattggaaccacgagcaggagagaggagtagagaagctgtgttttcttcctgttccaggggattgacagcccataccttcaaggagacgagaaggggaggaagctaatggatttgcgagaaatccggaccacgagccgcagctctcggtgtccacacgcacaccgccgccatgatccagccgccgttccttccccctgcctctgcttggatgaggcaaaaacttccccacggtggctgggtgccctagctccttatccaaccggctgggctgctcggcctttgggccttgaagtggccagttcaccttttttttaaaaaaaggggaaaaccccaaactgaacaacactttgtactagtaccacttgtcctacatgcaagtgtttg

SEQ ID NO: 85385 - DNA, 281 bp, Zea Mays
gtttgtcaggtgcggcgcgggcgcgcgcagctgggccgcttgggtcgggggaggagagggggaaagagcaggcgcagcgcgacttgggccaaaatcggcccagccgagggggggagggttttttcttttttcctttttctgttttctatttctttttttgtctcttttaatttcattttcttttgaatcaacaatttgctaaataatcttgagtgttgaaaatagtctatgtgaggtgctcctaacaactcaagtgtatgcacatgatgagatgacctaag

SEQ ID NO: 85386 - DNA, 317 bp, Zea Mays
cccggtttgacaggtgcggtgcgggcgcgcgcagctgggccgcttgggccgggggaggagagggggaaagagcggccacggcgtggcttgggccaaaattggcccagccgaggggggagggttttttctattttcctttttctgttttctatttctttttttttgtttctttttgtttccttttcttttgaatcaacaatttgctaaataatcttgagtgttgaaaatagtctatgtgagatgctcctaacaactcaagtgtatgcacatgatgaggtgacctaagggtggagttttagggagaaaataaaataaga

SEQ ID NO: 85387 - DNA, 1835 bp, Zea Mays
atgtcacatctttactatgtagtatgagttctatacaaaataaataaataaatacatcataaggagacaacgatccagcaacccaaagttgactggtcggcctagacctctcatgaactcgtcacagcatcctccatgcgcctcatcctgcggtacctgttcttgacctgtgggggtgtgagacagcaagagtgagctcacatacgttcatcgctcaacaagttgtggggaataatgtgcatgaactcaccaaaggtgagagctcacgtgaagtgtaaggcttaccaaagaggatggttgaaactgagcattgcttttaaagttggtcaaaattttattagcaattactaagtataagtgaataccaacccaattaagtagtagaacaaaagtgataacaacacctgcgatgcaatgcatatgacaaattgaatttagttccataaattaatcatgtgagtgtccgagcttactcatgactgtgagcacgactgatatacccagttttacactctgcagaggttgcacatctttacccacaagtcatgttacccatctgccaagggatcgtgacttcctatacacctctaccgaggaggcgacacaaggtaacactacgaggcctttacaaagttccactagcttcagaaaacccgctacagtttctatgaagctccaatgcagggacccctcgcctgaccgccatcgcagcaaaatcaacccaatggcctccctacactgaccacttccctactccccttgcccctttcgggtaaggtagtcctccactagctttcctaattagtcagccaagggcgtcccataccacccttgtggtagcactgttttctcgggtggttctccatgttctaatcaacataatgatcttatcatgaacaatatataacaaactgataataaaagtatgatcacgaataatgtatatctctatacccaaaaccacacaaagcaatagcaggtactacccaaaaattcagtggtaaacaaggtataaagatagtcaaactagggtaatttgtcgggtcccatcaaaattaacctatgtagatcattatgattaataagaacatgagtgggtaaaaaaagaagtgaccaaagggcacaacttgcttgggacttgagattccaggtactaacttgctcttcaagtgattcgtaacctcgctgctagtcgtagcaatacaaacaaacatggtataggcaaaattaacatcacaccaaacataagaataaactgtgtaataataatctacgcgtcactacaaaaccgtgggctcgtgaatcactaacttcggagttacggttaaggagttatgatttatggaagataaatgtgatttaaatattaaactatattataaattggttaatatacatcatatgagaaaatatactccaactagttaagtaaactttaatccagattataacttgtttaggaataatattatagtcaaatcactatcatggtctagtttaactttggttaaaaggtataatctactgaacataggctaaacaaatatctaattataaaaatatgttctatggtacaattaatattgccactgcgtagacaatatttttataaagctaacacaatttgaatggatcaaatcagagttacggttctcaagttacgaatttctaaagatttagtagtggtgtacaaaagaaattaagtacaaaatttcagtttagatttcataacaaaataaagttactggatgataaacaatatcaatacaattctaatgcaattggaatgaattaatttggagttaaaatggatttaatacgaattaaacaagttt

SEQ ID NO: 85388 - DNA, 1661 bp, Zea Mays
catcatttcgcccaagagctcttcacccgtcacgcagatattacatcacatcggaggaaagaataagcggaagcaaattacaataatttaatttacattcatcaaatatagagagagagtatttacaataccagggtattacgagtgcataaagtattattattacagaccagggaggcaaaacactctcccgcacacaagtttattgttttaaagtgggaggccaacatcctcgctcgaccacttcactgatggggctcttccttgggtaccacctttgaacaaaaacatcaaaagtctgatgtttcctcacctacaacaacatgggttcgaaaaccctgagtatggagtgtactttcgcaagtcttacccgacaaaagaaaaagactctcaaggatatgctggcttgagggggtcaaggtaaggctattcaagaatcaaagactctgtttgcagaaatggttactatcaatggatccttaaaaatccagttttattatcaagttaagtcattatctgcagctagagttctttctaccctagttcaagcacttggcctgtgctagccatcttttatcaccctttttctttactggattactacgtgtagggcagtgaccaagtcttcatatccgaatcgattaatacccaactggggatctccaaccacacgacatatgtagcacttaacccttgcatatgtcaactcgccaccgggtttctcaagactagaccgggttcacgccaaccgagagcacagatacaccaccgtccagcctcttgccacggagggcacacgctactctcgccatctctccactcccattgcgtgttggcctttctagtattggtctgcccgaggcaaagcttacccatgacgaggcatgtggctagttaaaaggtcctcaatcatcaagcctacatcgatacggtccttaatcgactcaggcggagacactacacttagacttccttctcgtgcaagtcacccgcccggtctcatctttatcattttcaaacccaaaatttggtacctgacagaggtacatcttgtctgatgttgaacccatcacgaccatgatggatccacaatcaagttttatttttgaaaacatcccattccatctgaagcatcatcttttgttaaaaacaaaacatttgttttctaaaacaagactaagcattagaaaaccttttaataaaacaggtaatcaaggaagggtaaacagttccaaggaaggaaatgcaacaattggttcatcacccaacttctatcacctaatgcatcattcaagtgataaagagtttaaaatcacaaggaaaaggtaaatgcaccgaggcttgccttgtgttgtaggggattcgggatctgttccacagatatcgaaataaaaactattcccgacaggtggagtctgagttggtggtgtagtctctccttcttcgacacttacttcttcttcattttctatacataaccatatataaacatgaatgctcatgtgatgctatgaatatgcagttatattagtgatacatcaagttgtatcttgaatacaactttccttcacgacacacctaagttactagggtcttttgggttaacaccctagtagggttaggcagttttattctaagaaactagggttttggggttttgg

SEQ ID NO: 85389 - DNA, 4019 bp, Zea Mays
cgcctcggttcggcagaggccagcaactacggcgcctggtccacagcagcagccaccacggctcgctagcgctaggccgacctagatgagatgcagtgagctgatgggagggatgggcgagcaagaataggtacagtaaccgagagccgatcttgatttattccttatgtcatgaattccttttatttacacccacactttctaactttcgtacagggctaacttatgtgctcatgctttacgaaccctagcatatgtcgcaaaaaatccttacctaaagtaataactaactctgcaacctcttcaagctctagatttcaattcttatggcctaagaagtgtttttttatttcataatataagctttcacaacaatcaaattgttggagtcagattctataaatacccaacatttactaacctacatttttttcaattggtgccatgaccatcacataatgttgatgagctattctttccaatttgctgattgcatgtggattaccatgcatggctatttgctatttggttgtcccgacctttcttaggatctattggatgtagtacatattatcactatttagctaatatttgctaactactgcctagcagagtggatagtaggttgtggtgttcagatccataactaatggattaattaataagtggagagtaatgttcctgttagtccccattatttgggtagatagtaagataatggggatttagaaacaatctaaagtttattcccatctgttatctagacctatttatatccatatagctaaagtttagcatattgctacatcctcattattagtttggagccaaacatgtactgattgtataatttaaatgtttataggagtaactaatttgttttagctttgctattttacgagtgtcaggatgcttaactatttcatacttgctttgtaggaatgttcgatgccgacaacatcttgctctaccagaaggtaccagatccaaatcaagaaccaaaatttaggaaaaaatacgaactgcaaccttatccgtcatctttagtaattcatgtgtttatcttatttgcaccaagaactatgctggaggctataaaactatgaatgttatgtgtgacatgtaaataatactagcttgtacatgcatctaaatgcatataagaaacacaatgcaccttttgtttgcattccatgtaaattatagattaaatccgaacattacaaaattacaaaacacacacacaacactacgcgcgctgcgcgcgcgcaagacactagttgccaacatgagatgacgaattggggtgagtcctggtccgtttatttttcccttttttatttccctaaaataaaaggacacttgatacattatcgtcttcctagtttaacctcgcgatgaatgaatcttctgcgcgacttggcaacgtgtcatttggcgagattacgcccttgtttggactgactgctgagatacgtgtttggttgtccatcatgtcgaatgattggataaatatcaggcgacggcgagaaaagcgggcacacgggcgtggcaataatgcagcaagtggcggcggcggccctgcttgcgccggggccggctgtgcgaggcgtcgctttgcacccgtgagccgagtgccaaagcaggggaggagaccgaccctagcgccccgtcatcccttttgagtctttggcgtgaccagccatgtggggccggggctccgggaaatgaaatcaagggcagcgcggcgactcggcgaggttgagacgtttgcatggctcggaattgctttttcttgagaaaaaaaaaaacaggagcctaaccttgacccggtggtgactttggtacgcaaaaggctgatcggcccatcaaaggccccggcccgaagcatccccggttccccacgaagctagatatatatacgcgggcccgtggcagttggcaggttgtgcccagtagcagggcctgaagtgatttgacggtttatgtggcgggtggccgggtgctgcggtacagggacagcgggttttttttccgacgtggcagatatgctgggcccgtacacggacggaatctactggaggggcaaccatcagtcatgccctgcactgttcaaagtcacaaatattctagcatagtctatgcgtgtgtgtggtgatcaggttctggtacggaacggacgacggcaaaaagcctcagaacgttcccgcggttttgcttgtccgggtcctgatggatgccgcgacaaaatgatgaaaagggaaggacctaataacaaagctagcctttgcgcgcaacaaacgggtttcacatggatattgctgcgcctccgggttatttattttctaaaagcgacgggaggtctgcgtgaacaacagaacaagaccaggcccagccgatacgggtgacgggtcggatggttcagcgcatgcgtggccggccctaaacacataccagtaggctgcagatgcagtgacagcacaatgtgtgaaggagatgtgattagcttccctttgacccagggtatgtatgctgtcaaatcgacccatcatcttatgtagctatatagcgtggtgggcgaatatataaggccatgtgtttggttcctctctctagtggctaaagtttagtcaatctcaatctctaaactaccaaacagctaaaagaagtcccctaagatttagtcctttagtcacgaatggggtgtctgaagttgactaaacttccacctttttcagtatctgcccctcagcagtgcagcgcaggctagaattggaccaccttattttgtctttataagagctagtttagaaactctatttttccaagagatttctattttcccaaagaaaaatgaactaatttcccttgggaaaataaaaaaccctatagaaaaatggtgtttccaaactagtcctaagtaatatataatgctctctaatcagttttagttcttaaaaccaaacataagtattttagagactaaaatttagaagggtgactaaagaaatcaaatactacctccgtcccagaaagaatatcgtttgactttttttagaccaaatttgaccaatatttcttattcaaattatttctgaaaataagaaaaatttattttatagttaaagtaaatgatatgataaactaaatcagaatgaaaataaatgataattatgagattttttaaataaattgagccagtcaaacttgatctcagaaaagtcaaacgacattctttctgggacggaggtaataggacctaagggcatgtacaacatatagactctagaacggtttttcaagtacaagagacagctaagagaatatacgatgcaactctaagcctttggatcataaatgcagtcaagggatatatatatatagaaaatcgtgtaaagacaggctattcgcgaagagattgtctgttgttcagctatattaaatggaattgcacatgccctaacataattgctaccattaatcattgtcccattattagcccttaacccaaatatgtggatgagcttgcacctagcatatacatattgctgctgtggtcagctatatggatcgcaattgacctgatgcatgactacctcgatgagcagcaaactagctagctaggctagaaaagggtgataacacgcaaactaaaacatccatcccaccctcttacgttggtgaggatgagattatatattagtggtgaaaatgattcgtcataagaactgctagggaacgttctctaggccgggctggagaaagaaaaagtcaagcgcttacgtggccgcacagcttggccgctcggagattccttaccatagcacctgaatttgtcgatatatataggataggaggaggaacggggcacgcgtacgcgcgcattattgtctactttggtacgtacgaccatcccactcccatgacgtgatacaggataggaggaacttgcatgacaccatgagtgatacaacaagagatgggtatttttggcgcgtagtagtgcggtgcgtacgtac

SEQ ID NO: 85390 - DNA, 215 bp, Zea Mays
gtgggatttgggcatgcagatggccgtggtacgcaagtcgatcgaggagtcctagctagctaggcgtagacgaaagcacggccatgcatgtatatacagatgtatgtgtcatgcattttcttaccaattcggctgcccttcgtctttggtacgtagcagtggcacttcaggatataggagtgtgttttgtgtcttaaactcctagcagcgccgac

SEQ ID NO: 85391 - DNA, 293 bp, Zea Mays
ataaaatctttgaacatcgatttcctcgctcaccatatattctcctttttatcttaaggatggtgcgtcgtaggaatctgtcagttgttgaatctgactccgatgatgacgctcaagagattcgtgaagaaactcctccgcggtccggatccaagcgcgggcgaggatccggcaatgtgatgcaaggtggtgaggcctcagggtctcatggtgctcgcggtcgaacggcccggaatccctcaggtcggtctcgacccgcggccaatccacaagcctgggagccaactagcgat

SEQ ID NO: 85392 - DNA, 316 bp, Zea Mays
caaagatatattaactgggaaggatgtgaagcaattggtgatccagagatgacacaggctttgagggcctgtgagaggaagaggatgaagaacattatgacattccaatacgattggaatgatgaagttattgcttagttctattctaccctttggatcaagctggctgatgagaaaagtccttataactttccttatctcaatttctatattgaaggcagctggtataaggtgagctaccggaggtttgctcacatccttggattttctgatggagatattttaggcgacaagattaagattcatgactttcgtc

SEQ ID NO: 85393 - DNA, 2703 bp, Zea Mays
ctgctccttgtcatgatggatttacagtgaagttttttaagtctttgtggtatctgataggtggtgacataaaggaaacgttagatgagttatatgcaggccttggataattggaacagcatgatcagacagcaacaagaatggttgtttcagacaacaacaagaatgcactttcagacaacaacaagcatgatcagtcaacatatttagtgtactaacttcagaaaaactttgagcagataaatatggctggtataaagtatatcggctcagttccagataagctgctgctctgttgcagcaatatgttgcatttgtgtcactcaaattgatggcctctgagtaaaactcaattgctttgatccactgtcttcttttgaaggcgctatttccctgtcaagggaattcacactggtttagtttaaaatgaacaacatgagctgaagaaatgaactcggttgctttaaattagtgtcattgtatgccctttcaagtctccatatcccacttcttttaatccagaagtagacataggcgatgaaactggaaaaaggatctacatagtaatgaaactaattcaaaaattggaactaacagattaacattggttattcattgcgctctggatggcaaggttacatggattttcttcaagaggcaataaaatgtggtggaactgcccgaattattccaacttaagtgcctaagtcccgccttagaggctagaccacacttaaatgggaataacccgtcaatccctcggatctagtccgacgaggccactgacaggatcaagtaccacattctcactcgatggtgagtcacagagcaaatacaataaagcataaaaccatacattaaggagtattaaacttattacatcatcatcagagttttagcaaaagtagtcatcattgttcaaaatgcagcggaataaaactaacgataaataaacagagagatggggaagcctgtcccatcactcctcatgctcctcctcagccgaggtagggtcccactcgactgtccaacctggtggcaagatggacggccaagtcactccagcaaccatgtcctccagagaacctgtaaaattatgccacaagcaaggctgagtatactaatacttagctagacttacccggtatgaggagtctactcctctacctctagacatgcagctgtttggctgagaggtttggttgccaaaagcactagctgagtctataaatcaagttttagctttaccaagttttagtgtgactctcttaagactgaatgtatacctatctaatcatacatggtatcaaacatttagcaatcaacaacttttgctaagtcatcacatttccacttgttactcaatgtagcagcatggatcaagcagtctcattagctgcgagaagcagacgattcgaatcgagtttttaaaccttgcaaggtaaacctaaacacacgacgtggcaaggcactccgtccccacacacatcaaccgtccccatcgattccccgtcagcagagaggggctcaccgccttggcgtacaatgcctcactgaccccgactgccgtcgtgcagtgaccgcacttgtacccaccataaccggaatgggagaccacgtctcaggtcgcgtgaggagggcaatctgctgccaggttcaatcaggtactaggcttaccgatttaccatatttctcggcatatgtttagtacgttcaaacgcttgacacacggtactaaaccataatccttagtccaatttccacctcgtagacaaccaatcctcatggattgttttccacagaccaacatcattatactatgaaagtggatacaaccaattcctgacctcgcgcgagtgctagaaaaatcactcgacttataccgagatccctaattagtaaagcaactactcgacctagcatactagtatccatctcaaaggaatcctgggttcatgcaactagggtttcagtcaactcctacccttaagtgcacagtacaaacctacaaacattaagtgtagtaaaatagcatatataaacggttatgcataaaaccggggcttgccttccaaagctggggcaggcagattgtggcagaacctcccaaggtatcgggcccacatgcacttgtccttgtcccaaagacctcagacggccatgcatgtgcaccagataacttaacaggatccgtccgattgccccaaggacatcggataaaccacttacaaccagaaccgcgtgattaagtaatacaaatcacacacaccaatatttttgcagcggaaatcttattaccaaattttacaagttacaaaaattttacattattttatcggaatgattacaaaagtataagtttgaaatatatgctagcttaagagaccatcctcaataagaagtatagaagggttacttagacttataagaaggccgagcccaccggcacttaacaccatcatcagcagcacaaagctatgacctgaaaaacaacagggaataaaaccctgagtatggaattactcagcaagtcttacccgactaaggaaaagactctcaagggtatgctggataaataggaatcaaggagaggctttagcaagaatcaacttagatacttttgcagaaatagcttactaaagtgagtccttactttcaacattttaatgccagattaaatataatagactctgtttgtctcta

SEQ ID NO: 85394 - DNA, 1531 bp, Zea Mays
agaggagcgtgtgggagaataccagcttgcccgcgcgaatgcgttctcccgcgccaccaggaaaagttgccgccgcctcccctcttgcccgtcaagaagagcctctgcctcgagttgcgtgagcagcagccgcccacaggccgcggttatctttccctgccacctactctggtcgtcctccatcgaaggacaagagagcccgaactgtcaaccttcactcgagcaggacagcatcccttgaactaggtacctgattgattacctgctcttctacttgctaggacaggctcagtgctcacttctattttatgtctggaatctggatcacaatttactttttatataccaacctgagccctatttaactatttgtctccactgtccacttgtccattagtgctcagtgttaattaataattaccttgcttgtccagtttcacaggagtccatctaaatggcaacacaaggccacagagtgtaggctcgacatgactgaatatgatacaaggacatatccaaaaaggaagcctaaatctcgtgatccttggtggaagtatggcttctagccaaaaattgggaacaaatatttggttgagtgtagcctttgtgaaggatatatcgtaggtggatatgaagatgctgtcaaatgtaaatttacagcaacacaaattgctaatagagtggagacagcactagttaagggaagaagaaagtgagcgctaaacctagataatgatggtgatggtgttcaagtggtggaagtggtaccaagtgagaaccagattcaaaagtccctccgggattcccggggatcgagtgggaaattagccccgggaatcccggtggggatttatgtttccaaactagccctttgggaaaacctgaagaagtggttgaggaaaggtatttctaagaaagggaaggatcaggaccaaggaagagatggaagtcaatatgcatgtggcccgtttcttctatgagtgtggaataccatccaatgctatcaactcaaggagctttgagattatgtgtgaggccattggacagtatgaacctggatataaacctcctagcttctgtgaggtcagggtgccattgcttggaaaggctgtggaacggaccaacaaactaaagaagcatgaagctgttcggaagcaattggctgtacactcatgttagatgagtggacatataggcagggacatcacctcattaatttcctagtcaatagtctaaagaggactttctatgaatggacctctagctgagtttgttaggtggtctgagtagaactcctcaaaaggaatttcaggatggagttaaaaaatcacctctgctggtcacctgttgttgggattaggttaccgagatagagtggtaggtttgaggtctaggaccaggacgccggcgcttgggcgccatcgtcctagggttagggttgctggctggaagatgcgaggtactgttcacgtgatgaatagtaccacagtgaacagtagccacgatcgaatagtagatggtttggggcaag

SEQ ID NO: 85395 - DNA, 2519 bp, Zea Mays
ctaatatcttttgctcctgtcattccccaaagcttaacatcctcgtgaatctcttgcaaaatgttgcggatactcgggggtaccccatcaaacacgcaagcattcctttgtttccacaaccgccaagacaccaagataactagggaattaaacccctttctcttactatttggcactttctgctcagccttcctccaatcttggaaaaccacatctgttatttctggagccaaaggcagcaatcccaccttgttcaaaatctgggcccaaatgtctctagcaaaaacgcaagccaccagaatgtgttgtgatgtttcctcttgatggaaaagtgatggttgctattgttaactgtgtcaagccatccatgattatgggccttccttcattcaagactgcaaaagctatgtggtcttatttatagaagcggtatgtttaagatagtggtgcccttcttcatactcttatgcggaaaatacatttaatagagcaacatgacatgtacattgatgagtattattcaggttttgatcgatttattggtcctttgatgtctatggttccttcatgcactgctgatgagtgtactgcacataagttcattgaaaaattcttcacatacagatttgttatgggtctcaggacagattttgaggatattcgtaccagattgcttcatgggtctacaagtctgattatgacagaggctttatctgatttgcttgctgaggagacttgcctctcatctatgtctgtctctcatactcctgtgtcccataatgtgttggcaacttctcacaagtctggtggaagaggtggttactttgagccttgcaaacattgcaacaagactaaacatcaatctgatcaatgttttcttaagtatccagagaagttagctgagtttcgctctcgtcgtactgctcaagggtgtgggccatccaagggttcagtgtcagttgttgctgcctgtagtagtgcttctcagtccacatgggttcttgattttggtgcctcatttcatgtaacttcatatcagtctcagttggatacatgtgcaccagtcactaatgggtcttctgttcaaacgcctgatggtacttcctgctctgtaactcataagggctccctctgtagctcccaattttccatatctaatatttcttttgtacctgagctctccatgaatttacttttcattggtcagattatagaccacaactattttgttggttttgacagctcatcttgttttgctcaggatcgtcgaagcgagcctgtgattgggactggccatcgccgtagagactcttccagactctatactctggactttttgcgtctacatattgtctacactgctagtgtttcatccgctgcgtccacttcatcttttgcacaatggcatcacgtcttggtcacttatgtgggtctaggttatctactctagtttataaaggatgtttaggtcataccaacattgagtcaaattttcattgtaagggttgtaagcttggtaaacaaatacaacttccatatttatctagtgcttcttactcagctcgcccttttgatcttattcattctgatgtatggggtcctgctccttttccacaaaaggaggtcataaatactatgtcatttttatagatgatcattctagatatacttgggtctttttcatgaaacatcgttctgagctatattctatttatcaatctttcacacagatgatacatactcagttctctagcccaattaaattttttcgctctaactctggtggtgaatacttgtctggtaggtttcgccagttcttaacatccgagggtactcttgcccaactctcaagtcctggagctcatgctcagaatggtgtggttggacggaagcatcaccatattatagaaacaacctgcacccttcttattgctttttttgttccatctcaattctagggtgaagctgtctctactgttgtttatctaatcaatagacaaccatcaactaaattagccaccaaatgtccgggtgaggtactctttggtactcctagctatgatcatcttcgagtttttggttgcacctgttatgttctgctagcatcccgagcgcaccaaattaactgctcaatctgtcgagtgtctttttaggatatagttctgagcataagggctatcgctgctatggttcttcagctcgcagcatgcgtaacgtgatgtggcatttgttgaaaaccgtcctttcttttataatccctctacttcctcttcgtattctccatgagagaccacatcttttttgtcttttccttctagtaatgacactgttttatcccctcaagtgttcgtggggatccccgcggggaaaaattttcaccgcgaggacgaaaatggggagctaaaacccgacggggaattccccgttgccatccctacctctaaccaatcctggtactcctgtttttgatgatactaacaattctgatgagctgcaggttgctcagggatataatttac

SEQ ID NO: 85396 - DNA, 165 bp, Zea Mays
atctagtttatcttataaacaatttatgaggataacccttttttaacataggatgaacctattaggataagctggaatccattaagttaaaaggggtccattaaagtaagaaataatcttttaaggtaagaaggatccatttaaaatagatacactttaatggag

SEQ ID NO: 85397 - DNA, 250 bp, Zea Mays
gttttgtgctactgatgatggtgttaagtgccggtgggctcggccttcttataagtctaagtaactcttctatacttcttattgaggatggtcacttaagctagcatatatttcaaaactataaataatttataacatttcaaagtttattctttgaacctttttttaatcactccgatcatgtacaatgtaaacttgatgtaacttgtaaaatttggtaataagatttccgctgcaaaatgttggtgtg

SEQ ID NO: 85398 - DNA, 276 bp, Zea Mays
tttttttctattttccattttctatatcccctatttcgtatatgcctaattctccaattcacccaaccacaaataaaaagggtgcataatccggcatgatgcaacaaccaaaaatagttctaggttttgcgtacacaagatgtcgagctaattctcgctataacttttggaaaagatcaaggcttagcgaggggaaaaagggaaaaggaaagggtaacgcctgaatttggtgagaggaaagaagaaaaaattctacccccaaattcagggcgttac

SEQ ID NO: 85399 - DNA, 258 bp, Zea Mays
caggaggagagaggagaaagcgggctgaaagtgagacatccgagccgagttgattctgtttttatttttccttttcttttttttctagttttcttttcctttttattttcaaattcataatttgaatttccatttaaattcaaactttatggcagacttattttgacattaaatgtccaatttaaacatggcatggggtgaacttatctattttaaatgtttattttgtgattattaatgctcctcttttctccaaat

SEQ ID NO: 85400 - DNA, 377 bp, Zea Mays
atttacaaaagaatttgcaaaaacaaaacatgtggtgcaaacgtggtccaaaatgttatataagaaagaaacattccatgcatatcttgtaagtagttttattggctcaattccaagcaacctttacacttacattatgcaaactagttcaattatgcacttatatatttgctttggtttgtgttggcatcaatcaccaaaaagggggagattgaaagggaattaggcttacacctagttcctatataattttggtggttgaattgcccaacacaaatctttggactaactagtttgcccaagtgtatagattatacaggtataaaaggttcacactcagccaataaaaagaccaagttatggattcaacagaggag

SEQ ID NO: 85401 - DNA, 71 bp, Zea Mays
cctctaagcccgttaagcccgtttttttttacactaaaacgtgcttaccggcccgtttagcccgctttttg

SEQ ID NO: 85402 - DNA, 284 bp, Zea Mays
cccacacgcccgatccccaaccccattcccccacacgctgcacaccccaatcccatcggcctcggtcatcagtcgatccccaaccccagttccccaatccccactctcccagtcctagactcctagcctccaagacccaggctcctagccgagagccggaagccgcaccgccgccccaagcagccagggcgctaggccctgcctagatctacactggcaggagctgaggagagtgcttgtcgccacactggagcagtgtctgtgcctcacacccaagatcgaac

SEQ ID NO: 85403 - DNA, 177 bp, Zea Mays
cttcctccctccaccggaaaccgttgaagatttgcaccacgcgacggagatccgagcggcaacgaatggcaccttgggaggaggagatgggggcggctagggtttgatgtgtggctgcaagtgcttgagaaaggaggagatgggagggggggcggcggccaagagggtaggggaatg

SEQ ID NO: 85404 - DNA, 2575 bp, Zea Mays
gtaacaccccgggatccacaaacaccccagaatgctactaaactacacatctaacattcatatataaaattttgacagcatcccctttgaaaattgcataaatggggaagcaacaaagtataaatagatatcatgaaaataaaacataatggacattaataatctgctagcaatggaaagacaaccataacgacatgaactaaatcaactagtgcgcacaactagttagaaacaacatcctttgacaagaagtttataattaaatcatgactgcgcctaagcagcgttattatgagagtgaaggtggatgtgctgctacttcccacttcccttgatgagcaacaagcacctgcattgagtaatgcaagagtgagatgaaacatctcagcaagcgaattgttttgacaagatatttaaaccacgagttgaattaatcaacattttaaaagaatcacaattaagatcagaaatacttgtagatatagaactcagtagtctcaatataaccaatagcatctcatttccttgaacaaccacaatagtttgtataacacttccctgcgtcaacagtacctgcaaatatcacttcaatgtatgcataggaacgcaaagtgtaggtactctgtcttcatacctttgagggtataaaaccatattatctgcaaatatcacttcaatgaatgcattatgaatgcaatgcatatgtcctctgccttcatacctctaagggtatgaagccgcatcgtacccctcctcgggcaacgtacgatgctaagttgtaccggtacggtcggacccataggtcacgacccaacttcagatgcaagtgaatcatgcaatgtatatggcatgctgcatttatcaatatacttcacttccttcacatacaatacaacctcaaataatacttcatttaccttcagatacaataccaacctcaaataatacttcatttaccttcaggggtgtgaattaatctcatgagtcatactcgaatcataatcatcatcaatatatgattgagcataagtataatgcaagcaagtaaagcatcaccatagagtccaattatgaaagaatccaatacttctgaatattagagtgtaggcaatagaaataacaggtcagaacggaagcaaccaccgctacattcacttgccttcatcgaagaagaaaaatgtactaggcatgatctggagtgtagccacctgctagcgggcataaaacttagtacacatatttcacaaacatttttcaacaatcaacaaattgctcctacacctgaaaccaagacctggtggaaaacctcccactctgaaccacatgccatacagcagcaacgctgtttgttaattttgtatctttaaaattataacagtggtgatatcaaacaaatactctatgagtatctacacaaaatactctacaacttcggcattcgatggataattaaattctgccatctataagttttaaaacatctgacaagataactgattgaatctgttttagacagcagcatagttaactttcaaaattcgatatctcacaaactactcaaccaaaaatcatgaaattctgctggaagtaagaatttgtatccctctacaaaagtttccatatctgggagaaccaattcggccatttacctgatgaaacctaccagtgaacagacccgctcatttctgtcaggccaacagaaacagccacagtaaaataaacataactggagtttcataattcatatgaatgcactctttaacaatctggaaagcttatgaaattatctacatcttttcttacaaacccaaggtttaattctgttgataaaattgcctaaattataagagaacagattctgcacagaattaagagactgaaaaactgctataatcaaactgcaataactctctgatctgatgtccgattgaggtgttcttcgcggccacggaaagatctacaaattatctacgactcatatatagactttttaattttttgaggccactaagaccacgtaaaactggcatgaacagaaactgtcgaatctgccattctgcagaaaactaaattcgagatcaaaacctaaccccacatctaatccaacctctaatcctttaattcccatgatccacaacctccaaaagcacataattacagggaggaacaaggatctcatccatacctagggtttccccaagaaattctgcaagaagagatggggaagaacatctccttgatcctctcttccccttcaattcaacgtgctcctcctcttctcgatccttgttgcgcgggggagatctagagggaggagaaagccgtggagaggggctgccatgggaggagaggacggccagcccaaggggaaaggaaggagggacggccaagtgtgggagggggggaaggggtggcggccaagtaggggcaaaagggggaaaaggctaccactagggttttccttgcgggaggaaagaagcgatgccacagatgactctgacttagcatccaacggcccacaacccttttcccacatccacgcaccgaagatcaacctttggcaacaatttttttg

SEQ ID NO: 85405 - DNA, 330 bp, Zea Mays
caaaagttgatctacggtgcgtggatgtgggaaagggttgtgggccgttggatgcaaaggcagaagtcatctggggcgtcggttcttttctcccacaaaaccctaggtggccaccccttttccctccaccccctctcttggccgccaccctcccccctttttcccttggttggccaccccctctcctcccatggcagccgcccaccatttcttcctcctccctagatctccccctcccccacgcagcaaggatcgagaagaggaggagcaagatggattgaaaaggaagagaggatcaaggagatgttctaccccccatctattgcagat

SEQ ID NO: 85406 - DNA, 1015 bp, Zea Mays
gtgaggtgttttgatcttcttatacattcgtcgggtgtggatgtttcaccatttaattaaaattaattgttgaagttggtaaggttgtgcttagtgcatattaccccttcataaaagagtgttgtcttaagacattgatgttgatgtatagttgcatccaaattcgatggtgtgaaattgtagtgttgattgcactatgacttgctttgagcttcattgcatgttgtttcatgcttgatgtcaggttgtgtagtttcctcagacaattaggccaaggtagaagttcttgtgttaattaagaccaataatggacccatgttttgaatgatggtgatggggtaccttgggtgttttgcttgtagtggccgaatttcgaggacgaattctttttaattggggtagagtgtaatatccccaaaacatttttggaccaaaagttgatctacggtgcgtggatgtgggaaagggttgtgggccgttggatgcaaaggcagaagtcatctggggcgtcggttcttttctcccacaaaaccctaggtggccaccccttttccctccaccccctctcttggccgccaccctccccccttttccccttggttggccaccccctctcctcccatggcagccgcccaccatttcttcctcctccctagatctccccctcccccacgcagcaaggatcgagaagaggaggagcaagatggattgaaaaggaagagaggatcaaggagatgttctaccccccccatctattgcagattttcttggagaaaccctaggtaaggatgggatccttgttcctccatataattatgtgcttttggaggttgtggatcatgtggattgaagaattagaggttggattagatgtggggttaggttttgatctcgaattcaatttctgcagaatgacagattcaacagtttctgttcataccagctttccgtggtcttagtggcctcaaaaaataaaaagtttatatatgagtcgtagataatttgtagatctttc

SEQ ID NO: 85407 - DNA, 367 bp, Zea Mays
ttttacgaagcatggatctttttcttcacgacgcctaaaaagaagggaaggtgttttttcgccgaaggctcaaaaacggtatgtaataagtttcatgcatcataaagaaatagaatataataatttacatattcgatctaaagttacacacatcaaatgttacagcttcgttgcaataaaagcacaatgtttattctattgtctcttacaccgaccatttaaaaatgtttttacaataagtgctagtcttctttcaagattttctccgcaacttcattgagcaatttattgacgacttcgtcaacgatagattcggccatattaatgatctccagtgcttccttcgtttctggatcggccaggggat

SEQ ID NO: 85408 - DNA, 579 bp, Zea Mays
ctttgtgtcatccacggagaaggcagcttcggcctgggccagggtcttgacatggtcgcatcccgccttctccaggatggctgaaattccccttgcaccagagaacgcacagacatccccgtgatcacttaaaatttctttgaaagcttcggcctctccacttatccatttgataacaccttcagggtcgcctcgtatgaagttatctttgttagaataggcgcccacgttggcgaagctagcctttattttctccacgtagcccaaggatttttcaaagcatctttccttggatgcgcgaagtttttcaactgttttctctaaatggtttttccaatatttactgatctcccggttagattctgcgagagcgcatttttctttggcttctgccaactgtttccgaaggtcttcgatttcattcttttggatttcggcttgagccttgaaactagcttcatcttctttcactttgtttaccaatgaaatcaagattttgtctttttcaagaccttcgttccttaattcgattacctctgaacgaagattgttcaaagccatcgtatatccttcatcttt

SEQ ID NO: 85409 - DNA, 412 bp, Zea Mays
ggacttgcactggaggctgaggtggtggtggctgctgctgaacttgctacatcgctgctaatgtctgactaattgcctgaactgcctgggtctgcatcaagaacatctgctcaatggtcatcgggggtggcggtggcaaatgctgctgtggagctgcctcctcttggggtgcctactgctctggctgtgcacgcctcgcacctctgcgcctattctcagacatctgtagaaatcacacacatatcagatctgactctgcagtctttcagcataagaaaagatatacggaaatcttcacagcactgaacaattgatcatcttcactgacaacttctcaaataaagaggaaagtggaaataaatggattacccaactaaataacttactttattaataactacaccaagtggca

SEQ ID NO: 85410 - DNA, 372 bp, Zea Mays
ctcaaacacaagggcatatagagtcttcaacaagtccactggattagttgaagtttcttgtgacattgtgtttgacgaggctaatggctcccaagtggagcaagttgatcttgatgaattagatgatgaagaggctccatgcgtcacgctaacaaacatgtccattggaaatgcgtgtccaaaagaacccgaagagccttctcaagcgctagatcaaccatcatcttccatacaggcatctccaccaactcaagatgaggaactgattcaagaggaagaggatcaagatcaatatgataagccacctcaagaggaatacattgatcaacagggagatgaatatgatcaagaaaaggaagatgaacaagagat

SEQ ID NO: 85411 - DNA, 283 bp, Zea Mays
tgaacatattcatgatgcacatgatatttgggctagaattaaaagtaaatttaatgagtccaaacatattagttcatatgatgcttctatttcctttagtccttgtgaaactaaccctttgaaggaagaagaaaatgaacgttggagaccaaacgatgaatccacctctccaaaaggtttgtcttcccatttcaattcccacatatgttgtattgctaatgaaaatgatagtggaagcacaaatgaggatgaggaggatgaaagaagctttacacaactctac

SEQ ID NO: 85412 - DNA, 668 bp, Zea Mays
gttttgcaccggattgcgttgagttagggcattcctggcactggttcaagagttcaccggccatggcgccaccgcaggctgggcgccaccacgtccggacgctgggttagggacgaccaatctgccgtcagatagccactggacggattagattagaacgcgcctaccggttggatcccgactgtagagatctgatcggacggatcagggcgactccagagtaattaaatctgcacagttgatcgcggattgggtggtctgcgccgcataccgtttcgctggttgcttgatctaatccgagtggttgggtcgagatccaacgactagattaggccaataccccttcgcgggtacgcattttcatatgagcccctgactaaaacagagataaaacccgcagtaccctcaagttcccctctgagtctagggagttttcatagatgagcccctgcagtttttagtattcgaggcccggtccagagaattagaaaaatgagagaaataaatttagaaatagatttttagtattaaattaattgcagaaacttgtttaaattgtagacaaattcatttgaactccaaattaatccattccacttcctataattttgtaatattattttctatcaaatagtaccactgttttgacatgaaagtcttattaaaat

SEQ ID NO: 85413 - DNA, 595 bp, Zea Mays
aagatcttctaacaattgttccttataagccacaggttcaccaaaacctttgtttcgaagcttggtagtcttcgtgaacaggaaaagatagcatagaaaggcaaagacagatagcaggaatagggtggacgaaacatgtactaatactgctacatagggggcttaatttaaaattgtatgtcatgatgcatgctcgtcctattcgtcctcacaattcttgccaacatatggtggctttcacgttctatggcggtggcatacctactcactcattatttatcactagtcgcactttcatagggtttagttagtgtacctgcaaaaaaattgcattatagttgtgggttagtggttagcatcctaaactaagccaccttatagttcttaacttaactatatactatttgcacttcgactatcaggatttgatcatattcttaagtttttccaaaatagtttggactcaaaatccttttgaagtttatcaaaggattgctttaatatccatgataatgggggatcgctccgataccacgctgtgacagccctcccaagttatcaggcccacatgcaccaacccttgccattaacggcc

SEQ ID NO: 85414 - DNA, 252 bp, Zea Mays
caacaatttatacttaggggatttcaatttggaagatcctaacttaagggcatgccttttcactaaaatctcacttgggtggttatgacatgttggaatgaggacaataaagaaatggttaaaggcagggctaaaacaaaaatggtaatttccaatttttgagaatcgtttttgagattttaccgatttttagccctaaacagaaacaatagcgataaccgaaaaaacaaaaatggtaaaaaagcaaaaaaa

SEQ ID NO: 85415 - DNA, 363 bp, Zea Mays
atcccctactccaggcgacgtcgcgcccgcgacatacgcagggcagccgagcatgcagcacaggaggcggctgcccaaaccaattagccgctaggattaaggcaataaaagatatctagcctattatttaggaagggattactcctttctgttagaagttatctagcctattatttaggaggagattacccttatctgtttcagccgtgggctatatatagatgtaatcagcacttgagaagggaagaaaacaattatccatctctctctctatctcctctcaagcccagccgccgtaaggggcataaccttcggttctggaagacacggcaggagactacgaactccgtagtcgagggccgc

SEQ ID NO: 85416 - DNA, 221 bp, Zea Mays
ctcctatattagtgtcagcagctcctccacctaaccgaatgtagcggtagccaccatttccctgctctttcctcccactaaccaaatccatatgttcctgcttcctccataaatgccgacagtttctctcgccattgtttgttacaacgtcttcaccggcgacctctctgtttctcttccccacgacgtccgggctcccttcgtctcactataaaaggcat

SEQ ID NO: 85417 - DNA, 428 bp, Zea Mays
cacgagatttctgttctcgttgagctcatcttaggacacctgcgttatcttttaacagatgtgccgccccagccaaactccccacctgacaatgtcttccgcccggatcggcccggcgaggccgggccttggagccaaaaggaggggcggtgccccgcttccgacccacggaataagtaaaataacgttaaaagtagtggtatttcacttgcgcccggaggctcccacttatcctacacctctcaagtcatttcacaaagtcggactagagtcaagctcaacagggtcttctttccccgctgattccgccaagcccgttcccttggctgtggtttcgctggatagtagacagggacagtgggaatctcgttaatccattcatgcgcgtcactaattagatgacgaggcatttggctaccttaagagag

SEQ ID NO: 85418 - DNA, 208 bp, Zea Mays
taaacacgggccttatgtgtgttctgcaggtggctgacttcactagccgtactgcgtcgggggcccttacggcgacgttgtctgccgaggtcgagagacttcggacgcaacacgcggacgctgtccgtgagaagtcggcctccgacagcaagtgccgcaagctggcggagaaggtggccgcccttgagaaggagaaggcagacctccg

SEQ ID NO: 85419 - DNA, 448 bp, Zea Mays
aggttaacgggcccgtgcctcatgtacatctataagtgagcgccatgggctgagcggggagagaagctgagttgggccggccgaagaggaaaacggcccagccgagatttctctattttctctttttcctttctatattcttctcccatttataatccctccctttaaattcaattcaactcatgttatgaactcccaagttttcaaatatcaaacacaccctttaagaaaatataacatttattatttccaatattttatttattgttttccttgtcatttattttagggggaaataaatgatttcctttaaattcccatccttttcttttctgttccctttttattttcaaattctaatttttttaaactcaaacttgtttcacaaatttgaatacaaatacaataatttcattatgtggtgcccatttttatttatttatttatt

SEQ ID NO: 85420 - DNA, 205 bp, Zea Mays
ctaagtcaggtacgttgagctagacttcggttttttttctttttttcttttttttaaccggctgcgccggggctgtggtcttatgtgtgtcttgtaggcggctgacttcgcagaccgcgcggcgtcgggggccctgacggcagttgtgtctgccgaagtcgagagacttcggacgcaacatgctgacgccgtccaggagaagtcg

SEQ ID NO: 85421 - DNA, 569 bp, Zea Mays
ccttcctcctctcgatcgcgggtgacccatgggagaagacggtgctgtgggacatggtggagccctaccgtccgctgcatgcccgcattccttcacgtcactcgttgccaccctacgttgccaccttctacaccggcgtcgtcgggcccgccgtcaccgataagctctacaaggttagtcaacctcagtgcctcggctctacaagatcctctccttgtcctatccattccctcattacatataacatcactaccggaatctggacctttgccgagtgtcagcggctttgccgagtgctttttatcgggcactcggcaaagaagactttgccaaagaagactttgccaaagaagactttgccgagagccacactcggcaaagtcctgcgctcggtaaagagcttgtgctcatgagggtcggaggaggcaagagacataggcggtactggattgccgacggggcaatcgactcgtcctctactcccactccgtctcaggtgagagcaaggagcacgggctcgagtccagccatacgacctcggcacgacagctcgcagcattgcatacaac

SEQ ID NO: 85422 - DNA, 154 bp, Zea Mays
gagaaatcgagtattattttatatttgcttttacttcaattgctgcagctacacaacacatatttgacaatagattttcaccttgctacaacatatttttagctacaatatatcatattcagtagtaggagactccatttcttcaagtgcttga

SEQ ID NO: 85423 - DNA, 506 bp, Zea Mays
taataacagagtgcatagagataaatgtcataaatatcataaatgtacttattacatagcggaagtcttacaaaaataaatgataaaataaagcgaactatatattattccctggcgccacaaagctgactaggagacgccacctagatcaagtcgaaagcctcagtgttaggcggctcctcttcgaccacccgttcttttcctatgggggtgtgagacaacaagagtgagctcacatacgatcatagctcaacaagttgtggggaatcatgtgcatgaactcaccaaaggtgggagttcatgtgaagtgtaaggctgatcaacaaaataaaggctgaagctgagaattacttttataagttggtcaaaattttattagcaattactaagtataagtaaataccaaaccttagtaaataaaagtaataataaaataatcccaaatgcgatgcaaatgacaaattgagttttaattccatagattaatcatgtgagggtccgagctg

SEQ ID NO: 85424 - DNA, 236 bp, Zea Mays
ggccacgacaaagtgtggttccgcggcggtgctagatctccggcgaggaattaaagacgtcccgagggacaccccattatggcgcggccatagaaacgttcctcgcgccatggcgaatctccccgactggtccccgatgattcgacgtacgcttgaccgcgaatcagccatggcggccgcagttctctcctctctctcgcgttctttctaccggtgttaacgatgacctggggttt

SEQ ID NO: 85425 - DNA, 585 bp, Zea Mays
gtttctttaccctaacattttcaccgctccaacgcagtcatcgttgttttctcgaatctggccatcctcatctacctcgcagcgtcggtgccctatcttctgttccttctctttcccgtgctcggcgcgcaggcggcggccccatctttcgcttcctcccttcctccaccaccactcaccccttgatccgttccggcctcctaaatccggcgatgccaagcaaccccactcatgtcgttctcaaaaccctacctgactaatccatctaattacaaggttgtcggctttgcgttgggagcaccgggtcaggggacgggcaaaggatcagatcgacagccgcacgagcattgagcaatatggctgctatgtaggatgcaactggacatcaccgtccgcccgtctagctgttgctgcggaagtcccgatgcttcatgccaccgtgatggtggctggttgatctctgtcagtttctactactactttaatgatgggtaagagattaggtggttgtactataccaaagattaatgtgttttactggccgtcaagtttcccttaaattaatgcctaattgcatttgttggg

SEQ ID NO: 85426 - DNA, 1712 bp, Zea Mays
atgaaactccagttatgtttgttttattgtggctgtttctgttagcctgacagaaatgagcgggtctgttcactggtaggtttcatcaagtaaatggccgaattagctctcccagctatggagacttttgtagagggataaaagttcttactttcagcagaatttcatgatttttggttgagtattttgtgagatatcgaattttgaaagttaactatgctgctgtctaaaacagattcaatcagttatcttgttagatgttttagaacttatagatggcagaatttaattatccatcgaatatcaaagttgtagaatattttgtgtagatactcatggagtatttgtttgatatcaccactgttataattttaaagatacaaaattaacaaacaacattgctgttgtatggcatgtggttcagagtgggaggttttccaccaggtcttggtttcaggtgtaggatcgatttgttgattgttggcaaatgtttgtgaaatatttgtactaagttttatacccgctagcaggtggctacactccagatcatgcctagtacatttttcttcttcgatgaaggcaagtgaatgtagcggtggttgcttccgttctgacctgttatttctattgcctacactctaatattcagaagtattggattctttcataattggactctatggtgatgctttacttgcttgcattatactgatgctcaatcatatattgatgatgattatgattcgagtatgactcatgagattaattcacacccctgaaggtaaatgaagtattatttgaggttggtattgtatctgaaggtaaatgaagtattatttgaggttgtattgtatgtgaaggaagtgaagtatattgataaatgcagcatgccatatacattgcatgattcacttgcatctgaagttggtcgtgacctatggtccgaccgtaccgatacaacttagcatcgtacgttgcccgaggaggggtacgatgcggcttcatacccttagaggtatgaaggcagaggacatatgcattgcattcatatgcattcattgaagtgatatttgcatatgatgtggttttataccctcagaggtatgaagacagagtacctacactttgtgttcctatgcatacattgaagtgatatttgcaggtattgttgacgcagggaagtgttatacaaactattgtggttgtttaaggaaatgagatggtattggttatattgagactactgagttctatatctacaagaattttttatcttaattgtggttcttttaaaatgttgattaattcaatttgtggtttaaatatcttgtcaaaacaattcgcttgctgagatgtttcatctcactcttgcattactcaatgcaggtgcttgttgctcatcaagggaagtgggaagtagcagcacatccaccttcactctcataataacgctgcttaggcgcagtcatgatttaattagaaacttcttgtcaaaggatgttgtttctaactagttgtgcgcactggttgatttagttcatgccgttatggttgtctttctattgctagcagattattaatgtctattatgttctcttatcatgatatctatttatattttgttgcttccccgtttatgtaattttcaaaggggatgctgtcgaaattttatatatgaatgttagatgtgtagtttagtagcattctgggtg

SEQ ID NO: 85427 - DNA, 474 bp, Zea Mays
gtggagctgggccgcctgggccggggagagaggaggggaacgcgggcgcgcggggttgggccggaattcggcccagccgagggaggggggaagtttcctttttcttttctttttctaattctaattcctttcttctcttttttctatttttgtttctttttgtttctttttctttggagaccaaaaatattttctaagtgatcttgggtgagaaatatagtctaggtgaggtgctctaattatttcaagtgtatgcacatgagaaggggttctaagggtagggttaagggggaaaagtaaaataaggtggggggatttggaggttagggtttcaaaccttaggtgggattttgggatgttacaaacctaccccacttaaaggaatcttgccctcgagatttagactggatttgagaaaagataagggtattccttcctcaaggagtcctcactctccgaggtagcttcctcttc

SEQ ID NO: 85428 - DNA, 443 bp, Zea Mays
gttatcaggcccacatgcaccaatccttgtcttactggcctcagatggctatgcatgtgtaccaggtaacttaacaaggctatcgagttcgccaactggaactcatcatcccaaggatctcccacataacaggtatattacagtaatcacatttgatacacacacattggagatagagcggaagacttttacaaagtacactttacattccagaactcaagttttacatggtagaaagagatgtatttattacaagtcctgatagtactcgaagggcataacttattacaataactggaagggtgaagcctttccataagagatatataaaaaccttctaagcttcaagtcttccacatgaagtaactaacccaaagataagggaataaaacttctcctacaaaaacaacaagggataaaaccctgagtacgcaattactcag

SEQ ID NO: 85429 - DNA, 1283 bp, Zea Mays
cttcaaactgtttatagatcaaaagttatgaggacccaaaaacagctagttgatattattttcagcaaacttcaaatccgattcaaaactgaattaagcattttactccagcttttcctctaaaacatggagttctccatacatgaaagttgttcaactctccaacatctacaactttgatatatgtatccctagcaaattctctctagatttaaaattccacttttgggcaactttagtgtttcatttgagattgtttttctccagtcaagcctctcatcttttgtccatcatttaaaggtaaaattgacctttaactaaaggcccaactatgatacatagttcccatggccaaagcatctttagcttaggagcggtttacttgcacttgatctctcattaactctcaaacttctctagctctcaacaagacaacacgctatccttgtttcgaaatttttagacctagtagatgcattctaggtgtatcaagcaagattatgatgatgcatatgatgtaataccaatgttttagttctcgtaacaccgggggtgttacatccttcccccttaaaaaggaatctcgtctcgagattaaaattctaggctaagtgatggtaaaggaaatgcgtcaccggtttatttcccagttactcctacaaggcagggggtgtgaccccatcaaaagacaacttatacaaacccacggtttccaagacactaggaactcagaaatatacttttccaaatacttctctgactactatgtgactttatcttccgggtgttagttccactgtatctcgtaaaactcaataacttttcttcgagtgacctgatccttttgatctaagacatttatgggatattccgaggaggttaaacctggtttatggttaacatctaaaatctcaataacatatttggggactcgaagacatttcttccatttggacacgtggaacacgtcgtgcactgttgaaggtccttttggcaactgtaccttataagatataggtccaccaacatctctgtttcaaaccttgttacctattgctaccttcagggtgaatggaatctcggattgcaacctaatcgcaattctacatccctttctggaggcaactagtcaaatcttcgaggaacacatccgagaactccctcacatcaggtatatcctttacttctttcacttaaactcttgatgtagatgaatcttatatttcctagaatagcttgactgaccatttccttatatctttcaaccaaactaattgccatca

SEQ ID NO: 85430 - DNA, 857 bp, Zea Mays
actccatattgcaaccttcatatataccacatgtagaatatgtatatagtctagtgccacatttaagcactcccctagaccgacgtttgttcggtcatgctctacacaactcacctttacctgagcatcgatccattcaaaacagaatggccccaaaataacattacacatgtatgcagttccctacccagttgtgggttagtggttagcatcttaaactatgccaccttatagtccttagttttaaccacatactatttgcacttctactatcaggctttgcttatacattcttaagttttccaaagtaatttggactcaaaatcattttgaagtttatcaaaggattactttaatatccatgctaatggggaatcgctccgataccacgctgtgacagccctcccaagttatcaggcccacatgcaccaatccttgtcttactggcctcagatggctatgcatgtgtaccaggtaacttaacaaggctatcgagttcgccaactggaactcatcatcccaaggatctcccacataacaggtatattacagtaatcacatttgatacacacacattggagatagagcggaagacttttacaaagtacactttacattccagaactcaagttttacatggtagaaagagatgtatttattacaagtcctgatagtactcgaagggcataacttattacaataattggaagggtgaagcctttccataagagatatataaaaaccttctaagcttcaagtcttccacatgaagtaactaacccaaagataagggataaaacttctcctacaaaaacaacaagggataaaaccctgagtacgcaattactcagcaagac

SEQ ID NO: 85431 - DNA, 338 bp, Zea Mays
ctcttggccgccccccccctcccatctcctcctttctcaagcacttgcagccacacatcaaaccctatccgcctcccccccatctcctcctcccatggtgccattcgttgccgctcggatctccgtcgcgtggtgcaactcttcaacggttttcggtggagggaggaagggaggaagaaaagggggagaacccaaggtgatttttgtgtttatctcttgttcattttatgcggcaatccaattgtttagatgttgcgtgtgcgatttggtagaagggctgtccagaattttaaggggtggacgaacagcagcaggattagtgatttctgggcattttt

SEQ ID NO: 85432 - DNA, 474 bp, Zea Mays
atgtcatccttgcatttgtagacatttgcactcatgaggaatatatgaagtgtgacattactatgttactattgtggtttctacctgcgaggtgtggtaactaggtgtgttgtacgttgtatgcgtgttgcaccttcgtaataagaaggttgtggaatcaagtggtggtaaaacaatgttcttatgtggttaaactgtttgatattattttacttgctgagatgtgtcatctcactcttgcattactcaatgcaggtacttgatacatgttggaaatgaggggagtagcggcacgtccacttttactctcacaataacgctgcccaggcgcagccatgatttaattagaaacttattgtcaaaggaagtttgttttctttatatggtcgtgcgcactggttaattcagttcaggtcgtatgtttatctttccttgctagtcgattaataatacttagtatgttttagtcctaat

SEQ ID NO: 85433 - DNA, 178 bp, Zea Mays
cgatctcctcctctctcaattcttgcagccaccaaaccctagccgcccccctctcaatccccttctcccaaggtgccaatccttgccgctcggatcatcgtcgtcgtggtgcgagtcttcaatcgttttggtggagggaagaagggaggaaggaaaggggggagaatccaaggtgatt

SEQ ID NO: 85434 - DNA, 224 bp, Zea Mays
agccgcccccccacttctcttcccccttggctgccgccccctgcccatctcctcctctctcaattcttgcagccatcaaaccctagccgcccctccctctcaaacccctcctctcaaggtgccaatccttgccgctcagatcatcattgttgtggtgcgagtcttcaatcattttgatggagggaagaagggaggaaggaaatgggggagaatccaaggtgatt

SEQ ID NO: 85435 - DNA, 421 bp, Zea Mays
taaactgtttgatattattttacttgctgagatgtgtcatctcactcttgcattactcaatgcaggtacttgatacatgttgggaatgaggggagtagcagcacgtccactttcactctcacaataacgctgcccaggcgcagccatgatttaattagaaacttattgtcaaaggaagtttgtttatttttttatatgttcgtgcacactggttaattcagttcaggtcatatgtttatctttccttgctagccgagtaataatacttagtatgttttagtcatgatatatgtttatactctgttgctccctcttttatgcaatcttgcaaaggggatgctgccgaaattttatatatggacgtcggaagtgtagtacagtagcataccgggttgtttgtggaacctggagtgttacaact

SEQ ID NO: 85436 - DNA, 330 bp, Zea Mays
gagagaaaggaagatgcagaagcaagggcgtgcggtgctcggccgaacgacggcagcggctgctggcctggttggccgagtgtgtgtgcgtgcgttttttttgttttttttctatttgatttcaaaattctttttatttttttagaataggttattcattaataaatatattttaagtattacaaaaatataataaatctaataatgtcattttaataaaattcataataaagaatctttagacaaattctattagtaaattggtcgttataaaagagaataaattaaaataaatttgttacaattcattaacaaacaaagaaatcatgc

SEQ ID NO: 85437 - DNA, 72 bp, Zea Mays
cttgtactctaatgcatttattcccttgcacacaaaatcaaacaaagtttttaagttctatggacttggagc

SEQ ID NO: 85438 - DNA, 208 bp, Zea Mays
catttcccctagcccttggccgccgcccccctcccatctcctcctccctcaaactcttgcagccacaccacctaaccctagccccccatctcctcctccccaaggtgtcattccttgccgcttggatctacgtcatgtggtgcaagtctccaattggttttggtggagggaagaagggaggaagaaaagggggagaattccaaggtga

SEQ ID NO: 85439 - DNA, 441 bp, Zea Mays
ctgaggccaccaggctggaggacattgatgtacttgaagaagaacggctaaacgcagtaatccaatcagcacggtaccagcagactctaaggcgctatcacgacaaggctgtgcgacaacgatccttctcagtaggagatctcgtcctccgccgaattctaatgggggagggacggcacaagttatcgcccttatgggaaggacccttcatggtagcagaagtcactcgacccggatcgtatcgtctcactcagatggatggcacagaagttgggaactcctggaacatagaacacctcaaaaagttttatccctaactgtgtttcaaaaactgctgggacgacaatgtactctataaagtggaaatatgtcatcaataaaaaagaggcttcaaagatactcagtttgtttacgattgacatgctcacgcttacttaactc

SEQ ID NO: 85440 - DNA, 288 bp, Zea Mays
ggatgtaatagcatgaccactacacctttaaataaaggaactactgcttaataatgatgttaatcagggagggtcaagtctatgggattattatattctagcctttcatggtagttgaactgtttttttggtgggctgagttacctatcttttatttggtcatgaatgttcattactaccgttgtatttcgattatattatgtgaattatctttcttttatatcctgtataaactctatgttccccttgttatgcttctttcaagggaggtgctgccggattttgcaa

SEQ ID NO: 85441 - DNA, 181 bp, Zea Mays
cagaaattgatttttagtattaagataaatccagaaaacttatttaatccttagaaaatccatacttagtccaaattgacccatttcagttcctataattttgtaatattattgtttatcaattagtgccactgttttgacatgaaagccacattaaaattaatatcctaattaatctttt

SEQ ID NO: 85442 - DNA, 1413 bp, Zea Mays
gagatatcgaattttaaagttaaccatactgctgtctaaaacagattcagtcagttatcttgtcagatgttttagaacttgtagatgacaaaatttaactatcttttgaatactgaagttgtagagtattttgtgtagatactcctagagtatttgtttgatatcaccgctattttaattttaaagatacaaaattaacaaacagcgttgctgttgtatggcatgtggttcagggtgggagtctttccactgggtcttggtttcaagtgtaggagtgttttgttcattcatggcaaatgtttgtgaaatatttgtactaagttttatgcccgctagcaggtggctacactccagatcatgtctagtacatttcttcttcttcgatgaaggcaagtgaatgtagcggtggttgcttccgttctgacctattatttctattgcctacactataatattcagaagtattggattctttcataattggacactatggtgatgctttacttgcttgcattatactgatgctcaatcatatattgatgatgattatgattcgagtatgattcatgagattaattcacacccctgaaggtaaatgaagtattatttgaggttggtattgtatctgaaggtaaataaagtattatttgaggtttgtattgtatctgaaggaagtgaagtttattgataaatgcagcatgccatatacattgcatgactcatttgcatctgaagttttgtcgtgacctatggtccgaccgtaccggtacaacttagcatcgtacgttgcccgaggaggggtacgatgcggcttcatacccttagaggtatgaaggcagaggacatatgcattgcattcatatgcatacattgaagtgatatttgcagatgatgtggttttataccctcagaggtatgaagatagagcacctacacattgcattcctatgcatacattgaagtgatatttgcaggtattgttgatgcagggaagtgttatacaacctattgtggttgttcgaggaaatgagatgatattggttatattgggactactgagttctatatctacaagtatttctgatcttgattgtgattcttttaaaatgttgattaattcaatttgtggtttaaatatctcgtcagaacaattagcttgctgagatgtttcatctcactcttgcattactcaatgcaggtgcttgttgctcatcaaggggagtgggaagtagcagcacatccaccttcactctcataataatgctgcccagacatagtcatgatttaattagaaacttcttgtcaaaggatgtttgtttttaactagtcgtgtgcactgattaattcagttcatgttgttatggttgtcttcccattgctagcagattattaatgtcttttatgttttcttat

SEQ ID NO: 85443 - DNA, 545 bp, Zea Mays
gtccggtccggtcggctttagtttttggatcgggcaggtcgacgaggttatcctcctccacaaagcaggcacgcgcgcgcgaccatcaccgaactctctcgccgtctcgccacgacgacgccacgggggcggatagcaggtgtgtgaccggccggacgcaaagtggaaaggcgtgcgcggcatctttgcctcagctctttttctttattgctagtacttctctctgtcgttctgctttggtcattgggtaattatcatgtcatgtcatggcaaaccgacctacccaagacacgtcaacgaccaagtggtggctgaataatgtatcataaaatattcatactatactcagctgccgctcttctcagggatctgctgtatatacaacagcaaactcttcatgggcgcgtggattttagtcttcttccggacgatcgacccaccgctattatgtgtgtggagtgttaacaaagctgttacctctgtaacctacctggaagataggaatggttagctgaaagataggaatggttagccggatagatacg

SEQ ID NO: 85444 - DNA, 270 bp, Zea Mays
ttttttctttttctttctccgatcgatttcttttttttcttcttttccctctctctggtccctgatgaatacggcagcgcactggtgcacctccgacgtggcgcggagtgcttggcgccatttgcatgcatgaaataagagcaggggtcggccgacgacggcgacacacacaggacaggggcatcttgtttctgtgccacaaatacaaatacacctatatagaaataaacggagtggttggacaagtggagacggcgaggaaaggcggac

SEQ ID NO: 85445 - DNA, 306 bp, Zea Mays
gaagcaagaagtacgaatatattacaagtcacttgaaatgttttgagtgttcgaatacttcgtaccaacaaaatattacaacaaaggatcattgttcttttatatcattctatcaattttctttatggccctacatcacttcatcatagatttgttcacaaattttgagaacaacatcatttgtggccttctttgtagccctggcagctcccgctttggcttccataacaacatccttagctttagcttcagtatgcttcacttcaataattagctgtgaagtagagacttctcagcaaaagttag

SEQ ID NO: 85446 - DNA, 449 bp, Zea Mays
caagatgtctgagacatccacagagtctgtcagtggggaaatccaccggccgggtggcggaacgcacccgccctaatcctaagatgaggagggggcctaagcggttgcctgtttggtgaattcgggatgaacacacggggacacgagggattatagtggttcaggccgtcggagcgtaataccctacctccactgtgtgtaagtagtattgagagtgtgattgagtctatcccttgtaacacagtgtgccttcccttttatagtttaagggaggcacatacaaggatactgagccccgacatgcgggcctaggagcataatggaagaaatacattatgtggataactaatgctgacaaagtaatgcatgagtaatcagcgagagtcatgatgtccgcagtccatgctgcattgatgggtagttaccgtatgagtaatggtgagttattg

SEQ ID NO: 85447 - DNA, 1857 bp, Zea Mays
aggggctacaagcagcgcctccgtcccaggtggctccggggggtcggaggaggagaggcgatgtcacacccggttttagaaggcaaaccgaatgcgaaccatgtacgtgccaggatcagcaattcatgtacacagcagttacataactggacatcatcacacagtgctaaaataatgacatcaaagagggtataatagtcgattacatcatgatgtccgagacatccacatagtctttaacaataattaaagtgcggaaaagaaacgtagatacacacgacctacacaggcagccgactgggggtttgccgctaacccacgcctagaactcatcgtactcttggaactcctggaagtcctccttcacgacttcatcttcacatgagcagtggttgcaacgtggacaacctggggggggggggggggttggtgtgtaaagcaagggtgagtacacatcaacatactcaacataatgtcccgtttggctgtagtggactagctttatgtggagttaagtcaagcagttgcttttagttggtcaggttattatttactagtagaaagccaggttttagcatcaacccaagttattaacccagatgtaccctttccaaacggaaagaataccacttaccattaccataaaatcatcatcctcatcaccacctgtaaaccatacattttagatcaagtatctctaatcaatggagctcccttggccactcataaccacgagcacgactgatatatcagtttcataacactctgcagaggttgcacactttacccacaagccgtgattccctcttgccttgggccgatcaaacccttaaacactaccaaggtgaataggcagggtctcactacgtagcctttacaaagatttcctggggctgtagccgcctgttaggtttcctaaatgcaccgcactcctccccaaggggtgaaccaaccttggcagagcgagccgcatacacggaaccccattaacggcacgacggcgaagcgaactacatcccagttcctctaattactcagctaagggcgtcccactccaccctcatggttgcactgttttcccggacggtcatccaacgaacaggtccttatggagaggcactcgagaaacagctcgagtccccttaaggtccacaagtatatcatcataatcaaaagggaaaacagtgtatcatagataatctcatcatgatcattgattaatgtgaagcactagcataaagctaaaccataataaaccaaccagaataggtaaacaaggacaagatagacaaaagctagtcaatccttaggtataaactgtgtaaatacggggaatgaattataagaatgagtaggacatagatgggtcaagggacacttgccttcaccaaccagctgctgctcagggtcttcacctgcaactccttcggactccgccaactggccattatctatacgagtttcaaacatacattccacaagttttaatacaaaagaacactacaccaaacaatagaatacaataaatagacggacatttgacgcagggctcacacctacgactaagcaagaaagagaaagtaacggtcgaggctacggtcgaagagcgatcacgccacacgattataaattaaaatactcgtctaaacagaatggtattaatttagccatcgcgttaagcatagggtaaagtcatgttccatgtttaattattatgaacagataaaggtaaattaaaatgattgtcgcgcggcaagactcgcgacacaacacttaaattgaattaagaaataaacgacccgtcgcgcgacggggcgcgcaacgagactcttgcattaattataaagaaacgttaag

SEQ ID NO: 85448 - DNA, 230 bp, Zea Mays
ttcaccttcactcatggtcactgcttcacgactttagaaaatcagcagccagcagcgccaagccgtgaagccgcgaaggcttcgttcctcctcctcggtcgccggtcggagcagaaaaagcaagagccagcgagggcgagctgttgacgggacgtctggacgggagggcgggcctgcgggagccaggaggccgagcggcggctggacgcctagactgtggacgcggtggg

SEQ ID NO: 85449 - DNA, 466 bp, Zea Mays
agggacttggacataaataaatcaattggatttagaatattggggacttcgtcagtgcttcttaatggagtcccaggtaaagtgttccattgcaagcgagggtcaggaaatgagatccgcttcccccctcttactcattattctattattcttctacaaccagttgttaaccaaggaaaggatagaggtttgttatgttgttcaatctctatcagttcttgaagtgatttctgtatttaacaatatgttgatgatactcttcttatcatgcaagcctatcaaaaacaattgtttctccttaaggctctcttgaacacttatgccatggccactagagtgaaagttaactacttggagtctagcattatttcattcgatgtagcactagccaagatggaactgctacctggactttctttttccaaattggaacataacctttcacatacttagggttacccatgag

SEQ ID NO: 85450 - DNA, 233 bp, Zea Mays
gtcaggttcgctgagctagagtctctttttttttgtttttttttcggcttgctgaggccgcggccttacgtgtgctctgcaggtggctgatttcgccaaccgtacaacgtcgggggccctcacgacggctgtatctgccgaagtcgagagacttcggacacaacatgctgacgccgtccgtgaaaaatcggccgccgacagtaagtgccgtaagctgacggacaaggtggccg

SEQ ID NO: 85451 - DNA, 214 bp, Zea Mays
cttggtgttgcgtctgaagttctgtcacctgatgctttagtccaataacctgttctgcttgaacctttgtttccttcagtcgttcttgtgcctgggtacaagccctattcttggccgtttccatcatcttaaatgctgcataactcccagtgtacaactgctgccacttttgacgactgtgccctcgagtaagttgcaactctagcacggccat

SEQ ID NO: 85452 - DNA, 173 bp, Zea Mays
gataaatgtcacaatataatcagagtatttattacatagcggaagtcttacaaaataaaaggtaaatataaaacgaactaaggatcgtccttggtgccataaagtcaactgggagacaccacctagatcgaatcgaactcctctttgtgtggctcctcttgaaccacctgttc

SEQ ID NO: 85453 - DNA, 327 bp, Zea Mays
cgccatcgcagcaaaatcaacccgagaacctccttgcatgcaactccctactgcccttgcccctttcgggtaaggtagtcttccactatctttcctaattagtcagtcaagggcgtcccattccacccttgtggtggcacgtatttctcaagttaagctccatgttccaattaaaatataatgatcttgacatgaacataaataaaataacagaataattgtaacatggatataatgaaatattaacccaaaaccaaataatgcaataacataactacccaaatgattcaggggtaaacaagataaacagactagggtgacctattg

SEQ ID NO: 85454 - DNA, 1168 bp, Zea Mays
aaaggaattagttgggccgcgcgggaggtaaggtgggccggcaggtgaatcttggcccaaagtaggtgagttctttccttttttccagttttattttattttcaaatttcgaatttagaattcaaatttcaaatctgcaacaatccaaaaattactaatcataacaaaaatctattatcactttattttttttatccttacttaagttaatgattttaggtatgccactcatacatacaaaataggcatttaacaacataattcctagttggatagaatctcatagaaagaaatttttaaatacatatttgaacaaggtaataatttagttttacatatagactctttttcttaacctttattaggtaacatactttattttattgttccaagtctaaattttaaatttttgcttcccaaacttggacctaagctttgagttaccatactattattatttatttttttgagagatttattttatgaaggaaaggaattcattattggcagatattttattattacaatttttctcttaccaattttttgggctttacagcaggtgtgggcacgatggctggaggccgggcccaatggcaggggcgtggtacggggatggtcctaggccgtcggatctcggatggacggttaggattagatacaatttatttaaataggaactgcccaatcagagatcgaatggctggcctcgatgtcgcctgtgtccgcggcagggagttcgccggagacgaggagcgcggacgctctggggatcctagggagacgaggatggctcggtgaaagtcaccaaaagggggtgaataggcaaaacctgaaaattataaactttgaacacacactttacccggggttaggattagaaataaataataatgagttaggagtgtggaagatagttcctcacacgggtcactaagaccccccaaggatcaccacataattagatatctcttgtttgctttacaatgcgcttggaaagattagagcgagaagaagaaagcaaccaagcaacaatagcaacaaaagaaacacaaatcactctctctctcaagtctctaagcacttgatttgattttggagcttggagaggatttgatgccatgattgtgtctttggagtctattcttttgctctagtgttgaatgag

SEQ ID NO: 85455 - DNA, 306 bp, Zea Mays
gtccagtgtccacattgtgtcattacacatatgtaatgtcccatcacaccctgaaaaccatacaatgaaacacctggaaaaaaaaactctagtgtgctagtggttcacttttttcaaaccaattgagtatgatagcacatcatacatctgtttcagacgtctcgaataagctagcgcatatatatactccctgttcaatgacatgcttttgaaaatgtcgtgggaataagtactgtactcctatatggcatcgtctctgaagttcagttttccatagcagcaaaaaaaaaaaaaaactgatcttgg

SEQ ID NO: 85456 - DNA, 225 bp, Zea Mays
cttatgtgcatggtacttgcgtcacggagtttgaataaacaaaaacaaaaacaaaaaatatctagatgaataaataaatcagtcacaaaaacaaaaaaaactagatgaaaaataaatctgaacggacaaatcagcgacataaacgaaaaatatggacaacaaaaaaacaaattagtgacaaaaacaaaaaaaaatattgaacgtataccatggggcttgaaccca

SEQ ID NO: 85457 - DNA, 108 bp, Zea Mays
caccaaacagatgctcagggtcttcaactttgtagaacatgaagagccagatcacttggtcgccgaagcttgactgtcgattcctcgaagctcgaaaatggatcgcag

SEQ ID NO: 85458 - DNA, 638 bp, Zea Mays
gggcggttccgatcggcatgctttccctaggtctcgtgctagcataccgcggctgcagggccacacgcagcaagagaagggctgtcctacatggatcttgcgtcggcttcctagcaggggctagccaccatggggaaggatcgctgggggaagggggcttcgtacctgggcagggggcgtccaggatcgccagaacaccggtcgtggctgctgcgcgccgctagaaaaagaggggaggagcgcagggaaccgccgacgctatttcacgatttggatcagggagagaagaagtggatgcctgcacaggggagactattttagagatggagaaataggtgatagaatatctgcatatatagagaggagggatgcagtgaggcggttacgcggcggaacaaggtgaggtgggggaaataagacgtggcggttgccgctttcgttgcgagttcaaacccagcctgccaagggaacatgggggttgacggggtagcgaaggatagatcggggaggtgtagacaaggttagcagacgcgaacgagtgacatgtcattcgtgagaagttgcggtttggcgatctcgtgaaaaaaactcgaaatctggaatgggcccgacgagaggagtatatatgtacatataat

SEQ ID NO: 85459 - DNA, 200 bp, Zea Mays
gaggcgaagaggaggggccgggccgggctgtgccgagagcgcgtcaactgatgaggcggccggccgtgggcgacgtcttgtatcgtagcgcggagagtgagttcgatcattccgaggctgtttgtattttgccgcgaaacggcacggccatcccaatacgcacgtcgtgcagctggagctcgctgacgatggagtgatga

SEQ ID NO: 85460 - DNA, 529 bp, Zea Mays
cggcgcggtcatcagtagggtaaaactaacctgtctcacgacggtctaaacccagctcacgttccctattggtgggtgaacaatccaacacttggtgaattctgcttcacaatgataggaagagccgacatcgaaggatcaaaaagcaacgtcgctatgaacgcttggctgccacaagccagttatccctgtggtaacttttctgacacctctagcttcaaactccgaaggtctaaaggatcgataggccacgctttcacggttcgtattcgtactggaaatcagaatcaaacgagcttttacccttttgttccacacgagatttctgttctcgttgagctcatcttaggacacctgcgttatcttttaacagatgtgccgccccagccaaactccccacctgacaatgtcttccgcccggatcggcccggcgaggccgggccttggagccaaaaggaggggcggtgccccgcttccgacccacggaataagtaaaataacgttaaaagtagtggtatttcacttgcgc

SEQ ID NO: 85461 - DNA, 484 bp, Zea Mays
aatttcggcagcatcccctttgcaagattgcataaataagggggcaacagggtataaacatatatcatgacaaaaacatactaggtattattaatcggctagcaagggaagataaacgtacgacctgaactgaattaaccagtgcgcacgactatataaaaaacaaacttcctttgacaataagtttctaattaaatcatggctgcgcctgggcagcgttattgtgagggtgtaagtggacgtgctgctactcccctcattcccaacatgtatcaagtacctgcattgagtaatgcaagagtgagatgacacatctcagcaagtaaaataatatcaaactattcaaccacataagaacattgttttaccaccacctgattccacaaccttcttattaccaaggtgcagcacgtatacaacgtacaacacacctagttaccacacctcgcaggtagaaaccacaatagtaacatagtaatgtcac

SEQ ID NO: 85462 - DNA, 216 bp, Zea Mays
atcaccttgggttcctccttccattcttccttcttcctccctccaaactccaatggaagactcgcacccacacgacggggtaccaagcggggaggatgcaccatggagaggaggggggggcggctagggttgaggggtggtgctgcaatcacttgggggagaaggagagggagagagagggggggtggcggccacaaaggggaatagggaaggggg

SEQ ID NO: 85463 - DNA, 1267 bp, Zea Mays
attttctacaggttcgggccgcttggagaggcgtaataccctacttcatagtgtggatctttatgtggtaggttacaagggaagtctccaggatggagaaaagctaatgaaataggtagatggtcgatgaaaattatagggtacccactagtccttatatactcgatcggccgtggacactacatgcatacgtgacgaactgacgatcatgcataccctaaataatagtgaacggactgaactgatcttcctacaatcttgccgacttatcacaaatctgcccgatattccagggcgctgcacgcgggaaagtcgggtgtgcgctacagatagcgctcaagtctgacgggttgcttgggtctgagtctgcttttttctcgtgtcggcccactccatcagtagttctgtcccggcccacgaagggatgaccttgcgaggtaacaggctcaagtctctcgcgatgccttcttgccttctagtggacacggggatatctgtcccccacccgtgtctcaagttcatcgtctgagtccctgaaattcaccattcggagtgagtccacgctaactttccgtgccgaacacaaatctattgtcccaccggtttccgaaatcacggcaaaatgagattctgagattatcacccagtcgaagaagatttttcaacgggatgacgaaaatacattgaggatcgagaacgtgtatctctaaatatgttggtacaaaagcaccaaagacgtttccttaactggactgttggtacaccgagatgaagttgtcctactatgtgccgtagttcttaaaaaactaaacaggcaaagagcactagctaatcaaatgaactctacgcgtctgcactttgttttcatgtggccgtagatacgcgcggtcctgttgcgtgctccctgcaccaccgctgcctatattcccatccagctggttcttgttggcgtccagcggagccgcgcctccagctctcgtcctgccaagctgcttgctgggtggtgtgctctggcgactggcgtgccgcgaccaacctttgtcatcgtcctgttgcgcggcgcctccctttgttccatatactaatccagaatcacacacaggagcgagggagagaaagatctagctgcagctgcagcatctatctatctatctatctatctatctatctatctatctatctatctatctatctatctatctatctaaaagtatcaatcacatcagcctaagcaaggcccgtagtaattatccaaccaaggaaaaat

SEQ ID NO: 85464 - DNA, 273 bp, Zea Mays
actttagtaccacaattttcttccttatatcaaatccctgaagtgaggaatctccacaatttggagtctctcacgccttgcacaattgatctctaataaacacaagagtaagggggaagtcgagacacacacaagagacaaacttgcagcaacacacgcacacgagtcgagagagaggagcacaaaacaacacagtggaattacaactcaaaagaagtgctcaaatctttatctagcaaagcaaaggcatggatgcgatgtctcgacgttgta

SEQ ID NO: 85465 - DNA, 717 bp, Zea Mays
cagaattaaactgtgggttggtaaaagaagttttagataattttatcagctttccagattattaaagagtgcattcatatgatttgtgaaactccagttatgtttgtcttactgtggctgttcctgtttgcctgacaaaaatgactgggtctgttcactggtgggtttcatctagtaaatgaccgaattggctcttccaactatggagacttttgtagagggataaaagttcttacttccagcagaatttcataatttttggttcagtagtttgggagatatcgaattttaaagtgaaccatactgctgtctaaaatagattcagtcagttatcttgtgagatgttttagaaattgtagatgtcagaatttaattatccattgaatactgaagttgtagagtattttgtgtagatactcctagagtatttgtttgatatcaccgctgttttaattttaaagatacaaaattaacaaacagcgctgctgctgtatgacatgtggttcagggtgggagtctttccactgggtcttggtttcaagtgtaggagagttttgttgattgatggcaaatgtttatgaaatatttgtactaagttttatgcccgctagcaggtggctacactccagatcatgtctagtacatttcttcttcttcgatgaaggcaagtgaatgtagcggtggttgcttccgttctgacctgttatttctattgcc

SEQ ID NO: 85466 - DNA, 353 bp, Zea Mays
atcctgctaaatgatcaccgagcacatgaacacgcgagagtttagagtggttcgggccgccggagcgtaataccctactccaccgtgtgttggattgctgtggaagcttaaaagctgagagtctaagttgggtctgagagatgcccctcgtaacgctgcatgcctccccttttatagctaagggggacatgtacaagggttctgagccccgacatgtgggcccaggaacataacagatgtagtacttggagctactaatgtttgctgctggagcaaccttcctacgtcctgacgtctgagatctgtgtagtatcggcgtgcaggggaagcttctcgcataagggatgatgagc

SEQ ID NO: 85467 - DNA, 185 bp, Zea Mays
cgccttcttgaccgttggttgcggcgaagatgaaggggcgtgctactgcggggcggtggcatgctccctgtgcgacgattcgcattcttcgcgcttcgggcttgtatgacatgtgaggcctggccccgtgtcataggatgggaaccctggtgcgcatcgggggagaccttgcccgtgacgcttcg

SEQ ID NO: 85468 - DNA, 1106 bp, Zea Mays
gtcgccttcgctggcgagccgctcggagctagctacccacgcgaccctactggtgtggaggtagttcatacctgtagagtagatatggagctagaactccgcttgaaggcggatgtaatacttttgctttttgtaaggtacttttgagtactatttatcaagcagtattagcacttatctgtgtaccacttgtccctgttctgtgtggtgtagccgattcctccttggtacctggcccctgggatgtaggctcgatttgtcgaggctgcagaccagcatacctaaggaagagttggcaatggcccccaggaggtagcctcgactgggacctgagcctgcacacagctttggctagggacattagtacacccacagggcccgccatctgacactagccatcctttgatacatgctcgggacctgcagggtttagtctgggaggccaagttgtgcgtccggaccccctggatggtggttctaggtactaggacacccgtcgcagagtggtagagcgtgcaggcccactgtacgggaccaggctgagcggctacatgggctccggaccaccccaggagacaagttcccattctctagttccggaccccaggttgtcggacccacaggacttatagctccaaatactagggtacccgtcacggagtggtggagtgtgcaggctttcgggtacgggaccaggctaagcggccacacaggttccggaccaccccatggaacgggctaccgttctttagaaccgccccccaggctgtcgggccctcctgctttcacaaagaggtcctaaactgcaagcctggctgttcaattcggatgtcattatgtctgatggaaaagaaactgtttggatgggttagataaaataatatctgaaaaactgcaaggcaaaaccatggagcagtaggataaaactatcatagaggcacatctgagggggtaattcttttctttataacttatcatgcatgggtgcagaccaacaggctgggcttatgagggcggacctcaccgggttggcgtacacgtatgcgttacctagttacaaaagggagaaaaatctgacccctcagacttgctcctatggatagaac

SEQ ID NO: 85469 - DNA, 497 bp, Zea Mays
gaaccacgcgcagagctcttcccaggagtagattgaccctggggcgaggttcatgagccaagttcgggcaggtccagacaaggcgacatgaaaatatgttgccatcacagcggtgtttccacctgctgctgtgatagcggtgacatacacctgcaggaattccgacgggtttgacgtaccgtcgtatttttccggcaggtgtggccggaacttgggatacgttggtgccgggcggacggggcaccagatcccacgtctggttggcgacgagcgccgcgtactcctcctccatcgcccgacgccagtgggggtccagcagggcggtgcagacggaggagggtaccggagaaacctgcgagtctccagtcgtggccgccaggactcggggcgcagggtaccagccgcatgccgcgtcaccatcgggtagacatgccgcgggtcgcggtgaagaagcggtgggtggtacaccggcgtctcgacacgtgccgcggatggcc

SEQ ID NO: 85470 - DNA, 1618 bp, Zea Mays
aggcggtgcagtcccaccacccccgctcggcccaggggcgatcggagacggggccccgcggagaggcgacaccaccggacccgggcaaggcatcgggccggtagtaggatcgacaggcggtgagcgagtacctgcagagagaggaaggataggtggctcaaccactgcgtcagtcagaaggagagtgaagaggtcaaggtcagggtcggaggagggtggtgtggtggtggaggagtagggaaatacggactcatcaaacaccacaaggcgagagatgaggacccggcgagaggagaggtcaaagcagcggtagcccttgtggtccggggagtacccgagaaacacacagagggtggaacggggtgcaagcttgtgaggagcagtggcagcggtgttcgggtagcaagcacacccgaagacacggaggtggtcatagcgcggaggggtaccgaagagtgcctggtgaggagtgggggccgggcacgcagtggaagggagacggttgaggaggtaggtagaggtgtggaggccctcggcccagaagcgtgccggtaggtgcacttggaggagaagagtgcggatggtgtcgttggtcgtgcggatcatgcgctcagccttgttgttctgggaggaggtatacgggcaagacatccgcaagtgcatcccgtgggagagaaagaaggcgcgggaggtggagttatcgaactcccgaccattgtcacactggacggccttaatggtgaggccgaactgagtggacacccagacgaagaagtggcggagggcggggaaagcttcagacttggcacgcaaagggaaagtccacacataatgagaaaaatcatcaagcaccacaagatagtatttgtagcctgacatactggtaataggtgaagtccacaaatcgcagtgtacaagatcaaatgcatgagtagcatgcgaggaagaagaagaaaaaggaagacgaacatagcggcctaactggcacgcatgacaaagatgctcatcatgtgatctagtacatgggatagtggcactatgagtaagctgcatcaaggcatcgcgtccggggtgaccaaggcgacaatgccaggtggtaggagacgtggtggcagcaaaaacagcagcagtggcaggtgacgacgacgaagaagaggtggcgtgcggaagccgaagggtgtagagggggctggtgctgtcacatctgaggagggggcgccgagttgccgagtccttcacagtaagaccagaagagtcaaactcgacagaacaagaattatcagcagtaaaacggcgaatggaaagaagattgtggatcaaagaaggagcgacaagaacatcgggaatgcgaaaagagccagaagggccggcgacacccacagatgtgacaggaagacacgagccattcgccaccatgatggacgaagggagagaggaaggagggcgaacagaggtgagtataccagggtcaggagtggtgtggtaggtagcaccggtgtccgcgatccactcgggacccatcagtggagtcagagtgggagtctggaaggcagccagggcgatcgcgtcccaaccaaccaacccggacggtggagcagacggcggtgtgggccacgac

SEQ ID NO: 85471 - DNA, 224 bp, Zea Mays
gacggagtaagtggacgggtcggggtgatagccgccagtgctgtcgaggaggacgaggaccccgggccggagatcgatgcagcctgagcacccagagtgatctcctccagagcaaggtcgtcgcggacctggaggaaggtagggaaggggcgctggcgcatgatcaacgaccggaggtgggtgtagcgatcgctgaggccacggaggacgttgaggacgagcat

SEQ ID NO: 85472 - DNA, 435 bp, Zea Mays
cggtgtgtacaaagggcagggacgtagtcaacgcgagctgatgactcgcgcttactaggcattcctcgttgaagaccaacaattgcaatgatctatccccatcacgatgaaatttcccaagattacccgggcctgtcggccaaggctatatactcgttggatacatcagtgtagcgcgcgtgcggcccagaacatctaagggcatcacagacctgttattgcctcaaacttccgtggcctaaacggccatagtccctctaagaagctaactacggagggatggctccgcatagctagttagcaggctgaggtctcgttcgttaacggaattaaccagacaaatcgctccaccaactaagaacggccatgcaccaccacccatagaatcaagaaagagctctcagtctgtcaatccttgctatgtctggacctggt

SEQ ID NO: 85473 - DNA, 1652 bp, Zea Mays
gagattcgacggtgtccaggtcgcaggatcataatctggcggtcggcggacgaaacagatctcgagtgcgttaggccattgatcgggctgtgtacggataagattagacggataggtaaggggctttcgaccgtggattggtgatcttacggctggaatccaattaaacgtaccgtttcgatgaaatgctaggaaccgctcgatttaaatctaatgtgtgggagtcaatcggctttggtaaaatcttgtacgttcatcacggatcctatggacctcatcgcataccggttcacttaatggctgggggtgatctgggccgttcatttctaatcggacggctatagactcgcgataccccttcgcggtgacgttttgttaaaaagaccctgagaaatataagaatcaacccaccatcccgtctggattgttcactgagtcttagaaattttatagtttaacccccattgttctctgtatttagtgttcggcccaaagaacaaagaaactaggtaaatacttatagaaattgattttcaatacgcaaatgaatccacgaacttggggaattcatatttaatccatcctggctccaagttaattcattccagtgacatttattttggaatattattgtctatcacttagtaccattgttttgacatgaaacttatattaaattggatcacctaattaattttgtatcaaacacacatagaatcttcataaatttatagcttctccgttttaattcgatttgatccgttcaagtttcgttagcctcgtataaatatttactatgcaataacaacatttattataccatgtcttattatattataattagatttctatttaacttatgtcggttagtcttgttaatctgcttatcattataatctactagaatataatttatggtcaatttataacttagattaaatttgcgataattatttataaaataacctctcatatgatttatactgaccaaattaagatatagtttgacatgtcaatcacacagatcttttataaaatcataactcattaatcgtaactccgatcttagtagttctggatcccgcgatctcgtagcaacgtgtagattattactattcagtttgttcttatgtttggtgtgatgttaattttatctataccatgtttgtttgtattgctacgactagcgtgaggttacgaggatctgaagaatcaccctggtaattggaatctcaagtgttaggcaagttgtgcccttgatcacttcttttacccactcatgttctaattaatcataatgatctgcataggttaattttgatgggacccaataggttaccctagtttgtttatcatgtttaccttgtttacccctgaatcaattgggtagttatgctattgctttatatggtttttgggttaatatttcattacatccatgttccaattattctgttatgttatttatgttcatgataagatcattatgttaattggaacatggagcgaccacccgggaaaacagtgctaccacaagggtttaatgggacgcccttggctgattaactaggaaagctagtggaggtcttccttacccgaaaggggcaagggcagtaggggagtggtcagtgtagggaggccctcgggaggat

SEQ ID NO: 85474 - DNA, 422 bp, Zea Mays
ctttattaattttgttctattacttttattaaggtttggtgtttacttacacctagtaattgctaataaaagtttgaccaacattaaaagcaatgctcagctttaaccattttctttgataagccttacacttcatgagctctcacctttggcgagttcatgcacattattccccacaacttgttgagcgatgaacgtatgtgagctcactcttgctgtctcacacccccccacaggagaagaacaggtggttcaagaggagccacgcaacgaggagttcgattcgatctaggtggcgtctcccagttgactctctggcgccaaggatggattttagatcctgctatatttatcttttattttgtaagacttccgctatgtaataagtactctgattattgggacatttatctctatacact

SEQ ID NO: 85475 - DNA, 201 bp, Zea Mays
atacaataacagagtgtatagagataaatgtcacaataatcagagtatttattacatagcggaagacttattacaaaataaaaataatgagtataaaacgaactaaggatcgtcggcgcagatgtcaactgagaaacgccacctagatcagatcatactcctcgtcttgtggctcctcctgaaccacctgctcttctcctg

SEQ ID NO: 85476 - DNA, 606 bp, Zea Mays
ctcacttcgagtgacagcgcaaactctgatgcgctgagcagcagcaggtggttggcaggcggatcagatcgagcctggattagcagacaccagtgcgcgcaagaactcgatcgttccaataggcgacgacgctctaacacatgcatgtgcatgcgatgcgggcaaggcagttcgcggccgaagaagacgatcccgatcgaggcgagcgacgtggcctactctcatcttcaacctctgaagaaagtgaaggagaaggagctcgaagtggctattcaatgcgtaccgcgtacttccgtacgtcccaccggtctccatcgaccatcaccggcgttgatggcgaactggagatggaacggtcgtcggccgtccttaaataccgacagagtggtcttgtccagtgccctatctatatcctggccggtctaccagcactctaaaactccggatgcagttggaggtagagatgggctaatgacacggtggccactggccttcacactactatgaaatgtctgcaatgctacatgcatggcggagattggccggtcacattctctcttggatgcagaaactgcccatccgtcgtcgcactcgtgtgaagaactg

SEQ ID NO: 85477 - DNA, 1938 bp, Zea Mays
cggtccctcggaccgagtgagcttctcttctcaaatcaattgggaacaaaactgtaacacctattttgtaacatataataaaagaggaggaattaattcctttatctatttgcatgtgtcatttctacttactatcataggtaaacacgccacttacacagttaaataaatacccgaaagacacctaaataaattttgcatcatgctgagttttactcgattgcgcatttgtggttaataaaataaatgagtcattagcaacatatcaagggatccataaaaatttaaactctaaacttggggacaaaaccatgaaaatagagaggaaggaatattgttcaatacaaacaaaattataatttgataacttcatcacagttggtatgatcaaaataaataattagctggtgtacaaagtgccccaaagcttgaatttgaattggagtttgaatttggaaagaagggaaaagacaaaagaaaataaagtaaaaagaaaaaggaataaaaccctaactgggccgactgtctccaatccgggcccagctccacactccctctctgcgcagccccaggcgaggaacgtggtttgcgctgtgtgccactgaccggtgggtcccacgtgcagcctcaccgtttcacgccgcgcactcatctgtttcactgtcacgcgggccggcttgtcagccgcttcgtcactgttacaacgactccgcgaagaccgcggcgtggtgtacgcagccgctccgccgcgaagctcgcgggtggttgacccgacccccctaccctaacgctgtagtccgccgttgagaacacagagagaggagtggaggtcttgggcaccgccgacgttgtctacggctgtcaccgccgttcagtactcgtgtaaggattctggggaagcttcgtgccgtgtgggacctgggcagtcccctctcgcttgggaatttggccgggagcgggggggaatttctctccgtcgctcacagttcgccgccgaccgcatcacaacgtggctgggaacctccgcaccgtaatcaccggtaagggtcttctagatcttctcacatactttggtagaccgtgtaggatcgatcggagttaggatcggggctcttgggtgtctgctcggccaactccggtgatggcgcggccgtggggaggctctgcgccgtcgtggcttggtcgtggggttgaaggcgctcgcgggccgtcggatcggtgcggacggctgagattaggttagagaatccccttcgtgggattcggtcttgtccatcggatcgcgatcgggcggtcgaggatgggtctggggcactttaaatcggcaccgtttatttctaatccagcgcatagcattgcttaccggttcttataatgcgtgggctaatcctggcggccggtttctaatcggacggctccgggcggaagataccctttcgctttggcatatttgctaaagagccccctggtaaactgaaaatcaacccgcagtccctcgggcactataccctatgtcttaggattcttaccccgagccccctgtgttcctgtgtaaatgaggcccagtccatagctcttcaaattcagctatttaattatagaaattactttttaatacaaaataattgctagaactttgataattcatagaaaatacatatgaactccaaattaatcccttccactttctaaatttttgtaattttattctttatcacctagagcctctgttatgtcatgaaaacagtaagaaatttatttatcacttaatcctatttaaagcacataaaaccttgggaaattcataacttaaaatctataacttcaaaaattatgattcctgttcctagaattttattttaatgtgtagattattactgggtattttatttatatgtttggtgtaatgttaatttctctatatacactgtgcttgtt

SEQ ID NO: 85478 - DNA, 1009 bp, Zea Mays
tgacggtcgacatcggcaagccggtttgtttggcggcgcagggaaatgatgcagcatggcggtggcatgcaaggttcggccacctcaactttagatcgctgcggaggttgtcgcagcaagagatggtaagggggttgccgtcacttgatcgtatcgatcaggtgtgcgacagctgcttggcagggaagcagcgaagacggtcgttcccgactgaagcaaaattccgcgcaaagaacaagctggagcttgtccacgctgatctgtgcgggccgatcgcaccaattacaccaagtggcaacagatttttcttactgttggttgatgatttcagtcgctacatgtggctgatcttgctgagttctaaagatcaggcggcggagtcgatcatcaggcttcttggcggcgtggagacgcaggccgggcggaggctggggactctgcgcaccgatcgcggtggcgagttcacggcaaggagcttcgccgactactgcgccgcgcaaggcatcgccaggcatctcaccgcgccgtactctcctcagcaaaacggcgtggtggaacgccgcaaccagaccgtcatgggaacagcgaggagtatgatgaaggcgatgcgaatgccaagctggttttggggggaggccgtaaccacggctgtcttcctcctaaaccgcgcgcccacgcaaagtgtagaaggaaggacgccgtttgaggtatggcatgacgccaagccacctgttcattttcttcggacattcggttgtgtagcacatgtgaagacggtcggcaagtatctgtccaagctcgaggacaggagtgtgcccatggtgtttgtggggtatgaaatcgggaccaaggggtaccgattctataacccaacaacacagcgtgttcttgtctcgcgtgacgccgtgttcgaggaggaacgtgcgtgggactggactgctgaacacccaagcgcgctggaggatgcctttgagccattttgtgtcgaacacggcgtggctgcagtagc

SEQ ID NO: 85479 - DNA, 672 bp, Zea Mays
gggtaccctgtttcagggtaccgacacaattgatcaaaatacaatggaagtttctagtagccgcttattgccggtgagagtttgtgcccccaggagcgtctctctgtacgcggcttcttttagtgctgagtttcgtcagtcacaatctgtttgctaggtaattaacctgtgaacttcctggggatctttgtgaggcttttcttgcaaggatcatgttggtcctggtatgtgttgtaactcaccttttctcttaacgaaaaatgtgcttaggcacggttgcgaaaaggtaaatcagcgtgtaggttaaaccctgcaaaagcctcacgtgagagaaaaagaacaagatgtagccaaggacaacttgccggaagacaggcaccgcacggtatgggctcaaaattccaaacagattgcatatgctcccctgtaacatgcatgctcaaaatacccggcaagtcatccttggctgcatcccactctctttctcgcttcacgtagggccgttggcagtcacaacaagcaccaaactaagggccgctgacagtcacaacgggcaccaaactgaactctagggtgtgcaccacaggaagccgatgcatgtgtgtgtgtatgcctagtcattggctgctactacttgagacatgtgaggctcagttatctatatgactctat

SEQ ID NO: 85480 - DNA, 214 bp, Zea Mays
cctgtgccgatttttttttgttttttagtcttttttcgattttttttacatttaaattcctcgatgacttaattattgttttggacctgaatcttggcgccacacctcatggcgccgagcaacacgcctcgacgtcaagacctgtggcgccgagcaggctgacgcggcatcctagctcggcgccataaatcttaacgtcgagctaggatttata

SEQ ID NO: 85481 - DNA, 80 bp, Zea Mays
accttctagattttcagagagacacttagaattttgtggactaatatgactgttccaccaccttgagcgggattttcttg

SEQ ID NO: 85482 - DNA, 362 bp, Zea Mays
cacaaatattttcatgctttctgagcagttttgtcaggaaaaaaggttatacatgtatattgggacatttagaatttgatgagaatgaagttgatcagaccttgtataacgatcatttgtttacattatgaaaggaatcatacttgtttaccaccattgacaagtccaagtgcaaaagacgctgcaactagagctctagaggggttaggtgggtcagggaactagattcaataatctgggaatgaactgaaacatagacaagaagaatggacaacacaaggtaccccacattgatcaaaacttgaggattgaagcaagatgccgcgaactcacaaccaaaaatgtacttgtcaatgtccagc

SEQ ID NO: 85483 - DNA, 327 bp, Zea Mays
ccttggggctataaaagggacccctaagcgcatggaggagtcactcaagcattcactaagtattttaaggcatccagactctcccgcgcattcgctttgttgtgttagagatttgagctccattcgagtcgcgaactccctgtgttgtcaattgagctcaagtcttcacttgtgtgtgtgggtgtgctgcggatttatgtcttgtgtgtgttgctcttcccaaccttactcagtgctttctttgtgatctcctttgtaagggcgagagactccaatttgtggagattcctcgcaaacgggaacaatactctaaaagaaaaaccgtgg

SEQ ID NO: 85484 - DNA, 383 bp, Zea Mays
atttaatcccaaggttagaaaccctaaaactcctaaacccccccattagttatctcctaaggcccccacctcataagacatttcattcatcatatgcatacatcatggttgttagtagcacctcacatagaatatttttgacacccaagaaatatagataaatatttgttcaaaagaaaaggagattaaagaaaaagagaaaaagaaatagaaatagaaaaagaaaaagaaaaaaggaaatctcctccccctcggctaggccgaatccagcccacctctcttccctcgcgcgcccgcactcctccctccctcatggcccacgcggcccatctcccgtgcacccgccagcgcttgtgtcgcgcctcccctcccgctgaccagcc

SEQ ID NO: 85485 - DNA, 394 bp, Zea Mays
gcctggcccattacaacgagggtgagatggtaattacatggggaaggccctaaacactagacgggtagtctaacagggaaggtcctaaaccctagacgggtagtctaacccccgcagtcacaactctatcctgtacaaatgttgagactggattgaaagtctaaaaatacactcgacggtaaccccttggtgaagatgtcggcaaactgtagcgtggtggggacgctgagaacccgaacgtcaccggcagcgacacactcgcggaagaagtgtaggtcgatctctacgtgcttggtgcgctgttgctgcacggggttggtggagaggtagaccgcgctgacgttgtcgcagtagacgagggtggcgcgctggaggggactgtggagctcgtgga

SEQ ID NO: 85486 - DNA, 647 bp, Zea Mays
cttcctccatcgtcgttggcaacggttccaccctcccggtcaccttagtaggtgcatgagttcttccaggaccattctgccttaacgacgtccttgttgctcccgaactgactcatcccctcctctcggttcgtcgcttcactagtgacaaccagtgacactatggagtttgacccctggggtctcaccatacgccaccttcccacacatgctgtcctcgctgtgacagctctagccccctctattctcttcacttgccctccactccccacaccagagtagcctcatctcctgcccttactactaccaccacatcacatgctattgctactaccaccacctcctccgccatttggcaccgtcgcctcgggcaccctagacctgacgtcatgtcccatcttgccggccactctgacatatcctatactcggggctcttctgagcacctctgtcatgcttgtcagcttggccgtcactcccgtcttcctttttccacttccacgtccagggctgttcaggcctttgatcttgtccactgtgacctctgacgtctcctgtccttagcctctccggctacaaatactacctggtcattctggacgactactcccattttctttggactttcccccttaggctgaagtccg

SEQ ID NO: 85487 - DNA, 230 bp, Zea Mays
cttttatacaccaggattttgggaccctagaaaatttggggccaagtgcctatgatccacttgtgctgcgcaagggacgggcgcacctccaaagtttagggtacagtggatgtgggctatgtccagcggaatctacatgcggctgcgtattttgaacgaccacaatacaaatgcgagactgtaaatgagaggatgctctcagtaaagtgtgtatgtggacacacaaatag

SEQ ID NO: 85488 - DNA, 343 bp, Zea Mays
gtcactcctaggctaggagaaatcatacggttatacatctcggttgtaacgcttattgtgagtattgcattgatagtggaaagacaaattcaggttaacatccaaccaacatagttcctagtacacttcatcaatgttgtactaaatgattctaaattctagtacttccatatcatcaaactgccctacgcattactcataatctcctgcaagctggttcactacttccaagcacatcaagttgaggtgcacacatcatccagaagtcctgcataataaggattttatggaccgaattgctaaatgggatattgaacctaaagtttataacatcaccttcaag

SEQ ID NO: 85489 - DNA, 533 bp, Zea Mays
aattactcttggaaaacgccaaatctgagtccttggagactcaattctggtcatcaatcaagtcaacaaagagtgggctcacaatgatgttaagatgatggcttattgttaagaaattcaaaagcttagagataagttcgatggtattgagttcttacatgtccttcgggctaaaagtgaggaaacaaacatacaagccaaattggtctcctcaagttcacctatcctagaggcctatctagagatactaactatgcctaccattcaaaagatcatagagtcacctcaagccaagttgcctaaggaattagatccatagattttataagccccttcagctaaggttatgactattgacttagactagtgggctctttttatcaagtaccgccaggatagagtcctctcatcaaatagatccacgctgttcagatacaacacaaagcaaaaacttacatgttggttaatgccaatctatacataaaaatgcttcgggaattctgatgagatgtgtcccgatcgatgtggggaag

SEQ ID NO: 85490 - DNA, 1340 bp, Zea Mays
ctacaactgtctatttactgatgtaggtgttactgtctttagaagtgatgattcaatagcatttaagagagtgttagatggtcagctatatttagttgattttaatgacaacaaagctgacctagacacttgcttaattgctaagactaacatgggttggctctggcatcaccgactttcccatgttggaatgaagaatcttcataagcttataaagcgagagcacattttaggactaacaaatgttcattttgggaaagacaggatttgtagtgcatgccaagcagggaagcaagttggagtccatcatccacataagaacatcatgacgactgacaggccgctcgagctactcaacatagacttattcggcccgatcgcttatctaaacatcggcgggagtaagtactgcctaattattgtggatgattattctcgcttcacttgggtgttctttttacaagaaaatctcaaacccaagagattttaaagagaatcttaagatgggctcaaaatgagttcgaattaagaataaaaaagataataagcgacaatgggatagagttcaagaattcacaaattgaaggctttcttgagaaggagggcatcaagcatgagttctcttctccctacacacctcaacataatggtgtagtggagaggaagaatagaactctactggacatggcaaggaccatgcttgatgagtataagacaccagaccggttttgggctgaggcgattaacaccgcctgctactccatcaaccgactctaccttcaccgaatcctcaagaaaacatcatatgaactcctcactcataaaagcccaatgtttcatattttagagtctttgagagtaaatgctttattcttaggttgaagttctaaatttgctcctaaggttgtagaaggctttttactaggatatgactcaaacacaagggcatatagagtcttcaacaaatccagtggattagttgaggtttcttgtgacattgtgtttgatgagactaatggctcccaagtggagcaagttgatcttgatgaactagatgatgaataggctctgtgcgttgcgctaaggaacatgtccattggggatgtgtgtcctaaagaatccgaagagcctccacaagcacaagatcaaccatcatcttccatacaagcctctccaccaactcaagacgaggattaggctcaaaatgatgaagatgaagatcaagaggatgagccacctcaagaggacatggatcaagggggagatgaagatgatcaagacaaggaagatgatcaagaaattagagatcaaagaccgccacacccaagggtccaccaagc

SEQ ID NO: 85491 - DNA, 1873 bp, Zea Mays
agatttcaagcaaattctaagaaagttcaccttagggccatgaaaagaatcatgagatatttagtttacactcctaagtttgggcttccaggggatctacatttgatttaattggatattctgatgccgattatgcagggtgtaaaattgataggaagagcacatcagggacttgtcagtttctgggaaaatccttggtatcttgggcttcaaagaaacaaaactccgtagctctttctgccgctgaagccgagtacatttccgcaggccattgttgcacacaattactttggatgaggcaaacccttagggactatggctataaattgagcaaagtccctctcctatgtgataatgagagttcaatccacatggcggataattccgttgaatacagtcgcactaagcacatagacatcaggtatcactttttgagagatcaccaacaaaaggggatatcgaaattgcttatgttaatacccacaaccaattagccgatatctttaccaagccactagatgagaaaacctttagcaaacttagaaataagctaaatatacttgattctcggaattttgattgaaacattgcacacatagctattttatatacctttgatcatatctctttcatttggtacaaatgcatatttcttattattcttgcgccaagactacgactaatgtgttttcaagtatatttctaaaactaagccgactaatggagttttcggcaaagacaacacttccactcaactctaacggtatcatttacccttttccggtattccacaaactctcgatggtatgactctttactcatatttactttaccatttgggagaaattgttaggccccaaagggggagaaaatactacagggctctcaagttctccgttttttgcgcttaatgccaaagggggagaaaatattaagcccaaagcaaaaggaccgcaccaccatttcagaaagtagaatttcaaattggtatgtatttcaaagccctcttaaaaaactaagaggggaatttaaaatagggggaggaatttcaaataaaaaatgcatctagcaatcatattactatacctttgactatttgcaaatgtttttgaaaagatttccaaaaacaaagctaatttgtgcaaatgtggtccaaaatatcaaataaaagaaagccaatccattcactcttattcttagtaatactttcaattggtttaactccatgtaacttatgcacacttatcataaatgcaaacttgttacatttctgcacgttatatttgctttggtttgtgttggcatcaatcaccaaaaagggggagattgaaagggaaatagggttaaccattttctattattaattttggtggttgacgaccaacacaaacacatggactaacaagtttgtctagaattcatgtattacaggtgcataaggttcaacataaaccaagaaagaaatcagtttggggtcatgattcatttggagcaaaagaatttaagtgtgctgaataatggcgcactggactgtccggtgcaccaggaccgtacaacttcgaaccagccactctcgggaattttagggcgcgctccactataattcaccggactgtccggtgaactagtcgagcaacggctccctgcgcaccaacgatcgactggcatgatgaacagtgtgctacagtaccacagcagaagtcagagggcaccagactgttcagtgtggcaccggactgtccggtgcaacaagactacaaaggctccaacgggtgaccaactccgaaccctaacagttgcgctgacgtggcgcgcaccagacagtgcacagtggctgtccggtggcgtaccggactgtccagtgcgcccatcg

SEQ ID NO: 85492 - DNA, 450 bp, Zea Mays
gttcaacccccaactccggtgcgaagccgacacggacgccggtgatcttggcatggtttgttatgaagatgatggctgacggtgtggccccacgcacagtgaggtggataggtcgtgttgtgggcgcaggtgagcggttgtcgagcgggccccgctcgtcagggtggcgcgcgcggaaggggagagtttgggccgcgcgaggagagaaaggagtattgggccgaattagttttatcttttttttctttaatttcttctttttattttctttttttcttcccaaattcaaaacttcaattcaaatttaaattcaaattctgtggcaaatttgtcctcagattaaatgttcaatttgaacataccagtatgggaataatttacttatatatttattttatactatgtagtattttcttcttttcccatttccattttccaattctaaatttc

SEQ ID NO: 85493 - DNA, 582 bp, Zea Mays
ctctctctctctctctctctgtgtgtgtgtgtactcccgtgctaaactcggaggtgcagactactgtcactctaccagatatcttcaggtaccgctaccggcaataatgatggattagcattagctaaccgagggctccacctgcttgtttaaacgagcaggcagaagaaccagagacatgtgaagaaagagaagggcatcatcccaatcccaaagcagggccgcagacggtggtagggcgaccagggtatccgacggtccctgcacgagaggcgccttttgcggagtgagatggggatagaacctatttaaaaaaaaaattcgtttctgctctgcctctgcctctgcctctgcctcaccttgcatctttgaactccatggaaaacctgaaaaaaaaaatagggagcaaagctgtgctatcagtggttgcattgtcggtagactagcaggagctccttttattttatttttggagagagagagagaggctgcaggctgcggcattattggaggcaggaaaaagaatgatgtacactctagcatagccggagcgggcggcgaagcaatggtggcggtgggtgg

SEQ ID NO: 85494 - DNA, 406 bp, Zea Mays
tagctgaccatctagcactcccttgaaagctattgaatcatcacttattctaaagacagtaacagctatatcagtagaaagatagttgtagcccattttgcatatttgagaaacaaaaagccaattgtaatctaaagaatctacaagaaaaacattggaaatagaatggtcaggagatatagctattttacccaaacctttgacgaaaccttgatttccatccccgaatgtgatagctctttggggatcattattttctcatagaaggagaacatcattttctcccctgtcatgtggttcgtgcacccgctatcgattatccaacttgaaccaccggatgcataaacctacaaaacaattttaggccttgttcttaggtacccaaacagtcttgggtcttttgatg

SEQ ID NO: 85495 - DNA, 602 bp, Zea Mays
gcttgttataggataaaaatcaccttattatcatgcagtatgtgagtatatatgagattacatcatgtctaaaaagacaaataagattagtttctgtagtacatatatgaataaatagctacaaatgatatggccatggcgcaggttgggaataaattttgcaatactagcattcagctgtagattatggcgcaagggacatggttgcctttttaccttgcaacaatagcattgacagtgtcaggacctattaagtccgagggcaatctaaaagttatgtgaaattgagcaccatggcattgtctggtaatgattttgataaataatatatggctcttcttagaagcatagatagattgataatgtttttttggacaaatagtgtttctgcttctatgtagaagtggaggcatcctttcccctcccctagaagggtcacagtttcttttggaagcgtcatagcgcgtcgacctatcaaaggtggaggcgtcccatccccacccctctccgagctctctcttctgcttcggtctcgaagcgtcgctttgcgtcgacctgctgaaaggccctagttgtgtctctccgatgatgatcaaacgttt

SEQ ID NO: 85496 - DNA, 875 bp, Zea Mays
gcaacaacaagcaatgacaaaaaggtgtcagaattggatttgtatatgagtaaggagctagtgaaggtcaatgacaacgaagcaacatttgatgtcctatcatggtggaaagggcaagtgacaagttttcctattctttcaacccttgctcgtgatgttttgtctatgcaagtgtctactgttgcttcggagtctgcatttagctctggtggacgcattgttgatgcattccgttcaaggctcaaaccagaaattattgagacattagtttgttgtaaagattggaagattgcttcagagaaaggtattgctatatttataactttatgattcacatcatcattcaagactaataatatgttttatgttaatttcagatttggagattgaacttaaaaccttaagtgaagctatgaatgtcgttgacttggaggaggatgctgcaattgaaacttgagatgttcaagttcaagttaccatagaatattgttggttgtttggttgttggaactatattttcttatttgcacttcttcacttgtgttgttctgaacttgacatgatcaaatgactgtatctattgtgatttgtgttgtttcattttgtgatgtgaaagtgttgaacacttgaacatgttaattaatgtcaactatctactatctgttatatacttgtgggcttgtggattatgcctaaaagaggggacatgctaccgatttttttaatattgtggtgatgatttcacaatgtccttgtgattagtaactttgaactgcatgatgtcaataggttttctttcctacatttgatctatcatatgcataattcatatcatcgggacgaactacccgacaactatccggcacctacctgag

SEQ ID NO: 85497 - DNA, 343 bp, Zea Mays
cagagatcctcaaaatgtcccctactatatgaatgatctaaactgctagtgatcatggtcatgacgtcggatcttggatggtcgagatgacgtaagtggtggaggaggtggtggagactaggacgggaggtggagacgtgtcggtggtggaaggtcggagcatgtagagtggccctgcgctgtcacaatgggcgagaggggacctagtgaccagatccttcacagaaaaaccagaggggtcaaactcaatggaacaagaattgttagcggtgaaccaactaacaaaaagaagattatgggtggtgtggggctacaagaacgtcgttgagatagaatgacccag

SEQ ID NO: 85498 - DNA, 266 bp, Zea Mays
gcgttctctggtttgttctggtttttcttcttgttaaacttgcggaagtttctcttctgcaccacattagcagtagaggtctcaacaccttttccgttgtcctttgttgtagccctttcctcaacatcaagagtaccaatgagctcttccacattgaactcttgtctcttatgtttgagagaggtagcaaagtccttccaagaaggtggtaacttggcgattataccgccaaccataaacttgtcaggcaaaggacaaggaaaaag

SEQ ID NO: 85499 - DNA, 184 bp, Zea Mays
tgcctttggtgcaatccatgctcagataaaggagaagatgtcgaggcggatctctaggagttccatgatttcgacgagttcgaggattaggctagcgacctcccccagtcagctgcctgtggtgggttaatttacgttggctacgtttctattctgtgtactttgattatattatgtaaatgac

SEQ ID NO: 85500 - DNA, 2562 bp, Zea Mays
cccgtttagatcatagtaattgaatttcattctaatgacaccccgtttgtccaaacagcccgtaatagtaatttaggcaaagtttaattaagctaatatagtttttatataaaatatatttgtatattattattagcaatatgtgggagatatttatgtgatatatttttactataaataagtaagctgaatagcgttttataaattgcagagtaagaaacatattatgttgatatataaaattatttcccatactccacccataaatttgagacgggcttatatctaagctttgaaagtggtgaaatgtcaaattccaaaccaaatagactaatttattaagtaaatttcaatttcttcagaatgaatagatcaaaacggcccgttagggaaaagtctacataaccacctcatctttagagggtaatctaccataccctcaccttcaaatcagttgtttaacccctcaattttacaaaactagtaatataactctctctgtcgcacacacacacacaaattttagtgagtctacttcaccttcatgtcatcaaaaccgctaactaaaaatgacaagagagttatatttgtttgtccaagagcctatgtttttactctacaacttatagcatactctaggagttatttgtctgcctaggagattatatttctactctgcagcttataacatattttttggctcgctatcctatatagtataaatgtagcacataaatatttttttccatataactaacaataatatacaaatatattctacgtaaaaccatattaacttgattcatgcctaaattacaattattagaaaggaattcaattcaaaagatctaaacacaattattagaaaggaattcaattcaaaagatctaaacggagcctaagtccttttgccattttccaacaacatttgcaagtgattgtattattcttacaacagtgctttgaatggcaaatcaccatcgagattaaagggcagtacggtgtccaaacatcatcggtacggtaaagttacagtagctataacactatgacaggaaataaagtttagaaaatgaagtaagaatacattagcctgccgtttgctaacttcgtgcgtgcgttcaaaggggacggagccctacaagctcatttttttttctttctaaatgaagcacagcacctactgttctggatcagaaaagacacgagagtgatcgtgttccatgcgaaaactgtagagcaaagggacgaccgagccctcccttgtctgctcttggggcctcaccacgtccacgtcgtgcggtgcaggacgagagagacagtggcgccagtatgtacgtgtaccgcgtcccagtgttcgatcatacagtagatactattcaagagaaggccagtgacataaaagttgtgcgggatcggagcggtactgtacctgtacgcggcagtaaaacacacgcaaccaccagccgtgctacgttcttctgttacgagttaatgacgaaacgaacacacacggaaaaaaaaaacagtgagaagaaagaaacggcgttgtacgcttttgcacggataggaacgggaggagatctcttgttttagggtcgatcggtaggccgataagtaacaccggccgtgtgcgttccgtcctccttgtaggagagaactgctatgttttctttcggtagaattgcagccatatatgcatgttagcatatgtgttagaggctgatctcacgtcagactcagtcaaagaattggatctgcttttattttactgatcggagagatacaacaattttttggtcgtggctttccctttcctacatcacgtctaaacaaaaaatagatcaacatttatggatagcttcttatcctacatacacgaccttcttagtgaagggaaacgtagatggtgtccaaacaccgattttgacacagatcaccagagtccctccctttcattgcaatctccttctccaatccttcgggtgatttctctcccccactcccgcttctaggttttaggcaagggaagatcctgcaccttctaaaagtaacattggagccgaggtttgcacctaaaccctgctctagaacctaaagccttcaaggtttttatctaatcgatccatatccacaaattggctcaagcctagttgaatgtttagatctacatcaagttaaaagagaagaaatgggattccggttcgttacctaaccctaagtcagaatcctcaaaaatcctaaacaaactctaactctaagatccctaaattgctcttggcaagccaagaaaataagaggaagggactcatcggtcttaccttggtcatcggtgttggcagcgacgtgtgtgcatacacgtgtcggtcaagggcactgctatagggtcgctcaacggcaacacgctctcccttagcgtgggagtgtgaccaaccaacggctatgtggtagcaccaccactctactgtcactctcgccaaagttgggattgaggcgaaggaagaggaacacttgggggtggagaaagccgcaagagagagagatcaaaggagagagttaaat

SEQ ID NO: 85501 - DNA, 350 bp, Zea Mays
gtgcgggcggcttcgcgcgcgagcaggccggctaatgggccgagggaggggaatgcgcgggcgtgcgggaggggaggcggccgcgacatgggccagaattggcccagcagggggggagctcctttcctttttttctttttattttctataactcatttcatttttgtttctttttctttttgcacaaaattatttagtggatattctaggtgttggaaaataaaatctaagtgaggtgcttgtgatcaaacaaagtgtatgcatatgatgggaaaaatctaagggagtttttggagtggaaggtaaaaagaggggaggggtagattagggtttcaaacctggtttagaat

SEQ ID NO: 85502 - DNA, 268 bp, Zea Mays
ctcacatcaatcaaagaatgtggtcacaacaacgagaccattggagcttcttcacatggacctcttcggacctgtggcttacattagcattggtggtagtaagtatggtttagttattgttgatgatttttcttgattcacctgagttttctttttaagtgataaaggtgaaactcaagagatattgaagaaattcatgaggagagctcaaaatgagtttgaactcaaaatcaagaaagtgagaagtgataatgggacggaattcaag

SEQ ID NO: 85503 - DNA, 192 bp, Zea Mays
  misc_feature (1)..(2): n is a, c, g, or t
nnttgacaaggttgttgctttggcttattgttgcaacaccgaagctgtatgataaatataccgtgttaccggccttggagaatcaaagcttttggctgtttatattgttatgatctcgtgtggtgtttcaaggcatccaatatgaatgtgctcttcggctatttcatatatgggtgatgtgctggatttctg

SEQ ID NO: 85504 - DNA, 301 bp, Zea Mays
gtttcagagtggcaagttctgataaaatcaggtttggtttgcaaacttcaggaaattgcttaccttttcagatccagttttcagaattggaagagtctatttattatgtgcggaagtcttgcagataggaattatggtttagtttattcagtatgctaatattcagccattagtaaggaatctagaactattttgtcttcgtccctcatggtcctgtaaattgaagtctgtttatgctcttttgaatattagaattgtagcttgactgcgcaacctccaaatatgcattacacaaaggcag

SEQ ID NO: 85505 - DNA, 873 bp, Zea Mays
gggcccgggcaagccagtccatcccagaataataatcaccgacgaaaccaagcaacaactgagcaacgtcaacgcgcgaaaaattctgcagaagcttcagctagcccgccgaatccaggcatcctccagcggcgtcgtggatcctacgacgtcgtctgtcacgaagcaaactaatttcttctttcctattttgctttccattaacgacgaccacgaattagtatgatgactcagagtacgtgccacgcaactactccgttgatttggtttatttaatttcttgttgcgcgaggaaaaggaatattagtatatttttttaaaaaaatagtacaatgtatatataagtacgtctctacggtagtaaatgtagcttggaaacttttgccaccgctaaagtacgtacgcgtatgatgccatgccggtggcgtgtttgacaacttgatttgctccgttttgtttgtttgttgattacttactgtatactatgaatgttcgatactctgactgagatcgatagtaggtgggacgatgacttgtgctccaaggaagacgtttaggacgatatcattttataaataaaaaactatggctgctgatataaaaaaactacacgggtgttgatttgctagtcccctcttgtacatgtcacgttagatttattctgaatcgaacattatagtttccactaatattttagaaattcttagtatttactctctctgtttttttatttgccacggtgtagtttcaaataaactaacgaacttcaaatatccgagaacgaaaataatataattttatgatacattatgcatagagactagagagagagcacgtgtgtgtggattcgtagcactatctcacgagttcgcg

SEQ ID NO: 85506 - DNA, 657 bp, Zea Mays
cttttttttaccggttccaagctgcaaagcaagctgaagctgcgacacagagctgctagctgtgtatatgcatgcacatgcactcctacatagccgttcgagctagcgtgtacgtagagaccgattcacagctgcatgctacagtgctctgacgacgtgtcgccagatcaccatcgtgctctcgcgtgcagcctagggctcccagaatgcacgttcccgcgtgatgcgtggcagacttgcggtgcagtgcaggcgtcgtcgcgctggacgtgactggactcgtcgtcctgttgcgtacggcagtacataacgtgttagtgcatgtctgggcggagttgcagagctacggcccgttttccttcctctgtcctcccactcacccagctggcatggcaggttgatgacatcggacgccgagggcgcatggtgagccagcccatcttgcgggttaaagctgttagaaatcagtgggcaacccagtggagagagacagagagaaatgacaagactgttgtctttattgcagagtgtcatgtatttatacaggggatacaaagtctcccaaggggtgtgtcccttgggagtaactgtcagttgatcacaggacaatattttgtaacactcccccttgatcaaccaatatccatttgatcatct

SEQ ID NO: 85507 - DNA, 415 bp, Zea Mays
cttttccctcccctttttctctctttccccttttggtgacatcttgttgggtttcaactctagcctaccccaacttgcttgggactaaaaggctatgttgatgttgatgttgaactaatccagtttcaaatattcggagcaaaaggacttatgtgaccttccatgcagttacagaatcagaaaaaagtgaagtgaggaccgaggagatttcatttagtatctgtacttgcactgttgtcactatgtgctcacagattaaataaggcagttctacgataatttaatctgcaaaaaacacaccagaaaggacattgtgggtacttcctggtttccctacaaatattgttattgagtgcgagtgcacaactactctgcctaatcgaagctcattgagaaaactcattccgtagaagat

SEQ ID NO: 85508 - DNA, 729 bp, Zea Mays
cacacctggtgattatgttcgcgctcgggttttggacccctaaaatccgggtgtgacacgagtggggcgagagtcttgcgagaccgtgacaaccgcgtttgtgtcacggccgccaccgtgtaccggagggaacgaggcccacggtgtttcggccggaagctcgatagtggagacggcggggagcgtccgagaggagccggaagcggagcaccacttgcgcgtggagaaggctcgcggctctctacggagttactcgaccgtggtgcttggccctcgcgtgggcttcccttttgcgtaggggcaccaacgaggattagtcgggaccttgcgcggttctggatacctcggtaaaaataccggcgtcatccacgagagtttgcttctctacttagctctttacattccgcatttatattaagcatttaagtttcaatcttgtagtcatacttatttagtgtagattgaaacttagcctttgcggtagagatagcaacacttagacaaaacctagtttgttcattgtcgttttgattatttgcataggttttgctctagggatttaattgtggcctagtttagtaaaagttttataagtcctaattcaccccccccctcttaggcgtcacccgtttcctacaggggctaagaaccaccgtcgtcatgggagtacgcggggtgccatcattacttgtttaccggggtgagccagatgggatgccagtcttgttc

SEQ ID NO: 85509 - DNA, 673 bp, Zea Mays
cattattatgagaatgaaggtggatgtgctgctacttcccactccccttgatgagcaacaagcacctgcattgagtaatgcaagagtgagatgaaacatctcagcaagctaattgttctgacgagatatttaaaccacaaattgaattcatcaacattttaaaagagtcacaattaaaaatcagaaatgcttgtagatatagaactcagtagtcccactataaccaataccatctcatttcctcgaacaaccacaataggttctataacacttccctgcgtcaacaatacctgcaaatatcacttcaatgtatgcataggaatacaatgtgtaggtactctatcttcatacctctgggggtataaaaccacatcatctgcaaatatcacttcaatgaatgcatatgaatgcaatgcatatgtcctctgccttcatacctctaagggtatgaagccgcatcgtaccccttctcgggcaacgtacgatgctaagttgtaccggtacggtcggaccataggtcacgacaaaacttcatatgcaaatgagtcatgcaatgtatatggcatgctacatttatcaataaacttcacttccttcagatacaacacaaacctcaaataatacttcatttaccttcaggggtgtgaattaatctcatgagtcatactcaaat

SEQ ID NO: 85510 - DNA, 635 bp, Zea Mays
tttttctagtcttcgttctcatccacgcacggaaggaaaatcttctctgcgttcctatcctccactctgatatttcatcgctctgatttttgttgaagttgctggccgctcaacctcatctagcgcgcaagatctcctggagatttttccaccgcttgcacgtccagctcttcttcaaatatcccatacgtacatcttccttccctcgccttatctctccaccgctttctctcttccatctgatatgccgcgtcgctgtattctggaaagcaaaagaaaatcccgccgctgttcttctgttgaaatttctgccgtctcttcttatctgctgctgggatttttaccgtcgtcattctcccagctgagctctctctctctgctcttgctcgcatccagccatggcgcccctgttcttctcttttccagtctggccagccgagcgctccttctcccagccatggagctcccggccgtgcagctcgcccaatccccaacccgaccggagctcccttcaactcgatttcccatctccctgtatctcccatgggagagcgtgttagatcttttatgggcttgacccatttattgaataaactctatggtgtgtaatggtggagaatactaatagtaccaca

SEQ ID NO: 85511 - DNA, 787 bp, Zea Mays
ggacaagggcgtgccacacgcgcgcgcgcgccgccgccgccggccgggccgggcgagacgtggcgagacgtggcgtggcaggcaggcacaatccagccgccgagtgagggtatttccatctcgtgactctgcgcgcacagagtagcgagagggcaggtgcctccgaagccggtgccgttcgagaccttgcacgggggatcggcaattaggtttttggggagcgtctacgcgactgcccaaaacatcttcaacatgacaaaggaagctggccaaggatctggatcatcagagcgcataggagggtatgatcagtttatttacttactgttttgtgttctggagattatatatgtttcatattttcatctatgctgtttcatagttacgaatgattttatcttatctgttctgtcttattataatatgatagatctgtctgttttaatttttcagtcatgctatttaagtttctatctgtttactttcatttgtttagtcagtatacatgtttatcgtatttatatgatttatataattcacatgctctatgttctcttgattcatactggtatggatcaatttgagatcacaatttctatggttaattatttgttatatgtcatcatcataatgttgatttatggaattaaaataatacggaaaatgcctatatttctaacaatccaaaaacctaaagttaggcatttttctgtcagaggttttgctgctgtgctaaagcctgatccttttgatgataaaaacttcttgatatggaaagctaaaatgg

SEQ ID NO: 85512 - DNA, 1996 bp, Zea Mays
agtacgctatttctgcaaaagtatctaagttgatttttgctaaagcctctccttgattcccaattccagcatacccttgagagtcttttccttagtcgggtaagacttgctgagtaattccatactcagggttttattccctgttgtttttcaggttttaattttgtgctgctgttgatggtgttaagtgccggtgggctcggccttcttataagtctaagtacttcttctatacttcttattgaggatagtcacttgagctagcatatatttcaaacttatacttttgtaatcactccgataaaaaaatgtaaaatttttataacctataaaatttggtaataagatttccgctgcagaaatgttgtgtgtgtgatttgtgttacttaatcccgcggttctggttgtatgtggtttatccgatgtccttggggcaatcggatggatcctgttaagttatttagtgcacatgtatagctgtttgaggtctttgagacaaggacatgtgcatgtgggcccaataacttgggaggttctgccacacagctgcagctgcagagaaggtcatggccgcagcgcctgacaaagggaaaaagattgttgatgctgctacagaagaaaatgactttgaccttcggaacctggtgggtcaagaattgtccgaggctgagaagaaggagctacaggaatatggtcctgtggctaccagccagaagctatgctctttggtggaatcgacgcaggggccttaggatgcattcgagaccgcgcgagggcaaaataatcggcactctatcgaagaatgttggtttcccgaagcttgaagctaatattagcggctaccggcgacaacatatcatcggcagtctattttactccaatttcaaggtaaaattccttttgctaggtttcttttatttttgtgatgaaacaaaattttctgatgctggcttgtttctatggagtatgctgctaagtaagacactgagaatgcaacaagacctcgaagacaagaaaaatgaaaccataatcgagggcttggaaaataaaatcaaggattacgaagcttctctggagaagaaagactttctacttcaagcaacatagggctcgcttgcagaaatccaagctgaaaatgttagattaagcgaggagcttctccaaagtcggacaacgttgaaagaaaaatcaaagaacttcgaccaagagaagaaagatctgcaagcgaaatacgaggccgaagctgacaagaatacgaagctacagaaatctttggaagaccttcgagatacgtgcttgaatttaggtagcagctgcgtgcaacggttgaaaaaggtcttcagctcggttggggctagctctgaagatattacaccttcggctgaagacataccaaacaccttcgcacatattgaaaataaagttgatgcacttgatgaagtgatagccggtcatggtgacttttgtgccttgctagcttctcgcggcacagctgccgcattttttaaggctggttgcacacacgcaaaaacggtaaatagatcaaccttcagtctatctccaacagatttgattgatattcccagtgaagcccgaagcatcggaaacagatttataactcaaatttgggctaagggtggacgagagttggctcgggacgaagcccgaacttgcttaaaccggtacggaacatatacttgttgcttgccttgactcttgtaattactttttaccttatactgttatttgtctgcaggatggtggtgccgaaggttgataatctgaagcacattctgaaggctgctgaagcttctctttagtcctgcctgtatagagcttagaaacatttgtattatctttgcaaaaagctgtaatcgagaaccaaacaatacggtgtatatttgtccataccttgtaatatatttttaccttttcatctatgtacaagttgctttgatgtggacgaaacttgtatcttttgagccgaaggcgaaaa

SEQ ID NO: 85513 - DNA, 492 bp, Zea Mays
aaagttgtcaaggtttatagctcacaagaaatttccagtttcccactctgagggaggtgagggtcgtttgtatcatagttcttcatgtaaatttttactatgtaagagtatgattggatactcggccaaccagtaacttttattgtcacttcttttacctaaaataggttgacatgtcatttgatggttatcaagaaatgtgttgtggtttcgaaagaatgataatgtcatataaaacatcccatacctgccatttttagtctggatagctgccttcctagcattacgtatttattgaaaaattatagcagcctttcagattcacatgacaataacaaagtagtatcaaggaactaaataatgtatccacctataaacgaaatatgcctagtctgctggagcacttgtctcgggatatactgaggcaaagtttggatcatgatattggtccagctattgcttgatgagatagcaaatgtccgagaatggttg

SEQ ID NO: 85514 - DNA, 373 bp, Zea Mays
aacaccatgacgcacgcgaggcatcagctgacgaagcgggcccacgcgatagtgggagaacggtggagacggcgtgcggcggagtgaaaagggaagtgggccgcgcgggagtgttagggcatatgggccgaaatggggtagtccggcccaggtagcattgctattcttttcttttttcttttttttctgatttatgttttcccctttttatttttgaattccaaatttcaaattcgaatttttgtggcaagtttgttctcagatcaaatacgaaattttgaatattctagtatgggatgaatccattgttcataaatttattaacaatgcctttattttattagccacaaatgcacaatcaagtaaaactcag

SEQ ID NO: 85515 - DNA, 269 bp, Zea Mays
aaacactcaggtctttaaaaaaagagtacaaacgggaaagcgatgttaggataaattatgtcagggtttgtagaaaaatgaaaacccaagcgatcatatgggtatacgacaactaatacaatttcaactagaatctcaccctaatacaatctaagtcaagcagtttaaagaagagtgggaatggactcaggagttgaagggacaagtagtccttttggtactcaatgagaaaattgcaagaacaaggaagtaggaaacatatttttggg

SEQ ID NO: 85516 - DNA, 267 bp, Zea Mays
aaaggcgtcaacaccatgcgttcacgcgcctaacgacgatgtgcatgaaatggcggtggtgcgaaggcgatcgcctagagatcgttgtcaggggctggggcgggagcgtcggcagcggcacgcccagtgactgaacatgtccctttttctctcgttcgagtggtttagaaggttctcatccgttgtagtggtcaaaagggcaagccatacttggagacagtggcggaggacaaaagaaaattaaggtatggctagctagtagagaaa

SEQ ID NO: 85517 - DNA, 604 bp, Zea Mays
ctcatattccaccccaattaaggaagcagtattaatcacaaacataagcgctagatgtaggattacggaaagcaacaagagcatggctacatcaatcagaagattggtagtttcagatttcctagcgacaacgctaaacaagctagtaacagatttctcaggcgcatccgtgtctccaggtcaattttacccaacaaactagaacaggcaacccgctgagaacctacgggctaaatagcaccatgttattcgcacacaatcacacgtcccacccgccgcaaccagaagagcaccaaaaaaacaatcacaccgcgtccctaagatcgcatcgagctgtacctcatgcttccgcctcgtgaacggaggtgcgcgtcgtgtggtctgcgtcggggatttagggattggggtttagacgtcttgggggaagactgccgatggggagaggatgcggccgcggcctgggtgcgaagtcagcagtcccgtcagcaggaggtataaaaagacgaagcggcggagcgggagagaatggagggcgacgggggcaaactcgtcaaactgcgggattgcgcgagtgctgctggtgcttccaaaagtctctagatgg

SEQ ID NO: 85518 - DNA, 489 bp, Zea Mays
gatttgtaaagcccaaagtttgtatcagaaaaataaataaataaatataattatgtagtgttttgggatatgaaaccgttggtgatcatttggtcttcctttctttgtgcatattcaacaaaaaaactatttgattaaataataacaaattaataaattaataaaataatactttgcatacacactggattttgtgtttgtacatttaaataaatttgaagttggtgaaattgaatttgaatctgattacaaaaaaaaataacaaaaaaaaacaaaaagggaccattcctcatacctgggccgatttcctcttcacagcccactagctcccgcgtccctgttattctggcgagtgggccctcgtggtcggtcatccccaaccttcgctctgttctaaccgaagcgcgcagaaatcgcgcggactcggccaaacgcacgcgccccagccgatgaaatagcgtagttcgttgagatccctccgagctagcc

SEQ ID NO: 85519 - DNA, 273 bp, Zea Mays
tgacttttcacaaatttctagccattaatacttattagttattttattatgactttccaaagtttctagccaaaggggtgctttctactagcactatatttgaaaaatattaaacaacagatttctgattcttcctagcttcttatttgtgcaagagcaatcattctgaagtttggcgactttttgcttaagggaaaggtggtaggaattttttggattaaatggcctttttcatgaagtattggcaatgggtattattttgcagccttcaat

SEQ ID NO: 85520 - DNA, 524 bp, Zea Mays
aaacagtgtctaattgggtttgaacatctacaaattttctcaagttcagcacataagcataactaattttctttaattaaataaggtttggtcagtttctgtaattaaatccaaactcaaaaaattaaagcagaaagcatagggttcagtatttttaattgatagtccataatattttgaatctagcaaaattggtttgacaatttttggttaaatattcctcaagttttgaattttctaagtcctttgctgaataataaaagattaaatagaaatggtttaaagaaaagcagttttgcgctggcgtccctggcgaaagatcctaaaggaattacagacgggtccccagggcactattcatttgagtctatggctctacagaaaaccccctagggtttctagaaatcgagcccgcggtccttccctaatggaacagtggccgcggaggaagaaagaggcggaggggcttaccggcggcgaggttgctccggtgagatagtcgaggacataggggaggtctcgag

SEQ ID NO: 85521 - DNA, 254 bp, Zea Mays
ccgaagtccggcgagggtgaaatcggctctctggtgaggcaatgcctcgactcaagcttggagaagctccatggcttcactgggaagcgatccaggggctagggcgaggctggggttcaacaggaaaggctggtcacgatggccgtgcttgggcagagatggtgggcggcggtgcttgcctttcacggcgagctccggtgatctctggctcgggcgaggctcggggtgtgcaagtgccaatggctaaggcctct

SEQ ID NO: 85522 - DNA, 879 bp, Zea Mays
gtgccgcggctagtccgcgctcggccggtcaggcaagcgatcgaacgcgtggctttttgcttctacccgagttcaagcgctcataggttgaagatcttcgcgaatttgggcatgatcactgcgcaagatttgctcccacgacagagctttgtcgtttgtgtgtggaagtcgagcggtttggggcagtgtacagagagttatcgtgtcacaaaggtggcagtgtcacaaggttgagtcccgaggtaaaaccatgccaagggtgtgtcaaacggtggagagaggtttccaaactttgccacagcgtgttcaagggaatttggcgccactttgatatttggacttgtttgattttagttttgaaaaacagagaacgcgattgatctttggaaaggggttgaaattcagatttctgaatttctgaatttcccccaagtgctttagtttaggggctgttttggggattttaaaaagttcaaatggcaaaactcccttactatgctttgttagttaattagtgaactaaaactttgtaatttggtttttttccaaaatttgtatttttctcccaagattttctcccaattaccctttatgcttaaatggttcacttaggattaattagggtttgagagttttccttccttaggattcatgacaagattaaggagagtttgagaagactcattataaatctttgttctcatttttgatgtatattcctttattgagattgcatgtgataatagtttggtgttagcttaaggtagaaaccctaagtgacactggggtgtcacagccttccccccttaaaggaattcgtcccgagattcgggccggagtccttctagggtgaagcgaagggtgagacttactttgaag

SEQ ID NO: 85523 - DNA, 678 bp, Zea Mays
tgttttatagcttactctttccaattcaagattatattactgaaatttagattcgaagggcagaaggaggggttgggcatggatacgtaccaatttccttaggtaggcaatcagggaagttggaacgtagaaattcctcagtctcccaagtagcctcatcctctgagtgattactccattggatcttatacatcttgatcgatttagcccgagttgatctttctttgcaatccagaaccttggaagggtactcttggtacgatagatccggctctatctccaattctggttctgctatgatctcagtcggtaatctaacacacttctttagctgagatacatggaacacactatggatggcagacatttttggaggtaacttcaacttgtatgccacgggtccacatgcttctatgatctcataaggtccaatgtatcgaggggctaacttgcctttaattccaaacctttgcactcccttggtgggtgataccttcaaataaacgaaatctcccacctcgaactggagaggtttccttctcttatcatggtaactcttctgcctggcctgagcagcttctagatttttcctgattagtttgaccttcctttcggcttctgtcactaagtcaggtccaaaaacttctgtttctctaggctgagaccaattgagtggtg

SEQ ID NO: 85524 - DNA, 760 bp, Zea Mays
gcaacaaacggggcacctcgattagaaacaatggtccgaggcaatccgtgcaaacacacgatccgatcaatgtacaactctgcatacttttgagccttatcagtggtgtgcactgggagaaaaggtgccactttcgtcagttggtccacaataacccaaatcgaatcatgataacgagaggtgttgggcagacccacaataaatccatgctgatgtcatcccatttccatgaaggtatagacaggggttgcaaagctccagctgatttcaagtggcttgcctttatcctctgacacgtgtcacattccgatacatatcgggctatctccctcttcattctggtccaccaatacaagggcttcagatcatggtacattttgttgctccctagatgcatggagaatttggagagatgggcctcatccaagattttcttcttgagatcctcatttttaggaaccaccaatctgctttcaaaccataatataccctttccatattggcggaaacatttatacttctcggtcttctgacggagattctccttgataatctgcactcccttgtcactgagctaggccatgataatctggtcttgcaaagctggctcaacagaaatgagacaaagcaccagaaggaattacttcaatcttcatcttgctcaactcatcacacaatgtgtcaatacgagaatccatcataacacagttacattgcaacttccgactcaaggcatctgctaccacattggcttttcctg

SEQ ID NO: 85525 - DNA, 1041 bp, Zea Mays
ctctgcctcacattgagatcagcctgagtaaagatatacttaaggcttttatgatcagtgaagatgttgcagtgggttcccatcaaatagtgcctccgcatttttaatgcatgaaccaccgctgccaactccaagtcatgagtaggataattttgctcatgaggcctgagtgctcttgatgcataagcaatgactcggttgtcttgcatcaagacacaacctagtccagtgccagatgcatcacagtacacatcaaatgacttgctgctatcgggttgcgctaacactggtgctatggtcagatgttgcctcaatgcatggaaggcatctttgcacttctgaccccaaacaaacttggcttctttcttcaatagctcagttatgggcttcacaattcaagagaaatccgaaatgaatcttcgataataaccggccaatcccagaaaacttcgaatctgacggacagtcgttggtggcttccagttcatcacctcttgcaccttatcaggatcaacaactatgcctgcctgagagatagtgtgacccaagaacttgatttcctttagccaaaaatcacattttgacaatttggcataaagacggtgctctcgcagacgttgaagcactacatgcaaatgtccggcatgttcttcttcattctttgagtacaccaagatgtcatcgatgaaaaccactacgaatttgtccaactcaggcatgaaaacagaattcatcagatacataaaatatgctagtgcattggtcagcccaaaatacatcaccaagaattcatacaacccatatctggttgagaaggctgtcttcggaatatcacttgcccgtatcttgatctgatggtagccggagcgagtgtctatcttagaaaacactttggctccgaccaactgatcgaaaagaacatcaatacgaggcaagggatacttgttcttgatagtcaccgcattaaggggtggtaatctataaacagtctcaagctttcatctttcttctttacaaacaaagctggacatccccaaggcg

SEQ ID NO: 85526 - DNA, 482 bp, Zea Mays
ttcaattctgccaactcagcgggtggcatccggtagggcctcttggaaattggtgtcgttcccggttgcaactcgatggcaaattcaatgtcccggtctggtggcattcctggcaattcatcaggaaaaatatctgcatactcacagatcactggaatcttcttcaccggtgactccatcatagcaaaagcacatgatcaggtagaatcttggcaaggtagatataacaccaggtcttcggaggtaggggaacaaatctccagagctctggcagctacatccatcactacttgatgatgagtcatccagtcggctcccagaatgatgtccataccctctaatcccaaaattaggagtgtggttttgaagattttacttcccatggagataggcacacttcagattaattggttggttgcaattttacccccaggtgtggctatcatgaatgacccttttgtatgacagaagggcaattggca

SEQ ID NO: 85527 - DNA, 924 bp, Zea Mays
cttgatttggtgctggcatctgcctctgctgatttctggggcagtttttggcatagtggcccacattgccacaagtgaagcacttgttcccgttgccctggcggaactgctgctactgcggaggctgattgttccttgggacgggagctagaaagcggttgggtgccggctgctactgctactgaggtggcctgttcacccatctgcctgcctgctgctgaaatcccctgctctgattgtgagaaacaatcctgaacctctgggcctgagcggatggtgccgccattggtgcctttctcttcttctctgcccggtgcgctacaatacagtcctcctgggagatggccaggttgaccaactcattgaagctatcagcccggacagtgttgagacgttctcgcagcttggtgttgagacccctgcgaaagcggtctctcttcttctcatcagaatcagcatgataccctgcatactggcacaggtcattgaaggcctgagcgtactgcaacaccgtgcgggttccttgattgagtgccagaaattcattcaatttgcgatcaagaattccagctgggatatggtgccctctgaaagcagtcttgaattcctcctaagacacttcacgatcagctggtagcatagcacataagtggtcccaccaagtccaagtagggccacgaagctgctgcacgacgaagcgggtcttggtaccatcagggcagtctccaggtgaggaggggaaacttggactcaacgacgcgaagccacacgtcggcatccagcggatcctctgccttggtgaacaagggcggctgcatacttaggaattcctggtaggttgccgctgccggaggtcgctgctgctggcctccaccatgctgctaggggtggggctggcactgcaagagctgttgtagaatctca

SEQ ID NO: 85528 - DNA, 1369 bp, Zea Mays
tttccacctgcaaatccttctccaccaactcggaggacaagtcgaccacaaaatcttctcggttgtcgagggtgagcttggtggtttgagcaatgttagcaagatgtgtcatagtgtcgctctgcagggcctaaaggcggtacaacgcactcatgcactgaacagtgaccctcccaaccaagttgggatacattgcccatacgtccttcacatggctcacacggttgcaccacatggggtcatccttcttctcaacagtaaagagtgccaaggggtgcatcaccatttccaggggatggtagccacagaaagtcgtcagagtcttcatggctgccgcttcagtggtgtcgtctgtcctgaatccaatcatctcggagtcgagaacgccatcccggctgaaggggatgagcctccaaagtcagccagactcggcaacgaggtacccaatgctcctcatacaactgcaccgtgtacaaagggggcatagggtaaccggcggagttaagcacttcccacaagatggaaggaaaggcatcgtgagaaaggaagtcagagctgaaacgagtgtctcctccactggcggggtgggtcaattcatctgcggaagggtatcagatgtaaagattatggtggaaggaagaaaataaaagagcctggatggtttgaaaagaagcgggttagctcaaatttttacttcttagttcttaatccttcaaattttataatgcatgcatgctgaaaaataatggctcctctccgaaataaagggtgctcctagggcatcctttaaaaactaaggactggcccatagggctaacttacttagccacctattttcccctctattcctaaggtctttcgtcctaggtctagcattctagtcctgacgattcttatcagtttctaagcaagttttagattttgaaaattggtattcatggtttattgtccttctctgtggtggtatttgctccgataccagctgtggcagaaccgcccgaattattccagcttaagtgcctaagtcacgcctcaggggccgtaacacacttaaatcggaataacccgccagtccctcagatctagtctgataaagccacttaaccaggatcaaataccacaatctcacacgaaggtgagtcacagaagaaatacaataaagcaggaagacctcaaattaaagtactgaattattacataaatcagagtttttcaagtagctaataaaagttcacaagataaaatgcagcggataattgatatcgtcggtagcgaggaatcgggcaaggcctagcccactactcctcttgctcctctcctaccggagcagcatcccattcgaccatccaacccagtggcagggttgtag

SEQ ID NO: 85529 - DNA, 244 bp, Zea Mays
tatccttgcaaggtaaacctaaacacacgacatatgagggcactccgtccccacacatgtcaaccatccccatcaattccccgttcgcggccagggctcaccgtcttggcatacaatgctccactgaccccggctgccgccgtgcagtgacaacacttgtacccaccatagctagcatggtagacccagtctcaggacgagtgaggggaaaagtccacgcccggcttcactcaggtactaggtt

SEQ ID NO: 85530 - DNA, 4778 bp, Zea Mays
atgatcattttaataaggtagggcttaatcttgctactcgaagattcttggggtacacttagtaatttagggctaagcttggttaaattaagtggtaagtccattttggtgttccactgatttcattttaatatcttagtgagaatttaataagatttctagttgaactctttgaagtgaggtttattattttccctccttatttcctttgtgcttttaaggtgggtttgaactacaagttatattaataaattttcaaaaaatctgcaaaaattacagtggctttttactggtgtataagtctctgtctcaaaatttggggtttaaaacgtaagtagttctttctggataaaattattaaatattagagcaggaggggtgttttgaactacaaccttctttttgcagtgagttattctctaatacttatttttgctggcatttagaggttataacatgacttttcacaaatttctagccattaatacttattagttattttattatgactttctaaagtttctagccaaaggggtgctttctactagcactatatttaaaaaatatcaaacaacaaatttctgattcatcctagcttcttctttgtgcaagagcaatcattctgaagtttggcaacttttgcttaagggaaaggtggtaggaatttttttggattaaatggcctttttcatgaagtattggcaatgggtattattttgcagccttcaattgggttttgcatttttttctagtggcttatcttatcattgatctagtataattttatttgcccattattgcattattttttggttgctcatgatttatttgaaataggacccaatatcaagttttatttgtttaccctacttaaaatgatgggctggggtggttatcatttttgtagtggggttctagtggttacaagtccactggatttttattaacaattttggatttgtttttgtaattccaataattattttctagttggaataatgctaaataaaacatttcaccttgattccattctggactaggggtctctttatttttcctaggttctctattacttaagtaggctaggaaaaataattgcattcactgttcattattttctaatactcctctgattttcttaagttttgggcaaaaatggcttttattggataactatagttaaacttccaatactggggtgcctagtatttttaaatagtgtctaattggggtttgaacatctacaaattttctcaagttcagcacagaagcataactaattttctttaattaaataaggtttggtcagtttctgtaattaaattcaaactcaaaaaattaaagcagaaagcatagggttcagtatttttaattgatagtccataatattttgaatctagcaaaattggtttgacaatttttggttaaatattcctcaagttatgaatttcctaagtcctttgctgaataataaaagattaaatagaaatggtttaaagaaaagcagttttgcactgggggtcccctggcaaaagatcctaaaggaattacagacaggtccccgagcactattcatttgagtctacggctctgcagaaaaccccctaggtttctagaaatcgagcctgcggtccttccctaatggaacagtggatgcggaggaagaaagaggcagaggggcttaccagcggcgaggttgcttcggtgaggtggtcgaggacgtacgggaggtctcgaggatcacggcgatgtgcgggtcaccgtcggggatggtcggagtcggccggtccacgtgcgcagcggagatgctcgtcggcggcgaggaatctggcctactcacggcgcgataggtcaattgaacgggtcaaagagcttcacgggatgctagggaagacgtgggtgcaaggaattggaaaaagacttactggttagctcggtccacgcgaggcggcgaaagaccaaagtccgacgagggtgaacccgcctctccggtgaggcaatgccccggctcaagcttggagaagctccacggcttcactgggaagcaatccaggggctagggcgaggctggggttcaacaagaaaggctggccacgatggccgtgcttgggcagagatggcgggcgacggtgcttgcctttcacggcgagctccggtgatctctggctcgggcgaggctcgaggtgtgcaagtgccaacggctaaggcctctggaggcatttataggcgagggcgcgacacaggcgtgcggggcggggcgaccacgcgcggggcgcgcgctgccgcggccagtccgcacttggccggtcaggcaagcgatcgaacgcgtggctttttgcttctgcccgagttcaagcgctcataggttgaagatcttcgcgaatttgggcatgatcactgcgcaaggtttactcccccgacagagctttgtcatttgtgtgtggaagtcgagcggttttggggcagtgtacagagagttgtcgtgtcacaaaggtggcagtgtcacaaggttgagtcccgaggtaaaaccatgccaagggtgtgtcaaacggtggagagaggtttccaaactttgccacggcgtgttcaagggaatttggcgccactttgatatttggacttgtttgatttgagttttgaaaaacagagaacgcgattgatctttggaaaggggttgaaattcatatttctgaatttcccccaagtgccttagtttaggggttgttttggggatttaaaaaagttcaaatggcaaaactcccttactatgctttgttagctaattagtgaactaaaactttgtaatttggtttttttccaaaatttgtatttttctcccaagattttctcccaattaccctttatgcttaaatggttcgcttaggatcaattagggtttgagagttttccttccttaggattcatgacaagattaaggagagtttgagaagactcattataaatctttgttctcattttttatgtttattcctttattgagattgcatgtgataatagtttggggttagcttaaggtagaaaccctaagtgacattggggtgtcacacacgtggttgtacacactgtctggtgtgccagggcgcagaactgcaacggcaggtctgtacagccagtccggtgcaccacatggagctggaatatttctccaacaactctctttgcatggggctttatatatacctctttgcacgaccatttgaaggtgttgtagcccaagcaaaataccaacacatgaaacacacatctctaaggcttcaaacacccaagtgcttaatagaatcactcgatgatgagcgtatgtgctttgcgaagtggttaggttagttagaccgcttatgcgtttgctctagcttgttcctaattagttgagtgactttagaaaaaacccgcaaaccccctcggctcttgagtgagatgttctaattgtaccgaatggggcaagagtcttgcgagaccgcatcaaccacgtttgtggtgcgaccaccaccatttactggagggaacaatgcccgcgatgattcaattggaagctcgatagtggagaaggtggggagcatccgataggagccagaagcggggcactacttgagcgtggagaaggcctgcgactctttacggagttactcgaccgtggtgcttggcccttgcgtgggctaccctttgtgtaggggcaccaacgaggattagttgggaacttgcgcggttccggatacctctgtaaaaatactagcatcatccacgagagtttgcaatctctacctttgctctttagattccgcatttactttaagtacttaagtttcaatctctctttcctagtttagaatatatatatatatatatatatatatatgattggaacttaggttgcataactcttttgcggtagagatagcaacacttaaacaaaacctagattgcacgttcttgtttagttattttgaaagggaaataggcttaaacatttactataatcgattttggtgtttgacgtccatcataaaccacgtggactaactagtttgcctagttgtcatttatctcaggtgcataaagtacaacacaatccaataaagaaaataagttggagaactctacatagtttagagcaaatagaagcattggtgatgccagtggcgcaccggacactgtccggtgcccaggccaaggcacccacgaactggccgctctctggtttttcctagagtcactccgctataattcaccggactgtctgatgtgcaccggacatgtccagcgagccaacagagcaacggtcaactgcgcccaacggtcgactgcggtgaacagtgaacagtgcagaagcagaacgcaccggactgtccggtgccgcaagaagacaaagtacttcaacggtcaactgctccaaaccccaacggtcggctgacgtggcacacaccggataatgaacagtgtgtttcaggtacataggttaactttcggactgagaaagtgtgttttcaggtacaacacaaagaatcaacgaagcagatttaaaaccagaaatgagaaggtatggaacttcggctatgcacaggcgttgcaaaggcgtgtaccagcttcgtcgccgaaggccttgatgtacaaagcacaaaagaagaggctcgatacttgtttctccatataaatttgaaatttaacttatacgtggagaaaaagacaaatatcaatatttatctttttgtttttctatgtaaaagttgaattttaagttcatatttttagactgattgagg

SEQ ID NO: 85531 - DNA, 485 bp, Zea Mays
tccgtatccatatttttcacgcccacaggtactattcatcctctcagcaaactccctatcgcttcatgtaatatgggtggagttatgcactccgttttcccaagccttctctgtcctccccgcaaccaacacatcatgttaactatgttgtgctgtgcgggcacgggaatcgaggtatgtggatgctgggaactgcggatggatgcggatgctgctggaaactatgcatccgtttctggtgagacccacaactgacggcggtgtaaaatgcggatgcgcagtggtaccacctctgaaattcgttgctcaagatcgagtgttttgattgatgttggtttttcctctcctagtctcctctctttgcacttttgggattttttttgaatcagaacttttgagaataaattggttggatcaaaacaaggaaggatttttgaagatcattcccaccatatggtttggacagattcatcacgaacaggaag

SEQ ID NO: 85532 - DNA, 1303 bp, Zea Mays
aaaatcactctaaactatagtcgagggctacaaacagtggacaagactggtcggctaattaattttttcgactaacgctaagaatgactatcactagactagtctaaaacatgatcataaaagatattttttggattatgactggaaaaatcactgtaaatgatagtcgagggttgcaaacaatggacatgtgcacgaccttgggacaaccaactcgtgtggtgtcgtgtggctaaaggaccatgtcgtggtcatccctaacagactcgggtcctctgaatttgtagagcaggttactaatcttttgaatgtagaaccctattaattgttctatccactcttctgcacgagttggtcaccgtttcataagccagattgtgtggtttggttcgtaggaaaaaagcatagtgaaattgctaaacaacataaataattcttcacaccagtgggtgtgaagaattattgccatagtataaccacagagtagctaatgggcagtcacttcttaagacttgtatcacactaccttttagactagtttagtgatcgtcattcttagagtttctcgagaagactattttttttactcaacagcatacacccataggaagcaacgaagtgctctccagaggtaacactagttggagtacgttgagtaaaaaattagtcttatcgagtaacactaggaatgtctatcactaaactagccaaaaagataatctgaattcctgactatgactgaaaaaatcactctaaactatagtcgagggctacaaacagtggacaagactagtcggctaattaattttctcgacaaacagggctacaaaggatagtttttggattataactggaaaaatcactctaaatgataatcgagggttgcaaacaatggacatgcgcacgaccttgggacaggaaaaaggttgggataggcgacatggttcatttccaacatcgggatgtgtccagctcccgttgtcgccataacccgtgaaacatcgtaaactcgcaactagatggaaagagtgaactaggtttcaccaccctatccactctcgcctttttgtaatcttctcttaagcagtgactgcccattagctgctctgtggttatactgtggcaataattcttcacacccactggtgtgaagaattatttatgttgtttagcaatttcaccatgcttttttccctacaaaccaaaccacagaatctggcttatgaaacggtggccaactcgtgcggaagagtggatagaacaattaatagggttctacattcaaaagattagtaacctgctc

SEQ ID NO: 85533 - DNA, 1218 bp, Zea Mays
agtgatttttccagtcataatccaaaaaatatcctttatgatcatgttttagactagtctagtgatagccatacttagcgttagtcgaaaaaattaattagccgactagtcttgtccactgtttgtagccctcgactatagtttagagtgatttttccagtcatagtcaggaatccagattatctgcctggagtaacactaagaatgtctatcactaaactagcccaaggtcgtgcgcatgtccattgtttgcaaccctcgactatcgtttagagtgatttttccaaacataatccgaaaaatatcttttatgatcatgttttagactagtctagtgatagccattcttagcgttagtcgagaaaaaaatatcttttatgatcatcttttatgatcacgtgcagaggcaggacgtgacaaggggtgcctatgtgagcgtgattctgcatggaaagtgcacattttgcttgattcccaactaattgcgagtttacgatgtttcacgggttatggcgatggcgggagttggacacgtcccgatgttggaaatgaacaaggggtgggctatgaaatcgggttgagagcgacaacagctggcaactcatgtctacaataaaaacagaatgccatggagttttaagaagatgaataagaccgcgccgccaccgtaacaatgtcctacattgctggcgccgacgtcatttttgacggtgttaatatatttcgttggagactgaaatatttgaatttacaatagggaatcttatgattggcttcccgatactccatcagaggggcaacgatgtattaattgtaagtaacatcttatgactggcaacggcttaccggagaagcgtaagaaccggtcccgaggcgttcaaattcaaattagtaaaattggtgcgtcgttcctcctcctcttccttcgcatctgttgaccacaagttgtaatatgggagcctgaactcctgagtgcccgcctgttggtaagccaaccttatcccctacaagctttgagcttgctgattgttcctgtgtttttttgctagtctagtcagaccttgactttgttagcattttttctgctgatccacatacaggtggttactagtatttaggttctgcaattgaagctgaccttaaaaattgaatgtatgtaattcactgtttggattgtttgtttggtctgtaacaaatggcttgtgatttggtcttaat

SEQ ID NO: 85534 - DNA, 492 bp, Zea Mays
ctcagcccagccgcgcccatgccagccccctgcgtgcagtcgcgttcgtccgctctatccactcgcgcccagctcctgtcctccatggcgcgtggctcagctgcttctccctcccatggccagcggtgctctagcccctgcgtcgcgcgtctgagtcgccctccagcgccgcgcccgactccagccagccctgctcctctttctccctgctcggatttggttaagctcgcgcgcgattcctagctcggtctctagctgcctgtgcgcacatcgagttatcgccgtggtgatattgtggtgtggcgacgtcgtgcttgtcgtgacaactgtcgtggctgtgaggcagtctgcaccatagagttcggccgaccgcgatctcgctttactcctcgcgtcgtcgcttgccgagtccttccccagtccgcgccataaaattcgctcggccacggtcccgtcaaattgcgaagctccctgccatgcgcttgccagctc

SEQ ID NO: 85535 - DNA, 281 bp, Zea Mays
gaggaggagcgctcggctaagggcgagcagcaggagggcggtcgagcgccatgggagtgggcagggcgagctcggcaagctgcgcgcaggggacagaaaaacagggcgcgcgacgcaggaggaaccgagcaggaagctccggccaggaggacgctcggcgagctgggcagagggagggaacttgggcacgatgcagtggagctccggctgggcgtttctgccggcgagggagaagacacgcaggagctgcagagcagggaccgagcgggagcagaacgctg

SEQ ID NO: 85536 - DNA, 180 bp, Zea Mays
gtatgaatcaaattgtatttattagcatgtatgatcgactatgcattgcggttgccaattaatttaaaatctctctagttatctatgtgtgctattaaaattcatttaaattgtatttgcatatttttgttaaaaattaaaatattaatatatggtaatcaaatcacaatcgggtctaat

SEQ ID NO: 85537 - DNA, 353 bp, Zea Mays
ccccttcacccctatgatttttttgtgtttcgtcggataaagataactatcattttagtggagatggacacactgatccgattttacataaataaacccaaaccctaaactagactatgaagacccaatataagtgttgggagcatgatattacggatggcaattacacatgtaggacacggatatatggttcatgaactcatatccatgagataaaattcaacccatacatgtacccatactagtcatatgtccgtgcattgctacggttttatatatatgatatgagataaattttgttttaataaaacataaaatatatgttttctattgattacctgggtgtgaatgtg

SEQ ID NO: 85538 - DNA, 266 bp, Zea Mays
aacattagtccctagaaaccaaacacccccttagcttgtgaaattatttttctatgcataggtggatcataaaaaatagagtttatatatgttttggacatctattttactacaggctagtttttgaagctggaacaaactcaaactcaacttagattgggcctccgtcttggcatgtacgttcttgttggtcttctccatctccacacctgtctttaggtgttgtatgatcatattcaatattcctaagaataataacaccatta

SEQ ID NO: 85539 - DNA, 878 bp, Zea Mays
aagtactattttagtggtgaacacgtgttttcaaaatgctttaaactaatccaagctcctatacttcatagttcttgttcatatgattagtttgaatatcagctagcacatgcatacactgttgcgcaccttgaatatcaccacctagagcatttttacattccgattactatacccctaaagctcctatattttttgaattccctttgctttcatgcatatattgaggggttctagtttctgtgcatatggggaggagcttgctaagtgtatttatcaacgaggaggagaagtgtatacacacaaacatcttgttgagagtgcattgttttgttaggctttgtgcatttcttagggagtttagggcgatgtttttgttagtgagtgtttgggaggtgcatttgagattttgttagtcatgttgaacctttgcctctttttagagggactagatgtgtttttagagttgttggtgttttttgtcttttgctttgattctgttgtgattattggctagtggtgtcgaatcatttttagcatcttcttgagggctagccatttttgtttggttgtgttgagtcgttgtccatttcttatttctgatcattttgttttagcttttgtatagcccttttgtcattacagtgagctcttctttctttcttccttccttccttgttcgctgatcgcggtgaagggttcatcttggctcgactgtctacttggatgaggagcactgctcttgttttaggttcatttgtgcatctatggatgtgagtggcaccttcatgacctattaggtggcccaaaaatttaacctaattgtgcagtggcgagaacaaaatcataaatattgttatgtcaaagaatgtgatcaa

SEQ ID NO: 85540 - DNA, 717 bp, Zea Mays
tataaaaaacaaaaggaccaatgcttggtgaaggggaccaatctaactggttgttgcgcacactagttaggcactcgaccaagcatgctatcttaatcactcaaacaaaaaccatttattgcatcgcattcatgtgttatactacatgtactactagtgcactagctaagatgacagtacaacatgatgacttcctttcctcggtggtggttcagatctaccatctctctgctagctcaccaacagaaagagatgtaccatctatagcttagctagctagctagttttcaccaaattattggttaactactcctataaacctgaccatgcatgcatggctcgagttaattaccagatattgagttctcagttaactggccggtacggtccttgccttcaatctgggacgatttgcatgtgaagctaactaacccttcagttgtgctgcatttaagggcatccagcagaacacactttaggaagcaagggcaactgtatggtgtactacgtcctaaatggaccactgcactcccctccttttgcttgtgcttctccctccgttttagatctctagatgtcaattagatggtggtttaggagcaatggctgtttctctgttagatccaagtgatgtataattcaatcatgaatggtactggtaccccatagccagctttacggcccaagatattttaatcaatcggttcctttcctgaa

SEQ ID NO: 85541 - DNA, 253 bp, Zea Mays
ctctcccttctctctcacacttaaatcttcctcaagattcaaccttgttggaggagctcttgggtgtgaggtttgtgcttgtgctcacgatttggtttctcctctcccatctcttttaaaatcttgagcttgtgcaaactcctcttgtgcgttcttggtgttcttgaaaccctaggtttcaagaccgtttgaggttgcttgggagtctccaaatttgtggacgaccccaagaagtttgtatcacctgctcttt

SEQ ID NO: 85542 - DNA, 863 bp, Zea Mays
gtggttgcttccgttctgacctgttatttctatcgcctacactctaatattcagaagtatcagattctctcataattggactctatggtgattctttactttcttgcattatactgatgctcaatcatatattgatgatgattatgatttgagtatgactcatgagattaattcacacccctgaaggtaaatgaagtattatttgaggttggtattgtatctgatggtaaatgaagtattatttgaggtttgtgttgtatctgaaggaagtgaagtttattgataaatgtagcatgccatatacattgcatgactcatttgcatatgaagttttgtcgtgacctatggtccgaccgtaccggtacaacttaacatcgtacgttgcccgagaaggggtacgatgcggcttcataccctcagaggtatgaaggcagaagacatatgcattgcattcatatgcattcattgaagtgatatttgcagatgatgtggttttatacccccagaggtatgaagatagagtacctacacattgcattcctatgcatacattgaagtgatatttgcaggtattgttgacgcagggaagtgttatagaacctattgtggttgttcgaggaaatgagatggtattggttatagtgggactactgagttctatatctacaagcatttctgatttttaattgtgactcttttaaaatgttgatgaattcaatttgtggtttaaatatctcgtcagaacaattagcttgctgagatgtttcatctcactcttgcattactcaatgcaggtgcttgttgctcatcaaggggagtgggaagtagcagcacatccaccttcattctcataataatgctgc

SEQ ID NO: 85543 - DNA, 1030 bp, Zea Mays
gttttgaattgtggtgctatatggggtaccttgggtgttttgcttggagtggcagaattcgaggtcgaattctttttaaggggggtagagtgtaatatcccaaaaaaaatgttgaccaaaagttaatctctggtgcgtggatgaggtaaagggttgtgggccattggatgcaaagatagaagtcatctgaggcgtcgtttctttctcccacaaaaaccctaggtggccaccctttttttcccttcaccccccctcttggccgccaccccctttttctcccccttggctggacgccccctccccctatggcagccaccctccattgcttcctcccccaagatctccccctacgcagcaaggatcgagaaaaggaggggcacgttgaattgaagaggaagagaggatcaaggagatgttcttccccatctcctcttaaagatttcttggggaaaccctaggtatggatgagatccttgttcctccctgtaattataggcttttggaggttgtggatcatgggaattaaaggattagaggttggatttgatgtggggttaggttttgatctcgaatttagttttctgcagaatgacagattcgacagtttttgttcatgccagttttccgtggtcttagtggcctcaaaaaaataaaaagtctatgtatgagtcgtagataatttgtagatctttccgtggccgcgaagaacacctcaatcggacatccgaccagaaagttattgcagttttactatagcagtttttcagtctcataattctgtgcagaatctgttctcttaagatttaggcaattttatcaacataattaaactgtgggttggtaaaacaagttgtagataattttataagctttccagattgttaaagagtgcattcatatgatttatgaaactccagttatgtttgttttactgtggctgttcctgtttacctgacaaaaatgagtgggtctgttcactggtgggtttcatctagtaaatggccgaattggctcttccaactatggagac

SEQ ID NO: 85544 - DNA, 369 bp, Zea Mays
gtactgtcaacgcaggtacactggctagaagtccgccgcgcgccttggaattcggcgaattcgattcggtcagaattggtcctacggctcaagtcacggagaaccatccacgtaggacgacagagagaatgaaggagaaccttccactactagtactagagcccacgcatgccggggctcaggagacaccgcggctccgatgcgctcatctttgcctgcttgcgtgagtgcgtgcgtacgaccttattcacaggattcgggttaattcaatactacaatgtgatgagaagagaccatttccaagggaaaaaatacatgtgaagttagccccgttgacaattcaggggtgtttatgaatgaagttttttc

SEQ ID NO: 85545 - DNA, 144 bp, Zea Mays
ctcattgattatttttcaaaattgaaaatatgtgcacggaaatttaccggaactggtttctcagtgctaattggcggtttcctggtgctaattggcggtttcctgaccgagaaatgcggaaaccagtcatttaaatgaatatga

SEQ ID NO: 85546 - DNA, 757 bp, Zea Mays
aatcaaccctcttccccaacgagcgtcacacatgccttatggcaagggagaagaaggtatgtactcgaaactctacctatgcttcttcaagtgaggacgaatctagtgatgaggatgaagtagattactcatgtttgtttaaagggctagatagaaccaaggtagacaaaattaatgaattgattgatgccttgaatgataagaatatgcttttagaaaagcaagaggatttgttgtatgaagaacatgataaatttgtagaagcacaaagatctcatgctctagaagttaaaagaaatgaaatgctttcttgtgaattatcttcttgccatgagacaatttctaaattaaggagcattaatgatgatttgaatgctaagttagagattgctagtaaatctatctcttgtgtagaaaatattgtaacgtgcactaggtgtaaagatattaacattgatgcttatagtgaacacctagcttgcatttctaaattaaatgaagaggtagctagtcttaatgcccaacttgagactagcaaaagtgattttgataagctaaaatttacaagggatgcctacacgattggtagacacccctcaattaaggatggacttggcttcaagagagaagccaagaacttaacaagccataaggctcccattcccgccaaggagaaagggaaggcccctatggctagtagtgtgcaaaagaaccatgcgtttatgtaccatgataagagacgaactagaaatgctta

SEQ ID NO: 85547 - DNA, 173 bp, Zea Mays
gagaccgacgcagcgtatgcatgtgccgcggcggcctccgagaagctgaaccctagtgacgctgacgcctcggccgtcgtgtcacgaatggaggcagaggcctccgccatgatccagcacggctggcggtcttggttcctgcatgaccgcggcgtcgcggtgtgtgtgctgct

SEQ ID NO: 85548 - DNA, 2180 bp, Zea Mays
aagcttcttcgctttataagtgcttgttggtagtttgttgggttttggtagtaattgagacagaaaattcaaaagatctgtgaagctagtatcagaccatccggcgctagccttcaacttcagaagttctgagagcacctagagggggggggtgaataggtgatcctgtaaaacttaaacttatagtcacaaaaacttggttaatcgttagcacaataattgccaagtggctagagaggagccaaaacacaataaccacaagaaatcaatcacagagatgacacggtggttatcccgtggttcggccaagtacaaaacttgcctactccatgttgtggcgtcccaacggacgagagttgcactcaactcctctcaagtgatccaatgatcaacttgaataccacggtgttcttctttactttgatcttttcccgtttgcgaggaatctccacaacttggagtctctcgcccttacaattgaatttcacaaagaagtacggagtaagggagggaagcaacacacacaaatccacagcaaaatgcgcacacacacgaccaagaatcgagctcaaaagactatctcaaagttctcactagaacggagctcgaatcactgagaatgacaaacgaatgcgcaaagactgagtgtggatgatcaagaatgctctaaggttgctttttttactcctccatgcgcctaggggtcccttttatagccccaaggcagctaggagccgttgagagcaaatctggaaggctgatcttgccttctgtcgtcgggtgcaccggacagtccggtgcacaccggacactgtccggtgcccgatttccttccttaaacggcgcagccgaccgttgcagatcagggagcatttggcgcaccggacaagtccggtgcacaccggacagtccggtgcccccttccgaccgttggctcggccacgtgtcccgcgcagatcgcgcggccgaccgttggctcaccggacagtccggtgcacaccggacagtccggtgaattttagccgtatgccgtcggcgaattcccgagagcggcctcttcacgccgagtcagcctggcgcaccggacactgtccggtgcaccaccggacagtccggtgtgccagactaagctgagtcttggctgtacacagccaagtctttttcacctcttttcttttcttcttctttctgtttctaacacttagacaagtatattagtacacaaaaccaatgtactaaggcttagaaacatacctttactcttgatttgcactttgttcatccatgggcataaattcacatttaagcacttgtgttggcactcaatcaccaaaatacttagaaatggcccaagggcacatttccctttcaatctccccctttttggtggtttatgccaacacaacataaagcaactagaacaagtgcaaaatcactacaaataaaactcaaatttattttgattcaattttggcatatatggatcattctttgccaccacttggtttgtttttgcaaatcaaactcaaatctctctctctaagtcaaacacacatgttgaagcataaagagagtcattacaaaagagatttatcaaagatttcaaaaactccccctatttcccataatcaacatttctccccacaagaagccaacttttgacaagagagacaaaaagagttttgacaaaacaaaaactctactctactattttcaaatctctcaagtggtagctgatccatttattgctttggcctttattttctccccctttggcatcaagcaccaaaacgggatcaatcttggccctttaaccccattgcctcaccaaaatcttcaattaagagcaaatggcaataagagttcatgagatgaacttggaataagttaccctctcatcggagtgcagtggaagtctttcatggtccaagtccaccttttccctttcaattctcctttgagactaaatcaagcaaactcaagcatatggttagtctcaaagggtcaagttgtaacacaactcccccaaagtatgtgcatcacttacacaaggacttgtgaggtccagggaatgtttgtacaacttgagcaccacaataagcaacaaaatgcagaatgaacatgatcaaaggcgtaaacacatgtatgctacaattcaatccaagttccgcgaatctaag

SEQ ID NO: 85549 - DNA, 416 bp, Zea Mays
cagaaagtgatgccggatgtctatgtgctttgtgcggctgtgttcaacaggattttccgccatgcggatagcactctcattatcacataggagtgggactttgctcagattgtagccaaagtcccggagggtttgcctcatccaaagtagttgcgcgcaacactgtcctgcggcaacatactcggcctcagcggtggatagggcaacaaaggtttgtttcttggagttccacgacaccagggaccttcctaagaattggcacgtccccgatgtactctttctatcgaccttacatccagcatagtcggaatcggagtatccaatcaagtcaaaggtagacccctttggataccagagcccgaagcaaggcgtagcaactaaatatctaaggattcgcttcaccgccactaagtgac

SEQ ID NO: 85550 - DNA, 1028 bp, Zea Mays
gacttacctcctttgttgaggtcggtgtgtccgtcggtccccatcggagtctttgcgggcttggcgtccttcatcccaaaccgcttcagcaagtcttgtgtgtactttgtttgggagatgaaggtgccgtccttgagttgcttcacttggaacccaaggaagtagttcaactcgcccatcattgacatctcgaatttctgcgtcatcaccctgctaaactcatcacaagactttttattagtagaaccaaatattatgtcatcgacataaatttggcacacaaacaaatcaccatcacatgtcttagtgaaaagagttgggtcggctttcccaaccttgaaagcattagcaattaagaaatctctaagacattcataccatgctcttggggcttgcttaagtccatagagcgccttagagagcttacacacgtggtcggggtaccgttcatcctcgaagccagggggttgctctacgtacacctcctcctttattggcccgttgaggaaagcgctcttcacatccatttggaacaacctgaaagaatggtgagcggcatatgctagcaagatacgaatggactctagcctagccacaggagcaaaagtctcctcaaagtccaaacctgcgacttgggcataaccttttgccacaagtcgagccttgttccttgtcactactccgtgttcgtcttgtttgttgcggaacacccacttggttcccacaacattttgcttgggacgaggcaccagtgtccaaacttcattgcgcttgaagttgtttagctcctcttgcatggccaacacccagttcgaatctagcaaggcctcttctaccctgaaaggctcaatagaagagacaaaggagtaatgttcacaaaaattaactaatctagaccgagtagttactcccttgctaatatcacccagaatttggtcgacgggatgatccctttgaatcatcgctcgaacttgggttggaggtgccgattgcgcttcttcctccatcacgtgatcatcttgtgctcc

SEQ ID NO: 85551 - DNA, 781 bp, Zea Mays
gttagtagctcatacgaagtcttcttgaggaggcgatgaaggtagaccctgttgatggcgtggcaagccgtgtttacggcttccgaccaaaaacgctcgggggtcttgaattctccaagcatcgtccttgccatatcgattagcgtcctgttcttcctctctaccacaccattttgctgtggtgtgtagggagcggagaactcgtgcttgatcccttcctcctcaaggaactcctccacttgaaggttcttgaactcgtacccgttgtcgcttcttatcttcttcaccttgagctcaaactcattttgagctctcctgaggaagcgcttgagggtcccttgggttttagacttatcctgcaaaaagaacacccaagtgaagcaggaaaagtcatcaacaataactaaaccatacttacttcctcctatgctcagataggtgacgggtccgaagaggtccatatgcagcagctccagaggtcttgaggtggtcatcacattcttgctgtgatgtactcctcccacttgtttacctgcttgacaagctgcacaaggtctatctttttcgaattgcacgttagtcaaacctatcacgtgttctccctttagaagcttgtgaaggttcttcatccccacatgtgctaagcggcgatgccacaaccagcccatgctagtcttagctattaagcatgcatctagactggcctcttcttttgcaaaatcaactaaataaagtttgccgtctaatacacccttaaaagctagtgaaccatcacttcttc

SEQ ID NO: 85552 - DNA, 1680 bp, Zea Mays
atcatggggcgcgcttcgcgcgccctacagttgcaatcaagcattcgaacgataaaaaagaataatcttggcaacctcccaacataatggtaaaaaaacagggtgtggcaaaaagaataatcctcgcaggttttcagcataatggttgacaaaaacagtggagcgcaaatagcatatgagttaacgttatcaactatccactacgttacaaatatgcaaaccaaaggataccttagcggcaataaagtacatagtgcgccaatcactcaaccaacaaacaacgatagtttggtagaacaccacatcaaaagcaaacaaagtgcgagcaacactctgtacgaaggaattctttgattagaggaatctaagaagtaaactgcatcaacttccatttatgtttctgcaaaatgttatttttgttttgtttctacataatgttatttatcgcagtaggcaactgtgttggcaaattcagcactaagttattatgaaccaactatttatttaatcggaactgatagatgtcgaaggtaatgtggtggcaagtatggcactctgttgcattcaggaaacccatactgacaacaggacgacggcgtacatgtcttagcagttcatccgttgatttgttcaaatgaaacatatgagttaggacaccagccaattcaaacattcttaatgatctctgcctgaccatggatgtatataatcatatacactttggtgtaatatttattttgtttatagagactcgcattcttgaatctagcaatttgacaagcttagataattaaatactattatcagacctgtggatacttgtctccttgtcatctttgcatgaagcacaacttaaacgacataaactgagcagtgtcgtgcctaactgtatttagaattctaaatttacatagatatatgtgatgtctatattctggactaataccaaattcaatagatgggctgaaactacatatgggatgcttaagcacatcggaaatatgggatgcttaagctcaatacagttgatatatggatgcttaagcacattagaaatctacattgtctgacttagtgtagtctgtacacaatgaaaaattcaagtggttaaccatcaaataaccagagagtgtggtcatgcactaaattcaagctcttaaccattaagcaacaaatagaaagtgaatgtagaggataaatagaataacaaggaaaataatgttcatgacaaataaaggcaatctgaaattcaaggatgggttacctgatataccttggtatttttcttatcattcagaattggactgtcttcgttcttcaatggaacataggagctgctccggcgtccatttcctgtactatatgtagaacttcataggttgggtaacagataaccgtggtaatagataaatttcaccgaacctccttcaactatttgttcctatatgagccttacaaattcccagattactctgtgatgaacttaatcttaggcctcgggatagcctagataactctgtttctccccaaaaaagtatagttccaagaaattgatgtgccacatagtgacaactaaggaagtgctacatgaccacacctaatctaaaaaaatgcaggtagtctatccatatatgcatgtatctaaatgtctgtatccagtgaaacaggaaacaactatct

SEQ ID NO: 85553 - DNA, 170 bp, Zea Mays
tgatcacgtgatgcggagaacaagagccgagttgatctcaaaatgatgctggtgaacgaacctaaggatggatgatctgatagagtgccagaatgagagatgctcaccaagtggtcgtcatttaacaacactaacgtagtgtttatcccaggcaagccccggtgcatttg

SEQ ID NO: 85554 - DNA, 374 bp, Zea Mays
ccaagatcaattgttggaggaaacacaactcatattcagtgaagtcacaaccaaacggccaaattcagtgaaatgtgtgcgctctgtaataaattcagttttgtattagttttaaaatgtcgtgctccgaaactattaaatatgtgtgctcttcactaaaaattcagttctaaaacaaaaaaatttcaattctgaaataaaataaatgtttgtgcacctcaaaaattcagttctgaaacaaaagaaatgtgtgtgcaactcaaaaatccagttctgaaatgtgtgctcctaacaaatttagttatgtagcaaaactcttgaacctctgaaaatgtgtgtattcctcacaaattgcgaaaaagaaatgttcctga

SEQ ID NO: 85555 - DNA, 177 bp, Zea Mays
gaaacgtgtcaacagacgcagatatataggacaaggccgctctagctgttctatcctgcgtgttgttttttcctttctttctttctaagaggcatcgcacattgtgtaggcgctggcatggaataaacaagatgcgctcgtaccactatttggtataggatcgtcctactgattccc

SEQ ID NO: 85556 - DNA, 2728 bp, Zea Mays
cctatagtaatccatcagggtctggatagccttttcccctttaagtcggtttccttttctgttatcatgccgaagctcccttgcgcatagcttcggctttgttccatccttcgtatcccttgtgcttcttcacactgtgattttgactcaagtccgaagggtccaagttcgaaggtacctgctcatgtattatactccagaaacattgttaaatcatgtttttgaggaccttcggaagccgaaggtccccaacagtagcccctcgcaatattaatttgttagaatgataaattcagattgcgatatggacgaaggccttaagccgaaggtccaaaaaaacaccttccctttgctagaatagcatcagtcaatgacaagcggggccctcccacttgcaacgcactgggcgtataaataagagcacactgcgagcacatttggcacgctttcttgccatctgctcttactttcgcaatttttagttcttgcataccaacgcttgcctcgctttttagaattttttagctttggccttaagagcacgttttcaacatttccgaagatgtctcaagataacaaaggtgccgccgaaacaaagctgagcctttctgaggagaagaatcttgggtttcttgaatcaatagcaaagactaatacagagaagattactagggagattttagaaggtttatctgaagacagcggtgatagtgacagttatgacgtggagagtgggggtgaagactccaaagatcgaccgtggtgaccaagttacatagtcttcggaaaatcgagtattaaacagagtcatctcgataacatgaggggaagatattttcgggacatgtctactgtgagggcagatgatggagagaggactgtgcctactcccgaagagaatgaagttgtgatcttccgaagctttttaaagctgcgcttcggttccccttaagcaaatttgtggttgaggttttaaagatctatcaggtctaccttcatcaaattactcccgaagcaatcataagaatgggaatctttgtctgggccgtgaggagccagggcttggagccaaatgcaaaaagtttctgtaatatgcatgaactgttatatgagacgaaaccctggggcaaagagcaatatcataacaattttggctgctatagcttcgtcgctcgctctggctcgagctgtcccgtgccaaccttccggaaaagatggcctggggactggatgaaggaatggttttacgtgaaaaatgattcaaaggcacgagaagattttaaagatattatcatgcgtcctatctggcagcgcttcggccttcggaaaccgaaggtggaaattgatgaagcagccgaagaatgccaaaaggctttcggcatagtctgctctttcatcgggacgagggatttagttcaggagcacatagccttcagagtgtggccgcttgtagaggaatgggaaatgccaaaggaaactattagcaagtctgacgaaggtggactggttaggttgaaatacaccttcagatacgagggtaagtttattgagccagatgatgattggctgaagtgcatcgaagctacaagcgacgaactgcttggaccatattcaaagacagaagataacgcgctatctacgaccttcggaggccggaagaagaagaggctgaatagagttttcgatgctattgggtttatgtaccctgattaccgctacccgctgaaagggcaaaagagaaaaaacgcaacttctagaaaaggtgatgcttcagttgctctaagtgaggccatactaaagaggaagaaggtgaaggtccttactcaccgaccgcgcttcatcgaaccagcctcagtgcccgaatttggtggtgagacgtccacggctactgaagccaaaggacctgctcttacacagaagaatgaagagccggctatatgatgccgaaggctgataatattagagaaatagaggccgcgaaaacaaagatggtagaagttacaagcccttcgacaggaatgacagtgccgaaggcacaaaaagacctcgcggcgactccgaagagaaagatgatggtcaatgtattagatgtgctaaagacgataaagtcttcaagtaccactccgaagaaacctgccgaagctccgaacacgcaaattgaggcaaaaccatccgaagacgaagcttcaaagagccagaccgaggccgaagctgggccttcagagcccgccaaggaggaatccttggaaaccagaggagaaacaaaaaaagaggctataaagcaaattctgcctgaaaaaactctctcttcaactcccgaagcatcttccagagtacctgattacattgtacgacatgcttcgggaaaaaggctatctgaagaggaaaagcgagaagctcatcattatgcccagaaattaaaatatccaaaaggggtgttgatattcaacggcagcggagaagaagacttcttgtattgtctcccaaacagcaaggagatttctgtctgccgggagatgggaagaagcttcggattcccgacgctagaagacggtctctcagtgttatcaaaagatgagttggccgacagcttagcatacaacagcttaaaggcgagagaataagatttttgtacttaaaaacaaaatttttcatttgcttattcttaataccacactccttctgtagggccttattcttagcaacgccctcagggcgcaaaaaagcg

SEQ ID NO: 85557 - DNA, 655 bp, Zea Mays
ggaaaaatcactgggaaaaatagttgtggagctttgttcttcaaaagaaagatgctatgaaaaatctgtggcatgtgtacaaaagataaaaaccagcttcgccaatattggcgcatactcaaatgaggacaacttcgtactaggcgatcccaaaggtccaatcgaatggatcaacgacgaagccgaagcctttgaggaagttttgagtggccgcggagatgtctgtgccttctcaggtgccaggggaattgcggctatcttagagaaggcaggatgcgaacatgtgaagattctggcccaagccgaagctacgttctctattgaagatacaaaagacccctcggccgaggcaagcttggttggcggaaagtttttcaccgacatctgggaaaatggtggccgagggatggctcatgaaattataaagaaaagtgaaaaagatactcatgatgctagagaaggagcaaaggcagctgaaaaaactgcagagcttgaaaggcggataggtatcacctaattgcttttgactttatgttttatttctgtgacttcaaacttatttatattttgtatcgcagctgaactatctcctccccctgagccttttgagccattagccgactccgaagcaaaaaaggaagatgaaattacaaag

SEQ ID NO: 85558 - DNA, 1608 bp, Zea Mays
cccatactccgtgaaaatattatgcttcgtaagcaatagatcctctttgatattagagttgacgaagctgcacttcttcaaaatttattttgcgctttggcacaacttctttgaaacaatttccgaagatcaacattgtatccccttcttgtgccattaatgcaatatgatgtatgatgtcatgttatgcgaatgatgtgatgatgttatggtatgcgaatgaagttttgtgccgaagatacacacacatccccttagtagaacacacaatctctttgccgtttatttttcggcttcaccgcttatttttcggtgtatcagcgctgacttttcgctgtaagcctcccttaggagcttcttcgcctttttcttcggcggtattcgcgttgacttttcgtgcttcgccttacacttcggcggaatcagcgtttatttttcgctataagctctgcattccctttggaacgacttttgagcagaaaacttacgctgcgctcccttaggaacgacttttttgtagcttcagcaaacttacgctgcgttctgtaaaacaacttttttgtagcttcggagatattttctgtagccacgagctcttaagaacgagctttcatgcttcgacaactttttagattccgtaagtctgtgtataagatatattttcactatggcaaaaacgaaactgttacaagaaattgaaaacgacaagaaaaacttaggctttcaatgattgttctttattaaaaagaaaaatgataacgaatgcaataactatttcagcagtaggataccttctagtagatgtgcttcgactctggtacagtactgttgactgtacgagcttcggactcctctctgaagtctcgttgctgatgagtgtgctggctcccttctggctgctggcctcgttgtattggtggtggaggtggaagttgttgccaagatgcttgagattggcttgccgaagcaacagaagctgcagaatggttacccactgtaacactccaggttccacaaacaacccggtatgctactgtactacacttccgacgtccatatataaaatttcggcagcatcccttttgcaagtttgcataaaagagggagcaacagagtataaacatatatcatgactaaaacatactaagtattattactcggctagcaaggaaagataaacatacgacctgaactgaattaaccagtgcgcacgaccatatgaaaaaaataaaccaacttcctttgacaataagtttctaattaaatcatggctgcgcctgggcagcgttattgtgagagtaaaagtggacgtgctgctactcccctcattcccaacatgtatcaagtacctgcattgagtaatgcaagagtgagatgacacatctcagcaagtaaaataatatcaaacagtttaaccacataagaacattgttttaccaccacttaattccacaaccttcttattacgaaggtgcaacacgtatacaacgtacaacgcatctagttaccacacctcgcaggtagaaaccacaatagtaacatagtaatgtcacacttcatatattcctcatgagtgcaaatgtctgcaaatgcaaggatgacttctgc

SEQ ID NO: 85559 - DNA, 355 bp, Zea Mays
cgttcattgattattatatatcttcttttcattatcgtaacattagggcaaaatattacagactcagatagatgatgagaggaggcaacgtgaggaaatgaagaagaggatggcggagatgtttcagtacatgcagagccttggcgtcacattcgatttttctcctccaccttcgttgttccctatagctgaccctgcttagttccatactcctgtgaatatcaaaattctagtcctgcattatatatattcatttggtctcacaaatgcaatctgttctctgtgtagggacaatctacagcataaaacaatcctcatggatcgtccagtctggccacgcacctcgctgatgaca

SEQ ID NO: 85560 - DNA, 195 bp, Zea Mays
ttccaacaacaaatccttcctcttacaagatgcactagtgttgttctcaatcatgttgacatactcaataaatcttccatagaagaaaaacatcttgagactgaaacaaccactagttgtaactggtgaacaaatcaatatagtaggcataggggttctcatcacgaattggcttttgaacaccattgaattcac

SEQ ID NO: 85561 - DNA, 233 bp, Zea Mays
ttgtgccagcagatgagcatgtccacgcagcgcgggaagatgtataaacggcaccccctcctcccatccccgcctcggcgcctccgccgcctgccgccggccccggtcgggacgcgcactgccccatgcggagcggctccaagaactaaaaacagtcctcctctacaagtcgatcgcaggcggcggtacggagcaatcgagcagagcctctctgctgcagaggaggagacgcc

SEQ ID NO: 85562 - DNA, 287 bp, Zea Mays
ctgtctgtcatgtgcaccgacgtgtacgtgctctgctctgcatatatatgtatactagaattgacaatgatcctaccaacttactagcatgcattgaagcttccgcggaaggtgagtctgaaaaagatagctagctgtacgagagctagtacacgtacgcagcggtttcgccagcaaaagccacgtcggccatcctcttgcgtgtaatttatcccgccgatgtacgattagcgtcagaaacaccctggcggcgtacccggtcggtacggtgcttccttgcaaaaaaa

SEQ ID NO: 85563 - DNA, 435 bp, Zea Mays
cacagtctccctcttccacccgcaacgacgcctcccttctctttcacaacggatggagaagagcattgttcaaccctctagtgtcttctcgcggacgccagcgcctcgcgcgctccacaagtaagcaatgattatgttcgcccccaagtcgactgacaacaacattcgggcgagtgaacaacgacaagacgacatggacgcaagcaggcgcagtccaacccggtcgagttcgtcgacgacgaggagggacatcacgaaggttcttgtgaaagcgggtttcggtacagtcctcttcgtcgtctgaatgattggtcgtcggatccgtcttctcctccaaagacagaggtcatcgttgtcaatgttgtttgggtcaatgacttgtttccatctacttaacggctacaaaatatggctttttaccttcttaccattcat

SEQ ID NO: 85564 - DNA, 2466 bp, Zea Mays
aacagcattttggaagtaatgctgggcgtgtgaacacgtggtcggcgttttagaggcagcgccgagtgattgaaggtcggcgtcggcattttagaagcaatgccgagcgattgaacacatggtcggcgttttagagacagcgccgagtggttgaaagtcggcgtcggcattttagaagtaatgccgagcgattgaacacgtggtcggcgttttagaggcagcgccgagtggttgaaagtcggcgtcggcattttagaagtaatgccgagcgattgaacacgtggtcggcgttttagaggcagcgccgagtgatagcaagtcggcgtcggcattttagaagtaatgccgagcgattgaacccatggtcggcgttttagaggcaacgccgagtgatagccagcttcttcaagtttctttggggaaaatggccgagtgatgaggtggcacatcggctttcttggaaataactgttagatatccacgtggcgtgctgagatttcggagatgaccgctgggtgatgaccgggcactttttcaaaaaggtatctggctcaagaatatcccttaagtgtcgcgctttcagccgcctttgctttccgtgccctagttcttgcatttccgcatctgaatcttctctgccactcgcctcccactctgtttcgctagcgagaagcaagaatggcgcccaagaggaaaaccgcgaactcgtctgctgcagtgatccccgccatcgatcccaacagtcagttacccttcgcaggtaaccatatgtctgtgatttctgaagttgagcttctccgccttgtttccgtcggggttctccctccacgggaactctgttcttggcgttcttgccatgggactactgtcccaaccgaagatacccacgaatcagtggtctatacccctttccttcttcgcggcctcggccttcccatatctccttttttccgtggaatccttgatttttatcacatcaacctgactcacttaaaccctaactccattctccaaatctctattttcgtccacctttgcgaagcttttcttggcgtgctgccgcattttggcttatggaaatatttgtatcactgccgtcctgggatggccggggggcaacatcaattggtcggaggtgccagtttagagatgcgccgggggcggaagaccgagtatctcgagatacccctcaaggatagcattaaaggctggcgtctggagtggtttatagtggacaattatggaaactctcttcctcctcgttcagggagacaggcagacgttcgcactccgagttggactgaatctcccacggaccaagaagtagccgaggcgggcgtgttgcttactgaggttggattactgaaagagagaggtctgactgccgaagctgtggtcacagattttgttttcaaaaacattcagccgctgaaggacagggcctatccagcatatctttaccgagggctggccgacccaactcgagttactaataggagaattccttctgttgatttggtgagccgactcgagatgattctcaggggtaaggtttcaaacgttggagctccagtggcatactcggcttggaatctgccttctcccaaagatttcactctttttgtgtccaatccgcccgtgacagatagcaatttgggtcttagagttcgaccttctgctgaagatgtccgttccttagttgcttcgctcggggagatacctgatgatgagcgacagatttattttgaggtgcccctgaaccctagtgacgcagacataaatgacatgctcgatctgctagctgaggattcgtctgatactgttcctgatggtacactggcagtggtgccgcctccggaggttgatgcgaccttggatgtctcgaaacctgtcaatgctcgcccgaggcgtcctagccgaaccagtcagcccgagccttctgctgatgagcagaaaaggaaaagaagacgcctccggcgagtgtctagctttgatgaggacgccagcaccttagctcccactgttgaagaaatgactgcaactggtctagctgacgttgatcccaatgggtgtgctccgcctgttgctgaccctaatgaggatgctgtctgcgctgctgctgtggaagatgaggaagaagagaatgaaactccgttaattcggaaaaacagtcggcagctcgtcgctagcggtggtagtagtggggttccttctcctgccttgtctgctcttattggtctgcaagaactgtccatgaccaattttgatcaagctctagaggatatggtccctgagaacttgctgttggaacctgcagacgttgatgcaacagaaatttgcgcagccgtgccagatgcagggttgaggtcgtcccgtgcctcgtcgaccttagagcgcgatcttgagggccgggataatgacttggaccgtcctgatcctgtggaaaccagctgaaggtccgttgac

SEQ ID NO: 85565 - DNA, 2839 bp, Zea Mays
caacattctggcggcatgacgatggctcgaacttcagatcaggaggtcgctttggagggcagcatccccactggtctgaagttgaactctgctgaatgtactgagcttgttcctgctggcctactacgagctgcttcgggtggtggtctgatacctgattaccagctgatttctcctgacctggggatctcttcgttcttttccaacctccaggtgctgtgccgtgctttaatttgatctctatgttgcatgaattgctgtcattatactcatctgttcttctcgtcaggctttggtgaatggattggtcagtcaactgaaatcacagggtgcttctaccccagaagtggcatcatctctcgagtgttggaatccagtgttgcttcgccgtcgtgtatctgagttggaggccatcaatgctggtcagtgtcctttcttcttcttctttactcttgtccgtaggttgttttaccttctcatatcgctttgtttgaatacttcttgatagggatgactcggcaaatcatagttcttgaagaaaaacattctcaagatcaagccgagatgactcaacgatgcgctgacttcgaggagaagtattctcaaagtcagatcgagttgagtcaggtctctgcggctttggatgatgctaacgctctgagttcttctcttcatgctcagcttaactctgagaaggtagcttgcgaacctgtgcttcgccttatcacgatcttggattctgaatgagcttgatttttgcttgtaggaagagaaacgtagccttgctgcttctcgcgacaacttggacagactgtaccgggattccagtaattcgctgaccatcttggagaggagccaccgctttacgatggaggagcttgacaatcagcgccgtcaactgcaagaatcttcggacgaagtggcccgccttacacagttgctatcagcaaaggatgcctccatcaaggaactccgagcttccaagaaaaccattgcccgggagttggaaactgctcagcaggctgttaaagttgctgaagaggctgctgtcactttcaaaacccagcgcgataaggccctggacaaggccattcgggcgggacgaattttgatgagaagacctggcgtggttgtccccgaggatataagagccgatgtggttgctgcccctgattcctcgaatcgcccttcttcgtcagtcgttcctgaaagagacattggaagataaagaaacagttcgcgtgctctgagcacgcagttagcatgagcgagtatttatttagaggacatcagcttatcattcgaatgttatgatttctttcctatcgtatcagaatttattagtttgcaaatttgtggtatgctacgtgataattatgaagtctgtttgtgggatatggagatcatcccttgaactgcataagcgtgagtatgttatactggtttaaaccatcaattacttttagccggtaacttccgttagtagggcatagtggtcacccctgagttaagtaagcgtgagcgtgttgcaccgccttaagtcgttgccgacttaagccgattgctccgtttgtagggcatagtggtcaccccgagttaagtaagcgtgagcatgttgcaccgccttaagtcgttgccgacttaagccgattgctccgtttgtagggcatagtggtcaccccgagttaagtaagcgtgagcatgttgcaccgccttaagtcgttgccgacttaagccgattgctccgtttgtagggcatagtggtcaccccgagttaagtaagcgtgagcatgttgcaccgccttaagtcgttgccgacttaagccgattgctccgtttgtagggcatagtggtcaccccgagttaagtaagcgtgagcatgttgcaccgccttaagtcattgtcgacttaagccgattgctccgtttgtagggcatagtggtcaccccgagttaagtaagcgtgagcatgttgcaccgccttaagtcgttgccgacttaagccgattgctccgtttgtagggcatagtggtcaccccgagttaagtaagcgtgagcatgttgcaccgccttaagtcattgtcgacttaagccgattgctccgtttgtagggcatagtggtcaccccgagttaagtaagcgtgagcatgttgcaccgccttaagtcattgtcgacttaagccgattgctccgtttgtagggcatagtggtcaccccgagttaagtaagaatgcaggtcaatcataaatgaatcaagtatctttgaaatttctctttattgatgacatatttccactttacagagtacatggccgctccggctgttttgaagtacagctaggggtaaaactttctgaggtgttctatgttccaagagttcccgacttctgtaccatccatctgggtgaggcgatacgatccgggtcgagtgacctctgccactatgaagggtccttcccataagggtgatagcttgtgtcgtccctcccccgttagaattcggcggaggacgaggtcccctactgaaaagaacctttgccgcacagccttatcgtgatagcgccttagagtctgctggtatcgcgctgactgtattactgcattcagtcgttcttcctcaagtatatcgatatcttccagcctggtggcctcagcttccgctatgctttcgaaaatcaatcttggcgccccaaacttgagatcagcgggtagcactgcttctgatccatagaccatgaaaaaaggagtgtttccatgtagggcccggctaggttgagttctcaagctccaaacaacataaggcaattctcttatccattttcctgcgaatttttcatttt

SEQ ID NO: 85566 - DNA, 2974 bp, Zea Mays
atgcttttctgctcgcagaagtcaaagaattctgagctggtaaagttggatcccaagtcagtgatgatactgtttggtatcccaaatctgaatattatgctttgtatgaattccacggctttagcagaggttaaagaggcaatgggctgaaactctatccatttagtgaacttgtcaattgccaccaatacatgggtgtatcctccttgagctttcttgaaaggtccaatcatatccaatccccagcatgcaaaaggccaagttactggtatggtttgcagttgctgtgctggcaggtgctgttgttttgacaggtactggcaagcttcacatctctgaactagctcggctgcatcattcttcgctgttggccaatagaatcccgacctgaaaaccttcccacctaatgttctggatgctgcatgtattccgcactgccctgcatggacttcctccagaagttgcttcccggtggacgggagaacgcacttcatgaggacgcctgacgcgcccctccgatataatacctccccaatgagtgtgtagtgagctgattgtctggcaatgcgctctgctgagttcttgtcatctggctcttcttcattctttatatacttaataatcggttgcctccagtcatcagagtctggctcgggttggtctatgatgttgcactcttccctttgatccatcgagatgctcggctgaaggatttcttgcacgaagaccccgggcgggacttgagctcgaccagatccgagctttgacagtatatcagccgccgtgttccgatctctttctatatgatgaaactccagaccttcgaatttatcttctagctttcggacggcagcgcagtatctccccattgaatcattcgaacaatcccattccttgtttatctgactgatgactaccagagaatccccatataccatcagtctcttgacacccagtgatatggcgatgtttaatccgtgtatcaaggcttcatactcggctgcgttgttagaggccgggaatagcaattggagagcgtacttgaggtgttcgcctcccggtgcagtgaagagaattcctgctcctgctccctgcagcttcagcgagccatcaaaatacatttgccatacttctgcggtttctggattatccggcacttgctgttctgtccattctgatacgaagtcgaccagtgcttgagttttgatggcagtgcgaggtcggaactcgatatcatgggaccccaactcgcaagcccatttggctattcggccaatggcttccttgttgtgaagaatgtcccctattggaaaaccagtaactactatgactttgtggtcgtcaaagtagtgacgcaacttgcgggcagttagaagtactgcatacaatagcttctgaacttgaggatactttttcttcgatgggcctagaacctcactgatgaaatagacggggtgttgaaccgggtaggcatgcccttcttccactcgctcgactaccaacgcagtgcttaccacgtgagtcgtgcaagagatatataacagcagatcttcagccggctgagccggcgtagctcgccggggcggtttcaatactggcggtgttgtcaggaatttcttcagtgcgtctagagcttcttgtgcttctgaagtccattgaaacttattcacctttttcagcagtttataaaatggcagacctttttctcctagtctggatatgaatctgctcagggctgccatacatccggtgagtcgctgaaccttcttctgtgaccgaggagcttccatcttcatgatagcttcgatcttatctggattagcttcaattccccggtggctgacaataaatccgagtaacttccctgctggtaccccgaagacacatttttcaggattgagcttccatctatatcttctcaaactgttgaaaaccagctgtaagtcttcaatgaagttttctggattctccgttttgatcaccacatcgtccacgtaagcttccacacgcttgccccagtgatcggctaagcatgtttgaatagctctctgataagtcgctccagcgtttttgaggccaaacggcatggaggtataacagaaagcaccgaatggggtgataaatgccgttttttcctcgtcttcttttgccaaactgatctgatgatacccggaatagcaatctaagaaagacagcatcgaacatccagcggtggaatccaccacttgatctatccttgggagcccgaagggatccttcggacagtgtttgttgagatcggtatagtcgacgcacatgcgccaatccactttattctttttgagtacaagaacagggttggctaaccactcggggtgtaatacttctctaataaatccggccgtgaccaagcgagctaactcggcacgaatagcctctctcttgtcgggcgtgaaacgacgcagcttttgccgaattggcctcgcctggggatagaccttcaatttgtgctcggccagttctcttgggactcccggcatatccgcaggttgccatgcgaatacgtctcggttatcttgcaggaactggacgagcgcgctttcctatttgtcactcaaactggagctgatgatggccgtcttgcgctcatcagcgaaacccaggttgatccgcttggtgtcttcagtcggccgcatagaggtcgcggcctgagcttcgtttgccggcacggcgaggtcttcgtcaggcttagagttcgccggtgtagaagaaatcgctgatggcttggtggtgagggccgcctggatggccactcggaaacactctgcggcgccttggaagtcggcgcgtacagttatgattcctcgtggtcctggcatcttcagtatcatgtacgtgtagtgtggaatggccatgaacttggccagccctggcctcccgacgatggcgttgtacccgcagtcgaagttcgccacctcgaacctcaggaactcgg

SEQ ID NO: 85567 - DNA, 661 bp, Zea Mays
ctttacttcagctacatatcttcactttgcaactcttcgaggagatggaacttcaacaaaatccggcctttgaggagcatccggttgctgattgcaaatgctgattctagctactcaaagatcatcttcaggcttcagctttcgcttggcagctagcttattgaagaagcatcgatgccaacacacaaaccttcttcttgcgaacttatccatgggtcccttccttgattagtcttctggtgctttatcaacaaaacttgggtgaccacttctcatccagaaacttataagcttcgatgatctggtcctacacaagcttgctacaggccttcttctttttctccatagcaggaaccttactggaacactaccccacttaaaatgaatgagggtagaactcttgaatcttggggatttgaactccttgaagtacctcataacaagggtgttacggggcctccttctgctgttgctgcttgaccaggctgcggagagatgactggcacagggttgattctgggagaaccttcttcttatcttctcttcactatcttattttctcttctcacttttcacttttcactgcctctttctttctctttgctattcccactagaggattctatcgatgagtattaccatcatacagaggaggaaacca

SEQ ID NO: 85568 - DNA, 552 bp, Zea Mays
ctgtagcttattccaggcttcaagggtaagcttcccggtatcttcttgggtaaggcacttttatcttcagatgggttaagatgagaatggaagcataaggtaaggattagctctaatttgtgatctatgtttttagagaaaacctttttaagaaaaatgaaaagaaaaaacacaagctcagcaatgataagcacaaacaaataaaatgttttgaataagggtagaatagagtttttccaaagcacgggctactcagattcgggggctaagcataactactattgcttggctcctgaattgagaactatgctaaatgcaacttatgagcactaacgttaaagcatcacatatgcactcaaaaggggagaaaacatcaagcgaaattcattttgaaatgccctagggggccacacaaatagagttttgcaaaacacgagtctacatgattacctctcatacatgcagggctctagccaaagtgacaaaaaacttcactacccaatgcatgcagaggactgggcataactaacttcagaccaggcaacttctctt

SEQ ID NO: 85569 - DNA, 548 bp, Zea Mays
attttatgcagagttgttttgaaaaacattttgtatttttgcaaagcgcatcctctccaaaaggagcaggaagtttttcagtattatagcaaaatcccctggactaaaccatccaggtatctcaccagttcccgctggttttcattttcaaaaacagctactggacttcccgtccaccatagctcacggctcaaccgccgaacctttttaaaaaccacttttcaaaagcatctctttttttggaaaacaaaacattaattgccataccataccagactcgtccattcctgtggacacagactattcgaataggtttcaaactctgcgcagaggtgtacactttacccactagtccggctctgcgatctcatgatcaatgagatccgaatccgaatctctttcttcccttgcacggcctaaccttaacggttataccggaaggagtcaggccaccaccatgtccaaaccggacaaaacattccccctccttatcctcccggtgctccccagccttcataaccctggggttggaccgtacgagttcagat

SEQ ID NO: 85570 - DNA, 285 bp, Zea Mays
cggcccagccgagggaggggggagtttttctttttctttttctttttctaactctaattcctttcttctcttttttctatttttatttctttttgattctttttctttggagaccaaaaatattttctaagtgatcttgagtgagaaacatagtctatgtgaggtgctctaattatttcaagtgtatgcacatgagaaggggttctaagggtagggttaagggagaaaggtaaaataaaggggggattaggaggttagggtttcaaaccttaggtgggattttgg

SEQ ID NO: 85571 - DNA, 134 bp, Zea Mays
tcttttgcaaatagtcaaaggtaaatgaataagagtttgcaaggcattttcaagttttgaaattttctccccctgtttcaaatgtctttcctttgactaaacaaaactccccctaaatgaaatcatcctcttag

SEQ ID NO: 85572 - DNA, 383 bp, Zea Mays
cgccacctagatcgaaacgaactcctcgatgtatggctcctcttgaaccacatgttcttctcctgtggggggatgtgagacaacaagggtgagctcacacatgttcatttctcaacaagttgtggggaataatgtggcatgaactcaccaaaggtgggagttcatgtgatgtgtaaagctgatcaacaataggggttaaagctgagcattgcttttaataaattggtcgaattttattagctattactagatgtaagtaaataccaaaccataataaataatagaacaaaattaataaataatcctaagcaaatgcaaatgacaaattgaatttaagttccataatttaatcatgcgagagtcctgagctactcatgaccgtg

SEQ ID NO: 85573 - DNA, 55 bp, Zea Mays
aaaaaaaaaaaaaaaaaaaaaaaaaaaaaaaaaaaaaaaaaaaaaacatggacgg

SEQ ID NO: 85574 - DNA, 366 bp, Zea Mays
cgaagatctgatggggaaaagacatgtatatgtatttgtgaaccctaatagcgaggacactcggatgtatgatgctctgattggggaaaatacatttgtacctatgccaaacgttgataaaatgacgaagcaatcggagaaactgtggagatcttgacagtcgtcggcgacggcagcgattctactgtgaagctgctatgacgctgtggcggatataaccggtgtagcgccaggagtagtggatgggatgggggaaacagtgaagttgcgagcggcgtcgactccgggcagaagatgatgacactgtgaatagaaaaaagccgctggcttctttccttcggtgtggtcgcttcgtctcccgtccag

SEQ ID NO: 85575 - DNA, 485 bp, Zea Mays
gggtaggctcgtgcggcagtgacacagaaaagcgcctgcgagatgaaagaatgggaagaggctgacaaggtggctcccaggtgtcggcgcagtgctccggtaggacggactgacatgcgggccattgctgtcggcgccgataattgaagttgggccacgcggggcgagaggaagaagtgggctaaagaggtggtttgggcccatgcgcgtttttcaccttttttttattttcctttttctgaatttactttcctttttgtttttgttttttttgaattcaaatttgaattcaattcaaattgtaagattatactcattttaaatgtacacattgaacctaataatatgaaaggtccaattatttctatatctatttctttattattatttttttgtataacattttccttctcttctctaacctctaatttgcaaactagggtgaaattcccaaattttggtattaatatatttcttacttttat

SEQ ID NO: 85576 - DNA, 462 bp, Zea Mays
cccctccctcctttccccttgggctagccgtcctctcctcccatggcagcccctctccaggtcttcctcctccctctagatctcccccgcacaacaaggatcgagaagaggaggagcacgttgaattgaaggggaagagaggatcaaggagatgttcttccccatctcttcttgcagaatttcttggggaaaccctaggtatagatgagatccttgttccttcctgtaattatgtgcttttggaggttgtggatcatgggaattaaaggattagaggttggattagatgtggggttaggttttgatctcgaatttagttttctgcagaatggaaaattcgacagtttctgttcatgccagttttccgtggtcttagtggcctcaaaaaaatagaaagtctatatatgagtcgtagataatttgtagatctttttgtggccgtgaagaacacctcaatcgaac

SEQ ID NO: 85577 - DNA, 1917 bp, Zea Mays
ttccttgaacaaccacaatagtttgtataacacttccctgcgtcaacaatacctgcaaatatcacttcaatgtatgcatagaaacgcaaagtgtaggtactctgtcttcatacctctgagggtataaaaccacatcatctgcaaatcacttcaatgaatgcatatgaatgcaatgcatatgtcatctgccttcatacctctaagggtatgaagccgcatcgtacccctcctcgggcaacgtatgatgctaagttgtaccggtacggtcggaccataggtcacgacaaaacttcagatgcaaatgagtcatgcaatgtatatggcatgttgcatttatcaataaactacacttccttcagatacaatacaaacctcaattaatacttcatctgctttcagatacaatacaaacctcaaataatacttcatctgccttcagatacaataccaacctcaaataatgcttcatctgccttcaggggtgtgaattaatctcatgggtcatactcgaaccataatcatcatcaatatatgatagaacatcaatataatacaatcaagtagaacatcatcatatagttcaattatgaaagaatccaataattctgaatattagaatgtagacgatagaagtaacaggtcaaaacggtagcaaccaccgctacattcacttgcctttatcgaagaagaaaaatgtattggacatgatctggagtgtagccacctgctagcgcgcataaaacttagtacacatatttcacaaacatttgccaacaatcaacaattcgctcctacactggaaaccaagacccggtggaaagactcccaccctgaaccacatgccatacagcagcaacgctgtttgttaattttgtatctttaaaattataacagtggtgatatcaaacaaatactctaggagtatctacacaaaatactctacaacttcggtattcaatggataattaaattcagctatctataagttctaaaacatctgacaacataactgactgaatctgtttcagacagcagcatagttaacttcaaaattcgatacctcgcaaactactcagccaaaaatcatgaaattataccagaagtaagaacttttattcctctacataagtctccatagttggaagagccaatttggccatttacctgacaaaacataccagtgaacagatccgatcatttttgtcaggcaaacaggaatagccacagtaaaacaaacatatctggagtttcataattcatatgaatgcactctttaacaatctggaaagcttatgaaattatctacaatgtttcttacaaacccaaggtttaactctgttgataaaattgcctaaatctgaagagaacagattctgcacagaattaagagactgaaaaactgctataatcaaactgcaataactctctgatctgttgtccaatgaggtgttcttcacggccatggaaagatctacaaattatctacgactcatatatagactttttattttttgaggccactaagaccacggaaaactggcatgaacagaaactgtcgaatttgccattctgcagaaaactaaattcgagatcaaaacctaaccccacatctaatccaacctctaatcctttaattcccatgatccacaacctccaaaagcacataattatagggaggaacaaggatctcatccatacctagggtttccccaagaaattctgcaagaagatatggggaagaacatctccttgatcctctcttccccttcaattcaacgtgctcctcctcttctcgatccttgctgcgcgggggagatctagagggaggaggaagccgtggagaggggctgccatgggaggagaggacggccagcccaaggggaaagaagggaggggcggccaagtgtgggaggggcg

SEQ ID NO: 85578 - DNA, 299 bp, Zea Mays
cccacatctaatccaacctctaatcctttaattcccatgatccacaacctccaaaagcacataattatagggaggaacaaggatctcatccatacctagggtttccccaagaaattctgcaagaagatatggggaagaacatctccttgatcctctcttccccttcaattcaacgtgctcctactcttctcgatccttgctgcgcgggggagatctagagggaggaggaagccgtggagaggggctgccatgggaggagaggccggctagcccaaggggaaaggagggaggggcagcca

SEQ ID NO: 85579 - DNA, 1357 bp, Zea Mays
attacattcaaagttacaaaatattacacatgtttctcaacaaacattacattctaaatgtttttacaacagcatctaatcttcccttaggactacttctgcagcttcgtttagcagctgatcaacaactttatccatgatggcttcggccattcttctaatttcgtcatcccccttcacgtgagggcccgcagatggctcaacaggttctgagggaagagaagatacggctatattactattacaaacggagaacaagttcgaaatcaaaaaattacaacaaagagtcaaaaaccactagtcaatacctatttgcccttcgggctctgcacttttctcagcagcctctgctacttttctagcatcatgaatgcctttttcgctttttcgaataattttttgggccattttccggccaccattgtcccagatgtcggtgaaaaattttccaccgaccaggcttgcttcggccgaggggtcttttgtatctttggaggataaggcggcttcggattgcgccaagaatttcacatgctcacagcctttcctctccaaaatggtagcaatccccctggcacccgaaaaggcacatatgtttccgtggctattcaaaatttcttcaaaggcctcagcctcgtggctaatccattcgattgggccttcggggtcaccctttgtgaagttctcctcacttgagaatgcgccaacgctggcaaagctggtttttacttttttaacacattccatagatttttcatagcatcttttcttagatgcacgaagctcttcaacgctttttcccaaatggttggcccattgttcactgatttctcgttttgtttcttcaagtgtgcgttcctctttagctctggctagttgttttcggagatcttcaatttcatgcctctgagcctcaacttgaactttagaagtagcttcatcttcttttattttatctatcaatgaatgcaatattttatctttttcgagaccttcgttccttagttcaattacttcggaacgaaggttgctcagggccataacacacccttcgtctttggcatctttttgggccctgagggcattgctaagtataagaccctgcaaaaaagtttggtttcaataagtttaaacaaatgaaaaattttgattccaagaaataataacaaaaaaccttattttcgcacctttaagctattgtacgccaagctgtcggctaaatcatcttttgataacaccgagagcccgttttctagtattgggaattcgaagctcttgctcatctcctgacagacagaaatctccttgctgtcagggagacaatacaaaaagtcttcttgtaacaccccgggttcca

SEQ ID NO: 85580 - DNA, 277 bp, Zea Mays
ctcttttaacattttggaccacgcttgcaccacatgttttgtttttgcaaactattttgtaaatcattttcaaagttcttttgcaagtagtcaaaggtaaatgaataagattttgcaaagcattttcaagatttgaaattttctccccttgtttcaaatgcttttcctttgactaaacaaaactccccctaaatgagatcctcctcttaatgttcaagagggttttgatatatcatttttgaaatactactttctccccctttttgaacataataag

SEQ ID NO: 85581 - DNA, 551 bp, Zea Mays
ctcacgtccactctatcttcacaatattttacatgttcctagtgttcgtaagaatcttctgtccattcaaaaattagctcatgataatgatgcatttgtggaacttcacccatcctttttctgtatcaaggatcaaaaatcacggagaacacttctacgcggtaaaagcttcaatggtctgtacccggtgccatgctctaaatcttcatcacctatgtcccgccatgctgctctgtccagccactcagtttcctctgatctgtggcactgttggcttggtcatccatcctttagcgtcgtcgactttattgtcaagtccaataagttagcgtgtacaccgcgtcagtcatctagagtctgtgatccttatcaacgcgccaaggctcaccaattgccatttcaaaaatcaaagcatgtaacctctccccctcttgaactagtccactccgatgtttgggggccagctgttacatccgttggtggttttaaatattatgttagtttccttgatgatttcagtcgtttcacatggatttatcttctcaaacgaa

SEQ ID NO: 85582 - DNA, 50 bp, Zea Mays
cacggggccagtccacccccaccgccgcagcagcacagaatcagatctcg

SEQ ID NO: 85583 - DNA, 502 bp, Zea Mays
ggcggatccagcgggtggtccatatggtccacggcacaccctaagatcatataagtgtagttagtatagtggtgtaagtgctatattttaaacttggtggtcaaggttcgagtcttgttgatctttattttttgtttgtttttttatttttttccttggcacaccctaaacatagcagctgggtccgccactgtggctgactgccggaatcggatgccactatcacactaaaaggagagcgcggtaacgagtttatactggtccgtaaccgaagacgttgtaaacgattgtatttaagcccaagcaaacaacagccaacaggggtctaataacgtcgtaaaccaatcacgtgagtacgtgacacaaggaccgaaccaaacacgtcctaatacatatagaacggtccatccttattattttgatattgttaatcaaacattcatcatcgttacatcgtctttattattttgatattgttacatatatctattagctagaaaag

SEQ ID NO: 85584 - DNA, 116 bp, Zea Mays
gtatgttttcaagatactgtattcccagttttacttcaagcactgttcatgtgaaagggaaaaaaggtttagaaagctgaagaagttctaagcttgctacacaagtgcagggagga

SEQ ID NO: 85585 - DNA, 255 bp, Zea Mays
ctcccctccattataaccacccccgtcccacaaaaccaccacgccgaggcagagcagaacccagcagctccaattaatggactgcgcaacagcgcagcgcagcgcagcatttcaaaccgagccaaaccggccgcagcatcgcagcgcaacgcagcgggcacgcgccttgggggtggagggaatgacggaggcgtcggcgatcctctcgttctccgcggccgccgtggtggaagacgtgctgcggcagcacgggtg

SEQ ID NO: 85586 - DNA, 488 bp, Zea Mays
ctggattggagaagcttccaggaagcagaggaccggtggtcgtggccatggtccatggacggggctggctggctggctggtctggtctggccctcgacgggtaggcttttggaggctgaaggaaagatgggtacaaaggagagcttttcgccgggagaggtgctcggacggagcgggggacgaaaggaagcgcaaagcggagcggaacaaagcgggcaaaatgctcttctctctcgcattgcattgagttcatgatgagttctcgtgcctagacctttgtatacagagagacgaaaaatgaaatgataccgcatttgcattcccttttcatctctctgatggggtgatcaattgagctgtcaatgcacattaaccaacgccaagctgttgatcatgtataggagaaaaaggtgaatgatcatctaacggttctccaaatgatcagagtatcaggccatttgatttctcccgatggagctttggagtag

SEQ ID NO: 85587 - DNA, 275 bp, Zea Mays
gtcccgtggccgcgagcggtgaccggtgggtccgtgggtgagacagccccactccgcaatctccgtggggcggcacatcatatatccaagtggcactgtacattgacggtaatggacgctagtactagtagtgcttaattcaaagccgaaacctaactgtcccatcatacacacaggattagacttgtcgtggaacaaacaaagcccacagcgaacgatgccaactcaaaaaaaaaaaaaaagtcaaaagcgccgacgacgaggcagctctcgtc

SEQ ID NO: 85588 - DNA, 235 bp, Zea Mays
cccctaggcgcatggaggagcacaccaagtattcctagaacattcctaagcaccaagacatcgatctcgcattcgtttcattgtgatagcatctagagctcttgttgagttgcgaactctttgagttgtgttgcgagctcttgttgcgacttgtgtgcgtgttgttgttctgatcttttgaagtcttgtgtgcgttgctcattcccccttttgctctgtgttctttgtgaacttc

SEQ ID NO: 85589 - DNA, 867 bp, Zea Mays
aaatgtcgaaatcatatatcagtctaggatcagtaagtggtacactggtactgtagtaggtaagcggtaagcgacatgttgataattttctccctcaaggctagtttagtgaccaaagaaatacatgggatctataggcgagaaatctgcaaaagaatttttccatagatatcctatattttccaaatcaccaaatcagcctaaaaaagagagagaacgcactgttcagaagtgtgtacggtgtaatatacaaccacgcgcatccattattatcttcatcgaaatcttggagaagcaaattaatattcatccagaaagaaaaaaaattgaaatgacaactgacaacagagggggcgggctacctctagagactcggcatcatcaggcaggcacgcagcaacttgcagactagggaggagataagcaaggacgatggagattttggatggcttttcgtttgtcggtacagcaccggcaacttgacgctccgggctccacgccaaaagcaggggcgcggcgtgcagcttgcaattgcattgggcctccatatcaagtggacaagttcttcatacggcgtcgggcgcatggccccaaccccaagcgggccagggacaacgtcggccgccgcatttctcttgattcttcgttggctcgcgtttccaagctggttgtcaggctcttcctacgctgtgttcgatcggacgccactcgttttcgtccctcctcaggtagctcaccttgtatctccgtgcgacatgggcagagacgcggccgggcatgtctatccgggcaaggatctctgtagcagccggcggctgcgcacgcacacgcacgtgtagtgggcgcgtgtgtggttgtggtcgcgcg

SEQ ID NO: 85590 - DNA, 419 bp, Zea Mays
agaaaaagtggcacgcagacaagaagcgactgaaaaaaaatactctgcgcgcgcgtgaagagacagaaaaaaaaataaaaaataaaaaaatctggcgcgcacaggctgtcctgctgtcctgctgaccggcagcaagcaaagaaaaacaaagaactgcacgcgccgcaggaaagtgacagcacaggggaaaagtagcaaagcttctgcatgcacagccaaaaaaaaaaagtttggcgcgcacaggctgtccagcggagcggcagcaagcaaagaaaaaaaaagaatactgcgcgcgccagggaattgacgggtcaaaaaaaataaaaaaatgctgcgcgtgaagtgaccggaccagcagctggcacctagacaaaaaaaaatattttgcatgcgcatgtgactgtagctgagcacccgtc

SEQ ID NO: 85591 - DNA, 907 bp, Zea Mays
cagctgttagtctataattggttcaaaaattcagagtctcattttgttagtcaatagtgggtgattaggagagcatatgtatccatctacttattatgtggaataagagatggataggttagggcaggacatagtagggtaaggaagaactccatcccggattgtggatcttgactcatcttggtgatgtagcttgatctttgaagtcttgagttgatgcttatccttctttgacatggttggtcttctttggcctttatttcttggagttgtcatccgagttaaggacatatggctaggacacatgtgagtaggatggattgtatggtgtaggtaggttagaatctcttgctaggttaaaattgaagggttatgcaactatcggagggttaaggtagttgcatatggccaagtcgatctatcattcttaatttagtgcagggtgaactaagttaagacttgctctataggagtagagtctaatctatttcatcagtattatctatcatgtttaataagtcactttagattagatcggatctaggttagattggtgtgactagcttgaactagataagatctaattaatttggattggatcatgattgtttctccgaggtgagataagcaaagtggttaggataagataagataagatagattcttttaagatgagatcaatctattaaggtaagagaatatcttttaagataagaaggatcttatgaagctagatatattttagtggaggatattcttagttgatctagttatattatgatttcttatgcctttatgtatatacagatggaattgtggacattactccacaactcatcacaatcaatcaaagatccaaatcagacagatatcacaagaacaaacactcaagcgtatagttacctat

SEQ ID NO: 85592 - DNA, 1187 bp, Zea Mays
tattaatacaaaattattgcaactgaaatgactcaatttggagttaaattcatcaagttatgaatttcctaagtttgggacattattttgcattaaaaagaatttctgtattaaatttaatagatttctgagttacttggactgcggccactatttaacagaaacccagggggttctgcgcaaaagccaccaagactcagaactcccccagtgtggactgcgggttgtttatatggttttacagggtctctttagcaaatattacatcgcgaaggggtaccggtgaagatcggtcgtccgatcactgatcaagggcccatattagatcgcacatccctgcaaactggtacgactcggtatccttggatcataaatgaacggcctagattttatgaggcttgatctgcatcggacggccgagaagggttcaggccgaaccgatacccaagatttaatccctgccctacaactctgatctaacgaccatccacacgtcttcaacctccagacgcacacaatggccgcgcagggtgacagccgctgggctacctcgaggaggagcacagccatcagctcgccccacacgcgggacaggcgtcgaggcagcagcggacgcctggccgttgcccaaggcgagagcacacccaggtaaaaaaatatcgttgcatggacataactactcctgacctttacgaatctcgacggagggggaggtacctgcacgattcggtggtggccaggcccaggctttcccgaaatgatggcgtcgatgttgctacccacagtacaagcagcgtttgcggagtagacgaactccggcgagatcctccatggcacaggttcgatctccagagccggcgcccgggaccctggtgacggtgtgtccgattcctttggtggctgcttttagttctctctcggcaagggtacgagcggtagatggtgatggctgtatgcctcaagtatttatgcaccagagggggagatcggctggtggtacctggctagcatcttgtgcggcatgcagcgatttggtcgcaaggttgttacgaggatagagatgctacagcagagccccacatgtccacgagccggtgcccgcgagcgtccttccgcccgacatgcatggccctgtacgtgccgatagcaaacggatgcatgcaagagaattcaacgaccaatttgct

SEQ ID NO: 85593 - DNA, 217 bp, Zea Mays
gtacttttttcggacactcggcaaagactttgccgagtgtcaaaaagcactaggcaaagaaaaacactcggcaaattaagaatcgaaaaaattaaaaaaaatagcaaaacattttttaaaattctaggaacaactctctaaccctaccatagcaaagactttgccgagtgtcaaaaagcactcggcaaagaaaaacactcggcaaattaagaatcga

SEQ ID NO: 85594 - DNA, 906 bp, Zea Mays
gctacgcgggcaccacacagccaaaggagatgccggcgggatgcaaaggcaggcgcggccccggagaaaaagcacggcttctcggccacaccgtgccgtgccgtgccggggagcaacgaatcatggaaaggcgggcgatgctcctgctgccggctggcctctctccccgcggaccgcctctgcgcgccggtgctctgcaccccggcgcccgctttcttgcaaaggttttttatttttattttgacagagagaaattcctgcggagattctgggccaatgggataagctttgtggatcatgtccccggccggcatcccgcttccgttcgggacgtcctggcctcacagctgacatggactcaggactcttggtgttggcgcactgtctggggcatgacctttgactgcattacattagaatcttctattgcattaaaatcccttctcatttctagaccgcttccattttcgtttgtggtttgtcagatcaactagaccgcttacttgctcttctgggcgagatgatccaactgaggagtggaaagaatgcaaacaagaaggtttaacttgagatgacaattgctttgttcatccagcctctcaagggcactgtacgagggtatttacgtcttcgtcttcgccccaacaagcccaaacacgccggttcgatccgaccactttcggtcaatgagtgttgataaaataggcaatttacatatgaaattagtacgataatcttagatgttagtataaattttacgtttattttcaattttacgtctatttacctcctctatgcatggatgcctataaaaagctcttatacttggtttggatatcgatattggaggtaatgaattgaattgggttcaataccgaatcaaccatagtattgaaatgagatgta

SEQ ID NO: 85595 - DNA, 487 bp, Zea Mays
gtgtggatgccggtctctagcgggcgttgacgtgcagctgcctgtgcctcgtatgcagcaggacgttctgcctcccatgtgtgcagttggaccatctacagcaggactcagctcgtcgcgatcgacgcgggacacgtttgagaacgtggcccaggacgacgacgacgacgacgacgacgacgctggcgctggcgctggcgccgcaggtcaggtggagattggaccgtctcagttgcaggatgctcctacaactcagccatcacagctgacaccacgtagaaggcgtccacgagacccttacactccaggcaccgacgctcttggggccaagggcaagggtaagactaggaggaaatgaatacttttgtgatatggactgtgtgatttggacttatgctggagacgttgtaatatgaactatgttatgtgttttggacaatgtgttggggaacttgtattttggactttgtttgtggacattatatga

SEQ ID NO: 85596 - DNA, 184 bp, Zea Mays
caccgtagcagtaatatatgtaaataagacacatctcttactaagaatatggacggagagctcaatgagatgctagggtttcaataactaaggctatattcagcggatcgtgcatatactcgtgcaaaaacattgttttgcatgatagactataccgtttacaaagtgtagtttaaaatataag

SEQ ID NO: 85597 - DNA, 315 bp, Zea Mays
gctacatttgaagttttgccatgcctcagcgacggtgcagtcacggatacagttgaccgctgcagttgaagagtaaacgctatctcgatacagttttgcgtggagcgcgcgactgcggacagcctaacatcccttctttcttcctatcgctgcggggagctagagctactggcgactccgccagcgccgctgctgttggtctgttgccgccagcaatctagagacacaagtatgcgctcgcggtctcgcgcggctgttgctgccgccgccgaaggggacaggcgatcgcgagctcgcggctcggcacgacgtcgc

SEQ ID NO: 85598 - DNA, 450 bp, Zea Mays
tttgtcctctatcccgcaatcagagcgctacgacgctacgacctatacccacgaacaccacacatagtcctcgcctgcaacggctcgatgaagctcggccggggaggacgaccaccaaagcagtaggcgctctgctgcggtggcactgagtcgtttggcggcggcgtcgtggagaagcttgacgacggctctgtggatctcggatggggaggacttctatccactggcgcgttgccgctcggctatggacgcggagtcgcttgtcggcggcgtggagctgagtagtggtgctctggatctctactcggcggtgtggaggagccggcgcggtgccgcttggatgtggacatgaagtcgttcgtcgaagtcctggaatagtggacgagtgttgtgcgaagaacaaaaatcaatttcccattcgaatgtgtgaaggctagttcgaaaaataaa

SEQ ID NO: 85599 - DNA, 280 bp, Zea Mays
gaaaaaaatagctggcgcccctgacacgcatgcatggctgtgaggagaagtgaccgaacagagagaaaaagtctgcaacatggcgcgcgggctgagcagaagcgtccaaaaaaattctgcgcgcgcccagcagaggagaagtgaccggacagaacaaacaaaaaaaataaaaaagtggcgcgcactgacgctgctgagcggcagcaagcagagaaaaaaataataatctgcgcgcccagcagaggaagtgaccggtcaataagaaaaagaaaaaaaattg

SEQ ID NO: 85600 - DNA, 141 bp, Zea Mays
ttctgctcctccttttcttgttttggaggattcccaactattacaggcagctcgaaatgggtatggtatgggtatttcagcagtctagtcttaacaactggcgttttgtttgggaactcgacggctcgatggtgtggtatg

SEQ ID NO: 85601 - DNA, 236 bp, Zea Mays
ctcacatacaatttgttaactgatacaaaagtagccatcaactaattcagaagtaggacactgctacaaactaaacctggtattctcaaattaaatgatataatagtgctttagtaattttgtgaggatctaaatttcaaaaatatgttgtaaccttgacgaagcctcccgacttaaccagcaacagctcgaccatgtgtgtgcaagtgcaattgctatgaataaaaaaagctttc

SEQ ID NO: 85602 - DNA, 250 bp, Zea Mays
cccaacggccctttgacctacagaaaaaatgaacagcaaactcaccaccacctctgcacacctccccaagttccagccaaccagaacaatagtgttgctgatgcagacaataacagtcgattgaggcgggtgcatgtgcggttgagggctgattttggaatggggcggagaaggggtgcagtgcatgccatgtcaatcaaatatggaaggggccgcctaccatggccgcagatctcgcctaccatggaag

SEQ ID NO: 85603 - DNA, 437 bp, Zea Mays
gaaagactagagtcatttacataatataatcaaagtacacagaacagaaacgtagccaacgtaaacaacccaccacatgcaactgactgggggaggtcgctagcctaatcctcgaactcgccgaagtcctggaactcccggagatccacctcgacgccttcttctttacctgagcatagatcgcaccaaaggcaatctggtgttttgtgaaagcaagggtgagtacacatcaacgtactcagcaaatgtcccgtttggctgtagtggactagctttatgtgaggttaagctcaagcagttgcttttagttggtcagatatttattattagtggaagccaagttttagtaatagccaacccgtgaaccatttcctcctcgaggaacatcattatcatcatcgagccaaaaccataaatagaaccattgtatattgaac

SEQ ID NO: 85604 - DNA, 350 bp, Zea Mays
aatagactgtctcagtcagggtaccatggaggaacacattgttgacatccaactgatgaatcggccagtcctgatgaagcgccaagctgaggacggtgcggatggtggcgggcttcacaacgggactaaaagtctcgtcgaaatcaacgccagggcgatgagtaaatccacgaaggacccaacgcgccttgtagcgctcaagggaaccatcagaatgaaacttgtgtttgaatatccacttgcctgagacgacgttggcatgaggcgggcgtggaacgagagtccaagtgttgttggtgaggagggcttggaactcgtcctccatcgcacgctgccagagggggtcgtcg

SEQ ID NO: 85605 - DNA, 492 bp, Zea Mays
attgagggtgctggtggggtggagattgagaagatatgtggtggtgtgaagagcctcaacccaataaggagcaggaaggtgagcttgaaagagtaaggaacggacgatgttgttaacagcgcggaggacatgttctgctctaccattctgctgggaggtatagggacacaacatacgaaggtggacaccgtgggagaggaagaaagctcgtgcgtgggagttgtcaaactcacgaccattatcgcattgcaagctttttatggtggtgccaaattgagtggcaacaaaagagaaaaaattagcaatagtgggaaatgtgtcggatttgaggcggagagggaatgtccacaggaagtgggagcagtcgtcaaggatggtgagatagtacttgtaaccagaaatactgggtattggagaagtccatagatcacagtgaacgagatcaaagtgacgtggagcacgagactgggaaatggaaaaaggaaggcgaac

SEQ ID NO: 85606 - DNA, 431 bp, Zea Mays
gtgtgtacaaagggcagggacgtagtcaacgcgagctgatgactcgcgcttactaggcattcctcgttgaagaccaacaattgcaatgatctatccccatcacgatgaaatttcccaagattacccgggcctgtcggccaaggctatatactcgttggatacatcagtgtagcgcgcgtgcggcccagaacatctaagggcatcacagacctgttattgcctcaaacttccgtggcctaaacggccatagtccctctaagaagctaactacggagggatggctccgcatagctagttagcaggctgaggtctcgttcgttaacggaattaaccagacaaatcgctccaccaactaagaacggccatgcaccaccacccatagaatcaagaaagagctctcagtctgtcaatccttgctatgtctggacctg

SEQ ID NO: 85607 - DNA, 2546 bp, Zea Mays
gtaacaccccaggatccacaaacatcctgaaatgctactaaactacacaactaacattcatatataaaattttgacagcatctctttgaaaatttgcataaacgtggaagcaacagagtataagcagatatcatgataagaaaacatactagacattaataatcggctagcaatgggaagataaccataacgacatgaattgaattaactagtgtgcatgactagttaaagacaaacatcctttgacaagaagtttctaattaaatcatggttgtgcctgggcagcgttattatgagagtgaaggtggacgtgctgttactcccctcattcccaacatgaatcaagtacctgcattttgtaatgcaagagtgagatgaaacatctcagcaagtgaattgtttcgacgagatatttaaaccaaaaaattgaattaatcaacattttaaagggatcacaattgagatcagaaatacttgtagatatagaactcaatagtcccaaaataactaatgccatctcatttcctcgaataaccacaataggttgtataacactttcctgcatcaacaatacctgcaaatatcactttaatgtatgcatagtaatgcaatgtgtaagtcctctgccttcatacctcttagagtataaaaccacaccatctgcaaataccacttcaatgaatgcatatgaatgcaatgcatatgtcctctgccttcatacctctaagggtatgaagccgcatcgtacccctcctcgggcaacgtacgatgctaagttgtaccggtacggtcggaccataggtcacgacaaaacttcagatgcaagtgaatcatgcaatgtatttggcatgctacatttataaatatatttcacttccttcacatacaatacaacctcaaataatacttcatttaccttcagatacaatacaacctcagataatacttcatttaccttcaggggtgtgaattaatctcacgagtcatattcgaatcataatcatcatcaatatatgattgagcatcagtataatgcaagcaagtaaagcatcaccatagagttcaattatgaaagaatccaatacttttgaatattagagtgtaggcaatagaaataacaggtcagaacggaagcaaccactgctacattcacttgccttcatcgaagaagaagaaatatactaggcatgatctggagtgtagccacctgctagcgggcataaaacttagtacaaatatttcacaaatatttgccatcaatcaacaaaacacccctgcacttgaaaccaagacccagtggaaagactcccaccctgaaccacatgccatacagcagcaacgctgtttgttaattttgtatctttaaaattaaaacagcggtgatatcaaacaaatactctaggagtatctacacaaaatactctacaacttcagtattcaaaagataattaaattctgccatctacaagttctaaaacatctgacaagataactgactgcatctgttttagacagcagtatggttaactttaaaattcgatatctcccaaactactgaaccaaaaattatgaaattctgctggaagtaagaacttttatccctctacaaaagtctccatagttggaagagccaattcgaccatttactagatgaaacccaccagtgaacagacccactcatttttgtcaggttaacaggaacagctacagtaaaacaaacataactggagtttcacaaatcatatgaatgcactctttaacaatctggaaagcttatgaaattatctacaacttcttttaccaactcacagtttaattctgttgataaaattgcctaactcttaagagaacagattctgcacagaattatgagactgaaaaactgctataatcaaactgccataactttctgttctgatgtccgattgaggtgttcttcgcggccacggaaagatctacaaattatctacgactcatatataaactttttatttttttgaggccactaagatcacggaaaactggcatgaacagaaactatcgaatctgccattctgcagaaattaaattcgagatcaaaacctaaccccacatctaatccaactctaattcttcaatccacatgatccacaacctccaaaaacacataattatatggaggaacaaggatcccatccttacctagagtttccccaagaaaatctgcaatagatgggggggtagaacatctccttgatcctctcttcctcttcaatccatcttgctcctcctcttctcgatccttgctgcgtgggggaggggaagatctatggaggaggaagaaatggtgggcggctgccatgggaggagaggggacggccaaccaagggaaaaatgggggagggtggcggccaagagagggggggtggagggaaaaggggtggccccctagggttttgtgggagaaaagaaccgacgccccagatgacttctgcctttgcatccaacggcccacaaccctttcccacatccacgcaccgaagatcaacttttggtcaacatttttt

SEQ ID NO: 85608 - DNA, 218 bp, Zea Mays
ggagagggggggagaagcgggcgcgacgcggtttgggccgaaaacggcccagccgagggggggagaattttttttctttttttctgttttctatttcacttttccattttctatttttgtttctttttatttccttttcttttgaatcaacaatttgctaaataatcttaagtgttgaaaataatctatgtgaggtgttcctaacaatccaagtgtat

SEQ ID NO: 85609 - DNA, 375 bp, Zea Mays
gtcagcgagagggaggtggatccaggataacgtgctgagctcgccaacgggacccgggcttcagtgaaaaatgtagccagtggcgcgcgcatattccggttgagaccgttgacatgtgggccccacggcttagtgagaacagtagcgtggtggggagttgggccagggcaaattcggcccaagaccagtcccagcattttttttcttctttttttttattcctaattcttttctaatcccaaattttgaattcaagtttaaattcaaactttgtggctcatcttttacactatatttgtgcagttaacagtaataagtttaaggatatctatgtttttatatttttatatcatttctctttttcttattttccaa

SEQ ID NO: 85610 - DNA, 1396 bp, Zea Mays
gtattttgtcaaatatctgaaatctgatattctgattgtaaacgatctttagtagagttgcagtcattagagttagagtcgattggtagccttgtaagttgattctggtttggtttgtttcctgtgacttatgaccaatgtcaaaagaatcatcgatctaatgggtacaataatctaggcacagataaaccaatgccatcttcttcgtgcaccctcctgcggtttgtcttcgtttggacttgttgctctttaattctgcctttccatgtgtacataacatgtgcaatctattttggtttcttcctgactgtactatctgaccagagtcaaattcttcacttcagcttgtgtatctgcatatgtttgatatatgcttgatcatgtttaggacattagaactgcatgcttgcttgtcttgtatcattgtatacgacccttaaaattctgactgaaatggatgttctttaataaaaacataagctgtcaaagttccttcgtaaagaatgtgtaataaactaataatgttatattcagccaactggaaaggttggttttctgcaagtattcatatgtagggattcatttgccctttgaacattttttttggaagcttttgcctgttgcaacctcttggtcacccagttactgaaatccattttcaatttcccctcaagttttgtcctttaaaagttgtgatagtataggtattcagttattcaaaatagtatacgtttcaacgtaacaaaagcatagcagccacacagtgcacagcacacctataatttgtcaacgacctactaaccacaactagggtgacaatgggctctaaattttacaccataagatttaaggatatcagattaggattgggccctatttctatttatttttgaactaaagtttatttagtaccctaccattttgtgaagaagcatttggatcgcgactcattaccacaacataccagtctatagttcgagtaccgattaccaacaacagcctgcatagcaatatactatcgtgctgacatgttttgggcatcgacgtgtttttggcagcgacatgttttgtggcatgatttgacaacaatgctttgcgtgaccgaagtgttcagttttagactcagttgtgaaaaacaactgctctgtagagaaactgtttttatcttcttatgaatcatagactaatgtccttctttcaactttacttgtcttacgatttgcatgacgttatcagcttagaaatcaatgcttcatggtatagcagtctgtcatgtatatagtttatttggtgctcagaatatcgcatatgtagccagtataggttcattagcgagcttcatcgcttcattgcacgtcgcttattgaaatgactcgttcaagctagctgccatttt

SEQ ID NO: 85611 - DNA, 338 bp, Zea Mays
acgtcttttgaactggaggaggccgaggtcgccgagataggagactgtgaggtgcgcagactcagcgggtatgatgacctgcaccagctgcatcgcctccgaccgcatcagatccatcggcgggcagcacccgcctccgccaccacgcgccatggctggcgtgcgcgcgtgccccgccgggtcagcagccgacgcgctggtcctctgtcagatccctggagatccgacgaggtgtttcggatcggaatagcgcgggctgagcggatctccggcgggtccggcagtgacctgatcggttcctcgcgtcgtgaggaggtagagacaaccggggggggggg

SEQ ID NO: 85612 - DNA, 554 bp, Zea Mays
ctgaaatgaccccggccctcgaagtcactgctcagtcaccagtagtacatgttagaacttcattgacttgacttgcccattatggacatggtcatccctaggtgtctagctagctagctaggtacctctcctcgtcacgcaatcaagtggacgtgtcagctctctgcgtaccccgcgtggtggcctatacctcaatggaagcaaatggaagcgagcgatacttatgagtgaaaggacagggtaacaaacgcgggtctgcaaaaaaaaaaaaaaaaagagattgtcgtaattacttactgtaggtgagatttcgtagtagtagtaattaattgagtactttggatattgtataaagggaaatttggatccataccattaaaagatcaccactttggatccataccattactatctcacttacatgtgggtccacatgagtcaatgacatgtggggttcatggtatatatctaaagtttggatcttttaatggtatagatccaattgttccttgtataaatggcaggtcgatcgatcgatcttcattatatttgct

SEQ ID NO: 85613 - DNA, 361 bp, Zea Mays
gtggaattcaaaacttaaaagagattctaaaatttaagaagagaagcaaacaaataatatgtgatataaaagtataaataatataaatctccaaatggaaacttatcatgacacaatataaaataagagtgaatgggccacaaagttggatttaaattgaggttttgaatttggagttcaaaataaatagagaacaaaacaggaaaattagaaatagaaaaaaaagaaaaaaaaaggtttggcgcgtgggccgaatctactgtgcgcggcccagtaaccccgcgcgtcagcgctcctgccgcgccttaccctagcgccgccagcctcacttccctcgcgctcgctgcagatgggacccacg

SEQ ID NO: 85614 - DNA, 1507 bp, Zea Mays
gttatccactaaagctaatacattaccttatggtggtacatgctaagatgcccaactataatgtttcaatcaatcaaagaagcaaatcaagcattcatcatcagaacaatcaaccaacatttttaatagagaaaatagttttagttttatcttaggtctcctatctcttaaaaagttcataagtgtaggattccaaggtgtgaaatccatcttgtcttagagttgaaaagataagggtaatcagagtatgacaacaaaaggtgagacaggatcaagataaggtaagtatagaatgaatcagagtaagataagtagataagggtttgtccatttctatctaggtttcgtcctacagtcaacattttctctgataccacttctgtcacaccctgctttaagggacaaagccaggtgcatctcatacatgcgccaaagaagacaacatatataataacagagtgcatagagataaatgtcacaatataatcagagtaattattacatagcggaagacttacaaaataaaagataaatataacacaaactaaggatcgtccttggcgcagaagtcaactggggaacgccacctagatcgaatcgaactcctcgataagcggctcctcttgaaccacctgttcttctcctgtggggggtgtgagacagcaagggtgagctcacaaatgttcatcgctcaacaagttgtggggaataatgtaacatgaactcaccaaaggtgggagctcatgaagtgtaaggcttatcaaagagaatggttaaagctgagcattgcttttataagttggtcaaaattttattagcaattactaagtgtaagtaaataccaaaccataataaataataatagaacaaaattaacaaatgatcccatgcaatgcaaatgacaaattgaatttaagttccatagattaatcatcggagagtcctgagccgctcatgaccgtgagctcggctagtataccagttttacactctgcagaggttgtaccctttacccacaagtcgtgtttcccatgtcgccagggttagctaggcccttagacactaccaaggtgaatggctagggatccactacgaggcctttacaaagttccactagcttccgaaaacccgcaacagtttatgggaagagcacttgcaagaatcccccgtctgaccgccatcgcagcaaaatcaacccgagaacctccttgcatgcaactcccctactgcccttgcccctttcaggtaaggtagtcttccaatagctttcctaattagtcagccaaggggtcccattcctcccttgtggtggcacgtgtttctcaagttaagctccatgttccaattaacaataatataatgatcttgacatgaacataaataaaataacataataactggaacatggatataataaatgattatcccaaaaccatataaagcaatagcaaactacccaagtgattcaggggtaaacaaggtaatgagataaacaatctagggtgac

SEQ ID NO: 85615 - DNA, 1142 bp, Zea Mays
ctcttatgcaagacatgcacagcgaaggggtatggcgcgatatcggccgtcagatccgagacgtgcgcaccagattagatcttgccgcccgcgaagcggtacgccgcacgacccgtccattctgcgatcaacggcgcagatctaattactccgaaatctcccccgatctgttcgatcaagtccgacggtcaggatcaaacgcgcgaaggggtatactacagtttaatcttagccgtcgattacgatccgacgacctaattctcccctagccgcgtcaacagacaccgtgggtgactaggtgcccacggcggcgcaccagtgaacgacggcggagctatagccggagtgcggcgatccagggctctggtacgctgattcatgcgtaaataagtgcaacacgcagaggtcactaaggcgaaaacaatagggggtgtattaccggatggcacggcgtggaggtaactgctctcagctagatgcggcggagtgaggattgcatcccgacggcgagcgattgccgcataatcacaaccccgcgcaccaggagactcccctgaactcgatcagtattcccaatcggacgaccctgaccacccagcagaccccaaccgacggcgagggtgggggacagcgtcggggcggtgcgggcgtagatgaagatgtcgccggacttgaatccgcccatggcgtgctgcgacccgccgaggagcggagaggtacggtggagcaggagcttggggccgaggagagtggattcgcgactatggacgagcacgacgtgaaagatggccaggcttgtcggcggcgtctagaatcccgacctcgccatgcatccgaatcaaccacggcggcacctcccgcagagtccctcacaacccgcccaagggtagcgcgccgctgcagacatgaatcaccggttgcgccatcttgcggaccccgaggtcgtgcaccgtgagcgagcggaggcgactggagttcacggcaggggaggccgccgcggtagagcaacttggtcgggcaacacggggttcgcggctggtttatgcagcccgtaggggagagaatttcggcaaggtagcgccacaacgaccttgcggaggatccggcggcgagtccgtttcatccggttgaagaaggtggcg

SEQ ID NO: 85616 - DNA, 514 bp, Zea Mays
ggtaaggttcctaagcaagtaaatgtgtctcaatcttattcgcttaggagaaccaaatcatactcttgtgctagatcaatcatgagatcacctaggactagcacaaatgttattgggtaccaaaggcttttttggatgattgatatggacccatcccgagatgggtaccaaactgtgctaactagaccatgcaggtgccttgagatggactggagaccatgggagagcttaatacggttatctcaaactctatgcttaagttgttaattgttttggtgtttattcattgacccaaggttgaattattgtgagacactaatcccatgttcatctcaagtgaaataaagtgaataggtccttaatcattattggtgaatcaagcaaaggaccttgatgagattctgcaacttgctctccataggatggtacccttgtatcctaagtactttgttgataatcagtactagtctgattgttgtgcgacctagccttggagtagttatgcttttttatt

SEQ ID NO: 85617 - DNA, 1563 bp, Zea Mays
cacatctttaaagttctaaattattttttgatacgaaaatattacataacaggctacaagtttcttcagtctgaatcacaatctatgagtaactcatcttcggagtcatccgtcgcgcaatcctcaacgacaacctcattccacttgctgcattgtcctgcatcacacttgtcaccagttctcttataataattggcttctgcttcatctgcagcttgggagaatagctcatcctcagcctcagcctcatcagacttcttcttgtaataagccgcctctacctcttcggcctcctgagacataaactcatcctcttcctcttgagcacgtaatcctgcctcagctagtgcgatgagctcactcaaccttgatgtgttgtcctcctcttcttcatgtaatcctgcctctgcgagagcgataagctcactcaatctagatgtgtcgtcctcctcctcctccatcagctcaaccgtcgccattttatcctgaacatatctcgcatgcgcctcatcagccaaatagtttacgccacttccaatatctgcaaatataatgagcaaaataagttagcaaagtcaagataaataaattgtactaacataattataatatcatttatctcactcacttcccttgaggcgatcagcaagattatccaacatctgtttctcggcttgagccgcttcccattcccttgcatcctgtgctctcttctcatctgccgccttcaacctcctatactctgcacgcttcgggctatcataaaaggcagattttgcttccctacgcatgtcgcgtatgcgatcgttaatgtacgaatcgacgagccgagatccacaatgcatcttttgtcccattattctcttggactctattgtgcgcatcacctctcctttgtcgtcgtaactctcccaactgcatttcctcgtctcctacaaaaaaatagtaagtaccgctataacattacagttggtgcaaaaacaaaaataccaacctcatcgtaatcgaccatatgtccacaaaaatatccaacaccaagctcggaaggaactaatccatacttagcttcaataccacatttgcagagtactggatcaaatttcacctcttcttccgcccactgattgtatctcttttcctttacctctggctctggccaatgggacaaaggatcatacaaccactctctgaaacgacacttacgccacccatatggctgcaggagaaaaaattagtaatttattgtaaataataactagttcataaatttagcgtactgatgggctcacataatcaatgttcggacaacagaactgcttctcatagtcttcatcgatgacaacacggtctccacaatcgcatcgaggcggtgagtccatccgtctttctgttgctacctcctctgcatccgtcattggtggaggattcgggggaggaggtacccaacgcttaaaacgctcatgactagtccttccactcaaccaattaacaaaaagaagatatcgagggtcaaatttatcaggaccgtcgatccactggaaaaagaaacacctatgatgcccc

SEQ ID NO: 85618 - DNA, 231 bp, Zea Mays
gtgcagtctgcatgccgagcacgtcagtccacctctcttctctcgctctcgtgagctacgtaccgtcagttcttctcagctcaaggacagcagagactcacagtcgtcgattcaacagtgctcttgtatcctgatcgagctgcgtccaagtaccaagtaccatgtgtcaactctgaacgtaaaccattacaaattaataaatacaaacatgctgtgtgtcggcgtttcgtt

SEQ ID NO: 85619 - DNA, 283 bp, Zea Mays
acaatgataagatgaatgatacagaaaaatccagcgtaaaggaatataaatcggcacgcctgtcccttcttgtgccactcgcattccaatccaacaactgcttgtttgacctgtgaaccaaaacttttttttttttttgctagacgatgactcgacgagacgatcgatccagagcagcctggcactgtgtacgtgcgtaattcaattaggataaccatgcgacgcggcgacgcgcctgccgtgcttatcccgattaggtgagcacgggcctggtcgcccttcg

SEQ ID NO: 85620 - DNA, 670 bp, Zea Mays
caacaatccatctctttcagcccacccttctcctgcagttcctgctgccaactgcgtctttagttcctggacttgcggatctgtcaatgcttccttcctgagtgtatcaaagacttctagagttggggtggacagcagattcactacagttgttggttcctcatcccttcttgataaggcgtcagccgcaccgttcatcttccctggcctatactccacctccatgtcatacccaaatagtttgctgacccatgtgtgctgtggtatggtggataatcgctggtccagtatgtatttcaaactgaagtgatcagttctcactgtgaacgctcgtccccacaaatatggccgccaattgcgaactgctttgacaagcccaatcagttctctctcatatgccggaagtttctggtgatgtggtgccacagttctactgaaatatgccactgcccctgcaccttggtggagaactgccccaaaccctgaacctgacgcgtcgcagtcaaccacaaatcttttgctgaaatccggcatctgcagcaagggagcggtcatgagtgcctgtttgagtgcgaggaatgcctctgttgatgcttccgaccactggaatgcttccttcttcaatagggcagttagtgaaagggaaatgtgcccttgggccatttctaag

SEQ ID NO: 85621 - DNA, 241 bp, Zea Mays
gccgcctgggccggggagagagggggaggaagtgcgggcgcgcgcgggttgggctggaattcggcccagccgagggaggggggaagcttttctttttctttttctttttctaattctaatccctttcttctcctttttctatttttgtttcttttttattctttttctttggagaccaaaaatattttctaagtgatcttgagtgagaaacatagactatgtgaggtgctctaattatttc

SEQ ID NO: 85622 - DNA, 306 bp, Zea Mays
gagagtattatttactatacacatgatggttgcatcgacagagagaagatttttaaacttgaaatattttttgaactatttaaggtcaacaatgacttaagagaggttaaatggtttgacgattatatatatctaaaagaagttgttggatgagattaatcttaatggtataagcgatgatttgtatcacaaaatgttagaagatatttttaataacatcggataacaagtatgtgtttttgctatattttatatttgtcatcttataaacttaaaaatagtgcattataatttatatactttgaa

SEQ ID NO: 85623 - DNA, 686 bp, Zea Mays
gtttgggctgggatgggggatcggtggcgacgtgcacgctcgaggagcataaagagggatgagaaattagggatgacaagtggaccattgatgttcatgacttggatcgggggagcgcgaggtgaagctaatgcgtggggtcggggcactaggggctcaggatcggacgaatgcaactttggggtcgggcgagcgtaggggtgtgtcaataggcaacttccgtctgtcagggagacatgagcgcgggcgcagacgcagtactaggtcgataggctggtgggatgctcgggcattgggtcacttttttttttcttttttctattttctagatttgaatttaagtttgatttccaaatttaaattaaatgaactctaaatcacttcaaaaatttacagaaatcaggaatatgtagatggacattttggtagaatttggggctcatttcttggccaagatttttatacaaaaatattttcccctctttctctatttggggtaaaatggaataaaatcaagttaaacttgtttttcaaatttccctcaaatcttgtggcatgttatttaggaattcaaaggaattttatatcatataaaaataaggtgtcatatacaaaggtcgtgccatcatcatgagaccatgagtgaaagggaattaggcttatacctagttcctagttaattttgg

SEQ ID NO: 85624 - DNA, 169 bp, Zea Mays
ctctaattccctttcaatacacctatgacttggttttgaaattcacttgagaatacattagtcatagcatataaaagagatatgaacaaaggtatatttatgagctatgtatgcaagacatcaaaagaaattcctagaatcaagaatatttagctcatgcctaagtttg

SEQ ID NO: 85625 - DNA, 556 bp, Zea Mays
ctctcccccccacacacacccactccatgttccacacaagcacacactagcacaaggatcgttcggtcgttcttcgatcgttcgtccccctgttcttagtttgttcgttcgttcgtccgatcgttcatggttcgttcgtccgttcgtccgatcgttcgatcgttcgtccgttcgttcgtccaaataatctttttcctgccgttatgctgccgaaattccgatcgtttgatcgttcgtccgatctttcatggttcgttcgtccgttcgtccgatcgttcgatcgttcgtccgttcgttcgtccaaataatctttttcctgccgttatgctgccgaaattccgatcgttcgttcgttcgatcattcgatcgttcatcgttcgttcatagttcatatccatcgttcatcgttcgttcatacgaactattcaccatcactatttactgttactatttaccgttacttttaccgttactatttaccgttactatttaccgttactttttaccgttactatttaccgttactttttaccgttactatttaccgttactattt

SEQ ID NO: 85626 - DNA, 492 bp, Zea Mays
atctggtcacccatcctaggtttctccaagttgagcacgcttaacttgagattccttcgaaccaggcttccaaactcagattccaataattctcgtttctaaattcttatcgaattattccctatccaaccatgtcatcccataagcatggttcataatccagaaaactcctaaaatacacttatcccatattctgcctataatctctctgttcagactaagtcagacgattcattcgtcactattctcaccaacagtgaacttcactttgctacaccacatacacccagctataaatacacccagctaccctctccctctccacacacattcaacaccctcagccaaggcaaacgcccacccactcggttactccgctctaccggctacacgcatagtgtcgcttcgcctccagtccaccctcctggtaagcacctccgctccaccactagtagtatctcaacaccacaagacacagattctactcaagac

SEQ ID NO: 85627 - DNA, 240 bp, Zea Mays
ttttgctttgcacgcagttggccgtccgaacttcaagctctgtgaagcgtcgagaccaacgcccaagtcttctgggtgttgtttcatctctcatctagttttgggcacgttccaagtagaacaagggtgcagacgtgcagctgaggccagttccctgggcaaactgtaaaggccaacttgtgccacgaggagggggagtgggggaccatgaaagacagtgtaattgttacaaaatatttg

SEQ ID NO: 85628 - DNA, 140 bp, Zea Mays
ttagcctccaagcgaccaaaccagcaaggacacaatataaaaatggcaagggaaccaaccacaatgcatatattgatatataatcttcattaaaaaacaatataataaaacaacatctattttgtcaaacaaaataaaat

SEQ ID NO: 85629 - DNA, 279 bp, Zea Mays
caaaaacatacatttagaccccggatgacttatttcaggttttgaactcgaagctcggcgtcataggctattcctaacaggtgcatccctaactattcatacacgcaaatatctttttcattaatatgtgttctactcgcacatctgttttatgtgtttgtaaatgctcaaattttatgtaaacctagatagatgaccacatgttctgcgcattactaatttgtttgattttttaaaaaaaaacaatttggatacgaggttattttttttagttctagc

SEQ ID NO: 85630 - DNA, 116 bp, Zea Mays
atactcgatctagattgatcgagtcctcataatgagaccgagtattcgagtaacgaccaatgcgtggttgataccgagccggaatgcgtcagcctagctcacgaatgcagccagcg

SEQ ID NO: 85631 - DNA, 384 bp, Zea Mays
caccactccagcaggcattggaagcttcctctctcctccggcgacgcgtccggactcttgagtctgagggggcccaagcaacggatatatctcaaatctgtgccgatggatgaagggaaaactccaaattattgctcgggtttgggagatgtcctgctatgctgtgctggcgcacctctggaaccacaggccgcctgcaatgcaaccgtgccttgcaaggcttctggccgggctggctacaacgagacatgctgtctctagagctgcagggttaaaggcgcacgataaatggatcgtcgtttattatataatataatggtgtgatgtgtttgtaatggcataacatcttcatgccccttcctccagtgatgtccttgaataaac

SEQ ID NO: 85632 - DNA, 199 bp, Zea Mays
gcacagccaaaaccgcgagccgccgtatacgaaacgcgacgaaacccttacgcgcacggcgcaccgcgtcctgctctgccgaacacacaccacacaccccgacgggcaggcaaagcaagctgctctcgcctcccccaggccccaccccgtctccaccacagagccgcccgcccgctcgccaccagacgctcgcctttcc

SEQ ID NO: 85633 - DNA, 237 bp, Zea Mays
atgtccttgggttccaggaggtccatcccgccctccccttccctcccgcgcggcccccctctctgttatcccctgcgtcctgccgtgctaggttccgtttgcttgatcgcggctcctcctttgccgcgctcgattgatttgcgggggcagcggcgactggcgagggcggcgaggcgagccgttgcgcgtgttatgagcagagccgagggaaggggaagactgactacccgcccgttg

SEQ ID NO: 85634 - DNA, 312 bp, Zea Mays
  misc_feature (1)..(1): n is a, c, g, or t
ntgtagccagtgtactatgtacataggatgtgccctcctgtgggaaagaaaagaatgcagcagccatgctagaagagggaggggggctccttttgggatattcatcatcgagttagcaggcaatcatgtacagagttgtcatggttcgttggtttagtgcatgttggcctgcagatgacgctccagcattgtggtatttgaatgccaacttgggacaagggcgatttgccatgcatggatggctgactacatatgtctggagcttcgataacacttgaccaccaatttgaaactgcaggcagtgctgtgctt

SEQ ID NO: 85635 - DNA, 321 bp, Zea Mays
attaatttcttttggaaaaatgaaatttttttagaaaattagggttccagactagcccttaattagtggtggttcatggtcggtttctttggcgtttttttttttttttgcgaatacatgttgcatggagaaacatggcgggattttctttgtgtggcgcccgttttttagccttgcgctcagctacacgatgcggctccttatttactggacgtgattaaaagctgttacatgcaacgaagcgttttttcctggaagagagagtaacggttgctgaccaagccgatgcatgcgaaagtcaggggtaaaattgggtaagag

SEQ ID NO: 85636 - DNA, 345 bp, Zea Mays
atttcacgtttgatcgaaccgcgggataaaaatcactgtgtcacttgtctttctactttattatgattatatttcttctagcactttacttcactttcatattgctctaagtttaatactaatcttgtaagagcaattaagtgaagaagttctctcctctctcactcttcattcgaacttggtattttgtttgactaattcattttagaccaagtttgttttgttgaactgtttttacatgatcacctattcaccccctcccccctctaggtgctcttaggatttcagcttttgtgttgattttttgctcggatctggttttgtctgctggctagtggtgaggac

SEQ ID NO: 85637 - DNA, 405 bp, Zea Mays
cgggccgcgtgttgggctccaagttagaggatcggggccgttggtcgagggagctggacggcggatgctggcactatgcgtgcggtgggtgggttgtccggatgtggaggcagggtttccatttcctcctcgcgctcggcttcggtgcggatatcttgcttgaggccaccacacacacaaacctacccttccgcttccgcgtagggatcgaatctgattactccgagtactccatatctccgtctcttccgtcataaatgtgccgaatccttttatttcttagactcctttaaaaattactctcaacatctcaaaatagcaatcgttttagctatagatttttatatcagtattcatatatatagatgattataaacctatatatatagaacatatacattgtcg

SEQ ID NO: 85638 - DNA, 319 bp, Zea Mays
cgcgctgccacgccatggagtcgagttgggtgtgtgcttgggctaggagagagacgacgacctcggtctccatcgccggttccctgccaattggcgtctaggcgccggccctccaggaacgaattggtgcgcgttcccctcgccagcagcgaaacgccaatgaggccgacgaatcgcgtgaggcaagcacacggctgggctggctggctggcagcaattactactactactactaatcccgtcgggcgtcggcaagcgctaatcaatccccgccaccattcccatcgctactggaagtttaggctgcggcaaaaaaaaa

SEQ ID NO: 85639 - DNA, 92 bp, Zea Mays
gcgtgcagagaggaggcgacccagacggcagcagctaactgtagctgatgacgatgaggccggcggggcggccggggatggaccgatggagg

SEQ ID NO: 85640 - DNA, 271 bp, Zea Mays
aaaagtgatgcctttgacttccttcgttccatcttttacagctggccaaccattctcatgcatccaacgccgcacagttctcaactttattcgctacagtgctttctgctactgctagtagtagaaagattcggaaatgctagaaccggccaggtgctcggtcgccttttatcaagcaaagtgctattttataaaaaaaaaaaaagaaatgcgagttttgaattcctagtgcgccaagaagtcgccgttgtcgtcccatcggttgcgttag

SEQ ID NO: 85641 - DNA, 551 bp, Zea Mays
gcaaattcccgagagcgacgtcttcgggtcgaggcagcctggcgcaccggacactgtccggtgcaccaccggacagtccggtgccccagaccgaagcagtcttttggctgtacacagccaactcttctcttcttttcttctttctgtttctaacacttagacaagtatattagtacacaaaaccaatgtactaaggcttagaaacatacctttacttgtgatttgcactttgttcatccatgggcatagattcacactaaagcacttgtgtttgcacttaatcaccaaaatacttagaaatggcccaagggcacatttccctttcaagcatctagaaaaccgacccgcaaggagtcataaagaatggctcacatgtcgaataactcatgcagtgagtctagggccattgtcggcatctagaaaagggtataccctcatatggtgtcgagacatgctaagatatcttgaacaaagagacccacactctttaggacaactaccgacttagtctatgaaactccacatgtgttaactccatgcatcaagtcttg

SEQ ID NO: 85642 - DNA, 400 bp, Zea Mays
ctattcataaagtgaagtttgatatagtagatataatgggtaagttgttggagatagcctaagccctcacaccctaggatacatgtctactttagaatcctgggggacttgaaggactaagggccttttctagggagatatggatttagcaactttgttaggctacctcaaggtccaaatacatctaattcctatgaagtcttttaaaagataatatatttactaaatagctcctaataaacgcactatcaggacatatatcattagcaaaagtaatttggtgcctttgacattggtatatttttctgtacagctagcgaaggacaaagaggtaaatgaatgatacgaaggactagtaaacgtccatagagaacatatttatttatttgtagcgcaaatc

SEQ ID NO: 85643 - DNA, 314 bp, Zea Mays
ctttcattcagtagtgagtaaacaaaatcagtgctgaacatactacaaaaatatgcatgcaatgagggcaatgcccaaacatacaaggcgcgcgtgtctcttcgtgaaggtagcttatctcttggttttttacttaacccagacttaccctctattattcttgctagctgtggctgctgcccctcgagacgaaggcgaacaaaggttacagacgaaggcgatcatatgttcgagtgcagagccacaacctacccgtcaagacggccaagtacagatgcacaaatctggagagagagaaaaaaacaaaacaaaac

SEQ ID NO: 85644 - DNA, 757 bp, Zea Mays
tgaaactttgcattcaaatagcgatagtccacacaaaacctataagtgtgatcctgttggtgtaaatagttcaatgtaaaaggacctccttgtataatggagtaatatactttgtgggaactgcagcccgagaggcagcagcacaatacaccaaacaacatggtattcagagctagggttagcctcccctatcgtcggtgctgccattggagctcgagctcgagctcgcacgcgtgaggaaggagaaggccgtccaccggccccggagcacgtcagcgagcgcgtcggcagttgggaggaggcggctgctcccggtcgccccaccggccccggagcgcgtcggcagctagcaaagaggcggctgctcccgcaccgcgcaactcgtcgcagaacccgccaccggaccggcccgccgtcaccacggtctttgctggcacaacgccggcctgttgctgctgggcattgctgctgccccgtgggtgctgctgctgccctgctgtctcgagtggtggccgcggctcaggccagaggaggaggcggacagctagaaattgttgtcgtggtgcagtaagaggaggagctggtgcggtaagaggaggcagccagaaggagttggtgtggttgtagtgctgctggttggtgtggctgcagtgctgctgttattggaagttgtatgctagtgtttgtcggtgcttgttgtatagctgcttgattcggtgcttatgtgaagatgagtacagaagagatggatcccaat

SEQ ID NO: 85645 - DNA, 205 bp, Zea Mays
gtgagatgatgagtgagatgatgagtgagatgaggattatgatccaggagcttatgtggtagcattaaaaataacacaataaaaactcttactaagaatggcctaaattacaccgctatcgcttgtttgcattcattacacaccttcatatacacgtccttgcaacgatgacagctgacaagcccccttcttcgtggactggatt

SEQ ID NO: 85646 - DNA, 358 bp, Zea Mays
atttgctccatggctattttgctgcgacgaggggtcgcctgtcatctttgcccctatcctgtaactgcttccccgcgcgcgcacaaaaaactgcccagccgcgcttctgccgctgccccgctcggccagctcacgcccacgtcgcctcctctctcaccaatatccgccgcgcttgccgcatgtcgagtctccccgagcagatcgccgttgtccctgcaccaagcacaccggagaactgacgtcggccacgaacctccgtcccaagacttgcggctcttgggaactgccgtgttcactccccgccgcgccggagctccgttaagccgttgccgtgacattctccgtcgagatccgtttc

SEQ ID NO: 85647 - DNA, 2292 bp, Zea Mays
atttctactgcctacttaaacacttcagtttatatgtccatgatcatcctgtcttttgagaccctttcctattctgttgttaagttgctatctttcggcaattcgtactcccttggtcttggtatgctcgcaccttcgtaatcttgcatactcttactttttatataaatgcttacctttgtaccccaatgtttgtttaacatttcagtttacatactcttgaccacctttgtttcttcatgatccatgagcgatcgttccattcctcacatccttaatgatctcatcgtttccatataacttccctcggtaatgttttattttacttcaaccattctattggaaccttacctaccttactcgtgattgttttctccatttcgccattttgtgagtcttgccttaactccatcctttcttatgctcttcattattaccacctttacccttgacacttctatatattgcattgatgttcatcttatacctaccctttaaaatctcctctcttccatctcaatctgagagttgtaacttaccaacttttttccttggtcgtatcctcttctttgtcacctgcgagtttttaactctatcctctgttgtgttttgtttgatatttcctttacccttctcatcactctatcctaccttgtgattacgttatgtctgttatctaaaatctccaatctcctatctcaatgtgagagcagtgttttacttacctcacccttggctatatcctcttctttaccgcgtgtaagcttgggcacaactctattctttgttgtactcataccactggctctctaatgccttcatcttttctctcatacccttgtctgttgtcgcctttgacccttgcaatattgaggtcttctacctaaatgtttactttgaacccattctttaaaagtctcccctttctttcaacccagtttgagagatgtgagttacctatctctcccttgatttcttttcacttcttatcaccttacaagttttgtcttaattccatcctttgctgtgtgttttatttgctatcaccattaccttgtcatccatcggtcttgccttgatacttatctttattattgctctttgaaaaaaaatctcctctcttccacctcaatttgagagtggcagtttacctatctggcccatggacgtaccctctccctttccattttcaggtcttgtcttaactccatcctttgtggtatttatattcttggttcttatgcacatttacctcctctcctacatccttgtctgttatcacctttaaaccctcgtgatacatatgcccttgccacatgcctactttgaacctaccctttaaagccacctatttttcatcgccgttttaggataatgcctcacctacttcaccattgattgcttccccttctttgatgcctcacaagttttgtctaaaatacatccttggttgtcttggtctgttatcaccttaacccttgtcatcccttgatctttaccatgatgcttatcttgcacctgcattttaaagcctcctctcccatttcatttcaagagtgttgtcttacccatctcgctcttattcgtttcctcttcctgtgtcgcattgcaagtcttagcttttgtttgatatcacccttacctttgtaatcactagatcttgccttgatgcttatctcaggtctactttttgaaatctccccttttctatctcaactcgagagtagtgttttgcccactatgccattggttgtatccttttactggtcgcttacaatgctagctttaactccatactttatggtgctcgtgcccctatcttgcacgtattgttcttctcctcttcctttgacaaccttagaaagtagttattccctcttcaagaaagaccaccatctaactaacattaacgcgtagcaacgagatgtttgttgttgtatgcttgtattgtttgtctttgtgttatgaccgatttgcctctttgatgtgttgtggcccttggtccgcaatggcatcaattcactaggtgagtgccatagagttaggtagttgggtgcttccccttttctctctttaatccatctatgcttaccttttctatctatatattctatctacttgcatcgtccggttggtatcctccaacctctcttaatcagtcaagatcagagtcggcagcatcttcatcaagtgtgtatcaacgctcctgttaagggggttagccgctaaccccaatgaagacaatgcgatcaacatcagccaacaagattaaagtggtgcagcgaaagcgtg

SEQ ID NO: 85648 - DNA, 1805 bp, Zea Mays
atgaaaaacactgtcgagtcattagaacagttgaataccacactttctaatacagtcaacgatataccagaatcatctgcaatgggtgccttaagccattcggctaattcgagtattaatgcagctcttaacagtacggaagaggtaaaaaggggtgaagatgtcgcgggggattcaattcatgcaaatattagtgatatgtttcatataggtaacccattcaacccatttcagtgtttcattgataaccacatgcgtaaaaccatctttgcaaaaaatccatatgtgcaatacgctgtcgaaagttcttattacacacctgcggttaatcgtctggttaaagggttgagtttgaaagatatggatcctatcatgcgtatgcactatctttatatgcgctcgttgctccgtttaaaattgaaaagaaagatttatcgtgcagatttcagtgaatataaggggttgcggtctctctataacagggctacagataatttatatagccacctacaaagggcattagaaaagtatgaaaacttcggtgtttctgcaaaacataaagtattgcaatgtttagtacacgtggtgacatcacaatcagacaacagtgttaggtatgtctatgggaacatctttgcactagttagattaggtacttatgtaacagtgtggtactgttatactgagagcgcaccagatttcatatctgtggacccgcactatcttgatatagaattgattattgatttattcaaagttcgtaaattattcgtatggattccatacgaggaagtgattagtacatcaatcttagaagcttatgatgcggttgtggaaaggacggctttaacggattgcttggatagaaagttgagagaagaggaattgtcggataaattcgaattctgggggaaatgctctgatggtgatcataccatagattctgtagaggagaatgccactatagaatatgctagcagtaaagaaggtagtgcctgtaaagagggggtggatagtagctgtaaagaagaaggtggtggctgtgaagaagaaggtagtgggagtgaagaagatagtgacgatagtgacaatcctagatacctggcattcggtgtggttgtccttgtaggtgtgttattatacgtctggtattgttctaggtaattctatatttattgtgaaaaccagaaataagagtttcagttcatacttggcggtaaagggataacctttttgtcttgagtggaaatagaattcctttttgcaaagctagctcttatggcgcattggtgcacaatcgtgcactgcttcttcctcataaaagaacccggctttccttcctatatgtttaggataaaaaccttatccattaagagatggaacttcaagagctgctaggtctagagggaagttgtgagcattacgttcgtgcattacctccataccaagattagcacggttgatgatatcagcccaagtattaataacgcgaccttggctatcaactacagattggttgaaattgaaaccatttaggttgaatgccatagtactaatacctaaagcagtgatccagatccggccaagcagccaatcagtcgtgtaaagaacgagagttgtggaaagaaactagcctagcgtattggatggaagattcgattcatcgacctaaagaaccgtgccgggggtgccgtgagcagccacacctactacttgactcttcctcttgaccgaatggcgaacccagattcttcatttatcaccgcaaacgaacaatttatttgcgtagtaaatagagtaaggat

SEQ ID NO: 85649 - DNA, 3037 bp, Zea Mays
gacgaaacatcgttttttcgattttgactgaattggtcggagcgtagacgagcgagcagagcccaggaaagaggtcagatcgtcatagagcagtcgactataagtataagactgctggcctgagagaaggcagtctctctcgggaaacatggcccagggttctatagtatagtatagtagccagactataggaaaatcaagtctcatgttgctcctcagaaaacgcgtatagtatatagtatatagtatatagtatatagtatatagtatatagtatatagtagtagtagtatcattggccaaagtaaagtcgatgggacaaacgctgttcgttagaactagcattttgttttgtcatggaatcaagtctatttgttcgaatgttctttttttcgtttcgttggaaaaaccaacgccgacgtcaagaatggatcagtctagtctcctttctcttttgggagcagagctgaaaaagatggaattgtcaagtacgatgatatttttattaacggatagaaaaatgctattatcaagtagtaaacccattatgattgcaactcgtgggatgcctggaatcccactaaatcgagaatcggaatcggtggaggatgtgcatagggtactccgagccctccccttatttagagaaatggaaggtatcttgcgtgagaggaacctgaatctcccgtcagtacaggaaataagcgctttccgtgtgaatctattctctggtatccggcgtgagagtgcgattgcggactacgacgctttttggcgctccttactcgaggagattcacacacctcagggacgtagttgttttggtcagagaatacaagatctgcacgcccgaatgtctgccgagggcaactgggactacttgattgcccaacaaggcagagggtattttggtaacctacctaatctcaacagcccgttggatcaatatcaatttggaattcacccaattctggatctgaatattggtgagtactatgtctcattcacaaatctatccttgtctatgtctatgctactcactctcggtttggtcttacttctgaccaaagtatttatggaatcgtccggccagaaacggggaagagcccatgctgtcgtagaggcctcgtcgagtgcttccgctacgcctaattctgaggatgatgataagcggaaaaaagtgtcccgccaagacgccaatggcaaagagtcagagccgcccataaatggggcgcaacctgaagtaccatccattgcgttcttaaagaaaagaattaaaacagttctaaggtcctgtcgagataggaaccctagggagagcacattacgctctacttacgaggatcttcaccttgaaacggcgagcgccgagaagcgggtaaaaatcgcccaggccctagaaaatctgtacaggcgaagccaatatttccggagtaacaaaaggcagcagccccataccgacttgattattcaaatctgcgattgggagcgtacgaagaggtaaagaaattcactggtgtaggcataggaaaccgaggccccccaaacccatctactatacggttgaggtgagggggggaaagaagagtgggcatgtgggcttctttcactgtgtcttttgtgaagcaaaggcatcgcggcgtatcaacaccagactagttgctgattcaatagctgacttcctttcaaatatgatatgataacacatcagctcggcacccttgtttcccaaactaactactcatctagctagatccggatcagaaatggtaggaactagatcaagaaatacgagacttttccttcactggaaactcccgagcccgagtcatcaccctagcccgactcatccattgaagcgagccaggtggcaaatccattaatataacttctggaatcccagcaatagagctggcaaggttgaagtgaagctggaatggatccgatcttcagtgtggaaagagcttcaatcctctgtagcaaggaaaagccgatccgctcttgtcttgccttaaatagctggaagcgaaagcagttctcgaggaaggagtgccgtagtcttgttcgaaagtcaagtcattctacgagtttgaatcggttggcttgaaaggaataggttcagtatatcggtcaaaaagaaagtctagatgcaccgaacttgtctagttgttggaaagggatagctggaattcccactagtcaacatgcaaatagtatccaaccaagggatcaccgagagagaaagaagtcactgctaaactagagagagaaagaagtcactgctacactctagaggtatgcgttgcgtatggaatcagaagtagtataggctttttcttgctactagaaagatggagcccggtggtcagcgaataggggtctagacctaagtaagtatgtatgaggggacaggcaagtcaccagctagcggagcagcacgaatagctagtcaagaaggcagagctcttatttgattcgattcaggcaaccttggcacctttgcaagctcttcgcaacaggttccagggaggaatggatacgagtagcaacatcgggagatggaagctgacagacctcgtaattgaagcggcaccaagctgatgaagaacgaggcgtgggaatgctatgcaaatttccaaccaacggcgccaatcgatagaagtttccttggcatgggaggaactactagactctatcccctaatggtgagaagcaaggtcaagaagtaggagagataccaagccgggcaacttcccctagtcactacggaacacaaaagccaaggtgacccagaacaatgatttcacggatttctaggaacggatttcgagtttcagaattgtgtgtggtatcttttttcccctcctcggagcgcaccatgggatgctttgtgaacagccccctctgttcaataccgatacctgtcagattccatagctgatgaatctatttctttttccactctttccccgtcacgcaagacgcttttctggcacaaacctagtagttatttgtcctgtgctgatcttgggtgaac

SEQ ID NO: 85650 - DNA, 1620 bp, Zea Mays
gacgaaacatcgttttttcgattttgactgaattggtcggagcgtagacgagcgagcagagcccaggaaagaggtcagatcgtcatagagcagtcgactataagtataagactgctggcctgagagaaggcagtctctctcgggaaacatggcccagggttctatagtatagtatagtagccagactataggaaaatcaagtctcatgttgctcctcagaaaacgcgtatagtatatagtatatagtatatagtatatagtatatagtatatagtatatagtagtagtagtatcattggccaaagtaaagtcgatgggacaaacgctgttcgttagaactagcattttgttttgtcatggaatcaagtctatttgttcgaatgttctttttttcgtttcgttggaaaaaccaacgccgacgtcaagaatggatcagtctagtctcctttctcttttgggagcagagctgaaaaagatggaattgtcaagtacgatgatatttttattaacggatagaaaaatgctattatcaagtagtaaacccattatgattgcaactcgtgggatgcctggaatcccactaaatcgagaatcggaatcggtggaggatgtgcatagggtactccgagccctccccttatttagagaaatggaaggtatcttgcgtgagaggaacctgaatctcccgtcagtacaggaaataagcgctttccgtgtgaatctattctctggtatccggcgtgagagtgcgattgcggactacgacgctttttggcgctccttactcgaggagattcacacacctcagggacgtagttgttttggtcagagaatacaagatctgcacgcccgaatgtctgccgagggcaactgggactacttgattgcccaacaaggcagagggtattttggtaacctacctaatctcaacagcccgttggatcaatatcaatttggaattcacccaattctggatctgaatattggtgagtactatgtctcattcacaaatctatccttgtctatgtctatgctactcactctcggtttggtcttacttctgaccaaagtatttatggaatcgtccggccagaaacggggaagagcccatgctgtcgtagaggcctcgtcgagtgcttccgctacgcctaattctgaggatgatgataagcggaaaaaagtgtcccgccaagacgccaatggcaaagagtcagagccgcccataaatggggcgcaacctgaagtaccatccattgcgttcttaaagaaaagaattaaaacagttctaaggtcctgtcgagataggaaccctagggagagcacattacgctctacttacgaggatcttcaccttgaaacggcgagcgccgagaagcgggtaaaaatcgcccaggccctagaaaatctgtacaggcgaagccaatatttccggagtaacaaaaggcagcagccccataccgacttgattattcaaatctgcgattgggagcgtacgaagaggtaaagaaattcactggtgtaggcataggaaaccgaggccccccaaacccatctactatacggttgaggtgagggggggaaagaagagtgggcatgtgggcttctttcactaaaaaagaa

SEQ ID NO: 85651 - DNA, 1621 bp, Zea Mays
gacgaaacatcgttttttcgattttgactgaattggtcggagcgtagacgagcgagcagagcccaggaaagaggtcagatcgtcatagagcagtcgactataagtataagactgctggcctgagagaaggcagtctctctcgggaaacatggcccagggttctatagtatagtatagtagccagactataggaaaatcaagtctcatgttgctcctcagaaaacgcgtatagtatatagtatatagtatatagtatatagtatatagtatatagtatatagtagtagtagtatcattggccaaagtaaagtcgatgggacaaacgctgttcgttagaactagcattttgttttgtcatggaatcaagtctatttgttcgaatgttctttttttcgtttcgttggaaaaaccaacgccgacgtcaagaatggatcagtctagtctcctttctcttttgggagcagagctgaaaaagatggaattgtcaagtacgatgatatttttattaacggatagaaaaatgctattatcaagtagtaaacccattatgattgcaactcgtgggatgcctggaatcccactaaatcgagaatcggaatcggtggaggatgtgcatagggtactccgagccctccccttatttagagaaatggaaggtatcttgcgtgagaggaacctgaatctcccgtcagtacaggaaataagcgctttccgtgtgaatctattctctggtatccggcgtgagagtgcgattgcggactacgacgctttttggcgctccttactcgaggagattcacacacctcagggacgtagttgttttggtcagagaatacaagatctgcacgcccgaatgtctgccgagggcaactgggactacttgattgcccaacaaggcagagggtattttggtaacctacctaatctcaacagcccgttggatcaatatcaatttggaattcacccaattctggatctgaatattggtgagtactatgtctcattcacaaatctatccttgtctatgtctatgctactcactctcggtttggtcttacttctgaccaaagtatttatggaatcgtccggccagaaacggggaagagcccatgctgtcgtagaggcctcgtcgagtgcttccgctacgcctaattctgaggatgatgataagcggaaaaaagtgtcccgccaagacgccaatggcaaagagtcagagccgcccataaatggggcgcaacctgaagtaccatccattgcgttcttaaagaaaagaattaaaacagttctaaggtcctgtcgagataggaaccctagggagagcacattacgctctacttacgaggatcttcaccttgaaacggcgagcgccgagaagcgggtaaaaatcgcccaggccctagaaaatctgtacaggcgaagccaatatttccggagtaacaaaaggcagcagccccataccgacttgattattcaaatctgcgattgggagcgtacgaagaggtaaagaaattcactggtgtaggcataggaaaccgaggccccccaaacccatctactatacggttgaggtgagggggggaaagaagagtgggcatgtgggcttctttcactgtaaaaaaca

SEQ ID NO: 85652 - DNA, 302 bp, Zea Mays
cctggggtggggctacctattattcgtaggcggtacgtacggcgcacgcagggcctcggtttgctgcgtggactgtctatgcatttcctacagagtgtaatggaacccagctcagctccgccgagccaaaaggaaagaacagccggaggcgaagagtagagtatagccaaggggctggctttcgtcgtccgtaaaggacctaacggaagaccgtgctccgaagtgcactgagagttttgttttaagaacacttggccttaccccttcgttttgagccatgtctaggtggcagagtgttgatc

SEQ ID NO: 85653 - DNA, 67 bp, Zea Mays
ttcctatctgccgagtagtcctatcatactatccgaaaagattaaggctgtggaaaaaaaaccttag

SEQ ID NO: 85654 - DNA, 1023 bp, Zea Mays
ggtggcccgaaattgacttggcttcgccaaaaggcctcatctccaaagcccggctcgcgaggcgtccctctcgctgtagggcggagccccctcgcctcgctcttgtgacatgctatgtttcccttcttccattctccactcaagggtgagtcccatgcgtcagtttgtgggccgcggtctcacgcactaatccctacaggtgcccatagtaggccggccgccctacctaaaccaatcatcatatcggtccctaggccccattgctggaaaggctcggcttcaaaaccgtacgtggagcttccgcctcatacggctcctctagggatgggggtaggcccagcccaggcttgtgtggttaaggttgttgtacacgacctcagttgagcattcagttagagacggcgatcgctggttcgccggaggagagggtgttgcgagcaagattgcacaaacaaagccctcccgcccgcagccctattctagaaatctggctacgtgactaataaccgcagaacgagcaatgaatccccaacgacaaacgaacaaggggcggggcattttcggggagtagcccccttcagaagaaacttcctggcacatacattaagggagccatcgaaaggtgactgaaacacctgaaacggggactacccgagctaatgatagaggcaagaacactttccggccaagtcccattaattgatcataacgatatcgtggaaatgcagcacggacccatatatatagaaacagaaaaagaagaaccttgatactaaaccagatcgaacaagggatcttcttggaaatgggaagatctaggataggcggccaacctcctggaaagagcgatgtgcatagaccgggtgagtagggatgcagctccgtggaccgctcgtcgggcctgataggtggtggtatcacacccttctcaaaggaaccgtacgtgagactctcgcctcatacggctccgtcctggaatcagggcccccccctttcctttgaccaacgggtcctcgaacccgg

SEQ ID NO: 85655 - DNA, 50 bp, Zea Mays
gcctactcaactaatctcatgtaaacgcctgttcgctaaaatcaaaatag

SEQ ID NO: 85656 - DNA, 4120 bp, Zea Mays
gtcacagctctgcagctgtccctcaccaatgtcaaagataggccacggattacattcaagggatatcttgctaggagaagtctgtacaagcttgttagccagatcgagatgtggttctgttgggaatccaatctcctgtccgaggaatagaatctcttgcgaggaatggctagctcgatccatcttgtggaataccccaagtatcatatcatagtcatagcattggagctcgtatcgtatcggaacacttgtatctcgtatcaacggagtcaagcatctaatcttctactctagagattgggcctgtacgaagatctttctttttgcgggctaaagatcactcttgtccctccagtgaagtggtagttttcttgctttgcttatagaacagaactgagtctcttatgttcgtaacatacattaagtgttactcactccattggcatctacaagtggtgcttacgagagaggcctgcctagaccgagataggaatcatcagtggatacgagcgagaagaaagaaatctatctgtccagctttggcagtagggaatcataccaattcgtctttatactcattcgttatacgtgattcgttcaacacagtctagtcgatctgtcttgtccctcgcaacttgacagtggaaacagaagcatgagtgaatccgtactgtactatactatactatactattcgaacacatctcttcacccagtgccatgccacagtgagtggagctaaggatgaatgcatgggatccgtgttctaagtgttgtcttaagtgttctaagttcagttgtatctttttcttgtaagtttccgaatattctaaaaaatattggaatgcctctgtcttgtcctttgagaagtgagtggagggtaggatcccgccttcttatattcgtcacgttacaactcttatccttcgatttcgcaacgaaggaactctggcttggtatggtaggaggatggatatgctttgtagcagaatcagatgctggctttatattctcttttctattcttttcaagcgagaaacgactaattcatgaggaactcccggttatattctattcattatacttgccttggttgttccgaatctagggacgagcagggattagtatagtatagaagtgactcatgaattacaactcttatccttgattattatattatagtgtggaagacgaagatcttaaagaagaaaagatggagtgccatgccactaaaagaaacctaggtggggaaaccggttatattcgtaacaactcattggctttttcagagagaagtagccgctccgtcgtctattctatatagtgctgcaagctgagaacaaagtagctctcgcctagcaaactagattcgtaacattgcctacgaactcatatctgctccgcatgaagaaaatcatatctaaggatagaattcatcaagccataaaatcataaatcatagagaaatgttcttctatctgcgccaatgttgataagtgcagttcctcaaaataaaaaacaagaaaatgggagttcctcctatctgttccgctcaatcagtgacagtggatagattcagaaaaatatctcgaattcacttacatagaatagaaacatactcgtcacattcgatagaattcatcgaaaacatactcgtcatatgctcgtcacggaactattttagtgactcgctcattacttaaaaaatatgtcattccttctattttgggtttcttgattgatagaagttccggcacatctccgaaaagattgggggcccaaagtgcaccacagtagcgccatccaaaggagggccgtggagccggtaacctggccagtttacgagatgtgatacaggatcacctctgtcatttctagattccaatgagtaactcctaacgagcgagtaacgactaatgttacgagcatattgaggaatctattaatcgtttcattcatttagaatataaattgcaaaaacttgtatttagctcatccagaaaaatattcatagaacatgtgaagcaaggagacaatcatttctttggctagcagcaacgatcaaattagattcgtctttatgctttacacggaagtgagttgcatctaagttaagtgactcgctcgagtttatcattgattaagggaacaagcaatcctcgctaatcgactaatacctagcgaaccaaccacctactctacttttgtatcgggtgcccaatatttgaaaggccactctacctctatgatcaatcaatccttccgagtacgggttgttgttgctttgcttatgaaataacataatgcccgccatcaggaggaatcgctggctcgatatcactctgaaaggtggaatctcatagtgagttgagtcaagttgtgccaaccaatagccctgaacagtgccagtagctcctatctcgttccagtagtcctatctctagtgatgctttccccccccgggcagaaagaagacagtcaaatcaaggaaaaagtactttaaagtattcgattctattagcacgctccttcatacccaacttggcctgctaagtaagatatcatgattggagggatttccagacattagtcatgcttacaaccaatccgtatccccttggtgccagcacgggttccttcattgtaggaaagagagatgtagggagatcgccgttccaggtcctcctatcaaacaaagaaagggaactacctccaactatggttactactgtaaaggagccggttctagaaattgagaacataagtgatccttttatcgggatgcgctagacgagaaatagcactagtaaagtgaagcaagtagttgaaagcgttggcgcgaagcgttgttcgaagatgcattttctataattataatggagcaaaaagctagaaagggatcatccgagagccatatgtgaatgtatggtgcgctgggccagcgaagccatagaaactctctctcaaagcagtaagcgagcttcgccatcactctattagataggccgtgcgtggggtaagagatctctctcagccgttccgttccctgggcctcaaggtgcggagcctgtatatacgtaattagatcgatctatgaacaaaggaaagagtcagtccggtaaatctcatattggcgtactatctagagggattcgagatgtgaaaataggagtggttgaagcatcgaaaggtgtctccgtttttattacttggttgggtgccagtctgtctgcttttttttagtcgaactctcgcatcaaaggggtatgggcaatcgccgctatccgtggacatgacttgggaagtctttagttgccacaggtacgggtccgttcgaggcagactgagaagcggtctcttaacagatagatccggagattttggagaaacacggaatcctcactctacagcaattcatggaaatggtgccagtgcctgagtacgggtcgcggaaaaaaagtgccagagtaatttcgcgggatttctatcgtatacatacagttgaggtactcccgccaatctcgggtcctgcttctagcaaccataataactagccgtttagcactatcgaactatatgaggataacttttctcaaagaatagcaatgaaatagcgtaagagtggtgcctcacattggttaagtggtccgaatagagaagttctaagtgtgaatggtatcgccctgtttctcactctgttttgtaaaggtaactggttccaccatcgtttccgggcagtgatctccactctgaatagtcctccctcaagtgaaacgtatggtatgaagagagctaatatggattcgcagaacgggctagcactattcgaacacatctcgatcaccaaggtcacgtcacaattctagatctggataagaacggcaaccctctcgtagaaagaaaccctccagaaagggataggttctattctcgcaacagaagagatccaatcaaccaaagaacaagtcaagccgcagggatggatcagcctgacccggcacccgattcagatctgtatctcgggctagcatgagcgcaatcctcatctatgcttttctctgtgatgcggggggctacccatttaaggaaagctgggctgtaaaagggcaattcagttctt

SEQ ID NO: 85657 - DNA, 853 bp, Zea Mays
gccgggttcattatgctcttcttcctgaaaatgggaagtattatgaagtttaagtcctgtgctgtagttaattccctttgtcttaagtgatctattagagagcttccctgtgaccgcccgaagggtaagaaagagatgctccgtgtagctaaccccaagtctggtaacctttgaaaataggtttctgacgtcactgcctttcatgccaagcttgacgctcttgctcttgcacaggcggtgggtggatcaatttgtgtaaacgatcgctttctttctatgtctcccaatcgatgcggtactgccaatcgtagactggtgaccggggaatgagagctccatacaccatgattcatggagtctttcctctcgtttttaggttgtttgtgtatatacccaactgtaggtcacctatgtgaccaatcctcaccattggtttcacagcacttagtaagcatacgtttgaagaccgagttggttgatttggtctgtccattcgctctaggaggggctcgacttcctttgagctatgagaaatgggagcgccttcttcttttttttcagggatctccttggctacaaagagagctatggagcctagctgaaagcttgacaaggcctatttagtgtattcggccacccaaccactcgcagaaagaaaggggcattcaaaacctgacagggattccttctcctagggttgctctgaggtaaccgctcgtcttgatgctggcagtcaagaaggcaaagagttgacttctacttttgaagtgtaaggagttgaccttccttcgcctatctcggattctgctacagattggaacaatagttcacattcgcttgggaataccaaata

SEQ ID NO: 85658 - DNA, 2033 bp, Zea Mays
caaaccagcccactaatagcttagatagtggcccttccactttggtttggtatagttgaccctacctattgactcaaggtaagacctctgactcaaggttcataggaagggggaacccagacgtagtgggatgtaggcttcagttgttttggtacttttgcactacctacgtcttattatttattttgtaaccggcttttcaccggcaggtcagtaggccttttagaaggcgaacaaacgaaagttctccgcgggcgctagcgctatcttgttcgcttttgtcaactgaagtcgcgcgtagcgccaactaactgatagctgatagagcgcggagccccgagtctaagcgagcagagccatttctttgtcgtcaaaagaaaaaaaaagtactaaaggcgaagggcattctgttgtacagctactttggttttggtatagttacaaaggtaaccggtaggtgactgttgaatcgacagtagttacgaaagggggaaatagctcagttggttagagtgctggtctgtcacgccagaagtcgcgggttcgaaccccgttttccccgcacgatcttcctcttcctgcccgactcattttgtcttcactggaagctgctgatcccagcgtagcattcaagacaattgttccttcttcggtctccctccacccccttcgtttgttgtgggtcgcgtctcaccgcaggcacttaatgaaaatgaatgagtgaagatcttccttccccccttgtgtcttaccaaggactgagttcccacttgtggcgaaaaaaaagtataccatcccacccggcctccccccggggggttaaggttcctctcggagactgccagtctacaagaagctggcagagctttagccattggaccacatccatccatcctcctacctaaacagtgacgccttttcttgttcgttcttcgaattacgctagtggagactaattccttccggctaatgaagatactaccccagtcttcccattcattcccagtggatccttttcattgaacgaaccaagttcacctatacgagagtgaggaatagaaatcctacaatcaacttcccactttttatgtcccgtttgacgattctgctgcgtctttagaaaagaaaaaggagaaggacagggtcagaaaagcgataactatcaattcgaattcagaatgaatcaaatctccccaagtaggattcgaacctacgaccagtcagttaacagccgaccgctctaccactgagctactgaggaagaacggacttaaggaagctgactctcgttctttggaccaaccaaccgaaaagaaaaaaagttagtcactttttctcttttccgggagaaagggtgacgatagcaatcccctttgcctccccggccggggagcccccaggacaggacaaggggggcggcggtcaaccatcaactctcgatatgcatattgatcaatcgatctctgcgtcctgccagttcgctaagtagactcactctaccgaggggcaactaaggttggttcctgccaactgcttcccttgctgatcagcaagggaattggcaagtatgagagaggactctctctgtctctccgagtttcaactactaagtgaagtgaagtagcacttcagctattctaaatgtaaatagattccgatcaagcaagcaggagaaggtggtcctttcatctctctgtctgctccatgctctatagcctaaggatcatgagcaggtttaatgctagaaaaaaggagatctgcctaatcatttcggtagatgaagtagtgggatgggaggtcacgaaggaagtaagggggcgtgttaagttgataatttcgaacattgtagcatccttttgacggttgggctttgagttgagttcttttaagaactcttaatatgaaaatacacatcataaaatgacgcatcgagcgagaccattctgtttcattgtgaatgaaagacgttttcgaccaaaaacatctactcatatccagcttcgtgtcatttttcttccattcgctcgcaggct

SEQ ID NO: 85659 - DNA, 857 bp, Zea Mays
cttcagtgcgtgatcgtagtatgtcacctcgtctcgtcctcgcagcatcgaagagtacctatgcactatgttccggttcactgataaggaagatagagttggggtgggggtctacgatgtgatactatagtatgccccggggagaaagatgcgcaactcaaaacggaagcaggaagcgtgttgtaaaaaatatcggaggttaccagatctctgagactaccattgatccgacagagcggaacaaccagaaaaagaagtggagttagaaagccgtatgataggtggtaactatcttgtacggttcggggggtaagcggcgtactccgggggaatattaggctctatcgaacataccgggaattggaggtagcattttacttatgttaagtcatggactggtttcttcagccctttttctatgtgttggtgttctatatgaccgacataagactcgacttgttagatattatggaggtttagtgagcaccatgccgaatttctctaccattttcttctttttcactttagccaatatgagtttacccggcactagcagctttatcggggaatttctaatcttagtaggagctttccaaagaaatagcttagtagccacattagcagcgcttgggatgattttaggcgcggcgtattccctttggctatataatcgtgtggtttctggaaatttaaaacccgatttcctctataaattctccgatctaaatggcagagaagtttccatatttctaccttttcttgttggagttgttcggatgggtgttcaccccaaagtgttcccggactgcatgcatacatccgtaagtaacttagtgcaacatggcaaatttcattga

SEQ ID NO: 85660 - DNA, 4456 bp, Zea Mays
agaaatcatacggattgcaacctacagatgaagaatctgcttcattgttcccaccatctatatcagatgtttaataagaataggaatcgaataagctgctgattgactgaggaagcatttgaaaagaaaggaagggtgatgcttgttaaacaaagctgcgtgtggggccgccacgtatagctgtagtttctgctgtagcatcggttatttccgttattgctgtagtagcatcggttattgctcaggttacgaatgacccaatctatctatggcaaccacccctacttttagtagatagagatgcgcacctagaaaagacggatgaaagagaacctgcccttctgacttcttctcttgtctgtcctttacgcaaagcgatctatggtctcaacaagccccgatagcgtcggtttttgaagttcagcacagtggttatccaggcagggtttgctcggagtgatcatgattcggccatgttcgtatcagtttatcctcgaggacgtgctattctgttgttgtatgttgatgatatcaaactgactggtgattactccgttaccatatcgctgatcgagtgtcgccttcatcaattatttgctatgaaggcgctgacgcgccctaagccttttcttggcttggaggtcgcatcgcacattctcctcgtggatatttggtatctcagatcaaataacgtcatgacttgatcactcgagctcaactcaatgatgagaagactgttgacactcccttggagctttacgttaaactccgtccgactgatggctcaccattatctgatccgacgcagtacagacagtaggtcggcagtttggtttatctgacgatctcttgcccagatggcttttcttaagaaagtcagcctttcatggctgcgctgccccccggtcagttcactttgcagcagttcatcggattcttagatatattcgaggtaccttttctcgagccgtccttttttccgtcatcgtcttctttagagttgcgtgcaactactgatgccgattgggccttcagataggtgctcaactacaggcttctctattttttggggagactctccactatcttatcttggatgagataaaagcaatagacagttgctccttccactgccgaagcggagtaccgtgccatggcacactactagatagattgtatggctccgttggtgactttctgatcgcgggtttcatttttaaaaccccaaattcatcttgcgtcaaatccggtctttcatgcaagagtttcatttgctactacgttcgtcgaaaacttcttgatgacaccatcatctcattaccttatttttttccttcgacttcggctatgaccaatgccccacctagctgaataggcgtaacaaagctacctgaaaaaggcaaggtaaggtgtaccttaaattgaaatcgacaaattgcgttttgccagatggattctttagaaagattcccggataaagttcagtataatatttagttagaatctaaataaaggcgcatacgtgggcgggcagggggccccactacttcttcattcaggggggctagcctcatgacttcccactgggcgaggggtgcacctaacccacctactcactcatcaattacggtgttcagctgacttgcacagaaagacccctattgtttagtaatttggcgcctgattgactgttgtcaactaatcttttcaatgttcgattctactctatgttagaacatttcagtgaatgctatttcgatctaagtggtcctattctctgtcccgtgctaggaagcattactcctcttttcattccaaattcttcaataagaccgatacgattgattggtctgtgcgtttctcttattacttttttgtatccccctgttcctcggatacaattcgatccttctacggccaattctcaatttgtggaaagccttcgatggcttccttatgaaaacatccatttgtatatgggtatagacggtctttcattattcttcgtgatattgaccacatttctgatccctatttgcatttcagtgggttggtctggtatgagaagttttgggaaagagtatattacagcatttctaattcgtgaatttctaatgatcgccgtgtcctgcatgctggatcctctactattctatgttctttccgaaagcgtgccaatccctatgttgtgcggagctgagcatcttctattcgctgggatcaagcttttcctctgcaggggccttgtgcagtaaaccccctacgggcggtcccccgtcgtcgtaaagtagtcaaggtccccgcgaagctttcgggaagaggggtagtcttgtgcgtaagcatagcatttctggtcgaaccaccgaaccacacatctttttttggtgggagggtactccgagtagtgggtacctcgtaggacctcgacccgcctactcaggtcttgtatggatatgcaggaaggggtgctcctaggtgtgtgtaggggggtgtgtttgttcgcgagaatggattcctcgtcaagtcagggggggtgtggacacacttgcgcgaattcgggtaacggctacaagggataaaaataaaggaaactgtacccgaccagggatggacgtaaactcgtaagctaccgagggtagggataatcgtccaggtcttattgttgtttaaagccgccccgccacagcaggcaggttagttcctctgtcgttgccggagagttcttggcgaagagaccttaggataagttgctaaaacaaacggaggggaggatcgacccgttcagtagaattccgaagaaagactgttggcagcaggtggagacatttctttggcccccttccaaataaatgcgggcagggtagagctcggcagagggttcgagaatagggtagggtcctgtcctaataaagataaataaaggggcgggtccctttatgcatgcatcttcgtacaagtggaggccggaaagatcaaaccaatagaaccgctcacatcacagtagtcgtagttgcgtaaaggccgtggggggcgaccataacataaggcaatgactttcacggatctctctctatctatagatataacgaacgggcgggttcgaaaggtagggttttttacggtcgggtcccctaccactagtccggctagccttcttcgggcaggaagcaggccgggcccgacgggcgggcatctcccgcaacgcaagctgcattgttcgccaccacccgagaagcaaaagattcgagagtcaaggcggaaaagacaagcatagtggtctaatgacaagggccgacgacggaagctcgggacggagccgtatgatgcggaagtctcacgtacggttccctgagaagggagtggctacccactggagcttcgaccaaccaccaccggtcaattccgctttggggccacccctgactctaccatcattataggggtatggggttcgagacaaagaaagatcaaggcagcatatcagtttttcctatatactttacttggatccgtttttatgctattagctattctgttgattcttctccaaacaggaaccaccgatttacaaattttattaaccacagaatttagtgagcggcgccaaatccttctatggattgcctttttcgcctcttttgccgtcaaagtgcctatggtaccagttcatatttggttacccgaagcccatgtagaggcacctacggctggatccgtcatcttggcaggaattcttttaaaattgggaacctacgggtttttaagattttcaatacccatgtttcccgaagcgacactttgtttcactcctttcatttatactctaagtgcgattgctataatatatacttccttgaccactttaagacagatcgatcttaagaagatcattgcctactcctcagtagcccatatgaatttggtgactattggtatgtttagtccgaacataccgggaattggaggtagcattttacttatgttaagtcatggactggtttcttcagccctttttctatgtgttggtgttctatatgaccgacataagactcgacttgttagatattatggaggtttagtgagcaccatgccgaatttctctaccattttcttctttttcactttagccaatatgagtttacccggcactagcagctttatcggggaatttctaatcttagtaggagctttccaaagaaatagcttagtagccacattagcagcgcttgggatgattttaggcgcggcgtattccctttggctatataatcgtgtggtttctggaaatttaaaacccgatttcctctataaattctccgatctaaatggcagagaagtttccatatttctaccttttcttgttggagttgttcggatgggtgttcaccccaaagtgttcccggactgcatgcatacatccgtaagtaacttagtgcaacatggcaaatttcattga

SEQ ID NO: 85661 - DNA, 5539 bp, Zea Mays
agaaatcatacggattgcaacctacagatgaagaatctgcttcattgttcccaccatctatatcagatgtttaataagaataggaatcgaataagctgctgattgactgaggaagcatttgaaaagaaaggaagggtgatgcttgttaaacaaagctgcgtgtggggccgccacgtatagctgtagtttctgctgtagcatcggttatttccgttattgctgtagtagcatcggttattgctcaggttacgaatgacccaatctatctatggcaaccacccctacttttagtagatagagatgcgcacctagaaaagacggatgaaagagaacctgcccttctgacttcttctcttgtctgtcctttacgcaaagcgatctatggtctcaacaagccccgatagcgtcggtttttgaagttcagcacagtggttatccaggcagggtttgctcggagtgatcatgattcggccatgttcgtatcagtttatcctcgaggacgtgctattctgttgttgtatgttgatgatatcaaactgactggtgattactccgttaccatatcgctgatcgagtgtcgccttcatcaattatttgctatgaaggcgctgacgcgccctaagccttttcttggcttggaggtcgcatcgcacattctcctcgtggatatttggtatctcagatcaaataacgtcatgacttgatcactcgagctcaactcaatgatgagaagactgttgacactcccttggagctttacgttaaactccgtccgactgatggctcaccattatctgatccgacgcagtacagacagtaggtcggcagtttggtttatctgacgatctcttgcccagatggcttttcttaagaaagtcagcctttcatggctgcgctgccccccggtcagttcactttgcagcagttcatcggattcttagatatattcgaggtaccttttctcgagccgtccttttttccgtcatcgtcttctttagagttgcgtgcaactactgatgccgattgggccttcagataggtgctcaactacaggcttctctattttttggggagactctccactatcttatcttggatgagataaaagcaatagacagttgctccttccactgccgaagcggagtaccgtgccatggcacactactagatagattgtatggctccgttggtgactttctgatcgcgggtttcatttttaaaaccccaaattcatcttgcgtcaaatccggtctttcatgcaagagtttcatttgctactacgttcgtcgaaaacttcttgatgacaccatcatctcattaccttatttttttccttcgacttcggctatgaccaatgccccacctagctgaataggcgtaacaaagctacctgaaaaaggcaaggtaaggtgtaccttaaattgaaatcgacaaattgcgttttgccagatggattctttagaaagattcccggataaagttcagtataatatttagttagaatctaaataaaggcgcatacgtgggcgggcagggggccccactacttcttcattcaggggggctagcctcatgacttcccactgggcgaggggtgcacctaacccacctactcactcatcaattacggtgttcagctgacttgcacagaaagacccctattgtttagtaatttggcgcctgattgactgttgtcaactaatcttttcaatgttcgattctactctatgttagaacatttcagtgaatgctatttcgatctaagtggtcctattctctgtcccgtgctaggaagcattactcctcttttcattccaaattcttcaataagaccgatacgattgattggtctgtgcgtttctcttattacttttttgtatccccctgttcctcggatacaattcgatccttctacggccaattctcaatttgtggaaagccttcgatggcttccttatgaaaacatccatttgtatatgggtatagacggtctttcattattcttcgtgatattgaccacatttctgatccctatttgcatttcagtgggttggtctggtatgagaagttttgggaaagagtatattacagcatttctaattcgtgaatttctaatgatcgccgtgtcctgcatgctggatcctctactattctatgttctttccgaaagcgtgccaatccctatgttcatcattataggggtatggggttcgagacaaagaaagatcaaggcagcatatcagtttttcctatatactttacttggatccgtttttatgctattagctattctgttgattcttctccaaacaggaaccaccgatttacaaattttattaaccacagaatttagtgagcggcgccaaatccttctatggattgcctttttcgcctcttttgccgtcaaagtgcctatggtaccagttcatatttggttacccgaagcccatgtagaggcacctacggctggatccgtcatcttggcaggaattcttttaaaattgggaacctacgggtttttaagattttcaatacccatgtttcccgaagcgacactttgtttcactcctttcatttatactctaagtgcgattgctataatatatacttccttgaccactttaagacagatcgatcttaagaagatcattgcctactcctcagtagcccatatgaatttggtgactattggtatgtttagtccgaacataccgggaattggaggtagcattttacttatgttaagtcatggactggtttcttcagccctttttctatgtgttggtgttctatatgaccgacataagactcgacttgttagatattatggaggtttagtgagcaccatgccgaatttctctaccattttcttctttttcactttagccaatatgagtttacccggcactagcagctttatcggggaatttctaatcttagtaggagctttccaaagaaatagcttagtagccacattagcagcgcttgggatgattttaggcgcggcgtattccctttggctatataatcgtgtggtttctggaaatttaaaacccgatttcctctataaattctccgatctaaatggcagagaagtttccatatttctaccttttcttgttggaggggcgaccgtccgttgaactaccaaaaaagggtaaaccaatgtgatcataacattgtaggtgcttgcgatgggacggatgcgacttccctcataagtaaagtaatgggtggcatagcccgtagcagaagtcccctttttttatccatttctttattaccccagaggggcccgccctggtgggaccgagagaaagaaaggacggggggggggcgaccatgcatggcacttctcgaccgtgtctccgagggacagttgaacgagcgactcatgaatgctgccgggtcggacgagccaataactcgaacgtgttcggtcagttttttgagcaagaatcacagcgttaccttaccttcaccatgatacggactccaagttcttatggcagagcacgaggagtttccttcaatatgatgatgagaatggaaaccagaagcacgactgggtcttcgtagtccgagatcatacttatatatcagtcacagtaacgtaagcatgagactttttggtagtaccggtgaaccagatggccgcggcgagggaatctaggacggaggactcgtaatatctctatagatctggcaaaagcgaaagacccctaacgtcaggggctgaccactgagctcactcaggcctcgctgggcgggccagagtgggtgcgagctggaattgccatagcttatggttagagcaataggaaagggcccagcggagagaacagtcaggataacgagcgcggagcccgcttggcaggcggcaggagctgtgggcaagtgcttgcttggtaggccaacagccctgtgaaccgggcggggcactcgacgaaagggggcacactgagcaagtacgcaaaattggccccgcggagctttcaaaaagaaaagcaaggaccactacgggaggtcgaaccacggaccggaggtagtagaacgtgatccgcaccggtcaatattggatcaaacaataggggaccgtagcactgacctttctttttcaagacaataggtactgttccctaccgagacaagggacactctcaacggatcctccacgcgctgggcataccatagttcttccgtgcgtctttatcgtggcggaaacagaacaaaagggaagacccggccgactcgcccagggctcgagggcgagccatacgagagtgagtcgaattctgtttacgttctcggtttggttcgggcccctctcgatcttttgcgtataagggaagggggaaggagtctcaatctatggacattaatgaaccaccattgatgggcgttgcacatgacacgatcaattcgactcgacggtccggtgctaatagaagtcgcttactctccgtctagcgaaggtgccagggcagggcttttttgtagtaatagtgggctgggcgggtctcatgagatttcatctatgccggctcaaacgagggtcgaaggaccattcgattcattaagggggacggcccatttgtaaggcgggggggggcctgaatgaagagcggaccagactcttctttgtttcagctgctcccacgcacgcagaccggaagatctcagttgtcctggactagacaagtacgtagagatcttcgtggaaccggggagggagtctcaatcgatcttttctaggattccaactcacgccacgcacgaagatttatctattgatagagttaagggctcggctcccccgactctaaaaggttaggttactaccagcttgcctctacggaagaggtgtactttgtactgtctagaggtcatatagatcggaacccggagcgagttgaacgaaagccttacccactgctacaactactggcgcttcaaagggcttagattctaaggtaggggtgtcagccgtgaaagcctttggtactttagtaaggcgagcagcccttaaacaaaagaaaaggcgcgaccatcccccccttcccctatttttgcatttcattctctatttggcccgcctcatgaaaaatgataggcctattgattcgaagtaagtacgaaagggtcggtcaatagcatagctcttttttttttctcctttcgaaggaaaggccttcgcattcttaatctggtagggccggacggctttgtttgccctagcttggcgaatcgcgcccctgaccgttctcgcgaagtctttgcaacggctgggaaacctgtctacgaagctaagcatattgccacgccgaccatcaaatacgagattgggccccttctcaaagatggaatggcccagcccaataaaggaaggttaacgtacgcgatgccttccatttgtacgaatcgcgaacataccacgcacgaccggacgtagagccaaaattcactggcagaccgagtcgggcgcaggtgccagatcctcaaagtatcgtaaagttaagttaagtatcgtaaagtatcg

SEQ ID NO: 85662 - DNA, 4434 bp, Zea Mays
agaaatcatacggattgcaacctacagatgaagaatctgcttcattgttcccaccatctatatcagatgtttaataagaataggaatcgaataagctgctgattgactgaggaagcatttgaaaagaaaggaagggtgatgcttgttaaacaaagctgcgtgtggggccgccacgtatagctgtagtttctgctgtagcatcggttatttccgttattgctgtagtagcatcggttattgctcaggttacgaatgacccaatctatctatggcaaccacccctacttttagtagatagagatgcgcacctagaaaagacggatgaaagagaacctgcccttctgacttcttctcttgtctgtcctttacgcaaagcgatctatggtctcaacaagccccgatagcgtcggtttttgaagttcagcacagtggttatccaggcagggtttgctcggagtgatcatgattcggccatgttcgtatcagtttatcctcgaggacgtgctattctgttgttgtatgttgatgatatcaaactgactggtgattactccgttaccatatcgctgatcgagtgtcgccttcatcaattatttgctatgaaggcgctgacgcgccctaagccttttcttggcttggaggtcgcatcgcacattctcctcgtggatatttggtatctcagatcaaataacgtcatgacttgatcactcgagctcaactcaatgatgagaagactgttgacactcccttggagctttacgttaaactccgtccgactgatggctcaccattatctgatccgacgcagtacagacagtaggtcggcagtttggtttatctgacgatctcttgcccagatggcttttcttaagaaagtcagcctttcatggctgcgctgccccccggtcagttcactttgcagcagttcatcggattcttagatatattcgaggtaccttttctcgagccgtccttttttccgtcatcgtcttctttagagttgcgtgcaactactgatgccgattgggccttcagataggtgctcaactacaggcttctctattttttggggagactctccactatcttatcttggatgagataaaagcaatagacagttgctccttccactgccgaagcggagtaccgtgccatggcacactactagatagattgtatggctccgttggtgactttctgatcgcgggtttcatttttaaaaccccaaattcatcttgcgtcaaatccggtctttcatgcaagagtttcatttgctactacgttcgtcgaaaacttcttgatgacaccatcatctcattaccttatttttttccttcgacttcggctatgaccaatgccccacctagctgaataggcgtaacaaagctacctgaaaaaggcaaggtaaggtgtaccttaaattgaaatcgacaaattgcgttttgccagatggattctttagaaagattcccggataaagttcagtataatatttagttagaatctaaataaaggcgcatacgtgggcgggcagggggccccactacttcttcattcaggggggctagcctcatgacttcccactgggcgaggggtgcacctaacccacctactcactcatcaattacggtgttcagctgacttgcacagaaagacccctattgtttagtaatttggcgcctgattgactgttgtcaactaatcttttcaatgttcgattctactctatgttagaacatttcagtgaatgctatttcgatctaagtggtcctattctctgtcccgtgctaggaagcattactcctcttttcattccaaattcttcaataagaccgatacgattgattggtctgtgcgtttctcttattacttttttgtatccccctgttcctcggatacaattcgatccttctacggccaattctcaatttgtggaaagccttcgatggcttccttatgaaaacatccatttgtatatgggtatagacggtctttcattattcttcgtgatattgaccacatttctgatccctatttgcatttcagtgggttggtctggtatgagaagttttgggaaagagtatattacagcatttctaattcgtgaatttctaatgatcgccgtgtcctgcatgctggatcctctactattctatgttctttccgaaagcgtgccaatccctatgttcatcattataggggtatggggttcgagacaaagaaagatcaaggcagcatatcagtttttcctatatactttacttggatccgtttttatgctattagctattctgttgattcttctccaaacaggaaccaccgatttacaaattttattaaccacagaatttagtgagcggcgccaaatccttctatggattgcctttttcgcctcttttgccgtcaaagtgcctatggtaccagttcatatttggttacccgaagcccatgtagaggcacctacggctggatccgtcatcttggcaggaattcttttaaaattgggaacctacgggtttttaagattttcaatacccatgtttcccgaagcgacactttgtttcactcctttcatttatactctaagtgcgattgctataatatatacttccttgaccactttaagacagatcgatcttaagaagatcattgcctactcctcagtagcccatatgaatttggtgactattggtatgtttagtcgggcggcggccgttaggtcacctattttgagttatggacacacaagcaaggccaaaacatgtgtgccgggcgtgcgacccatcaacctactagcaataggggagaaaacttagcatgtcgcaacaaaagcgtcgattcgaggcgtcagcaaaacaccgccgtctgttcctaaaacaaaaccccttagcgccccgggacgggagtggggccccacgcagacagcagcagcaccggctctacgaagtccgaatcgaatctttcggttggctttccgaatagttgggcgcggcgaagcgagcgcttctagctgtttcgcttgcttctttcttattgtggcggcgcgtggctgaaatgaacgaaaagcgagatgaacctttcaaatcgattgatagatggcctgatctgttctgatagatcgaaagggaatctatcaataataagggttgacctctttctatctattgatgatacaagatatctatctattctggatccatcataaagaaatcgatatgtatctgatggagtctacatcgtatgtagagcgcccaagcgcttttttggcctgctcagttctattatccatcggtccaatgcactggctcatctcatggagggaaaaagcaaatgtagttagttgtcttgttgttgttcgccgcctcgacacattccccggcatcgtcccacacagaaagaaagagcgtggagccccggcccgacctgtaagtccgctaacgtaaagcgaggagttgagcctgaactggcgaaccgaagtcactttcgtaaccatacttcctacagctaacacgtgtccagtccagcgggaacgcgcagcgcaaacgaacgtaagctgctataccgaatcccccgcaggccatcggggacctagtggtaaggccatgatccgcaggggaagggatcactcattcttctattggggacaggtgcacgaacgacaactccaaacgtcatacatccgccgcctatacctaccgtttaggtggcaccagcgagatccagctaaggtaaggaacttcgtgtcgcggctgctccactccgctgcggtcttttgaactgaacttcgttgccttcccgcgcgcgaaacgaatgggcgctgtgtcgtgggtcagttttggggcggggggcagagagagaccagaagaatgattcatttggatcgacgagccatttcgcgaatcaatagaatgtctctctatccatatctattctatctttatatgacgaaaaaagaagtattttttttatggcatgtgagatgatcgcgcctagtagccacatatcagcagcgcttaatatgcgggatttccgttggatcagatctttcgctttgacgaatttggacctagcgaaaaggactctaagccttcgcgcaaacaagcaaagtagaagcaagacgaggaagcggagctgtcgtagaagcagtagcttcccccgacaatatacaatacaacagtagcgaccatgaataaaaaagcccctagtttataacgagttcgcagcttttcccgggccggagaagggcaactacttattttattgattgatcgcctttctttgatatgtgttcaatttagtacagtacaaactacaactagatcaaagcggaagggccactcactatagaagctataactagcctagccctagccaatagtatagagtttagtagtcggccaaacccccatgctcacgacatgttcttgatattga

SEQ ID NO: 85663 - DNA, 5443 bp, Zea Mays
caatagtacgggtgctgccgtgccacggggcacgaccatggaagtaatgaaaaagaagaagttctgtagttggaccatctgctctatccgttcgatttgagcttctccagagaagatgagacgctaaaaatgaaagtgttcgcaacgcataccgaaaaagggtacctatgttgccgaccattaatgactagttcgaagaccaggagcaggggcacgtgccaagaaagatttgttactttccctatggttttcgaacgttttcaataaaaccttctcgtactcgtagaagtatagtgtgaaagctctcgggagaagggaatcgacaacacaactggagctgccctttctttggtttagtaagaagcttcctcaagtatgtcgatttgtagtacggtcagttcactcgaatccactgacttcatgcacggggactcgaccatcatttcttgtgacgagctgtgactgggtgctctgaaacctccttaaaaggaggggtaaggtaattgaagtaactagccagtattaagattaggcataagcataataaactgatgcatccgaagacggtgaatctagaatagaggccgggtggggaagcaaaagatgcaagagagcctttttccgggattggatttcactcatttagtgcttgggatgcagacaggcgtggaagatgaacataagagagctccgcccttgccttgcaccggtgaacaaaagaaagaaaggagacaaggtcggaactaagacgtcaatagcttattttaagtgacgtattccgcgagcaaggataaaatgagagtatgagcccacacccatatagaaatcagtcatatgcctgatagtcgttatctattctttctcaatgatagtattattacccgaaaacaatatgtacagaggaagctagttctgtactctagttcagtccccaaggcgcgagtgaagcccttctccagtatggtaaagtgaaaccgcttcggagtttatggttcgaaagaaagagagaggaaagcacttctaaagcggtgggctcttattcttattcttattcttatagtaaacaagagttccgttaagctctgggactctaggcaagatagctgtagttttgaaaacgtaaattgaccgaagtttgtctttactttcccctattctacgtataccatctccgagcctctcgttaaatcgaatcaattgatgaaagatgcccgtccttgctaggccagttagaagttcctggggatgtgattgacctaagaagcccgtgttatcgatagatgtaagttcatagttgaagacaagggagttttagctttttcgtagatagtctgagttcgagctactgtagtctcccccgttgaccttcttttttagatagaatcctcaatgagtggaaaggactcccagacttgctccgcagtacgagccccatacagagccgcgcccttgtgatatgataagaagaaaaggggccaggccaccctcttttcttttccgcaccaagccttcttgtaaaatagggtgtatagctcagttggtagagcattgggcttttaacctaatggtcgcaggttcaagtcctgctatacccaaaaaaaaccactcttgtattcgtaaggatgcgggacaaagaccctaatcaatgcatccatttaggtcagaattctctataccataactcctcttttccctactgagatagatttcaggagtaccctggccgatgaaggagtctactttcttgcttacctacccgagtcggcaacttcctttgatgagtcacatccctcctttttatcgagttccgctaagacctctttgacttattacgccttaacctacctggtactaggactcattgtggaaatcccataggcctatcctccttgggcttatcccctaactacttccacggagcaggtggttgacctacttcctcgggttggaatcctccgttttggaatactttacctcatccgtcctgtgacctatcctcagcctcagtcgtagcctgatccactctctttttcccagcaagtgaatgcgagtccagttcaccctcggcctcgaaaacctgtgaagtacgaggaaagagtagggatcgagtgtgagttccgatcccaggcaagaatgaaattggacggtctcagcccagaaagtgaaaagaacgagatctataaagaattctactagctgaacgaggctgtgaaagaatctctgtcaggtggtgcagatgaatagaataagccaagccctgctttttctctttttagccttatccgctctcatctcgcatgtagaaaacagcgctcattgtgtatagctatcattgaaagaccctctcaataataacttaaacaaagaaagtacgtaatggcctcaggcctgctctattacatcgaccaccttcgagttctctatatgcgaagagcctggaatggtgatagaactatcggaaactacccaacgacgagcgagcctgagatcgcctaccagtcattccattgcttgaaaaagttagcctggatcttatcttatcttatcttaggaggaaggattgaagagctctagagaaggtctggaaaggatggtcggccactagaaagcaacaattcagccggaagtttggacacattggctctcgtcttaaagttcccattgacgaccaaaggattaattcctcatggaggaaagcctcactaccgatgctttactttcggctccattgatcttactccaacctaaagaatacactgtcttgctcaatgtgcaagggatcattctataaacttggtcttggaaagcctatcaagagtagctcggcatcgggaatctatgaaggaagaatacccctttgctttcttaggggaatagccgatcttttatcagaagcgagattaccggtctgtctccttaataaagagtcgaggaataggaggagaatccactggcactcttagcaagaaggagctcccctccaagtcatgcacctaggaacgaatgttcttgtggagcctgtctctttatgtgataccgccgctactcatcacatggaaaattgaactcgtacttgcactctctgattggctctctatgacatgccaacaaatgctcccaagcaatcagttacttcgctattgatagtaccggggtaaccctatctcagatcagaaaagtaagtcggagaggaatagctatcctgaagcagtaactctaaagtatgggctttttccactatatatatataatatatataaagtatgggcgtggatgttcttatttgggcatcttgtttaggtcccgggcctaaagcatttactaggaactgggctcaagagtctgattgcattactagttgttcagccctaaggtacaacatgtctgggcttggaatgtatgtcacgcatgagaggacgcattggactttattgggaatcttcttgccttgctgtacttcacagtaagtacaagattgacagaagaaggcataggcttagggactgatagagaactgtgagctgtttagttagcggagggacgaatacttactaatagcactatcctagtcgtaggaggggaatgctttcccggctagctagatgtaattcaccagctttcaaaggtttttgaggttggaaggggcattcctattttattgacttgcttgctagctttccaactgtcactaccgagtatacgacgttcacaaggtgttggcttacacatcaacagttcgtttttaggattgatataagaatatccggagcatttagtgtaagctggcctacttatgcctccatttcagtctcgggtgaatatttccatgctgcgaagagctttccaaaggttggttcagaaaggggttaacaatcccgcaaaaatgagttttctggccgcaggagcttattagtgagaaggaatctatcctggcgctcgtactttactgaactgattgagaaccttataatgtcgaggaggtctcgttgatcacgctagttatgaatcttgtaatcttaggaacttggtatggttctaataaaccaacacaacatctcgtgccagtctctagctcagtgactggtgggagtagtttgcagaatgagcaaagctttttagaaggcagatctctatggaacgaactcccttgagggtatacagacctattcaatatgtcatttccgaaaccgtacccgcctgctcaatcttagacacagtggctacgtgccttcaaaccaccggggttccgtcttatgtccgccgacaggacttgacttctagagccaaggcaaggaaacagaacttccacatcctctgttcacactacctggattggaattggttctatcgagatatacagacttgaaacaggaatttcttggtaacagcttcttctttgaagcaagtgctttcgggttggctcttctgatatgtttatttgctacccatacggaacaatttcattgatgaaagatggatggctatatgatcaaaggactggaagagagtattctatggtggataggatgcagaataagagataatgaaagaaagaggagcagtagcttcaatctaaagcatgtaatctgagctgtctatcccgataggaagtcaagacctaaagtaagcggaagccaatccttatgagaatgataggagggaggctaatccgagcagtggtagatgctctttatagttgttcaatatggctcttcaagctgaatgcgaggaatggaagcagtagcacaactgactcattcttagcttcattgcaatattaggcttagctttagtattagtagaagtacggtgaaatagatcgagtttcaagtatcaggtatcgcagaatttctgcaaattcccgttagggcaatgaactcttctctggcaactcaacggcatcaacacggccagcactcttgatcaacttcccattcttatctcgggccatcatcatccccattgaatccacttctcccatgcctcagaactatggaaatcggtttcagtcccatatcagtttatccattggtaattctaaagcttcaccatttcctaagctagtctatctgaggttttctttgcaacttagttactttaccagcctcgactgacccggattatcacaatcgcaaccctaacctagcgaaggctagggcctatctagtttagtcagtactttatctagatctagtttagttagtactttagagtttagggtgtcttctcttccttatgggaattcactacttatttgattgttcttggaattcttatgggcatatttccacaagactacgctacctttcttctaggatctgcagttcaggtttaggctttcatggctctttctttcgcttgttccacgttgccatgggtatcgaaaccctgatactcccatcacttgtcaatgagacaaccaatcctagaacaattaacctac

SEQ ID NO: 85664 - DNA, 1968 bp, Zea Mays
atggaaaaaaattcattaataatggtgaaaagggctccctcacactcatctgcctttcccttcttctacccgcaccgcaatcaatgtttaggaattttcccggctcccacttttccacttcttcagtcggctcactcattttcttttccttctgcttggcttcgggggtctaacggtttaccttttcgccttctcttggttcgtcccatggatcctcttatatcacctcttccttctcaactgctgccacatgccccttcttccccttcagagacatcaaataacattccctcgccattttatggtgaccggactctactcccactcctgcttccgttgggatcaatttcatcatcagatgggatgtagatactaccgcccctatcgcattcaacgttcctcgtcccagaatcgcattatacgccgaaggagcgtcaactaccagaaagtctatcattgccgaagaccgggccgaactcgacccttaggggaattttgcctaacggttgcagagtatctccagtgaatcccactaggggtgttcgtacctgacctagatgacgcagctctaggttcatttgatcgaatgctcgtttgtataatatatccgccgaactccctgtatcaaccaaaacacgtttgactctgtttcctcctattttcaggacaagaactatcgcatcatcatgaggtcgctgtatgccctcagaatcttgatccgaaaagctgatcacgctaccttcccttggccttttcttgtcgacctgaaggatgatcgggaacttcattttggtgctatactgtcgccgtcctttgttcgtgtcccctcccgacgctatcccccagcgattacgtgaattataggggggctctatggatattgttcgtctcctttccttcccttaccttattattcggcctaccttgtcccggggtccctatttccactgcgggggtccttcaggcctctttcatccagccttcctgttcccttgccattcacatacttttttatgaactgatataacttccccagccgggctcttctttcgagctcatctttgagttgcaagcactctatttgggttgggtgtgacccggactttctttatattcacaatacttgctcgcttctcttatttcatgcacttccaacggcctcggtcgtcgaagatcaaagtcgcttctatgctgaattcttctccaaattgaatcccggttgaattcggtgtatgcgggaaatcgtcgccgatactctgtggggctatccggtttgctcgctccgccctttcacttacttcgaaggggatcgcagactactttctttggggctatgctaactcatagcagcacctatcactagaaactctttcattcctcactagcagttctttggaactagttccgtagtacctgtaagagcagaacacttccctccactcatactctttacctgtggggctgtatggtactttagctggactttacaccagctctattcactgatagcgttactggctcttttccagcatttctggaaagcagctcgcactcaccgctgcgcgcctagttaggcttaaaaataataggaacaaagatcttccgcaatcaatgttgtactcaaatcctctctggccggagagggggatctcttaagcagagtattccgagtctagggctagtggaagcgttgaagagggatatcgttttcaaagaaggcatggggccctttcgtctttgtagagactttcacaatataccaagtggataataccatccaagagagaaggcccataaaaagaagcaggcaacaaaacatcttgatttataggaatcaacgacctcgccactgcaaaggaggaagtcgaatgatttggattcggacaggctgtctcgacagtaagaaatcgacatcatcatctgtctttcatgatggtgagaggcaagatttcgtggtaaagcacaaac

SEQ ID NO: 85665 - DNA, 2663 bp, Zea Mays
caacaatagaaacacgtgacatatttgcagaaatagagattttaggcgcaatagaaaggaatgctgtcaccggggtgggtgaaccctcatagatatcaggtgcccacatatatagagtcaaaagagagattgagtccgagggagaggggggttttcttggggctcgagagattgaatagatagggccccacaagttggttaattcgccgctggggaattcacacaaaagggaaggacttattctcaacgaaaaaagtgctctctgaaccgaacgtgaaagttgttttccatcagacggctgttcacgtaactccactctcggcttggattatatatccatttggtccgctctcggccattccacacgctgcctagcagagacgtggttatctgaagtggattctctcttttctttgggtgtagtcggacattccactttgttaagttcttttcttttcttttgtattgtagtagatgccgaacctgctgctcagtgggcgggcgcagcagctacatggacccctttctttatgttgttgccagcgctttcccgggccgagccggaattctttattagaacgtcggcaggcaaagcccgaaggaaggctgctatcccctcggccttcttccttttcgatgaaaaacaaatcaatctccgaaagcgttttccttacccttcccccccttcgtcgagcctttcctttagtggtaagggatatgcaccttatctgaacgtcggcaggcattccggaattctcctttttgagccccgggtgaacataggctcaaacatgattgggggggtcctagctacgccatgcgttcaatacaaaaaaaagcctctgggaagcagcagagattacaaaaagagggtgctttcctgtgttgcactgaaaaaaggacaaaggagaagacgctcttcgactttctttcttcctcccgcgcccgcctaagcccggcccgcgttagaggggaagattagcaaagcggaaaaagacagagggagggggagctgcatcttattctcttcgcgttcaggatcggagaagcattcggaaggggctaggccttcatttcgttggcagaagcagaaacgatccaatccattcggggaacccaaaaacgaactctgtttacttttttcatagatagatgatatatataggaataatatatacatccctttactgtatatgtctatgtatcttttaatctcccgattctcttttttttttagttcgcactgctctttctctctaaattgcatcaaagaaaatagagagagagagcagatggatcctatcccctataacgaacactcattcctatctattgatagaaagatcttcgtcacggactttgccttagactgacggaacaaagctaagaagtaggctgaatggaaaaaggaaagggacaagggcggtcgtcgcttggcgcgaaggctgctggttcggtacggtactaaaggtcctcggacttccaggcggtttttcttttgggctgctgtgaacccttggatctcgccaatacagcctcctatggttttcgttaccgagatatcttttcttttttcccagggattttttgggtaatcagctcccatgctgcaaacagtcaaatctgaaccttgccgctcttctttcctcgtgggcaggaagcacaccagctgcgtgcgttgcgtgattccactgtgttttttgcacttgactgggcggacagttgaccggaagataacttcgattcgcccggccagcaggcgggcggcgtgcttatcttgtgtgacaacactacagagcgagtagctcttctagtcgggcagctgtgtgacaacactccagagaaagcggcgcttttgtgtaacatgctatggtctcaacgcccttacgaggtagtgatgagtttcacgcgctctaagcccggcccgcgcgcagttaggaggattggccgctatctgagcggtaccacccatcctaccctactacctatagggggccgtccgtcctacagccgcccgaaaaggaactgcagtaatcttgaatagggatcctacagcgataaaaagaatccccataaaaataccactagatcgagcaccagtgatttcgtatccggtcaaaatcttggctaattgatcgaagtgggtagctccagtagacccatagatcatggaacaaatagggtgggtaggcccaaccaccacactacacgtatagacgcgaacccccctccttaccgtacgtgcgactctcaccgcatacggctcgcacaaagactcaaaaatccatcccgagctttttattccacctctcctctccaatcctcgatcaaacctctacttcaatgaaccacgtcgcgttctttatctttctcactcgtcgtttcgttggtcttttattggtcattgattgtttagtctcgtggaagcaaccgatgctttggtcattcgactccttgatgccagtctgtgcttgctgtcatgctggcaaaagcgggggtttcggccggttttacctactattggatttgaaccaatgactctcgccgtatgaaagcgatactctaaccgctgagtcaagtaggtcaagctgagtcaagtcagagaaaatagaaaaaaagagaaagccaaccaaagcgcaaccagagttccccgcggggtggag

SEQ ID NO: 85666 - DNA, 300 bp, Zea Mays
ctaacagctgagtcctctccgaaccgcaggagatagttgcccatcatacggctcaccaacttcacttgcctctaagggggggctcgctccgggcaggttcggatcacttactatacacggccctacgaaggggttaggagcgttttcaagatgattctttctttgtcgagacgaaaaaggaacccatcttttcgattgaaaaatgtgagtctgttttgcccactttatccatccccctctataaaaatgataaaaaaggcattttaaatgcttcttattcccgtgtttgatcttatccat

SEQ ID NO: 85667 - DNA, 1138 bp, Zea Mays
aatggaagtactttcgagtagtcttacattcacatctttaactactcgttttttcccgttgctagctagcgtctcaccttcttttccgaaaacgtaggaactaaagaggccggccttcggcaaagggaaagcgtgaaaggatttaaaaaaggggctttactaaactaaactaatatagaaatggaaatctgataaagatgcctagtctgcgctgttagaatccattggagaaaggcttgctcacttcttcatctgtgagatactcgtattagaataatttagaataatgggattggaccttgcttcgatcccctctttaagagactccagaaactcgttgacccatagatgtaatagccgaaatgaaactcttttcctttacgccataggaactagtatagaattataaaagaggtctttcctttacgtcgtaaagagaagcatgtgccttccacctatccttccacgtatagctgggctttaataaagaacgcatcgggcagcgagcggaaaagaaagtcgattgaatcttggtaattgagtgaagaagctctcagcgaagaacaacccgtaaatctaggaagtattgaatcgggatccgatctcttttggtacactcgagtcataaggtgtgtacagacagacaggcttcctttcgaaaggctaggcaccatttggtccaaagctcctcatatgatgggtatagggtgacgaccttaatgaatcaagtattcaggtggcagagttattagctacataagcgctcaaattccagaatacttattgccctggcttctatgatcaacccctggcacatttcggttttgatctgaggctatcctggtctgcaggacccaacacaagtattcatcctttccaatctgaaaaaggtgttgccgaaagcttaccctcttccacacggatgctacagccgctatcacttttgcaggaggggaattacagagttcgcctctcgacatcttgtttggtaaacggaatttttacccaggcgccctagtgttgcctaaccgttcggcctcggatgcgagatctttagctacttgtatcaatttgccacagtgtgcttagatacaatgcgctggcagctgaggcttggcaggatgggagtgaattaaat

SEQ ID NO: 85668 - DNA, 9432 bp, Zea Mays
gggtccctcatagatcgatagatctaccacttttattacaggtatttcttgatcttacggatgatctcatctatctatttattctgattatctgctttcttctcaggcatatctgacttcttcttcttagaagctttctccttcttagaatctttgatattctgtgaatcagaattcatctgatcagaattagccaattctctttggagatcttcattttgctctaataagcttttaattaacttctagtactagtactagtattagtataggaagtaggattcaaacttttcacatccccttctcctatatgaagaggttttgttcctacccatttgttatttttgtcaaaaacgaactctcgcttcttacttcctatcccctccccatagtgatacgtgccattttcttttccaccaatagcttagttcttactgaactttagctcatattcaaacttctgctttcaatatggataagagacttgctgccctgccctaggaagagcggctataaaaagcttgcaaaaaacactcttgcttggttggaaggtatggtaaaggtaaactgtatctatttttttatataaaaaagggagtgctaaaggagtcattcagaagtgagtgaaggggcaaaaaagctcatttctttcattcaggaatggacactggaccagaatgaaatgtgggaatatcgggattggcagatttgttatattgaaataagcctcaactcaacacgactagtgaattcaaattatagtcacttgcggatttcttaaaattgttgtagtgtagtgtagtattgtggtttttcagtaaagaccccgacctataaatattcacagcccggctcatacgggcggacaatattcacccagagccccgttgcgaccgcaatgctgttcttgaaggaccttaccttagagtagagcaaaaaaagggaatagaagttaggaagactactgacgtagggcggcgggtgagctcaacctcgaaccaaacaagcaacggattgagcaactagcgctaggcgcatcctcttgctccttaacgaccgagggatgaaatctttcgacgactagggaggcccgagaccgattcctgtggatcactatagaatcttctggaagcaagctaggctaccttctggctagctctgccatcttagaaaaattccttcgcgcttagcttagtaagctagcttggtaagctaagcaagcctggttctccgggcactatggtaggacgtggatcgatcatgacgagaatggacttctccgtcatgtaatggtttagaagagtcacggtccagttccccgccgggctttttcccttctcgactagacgaaggagatattcattccattcaggcaggtgaggaagggcggcgtcggcttgaccctgtcttctctgggtcggaggctaagtttatcattcagtggtgaggtgttcatagaaagcaaggcctcgcccaacgcaacgagtggcggatttggtttggatggggtctcgtctcgcttggacgctggggagatctggatagagtctttctcgctcagtaaagaagagtacgcgcgctacggcttacgcagtggatcttcgggcaaccggcacatccaattccgatcaacaacttggatggaggtatggctgagtggcttaaggcattggtttgctaaatcgacatacaagaagattgtatcatgggttcgaatcccatttcctccggttgaacgggcgggcgaaattacgtgagagaaagaacctcagattgatggagtccgccgtcggacagaatagcactacttagtgactaggagcggagcgcccctttcttgttcttggtggcgtctatagcgaagaagaccttcccgaacgagggccgtccagtccctgggcggctctcggttcttgagcaagctcctccactgcgggtaggatgctcatagatgaagaaaagagactttaggcaagtggttctggtagctcagctggttagagcaaaggacttaaaatccttttttgcttgtttcagtgggaagagcaaggggcattgcccttgaaatccttcagtggttcgaatccacatctgagcgtctttttttttcggtatgccgctccgcgagcaaggagcgccgcgaggagagcgagagaacgaagtgggctttggtgatgtcggaatttgcacctatttgtatctatttagtgatcagtccgctagtttctttgattccactcggtgttccttttccatttgcttccaatagttcgacctatccagaaaaattgtcggcctacgaatgtggttccgatccctccggtgatgccagaagtcgtttcgatatacgattttatccggttcctattttatttattatccctgacccggaagtcaccttttcttttccttgggcagtacctcctaacaagattgatctgtttggatcttggtccatgatggcctttttattgattttgacgattggatctctctatgaatggaaaaggggtgcttcggatcgggagtaaccactagtgaaagggctaaggggggaaggacataggaaagagggatgcctacaaaaaatcaattgattcgtcatggtagagaagaaaaacggcgcacggaccgtactcgagcttcggatcaatgtccccagaagcaaggagtatgcctgcgtgtttcgacgagaacaccgaaaaaacctaattcagctctacgtaagatagcaaaagtacggttgagcaatcgacatgatatatttgctcacattccaggcgaaggtcataattcgcaggaacattctatagtcttagtcagagggggtagagtgaaagattcgccaggtgtgaaatcccatcgtattcgaggagtaaaggatttgctgggaattccggatcgtagaaagggaagatctaaatatggcgcagaaagaccaaaatctaaatgaatggaagatgcctctggaacttattggttattttgggggggcgatatggaagcagctagcttcctttcccttattacgttaccagcccaccgctattccaaaaaccttagcttcatatggctcctctatgatcaggttctcaaaagaatttcctttccttggaaaaaccaaggacaacccctatctcagtctcctttctcttttgggagcagagctgagcttcaaagtttagagtaactatgagatgagatttagtggaatggatatgaagaaaagaaaaatgctcttttccttctttatcttttttatcatctcttctatttttgtcttactgggggggacgcactggtcttacgacttgcttactcactgagcaaggaagccttagtcaggctcttacttcggaatggctgctcctccgtgactctcatcatggccgttggattcgctctacgggccttcttcctcgctaccggaggggggctatccatggcaaattacatgatgcacggagcagccgaatcctccaattcggccttatttacttatacttccgattcctatttggtagaggattcggccagttccgggcgtagtagaagtaccacctcgtcggtcaatcaaccgcttcagggggaacaagctacgcctcccgctcttcctgttatgcaggaagcagctaatcgggctccgccctacgtcccctacccccatcaactaaatgaaataataggaggggatagcgtagaatccattcagaggcggctgttggggactaattggaatccttcagcccatgacataagaatggcccggattcaagccgaagacctatttgaggtcaaggttgacataatccggaagatggcgggcctgcatccaagtggcgattggatgggacggggggcgcgggccctggacaacccccgtacggccactggtgaagaacacttggctaggttgcatcaaatgcttgacgacctacagagcgggaattttccatctgcaaccttctgtcgaaagagtccgcttacgggcgggtgaggatcaacactctgccacctagacatggctcaaaacgaaggggtaaggccaagtgttcttaaaacaaaactctcagtgcacttcggagcacggtcttccgttaggtcctttacggacgacgaaagccagccccttggctatactctactcttcgcctccggctgttctttccttttggctcggcggagctgagctgggttccattacactctgtaggaaatgcatagacagtccacgcagcaaaccgaggccctgcgtgcgccgtacgtaccgcctacgaataataggtagccccaccccaggcagagtttgtgagccgtgtaataggcgaccatttcgcgcggttcggggggcacttgaataagccgccggcacccggctgcgtctttacccctatccaatttttgggccaattcccccttcgtactaccaaaaaatgagattcttgccgaatccgagtttgctgctccaaccattacaaaactaatacctattctgtttagtacttcaggtgcttctctagcgtataatgtaaatctcgtagcggatcaattccaacgagcctttcaaactagtactttttgtaatcgactctatagcttcttcaataaacgctggttcttcgatcaagttttgaatgactttctagtcagatcgttcctgcgtttcggatattcagtctcattcgaagctttagacaagggtgctattgagatattgggcccttatggtatctcgtacacattccgacgattggccgagcgaataagtcaacttcaaagtggatctgttgtgcgaagagtgcgttatgaaccgtggccgcctacctgctttggttggtgggggcggctcctccgttgtgggtaaacgggaaacccgactctacgaacccgaggaaaggctgcacagcttccgtagggtcgttaagaccggagctttttgtagtgctagcaggaatgcaagtgaatgaatccaatcccctttcaaatcggcgaggtaataccttattgaagtagggcacgctacggcaacacaggactgacggggtgggggcttgctgtctacttggcgagccttcactgcccccttctgtaacttcccttctttcgtccgtccacgaggcagtcaaaagaaagagagaaaggggcggctataacgcaggagtcgtggcggttgtatgccacaaggtccctatagacaaggggacaagtgaatcatcgcttttgggcgcaggcagccctctaccatccatcccattgcattcctctcatagagtactgtaccgtctcagaccagatacatctatggaaagaaaggatttcatagaaaatattcatttttctctttttttggatccccatgcattccgttattcccgtaactatggattggattggattggattgattgattgtccctacctaactaaatggtagtggtctagggagcgcaattgctagagcacgggagaatgaagagtaatgatttaagcaagagcagccggacggactactatagtcagtctagtgactactatagtcttttctttctttgtagttaagtaataatgtttggtatagcagcctttccgagcgagtctctgggatctcctgtaaacccccatgatgtggtaaagggagggaggatattaggggaagcagtgagtggagattcccctgcggagagccggatgaggggagaccctcacgtccggttcggagggcggggatatcccgaccctactatcattatgcctttgcaatgttacttggttcaactccatttgtgaccttttctcgtatgtgggactctctatcttcttgggtagattctagatcgtctttcattttgttagtgagtagttttattattaataagtcaagtcaagaataataagagaactgtaggagcttgccaggacggcttggtaagcaagctacctgttatgtaggcgccaactcccagttctttctcttctttcttttggcggcatggccaagcggtaaggcaggggactgcaaatcctttatccccagttcaaatctgggtgtcgcctgacccacaaaatactttttatttcttattgtactgattgaactctacaaattcttgccctgcataagcaaaggaaaagaactaggcctgtcgatactggatttttctgaatgccttaaagtctgatgtatagtttcaaaaagcaagtcgttttttcaagacagtgtttttcatgcaagggtagagtctcaatagaagtaaggactaggtgttttagcagcactggtttatgcataatagctaggtaagaaagcacagtattcgagggtcagtaactagaactaatagaagagatgggatagtgatatttcttgaaatagatatatatatgggatagtgatattcctttcaccgagcaagaaagagatgggatagctgatatgaactgtcaaagaaaagaaggcactcatctttagcgtggatatcataggtataaatgaaagaaacaacttcctgattcctgtttctttagcgtggataggatctaataagcaagcaccggtcaagtagaagcagaagcaaggtaggtcaaagataagtcacggatagaaaagaaaagcactgctttcctgtagaggaagactctcttcggggaagagaggattgatttctcggacaacagcgaagggaaagaaagggagaagcagaggaagaacatccggattgagagcaggtaggacttttgaccctatacgttgaccctagagaatcatactttgatcagattcagatccgccaatgaggagagtgactcggatgcagatacttacaagtgccagatgcgctagacggctttctaataaggttggcttggatgaagcgaatgttgttgtgatacggctctcttctcttctgctgtactaacgagaagactaacgagaagggctttctttcctatgaaccgaggaaatggaatgcatggttgcctctggcagagcggtggtataagactatcatacctcacagaaatgtaccccctttcaatgtatggcggaacccttaatcagtgaagtgatggtcccagggccagaatctcctgctgctgaattcttggctgagaaacagcaaatgattgcggcgcggaaggaaaattgagctcaagcccgggaaatttgcagatcaacacagaagtgagagatctttgcggtgatatggtctaccttaagctacagccatacaggaaaattctggggtcaggaacgaagctagctagaaagttctatctttcttattcttcagaaaattggtccagcagccttgcgcctcacactgcacagattcacccagtcttccatgtgagccaatttcagaagcatcttgggcctaaagctgttcccacttcctatggtcacctcagatgatcaaaacggaaccatttgcagtgttgagcactcgttctgtttctgacggtatggtggtgaaatctcaatggaggatcaaattaatctggcggcagaagactcaacttgggaagattgcagtttcattcaaagctcttttccacagttcgactatgctatgcaacgctgaaggcttggttcccagaacgatatccttgagttgaggatgaggacaaggattgcttcaagaggggaggcctggcctgtcatgagaagaatcgaggaccgtcgatgaagagcatccaacggccatgattccatttactttaccaccagtttacgttttcagtttacgcttcctctcttgctttacatttcgtttacagaattgcagctgctgtaatcgggctatggctataaaagccgagacttagagagagagggatagctagctagagagagagggtagtgattctcaagatcgagattagtgggcagtgccggtatcaggaatgctggtaaagagtttgtcttgtcattcttgtaaggtgcgccagcttagtctacggtgacctttcccggttgataggttgcactgccgtgagtagatagggtgaaatgctcggctcgcattatcattatatagatagatttctagcatgaaagccgtatagcgttagcgcatcctctgagatttcttgcttgtctgagttcacatccttgttgcggggaaggccagccctaaaactggtattggaatgacccgaacttcacttaacttaagtagagcccgcatctcgtcacgaaagatatctgatgaatatcacacggccgaatcttcatttgagaatacccagacctgaagtccatggaatagctgatacgcaccctgatattggtcaaacaaatcatcgatcctgggcaatggctacttattcttgattgtcacttcattgagagagcgatagtccacacatagcctcatagatccatccgcgcttttgaacaaagagcgaaggctttgacaagtaaaggctcgggagctaacaaaaaccaaggatcaaaaccaagtttagcgcaaacagcaacgggaaagcggcccttttggtccggttgcccggcgtgtaaaggactttctacgaggataggaaagagtggggagtgaaaggttagtttcgctttcctgttgagtgccaattccatgcattcaacctgatccattttatccctttctcccaggtgcaagtctattattgaggaactgcgagctagagcttactcaacccaactcaaaatgtgtcggttacttcttgtgtttacagctcaaatctctatggtcgtcttgacatccaattgctgcagctcaaaatacccattgccggcgtgtcccaagactactacctacaaaagcaagccctagtctttacaactgctactgtagctatctataccaattccctagtaccactgtcaatgccatgccctaacttctattcatatccagtaagaactccaaaagcaagtcaactcctattagagtaagtagtaagtagagtttagggaggttgaggagtggaagcttgctgtggcctaaaggctagtatcataaaggtgtgtaagttcaactcttgtagagcctccatcggatgccgagtatattgcgtatttgctcgtcccttccgatagaaaggatccgttttccgttcttgggatggatatcgatgacgaggacccgttaccgtatctacagcagggtagggatggctacgttataggattaaacagtcttcccataagcctactactaccgataccgatacctcaacgaatagagatcttgtctttcgctctcctccaaccaaaagtgccacattacaaccgcatttacttcactttacttctctgcatggggggtagacccttaagcggatattgagaaaaggagttattcggtaagttgctttcaaaggaaaaacagtggttttttttgttgggctgtggttagagttgtttgaggaaaccgagcaacctcgcgcttac

SEQ ID NO: 85669 - DNA, 4525 bp, Zea Mays
ctcgtaggaacccgaagtaggaattggatgattggcaaccgtaacattcattcaagttggcaattcccttctcttttctttggagcattaggattcggatttgcattcgtatgcatgtttgcccttgtcttttggcatttcccttgcctttttcagctagcgagcatacctagcttggcttgcttcttgtcacgagcgggagtcgaacccgcattgcccttcctgaaagaaacgtctctttcacttttgttttgatagagcagttccgttggcgagaaaagccgttcgtaatctgctaaagtgcttttcgcgtacatgtcgcacgcgccaggtgttttgagcacccgatttctacaaacaaattggacccttccgttgtatagggaaggtcttcaccctcattttaacccccctcaaccatgagatgagaaggatagctcatgcagggccacgtggcccgcttttgccgcttccactctattgtggttggcaaactcagatagttgagtcaaatagctctcgtctatcttacttagatatcctttaatctgcctaatgcaaaaaatgaacacaaaaatagaaccgaaaaataccaaacctttatcaaagggaggaaggtttaagaaagtcgtgatcattgacgaaaaagttttttcctttccgctccgctcttttgttgaaagagactgatctcaactggccttggtttttccaaggaaactctatctttagagaacggaactgaaacatcttcgctagactgaacacagcacaattacaaacgtaactagatcaacaatgccattctcgagtttagccataacaggttggaaagttccattcgtttagtacgagatcgcttcacacctcgcggtgcttacacctctcgcctatcgaagttctgttcaaaaacctcgtacgagaacttgtatagagaaggatttcccgcggcgcagcagttcttccataccaacttagctgcccggcgctgctattggcataacaaccggtacaccataggttgacccaacccagtcctctcgtactagggttggctcctcgcagttctccctttaacaccaacggtagataggaaccaaactgtctcacgacgttctaaacccaactcacgtaccactttcatcggcgaacaaccgaacccttgggaccttcttcaaccccaggatgtgatgagtcgacatcgaggtgccaaacgactccgtcgataagagctcttgggagtcatcagcctgttatccccggcgtacctttgatccgttgagcgagagcccttccacacgggactcccggatcactatggccgactttcgtctctgttcgaccagtcggtctcacagtcaggcaggcttataccattacgctcacgagcagaatcaacgcttgagcctaccttcgcacacctccgttactctttaggaggcatccgccccagataaactacccacctcgcagtgtcccgcccccccccgaatgatcggtgcggcggttaggcatccttagacgaaagagtggtctttcaggattggtcgttgtgtgtcaccacctcccacctatcctacacattcgatcaaggttgtcactgcgaagctatagtcaaggtgcacggggtcttaccgtctagccgttggtactccgcatcttcacggagaattcaatttcaccgggtccatgtcggagacagcggggcagtcgttacaccattcgtgcaggtcgctacttatgcgacaaggaatttcgctaccttaggacagttagagttactgccgccgtttaccggggcttccattcaaagcttatcacacttctccttccgaccttccagcaccgggcaggtgtcagactctatacatcgtgttaccacttagcagagtcctgtgtttttaataaacagtcgctaccccctggtatgtgccgctttcctaatcaaaagataggagagcaccccttctcccgaagttacggggtcattttgccgagttccttcgacatggttctctcgacgcgccctagtatactctacttgttcacctgtgtcggtttggggtacggtcagttcaccgggaggatcgccctcccaattcgaagttttttcctggaagtttaaaccgtcgttgactatgacaacagtcgcgaccgactattaagatcctcgcgactatggcagggcggtacgctctgctctctcgcgacctctactctaatcaaaagactaaaggcccctacggaagatgaaaaaggcgaggactgaaatgagaaaggaaggacaagacgacttcggttcacacgtgaaagtgcttcgaaaggtgtcagcaggtgcgcggagccggagccggcatgttcgcccgctgggccgagtgttcgcccacttcagagtcttcgcctttagagaaccgtgtccgcccaaaacggctgcgcgttattgtactaagttaagtactaagtactaacctaacctaacgcgcgacggagcaagagtatgcgcgtgtacggaagcgcaacggctttcgcgctcatcccttgcttcaaaacgaaaggttttagccctccctccgtttgctttgctggtcgccaaagacgagagcttcgcctttggaagcgccagtagcgtagggcgaccgggccagccgagcccctccgaattagttgacggctttgatgactcgacggtgaatattaaggaaaggagagcgaggggaagagggggcagccctcggcccgatcatccaattcgctccgacgatccaggcatggttcagtagtcaaagcaacttcgtcactttcgtgtacccatcggacggcagccctttcgggagttccttagggaccgattcactctgcgtagattgactgaacgcagaaagccttccactggcaggcgatcgtgtttttcacaggatttctcgttactcatgtcagcattctcacttctgatatctccaggtcttgtcaccaaaaaccttccccgattgacagaacgtcccgctactgacacttgaaaaagcagctttcaaggtctcgtcgcttcggtgaatcacttgagccctgagacattttcggtgccatggagctagaccagtgagctattacgctttcttcaaaggatggctgcttccaagcccacctcctggttgtcatcgctcgatcacttccttttccactaagtgattgcttagggaccttagcgtacgatctgggctgtttccctctcgactttggatcttagcacccaatcagtctgtctgtactaaggatgacggcctgtattcggagtttccctggggttggtaaagcgaaatgggggccaccctagcccattgagtgctctacctcgggccatcgacatcatacgctctactgaaatagatttcgcggaaaaccagctatatccgatcttggttggcctttcacccctagccacaagtcatccccgtattttgccacatacgtgggttcggtcctccaaggcctgttagagctctcttcaacctgctcatggctagatcgatcggtttcgggtcaaataggaagaacgtaaatcttccattccacctctggaaagcgcctacacctaatggcttaagccgctgttcccatttcctcgctgacccatcatgcgaaaggtacgccgttagagtgagtgcgcccgcgctccgctccttcgactgattgttcgcatcggatctcaggttctctattgcactccccgattggggttcttttcacctttccctcacggtacttgtacgctatcggtcattgaggaatacttaggcttagagggtggtccccctttctcgcgtaaaagcgatcatcattcgaacacgccgcgttttactgggaaggatcgaaccatgggaacgaatgaacagggctatcaccttctttggccggatcttccaatctttttagaaaaccagttcactgcgcgccccaccccgtcctgtgttgcctatgcttgcgccccaatgctgactttgtacaactccgtagggcgcgctacggcaacacagcctacgcttgctgcttgctggtttttccatcatccaatccacaacaaatcgaatgaaaccgcttcggatttcttttgatgaaaacccttgttccgctctcgctcgccgctactaacggggtctcggttgattttccttcctttagctactcagatgtttcagttcgctaagtttgaaaagtccaaagagcgcagactagccacggagcttggatacggtttcccgatcggagatccatggatcacagacgctctctctccccatggcctttcgcctctgaaagcgtccttccttctcaatgcccgggcatccatccaatgcatgattttcgatagcgtcgaacatgagcggtagactgaacacccacacaatctcaatttgacacagcaacactttccacctctcttccttcccttggatcagataggaaatcctcactttacttttccaagacagaagagaagcaagcaacggattgagcaactagcgctagg

SEQ ID NO: 85670 - DNA, 1501 bp, Zea Mays
ccgacaacctgattgtgtggttattcttcatccagatagaaagtcatcggtcatactggaagctgatcgatcacaaatacctattgcatccttagttgattctacgatcccatggaaattagataaaagaatcaattattccatccctgcgaatgatcctatgcggctcgtatatctatttcgtaattcgatcacgaaaactgtgattcttgaacggaaaagaatcactgcaaagaacagaacacctcgttcccatttatcttcttgtacggagaagtccgccgctggaataataatccactccagagaagtttcttcttgggcggagttaggatctgaacttctccctgtagtggccaactacttgcaaatttatagcgaaggtgcagtaccgcagccacaagggggggcagcccaagtagttcaggggacgccaacgccagccccacaagaggcccccctaccctcaattgtgccaccttcttgttactcgctgaccgggtatgtggaggattgggttgcttgcaatccgactttcatgagtgatgctttaaatgagaatatgatgggtcggggctctttagttcactcctctggctttccagcagcttcaggtagcgggccctcccttaaccctgctgtggcctctaccccctcctcgtcgtttttccaaggggttggttctgctttggaggccgccgcggcaccggcggaacccggggaggaagttcagcagggggccattgaggctctaaatgtcgctgcgcttcccggtgttcctcaggatgagctgtttggagccatggagcaaaacctcgggacagcccgcccttcctcaggttccagcggccccgcctgcagctccaattcatcaagatattgagcctatgattctaagtgcaaaaagctcaatatacaacaacttaacaattttacgtgggtccatggacccaaaggaagcaacggaattaacggaaacaattttttataagaagagccaaatcctgcgggagctggagcgtttaaatggcccggttaatggcccaatactttggcaagatggctgggataccataccatccgaaacccccaaagcggtaaggagtatcagccgaatacgttggatatgatccggcgcagtttgcaaagatatgggctaaatagtgactactataaaaaattcttaaatgagagggttcataccatggaaaatgcaaaatccactaagttgaaacttgaggatcttacaatagccaaattggatgaattgaatcaagccaagctaattgtgggtcgatgggaacgaaatacgaataatataataaaaaaagaactacgttaccctgatttttcttctatgaagaaagtacgtaggcactcctcagcgaggacgcgggttttaaagtcggttctacacattcgagaagacacaccggctggatcagaattctatcggtcgcggagtcggcggacggctctgctccaacttcatcgaggtgag

SEQ ID NO: 85671 - DNA, 2461 bp, Zea Mays
taggattccgtttgttttgttttgaattgacatagataaatctttatcgcgttcccttaattctggaataggtggcgaaggctacttgttccttggcggactatatataaaggaaaggggttatttttcctttacggcaataagagttgattcccttgcttgtagtttttgatcgattccgtgtatttaacatatttaagagtggttaggagagagaatcaatgtttagtagtaggcccggttcaccaggttctaccactgttcggcccaatcatagtcaaaatctgagtttgatcctggctcagaaggaacgctagctatatgcttaacacatgcaagtcgaacgttgttttcggggagctgggcagaaggaaaagaggctcctagctaaagttgtctcgccctgcctgcagggcgcgcgcaacggctttgacctaacggcctccgtttgctggaatcggaatagttgagaacaaagtggcgaacgggtgcgtaacgctggggaatcttggacaatgggcgaaagcccgatccagcaatatcgcgtgagtgaagaagggcaatgccgcttgtaaagctctttcgtcgagtgcgcgatcatgacaggactcgaggaagaagccccggctaactccgtgccagcagccgcggtaagacggggggggcaagtgttcttcggaatgactgggcgtaaagggcacgtaggcggtgaatcgggttgaaagtgaaagtcgccaaaaagtggcggaatgctctcgaaaccaattcacttgagtgagacagaggagagtggaatttcgtgtgtaggggtgaaatccgtagatctacgaaggaacgccaaaagcgaaggcagctctctgggtccctaccgacgctggggtgcgaaagcatggggagcgaacaggattagataccctggtagtccatgccgtaaacgatgagtgttcgcccttggtctgtctacgctacgctacgcggatcaggggcccagctaacgcgtgaaacactccgcctggggagtacggtcgcaagaccgaaactcaaaggaattgacgggggcctgcacaagcggtggagcatgtggtttaattcgatacaacgcgcaaaaccttaccagcccttgacatatgaacaacaaaacctgtctttaacgggatggtacttactttcatacaggtgctgcatggctgtcgtcagctcgtgtcgtgagatgtttggtcaagtcctataacgagcgaaaccctcgttttgtgttgctgagacatgcgcctaaggagaaatagccgaggagccgagtgacgtgccagcgctactacttgattgagtgccagcacgtagctgtgctttccgcaagaatttcaccattgggagcctcgaagcactttcacgtgtgaaccgaagtcgtcttgccgaactcaagacccacggagacctacctatagtgacgtcaaagtaccagtgagcatggaggtttggttaggcttggttacgacgacgtcgagttggcggcggaggaagactcggcatgaaggccagccgcccggtggtgtggtacgtagtggtaatagtacgcgccccgctccgaaacaaagaaaaaggtgcgtgccgcactcacgagggactgccagtgagatactggaggaaggtggggatgacgtcaagtccgcatggcccttatgggctgggccacacacgtgctacaatggcaatgacaatgggaagcaaggctgtaaggcggagcgaatccggaaagattgcctcagttcggattgttctctgcaactcgggaacatgaagtagaaatcgctagtaatcgcggatcagcatgccgcggtgaatatgtacccgggccctgtacacaccgcccgtcacaccctgggaattggtttcgcccgaagcatcggaccaatgatcacccatgacttctgtgtaccactagtgccacaaaggcctttggtggtcttattggcgcataccacggtggggtcttcgactggggtgaagtcgtaacaaggtagccgtaggggaacctgtggctggattgaatccttcgcgatggtcgcctacttgactaaactaaggacctcaacggaagcttatgtagatcgactgaaaagacgattccattttccttcttgtttatcaatcaccaatcaagacaaaccgggcactacggtgagacgtgtttacacccgatcccattccgacctcgatatatatgtggaatcgtcttgcgccatatgtactgaaattgttcgggagacatggtcaaagcccgcccctaaaggggatttctttcagccaacatcctgcctgccttagtggcccctctctgataaggaaacgaaaaaaaaatgacaaatctggtcctttcaactgtctgtactaaattactttgtacgaatgcacatctcggccgtcgggtagctgctcaccatttaaaagtatatatccgttgttt

SEQ ID NO: 85672 - DNA, 1803 bp, Zea Mays
cgcgcatcttgttgttttgttcaggactagagcacttgaaaactatctacctacagggttcctcgggtctcttctcaggttccttgctgtactgaaacatctgctagcaaagtgcctggggagtttactgagtaaaattcatagttttttaaacgtgatatgcaaacatctcatattccatagttgagaataggggacttacgaatcgccattcagttaaaaccatggggaacttaagtttgaatccccaagccgtcaagaggtatgtgcccgttgacaggtactttagaattgcctagcctagcagtttccatacttgagaatacccaattcgttactcttcctttagattagaagagaactcacctattagtttagtccatcaagtgcaagtctgtatccgtgcaagcaagtatgatttcgagcatatcccgtctgttgaagcccgtgataagagtgtatgttcagaggaggtgagggaaaccgttgtcaaaagaatatgctccttaggccatgaatgctttcttgatattcggaacaaatgagtcacgactaatgaatgaggaacgtataatgaacgagtcacgtataattcatgagtaactactaacgagcgagtaacgactaatgttacgagcatattgacgaatagaaagacgaatataaccggtagttcctcattggattagcgaggggtacttgacttccagtaggaaccgtggaatgccttaggcactcgtatcgtatcattggactggcctaaaacgaaagatacagtgaagtctggactgggtgtgaactcctctatattcccaaagcaaggcttgtcccggataggagatacgctttcttggaattgttggggttgacttgggcttgggagaagcattttaagtgtgtaatatcggagttgatatgattgtctactcttgatgagattggactgcccgaagatcagaagaaagtgttagctgtatttcatttcatttccacagaatggtaagttcataggttgtagttcactggtttggttcgaaagaagaacgtatcgccaatagagcggtgtcgtcacctggataatagcattctttcattggactaaactaattagtgtcgccatgggaataataatctctttattcggaattcctggtcaataatgacccttcgggacagatgtgggctttttcgcaactgtacaggccatgccattctccagatagatccgagtagagacgatacgagagtagagttcattcatcttagtaatccgaggatgtccaatctttccctggaattcagtgtgaggtgagctaaagagatagatccccactcccataggaaatcccccccatgggggcgggagggattttctataggaacacttggggatggggagagacgcaccatgctttggtaaaggatagagagactaatttatattaccatagtatagtatagtatagtatagtagcggccgaggacttgcatctatttcaactagacgtgaatacggtctttctccacggcaacaacgaggaggaggagatccacatttagagggcgaggggttcgaaactcggggaggtcacatatggttgtggaagaagagcttgtacgggctccgaggtcaaagaaattcgacaagttcttggtcgatcgatacctttccatcccggggcagatctccagatccgatacgagtgtagatactttactcccttcttcctcagtgagtaacgtataatgttacgaacaaaggaagtgagtctagctccactccgagggacaagacggaaatct

SEQ ID NO: 85673 - DNA, 973 bp, Zea Mays
attagcgacatcaattctgctacagttttgttaaagaaaggtgaatacattctaaaaagtctaaaactcatcttatttcttaaagagcatataacaacaaacgatttcacttacaagggggtgcagctgcaggaactgggtgctgtgccgcccgctgcctacttaatgtttcgcttgccttctacacttctgcaatgggagtcaccacatgagatgctatttttcacctttcgctattattcgctcttgcgtgtctttggagcccgatctttcccttgcttacgcccctagaaactccgtgaaaaaaccacctcgtttttccataaataaaggattcctaataaagtttttacatatcatatcccagcggtatttttttaataatttttgcataaataaagtataatttccacaaaataacacttttaggcgcccacttgaaattcaacttaacgttggacgttgaccaggccctctctattgccagaattggggactggctcttctccacaactagaaaacacagaactgccagaggtttggtcataaccagcacgcaccctcgccaatttcgttctaagctcaatccaagattgtgatcgggttgcctttcgatataacttggttcaagcttggatccagtggatagatactttaaacgatggtaggaacgggagctaccctggatcacttgaggaagtaagaacgcaagtctctcagttgaaattagatcgttccaggataatagctgaagcggctgagaactcccaaagagaagagaaccagcttaaggagcaggtatccggagtatcagcaagctataaatagctttaggattgtatgaatagagttgaggatcaagtatccctcatatttagatcccccgttgggaaaagccccttttttaaatcctttcacgctttccctttgccgaaggccggcctctttagttcctacgttttcggaaaagaag

SEQ ID NO: 85674 - DNA, 1346 bp, Zea Mays
ggtgaagctctattcattcaaataagcaggttacttatgaaatatataaagtattatatactcaacataacacatacctatgatgccatgccttggtgggtaagcgggataccatggtggatggctgagagtatcctcacactcttatcgttagtatgtatacattctatacttcaatttaatcctcttatctataagggcaatcgatgtgatattatttataaggtgccggatattacattaataggaataaccaaccatataacaaaggaaccaattaaacagctacaatggctctattctctgacacctgataactatcctactaaatggatctatagactaagaaatctctttagttatgatgagaatattccatataggataggatttctaagaataaagtgttctttaggcttacggagtataaaaggcttagtattaagtgattctgtattatatcaatatgcccatttgggagctggcctcaaatctctcattccgcaatctagagtagccattttcatgcaagttgcaactcgtcattttgatgaaaggcatcgtaagtatctctacggtttctttaatatacttgtgtattctggcgtaggattagttgtttggtactatatcacaccacaccttatacctgatttaggattcttccgcggggtaaacctagattcttttaaggacccagcttcggttgttgatgggtacaagagggtttcgtacatatttacaaaagacgtcgttaagactgtgttaagaacttgtcgaaatgatactttttttcacaatttactaaatgaggaatcaatccaattttttgataacgaaattatcagcataaccgatttgaattcaaacagacaccttaatctagatcacttcgaggaggttgaagctaacaagctagatctagtagcgtgtattgcagtaggtattatgagtgctacctttatagctaccaatcttcttcctcctggtactactacgatagtccaatgaataaggagaaggtcgttatttgtcagtattgagcctgatagcataattcagtacccgtgatgatgggctctagcaaggaggaagggaagcatcctcttcaatagcttgaaatcaactacagagtgttgagtatcaaattacgtattctatttattcagaaatcgcacaggggaagctcctgaattcattagttgagtatgtgatctcatagtaagaagtgatcacaaacggtgatggatgccgagagtatgttgatggggtgaatctgtagaacaatactacagtagagattgggtagccccctcaactataaaataagcaaatcctgaaaggcg

SEQ ID NO: 85675 - DNA, 1388 bp, Zea Mays
cttaagtactaaagcagctggacccttcgttgattccccacgaaggaatcggaatatcgctacttccccttactgtcctaagcaggggagatggattaaaaaccttgtgtgaaggaaaggctgtaaatgtcgttgaccattaatccggttgaaggacaaatggaatggagagtaaaggaaaataaggtcattcttctgtctagcttctggtcggtgccccttctccaactccgccagccaagactctgttactcgagcaggaaagttttccgtgcgtcctgtgttctcccggttcttacgtctctcaagccggttcacttgcctggtcattactggactaccatacaagattctatactgagctgacctatcaaccagacggacttgaacaactgacctgtctgctattgttattgccgggctcaggcgccagggaagggatgatcagagaagtcaagtcttgccttgggtcagagttccagttctctcagaagaatctccgctttccaatccaggtttacggcttccatagcgtatgtcattggccattcttgcttcatagactgcggcaccattgatttatggcccagatcacgaaaaagagaaggcctcaaaaacgggatggagccaatgagtagagtaactagcggttagattcgtctttatgctcgttatacgtgaactaatctcatttgttacgaatcaaactgattgactccggtagaatgatccagcgaactcttccacactggcatcaatactactactcctcggtggcaggcagcatgcatattgcaattcattcacatctgccatccatctgtctctctcctcagctctacgccgccctgtcccttaaggaaaggaaactagactagaaatcagaagaaccaaaagagtgccgcagtattctcataagatcagatcaacgctcatatctcttgctcgaggttctatctcattccttgctgctagtgctagatagattcttttatttgaggatcgcattcctttcctcttgctcggtctagttgcagggtctagatcgcattcattcactaaagtttgctttttctactcacttctatgtgttcatctattgacctggcccgaggcaatattgagtagggctttcataggtgaactttccgaactagctttccaagttgtttcgttatcttgtgatgtgccggatctctcttgaatagctcggtttcttgccttccggtttcggttctaagttgctgcccattcatttcctacgaataaggagatatgtaaagccagtcattctatgaaagagaacttgaacttccatgaggcaagtagtttatcgaaggtatggagaagggcttcactcgcgccttggggactgaactagagtacag

SEQ ID NO: 85676 - DNA, 299 bp, Zea Mays
cttactttacttatcccttacattactttacctagtaactttgaaataggcatatcttgtctaccttccatataccctagcatttctactagttgttttcttgcatatatccaacctgaaataccattgcttcttgtaggtttttacttctactttcttgactataattacctatacttgccatcccgtctttctattccttttgaaagtaaacttgtgacccttcgaagctatgaaaagacctattatgtatagagcttgacatgccaactactatagctatagtaagtacttctagc

SEQ ID NO: 85677 - DNA, 810 bp, Zea Mays
agtaaatgtcaggataatgataatgacttacttaataatagggattacttgcctatactatactataatatgttcatttgtatgaatgggataagatccaaagaagtaagttcggatccgtttgtgaaagagtagaataagaaagatagtgaatcttgtttgaaccattaatgaaaaatagaggttggtacaatagtatagtatagttaggaagtaaaatgggctttttattggggatagagggacttgacttgaaccctcacgattttgaatagaaagtcgacggattttcctcttactataaatttcattgttgtcggtattgacatgtagaatgggattctctctttattctcgtcagacttgaacctaacgaagaaagaatgaggaagaaaaagatatcgtgatgtacgtctaaaaacggaaacttaagaacgcttttaccaaaccaagaaagcgtatcacttttcaattgattggatcatcataagatcgactgtgtttcacctcccaacccacaccgggttatgttcctcaattccaacaagggtataatcagccgccccggcacatcgaccggctcaacccatgacgagccaccttcaccaaagcagctacaacctccctattaaagtgacccccggacctataccatacccttttagaatctccgcaaattgccaattaccattcccaggctagaccgattaaagaaactaaattcatacccatcctctggtctaaagaagagttttttttactttacttaactttacattagagacctaattcaaggcgccgcatctcagc

SEQ ID NO: 85678 - DNA, 597 bp, Zea Mays
gaaaaaccgggctatcgccctatctaagcgggtttcccctctcctctacgggagtcctcttttagtctatttcagttcctgtgtctatcgctatcgccctattctctctcaattgcctatccttttcaaatgagggggagtaccttttctttagcttccaacatgaaagattgaccccctaaagtgccagatatgcaagtttgatgaaggactacttacttagctaagctaaagtgaacttctgactaaaaaaaaagtggactaaaagagaacaacaaaagagagatcactttcgacgattaaacagcacttttatatccagattggaactggacttgaaccttcatatccagatttcactccactttcactttcaatagtgaattattcactttcgctcatattcactttcactttggccaggccaagaaatacaaataagaccttgaactccctatttcacgtataatcgagagactcagaatatcagtgccttgggtaaatgcctaccaaagggagaagattaccgaacttttttctgtcctcttcgcttcctaaaatatttagggaaaaggcctagtcggccaccgcttgcta

SEQ ID NO: 85679 - DNA, 420 bp, Zea Mays
gagatcccattttttacgtttaccgttgtccccagacttcactctttcaacacttgtctactttcgaaatagtcaggcgggtccaagtgtgtgatccaccgattcactgagtgggtctttcttaccgcagttttccctatctcttaaagccctatcagacttccgatccatcccttgtttgccgattgaagaaagccttatatggtctcaaacaagcacccagagcgtcggtttgcaaaattcaagatggccatgctggtgaatgaagctggattcagacagagctcgtgtgatcattctttgtttgtttgttatacggcttatggtatggttatttttttggtctaagtttataacattaaaaaagcaggcattgttattgttaaagtgaaagtgaaatttaacatgggaattttcttt

SEQ ID NO: 85680 - DNA, 429 bp, Zea Mays
caaaccgcaaggtcaagatgttttctagcggccgtctagcgcatccgttttcttgcttggatgagttctggaagggatagagggattagggatattatcactgaattgagatatgcattccatccagaagtttcatttccgcttgaagaaagagtgggaacgtcggattaagcttccaaaagtgggctaattgaccatatttaatttaggaaggaaggcctgtgctcaaactagaggtttctccactccaatcaggatagcaagatatcgattatcccgagtgtatgtgacttcctgaatatccattccattgttagatgaattagctgggcttttgttcgagtcaagcagtgggtttggatgaagcgaatgttgttgctggcggtgtggtagaggtaggatattgtcctttatccccgggagatgatt

SEQ ID NO: 85681 - DNA, 751 bp, Zea Mays
atctactatactacttgactcacgagttgctcaaatcatctcttgattcggaatcacgggatcggtagatgtcacataacttgattagttagaaaatgattatgctatcggcttgatagaataaaaaatatgaataatacaagtgccggtcagctagcacctttggtgacatgctgttccccactagtcttcttcgtacatgcccatggggtcatccctaaggcctattcagcactgcacactgggtagcacgtaactagtggtcatgcttacttcagatgttctcagcccagctcagtctatcacttagacttctgatttcgtgctgtgttcaacaagctaggaacacaaaagaacgcttatcctcttagggtaggggccacattcttgcatactcttttggatttgacaacgtgagttctaaactgagcatagagcaaatatctcttgataaaagagaaatagcaaagggaaatgtgctagctgataactcctactatttcgcttcgcgcctctgcctcgttttcagtgagatatgcccatcatagagaatccaagactcctcacttgccttgccgcttcgcgcctgcctcgttgactgatctcgtacaatcacttgcattttcctatgtggaaaacttagcaactactctacccttcccttagagtagagtggaactcacagtgtagcgagccacccataatcggcttggaagtgttgcagctcgcatccatcagacctggaaatacg

SEQ ID NO: 85682 - DNA, 126 bp, Zea Mays
cgctaacaaagctataaatgctggaaagacactaaccagaggacaggtaaaaacacgtcccacttctttttctttaccagctttggcttgcccgtcacccctaacccattcacattaccaaggtta

SEQ ID NO: 85683 - DNA, 1893 bp, Zea Mays
aagctcatggtaagaagcaagctattcaagatctcattctactctggcacacccatcccggaggctgtatcccaccataagtctacaccacaaacagaaacaaacggacctgcactactttttttaaaagagcagcgccactaccttggctttccaatctgaaccgggtatggtatgcggatctaagatagagaaatcagggaaaccaagcggattacctactccatatttctaatgtgctctaaacccagaaaatgttgaaacagagttttatgagcaattctgggtctcttctcaagcggcggagctgttctcgcttccatatttcaactcatttccactcactcaactcagcgcaacccgattcaagctaaagcagctgttagacgttgagaatctttctcttccactgttcttgtcaagtcaaataagttaggcgagctttagagcaataaaatcaatgcacattctttagagtggagacaaccctccccccggataacgacgagacactagtaagcaccttttttcgaaactggataacgaaccgtcagaacgggccttatttacttatcatctgaaaaagatggtaagctcttacttaactcgagtcaatgccaaaacccgggaagcagcaagtgtcattctaagccaaaatgctgttttttacccgagaatctacacatgtgcaatacttgatggattgaaggaagtcagagggagagttccgtatagggggtggtgaaggggctcaacagtttcgaaccgtagtgatatcacgcctcggtcgcacacatctggcttttggggttcgggatcatagcgtgagctatggccaagtgcctccattcttcctccacgggatcaaggcgataaataccagcttctttcctccacgggattcgtacatcggatgaggattcctacaacggtagatgaattctagaaagggcaaaacctacgggtgcaccaggacgagtaccttctttttattgatccactggaatatctactaaaggaaatttgccatacacttgttctggttcctttcatcggcgttgtaagcgcgttcttattccgttttcttggatgttttagtcaaaaaataaattctttttctggaactcgcaatctggaggattcgaaccgtagtgagattatctagcaatctcgaaatatcgtatctactagtgccggggggaggaatcgaaatctatatgccctctcgggttcttccctttccaccagtcactcggaaatcatctctcatttacttatgatgccgacaagccacgaaaggaggaacttcacgattgaactgggctcgcctccacttctgggcttcaaccagctactcagcaagaattagcacaacagctagcacactttcgagttgcacttaccgtctctcatatccgtgaggaaggaacatgtgccactagaggctagaaatacttctcttgtcaattcaaggaatgagtcaaggcaataccatctcggaaggcgactcatatacagagaagtctgctcactcaggtctaatctcatctagatgatcggttattggaagccgttctacaaatccatgtccttggatctgaccttctctttagcttttggagtagtgactttccctttgctttcttcctgtaggcagtagtagaacgatactagaccctctatctccttccttaagtactagtatcccattcattccttcacagctgtttcaccagatctttgcttggaaatattcttaggttgaatggtttgggtggccatccatatatatcctatcatcactcctccagtaagtaggcaaggcatccgtactatccctatcctggttcctggctttgctttatccatcgagacagacaagtcaagttgttt

SEQ ID NO: 85684 - DNA, 666 bp, Zea Mays
aaaaaatcatagaatgctaacaaccagcttcttccagctttgtacatcatttattgtatcgtttatgggtgcttgtacatcataatatcctcttcatatctttcctttctcgagtgagtggtgggatggatgtcctaccacgaacggaagctgacagagcaatatctattcatatgcttcgtaatccttgatttcccaaagataagattccttgccaagccaagactcttgagtgggatatttcaactactttaaagcgaggaggtgaatgagcaagcaaaaggtaggctaggcggtctcgcccatcccatgattggtggacttcctgctatttcagagtaagcatcagcatctcttccatcttgttctgggccaagcaaaccaactatttagtccaggcactcgtattgaaatggaaaacatgcttctttctgctatcgaccaatccggatccgagaatgatctgccccatcgttattagtaaatgtggggtgtagtgctggaacctttagttctgtgggcgtacaaagcatgtggcttgtttgacttgacctatgggatgggggtaccaatcttcgttgcattcaggattgacctgaggaatgggccggagtatcagaatagatgtgcttcgtgcgactcgtttcgactagcatgaaatccgga

SEQ ID NO: 85685 - DNA, 3130 bp, Zea Mays
catccatattggatcaattctcgataccattttgcaatgaaattagaggaatgttatggtaaaacttcgtttaaaacgatgtggtagaaagcaacaagctatctatcgaatcgttgcaattgatgttcgatctcgaagagaaggaagagatcttcgaaaagtaggtttttatgatccgataaagaatcaaacttgtttaaatgttccagctattctctatttccttgaaaagggtgctcaacctacaagaacagtttatgatattttaaggaaggcagaattctttaaagataaagaaagaactttgagttaattgaagaactaaatgaataaaaaagtaggagagggtccttagtaccccttaattatttagacacaatttgcctctttcttagtcctattttttttttgctgcatttatgtcgtgccaatccaacaaaagtccctattttatttcctttttatatctaattacattgtatttgcattgacaaaggtctattgaacaaatagaatttgtagatagatgggtctctttattgtcactccatattaggtatttctgtctacacttcattcaaatgatagggttgcccctcttgcatgtactctcatacacatacaagattattttacttctttaaattgccaaaaaaatcacaattttgccattgtgattggggctgctttttttttttacccttagccttagtgaaatttaaccggatctgttcattttgtatttgagtgtttttaatggattagaaaatctttcttttgatgtcttgctaattcaatgtggtataatttcatcgatttttagattttgatcgtatctaagagatcctattttatccgggttgctaactcaatggtagagtagtcggcttttaagtaaggctatgatcttttacacatttggatgaagcaacaaattcgtccagactcttggtagagtctagaagaccacgactgatcctcaaaggtaatgaatggaaaaaatagcatgtcgtaataaaatcaatttcttttttttttttgaataaaaaaaattctgattttctgggtctagtgaataaatggatagagcctggctctaattctggtaaaataaaaaaaaagcaacgagcttaacttcttaattggttaattggaaggattccccgatctaattagacgttaaaaatagattagtgcctaatgtggggaaaggttaggttttcctatgaatggacccttttactttttttttttaggaaatcctaattattcttgattatgggattgaaaagagatgttatgaattgaatgtgtaaaagaaacagtatattgataaagagactgtattccaaagtcaaaagagcgattggcctgcaaaaataaaagatttgttcttgtttgttttataattagaacaaacataaactaattagatagaaaaggagtggaaaaagttctatggattagactccctcttctctcctgggtttgtattatgcaacaccttgttctgaccatattgcactatgtatcatcatttgataaaccgagaaatggctttttttctctatttcaagtagaaatacaaatggaaaaattcgaagggtattcagaaaaacagaaatctcgtcaacactacttcgtctacccacttctctttcaggaatatatttatgcatttgctcatgattatggattaaatggttccgaacccgtggaaatttttggttgtaataacaagaaatttagttcactacttgtgaaccgtttaattatccgaatgtatcagcagaattttttaattaattcggttaattatcctaaccaagatcgattgttggatcaccgtaattatttttattctgagttttattctcagattctatctgaggggtttgcgatcgttgtagaaatcccactctcgctagggcaactatcttgtccggaagaaaaagaaataccaaattttcaaaatttacaatctattcattcaatatttccctttttagaagacaaatttttgcatttacattatctatcacatataaaaataccctatcctatccatttagaaatcctggttcaactccttgaataccggagtcaagatgttccctctttgcatttattgcgattctttctctactattattcgaattggaatagttttattacttcaatgaaatccatttttcttttgaaaaaagaaaataaaagactatttcgattcctatataactcttatgtatcagaatatgaatttttcttgttgtttcttcataaacaatcttcttgcttacgattaacatcttctggaacctttctggaacgaatcatcttttctgggaagatggaacattttggtgtaatgtacccggggttttttcggaaaaccatatggttctttatggatcctcttatgcattatgttcgatatcaaggaaaggcaattcttgcatcaaaaggcactcttcttttgaagaagaaatggaaatcttaccttgtcaatttctcgcaatattttttctctttttggactcaaccacaaaggattcgtctaaaccaattaacaaactcttgcttcgattttctggggtacctttcaagtgtaccaataaatactttgttagtaaggaatcaaatgctggagaattcttttctaatagatactcgaatgaaaaaattcgataccacagtccttgcaactccccttgtcggatccttatcaaaagctcaattttgtactggatcggggcatcctattagtaaacccgtttggactgatttatcagattgggatattcttgatcgttttggtcggatatgtagaaatatttttcattatcatagtggatcttcgaaaaaacagactttgtatcgactaaaatatatacttcgactttcatgtgctagaactttagctcgtaaacataaaagtacggtacgaacttttatgcaacgattgggttcggtatttttagaagaattttttacggaagaagagcaagttttttctttgatgttcaccaaaacaattcacttttctttccatggatcacacagtgagtgtatttggtatttggatattatccgtatcaatgacctggtgaatcctcttactcttaattaa

SEQ ID NO: 85686 - DNA, 157 bp, Zea Mays
gtaagtaaaaaaaaaaaaaattaatgaggtaaaacactgtatagaaaatgagacctatccctttatgatagagatagatttttgttgtattatttgttttcttgtattattagtaaaaaagaagcgtccttcttttctttggttaagcgaaaacgat

SEQ ID NO: 85687 - DNA, 2378 bp, Zea Mays
aaaactttcgagttcaaaactttttcatttttcttaaaaagttttggacggatttgttgaaacgattttcaacaggtaccccttggaaatggggtacttgactattctacaaggattatagtggatttggaacaaactatgttggagttttatcaacaattttattctaaaaaaaagggttgggagtcgaatttatactgcagagtatcaaaattatactactgcctgtccaacaaaaaataaaaagcatatcctacatacctaactcctccaggttcagggttttccgtttccgaacactaggaaaagggaggattctagattttcgatcctagggttaaaaggaaggggatagatacccaatatgattcttaggaggaacgtttggtaatggttctctatgctcttttttatgtgttcttagttctattcatcttctttgattcttttaaacaagaatctaataaactagaattgagcggaaaagaagagaggaaattaggaaatggagaggatcgactaaccagcgattcgtatctgcttttctttttaagttattactctttgttgcttctctcaagcgatagacgaagtctatgaaaaattttggaaagtcatctcactccttccctatggctcgcacttcatgatacgtggaggaagaaaacatctttcgcaatttctttgttcaattctgaacaaaaaagaaaaggaagaaagggatttatggggactgtactgcctttatatctcttagtatatattgtaggaataattaaacgattccttacaacagtctggcacatttacgtcctcacaaataatgatccttgtagtcataaccgtagaatagatcctaatcgaaatgcatacatttggttcatacgctattggtatggtaagaagagatgtattttacagactagagaggggctatctaaatcctaaagtaaaggtccgcgattgaagtaccaaccgcccaccgccatgaactttctcctttgattcgataaggtggaattagcctccttctcgaatggctacccttgacaaagggtagcattggtatcataatctacatgtagcgggtatagtttagtggtaaaagtgtgattcgttctattaataactgaatttgaaatgatatacttaaggcatccttaagtttttttatattcatattccgatgaaaactttagttcttataaaggatttaatccttttcctctcaatagcatattgaggaagaatatacattctcccgattagtatccaaagactaattgaatttgcatctaaaatacaaattcgattatgagtacgtagtcgcgaacgataattttgcattggattaagtattccgataagtattccgattgaataaatatgagtaaaggatctatggatgaagatacaaaaaaggttatttccaatcgtaactaaatcttcttttgttttgtaggaaatggaagcccaatagctaaaaaacgatggttttggtttactagaaccatcagtatattatattgtttcagctcggtggaaacccaactcttttcctcaggatctcttgaatgaaattagggaacgaagtaagtagattagatagatatttaggagaatttctatctcctattctatagggatcatctagaaagcggagagctttggttccattcagacagaaaagctgacatagatgttaagtggtgagaatatccataaaggagccgaatgaaatcaaaatttcatgttcggttttgaattagagacgtcaaaaataatcaaccaacgtcgactataacccctagccttccaagctaacgatgcgggttcgattcccgctacccgctccattctgtataaaaagactattccatttgtttgtctagacatggtagagacttgtattccacctttttctttcgtccaccagttttcggccctacagagcggagtagagcagtttggtagctcacgaggctcataaccttgaggtcacgggttcgattcccgtctccgcacttagcagtccgtataaatggactattctatttgtatatatatgatagagggctatatccaaccctttttttttatttagcaggcagaaaaaaaaaaaaaaaaaatgaaagaaaagcatagcctatccccctttcaaaaccgtttgtctcttgtttgtctcggcgaatccccggtttagggaactttcttagaaagttggatttgcaccctcgaagcactctttttttttgagtcgggtgcaaaggaaggataagataggaaggggtacagtactagactaacaactacttaatttaatattcatttaatattaaatagtaatttaatagaagtagttaagtagtcatttacta

SEQ ID NO: 85688 - DNA, 534 bp, Zea Mays
gtgcttttctcccctatgctgcctattggtactagtagagtcggattgccctgtaatacagaacctatcctgtaggtgtaacctttcgctcaatactcaaatctacaattgaagcatctgaggccacatcaatcgaggatacacgacagaaggaattgttagttcacctcaccttccccaagcgcgggtttcctttactaattttgttctctctatgcgaaccctctctctttctcgtaagaatgagatataggtagggctaaaaaaaaaaagagtcaaatcgcaccatctctataataagtaaatgcccttttttccccggaggttgtcggaattatttgcaataaaatattggctacaatcgaggaggtcttatcaatgaaatttccatttatacgggatctaggcataattcccaacccattctatatagaattcttttcattctatcacaaaataacataaaaacaaaacattcgattcttataaatcgatccatatgctctaaatggataagagagatatggattttcc

SEQ ID NO: 85689 - DNA, 2804 bp, Zea Mays
attccaaagccaaagattgcatcagttctgctgctatttcctcctatcattctttctgatgttgaaaatgatattaagcctaggattcgtgaatgggagaaggctggcattgaacaagactatgttagtaggatgttgttgaagtatccatggattctttcaacgagtgtgatagagaactacagtcaaatgctgttgtttttcaaccaaaaaaggatttccagtacagtcctcgctattgctgtgaaaagttggcctcatattcttggctcctcttcaaaaagaatgaattcagttttggagctgtttcatgttctgggcatcagtaaaaaaatggtggttccagtcattacatcaagtccacagttattactgagaaaacctgatcagtttatgcagaatgttttgtttttcagagaaatgggtgttgataagaaaacaacaggaaaaattctgtgtcgttcgcctgaaatatttgcttcaaacgtggataacaccctcaagaagaaaatcgattttcttaccaactttggtgtttctaaacatcatcttcctcgcatcattcggaagtatccagaacttttattgttggacataaattgtacattgctccctaggatgaactacttattggagatgggtttgtctaagaaagatctgtgctcaatgatctttagattttccccacttctaggttacagtattgaacttgttatgaaaccaaagcttgagtttctgctaagaaccatgaagaagccacttaaagcagttgtagaatacccaaggtacttcagttattcactcgaggggaagatcaaaccgcggttctgggtattgcagagtagaaacatagactgcactctgacagagatgttagcaaagaacgatgaactctttgctgaagagtacttgggacttggaggattgctcgagaaacctctacaatcaagcataggcagttaatttctggacttataagattgaaccatgcagtgcactatgccgaagctgtacagctttatgcttggattggtgaggctgtttttcagatgggaggtcacttttttttgaaaacggaggtgagttgtgtttctttgtattcaaatgccgcagctctgataaccactcttttctggaccaataaatggctgcttggttcctctataggagatgtgtcgctggctgttcttgctatggtacccgcaaaaataattaaaacaaggactgtggctgacgcactctcaaacaacagttgggtttcagatattaaaggaggactgtccatgattggtctgttcgaaattttcagctatgggacaccacacatggagtttctttaaccactgacaatgatcgccatatctggagattctctggttggggtgaattctcgtcgaaatcggcctacagagtcttcttccatggtttggtctcctttgatccttggaagcgtatttggaaaacttggactccacctaattgcaagattttcttttggatacctgtccgaaatcgctgttggactgcggaccgattggctcggagaggactggcacacctagtccattgaattctttgcgaccaggaagaggagaatattaatcacaatttgttttcctatgttttcttgagggaattctggtttagagttttctcctggctggtgtatgttgaccgtgtgccggggtcccaggagcaatcgcttgcagattggtggtgaaaggcttgcaaacatctcccaaaagaaaaaaagggaagggcatgaattcgatgattatgttgggagcttggatcctatggaagcatcgcaatgcctgcgtcttcgaaggtttgcagctgagtatgtggaatgttctgcatgctctcgaagatgaacagcatctctggtgtctcgccggagtgcaaggactgcagagtttaggcctgggctccctgagcggttaggtggcatttcctggtctggtctcaccatttctatttgctgtaagagttttgttcttgtaagcacagcccctcacggctcgggctcggtccggaatgaggggtaaaacttgtacgggaggccacttttctggtgcttagtattaaaaaggtaatacttgttctcatgaaagtgacctaacaaaagttataggtacaaatatagactggagtgatgttgttaactcaataccaaaacagcaaagcattgggttttgagaatacttcattcaaggtgatgaagaaattagttttcgccatgtgaagtctttcaatctcagttgtatgctaatttcgttaccatattgttcttacaggtttaagaagaaattgcaaagatgcggtttcaaactaggaaacggagtgaaggatgccccacacctttgagtggatgcgcgcaggaaccaatgcaagctgtagtaaggccttgaagtataaggcaacccaagtctgccatcatctctttctcgttgaactgaagcctgtccatgcctccatggcccagtccagcatcatcgccaatcagagctgagggcagccgcagagccagcggtagctagtcggctagtccattgactggccggtgcaggggtcacggactcacggttctgcatttcatattttcgtttaggtgtcgtttggatccgtttattttggaggaattagaatctatttaatagagtaggctatttagcttggaatttgacattccaccactttacaatgttaaaaaataagttatctcaaatttatagaatggaattgactttatgtatcttcaaactacgtttctactctacaatttataacatgtttttttggct

SEQ ID NO: 85690 - DNA, 1066 bp, Zea Mays
cacaatttgttttcctatgttttcttgagggaattctggtttagagttttctcctggctggtgtatgttgaccgtgtgccggggtcccaggagcaatcgcttgcagattggtggtgaaaggcttgcaaacatctcccaaaagaaaaaaagggaagggcatgaattcgatgattatgttgggagcttggatcctatggaagcatcgcaatgcctgcgtcttcgaaggtttgcagctgagtatgtggaatgttctgcatgctctcgaagatgaacagcatctctggtgtctcgccggagtgcaaggactgcagagtttaggcctgggctccctgagcggttaggtggcatttcctggtctggtctcaccatttctatttgctgtaagagttttgttcttgtaagcacagcccctcacggctcgggctcggtccggaatgaggggtaaaacttgtacgggaggccacttttctggtgcttagtattaaaaaggtaatacttgttctcatgaaagtgacctaacaaaagttataggtacaaatatagactggagtgatgttgttaactcaataccaaaacagcaaagcattgggttttgagaatacttcattcaaggtttaagaagaaattgcaaagatgcggtttcaaactaggaaacggagtgaaggatgccccacacctttgagtggatgcgcgcaggaaccaatgcaagctgtagtaaggccttgaagtataaggcaacccaagtctgccatcatctctttctcgttgaactgaagcctgtccatgcctccatggcccagtccagcatcatcgccaatcagagctgagggcagccgcagagccagcggtagctagtcggctagtccattgactggccggtgcaggggtcacggactcacggttctgcatttcatattttcgtttaggtgtcgtttggatccgtttattttggaggaattagaatctatttaatagagtaggctatttagcttggaatttgacattccaccactttacaatgttaaaaaataagttatctcaaatttatagaatggaattgacttta

SEQ ID NO: 85691 - DNA, 279 bp, Zea Mays
atgaaatttgtcgatgacagtacttctagtaaaaggcagaagaaagcgctccagtatgatactgatgaggatgaatccatgaagtctgacagtgaggaaaacagagatgaagattcagatgaagctgctgacaaacaagaaggcaaaaaggtgacaaaaggtaaaggagaatcagctgaagcagttcttcccagcaaggacgatctgaggaagattactaaaatcctcaagaaagttgacttcaacacggctttaaattaccgtctttggcaggcataa

SEQ ID NO: 85692 - DNA, 362 bp, Zea Mays
cagggaagaagttatcagaggtaaaagaatcttcaggtaaaaagaagtcaaacacagtgagtggccacaaatcaggtcctccaaagaaaattatcaaaagtccggtaaaaaaagtatcatccaagattcacgaggaaaaagaaagccccaatgatagtgccaaggttttttcgagaaagaagaaacccacagcagaaaaggagatcaaagagaaaaagtcgtcaggcaaaaaggtgacaaaaggtaaaggagaatcagctgaagcagttcttcccagcaaggacgatctgaggaagattactaaaatcctcaagaaagttgacttcaacacggctttaaattaccgtctttggcaggcataa

SEQ ID NO: 85693 - DNA, 419 bp, Zea Mays
ataccagatttggttgccgagactcgcggacaggggatggagggcactagcggcggtggaggcgagatctacaggtcggcgttggcgcttcacttcaatctggtcggccttcactgtaggtactggtggggaagtcgaggacggtgtcgatgcttaaggccgcagctcggttccgcccgagcgctacgcctaggcaaggaggatgacgcgcggtagatccaggatgacagcgtaccagcagagcaggacctagctgttagctactggctaccctaacagaggaataggaaggagattggaagaacgaagaagactttttttttgaaacacagactcatagagactgttaaacaacatctccaggcagatcgccggagactaaattggaaacaaaggcggggacttggctcatgaaaaca

SEQ ID NO: 85694 - DNA, 584 bp, Zea Mays
atagtttatacagaataagtgttggacagctgacaggctgcaaaaaagaggtcttccccatccggaagcatgccctttatgtgatcaagagcaagaaacagttcagcatctgatgactggttgtgtcttcgccaggcagttttggcatagcatcctctccccctttggtatgggccacttaactccaggaccagaagatactaattttgcagattggtggggactagtgaccattcaggtgcacagaagcaagagaaagggagtcaacagtgccattattttgggagcatggtgcctttggttgcatagaaacagagttattttcgatggagagttaccaaccattggcaaggtgcatagaagtttcatcgacgagctatccttatgggtgctggctggtgccaaacacctcggaagccttgggcttgctgctgctctaggcgcagcaggcccgacctaattttttccttggtcgtctttttgtatcctagtcctatggatagttttatttatgcttgttgctggccaccatagggtggttttttgtactggtcctcttggaccttaatttccccttcttaata

SEQ ID NO: 85695 - DNA, 1087 bp, Zea Mays
gcgctaggggtagccttcggctaccctgcctcctcgttcggccccgacgctagccccagcatctcctcccgtgacgcctccctcgatctcctgtcccgttccccagccatctccaatcatggatcctgcgatggagatccccatgtcaccgccaacgccgagatccatcggccagacgcagaccgtagccccgacctccctccatcgccaagcgttgcgttcagcgtcgccccatctgtcctcgcccatggctggcatgggggtttgattcccagcgtacgactccagcccgacgtggtacctcgaccctgcctgagatgtggtgaaggatccattcacctgtttgttttattttgactgaggtattgccaggatggattcaacggggtagttctgaattcgtttgatctcaagctatttcgttcgcctgtttgttttatttcgttcgatctcaagctattcggacggtgctcgatctgaattcccaagtacaggagcgtcaaacgattcactcccaccgaatttgttttgtgtcctcgtagacctgtgcataaattgtagtaccccatttcgacggcagtcaccattctccacaccttgtcgtctgcataagccggacgattgttgggtggtgggaatggaaccgcgagaagcatagaagacatttgatcgtcggcgcgtctatgcgatagtcctgccattgcaaacatactacagatgattaactgacaaggtgatgatgaacgagcagcggccatggaggcaacataggacagggctcggcgacagcgactttctcttctggcatggttccgctgagatgaagtggttcaatggcttggtgttcatctacatttattataccattttttgcaagctatgtggagagccaaattgtacagcaaatgtgaagaaatatatgatcggtccttcaaaacctatgagtattacaatgaagagaatttgtgactgcgaacatatctttttatgctctgtcaacgaaaggagtttgcctctagctagtgctttccaacggtgtaaaaccattgtaggatgagtataaatatttccagttttaagtgtaaaa

SEQ ID NO: 85696 - DNA, 297 bp, Zea Mays
atgcaggggtccattgatttaagaaccagccgatttaagaaccagacatgtgttatgaaggaaccaaagcagttattctttgtagcgcatggattttctctacttttcaaaacaaaattatatatcagctaccctgaagacaataagaatagacatctgccagcagacatgtacttcgacttgcgtcacgtgccacctgaattaactatgtatcaattccctgaatatacaaaagggtgcagtgcaattaagagatttgtttgccagcttatgtataatagcgttcagtgggtttga

SEQ ID NO: 85697 - DNA, 690 bp, Zea Mays
atggtgagttgcataattgatcgaacaactgacctgcagttaggcccgctgctccatccgccgcaggaatgctccctccatccacggttccatcttctgcagagatgggagggctgtagcagaagatgtcgactgagctacagccgatacacagctgaaaatggcggcggcgccacgccggagatggacaccagcggcgtcgtttctgcaggggatttagaactgagaagcgagatcaagatccaatcgaagagtatctcacctttgagttggctccagtgctgctgcttcggcctccctcatggcggcgcgcaccgtgtcccacatggccgacatggacaacgtgatggtctgcgctgctgcctcccccgctcccgccgtaggccgcttcagccccatcgccggcgccgtggagggtcagcgtggctaggggttgctgcttccgtttccggcgaggcgcgggtggcttcttcaccacgaagcgaatcgttgtgggggcgagtggatcgttgggggcgaggcggcggcgagggcgtcgcgagacgatggggaagggggattggagcggacggatctgcgcgtacgtgtggtagggcaatggtgaatcgaaaggatgggggcgtgggggaaaacgtgggttgggtgaccggggcggattggagcggacggatctgcgcgtacgtgtgctag

SEQ ID NO: 85698 - DNA, 351 bp, Zea Mays
atggctaaatcttcttccctcccagattcaagaaccatatgcaacgaacgggcacaaacagctcctgcaaccagtgccaaaagtaccactgctgcccctcaaaagcctttgtacaagtttttaatatatggcaggactggatggattggtggcctccttggtaagatttgtgacaagcaagggataccatataagtatgggaaaggatgtttggaggagcgctttgagctgttggaggagatcagaaaggtgaagccaactcaagtttgtaatgctgccggagtaactgggagaccaaatgatgacttgtgtgagacccataaacaggacacgtattggtccttatcttaa

SEQ ID NO: 85699 - DNA, 216 bp, Zea Mays
aaggatggaaaggagcaaccttctaccaggagtacaggagagaatgcatccttatctggtcgttgttgttggatcatgtctaccctgacttgaggatcgcagggaaggagccttttggacccgtcttgcctgtgatcaggattaactcagtcgaggattgcccatcgcgaccaccactccacccaccgcaattgcagcaacctgaaaacacaattt

SEQ ID NO: 85700 - DNA, 328 bp, Zea Mays
atattatatgtccctgttgcaacgcatgggcactcacctattgagaacaatgaaggcaaaagcatcaggtatcttgctgccaggaacgccgtcagggagaatagcagatggagttgctgacgagggggtctctctgtcgtcgatgttccgcacggcctcttgcccttctctatcttccgccgccaggaagaagcgagggagaaacaaccccaaacgtacgcacggcgaaccgaaaccatttctccagaatatatgaggtatttcaagattgaataccaagattgccaaagcagtatatgaggtattccaaaacaaaaacaaaaatata

SEQ ID NO: 85701 - DNA, 2395 bp, Zea Mays
atgaggacctccttcccttttgctctgcccactctccgttcacacggttatcaaagcggacgaagggtgggcagcaggtaccacgagccctctgtcccacacatctatcaagaagcaagtgtagttcaccggttccaccgaatgctcctatctctcggcaaagatcgtgtgagtgtgcagttatgcttcggatgcttcgccatggaatagatcgactatgttccccttcttttccggtgcactcgctttatatctccgacacacaaggaaggacatggtgggaagaaagcagccctagcctctgtccggtcgatcattccgctggcatcttgcattcacgcctccgtttgactgccgctcgggaatgtagttgtagatacgtgagtcttagtgggtcgttggctccacctcttatctccttctacgacatgttgtagtcgtcgccatattcaatatgtcacttagtcatatctgcctcgcagcgggtcagcacccccgaaagaaagggagggaggacttcattcagtgactccgcgatcgccctctgaacgatcaaaataaggtaaagcttgaagataagttttgtactcgattaatttctcagtccctctagtcgggtgggcgccggccggccggatccccctgaaaaccgtacgtgcgggtctccccgcatgcggctcacgccatttgaggtggcccagcattcattcgcaaatcctgtagtgaaattgagaccgctcgaccagcaagaggatgcgccgcaactagcgctagttgctcaatcccttgcttgttcagaagctaattcgcgtgtaggcagcgctgtctgtctaccgttgactgtatctattcattgatacattggcccgctcccccttctttttccaagaatgaatgagctgctcggaccttccatttccgtcaaatgacccggcttcccctggctcttccaccgtccgggctccctttcctccctatgctcccccggcgcaggcccaccacgcttcgcgcctgcggtgttttcgccagacggtctttgccagtagtgccatcctccccgcaggctgtctgtatgggtgggttgtcccttgctgctacgttctgttaggcgctatgtgaaaggaaattaagtggttgacttggacagcaggcgggttacacgttccactgtgccgagatgtgaggtgcaggtggtgatgatcaccccggggtatgcgctagcgcccttgacgggcactccaggacccgcctacgctcgcccaggtcggtcctccgaccagatgtgtggataacgaggccaccttcacaaccttctcccttctatctttatccaaagtcaggtagagtggttcgcttgagttgctcaaccgtccctttgcccggtgctcatgacgcgctactccaccgtgctagcggcataggagcctactcagcgtcagcggcttcgtgccgcactggagtgatccaatatgtggttccgcacgttccaccacttctccgttcatttccaatactgatcgtgaaacaccatgagcagctggatgttgaggtccggaattcgaagtgaaattcttgatttgcccgttcctagtcgtcatgggaaagaaataagaaagagattattcccctagagcttgtccagtaccacctgtactcaaaatgcatctccgcgcgtctacctggcgcttttattagccgccttgcatgcaagcgaagcgctattggcgacaattaatagctcactgagcgatgattgatgcagtcagtcagtgccctcgattattcctgatagaaggatcatggcgccccggaagcattccatccagcagcagcatctccttcaaccacgcgaggacaaaactgatgttagctacattcgagcgttcaccgcacagaggcgatctcgaacactacctatgataataaatccaaaggaaaggtcgataaaatgattcaatctgactttatcggtattctggattgagtaaaaaagggatatatgaagttcaaggccttgccaaaaccgtcatggccctattatgtataggccgtactaagccaatagcgaataacaaactctttcctgctccctcgaccttaattcactcccatcctgccaagcctcagctgccagcgcattgtatctaagcacactgtggcaaattgatacaagtagctaaagatctcgcatccgacatctccggccgaacggttaggcaacactagggcgcctgggtcaaaattccgtttaccaaacaagatgtcgagaggcgaactctgtaattcccctcctgcaaaagtgatagcggctgtagcatccgtgtggaagagggtaagctttcggcaacacctttttcagattggaaaggatgaatacttgtgttgggtcctgcag

SEQ ID NO: 85702 - DNA, 839 bp, Zea Mays
ctgctccaggattcgaaaggtggccttcagatttataacctacaaaggacctggatgtgctgccaccatgatggccaccacaaaggaggccaagttgatgagtggactgctgaggaacagatgtagggaaaataatggtccattttcaaggagtgtctttatcaggaaatggacctttgcagctatgttcagaatatgtgaggaatgttctcctgtggaagagtctacagggggctacactgctactaaattgatacttgatggatctgatgacaagaatccttgtgataaggaactagttaataaggacaacctgctgcagaggaacaagataaatcaaaaataccaaggactgttcaaaggaaaaacaactaaatgccgacaccctgtacaaaagcaagaaccaggagatggagggctctttgaaggagaatgtagtagaacaagtcaacacgaagttaatggatcataagaagcgtagaaccaagcttgaacactattcctccttagggtttgatgaaacaacattgctgctcaataaagaaaaggagcaaggcaaaacacacacaagggttagtggaaaagcagatggcaatgaagcaaagtcagcagaacttgtgagccttggtaacgaaaaggagcaacgaagaaatcacacgaaagttagtggaaaactggataatacggcaaagtccgcgagagtttcggctacctgcgttgcgtactttgtgtcttatgatggctttgcctggttgaacttttatgaaatgcttgtcttggtgagcttcatgcgacttatattatgcccttctattgttgaattctaaatgctttctgcc

SEQ ID NO: 85703 - DNA, 1578 bp, Zea Mays
atgtacaacaaacaacttgtgttcaacaatcgatttagagcagcaagtaaaggatcatcaaggcccacgatttgttcaatggactggaaacttaatataggagaatttgatgcaatggtggctttttcttcctgtgagcttatgcgagtgtttgggtgtaagggggagaagtggaaaatgctgatgaacaaaaaaccttctagtttgagaaaaataaatgccttgaagtggtgtcctgatgatcgttcacgcatagcagtcgctgccggcgatgggcaccttgtgaccattgacttcttagattttaaaggtcgacactttaaaagagtcgagaggtttgaggtaccccaagcaggtagtgtttcctgcatatcatggagctgttgtggtaaatacttaatggcagccataaaacgagatgctcgacatcctgatgctcgaatggtccatatttctctggatacaccgtttgaggtgctttattttcgctggagctatgtgcatgcacataataaaagtggacctgtgaaatgtgtttcatggattccaagaaaaccttcaatgttggcagtagctggtaatgacggggtagtcattgtgtgggaactggtggatgctgattttgataaccctcacaatcgaaattacatgaaagaaatcaattacttctaccccggacgtagaagctctgtaggagatgaagttttatgctatgatgtggcttcaatcgaatcaatcccagactttggtagcacctcaagtttcaaaagtgaggacacatctgatgttgatgttgatgatgatcgtgatgaggtggaggatgagcaagacgaggagcaggaccagactgatgctacatcaactgcagtacggttgaaagttcaacatgttctagagaagcaggtggatcttgaatcaacagtatctgaagtgtttaacaatgttcaagatgttttagaaaaattgagagctctagaagaaattgctgatgggcatgatgataagttatttgaattggttggatcccatacagaagctaaggagaagcaggaagaaattgaagaatcagtgggagaggttatgctgaaactgcaggacctcgaaaaagtgattgagaacactaaaactgaactaacttctatggttcaacttattcttcctagattagctacactggagggagaagtgaagctacataaggctgaagtgatagcagcatttcaaggagttattcagaaaccagtggagcaggaagagatgacaaagaaggagaagtttgaattggtttccaaaattcaggagatgcttcaatgtcacaaagttgatgtttttgccaaacagaataagatggaagcatcattcttagctcactgtcagaagctggacactacattcgttcataagcaaaatagtttggaacagaatctcatccgacagatgaagcaattggaggagtctatgcaatcaaggcttcacctaatagaggaggaaaacctaaaaaagcacaatgagatgactgaaaagtttgacacaatgatagggcttctgcagaagttatctgacacctcatcccagtaa

SEQ ID NO: 85704 - DNA, 1575 bp, Zea Mays
caacttccacgtactcctctccctagaaaaatcctgccgccctccccttgtctaatttttttcagccggcgttatctccctgctcggcagcccttccctgtgcttgttcttcatgccgcgtgctcctcaaattcccagctccggctcatcttccaccaacgcgcgctgctccagcctttagctccctggtcgccgcgcagaggagctccctcagctcgttcctcctgtgtcgcgccccagcccctggttcggctctgctcctccctgtgcccatctcccatggcggctctctctgtccggccaccggcgcctttgttttcctctctcctctacgctgtcgctgtttccttgtgcagcgccggttgtcctcgcgctcggctcccagctcgcccagctttggtggtcgtcgtctccacctcgacctgagcatcgccgtggagtccctgcttcttcggctggccgcggcgctctctcccgggcgcgctcgtctgcccctgctccactgcgccgagcagttcccagccgagctcctatccagccatgctgcgccctccctactccctcctgcaactcggtgcctctcccagctcgctggtcgtcgagtccttctccctagcgcatggatcaagttgttgcccccagccatgtcttcatctccctcaactgacactttctgctcggccacatgccatggagctcgccctgcccctgtttccatgaccggcgtccccaagctcctcccatgtgcgtcgcgattttccctggcacagctcgctcactgttcgccgcacgctctgggatcctccctgcaccgcgccatggcaaccgttggaccggtcgttccctgcgcgccaacttccctgtgcgcgcctctgttcctcgtcgtggtggggtcgtggtgtggcaacgtcgtgtgcattgcgacagccgtcctgaccgcaaagcagtccgcgcaataaagttcgcccggtcgcgacctctctttgctctctgcgtcgttgttcgccgggtcaagcctcatgttgtcacgtcctgttttctgcttgacagtgcgccctctcggctcgctcggctttaattcccaatcacgtcgtcgaacgacacgaccttatcattcgtcgtcacgtcgttcgccgtcaagcctcactgccattcatgttgtgcctcgcttccgatgtgttcgattaaatgacggaccaagaatccaagacgtcgctcctccttgctatgaaatcctcacgctcaccattctctattcgatctcgtcgtcaagctgaaggccgtcgtcgttcaggcaactaccaaatcgagttgtgatgtggtgagccgattcgctatttttactctcggttttctgatcgtaaaataagacgctttgtatacgtatacgattaagttagaaataccagtaatgcgaggtgtgcgcttggtaattatggctcaatctgttattatgtcgttaggttgtgtgatgttatggggtcgatgatagaagtggaattctagctgttgagcgatgacgggaaggacattgttcaatcgcatgcttaatgtttgatggatagtccgaacggg

SEQ ID NO: 85705 - DNA, 1095 bp, Zea Mays
atgtgcaggtgtagctcccttccgtccttgtccctgccatccccgatcccagcgcctacaagcagacgcctaggcatcttctccagcaacgccaaccctattctggtgcaggagatctcgtgctaccttgggctggagctaaggcagatcaagatcgagcggttcgtggacggcgggatctacgtacagctggaagagagcgtgcacggctgcgacgtgttccaggtgcagcccacctgccctccctccaacgagaacctcatggagctcctcatcatgatcgatgcctgccgaagggcctccgccaagaacatcaacgctggcatcccctacttcggctacgccagggccgataagaaggtgcagggggcgcggctccatcgccgccaagctggtggccaacctcatcatggaggtcggcgcccaccgcgtgctggcctgcgaactccactcgggtcagtccatcgactacttcgacatccccgtggaccacgtgtccacagccagcccatcatcctcgactacctagccagcaagaccatctgccccgaggacgtggtggtggtgtcgccggacatgggaggggtggccaggccgcgcgccttcgccaagaagctctctgacgcgccgctggcgatcgtcgacaagaggcgaccgggccacaaccaggccgaggtggtgcacctcatcgatgatgtcaggggaaaggtcgtcgtcatgctctccgacgcgccgttggcgatcgtcgacaagaggcgaccaggccacaaccaggccgaggtggtgcacctcatccatgatgtcaggggaaaggtcgtcgtcatggtggacggcatgatcaacacgaccgagaacatctccaagggcgccgagctgctgcacaaagggagcgcgagttgtgtacacctgcagcacccacgcggtcctcaacagcccacccgcgctccagaggctctccagcgacctcttccaggaggtgatcatcaccaacaccgtgccggtgcacagctcaccgtgctctccgtcgctaacctcctcggtgagaccatctggcgtgtgcacgacgactgctccgtcagcagcatcttccagtga

SEQ ID NO: 85706 - DNA, 105 bp, Zea Mays
cttttgaatgttattatagtagtttaaagtttaaacccatgaccgctctactctttgctgccactttattcagcatacccgatttatctgtccatgccggtgaag

SEQ ID NO: 85707 - DNA, 7678 bp, Zea Mays
caggaggtaaccacccaaacctcagaattggagttgtcaatctcggcgtttacagcattatcttcaaggatttcacatacctactgaatgacaacagacaaaggcacaaatgccagaaggtccaaaaggagttactgcaaaagaaaaacttaacaccaaacgacgtaaataacacactgaatgaagagctctatgaaacgcagaaagtgtcacccttttccatctccctcacacttgagaagcaaaggagctggaaatgtttggtaaatcacataaaaataaatttcagtacacctcaaagcccagaaagttttagcttacaacgtagagaaggcaattcactgatccaagtgaactcaaattgcctcaatagttggatgcttatttatgcatgagatgtatggcaaaacatatttgacataccaacagcacaccgattgcataagcgtaacaaaaatataagcaaaaaatagcattccattgaacttaatcaaaacagtataatgggacaataaaacatcatacctgctcgtatatttgctcagctctattagataatgtccgcctcttgtaaatgatccacagtatccaaagcagtgctgcaaacttgggttccatcatcactgagctgcctataaacaagccgtgtgcctaagtagcagttgtagaagcataccaggatacaaaagattgccacagatgtggtatttctaaagatccattggcgaactcgacaacccattggcatatgaagctccgcaaccagctcagggcatttatatactttgactctaaatggaaatatttagagggttacccttagcatccatccatcaatgctttctagcatgtattgtcagtggggaggtgaaagttgtgagatagcatacttgctggaagtaaatgttgtatcgaagaagcccccggcactctccagcaccctagttttcacaagttgaagcccatcctcagttagaccagcgggaatctttgacaagagttcatcaattgcatttgagacctcatgctcctgaaactggaatcaaaatatataccatcttagcaaatactagaagagatttgaacaggaaagacatgtgatgaggtggaacaaaagatgaaaacagaccaggatttcggcagaatggccacataaagcacgagcatgctgatcgcagatccttagctgtagaagctgtgacttaattttgtagagaagaagaaacaagacgaccggtacagcgttagtagatacgcatgtgccttagggctactttgggagcccagatccctggggggcccgcaaattccctgggccaagaaacccggtgccaatctcccatgggccaattttttgtgccatttggacggaagcccacaaactcagggatcgaaactcgcttccattccttttccacgcggaagaaaactgcgagtcaagaggcgggagggcttccctaacccccgtcgacttgttcatgctcacacggcatgtgagtcgcaaggctgctgccactgtcaccctagtatcccgtggtcagcgcatacccagtggctggtgactagcggcgcaccttttcctatggtaggtgacacatctcctagtcctagcgctcggcttgttcatgctcatgcagcttgtgaatcgcaaggctgctgccgctgtcaccctagtatcctgtggtcagcgcatacccagtggctggtgactagcggcgcgcctttcccgacggtcggtgacacatctcccagcgctcggcgatcacgttgctcccgaaatccactgctccatgtcgatctctagaaatcacataggcaactcaccccgaccactgccaccttgctcctccactgtcatcgcttcaccatccgtctctggaggtcaatcctcctccgcctgcattcccttccccaacagtaatttctcgatacgctagggtttcacccagatttccattgtttcttgaagatcttggagctatcggtacgtgagtcaagacaccgcttctgctcccattgtcccgttcggggtaacacaacgctgtggagctacaggttagttctctgcctgctacggattcgttgcattctgtttcagtggtcggacatgggttcatggcagtctgatgtgctgctgtagttttctgtgttgtagcttcatgtgcagtgtaggaggtggtcaatttgtttgtgattctttattttgttaacaaaaaaattggagcaagtccagggtagttcgagccaaatttattgctatacttgtgatcttttattttgttgatatattggatcagtacaactgtccttgttgaaggaatgagagaattggtataatgtgtgggatgtattgcattgagcctctagggagaatatataggagtacatgacttggagggcaagaagcgtattctagagataagaaaggttatcctagatataaggaaggttatctcgagattacaatcaatcctaaaccaaccatatcaggagttgcctaatatactctaacatacctaatatactctaacatccccccgcactcgtagcgttagcaaaacgaacggacagactggagaataatggagatatccccccatagtcagaatgccggtgcgaatgctgctactggagtagcccatgcagatgatagccctttgtgccgataatgttgaggtagctaagtgcaagggcgtcgagccgtcgtcgaggtgccatgcgtagggttgctgtggtcgaggaagctgtcgaggacatcatagaagacaagccgcacaagtcgcaggcgctggtgcggcacgcgggaaggcccgcagcgcaccagagtacgccgtggtgacagtggcgctgagaaaaatctccagcatccttggttttggtcgcagatggtgtaatctgatcagtttgttgttgttcacatcctctaccagaattttaatcaatggtgaacctaggaattgcatctcccaccatcgaggccttcatcaagggaaccccctatcacccatgctatttattctggtcatggaagtcctgaattccatttttacttttgcaactcaagagcatctcttgcagcccattgctcatcagcaggccaaacatcgcatttctttttatgcggatggcgtagtattgttcctccggccactaaaatctgatctccttatggtcactcggctccttgatatttcggggcattctacaggcctcaagacaaacatttccaaaagttcagtcacacctatccagtgtggggatgaagagctggtcattatctctgagttgttgccttgtgagttaaaggagtttccatgtaattacctgggacttcccctgtcaattcgaaaaccaacaaatgccgagttgcagccccttgtcgataaggtatccaataaattgtccgattgtcgggctagaaaacatcgctcatgagtcaagcaggccgccctgtgatgatgagagtggttttatctttcatccctatgtactctatgctagcacctccctaaatgggtgctcaaataaatcgataaaagaagtgggttcatgtggaaagggcaggaaaaagcaaatgggggtagctgtcttgtttcctgggagtgtgttcaacgacctttgctgtttggaggcctagccgcctaggtatacttaacatggagctgttcagtggggccttgcgtattcgttggttgtggttgcagaagacggatgcatctcgcccttgggctggcctccccttcaaactacctcctcatgcgcaagctttgtttgacattgttgttgttactgttgtgggcaatggagaatcaactaaatcttggaccgatggctgcaaggaaaatctgtttcggactgggcccccaatttgttcctgttgatgcccaaaagggctaagaggcaaagaacagtggcacaagggttgcaaaaccatagttgggtctctgatttaaggggtgccttgtcagtgcaagtgcttgtggaatatttacagctctggaacctcgttgataacctggagctccaacaggacatccctgatcagcacttatggtggctaaccaatcatggggactacaccatccagaggggacataataacaaagtctgtggatgcatcaagtgaagttcatgatgcatttatgctagctgatttattagggaagaaaattgaagagattgggaaagaaaaagtggttcaggttatcactgataatggggctaactacaaggcagcaggtaggatacttatggagaggtttccttcacttttttggagcccatgcgctgcacattgcttagatcttatgctagaagacataggaaacttgaaggaatttaagaagcccactgtacgtgcaagacgtgtcacaactttcatctataggcacggtagaattcttagtttaatgagagagaagacaggtggggcagatcttgtgagagctgcagccactagatttgccactgctttccttactttgaaaagtttgtacaagcacaaggatcctttgaaggccctatttcttagtgaagaatggaatggaaacaagttggcaaaaactgctgcaggtaaggaggcttgtgatattgtgctctctgtggagttttggaataaagttgaagattgtcttagagcttcagcccctctcctcattgtacttagagtggttgatggtgatgagaaacctgcaatgccagaggtcgcggcactaatgaaacatgcaaaagagaagatcaagctaagctttgctattgatagcaagaaaagcttacttaagagaatcatagacatcattgagaaacgatggatgaaacaaatggaccatcctttgtatggggctgctctttatttgaatccaggaaaattgcatcctctcattcgagatgatgatgatgcaactgttggccaactaagaggttgtttccttgatgtgcttgcaagaatgcaagtttatacattaacatctaaatttatgttgtatttcacatttggcaatcaagttgattggtggcgttcatatggtgggcgtgctattgagattcaaaggtttgctaggcgtattgttggtctttgtgcttcatcatcgggttgtgagagaaactggagtagatttgagtttcctcaaggtgctcgtgggtgtgattgtggtgaggatgagaatggccttacatgggaacttgttgatcaagctgtgggtgcatcaagctcgctgcgaggccgaaatcttccaaggaatgccaacaagcgtgcaagagtttcacactcaaggtttgactttgaagaagattttggttcagccaatgaagaagaggaggaccaagatccacatgatgatgttgatgtgactgattctgaagatgcacatgatgatgttggtggagaaaacactgaggctgctccagatgagttcgaagatggatattgactcactaagagttggctgatttcagatttgcagcttacctaattttgtgcagtgcttcaatgcttcactgcttgtgctcttaatcaactagtcttttaatcttttgattgatctatgtcgctaagtcattatggggctggactggaactaatttaattatgccactaagactagcagtctagcatatgttgctgctgctattttattcccaccaatgtattgtgggtttaatttgatatacatgtctgctgcttactgttttaatatgtcaatattcaaaggttaatgtagcttgcagcttgaaagaaaagaagaggggttggatcttcgataagagagatggatcatggatgctacaagaacaacaaagagaagggcagagtacataccaaagcatggacaacaaaaaagcttgtattgtattctctaaccttaccaattttgttattgcaagtgttagattgttaggattttttttgcatatcctcgcctaggcgatcctcatatggcgtcgcctcgccgcacgcctaactcgcctaggcgtttggaagggggtcggtcgccatgtctcgccttaacgccttaataaccttggttgtgtgttcgtgtgggaggttcccaacatgtcatgattagttgtgtgttcgcgtgggaggtttggacttcaatcctcaatattttggggttgattgccctcgcacctcagcttggatgttgtcgttttttggctgtggtgtacagctaccaaggcagttcccaaagagttgaaaaagggttttaatcccctcatcatttcggtcaccggggagatttggaagcatcagaatgcctgcgtgttcgaaggaaaaaagccatgtgttcggtctgtccttgcaaactgtggccattgaatgtgctctttggagtgtggcgggtgcctctcgcctttgagagctgctcacccgccaattcatcccaggggattagcctaggcccagggtggctagtagtgttgtggtcgtgtgtgtgtgtgtgtgtgtgtgtgtgtgtgtgtggcgagttagtgtaggaaggaaggattgcgtataatgtgttggatgtattgcattaagcctctagggagaatatataggagtacatgacttggagggcaagaaggctatcctagagataaggtaggttatcctagatacaaggaaggttatcccgggattacaatcaatcctaaaccaaccataccaggagttatctaatatactctaacatgcctaatatactctaacagttagttcctaacctgccttgtacacggcgttatctttccagtcgcgccgtttgtttttgttttctcctcttaatgaaatgactagcagctctcctgcgacgttcaaaaaaaaattcgacctgaataatataatttggttctcggtgccgtaagatgcccatagtcctcattatcttaccttgtgtttacttgtagagagagctcttgctggaagcattgtatgatttgagaagaaaaacgcagctgcagttcctatctgagaagcttatgcaaaggatttttttcttggacactgactatgaaaaggagttaaaccatttttatttttgattatgccttggatatctggatggagatgatctgtaacttggtgacgaatgggttagctaggttgaatttgccacttgaattaattttttctttgcactggactatgtcaaataattattattccaaattcttatgtgagcttctaatgttactcaattatttgcattatttaggtcttgtgattttccatgcattgttttcatgaaaatgttgtggttgacattgatatgtggtgacttccttatattattatttctttatttttctaagacattgttttcaatttactaagacgtacccaggttcaaacctgctgccaaactctggacagcctcagcgcaatcaaagtttcaaaaaaaatccacatgtagggttatcttcccagggtttccctctcctgccaaagtgagagaaagagagaaggaaagtgcattacaatcttgttagctctttgaatgagcagtccatcctctatgcatgctttgccgtgcctcttgaacccctggacgcactccaactcgccgtccacacatcgcccgttcggagggcaaggttgacacgaatctgcgcatgccttgccttagctttgctatacttttgatacaaatagtgagcaaggagagcatgcagaggagttaaaaaagctgtagaagga

SEQ ID NO: 85708 - DNA, 229 bp, Zea Mays
gagagctcttgctggaagcattgtatgatttgagaagaaaaacgcagctgcagttcctatctgagaagcttatgcaaaggatttttttcttggacactgactatgaaaaggagttaaaccatttttatttttgattatgccttggatatctggatggagatgatctgtaacttggtgacgaatgggttagctaggttgaatttgccacttgaattaattttttctttgc

SEQ ID NO: 85709 - DNA, 778 bp, Zea Mays
ccactcatctatttcttttgaatcattgtatactagctagctagctagccagagcttgtatggccactgctcatcatgcggatgaccatcgtgcagggagaagaagcgaggccgtcggagagaactacatgaggggcctctacggcgacgatgactacaacgccacccactacggtcaccagcagcagcagcggccgccgcccgcgcccatggcggtggccaaggcgttagccacagccacggcagccttctccatgttgttgttgtcggggctggcggtgacgggcacggtgctggcgctcatcgtggcgacgccattgatggtgatcttcagccccgtgctggtgccggcggccatcacggtggcgctgctcacggtaggcatcgtttcgtcgggagggttcggcgtggctgcggtggctgtgctggcgtgggtgtaccgctaccttcagaccacgacctcgtcgtcgggtcagcagccgcacatcgtcaaggactgggcgcagcagcaccgtctggagcagacacgcgcgcactgaaataaaaaaaagcgtagtacccctccgtttctttttatttgttgctgtttagttcatatttgtcactgtttcgttaaaaatgaactagcgggataacgagaacgggaggtaatatagcttttcatttaatgtaatgtaacgtaatcttatgtttgcagcagtaataatgtgtattatatatttgcagcaataaaagggcgagctcgatcgacccctctacgaataaatactttaaaaaa

SEQ ID NO: 85710 - DNA, 527 bp, Zea Mays
agaaagaacaagggtgtgtttggttgcccggcctatcctaacctggctagttttctaagccaggccagtcaatgcctggctagtgctatacaaaatgcaattgtttggttgtgtggtttgtcgaagcctgcattataaatgtgtatttggttgtccaacttggcttgcattgaatcatcgcatctttgccatggtaaatttacctcacacaatctatcaaacacttggtgggcatcatatatagcagcgtcgagcttaaatccatggccgacgagggtggagctagggattgtgcccgatgttaatgtggtgaggctaaagccatggccaggcggagacgaacctcaaactcctccgtcctcacgaggccgcatcgtcgtcttcgagcaatggtggagccggggaggaacaaggtcatggttgcgcgcacgtggggcatagtggtgctcgatggagcttgtgtgatggtcaacgacattcacgtggtgctcggcagatctcgcatgggacctggcgaagctcatgca

SEQ ID NO: 85711 - DNA, 155 bp, Zea Mays
gatctagcagctttcaactgataacacatgatttcacagctggaggtagaatcagttacacgcctatctcaatttcacggttcatagcacttgcctgttcatggatttcacccaacgagcaatattattggcatcttttgcttcttttcaattta

SEQ ID NO: 85712 - DNA, 1808 bp, Zea Mays
gacgctaggggtaaaatgcacagggttagcaaaggcgctcctgaacagatcctgaacctagcatcgaacaagtctgagattgaaaggaaggtccatcattctattggcaattatgcagagagagggctacgatcgcttgctgttgcctatcaggaagtacctgaagggactaaggaaagttctggtgggccttggcaatttattggtcttctcccactctttgatcctcctcgccatgacagtgctgaaactatacgcagagctcttgaccttggagtcagtgtaaaaatgattacaggtgatcagttggctatagctaaggagactggccggagactaggaatgggcacaaacatgtatccttcttcatcattgctgggtgacaaaaaaggtgacatcgcagttctaccagtggacgaattgattgagcaagcggatggatttgctggagttttcccagagcacaaatacgagattgtgcagaggttgcaagccagaaagcacatatgtgggatgactggagatggagttaatgatgcacctgctttgaagatagcagatattggtattgctgtggctgatgctactgatgctgctcgaggtgcttctgacatagttctgacggaacctggattgagtgtcatcatcagtgctgtactaaccagtcgggcaattttccaaagaatgaagaattatactatatatgctgtatctataaccatacgtattgtgcttgggtttttgctcttggcatgcttttggaagtttgacttccctccgatgcttgttcttgtgatagctattcttaatgatggaactattatgactatatccaaagacaaggtgaggccatctccccatccggacagttggaagctagcagagatatttgcaactggagtgatcattggggcgtatttggctgtaaccacggtgctgttcttttgggtaatttacaagacggagttttttgtgagggttttccacgttagaacaatgaatagaaaaaagatcgaagaaacaggagaccagaatctacttgccgacaacatggagatgctggcctctgcagtgtaccttcaagtgagcaccattagccaggcgttgatatttgtgacgaggtcgaggggttggtccttcatggagaggcctggcctgctgctgatggccgcattcgtgatagctcagctgatcgcgtctgtgcttgctgccatggtgagctgggagcttgctggcatcaaaggcatcgggtggcgttggaccggcgtgatctggctgtacaacttggttgtgtacctgctgctggacccgatcaagttcgcggtgcggtacgggctgagcggcaaggcctggaacctggtgatcgaccacaaggtggccttcacgaaccgcaaggactttgggaaggaggcccgggaggcggcatgggcgcacgagcagcgcacactgcatgggctggagagcgccgggacccctggggagaaagcggcgtcggtggagctggggcagatggcggaggacgcccggcggcgcgcggagatcgccaggctgcgggagctgcacaccctcaagggcaaggtggaatcggtggtgaagctcaaagggctggacctggaggacatcaacaaccagcactacacggtgtaagtgtaaccgccgtgattgattcgtcatagcctccttatcttagagagagggatataaagtaataattggatgcaataaccatctgattggttgcccccactatcttgtcctaaactatcacatgcgttgattttatcttaaacttctgtttggttctttgt

SEQ ID NO: 85713 - DNA, 696 bp, Zea Mays
atggggaggcaaggtggtggcgaggacagctgtccggtggcagggggtggcgcggaaatctggctgctggcagaaaatggcgcggacatctcgctggtggcagggggtggcgcagaaagctgctggcagacggcagcgctcgcagatggaagcaggagaatggaggtttgcgcgagcacctggtggcgagtccccctgctggcagacggcagcgctcgcagatggaagcaggagaatggaggtttgcgcgagcacctggtggcgcagcagacggcggcgcgcagcagacagcagacggcggcgcgcgcagcagacagcagacgacggcgcgcacacctggagttctctcgcgaatgagtaagtccggctgccaactcgctgccaaccgagcgcaacaacaccgtaggggtagattagtccgaaggggaacacaaccggcattaagatttgaaaaacatacgttaacagagggcggcggaataactgtccctatctggcgaggatgtgagctcgagaataccatactagcgatgcgcggctgcggagtaacaaagtggcgaagccgcgcgacgagattattacaatctcaaataactcggatgaaacgagggtaatggcatggccgtgacggtgacgtgacgggacgccaagggagacacggcagcccaacccatttccgtccctgtctctgtctct

SEQ ID NO: 85714 - DNA, 3655 bp, Zea Mays
atggggaggcaaggtggtggcgaggacagctgtccggtggcagggggtggcgcggaaatctggctgctggcagaaaatggcgcggacatctcgctggtggcagggggtggcgcagaaagctgctggcagacggcagcgctcgcagatggaagcaggagaatggaggtttgcgcgagcacctggtggcgagtccccctgctggcagacggcagcgctcgcagatggaagcaggagaatggaggtttgcgcgagcacctggtggcgcagcagacggcggcgcgcagcagacagcagacggcggcgcgcgcagcagacagcagacgacggcgcgcacacctggagttctctcgcgaatgagtaagtccggctgccaactcgctgccaaccgagcgcaacaacaccgtaggggtagattagtccgaaggggaacacaaccggcattaagatttgaaaaacatacgttaacagagggcggcggaataactgtccctatctggcgaggatgtgagctcgagaataccatactagcgatgcgcggctgcggagtaacaaagtggcgaagccgcgcgacgagattattacaatctcaaataactcggatgaaacgagggtaatggcatggccgtgacggtgacgtgacgggacgccaagggagacacggcagcccaacccatttccgtccctgtctctgtctctctccgtgtgaatgtgtgatgtgtcgccgtcccgttccgtccgcccctgcggtgcgggtgctttctccagcgacagcgacagcgagaggggaggggaaccagcaagctcctcctcctctacccctcgcctcggcggtgccaacaggcaggcaggcaggtcgtccgcgccagatctatctgtcccttcctcttgtagttgcaggcagacgcgccatgcggatgcgggtgcttcccgcgtcctggtcatcttcctccgccaagcatagcagcggcagctccgagtcgcaggagcacccttcttcctcctctgctacggccgcggtgtacctcaacatctacgacatctcccccctcaaccactacctctactggttcggactcggcatcttccactccgggatccaagtccatggcatggagtatggctttggagctcatgaataccccaccagcggagtcttccaagtagaacccaaaagctgccccgggtttatcttcaggcgctctgtgtgtgtgggtgtaactcacatgtcccgttcccaagtccgcacttccatagaggatctcgccgaggattatcatggggacacttatcatttgattctcaagaactgcaatcatttcacagcagatgtctgcgagcgtttgaccgggaagccagtacctggatgggtgaatcgactcgccagattaggttccttcttcaattgtgtattgcctgacagcatcaaggtttcagcagtcagagatgtaaatgcacatccagatttttctggtactctacctacacccagtttaactacttgtaccttcacattcacatcacatggttggaatttgaccttacagaatcctgtaccactttattaaagattgagacagacattgcttccaacagtagagtggtctgcgtcgcataagtggctgtatttagctaaaaaaagataaagcaaattatcttatgtttatatggtcttgcatttcaatgaagacattgaaacaaccttgaattgtttaaaacttatattatgtagcctgccaacacagaattgttaggaaattatctgatatgtctcatcttttcttgaaagtaagaaggacagacctggtgcagtggtgagagccgtcttattgagtcaatcgggttgcggattcaaagcagcctttttgcatttgcggaaaaggcccttcccagacccgactcatgtaggagcctctggcactaggtctgcccatcttttcttggaaatggaaagaccaagtttcagatgtgttccttttcacatctgaaagggtgtcaacaaaagttgatatgcttcatccatcttcccattctgaacatgatgctcattgcttgtctccgactcctctgcaaaccatgaattccatcactgctcctgaaatttcgctgggccttcgtttgttggtattgctgcagatgatggcttggggtccaatgcctcgatccttgagggaagtgatgacgatgatttagaccaactcctaagaacacctaacagcgacactgtgtcttcaagggacaagacattaactcctggcagggatagtctctaattgttctcctttgatagcaaaatagaggcaagtgctttgatgttcacgtctcatggtggtatggggttggcctgatcatatcatcatctgctgtcaaaatttggtggcgcgctagtctggggtgatgaaggattgtttgatattgttgctattatcagttgttgaggttgatatagctgcctatagtgttaatgtgatcatactttgttgtggtattatcatgtggcgaaggccaagttaaccagcatgtcatggttgtttgtgtgcgccggtgtttgtagtgtggcatattgtctgagtaagtagagggtttggctagtcatctcacgtgacctttcctttgaaacgatgatggtgtgtataagtgatttcttctgtacaaaaattattgacagagtttgaaatggttttccagatatattatttgtgatctgaactcaggcatggactcgcacgtaacctatcctctactggagcgaataccgttcccgttcagtaacacacacatagtttaaaaagccatttatttatgcatgccgctgatttcagctatcaattacaatacaagctatattacgtaagatagtgtttaaaagttatgaatagatagtttggctttacacgtggatgataatccagaaaacctttttctggattttaggctgttcgtaacccctacaacaatgatccgtatcagctccggtaaatttagcggaggcctccggacggtttctccatcgcccgctatcgcgtcgcctttgacttttctccgacggtaaatttattcgtcacgccgtcggccgcatataggactgtctacggatctgagtgagcatctctcgggcggaatcgccgagccgacgcagcttcgccaccagctccgcggcgttcgacgccgggcaccgccgtgcgcacggcagcgaacttcctctgctcgcactgatgctgccgctacacatcctcctgcgctccttcgacgaaccgctcgaaccaccatggtggccgcggcgttcgacgtcggccaccaccgtgcgcagggcggcgactgcccgtgctccaccttcggcccagcggacactggcagacaacgacgacatcacgcccttctatgttgttgcctcctccggcggacgtactcctgcgctccttctccgacgaaccatggcgctcgaccaccgatatgaagacaacaactctcctgttcgacgaaatgtctccaaagcaaaatagagatcaactatgttttttttgtccaataagagtttatgttacaaaacatacttagatagcattttcttcggaaaagaaatattaccaatgtcgattacataatgtaattattttcaccagtccataattcaatttcgattgcgtgttcgataagg

SEQ ID NO: 85715 - DNA, 884 bp, Zea Mays
gaatgtgtgatgtgtcgccgtcccgttccgtccgcccctgcggtgcgggtgctttctccagcgacagcgacagcgagaggggaggggaaccagcaagctcctcctcctctacccctcgcctcggcggtgccaacaggcaggcaggcaggtcgtccgcgccagatctatctgtcccttcctcttgtagttgcaggcagacgcgccatgcggatgcgggtgcttcccgcgtcctggtcatcttcctccgccaagcatagcagcggcagctccgagtcgcaggagcacccttcttcctcctctgctacggccgcggtgtacctcaacatctacgacatctcccccctcaaccactacctctactggttcggactcggcatcttccactccgggatccaagtccatggcatggagtatggctttggagctcatgaataccccaccagcggagtcttccaagtagaacccaaaagctgccccgggtttatcttcaggcgctctgtgtgtgtgggtgtaactcacatgtcccgttcccaagtccgcacttccatagaggatctcgccgaggattatcatggggacacttatcatttgattctcaagaactgcaatcatttcacagcagatgtctgcgagcgtttgaccgggaagccagtacctggatgggtgaatcgactcgccagattaggttccttcttcaattgtgtattgcctgacagcatcaaggtttcagcagtcagagatgtaaatgcacatccagatttttctggtactctacctacacccagtttaactacttgtaccttcacattcacatcacatggttggaatttgaccttacagaatcctgtaccactttattaaagattgagacagacattgcttcc

SEQ ID NO: 85716 - DNA, 1106 bp, Zea Mays
gaatgtgtgatgtgtcgccgtcccgttccgtccgcccctgcggtgcgggtgctttctccagcgacagcgacagcgagaggggaggggaaccagcaagctcctcctcctctacccctcgcctcggcggtgccaacaggcaggcaggcaggtcgtccgcgccagatctatctgtcccttcctcttgtagttgcaggcagacgcgccatgcggatgcgggtgcttcccgcgtcctggtcatcttcctccgccaagcatagcagcggcagctccgagtcgcaggagcacccttcttcctcctctgctacggccgcggtgtacctcaacatctacgacatctcccccctcaaccactacctctactggttcggactcggcatcttccactccgggatccaagtccatggcatggagtatggctttggagctcatgaataccccaccagcggagtcttccaagtagaacccaaaagctgccccgggtttatcttcaggcgctctgtgtgtgtgggtgtaactcacatgtcccgttcccaagtccgcacttccatagaggatctcgccgaggattatcatggggacacttatcatttgattctcaagaactgcaatcatttcacagcagatgtctgcgagcgtttgaccgggaagccagtacctggatgggtgaatcgactcgccagattaggtcccatatcatttcacaatcaatctgttgctccttgatgctgattcattctcaactccttcagccgtcatcctgttggaattgcaggttccttcttcaattgtgtattgcctgacagcatcaaggtttcagcagtcagagatgtaaatgcacatccagatttttctggtactctacctacacccagtttaactacttgtaccttcacattcacatcacatggttggaatttgaccttacagaatcctgtaccactttattaaagattgagacagacattgcttccaacagtagagtggtctgcgtcgcataagtggctgtatttagctaaaaaaagataaagcaaattatcttatgtttatatggtcttgcatttcaatgaagacattgaaacaaccttgaattgtttaaaacttatatt

SEQ ID NO: 85717 - DNA, 1323 bp, Zea Mays
gaatgtgtgatgtgtcgccgtcccgttccgtccgcccctgcggtgcgggtgctttctccagcgacagcgacagcgagaggggaggggaaccagcaagctcctcctcctctacccctcgcctcggcggtgccaacaggcaggcaggcaggtcgtccgcgccagatctatctgtcccttcctcttgtagttgcaggcagacgcgccatgcggatgcgggtgcttcccgcgtcctggtcatcttcctccgccaagcatagcagcggcagctccgagtcgcaggagcacccttcttcctcctctgctacggccgcggtgtacctcaacatctacgacatctcccccctcaaccactacctctactggttcggactcggcatcttccactccgggatccaagtccatggcatggagtatggctttggagctcatgaataccccaccagcggagtcttccaagtagaacccaaaagctgccccgggtttatcttcaggcgctctgtgtgtgtgggtgtaactcacatgtcccgttcccaagtccgcacttccatagaggatctcgccgaggattatcatggggacacttatcatttgattctcaagaactgcaatcatttcacagcagatgtctgcgagcgtttgaccgggaagccagtacctggatgggtgaatcgactcgccagattaggttccttcttcaattgtgtattgcctgacagcatcaaggtttcagcagtcagagatgtaaatgcacatccagatttttctgatgatggcttggggtccaatgcctcgatccttgagggaagtgatgacgatgatttagaccaactcctaagaacacctaacagcgacactgtgtcttcaagggacaagacattaactcctggcagggatagtctctaattgttctcctttgatagcaaaatagaggcaagtgctttgatgttcacgtctcatggtggtatggggttggcctgatcatatcatcatctgctgtcaaaatttggtggcgcgctagtctggggtgatgaaggattgtttgatattgttgctattatcagttgttgaggttgatatagctgcctatagtgttaatgtgatcatactttgttgtggtattatcatgtggcgaaggccaagttaaccagcatgtcatggttgtttgtgtgcgccggtgtttgtagtgtggcatattgtctgagtaagtagagggtttggctagtcatctcacgtgacctttcctttgaaacgatgatggtgtgtataagtgatttcttctgtacaaaaattattgacagagtttgaaatggttttccagatata

SEQ ID NO: 85718 - DNA, 740 bp, Zea Mays
tttttctggattttaggctgttcgtaacccctacaacaatgatccgtatcagctccggtaaatttagcggaggcctccggacggtttctccatcgcccgctatcgcgtcgcctttgacttttctccgacggtaaatttattcgtcacgccgtcggccgcatataggactgtctacggatctgagtgagcatctctcgggcggaatcgccgagccgacgcagcttcgccaccagctccgcggcgttcgacgccgggcaccgccgtgcgcacggcagcgaacttcctctgctcgcactgatgctgccgctacacatcctcctgcgctccttcgacgaaccgctcgaaccaccatggtggccgcggcgttcgacgtcggccaccaccgtgcgcagggcggcgactgcccgtgctccaccttcggcccagcggacactggcagacaacgacgacatcacgcccttctatgttgttgcctcctccggcggacgtactcctgcgctccttctccgacgaaccatggcgctcgaccaccgatatgaagacaacaactctcctgttcgacgaaatgtctccaaagcaaaatagagatcaactatgttttttttgtccaataagagtttatgttacaaaacatacttagatagcattttcttcggaaaagaaatattaccaatgtcgattacataatgtaattattttcaccagtccataattcaatttcgattgcgtgttcgataagg

SEQ ID NO: 85719 - DNA, 1387 bp, Zea Mays
ggggaaaggaaaaggggaagttctcgccagcgtgctgccttgcaagctgctaactagaataggaatccgacgtcgcccccgcccccccctgtgaaaattcgtgatgcggagaacagctaccgccgccctcgtcctcgtccccctcctcgctgcggcggtacagacctccgccctgcctttcatcgtcctgcacgggattggggaccagtgcgtcaaccatggcgttgccaagttcactaaacttctcgccgattggtccggctccgacggctactgcctagagattggcagaggaacatgggactcttgggtcatgcctcttcaacaacaggctgatataatctgcaacaaggtcaaggaaatgaaacaactgagaggtggctacaacatagttggtctgtctcaggggaacttgattggtcgagcagtggttgagtactgtgatgatggaccgccggtcaagaatttcatctctctaggaggtcctcatgctggtaccgcttcagtgcctctttgtggttctggatttttttgcattattgttgatgctctgatcaaattggagatctactcagactatgtgcaggtttgaatgcattggcttaaatcgaacttgatttttttgtcatggaacatcttgcacctagtggctacctcaaaatcccaactgatatggcagattatctgaagagttgtaggtttcttccaaaacttaacaatgaaattccagataaaagaaatgccacctacaaggaaagattcagtagcttagagaatttggttctgattatgtttcaggatgatgcagtcctgataccacgagaaacggcatggtttggttactaccctgatggagcctttgatccagttctaccacctcagaagacgaaactgtatgaggaagactggattggtttgaagacactggatgaagcagggcgggtgaagtttgtgtctgtgccgggaggtcatcttggtatctccaaaggtgacatgaagaagtacattgtgccttacctgacaaacaaaaaggcatcggtgacggtttctgatttgctagttgccatttggcacgctgtgcttgggctggcactggcagagggtgatgacgctgttttgatttgatgcatgggcttccgacagtggcttggattgttacgctgcctctgcttggttggcttggcactcagtcacaaataagattcatctcatctcatattctgttctgttggaaggccctttgattcatggtcacagaaataacagaatgcatgcatgcatgcatccaactagctagctagcttatagtcggagacaatctgtgcggtgcagctagttaattatctatctatacagggcaggcccatgccatgagtattgttgatga

SEQ ID NO: 85720 - DNA, 1989 bp, Zea Mays
ggggaaaggaaaaggggaagttctcgccagcgtgctgccttgcaagctgctaactagaataggaatccgacgtcgcccccgcccccccctgtgaaaattcgtgatgcggagaacagctaccgccgccctcgtcctcgtccccctcctcgctgcggcggtacagacctccgccctgcctttcatcgtcctgcacgggattggggaccagtgcgtcaaccatggcgttgccaagttcactaaacttctcgccgattggtccggctccgacggctactgcctagagattggcagaggaacatgggactcttgggtcatgcctcttcaacaacaggctgatataatctgcaacaaggtcaccaccccaaccgatttgcgctgtttgatgagttgttcaaaactacactctgccacttttgattttttttccaggtcaaggaaatgaaacaactgagaggtggctacaacatagttggtctgtctcaggggaacttgattggtcgagcagtggttgagtactgtgatgatggaccgccggtcaagaatttcatctctctaggaggtcctcatgctggtaccgcttcagtgcctctttgtggttctggatttttttgcattattgttgatgctctgatcaaattggagatctactcagactatgtgcaggaacatcttgcacctagtggctacctcaaaatcccaactgatatggcagattatctgaagagttgtaggtttcttccaaaacttaacaatgaaattccagataaaagaaatgccacctacaaggaaagattcagtagcttagagaatttggttctgattatgtttcaggatgatgcagtcctgataccacgagaaacggcatggtttggttactaccctgatggagcctttgatccagttctaccacctcagaagacgaaactgtatgaggaagactggattggtttgaagacactggatgaagcagggcgggtgaagtttgtgtctgtgccgggaggtcatcttggtatctccaaaggtgacatgaagaagtacattgtgccttacctgacaaacaaaaaggcatcggtgacggtttctgatttgctagttgccatttggcacgctgtgcttgggctggcactggcagagggtgatgacgctgttttgatttgatgcatgggcttccgacagtggcttggattgttacgctgcctctgcttggttggcttggcactcagtcacaaataagattcatctcatctcatattctgttctgttggaaggccctttgattcatggtcacagaaataacagaatgcatgcatgcatgcatccaactagctagctagcttatagtcggagacaatctgtgcggtgcagctagttaattatctatctatacagggcaggcccatgccatgagtattgttgatgatgactatgttgtggtggacgtggacgacagagctatggttcctgctgcttcctctctcggttgctcccctgctgcatcttcgtctacaatccttttccaaaaccagtgggtcctccagacctgttccatctgctccatgggcagctgcttggtctccggcaggaagaaatacacgaagagcgtcatgacgcacacccagccgccgaagaggaagaaggtgccgaacttgaggtggcacagcatcgccaggaaggtctggccgatgaggaaggtgacgaagaagatgacggcgatgacgacgctctgccccgccgacctgatctccagcgggcagatctcggtgggcaccaggtaggtgagagggccccaggaccaggcgaagcccgcgacgaagacgcacatgatgacgagcaccaggtacgcgtactccttctccatccctccgtgctcctggaacttggcggccagcaccgctcccaccatggcctgcgacaggatcatctgcacgccgcccaccaggaagagcttccggcggccgaacctgtccacgaccaccatggccaccacgt

SEQ ID NO: 85721 - DNA, 1994 bp, Zea Mays
ggggaaaggaaaaggggaagttctcgccagcgtgctgccttgcaagctgctaactagaataggaatccgacgtcgcccccgcccccccctgtgaaaattcgtgatgcggagaacagctaccgccgccctcgtcctcgtccccctcctcgctgcggcggtacagacctccgccctgcctttcatcgtcctgcacgggattggggaccagtgcgtcaaccatggcgttgccaagttcactaaacttctcgccgattggtccggctccgacggctactgcctagagattggcagaggaacatgggactcttgggtcatgcctcttcaacaacaggctgatataatctgcaacaaggtcaaggaaatgaaacaactgagaggtggctacaacatagttggtctgtctcaggggaacttgattggtcgagcagtggttgagtactgtgatgatggaccgccggtcaagaatttcatctctctaggaggtcctcatgctggtaccgcttcagtgcctctttgtggttctggatttttttgcattattgttgatgctctgatcaaattggagatctactcagactatgtgcaggaacatcttgcacctagtggctacctcaaaatcccaactgatatggcagattatctgaagagttgtaggtttcttccaaaacttaacaatgaaattccagataaaagaaatgccacctacaaggaaagattcagtagcttagagaatttggttctgattatgtttcaggatgatgcagtcctgataccacgagaaacggcatggtttggttactaccctgatggagcctttgatccagttctaccacctcagaagacgaaactgtatgaggaagactggattggtttgaagacactggatgaagcagggcgggtgaagtttgtgtctgtgccgggaggtcatcttggtatctccaaaggtgacatgaagaagtacattgtgccttacctgacaaacaaaaaggcatcggtgacggtttctgatttgctagttgccatttggcacgctgtgcttgggctggcactggcagagggtgatgacgctgttttgatttgatgcatgggcttccgacagtggcttggattgttacgctgcctctgcttggttggcttggcactcagtcacaaataagattcatctcatctcatattctgttctgttggaaggccctttgattcatggtcacagaaataacagaatgcatgcatgcatgcatccaactagctagctagcttatagtcggagacaatctgtgcggtgcagctagttaattatctatctatacagggcaggcccatgccatgagtattgttgatgatgactatgttgtggtggacgtggacgacagagctatggttcctgctgcttcctctctcggttgctcccctgctgcatcttcgtctacaatccttttccaaaaccagtgggtcctccagacctgttccatctgctccatgggcagctgcttggtctccggcaggaagaaatacacgaagagcgtcatgacgcacacccagccgccgaagaggaagaaggtgccgaacttgaggtggcacagcatcgccaggaaggtctggccgatgaggaaggtgacgaagaagatgacggcgatgacgacgctctgccccgccgacctgatctccagcgggcagatctcggtgggcaccaggtaggtgagagggccccaggaccaggcgaagcccgcgacgaagacgcacatgatgacgagcaccaggtacgcgtactccttctccatccctccgtgctcctggaacttggcggccagcaccgctcccaccatggcctgcgacaggatcatctgcacgccgcccaccaggaagagcttccggcggccgaacctgtccacgaccaccatggccaccacgttggcggccgtggcgcagacgcgcgtgaccacggccgacatgagggacgcgctctccttgagcccgatggtccggaacatgac

SEQ ID NO: 85722 - DNA, 972 bp, Zea Mays
gaaaaggggaagttctcgccagcgtgctgccttgcaagctgctaactagaataggaatccgacgtcgcccccgcccccccctgtgaaaattcgtgatgcggagaacagctaccgccgccctcgtcctcgtccccctcctcgctgcggcggtacagacctccgccctgcctttcatcgtcctgcacgggattggggaccagtgcgtcaaccatggcgttgccaagttcactaaacttctcgccgattggtccggctccgacggctactgcctagagattggcagaggaacatgggactcttgggtcatgcctcttcaacaacaggctgatataatctgcaacaaggtcaccaccccaaccgatttgcgctgtttgatgagttgttcaaaactacactctgccacttttgattttttttccaggtcaaggaaatgaaacaactgagaggtggctacaacatagttggtctgtctcaggggaacttgattggtcgagcagtggttgagtactgtgatgatggaccgccgattatctgaagagttgtaggtttcttccaaaacttaacaatgaaattccagataaaagaaatgccacctacaaggaaagattcagtagcttagagaatttggttctgattatgtttcaggatgatgcagtcctgataccacgagaaacggcatggtttggttactaccctgatggagcctttgatccagttctaccacctcagaagacgaaactgtatgaggaagactggattggtttgaagacactggatgaagcagggcgggtgaagtttgtgtctgtgccgggaggtcatcttggtatctccaaaggtgacatgaagaagtacattgtgccttacctgacaaacaaaaaggcatcggtgacggtttctgatttgctagttgccatttggcacgctgtgcttgggctggcactggcagagggtgatgacgctgttttgatttga

SEQ ID NO: 85723 - DNA, 426 bp, Zea Mays
atgcgatggagggcgcggtggtggccagcggcacgtcaaagaaggatctggctgggaaagccccttcttccccgctgcgatgacctcaagcgagttggaggcggccggttgtcgcgggagtggcaacgcgacggaggccgcggtggcggccagtggcgcgccaaagaaggatttggtcggaaaggccccttcttccccgtagcgacgacctcgagcgagctggaggcagccactggcacaggagcgacaaagcgacggaggccgaggtggcggccagcggtgcaccgaagaaggatttggccgagaagacgaggctggctatgggtagcttcctgccacctgggctggcgaagacgacgaagagcacggggcgcgcgagggcaagggacaacgctattggaggggcgcagtggcaggagacggtag

SEQ ID NO: 85724 - DNA, 225 bp, Zea Mays
atcccttgtcagtcaggttgttgtgtgccactagcattaagtagagaatagctcaaggacaagtacttgtattaaaatgttaggaccttttagttgcaggattcatatgggggttcgtgacgaagtgatgcttatgttgctgtttgttttgctaatacagttaggatccactgcaattgggttgaagacgaaggatggtgttgttctcgccattgagaaacgtgt

SEQ ID NO: 85725 - DNA, 2444 bp, Zea Mays
gatctattttacctgaacttttgaatactggggatgctttggagagataccaacaggttgcccaaaagctggaagccttgattgctaatgatggcaaagatgtggaaattcagtctgttattatggaagttcctgatatcttgcgtaggtgtgttagccgtgatgaggctgcattagcagtagcacaaaaggttttcaagagtttgtacgataacacatcaaataccacttatgtctcctggcttctagcaaccttagttgcaatacgagatgtctgcaagcttgttgtcaaagagttaacaagttgggtaatatattcagatgaagagaagaagtttaacattgatatcatttttggccttattcgttcggagttgctgaatattggggagtacaatgttcatttggcaaagttaattgatgggggaagaaataaggttgcaacggagtttgcaatgtcccttgtccaagcattgtttgctcatgatcctgttggcttcacagagtttcagaatgttcttgatgcactatcgaagcatacaaagagaccaggttcacctgaatcgttgcaacaattgattgaaatcgcaaggaataatgtgagcaccactactggttttgttgctgtgaaggatgaaaaggtcaaactgccgaaggataaaaaggttttagctacccgggcaaacaaggaggaaaacactgctaatgaaattacactagttgatccaaatcaggtggcagtcctgttttctgaatggtgtcagatgtgtaatcatgtaagtgctagtgatgcggcatacactcgttttgtcacacagttgcagcaagatggtctgctgaagggggatgatatctctgaacgcttcttccgtattctcacggaacttgctgttacacactctctagtctccgagcagatcgttgctcctggtggatcatctcagcaatcaccacagcaacctcacatttcatatttctccattgattcatatgcaaagcttgtggttatggttctcaagtactcagtggagataacaccaaataaagccagtatactttccaagatcctatctgttacagtgaggtccattcagaaagatgctgaggaaaagaaagcttcatttaatcctcgaccatacttccgattgtttataaattggctctatgatcttactactaccgatggtcaccatgatagttctaattttcaggttttgactgcatttgcaaatgcattccacatgctacaacccttgagagttcctgcctggagctttgcttggcttgagctggtgagtcacaggagcttcatgccaaaactgctgatgtgcaattcacagaaaggttggccattttttcagcgactgcttgttgctcttctcaagttcatggaaccatatctgagaaatgctgaactcccagaggcgatggaccttttatacaagggaactatgcgagttctgcttgtactactgcatgactttcctgaatttctttgtgattatcacttcagtttctgcgatgtgattccttcaagttgcattcaaatgcgcaatgtcattcttagtgcttttccacgtaacatgagactgccagacccttctacccctaatctaaagattgatttgttggctgaaatttcaatagcaccacgaatcatgtcggatgttgatggtgcccttaaatcaaagcagttgaagactgaggttgatgaatatctcaagaggccggaaggctcttcctttttaagtgacctgaaccaaaaattgctgctgcctcagaatgaagcaagtgttgctgggacacgctacaacgtgcctctgatcaattcacttgttttttatgttggcatccaagctgtgcaacaactgcaactgaacaaggctaatccgtctgcatcagtacagcagattaaccatatatctccgatggacattttccagattggaacagctaccgatatattcaggagtcttataacaagtttggatacagagggccgctaccttctgttgaatgcaatcgctaaccaactgcgctatccaaatagccatacacactactactccttcatcactctgtatctattttccgaggctacccaggaaattacccaggagcaaatcacaagggttcttctggagcgtctcatagtgaaccgcccccatccttgggggttacttattactttcattgaattgataaagaatccgcgttacaacttttggagccggtcttttacacactgtgcacctgagatagagaaactgttcgagtcggtggcaaggtcatgtggcgcaaaagttgtggacgaaggaatcagcgtgcaggatggcagccactaaagccatctgctttgttcaagtgttgtttttgtgctatttcttctctggcactggaaattttctgtgcttgtacagatcgtctgtatagtaaagctgtta

SEQ ID NO: 85726 - DNA, 2107 bp, Zea Mays
ctggacatgatcttttattttcttttaatatttatccaaggacctggttcaacagtaggaaatgttggtttgcagcatacaaagagaccaggttcacctgaatcgttgcaacaattgattgaaatcgcaaggaataatgtgagcaccactactggttttgttgctgtgaaggatgaaaaggtcaaactgccgaaggataaaaaggttttagctacccgggcaaacaaggaggaaaacactgctaatgaaattacactagttgatccaaatcaggtggcagtcctgttttctgaatggtgtcagatgtgtaatcatgtaagtgctagtgatgcggcatacactcgttttgtcacacagttgcagcaagatggtctgctgaagggggatgatatctctgaacgcttcttccgtattctcacggaacttgctgttacacactctctagtctccgagcagatcgttgctcctggtggatcatctcagcaatcaccacagcaacctcacatttcatatttctccattgattcatatgcaaagcttgtggttatggttctcaagtactcagtggagataacaccaaataaagccagtatactttccaagatcctatctgttacagtgaggtccattcagaaagatgctgaggaaaagaaagcttcatttaatcctcgaccatacttccgattgtttataaattggctctatgatcttactactaccgatggtcaccatgatagttctaattttcaggttttgactgcatttgcaaatgcattccacatgctacaacccttgagagttcctgcctggagctttgcttggcttgagctggtgagtcacaggagcttcatgccaaaactgctgatgtgcaattcacagaaaggttggccattttttcagcgactgcttgttgctcttctcaagttcatggaaccatatctgagaaatgctgaactcccagaggcgatggaccttttatacaagggaactatgcgagttctgcttgtactactgcatgactttcctgaatttctttgtgattatcacttcagtttctgcgatgtgattccttcaagttgcattcaaatgcgcaatgtcattcttagtgcttttccacgtaacatgagactgccagacccttctacccctaatctaaagattgatttgttggctgaaatttcaatagcaccacgaatcatgtcggatgttgatggtgcccttaaatcaaagcagttgaagactgaggttgatgaatatctcaagaggccggaaggctcttcctttttaagtgacctgaaccaaaaattgctgctgcctcagaatgaagcaagtgttgctgggacacgctacaacgtgcctctgatcaattcacttgttttttatgttggcatccaagctgtgcaacaactgcaactgaacaaggctaatccgtctgcatcagtacagcagattaaccatatatctccgatggacattttccagattggaacagctaccgatatattcaggagtcttataacaagtttggatacagagggccgctaccttctgttgaatgcaatcgctaaccaactgcgctatccaaatagccatacacactactactccttcatcactctgtatctattttccgaggctacccaggaaattacccaggagcaaatcacaagggttcttctggagcgtctcatagtgaaccgcccccatccttgggggttacttattactttcattgaattgataaagaatccgcgttacaacttttggagccggtcttttacacactgtgcacctgagatagagaaactgttcgagtcggtggcaaggtcatgtggcgcaaaagttgtggacgaaggaatcagcgtgcaggatggcagccactaaagccatctgctttgttcaagtgttgtttttgtgctatttcttctctggcactggaaattttctgtgcttgtacagatcgtctgtatagtaaagctgttagtcacacgtgtcggtgcactgccaaaccttagcaggtgcctgggagaatgcttttgtttgtatgaattttagtcagcaatatggatggtttgcaatatcgctcgctgctacttcgcgccagtac

SEQ ID NO: 85727 - DNA, 97 bp, Zea Mays
ctatgttattaatacaaaacattgtcacttatatgcattgtcagatgttagaactcattatgtgtacatcaaaataaatatatttgtacaacgagtt

SEQ ID NO: 85728 - DNA, 590 bp, Zea Mays
tatcgatctacccgatcgagctgagcctgagactgcgagggcgacgacaaaaaggctgcagctgtagctgcaggagatgaattgtgggattcacgaggagtactggacgatggatctgtagaatgtgtttggcctccagttgagtgggatgacgtcgcgtgcgacgagcgtcttgccggagtcggtgcgggtgcggatggagaagggtggctgcaggcggtggttggagtcgaggcgccagatggatccccatgactggctcatgggcgtccagcggcgggcgcgcttctccatgaggtcgacctggacgacgtcgccgtcgccgttctcgtactcgaccagcacggcgaagtagacctgggtggagccttcctcgacgtggaagccgaccttgaggcctgggaactcgcagggtaccctggcgaactggatgtcgatgatgccggcgcggcgcaggtcgtcgttgcggccgggcttggccagcctgccgaaggcggtgccgctgaggtcgaagtggtagggcgcgacgcccggggtgtagttcatgtcggtgatgacgacggtctcggtgcggccggagcaggcggcgt

SEQ ID NO: 85729 - DNA, 1392 bp, Zea Mays
gccttagctttcatttcatatatatatatatatatatatacatgtcagtctctccccctgcagccttcaccttccacttcagcttcattccacttccacttggatcgatcgatcgcatatggcggtactgtggtggtggtcatcgtcctgcttgtcctcccgcgccgtcgctgctgcgctgctttgcctgctggtggctcacggcagcgatggaaccaggcacaacagcaacaatggcggtggtagtggtagttccagcagcagcaagagccacaagcaaggcggagggggacgagcccatgccgcgccgacgacaccgtctccgtatccgtctccgtctccggcggctggcaacaacagcagcagcgacgacgggtggctgaacgcccgtgcgacatggtacggtgccccgaacggtgctggtccggacgacaacggcggcgcgtgcggcttcaagggcgtgaacatgccacctttctcggcgatgacgtcgtgcggcaacgagccaatcttcaaggacggcaaaggatgcgggtcctgctaccagatccggtgcaaggcccaccctgcgtgctccggcgtggcggagacggtgatcatcacggacatgaactactacccggtggccccctaccacttcgacctgagcggcactgccttcggggccatggcaaaagacgagcacaacgacgagctaaggcacgcaggaatcatcgacatccagttcaagagggttccctgccagtaccctggtctgacggtgaccttccacatcgagcgtggctccaaccccaactacctggcggtgctggtggagtacgagaacggcgacggcgacgtggtgcaggtggacctgatggagtccagccccgacgacggcgagcccaccggcgtctgggagcccatgcgcgagtcctggggctccatatggaggatggacacccgccggccgctgcaggggcccttctcgctgcgcgtcaccaacgagtccggcaagacgctggtggcggaccaggtcattccggcagactggcagcccgacaacgtctacagctccatcgtccagttcgagtagcagtatatgccatgcgtcgtacatatagatatatatacactacacacacaacgcggtgtcagcagtaatttaagcaagtatatgcatcatcattaattccatggacggatcggatcgatgatatatatgtacgtaaagatagacaggcataagacgacgtctctacctagctagctatagctgctgaatacatacatatacttgtcgatcgagacgtcgcttgtgacgtccgtccagtgcattatgaatcatcttcgatcgatctgttgttggattatacatgctatatattcgtgataaagctttacccaactatt

SEQ ID NO: 85730 - DNA, 1845 bp, Zea Mays
tgctgctgcctgctacttcatcctctcttctccacgcgagagatgtctgatgtggcggcgcttcctgagaccgtggcggagggtaagatgacgacgactatgaacgacgcgtgggactacaagggccgtcctgccgtccgcgcctcctccggcggctggtcgtccgccgccatgatcctggtggtggagctgaacgagcggctgacgacgctgggcgtgggcgtgaacctggtgacgtacctgatcggcaccatgcacctcggcggcgccgcctctgccaacgctgtgaccaacttcctcggcgcctccttcatgctatgcctcctcggtggcttcgtggccgacacctacctcgggagatacctcaccatcgccatcttcaccgcagtccaagcggcgggcatgtgcgtcctgaccgtgtcgacggcggctccagggctacggccgcctgcgtgcgcggaccccactggccccagcaggaggagcagctgcgtggagcccagcggtacgcagctgggcgtgctgtacctggggctgtacctgacggcgctgggcaccggcggcctcaagtccagcgtgtccgggttcggctccgaccagttcgacgagtcggacgacggcgagcggcggagcatggcgcgcttcttcggctggttcttcttcttcatcagcatcgggtcgctgctggcggtgacggtgctggtgtacgtgcaggaccatctggggcggcggtggggctacggcgcctgcgtcgcggccatccttgcgggcctgctgctcttcgtgacgggcaccagcaggtaccggttcaagaagctggtgggatccccgctgacgcagatcgccgctgtgacggcggccgcgtggaggaagcgcgcgctgccgctgccgccggacccggacatgctgtacgacgtccaagacgcggtggccgccggagaggacgtcaagggaaagcaaaagatgccgcgcacaaagcaatgcaggttccttgagagggcagccatcgttgaggaggccgagggttccgccgccggcgagaccaataagtgggcggcgtgcacgctgacggacgtggaggaggtgaagcaggtggtgcggatgctccccacctgggccaccaccatccccttctggaccgtgtacgcccagatgaccaccttctccgtgtcccaggcgcaggccatggaccgccgcctcggcagcggtgccttcgaggtccccgccggctccctcaccgtcttcctcgtcggctccatcctcctcaccgtccccgtctacgaccgcctcgtggtgcccctcgcccgccgcttcaccgccaacccgcagggcctctccccgctgcagcgcatctccgttggcctcctcctctccgtcctcgccatggtcgccgccgcgctcaccgagcgcgcgcgccgctcggcctccctcgccggagccacgccctccgtcttcctgctcgtgccgcagttcttcctcgtcggcgtcggggaggccttcgcctacgtcggccagctcgacttcttcctgcgcgagtgccccaggggcatgaagaccatgagcacgggcctattcctcagcacgctgtcgctcggcttcttcttcagcaccgccatcgtcagcgccgtgcacgccgtcaccacctcgggtggccggaggccctggctcaccgacgacctcgaccagggcagcctccacaagttctattggctgctggccgccatcagcgctgtcgacctgctggccttcgtggcagtcgccaggggatacgtctacaaggagaagcgcctggcggcggaggctggcatcgtccatgacgacgacgtactcgtccatgccacctga

SEQ ID NO: 85731 - DNA, 1152 bp, Zea Mays
atgggcttcctcgacttccccttcgccgctgtcccggactccgccgacgcgcgcaggtttcctcggcaccaggaggtgctgcgctacatccaggccttcgcgcgccgattccaccttgacggcctcatccgcctccgcacggaggtgctcgccgtcagcaaggacaacgacgaggggagcagcggcggctggagggtgaggtggcgccggaacgcagccggagacgagtccgagcaggagcaggaggaggtgtttgatgccgtcgtggtctgcaacggacactacacggagccgagaaccgccgccgccgacatccccggcctagacgcctggccgccgggcaagcagatgcacagccacagctaccgcgtgccggccccgttcgcggaccaggtggtggtcataatcggcgccagcaacagcggggccgacatatccagggaaatcgccggcgtggccagggaggtacacatggccgacagatcggcccccaccgccacctgccacacgctccccggctaccgcaacctctggctccgctccatggtggagcgcgccgaccaggacggcaccaccgtcgtgttccgagacggcagctccgtcagagcggacgtcgtgatgcactgcaccggctacacgtacagcttccccttcctcccgacgacggcggcgccggcgggcgacggcgccgtcgtctccgtggatgacaaccgcgtccacccgctgtacaagcacgtgttcgtgcctcagctggctccccgcctcgccttcgtcggcctgcccttcaaggtgatcccgttccccatgttccagatccaggccagctgggtcgccggcgctctgtcgggccggatccagctcccttcagaggagatgatggaagacgtgagcgcgctctactcggagctggagaccgtgggatggcccgtcaggtacacgcactgcatgaagcacagccagttcgagtacgacgagtggctggcagagcagtgcggtggtgggcacgccggcagagtggaggagtggaggaaagacatgttcgacgccgccaagaggaagaaggtgcagtgcccagaaacgtaccgagacgagtgggacgatcaccatttgctggaacgagcgtaccaagacttcaacaactactcctcttaa

SEQ ID NO: 85732 - DNA, 465 bp, Zea Mays
ctagcatgtacagtgaatcagtgcgagttcatcaacatgaaagaagcagcaacaagtacaagaccttcatcattcatccatcggccaagccaaatcacacacatatcccaggtgatgatgagttcttctaaaccaacatcagcagcactacctacctaccaaacacccaaggacacagctacaaaactagagctaaccatactatcgctttgatggtggcctcccatcgtcatcatcgtcaccatcatcatccccatcgtcgtcgtcttcttcttcttcgtcgcctgacctcttcctcttcgtagaggtctgcgccttcacagagtcctcaccgtcatcgtcctcttcatcgatctcctcatcgtcggcaccctcaccgttttcttccggttcaaagtcgctcgagtgctcttcgtcttcagcccgcccaagaggctgaaccagatactcggttcccagctcctc

SEQ ID NO: 85733 - DNA, 705 bp, Zea Mays
ttttgttcttaaacatgacttgttctctttagaatttttgcaggtgattttttaccatagaagagaccagaaacgcacgaacccttgcgtggaaacataagtaataatctaagcagatccaatttctctgggaagaaactgttccagaaggactagtaaacacggatctggcagcacagacggatactaaaaagttatacctcctgatcgtcttcaccgtcgacctcttcctcgtcgtctgagtcctcgtcgtcgtcgtcgtcgtcatccccgtcatcgtcgtcgtcgtcgtccgcctccccgtcaccgtcgtcgtcgtcttcgtcggagatctccacaacccctgccgcctccttctcctccccatccacctcctcatcatcatcctcctcgtcaccgccttccccatcgtcgtcctcgtcaccgtcgccctccccatcgaccgcctcgtccccgtccaccacctcctccacctcaacttcctcggccgctttcttggcagccgctgccttcttaggtgccatctcctccgccgctcgctcgtcagcctccgcctctactgccggcttcatctctacgaaatcggatctgattgggtgatgcttcggtggagggaaattgggggggaaattttgggcgaatttgtaagcggcggggacgaacagggggcggtggagggactgggtttcggcagattggctacat

SEQ ID NO: 85734 - DNA, 83 bp, Zea Mays
atttttatggcagatccgaaaaacatggcagtcgcatgcatgcagtttctatttttatacagatccaaaaattatgacaaaat

SEQ ID NO: 85735 - DNA, 1608 bp, Zea Mays
gcatgcagtacgcccgtcttttcgaaaccactataccgtgacaccacacagacgcaagctcttccaaagcccacccctgcccgttgtctcctttcctcgtgacagctgctagctagcttttcttttcacctttctagagtagaggaacgatggatgttgtagctagctaggtgacgccggccgacaccacgcactagcactccactgcctagctagctagctttgtaccatccggacatgtacatactagtactacgtacaatacagtcaactagctgctaggtaccaaggtcgtcgtcgatctagccttcctccctagctatatatataatgaacagtacgtaggtgtacgtactaatcatggatcgttattaattactagggctttgtttccccgccccgccccgcctataaatagcaccccaagcaagctgcgacctgatcacaagttgcagtgacagttacacgcagcagatcagagaggcacacgcactaggtacctgcagtctggtctgcaggtacgctagcgatctagctaccgctgtgctgcgtacagtacgtagtaccatggcgaagaaagtggccactctgctggccctcaacctcctcttcttcgccttcgccgacgcatgcggctgcaggtgcggcggatcctgccctagtccaggcggcggtggcggtggaggatctggtggtggtggtggtggaagcggtgggggtgggagtggagggggtggatcgggtggtgggagcggtgggggtgggagtggaggcggaggatctggtgggggcggcagcagtggtggaggcggcggcagcggtggtggaggcggaggaggatctggtggtggcggcggcggcggcggtgggacgagcggtcgttgccccgtggacgcgctgaagctgggcgtgtgcgccaacttgctgaacgggctgatcaacgcgaccctggggacgccgcccaggacgccgtgctgcacgctgatccaggggctggcggacctggaggcggcggtgtgcctctgcaccgtcctcagggccaacgtcctgggcatcaacctcaacctgcccatcaacctcagcctcctcgtcaactactgcggcaggcgcgtcccatcgggcttccagtgcttctgatatatatggtgtagtattatatatgtccatgcatgcaatgcatctcgtcgtccatcacatgttgttgttgttgtgtgtgttttcgatgatcctgtctctgttataaatatcattattattacagtacgtgtgtgacctgaatgtttgtatttggcctgatgcatgcacattcatggttcagatttttagcgacatctcgctgaattatttttccgtgttggccgaaagaaaaatcgtaaattttatacacactaataatgcatgcatgtgaactttggactatatgtttttattgtttatgttatatttttcaacacaatggatataaatcatactagtaagtatttgtttaaatctattttttagatggtgatatttttgttttcatgcatatgtaagtctctaaaaatatctaaagaagtttcagtggtggccgaaatcttcgtactaataacggaataaaaaaaaaaa

SEQ ID NO: 85736 - DNA, 148 bp, Zea Mays
gcatgcatgctcggtcctgctcacagcaacaaaatggacagtaatatatgggtttcgttcttctttctacatgaaagaaaagaaaagaaaagaaaaaaagatatatgggtgcacggccggccaatcgtccttggaatgtttgacgatg

SEQ ID NO: 85737 - DNA, 2077 bp, Zea Mays
atcgtgctctgctcactctctccaagaccaaatgacatgcgttgcgttgcgttgcttgctagcaacttgatatattcttgctgccatgccaatcgtcggtgctgatcctaatcatcctgtctaagctcagacgacgacacatcgagggatgcccctcgccggagccgcgacggccgcgaacctgccacgactcgccccctacgcccaagtaccagcccgcccaccacgctgtcttcgccactcggcatcgccgacgtggcggccctcgccgacgccgacgccaagagcgtctccccgcccgcatggccggacgacgacgacgacgacgtcgccgggagggacgactgggtccaccatctcccgccccttgacatgcacatgccgccgctcggcctcggcgccgcagaggcctgggagccccacgcgcaacctccgggtccgggcggcctcaccctctcgcacgcccagcagacccacgacagcaccttcctcggctggtttattgccgacgacgtcgccatgtcgggcgtcatggacgaccacaactcccactcggtacttcatgacctcgaccacataccctcttcctccgtgccgccgccgcagttccagcctctcgcgccccacgtgcactacccgcccaagctgcaccaccaccaaaaccccgtggtgcccgcgtcgcctcccaagcacacgctcctgaaacccaagccggaggcgccggggaccgacgacgcttccacggcggtggaccagctcgccgaggccgccaagcttgccgaagccggagacgttttcggcgcccgcgagatactggcgcggctcaactacctgctcccgcccggcgccgcgacggcgacgccactgctccgctccgccttctacttcaaggaggctctgcgcgctgccctgtccaccaccgcctccgcaaccgccgccgccgccgccgcgccggtggacgtgctcctaaagctcggtgcctacaaggacttctccgagctctgccccgtgctccagttcgcgcacttcacctgcgtccaggccatgctcgacgagctgggtggcgctgcctgcatccacgtgctggacttggacatcggcgtcggcgagcagtgggcgtcgctcatgcaggagctggccagccgccgcccgggcgccgcgctcaaggtcaccgcattggtgtccgcggcgtcgcaccacccgctggagctgcagctcgtccacgagaacctgtccaacttcgcggccgagacgcgcgtcccgttccagctggccttcttcaacctcgacgccatggaccccgcggagctgctcgctaccgccgccggcgacgccgtcgccgtccacctcccggccggctccgtgcacgcccccgcggtgccgtccgtccttcacctcgtcaggcggcttggcgccaagcttgtcgtctccgtggaccgcagctgtgaccgcggcgagctgcccttcgccgcgcacttccagtcctgcgtgttcctgctcgagtccctggacgccgtcggcacgggccccgacatcaccgccaagatcgagcgcttcttgatccagccgaggatcgagaggtgcctggcggagaggtaccgcgccgcggcggcgggcgacaagacgccgccctggcgggcaatgctcgtgtcggccggcttcgtgccggtgcaggcaagcagcttggcggaggcgcaggcggaggcgttgctcaagaaggtgcccgtgcggggcttccgcgtcgagaagcgcgccggctcgctcgtcctgcattggcaacgcggggagctgctctccgtgtccgcctggagatgctagcaccttgctgctgctcaatctgccattgtttaaggatcctgatatatgtatcttagatagaatccacaagtctgctcgtgctttgtacaatcaaatgggggttatatggtgtatgaaatgttccctgcactcaggcattggatgcttgttttttctgtgaagttcatgatcatgagattcagaactatgaatggaaattaagttcctctttttcttttgttcatatataatgtatatatttcctaaagaaaaaaaaaaa

SEQ ID NO: 85738 - DNA, 1421 bp, Zea Mays
cgatttcgcccccagcaaggcctacgtagaagacacaaaaaaaaaatcagtaagagccgcaacaatcgtcctgccgccatgagggagatcctccacatccagggcggccagtgcggcaaccagatcggtgccaagttctgggaggtggtgtgcgcggagcacggcatcgacgccaccggccgctacggcggcgactccgacctgcagcttgagcgcgtcaacgtctactacaacgaggcctcgtgcggccgcttcgtgccccgcgccgtgctcatggacctagagcccggcaccatggactccgtgcgctccggtccctacggccacatcttccgccccgacaacttcgtcttcggtcagtccggggccgggaacaactgggccaagggccactacaccgagggagccgagctcatcgactccgtgctcgacgtggtgcgaaaggaggccgagaactgcgactgcctgcaaggcttccaggtctgccactctctcggcggcggcaccggctccggcatgggcacgctgctcatctccaagatccgcgaggagtaccccgaccgtatgatgctcaccttctccgtgttcccgtcgcccaaggtctccgacaccgtggtggagccctacaacgcgacgctgtccgtccaccaactggtggagaacgccgacgagtgcatggtgctcgacaacgaggcgctctacgacatctgcttccgcacgctcaagctcaccacacccagcttcggcgacctcaaccacctcatctccgccaccatgagcggcgtcacctgctgcctccgcttcccggggcagctcaactcggacctccgcaagctggccgtcaacctgatcccgttcccgcgcctgcacttcttcatggtggggttcgcgccgctcacctccaggggctcccagcagtaccgcgccctgacggtgccggagcttacccagcagatgtgggacgccaagaacatgatgtgcgccgcggacccgcgccacggccggtacctgacggcgtccgccatgttccgcggcaagatgagcaccaaggaggtggacgagcagatgctgaacgtgcagaacaagaactcctcctacttcgtggagtggatccccaacaacgtcaagtcgacggtgtgcgacatcccgcccacggggctgaagatggcgtccaccttcatcggcaactccacctccatccaggagatgttccggcgcgtgagcgagcagttcaccgccatgttccgcaggaaggccttcttgcactggtacacgggggagggcatggacgagatggagttcaccgaggccgagagcaacatgaacgacctcgtgtccgagtaccagcagtaccaggacgccaccgccgacgaggagggcgagtacgaggacgaggaggagggagatctccaggactagaa

SEQ ID NO: 85739 - DNA, 1805 bp, Zea Mays
tataaagcaaaggcaaaggcaaaggcaaacccctccccacaaaccctaacactccaccgacgcccagatctgttccttctctcttccacgccgccgccgccctcgaattttcgaatcctcagcaacaatcgtcctgccgccatgagggagatcctccacatccagggcggccagtgcggcaaccagatcggtgccaagttctgggaggtggtgtgcgcggagcacggcatcgacgccaccggccgctacggcggcgactccgacctgcagcttgagcgcgtcaacgtctactacaacgaggcctcgtgcggccgcttcgtgccccgcgccgtgctcatggacctagagcccggcaccatggactccgtgcgctccggtccctacggccacatcttccgccccgacaacttcgtcttcggtcagtccggggccgggaacaactgggccaagggccactacaccgagggagccgagctcatcgactccgtgctcgacgtggtgcgaaaggaggccgagaactgcgactgcctgcaaggcttccaggtctgccactctctcggcggcggcaccggctccggcatgggcacgctgctcatctccaagatccgcgaggagtaccccgaccgtatgatgctcaccttctccgtgttcccgtcgcccaaggtctccgacaccgtggtggagccctacaacgcgacgctgtccgtccaccaactggtggagaacgccgacgagtgcatggtgctcgacaacgaggcgctctacgacatctgcttccgcacgctcaagctcaccacacccagcttcggcgacctcaaccacctcatctccgccaccatgagcggcgtcacctgctgcctccgcttcccggggcagctcaactcggacctccgcaagctggccgtcaacctgatcccgttcccgcgcctgcacttcttcatggtggggttcgcgccgctcacctccaggggctcccagcagtaccgcgccctgacggtgccggagcttacccagcagatgtgggacgccaagaacatgatgtgcgccgcggacccgcgccacggccggtacctgacggcgtccgccatgttccgcggcaagatgagcaccaaggaggtggacgagcagatgctgaacgtgcagaacaagaactcctcctacttcgtggagtggatccccaacaacgtcaagtcgacggtgtgcgacatcccgcccacggggctgaagatggcgtccaccttcatcggcaactccacctccatccaggagatgttccggcgcgtgagcgagcagttcaccgccatgttccgcaggaaggccttcttgcactggtacacgggggagggcatggacgagatggagttcaccgaggccgagagcaacatgaacgacctcgtgtccgagtaccagcagtaccaggacgccaccgccgacgaggagggcgagtacgaggacgaggaggagggagatctccaggactagaataggctgcttcacattcagtcaccgtcagtctatgaaaaactaatcatttgctgcttttcgtcgtcgtcgtagtagtagtaggtcggtaatcatctgtcgtgggtgtgtttcgtttctatcattaatcaggattagtagtagctgctgctgctgcgggcacaacacaaggggggataggaactgcaataccctgttgcgctttggttgtttcttggaaccgatgttatgttaaattctcaacgctcagtgtctgaacactatttgctcatgtttctggaactgctgttgtgttaaattctcaacgctcttgtctgtagtta

SEQ ID NO: 85740 - DNA, 1616 bp, Zea Mays
ccccacaaaccctaacactccaccgacgcccagatctgttccttctctcttccacgccgccgccgccctcgaattttcgaatcctcagcaacaatcgtcctgccgccatgagggagatcctccacatccagggcggccagtgcggcaaccagatcggtgccaagttctgggaggtggtgtgcgcggagcacggcatcgacgccaccggccgctacggcggcgactccgacctgcagcttgagcgcgtcaacgtctactacaacgaggcctcgtgcggccgcttcgtgccccgcgccgtgctcatggacctagagcccggcaccatggactccgtgcgctccggtccctacggccacatcttccgccccgacaacttcgtcttcggtcagtccggggccgggaacaactgggccaagggccactacaccgagggagccgagctcatcgactccgtgctcgacgtggtgcgaaaggaggccgagaactgcgactgcctgcaaggcttccaggtctgccactctctcggcggcggcaccggctccggcatgggcacgctgctcatctccaagatccgcgaggagtaccccgaccgtatgatgctcaccttctccgtgttcccgtcgcccaaggtctccgacaccgtggtggagccctacaacgcgacgctgtccgtccaccaactggtggagaacgccgacgagtgcatggtgctcgacaacgaggcgctctacgacatctgcttccgcacgctcaagctcaccacacccagcttcggcgacctcaaccacctcatctccgccaccatgagcggcgtcacctgctgcctccgcttcccggggcagctcaactcggacctccgcaagctggccgtcaacctgatcccgttcccgcgcctgcacttcttcatgatgtgggacgccaagaacatgatgtgcgccgcggacccgcgccacggccggtacctgacggcgtccgccatgttccgcggcaagatgagcaccaaggaggtggacgagcagatgctgaacgtgcagaacaagaactcctcctacttcgtggagtggatccccaacaacgtcaagtcgacggtgtgcgacatcccgcccacggggctgaagatggcgtccaccttcatcggcaactccacctccatccaggagatgttccggcgcgtgagcgagcagttcaccgccatgttccgcaggaaggccttcttgcactggtacacgggggagggcatggacgagatggagttcaccgaggccgagagcaacatgaacgacctcgtgtccgagtaccagcagtaccaggacgccaccgccgacgaggagggcgagtacgaggacgaggaggagggagatctccaggactagaataggctgcttcacattcagtcaccgtcagtctatgaaaaactaatcatttgctgcttttcgtcgtcgtcgtagtagtagtaggtcggtaatcatctgtcgtgggtgtgtttcgtttctatcattaatcaggattagtagtagctgctgctgctgcgggcacaacacaaggggggataggaactgcaataccctgttgcgctttggttgtttcttggaaccgatgttatgttaaattctcaa

SEQ ID NO: 85741 - DNA, 213 bp, Zea Mays
tctgtacatggggtgggataattctctctgcgtggagagggtgctcgagggggcaccccctccttcctcattcgtacatagaggtgggcgtttgggttatccgaaaatttcgagtcgggtaattcgggtttttaaaatttcgggttttgagaatcgatacccgaaattacaacgggttttgcaatacccgaaaattcgggtacccgaaatttc

SEQ ID NO: 85742 - DNA, 964 bp, Zea Mays
ctttgctaccctgtttcagcaaatgatcagccaacgaacaagccttaaattatatagtttacaaatagttctatagctagagagaactactgcaaaaataaagtggataattgttttcagcagcaagttacttctacaaagaaaacaatctggtccttcgccttgggacaccacagtatcctcatagattaccaaaagaataggtacctgaacaaagagctccatgggatgtttcacattggtagctatagactcagcccagctattatcatatgtgttgccaataacgtcgatggggcaagccatgtcccatccgccacagtcgcaacccccaccgtacctccatctatctagcaagggagatgggccgccggcttcatcgtcactcggcgaaccatgcagtccactaggtgcaacaactttgacagtacaaggagatgaaccattcttcacctcttcggacttgtatctgctaaacggaacctctatcacagtcgccgcaatctccaaataaggatgaaggtcttcttcggaccacgggcaagatgtcgatacatctgagttatttctcccagtcttgttctcttccgtcagactagtcctctgtggctgttgaagtgcccctgtcttctcctcaacaatccgcctcgcatgaccaatgtcgtacgaaacaaactcggtgacgacagagttattcaccgtaccgtcttttccaacttcagagcataagtatgatgaaacctgcacctgcccaacgattgggggtaaatcccagcctccatctttggagatccttccagcagcactggaccgtttcccgccactatggaaggtgtatatagagctcaactcatcaccgtttttccaattcctggcggaaatggattctcctgggccgtcaacacagaattcaaaaacctggacaccgttcttggaatccaatctaagaaccgcttggagatga

SEQ ID NO: 85743 - DNA, 865 bp, Zea Mays
aaagtggataattgttttcagcagcaagttacttctacaaagaaaacaatctggtccttcgccttgggacaccacagtatcctcatagattaccaaaagaataggtacctgaacaaagagctccatgggatgtttcacattggtagctatagactcagcccagctattatcatatgtgttgccaataacgtcgatggggcaagccatgtcccatccgccacagtcgcaacccccaccgtacctccatctatctagcaagggagatgggccgccggcttcatcgtcactcggcgaaccatgcagtccactaggtgcaacaactttgacagtacaaggagatgaaccattcttcacctcttcggacttgtatctgctaaacggaacctctatcacagtcgccgcaatctccaaataaggatgaaggtcttcttcggaccacgggcaagatgtcgatacatctgagttatttctcccagtcttgttctcttccgtcagactagtcctctgtggctgttgaagtgcccctgtcttctcctcaacaatccgcctcgcatgaccaatgtcgtacgaaacaaactcggtgacgacagagttattcaccgtaccgtcttttccaacttcagagcataagtatgatgaaacctgcacctgcccaacgattgggggtaaatcccagcctccatctttggagatccttccagcagcactggaccgtttcccgccactatggaaggtgtatatagagctcaactcatcaccgtttttccaattcctggcggaaatggattctcctgggccgtcaacacagaattcaaaaacctggacaccgttcttggaatccaatctaagaaccgcttggagatga

SEQ ID NO: 85744 - DNA, 440 bp, Zea Mays
gagcggcgcccccggcatgagcacgaatcaaggcgctccgcgacggcaccggggtgggggaagcctcttttatttgtcctcactcagccgccggccggcaagcctgtctgcctggaagagcgagaagaagaaaagatagcgtcgccggcagtggcctggtactccccaccccccgccggccgagcgggaagaagtcggaagcgaggtcgatcacttgtccgaaaaatcgggcggagaaaatggcgggcgagtcgccctcgggtcgggggggggggggacggggtgggattgtgggaaaggcaggtaggctagggtttggtggcggagcgaggtcgggagcagggtggtggaggcgagcaacagggcggaggaatgacgagtggatggagcgtgcctgcgttgctgctgctgctggtggtagtggtgatggtggcctgctg

SEQ ID NO: 85745 - DNA, 2474 bp, Zea Mays
ggttggcctgtctgctcggcccgccgtcgtctcagctcttgtgttttctgttacggaaaaaaaaagaagaaaaaacaagccggggacgacggcggcgaggacgacgacgacgagagggacggaactggaccagcgcacgtgccgagatggcggcgctggatgacaaggccatgacggacctggagacgctggaggaggaggaagtgctgcgccggttaggcacagcggaggaggcgggcctcaccgacaacgaggccgcgcgacgcctccgtctccacggccccaacgtcgtcgtcctctcgcaccacgagggcagcatgcttcatggattcctaatggcgctcttctcgctctggggatgggatcatgtcttccccaagtacaataacatggtccgggtcatacttaactccatgtcgtgggttacagtactgactatagttgtgtctcttgctatcacctcagctggccaaagatcatgcgagctggccatcataattttcgtagtagctacatgcctcatagcatgctttactgcaatgcttgttttagagtatgctaaggctccgctggaggccaaagcccacgcaccaagggccaaggttctgagagatgggaattggagagatgtacatgcagcaaatctggtcccaggggatatcatatttctcaaagttggggacattgtcccagccaatgctcgcatactccgatttcagaaaatcgacacaatgacttgctgggccaaaaggtctgttgattgtgcgcatggcttcctcctatactatgcttggactgtttcctgtggccaaggaactgccgttgtcattgcaactggacgtggcattcccagaagtacattgcggctctacccacaacgttatgctcgacctgggcagcttaaagaaggagccatgcttactggctgcttctgtgcttccctggtacttgttggcacttttgctgagatagtcttaagatttttgttccaaaaacaaaattacagaggcatgccactcgacgcccattttatgccattgattggtggaatcccgatggcaatgcctacttttttttacctggcattggcattgggatctgtaaggctttgttttctggggattgctagccggggaacagttgcacttgaagatctagcaagtgtggatgtaatcctcttcaacatgactggtactttaacgtgtaatcagccctgttttgtacgggacaagattgagatgtttgcagatagcgttaataaagaccatgccatagttttagctgcacgggcatcaagatctcaacatgagttgtacattgaaccaattgatgcagctattctaagcctccttgatgatccggagcaggcacgactcggtgttcaagtcttagagcatcatgccagtttctttgttgcactgaaactgatgttccagactacatacatcgacgaaggcaatagattcaagtgttgcgtattcaaaggccatagctgtaggacatcaagtaggcaattggatttcacattagtagactcttgttgggactttattgcccttctgccttacacagatgaccttagaagcgatagtgctgatgttgtcgatagccttatcgatctaggtttagatataagagtcctcacagaaagtccattgtcgaccacaaagcagatattcaccatttcatcaactgtccatcttgatcctgcaggtctaactccaatcttaattgtaatgaagtttggtgtccgtgtcattttacatttatggaactttgacttgtcaaatatcctggctttcatgattacagcttgtaattactgtacgtcctttgcaatgttatttgaaagggtggaattgaacaagtcaccagataaatggagagttcagaaaatcattacaagcggtgctgcttttggaagctacatagttcttactactgccattttttatagggttgcaacaactgcaaacccttttgcatgtaaattcaaacatatatcactgatgggcagtgatgaggaaatcagatctgctttgttccttcagattagcacagtaaaccaggctattgcactctttgttcattctgatggttgctgtatcataagatggcctggaccttttgtcacatttgcctttgttgtttctcaaacggtggcaacacaaaaagttgtccatggcgacttgaattttgcactaacaaagggtattggctgtgttagggccggattgatatggttgtataacttagtcctacttttggccctggttttagtttgtaagtttctagatcgaatgttagaatttgtgatgataataaaactttattttccatatcccattacaggaaatatgaatgtgctgtcattttacaggtcgcaaatggagacacgcaaagatgactagtgaaaagttgttgacaatatgcttgcgttcagctatcctacacatagttcttacctggtttct

SEQ ID NO: 85746 - DNA, 1972 bp, Zea Mays
atggcggcgctggatgacaaggccatgacggacctggagacgctggaggaggaggaagtgctgcgccggttaggcacagcggaggaggcgggcctcaccgacaacgaggccgcgcgacgcctccgtctccacggccccaacgtcgtcgtcctctcgcaccacgagggcagcatgcttcatggattcctaatggcgctcttctcgctctggggatgggatcatgtcttccccaagtacaataacatggtccgggtcatacttaactccatgtcgtgggttacagtactgactatagttgtgtctcttgctatcacctcagctggccaaagatcatgcgagctggccatcataattttcgtagtagctacatgcctcatagcatgctttactgcaatgcttgttttagagtatgctaaggctccgctggaggccaaagcccacgcaccaagggccaaggttctgagagatgggaattggagagatgtacatgcagcaaatctggtcccaggggatatcatatttctcaaagttggggacattgtcccagccaatgctcgcatactccgatttcagaaaatcgacacaatgacttgctgggccaaaaggtctgttgattgtgcgcatggcttcctcctatactatgcttggactgtttcctgtggccaaggaactgccgttgtcattgcaactggacgtggcattcccagaagtacattgcggctctacccacaacgttatgctcgacctgggcagcttaaagaaggagccatgcttactggctgcttctgtgcttccctggtacttgttggcacttttgctgagatagtcttaagatttttgttccaaaaacaaaattacagaggcatgccactcgacgcccattttatgccattgattggtggaatcccgatggcaatgcctacttttttttacctggcattggcattgggatctgtaaggctttgttttctggggattgctagccggggaacagttgcacttgaagatctagcaagtgtggatgtaatcctcttcaacatgactggtactttaacgtgtaatcagccctgttttgtacgggacaagattgagatgtttgcagatagcgttaataaagaccatgccatagttttagctgcacgggcatcaagatctcaacatgagttgtacattgaaccaattgatgcagctattctaagcctccttgatgatccggagcaggttgctcatcactgtggcagcagcaaagaagttaaagagaaaataagcatgataatggatgaacttgcccttgatggatatcaggccatagctgtaggacatcaagtagactcttgttgggactttattgcccttctgccttacacagatgaccttagaagcgatagtgctgatgttgtcgatagccttatcgatctaggtttagatataagagtcctcacagaaagtccattgtcgaccacaaagcaggtctatctttatcttctatgtacctcctgcaaagttttgtttttgcaagttcttgttaccattttgctatcttcatatcttagtacagaggacaaaagcgatatagtaagaagactaagaaatttcggttgtcattgtgcaatggttgggtatgaatttcttgatcatgatgccataggagagagccatattgggatttcagttgctgatgcaactgattacacaaaaagtgaatctgatcttgttttgactcagcctgcactgatgcctgtttcttcagcagtgcaaatcagtaggaagatttgtcagatgctaagaagctacactgtaggtcattctgatgcatttagaggcttgatttctgacaagatgttttatatctggatcataataaatggatattaacttgcagtatgttgctgttttgcagatattcaccatttcatcaactgtccatcttgtgagttcaatttatgattattttctataatccttctaaagt

SEQ ID NO: 85747 - DNA, 891 bp, Zea Mays
atgtacatattaggtgttgctaaaagtccagcggctgaagttcaattcagcaccttcaccacggctcagatatatttgattttctctgagactggaggtcataatattcagcagttggtttctaccatggtccctaggtatcccaagcattctaattttcgttctagacgattaagtgccagggagttaaatatgctgaagcgtaaagcaaagagtaatgccaaagatcatacaaaggttgtatctgaggatgatgaggttacactgaaaggatctgtgccctccaatggagcttcttctgaacaagttggtgcacaaaatggtgtatttgatacagctgtcgaagaagacaatctagagtacaatgagaacggaagatggccttttcaacaatttgtggatcaacttattcatgatatgtttgatcctactcacccctctaaaggcgtttcgacatgtaaatcacagaaaaaactcaactccatatcacatctgagttctcatattcttgctccagaatgccgacgcatgaacaagaagaggacgggatggagggcatcagcggttaggcatgggccacacggagggcatcagcggcaagtcaccaactttaggcacgacgacgagcattggcgacaaggcgccaaccttcgacacgacggcgggcatagcgacaacgtcacttttggcatgacagcgggtactgcagtcgacatagggggcagcgcgacggtgttcgacaccacatggatctgttgcacggcgcccaccgtgagaaccgtcggtatggcgagcataagtggaagagtggccacaggcacaatcgacgacttcgacacgattggaatgaccgggacggcgacaggagcgacaggggcggggcatgagtaa

SEQ ID NO: 85748 - DNA, 4581 bp, Zea Mays
agcagcagcagcagcaggaggaggagggcaggatgttcaagcttcaccgccaccgctcctccgaccgcgtcggcgagcgcttcgacttcagattctccaacttccgcgccgtccaggtccctgcagtgtcagacaggctcttcctttccatagtttcagtcgacagcggaaggacaattgcaaagtccagcaaagtagcttctcggagtgggatatgccagtggcctgacacaatcttggaacccatatggttctccaaggacgaagtctccaaagaattcgaagattgccagtacaagattattgtttccttgggatcgacaaaatctggcattcttggggagatttttctaaatctgtctaattttctgaatatagtcgatccaaccgcaatctctttgccactgaagagatgcaacgccggaacagttttacagcttaaggtccaatgtcttggcacaaagtctaagctgagtggtgtcagatcactgagggacatggctccccgtctcgatgaccgtagtccaacgccaaccaatgatgagatggacaataagtcagattgctctgatggtatgttcaacaggagtgttcgttcttcatccgaaaatcatctggttggaacttatcaagatgaatctggaaacagggaaacaagtttctctgcaccagggtcccatcggagttctaattctggagatagtactgcggatagaacaaacttctctcctagagacaactctagtggaggactttatgtgggaaggcaggattctgctagttcctatgctagttatgttagtgctggtcgtggcgatgatgggcttagatccaataattcatcttttagttctcgggcttcaggcccaaatttgctgcaagggaatactccaaaaatattttcaaatggcctttctcaattatctatgggggcatctgactcatctaaagatcttcttgaagctgctgaagaaacaattgaggagctccgtgatgaggcaaaaatgtgggaacgccactctcgtaagttgaaggctgatctagagatgctaaaaaaggagtgttctgaaaaatcaaagcaacatgctgagctagcaggcgagctatctgctgcacaagctgaacgggattcctataggcatgaaatagaagaattgaagtcatccttacaagatgtaaacacacggcaaacaattacaggaacacctaaacgttcagactggatagacctgcagaaggaacttgaaggtgaggtgaagtttcttagagaatcgaatgcggacttaaccatacaactaaacaggactcaagagtcaaatatagagcttctttctattcttcaggaactggaggaaaccattgaagaacagagagttgaaatatctaagatttcgaaggtcaagcagactgctgatcctgagaatgggcttttagtaaaagaagacaaagaatgggctaagaaactgtcaatgaaagacgatgaaatcacagttctgagggagaaattggatcgggctctcaacattggaaatgcaggtggtgctggttccaatgccatttatcttgaattggagaaagaaaatgaaattttaagggctaaaatacaagagcttgagaaggactgctctgaactaacagatgaaaatttggagcttatatataagctgaaagaaaatgggctcacaaaaggtcaggttccacgtatttcaaacaacaatgagctgcaatttgaaaagcttacatcccggattcgtcaactggaggaggaacttaggaataaggaaatgttaagagacgacagtttttctgagtcatcaacgtctaatgcagatgagttacagagaaaatgtgctgaccttgagctgaagctgctaaattttaggtctcaaacctgtgagctggaagaaaagttccaaaaaagccaagaggaactggaacaaagaaatctcgagttatccgaactgagaagaaagctaaacggtttacattctactgaactggaagtttttgaatctggtgcgacatggaagtaccaatctagaacagcagatctagaggatactgaacctgagacagatacgctaaaggctagatttgaactgcaactacaggaaaatgatgaccttcgaagttccaaggttgagatggaaaattttatttctgagattcaggcagagaagagtcagcttgaggaacgcctgtccgtgtcgcttaaagaaagcagcatcacatctaaatgcttggatgaagtgcggaaagatatccttgtgctttccagcagtatagattcccatgtttcagctaataaggttcttgagaggaacataattgagctagagagctgcaaagctgaactagagttgcatgtatcagagctggaacaggaaaacatagagttgtcagaacggatatctggactggaagcacaattgacttatctgacaaatgaaaaggagtcaagcgagctacagattcatgactccagatcgctcatcattaatctcaaagataaagtagagcggcagcaatccgagatggaaactcaaaggctcgagtttaagcagaaacaacaagaatctcaaagaagattgtcagaaacacaggatgattctgaagttctgagaagatctaattctaaactacaatctactgttgagagccttattgaagagtgcagttctcttcagaatctaactgctgatctgaaaaggcagaagttggaaatgcatggtcatcttacgcaaaaagagcaggaactggatgagtcgaaaaaaaggaactttgagtttagcaaaacagtggaattccttgaggcaaagctttcgtcactacataaggacgtttcttctaaagagcaatctttattgtcagaattggagagtatattccaggagcacatggaacaagaagaaagaattaatcgcgcgcatttcatgctcaataagatcgagaaggaaaagactcttgaagtagagaacctcaagagggaggtcgtcagcctcactgcacaggtctcctccacacatgaggagcgagaaagtgccactctggatgctattagagaggtatctgtcctacgagcagacaaggctaaacttgaggctaatcttcaagatgtcagtacacaattgagacattacgagtctcaattggaagacctccgaaaggagtctaaaaataagattaaagggttggttgattcccttaatgcctccaaacaaagcgaggaaatgttgacatcagatgctgaacatatgaaaaagttgatggaagctgctagatccaatgaagacacgttaaggaagacttctaatgaactagaattgaagcttaaatccagtgattatgagaaacaacaaatgctggaagaaatatctggcctgaaactgcaggtccagaaaataatgaatcttcaagatgaggttttcaaacttcagagttctcttgatgaggccaagttcggaaaagggaaactggaggagattctacgctcggtgaccgaggaatgtgaagaactaaaagcacagaaggctatgctaacagataaagtttctgatatgcaggagactttgagaaatggtgaagaagaaaaacgaaacagaatagctatgcaggcaaagctcgtgaggctggagagtgatctgtcagcatcagaagcatcacatgtacatgaagcagaattaaagaacgaactcagcaggatcaagagatcaaacagtgagtaccagaggaagatacaatctcttgagcaggaaaatgaggatctcactagaagagagcttggaggagataaccaggcagccattcagtcaaaaattgagttattggaaacgaagctcgcagaggcattggaggaaaacaagatgtacagagctcaacagaagagtccgatgcctgaggggcaaccttctgcgggagcgggagacggcaaggagggcaataccgataggattttgcaattggaaggagagctaagagatatgaaggaacggttactgaacatgagcttgcagtatgcagaggtggaggctcagagggagcggttagtgatggagctcaaagccatgaagaaaggcaggtggttttagcaatgatggagaactgttgcctgacataaaacagacacaggctgactgacagcacaggtaactgtgtgttgtcttcatcactagcatttcttgtgaagctggtctcaaactctctatctttctttattaaaagaagtttctatcaggctcaggcacctcattttgcccaaccaaatgtttaaaaaaacttaatttctggttgtacagatgggcatgtcatgtgagagcaagcaaagcaaatgcaagtgatgcagagcctggacctgctaactggtgctggaagatgtgtatcccaagacgacactgaaggtccctgtgaccacccagcgcccctacatgacatgatgatccaattgttattggtatttatttttaatggcgtgccttttcatcttgtatataatatacgccggtttgtgaggagcttgactggtcagttgttgatatgattactgagatcgatgactccgatctctctattttacacccttaa

SEQ ID NO: 85749 - DNA, 4729 bp, Zea Mays
agcagcagcagcagcaggaggaggagggcaggatgttcaagcttcaccgccaccgctcctccgaccgcgtcggcgagcgcttcgacttcagattctccaacttccgcgccgtccaggtccctgcagtgtcagacaggctcttcctttccatagtttcagtcgacagcggaaggacaattgcaaagtccagcaaagtagcttctcggagtgggatatgccagtggcctgacacaatcttggaacccatatggttctccaaggacgaagtctccaaagaattcgaagattgccagtacaagattattgtttccttgggatcgacaaaatctggcattcttggggagatttttctaaatctgtctaattttctgaatatagtcgatccaaccgcaatctctttgccactgaagagatgcaacgccggaacagttttacagcttaaggtccaatgtcttggcacaaagtctaagctgagtggtgtcagatcactgagggacatggctccccgtctcgatgaccgtagtccaacgccaaccaatgatgagatggacaataagtcagattgctctgatggtatgttcaacaggagtgttcgttcttcatccgaaaatcatctggttggaacttatcaagatgaatctggaaacagggaaacaagtttctctgcaccagggtcccatcggagttctaattctggagatagtactgcggatagaacaaacttctctcctagagacaactctagtggaggactttatgtgggaaggcaggattctgctagttcctatgctagttatgttagtgctggtcgtggcgatgatgggcttagatccaataattcatcttttagttctcgggcttcaggcccaaatttgctgcaagggaatactccaaaaatattttcaaatggcctttctcaattatctatgggggcatctgactcatctaaagatcttcttgaagctgctgaagaaacaattgaggagctccgtgatgaggcaaaaatgtgggaacgccactctcgtaagttgaaggctgatctagagatgctaaaaaaggagtgttctgaaaaatcaaagcaacatgctgagctagcaggcgagctatctgctgcacaagctgaacgggattcctataggcatgaaatagaagaattgaagtcatccttacaagatgtaaacacacggcaaacaattacaggaacacctaaacgttcagactggatagacctgcagaaggaacttgaaggtgaggtgaagtttcttagagaatcgaatgcggacttaaccatacaactaaacaggactcaagagtcaaatatagagcttctttctattcttcaggaactggaggaaaccattgaagaacagagagttgaaatatctaagatttcgaaggtcaagcagactgctgatcctgagaatgggcttttagtaaaagaagacaaagaatgggctaagaaactgtcaatgaaagacgatgaaatcacagttctgagggagaaattggatcgggctctcaacattggaaatgcaggtggtgctggttccaatgccatttatcttgaattggagaaagaaaatgaaattttaagggctaaaatacaagagcttgagaaggactgctctgaactaacagatgaaaatttggagcttatatataagctgaaagaaaatgggctcacaaaaggtcaggttccacgtatttcaaacaacaatgagctgcaatttgaaaagcttacatcccggattcgtcaactggaggaggaacttaggaataaggaaatgttaagagacgacagtttttctgagtcatcaacgtctaatgcagatgagttacagagaaaatgtgctgaccttgagctgaagctgctaaattttaggtctcaaacctgtgagctggaagaaaagttccaaaaaagccaagaggaactggaacaaagaaatctcgagttatccgaactgagaagaaagctaaacggtttacattctactgaactggaagtttttgaatctggtgcgacatggaagtaccaatctagaacagcagatctagaggatactgaacctgagacagatacgctaaaggctagatttgaactgcaactacaggaaaatgatgaccttcgaagttccaaggttgagatggaaaattttatttctgagattcaggcagagaagagtcagcttgaggaacgcctgtccgtgtcgcttaaagaaagcagcatcacatctaaatgcttggatgaagtgcggaaagatatccttgtgctttccagcagtatagattcccatgtttcagctaataaggttcttgagaggaacataattgagctagagagctgcaaagctgaactagagttgcatgtatcagagctggaacaggaaaacatagagttgtcagaacggatatctggactggaagcacaattgacttatctgacaaatgaaaaggagtcaagcgagctacagattcatgactccagatcgctcatcattaatctcaaagataaagtagagcggcagcaatccgagatggaaactcaaaggctcgagtttaagcagaaacaacaagaatctcaaagaagattgtcagaaacacaggatgattctgaagttctgagaagatctaattctaaactacaatctactgttgagagccttattgaagagtgcagttctcttcagaatctaactgctgatctgaaaaggcagaagttggaaatgcatggtcatcttacgcaaaaagagcaggaactggatgagtcgaaaaaaaggaactttgagtttagcaaaacagtggaattccttgaggcaaagctttcgtcactacataaggacgtttcttctaaagagcaatctttattgtcagaattggagagtatattccaggagcacatggaacaagaagaaagaattaatcgcgcgcatttcatgctcaataagatcgagaaggaaaagactcttgaagtagagaacctcaagagggaggtcgtcagcctcactgcacaggtctcctccacacatgaggagcgagaaagtgccactctggatgctattagagaggtatctgtcctacgagcagacaaggctaaacttgaggctaatcttcaagatgtcagtacacaattgagacattacgagtctcaattggaagacctccgaaaggagtctaaaaataagattaaagggttggttgattcccttaatgcctccaaacaaagcgaggaaatgttgacatcagatgctgaacatatgaaaaagttgatggaagctgctagatccaatgaagacacgttaaggaagacttctaatgaactagaattgaagcttaaatccagtgattatgagaaacaacaaatgctggaagaaatatctggcctgaaactgcaggtccagaaaataatgaatcttcaagatgaggttttcaaacttcagagttctcttgatgaggccaagttcggaaaagggaaactggaggagattctacgctcggtgaccgaggaatgtgaagaactaaaagcacagaaggctatgctaacagataaagtttctgatatgcaggagactttgagaaatggtgaagaagaaaaacgaaacagaatagctatgcaggcaaagctcgtgaggctggagagtgatctgtcagcatcagaagcatcacatgtacatgaagcagaattaaagaacgaactcagcaggatcaagagatcaaacagtgagtaccagaggaagatacaatctcttgagcaggaaaatgaggatctcactagaagagagcttggaggagataaccaggcagccattcagtcaaaaattgagttattggaaacgaagctcgcagaggcattggaggaaaacaagatgtacagagctcaacagaagagtccgatgcctgaggggcaaccttctgcgggagcgggagacggcaaggagggcaataccgataggattttgcaattggaaggagagctaagagatatgaaggaacggttactgaacatgagcttgcagtatgcagaggtggaggctcagagggagcggttagtgatggagctcaaagccatgaagaaaggcaggtggttttagcaatgatggagaactgttgcctgacataaaacagacacaggctgactgacagcacagatgggcatgtcatgtgagagcaagcaaagcaaatgcaagtgatgcagagcctggacctgctaactggtgctggaagatgtgtatcccaagacgacactgaaggtccctgtgaccacccagcgcccctacatgacatgatgatccaattgttattggtatttatttttaatggcgtgccttttcatcttgtatataatatacgccggtttgtgaggagcttgactggtcagttgttgatatgattactgagatcgatgactccgatctctctattttacacccttaattgtcgataaatgtagttactctattctttctttctttcttttttgagacagcagtggagtggctgggttagtgggtagcagtcattatgttgcactcatacaatattgttttagtttgggtgtagaataatgtgacgaagggagacccatttgttcatgtaagtttgtttgtttgtttgtttgtttgtttttacagcgtagatcacggataataatgaagtttccgttgtgcggttgtggtacgtgcatcgcattattgatgaaacttttaacctcaggagggcaaagtgttgccag

SEQ ID NO: 85750 - DNA, 1979 bp, Zea Mays
aaggcgaaaaaacgtagtctacgacgacggacagcacagcagccgaaccagcaaagcgagctccgtccaccctcgcgctttcgccatgagagatcccaagccgaggaggagccaagcagcgcgcaccctggctgccaggctgcggaaacactccaccttgcttctcctcctgctctggttcgccctctccctcgccctcttcctctccgccacgccgccttccgccgcgccgctccgccgctcctcctccttcctccgctccaagccccgcgccctcgccgccaccaccaccgacgcagccgccgtggcaccccgcgtccggatctacgtctacgacctccccgcccgcttcaaccgcgactgggcggccgccgacgcgcggtgctcgcgccacctcttcgcggccgaggtggcggtgcacgaggcgctgctggcctacgccggccgcgcagcgcgccccgaggacgccgacctcttcttcgtccccgtctacgtctcctgcaacttctccacgcccaacggcttcccctcgctgtcgcacgcccgaggtttgctcgccgacgccgtcgacctcgtccgggcccggatgccgtactggaaccgctccgccggggccgaccatgtcttcgtcgcgtcccacgacttcggcgcctgcttccatcccatggaggacgtagccatcgccgacggcataccagagttcctgaagaggtccatcctgctacagacatttggtgtccaaggccatcacgtatgtcaggaggtggagcatgttgtgatcccacctcatgtgccgcccgaggtggctcacgaactaccggagccagagaaggctcagagggacatttttgccttctttcgaggcaagatggaggtgcaccccaagaacatcagtggccgcttctacagcaagaaggtgaggactgaacttctacaacattatggccgcaatcgcaagttctaccttaagagaaagcggttcgacaactaccgatcagagatggcccggtcgttgttctgcctctgcccgctgggatgggcgccttggagtcctcggctcgtggaatcagtcctgctaggctgcattcccgttataattgctgatgacatacgtctgccgttccctccagtcctccagtggcaggagatctcgctgcaggtggctgagaaggacatagccagccttgggatggtgcttgaccatgtcgtggcaaccaatttgactgtgatacagaagaatttgtgggacccagtgaagcggagggctctggttttcaatcgtccgatggaagcgggcgacgctacatggcaagttttgagggagcttgaggttttgctggaccagtctcggaggaggagatctgttggatcctattcctggaggaggtgaagcacacagaaggtcatctgttgcagctgtgcacccatggtttgcgctctgcagttcacagcatgccgccctggctgacaacatcaacattgagtcgagacctgagcctgagatccacctctgacatggttttttctcaccagaaattcagaatgacgatctcaaaccagagctctacttctgacatggttttttctaatccagaaattcagaatattgatctcaagctagagatcccaaccttcagttaggtcgatgggaatatgggctgctagctccaccttcgttggcctgttgtctggttagtgcctaattggagatcccaatctcggttgacaagttgaccagctccctataacgtataggcaaatcgttcacacatttatttattcttttaagaactgagatgggtttgcttttcttgccatagaaagatcttactgcaatttacaggttgcagcttatttttttgtgtttattttttcggctgcacacttgtatagttgccgggctgttgtgtatgctacttaaattcttctgtaaatagaatggtgtcaaagaatgagttgattttaagataacgagaagc

SEQ ID NO: 85751 - DNA, 2067 bp, Zea Mays
ctcgccgtcacgccgtcactctacaggaccagttggctgcatatggaggtcgaggacctcgaggatctctacaacatcgacgcgtcgtacgaccaagacgacccggatgaggacgagggggagcagcagagcgaggatgaccaagagatggacatgctaggaggagcggtggcggaggaggacggggcggatgacgctcgaggatccagcgccgacgaggaagaggatgaagaagacgacgaagaggaggaggaggaggagccggagggggcgcggttggtcgcgggcgattgcggaccatccccacgagctagggtttccgagtttgcggcggctgccggcgccgccgtggagcgggcccacacggccaactgccccgtctgtatggacccgtggacctcccaaggtccgcatcgcatcagttgtatcccatgtgggcatgtctatgggagatcttgcctagagaagtggttaacccagcgcgggaaccgaagtgcgacgtgccctcagtgtggcaaaaggtttaaacataaggacatcatcaacctctatgcacaagaggttgctgttcctaatagtgaacttgagaaggaaatttcatacttaaggcgggaaatctgttctctgaagaagatggttgtgcaccatgataaaatgtttgaggagatgatcaagaggcagaatgatggtgttcgctcaaagagacagaaagtggctgagcactcatatgaagccgcaaatctggtggcatctaccccagccacaataagttttagcttacagaacgaattacctgtggctggagctcgagtcatcagcatagacacatctaacaaaataatacttgtttctggaagggcaaatgctataggtgctgaatatgttgttaccaagattagcatgctgtccaaccgtgaagtacgcaaaatccatcttcctcctgaaaccaaagctgttagggatatgtgtatcctgcctggtggctctgctatttttacatcactaggaaggaggctatcacttttcagcatggcaactgacagcattgttcttaactgggatttgccggctcctggttggtcgtgtgcagtaggtgcatctggttcacatcatatttatgctggattgcagaacgggatggttgtggtatttgatatccgtcaaactgtgaggcccttgcgttgtatggtggggctatctgcaaatccggttcatactctccactctgtcattgataacaacggttccaggaaggttctttcagcttctgctataggtccctgcatgtgggatgctgatagcaaccaaagcaggccgcatttgctaactgggacgggagatgagcgtgtctgcatatctcttgcatgtgccgctccatggagtgaccttttggtggcttccttccggcccagagttgatccatcaggagatgcagttgccgcatcccaagtttatctatcacaaacgcctacacggtctgggcaggggaaaccagggcagcacacccttatcaggaggaggacgggtaacacctgcttcgctgaaggcacgacttgctatgccaacgtgagcgagctgcgcatgtcaaaatcggccatcataccttacggatacggaggccaccagcagaagcacctgttctcctacggagacgagtcgctgcgtggggtccggacctggcaactgccttcgtttgggatgcatgctgacctctgcacccaccgggagcccatccttgatttaaggtacgctgctgaaactgaaggaccaggtgggtaccttggttgcttaagcgaggagaagctgcaggtgttcagagttaattaattgttaggtagcttagctggtcagtgagggagcagcttctttttgacttttggtagctcagctcagctaattgctaggtaacataacatcactgtgaaggtcgtgcttgtttggtgaagctgctgtgtacatacagggcaacagctgaaattgcctagttttggtgctgctggctgtttgtttgtgtcactgactggagtgaagaccatctccagcaattcctcccatatttcactgact

SEQ ID NO: 85752 - DNA, 1983 bp, Zea Mays
ctcgccgtcacgccgtcactctacaggaccagttggctgcatatggaggtcgaggacctcgaggatctctacaacatcgacgcgtcgtacgaccaagacgacccggatgacgctcgaggatccagcgccgacgaggaagaggatgaagaagacgacgaagaggaggaggaggaggagccggagggggcgcggttggtcgcgggcgattgcggaccatccccacgagctagggtttccgagtttgcggcggctgccggcgccgccgtggagcgggcccacacggccaactgccccgtctgtatggacccgtggacctcccaaggtccgcatcgcatcagttgtatcccatgtgggcatgtctatgggagatcttgcctagagaagtggttaacccagcgcgggaaccgaagtgcgacgtgccctcagtgtggcaaaaggtttaaacataaggacatcatcaacctctatgcacaagaggttgctgttcctaatagtgaacttgagaaggaaatttcatacttaaggcgggaaatctgttctctgaagaagatggttgtgcaccatgataaaatgtttgaggagatgatcaagaggcagaatgatggtgttcgctcaaagagacagaaagtggctgagcactcatatgaagccgcaaatctggtggcatctaccccagccacaataagttttagcttacagaacgaattacctgtggctggagctcgagtcatcagcatagacacatctaacaaaataatacttgtttctggaagggcaaatgctataggtgctgaatatgttgttaccaagattagcatgctgtccaaccgtgaagtacgcaaaatccatcttcctcctgaaaccaaagctgttagggatatgtgtatcctgcctggtggctctgctatttttacatcactaggaaggaggctatcacttttcagcatggcaactgacagcattgttcttaactgggatttgccggctcctggttggtcgtgtgcagtaggtgcatctggttcacatcatatttatgctggattgcagaacgggatggttgtggtatttgatatccgtcaaactgtgaggcccttgcgttgtatggtggggctatctgcaaatccggttcatactctccactctgtcattgataacaacggttccaggaaggttctttcagcttctgctataggtccctgcatgtgggatgctgatagcaaccaaagcaggccgcatttgctaactgggacgggagatgagcgtgtctgcatatctcttgcatgtgccgctccatggagtgaccttttggtggcttccttccggcccagagttgatccatcaggagatgcagttgccgcatcccaagtttatctatcacaaacgcctacacggtctgggcaggggaaaccagggcagcacacccttatcaggaggaggacgggtaacacctgcttcgctgaaggcacgacttgctatgccaacgtgagcgagctgcgcatgtcaaaatcggccatcataccttacggatacggaggccaccagcagaagcacctgttctcctacggagacgagtcgctgcgtggggtccggacctggcaactgccttcgtttgggatgcatgctgacctctgcacccaccgggagcccatccttgatttaaggtacgctgctgaaactgaaggaccaggtgggtaccttggttgcttaagcgaggagaagctgcaggtgttcagagttaattaattgttaggtagcttagctggtcagtgagggagcagcttctttttgacttttggtagctcagctcagctaattgctaggtaacataacatcactgtgaaggtcgtgcttgtttggtgaagctgctgtgtacatacagggcaacagctgaaattgcctagttttggtgctgctggctgtttgtttgtgtcactgactggagtgaagaccatctccagcaattcctcccatatttcactgact

SEQ ID NO: 85753 - DNA, 1518 bp, Zea Mays
gcacgcttggttaaactccgggcgatggccgagcaaggacgcacccgggattggacctatcgacggtggcagcccgcagcccatcggtttcgccgaccggcgcctcgttcgcatcgactccacctcctcctcctcgcacgctataaactagactagagcaatacccgtggtggatgttccaccgcctgctccgccgcgcgatgccgctcccgccgccgcagtccccgcttcctgctccccggatgccgggggtcaccggcgggcgcctcttcgcttcgctgccgtcgccgccgcccctccagtctcgaagagaggtgcatgtgtggtatcttttgcctgatgagttgaaggatgcctcccaactcaagatgtacacggagctcctttccccttctgaaaggaagactgctttgtctatgaacggggaaaagttgcagaaaggtgccgtgctgtcccgtgcactgctgcgcaccaccctctcgagatatacagattgcaaagttgatccaagatcatttgagtttaagaaaaacaagtttggcaaacctgaggtactgtggcgatctgatgacagcaggatggaatggcctttacatttcaatatttcacacacatcatctttgattgtctgtggcataaccatggatactcctattggcattgacgttgaagagaagacacgaaagacagccaagaatattttatctcttgctcgccgttatttcaccccatctgaaattgattatctagctaaaattccagatcctgatgctcagcaaaaggagttcgtaaaactatggactcttaaagaagcatatgtaaaagctcttggaagggggttttcaggcgcccctttcaacaaattctcgattatattggcagcaaatggcagaatccaaatttctgtggcaccaaaagtatcgaacggttctgactctatccatgactgtctgtccgagaattggcagtttgcacttgctgaactaaacagttctcattacatggcaatctgtatagaggatgactcaacaagttcagattctggaaacggtagactgccactaggattgaaagtatggaagaccactccgttcgtggaagatatacttgtttctggaacggaagctgtaaaacttgtcagttaagtatgtgagaggatatctgccattggtcaagtgatttcgccagatgacaatgtgatgcaacgaatgtatttggacgaagtatgcgctgtgcagggaggctgaacggttttcttcgagcatactgcatgcattgatgaactgaccactgacactgtgtgctttagttaagatttggaaatgcaatgacatacactttggagtcctgatattcatattagcatatcacgacactgtttcgaaaggaataaacatttatctctctcttgtgtgtgtgtgtggggtaattttagacgtattttgtactgattggtccttgttatctgacggatcattggaagaaatattcatgcatcagcatgcttctatcggtggc

SEQ ID NO: 85754 - DNA, 1533 bp, Zea Mays
cgctgcttcgtcctctctcttcttccttcccctcccccgctcgccaatcgccatcggtcactcttcctcaccttcaccttcaccttccgaaaagagagaccgaggaggatcacaggaggacatccagataagcaggaatagaacaaccccataaaccatatcggaccatacatttgcaaaagcttgtcggttttctagcctccaatcgtccctcaactcaagcctgatgaaagaagaggaggtgaatccttaagagcaagcagactttgctgactgaacaagacatgtgacttggcaagaaagcatggtccttaaccatctgcagcttctggctgcgcctcacatcaagtaactcagctgcaagcggcaccttctggacatacctgacatcattagcctgaataacctaggtgcaaaggcatggtgtggaatgtgcaaatctcttaaaagaatcccttcagtccgcagagactatagggaaaaatattggcattagcacgactccaaccaggttgtctgccatagttttgctggagggacaaaaacagaagcgttcctgactctacctcaaggatgagagctgcgtcctccacggtttaccctgtctaccttagcctccaccgccaccccaacagccaccaagcctcttttcgtccctcgagagcaaaccatgacaacacccataaatgtaccaagccacccaaagttcttagacggtctctcttctccctgcctgcctcatttcttctcctccacacatcctcctcccttgccgtagatgacgcaaacatgccatctacctcaacaattgacaccacgatcacagatcgcatcttcatggacttcagcgtctgtccaagctactttcgctcagacagacctctaggagctgagctttcctcgtgccctgattccgagcctcttggtcgtgtcgtctttggtctctatggccggcttctccccgtcactactgccaatttcaaagctacgtgtactgcagctgcatataggggcacccttgtccacaagctccttcagggacagttttttgctgctggtcgacaaggtcctcggcatgacaagggtgaggtccagcctccctctggcctcgttaggaattctgagactgttaaccctaaagcgttcgagctaaggcatgcaaggcctggcacgctttcgttatgccttggacagaatgacgatgatgacgacatcaagctcaaccccaattatcacaatcttgaattcttggttactacagggccaggaccctgtcctgagcttgatggccagaacatcgtctttgggactgtattggaaggaatggatgtcatcaccagcatcgcaaccatacctacctacaaaccagctgaaaggatccgcctcttcaacggctttgcgcagttgattggtgatggaagggctcaaactgcccgggctatgtgggaccgcccgcttaagaccgtgtatatcagcgactgcggggagctgacagtaaccaaaccatctctttcccctccaagcttgccatga

SEQ ID NO: 85755 - DNA, 1735 bp, Zea Mays
cgctgcttcgtcctctctcttcttccttcccctcccccgctcgccaatcgccatcggtcactcttcctcaccttcaccttcaccttccgaaaagagagaccgaggaggatcacaggaggacatccagataagcaggaatagaacaaccccataaaccatatcggaccatacatttgcaaaagcttgtcggttttctagcctccaatcgtccctcaactcaagcctgatgaaagaagaggaggtgaatccttaagagcaagcagactttgctgactgaacaagacatgtgacttggcaagaaagcatggtaagcatttttctcacgctttttcccgcagctcaaaccagacctcctcatcagagagcgggggagatttgccgatctctacttcaagacggtatcttgccttctcgatgttcaggtccttaaccatctgcagcttctggctgcgcctcacatcaagtaactcagctgcaagcggcaccttctggacatacctgacatcattaggaaaaatattggcattagcacgactccaaccaggttgtctgccatagttttgctggagggacaaaaacagaagcgttcctgactctacctcaaggatgagagctgcgtcctccacggtttaccctgtctaccttagcctccaccgccaccccaacagccaccaagcctcttttcgtccctcgagagcaaaccatgacaacacccataaatgtaccaagccacccaaagttcttagacggtctctcttctccctgcctgcctcatttcttctcctccacacatcctcctcccttgccgtagatgacgcaaacatgccatctacctcaacaattgacaccacgatcacagatcgcatcttcatggacttcagcgtctgtccaagctactttcgctcagacagacctctaggagctgagctttcctcgtgccctgattccgagcctcttggtcgtgtcgtctttggtctctatggccggcttctccccgtcactactgccaatttcaaagctacgtgtactgcagctgcatataggggcacccttgtccacaagctccttcagggacagttttttgctgctggtcgacaaggtcctcggcatgacaagggtgaggtccagcctccctctggcctcgttaggaattctgagactgttaaccctaaagcgttcgagctaaggcatgcaaggcctggcacgctttcgttatgccttggacagaatgacgatgatgacgacatcaagctcaaccccaattatcacaatcttgaattcttggttactacagggccaggaccctgtcctgagcttgatggccagaacatcgtctttgggactgtattggaaggaatggatgtcatcaccagcatcgcaaccatacctacctacaaaccagctgaaaggatccgcctcttcaacggctttgcgcagttgattggtgatggaagggctcaaactgcccgggctatgtgggaccgcccgcttaagaccgtgtatatcagcgactgcggggagctgacagtaaccaaaccatctctttcccctccaagcttgccatgactgccagtgtaatgacactacccacatagccagttttctgtctctgttgcttgggtcctctttctgtactctatatatgcagtgtatatattacctgtgttattaaacttatgcatgttccatgagctgtatatatatcgcttccgttgttaatttatgcatgttccct

SEQ ID NO: 85756 - DNA, 1574 bp, Zea Mays
atcgccatcggtcactcttcctcaccttcaccttcaccttccgaaaagagagaccgaggaggatcacaggaggacatccagataagcaggaatagaacaaccccataaaccatatcggaccatacatttgcaaaagcttgtcggttttctagcctccaatcgtccctcaactcaagcctgatgaaagaagaggaggtgaatccttaagagcaagcagactttgctgactgaacaagacatgtgacttggcaagaaagcatggtccttaaccatctgcagcttctggctgcgcctcacatcaagtaactcagctgcaagcggcaccttctggacatacctgacatcattaggaaaaatattggcattagcacgactccaaccaggttgtctgccatagttttgctggagggacaaaaacagaagcgttcctgactctacctcaaggatgagagctgcgtcctccacggtttaccctgtctaccttagcctccaccgccaccccaacagccaccaagcctcttttcgtccctcgagagcaaaccatgacaacacccataaatgtaccaagccacccaaagttcttagacggtctctcttctccctgcctgcctcatttcttctcctccacacatcctcctcccttgccgtagatgacgcaaacatgccatctacctcaacaattgacaccacgatcacagatcgcatcttcatggacttcagcgtctgtccaagctactttcgctcagacagacctctaggagctgagctttcctcgtgccctgattccgagcctcttggtcgtgtcgtctttggtctctatggccggcttctccccgtcactactgccaatttcaaagctacgtgtactgcagctgcatataggggcacccttgtccacaagctccttcagggacagttttttgctgctggtcgacaaggtcctcggcatgacaagggtgaggtccagcctccctctggcctcgttaggaattctgagactgttaaccctaaagcgttcgagctaaggcatgcaaggcctggcacgctttcgttatgccttggacagaatgacgatgatgacgacatcaagctcaaccccaattatcacaatcttgaattcttggttactacagggccaggaccctgtcctgagcttgatggccagaacatcgtctttgggactgtattggaaggaatggatgtcatcaccagcatcgcaaccatacctacctacaaaccagctgaaaggatccgcctcttcaacggctttgcgcagttgattggtgatggaagggctcaaactgcccgggctatgtgggaccgcccgcttaagaccgtgtatatcagcgactgcggggagctgacagtaaccaaaccatctctttcccctccaagcttgccatgactgccagtgtaatgacactacccacatagccagttttctgtctctgttgcttgggtcctctttctgtactctatatatgcagtgtatatattacctgtgttattaaacttatgcatgttccatgagctgtatatatatcgcttccgttgttaatttatgcatgttccct

SEQ ID NO: 85757 - DNA, 1390 bp, Zea Mays
actcctctcctctccccgctccagtcggtctctccagtctcctctcctcaccttgccaggaacccaggaggaggagggatacagcctgaataacctaggtgcaaaggcatggtgtggaatgtgcaaatctcttaaaagaatcccttcagtccgcagagactatagggaaaaatattggcattagcacgactccaaccaggttgtctgccatagttttgctggagggacaaaaacagaagcgttcctgactctacctcaaggatgagagctgcgtcctccacggtttaccctgtctaccttagcctccaccgccaccccaacagccaccaagcctcttttcgtccctcgagagcaaaccatgacaacacccataaatgtaccaagccacccaaagttcttagacggtctctcttctccctgcctgcctcatttcttctcctccacacatcctcctcccttgccgtagatgacgcaaacatgccatctacctcaacaattgacaccacgatcacagatcgcatcttcatggacttcagcgtctgtccaagctactttcgctcagacagacctctaggagctgagctttcctcgtgccctgattccgagcctcttggtcgtgtcgtctttggtctctatggccggcttctccccgtcactactgccaatttcaaagctacgtgtactgcagctgcatataggggcacccttgtccacaagctccttcagggacagttttttgctgctggtcgacaaggtcctcggcatgacaagggtgaggtccagcctccctctggcctcgttaggaattctgagactgttaaccctaaagcgttcgagctaaggcatgcaaggcctggcacgctttcgttatgccttggacagaatgacgatgatgacgacatcaagctcaaccccaattatcacaatcttgaattcttggttactacagggccaggaccctgtcctgagcttgatggccagaacatcgtctttgggactgtattggaaggaatggatgtcatcaccagcatcgcaaccatacctacctacaaaccagctgaaaggatccgcctcttcaacggctttgcgcagttgattggtgatggaagggctcaaactgcccgggctatgtgggaccgcccgcttaagaccgtgtatatcagcgactgcggggagctgacagtaaccaaaccatctctttcccctccaagcttgccatgactgccagtgtaatgacactacccacatagccagttttctgtctctgttgcttgggtcctctttctgtactctatatatgcagtgtatatattacctgtgttattaaacttatgcatgttccatgagctgtatatatatcgcttccgttgttaatttatgcatgttccct

SEQ ID NO: 85758 - DNA, 1447 bp, Zea Mays
actcctctcctctccccgctccagtcggtctctccagtctcctctcctcaccttgccaggaacccaggaggaggagggatacagcggacaatttggagaaccaagcctgaataacctaggtgcaaaggcatggtgtggaatgtgcaaatctcttaaaagaatcccttcagtccgcagagactatagggaaaaatattggcattagcacgactccaaccaggttgtctgccatagttttgctggagggacaaaaacagaagcgttcctgactctacctcaaggatgagagctgcgtcctccacggtttaccctgtctaccttagcctccaccgccaccccaacagccaccaagcctcttttcgtccctcgagagcaaaccatgacaacacccataaatgtaccaagccacccaaagttcttagacggtctctcttctccctgcctgcctcatttcttctcctccacacatcctcctcccttgccgtagatgacgcaaacatgccatctacctcaacaattgacaccacgatcacagatcgcatcttcatggacttcagcgtctgtccaagctactttcgctcagacagacctctaggagctgagctttcctcgtgccctgattccgagcctcttggtcgtgtcgtctttggtctctatggccggcttctccccgtcactactgccaatttcaaagctacgtgtactgcagctgcatataggggcacccttgtccacaagctccttcagggacagttttttgctgctggtcgacaaggtcctcggcatgacaagggtgaggtccagcctccctctggcctcgttaggaattctgagactgttaaccctaaagcgttcgagctaaggcatgcaaggcctggcacgctttcgttatgccttggacagaatgacgatgatgacgacatcaagctcaaccccaattatcacaatcttgaattcttggttactacagggccaggaccctgtcctgagcttgatggccagaacatcgtctttgggactgtattggaaggaatggatgtcatcaccagcatcgcaaccatacctacctacaaaccagctgaaaggatccgcctcttcaacggctttgcgcagttgattggtgatggaagggctcaaactgcccgggctatgtgggaccgcccgcttaagaccgtgtatatcagcgactgcggggagctgacagtaaccaaaccatctctttcccctccaagcttgccatgactgccagtgtaatgacactacccacatagccagttttctgtctctgttgcttgggtcctctttctgtactctatatatgcagtgtatatattacctgtgttattaaacttatgcatgttccatgagctgtatatatatcgcttccgttgttaatttatgcatgttccctttgacaatgactgtacttgatgagtacatggatgtt

SEQ ID NO: 85759 - DNA, 1344 bp, Zea Mays
actcctctcctctccccgctccagtcggtctctccagtctcctctcctcaccttgccaggaacccaggaggaggagggatacaggaaaaatattggcattagcacgactccaaccaggttgtctgccatagttttgctggagggacaaaaacagaagcgttcctgactctacctcaaggatgagagctgcgtcctccacggtttaccctgtctaccttagcctccaccgccaccccaacagccaccaagcctcttttcgtccctcgagagcaaaccatgacaacacccataaatgtaccaagccacccaaagttcttagacggtctctcttctccctgcctgcctcatttcttctcctccacacatcctcctcccttgccgtagatgacgcaaacatgccatctacctcaacaattgacaccacgatcacagatcgcatcttcatggacttcagcgtctgtccaagctactttcgctcagacagacctctaggagctgagctttcctcgtgccctgattccgagcctcttggtcgtgtcgtctttggtctctatggccggcttctccccgtcactactgccaatttcaaagctacgtgtactgcagctgcatataggggcacccttgtccacaagctccttcagggacagttttttgctgctggtcgacaaggtcctcggcatgacaagggtgaggtccagcctccctctggcctcgttaggaattctgagactgttaaccctaaagcgttcgagctaaggcatgcaaggcctggcacgctttcgttatgccttggacagaatgacgatgatgacgacatcaagctcaaccccaattatcacaatcttgaattcttggttactacagggccaggaccctgtcctgagcttgatggccagaacatcgtctttgggactgtattggaaggaatggatgtcatcaccagcatcgcaaccatacctacctacaaaccagctgaaaggatccgcctcttcaacggctttgcgcagttgattggtgatggaagggctcaaactgcccgggctatgtgggaccgcccgcttaagaccgtgtatatcagcgactgcggggagctgacagtaaccaaaccatctctttcccctccaagcttgccatgactgccagtgtaatgacactacccacatagccagttttctgtctctgttgcttgggtcctctttctgtactctatatatgcagtgtatatattacctgtgttattaaacttatgcatgttccatgagctgtatatatatcgcttccgttgttaatttatgcatgttccctttgacaatgactgtacttgatgagtacatggatgtt

SEQ ID NO: 85760 - DNA, 2392 bp, Zea Mays
caggcacttcctctgcatcacacacctatgctgcggctgcgtgatggaggaagctaacgccccagtgacgaccagccacccctcctccaccgctcctgatgcgcctccggacccggcggctgttccatccagttctgaccaaggctcccaatcctgtcaggcccagcagcaacaggtccaccagctggatgaaacgcgagagccggcgggcagcagctacgaagcgtcagagatcgccggccgcttcaacgaggccatcgatcccaaggccggcatcgacgctgcggcgcccatcgtcgattccgtcaagggcgccgtcagcaaattcggagctgtaggggttgttgattggagagagaaacgcaagcatgtccaggatgagctcgacaaggtgcgggaagaggtcacggagtaccagaagagagcacaggaggcggaggccggcagagcgcaagctctgcgggagctgggaaccgtcgtgaccgctgccgacgagctgggcctgggcctggagatggcgcgggccgagcaagcccaggcgcggcggcaggtggagctcgccgagctgcagctcgaggaggtgcggcgcggcgcaaaggcggagctcgacaccgtcagggaacgccgcacggccgcgctcgctgacctgcgggcggcgcgagcggaggtggagtcgctggagaaggtgcgcgcgcgcgccgcggccgaagcaggcgcggcggtggcgcgggagcgggaggccgccgcggcgtcgcgggaggctgggaaggccgtcgaggacctcaccgccgagctcgtcgcgctgaaaggggagctggagtcctcgcacgccgcccatgtcgcggcggagcagaagaggatgggcctggcggtcgcgtgggaggaagacaaggcgcggtggcagatggagctggaggaagccgagcaggaggccaaggggctgcgagagaagctcgtggttgcctgcgacgtcgagacgaaggcggtggcggcttcccagctcatggcgagcctaaaagctgagctgttcgcttacgccgtcgagagaacaacactgggacaggaggaggaggcgacagcgatcagcgaccggttgatgctggagaagaccaagaaagagctcgacgacgtgaaagcgagcgtcgagatggccaagcacgaggccaagtgcctgcgcgtcgccgccgcctcgatgcgcgatgagctggagaaggagaaggcagggctcaccgcgctgcggcggaaggaaagggaaaggcaagggctctcgtcagcgtccatcccttacctcgaggaggagttgaggtgggtgaccgccgagctcgccgaggcacgagcgaagaggggcagcgacgagagcgagatggccgagcgtgtagccgaggcacggcgagaagcggaggaagccaaggcgaaggcccggtcggctcgagaaaaggtcgccagggccaaggaagttgcgggcgtggccaaggccgccgtcgccgccatggaggcgcggctggaggcggtgacgcgggagatactcgccgcgaacaagtcggccgagaccgccacggcctcggccggcgcgctgctgcaagaaagcaagccgtcgagcgataaggacgtggaagcaggcgtgaccgtgacgctgacggtgcaggagtacgccgagctgagccggagagcgcaggagacagaggaggccgccggcatgcgggtggtcgaggcggtgaagctgatcaaggaggccaaggacgcggaggtgaggaggctggagaaggtggcgcggctggacaagcagaccgagcagaggcggctggcgctggaggccgcgacgctggaggccgaggaggcggagttcgacaagctgtcagcggagcgggagctgaggcagtggcgcgccgagcacgagcagcggcgcgcgcccggcgacaccgactcgccccgcccgggcctcgccgagatctccgtgctccacgaccagggcaccggcgaggggcgcgggaacccgcacatagtcagcccgagggcaggctacatgccgcggacggagctggtgatgacgggatcggcggcggatgcggatgcggatgcggacgcgaggcagaggaagaccttcttcccgcggattgtcatgttcttcgcgcgaaagagaactcagtcttggaagtgatgcacaacaaccggcttccttttgaaatttcttttggggcttgcttctggtacgtggctttctcggatggagcagatcaaatatgacgacacaagtgtaaaatgtgtattgatcataattttttttttcgttttcactcggagttgtgatccatgcttggaaatatggaccggcttgaatcttgatagttggtaaggtcttgttcttttgtccaatccaaaaatcatttcagct

SEQ ID NO: 85761 - DNA, 1118 bp, Zea Mays
gtccgtttccttcctctctctctctctctctctctctctctctcttctggggcttgcagcagaatcgcagcgaccgcgtcgtccccacgcggtgcggccgctgcgcattgcgggccgggagagcgagaacggagtggggaagatggagacggtgaagagccttctgaagccgaagccgacgccgcagcagcagctgcgcgagtggcagcgccgcctccgcaacgagggccgcaacatcgaccggcagatccgaggtccaggctgtcgccctcgacctcgatgtgctgcagatgtgcagagggaggagaagaaggtggagaaggccatcagggaggccgccaagcgcaacgacatgggatccgccaaggcgctggccatggaggtggtgcgctcgaggaaggcagtcaaccgcctgtacgagaacaaggcccagctcaactccatctccatgcaccttggcgaaatcgttgctacagctaggacagtaggccacttgtccaagagcactgaagtgatgaaacttgtcaacggcctcatgaaagcccccgaggtcgcagccacaatgcaggaattcagcaaagagatgacaaaggctggtgtgatggaagaaatggtcaacgatgctttagattcaacgctggacagcgaggacatggaggaggaaattgaagaggaggttgacaaggtcctcactgcaatcgctggggagaccgcctctgagctcccggatgctgtcaggaaggaaaaggagaagatgaagcagccttcaacaagtgtacctgaggagagaactgctatagcagaggctgttgatgacggtgagctagaccagataagggaaaggcttgccagagtgaggtcatagaagatagctgaacaaggtcagatcattgaggtgttacggcacatgacatctcacttgataatgtatacacgtatcacacacaatcactgtgattagcagaccgatttccccacatccagcaatgtgattttgtccaggccctgttgtaacctgtatgggtcatgatttctaatatatatcacgtattatatgtttggaagcaccgtgtttaatactctgaataatccatacatttcattgcactgcgacgaag

SEQ ID NO: 85762 - DNA, 1082 bp, Zea Mays
gtccgtttccttcctctctctctctctctctctctctctctctcttctggggcttgcagcagaatcgcagcgaccgcgtcgtccccacgcggtgcggccgctgcgcattgcgggccgggagagcgagaacggagtggggaagatggagacggtgaagagccttctgaagccgaagccgacgccgcagcagcagctgcgcgagtggcagcgccgcctccgcaacgagggccgcaacatcgaccggcagatccgagatgtgcagagggaggagaagaaggtggagaaggccatcagggaggccgccaagcgcaacgacatgggatccgccaaggcgctggccatggaggtggtgcgctcgaggaaggcagtcaaccgcctgtacgagaacaaggcccagctcaactccatctccatgcaccttggcgaaatcgttgctacagctaggacagtaggccacttgtccaagagcactgaagtgatgaaacttgtcaacggcctcatgaaagcccccgaggtcgcagccacaatgcaggaattcagcaaagagatgacaaaggctggtgtgatggaagaaatggtcaacgatgctttagattcaacgctggacagcgaggacatggaggaggaaattgaagaggaggttgacaaggtcctcactgcaatcgctggggagaccgcctctgagctcccggatgctgtcaggaaggaaaaggagaagatgaagcagccttcaacaagtgtacctgaggagagaactgctatagcagaggctgttgatgacggtgagctagaccagataagggaaaggcttgccagagtgaggtcatagaagatagctgaacaaggtcagatcattgaggtgttacggcacatgacatctcacttgataatgtatacacgtatcacacacaatcactgtgattagcagaccgatttccccacatccagcaatgtgattttgtccaggccctgttgtaacctgtatgggtcatgatttctaatatatatcacgtattatatgtttggaagcaccgtgtttaatactctgaataatccatacatttcattgcactgcgacgaag

SEQ ID NO: 85763 - DNA, 1809 bp, Zea Mays
gtccgtttccttcctctctctctctctctctctctctctctctcttctggggcttgcagcagaatcgcagcgaccgcgtcgtccccacgcggtgcggccgctgcgcattgcgggccgggagagcgagaacggagtggggaagatggagacggtgaagagccttctgaagccgaagccgacgccgcagcagcagctgcgcgagtggcagcgccgcctccgcaacgagggccgcaacatcgaccggcagatccgagatgtgcagagggaggagaagaaggtggagaaggccatcagggaggccgccaagcgcaacgacatgggatccgccaaggcgctggccatggaggtggtgcgctcgaggaaggcagtcaaccgcctgtacgagaacaaggcccagctcaactccatctccatgcaccttggcgaaatcgttggtactaataactaactatcccacccgttggtactaggcaaacaaggttgtgactgaactgaatcgaccttccttccatgtttggtatttacattttttggaatgctatgtgattatgacttaaccgaccactgcacttgtccactggttggatgccatgttcccatctaatacttgtctcggtgtctcaggctgaagcctaattaaccttatttatttctacgtataggtgtatataagtgtagaaatagatgaagtgaaacgtcatgtgccaattccttgtatgccatcggaaaatatactcgttccttgtgtgccactggctccacatgtcatacacacaaaaaatgttggctccacatgtcatacacacaaaaaatgtatctatatgccactcagtggcacacaagggaatgagtataaaatctgatagcataccaggaatttttccaagaaaatttttagtagaatacctcctactgacaagaactataaccttgtgtgtgttcctcgttacctaacgtcggactagcttccctctgttcctttctttcaaccactgacatagatcatgtggatcattctttattgtgtccttatccgtaaacatggtaatgacactcataagtgcaatatagtaatcgcagtatgattgtatgaaacttagaggttgtacaagctgtactgacaataagctgggaataccgtaatctttcagctacagctaggacagtaggccacttgtccaagagcactgaagtgatgaaacttgtcaacggcctcatgaaagcccccgaggtcgcagccacaatgcaggaattcagcaaagagatgacaaaggctggtgtgatggaagaaatggtcaacgatgctttagattcaacgctggacagcgaggacatggaggaggaaattgaagaggaggttgacaaggtcctcactgcaatcgctggggagaccgcctctgagctcccggatgctgtcaggaaggaaaaggagaagatgaagcagccttcaacaagtgtacctgaggagagaactgctatagcagaggctgttgatgacggtgagctagaccagataagggaaaggcttgccagagtgaggtcatagaagatagctgaacaaggtcagatcattgaggtgttacggcacatgacatctcacttgataatgtatacacgtatcacacacaatcactgtgattagcagaccgatttccccacatccagcaatgtgattttgtccaggccctgttgtaacctgtatgggtcatgatttctaatatatatcacgtattatatgtttggaagcaccgtgtttaatactctgaataatccatacatttcattgcactgcgacgaagtggaaagaga

SEQ ID NO: 85764 - DNA, 1913 bp, Zea Mays
cctccggcgatcgatgcgaggcgccgcgggaggcggctcgggctcgggcaggctcaagggaaccaatggctgcagcggtggcgatgcgagggggaagcagcgacagcggaggatttgacaaggttcccgggatggactcggggaaatacgtgcgctacaccccggagcaagttgaggtgctcgagcggctctacatcgattgccccaagccaagctcctcacggcgccagcaactgctgcgcgagtgtcctatactctccaacattgagccgaagcagatcaaggtctggttccagaaccgaaggtgccgcgataagcagcggaaggagtcttcgcggcttcaggctgtcaacagaaagctgacggcaatgaacaagcttcttatggaagagaatgagcgtcttcagaagcaagtctctcagttggttcatgaaaatgcgcacatgcggcagcagctgcagaacacttcattggccaatgatacaagctgtgaatcaaatgtcactgcccctccaaacgctataagggatgcaagtaacccttctggactccttgcgattgcggaggagaccttcacagagttcctctcaaaggctactgggacagctattgattgggtccagatgcctgggatgaagcctggtccggattcggttggtattgtggccatttcgcatggttgccgtggcgttgctgcccgcgcctgtggtttggtgaatctagaaccaacaaaagtcatagaaatcttgaaagatcgtccctcttggttccgtgattgtcgaagtctggaagtgtttacaatgtttccagctggaaatgggggaacaattgaacttatctacatgcagatgtacgccccaacaactttagttcctgcacgtgacttttggacgttgcgatacacgacaacaatggaagatggcagccttgtggtctgtgagagatccttgactggttctggaggcggtccaaatgcagcttctgcacagcaatttgttagggctgagatgcttccaagtgggtatttagtgcgcccatgcgaaggtggaggttcgattgtgcatatagtggaccatctagatctcgaggcatggagtgttcctgaagtgcttcgaccactatatgagtcttctagagtagttgctcagaaaatgactactgtggcactgcgccaccttagacaaattgctcaagaaacaagtggagaagtagtgtatgccttgggaaggcaacctgcagttctacggacctttagtcaaagactaagcagggggtttaatgatgccattagtggtttcaacgatgatggttggtctgtaatggggggagatggcattgaagacgttgttgttgcttgcaactcaaccaagaaaattaggaataatagcaatgctgggattacatttggagcgcctggaggcattatttgtgcgaaggcatccatgttactgcagagcgtcccaccggcagtactggtccgatttctgagggagcatagatctgaatgggctgattacaatattgatgcgtatttggcttcatcactgaagaccagtgcgtgctcacttcctgggttgcgacccatgagattttctggggggcagatgatcatgccacttgctcacacagtggagaacgaggagattcttgaagttgtccgccttgaaggacaacctcttactcatgatgaagcccttctttcaagggacatccaccttctccagctttgcactggaatagatgagaaatctgtgggttcctccttccagcttgtgtttgcaccaattgatgagcattttccggatgatgctccattgatttcctctggctttcgtgtcataccacttgatatgaaaacagttaagcatcactaacaacattaccttttctttttcgttgcttgggcggtcgct

SEQ ID NO: 85765 - DNA, 2774 bp, Zea Mays
cctccggcgatcgatgcgaggcgccgcgggaggcggctcgggctcgggcaggctcaagggaaccaatggctgcagcggtggcgatgcgagggggaagcagcgacagcggaggatttgacaaggttcccgggatggactcggggaaatacgtgcgctacaccccggagcaagttgaggtgctcgagcggctctacatcgattgccccaagccaagctcctcacggcgccagcaactgctgcgcgagtgtcctatactctccaacattgagccgaagcagatcaaggtctggttccagaaccgaaggtgccgcgataagcagcggaaggagtcttcgcggcttcaggctgtcaacagaaagctgacggcaatgaacaagcttcttatggaagagaatgagcgtcttcagaagcaagtctctcagttggttcatgaaaatgcgcacatgcggcagcagctgcagaacacttcattggccaatgatacaagctgtgaatcaaatgtcactgcccctccaaacgctataagggatgcaagtaacccttctggactccttgcgattgcggaggagaccttcacagagttcctctcaaaggctactgggacagctattgattgggtccagatgcctgggatgaagcctggtccggattcggttggtattgtggccatttcgcatggttgccgtggcgttgctgcccgcgcctgtggtttggtgaatctagaaccaacaaaagtcatagaaatcttgaaagatcgtccctcttggttccgtgattgtcgaagtctggaagtgtttacaatgtttccagctggaaatgggggaacaattgaacttatctacatgcagatgtacgccccaacaactttagttcctgcacgtgacttttggacgttgcgatacacgacaacaatggaagatggcagccttgtggtctgtgagagatccttgactggttctggaggcggtccaaatgcagcttctgcacagcaatttgttagggctgagatgcttccaagtgggtatttagtgcgcccatgcgaaggtggaggttcgattgtgcatatagtggaccatctagatctcgaggcatggagtgttcctgaagtgcttcgaccactatatgagtcttctagagtagttgctcagaaaatgactactgtggcactgcgccaccttagacaaattgctcaagaaacaagtggagaagtagtgtatgccttgggaaggcaacctgcagttctacggacctttagtcaaagactaagcagggggtttaatgatgccattagtggtttcaacgatgatggttggtctgtaatggggggagatggcattgaagacgttgttgttgcttgcaactcaaccaagaaaattaggaataatagcaatgctgggattacatttggagcgcctggaggcattatttgtgcgaaggcatccatgttactgcagagcgtcccaccggcagtactggtccgatttctgagggagcatagatctgaatgggctgattacaatattgatgcgtatttggcttcatcactgaagaccagtgcgtgctcacttcctgggttgcgacccatgagattttctggggggcagatgatcatgccacttgctcacacagtggagaacgaggagattcttgaagttgtccgccttgaaggacaacctcttactcatgatgaagcccttctttcaagggacatccaccttctccagctttgcactggaatagatgagaaatctgtgggttcctccttccagcttgtgtttgcaccaattgatgagcattttccggatgatgctccattgatttcctctggctttcgtgtcataccacttgatatgaaaacagatggtgtatcctctggtaggacgctagatttggcatctagtcttgatgtgggttctgctgcaccccaagcctcaggggatgcacctccagatgactgtaatttgagatctgtgctgacaatcgcctttcaattcccttatgagatgcaccttcaggacagtgttgctactatggcccgtcaatatgtgcgtagtgttgtttctgctgtgcaaagggtgtcgatggctatatctccctcccaatctggtctaaatgctgggcagaggatgctttctggcttccctgaagctgccacacttgctagatgggtttgccagagttatcactaccatctaggtgtggaattactcaatcaatcagatgaagctggtgaagcattgttgaaaatgctctggcatcatccagatgctgttctgtgctgctcttttaaggagaaacctatgtttacgtttgcaaacaaggcagggctcgacatgttagaaacatctcttattgcgctgcaagacctgacgctagacaagatcttcgacgagtcaggaaggaaagcaatattctcagatatctcaaaactaatggaacagggctacgcgtacctgccgtcgggcgtgtgcatgtcaggaatgggtcggcatgtctcattcgaccaagctgtagcgtggaaggtgctcggcgaggacagcagcgtccactgcctggcgttctgcttcgtcaactggtccttcgtttgacacgccatcccatggcctgtgtgatgagcaggccaatttttttgtatggtgatcccaatatggggaaaccatcagctgtgacagaaggctttatgttgcatgcactagttgtacgtcttgaatcgagtgtatttatgaagaaattggatactgcgcaaagtctggtgccacttacgtttgactgcc

SEQ ID NO: 85766 - DNA, 2857 bp, Zea Mays
gctgcgtggatctgtgccgcttttggtgtctgtctgcgcgtgcccactgatgcttccggtttcatcgcttcagggatcttcgcgagcggggagttgaagcgcgagatttgcgcggctacgattctgcgttgccgagggagcaagggaaccaatggctgcagcggtggcgatgcgagggggaagcagcgacagcggaggatttgacaaggttcccgggatggactcggggaaatacgtgcgctacaccccggagcaagttgaggtgctcgagcggctctacatcgattgccccaagccaagctcctcacggcgccagcaactgctgcgcgagtgtcctatactctccaacattgagccgaagcagatcaaggtctggttccagaaccgaaggtgccgcgataagcagcggaaggagtcttcgcggcttcaggctgtcaacagaaagctgacggcaatgaacaagcttcttatggaagagaatgagcgtcttcagaagcaagtctctcagttggttcatgaaaatgcgcacatgcggcagcagctgcagaacacttcattggccaatgatacaagctgtgaatcaaatgtcactgcccctccaaacgctataagggatgcaagtaacccttctggactccttgcgattgcggaggagaccttcacagagttcctctcaaaggctactgggacagctattgattgggtccagatgcctgggatgaagcctggtccggattcggttggtattgtggccatttcgcatggttgccgtggcgttgctgcccgcgcctgtggtttggtgaatctagaaccaacaaaagtcatagaaatcttgaaagatcgtccctcttggttccgtgattgtcgaagtctggaagtgtttacaatgtttccagctggaaatgggggaacaattgaacttatctacatgcagatgtacgccccaacaactttagttcctgcacgtgacttttggacgttgcgatacacgacaacaatggaagatggcagccttgtggtctgtgagagatccttgactggttctggaggcggtccaaatgcagcttctgcacagcaatttgttagggctgagatgcttccaagtgggtatttagtgcgcccatgcgaaggtggaggttcgattgtgcatatagtggaccatctagatctcgaggcatggagtgttcctgaagtgcttcgaccactatatgagtcttctagagtagttgctcagaaaatgactactgtggcactgcgccaccttagacaaattgctcaagaaacaagtggagaagtagtgtatgccttgggaaggcaacctgcagttctacggacctttagtcaaagactaagcagggggtttaatgatgccattagtggtttcaacgatgatggttggtctgtaatggggggagatggcattgaagacgttgttgttgcttgcaactcaaccaagaaaattaggaataatagcaatgctgggattacatttggagcgcctggaggcattatttgtgcgaaggcatccatgttactgcagagcgtcccaccggcagtactggtccgatttctgagggagcatagatctgaatgggctgattacaatattgatgcgtatttggcttcatcactgaagaccagtgcgtgctcacttcctgggttgcgacccatgagattttctggggggcagatgatcatgccacttgctcacacagtggagaacgaggagattcttgaagttgtccgccttgaaggacaacctcttactcatgatgaagcccttctttcaagggacatccaccttctccagctttgcactggaatagatgagaaatctgtgggttcctccttccagcttgtgtttgcaccaattgatgagcattttccggatgatgctccattgatttcctctggctttcgtgtcataccacttgatatgaaaacagatggtgtatcctctggtaggacgctagatttggcatctagtcttgatgtgggttctgctgcaccccaagcctcaggggatgcacctccagatgactgtaatttgagatctgtgctgacaatcgcctttcaattcccttatgagatgcaccttcaggacagtgttgctactatggcccgtcaatatgtgcgtagtgttgtttctgctgtgcaaagggtgtcgatggctatatctccctcccaatctggtctaaatgctgggcagaggatgctttctggcttccctgaagctgccacacttgctagatgggtttgccagagttatcactaccatctaggtgtggaattactcaatcaatcagatgaagctggtgaagcattgttgaaaatgctctggcatcatccagatgctgttctgtgctgctcttttaaggagaaacctatgtttacgtttgcaaacaaggcagggctcgacatgttagaaacatctcttattgcgctgcaagacctgacgctagacaagatcttcgacgagtcaggaaggaaagcaatattctcagatatctcaaaactaatggaacagggctacgcgtacctgccgtcgggcgtgtgcatgtcaggaatgggtcggcatgtctcattcgaccaagctgtagcgtggaaggtgctcggcgaggacagcagcgtccactgcctggcgttctgcttcgtcaactggtccttcgtttgacacgccatcccatggcctgtgtgatgagcaggccaatttttttgtatggtgatcccaatatggggaaaccatcagctgtgacagaaggctttatgttgcatgcactagttgtacgtcttgaatcgagtgtatttatgaagaaattggatactgcgcaaagtctggtgccacttacgtttgact

SEQ ID NO: 85767 - DNA, 920 bp, Zea Mays
gttgccccaccccaccaagtcaaacgtccccagcctcctaaaatttcccctttccccaactaacacgacaccccccttcccttcctccgatccccccgcctcccccaaaatccgacgcgtaatcgccgccatggccgccgccggcaagctcctcctcctggccgccgccatcctggcggcttccttcgtcgccgacgcgcgcccgtgcggccacgcgcagacgctcctcgtctccttctcctccgtcctcaggccgaacccggaccccaccaacccgacgccgctcaccaccacagtcgtcaccgtcctccgcgtccggcgcctcggcccgcaccagatccgccgccccgtggcgctcccctccgtcgagtcggaggtcgccgcctcgtccgcccaggaccgcgccaaggacatcctcgtcgtcgtctccggcctcctcttcggcttcggctgcggcgccctcaccgcggcgtccatgtacctcgtgtggtcgctcctcgcctccacctgcgcctctggatacgacgacgacgtctacagcgacgacgaggaccggctgtccgactccgagagccccaagaatgccggctacgtcatcatccacgacgctgacgagtacggcgccggtaagaactagggctggggatccgtcttcggtctcgccgggggtcagcagaaggattttcgtaataacatttgcatgattgcttggaaatgtgcagtatactctatgcacctttttaatcatgtgtgtcgcgtctgtcggtatgtatgtcgtctgggggaaaggaaatttaaattatatgaaatgaatatgctgttgatgtgtcaaattcaaatggtacttgcgctgctaccgcaaaacatggatcttattggctgccacgatatacaaaaaacaaaatcatggtgttcttcct

SEQ ID NO: 85768 - DNA, 1962 bp, Zea Mays
atgggtcgcagcccatgcacagcccagggagttttcaggagcgcgttgtctaggaacgaacccccggaaacattttcccttcagacggttcaggaagcaattaaacctcagaaggaaaccgtgttggttctagaggagaatcagtccttggaaaatgctcttcgaactttgctgcaggagcttgtgtcatctgcggtccaatcggataaaaagattatgcagtacgggaattctttggatagcggagaaagtaactgcctgataactcgccttcttgatattgtgctttacctttgcgaaagagggcatgttgaaggtggtatggtattccagctgttagaagacctaactgaaatgtcaacaatcaaagactgcaaagatatctttgggtatattgagagccagcaagatgtattggggaagcaagaactttttggacgtggcaaactagttatgctaaggacttgcaaccaacttcttcgcagactatcgaaggcaaatgatgtggtgttctgtgggcgcattattatgtttcttgcacattttttcccattatcggagcgttcagctctcaacattaaaggggttttcaatacatcaaatgtaacaaagtacgaaaaggatgctatggatggaatctctgttgatttcaacttctacaagaccctctggagtctacaggaacatttcagcaacccagctttgacttctacaaatccggcaaaatggcaaaagttctcttctaatctggcggttgtgttgaacacatttgaagctcaacctcttagcgatgatgatggaaaacttaacaatctgaacgaggaggaagatgctgctttcaatattaagtacctgactagcagtaaattaatgggtttggagttgaaggacccaagttttcgacgccacatccttgttcagtgtcttatattttttgactatctcaaggcacctgggaaaaatgacaaagaaggtccaacagggagcatgatagaggaaattaaatcttgtgaagagcatgttaagaagcttctggaaattattccccccaaagggaaggaatttctgaaaagcattgaacatattcttgagcgggagaaaaattgggtttggtggaagcgagatgggtgtctcgcatttgaaaagccaccctttgaaaagaaaccaggtcaggctggtgccagaaaacggaagccaaggtggagactgggaagcaaagagctcagccaactttggaaatgggcagaacaaaaccccaatgtcttgactgatcctgaccgtgtccgcatgccatcaattacagaatattggaaaccacttgcagaagatatggatccatctgctggaattgaagaggagtatcaccacaaaagtaatcgggtgtactgttggaaaggactacggttttcggccaggcaggacttggatggattcgcgcggttttcagactacgggatcgaaggggttgtaccttcagaactgctgccacctgaagtaaatgccaagttttcttctaaacccgccgagaaggttaagcggacgagaaaggaagattcaaaaagcgtgtcagctcatcagcccagagagcatcaggttgctgcgacacctgaaaccgacggcggtgtcgacccggaagaaggcgaaggcgcggcgccaatggattccgacaacggcgcggtgggggatagccagaaacggagcccgggggaggtctctggccctgaaagcgggcagtgcgagcctgaggcggacgctgatgataacgtgaggacggaaactaccagtagggatgctcgtgccggagagatgaaatgaaacagtggcatgaagaggaaccagattttgtcgactcactgacattgaaccagattttgaacagctgagatacattctcttgttggtgtgtactgtgtagtagacatcagtagccatccatttgaaggaaatgcttcccgctaggtc

SEQ ID NO: 85769 - DNA, 2341 bp, Zea Mays
cgcggtccatctgtcttgtgtttctccttcctcattcctcagctcgagctcctcgacggctcgccagtctgccgccgcgcacggcgcatctgttccttctgctctgcgacggcgagcctctcccctccctccgtgctcgtatcgtagcctattttcgccgccgcagcttgcccagtgctgttatcttgtgttcggcaccgcgtcaaaggctgaccctctccaggcgcctggtagatcgcccagactcaaccgggtaagccttaccgcgcacgccaccatggccgagccctcgccgcctccggtgtcgaacgctggcctccgtatcctcctgtcgaaggaccggccggctccctcccctccacccaccgccgctgtctccagccacgccgaccgcgaccgcatcatcggagttttcaggagcgcgttgtctaggaacgaacccccggaaacattttcccttcagacggttcaggaagcaattaaacctcagaaggaaaccgtgttggttctagaggagaatcagtccttggaaaatgctcttcgaactttgctgcaggagcttgtgtcatctgcggtccaatcggataaaaagattatgcagtacgggaattctttggatagcggagaaagtaactgcctgataactcgccttcttgatattgtgctttacctttgcgaaagagggcatgttgaaggtggtatggtattccagctgttagaagacctaactgaaatgtcaacaatcaaagactgcaaagatatctttgggtatattgagagccagcaagatgtattggggaagcaagaactttttggacgtggcaaactagttatgctaaggacttgcaaccaacttcttcgcagactatcgaaggcaaatgatgtggtgttctgtgggcgcattattatgtttcttgcacattttttcccattatcggagcgttcagctctcaacattaaaggggttttcaatacatcaaatgtaacaaagtacgaaaaggatgctatggatggaatctctgttgatttcaacttctacaagaccctctggagtctacaggaacatttcagcaacccagctttgacttctacaaatccggcaaaatggcaaaagttctcttctaatctggcggttgtgttgaacacatttgaagctcaacctcttagcgatgatgatggaaaacttaacaatctgaacgaggaggaagatgctgctttcaatattaagtacctgactagcagtaaattaatgggtttggagttgaaggacccaagttttcgacgccacatccttgttcagtgtcttatattttttgactatctcaaggcacctgggaaaaatgacaaagaaggtccaacagggagcatgatagaggaaattaaatcttgtgaagagcatgttaagaagcttctggaaattattccccccaaagggaaggaatttctgaaaagcattgaacatattcttgagcgggagaaaaattgggtttggtggaagcgagatgggtgtctcgcatttgaaaagccaccctttgaaaagaaaccaggtcaggctggtgccagaaaacggaagccaaggtggagactgggaagcaaagagctcagccaactttggaaatgggcagaacaaaaccccaatgtcttgactgatcctgaccgtgtccgcatgccatcaattacagaatattggaaaccacttgcagaagatatggatccatctgctggaattgaagaggagtatcaccacaaaagtaatcgggtgtactgttggaaaggactacggttttcggccaggcaggacttggatggattcgcgcggttttcagactacgggatcgaaggggttgtaccttcagaactgctgccacctgaagtaaatgccaagttttcttctaaacccgccgagaaggttaagcggacgagaaaggaagattcaaaaagcgtgtcagctcatcagcccagagagcatcaggttgctgcgacacctgaaaccgacggcggtgtcgacccggaagaaggcgaaggcgcggcgccaatggattccgacaacggcgcggtgggggatagccagaaacggagcccgggggaggtctctggccctgaaagcgggcagtgcgagcctgaggcggacgctgatgataacgtgaggacggaaactaccagtagggatgctcgtgccggagagatgaaatgaaacagtggcatgaagaggaaccagattttgtcgactcactgacattgaaccagattttgaacagctgagatacattctcttgttggtgtgtactgtgtagtagacatcagtagccatccatttgaaggaaatgcttcccgctaggtc

SEQ ID NO: 85770 - DNA, 1355 bp, Zea Mays
cgtgcggatgcacttgtttgcgtcccgtgcgcgcgtgatctgatcagcgcgttcgcgtggctcggtcgccacccaactcgacaccgcccacctccacctcctccgcgtccgcttttttgtccgggcacaccccgcccgacgccgccggaaccagaccagagtccacaccacaccacaggagaggagaggagctctggcccgccaaaaaaaaatagcaggggcaggggccgcaggcgccgcgacccatgggcgtcaagcaggtcctcgtccgcccccgctacggcgacgaggatgtcgtcgaccagtcgccgccgccgcccatgtcgtcctcgccctgcggccgctacgtccaccaccgcgtctgcaggttcgacacgctcgccggcgtagccatcaagtacggcgtcgaggtggcggacgtgaagcgcgccaacggcctcaccaccgacctgcagatgttcgcgcacaagacgctgcgggtcccgctccacggcaggcacgcgccgtctcctccctcctcgtccccaagccacgccgccagagaatggactaaaaatgctgcttccctggacccgctccttaaacttaaaccaccacggagcacagtttcgccatccatgagccttctactacaggggtgccatggcctgacgccggctccaaagggggacctgaacctgaccgatgaatgcgctcaaggccatcacaggaaagccggaagcttatcgagcaccttgttgccgaggagagccgggcaagggctggccctgaggccaaagtctggcggtcgggcagacacgaacggcatccagcaggatctgttggctgcgtgggtgccctcgtacggggacgggttgcgcgcggtgaagagatcgtcgagcgctccggagttccaggattcggacagcgtcagcctcgcctcggcgtggctgaagagcaagtggaacctgaaaccggattatgccttcaccctggcgctgttcgacggcatctccaagcctctcctggacagcatccccaagcctctcctcgacaacatccccaactcgatcgttgcttggagaaacaaggcggccagagattagcagcttcgtttcgtctctttacagccaacaaaaaaaaaggcctcgaacggttggacacactgtgctgaaatggcgtgacggatacagtgacacattacttgcacatacatactgtgctgaatctattgtgccaaagcagcagcagcagcagattgggagctgggagatgagcctgggggtgtattcttttcatttttgtacgtacacatctaggaatgaaggcaaacgcctggcagcattcccatgacctaataaagaaatagcttgttc

SEQ ID NO: 85771 - DNA, 2440 bp, Zea Mays
gtttggcgggcgccgcgcgtatgtttctcgttgcgacttggaggagaaggagattcgccgtctcaccccttccctgcctgctccctcgtctaagaaaagcgggcagagcagagacggcggcggcaggccatcgcggactcccgctcaccctcgtctgccaccgcctcccaggtcaggggccgacggcgacgggtggggaggggcggcagaggtagtccgaggggaggctgtggagcggagggcggagagaggccacgccgtccggagtctccagttccgtcgccacagcttcctgccgcgcctgggccgaggtaaacgagagggatcgaggaagaagtatcccccggagccccttcccccgaacccgaaggctccggaatggcgcactgggttagcgacagtgatggcagtgacaactttgaatgggatagtgatggcaatggggaggagccagcgaacttcaatgctgctggtgccggttcatcagctctgagatcaacgaacactgatgctccaggtccatcaacacgggttgctaatggcaatgggaaggctgggccatctgcctccttggttcaaaagtatatggacatgggtttcacggaagagattgttcggaaggccatgaaggacaatggggataatggagcagattcattagttgagcttcttcttacttaccaggaactaggcaatgacctcaaagtggataacggcttcgcttctggttgtgccccccaaactgttgatgatagtgatgatgacgacattctagaaaactgggatgatgaggatgctgatggtgggagaagcaccagggttgctaactctattgatgattctgaagacgaggatttcttaaatgagatgtcacagaaggacaagaaagttgattccttagttaaaatggggtttcctgaagacgaggctgcactggctattactagatgcgggcaggatgcatctatttctgttctggtggattccatatatgcttcacagaccgcaggagatggttactgtggcaatttgtctgactacgagggtaattccaatggagggagaaacaaaggaaggttcatggacgggaacaaaaaaaagagaaaaagatatggaggtcaagcacagggaaatagaggcccattagatggtagctgtgaagaacccatgcctctcccaaatccaatggttggatttaatttgccggaccattggacaagaccagtagacagatcgctgcctacacaagctattggaccaccatacttctactacgagaatgttgctcttgctccaaagggtgtctggactaccatatctagattcttgtacgatattcagccggagtttgtggactccaagtacttctgcgctgctgccaggaaaagaggctacatacacaatctaccacttgagagaaggtcgcctctcctccccttacctccgaagacaatatttgaagcatttcctcgtaccaagaggtggtggccttcatgggacccaaggcggcagttcaattgcctccagacttgtacgtctagcgcaaaactgttagagaggattcgtgtaacccttgcaaacagttcggatccaccacctccattagttcagaagtttgtgctggaggagtgtaggaaatggaatctggcttgggttggcctaaacaaggttgctcccctagagcctgatgagatggagttcctgcttggctttcccaaggatcacaccagaggtatcagcaggacagagaggtaccgatctcttggaaactcgtttcaggttgacactgttgcttaccatctctcagtcctcaaggataggtacccacaaggcatgaacgtgttgtctctattcactggcatcggaggagccgaggtggctctccataggctcggtatacgcatgaacacagtcgtttcagtagagaagtctgaggtgaacaggactattctgaagagctggtgggatcagacacagactggtaccttgattgagatcaatgatgtgcagacgctgacagctgataggatcgaggcatatattagacgaattggcggctttgatctcgtgataggtggaagcccatgcaacaatctcgctgggagcaaccgccaccacagagatggcttggagggcgaacattcttcattgttttaccattattttaggatcttggactccgtcaagtccatcatggagcgcctgtagtttttagaaacttttgatgttctggttcgtagaattgtagccgtctttccctgtgatcaaacttgtgaatgatttgaaggtcgactggtgtaatattcatgtcactctaatttaggctactttcgttaattacctcttgtgatcaatgcaaattgaaaggcaggtttcatttcttaagtttgtatttctcaatgcgagatctagtatctttgtcgaaaaaaaaaacctaaaa

SEQ ID NO: 85772 - DNA, 345 bp, Zea Mays
atgtctgtgccagcgttagcccaggtgcctgttggaagctggtttgggctgcatcaactgtccgcgcagaatttggaccgatatcgcagatggcgggggactggaaagaagatggttccttccgctgctcgtggtgtgcttgaatccagtagtggtacacattctggtggctttatgatgaaaaggaaacagcagcctgatgccaaaaaccaaaaggtcaatatggccgctactaacgatgtcatcaggcatgtgatgcacatgctcgcctgcaaagagtacagctcactcgtgctcctctttgattttctcatgtttgcgcggtataagttctacactttttga

SEQ ID NO: 85773 - DNA, 1112 bp, Zea Mays
gagccaactactagcttgtttgttaagccattcacttcccttgtttgttaagagctgagctacatttattctcttcttcttgagcccctggcctccccctcctgccaggctgcgcattctttctccagctctctgataagctagccagcgtcgtcgtcgtgtcttgttagttattagctctatctcgccgccctgcagctgctgatcgagtgagggaattcagcagcagcagcagcaggtagcatagcatagatatgacggcggcggaggtggaggccgccaaggacatcgccgaggagaaggccgtcgtgccgttgccaccgtcgcccgccaagccggccgacgacgactccaaggccatcgtcgctcttgtcgtcaaggacgctgctgctgggaaaccttctacagctattattggaggctcaactgaaagagatgcttacctcgccaagatcgtgtccgagaagaggctgagtctgatcaccgcctgggaggagagccagaaggcgagagccgacaacagggctgccaagaagcttgccttcatcacgtcctgggagaacgccaagaaagcggagatggaggcggagctcagaaagatcgaggagcaactgcagaagaagaaggcggcgtacgaggagaagctcaagaacaagctggcgatgctgcacaggacggcggaggagaggagggcgcagacggaggccaggcgcggcgaggagaccatcctggcggaggagatggccgccaagtaccgcgccaagggcgagggccccaccaagctctttggcctcttgaaagcgtgacctctgctatggagaatgccctgtttcgtgcgtgtattaatttcgtattctcaacaagtgcacttggtgtgtgtgctgtttgttattttctctcttgtattccaaggcttgcttgacaatatctgttgtattgtatttgtataggagtgcagtgcagtgcagtgctattctttcttctcgcttctcttttgatgattggcaaccgccttcttctctgctgcattttcttcgtttgatggacggaaacaaaacgtactctctcgacacacaccctgtttctccacgctggaatctgattgtataggt

SEQ ID NO: 85774 - DNA, 976 bp, Zea Mays
gagccaactactagcttgtttgttaagccattcacttcccttgtttgttaagagctgagctacatttattctcttcttcttgagcccctggcctccccctcctgccaggctgcgcattctttctccagctctctgataagctagccagcgtcgtcgtcgtgtcttgttagttattagctctatctcgccgccctgcagctgctgatcgagtgagggaattcagcagcagcagcagcaggtagcatagcatagatatgacggcggcggaggtggaggccgccaaggacatcgccgaggagaaggccgtcgtgccgttgccaccgtcgcccgccaagccggccgacgacgactccaaggccatcgtcgctcttgtcgtcaaggatgcttacctcgccaagatcgtgtccgagaagaggctgagtctgatcaccgcctgggaggagagccagaaggcgagagccgacaacaggagcaactgcagaagaagaaggcggcgtacgaggagaagctcaagaacaagctggcgatgctgcacaggacggcggaggagaggagggcgcagacggaggccaggcgcggcgaggagaccatcctggcggaggagatggccgccaagtaccgcgccaagggcgagggccccaccaagctctttggcctcttgaaagcgtgacctctgctatggagaatgccctgtttcgtgcgtgtattaatttcgtattctcaacaagtgcacttggtgtgtgtgctgtttgttattttctctcttgtattccaaggcttgcttgacaatatctgttgtattgtatttgtataggagtgcagtgcagtgcagtgctattctttcttctcgcttctcttttgatgattggcaaccgccttcttctctgctgcattttcttcgtttgatggacggaaacaaaacgtactctctcgacacacaccctgtttctccacgctggaatctgattgtataggt

SEQ ID NO: 85775 - DNA, 3916 bp, Zea Mays
atggcgctctcggggatgcgggggctctcggtcttcatcagcgacatacgcaactgccacaacaaggagcaggagcgcctccgcgtcgacaaggagctcggcaacatccgcacgcggttcaaaaacgagaagagctgcgtgcgaggcatgagcgctatgggcctaaggctgcagagcagcgtgagtgcagaaccatcgatggagacttgcggtgcgtctgtggcagagctgaagagtgagacagcgtcgtggacggatgggaggtggggtgagttggacaggaagcagggcttatcaccatacgagaagaaaaaatatgtatggaaaatgctttacatttatatgctgggttatgatgttgattttgggcatatggaaactgtctcgttgatatctgcaccaaagtatcctgagaagcaggttgggtatattgtgacatcttgcttactgaatgagaataatgatttcttaagaatggtaataaatacagtaaggaatgacataatcggacgaaatgagaccttccagtgcttagcattgacaatggtaggtaacattggtggtaaagaattttctgagtcactagccccagatgtccagaaacttcttatttcaagcagttgccgtcctgttgtcagaaagaaggctgctctatgccttctgcggctttataggaagaatcctgatgttgtgaatattgatggctgggctgaccgaatggcacaacttctagatgagcgtgatttaggtgtgctgacatctgtcacgagtctttttgtttcactagtatccaacaatgttgaagcatattggaattgtcttcctaaatgtgtgagaatattggagaggttagcaagaaatcaagatattccacaagagtacacttactatggaattccatctccttggcttcaggttaagacaatgagagctcttcagtacttccctaccattgaagatcccaacgcaagacgagctttgtttgaggttttacagcgcattttgatgggtactgatgttgttaaaaacgttaacaagaacaatgcctcacatgctgttctctttgaagctcttgctctggtcatgcatctggatgctgaaaaggagatgatgtcacagtgtgtggctcttcttgggaagtttattgcagtccgggagccaaacattcggtaccttggtctggaaaacatgactaggatgctgttagtaacagatgtgcaggatatcattaaaaggcaccaggctcagatcatcacatctttgaaggatccagatatcagcattaggagaagggctcttgatttattatatggcatgtgtgatgttacaaacgcgaaggaaattgtggaggagttgttgcaggctgaatcctcttctcttacctcacagtaccttgatacagcagaatttgcaatgcgtgaagagttgtctctgaaggcagctattcttgcagaaaaatttgctccgcaactattgtggtatgttgatgttattcttcaacttatagacaaagctggagattttgtaagtgatgatatatggtatcgagtggtacaatttgttacgaacaacgaagacctacagtcatacgctgcaactaaagcgagagaatatcttgacaagcctgctttacatgagacgatggtcaaggtgagtgcctaccttcttggggagtatggacatcttttggcccggagacctggctgtagccctaaggaattgtttgctattataaatgataaacttcctacagtatcggcaagtactgtagctattcttctctcaacctatgccaagatattgatgcacactcaacctcctgatgttggactgcaacaacaaatcctcacaatatttaaaaagtacgagagctatattgatgttgaaatacaacagagagcagttgaatattttgaactaagcaggaaaggtcctgctttggcagatgtgttggctgaaatgccaaaattccctgaacgtgagtctgcactgttgaagaaggctgaagacgctgaaattgacacagcagagcaaagtgccataaagctacgcagtcagcaacaaacatctagtgctcttgttgtagctgatcacccccctgcaaatggatttgcaccaccagttaataatctcactcttgtgaagatgccaagtcaaactgtttctgacactcaggagagtggagtaagttatgaagaagctcctaagcctcctgttgaagctcccaaagaaaatgggactcctgtcgaagtgcagaacagggacacaaacattactgaaatcaacaatgagattaaagctgaacctccctctacatcccattctacctctcccggagacctcctcctggcagatcttttgggtcctcttgcgatagaaggccctcctgctgtagagcaaaatcctgcccaaggattgaatgctaatcaaagtccagctggtgacttggcacttgctacccttgatgatcagtccaactcagttcagccaattgtcaacgtcgaggagaagtttcatattttgtgcacaaaagatagtggggtgctgtacgaggatccttacatccagattggcttgaaagcggagtggcgtgcccatcatggccgtcttgttcttttcctgggtaacaaaaatacttcagcccttacgtcagtgcgggcgctgattttgcctcctagtcatttgaaaatggaactttcgtcagttcctgatactattcctccaagagcgcaggtgcaagttccccttgaggttgcgaatctccttgcaagtagagatgttgcggttctagatttctcgtatgcttttgggacttcactggtggatgccaaacttcgactccctgttgtattgaataaatttttgcagactataactcttacccctgaagaatttttctcccagtggaaagcgcttactgttcattcgctgaaggttcaagaagtggttaaaggtgtgaaacccatgcctctttctgagatggctaatcttttcatgagccttcacttggcggtcgctcctggacttgataacaacccgaacaatctggttgcatgcacgacattcttttctgaagcaacacgtgccatgctttgtctgatacgagttgaaacagatccacaagacaggacccaactgcggctaacagttgcctcgggcgaccaatatttgacattcgagttgaaagagttcatcaaagaacatctggttgatatcccaaggactcaggtcgccccacctcgcgcagcagtccagccacagttgcctactacagcacctgccacatacaatgaccctggtaccatgcttgctggattgctatgagaagtaacccgaaggaatagtgttttgatgtacatgacagttatttaatacgaggatctaacatctccacaagcatcttgctgccaagacgtacacgtggagcaaccaagaaagagctggcggagtgtagtctccatgaggattctaaaccgagaaagagcttagattctttttgtgcggtttgaaggccccctccctctccatgtagcagttgccgtattgtgtaagcgtaacttgttgtttctcattattatcatccccttttggtccatttgtataacctgtatcgcccatgtctggtggtggacaatcggtagtttttgtgtgttaatataaggtgctaggttttcccaccatgccgattgtaaagttgccctggtgcgcattgcactgcgatttgtacggaatagggaaggaaaaatttataggttttgctttgtgcatgttctatggtttgcatagctcccatctcttgatttcctttttcttctgctgctatgtggtggtgtgtgatggttcacgaggctcgattgtataatgtaacctggttggaaccggtgctccttttcttttggagttcccaattcatgga

SEQ ID NO: 85776 - DNA, 93 bp, Zea Mays
ggtgaccgagacgagcgtcccatccccctcccctcgtacgtgaagctggacccgccagctgcgtcgtccttttctctacgacgacggccgccg

SEQ ID NO: 85777 - DNA, 1504 bp, Zea Mays
atggaggccgccgcgcccgatggggccgcgcaggcgtccccgccccccgcggaggccgaccgcccgcccgagcctcgccccccgccgctgccagccgcggggacgcacgatccgcacttcctgagctcgatcataggggacgcggcgcccccgcccccgccgccgccgctcgggcagaagcggaagcgggggaggccgcccaagaggaaggacggcgcggccgtggccgcggggccggtggtgccggcgccggcgccggcgctcgcccgggccgcccggagaaggcaggacgaggaggaggtcgtctgcttcatctgcttcgacgggggaaacctcgtcgtctgcgataggaggggttgccccaaggtctaccatccggcgtgcatcaagcgtgacgaggcattcttccagtcccggagcaagtggaactgcggctggcacatatgcagcagctgcgaaaaggcagtgcactacatgtgctacacttgtacatactccctctgcaaagtgtgcatcaagcaagatctgaaagggaagctttcattaacattggaagaactcactactgccaagaatagatggaatgttcctagcacttctgctaggaaagaaaaagaggagtcgtctgatgacctgtatgatgctaataatgatgatgatgctggttctgactgctcctcaggaaaacgaaggcgaactaattcaaggaaaaagggtcaaaaacgccgaaagactcttctgcttgattatatcaagaagaataaccttcgtgatcctcaaaggaaaagccagattatttgtgactcgagacttcacttcttgttcaggaaagcacgagttgctcactttgagatgttaaagcttttggaaatgcattttcttacgaatgagacttcaacagtaactaatagtagccaagtgactatcaatctcaattcagctcatgtagataccaatggacacaatgacacggctgcaaaagtttcccctgataagaggaggaggatctatagaaagatggaaagagatacacaagttaatcttgaggattatgcagcaattgacatgcataacataaatttgatttacatgaggcgcagcctaatggaggatttagttgatgatgtcaaattctcagataaaattcacggtggttttgtgaggataaaaatttctgatgtttgtcaaaaacaagacatataccgtctcgtaaaagttattggaacacataaggttccagaaaagtatagtattggaaagaagatgacaaatgttgcacttgagatattgaatttaaacaaaaaggagattattacaatggatacaatatctaatcatgattttacagagggtgatatcctagagaaagccaagatattgcaatattggtttgaaaatgaaaagcagaggcttgggcatcttcgtgaccgtgcaagtgaaactgggcgcagaaaggaatatcctattgactatactatggtgtggtgatgcctttattatcact

SEQ ID NO: 85778 - DNA, 1209 bp, Zea Mays
aattgatccttcctctggtgttgagtcgatagatgtgtcagatgtactggattctttaatggaagaaaggagtggaacttcgtacatgccaggatcaatagaggacttcctagccgaagaagaaccacaatactctagccctatcgcattatctccttggggtgaacctagttactaccaaggtgatgctgttgattctgcgctatggggtactcaagatttgatcaatgatatgtggtcattgctttcaccaagacctatgctccaaccttcatctggtattggaactgaggggaaggaaacttttgatatcaacgaggtggctgtgacccatgttagtagtgattattttcaaaaaggatcaatgtttggggaggaaaatgtgaaccaggcaaacttgagtgctgctgcagactggatgctgcctgagcaggtcccatcaataccaaatggtatgtcaacatcgtcagtagatgagagcaccatagttttaggttctcagccatcaaccaatcagagcttagactggggtggtactacatggagtattggccagaatgccagcgtgtatagcaatgaaaaagcagagccctcgagtaaaagctattgggaagaaccaaggaagcaggaaaccgccaaatccagtgtttctatttcaggacaggccattggaaacaacaagggcttggaccctcgtgataatgctgctaatcggggcagccggctgagtcatcatcaccgtggcaggtactcccaaatcagtgaatcttggctacttagttcaagtcactctaggagtaggtctgatagatttggcagcggtgggtcatcaagatcaacttcaaaggggcaatctaggggctaatgtaaattgtcaagtgcaggagagaaatgatgcatcttgtagctaacctgcatccttgatctctgcagcaggaatagttttctttttaaaattctttgtcatatctttgcagtttgtataggctaattacagtttagtccactcagactgtagcaaggagcatatatgtttagcatagaggtatttgactgcccattgcccaaggagtagattcagctcttgggcatggtctgtatcatcctgacattctgttggatggagctccaattgtaccaccggcatctctgttgacaccgaaacgcctgatgcgttggaaacaattatatctgattgattggtttaac

SEQ ID NO: 85779 - DNA, 2009 bp, Zea Mays
atggaaggcgcggaggcgcttttccccggcgacggatgcggcggtgaccccatggacttctcgtggaccgctgacggggagaagcacccggacccggcggcttgcgccagccccggccgcgacgacgaggctacctcggcctcgaccccggttccttcgccgcaggagatggcggagtccatgattctcgtgcccgggccgcgcgtcgtcatgtctggactcaggctggctgattgccgttcagatgactgtgttctcttcattaatgctggtggtggtgcaatcgaaagctgtgatccctgtgtgaaggtttctggtgattcattctttgaaggaggggatgtgatagaaacaaatgagagcatagccgaaggtggtgattgtccatttatttatcactcagcaagatacggcagtttcagctacaagttcgacggtcttgcccccggagcttattttctagatctgcattttgctgaaattctatacacgtgtgggccaaaaggaattagcatgttcgatgtcctgatactgtctcagctcgatgtatatgctgtagttggagggaacagggcccttcaagtgcgtgatattagggttactgttgagatgaatggtgctgttatgatcaatttcaaaggaagtgataatcttggtcttacactcgtggcagcaaactcggttacaaatggcaatgtcttgtgcaaaagatgttcatctgatattgatgtctcaactacacagactaggacaagtaaactgatctcaaagtatgagaagcagattgaggagctcaccagccaatgcactatgaagtccaatgagtgctatatggcatggtcttcagtagacactaccaacgtggagcttgggagactgaaaatagagcttcaccaaaagggtgctgaaatggagaatcttgtgcaaactcttggtagagagagcgaccaactaagaaatgtttctcgtaagtacaaaaatgacaagaaattgtgggttgctgctatatctaatttggaaaggaaaataaaggtaaagctggtttaatgcatgcaacttctagaataacttgtatattttttcacaccttaatccacaggccatgaaacaagagcagcaattgttgtcccttgaagcacatgattgcgcgaatgcaattcctgatttgagcaagatgatcggggctgttaagggcctagttgcacagtgtgaagatttaaagttgaagtactatgaagagatggataagaggaagaaacttcataatattgttcaagagacaaaaggaaatatcagggttttttgtagatgccggcccttaagcaaagatgaggtgtcatcgggtcagaaatgtgtagtggattttgatggatccagtgatggtgacattgtaattacaaatggcggaactaaaaagacctttaagtttgatagagtcttcacgccaaaggatgatcaagatattgtgtatgccgatgcgtctccactagtcacatctgtcttagatggctacaatgtatgcatctttgcttacggacagacgggaacaggaaagacttttaccatggaagggactgagagtaataggggtgttaactacagaactctggaagaactgttcaatattgcagaggagaggaaagaaagcgtcacatatgacttatctgttagcgttcttgaggtttacaatgaacaaatcagagaccttcttgccacgtctccatctaaaaagctggagatcaagccaaacagtgaaggacaaaatcatgtccctgggttagtggaggccaaaattgagaacataaatgaggtttggaaagttttgcaaactggaagcaatgcaagggctgttggttcaaacaatgttaatgagcacagcagtcgctcccactggttggacactgttttcatataatatccttttttattcgttggctgattgcttgatgtccaaatggttcttcttttaatctttattataacttttcttcagcatgctatgcatcacg

SEQ ID NO: 85780 - DNA, 2336 bp, Zea Mays
atggaaggcgcggaggcgcttttccccggcgacggatgcggcggtgaccccatggacttctcgtggaccgctgacggggagaagcacccggacccggcggcttgcgccagccccggccgcgacgacgaggctacctcggcctcgaccccggttccttcgccgcaggagatggcggagtccatgattctcgtgcccgggccgcgcgtcgtcatgtctggactcaggctggctgattgccgttcagatgactgtgttctcttcattaatgctggtggtggtgcaatcgaaagctgtgatccctgtgtgaaggtttctggtgattcattctttgaaggaggggatgtgatagaaacaaatgagagcatagccgaagtagttggagggaacagggcccttcaagtgcgtgatattagggttactgttgagatgaatggtgctgttatgatcaatttcaaaggagtaagaggaagtcccatggtttgtggtatctgtattcgcaaagcaccacttttatcagtgcaaactcttggtagagagagcgaccaactaagaaatgtttctcgtaagtacaaaaatgacaagaaattgtgggttgctgctatatctaatttggaaaggaaaataaaggccatgaaacaagagcagcaattgttgtcccttgaagcacatgattgcgcgaatgcaattcctgatttgagcaagatgatcggggctgttaagggcctagttgcacagtgtgaagatttaaagttgaagtactatgaagagatggataagaggaagaaacttcataatattgttcaagagacaaaaggaaatatcagggttttttgtagatgccggcccttaagcaaagatgaggtgtcatcgggtcagaaatgtgtagtggattttgatggatccagtgatggtgacattgtaattacaaatggcggaactaaaaagacctttaagtttgatagagtcttcacgccaaaggatgatcaagatattgtgtatgccgatgcgtctccactagtcacatctgtcttagatggctacaatgtatgcatctttgcttacggacagacgggaacaggaaagacttttaccatggaagggactgagagtaataggggtgttaactacagaactctggaagaactgttcaatattgcagaggagaggaaagaaagcgtcacatatgacttatctgttagcgttcttgaggtttacaatgaacaaatcagagaccttcttgccacgtctccatctaaaaagctggagatcaagccaaacagtgaaggacaaaatcatgtccctgggttagtggaggccaaaattgagaacataaatgaggtttggaaagttttgcaaactggaagcaatgcaagggctgttggttcaaacaatgttaatgagcacagcagtcgctcccactgcatgctatgcatcacggtgagggctaagaaccagcttaatggagagtgtacaagtagtaagctttggcttgtagatttggctggaagtgagcgtttagccaagactgacgtgcaaggcgaacgacttaaggaagcacaaaatattaacagatcactttctgcattgggtgatgtcatttcagctcttgctacaaaaaacagccatataccctacagaaattctaaattgacacacttgctgcaagattctctaggaggagactcaaaagcattgatgtttgtgcaaattagcccatccgataatgatgtttcggaaacattgagttcactaaacttcgctagccgtgttcggcgtattgaattgggaccagcaaagaaacatgttgatactgctgaacttcaaaagaccaaacagacgcttgaaagagctaagcaagaactcaggcttaaggatgattctttgagaaagctagaagaaaacttacaaaatttggagagcaaagccaaagggaaagagcaactttgcaaaaacttgcaagagaaggtgaaagagctcgagggtcagttagattccaaggcacagtgtcaaataacatcagagaaacagcaacggcagctttctggaaaactaaaagagaaggaagaaatgtgtaatgtacttcagcagaagattgcggacttagaatgcaagcttagacaaccacaacaatcagaatctgaggttgcacttcttaagcaaacgatccaagagttggaggtcaagttgaaggaacaacaacatgaccgatcagccatggaattaagtatcaaagagatggagctaaggttcaaggaagaagaacaccagcgatctgttgcagaactaaaggtgactccttgaatgtcgtgcttcatttgatttctacttcacaaggg

SEQ ID NO: 85781 - DNA, 3031 bp, Zea Mays
atggaaggcgcggaggcgcttttccccggcgacggatgcggcggtgaccccatggacttctcgtggaccgctgacggggagaagcacccggacccggcggcttgcgccagccccggccgcgacgacgaggctacctcggcctcgaccccggttccttcgccgcaggagatggcggagtccatgattctcgtgcccgggccgcgcgtcgtcatgtctggactcaggctggctgattgccgttcagatgactgtgttctcttcattaatgctggtggtggtgcaatcgaaagctgtgatccctgtgtgaaggtttctggtgattcattctttgaaggaggggatgtgatagaaacaaatgagagcatagccgaagtagttggagggaacagggcccttcaagtgcgtgatattagggttactgttgagatgaatggtgctgttatgatcaatttcaaaggagtaagaggaagtcccatggtttgtggtatctgtattcgcaaagcaccacttttatcagtgcaaactcttggtagagagagcgaccaactaagaaatgtttctcgtaagtacaaaaatgacaagaaattgtgggttgctgctatatctaatttggaaaggaaaataaaggccatgaaacaagagcagcaattgttgtcccttgaagcacatgattgcgcgaatgcaattcctgatttgagcaagatgatcggggctgttaagggcctagttgcacagtgtgaagatttaaagttgaagtactatgaagagatggataagaggaagaaacttcataatattgttcaagagacaaaaggaaatatcagggttttttgtagatgccggcccttaagcaaagatgaggtgtcatcgggtcagaaatgtgtagtggattttgatggatccagtgatggtgacattgtaattacaaatggcggaactaaaaagacctttaagtttgatagagtcttcacgccaaaggatgatcaagatattgtgtatgccgatgcgtctccactagtcacatctgtcttagatggctacaatgtatgcatctttgcttacggacagacgggaacaggaaagacttttaccatggaagggactgagagtaataggggtgttaactacagaactctggaagaactgttcaatattgcagaggagaggaaagaaagcgtcacatatgacttatctgttagcgttcttgaggtttacaatgaacaaatcagagaccttcttgccacgtctccatctaaaaagctggagatcaagccaaacagtgaaggacaaaatcatgtccctgggttagtggaggccaaaattgagaacataaatgaggtttggaaagttttgcaaactggaagcaatgcaagggctgttggttcaaacaatgttaatgagcacagcagtcgctcccactgcatgctatgcatcacggtgagggctaagaaccagcttaatggagagtgtacaagtagtaagctttggcttgtagatttggctggaagtgagcgtttagccaagactgacgtgcaaggcgaacgacttaaggaagcacaaaatattaacagatcactttctgcattgggtgatgtcatttcagctcttgctacaaaaaacagccatataccctacagaaattctaaattgacacacttgctgcaagattctctaggaggagactcaaaagcattgatgtttgtgcaaattagcccatccgataatgatgtttcggaaacattgagttcactaaacttcgctagccgtgttcggcgtattgaattgggaccagcaaagaaacatgttgatactgctgaacttcaaaagaccaaacagacgcttgaaagagctaagcaagaactcaggcttaaggatgattctttgagaaagctagaagaaaacttacaaaatttggagagcaaagccaaagggaaagagcaactttgcaaaaacttgcaagagaaggtgaaagagctcgagggtcagttagattccaaggcacagtgtcaaataacatcagagaaacagcaacggcagctttctggaaaactaaaagagaaggaagaaatgtgtaatgtacttcagcagaagattgcggacttagaatgcaagcttagacaaccacaacaatcagaatctgaggttgcacttcttaagcaaacgatccaagagttggaggtcaagttgaaggaacaacaacatgaccgatcagccatggaattaagtatcaaagagatggagctaaggttcaaggaagaagaacaccagcgatctgttgcagaactaaagatcaaagagctggagctgaagctgaaggaacaggaacaccagcgatcagttgcggaactaaaggcaagagaaataggacatgagctgctggagactcagagaaccgagtcaatgcttcagattaagctaagagaacttgaaagcaaggcgaaagagcaggacacaaacatgacggcagtggtggagtcccgcgtcgtcgtcgcgactcctgtaaacgcgaaggtgatgagcgagaaggagaaccacgtcctgaggatctcaaactccctgaacaagcagctggctcacgtggagaacactcctgaggcccctgaagcggcttgcaacgagaggaagaggaaaggcgaggcgaggaacgcgtccatcggcggcggcgagcaagagaacactaacaacggtgggaggaagaggagcctgccagccgagcgcgaggcgaggctgaagaggaagtcgacggagcctcctccccaggtgaagaatctggtgaggtcgacggcgtcgtccagggcggctgccaaggcggcggcggcggcggctccgagctccagagccggcggcgccaagcagcaaccgggcggcgggaacaagaccagagggtgggttaggtagacgagatgatgatggtgattgcgtgtgttgtatgtgcaccggtggctggctcaacttttggctgagtcccactcactacattgctgcggtgatgaattagccagcttgtttacattgctcctgtgtctatgct

SEQ ID NO: 85782 - DNA, 3124 bp, Zea Mays
atggaaggcgcggaggcgcttttccccggcgacggatgcggcggtgaccccatggacttctcgtggaccgctgacggggagaagcacccggacccggcggcttgcgccagccccggccgcgacgacgaggctacctcggcctcgaccccggttccttcgccgcaggagatggcggagtccatgattctcgtgcccgggccgcgcgtcgtcatgtctggactcaggctggctgattgccgttcagatgactgtgttctcttcattaatgctggtggtggtgcaatcgaaagctgtgatccctgtgtgaaggtttctggtgattcattctttgaaggaggggatgtgatagaaacaaatgagagcatagccgaagtagttggagggaacagggcccttcaagtgcgtgatattagggttactgttgagatgaatggtgctgttatgatcaatttcaaaggagtaagaggaagtcccatggtttgtggtatctgtattcgcaaagcaccacttttatcagtgcaaactcttggtagagagagcgaccaactaagaaatgtttctcgtaagtacaaaaatgacaagaaattgtgggttgctgctatatctaatttggaaaggaaaataaaggccatgaaacaagagcagcaattgttgtcccttgaagcacatgattgcgcgaatgcaattcctgatttgagcaagatgatcggggctgttaagggcctagttgcacagtgtgaagatttaaagttgaagtactatgaagagatggataagaggaagaaacttcataatattgttcaagagacaaaaggaaatatcagggttttttgtagatgccggcccttaagcaaagatgaggtgtcatcgggtcagaaatgtgtagtggattttgatggatccagtgatggtgacattgtaattacaaatggcggaactaaaaagacctttaagtttgatagagtcttcacgccaaaggatgatcaagatattgtgtatgccgatgcgtctccactagtcacatctgtcttagatggctacaatgtatgcatctttgcttacggacagacgggaacaggaaagacttttaccatggaagggactgagagtaataggggtgttaactacagaactctggaagaactgttcaatattgcagaggagaggaaagaaagcgtcacatatgacttatctgttagcgttcttgaggtttacaatgaacaaatcagagaccttcttgccacgtctccatctaaaaagctggagatcaagccaaacagtgaaggacaaaatcatgtccctgggttagtggaggccaaaattgagaacataaatgaggtttggaaagttttgcaaactggaagcaatgcaagggctgttggttcaaacaatgttaatgagcacagcagtcgctcccactgcatgctatgcatcacggtgagggctaagaaccagcttaatggagagtgtacaagtagtaagctttggcttgtagatttggctggaagtgagcgtttagccaagactgacgtgcaaggcgaacgacttaaggaagcacaaaatattaacagatcactttctgcattgggtgatgtcatttcagctcttgctacaaaaaacagccatataccctacagaaattctaaattgacacacttgctgcaagattctctaggaggagactcaaaagcattgatgtttgtgcaaattagcccatccgataatgatgtttcggaaacattgagttcactaaacttcgctagccgtgttcggcgtattgaattgggaccagcaaagaaacatgttgatactgctgaacttcaaaagaccaaacagacgcttgaaagagctaagcaagaactcaggcttaaggatgattctttgagaaagctagaagaaaacttacaaaatttggagagcaaagccaaagggaaagagcaactttgcaaaaacttgcaagagaaggtgaaagagctcgagggtcagttagattccaaggcacagtgtcaaataacatcagagaaacagcaacggcagctttctggaaaactaaaagagaaggaagaaatgtgtaatgtacttcagcagaagattgcggacttagaatgcaagcttagacaaccacaacaatcagaatctgaggttgcacttcttaagcaaacgatccaagagttggaggtcaagttgaaggaacaacaacatgaccgatcagccatggaattaagtatcaaagagatggagctaaggttcaaggaagaagaacaccagcgatctgttgcagaactaaagatcaaagagctggagctgaagctgaaggaacaggaacaccagcgatcagttgcggaactaaaggcaagagaaataggacatgagctgctggagactcagagaaccgagtcaatgcttcagattaaggtagccttctttgtcacagctgctacaattgagtagtgcgtttatttaagagatcttgaataacccggagcttggcgtctccgcatgtcagctaagagaacttgaaagcaaggcgaaagagcaggacacaaacatgacggcagtggtggagtcccgcgtcgtcgtcgcgactcctgtaaacgcgaaggtgatgagcgagaaggagaaccacgtcctgaggatctcaaactccctgaacaagcagctggctcacgtggagaacactcctgaggcccctgaagcggcttgcaacgagaggaagaggaaaggcgaggcgaggaacgcgtccatcggcggcggcgagcaagagaacactaacaacggtgggaggaagaggagcctgccagccgagcgcgaggcgaggctgaagaggaagtcgacggagcctcctccccaggtgaagaatctggtgaggtcgacggcgtcgtccagggcggctgccaaggcggcggcggcggcggctccgagctccagagccggcggcgccaagcagcaaccgggcggcgggaacaagaccagagggtgggttaggtagacgagatgatgatggtgattgcgtgtgttgtatgtgcaccggtggctggctcaacttttggctgagtcccactcactacattgctgcggtgatgaattagccagcttgtttacattgctcctgtgtctatgctgc

SEQ ID NO: 85783 - DNA, 1008 bp, Zea Mays
acgggacgacccgacgcctacctcccccgcgctccgctttattagcaaaagatcccagcagcagagcacaagctgccttgcgcttcggtgatcacgaggacaccaccaagacgacgcaggttcactggttcagcgaccggtttccgcgatgtgccgcgccacggcgatagagggcggcttcctccgcccgcccccgtcccggcgcctcgacatccgcgctttctacctccgcctctcctcctgctccgccacgacgcccgcggagctcacgctggcctaccacccggccatcgggggcgcggcgctgggactcaacggccgcgcgctcccgccagccgcgcccgccaaggtcacgctccgccgggtcgccgccgacgcgtacgcgagcgccgaccgcgtcgccgccgccgagggcgcgcggttcgaggtgctcgccgccgccgccggggaggaggtcgcggcggagggcgtcttctccgcgcggcgcgagggggggtggcgcgtggagtgccgccgggcgccggcctcgccggaggtgtgcgtcgcggaggtggtggtgctcgcggagggcggcgtgctgatgcgggacagggcccgcgcggccggccggggccggatgcggtgcggagccacccggctggaggggataccggaggaggacgccaccacgggcctcggcggctggtgccgctgcgagtgcgacgacgacgggtgggaggtggtcggggacgcggaggaggaggaggagcaggaggtcgagatggagacggtgcggtgggcgatggaggtgggcgtgtgggccgtgtgcctcggcgttggcctcctcgccacggccaggcgtttccggcggaagcgcgccttctggtgaccgccggcgccttctttgcttcggctgtcgtgtagtttcggaaattttgtacatgtttcgcggagatttcacgggcgtgcttttttctttgtttccagagatgatcaaatgaaccaagaccaattcgttccttttctcca

SEQ ID NO: 85784 - DNA, 834 bp, Zea Mays
cactttctctcctgtctccactcgccctcaaactattctccttctctcgtctccaatcacactcaggctctcgcaccctccactctcctcgttgttatggtctggctccttataggcttcgccgaagcagttttgccacccttgttgaagcaccgaccgcatgctacaaggcctatcacttatgccctgacgccgaggagcgcacccgaaaggaaaatgtgcccttgggccatttctaagtattttggtgatcatgtgccaatacaaatggtttaagtatgaaactatgtcaaatggtggaagaagtgcaaatcgacacaaaggtatgattctagacttagtacattggtttttgtgtactaacatatttgtctaaatgctagaatcagagaaaagacaaaaggaaaaagagttggctgtgtatagagagctgtgtacagccaactgttgttcagtctgggtgcaccgaactgtctggtggtgcaccggacagtgtccggtgcgtcaggctagctctggtgaaaaggctgctctcgggaattcgtcgacggcgtacggctataattcaccggactgtctggtggtgcaccggactgtccggtgagccaacggtcgactgcaccaacggtcggccgcgcaatccgcgcgtgacgcgtggccgagccaacggtcagaagggggcaccggactgtccggtgcgccaacggctccaaatcttcaacggtcggctgcgccagaataggaaagaaatcagcaccggacagtgtccggtggtgcaccggactgtccggtgcgccacccgacagaaggcaagaattcccttcctggattgct

SEQ ID NO: 85785 - DNA, 1372 bp, Zea Mays
actccttttttctcctctcaatctcccccgtctcccccctccctctcccttgcttccctctccagtccccagcgcgcgcgacacgacacgggccaatcacccagccgccgccgccggcgatcgccggaactcggcgccggtgcttccgagcacgctccgctcggaaccatggtgaggagcgggagcatacggcggtccgcggtgcccgcgcctatgccggcgccggcgtttaccgtgtctcccgccgactacaggctgctggaggaagtgggatacggcgccaacgccgtcgtataccgcgcggagttcattcccaccggccggacggtcgctgtgaagtgtctggatctcgatcgggtcaacagtaacctcgatgatgtaagaaaggagactcaaactatgagcttgatagatcaccctaatgtcatcaggtcttactgctcatttgttgtgggtcataatctttgggtggtaatgccattcatgtcagagggttcatgcttgcacctaatgaaggttgcatatcccgatggttttgaggagccaattattgcctctattctaaaggaaacactcaaagctctagactacctccataggcaaggacatattcatcgtgatgtgaaggtaatatccttattgataatcctggtgtagtcaagctcggggactttggtgtctctgcttgcatgtttgatagaggcgatagacaaagggctaggaatacatttgttggaacaccatgctggatggcaccagaagttctccagcctggaactggatataatttcaaagctgatatatggtcgtttggaataactgcactagagctggcacatggacatgctcccttttcgaagtaccctcccatgaaggttcttctcatgacgctccaaaatgctcctccaggtcttgactatgaccgtgataaaagattttcaaagtccttcaaggaaatggttgcgatgtgcttggtgaaagatcaaacgaagaggccaacagctgaaaaattacttaagcattcttttttcaagaatgcaaaacctccggagctaactgttaagaacattttaactgatttgccccctctttgggaccgtgtaaaggcactccagctaaaggatgcagcacaactagctttgaagagaatgccttcttcagaacaagaagcactttctatgagtgagtaccaacgaggtgtcagtgcatggaacttcgatattgaggatctaaaggctcaggcatcactgatatgtgatgatgatccacctgaaataaaagaagacgatgacactggtagaataactgacattgataaggtttgcttgactcttttttctttatgtgtatattcatatgtatattcactatg

SEQ ID NO: 85786 - DNA, 1598 bp, Zea Mays
attaccaggatacatcttctgacgattattttggaaagacagcaccatcgaatggaaataactgcagtgatcgttcttctgtgccagcaaatcctggtcaaaatggtcccgaaataaatgaaatattgtcttccaacaatgggaatgcctacagtgaaaggaagcctgatggacgtaaaaacccagaatcagaaaatgattcattgccctcgacgtcgaagcatgatgctgatgggaaagattatagatgtgatttcaggcaaaaacagaggacatactcaggtccagttctgcaatctggtccgaataatagttcgatgactgaaaggggccacattattgaaagggatgcaggagttcaatctgtatctgataaacaaaagaatggtacaagaagagccaataatcttagtggtcctttgtcacttccaactcgtgcttctgcaaatagtctttcaagagccaataatcttagtggccctctgtcacttccaactcgtgcttctgcaaatagtctttctgctcctattcgatcttctgcaggttatgtaggctctttgggtgataaacctaagcgcactatggtggaaattaaaggccgcttctcagtgacatctgagaatgtggatcttgcaaaggttcaagaaattccagggagcagtgcctcacgtaaattgcaagaggggccttcactgagaaaatcagccagtgttggtgattggtcagcgaatgataagacaacgtctactaatcatcaaaggaaggaactctgcaatagctctgtatctacatcaattctgattccgcatcttcaaaaccttgtgaagcaaactgcattccagcaagatctgattacgaacctactaagtagcttgcaacaaaatgagagagtcgatgcagctcagtcaagagtccagagcacgacgagtgatacagtggttgaagctgctactgctgagagagaacactcgttacttgttaaaatttttgagttacaatctaggatgatttctttgactgacgaattaattgcggcaaagctgaaacatgttcagctgcaagaagagctaaatgtactctactgccaagaagaaatcctggatatgagagaggacgagagcgaagaagcatgatgcggtggagcctgcccccctttttttactactactactgagggggactaaaagccacatgctctaagcccgtgcaattgaggcttggctaactggctgcatacaatacaaggactcgaaggatcattggccaactccgggtgcaatcgaagaacctgcaatgagtttgatggagcggggtttatgatcgttggcctcggatttgaactgttatgtatattcagtcgacccgttcgatttctgactcgggtttggtttgttcagtgagcttttaaggcgtcttgcgatgcgcatctacttgatcattaagatggctatgacgccagcctctaatatatactactagtggtagtaataggtatagcgtccgtatagtaccattgtacttgtacctcagaagtcagcaagactgcgacaataattgcatcgcgtctgtagacagcggaatgcatgagtagctactgt

SEQ ID NO: 85787 - DNA, 1602 bp, Zea Mays
attaccaggatacatcttctgacgattattttggaaagacagcaccatcgaatggaaataactgcagtgatcgttcttctgtgccagcaaatcctggtcaaaatggtcccgaaataaatgaaatattgtcttccaacaatgggaatgcctacagtgaaaggaagcctgatggacgtaaaaacccagaatcagaaaatgattcattgccctcgacgtcgaagcatgatgctgatgggaaagattatagatgtgatttcaggcaaaaacagaggacatactcaggtccagttctgcaatctggtccgaataatagttcgatgactgaaaggggccacattattgaaagggatgcaggagttcaatctgtatctgataaacaaaagaatggtacaagaagagccaataatcttagtggtcctttgtcacttccaactcgtgcttctgcaaatagtctttcaagagccaataatcttagtggccctctgtcacttccaactcgtgcttctgcaaatagtctttctgctcctattcgatcttctgcaggttatgtaggctctttgggtgataaacctaagcgcactatggtggaaattaaaggccgcttctcagtgacatctgagaatgtggatcttgcaaaggttcaagaaattccagggagcagtgcctcacgtaaattgcaagaggggccttcactgagaaaatcagccagtgttggtgattggtcagcgaatgataagacaacgtctactaatcatcaaaggaaggaactctgcaatagctctgtatctacatcaattctgattccgcatcttcaaaaccttgtgaagcaaactgcattccagcaagatctgattacgaacctactaagtagcttgcaacaaaatgagagagtcgatgctcagtcaagagtccagagcacgacgagtgatacagtggttgaagctgctactgctgagagagaacactcgttacttgttaaaatttttgagttacaatctaggatgatttctttgactgacgaattaattgcggcaaagctgaaacatgttcagctgcaagaagagctaaatgtactctactgccaagaagaaatcctggatatgagagaggacgagagcgaagaagcatgatgcggtggagcctgcccccctttttttactactactactgagggggactaaaagccacatgctctaagcccgtgcaattgaggcttggctaactggctgcatacaatacaaggactcgaaggatcattggccaactccgggtgcaatcgaagaacctgcaatgagtttgatggagcggggtttatgatcgttggcctcggatttgaactgttatgtatattcagtcgacccgttcgatttctgactcgggtttggtttgttcagtgagcttttaaggcgtcttgcgatgcgcatctacttgatcattaagatggctatgacgccagcctctaatatatactactagtggtagtaataggtatagcgtccgtatagtaccattgtacttgtacctcagaagtcagcaagactgcgacaataattgcatcgcgtctgtagacagcggaatgcatgagtagctactgtagtacaa

SEQ ID NO: 85788 - DNA, 1572 bp, Zea Mays
tcaccgctccctgtcatggttgcccggcgtcggcggcccgtgcgcgtcgccttccagtggcacggcgccggcgccctccctccggctcctgaccttgatcagcccgtacagcttcttgaactccctcatgggcgcctcctttccgaacaccccgccgcacgtcgccggtgccccggcggccgtctcgtcgacctccacggagaccgcgctggctcgcgccggctgggcctggtcctcccactgctgtccggtccaggcgccggaccagctcgtgttccgcctgtgcgccgggttccgcggcggcgcggcgcctccggacgcgacgcgctggagcttggtgatcacgctgcggagcgcgcggctcggggacgcgcggttggccagcatgatctcgccaagctcggccgggctgaggcgggcgccggcggcgtggaacccctcctccacctgcgggtacagcttgtggtccttgagccccaggtagttgctggccagcgccttgaaggcctcgaagtcgcagagcgtgaactggatgtgcacgtccagccggcccgggcgcaccaccgcggcgtccacggcgtccttgcccccgcgcatggtgaacaccatgacacgctcctcgccgcagcacgacgcgatgccgtccatgaagctcagcaccctggccgcgcgcgcctccgcgtccccgccgccgccctgcaggtaccggtccaggtcctcgacgaggacgagcgagcgcggggtggtgtgcaggagcagcgcgcggaggtcgtcgccggcggcgtcggcgcgagacaggtcgacgtcgtagacgtcgtagcccaggaacctggccatggccgccgcgaacgtggacttgccggtgcccggcgggccgtagaggaggtagctccggcgccagacgcggccgaggcggtggtagtaggcgcggcccttgaggaagctctcgaggtcggcgcggacgcgggccttgaggtccgggtccatggccacggcgtcgagcgtggccgggtgggtgaagggcgccgacgcccagcgcggcgcgcccgtggtcgcgtccacggcggtgttggcgaagaggcgcagctcgcggcggcgctgctccatctcctctgccacggactccacgtgctgcaggtaaggtcgcagcacgcgggagcggtcgtggcggcgcacgcgcagcaccaggcgctcgccgcccgcgctggtccacgcgaggcgcgcgccaaggtacgtgtccctcgcggtgtggcccgggccgagctgcagggacagcccgccgttggtccttgacgccgacgacaccacgcacgcagcgtcggcgtcctccagcgacggcagcgccgccacgtacgcggcgaccttgcggaacagcgggttctctgcgccgtcgcacccgcactgggccccggcgaagcgcggcacctcgtggtactggtacgcctgcgcccactcgtcggcgcaccgccacaggcggcgcagcgcgtagagcgccgacttgtaggacagcagcagccgcagcgccgcgagcgcgagggcggcgtacgcgagcatgccgccgtgcggtggcat

SEQ ID NO: 85789 - DNA, 1897 bp, Zea Mays
acggtatgatgatgtaatatgtacactatttacatcaatcttccatgtccgtcatactcacatgtgttctccatcagatcagccgaatcgtttctgctgaaactatggagtggcgcttcctcttactccctcgtcacctctcctccgttgccccgtccagcgccgctgtcgtcgccggcgagatctctgtcctcctcagcgcccggaatttcctggcttctgttaactgtgcggaacaattcataagctccgaggccgtcacatcctcgggcgtccttgagctctaccgcgcggtggccgccgcagccccaagtgggaaggcccgttacttagtcgacgcggcctcggcgctagtcgaggcatccgcgcgcgcggacctccccgacggcgcgctgcggctgctcgagttcctcatcgacacgcctgcggcgcggctgccgatgggatcgtcctgcggccacctcatggtgaaactcctctcgctcggacgccgcgcggatgcgcgccacgtgtttgagatcctcgcggatgccggtgagcgccggcgcaaaaaggcgatgaacgagctttgggcagccggtaggggggccgacgccttcaaggtgttcggcgaaatggcggatgtgcccgtggtttcatatcgtaaaaggtacgatttcatgatgtatggctacttgaagaatggagacctgcagtctgcatccgagatacggacccggatgatgcaggggggcatcaagctatccactcaacagagacgaatgcttcggatgctggcagaagccagggcttgcccagagaacatgctgcggatcaaggtggaaatttgcattatggcacaggacatcgatgaggccatccgtttgctccggcatatgagccacggtgataagtcacctccaaacgctcactcctacaatttggtaatcgccggtctctggaaggcagggagaggtgacgaagctgtcaagctgtttggcgagatgacagacatatccctggcgccgaatcacttcacatacactgtcatgataaatggccacttgaaaagactgggtaatggtctgaccccgaggaagaatgggaatggagatctggaggctgcactccagttgaaggctcagatggagcaggcaggcttcaagtcagatgaacccacctaccatttgctgatggcagaactctgctcggctgaacggctgggagatgttacagctttattcgacgagatgatgacacaagagacgacattacataagatcgtccatagcagcatgttgcagttcctctgtagaatcaatgaaggtcagctactgcgcatcatcgaagaatctgcaaagaacggcgtttctgcagcggataatggttgcattaccttgttgttgaaggagctttgcaggatcgacaaggtttcaagcgcagaaaaggcgttgcagacgtttgccaaaacagggctggtcccgacaacagagatgtacaacattcttattgacggctatagcaagatcagggagctccaagcggcattcttgctgtatcgccagatgaaatcgcatgatcagcttgtacctaatgaagccacccatgaggcactactgctggctgtgcgcaacaacacaagcatcgtctactgggaggacgtggaggagttgtttgagaagaatggagttggtatagatgcgatgaacaacgccttttctgatatatatggattcaagtaggtatatcctaatacctagaatgctcaaaagggaacattctagcaagctgtttttagcatctgtagaatggacatattcattgtagatctcggctcctaccttaaacagatgattgatgacgcagcatgtattctctctaagtatctgaatatgcgcatctttgttttgtacagaga

SEQ ID NO: 85790 - DNA, 2390 bp, Zea Mays
atatttttggttggtccttgagctcacttggacagagtgcggcttgccgacccagcagtatgtgcaggtgcggcccggccgaagatttggcgcacgcacactcaggtagcccagtggctggctccactgccagacgcgctcggctcggctcggcgcaccaccaccccgaggacacggagtgagcccgactgcccgagcccgtataaatcgacgctgcgaggggtagcgagccgcaccgcaccgcaccgcaacgcgccaccgatccaccccgcgtcctcggcctccctccctccggcgagcggcggcgcgggcggccatggaggtgttctactacgtcgtgttcggcgcgctggccgccatcgtggcggggctcgagctcggcaagagcggcaaggaccgcgtcgccactacctccgccttcaactccttcaagaacaactacgtcctcgtctactccctcatgatgtccggggactggctgcagggcccctacgtctactacctctacagccagtacggcttcgacaagggcgacatcggccgcctcttcatcgccggcttcggatcctccatgctcttcggcaccatcgtcggctccctcgccgacaaacaaggccgcaagagggcctgcatcacctactgcatcagctacatcctcagctgcatcaccaagcactcccccgagtacagggtcctcatgatcggccgcatcctcggaggcatcgccacctcgctgctcttctccgccttcgagtcctggctcgtcgcagagcacaacaagagaggctttgacccgcagtggctgtccataacattctccaaagccatcttccttgggaatggcttaattgccattgtgtctgggctattcgcgaaccttcttgctgagaacttgggttttggtcccgtggctccatttgatgccgctgcatgctttctggcgattggcatggctgtcataatgtcctcatggagtgagaactatggagacccatctgatagtaaggacctgatggcccagttcaaggttgcagctaaggcaattgcttcagatgaaaagattgcattactgggagccatacagtcattgtttgagggctcgatgtacacatttgtcttcctatggactccagcgttgagcccaaatgaagaagacattcctcatggttttatttttgctacattcatgctgtcatccatgttgggtagctccgttgcgtcacgtctattagcccgaaagctcaaggttgaaggttacatgcagattgtgttctcgatatcggctgtcacccttgtcctccctgttgtcaccaacatcctagtgcccacatcttctgtgaaaggaggcagcatatcgattggaggttcccttcagcttcttggtttctgcaccttcgaggcctgtgttggcatattctggccatcaatcatgaagatgaggtctcagtacattcctgaggaagcaagaagcacaatcatgaatttcttccgcatcccgctcaacttatttgtttgtgtggtgctttacaatgtgaacgcattccctatcactgtcatgttcgggatgtgttctatcttcctcttcatggcagcaatcttgcagagacggctgatggttgtctcggatctacacaagtcatcaactaaagcacaagaaatgatcggggaagatgagccactaaatccttagacgtcgacagaaccatacgtgcaaatcagatacgaaggcggcatacacagagcaattcatttccacccgtgcaataagatggaagtcagaaccatgtagttgttttcgtttgtaattttctttctatagtgtaagatttgacaaggctgttagtttgcacctcggatctgcttatatccacagggcaatcgatagttcagcaagtattgagctatacctatgtcccgagaagattagatgagttggcgtcttggcgatcgatgtgggcttttcccgttgttgttccttgcaatttattttcgaaaaaaaaagaaacatgttcgctttaagctttacgatacggtatatattattcttggaagtgttatctactgcatgacaattctggctgatgtgcatatagcatgtgaaaagagtattgtgaaccagcgtagatatcttttttatggccgctgctctgatggctggtgacaaatctggtgctgctactgttactgttgtgggctctctctatctggccgccgctgctccgatggtcgcgcttctagctgttgttgtttgagcgccaggttgcaggattctatatcgtagcctcagttggcttctctggtctgtctcacacctagtagtgtcatgtttttgttttctgtagattttctttggtcgttgtaagaactattgcttcctaatgaagaaaaaa

SEQ ID NO: 85791 - DNA, 1107 bp, Zea Mays
tgcccagcagcccacggcccagtggcccacggccgtctatactggaaccaaagccgtccgccgacgtgattaaggagacggcggcggtaggcagtaccggagattgcggccggaacacatggtccgagccgcgacgcggggcatggagtcgcacactttctgcactctacctctaccagcctctcatagtatagataaataaagccaacacaagcctgcccgcaagcacaaagcagcaagcagggcaggttttgcgaagcaaagcccacgagcacaggatgaggatgcgtgcgcgggcggcatcggcatctgcgtcggcggctgtggtggtgctgctcctgctcctgctactggtgggcgtctgcgcgggcgccgtgtacaaggtaggcgacctggacgcctggggcgtgccgccgccgtccaagcccgacgtctacaagcgctgggccaagtccatccacttcgcgctcggcgactccatctggttcctgtacccgccgagccaggactcggtgctgcagctggcgccggcggccttcgcgtcctgcgacctgtcgcgccccgtggccaggctcgccgacggcaactccttattcaacctcaccgcgcccggccgcgcctactacgccagcggcgcgccgggtcactgccgcaggggccagaagctctgggtcgacgtgcccttgcccaacggcacctacctccagccctccgccaccgacctcgccgcgctcgcgcccacccccgccgccgacccgcccgccgggttcgcgtccgctgccgccgccgcgccacaggggggcaacgcctcgcccgcgccccgcgccgccgccgccgctggatccgtcgtcgcactctccttcgcgctccagatcctcctcctctgactgtgcggtacagtagctgattagctacctctatctcgctagttttgagatctccattttttgtgtgtgctgtggaacgagagtgagaacagttctttcttggctgaaaattgaattgaatgcatgatcggagggagattggatctccatttgctttctttttttctgttggcttctactgctactgtctctttccattaattaaattccttcaatcaaa

SEQ ID NO: 85792 - DNA, 1444 bp, Zea Mays
ctagttctactccccgctccccattcacgcactctcactctacctccctccctccctcgccggcgccgcgcgtgctcccgcgggatgctgcgtgcggcgcggtacctgctggggtcgccgggcgcgagcgggttcgggtccaggtcgacggcggaggaggtgaccccggacctgggcgcgacgacggccatcatcacgggcgccacgtccgggatcggcgccgagacggcgcgcgtgctggcgaagcgcggcgcgcgcgtggtgatcccggcgcggagcgccaaggcggcggaggacgtgcgcgcgcgcatcgtggccgagtgccccgccgccgccgtcctcgtgctcccgctcgacctcagctcgctcgcgtccgtgcgcgccttcgccgacaggttcctagcgctcggcctcccgctccacctcctcatgtacgtacgttcgtcgatcggggcgccgccaccgccgccctcgtccaagtccacagtacatgtatgtatgcgtatgtgtgtgatgcctgtgcgcgcgcgcgtgcagaaacaacgccggcaagttctcgcacgggcagctggcgctctcggaggacggcgtggagatgaccttcgccaccaactacctgggccacttcctgctgacgaagctgctggcggggcggatggcggagacggcggcggccacgggcgtgcagggccgcatcgtgaacgtgtcgtccagcgtgcacggctggttcgccggcgactgggccgagtacctgcacctcgtcacccgccgcaagataccctacgacgcgacgcaggcgtacgcggtgtccaagctcgccaacgtgctgcacacccgggagctcgccgcgcgcctgcaggaaatgggcgccaacgtgacggccaactgcgtccacccgggcatcgtcaggacgcgccttaaccgcgaccgcgacggcgtcctaaccgatctggtgttcctgctgctgtccaagctgctgaaaacgatccctcaggctgcggcgaccacgtgctacgtggcggcccacccgagagtggccggcgtgtccggccgctacttcgccgactgcaacgaggcgctgccgtcgccggccgccaccgaccgccacgaggccgcgcgcctctggcgggtctccgaggccatcatcgacggctgcaccaacagccaaccccagcgggactgcaccactgctcctctaccacgattactgccggcccagacgcagtcacagtcgccgacaggagcttcttcgtcgcctcgtcgtcgagcctgctgagctgatccggccgtccacctccagttccagtatatccgtcccttttgttctcgtccatgtgagatgcgtgtacaatacctagacattgtatgtatatccgatcgattatccccggccgtcctagcagcattataaatacagcatatactccttgtcccatatataaca

SEQ ID NO: 85793 - DNA, 1462 bp, Zea Mays
ctagttctactccccgctccccattcacgcactctcactctacctccctccctccctcgccggcgccgcgcgtgctcccgcgggatgctgcgtgcggcgcggtacctgctggggtcgccgggcgcgagcgggttcgggtccaggtcgacggcggaggaggtgaccccggacctgggcgcgacgacggccatcatcacgggcgccacgtccgggatcggcgccgagacggcgcgcgtgctggcgaagcgcggcgcgcgcgtggtgatcccggcgcggagcgccaaggcggcggaggacgtgcgcgcgcgcatcgtggccgagtgccccgccgccgccgtcctcgtgctcccgctcgacctcagctcgctcgcgtccgtgcgcgccttcgccgacaggttcctagcgctcggcctcccgctccacctcctcataaacaacgccggcaagttctcgcacgggcagctggcgctctcggaggacggcgtggagatgaccttcgccaccaactacctgggccacttcctgctgacgaagctgctggcggggcggatggcggagacggcggcggccacgggcgtgcagggccgcatcgtgaacgtgtcgtccagcgtgcacggctggttcgccggcgactgggccgagtacctgcacctcgtcacccgccgcaagataccctacgacgcgacgcaggcgtacgcggtgtccaagctcgccaacgtgctgcacacccgggagctcgccgcgcgcctgcaggaaatgggcgccaacgtgacggccaactgcgtccacccgggcatcgtcaggacgcgccttaaccgcgaccgcgacggcgtcctaaccgatctggtgttcctgctgctgtccaagctgctgaaaacgatccctcaggctgcggcgaccacgtgctacgtggcggcccacccgagagtggccggcgtgtccggccgctacttcgccgactgcaacgaggcgctgccgtcgccggccgccaccgaccgccacgaggccgcgcgcctctggcgggtctccgaggccatcatcgacggctgcaccaacagccaaccccagcgggactgcaccactgctcctctaccacgattactgccggcccagacgcagtcacagtcgccgacaggagcttcttcgtcgcctcgtcgtcgagcctgctgagctgatccggccgtccacctccagttccagtatatccgtcccttttgttctcgtccatgtgagatgcgtgtacaatacctagacattgtatgtatatccgatcgattatccccggccgtcctagcagcattataaatacagcatatactccttgtcccatatataacaggcactagcatgcagtagccaacgtagtgcagtagtagttctgtgtttgtgtgtgtctcaagtctggactctctctgaacattgaagctgtactgtaccattattacatggcctgtgctgcgta

SEQ ID NO: 85794 - DNA, 1533 bp, Zea Mays
agttctactccccgctccccattcacgcactctcactctacctccctccctccctcgccggcgccgcgcgtgctcccgcgggatgctgcgtgcggcgcggtacctgctggggtcgccgggcgcgagcgggttcgggtccaggtcgacggcggaggaggtgaccccggacctgggcgcgacgacggccatcatcacgggcgccacgtccgggatcggcgccgagacggcgcgcgtgctggcgaagcgcggcgcgcgcgtggtgatcccggcgcggagcgccaaggcggcggaggacgtgcgcgcgcgcatcgtggccgagtgccccgccgccgccgtcctcgtgctcccgctcgacctcagctcgctcgcgtccgtgcgcgccttcgccgacaggttcctagcgctcggcctcccgctccacctcctcataaacaacgccggcaagttctcgcacgggcagctggcgctctcggaggacggcgtggagatgaccttcgccaccaactacctgggccacttcctgctgacgaagctgctggcggggcggatggcggagacggcggcggccacgggcgtgcagggccgcatcgtgaacgtgtcgtccagcgtgcacggctggttcgccggcgactgggccgagtacctgcacctcgtcacccgccgcaagataccctacgacgcgacgcaggcgtacgcggtgtccaagctcgccaacgtgctgcacacccgggagctcgccgcgcgcctgcaggaaatgggcgccaacgtgacggccaactgcgtccacccgggcatcgtcaggacgcgccttaaccgcgaccgcgacggcgtcctaaccggtgagggaactgacagcgcgcagtcagcttgctgactcgttcgtctgaaatctgaatggagtgacgagttaaataaatgtctgtgttcgcagatctggtgttcctgctgctgtccaagctgctgaaaacgatccctcaggctgcggcgaccacgtgctacgtggcggcccacccgagagtggccggcgtgtccggccgctacttcgccgactgcaacgaggcgctgccgtcgccggccgccaccgaccgccacgaggccgcgcgcctctggcgggtctccgaggccatcatcgacggctgcaccaacagccaaccccagcgggactgcaccactgctcctctaccacgattactgccggcccagacgcagtcacagtcgccgacaggagcttcttcgtcgcctcgtcgtcgagcctgctgagctgatccggccgtccacctccagttccagtatatccgtcccttttgttctcgtccatgtgagatgcgtgtacaatacctagacattgtatgtatatccgatcgattatccccggccgtcctagcagcattataaatacagcatatactccttgtcccatatataacaggcactagcatgcagtagccaacgtagtgcagtagtagttctgtgtttgtgtgtgtctcaagtctggactctctctgaacattgaagctgtactgtaccattatt

SEQ ID NO: 85795 - DNA, 1584 bp, Zea Mays
agttctactccccgctccccattcacgcactctcactctacctccctccctccctcgccggcgccgcgcgtgctcccgcgggatgctgcgtgcggcgcggtacctgctggggtcgccgggcgcgagcgggttcgggtccaggtcgacggcggaggaggtgaccccggacctgggcgcgacgacggccatcatcacgggcgccacgtccgggatcggcgccgagacggcgcgcgtgctggcgaagcgcggcgcgcgcgtggtgatcccggcgcggagcgccaaggcggcggaggacgtgcgcgcgcgcatcgtggccgagtgccccgccgccgccgtcctcgtgctcccgctcgacctcagctcgctcgcgtccgtgcgcgccttcgccgacaggttcctagcgctcggcctcccgctccacctcctcataaacaacgccggcaagttctcgcacgggcagctggcgctctcggaggacggcgtggagatgaccttcgccaccaactacctgggccacttcctgctgacgaagctgctggcggggcggatggcggagacggcggcggccacgggcgtgcagggccgcatcgtgaacgtgtcgtccagcgtgcacggctggttcgccggcgactgggccgagtacctgcacctcgtcacccgccgcaagatgtgagtgcctggcgactggcttctcctctgcactgctgtgtgctgtggctgtgctaatagaacatctcgtcaacctgacaacaaccttgcattgtcttgggcgcaatggcatgtgggctggcagaccctacgacgcgacgcaggcgtacgcggtgtccaagctcgccaacgtgctgcacacccgggagctcgccgcgcgcctgcaggaaatgggcgccaacgtgacggccaactgcgtccacccgggcatcgtcaggacgcgccttaaccgcgaccgcgacggcgtcctaaccgatctggtgttcctgctgctgtccaagctgctgaaaacgatccctcaggctgcggcgaccacgtgctacgtggcggcccacccgagagtggccggcgtgtccggccgctacttcgccgactgcaacgaggcgctgccgtcgccggccgccaccgaccgccacgaggccgcgcgcctctggcgggtctccgaggccatcatcgacggctgcaccaacagccaaccccagcgggactgcaccactgctcctctaccacgattactgccggcccagacgcagtcacagtcgccgacaggagcttcttcgtcgcctcgtcgtcgagcctgctgagctgatccggccgtccacctccagttccagtatatccgtcccttttgttctcgtccatgtgagatgcgtgtacaatacctagacattgtatgtatatccgatcgattatccccggccgtcctagcagcattataaatacagcatatactccttgtcccatatataacaggcactagcatgcagtagccaacgtagtgcagtagtagttctgtgtttgtgtgtgtctcaagtctggactctctctgaacattgaagctgtactgtaccattattacatggcctgtgctgcgta

SEQ ID NO: 85796 - DNA, 1156 bp, Zea Mays
gtctcgccgctcatcgaccctgtttcactatttggaactgaattatctcatccagcgattccaggtccccgtagcgccatgaacctgccgacgccgctcccgcccaccagctccccggccgcggctccccgcgccagccgtgcgcctgtcgtgcctgctgcccgacgcggcaccggccgccggcgtcggcggcagaaaccgtcttcgtccccgtccacccgcgagaccgaggccgagtacgagcagccggacgccctcgcccgcatcctccgcacagaggccgccatctcgggcgtctcccgcaaggctgcggccgcgcggcagcagtccacgaacctttggccccgcgccgtcctcgaggccctcgactccgctgtcgccgcctgccgctgggagtccgccctcgaggtcccctccctccctccgctttcccccctttcctccacgcggagggccttccttcttcattcctcaacgattcttacctctctcttgctttccttgccactagatcttcgagctgctgcggaagcagcactggtacgagccgaggtcgcagacctacgcgcggttgctgatgatgctcggcaagtgccggcagcccggtcccgccgccggcctcttcagggagatgctctcggagcggctccggccgacggcagacgtgtacacggcgcttatcggcgcgtacggctacagcggcttgctggagcacgcgctggccgctgtcgagcagatgaaaggcgccgctgactgcaagccggacgggtacaccttctccgtcctcgttgattgctgcgccaagtcgcgccgcttcgatctgatccctgccgttctcgacgagatgtcgtacctggggatcgaatgcaattcggttatccacaacgcgataattgacgggtacggcaaggccgccatgttcgaggagatggagggtgcgctctccaccatgcttgagagtggtagcaatgtgccggacatttacaccatgaactccgtcgtcggggcgtatggcaaccatggaagaacagatgagatggagaagagttacagtgagtttcagctgatgggtgttgagccagataccaagacgttcaacatcatgatcaggtcttatggtaaggctggcatgtatgtcaagatgatgtcgatattc

SEQ ID NO: 85797 - DNA, 4569 bp, Zea Mays
ggtccccgtagcgccatgaacctgccgacgccgctcccgcccaccagctccccggccgcggctccccgcgccagccgtgcgcctgtcgtgcctgctgcccgacgcggcaccggccgccggcgtcggcggcagaaaccgtcttcgtccccgtccacccgcgagaccgaggccgagtacgagcagccggacgccctcgcccgcatcctccgcacagaggccgccatctcgggcgtctcccgcaaggctgcggccgcgcggcagcagtccacgaacctttggccccgcgccgtcctcgaggccctcgactccgctgtcgccgcctgccgctgggagtccgccctcgagatcttcgagctgctgcggaagcagcactggtacgagccgaggtcgcagacctacgcgcggttgctgatgatgctcggcaagtgccggcagcccggtcccgccgccggcctcttcagggagatgctctcggagcggctccggccgacggcagacgtgtacacggcgcttatcggcgcgtacggctacagcggcttgctggagcacgcgctggccgctgtcgagcagatgaaaggcgccgctgactgcaagccggacgggtacaccttctccgtcctcgttgattgctgcgccaagtcgcgccgcttcgatctgatccctgccgttctcgacgagatgtcgtacctggggatcgaatgcaattcggttatccacaacgcgataattgacgggtacggcaaggccgccatgttcgaggagatggagggtgcgctctccaccatgcttgagagtggtagcaatgtgccggacatttacaccatgaactccgtcgtcggggcgtatggcaaccatggaagaacagatgagatggagaagagttacagtgagtttcagctgatgggtgttgagccagataccaagacgttcaacatcatgatcaggtcttatggtaaggctggcatgtatgtcaagatgatgtcgatattcagatacatgaagaaacggttcttctcaccaactgccgttaccttcaacacagtaatagagtgtttcggacgtgctggcgacatcgaaaagatggagtactatttccgtcttatgaaaattcagggtgtcaaacccaaccccatcacctactgctcgctggttaacgggtacagcaaagccgggcttcttgataaggttgcgggggtcattcgacagaccgagaacactaatgttgtcttggacacaccattctttaactgtgtgataagcgcatatgccaagtctggggatatcaaaatcatggaggagatgctgcagcttatgaaggagaagaggtgcaagcctgacagaataacttatgccaccatgattcaggcatacactgcacacgggatggatgaagctgctatgttgctggagatagaagctgaaagatttgataaacggttgctgggatcggtttctgacattgatggcaaataatgcatacaaccattagtcctaatctaaggccggggaaaagatgttgctgcgcaagaggtgcttttggtggagatagcttggaatccatccacaaccggatctgaacaaaagggtcgggccaattggatgcagagccatgcagatagcaaggaaagcagatatctataaccctttctaaattcctggtccgataattagttccatgctcaggtaatccatctgtttggggctcatatttaggatcactgttcaacaagacatctggtcagtttggtcactatgttgtcaccactgatgtgctggatatatttcttattggcaaaccgaattctgttgccggtaagcatgtcgtcaccgagtttggtcactacgttgtcaccaaaaggccacacatgccactgtgctgatcctattgccagttgtagcagcctccaagtgagactgggaggctggggatcgagagcatgaagcaagcagcatggatgacgctgtcagctcacgaacaaatcgctggtggaggcactcgcaggtcatgggatttgcgttgcaggcttggtccaagtgaaacgaactatatagatcttcaatggccgcagaagtggtaaaaccctgcaaggaattcatgttggagtcatcacatttgtctgtagtcactgaacatttatgtgctgatgaagtggtaaaaccatgcagatgaagtggtaaaaccatgcagaatgtagcgtccgcattctgtatctgttgttgatcaattatgtattcagatttgttttttgcgcctacttttgtgcaatgtaaaataagcagagtatcaagctatctgatcaatgcacgttcacgaacagagcagtgaagttgacatggccagagccagtgaaatccatgaaataaacctggtcgttccatacaggtttatgagtttattatccctctgtactcgaaccaataacttaacacgaaagggggaacatcttatatgaataataataaatgtagaaaaggaaaagaatcacagcttccagtttttttccttttataccctccttttcttcctaaattctgagttttcaccataaccatattgggatctttttcagacaaatccttactgagtcccgaattctgatctagtcgtgtatcctgagataagcagctcagctcttcttccactcctccgcggcgccgtcggtgcccgcgaggtaggccttcttcctcctctcggcacgcgcgcaggcgcacacgatggcgaagcaggcggcgtacacggcgtagacgcgccagttggcgcggggcgcctctcccgccgccgcgcggtggaagacggcggcgtagtagtgcagaccgacggcgaggcccaccaccatctgcgcaaggccgagcgccttggcagcgtccccgttgccttcgtcctcgggggaggcggcgtccgagaagacagcaacgaggtccaccatctggagcacgaggtagcccatgaagccgagggactgcgcggcctgcgtccaggcgtaggcggcgggggaggccgcgtggaagaagcgcagcggctccagccccgtggcggccgcggcgagcgcgagcgtggcaaagtagatggcgaggtacgcctgcgccagcagcagcgcgcggtggaggagcggcaggtacgggcccatccggcgcaccagcgcggtgagcatgaagagcggcagcagcagcaccgccaccgacgccgcggaggcggccaccgccgcccaccggccgcccaggatcgggcgcacgccgtcggcgatcccggcgttcgccgcggacaggtacgccttggagtggtgcgagaggcgcgccaggtccggcatcagcgtctcctgcagccgactgggtaggtcccggaattcggagatgagatcgtccgtgccctcccccgcctccttggccaacaccacctcctcctcatcctccatctccaccgtctccgtcgccgctgacttctccttgctcacgacggtcgcattcgccttcacctcggcgtcgacgaccaccggagccttcttgccggatttggccgtcttggcaccggcatccacggtcgaatttgccggcggcggtttctttgccttcccaaccgcggtggcagcctcagatttggccgtcttgggcggcttcaccgccttggcgcccgtcttggaaaccttggcaggcttggccgaatcggcgcccttggtcttggcaccagccgccgccgcagtcgccgccttgtccggcttcggcaccttggccttgtccgccttgggggtcttgggggccttggagaccttggcaatggcggcgtcaccacccgcagccgcagccgctttgccagcgggcttcttggcggcccctttcgccgcggcagctgactctggcttcttagccttggcaaccttggtctggttcttggaagtggcgtcgccggcgagcagcttctttttggtcttccccgccgcggccgacttgcccggcttggcggcgggcacctcgtcgccgtcgttgtccgcaagcagcgccttgcggctgccggagaccttgggcttgggcttgggtttccccggttcggcggaggagcagagcgcgacatgggagcacaggagcgcgagcagcaggagcagcaccagcgtcagcacgggccgccgcggccaaggcgccatttttgcttttgtgcaggcacaggctggcagtggcaggcggggagtacttcggcggtggagtgagagggagagtgcggcgcggcggcggtggatccggagtcaggagcccggacggacgggccgccggcgtgttatatacggagatctggggcggaagtttgtggcagtgtccgcgagtgagtgagtgagtaagtgggaggtgaaccacaccaccggcaggggagaagaggtatgggatggtcttggtttggcccagtccctcccagcccagctggtagcgtgagtgggaggcgaaccacaccaccgacggcagcggagaaggggattgtttggtacagctggtgcaaaacaaggtcacgtggtgcgtctccctccgtctccgtctcccatgggcaaatgccaagcggccaaactctaccgtaccgccgctagc

SEQ ID NO: 85798 - DNA, 1380 bp, Zea Mays
cagacctttaaggcttgttgctttggacatgtgatttctaattttgaaattttcccttcaacatctatacactgcaaagtgtcttagtgttcttgcctccaacactattcacatctaagtcaatttctacaacttttatatcgttgttatatgatacaggagatgagaccagaaattgaagccatcaatgaagagatgcgaaattcaactgatccaaggtcaatggaagtggggaaacagaaactgggggagctattccttagacatggagtgactccattgacaccattgaagggtctattcatacagggacctatatttatgagctttttctttgctatatcaaatatggttgagaaagtcccttctatgaaaggaggtggtgtgtattggtttactgatttgacaactcctgataatttattaatcctcccagtgttaacatcactgacctttttggctacagtagagcttaatatgcaagatggcatggaagggaatcatatgttaaaaccaatgaaaaagttctcccggttttttggagttttgtttgttccatttacaataggctttccaaaggcaattttcttttactgggtcacatcaaactttttctcacttgtttacggtgctgttctccggaatccggctgtaagactcttcttaaatcttcctcgcttggaatctcagcccacaactgcagaagtccagcccttaaacctatcgggcggaccagagccaagtcctggagtcgattctcctatcacagataaggaaactgagcagtcgagttctgtgctaagtcctggagtcgattctcctatagcagacaaggaatgtgagcagtcgagtcctgcggtgagtcctgaagtcaattctcctatggtggacaaggaaagtgagcagtcgagttctgtgttatgtgaccgtatcagagatcttgagatcagggctaaagcaacgggtgaatctcgagagtaaattcgtgatttgtccacatggaagtaagcaagcacatctcctttgggggtttctggtacttttttttttgttgggagcaaaggatacccagtagcgaggtataattttgaagagtccgcggtttttcgaaatataacggcccaccatgtttccgtgaataaattggtgtagtatattggcttgtaaaatcgttgcacggtatgatataaccttgtactactagctaacattagccatgatgttccttggattaagcatattgttgctattgagcggcacacgacatgtttgtctaatatttgcttcatgctgaaagctcaaatgagtgataactgtttctgtacatttgcgatgttgtcaattttcgagagctgaagttgtaatgtgacttttggtatt

SEQ ID NO: 85799 - DNA, 1322 bp, Zea Mays
cgcgtttattaattcccaccccgccgctgctcacgtatcgcccgccgtcctctcctctcctccccggccccttcactccaccaacgaaccccacgcaggcagcagcacgcgcaagccgcaaggcaaggcacaaacactaggggccgggcatggcgacgcgggcggacgtggagaagggcgggccggcgaggaaggagcccggcaaggtgccgtcgccgctgtacccgcagcacgagggggagcgggagtgggtgccctggctcgtccccgtcatcttcgtcgccagcatcaccgtcttcgtcgtcaccatgtacgccaacaactgccccgcgcgcgacaccaacaagtgcgtcgcccgcttcctcggccgcttctccttccagccgctgcgacagaacccgctcttcgggccctcctccgccacgctcaccaagatgggggccctggtgtgggagaaggtggtgcaccgccaccagggctggcgcctcctctccagcatgtggctccacgccggcgtcatccacctggtcgccaacatgctctgcctcctcttcatcggcatgcgcctcgaacagcagttcggatacgtgaggatcggcgcgatctacgtgctctccggcgtgggcggcgccgtgctgtcgtcgctggtcgtccggaaccgcgtcaccgtgggggcctccggggcgctcttgggcctgctgggcgccatgctctcggagctgctcaccaactggaccatctacaccaacaaggcggcggccgtggccacgctcctgtccgtggccgccgtcaacctggtgctcggcgtcctgccccacgtcgacaacctggcgcacctcggcggcttcctcgcgggcttcctactcggcttcgtcgtgctcatgcgcccccacttgggctggatggagcgctacggactccccgccggcgcgccctgcaccgccaggaagtacctcgcgtaccagtggaccctcctcgccgtcgccatcatcatcctcctagtcggattcgcggccggcatggcgatgctcttccgcggcgccaacgccaacgacagctgccactggtgtcactacctcagctgcgtgcccaccgccagatggaactgcaccaactgatgatccatgcatagcggcagcagcacgagttggagttgccacccattttcatcttccgatccgtatagtctcgttactgtagatagcttctttgtcattcattcagatctcaacacacacgtcggtctcctgttcatttgattcattcttttacataatgatgcaatgcaattattgagatttcgaatctcgtcttgcgtgtct

SEQ ID NO: 85800 - DNA, 1882 bp, Zea Mays
cgcgtttattaattcccaccccgccgctgctcacgtatcgcccgccgtcctctcctctcctccccggccccttcactccaccaacgaaccccacgcaggcagcagcacgcgcaagccgcaaggcaaggcacaaacactaggggccgggcatggcgacgcgggcggacgtggagaagggcgggccggcgaggaaggagcccggcaaggtgccgtcgccgctgtacccgcagcacgagggggagcgggagtgggtgccctggctcgtccccgtcatcttcgtcgccagcatcaccgtcttcgtcgtcaccatgtacgccaacaactgccccgcgcgcgacaccaacaagtgcgtcgcccgcttcctcggccgcttctccttccagccgctgcgacagaacccgctcttcgggccctcctccgccacgctcaccaagatgggggccctggtgtgggagaaggtggtgcaccgccaccagggctggcgcctcctctccagcatgtggctccacgccggcgtcatccacctggtcgccaacatgctctgcctcctcttcatcggcatgcgcctcgaacagcagttcggatacggtcggtagcggctacctacctactctactctactctaccctgcccctggctgccaataataaccacaatatataaccgcgttcatcagtgaggatcggcgcgatctacgtgctctccggcgtgggcggcgccgtgctgtcgtcgctggtcgtccggaaccgcgtcaccgtgggggcctccggggcgctcttgggcctgctgggcgccatgctctcggagctgctcaccaactggaccatctacaccaacaaggcggcggccgtggccacgctcctgtccgtggccgccgtcaacctggtgctcggcgtcctgccccacgtcgacaacctggcgcacctcggcggcttcctcgcgggcttcctactcggcttcgtcgtgctcatgcgcccccacttgggctggatggagcgctacggactccccgccggcgcgccctgcaccgccaggaagtacctcgcgtaccagtggaccctcctcgccgtcgccatcatcatcctcctagtcgggtaagcaggacaggacatcctgattgatttatttatttatttattatatatatgcccttcgtagctggccaggccatttccttcgtccagcatgtacatataacaggagtaacgtgactggattctcctcttcctctctcatggctagccagcgtgttgacattgacaaccacgctgtgcacgatactctatgccgttttgtgtgcgctcatatataattcaaaagtctcaacaactcattattccttgcgtgtatggtttcctctctctgcagattcgcggccggcatggcgatgctcttccgcggcgccaacgccaacgacagctgccactggtgtcactacctcagctgcgtgcccaccgccagatggaactgcaccaactgatgatccatgcatagcggcagcagcacgagttggagttgccacccattttcatcttccgatccgtatagtctcgttactgtagatagcttctttgtcattcattcagatctcaacacacacgtcggtctcctgttcatttgattcattcttttacataatgatgcaatgcaattattgagatttcgaatctcgtcttgcgtgtctagtcagcatgcgccgcctttttcgaacccgtgcaaatgcgccaacgcacgcacaagagcaaccaccacgtgccttcccttctttttcttgacaacacatgtgtacgttctcaactgcacatgttcccaagataccaactatcacaggttggttggtgaaagtactacgcacagcgcatcacgaaggcccccccccccc

SEQ ID NO: 85801 - DNA, 1397 bp, Zea Mays
attcccaccccgccgctgctcacgtatcgcccgccgtcctctcctctcctccccggccccttcactccaccaacgaaccccacgcaggcagcagcacgcgcaagccgcaaggcaaggcacaaacactaggggccgggcatggcgacgcgggcggacgtggagaagggcgggccggcgaggaaggagcccggcaaggtgccgtcgccgctgtacccgcagcacgagggggagcgggagtgggtgccctggctcgtccccgtcatcttcgtcgccagcatcaccgtcttcgtcgtcaccatgtacgccaacaactgccccgcgcgcgacaccaacaagtgcgtcgcccgcttcctcggccgcttctccttccagccgctgcgacagaacccgctcttcgggccctcctccgccacgctcaccaagatgggggccctggtgtgggagaaggtggtgcaccgccaccagggctggcgcctcctctccagcatgtggctccacgccggcgtcatccacctggtcgccaacatgctctgcctcctcttcatcggcatgcgcctcgaacagcagttcggatacggtcggtagcggctacctacctactctactctactctaccctgcccctggctgccaataataaccacaatatataaccgcgttcatcagtgaggatcggcgcgatctacgtgctctccggcgtgggcggcgccgtgctgtcgtcgctggtcgtccggaaccgcgtcaccgtgggggcctccggggcgctcttgggcctgctgggcgccatgctctcggagctgctcaccaactggaccatctacaccaacaaggcggcggccgtggccacgctcctgtccgtggccgccgtcaacctggtgctcggcgtcctgccccacgtcgacaacctggcgcacctcggcggcttcctcgcgggcttcctactcggcttcgtcgtgctcatgcgcccccacttgggctggatggagcgctacggactccccgccggcgcgccctgcaccgccaggaagtacctcgcgtaccagtggaccctcctcgccgtcgccatcatcatcctcctagtcggattcgcggccggcatggcgatgctcttccgcggcgccaacgccaacgacagctgccactggtgtcactacctcagctgcgtgcccaccgccagatggaactgcaccaactgatgatccatgcatagcggcagcagcacgagttggagttgccacccattttcatcttccgatccgtatagtctcgttactgtagatagcttctttgtcattcattcagatctcaacacacacgtcggtctcctgttcatttgattcattcttttacataatgatgcaatgcaattattgagatttcgaatctcgtcttgcgtgt

SEQ ID NO: 85802 - DNA, 513 bp, Zea Mays
atgaaggtttctcaggaggtgagggaaacaacggaggcggaggcacgcaaaatctcgcttgcatatgacggtgccatcgccgcgcaaatccaggcggagacctccgttaaggagcggagcaccgagctccagggacttcgccagctcatgggcgaggtgtgcaaccgcctctcgcccccaccatctaccgaggtgcctttggctaagcggcttcgggcgcttcctaggcacgtggtgcgggtggtccttgaaggcatgtacctcaggagcagcatagccctaggtcagatggtctctcatttcgatgagattgatgtcatcatgatcgtcgaaggttatgccgccggatggagcgaggaggagctagatgccattgaagaacaagtcagccctcatgtctgctcactcgcaagacaaaacgacgtgaagctcctcctaaccagccccctgaatgcggaagccccaccggcgactctcctgcgggtgtcctggactatttttatttgcttgtaa

SEQ ID NO: 85803 - DNA, 1693 bp, Zea Mays
cgaggacctcggcaggcactcactcacccacccgcgtccgttcgccggaaagctccagaaaagaaaacacactcgcgagaccgcccgcccggccgggcgcaggcaggcaggcaggcaggcaaaagtggcctcgcaaaggaacggcgccccggaactcggctcggttcccccgcttcagttcccggtcccgtccgtcgctcgctcgcttccctttccttgcttccttcctccaccgccctaacctcccctcccgcggtcccgcctcccgcacgggcacggcacgcggatctgaaccggccaggaggccctctcccagcggcgggcgcccgcgcgcagcaacctgctccccccctgtcctgtggcatcggcttccaatccggtcgatgcgcccgatggagacggaggacagcgtcgggtgggacttcctcgactggctcggcccggacatctccaccaccatcttccagctcctcgacgaccccgcggacctcgcccgcgtcgccgccgtctcccgctcctggcgccgattcgtcgccgtgaacaaattcagcaagcacctgtgcaggcagatatgtccggaggccgccagcttcacccgcgcggtcgtggtggcccgattgccgccgccgccgccgccggcggcgcacgccgcgtgcgagtccagccaggtcgccgagtgcagggcccgcgatggggagcacgcggcctactcctacctcgccggcgcgctcgtctccggcaagcccgccacggacctcgtcatgcgctgcgtcggcgcctccagcaccgacaacttccccgacgagaccatcgagaacacgctcgtgccgcacgacatggttaacttccgcccctcctactggtccagcggcggcgaggacgaccccgatgtccccgagagcttgacctacacgctcgcctctgatctctgcgtcatcgaggagatcaggatacgcccgttcgaagcatggccatccgatttactcttcgaaggcggtgagaatccggctgggtcattccaagcttgaccctggaagagagacttttgtttcggatgaggatgagaacctgactgcgatcgctgatgagaactacatgtggacatacacgtcgccagagtttcctatgcttcaggaaaatgtgttgcaaaccttcaagcttccacgcccggctctttgcattggtggtatagtgaagattgaactactggggaggatacagaaacaatttacagatgataagtattacatatgtgtctgccatgtccaagtgacggggcgctcgctctcaccagatttaatgatagacctctccgatcctgctggttactcgaacctcaagtatctgccgggtgccggtaacttgcgcccagaagacctaatcagcattgacgccaaggactcaccggactggcgctcgcttgtttccaggtacaggcagatgaggcaactggctatggtgtacatgctgcttggacccgtgcagttgcagtttatggatgaagacgaagctgacttgcagatgtaggctttgttttccctgaatccgatcttgtgtatcctaattgaacagagcttgctctgataaatatagcgagaaaagatatgtgtcgctgtttatgccttctggtttttcagctatgcttgaactcgatcatggcagagacaaaagagtttgcaaatagtgcattgat

SEQ ID NO: 85804 - DNA, 1755 bp, Zea Mays
cacccgcgtccgttcgccggaaagctccagaaaagaaaacacactcgcgagaccgcccgcccggccgggcgcaggcaggcaggcaggcaggcaaaagtggcctcgcaaaggaacggcgccccggaactcggctcggttcccccgcttcagttcccggtcccgtccgtcgctcgctcgcttccctttccttgcttccttcctccaccgccctaacctcccctcccgcggtcccgcctcccgcacgggcacggcacgcggatctgaaccggccaggaggccctctcccagcggcgggcgcccgcgcgcagcaacctgctccccccctgtcctgtggcatcggcttccaatccggtcgatgcgcccgatggagacggaggacagcgtcgggtgggacttcctcgactggctcggcccggacatctccaccaccatcttccagctcctcgacgaccccgcggacctcgcccgcgtcgccgccgtctcccgctcctggcgccgattcgtcgccgtgaacaaattcagcaagcacctgtgcaggcagatatgtccggaggccgccagcttcacccgcgcggtcgtggtggcccgattgccgccgccgccgccgccggcggcgcacgccgcgtgcgagtccagccaggtcgccgagtgcagggcccgcgatggggagcacgcggcctactcctacctcgccggcgcgctcgtctccggcaagcccgccacggacctcgtcatgcgctgcgtcggcgcctccagcaccgacaacttccccgacgagaccatcgagaacacgctcgtgccgcacgacatggttaacttccgcccctcctactggtccagcggcggcgaggacgaccccgatgtccccgagagcttgacctacacgctcgcctctgatctctgcgtcatcgaggagatcaggatacgcccgttcgaagctacttttcagcatggccatccgatttactcttcgaaggcggtgagaatccggctgggtcattccaagcttgaccctggaagagagacttttgtttcggatgaggatgagaacctgactgcgatcgctgatgagaactacatgtggacatacacgtcgccagagtttcctatgcttcaggaaaatgtgttgcaaaccttcaagcttccacgcccggctctttgcattggtggtatagtgaagattgaactactggggaggatacagaaacaatttacagatgataagtattacatatgtgtctgccatgtccaagtgacggggcgctcgctctcaccagatttaatgatagacctctccgatcctgctggttactcgaacctcaagtatctgccgggtgccggtaacttgcgcccagaagacctaatcagcattgacgccaaggactcaccggactggcgctcgcttgtttccaggtacaggcagatgaggcaactggctatggtgtacatgctgcttggacccgtgcagttgcagtttatggatgaagacgaagctgacttgcagatgtaggctttgttttccctgaatccgatcttgtgtatcctaattgaacagagcttgctctgataaatatagcgagaaaagatatgtgtcgctgtttatgccttctggtttttcagctatgcttgaactcgatcatggcagagacaaaagagtttgcaaatagtgcattgataatttggaggcagccccctttatcttgcaaatagaccatattctgtatcatgattaataattaccatctggtggttttt

SEQ ID NO: 85805 - DNA, 1376 bp, Zea Mays
cccggtcccgtccgtcgctcgctcgcttccctttccttgcttccttcctccaccgccctaacctcccctcccgcggtcccgcctcccgcacgggcacggcacgcggatctgaaccggccaggaggccctctcccagcggcgggcgcccgcgcgcagcaacctgctccccccctgtcctgtggcatcggcttccaatccggtcgatgcgcccgatggagacggaggacagcgtcgggtgggacttcctcgactggctcggcccggacatctccaccaccatcttccagctcctcgacgaccccgcggacctcgcccgcgtcgccgccgtctcccgctcctggcgccgattcgtcgccgtgaacaaattcagcaagcacctgtgcaggcagatatgtccggaggccgccagcttcacccgcgcggtcgtggtggcccgattgccgccgccgccgccgccggcggcgcacgccgcgtgcgagtccagccaggtcgccgagtgcagggcccgcgatggggagcacgcggcctactcctacctcgccggcgcgctcgtctccggcaagcccgccacggacctcgtcatgcgctgcgtcggcgcctccagcaccgacaacttccccgacgagaccatcgagaacacgctcgtgccgcacgacatggttaacttccgcccctcctactggtccagcggcggcgaggacgaccccgatgtccccgagagcttgacctacacgctcgcctctgatctctgcgtcatcgaggagatcaggatacgcccgttcgaagctacttttcagcatggccatccgatttactcttcgaaggcggtgagaatccggctgggtcattccaagcttgaccctggaagagagacttttgtttcggatgaggatgagaacctgactgcgatcgctgatgagaactacatgtggacatacacgtcgccagagtttcctatgcttcaggaaaatgtgttgcaaaccttcaagcttccacgcccggctctttgcattggtggtatagtgaagattgaactactggggaggatacagaaacaatttacagatgataagtattacatatgtgtctgccatgtccaagtgacggggcgctcgctctcaccagatttaatgatagacctctccgatcctgctggttactcgaacctcaagtatctgccgggtgccggtacaggcagatgaggcaactggctatggtgtacatgctgcttggacccgtgcagttgcagtttatggatgaagacgaagctgacttgcagatgtaggctttgttttccctgaatccgatcttgtgtatcctaattgaacagagcttgctctgataaatatagcgagaaaagatatgtgtcgctgttt

SEQ ID NO: 85806 - DNA, 1912 bp, Zea Mays
cgcacgggcacggcacgcggatctgaaccggccaggaggccctctcccagcggcgggcgcccgcgcgcagcaacctgctccccccctgtcctgtggcatcggcttccaatccggtcgatgcgcccgatggagacggaggacagcgtcgggtgggacttcctcgactggctcggcccggacatctccaccaccatcttccagctcctcgacgaccccgcggacctcgcccgcgtcgccgccgtctcccgctcctggcgccgattcgtcgccgtgaacaaattcagcaagcacctgtgcaggcagatatgtccggaggccgccagcttcacccgcgcggtcgtggtggcccgattgccgccgccgccgccgccggcggcgcacgccgcgtgcgagtccagccaggtcgccgagtgcagggcccgcgatggggagcacgcggcctactcctacctcgccggcgcgctcgtctccggcaagcccgccacggacctcgtcatgcgctgcgtcggcgcctccagcaccgacaacttccccgacgagaccatcgagaacacgctcgtgccgcacgacatggttaacttccgcccctcctactggtccagcggcggcgaggacgaccccgatgtccccgagagcttgacctacacgctcgcctctgatctctgcgtcatcgaggagatcaggatacgcccgttcgaagctacttttcagcatggccatccgatttactcttcgaaggcggtgagaatccggctgggtcattccaagcttgaccctggaagagagacttttgtttcggatgaggatgagaacctgactgcgatcgctgatgagaactacatgtggacatacacgtcgccagagtttcctatgcttcaggaaaatgtgttgcaaaccttcaagcttccacgcccggctctttgcattggtggtatagtgaagattgaactactggggaggatacagaaacaatttacagatgataagtattacatatggtgagttctcaacttctgatgttggtgttggttggtcacctgttttttccttcatggttcccttcacgcgcgctcgttaacattgtctcaatccagttacaagaaggaaacatgcatggccgttaatttgttatatgaattttgaacttgcgtataatgtacagtttcgcgctgggatagaactaaaggagtgtgtgctacttattttcgctgcagcctaaaagtagtttgtctacagaagatcattctctatgtgatcctaattacctttcctgtaattttgtcttgatccttgtgtccaagcatggtttatgtattgcttgtctgtgcagacacatgccatcttggatggtgaaatttctttgtccacttataaagtagagttagctttctttagcacgtctgaagcattcccttggatatgcgtcatctctgcgacgttaacagctttgttttctttttgcacgctgacagtgtctgccatgtccaagtgacggggcgctcgctctcaccagatttaatgatagacctctccgatcctgctggttactcgaacctcaagtatctgccgggtgccggtaacttgcgcccagaagacctaatcagcattgacgccaaggactcaccggactggcgctcgcttgtttccaggtacaggcagatgaggcaactggctatggtgtacatgctgcttggacccgtgcagttgcagtttatggatgaagacgaagctgacttgcagatgtaggctttgttttccctgaatccgatcttgtgtatcctaattgaacagagcttgctctgataaatatagcgagaaaagatatgtgtcgctgtttatgccttctggtttttcagctatgcttgaactcgatcatggcagagacaaaagagtttgcaaatagtgcattgat

SEQ ID NO: 85807 - DNA, 2257 bp, Zea Mays
agataatatcgtttacagagtatagttttaaatagaaactaagatataaaataagatagcctcagatggtggttggatcgacgttatgagctgtgatccgtgccccagctacgatgttggatggctcctcgtgcctcgatgtttggtaggtcacgaaaaaaaaacgacccagtttttgtttggaaataaaacaggagaccttcctggcttcattgtgtgccgatgcaaacgcgatgtaccggagctaggtacacgtacaaaggttccttatttgccatggccttcatgagaaatggcaaagtaacgcgcacacactaatgctatcaaacaaaaaaaaagtccagtgtgctactatgctatgtataaacgctttcagaatacaattagcccaagctaaaaaaaaatggcaggctactcatatctctcgacagctcgctctaatgcgcagtgcctctatagctaccaaatgcccacacacggtcatttccgagccctgaccacccgttccggctgaaaccccttgggatacacgagcaccgaatcgacacagaggccacctttcgtgtgggtgcagtcgatctgcgctaacgaaaacttgagcctggtcggctgaccagagctcggcggcgcgtcgaaatcgccgacgtggtacaggatccagcgtccaggctcgtccaggtagcactgggacacggcgtgctggccgtccgacgtggagagctggaaccgcacgggcttcttgtcccagccgtggacctgctccgagctgcagacccggcggccgaagcgcgtggaggacttgccgaggtggagcctgaagtagaggctgtaggccgtccccgccgggaagcagaagtccacctctcccaccacctcgaaccaccagatttgctgcaggtatgcagtggagtggaacgtgtttcttaggtgccgccacgatggactggtattccaacgcacaggtaattccggaatttatctgtgccttttgtccaaaagaaaacaatttatttgcccataaaaatccggtggtcagagtcagatggtgctgaaaaatcacgacttcatagggaaatgaaggagatatatatactgagctgttgaaaatttcagacccacacatggtgctgttctctaccaattatatctcctgtcaatttttgctggcgtccatgcttacctcaccagtgtagcggctagcataaagttcatttccgaatttaattttttatcaagtcaatcgtaaaagagaataaaaggtttcacttttattgctttcgctattctcaactgtcgcaacaaggcattcattactgtgtcactcaccggtagccttcctctctctcacccctacggccctcactccatgtctcaccacgtcactacgatggtcatatacacgcactattgagctttgagcatggctccgacaataaacacgatacagccctagctaactgttcgtaaaaaaacgaagagggagtgaaatttcaatatggtagaagtcgaacaaaacgggaggaaaagaagtgagttcatattaatttacctagattcagatgttggcatgttaatccagtatcttctatcgtcaatcccagtaatgaccagcgctttcgacgacaaggccatgcagatcccaccttcgttcttctccagccagaattcctgcagcacaaagcagaaaagtacacgttgaaaaaactcctctgtgaacaaagcatgtctgcttgtgtcgtattcagttttgcttgcctacaaagcaacagagacttcatggtaatacttctccactagtcgtcgtattcagttttgcatggtggtaaagatagaatttatttttcaacaggaaccttcatagttccaagagaaccgacaattttcttatgtcgaacacgaaaaatcaaactggaaggcccggtgcccacctaaccagttgaaattcgatgaaacaaaattcaacgacgaataccataaaccttctgatttcgcgagggggaaaaggcttcattttgaatctaaagcaaataacttgacactcaccaatccacaaaactaattcgaagtggataaaattaaggctatactacaagttccgaattccaatcgtctccatgcccaaattgcttaacagtcgagtcgacaaagaaactcttgaacgtcacaaaatggaacttagttagaccgatcaaacaaacaaacaaaaaaagtagagaaacctcacccttttgccaccgtcgaacggcacaggtctggc

SEQ ID NO: 85808 - DNA, 2045 bp, Zea Mays
atgattgcagtcttgatcgcggctctgctggggctggggctctgcgtcgccgtcgttgcggcggagaagaggcggcggctagtcggcgtcggcgccaccggcgacgaccacgcggcggcgtcggccggactaagccagggaactgtccaagtccaagatcacggcgggcactggtgcagcaatagcaaccgggtccaagtccaagaaatgagctcgcggggtcccgacccggcgccgcccggggaggagcaggagacggcggaggagctgctggagcgcgtccggggcatggtgccggcggcggcggccgcagcgcgggcggcgggcgggttcccgggccggtggaaggcgatcgccgcgaagctggacgcgctgccggcgtgcctgtccgacctgtccagccacccttgcttcgccaggaactcgctgtgccgggagctgctgcagtcggtggccgccacgctggccgacgcggccgagctcgcggcgcggtgccgggagccgccggcggacgggaagctgagggcgcagagcgccgtcgacgcgctctccgggaggctcgacctcggcctccgggactgcgcgctgctcgtcaagaccggcgtcctgtcggacgccgccggcccgtcaccgccgccggaggaggcgcccgacgtccgggagctgctcgcgcggctgcagatcgggcacgccgaggccaggggccgggccgtggacgcgctgctggacgcgctgcgcagggacgagcggggcgtgctggcggcgctcggccgcgccagcgtcgccgcgctggtgcagctgctcacggcgtcggcgcccgcggtccgggagaaggccgccacggccgtgtgccaggtcgcggggtcgggcgccgcctccgaggcgctgctcgtgtcggagggcgtcctgccgccgctcgtcaggctggcggagtccggcagcgccgtggggcgcgagaaggccgcggccacgctgcaccgcctgtccgcgtcgcccgacgtcgcgcgcgcggtcgtcgggcacggcggcgccggcccgctcgtcgagatctgccggacgggggactccgtctcccagcccgccgcggccggcgcgctcaggaacctctcggcggtgccggaggtgcgccaggcactggccgacgaaggagtcgtccgcgtcatggtcggcctgctggaccgcggcgccgtggtggcgggcgccaccaaggagcacgccgccgagtgcctgcagaacctcacgtccggcagcgacggcctgcgccgcgccgtcgtgtcggagggtgggctgcgcagcctgctgctctacctggacggcccggtgccgaaggagccggcggtgggcgcgctccggaacctcgtgggcgctgtctcgcccgacagcctcgtggcgctcggcgtgcttcctcggctggtccacgtgctcaaaatagggtcggttggcgcgcagcaggcggcggcggcggcagtctgccggatctccagctccgccgagatgaagcgcgccgtcggcgagcacggctgcgtagcgccgctggtgcgcatgctggaggccaagtcgaacggcgcgcgcgaggtggccgcgcaggcgctggcggccctggcgagctgccctgccaacgcccgagagatgaagaaggacgacaaatgcgtgcccagcctggtgcagctgctggacccgagccctgcgaacacggctaagaagtacgccatcgcctgcctcctcacgctctcggggaccaaacgatgcaggaaggtcatggtctcgcacggcgccatcggttacctgaagaagctctccgacatggacgtggccggcgccaagaagctgcacgagaggctggagcgcggcagtctacgcagcatgttcagtagatagtagcagctgttactattttattgccttgcgaaagtttcacctctactgtatagaaaccaaactcagtctcacactctgtatgaaatgaaatgaaaatgtctgttcaggaactaataagcctagtaagtgtatcttcaactagcaagatcagccgtccagatttgtgc

SEQ ID NO: 85809 - DNA, 1562 bp, Zea Mays
agagggcacagggcagcgcagcacgggagccggcagcggcggtggagcagcgtgcgtggagggtgacggagctaggcttggctcgcacaggctcgctactggttgaaacttggtgcgcgccctccgacctacacccaaccaaccgtcccaaactcaaccaaactctccgcgcgcgcaggcggccgccctcggattgggctcccctcccctcccgctcactcgccagtcgccaccgctcgctgcccacgcgcatggcgtcctcgctcgtctcgcgcccgcacctcacccagcgcccggtccgcgccgccacgctcgcctccgctacccgcccccgcctcgtggccggggccctcggcgggcgctgccaggcgcaggcggcgggggacttggacgacgcccactacatgcggcggtgcgtggagctggcgcgcaaggcggccggccacaccagccccaaccctatggtgggctgcgtcatcgtccgcgacggccgcgtcgtcggagaaggattccaccccaaggccggccaacctcatgccgaggtatttgcactaagagatgcaggtaatctagctgaaaatgcgacggcctatgttagcttggagccctgcaaccactacgggagaacccctccgtgtactgaagcgctcataaatgcaaaagtgaaggaagttgtcgtggggatgactgacccaaatcctatcgtggcatccaaagggattgagaagctccaaggtgctgggataagtgtgagggtgggtgtggaggaagcgttatgccgcaaactaaacgaggcttatatccatcgtatgctcaccgggaaggcttttgcaactctgagagctacactctcaatgaatggaatcatcacgaaccagattgggaagggagctgatcagtcaggtgggtactactcgcagctgatgaaagaatacgacggagtcataatttcaagcgacctggccaagatgtcggccttacctttgtcgcgtgaagccggcacaaaccaacctctctgtatcatcatagcacagggtgaaagctcccggctacacatcccatctctcagccaagagcatgcatccagggccatagtccttgccgatagtccggtcactgtggagccagcaggagtggaagttgcagtttttcgtcagatagacctggagtctattctccagcttcttgcgcagcgagggctctgcagcgtgctggtggacttcagagaggccggcgaaagcttcgcgtcgcttctgaacgacttccaggaggacaagctggtgcagaaggtcgtcgttgaggtcctgcccttttggctcgcgagcgacgggctcagcaacctggcatttggtggcagccaatcgttcccgttgaagaacttggagctcagggatgtgaatgggagtgtgctgctggaaggctatgtgtaatagcctctcttctgtcggagattggcattgtttgttttccctcgtgtaaacagatagccctgtaatatacttgcagagccgcccacgagccatgtggggttttgcttttttatatatatagttgaaaatcaa

SEQ ID NO: 85810 - DNA, 1094 bp, Zea Mays
aacctgctcgagaccactgtgagtctgtgaccagtcaccacctctgcccagcgctccactcaccagtcaccacaatggcgtctgaatccgaggcctgcagctgggagccgcacctgctccaccccaacggcactgagccgctgcaccggatcgccgtggactactgcccggaggcgtgcctccacgagcgccacgcgggggagatccacgtcacctacgacgaccgcggcggcgcgcgctggcgctcctgctgccggttcctgcccggcagcgccgtggccaccacgatccgcgcgccggcgggggacacgtcgggactcaactacaacatctacttgtcctccctggagggttccgccgaccaggacgagatcgacttcgagttcctcggccacgacaagcgcgctgtccagaccaactactacgtcggcggcaacggcgggcgggagcagatccacgcgctccccttcgactcctctgacggcttccaccactacgccatcgcctgggacgcggccgccatcgagtggcgcgtcgacggcgagctcgtccggcgcgacaagaggcgcgagggggagccgtggccggagaagcccatgtacctgtacgcctccgtctgggacgccagccacatcgccgatggggcgtggaccggcacgtaccacggccgcgacgcgccctacgtctgcagctacaaggacgtcagggtgcccactgctgagcattcagtggaagacgccgctcatgcgcccgctggcgatcctgtcgccgctgacgctgccgcggcggcggaagaagagaaggacgccggagcaggtgaagtttagatcttggtggtgcaatggaatgtcttttgagtgtctctgcaattaaaaagatctatgaataatggatgcggcctcatcggtgaaaaaaaacatttcagctgctgtatttatgttgttcgttgctcaatggtcaatgtgctctgtttactgttttgcacttttgcttcggttcctgtatttttatgttaaggggatacttggtaaagggctgaaatttaatctctgagacatcgaatgtttagatgtttaattataaatattaaatta

SEQ ID NO: 85811 - DNA, 1324 bp, Zea Mays
atcggcatctcggcaagacgacaacacatgccacagccacacgcgacacacctgtctcggctgtggcgagcgcgatggccgcaaacgtggcgctggtgctgctatcctcctgctcgccctccacttccgccgccgccgcctcgctcctccctcgccgccgcttcctgccctcccgccgaagaagagcaagctcccgagccaccaccatcatgtcggcgttgggcgatgacccgatcagggaatggattcttacagaagggaaggccacgcagataaaagggatcaggtccattggtggtggctgcattaactccgctcagcgctatgataccgacgcgggccccttctttgtgaagaccaacagccgcattggtccagaaatgtttgaaggggaggctcttggtttgaaggcaatgtatgacacaaagtcgatccgtgttccgttgccatacaaggttggttctttacctacaggtggttcttttatcatcatggagtttattgaatttggtcgttcaaggggagaccagtcagatttgggaaggaagcttgctgaaatgcataaggctgctaaatctgataaaggatatggtttcccggttgacaatactattggaagcactccacaaattaacacttggactgatgactggattgagttttactccaagcatagattgggttaccagttggagttggcatcgagacgatatggagattcggccatactcgaaaaaggtcagcggttgatcaagaatatccgcccactttttgatggagcggttattgagccatgcttgcttcatggtgatctgtggagcggaaacataagctctgatagcaatggggatcctgtaatattggatcctgcttgctactatggacacaacgaggcagagtttgggatgtcctggtgtgctggatttggtggggacttctacaacgcctattttcaggtgatgccgaaacagccagggtttgagaagaggagggacctctatctcctctaccactacctgaatcactacaatctctttggctctggctaccgttcatcagctatgtccataatcgaagactacctatatgtgctggcgatttagtctcttctgtctattcccacatggccacatggaaacgaaaaagatcttcatttgtgtaaataaatatctcactgcccatccatttggacacggttcggtggctcaaagaagaataatgtaatagtatagtggactctgattgaatttggcccgtcctactaaactaacaccaggaggcgcccgggggggctatattgttaacaacgttagtgaaaagccca

SEQ ID NO: 85812 - DNA, 1504 bp, Zea Mays
gcaagacgacaacacatgccacagccacacgcgacacacctgtctcggctgtggcgagcgcgatggccgcaaacgtggcgctggtgctgctatcctcctgctcgccctccacttccgccgccgccgcctcgctcctccctcgccgccgcttcctgccctcccgccgaagaagagcaagctcccgagccaccaccatcatgtcggcgttgggcgatgacccgatcagggaatggattcttacagaagggaaggccacgcagataaaagggatcaggtccattggtggtggctgcattaactccgctcagcgctatgataccgacgcgggccccttctttgtgaagaccaacagccgcattggtccagaaatgtttgaaggggaggctcttggtttgaaggcaatgtatgacacaaagtcgatccgtgttccgttgccatacaaggttggttctttacctacaggtggttcttttatcatcatggagtttattgaatttggtcgttcaaggggagaccagtcagatttgggaaggaagcttgctgaaatgcataaggctgctaaatctgataaaggatatggtttcccggttgacaatactattggaagcactccacaaattaacacttggactgatgactggattgagttttactccaagcatagattgggttaccagttggagttggcatcgagacgatatggagattcggccatactcgaaaaaggtcagcggttgatcaagaatatccgcccactttttgatggagcggttattgagccatgcttgcttcatggtgatctgtggagcggaaacataagctctgatagcaatggggatcctgtaatattggatcctgcttgctactgtaagtaaaactgactgattttagtatccgaattcaggatcatgggtagtggttgcaaaaggatgaatttacatgtctctttccagtaattttcatcgaggtattctgttctaaatattctgctgctgaagtacccacactgtgttgcatttagcaagttacaaaacaacaatcaattttgcaaagacatgattaccggttcttcaactgcagatggacacaacgaggcagagtttgggatgtcctggtgtgctggatttggtggggacttctacaacgcctattttcaggtgatgccgaaacagccagggtttgagaagaggagggacctctatctcctctaccactacctgaatcactacaatctctttggctctggctaccgttcatcagctatgtccataatcgaagactacctatatgtgctggcgatttagtctcttctgtctattcccacatggccacatggaaacgaaaaagatcttcatttgtgtaaataaatatctcactgcccatccatttggacacggttcggtggctcaaagaagaataatgtaatagtatagtggactctgattgaatttggcccgtcctactaaactaacaccaggaggcgcccgggggggctatattgtta

SEQ ID NO: 85813 - DNA, 1282 bp, Zea Mays
catgccacagccacacgcgacacacctgtctcggctgtggcgagcgcgatggccgcaaacgtggcgctggtgctgctatcctcctgctcgccctccacttccgccgccgccgcctcgctcctccctcgccgccgcttcctgccctcccgccgaagaagagcaagctcccgagccaccaccatcatgtcggcgttgggcgatgacccgatcagggaatggattcttacagaagggaaggccacgcagataaaagggatcaggtccattggtggtggctgcattaactccgctcagcgctatgataccgacgcgggccccttctttgtgaagaccaacagccgcattggtccagaaatgtttgaaggggaggctcttggtttgaaggcaatgtatgacacaaagtcgatccgtgttccgttgccatacaagtataggttggttctttacctacaggtggttcttttatcatcatggagtttattgaatttggtcgttcaaggggagaccagtcagatttgggaaggaagcttgctgaaatgcataaggctgctaaatctgataaaggatatggtttcccggttgacaatactattggaagcactccacaaattaacacttggactgatgactggattgagttttactccaagcatagattgggttaccagttggagttggcatcgagacgatatggagattcggccatactcgaaaaaggtcagcggttgatcaagaatatccgcccactttttgatggagcggttattgagccatgcttgcttcatggtgatctgtggagcggaaacataagctctgatagcaatggggatcctgtaatattggatcctgcttgctactatggacacaacgaggcagagtttgggatgtcctggtgtgctggatttggtggggacttctacaacgcctattttcaggtgatgccgaaacagccagggtttgagaagaggagggacctctatctcctctaccactacctgaatcactacaatctctttggctctggctaccgttcatcagctatgtccataatcgaagactacctatatgtgctggcgatttagtctcttctgtctattcccacatggccacatggaaacgaaaaagatcttcatttgtgtaaataaatatctcactgcccatccatttggacacggttcggtggctcaaagaagaataatgtaatagtatagtggactctgattgaatttggcccgtcctactaaactaacaccaggaggcgcccgggggggctatattgtta

SEQ ID NO: 85814 - DNA, 1703 bp, Zea Mays
ccatccacctctccccccttctcatttaaacgcgcacccacgctgaacacacagcctcactgccctgccgccggccacttcttcttcttcgatcgctttcgcacgggatggcggcgagaggcgtgcaggcgccggcgccgcgacggccggtgacgctgcgggacttcctggagctcggctgcgactccagcagcgacggcttccgctcctacccgcgccgcctgctgcccctccctcccgacgccgtgctgcacctgcagcagcagcaggcgcccccgaccccgcgggcggaggccgcggccgcccagcggctgctcaggcggagctcgtcctcgctcgcgctcgcgctcttctcctcctccctccccggctccggctccggctccggcccagctggcgcgctcgccaggatctccagcatctccaggagcttctcgcggcggatcaaggaaggcttctggaggcgccgcgacgaggacgagggcgacggcgacggcgacgacgactacgacggcgactacttcgacgaccgggactcgtgcggcttcccctcgcctctcgtcagcagctgctccgcctccgactcggacgagtccgaggcggacgtgacgacggcgcccgagcgcaacaaagccaccgcttcctcctctacgtcgccgtcgccctccccaagctcggcggaccacgaccgcacgcgcacggacgccgccgttgctgacggggacaagacggcggcggtagaggacggcgactcgacgacgggtgcgcccagcacggtgggggacaagcagcaacagctcagccccgtgtccgttctggatttcgccttcgatgacaacgacggcgaggaggaagggagcgacgccggcaccagctgctcctgctcctcccccgccttccagttccagcgctgcacgccgccggcggtggacctccacgggacgaagccgcaggcgcagctgctgcacaagatcagacggtacgacggcgttgcgcagggaatcgaccccgtggacctcgacgcgcggttcacggcggccacctcggagtccggggagtccgccgacgccagcacgcgtctcgcaaccaccaccagcagctcgagcacggacaccagcagcagcagcagcagcagcgcggagacaacggcgccacagcacgacgacgaggaggcggagcaccagagcgccgagcgcgcgctctcgccctcgccctcgctccactaccaggcagaccaagaagagcccgacgacgagtaccgcctgctcgcgcggctgctggagcacgacgcggcggcggcggagtgcctggacgacgaggtcgcacgggtgctcgtcctcgacttcttcgcggagggcgccgaccgtcgtctcacccgttcggcggcggccggcggcaggccgctgcacgacgaccgaagcgagtcgctgctagtgagggccgccgccgcgtggctgcgtggcgcggggccgcggtggggcataggggacgtggcgcgctccggaaaggcggcgctggacgacatggagcgcagccggcggtggatgtgcgtgggcgaggaggagtgcgacgtcgccgcggacgtggagtgcgacgcggtcgacgccctcgtggacgagctggtcaccgagctagccatcgtgctgccccggtggccgcgctgtgacgtggccgtcgatgatgataatgtgctcgttgactga

SEQ ID NO: 85815 - DNA, 1223 bp, Zea Mays
ggtgatccatcgctgtgcctgtgcctgtgcgccctacgcccatgcacacaccacacagctgtgggtcaactgcgtgcgtgaaaccggacacctcattccatccctgacatgtgggccatccaccgctgaatgcccctgccatttcgcactgacgacaatacgcctcaaaggcggagacggcggcggtagaggacggcgactcgacgacgggtgcgcccagcacggtgggggacaagcagcaacagctcagccccgtgtccgttctggatttcgccttcgatgacaacgacggcgaggaggaagggagcgacgccggcaccagctgctcctgctcctcccccgccttccagttccagcgctgcacgccgccggcggtggacctccacgggacgaagccgcaggcgcagctgctgcacaagatcagacggtacgacggcgttgcgcagggaatcgaccccgtggacctcgacgcgcggttcacggcggccacctcggagtccggggagtccgccgacgccagcacgcgtctcgcaaccaccaccagcagctcgagcacggacaccagcagcagcagcagcagcagcgcggagacaacggcgccacagcacgacgacgaggaggcggagcaccagagcgccgagcgcgcgctctcgccctcgccctcgctccactaccaggcagaccaagaagagcccgacgacgagtaccgcctgctcgcgcggctgctggagcacgacgcggcggcggcggagtgcctggacgacgaggtcgcacgggtgctcgtcctcgacttcttcgcggagggcgccgaccgtcgtctcacccgttcggcggcggccggcggcaggccgctgcacgacgaccgaagcgagtcgctgctagtgagggccgccgccgcgtggctgcgtggcgcggggccgcggtggggcataggggacgtggcgcgctccggaaaggcggcgctggacgacatggagcgcagccggcggtggatgtgcgtgggcgaggaggagtgcgacgtcgccgcggacgtggagtgcgacgcggtcgacgccctcgtggacgagctggtcaccgagctagccatcgtgctgccccggtggccgcgctgtgacgtggccgtcgatgatgataatgtgctcgttgactgagtacgtgttgacgtcacaattcaatgacctcgccggcgaggtccagcgccagcaggcagtcgttcataccat

SEQ ID NO: 85816 - DNA, 1379 bp, Zea Mays
ctttttttatgacatagcactcattaaataagggaagaatatacattctcctgattagtatcaaagactaattgaatttgcatctaaaatacaaattcgattatgagtacgtagtcgccaagaataattttgcattgaattaagtattccgattgaataaatatgagtaaaagatctatggatgaagataaaaaaggttatttccaatcgtaactaaatcttcttttgttcggtaggaaatggaagcacaataactaaaaaagatgtttggtttactagaaccatcagtatattatattgtttcagctcggtggaaacctaactcttttcctcaggatctctcgaatgaaattagggaacgaagtagtttcatccgacgacactctgctaacttatttctaagaagaaatcgggtgaaatgcctactggtaagtggtaaccggcatcgtttcatggggggacctcgtacacctcccgctcgcgctcttcactcgcgaaatccccccgtgcgcactcttccctcgcgcccagatctcttcttcgtcttccaagtcccaggtctgtagcagtccggcgccgtcagctccttctcttggcccggccgctccccgtccctgtccgccgccgccgccggccaggccctgtttgccggtctctgtccgctccccgttcgtatccgccgcctccggtcggctcccctcccgtccctgcttgcccatcgcgatggatccaacgaaagagcatggtaggagcaacttgttggacgaaacagcttcgagtttatcctgctgttggactgttgagtgctactgcgtatcatgtaatctactaatttagtctcatgatcttatgtgaactgaaatgtccagttttatttgtgtgtacagtgtgaactgatatgcttgtgtaaactgaaatgattctgtaaactttttttgaacgaagtggcataagctctgccttttaattaagagtgggaaaaaagttagagtgatcgacgacactcaggccaaaggatcagacacccaagaaagaacacgacaggagcaaccctaatacaagccaaggcgactggacgcacttttatagagcaaaacacactctctcactctccctgcgatctggagcggtgacaatgagcaatgctcaaagattcttcgattgcgctccttccaaaggttccacatagtgtagatgaccacaccattgaacttccttttgcgatcttgcgggaagagagactccatcttctcccaccactctctaatgctggagatgttgctcaaatcaacctgttgtggcagggaaacgctttcccaagtaagaactatgttccagacctcctatgcgaaggggcaagttaggcatagatggagtcc

SEQ ID NO: 85817 - DNA, 2198 bp, Zea Mays
gggctgaaaggaacggagccgatgccgcagcagcagtgaggcccatacgtcattcgcgaatctctctcggcccattgttaactcagaggctggctcccgcgaccgcgccgcgagctaggcgcctaggcgtagcgtagctctctccaagtctccatttcccttcccgaaccctcgcgccgccgcctactccagcctccagcgtgatctgagtcctgaccaagccctaaacgccaccgccctcgcaaatctcctttcccttcgatccatggccgccgccgtcgccgcccccgcgccatcccgcaagacggagacctacaccgacaccaagcgccgcgacgacgtgcgcggcgccaacatcgccgctgcgcgcgccgtcgccgacgccgtgcgcacctcgctgggcccccgtggcatggataagatgatcgcttcgggcgaccaggctcaggaggtcatcatcaccaacgacggtgccaccatcctttcccgcatggcgctcctccagcccgccgcgcgcatgctcgccgagctatcccgctcccaggacgccgccgctggggacggcaccactaccgtcgtcgtcctcgctggatccctcctccgccgcgcccagtcgctcctctccgccggggctcaccccaccgccgctgccgacgccctccaccgtctcgccacgcgcgctgttgagatcctccacgccatggccatccccatcgagctatccgaccgggaatccctcgtcaagtctgcgtccacggctctcaactccaaggtcgtctcccagtactccacccttctctcgcccctcgccgtcgacgccgccctctctgtggtggaccccgctcaccctgaccttctcgacctccgggacatccgcatcgtgaagaagcttggtggcaccgtggacgatactgagctcatccctggcctcatctttgacaagaaggctagccatgctgctgggggcccaactcggatggagaatgctaagatcgctgtcatacagttccaaatctcaccacccaagactgacattgagcagagtgtcattgtatccgactacgcacagatggaccgcatcctacgtgaggagcgcaattatatccttgggatggtaaaaaagatcaaggcggctggatgcaatgtattgctcattcagaagagcatcttgcgtgatgcagtcactgacttgtctctgcactatcttgctaaggcaaagattctggtggtgaaggacgtggagagggatgagatggagttcatcaccaagaccctaaactgccttcccattgccaacattgagcacttccgcacggataagtttgggtatgcagatgttgttgaggaagtctctgttggagagggcaaggttgtgaagatcactggaatcaaggacatgggtaggaccgcaactgtacttgtcaggggatctaaccaattggttattgatgaagctgaacgcagtctccatgatgcactctgtgtcataaggtgcttggtcagcaagagatttttgattgctggtggtggtgctccagaaatagagatgtcaatgcagctggctgcttgggcaaaggagcttcgagggatggagagttactgcatcaaggagtttgctgaggcgcttgaggtcatcccttacacattggctgagaatgctgggctcaacccaatctccattgtcaccgaactcaggaatcgccatgccagaggtgagaagaacactggcatcaatgtgaggaaagggcagatcacaaacatcctggaggagaatgtcgtgcagccgttgctggtgagcacaagtgccattacgttagcctgcgagtgtgtcagaatgatcttgaagattgatgacattgtcactgttaggtaagagcgtgaagttggggtcatgtcagcctgctctgttctgtctggattgattattagttaggttactgcttaatgtaaaacttggttcatgggcgtgtttctacacttggttttgatgttagtactatccttgacatgaaactactaccagggttgcatctgcgatctctattttctttacattggccgtgtatgccttcgtttcggtcggccgcttacgcccatgggatttttttgagccggttgtgttgtaatctgttcttggctttatcagctattcagcttatatattttctttttgagaaatgggaagggtttcattcatt

SEQ ID NO: 85818 - DNA, 2383 bp, Zea Mays
gacgaaagctgccgcagtcaaacagcgaataaaagccaaagccaccaggccagcaacaatagaagcgagcgagcgagcagcagtaggcagcggcgcgggcgaggagcagaccagcacccagcagccctcgtcggggggcggcagctgcagcttcaccagccgccgcctttccccgtctcctctgcctctgcctctccccctaacccccttccatttctccaccccaccccgctcccgcttccgcttcctcgccacttagttcgttccgcacccgcagccgcggctgcgttcgcattgggggcacgcaatggagcagtacgagaaggtggagaagatcggggagggcacgtacggggtggtgtacaaggcgctggacaaggccaccaacgagacgatcgcgctcaagaagatccgcctcgagcaggaggacgagggcgtcccgtccaccgccatccgcgagatctctctcctcaaggagatgaaccacggcaacatcgtcagattacatgatgttgtccacagcgagaagcgcatataccttgtcttcgagtacctggatctggacctcaagaagttcatggactcctgcccggagtttgctaagaatcccactttgatcaagtcatacctctaccagatactccacggtgttgcgtactgccattctcatagagttcttcatcgagacttgaaacctcaaaacttattgatagatcggcgcactaatgcactgaagcttgcagactttggtttagccagggcatttggaattcctgtccgtacatttactcatgaggtagtgacattatggtacagagctccagaaattctgcttggagcgcggcagtattccacaccagttgatgtgtggtctgtgggctgtatctttgcggaaatggtgaaccaaaagccactattccctggcgattctgagatcgacgaactttttaagatattcaggatactaggtacaccgaatgagcagagttggccaggagtcagttgtttgcctgacttcaagacagctttccccaggtggcaagctcaggacctggcaacagtagtcccaaatcttgaccctgctgggttggaccttctctctaaaatgcttcgatacgagccaagcaaaagaatcacagcgaggcaagcacttgagcatgagtacttcaaggaccttgaagtggtacagtgacctgctaaatgtgcttgacgttgcattgacatttgtatgagctgagtcgctcattcctttttatgaacgcctgtactcttctcattctctccctgcatttttgtcattcagctggatatttcgaatctggtgtgttttgagatgtattaaagaacgtcaaatagattaccgccttggtctctgtccattgaaagtaaatatccgtcatatgtttattttccccggaagcatctatggtttccttttatttctatgcgtcatgtaatgtcgataaatgtgtgcgatgcgttttaactttcattttttttttcaacaccagctttgtgagatgcactttgctcagcatctcacaaggaatagcaaacagttgcacacgcacacaaaaaaaagacattattatgatagccactcactgataacccatggtaacaatcttctgagattatagttgatgagcacgagcctaccaagtggcagttgctgtataaattaaagaatagaagtggccccttaaacaacatggccttctgaactgggacaagaacatcgtggaacaaaaataagacggtaattcacatgctaagttagtagttacctaagattacaagtgaaacttttatctttacaatggctgggcgcaggcatgaaattatcacacaggcgacttgttaacgtgccttcttcaggattgctgacgttcgcatctccgcatcttccttggcaaagctccaccaaaggtacgaaagggggatagccacagcaaggcatatagcacggccatccacatatccccatcgcggaggaatgtcagaagcttccagaagtaccgcagccgcacctccgatggcaacaaatatgatcttcagccgtgaaggatgccgagtcatgacagcccacagtgcccataggagacactgagcaatgattatcacagtacaaaccttcatgttcaggcctgcagattttacaagcgtaaccgcgtaagccactaatacgtgctactccctatgtcctagtatataagatgtaagttacattcaaaaacaaaaaaaaatgtatttaattctctctatactactgcatcaatgtatacatgtctagaaagagcatgtcttatattatgaaactagaataaaaatcgttacgtctttatgtactaggatagagccatggagggagtacatccattcg

SEQ ID NO: 85819 - DNA, 729 bp, Zea Mays
accaagtaccaactgcccgagacaagaacaactccaactcccatctctcactacggcaacactttgcgagctgagccatcaaagctcggggcggatggcggggcggcggcagatcaagaaggagtgggtgcaggcggcggcggacgcggcgtcgtggtgcgtggcgctgtcgctggtggcgatgctggtggtggtgtgcacgctgggcgccggggaaggcgggggcggcgcgccggtggtggtggtgcgcggcgcggcgctgtcggcgcggccgtgcgaggagatctacgtggtggcggagggcgagacgctgcacagcatcagcgacaagtgcggcgaccctctcatcctggagcggaacccgcacgtgcacgaccccgacgacgtcttccccggcctcgtcatccggatcacgccgtccaagcccaggtagatcgatggcgatccatcggtcgtcgtgaaccaaacagaatgccgttgctgacttgctgcggtgtcgtcaagccccctctgcatgatgccgcgtacgtactaatacggtgtgcagactgcactgcagagggagcgtagcgatgcaagaggacgccatgtactgttaagtatgcgtgaacagcgtgtagcaagaagctctggacgaggcctccagcctcctgtgtgtaaattgtaagggacgccgcgctagtgcttcaagtgaatgaagagataaaattgttggcttatttttttatg

SEQ ID NO: 85820 - DNA, 1978 bp, Zea Mays
aaaagcggcgctgccagtgtgtatattacacggcgcggaggacggggacgcggaggactcgcccggcccatcccgcaccccctacctccgaggctgcgatccgctcttgtaggctccctcgccaatccgctcctcctccctccctccaactgttgtgcgtgcagcggcgtcggagaagagatggcgtcggaggccaaggacgtgggcatcctcgccatggacatctacttcccgcccagctgcgtgctccaggaagagttggaaacacatgatggtgtgagcaaagggaagtacaccattgggcttgggcaggaaaatatggcattttgcactgaagttgaggatgttatttcgatgagcttgacagttgtgaagtccctcctgaaaaattataacattgacccaaagtgcattggacgtttggaagttggcagtgaaacagtaatagacaagagcaagtctataaagacatggctgatgcagatatttgaggaatctggcaatactgatattgaaggagtggactcctcaaatgcgtgctatggtggaacagctgcattgtttaattgtgttaactgggttgaaagcaactcatgggatgggcgttatggacttgttgtttgcacagacagtgcggtttatgctgaaggtccggctcgtcctactggtggtgcagctgctattgcaatgctgattggaccaaatgctcctatttcttttgaaagcaaatataggggatctcatatggcccatgtatacgacttttacaagcctgatctcgcgagtgaatatccggtggttgatgggaagctatcacagacatgctacctcatggcattggactcctgctacaatgtattttgtaaaaagtacgaaaagcatgagggaaagcagttttcaatttttgatgcagattatgttgtgttccattctccatacaacaagcttgtacagaaaagctttgctcgtttgtactacaatgatttcttgagaaactgcagcacggttgatgaagagtcgagggaaaagttggcaccgtatgcaggcttgtcatctgaagaaagctaccagagtcgcgaccttgaaaaggcatctcagcaagttgcaaagaacctgtacgagtccaaggttcagccaacaacattgatcccaaagcaagttgggaatatgtatacagcatcactctatgctgctcttgcatcggttatacataatagacatgaaactctggcaggccagaggattgttatgttttcgtatggcagtgggttgacatcaacaatgttctctttcaagattaatgaaggccatcaccctttcagcttgctaaacattgcaaacataatggatgtttccaagaaattgaaggcaagacatgtggtcccgccaaagaaatttatcgaggtactgaaactgatggagcaccggtatggggcgaaagatttcgtgaccagtcaagacacaagtttgctatctgtaggcacatattatctcacgcatgttgactccaagtaccgaaggttctatgacgtgaaaggtgacggtgtcaccactactgcaatgtccaacggccactgatctgtcttctgcccggagctgcaacaagtcaaataacagaggcaggtgttcctaagcattctgattcttcttagattatctattaggaagggacgctggagcttagattaatctctgccaagttgtaaggttgtaaagttagttagagctgcgtcattgctgtaatgcttgcttggtaaaagttctggcgctcttcagttcttcagtgcttgcaaaattcaaatcaagctcactactagttgtaagaattctgaataatctgcagaatcactggttacatccaagttacgctgttgaatgcatgatttcatgtttaacacgattaatgcatctggattcagctgtgttgttggagtactcgtgtcgtgtcttgtacctttttaaaaagaagtttcttaca

SEQ ID NO: 85821 - DNA, 1606 bp, Zea Mays
atggcacagcacagcgcggcgtgctccattttcttcctggcggccggcccagagccaaaacctaggactgggcacaacatgtctccatccgacgacggcgaggaaaccctcgccgcgctcatagaactgtctagaacgccggagggccgggagggtctcaccgacgtgctcatcgacaccctcttcctcctcccggcctccccgccgcgcctcttgctcctccgcctacgcctcctccgcaacctcctcgccggcgatgagctcaaccactacgccttcatcgagcactccggccccgccgccgtcgccgcctccgtgctctccttcccctcgctcgcccccgacgtggcgcgcgccgcgctccaggcgctcgggaacgccgcgctcgccggggagctccaccgcgacgccgtctggcaggcgctcttccctgaggcgctgcgggtgttcgcggggctcagggaccagggagtcctggatcccctgtgcatggttctcgacacgtgctgcggcggggaaggcggtcgcgggaggctccaggagctgtgtcacgaggagctgggcctgccaatcctcgtccaagctgtcactacggcgtcacaagtggagcacaaggaagagtggttagagtggcttctgttcaaagtctgtgctgaggagcagaagtttgagagcttgttctatgccttatgctctgctaatgatgtgggcgagtataatgctaagcatatttttcttctggatacgttgtcaaggtgtttgaatagccatcccgaagaagttaccgtctcagacagttttgcacatgatgtttttaatctacacaagcatgctgctgaaactgtgaattttacttaccgaggtacctcccctcttccaaccgggcaccctgcaatcgatgtccttggatatacactgcagctcctgagggacatctgtgcctgggaatccacctcagcagatactcaacgccctgttgactcactattgcaggctggctttgtaaagcgccttctgagatacctaggtgagcttgagccaccaagtacaatcagaaaatcaatggcaggagcaggaggacaaggagataaccatccagctcttgaaaatgcaaaggtctgcccatacattggttacaggagagatttggttgcagtcattgctaattgcttacacagaaggaagaaggtgcaggatgagattaggcagttagatgggatcatgttgctgctgcagcaatgcgtcatcgatgaagataatccatacttgagggagtggggtcttctagctgttaagaacttgcttgaagaaaatgaagaaaatcaaaaggaggtttctgaacttgagatgcaaaaacctgttataactccagagattgctaacataggtctcaaggtggagatagacaaggaaacaggtcgtccgaaactagtcaatacttctgatacctgaactctgactacaggcactgccacaatcaaagttaatgttgatgctgtctgtggctaggaatccatgtgcttaggggtgacaatggactctaaattttaccctctaagatttagggatcggatcgaattaggattgggtcatatttgtattcatt

SEQ ID NO: 85822 - DNA, 1003 bp, Zea Mays
ttccgatgcgtccgtccatcgtcgtcgatggggttctgctccttccgcggcctcgcctcccctttcgtcggatatcacctgtcgcgcgccctactagaatactaatccggaccccgatgctgcagtgtcccccctcgcccgcctcctaacactcgctgaaccgagttcgttccataatctcgacgcaccagtgtgcagctcatggtgaagaaacggaggttggggtcgattacgtggcgttgctccgcaacggatgaatcaatcagtggggagacaggtgcttgctcccggttcctggtagcggcggaactcggaggttcgcccggtgggcgtctacagaaagctaggtgatctcttgaatcgattcaggaaatatggagttttcttttctgctgatacaatgctgaaggtggggtcaatgtcactgcagtgacttgggtgacctataagcactgctcatattgtgaggttctcttggatattcaggaaggagccgcagatgttcccgccaagatctgggaatgtggcacacccagacagaggattcaccttgcccctggaatcgatgctgacggggtacttgagcaggtggcccttcatctcggtcacatggctggagatgaatttctcccagttctgctgtccgatgtgacgcacctgcctcgtgcactctaggctctccggtctggtgaagctctcctcaatggctccaatgtgctctgcccatagagacatcctgtacccgaaaatctgcaggtgaaagcacaccagattagcaaagctcatttgtctctatatgaaaatacaatattttgctgtgttgcctctatagggatgtacagtgttggctagtgagttagttttgtttagcatttagcactataatagaaaaaaactcgttagcactaggatctctttctgggtattcctagtttaacatatagtcccatttctgtaagcagcaaatgtttgtgccactggcttggcccacattgtgaactcc

SEQ ID NO: 85823 - DNA, 2928 bp, Zea Mays
ttccgatgcgtccgtccatcgtcgtcgatggggttctgctccttccgcggcctcgcctcccctttcgtcggatatcacctgtcgcgcgccctactagaatactaatccggaccccgatgctgcagtgtcccccctcgcccgcctcctaacactcgctgaaccgagttcgttccataatctcgacgcaccagtgtgcagctcatggtgaagaaacggaggttggggtcgattacgtggcgttgctccgcaacggatgaatcaatcagtggggagacaggtgcttgctcccggttcctggtagcggcggaactcggaggttcgcccggtgggcgtctacagaaagctaggtgatctcttgaatcgattcaggaaatatggagttttcttttctgctgatacaatgctgaaggaaggagccgcagatgttcccgccaagatctgggaatgtggcacacccagacagaggattcaccttgcccctggaatcgatgctgacggggtacttgagcaggtggcccttcatctcggtcacatggctggagatgaatttctcccagttctgctgtccgatgtgacgcacctgcctcgtgcactctaggctctccggtctggtgaagctctcctcaatggctccaatgtgctctgcccatagagacatcctgtacccgaaaatctgcagaaaatatgatatacaaaacaaggtagcaatgtgacagtactgcaataccaagttaccaacttatcagaactgaggcatattacctgtccacgaggagcagaaagcatatttgcccatgtatgctggggttggtatgcagccattgcaatctctgtatctctagttccttccatggatctctggttgatgttagcggatccaattatcacatattcatcatccacaatcatgcctttcgagtgcacatacaccatgaatctcctattcttccgagcttggtcctgattggatatccaagttgcagcataattgtattttttggggaaatcagtacgtccttcagttttgggcatttctaaagtgtaccggaatcagcagcagaaaacagaacaatagtctgcagtctaacctgtgggttactggctgagaatggtccactagatgtgcaagtagtgtcctcagcttcacggttaccaaggcagaagaaattcagtgagttatggagccctttggtagacttacctgcacgtcccatctctctggatcatcgtcgtttgaatagatttcgtcgtcaatagcgataatatcagtttttcaggacatcgtatgctgctggaccgtcgatcttggaatgcaagtcatgccatggctctcttgggccgcgagcatcttcaacctgagagtaaattatcggcacatgaggatctaacaaaatcgcgacaagcttcctgtctcctaataaaggaaaaacaaaatggaacgaagttccagaacaacaaggatggaattctttttgtggccattgcataaggttcttagtaaattcagtttgatacggtaaatgtggaaaaactactctcaccgcaaaatttgggttgtagtagtcttccttgtgaaatgtctgaagagttcgaaatagagtgtgctttggtgtatcatatcggcctccacatagatcaagtcctcccacaaaagcaacaatcttccttctatgattcccagcatcagcatccaagatcactgtcttctggtgatgagtaaagatagtgcctgtttcctggaaacgatggttattaccatcagtgcagattccagatggcagtgtgcttatgtggttgtcagatatcacaatagtttaagctgaagtataagacctgttgcttcacccagctgtgcctcttccctgcagatcgtgggcaaagcagtatctggaccgaagagtgcttgaaaaatctccgggtctcctcatcccttgtgcccatgtaaccttcctacaggcaagaatccaataagcaaacagtgttgtacaacagcatgggtactacggcgtgtaccatcttgatgccaaggagtctccgggacgtgggatcgtcccacacgagcagcagcacccgcacgccctcctgcgacttcctcctgagcaggtcgccgagcgccatgtcgtcgtggccgtcgcgcaccaggtggatggtgtggaacacggaccacccggtgatgtagatgagcctccgggcctggcatatggcgtcgtagacgtcgcgccagcactggccgtgccggtagcagtcgccgttgccgagccttacctccggcagcgttccgtcgggcacgtgcgcgtcctggtacagcgtgaccttcccgccccggcgcagcgggaagtaggtcctgggcacgccggcgaagtccgggcccggggtgacgccgtggtggtacatggtgagcctcgccacgggcacgtactgcacggacagccggagcacggcccccggcgcgcactccttgccgttgcgctccaggaccgggtacgcgccctcgaccatgtccccggcctgcagctggtcggcgcggacggcgacgacgccgatgagctccgcgcccacgacgtcgctgtccttgacgacgaagttgacggtggcggcctcgtgcgcgacgggcaccaggaactgctgcgcccacacggggttctcgtcgtcggggatgacgaaggtgcgcgccaccaccgcggaggcgacctgcaccgtcacgtacgggtcgctggtcatgccctccgacggcttgcacagcaggtcccgcatcctcttggacaggatgtccttgttgggaaggttcctcgcctcgtggatccagatgtccaggctgccgtgcagcagcaccgccggcgcgtccccggcggagccatgcaccaaccaagagacgctctcgtcgtcgtcctgcacgggcatcgtctgcctcgatccgatggcacgggg

SEQ ID NO: 85824 - DNA, 2802 bp, Zea Mays
gggggttttcgatgcgattaattatttccgccatttttttacatacggaacgaacgggcgccattgccattgcagctgagcttgctgcgtcgcagatgatcgggtaccctgcctccaccagcctatacaacagtcgcctgcctacttccttcgccatacgtacaccgggcgcactcacgattacctaaagctactgaatactgatgaccttcatcctcggagacacgacacgagctgagaacggtcctgccggccgtcaagcagattggattgggagctacgcctacgcggcggccttggccggcggtataacgatcgggctccggacgacgtgctcgctcgacacccacttcaggttcccctcggcgccggcgacggccggcggcccgttccaccgcaccgtcacggtgaagctctgcttctcgttcgccctggcgaaccgcagcaccgggggccgcaccaccacggacacggccctgggcatgtccaccacggccttgtacaccgagttggccttcccgacgttggtcacggtgcggcggacggtgatcggatgggacagcagcttcaccaccagcgacgggtagttgagctccgcctcggtgatggccttcagcttggcgcaggcgacgcggcgcccagttatctccttcacgccgtcgtccccgatgcccagcccgcagaggtaggcgatgtactcgccggcgccgaggtcgtacaccagccccgggtcgacggcgcgggacgggttcacgtagccggcgcccatgctgtagaagctcgcccgcctgtactgctcgtccttgatcggcacgcccgcgtggtccgccgtgcccgacgacgtcatgatcgccgacttgatcgccgcgggggaccagctcgggtgcaggctcttgatgatggccgcgatgccgctcaggtgcggcgtcgacatggacgtcccggactccatgaagaagggcaggctcacgtcgtccgcgaactccgggtgcatctcgctgggcgcccacgccgccaggatgttcattccgggcccggtgatgtcgggcttcaggatgcccgggctcgccttgttcggcccgcgcgacgagaagaaggccacggacggcgccggggacgagcccatcaccgtgccccggaacgtgatggtcgccgtgggcctgggcgtcgacttgatgtacgccgcgatcttggaccccgcggcgtagctcacgtgcgacgccggcaggacgtgcgcgtcggcgaaggtggtgaacccctccgccggcttgttcatgaggatcatgccggcgccgccgtacgcggacaccatctgcccctgctcgacgtgctccgtgatggagcggctctcgcacagcaccaccttgcccctcacctcggcctccaccagcgtgctgcagtcgcgggcctccgggtcgccgttgcggcccgggaagacgagcggcagcgggcgccccgcggtgttgttccggggctggaacagcgactcgccgtcgaacacctgcccgtcgccgagcctgacggtggtgcgtatcgcgcggtccatggtgcccgccgcaaccgtcagcatccatggcgcgccgttggtgatggagcccgcggcggggccgtcgttgcccgccgcggcgctgacgaagatcccgtgctccatggccttgaacgtggcgatggcgatgaggtcgtagttgaactgcgcgccgtccgtggcgctgatggagaaggagagcacgtcgacgccgtccttgacggcggcgtccaggccggcaacgatgtccatgatggagcaccggctccgcgtgcacaccttgtagatggccaggtgcgcgtgcggcgccatcccggacgccgtgccgtgcgcgttgccccgcacgtcggcgttctgcacgaagttgcccgccgccgtgctggccgtgtgcgtgccgtggcccgcgtcgtccacgggcggcgccgagtcgttgatggccgcgctcccgaacgcgcgcgcgccgatgaccttgttgctgcacccgccgccggcgatcgaccggaactggcaggcgcccttccacttcttgggcggcggcggcagcccggcgtcgccgaaggacgggtggctgggcaggatgccggtgtcgaggagcccaatcaccacgccgcggccgaagccggagcggctccagaagccgtccttgcccatgtggaggccgaggaagcccggcgagtgggtggtcgccagcggcaggaactcctctgggtacagccgcagacacccctccttgcgccgcagcgtctccgcctccgcgtcggtgaggcgggcagcgaagcccgtcagcacgtggctgtacgagtggatgatcctcggcccgtcgtccgccgccgagtccagcgtcgcctccggcaagaaggaccggtgccactcctccaacgaagcggtgctgccgccgtccctcggctcgagatgaaccacgtagttcttgcgctcctgcgcgtcggcgagcagcgcggcggcggaaagcaggagcaggggaaggaggcttctttgggtccgcatgactctggtaagcagccgccttggcgtttggtgctcggtagcgccgaatcgatttgaagcgagggagcagggtgcggggagggaagtggcgtggcaacaacggagggggtgccgggggtttatgtagggtggtggcaggcagcggcagtgtgcgccgggtggggggagtgagtgagtgagtgatgggcaggcagcgcagagcactggcggtgagctggcgagcagaatcgaagcagggggggaggaggaggaagaggactactgggccgatt

SEQ ID NO: 85825 - DNA, 708 bp, Zea Mays
tttgcagtgtttcttattggacaaaataaaaatgttctacttattgggcaagggtctatgatttcttccagatcgcaaccaaaattcacttatgcatcactgggcctcgatccaagagtgtgtgaataagttttgtggctgtatgtcctggattgagggtaggaatgcaagcagaaagacttttgaaaacaagctcactaatgcatactctttgtacaaagctgaggataaagataacaagtcatttcagttcatacactgctggaatgttttacgacttgaaccaaagtggaatgaaaagatgaatcaattagcttcaacaaaatctggttgcaagaaacagaaggcaacattttcagttatagatttgactggtaacttaaatggcgatgcaactccagagggtgatgcacctacaagacccattggcaggaagaaggctaagcaactattacgccgaggtggtgctgatggttacattgaggcattggataatttgtgggagaaaaagaaacaagctgatgtagacaaagaactgaagaagaaagattcaacgaatcactagaaattgagaaggagagacttgagatagagcgcacaagggttgcaaatgaacaaaaatgtatgcatatgaagagaatgctagagcctagaggaagaataatgaaagtgggcaatagcggaatggatgcagatcagcagcagtac

SEQ ID NO: 85826 - DNA, 1175 bp, Zea Mays
tttattggcaatttgctggatctggaggtggttatacatatggattgttttaattaggtgagggcagcaatatcaactctgcagtactatactgatctgcccaggcttcctggtaccttttcagtccctgatgctaggaattcagatatcctggatcttttgcaatgtgtatttggttttcagggggataatgtgaaaaaccaaagagagcatatcattcacctactggcgaatgaacaatctcgtgtgggaaaactatcaggaaacgaaccgaaaattgatgagggtgccgtgcatgctgtgttttctaaagcccttgataactatatcaaatggtgcaactatctgcctcttcgtcctgtctgggataacaatgattcgttgacaaaggaaaagaagttgctatatgtgtgtttatactacttgatgtggggagaagctgctaacgtgcgatttattccagagggcttatgctacatatttcatcatctagcaagagaattaggggtgattctgcagaaacaaactgcagagccagctgaaagctgcaattctggtggtggcgtatcgtttcttgacaatgtcatttatcctttctatgaaatcattgcagcggaagcagccaataataaaaacgggcgtgcaccacattctgaatggagaaattatgatgatttcaatgagtttttctggtctcataagtgcttccacctacgatggccttggaacctgagcgacccgtttttctcgaagcccagtaggaaatataagggcttgctcagtaggaatcatcactacggaaagacatcttttgtggaacataggacttttcttcatctttaccacagctttcatcgcctttggatgttccttattatgatgtttcagggactgactatcattgctttcaatgatggtagttttgacaggaagaccatattgcaacttcttagtctgggtcctacttatgtcgtaatgaaatttattgagagtctattggatattctaatgatgtatggtgcctattcaacatctcgtggatctgcaatcaccagagtggcatggcgattctgctggtttactatagcttcagttgcaatttgctacctatatatgtatgtttttaaatccatttgtgatatctgaaatttttttcttaccctaaattaaaaaaa

SEQ ID NO: 85827 - DNA, 2877 bp, Zea Mays
tttattggcaatttgctggatctggaggtggttatacatatggattgttttaattaggtgagggcagcaatatcaactctgcagtactatactgatctgcccaggcttcctggtaccttttcagtccctgatgctaggaattcagatatcctggatcttttgcaatgtgtatttggttttcagggggataatgtgaaaaaccaaagagagcatatcattcacctactggcgaatgaacaatctcgtgtgggaaaactatcaggaaacgaaccgaaaattgatgagggtgccgtgcatgctgtgttttctaaagcccttgataactatatcaaatggtgcaactatctgcctcttcgtcctgtctgggataacaatgattcgttgacaaaggaaaagaagttgctatatgtgtgtttatactacttgatgtggggagaagctgctaacgtgcgatttattccagagggcttatgctacatatttcatcatctagcaagagaattaggggtgattctgcagaaacaaactgcagagccagctgaaagctgcaattctggtggtggcgtatcgtttcttgacaatgtcatttatcctttctatgaaatcattgcagcggaagcagccaataataaaaacgggcgtgcaccacattctgaatggagaaattatgatgatttcaatgagtttttctggtctcataagtgcttccacctacgatggccttggaacctgagcgacccgtttttctcgaagcccagtaggaaatataagggcttgctcagtaggaatcatcactacggaaagacatcttttgtggaacataggacttttcttcatctttaccacagctttcatcgcctttggatgttccttattatgatgtttcagggactgactatcattgctttcaatgatggtagttttgacaggaagaccatattgcaacttcttagtctgggtcctacttatgtcgtaatgaaatttattgagagtctattggatattctaatgatgtatggtgcctattcaacatctcgtggatctgcaatcaccagagtggcatggcgattctgctggtttactatagcttcagttgcaatttgctacctatatatcaagacacttcaagatggcacagagtcagcaacattcaagatatatgtttttgtaatcagtgcatatgtgggcattaagataattttcagcctacttatgagtgtcccttgttgccatggtttggctgaggcttgctatcgctggtctgctgtacgccttgttaagtggatgcatcaggagaataattatgttggaagaggcatgcatgagagtccccttgactatatcaaatacgccactttctggattgcaattcttggtgcaaaattttcattcacctattttcttcagataaaacctcttgtagaaccaacaagaactataatcaatttcactggcctgcagtatgcttggcatgattttttctcgaagaataatcataatgctcttacaatcctttctttatgggctccagtgctgtcaatttaccttttggacattcatgtattctacactgtattgtctgctatttatggatttctccttggtgcacgtgatcgcctgggagagattagtactgtcgaggctgttcacagattctttgagaagtttcctggagcattcatgcatagacttcatgttgaggttcccaaaaggaagcaactgctatcttctggtcaggaaatagagttaaacaagtttgacgcatctagattctcccccttctggaatgaaatagtgaggaatttaagggaagaggattatattaataattttgaactagaattgcttttgatgcccaagaatgacgttggagttctaccgattgtgcaatggccagttttcttgcttgctagcaaggttttcttggccaaagagattgcagaggactgcaaagactcacaagaagaactttggttaaggatatcgaaggatgaatacatgcaatatgctgttgtagagtccttccatagcatttatcatattctgacgtctatactagagaaagaaggccgcctctgggtggaaagaatttatggtggtatccgagacagcatttcgaagcggaccatccaaagtgatcttcatttcaaaaaactgcttaatgttattgccaagcttgttgctgtattgggaatactgcgaggtacgacggagtccagtgatttgaaaaaaggtttggttaatgctattcaagacctatatgatgttgttcatcatgaagcgttttcggttgatatgagtggccacattgaagactgggatcaaattaatttagcaagggctgaaggtcgcctcttcaataaactcaagtggccaaatgatcccaaattgaaagacttgatcaagagattgtattcacttctgacaattaaagaatctgctgcaactgtccctaaaaatttagaagccaggcgaagacttcagttctttacgaactcactgttcatggaaatgcctgttgcacggcctgtttcggaaatggtctcctttagtgtgtttactccatattactctgagattgttctctacagcatggctgaacttcagaagaaaaacgaagacggtataactacactgttttatctccagaagatttacccaggatggcagctgcagtctggagttgagaatagacatgttttcactattgctccaagtggcacctattcagtaaagtctgcttatgaaaggctgtgggaagaggtgggggctgctgtcaacggactcaccaaaagaggacttgactcccttatcatcctggagcctggattttgtggaaccatagaaatatatgcgtctttgatgctgcagcctaat

SEQ ID NO: 85828 - DNA, 411 bp, Zea Mays
atggagggccccgcgcggggcctggcacgtcgcggcgcactgggttgcaggcggcagcacggctccaggcgcgtggggcgcgggcagtgggcggcgcggccggtgcggagcacgcaggcaggggtcgcgggcgccggtcggggcggccagcgtgcgggcgtcacagccgctggggaagggcagtcctggcgcggcacctgggcgcagagggcgctcggtcggcccgaccgcaccttggcctggcgcggggctggcagcgcgtgggcgtcgcggccggcgggggcaggcggtcctggcgcggctccctggcggcgcgcccgagaacaggggagggagagggaagaccaggggcggcggccgggtgggagaagactaggggcggcggccgggtgggagaagaccaaaccctag

SEQ ID NO: 85829 - DNA, 380 bp, Zea Mays
cagatgaatggaagaacttccttactcgtatcaacagggatgaaaatgcagcagactctgagctttttggcaacccaaatgacatacttgaactacgtctatgggcttcttatcgtgggcagaccttagctcgaactgtccgtggtatgatgtactataggaaagcccttatgctgcagagttatttggagaggatacaatctgaagatttggaatctacattagggttggctggttcagctgataggcattttgagttgtcacctgaggcgcgtgctcaggctgatttgaagtttacatatgtggttacctgccaaatttatggaaaacagaagggggaagggaaggctgaactgcagacatatccttactaatgcaaa

SEQ ID NO: 85830 - DNA, 390 bp, Zea Mays
gtctctgaggtgggaaatgggtctagtacccttttctggtctgataattggctgcagggtaagagcatctcgaccattgcccctagactatactctataatcccaaagaagataacaaaaagtagaacagttcaagaggccttgttaaacagaagatggatatctgacattagaggtggtcttactgttggggttttggcagattactgaaagctctgggtctgtctctccgaaattgagctgcaccctcacattgaagacatgcatatctttagtgtagccccaggtggaaagtattcggcgaaagcagcttacaagggtctcttcctgggatcctgtacatttggccactacaagagggtctggaaaacttgggctccatcaaaatgt

SEQ ID NO: 85831 - DNA, 2076 bp, Zea Mays
atgacaatggataactactttgaggaggcacttaaaatgagaaacctgcttgaggagttctctctgaagcgtggcaagcattacccttctattcttggtgttagggagcatgtcttcacgggaagtgtttcctccctggcctcatttatgtctaatcaggagacaagttttgtgacattaggacagcgtgttcttgctaacccgctgaaagtgagaatgcactatggtcatccagatgtttttgatagaatttttcatataacaaggggtggaattagtaaggcctctcgcagcatcaatatcagtgaggatatatatgcaggattcaactcaactctgcgtcaaggatgcataactcatcatgaatatattcaggttggcaaaggtagggatgttggacttaatcagattgcactatttgaaggaaaagttgctggtggaaatggtgaacaagttcttagccgagacatatatagactcggacaactttttgactttttcaggatgttatccttctacgtgacaactgttggattctacttctgtactatgctaaccgtgctgaccgtgtacatatttctctatgggaaaatgtatctggccttatctggtgttggagaatcaattcaaaatagagcggatatactgcagaacgcagccttgaatgctgctctgaacactcaatttcttttccagattggtgtatttactgctgttcccatgattcttggtttcatccttgaatcaggtgttttaacggcttttgttcagtttattacaatgcagttccaaatgtgctctgtattttttactttctcacttggaacaagaacccactactttggccgtgcaatattacatggaggtgcaaagtatagagcaaccggtagaggttttgtggtacgacatatcaagtttgctgagaactaccgtatttattctcgaagccattttgtgaaagggatggaggttgcacttttgttggtgatcttcctagcgtatgggtttaacaatggtggagcagttggctatattttactctctataagcagttggattatggcattgtcttggctttttgctccctatttatttaacccatctggatttgaatggcagaagattgttgaggatttcagagactggacaaattggctgttttatcgaggtggtattggtgttaaaggagaagaaagctgggaagcttggtgggaagaagaactgcaacatatttacagcattcgagggaggatactggaaaccatattaagcctgaggtttttcattttccaattcggagttgtttaccacatgaatgctagcggaggaagtacagctttattggtgtattggatttcttgggctgtgcttggtggccttttcatcctcctcttggtctttggtttaaaccccaaggccatggtacatttccaattgttcctgcgtttggtcaaaagtgtagcgttattgatggttttggctgctctggtccctggcaattttgtttacgaaactcagtgtgagagatgtttttgcttccattctagcatttgtgccaactgggtggggaatcatttcgattgccatggcatggaaacctgtcgtgaagaaattgggtttgtggaaaactgttcgtgccctagctcgcctctatgatgctggaatggggatggtcattttcatacccatagccatttgctcgtggtttccattcatatccactttccagacgcgacttctgttcaaccaggcgttcagcagaggtttggagatatctctgatccttgctggcaacaatccaaatgctgggatctgatggtggcagttccggccttgcttcattaatctgtggacctttcgtacttgaattaatcctcacttctcagttaacagtagcgatgtacatatctgatatctctatgttcaccggagttgtttgccgtgggtataaatatcaacggctatatttctagagttcaccggcttgtacctgtatttttgaacgggtgaactttgtatggcccttcttttgacattgacatgtgctgattacgtggaaaaattgcttttttaggt

SEQ ID NO: 85832 - DNA, 2345 bp, Zea Mays
cgacctggccgcctcgactcggcccaggctcccagcgcacccgtgtggccgtcaggcgtcagatgcaccacctccgtcgcctcgtccgctctcccctccgccacgtccctccccgcgcggcattctccggcaggccctccgtttcccacggcaacgacgcgtatggtagctcccacgccgccgcttcagacgcgatcgtttgcctcgtcgtcgcaggcggcggaggcctcgaggccgacctcgaccgcctcttctcagccgtcctttcccacgggctcgtctccagcgtcctccgagcgctcacggaccgcggcgtccccgcggagcgtttcttcgcgtgggcctcatccctcggcaggggcttctcccccggcccccgcgcgtacaacctgctcgtcgagaatgccgggaggctggacgactacggcgcgatgtcgcgcgccctggcgctcatgtcagagcggaggctctccctgaccgaccgggcattcgccttcctggcgccgtcgtcgggttcgtcacggagcggcagcgtggaggacgcggcgagagcggtcctgcgtgctctcgatggtgtcggcgggccctgccgcgcttccggcgtgttctcgcttgtcaaggcgctggcgtccatcggagagttcgatgccgctgtcttggtgatcgaagagacggcgaggaaggtgcggtactataacgtcctcgtcgctgcaaagtgtaaagccggcgactttgtcggcgcccgtgaggtgttcgatgaaatgaggaggtcggggtctgaccccgacgccaacacctggaactacctcctcggctgcctgctcaagaaggggaggctcgctgaggcgtgcgggctcgttgaggccatggagaggttgaagcgcagtgagatcccgagctcgctcacgtacgagatcctcacataccatgcctgcaaggcagggaagatggattcggcaatgcagattcttgatcagatgttctcggaaaacctgacgccgaggatcaccatacactctgcattcatcaaggggtacttctacgctgggagaatagaagatgcctgcaagtatgtcagtgacatgagcaccagggacagacattctgtgaaccggaactacagcctgctcgctaagctgctgtggaagtcggggaggaccattgatgcaggcagagtcctatatgagctgatggagaagggcctcagacctgaccattctgcttatgttaaagtggccaaggatctgcacaagatgggcaagggtaatctggcttgtgaactgaagatgatgtttcaaaggttcagcgtcaatagcagatcagaaacacatcatcaacccatatctggtacttagtctgtctatgataataatcaaaagaataatttatgcttcccaaggttggtagggggggagcctctagggtggcctgtaaacgagtgcaagttttatttgtagagtagtgatttgtctgccaaacatagttccactcatcttcctccctggatgattccctgtaaggtttctaattggtctgaggcttgagaggagaggggtagggtgaagactctttcaaaaaaactgtatttccatgaagtgggctacttactcatttggcttgacagcaaaagaatacagctggggggaaaggcttttcaggggtgtgttgttccaattatcatgccataacatcaccgaatgtcctttgtttggagtgcattgagtcactcttatgaaatcttcagagagcttgaggacatccttggaccaaaaggaacccactggactcctagcatgaaggaggaacatgggtgtttctatacagtttagtccaggttaatgattcccaaaggatgtctgcattgttataaaaagtgcctaggtgcttgaggagcaaagctgagttctgatttttgcagactaatgatacttaagccccttcctcttttgttctacatgtttccaaggctgctaagcaaagatcctttcctgttgatatcacacccactccaaagacggtgtttcctatatctgtctatctgcttgatgaactgagaaggtaatttcgagcctgcacatgtaaacggttggatgagatgagaaaacagagttgaccaagataagccttccctggtaggataggaatttgctgatgtctcccaacgacccgacctgccttcagttctgtttagaagacgagttaattcctgtaggttgggtctggtggtgcctagaggtaggcccaaataggtgagggcattgatccaaccttgcaacctaaggtgtcagccagatgtttggcttgagtcttcaggttttatgagcactacatgtttgcatagacct

SEQ ID NO: 85833 - DNA, 1090 bp, Zea Mays
tttttttagttgctctaacacactgtaggacatacgtttttcattagcaaaggaaatgctttttttggaaaagaaaagtccattggatttaacggcgacgccacaatctcccattcccgcggcccatctcaagcccactcctggaaaacagacccacgtgacgtcagcgatccgggttcatcccccacgaaccaatccaacgccgcgcatccctccgggatccttgccacgtcacgaatccaccccactcgcttccacgcagccccatccatccatcacggatccgacgcgccgaactccacctcccacggattgcactccctccctcctcgcgcccaagcgcacaccccctcccgcctggaggccgctacagcctacaagtagcactcagcccggctcccgtttaccgccgccgacttctgattctaccaccacccgcctcctctcgagttcgatctgtttgctcccccagacatgtcgggccgcggcaagggaggcaagggcctgggtaagggcggcgcgaaacgccaccgcaaggtgctccgcgacaacatccagggcatcacgaagccggccatccggaggctggctcgcaggggcggcgtgaagcgcatctccgggctcatctacgaggagacccgcggcgtgctcaagatctttctcgagaacgtcatccgcgacgccgtcacctacacggagcacgcccggcgcaagaccgtcacagccatggacgtcgtctacgcgctcaagcgccagggccgcaccctttacggcttcggcggctagggcgctaggctaggccatgctcgacccgccccccactctccgctctggcgtcgtcactggttccttgacccctgtgcgggtcggtcggtggtgctagggtcagcagttgtctggtgtctgtagcctctctggctatccgttctttggtgtgaaatggaattccaatcgtgtgggaatggatctctgttcgattgttcaattggcccatattccatctttggatcttagttttgcactaatggcgcaagccttttcgaaaaccaatgctctgaactgcactctgtctggcttattttggagctgt

SEQ ID NO: 85834 - DNA, 267 bp, Zea Mays
atgtcgggccgcggcaagggaggcaagggcctgggtaagggcggcgcgaaacgccaccgcaaggtgctccgcgacaacatccagggcatcacgaagccggccatccggaggctggctcgcaggggcggcgtgaagcgcatctccgggctcatctacgaggagacccgcggcgtgctcaagatctttctcgagaacaccgtcacagccatggacgtcgtctacgcgctcaagcgccagggccgcaccctttacggcttcggcggctag

SEQ ID NO: 85835 - DNA, 261 bp, Zea Mays
atgtcgggccgcggcaagggaggcaagggcctgggtaagggcggcccggccatccggaggctggctcgcaggggcggcgtgaagcgcatctccgggctcatctacgaggagacccgcggcgtgctcaagatctttctcgagaacgtcatccgcgacgccgtcacctacacggagcacgcccggcgcaagaccgtcacagccatggacgtcgtctacgcgctcaagcgccagggccgcaccctttacggcttcggcggctag

SEQ ID NO: 85836 - DNA, 1995 bp, Zea Mays
atggcgccggtcagtttgcctcctggtttcaggttccaccccactgacgaggaactcatcatctactaccttaagaggaagatcaacgggagacagattgagctcgaaatcattccggaggttgatctttacaagtgcgagccatgggatttgccagaaaaatcatttcttccaagcaaagaccttgaatggtacttcttcagcccccgggaccgcaagtacccgaatgggtcaaggacaaaccgtgcaacaaaatctgggtactggaaggcaaccggcaaggaccgaaaagtgaactcgcataggcgtgcagttggtatgaagaagaccctggtgtactatcggggccgagctccacatggttctcgcaccgattgggtcatgcacgagtaccgcctcgacgagagggaatgcgagactgacacgggcttacaggatgcatacgctttatgccgagtgttcaagaagacagcgcctgggccaaaaatcatagagcattatggcgcagtgcaccatcccatcgaacaccctcagtggatggcagaggcaggcagtgttgaccgccactccccaacgctggacttgtccagtgacgctagaggtgacgacttcgagagcagcagcttctcgttcccgacggaggcgcccagcatggactccatgcacgggatgcagatgagcgcaccccacgaggatggcaaatggatgcagttcctgagcgaagacgccttcaacgccaccaataaccctttcttcatgaacccaccttcttcttcaagcttcccatgcctcccgtccaaggtggatgtcgcactggagtgtgcaaggattcagcacaggctctcgttgcctcccctggaggtggaggacttcccacaggacgtcagcctcgacaccaaggcgagcgtgctccgcagcaaccccaacgaggtcgacatcctccaagagttcctctccgtggcgtcggcctcacaggagctcatcaatggcgccaccagcagctgctacgctgcagagttgtggccatcaggcgcgggcacaagcagcaccagcacccactacgtcaacgaactgtcttccctcgttgagctcggggtgaaggccaaagaggaggcagacaacttctactatatggactgcattgttggaacatctgtagggttctcatccaagtcgtcggtccaagtcgatgaacaggccgttaggttggttgagatcgctgacatcgaggggttgaagcaggaagagaagaggcaggtagagaaccttagaggtgtgcggcttcacaacaatgacctaggagagattgttgtacaaggagatgaaagcaatccaacggactgcatcacacaataccccatatcagattattctgctgacaatttaggagaagccggtcacctggccgatcccactgacgttggcggcggcctagccactgcacccatcttctcgcaatctcagcctgacgacttcgctattgggttcggtgacgtcgacgtcaaccctaatgcatctttcgacctgtacgagagggtcgacgtcaagcatgggctcttcgtctcaacggccggtgcgccgaagacattcttccaccacgttgagccatcgaagaaggtcagcgtctacctgagtcccgtagcgagcgacgtcgtcggcaaggcgaccgagaagttccattcccccattactgtgacagcaaccaaagcttccgtttttagcaagttgaaggcgctcgtcactcgtcagggacaaattcctggtggggaagacgcctccatcatgccgccggaggtccttaggcagcaaagaaatagcggcagccccacgacgatgaataccgagcaagagttggtcaagaaggcgaagaaggtgatgaagccggggcatggtggtggtgatggaaaccaagcatgtcttcttcttccactctccaagaggagcaaaggcatttccagcatgttcttctcggtgagaaatgggcataatttctga

SEQ ID NO: 85837 - DNA, 966 bp, Zea Mays
gcctttgactatgtaattagattctaattttattaatgaaagttcctaacacgcaatataccatcaacgtagaactcaaatagcatacatccctaaattatatgatgatctatcaaaagatgttaaaataaaaaagtaaaaaggatagtatagacttttatttggcgtaaaagcccattaattcaacacaagcccaatttccacgagagccatacatttcttcactgctcagcgaagcgacacagccgccgccgtttcctcgtctcccatcttcatcttcctcgcagcgccgggactccatcttccgcttcctcccttactcgcgctcggcacgcaggcgacgggagcggcgctcaggctcgggctctcagcggcgacttcagcggcttcccctcccgcatcgcgccctcgcctccggtcctccgcacatcggccggtgatcctgctttaagatgtcagaagcactcgagaaagataaagaaattgatgaagaggaagaggagtatgtattgctagagttggacaattgtctttattcagacatgtcgccaggtgctccgttcgtactctccatcggagaatatgaagaaactattggcacctgctatctattctctgaaactgaagctgaaccgaaacctacaagtaatgagatggcaccttctgaagaaaacacagacaaacaagttagcagcagtaaggaagcgccgtcgaaggaggtgaaccatctcgccagcgttcaaaagatcctcaaatttcggccaatcaatgcggagcattcgcagcatcgagcatatcagcacaaggacaaggaattctagaaaaaaattgtagctggctatctgccgttatcttcttcattggccatccaaacgaggtggtttgtacactttgctttgttctatacataatctgatctattgtatcgatctgtcggtaattgtttctcagcattccccaaggaaa

SEQ ID NO: 85838 - DNA, 1049 bp, Zea Mays
gcctttgactatgtaattagattctaattttattaatgaaagttcctaacacgcaatataccatcaacgtagaactcaaatagcatacatccctaaattatatgatgatctatcaaaagatgttaaaataaaaaagtaaaaaggatagtatagacttttatttggcgtaaaagcccattaattcaacacaagcccaatttccacgagagccatacatttcttcactgctcagcgaagcgacacagccgccgccgtttcctcgtctcccatcttcatcttcctcgcagcgccgggactccatcttccgcttcctcccttactcgcgctcggcacgcaggcgacgggagcggcgctcaggctcgggctctcagcggcgacttcagcggcttcccctcccgcatcgcgccctcgcctccggtcctccgcacatcggccggtgatcctgctttaagatgtcagaagcactcgagaaagataaagaaattgatgaagaggaagaggagtatgtattgctagagttggacaattgtctttattcagacatgtcgccaggtgctccgttcgtactctccggtttggatacattgacgcctaccttgataataggtgacagtcttaagatgatcggagaatatgaagaaactattggcacctgctatctattctctgaaactgaagctgaaccgaaacctacaagtaatgagatggcaccttctgaagaaaacacagacaaacaagttagcagcagtaaggaagcgccgtcgaaggaggtgaaccatctcgccagcgttcaaaagatcctcaaatttcggccaatcaatgcggagcattcgcagcatcgagcatatcagcacaaggacaaggaattctagaaaaaaattgtagctggctatctgccgttatcttcttcattggccatccaaacgaggtggtttgtacactttgctttgttctatacataatctgatctattgtatcgatctgtcggtaattgtttctcagcattccccaaggaaatcatacaccaagcgggagaatttttttgtcat

SEQ ID NO: 85839 - DNA, 94 bp, Zea Mays
aatttagagctcattattgtccctgcggtcctgccagccatacgttctgtctcttcatccccatcttcctctcgcctaatgtcatatcccatag

SEQ ID NO: 85840 - DNA, 1594 bp, Zea Mays
cactccttccccttcccttcccttcccttcagggaccaggccatcagttcttcacgagctgggaagagctcgtgagccgtgcattgaaggcaatggccgctgttcgtagatgctgcctgctggccgcggtgctgctgtggtcggcgctcgcttcagcggccacggccgcgccggcgcctgtggtggccgggccggtgtccagggtggaggacgccaccatgttccggatatactacggtcagagcttcaaggtcatcaagaactccggcgatggcaagagctaccttctcatgcagaacacgtccaagatggcatccaagacgaagtactgcacggggaggattaagtcgttcgtcatccccctcgccagcttctccgtcgacaccacgacctctccagtgtcattctttgagctgcttggagtgctagagagcttgaaaggaataacatcgaaccaagtcgcttctcagtgcgtgctccagtcatatacaagtggaaatgcccagcttgtgaatagaactgatgtgcagacactctcgcagtttactgcgcatttcataagcgatacagatgaagacagaggttgcaactttgcagcatatgtacccttagaagagggcacaccattgcagatggctgagtggatcaagtacctgggaactttcacaaactctgaaaacagggctaatgctgtctacgatgcagtaaagacaaactacctgtgcttaagcaaagtagctgcaaaccttggcacaagattcaagcctgtagtagcgtggattgaattcacacagggaatgtggacatttgttaaagaaagttacatcttacagtatgtcacagatgcaggagcagaaattgttgatgcaactattacggataagagatttaatagttcagatccagaggatatggataacttccatgctattctgtgtacagtggacgtggtcatagatcagacatatgctttggagcctgcagagtacaaactatccacctttttggagaatattaatgttagccacgactcctgttacagttttgtatcaaatcgcagcatatggagatttgacaaaaggataggagcttctgggacacttgattggtccgatggagctatctcacagcctcagttggttcttggagatctcatagaaattttcttcccaacggggaactacataacaatttacttcaggaatcttgcaaaggatgaaggggtcacagagattggtcctgaaatgtgcactaggagcatatccacacccatggatcctataatcctgtcatgtgaatgatgaacccagatgaacacgaagagttgtcaagctactgtactaacagacagtggcaactagttgacagaagcatttaagttactgacaaactgatctggacagaagcatttgcaacaaagattagattacacaatctagaaaaatactttctttcaaatattgagcagcaactgctgtttggtcagttgatcaataagtgattacaaacctcggtgtatccatgttaaaaggaatttgatgtaattatccaagagaccatcttatgaaattcaaacgactgttttcaatatgat

SEQ ID NO: 85841 - DNA, 2252 bp, Zea Mays
cactccttccccttcccttcccttcccttcagggaccaggccatcagttcttcacgagctgggaagagctcgtgagccgtgcattgaaggcaatggccgctgttcgtagatgctgcctgctggccgcggtgctgctgtggtcggcgctcgcttcagcggccacggccgcgccggcgcctgtggtggccgggccggtgtccagggtggaggacgccaccatgttccggatatactacggtcagagcttcaaggtcatcaagaactccggcgatggcaagagctaccttctcatgcagaacacgtccaagatggcatccaagacgaagtactgcacggggaggattaagtcgttcgtcatccccctcgccagcttctccgtcgacaccacgacctctccagtgtcattctttgaggtgagcaatgcatgagactctgcagtgcagtccaattggcaatgggtccttctgcaagggaaagaaaaaaaactcagaaaaatgtctaaatattcaattcctcatctactccgaacttaaagctaaagaaaattgtactcaggacagtgttactaataacaagtatgcatacacattaaaacaagagcagcaaaagaaacagaggagccaatcaagagagagtatgctttaagcttatggcaaactcataagtacacttgacatatatgcagctgcttggagtgctagagagcttgaaaggaataacatcgaaccaagtcgcttctcagtgcgtgctccagtcatatacaagtggaaatgcccagcttgtgaatagaactgatgtgcagacactctcgcagtttactgcgcatttcataagcgatacagatgaagacagaggttgcaactttgcagcatatgtacccttagaagagggcacaccattgcagatggctgagtggatcaagtacctgggaactttcacaaactctgaaaacagggctaatgctgtctacgatgcagtaaagacaaactacctgtgcttaagcaaagtagctgcaaaccttggcacaagattcaagcctgtagtagcgtggattgaattcacacagggaatgtggacatttgttaaagaaagttacatcttacagtatgtcacagatgcaggagcagaaattgttgatgcaactattacggataagagatttaatagttcagatccagaggatatggataacttccatgctattctgtgtgtgagtatcaatcactcagaatgtaatattacaactgtaatgttagttgacgagctcactgttgcatgtgagtgtgtgacgtacaaaagacacatcctcttttggccataaaagggattaatgctgacacaattaataattgaaataaactggactggttgtatcaaatgaacaatgcctgcaaaacaccaaatggtctattacttgacacatttttcaaatgactctgcacttagtaacagttaactaagcttggttcacgaatattacagacagtggacgtggtcatagatcagacatatgctttggagcctgcagagtacaaactatccacctttttggagaatattaatgttagccacgactcctgttacagttttgtatcaaatcgcagcatatggagatttgacaaaaggataggagcttctgggacacttggtaaccgaagcaatactattactagtatcatatcttttacctatgtaatgatctaatgaatttttccatctcaaagaaatgatgtcatacacatttactctttttccctttaagattggtccgatggagctatctcacagcctcagttggttcttggagatctcatagaaattttcttcccaacggggaactacataacaatttacttcaggaatcttgcaaaggatgaaggggtcacagagattggtcctgaaatgtgcactaggagcatatccacacccatggatcctataatcctgtcatgtgaatgatgaacccagatgaacacgaagagttgtcaagctactgtactaacagacagtggcaactagttgacagaagcatttaagttactgacaaactgatctggacagaagcatttgcaacaaagattagattacacaatctagaaaaatactttctttcaaatattgagcagcaactgctgtttggtcagttgatcaataagtgattacaaacctcggtgtatccatgttaaaaggaatttgatgtaattatccaagagaccatcttatgaaattcaaacgactgttttcaatatgat

SEQ ID NO: 85842 - DNA, 1980 bp, Zea Mays
cactccttccccttcccttcccttcccttcagggaccaggccatcagttcttcacgagctgggaagagctcgtgagccgtgcattgaaggcaatggccgctgttcgtagatgctgcctgctggccgcggtgctgctgtggtcggcgctcgcttcagcggccacggccgcgccggcgcctgtggtggccgggccggtgtccagggtggaggacgccaccatgttccggatatactacggtcagagcttcaaggtcatcaagaactccggcgatggcaagagctaccttctcatgcagaacacgtccaagatggcatccaagacgaagtactgcacggggaggattaagtcgttcgtcatccccctcgccagcttctccgtcgacaccacgacctctccagtgtcattctttgaggtgagcaatgcatgagactctgcagtgcagtccaattggcaatgggtccttctgcaagggaaagaaaaaaaactcagaaaaatgtctaaatattcaattcctcatctactccgaacttaaagctaaagaaaattgtactcaggacagtgttactaataacaagtatgcatacacattaaaacaagagcagcaaaagaaacagaggagccaatcaagagagagtatgctttaagcttatggcaaactcataagtacacttgacatatatgcagctgcttggagtgctagagagcttgaaaggaataacatcgaaccaagtcgcttctcagtgcgtgctccagtcatatacaagtggaaatgcccagcttgtgaatagaactgatgtgcagacactctcgcagtttactgcgcatttcataagcgatacagatgaagacagaggttgcaactttgcagcatatgtacccttagaagagggcacaccattgcagatggctgagtggatcaagtacctgggaactttcacaaactctgaaaacagggctaatgctgtctacgatgcagtaaagacaaactacctgtgcttaagcaaagtagctgcaaaccttggcacaagattcaagcctgtagtagcgtggattgaattcacacagggaatgtggacatttgttaaagaaagttacatcttacagtatgtcacagatgcaggagcagaaattgttgatgcaactattacggataagagatttaatagttcagatccagaggatatggataacttccatgctattctgtgtacagtggacgtggtcatagatcagacatatgctttggagcctgcagagtacaaactatccacctttttggagaatattaatgttagccacgactcctgttacagttttgtatcaaatcgcagcatatggagatttgacaaaaggataggagcttctgggacacttggtaaccgaagcaatactattactagtatcatatcttttacctatgtaatgatctaatgaatttttccatctcaaagaaatgatgtcatacacatttactctttttccctttaagattggtccgatggagctatctcacagcctcagttggttcttggagatctcatagaaattttcttcccaacggggaactacataacaatttacttcaggaatcttgcaaaggatgaaggggtcacagagattggtcctgaaatgtgcactaggagcatatccacacccatggatcctataatcctgtcatgtgaatgatgaacccagatgaacacgaagagttgtcaagctactgtactaacagacagtggcaactagttgacagaagcatttaagttactgacaaactgatctggacagaagcatttgcaacaaagattagattacacaatctagaaaaatactttctttcaaatattgagcagcaactgctgtttggtcagttgatcaataagtgattacaaacctcggtgtatccatgttaaaaggaatttgatgtaattatccaagagaccatcttatgaaattcaaacgactgttttcaatatgat

SEQ ID NO: 85843 - DNA, 1646 bp, Zea Mays
cactccttccccttcccttcccttcccttcagggaccaggccatcagttcttcacgagctgggaagagctcgtgagccgtgcattgaaggcaatggccgctgttcgtagatgctgcctgctggccgcggtgctgctgtggtcggcgctcgcttcagcggccacggccgcgccggcgcctgtggtggccgggccggtgtccagggtggaggacgccaccatgttccggatatactacggtcagagcttcaaggtcatcaagaactccggcgatggcaagagctaccttctcatgcagaacacgtccaagatggcatccaagacgaagtactgcacggggaggattaagtcgttcgtcatccccctcgccagcttctccgtcgacaccacgacctctccagtgtcattctttgagctgcttggagtgctagagagcttgaaaggaataacatcgaaccaagtcgcttctcagtgcgtgctccagtcatatacaagtggaaatgcccagcttgtgaatagaactgatgtgcagacactctcgcagtttactgcgcatttcataagcgatacagatgaagacagaggttgcaactttgcagcatatgtacccttagaagagggcacaccattgcagatggctgagtggatcaagtacctgggaactttcacaaactctgaaaacagggctaatgctgtctacgatgcagttaagaccactaaatgcatctttatttggattgatatgaataagtaataaagtaaagacaaactacctgtgcttaagcaaagtagctgcaaaccttggcacaagattcaagcctgtagtagcgtggattgaattcacacagggaatgtggacatttgttaaagaaagttacatcttacagtatgtcacagatgcaggagcagaaattgttgatgcaactattacggataagagatttaatagttcagatccagaggatatggataacttccatgctattctgtgtacagtggacgtggtcatagatcagacatatgctttggagcctgcagagtacaaactatccacctttttggagaatattaatgttagccacgactcctgttacagttttgtatcaaatcgcagcatatggagatttgacaaaaggataggagcttctgggacacttgattggtccgatggagctatctcacagcctcagttggttcttggagatctcatagaaattttcttcccaacggggaactacataacaatttacttcaggaatcttgcaaaggatgaaggggtcacagagattggtcctgaaatgtgcactaggagcatatccacacccatggatcctataatcctgtcatgtgaatgatgaacccagatgaacacgaagagttgtcaagctactgtactaacagacagtggcaactagttgacagaagcatttaagttactgacaaactgatctggacagaagcatttgcaacaaagattagattacacaatctagaaaaatactttctttcaaatattgagcagcaactgctgtttggtcagttgatcaataagtgattacaaacctcggtgtatccatgttaaaaggaatttgatgtaattatccaagagaccatcttatgaaattcaaacgactgttttcaatatgat

SEQ ID NO: 85844 - DNA, 210 bp, Zea Mays
atgccgtcgaggaatgggtctggagaggacgtcgtggctgaagatgacgacgttcttcttcctcgtctagcacccgagggcgagaacgacgacgacctcagagatgacgttgctggcttgttcggtattgatctcgacgacgctcctatgtcgactcctgtcgatcttgacggcgacggtggagaagggacctggggctttgcttcttga

SEQ ID NO: 85845 - DNA, 2001 bp, Zea Mays
cgaccacgatcgccgacgaccaaacctacctagtactagcggctactggctactgctacgcctacgcctcagggttctctatgctcagctctcccgcgcgggcgcgcacgaaaatggagcagatcgactagtaaaaagccgcgcgcctttcgctgtcgcaggaagatgctctggtgtcccatttgctttgtccctgtctgaacagtggacagtcgggggaacaggaacaccatgggcacgcatggcgctcggaccgtggagtggatagagagtggccattgcccgttgtcgattgcattgctactactcatccatccatttggtacggttctgttacacgcgcacgagctgacgagcacatacacacacacacacaccgcctgtcgacgacgagagcgcgactgagatcacatgacggagcaggcgttgacgtcgtcgtcgttgaacatgttgctgacggggtcggcgccgcggtggggctcgtggagctgtccgtgcttgtcgccgttgtagccgtggcggtagtagttgtaggtgcggcggtacgactcctcgtcgtggaagtagtccttggcgcaggtgaagtgcatcggcaggtccgggttgggccagaactccgccttcttccccgcgcgccggacctccttgagcacccggtggcggtccacgtaccccgtcaccgtcaccttctccatctccacgtccacctccacggagtccaccccgcgcagcctcgtcaccgcgtgcttcaccacgcgctcgcagcccgagcagcacatgcgcaccttcagctccaccgtctgacgaccaaagagcatgggtagggtgcagaggagaggagtcatcagtcatacatgtatgagaaaaaggctcttcgttctctgtccctctttatttattttttttcttttctatccctttctcgctttcttttcaggaagcatgctctgcatgcagaggtcgtcgctgttctcaacaggagcgccagcgcccgcatccgccaacggtcaccgtatgcgccaagaattcgaacaagaagaataaaaatggtggcggacacagaagaaatatgtgcatgtcacgtcgcactcgcgtagccaagtcgccgtgctcgcatgcgtgtctactacctaccctgccgcccgacgaaagaacagggcaccgcaaagcagacagacgacagaaagaagcagaggcagaggcaacggacgacgcgcacctgcagcgacagcggcctgctgctccggcccatggccctgcgcccggcgaaggtgccctcgtggtagtgcagggtgctggcgctcgtcgggtggctgctgtagtagtaggcgccgccgcggtggtggccggcggatgacgggtagaagcagcagagcaggaagttggtcagcgacgacgacaccgacgacatggctggctggctggctacttatactgcggctaatctctcccgcgcgcctgggaaggaaggaagctagctgcccctctctgcgggttcacccacccttggttgccccgccgcgccgtgcacacgcctgcctgggctttctttgcttgcgttgcgaggtcgggatggatggcgttggacgctggaggagtcgagtgccctctcgcctctgcccactgccgctgcttttattctctcgccgccgctgctgccgcgccctactctttttattctttttccgccctcgtattggtgcttgaattctgggagggaaaagagggggccctggtctgctcacctagcttgccggtccgccggccggtacacatgttctgccacgtctgccgtggactactagtgctaccgagcactagtagttgctaatcatcatcgtctgttgatgttcatagggattttgaaacgccgaaagctagactaccgccagctattatgtttaggatgtccagaaaagtatctaaaaaataaatgaaaaacaagggtattcaaactgtggttgataagttaaggagacagtacttacaccactaaactaa

SEQ ID NO: 85846 - DNA, 1627 bp, Zea Mays
agctgcacctccactcttcgccatccagtagtagcgtgccataaacaaaaagtatatcaggcgccactggtcaaagtaaagtctcaaggcggaggcggtagcggcagcagcgtcgatcgatcggccggcgtctacggcctacgttcgacctgcctcgacggacggccggccggctcgatctcgaccgatcgccggtcgtcgatcggagagatcgatggagttcaccgctcccccgcccgcgacccggtcgggcggcggcgaggagagggcggctgctgagcaccaccagcagcagcagcaggcgacggtggagaaggagcacatgttcgacaaggtggtgacgccgagcgacgtcgggaagctgaaccggctggtgatcccgaagcagcacgcggagaggtacttcccgctggacgcggcggcgaacgacaagggcctgctgctcagcttcgaggaccgcgcggggaagccctggcgcttccgctactcctactggaacagcagccagagctacgtgatgaccaagggctggagccgcttcgtcaaggagaagcgcctcgacgccggggacaccgtctccttcggccgcggcgtcggcgaggcggcgcgcggcaggctcttcatcgactggcggcgccgacccgacccgcccgtcgtgcaccaccagtaccaccaccaccgcctccctctcccctccgccgtcgtcccctacgcgccgtgggcggcggcggcgcacgcgcaccaccaccactacccagcagctggggtcggtgccgccaggacgacgacgacgacgacgacgacggtgctccaccacctgccgccctcgccctccccgctctaccttgacacccgccgccgccacgtcggctacgacgcctacggggccggcaccaggcaacttctcttctacaggccgcaccagcagccctccacgacggtgatgctggactccgtgccggtacggttaccgccaacgccagggcagcacgccgagccgccgccccccgccgtggcgtcgtcagcctcgaagcgggtgcgcctgttcggggtgaacctcgactgcgccgccgccgccggctcagaggaggagaacgtcggcgggtggaggactagtgcgccgccgacgcagcaggcgtcctcctcctcatcctactcttccgggaaagcgaggtgctccttgaaccttgacttgtgaaggcatggcagccggagaagccgcgtggtcgtcgttctcctactccgtactcgtacgatctatctctacagcagcagcctactactactactacttgctccccggccggcggccgcttctggcgccactgcagtgcactgaagacggcaccaacggtcgtcgtcgtggagagtgaggggatcgagatccaatccagtccaagtaaacaaaggcggcggcggcggtacgtggccggccggtgcaagtaaggatcgatcgagctggagtggaggagcactgcgctgcgctgcaccaacaagtcttcactcgtaacccgtatatagctcatctctcccaatttctttttagcaattccggtgtgaagggggaaacaaggaaattaagaacaaagcagcagcaacaagttataaaaaaatgatttcttcttct

SEQ ID NO: 85847 - DNA, 124 bp, Zea Mays
ttttttttgttttgtttccattacacgcaataaaatggatgcacaaaatagtatatttaattaatttgcaattgctattttccgaaataatacgtgattaataatttgaaattataaatattaa

SEQ ID NO: 85848 - DNA, 415 bp, Zea Mays
ttttcttttcttctctttttttttacgaggaaagaacgtaaagcccttcgttatcgtgtgcacgccctggccggatcaggttccccatgctggctgttgggtgcaaagttggatccactttcagtggccaaatcgcaagcttcttttccttctctcccccctcctcctttcaagcctcaggcgctaatcaatcaatgatgcagctttgtctttcacaaaacatgaatcatgcagcattttggcagcccagctcgctcgtgatcattaatgtccaaaagactattttttaggtaggcgggcaggtgaggccctcgattgtgctaggcacatgacaaaagtgcggcgcaggcaccgaccgaccggccggccctgccctcgcgttcttttccttttattttccctcttttttttcttt

SEQ ID NO: 85849 - DNA, 861 bp, Zea Mays
tctcagaacactatagatactgaatgaggcagaacactggtgcgggagaagctagaagagctgtcgatcaaagaacgacaacatagcaggagacgggaaggaaaagagaccatgagatcgaggagaactggtacacctataagatcaagagatgacaaggctaaaccgaccatgcataagtgctacgagtctgaggccgagaaatatcatgctagtgagacagtttcggtaccgagggcctcgtcactcccaagtccgccctatagagcaaccgacatgtatggaacttccagatatgttacagatcagtcagtgctactgcaaaagagtgaagcactccatcaccgaggatttaccagaccggaagatggtgaaaacatgaaccatgttggcaaaggaaacgtggacaggtggctccatatgctcatggataaccaacaagaagatcatgttgcgtaccattcttcagacgaacacgataatgacgaggagaatgcttcggatgagcagcgaacgcagagccgggttgacgaagagagctgcaggaatgggataactgaatattctgatgagatcgtcgaggtcgaggacgagattgtttctgaccagggagcagaaagagggaggaacaactttggaattaaagacagagaggaaaagaagatttggttccataggactgacagcacctggggtttctggtcactgccatcatcaccatccatgatcctgggaatgagaaaaggtgtggaacgcacggctgtcgacgatgaccgcaaatatggctatgaggattcagtgtctaggagcagcactaagtttccgcgcccagcagcctgtgcagctgcgcctcgacgctag

SEQ ID NO: 85850 - DNA, 2110 bp, Zea Mays
ctcgccgccgcggcgcgcagacgactgcgactccgcgatggacgaggaggaaagggaggaggtgggagagtacaagctgcaagggttggttgggaggggctcgttcgccgaggtgcaccgtgccgcgcaccgccgcactggcgcgcccgcggcggtcaaggcgatcgaccgccgcctcgtcgacaagcgcgtccacgacggcatcctgcaggagagggagatactcaggagcatcgaccaccccaacatcctccgcctcctcgacaccatcgacaccacgaacatgatgtacctggtgctggagtactgcgacggaggcgacctggacgcgtttctccacaagcacggccggctgccggaggccgtagccaaggacttgatgcggcagctcgcggaagggctgaaggtgctgagggggaggaacatcgtgcaccgggacctcaaaccacagaaccttctcctatcaaccaacggggatgacatcgtattgaaaattggtgactttgggtttgccaggtcgctggtgcatgaaaatttagctgctacaatatgtgggtcgccatattatatggcaccagaaatttggcaagggaaggactatgatgcaaagtcggacttgtggagtgttggtatcattctttttcagctagtcacagggaagttgccattcaccgggagtaatgcttttcagctgcaccaaaatgtcatggctaccgatgatcttaacttcccttcagaaattgaagctgatttatgtcctgattgcattgatttgtgcagaagactcctgcaccgtgatccaaagaagagaataagttttgaagaaatcttcaatcacaagtttttggcaacaacaaggaaatgctatgaatcctgtcatgctgtagaattaagagataactgccagacaatcacctctcctgttgtcctaaaaacaaagtctggaagtattgaatcaaaaaatccgaaagtttttgattcatgggagtggattgaacgagaatatgtgcttgttccggaaaactgtacttctatggaaatgtcttcactcaacatcaagtccacaaaggatgatatggatacaagaacggtcagctatggtaggtccactggcaaagggtctgttcagaaccaaatcagagactttactgacacagctactggtgtacaaagccatggatgtgctcctgtggtcatttcacaggagtcagccactgtggattgtagacgagggaaaccacctgattatattacaagacttcattctctgaatcaatatgttcttgttcttgcggatcttgctcgggaaaagctatctaaaggcctgtacctggaggcgttatcaattgaacttgtattattaactatctggaaagaggcacttgatgcatgtagcttgctcatggatacatcagatggtgaaaaattctctaaatcttgtcaagaacatttccttgctaagagtggccactcacctatgaatgtagtacaaggattggatttcactcggacggcttctattttttcttggcttgaaagtgggtttatgaaggcatatgatcgtgcagagaagatatcacatgtattacggaaaagtgatgataacaccgagatgccagatgcagtggatgttacattccaaactgctttgtaatatgagaagagtagagctgcgaatgaagttttaggaaatcaaagcagatccgcagagctatattcgaagtctatcatcttgctcacgtttttagtacaggaagcatctatgttgccactaaatccaccgctttccctttcgcctttggatcagcaacgcatccgtaggtacatagctaatttgaacagccatctctgcagtgctcaggttccagggcaacggcagagatcagtccaccatgttgctttttgtctaggaggtggtgttcaatgctttggtgtcatgaacctttgtaaaattgtagttgccgaacaccatgatcctgcccccttttttgtatatatatagataataacaccacatgctctatatggtcgccccttaccatatgttcaaatgactctgaactttatatatttgcaagtgccttgtttgcacatgtaaaaagaaacgggt

SEQ ID NO: 85851 - DNA, 999 bp, Zea Mays
gtacttctatggaaatgtcttcactcaacatcaagtccacaaaggatgatatggatacaagaacggtcagctatggagtcagccactgtggattgtagacgagggaaaccacctgattatattacaagacttcattctctgaatcaatatgttcttgttcttgcggatcttgctcgggaaaagctatctaaaggcctgtacctggaggcgttatcaattgaacttgtattattaactatctggaaagaggcacttgatgcatgtagcttgctcatggatacatcagatggtgaaaaattctctaaatcttgtcaagaacatttccttgctaagagtggccactcacctatgaatgtagtacaaggattggatttcactcggacggcttctattttttcttggcttgaaagtgggtttatgaaggcatatgatcgtgcagagaagatatcacatgtattacggaaaagtgatgataacaccgagatgccagatgcagtggatgttacattccaaactgctttgtaatatgagaagagtagagctgcgaatgaagttttaggaaatcaaagcagatccgcagagctatattcgaagtctatcatcttgctcacgtttttagtacaggaagcatctatgttgccactaaatccaccgctttccctttcgcctttggatcagcaacgcatccgtaggtacatagctaatttgaacagccatctctgcagtgctcaggttccagggcaacggcagagatcagtccaccatgttgctttttgtctaggaggtggtgttcaatgctttggtgtcatgaacctttgtaaaattgtagttgccgaacaccatgatcctgcccccttttttgtatatatatagataataacaccacatgctctatatggtcgccccttaccatatgttcaaatgactctgaactttatatatttgcaagtgccttgtttgcacatgtaaaaagaaacgggtttcgaaccttctcgcgac

SEQ ID NO: 85852 - DNA, 291 bp, Zea Mays
atgaatgcaattctgcttccaaaaccatcttcattttgcaggtccaactcaaaatcagtatgtggcaaggcttgtcgatccatatccattgcaattacatgcccactctccacaaaaggcttaaatgtgttacacagtgatagcgccaggcttttcccaaaggatttactgaaactttgcaaatcaagcccccaagctgttctcagcgatagcataaccacatccagtgccatgtccttcagatcagagcttctagactcatgtctccacgttccatcctctaacttctga

SEQ ID NO: 85853 - DNA, 1256 bp, Zea Mays
cacggacacggagtagtttatatgttgtggagctagccctcgctgctcgtagttgtagctccgggcctccggctgctgccgccgccgccgccacagggagagctagcaaggaggtatataggtatagccgtatagctagctagctgctgctgcgtgaacggggaagaggggagggggctgctgttgcagtgttgcctgttggcctgttgcaggctcagctcgcaagtcgcgtctgcagcagctgctgcctcagggaggggctcattactccctcgttgcgtgctgcagttattgcttgctaccgctagctactgtgtacgttttggccttgccaataagctctaatggagaggatgcagctgcaactgcaagggtccatcgcctcttcgctgtgggcagacaagcagcagcaggcggccagcaccaacgccgcagcggcggcggcgcagatgcccttcctggcgctgctccagggcgcgggcgttgtggtggaggcggagcagcaggaggagcagcaccacgacgggcgcaagcggcaggccttcgcgcgcgccgtctccgaccttgatctgctcgagagctgcgtcacgcaggcggtagctcccgcagcggcggcgtctgcgcccgtggccggcaggaccgagaggcggaggaagcggcagaggccccgcgcgcgcgccgcgccgccgccggagaagcgcaagaagcccgaggaggccgagagccagcgtatgacgcacattgctgtggagcgcaaccggcggcgcctcatgaacgaccacctcgcctcgctccgctccctcatcccttccagctacaccccgcgcggcgaccaggccacggtggtgggtggcgcgatcgactacgtgaagcagctggagcagcagctggtggcgctgcaggcggccgcggccgcgcggcgtggcgtggccggcaccggcgccgccgcggtggcaacggtcgcgtcggacggcgtgttcgtgtccccgcagtacgcgagctactcggactcgcgcggcgccggcgccggcgtggacgtggaggcgacggccgcggtgggcgggcacgtgcgcgtgcgcgtcgcggggaggcggtggcccgggcggctcgtgcgcgtcgtcgccgcgctcgaggacctccgcctcgcggtcttgcacctcgccgtcacctccgtcggacacgacgccgtcgtgtactgcttcaacctcaaggtcagcccagtgtcacgtcgattttacttctggtcgtgctcatag

SEQ ID NO: 85854 - DNA, 1174 bp, Zea Mays
tcttgacgcttcctttcccttccatgccctctctgcattgttcacctttgctagtacttccctctcatgtcgtcgcagtggcagctctgccgccggcacccacgcacgcacgcacgcacaattcaatgcgcaccactgtactcgctctctgtgcttcctgctaggagatcgacatcgactcgactactaggagtatctttaatgtcgttgctgctgctcccctttctcgatcggcttgctgatgatgtgcctttcttgctccccttccggcgatggcgtggtgatgacgacggtggcggtaatggaacagtgggcagacaagcagcagcaggcggccagcaccaacgccgcagcggcggcggcgcagatgcccttcctggcgctgctccagggcgcgggcgttgtggtggaggcggagcagcaggaggagcagcaccacgacgggcgcaagcggcaggccttcgcgcgcgccgtctccgaccttgatctgctcgagagctgcgtcacgcaggcggtagctcccgcagcggcggcgtctgcgcccgtggccggcaggaccgagaggcggaggaagcggcagaggccccgcgcgcgcgccgcgccgccgccggagaagcgcaagaagcccgaggaggccgagagccagcgtatgacgcacattgctgtggagcgcaaccggcggcgcctcatgaacgaccacctcgcctcgctccgctccctcatcccttccagctacaccccgcgcggcgaccaggccacggtggtgggtggcgcgatcgactacgtgaagcagctggagcagcagctggtggcgctgcaggcggccgcggccgcgcggcgtggcgtggccggcaccggcgccgccgcggtggcaacggtcgcgtcggacggcgtgttcgtgtccccgcagtacgcgagctactcggactcgcgcggcgccggcgccggcgtggacgtggaggcgacggccgcggtgggcgggcacgtgcgcgtgcgcgtcgcggggaggcggtggcccgggcggctcgtgcgcgtcgtcgccgcgctcgaggacctccgcctcgcggtcttgcacctcgccgtcacctccgtcggacacgacgccgtcgtgtactgcttcaacctcaaggtcagcccagtgtcacgtcgattttacttctggtcgtgctcatag

SEQ ID NO: 85855 - DNA, 1272 bp, Zea Mays
tcggcaagttccattctagtaacaaacaaactagtaccgaaaagctaaaatgaaagagaagcatccaaaatactcctaggaggtcggggtcctgaagagctcgaggcagtgctcctggtccaggttcctgctccagaacttggcgtagtactcggcgtaggtgtagtccctgtagacggcgggcgtgccgtcggtgaggagcctggcggcggggccgatgcgcgcgtcgttgcaggggcagaggaacgacgccaccgacatcctcggcctgtcggcgttgacgacggcgcggtgccacacgctcctgtacctgccgttgctcagcgcctgtgcaggtgcagtgcagtagtggaggccaggggcagagaggaggtgagagggtgggaataatgggagagcgagacaagagcacgtcacctgcagctggtccccgatgttgacgacgagcgcgccgggccgcgggttcacggcgatccagcggccgtccttgagcacctgcaggccggccacctgctggtccatgagcaggatggtgagcgcgttggggtccgtgtgcgcgggcagcccgtacgtgagctccggcgccgggcacctcgggtagaagttcaccgccatgtgctgctcctgctcgcccagcgcctccttgatgtacgctccgtccaggcccaggccctcggagatggcgacgtacagcctgaaccccagctcccggaccgcactgcagtacgcgctcacggtcctcctgtacgatggtgggttgtccggccagtcggggacgtactgctccagcgggtggcagtgcaggcggaggtagtcccgccagttgtgcaccgtctccttgcgcacgttgaagctggtggacagccgcatcttcttggccgggtcgtcggagtacagcttggccttctcctccgcggggagccggaagaattcgtacgccaccgacatcatcgccgccgtcagctgctccggcaccccctgtgtgcccacctggaagaagccgtgggtgcggcacgcctcggcgaccctggcgacgacggcttcgcggtcggggtcggcgaggtccaccacggggatctccgcgtcggggacgacctcgcgcaggcgcggccgctgcgtctccggccggacgtagctgtccggcagcctgtcgtggtcagccgtagagatgagatgctctgccatgcccgccgccgccgctctagctctagatcacttccagctcccggcgccgcgtctgctctgtctcactctcacctagctaggccgcgt

SEQ ID NO: 85856 - DNA, 673 bp, Zea Mays
acttcttctcgagaagaagctcaccaatgcatgccgggcagggaattcatcaggaggagaacatacttgaacagaaggtttcgacatgagcaggccggagcagctagctaatagagggagatgagggggtaagtgttctctgacggacgttctggcgcatgtgcctttgacggacggtggacagtcatgtctttgttgtttgagcggtaatctctgccgggcaatcctatgtacagctccgtctccacgtccatcccgacatccttcggccccgtgtgatcgatggctgccggcgctggaggcggcggaggagccatcagcataggcggcggcggcggcggctgcttcttgcactgcacgcatggcttggatcaggattataccatatgcgtgcatcatgatgttgcagaaatggggagactgtatgcacataagatatcacagcacaggaagtcgagattcatctcctgtttggtggttgacgcaacaaggcacaagttaggatgtattctgatgtttcaatgcccgatgtagcctgtaggacacgaagctgacttaccttctccttcagcttatggagttgctcctccagcagctgagtctgccatgtacgtaagaccagatacgcatatgtatgtatgcagctttcaattcatttgttaaaacatcatac

SEQ ID NO: 85857 - DNA, 711 bp, Zea Mays
acttcttctcgagaagaagctcaccaatgcatgccgggcagggaattcatcaggaggagaacatacttgaacagaaggtttcgacatgagcaggccggagcagctagctaatagagggagatgagggggtaagtgttctctgacggacgttctggcgcatgtgcctttgacggacggtggacagctccgtctccacgtccatcccgacatccttcggccccgtgtgatcgatggctgccggcgctggaggcggcggaggagccatcagcataggcggcggcggcggcggctgcttcttgcactgcacgcatggcttggatcaggattataccatatgcgtgcatcatgatgttgcagaaatggggagactgtatgcacataagatatcacagcacaggaagtcgagattcatctcctgtttggtggttgacgcaacaaggcacaagttaggatgtattctgatgtttcaatgcccgatgtagcctgtaggacacgaagctgacttaccttctccttcagcttatggagttgctcctccagcagctgagtctgccatgtacgtaagaccagatacgcatatgtatgtatgcagctttcaattcatttgttaaaacatcatacatatactgtatgcataaaacgacatgaggaaagtaactaacctttcttcccctgatgcaatgaaggctcttttcgagtttcacttccaaa

SEQ ID NO: 85858 - DNA, 603 bp, Zea Mays
atggccatcaccttccacagcaagatcaccctccgtcccggatccgtattctgcttcggaacaatctcatccgtagtagatgaagaggaaactctacaccgcattgcggatccgccggaaaagaagtctcctccaacaaactccgaaaatgtcggagaagcgcaacctccagctctccggaaaaagatcgtctccggaaagtcaggggccgagggcccgctgacccggagaactccactgtctacttccccgacaaaagaatggacacagatcgcgaggaagaaggagaccaaggggaagcaagttgttctttccgttcctccgccctcaaaggagaacggaaagaaggtcgccacgacagcagcaccattctatcccgacatcctcttcatcgggagagcggagtcggccaccgtctccgacgacgagccgaccgcacccggagaagaaccacctcaacgagaatcccgccgacggaggaaccggcgccggaacgtccgacgacatcacgcggcgggagaacgggacccggagcaacctgtctcgcgggacgagctacaggcattttcggcggccagagcccgaccgccgaaaataagttag

SEQ ID NO: 85859 - DNA, 1605 bp, Zea Mays
ccggccccgctcgccacagctggagcacaccgtcaccggccccggctccggaatcagatgctccgaccggaccgactacgagcaacagcaaaaagaagaaaaaaaagaaaaacgggatcgccctaaccgtctctgcgtggtgggcccaaccttagcctctccactgtccactccaagcaaggaaggaacgtgatacccgcgccccaccccgcagtgtgatagcacgatagggacactcacgcctcgcctgcccccgtcgcgagctccacccgcttcgcttccctgacacgcaggcctcgcaagcgaccgccctactggagcccactcgccagggaaggccgctgaaaatacgggggaagaaacacgaaaaaggcaaggaattagaacgggcgaagcggcacacaattcgcgcagcagcgtagaaactagaaagaccagtccccaaactccccagcgggggcgagtagaggaggaagagtcgccgccgccgccgccgccgccgccgccgccgccatgtctgggggaatcgcccgcggccgcctcgccgaggagcgcaaggcctggcgcaagaaccacccgcacggtttcgtcgcgaagccggagtcgctgcccgacgggacggtgaacctgatgatctggcagtgcaccatccccggcaagcaagggactgactgggaaggtggatatttccctctcacccttcattttagtgaggattaccctagcaagcctcccaagtgcaagttccctcagggtttcttccacccaaatgtgtatccttctggaacagtctgcctttcgattcttaatgaggacagtggttggagaccagctattactgttaagcagattctcgtcgggatccaggacttgctagatcagccaaatcctgctgaccctgctcaaacagacggatatcacctttttatccaggatcccacagaatacaagaggcgcgttagactgcaggcgaagcagtatcctgcattggtctgagagcttcgccctactagggggatccatgctgcacatccgcatagttgttgctagtgtcttgaatgaaagaccaaatgtaacatggtgcttggagaagtaactatcgccattgtggactgtgtgtcttttaacagccttattaactgtttggagtgtgtgttttgcgggatgatgtcaaaaccttgctgtgtcttgttatcaagaattgctgtgtgttgtctgacaaatctaaatatgggaagaaacgcccatgacgtttcagctgagggcactcctggttctgtactttgacagatatgaagggaaggtagcctgtggtttttgattcaacagtcattcctaacgccaatgcacatgattataacgatatcgatgctgttgcttgcttcagatgagctgtattatgtagcctacttgaacatgcttaaacattggcatgagtagagtgcattgttagcttcatttcttggttgatgtgcaactttgaccttgagtatagcaacacttgcctgaagattcagtgtcaagctttcgcaacggacaaacagcagccatggtgaactgagatgttccgtagtgcatctgacaagtactagtgtgccggtaatt

SEQ ID NO: 85860 - DNA, 1621 bp, Zea Mays
ggacccggcggctagcaggaggacggagtcgaacatcttgacgatgcgcgctcccggctggtggatgctgagcagcacggtgcgttcgcgcgcctcggccatggcgcggagcgcgccgacgatgtggagcgcggaggcgctgtcgaggccggaggtgggctcgtcgagggttgcgcaggaaggaagagaagaggagaaaagaacaacggctgctagtagagaggtaacggatgtagacgacgtgagtatccatggttttaatcaaagaggttaccaagtaatagagtgctcttgttcgttttagcgagtggtctattccctgctttttcatatcagctaatccctcgcctacgcctccaaaacgtcgaagccgcacgtgaggatctccataatagcaaatttctctagggggagcaggggctgagagagggctgcggagcaaggaatcaaggacgagccgccgagaggactagggtttagccatggcggccgaggaccagactccttgtaccaagctccgccccggcaaggcaaagacgcggaagaagacgaagagggacaagtggggccagcctatctccgccgccgccgccgatgaggagccgtcggtggagccggagcaagagcacccggcgggggtagttgaggcggcagtacaggtggagaaggaggaggaggaagaggcgactgcggcggcggaaggctatgagcccgggaaggtggtggcgagcggcttgccctacacgaccaccgaggcggacatccggaagctgttcgagttctacgggcccatccagtcgatgcagctctctcgcttcccggactccggcaacttccgcggccttgccttcctctgcttcgagtcagaagaagatgcaataaagtctcttgagcttgatggattcaaaattggcagcagatacatgagggttgaaaggtgcagggtgacggccacctcaaacaagaagaggaaggcagagttcgaaaccgaccccaagaagtccgaaggctgcctctcggcatatgttggcaacctctcatggaacgtggacgaaaacgacttgcgaggtttcttcgggccgtcgaagattgcatcggtaaggtttgccgtcgacaaaagaaccgggggttcccgtggcttctgccatgtcgaatttcaagacgacgagtcgctcgagaaggccatagcgatgaaccagtcgaaactgcagggcaggcctgtcaaagtggcgtattcagtcagcaaccggggctgaagagcgccgccccgtcgccagcggttatagtaccagtgaacttgtagtgttatggtttccgctccttcagtttcggttaggctttacggtgtggctaccagcagtaccagtgtgagcttgtagtgagacggtttcgctccctcagttttggcttaagcttttttttcgccgctttgaaacaaggtttttgagatcagttccatgacgccagttcttggcaccaaacatatggcaaaatgtaaacccctctgtaacgagtaccgagttgtcgttaagcctgtatcccagcccgtctcatggttttgtatcttgaatggatgtttccgtcaggtgtctcctcttgaaatggtcaggagcacatgaaa

SEQ ID NO: 85861 - DNA, 1653 bp, Zea Mays
ggacccggcggctagcaggaggacggagtcgaacatcttgacgatgcgcgctcccggctggtggatgctgagcagcacggtgcgttcgcgcgcctcggccatggcgcggagcgcgccgacgatgtggagcgcggaggcgctgtcgaggccggaggtgggctcgtcgagggttgcgcaggaaggaagagaagaggagaaaagaacaacggctgctagtagagaggtaacggatgtagacgacgtgagtatccatggttttaatcaaagaggttaccaagtaatagagtgctcttgttcgttttagcgagtggtctattccctgctttttcatatcagctaatccctcgcctacgcctccaaaacgtcgaagccgcacgtgaggatctccataatagcaaatttctctagggggagcaggggctgagagagggctgcggagcaaggaatcaaggacgagccgccgagaggactagggtttagccatggcggccgaggaccagactccttgtaccaagctccgccccggcaaggcaaagacgcggaagaagacgaagagggacaagtggggccagcctatctccgccgccgccgccgatgaggagccgtcggtggagccggagcaagagcacccggcgggggtagttgaggcggcagtacaggtggagaaggaggaggaggaagaggcgactgcggcggcggaaggctatgagcccgggaaggtggtggcgagcggcttgccctacacgaccaccgaggcggacatccggaagctgttcgagttctacgggcccatccagtcgatgcagctctctcgcttcccggactccggcaacttccgcggccttgccttcctctgcttcgaggtccatactccatagcaaccacacttccttcttcagaagaagatgcaataaagtctcttgagcttgatggattcaaaattggcagcagatacatgagggttgaaaggtgcagggtgacggccacctcaaacaagaagaggaaggcagagttcgaaaccgaccccaagaagtccgaaggctgcctctcggcatatgttggcaacctctcatggaacgtggacgaaaacgacttgcgaggtttcttcgggccgtcgaagattgcatcggtaaggtttgccgtcgacaaaagaaccgggggttcccgtggcttctgccatgtcgaatttcaagacgacgagtcgctcgagaaggccatagcgatgaaccagtcgaaactgcagggcaggcctgtcaaagtggcgtattcagtcagcaaccggggctgaagagcgccgccccgtcgccagcggttatagtaccagtgaacttgtagtgttatggtttccgctccttcagtttcggttaggctttacggtgtggctaccagcagtaccagtgtgagcttgtagtgagacggtttcgctccctcagttttggcttaagcttttttttcgccgctttgaaacaaggtttttgagatcagttccatgacgccagttcttggcaccaaacatatggcaaaatgtaaacccctctgtaacgagtaccgagttgtcgttaagcctgtatcccagcccgtctcatggttttgtatcttgaatggatgtttccgtcaggtgtctcctcttgaaatggtcaggagcacatgaaa

SEQ ID NO: 85862 - DNA, 2580 bp, Zea Mays
attaggatcaccattataaaaaccctataaattctccaccaacgaaacaacaaaaaaatggaaggggggcgatacaccataaggcaaacacaaaacaaaagcaacaaagcagagcaaagattggattgttccgggaataaacaagaaaggcaagggtggatggagtaaaaaaagcaactagtagaaataactgcccaatgccgagttccgaggagagcgagaggtggaggaggagagagagaaaagcgcgggggcgcgaaggcaagctgtagttacacacatcacccaccccgtcgcactcgcaccgcaatctccccgatccccaattcccccattatccgccgagccccgccccgccccgccaatggaccaccacctcacgccgacgccgccgccgccgccgccgccgatggggaactccgcggcgggggcgtcctcgaagccgccgacgccggcgtccacgcccaactcgcgcctcgcctcggcgccgtcctcccgccacgccgccacgccgccgcacgcgtcggcggcggcgtccgccccggcgccggcctcgcgcaccgtctacagcgaccgcttcatccccagccgcaccggatccaacctcgcgctcttcgacctcgccccctcgccctcctccgccgcctcgtcctcgcactcgcacgacgccggccccgcggcctcgtccggatctgcgcagcccgccgcgtcgccctactgcacgctcctccgcgccgcgctcttcggccccgacacgcccgaccgcgtcgcgtcctcggccgccgcgtgctcctcgtcgtcgtcctccttctccccggggccctcgcctgtcggcacccccgccaccgggaacatcttcagattcaagacggaggtgcgccggaacgccaagagggcgcttttttcgggagaccaagaggaggacgcgctgttccccggcattttcaccaccaggggcgcgggaccaaggaaggtgccaaggtcgccgtacaaggtgctggatgcgcccgctttgcaggacgacttctacctcaacctcgtcgattggtcttcacataacgtccttgctgtcgggttgggcaattgcgtttacttgtggaatgcatgcagcagcaaggtcaccaagctttgtgatttgggggtggatgacaatgtttgctctgtggggtgggcgcagcgcggcactcacctagctgtaggcacaaagcaaggaaaagttcagatctgggatgcaactcgttgtaaaagaataagaactatggaaagccatcgcatgcgtgtaggtgctcttgcatggagttcttctttgctttcttctggaagccgtgacaagagcatcctccaccatgatatccgtgctcaagaagattatgttagcaagcttaccgggcataaatctgaggtttgtggactcaagtggtcttatgacaatcgtcagcttgcatccggaggcaatgacaatggactttttgtttggaatccacattcagtacaaccagtactgaagtatactgagcacacagcagctgtcaaagctattgcctggtcacctcatctccacggcctgcttgcatctggtggaggaactgcagatagatgcatacgattctggaatacgaccacaaatacacacttgagttgtgtggacactggcagccaggtctgcaatcttgcgtggtcaaagaatgtgaatgagcttgttagcacccacgggtactcccagaaccagataattgtttggagatatccaacaatgtcgaagcttgccactttgacagggcacacgtaccgagtattgtatttagctatttcccctgacggccagaccatagttactggtgccggtgacgaaacactccgtttttggaacgtgttcccctctccaaagtcccagagctctgatagtctaagttgcatcgggggtacatcgtttgttagaagctacatccggtgacccgcagaaacgtagtttgaactgagctcataaggtaattgcagcatatgtggatgatcatcagcatcatcccattcatgacaaccatgccatcaggtcgtcaaccatccaaggtagctgaatttttgagatgccacggcgcagcccgatggaagaagtggcttgcgaatccgggcatggctcttttggccgagagtgtacatatttatcagagcaacaacggcgcgcatgttacaggagtgcagcatagcggaggcctcaagcatcggcattgttcccagctgataagaatacgccccctttttttgttgttatttttttgtccattttgcgggtcaaacgtcgacctggtatgtgtgtctagtgcgctagcagttaacctattcgaaacgcttactgacctgtgacgcccatttctcattcatgctggcacggtgtaagatgagagcacttgttccatggtttcgttcctggtgtcttgaaaaggagggctggttctgccctcgactggcttgtttcgaagtaatagacagtcgagaaacgtgtgttcgttgttgtttgttgatgtatggacaccaagacaatgctgaaccttgtctggctacctttgttgtaaagtgcatgta

SEQ ID NO: 85863 - DNA, 102 bp, Zea Mays
cgtggttgcctctgggccgagggaggctacaggcccagatacgttggtcgagtggacagatggagtagcgtcgaagcccggcaaggaggaggaccgagtgaa

SEQ ID NO: 85864 - DNA, 1869 bp, Zea Mays
ctctctctctctcattcatctcgcctttctttcttaccggccggccggccggcggctgggctctgcaattcacccaacttttctctgttttcactacgatctcagggctccggcgaccgtgcggcctcatcatcagctacaacctaccagctgctaccgtctcggtcgccgcctagctctccgcagcggctagctcatccggccggccgccccttttctcttgccgttgcgcagttgcgcccccttccccgcggcttaggaaccatcgaaaagacgcctcaccatctcctttgtgtccttgctaactaactcccccattaaatcctctccttcctcccgcgctggccgtgtggtctctcagccctccgagttgatccataagctagcgccatcatcgatcgccatatatacatagccaaggacgcacgcgcgcgcgcgcgcaaaccagcgggagcgaacaccaaccggccggaccaattaagaagcaggctagcaagtcgaagaggaaagaagagaaggggggtaccgggggtaccggccggtcatcgatcgagcttggcgaagcagcgaccgccgggtcgtcgtcgtcggtacatgcatgcagcgcggcggtgatcaagcaggagcgagcctgggcatggagatgggggtggggtacgccggcggcggcggcggcggcgagtgctcgtcgtcctcggcggctgccgcggccgcggccgcggcggagggggaggagcggcagctgctcaagggggagatcgcggtgcacccgctgtgcgagcagctagtggcggcgcacgtggggtgcctgcgcgtggccacgcccatcgaccacctccccctcatcgacgcccagctcgcgcagtccagcggcctcctccactcctacgccgcccaccaccgccccttcctctccccgcacgacaagcacgacctcgactcgttcctcgcgcagtacctgatgctgctgtgctcgttccgggagcagctgcagcagcacgtccgggtgcacgccgtggaggccgtcatggcgtgccgcgagatcgagcagtccctgcaggacctaaccggggcgacacttgaggaagggacgggggcgaccatgtcagaggacgaggacgaggcgccgatgctggaggtgggcctggatatgggctccgacgggcacgacatgatgggcttcggcccgctcatgcccaccgactcggagcgctcgctcatggagagggtcaggcaggagctcaagatggagctcaagcagggtttcaagtcgagaatagaggatgtgcgggaggagatcctgaggaaaaggagggccgggaagctgcctggggacaccaccagcatcctcaagcaatggtggcaggagcactccaagtggccataccccacggaagacgataaggctaagctcgtcgaagagaccggcctgcagctgaagcaaatcaacaactggttcatcaaccagaggaagaggaactggcacaacaactcccagacgtcaaccctcaaatcgaagcgtaaaaggtgatggaggagagctagctgcaccgtatataccgtgtatgtaacgcacacctgctgacacacatgtacacatgtataccataccaacacgctaatcaaacggagctctgcatggcgactgtactcacggaaataaagaggaccatatcgaccggttcaactgtatatctagccattagtctgaccactggcatatttgtttgctgcggctgatactttgagctgatgatgtgtggctcacagcatactttattcttgttcttattgtgttgacatagtttgtcccccataatcttgaggattaaaaaatgcatcccctgtgcgcgcgcacacacacatctg

SEQ ID NO: 85865 - DNA, 861 bp, Zea Mays
gaacatcttgtcacactcgcactcgagaaacttttcccccatggttagagcaaggccacggccttggcacgacgcgggctcgacagtcgtgccttgggcttggatcttcggtagcagagccttcggcggctcgtcgccttctgcgccatgagctgtatcctccgccgccgccgcctcagcagccaggaggtggaactggagaactcgtgcgttcatgatgaggtcgatcgttgctgatcagggcgaggagttatggtgctgcttctgggcgtgggcaggtgcgtgtgtggctatatttgttgcgatcgatgcgccgacgagcagaccttcctatcgaagaaacggattctggaactcaacaccgagaagatcagagtcgcttctcctttgtcacctggaaaagaaaaaacataatatcataaattagtaaatagagaataaagttgtagtcaattcttgagttattagatagtaaaagtctaaaaccgcctgtgcgcaaaataattttaaaatatattttgccgagtgttcccgtaagacactcggcaaaacaaactttaccgagtgttacctaggctgacactcggcacagtacgctttgtcgagtgtcacctttggacactcggcaaagtatatttttatttttttccttttccagccaaactttgtgtggtttgtgcctacactatgtagacctacatgtaccattttggcacaattataaaagtgtttcctataactattagatttagttcgtttaattgaatttcatcggataattcagatttgaactacaagtcactcgaaacatgaaaaatcgtgcatgcaaaaatgatatttatgttatttagcacaagttac

SEQ ID NO: 85866 - DNA, 483 bp, Zea Mays
atggatgggaacggcaactgggacacgatgaaaggcaataagttagccgccgaggtcgccgtcgcgcgtgaggtcaggtcggcaacgtgttgcgcgtgtatgtccagactccaaatcgacctgcacctgcacatcagcacatcagcccaagtccccagcagcaatggaaatttccggacgcggttcatcacgagcggaggaaacgtcctcgctattcatcatgaagttgaagaagagtacgttgtgcgatggatgcttggcaaacaaggaacagatcagagtccagcaccaggattctgtctcgatttactagcaggtgccttgccaatgcacctgcccttctcgtatggagccgatgcggaagaggaattgactgagcgcggggaagctgatgtagttccagaggctggaacgaagatgggccgtagccgtcgtgtgcgccggctcagtggacgttttccttctgatgtatggaccaaatga

SEQ ID NO: 85867 - DNA, 1351 bp, Zea Mays
cacctccggctcctctccagttctccacccatcccaactcccccacctcgctcgcttaaaagctcgcctcgcccccgaccgaatccaccctcccaccaccgaacccgcagccgccgccgccaaaccacaccgcgctcctctctggcggatagcggacagcgattttgatcggcggtcctcagacctcagcccagcccggcccgcgatggagaagacaaagctgccgctgccgctaccgctacccctggtgcacggcgagcgtctgtgggcgcggccgtggcggtggctgaagacggccttcttcatcgtggcgatgctggcgtcgctgctgctcgtgtgcgcgccgccgctgctggtcgtgctgctggacctgctcctgccgcccgcgctgctctccagcttcctccgcgcgcagccgccctcctccgcctccttcgccgccgcgctcgccgcccaggccaggcccttccgcttcgcctcctcgctcgccgacctccccgcgctctccgccgcgcgctccctcctcatcctctgcgcgtacgccgcggccggaggcggcggcgccgcatacaggtgggtcgccgtcgcctgcagcgccgcctccgtctgctacgtcctcgccaaggccgtcgccgtcttcggcgccgcgcccgtgtggcggggcaacggccagctcgtcgccgtcgaggccttgttcctcatgtcgctcgcgctcgccgtcgcccacctcgccatggcgtaccgcgcgtcatgccgcgagcgacgacgcctgcagctagtctacagaatcgacgtcgaagcggtaagactgaagggaggccagacgcccaaggcactgaagcaatgcatgatatgacacccatctgctcctagtatcgccgtccccgctgggtggaggtggaattggaaggaaggaacctgaagatgcacggcgcggcggtcttcgtggtgcagaccggcagtgcagtgcagtgcagggggctcatccgcgcccaagttttggctcgagaagctgtgcataccgatcgccgcgtctgtccgtccactccctctgcgtctgtgaatgtgtgccagagtgaacgtgtagtgtcatcctgtacatacgtatggaacacaacattcgtgcttcggcctcctgcagccaatgcgatccaggatgagccgtgtgccaggtgcttgcgttgcctcgtcggcccggaattgtgaatatgcctgtcacgtgcgggcggaggtggcaaatgggcatctctaaatttggtgtttatcctgctttcaagtggatttggaagccttttcctcttagctaaaacataagatcgctcttttatcttctgttaagaatttaagatcg

SEQ ID NO: 85868 - DNA, 2085 bp, Zea Mays
gtttggacgggatatatataggcgcgatgcagcagagtagactgggcatgggccactactgctagtgctagtgctagtagcagcggcacagcgcggagaggcagagaagtagccaaagccaagtaggaggaggaggaggaggcagggcgcggggcgagagcttgacgcggcaaccaccgctgcactgcactgcacccctcgctcctccgagctcagcagcagcagcagcagcagctcgctcgcggcatgtcgccatccatgtcaggaaagatttatctggtcggccgatcgagctcctctcctccgaagcactgaagctccagcggctgccctgcctgacagccactccgcacgacaaaattaaagcgcgcagggcgctcggggagaaggacgtggcggtgcccgggatgacgcgcggggacacgcccaggctcagggtgctcgaccagtgcatccgccagcacaaggcgctcacccaggccgccggcatgatggagagccacccgtggcgcccgcagcgcggactccccgagcgcgccgtcaccatcctccgggcgtggctcttcgagcacttcctgcacccgtatccaagcgacgtcgacaagcatatcctggctcgccagacgggcctctcacggagccaggtgtccaactggttcatcaatgcgcgggtcaggctctggaagccaatggtggaggagatgtacgtggaggagatgaaggccgagggccaggacggcgggggccagcagcaggtaggcgtcgccgtcgccaacaaccctaaccctagcagcgccggccacgcctccgaggcggctgaggacgatgggcgcggggacagcggcggcggcgccgtcgtcgaccggaagccgacgcgggcgcagctcctgcacgacgccggctcgctcgcctcggtcgtcaacatcggcggcggatcgcgcgcgggattcggcatcatggaccacctcgacttcgacgcctacggcggccaccatgccggcgccgtgtccctcacgctgggcctgcagcagcacgactcccacgccgacggcggcgccggcggcgtcaacatcgcgttcggcgcgccgccgcccgcgcaccaccacgggtacctgttcgctccgacggcggcggcggcaggccatcagatgggcggcggcgtgcacccgggactacaccaccacgtccagttcagcggcgccggcgccggcatcgacggcgaggcggcgcacgggcaggagcactaccggggcctgcagggcggcggcgggttccacctcctgcgtgacctggccgggtgatcgatctgctccatccacggcccgtgcatccgcggtcggccgcgcgcgagctctagctgcgactccgagtgagctgagcgatggggacgtcgtgccggcgcctagctagctaccgggtgtccgcgccggattcatggcacgcactcgatcgcgcgtgcgctcatccggccacagcggcgctgtgtacgtacgcaccggatttgtttggcttgttgcttgcctggctcgtgccggtctccatcggtctcgatcgccgccggcggcggcttggccgggcccgggtctagctggctagctagctgccctagttatacataatatatgtatttgtagcgtgtacagatcgggtcgcgatcgagcagtttggacgcgcgcaggtgcagctagtactagtagtagctagcccgccggaactgcgtagttgatcaaacacgcattgcatgcaggttaattgcattgtttgtcaatttcttgaaggattcgacgacgtacggcacaatttataccaggcattattgacgattttcctggcagaatattcatcagtccatatgcccatgcatgtttgcgaattgtctatatgtatgtttgtgattggctggtgtgtaagcctctggttagtttgcattatctaaacttttcgtaaacaaaaaaaggtgagagcgtcagctaatgttttttttcataaattgagtggctgaacaatttgaaatgagctataagagtcaggccagtttggatcaactaaagtaagttggtgtccactaataaaaagctctagctg

SEQ ID NO: 85869 - DNA, 1489 bp, Zea Mays
gggcatgggccactactgctagtgctagtgctagtagcagcggcacagcgcggagaggcagagaagtagccaaagccaagtaggaggaggaggaggaggcagggcgcggggcgagagcttgacgcggcaaccaccgctgcactgcactgcacccctcgctcctccgagctcagcagcagcagcagcagcagctcgctcgcggcatgtcgccatgtatgcttttgctggcgcccgtcgcccccacccttttcccgttccccttccccgctcgcggatgagatctttgggtttggttggtttctttaagacccgagcgtccaaatcacccctgtgctactgctgtgcctgccttttcttttgatcccaatttcctccttttccacccctgccctcccccaacacaaagcgagattcttgcttgcttggcagaggtaaagagggggggcctatggctacctagctatctatctgctagcggctcgtgctactattcttgctctcccccgatgattgctacttgcaacgcatcttatttgacttaattagcttgcttgcttgcttatgttttctcctttttctctctcttttctcatcaggactgtatatgttttctctggtatatgtgtgtgtatacatctctctctctctctctctcttttgctgtgtgtctgtgttcctcgttgatcgatgatcatgcgtgtcgtctgggctggtcgacgatgagctatagctgggtagtatcagtagctagtagctatccccatgcatggatcatatcactgctggccggccggccggtggtcgctgagcactaactacgtgcctcttgtagccatgtcaggaaagatttatctggtcggccgatcgagctcctctcctccgaagcactgaagctccagcggctgccctgcctgacagccactccgcacgacaaaattaaacgcgggcgatcaagatggcgcacgaccccagcctgggcttcgcggactacttctcggcggcggcggcggcgggcgccacggcgatggacgacgacgtcggggcgccggagctctatggcctgcatgccgacgacatggagttcctcggcatgcgtggcctggccgccatgccccccgccgcggcacaccaccagcaccaccaccatcacggccacagcaaggccggtgcgctcctcgacgacgacgacgcgggggtggggccagacgtcagcggctccgcggacgacgccaccatgcgcttcctgagcgagcagcagcagcagcagcaccaggcgccgctgtcgctgtcgctgtgccggccggacgtggcgacgacgttgcacgagcagcagcacctcgccggcggtggctcctcgtcccggtaccatcaggagcagcagccggcggcgtgggtgcagcagcagcacgactactcgccgtcgccgcagcagcacgcgtggcacctgcgcagctccaggttcctcgtcccggcgcagcaggtcctgcag

SEQ ID NO: 85870 - DNA, 2720 bp, Zea Mays
gggcatgggccactactgctagtgctagtgctagtagcagcggcacagcgcggagaggcagagaagtagccaaagccaagtaggaggaggaggaggaggcagggcgcggggcgagagcttgacgcggcaaccaccgctgcactgcactgcacccctcgctcctccgagctcagcagcagcagcagcagcagctcgctcgcggcatgtcgccatgtatgcttttgctggcgcccgtcgcccccacccttttcccgttccccttccccgctcgcggatgagatctttgggtttggttggtttctttaagacccgagcgtccaaatcacccctgtgctactgctgtgcctgccttttcttttgatcccaatttcctccttttccacccctgccctcccccaacacaaagcgagattcttgcttgcttggcagaggtaaagagggggggcctatggctacctagctatctatctgctagcggctcgtgctactattcttgctctcccccgatgattgctacttgcaacgcatcttatttgacttaattagcttgcttgcttgcttatgttttctcctttttctctctcttttctcatcaggactgtatatgttttctctggtatatgtgtgtgtatacatctctctctctctctctctcttttgctgtgtgtctgtgttcctcgttgatcgatgatcatgcgtgtcgtctgggctggtcgacgatgagctatagctggccatgtcaggaaagatttatctggtcggccgatcgagctcctctcctccgaagcactgaagctccagcggctgccctgcctgacagccactccgcacgacaaaattaaacgcgggcgatcaagatggcgcacgaccccagcctgggcttcgcggactacttctcggcggcggcggcggcgggcgccacggcgatggacgacgacgtcggggcgccggagctctatggcctgcatgccgacgacatggagttcctcggcatgcgtggcctggccgccatgccccccgccgcggcacaccaccagcaccaccaccatcacggccacagcaaggccggtgcgctcctcgacgacgacgacgcgggggtggggccagacgtcagcggctccgcggacgacgccaccatgcgcttcctgagcgagcagcagcagcagcagcaccaggcgccgctgtcgctgtcgctgtgccggccggacgtggcgacgacgttgcacgagcagcagcacctcgccggcggtggctcctcgtcccggtaccatcaggagcagcagccggcggcgtgggtgcagcagcagcacgactactcgccgtcgccgcagcagcacgcgtggcacctgcgcagctccaggttcctcgtcccggcgcagcaggtcctgcaggagttctgcagcctccccgtggacagcagcagcgctgccgcctccagcaagcgcgccaaggccgcaaataagccggcctcgcagcagcagcagcagcaagaagacggcggcggcgccgaggggtcgtcgtcgtcggcctcctgggcgccgtcgccgcagatccaggccatggacgcgctggagctgcagcggctcaaggacaagctctacatcatgctggaagaggtggaccggagataccggcggtactgcgagcagatgcgggcgctggcgggcgggttcgaggcggtggccggggagcgcgcggcggcggcgtacacggcgctggcgtcgcgcaccatctcgcggcacttccggagcctccgggacggcgtggtggcgcagctgcaggcggcgcgcagggcgctcggggagaaggacgtggcggtgcccgggatgacgcgcggggacacgcccaggctcagggtgctcgaccagtgcatccgccagcacaaggcgctcacccaggccgccggcatgatggagagccacccgtggcgcccgcagcgcggactccccgagcgcgccgtcaccatcctccgggcgtggctcttcgagcacttcctgcacccgtatccaagcgacgtcgacaagcatatcctggctcgccagacgggcctctcacggagccaggtgtccaactggttcatcaatgcgcgggtcaggctctggaagccaatggtggaggagatgtacgtggaggagatgaaggccgagggccaggacggcgggggccagcagcaggtaggcgtcgccgtcgccaacaaccctaaccctagcagcgccggccacgcctccgaggcggctgaggacgatgggcgcggggacagcggcggcggcgccgtcgtcgaccggaagccgacgcgggcgcagctcctgcacgacgccggctcgctcgcctcggtcgtcaacatcggcggcggatcgcgcgcgggattcggcatcatggaccacctcgacttcgacgcctacggcggccaccatgccggcgccgtgtccctcacgctgggcctgcagcagcacgactcccacgccgacggcggcgccggcggcgtcaacatcgcgttcggcgcgccgccgcccgcgcaccaccacgggtacctgttcgctccgacggcggcggcggcaggccatcagatgggcggcggcgtgcacccgggactacaccaccacgtccagttcagcggcgccggcgccggcatcgacggcgaggcggcgcacgggcaggagcactaccggggcctgcagggcggcggcgggttccacctcctgcgtgacctggccgggtga

SEQ ID NO: 85871 - DNA, 1264 bp, Zea Mays
gggcatgggccactactgctagtgctagtgctagtagcagcggcacagcgcggagaggcagagaagtagccaaagccaagtaggaggaggaggaggaggcagggcgcggggcgagagcttgacgcggcaaccaccgctgcactgcactgcacccctcgctcctccgagctcagcagcagcagcagcagcagctcgctcgcggcatgtcgccatccatgtcaggaaagatttatctggtcggccgatcgagctcctctcctccgaagcactgaagctccagcggctgccctgcctgacagccactccgcacgacaaaattaaagcgcgcagggcgctcggggagaaggacgtggcggtgcccgggatgacgcgcggggacacgcccaggctcagggtgctcgaccagtgcatccgccagcacaaggcgctcacccaggccgccggcatgatggagagccacccgtggcgcccgcagcgcggactccccgagcgcgccgtcaccatcctccgggcgtggctcttcgagcacttcctgcacccgtatccaagcgacgtcgacaagcatatcctggctcgccagacgggcctctcacggagccaggtgtccaactggttcatcaatgcgcgggtcaggctctggaagccaatggtggaggagatgtacgtggaggagatgaaggccgagggccaggacggcgggggccagcagcaggtaggcgtcgccgtcgccaacaaccctaaccctagcagcgccggccacgcctccgaggcggctgaggacgatgggcgcggggacagcggcggcggcgccgtcgtcgaccggaagccgacgcgggcgcagctcctgcacgacgccggctcgctcgcctcggtcgtcaacatcggcggcggatcgcgcgcgggattcggcatcatggaccacctcgacttcgacgcctacggcggccaccatgccggcgccgtgtccctcacgctgggcctgcagcagcacgactcccacgccgacggcggcgccggcggcgtcaacatcgcgttcggcgcgccgccgcccgcgcaccaccacgggtacctgttcgctccgacggcggcggcggcaggccatcagatgggcggcggcgtgcacccgggactacaccaccacgtccagttcagcggcgccggcgccggcatcgacggcgaggcggcgcacgggcaggagcactaccggggcctgcagggcggcggcgggttccacctcctgcgtgacctggccgggtgatcgatc

SEQ ID NO: 85872 - DNA, 790 bp, Zea Mays
ttcctccttttccacccctgccctcccccaacacaaagcgagattcttgcttgcttggcagagccatgtcaggaaagatttatctggtcggccgatcgagctcctctcctccgaagcactgaagctccagcggctgccctgcctgacagccactccgcacgacaaaattaaaaagcgcgggcgatcaagatggcgcacgaccccagcctgggcttcgcggactacttctcggcggcggcggcggcgggcgccacggcgatggacgacgacgtcggggcgccggagctctatggcctgcatgccgacgacatggagttcctcggcatgcgtggcctggccgccatgccccccgccgcggcacaccaccagcaccaccaccatcacggccacagcaaggccggtgcgctcctcgacgacgacgacgcgggggtggggccagacgtcagcggctccgcggacgacgccaccatgcgcttcctgagcgagcagcagcagcagcagcaccaggcgccgctgtcgctgtcgctgtgccggccggacgtggcgacgacgttgcacgagcagcagcacctcgccggcggtggctcctcgtcccggtaccatcaggagcagcagccggcggcgtgggtgcagcagcagcacgactactcgccgtcgccgcagcagcacgcgtggcacctgcgcagctccaggttcctcgtcccggcgcagcaggtcctgcaggagttctgcagcctccccgtggacagcagcagcgctgccgcctccagcaagcgcgccaaggccgcaa

SEQ ID NO: 85873 - DNA, 2704 bp, Zea Mays
ttcctccttttccacccctgccctcccccaacacaaagcgagattcttgcttgcttggcagagccatgtcaggaaagatttatctggtcggccgatcgagctcctctcctccgaagcactgaagctccagcggctgccctgcctgacagccactccgcacgacaaaattaaacgcgggcgatcaagatggcgcacgaccccagcctgggcttcgcggactacttctcggcggcggcggcggcgggcgccacggcgatggacgacgacgtcggggcgccggagctctatggcctgcatgccgacgacatggagttcctcggcatgcgtggcctggccgccatgccccccgccgcggcacaccaccagcaccaccaccatcacggccacagcaaggccggtgcgctcctcgacgacgacgacgcgggggtggggccagacgtcagcggctccgcggacgacgccaccatgcgcttcctgagcgagcagcagcagcagcagcaccaggcgccgctgtcgctgtcgctgtgccggccggacgtggcgacgacgttgcacgagcagcagcacctcgccggcggtggctcctcgtcccggtaccatcaggagcagcagccggcggcgtgggtgcagcagcagcacgactactcgccgtcgccgcagcagcacgcgtggcacctgcgcagctccaggttcctcgtcccggcgcagcaggtcctgcaggagttctgcagcctccccgtggacagcagcagcgctgccgcctccagcaagcgcgccaaggccgcaaataagccggcctcgcagcagcagcagcagcaagaagacggcggcggcgccgaggggtcgtcgtcgtcggcctcctgggcgccgtcgccgcagatccaggccatggacgcgctggagctgcagcggctcaaggacaagctctacatcatgctggaagaggtggaccggagataccggcggtactgcgagcagatgcgggcgctggcgggcgggttcgaggcggtggccggggagcgcgcggcggcggcgtacacggcgctggcgtcgcgcaccatctcgcggcacttccggagcctccgggacggcgtggtggcgcagctgcaggcggcgcgcagggcgctcggggagaaggacgtggcggtgcccgggatgacgcgcggggacacgcccaggctcagggtgctcgaccagtgcatccgccagcacaaggcgctcacccaggccgccggcatgatggagagccacccgtggcgcccgcagcgcggactccccgagcgcgccgtcaccatcctccgggcgtggctcttcgagcacttcctgcacccgtatccaagcgacgtcgacaagcatatcctggctcgccagacgggcctctcacggagccaggtgtccaactggttcatcaatgcgcgggtcaggctctggaagccaatggtggaggagatgtacgtggaggagatgaaggccgagggccaggacggcgggggccagcagcaggtaggcgtcgccgtcgccaacaaccctaaccctagcagcgccggccacgcctccgaggcggctgaggacgatgggcgcggggacagcggcggcggcgccgtcgtcgaccggaagccgacgcgggcgcagctcctgcacgacgccggctcgctcgcctcggtcgtcaacatcggcggcggatcgcgcgcgggattcggcatcatggaccacctcgacttcgacgcctacggcggccaccatgccggcgccgtgtccctcacgctgggcctgcagcagcacgactcccacgccgacggcggcgccggcggcgtcaacatcgcgttcggcgcgccgccgcccgcgcaccaccacgggtacctgttcgctccgacggcggcggcggcaggccatcagatgggcggcggcgtgcacccgggactacaccaccacgtccagttcagcggcgccggcgccggcatcgacggcgaggcggcgcacgggcaggagcactaccggggcctgcagggcggcggcgggttccacctcctgcgtgacctggccgggtgatcgatctgctccatccacggcccgtgcatccgcggtcggccgcgcgcgagctctagctgcgactccgagtgagctgagcgatggggacgtcgtgccggcgcctagctagctaccgggtgtccgcgccggattcatggcacgcactcgatcgcgcgtgcgctcatccggccacagcggcgctgtgtacgtacgcaccggatttgtttggcttgttgcttgcctggctcgtgccggtctccatcggtctcgatcgccgccggcggcggcttggccgggcccgggtctagctggctagctagctgccctagttatacataatatatgtatttgtagcgtgtacagatcgggtcgcgatcgagcagtttggacgcgcgcaggtgcagctagtactagtagtagctagcccgccggaactgcgtagttgatcaaacacgcattgcatgcaggttaattgcattgtttgtcaatttcttgaaggattcgacgacgtacggcacaatttataccaggcattattgacgattttcctggcagaatattcatcagtccatatgcccatgcatgtttgcgaattgtctatatgtatgtttgtgattggctggtgtgtaagcctctggttagtttgcattatctaaacttttcgtaaacaaaaaaa

SEQ ID NO: 85874 - DNA, 3501 bp, Zea Mays
cacgactaaacaaccaaggtcgcctttccagccgaatggaacaagtgagtgaccagtggacgcacaatggaatttggaatgacccaaccaggcaaccaggtcgccagtatccgtccacggtccactccagtccagggctgctgtccaccatccccgtgtcctcctcgaaccatccaagtccaccttccccgtgcccgactccacacaccacttaccactcggtcgtcctcggcacaggccagtcggccacacttgcttatccctccgtcgcctgccacaccttcggccggcacggctccactaccatcactcacaatggctgtcctcgtcctcctccttctcgcatccttcctcccgcccaccgccctggccgccttctccccacccttctccttcttcctcgcctgcggcgccggctccaccgtacgcgacagctcagcgcgcaactttacaccggacgacggttacctgaccaccaaaagcgtcccggcggtgacgaactccaacgccaacagcgccgcctccccgctctacgccgccgcgcgcgcgtccagctccggcgccttctcctacagtctctgttcagcttcaggacacgtacgacgtgctgtcctccttctcgccgccgagcgccggcgtcgtcaaggagttcttcgtcccggcaggcggctccggtgacttccgcgtcacgttcacgccggccgccggctcggccgcgttcgtcaacgccgtcgagctgttcccggctccagaggagctgctgtggaacgccagcgtgacgccggtgggcgcggcggtcctcgacatagccgcgtggccgcgggacgcgctggagacggtgtaccgcctcaacgtgggcggccccgaggtgagcgaggagagcgacacgctctggcggacgtggctccccgacgaccccttcctcttcagtcccccggggacctccacgctggagaacacgagcgccccgatcatctacgccacctacacccgcgaggtggcgcccgacgtcgtctacaggacgcagcgcgccgcggcgaacgtgtcagggatggcggtacccacgagtgtcaacgtcacgtggaccttcccggcggaaccggggtcgaactacctcgtccgtctccacttctgcgactatgaggtggtgagcgccgtcgacggagtcggcatcgtgttcaacgtcttcgtcgcgcaggccattggcacccaagacttcacgcccaaacaattcgagacgcagccgaacacggccttgtacagggactacgccgcctcggctcccatctcccggaacttcacggtcaccgtcggcatgtccgacaagagcagccctggcgaaggcggtttcctgaacgggctggagatcatgaagctgcggccttcgggttcgagcttggcggcggggtcacgcggtagcagcaggagagttctgatcatcgcgctctcggccgtgctcggcgcctcggttctcgcgtccgccgtgctctgcttgtgcttcgtcgcgcggaggaaaaggcggatggcgcgaccggcgccgctggagaaggagagcagcaagccgctgccgtggtcccaagagagctccgggtgggtgctggagccgtcgagccggtcgggcgagggcacgaccggcgcgatgcacagggtgagcacgcagctccacatcccgctggaggagctgaggtcggccaccgacaacttccacgagcgcaacctcatcggcgtgggcgggttcggcaacgtgtaccgcggagcgctccgcgacggcacgcgcgtggcggtgaagcgcgcgacgcgcgcgtccaagcagggcctgccggagttccagacggagatcgtggtgctgtcccgcatccggcaccggcacctggtgtccctgatcggctactgcaacgagcaggcggagatgatcctggtgtacgagtacatggagaaggggacgctgcggagccacctgtacgggggggcggacccgggcggcggcggcggcggcgaggcggcggtgctgtcgtggaagcagcggctggaggtgtgcatcggcgccgccagggggctgcactacctgcacacggggtactcggagaacatcatccaccgcgacgtcaagtccaccaacatcctcctgggcgacgggttcatcgcgaaggtggccgacttcgggctgtcgcgcatgggcccgtcgttcggggagacgcacgtgagcacggcggtgaagggcagcttcgggtacctggacccggagtacttcaagacgcagcagctgacggaccggtcggacgtgtactcgttcggggtggtgctgttcgaggtgctgtgcgcgcggccggtgatcgaccaggcgctggagcgcgagcagatcaacctggcggagtgggccgtggagtggcagaggcgcgggcagctggagcgcatcgccgacccgcggatcctcggggaggtgaacgagaactcgctgcgcaagttcgcggagacggcggagcggtgcctggcggactacgggcaggagcggccgtccatggccgacgtgctgtggaacctcgagtactgcctgcagctgcaggagacgcacgtgcggcgggacgcgttcgaggacagcggcgccgtgggcgcgcagttccccgaggacgtcgtcgtgccgcgctgggtgccgtcgtcgaccagcttcatgaccacggccgacccggacgactcggccgtcacgggcgtgggcgccgtcgacagcaaggtgttctcccagctcagcggcggcgagggccggtgaatgatgaccggctactggagtgtactaatcgcgcgctgttttgttatcgtttgacagtaccataggggggaaaacacgttattatcacatatacagcagcagctagctcctagagttgctggtgaatgtgctcaactctgcaaccaaaaacttttcgagccaactcttcgccgtccctacactcagacaggtctgcatcagggtcacgggataaatccgtgtccgtgtgcatgcggccaaagcaaattgaccagtggctgtctgattgattgaggcgcctgtacgactgctggcatggcaacaaagcttttgcggccattttcttcttcttctccggtggtcatagtcacgcgtatactagttgataggtggagcggacagcggagcaaggcgccggataaagctgggcggaagagtccgcggtggggatgttcagtggttgcaacgtgtgttcaacgtcagtcttatgctagtgttcgccggctgtcaccgagatccatcccaacatttccctgtgattgtgaggtcaaggttttcaggctttgagttcggtcatagactacttaaaagggaacgcacgtaactggctctaagcagtttctaatggttgccgtggagcccacggcgaagtgccgaaatctgaacgcggttcggagctgagagggaaggaagaaccgtgtgatgacgcccaagctccacatgtttggttcgaagagtcaattcattttaaatgagat

SEQ ID NO: 85875 - DNA, 3045 bp, Zea Mays
agtatccgtccacggtccactccagtccagggctgctgtccaccatccccgtgtcctcctcgaaccatccaagtccaccttccccgtgcccgactccacacaccacttaccactcggtcgtcctcggcacaggccagtcggccacacttgcttatccctccgtcgcctgccacaccttcggccggcacggctccactaccatcactcacaatggctgtcctcgtcctcctccttctcgcatccttcctcccgcccaccgccctggccgccttctccccacccttctccttcttcctcgcctgcggcgccggctccaccgtacgcgacagctcagcgcgcaactttacaccggacgacggttacctgaccaccaaaagcgtcccggcggtgacgaactccaacgccaacagcgccgcctccccgctctacgccgccgcgcgcgcgtccagctccggcgccttctcctacaggttctctttccccaacttcgccgggcaggccgcgttcctcgtcctccgcctccacttcttccctttcaccccggccccgccgtccgccttcagcatctcctctgcgcgcttcgcagtctctgttcagcttcaggacacgtacgacgtgctgtcctccttctcgccgccgagcgccggcgtcgtcaaggagttcttcgtcccggcaggcggctccggtgacttccgcgtcacgttcacgccggccgccggctcggccgcgttcgtcaacgccgtcgagctgttcccggctccagaggagctgctgtggaacgccagcgtgacgccggtgggcgcggcggtcctcgacatagccgcgtggccgcgggacgcgctggagacggtgtaccgcctcaacgtgggcggccccgaggtgagcgaggagagcgacacgctctggcggacgtggctccccgacgaccccttcctcttcagtcccccggggacctccacgctggagaacacgagcgccccgatcatctacgccacctacacccgcgaggtggcgcccgacgtcgtctacaggacgcagcgcgccgcggcgaacgtgtcagggatggcggtacccacgagtgtcaacgtcacgtggaccttcccggcggaaccggggtcgaactacctcgtccgtctccacttctgcgactatgaggtggtgagcgccgtcgacggagtcggcatcgtgttcaacgtcttcgtcgcgcaggccattggcacccaagacttcacgcccaaacaattcgagacgcagccgaacacggccttgtacagggactacgccgcctcggctcccatctcccggaacttcacggtcaccgtcggcatgtccgacaagagcagccctggcgaaggcggtttcctgaacgggctggagatcatgaagctgcggccttcgggttcgagcttggcggcggggtcacgcggtagcagcaggagagttctgatcatcgcgctctcggccgtgctcggcgcctcggttctcgcgtccgccgtgctctgcttgtgcttcgtcgcgcggaggaaaaggcggatggcgcgaccggcgccgctggagaaggagagcagcaagccgctgccgtggtcccaagagagctccgggtgggtgctggagccgtcgagccggtcgggcgagggcacgaccggcgcgatgcacagggtgagcacgcagctccacatcccgctggaggagctgaggtcggccaccgacaacttccacgagcgcaacctcatcggcgtgggcgggttcggcaacgtgtaccgcggagcgctccgcgacggcacgcgcgtggcggtgaagcgcgcgacgcgcgcgtccaagcagggcctgccggagttccagacggagatcgtggtgctgtcccgcatccggcaccggcacctggtgtccctgatcggctactgcaacgagcaggcggagatgatcctggtgtacgagtacatggagaaggggacgctgcggagccacctgtacgggggggcggacccgggcggcggcggcggcggcgaggcggcggtgctgtcgtggaagcagcggctggaggtgtgcatcggcgccgccagggggctgcactacctgcacacggggtactcggagaacatcatccaccgcgacgtcaagtccaccaacatcctcctgggcgacgggttcatcgcgaaggtggccgacttcgggctgtcgcgcatgggcccgtcgttcggggagacgcacgtgagcacggcggtgaagggcagcttcgggtacctggacccggagtacttcaagacgcagcagctgacggaccggtcggacgtgtactcgttcggggtggtgctgttcgaggtgctgtgcgcgcggccggtgatcgaccaggcgctggagcgcgagcagatcaacctggcggagtgggccgtggagtggcagaggcgcgggcagctggagcgcatcgccgacccgcggatcctcggggaggtgaacgagaactcgctgcgcaagttcgcggagacggcggagcggtgcctggcggactacgggcaggagcggccgtccatggccgacgtgctgtggaacctcgagtactgcctgcagctgcaggagacgcacgtgcggcgggacgcgttcgaggacagcggcgccgtgggcgcgcagttccccgaggacgtcgtcgtgccgcgctgggtgccgtcgtcgaccagcttcatgaccacggccgacccggacgactcggccgtcacgggcgtgggcgccgtcgacagcaaggtgttctcccagctcagcggcggcgagggccggtgaatgatgaccggctactggagtgtactaatcgcgcgctgttttgttatcgtttgacagtaccataggggggaaaacacgttattatcacatatacagcagcagctagctcctagagttgctggtgaatgtgctcaactctgcaaccaaaaacttttcgagccaactcttcgccgtccctacactcagacaggtctgcatcagggtcacgggataaatccgtgtccgtgtgcatgcggccaaagcaaattgaccagtggctgtctgattgat

SEQ ID NO: 85876 - DNA, 820 bp, Zea Mays
tgtattaaataatgcttgagctctcatgttctttttcttcacgtgggacattatacatagggaaaactaaatcacagtggggtggtaaagaatattttaagctttagagcattaaccggttatttgagcttgaggagtttacgcgcttcgctaaaacaagttcagtctgcttggacttagttcagaagggagccatgttagactgggtaggttagcacgataccggtttaatatggtctacataacttgtggcatatgattgtacttgagctaacagacattgatgttgttgagctgaagaagatgcaccaagaaaagcaactggacacacttgtcgacaagggcctgaggagcaaatatgaccacattgagctagaggagatgatgcaagtggcgctgctatgtacccagttcctccctggccacagtacgtcaataccaagatgttagaggtggtcaggatgctggaggccagcaatgagcttgcagagcggtgggtggcatcacaacacacagagtcacacaaattcaaggtgcccgagttttccttcagctgctgctctgacctcatggacgattcgtcactcctgttgcaagcagtgaagctttctggaccgagatgtaacatgaacgtgtacgtacactgcctaaatgtggcacacacactttctttttactactactgtcaggaccgagatgtaacatgaacgtgtacgtacactgcctaaatgtggcacacacactttctttttactactactgtcaggatgagcgtgtaggaatatttacctttttggaagcttttagagttgggtcaaaa

SEQ ID NO: 85877 - DNA, 1041 bp, Zea Mays
tatatttaaggataataagattctaaaatgaatactgagtgtctatttcacgtttggagcatttgaagtaaatgaatgaataaactcatttatatgtagataaataaaataaacctttcatcccatgctgagattttattttgctgcatgttcattttgtgaatcaaaaccagattgaatttgaatcggaatttcatctttgaaataagaaacaaaagggaaacagaaaatagaaaataaaaagggagaaaagagatgacgctatttcacttagcttcttgtttgcttggcccaggcgacccatctattattcatttctttttttccggccatccgactgggacatctcttgcgcatggtgacagacgatggtgtgctgtgtaggcccaatgtgtcagcatgttcctctacctctttcccgtaatgaacggagccatcaccaggaaggacctgctatcgccgcgttcgtcgtggtttgttgcaaaaaaaccagatcggccttgggtttgttggactgtgcacctcggaccctcatccactcccgtggatatatataggatcagcctaggcacctcctgatccaagaagagagccatggcggcaagcagagaaattggtgagagaaagagagcctcaccccatagcaaacccacgccgaagtcgccttggtccgccgtggtgctgtcgcgaattgggcgtcgcagccgcgccttgcgctgttagccgtggggaagatactcgccagtccgccgttcaccgaggccagacaatctgcgcaccgaccgccgcgaggacaggcttcaatacccgttcgtctagccctgggatttggttcttgtgctcggccagaccactgggatcgtgtggtgctgttgctttccctcgggcacctccgtggcggcgataattcctcgccggagtaccatccttgccgctgattcgccctgcgtcgtggctggccctgccctggtctccgcctctgtgaggatacgtgtcacctgaagatcatcctggtacctggaatctcaagtctcaggcaag

SEQ ID NO: 85878 - DNA, 1997 bp, Zea Mays
gattcctccactccggccttgcccgacgatctccagctgtccttcaatcaaattatcaacccaacgccatttcggcgctcccgcttcccacaggagtcacagctcaacaaatccctacccaaatccacctccccgccccccaccgccatggctcccccaccaacctcgcgctgcctcgccctcgctctcatcctcatcggcgccctctgcgccgccgccgccgccgcgcggttcgccccggcggacaaccacctccttgcgtgcggcgcggcggcgcccgccgtcctccccgacggccgccgcttcgtgccggactctggctgcgcatccacccgcctccggtcatcctccccgtccctctcctccgcggcgccgcccggctccccgccgccgccgtcctcgctcctcgcctccgctcgggtcttctcctgccgcgcgtcctacgacctcgatgtccgccgccgcgggcaccacatcctccgcctccatttctaccccttcgtccccgccctcgccgcggcccgcttccacgtcggcgccggggggctcctcctcctccacaacttcacggcctcgtcccccgtcgtcaaggagttcatcctccccgtggactccgacgtcctcgtgctcaccttcgtccccgactccggctccactgccttcgtcaacgccatcgagctcgtctctgcgcccgaagagctcgttggcgacatcggcaccctagtcacgtccggcggcgccgctcagatacacgagctgtcgtctcaggtgtttgagactctctacaggatcaacgtcgcggggcgcaaggtcacgccattcaacgacacactgtggcggacatgggttaacgatgagaaattcctcatcgacaccgactcctccaactacatggtgtggtcgtccagtggccggattgcttatcccaagggtagcaagcagatgacaagagaagtggctcctgacaatgtctacaactctgcaagatccgtgaggccaggggtgaatgtgacttggggtttccctgtgcctgctagcagccggtaccttgtgcgtatgcacttctgtgacattgctagcaaggctctgtatgagctctacttcaatatctacgtcaatggtgatcttgcagtcaaggatttcgatctctccagtgcaactggattcttggcctatccttattacattgactttatcgtcgatgtgaaggatgaggggatactgaaattggcgattggtggcttaaagaagagtcgatctgatgaagtaagtggtatccttaatgcactggagataatgaggatgaacaagaccagtggaggtatggatggagacttcccaattgatctacacatggaatatgtggtgagtaaggggattggagaatttgcccgctccctgctctgtggtttcatctttgttgggttgtttgtggctttggtcacgctgatggtgaggttgaggaccgagttgaggaataacggcacagcttggtcctggagacagatgaactccgatgaagggaaactggccagaacatatcagcttgtgcccagtaagacggactattgaatattgcaggctgggcatctttgaggagtgacaacctgcggctgttgtgtgcatctaatcacatcatactttttattaagttgtaagtactgtagttttatcacctctctaaaagtattgtagttttgtatcatcactcctttcatgcttggactttgcattctccatgctttgtcaatggtcaatggaggacatgctcatgatgctgtaaaagtactctaccctagatgtggctgtattgctattgcctcatttattcagtttgacttctgaaacatggattcacagctgaattgcatttgaatataattagttgtagtggagacatttgattataaaaaaataagtcaaatagctgcagaagccatcatgccattgtatttgtaacatgatttggctgttgctgacttactgttttcttctcc

SEQ ID NO: 85879 - DNA, 1729 bp, Zea Mays
gcccgacgatctccagctgtccttcaatcaaattatcaacccaacgccatttcggcgctcccgcttcccacaggagtcacagctcaacaaatccctacccaaatccacctccccgccccccaccgccatggctcccccaccaacctcgcgctgcctcgccctcgctctcatcctcatcggcgcccgccgtcctccccgacggccgccgcttcgtgccggactctggctgcgcatccacccgcctccggtcatcctccccgtccctctcctccgcggcgccgcccggctccccgccgccgccgtcctcgctcctcgcctccgctcgggtcttctcctgccgcgcgtcctacgacctcgatgtccgccgccgcgggcaccacatcctccgcctccatttctaccccttcgtccccgccctcgccgcggcccgcttccacgtcggcgccggggggctcctcctcctccacaacttcacggcctcgtcccccgtcgtcaaggagttcatcctccccgtggactccgacgtcctcgtgctcaccttcgtccccgactccggctccactgccttcgtcaacgccatcgagctcgtctctgcgcccgaagagctcgttggcgacatcggcaccctagtcacgtccggcggcgccgctcagatacacgagctgtcgtctcaggtgtttgagactctctacaggatcaacgtcgcggggcgcaaggtcacgccattcaacgacacactgtggcggacatgggttaacgatgagaaattcctcatcgacaccgactcctccaactacatggtgtggtcgtccagtggccggattgcttatcccaagggtagcaagcagatgacaagagaagtggctcctgacaatgtctacaactctgcaagatccgtgaggccaggggtgaatgtgacttggggtttccctgtgcctgctagcagccggtaccttgtgcgtatgcacttctgtgacattgctagcaaggctctgtatgagctctacttcaatatctacgtcaatggtgatcttgcagtcaaggatttcgatctctccagtgcaactggattcttggcctatccttattacattgactttatcgtcgatgtgaaggatgaggggatactgaaattggcgattggtggcttaaagaagagtcgatctgatgaagtaagtggtatccttaatgcactggagataatgaggatgaacaagaccagtggaggtatggatggagacttcccaattgatctacacatggaatatgtggtgagtaaggggattggagaatttgcccgctccctgctctgtggtttcatctttgttgggttgtttgtggctttggtcacgctgatggtgaggttgaggaccgagttgaggaataacggcacagcttggtcctggagacagatgaactccgatgaagggaaactggccagaacatatcagcttgtgcccagtaagacggactattgaatattgcaggctgggcatctttgaggagtgacaacctgcggctgttgtgtgcatctaatcacatcatactttttattaagttgtaagtactgtagttttatcacctctctaaaagtattgtagttttgtatcatcactcctttcatgcttggactttgcattctccatgctttgtcaatggtcaatggaggacatgctcatgatgctgtaaaagtactctaccctagatgtggctgtattgctattgcctc

SEQ ID NO: 85880 - DNA, 1566 bp, Zea Mays
gcccgacgatctccagctgtccttcaatcaaattatcaacccaacgccatttcggcgctcccgcttcccacaggagtcacagctcaacaaatccctacccaaatccacctccccgccccccaccgccatggctcccccaccaacctcgcgctgcctcgccctcgctctcatcctcatcggcgcccgccgtcctccccgacggccgccgcttcgtgccggactctggctgcgcatccacccgcctccggtcatcctccccgtccctctcctccgcggcgccgcccggctccccgccgccgccgtcctcgctcctcgcctccgctcgggtcttctcctgccgcgcgtcctacgacctcgatgtccgccgccgcgggcaccacatcctccgcctccatttctaccccttcgtccccgccctcgccgcggcccgcttccacgtcggcgccggggggctcctcctcctccacaacttcacgagctgtcgtctcaggtgtttgagactctctacaggatcaacgtcgcggggcgcaaggtcacgccattcaacgacacactgtggcggacatgggttaacgatgagaaattcctcatcgacaccgactcctccaactacatggtgtggtcgtccagtggccggattgcttatcccaagggtagcaagcagatgacaagagaagtggctcctgacaatgtctacaactctgcaagatccgtgaggccaggggtgaatgtgacttggggtttccctgtgcctgctagcagccggtaccttgtgcgtatgcacttctgtgacattgctagcaaggctctgtatgagctctacttcaatatctacgtcaatggtgatcttgcagtcaaggatttcgatctctccagtgcaactggattcttggcctatccttattacattgactttatcgtcgatgtgaaggatgaggggatactgaaattggcgattggtggcttaaagaagagtcgatctgatgaagtaagtggtatccttaatgcactggagataatgaggatgaacaagaccagtggaggtatggatggagacttcccaattgatctacacatggaatatgtggtgagtaaggggattggagaatttgcccgctccctgctctgtggtttcatctttgttgggttgtttgtggctttggtcacgctgatggtgaggttgaggaccgagttgaggaataacggcacagcttggtcctggagacagatgaactccgatgaagggaaactggccagaacatatcagcttgtgcccagtaagacggactattgaatattgcaggctgggcatctttgaggagtgacaacctgcggctgttgtgtgcatctaatcacatcatactttttattaagttgtaagtactgtagttttatcacctctctaaaagtattgtagttttgtatcatcactcctttcatgcttggactttgcattctccatgctttgtcaatggtcaatggaggacatgctcatgatgctgtaaaagtactctaccctagatgtggctgtattgctattgcctcatttattcagtttgacttctg

SEQ ID NO: 85881 - DNA, 750 bp, Zea Mays
cgtgcacgcccctcctcagcgctgccactgccaccgcgccgtctcccgtcccccgtccgcgcgcgcgcgcgcacgcacgccggccaggcccaggcccaggccctcatggaggtcggtccgacgcagcagcgcctcggcgacagcttctcccgcgggtggctggcgaagcgcggcgcgcgggcgccgtcactcgagcacctcgtcgccgacgccgacctcggccattccttcggcagctccaggtcgtcgttcatcgacatggaccccgccgcgctcttctccatgcggtggacggccacggccgcgccgccgccggagagcgacttcgagttcgggcttattattcccggtggcgtgggcgggggcagtgaccccccgtccccggcgctggtcagcgcgagccgccgggtcatccgcgacggccgcctcgtccccggcgacccgctgttctgctcggcccgcagcgcgccggcctccccgtccccgagcccgtgctgcggcgggagggccgccgccgccgggaggcgctcgtcgtggtggaagatgccgctgcagtacctccggttcctcctgccgctgtaccgcaaggtgagggccctgcggcgtctcccggcgccgaggcggcggccccgcgtggcgccggccagcccggcgcgcgcgtccgcgtccagcctcgactggtgccacggcaatgccgacaccgccgtccgcgacgccatcctctactgcaaaaagtgcagcgtacgtcca

SEQ ID NO: 85882 - DNA, 953 bp, Zea Mays
atggcagtaacggggcaaactcgtaactctctcccgcgggtctcggcctcctctcctcggctcgctataagcaggctccaccgcttccgcaatggccacctaattcgctcggcgtcgggggagaagagaagcgcgcgcgatggcaccgggaagatctcttcgccctgtaataattccctcgcccccgcgctgcatcttcgatgacggaccaaaatccgggacgatgttttggtggtcagtctcgtcagtcactgatcaagcggcattcgtacgtgttggttgtttttgcaggcggggacggcggcggttctgtgggcggcgtcgctgctgctgctggcgacgtcgtgcgcgcgcgcaggtggcgcgtacgcggggccggggtgccggaagcacgtggcgagggtcacggagtacggcgcggtcggggacgggaggacgctcaacacggcggcgttcgccagggctgtggcggacctggcgcggcgcgcgcccgacggcggcgctgcgctggtggtgccgccggggaagtggctcacggggcccttcaacctcaccagctgcttcacgctctacctcgacgagggcgccgagatcctcgcgtcccaggacatgaagcattggcccctcatagctcccctgccgtcctacgggagaggaagggacgagcctggcccaaggtacagcaatttcatcggaggatccaatctcactgacgtcatcatcacgggcaaaaatggaacgatcaacgggcaggggcaggtctggtgggacaagttccacgccaaggagctcaagttcacccgcggccacctcctcgagctcctctactctgacaacatcatcatctccaatgtcaccttcgtcgacgcgccgtactggaacctccaccctacctattgcacgtatggatctcactctcagctctgaaagcctaaagtcactgatcatctgtt

SEQ ID NO: 85883 - DNA, 2097 bp, Zea Mays
cagtaacggggcaaactcgtaactctctcccgcgggtctcggcctcctctcctcggctcgctataagcaggctccaccgcttccgcaatggccacctaattcgctcggcgtcgggggagaagagaagcgcgcgcgatggcaccgggaagatctcttcgccctgcggggacggcggcggttctgtgggcggcgtcgctgctgctgctggcgacgtcgtgcgcgcgcgcaggtggcgcgtacgcggggccggggtgccggaagcacgtggcgagggtcacggagtacggcgcggtcggggacgggaggacgctcaacacggcggcgttcgccagggctgtggcggacctggcgcggcgcgcgcccgacggcggcgctgcgctggtggtgccgccggggaagtggctcacggggcccttcaacctcaccagctgcttcacgctctacctcgacgagggcgccgagatcctcgcgtcccaggacatgaagcattggcccctcatagctcccctgccgtcctacgggagaggaagggacgagcctggcccaaggtacagcaatttcatcggaggatccaatctcactgacgtcatcatcacgggtacagcaaaaatggaacgatcaacgggcaggggcaggtctggtgggacaagttccacgccaaggagctcaagttcacccgcggccacctcctcgagctcctctactctgacaacatcatcatctccaatgtcaccttcgtcgacgcgccgtactggaacctccaccctacctattgcaccaatgtgaccatcagtggcgtcaccattctcgcgccggtgaattcgcctaataccgatggaattgacccggattcttcctcgcgtgtcaagatcgaggactgctacatcgtctccggcgacgactgcgtggccgtgaagagcgggtgggacgagtacggcatcaggttcaacatgccgagccagcacatcgtcatccggaggctgacctgcgtctcccccacgagcgccatgatcgcgctgggcagcgagatgtccggcggcatccgcgacgtgcgcgccgaggacagcgtggccatcaacacggagtcggccgtcagggtcaagtccggcgccgggaggggcggcttcgtcagggacatcttcgtgcgcggcctcagcctccacaccatgaagtgggtgttctggatgaccggcaactacgggcagcaccccgacaacacgtccgaccccaacgccatgcccgaggtcaccggcatcaactacagcgacgtgttcgccgagaacgtgaccatggccggcaggatggagggcatccctaaggacccctacaccgggatctgcatatccaacgtgaccgcccgcctcgcgccggacgccaaggagctgcagtggaactgcaccaacgtcaagggggtcacctcccacgtctcgcccaagccgtgcccggagctcgccgcggagggcaagccgtgcgccttcccggaggaagagctcgtcatcggcccacccgagctgccgaagtgtagctattgaggccgattgccaaaagagatcattgatcatataggctcttcggtgatagtctagacaagcagtatgagaaatgcagctgaaatacgtttgcattacagtgtccgtctcacattactgcttcctccgattacaatgtctggcagtggtataacttgtgactacaaattatgcatcaagaagaaatcagcaaaacggacatgatcattgcaaacctttttcataggtgcacaagttacataattgacagacaacaacagcatcgaatttgtaagccaaattctgcaaaaagatcggaattaaaacaagctgaacagagcgtgtgcaaccatgggctggctggctggctggttcctctcctcaccgtcgtcctcccttccccttgcccttgctcaggaagtggtggcgcttcaacctcttcttccggatcaccacgtcggtcttgatgttctccgagaatggcatgccgaggaggaccagcagcctgaacgcctcgttgtccgtcttggcgctggtgacgatggacacgtccatgccgttcttcttcccgcccacctcgtacgggatc

SEQ ID NO: 85884 - DNA, 2219 bp, Zea Mays
cagtaacggggcaaactcgtaactctctcccgcgggtctcggcctcctctcctcggctcgctataagcaggctccaccgcttccgcaatggccacctaattcgctcggcgtcgggggagaagagaagcgcgcgcgatggcaccgggaagatctcttcgccctgcggggacggcggcggttctgtgggcggcgtcgctgctgctgctggcgacgtcgtgcgcgcgcgcaggtggcgcgtacgcggggccggggtgccggaagcacgtggcgagggtcacggagtacggcgcggtcggggacgggaggacgctcaacacggcggcgttcgccagggctgtggcggacctggcgcggcgcgcgcccgacggcggcgctgcgctggtggtgccgccggggaagtggctcacggggcccttcaacctcaccagctgcttcacgctctacctcgacgagggcgccgagatcctcgcgtcccaggacatgaagcattggcccctcatagctcccctgccgtcctacgggagaggaagggacgagcctggcccaaggtacagcaatttcatcggaggatccaatctcactgacgtcatcatcacgggcaaaaatggaacgatcaacgggcaggggcaggtctggtgggacaagttccacgccaaggagctcaagttcacccgcggccacctcctcgagctcctctactctgacaacatcatcatctccaatgtcaccttcgtcgacgcgccgtactggaacctccaccctacctattgcaccaatgtgaccatcagtggcgtcaccattctcgcgccggtgaattcgcctaataccgatggaattgacccggattcttcctcgcgtgtcaagatcgaggactgctacatcgtctccggcgacgactgcgtggccgtgaagagcgggtgggacgagtacggcatcaggttcaacatgccgagccagcacatcgtcatccggaggctgacctgcgtctcccccacgagcgccatgatcgcgctgggcagcgagatgtccggcggcatccgcgacgtgcgcgccgaggacagcgtggccatcaacacggagtcggccgtcagggtcaagtccggcgccgggaggggcggcttcgtcagggacatcttcgtgcgcggcctcagcctccacaccatgaagtgggtgttctggatgaccggcaactacgggcagcaccccgacaacacgtccgaccccaacgccatgcccgaggtcaccggcatcaactacagcgacgtgttcgccgagaacgtgaccatggccggcaggatggagggcatccctaaggacccctacaccgggatctgcatatccaacgtgaccgcccgcctcgcgccggacgccaaggagctgcagtggaactgcaccaacgtcaagggggtcacctcccacgtctcgcccaagccgtgcccggagctcgccgcggagggcaagccgtgcgccttcccggaggaagagctcgtcatcggcccacccgagctgccgaagtgtagctattgaggccgattgccaaaagagatcattgatcatataggctcttcggtgatagtctagacaagcagtatgagaaatgcagctgaaatacgtttgcattacagtgtccgtctcacattactgcttcctccgattacaatgtctggcagtggtataacttgtgactacaaattatgcatcaagaagaaatcagcaaaacggacatgatcattgcaaacctttttcataggtgcacaagttacataattgacagacaacaacagcatcgaatttgtaagccaaattctgcaaaaagatcggaattaaaacaagctgaacagagcgtgtgcaaccatgggctggctggctggctggttcctctcctcaccgtcgtcctcccttccccttgcccttgctcaggaagtggtggcgcttcaacctcttcttccggatcaccacgtcggtcttgatgttctccgagaatggcatgccgaggaggaccagcagcctgaacgcctcgttgtccgtcttggcgctggtgacgatggacacgtccatgccgttcttcttcccgcccacctcgtacgggatctccgggaacacgccctggtcacggaggccaaggctgtagttgccgtgcccgtcgaagctgttggggttgacacccaggaagtccatggtcctagggagcccaaggttgatgagcctatccaggaagt

SEQ ID NO: 85885 - DNA, 877 bp, Zea Mays
gtctcggcctcctctcctcggctcgctataagcaggctccaccgcttccgcaatggccacctaattcgctcggcgtcgggggagaagagaagcgcgcgcgatggcaccgggaagatctcttcgccctgcggggacggcggcggttctgtgggcggcgtcgctgctgctgctggcgacgtcgtgcgcgcgcgcaggtggcgcgtacgcggggccggggtgccggaagcacgtggcgagggtcacggagtacggcgcggtcggggacgggaggacgctcaacacggcggcgttcgccagggctgtggcggacctggcgcggcgcgcgcccgacggcggcgctgcgctggtggtgccgccggggaagtggctcacggggcccttcaacctcaccagctgcttcacgctctacctcgacgagggcgccgagatcctcgcgtcccaggacatgaagcattggcccctcatagctcccctgccgtcctacgggagaggaagggacgagcctggcccaaggtacagcaatttcatcggaggatccaatctcactgacgtcatcatcacgggcaaaaatggaacgatcaacgggcaggggcaggtctggtgggacaagttccacgccaaggagctcaagttcacccgcggccacctcctcgagctcctctactctgacaacatcatcatctccaatgtcaccttcgtcgacgcgccgtactggaacctccaccctacctattgcacgtatggatctcactctcagctctgaaagcctaaagtcactgatcatctgttcctgtggtggtttgtgatcattgtttcagtcagcggtgaatctcacgtgtcatgccactgttttgcgcagcaatgtgaccatcagtgg

SEQ ID NO: 85886 - DNA, 2068 bp, Zea Mays
gtctcggcctcctctcctcggctcgctataagcaggctccaccgcttccgcaatggccacctaattcgctcggcgtcgggggagaagagaagcgcgcgcgatggcaccgggaagatctcttcgccctgcggggacggcggcggttctgtgggcggcgtcgctgctgctgctggcgacgtcgtgcgcgcgcgcaggtggcgcgtacgcggggccggggtgccggaagcacgtggcgagggtcacggagtacggcgcggtcggggacgggaggacgctcaacacggcggcgttcgccagggctgtggcggacctggcgcggcgcgcgcccgacggcggcgctgcgctggtggtgccgccggggaagtggctcacggggcccttcaacctcaccagctgcttcacgctctacctcgacgagggcgccgagatcctcgcgtcccaggacatgaagcattggcccctcatagctcccctgccgtcctacgggagaggaagggacgagcctggcccaaggtacagcaatttcatcggaggatccaatctcactgacgtcatcatcacgggcaaaaatggaacgatcaacgggcaggggcaggtctggtgggacaagttccacgccaaggagctcaagttcacccgcggccacctcctcgagctcctctactctgacaacatcatcatctccaatgtcaccttcgtcgacgcgcctcagcggtgaatctcacgtgtcatgccactgttttgcgcagcaatgtgaccatcagtggcgtcaccattctcgcgccggtgaattcgcctaataccgatggaattgacccggattcttcctcgcgtgtcaagatcgaggactgctacatcgtctccggcgacgactgcgtggccgtgaagagcgggtgggacgagtacggcatcaggttcaacatgccgagccagcacatcgtcatccggaggctgacctgcgtctcccccacgagcgccatgatcgcgctgggcagcgagatgtccggcggcatccgcgacgtgcgcgccgaggacagcgtggccatcaacacggagtcggccgtcagggtcaagtccggcgccgggaggggcggcttcgtcagggacatcttcgtgcgcggcctcagcctccacaccatgaagtgggtgttctggatgaccggcaactacgggcagcaccccgacaacacgtccgaccccaacgccatgcccgaggtcaccggcatcaactacagcgacgtgttcgccgagaacgtgaccatggccggcaggatggagggcatccctaaggacccctacaccgggatctgcatatccaacgtgaccgcccgcctcgcgccggacgccaaggagctgcagtggaactgcaccaacgtcaagggggtcacctcccacgtctcgcccaagccgtgcccggagctcgccgcggagggcaagccgtgcgccttcccggaggaagagctcgtcatcggcccacccgagctgccgaagtgtagctattgaggccgattgccaaaagagatcattgatcatataggctcttcggtgatagtctagacaagcagtatgagaaatgcagctgaaatacgtttgcattacagtgtccgtctcacattactgcttcctccgattacaatgtctggcagtggtataacttgtgactacaaattatgcatcaagaagaaatcagcaaaacggacatgatcattgcaaacctttttcataggtgcacaagttacataattgacagacaacaacagcatcgaatttgtaagccaaattctgcaaaaagatcggaattaaaacaagctgaacagagcgtgtgcaaccatgggctggctggctggctggttcctctcctcaccgtcgtcctcccttccccttgcccttgctcaggaagtggtggcgcttcaacctcttcttccggatcaccacgtcggtcttgatgttctccgagaatggcatgccgaggaggaccagcagcctgaacgcctcgttgtccgtcttggcgctggtgacgatggacacgtccatgccgttcttcttcccgcccacctcgtacgggatc

SEQ ID NO: 85887 - DNA, 1649 bp, Zea Mays
tccacggcctcaaaacggcctacccgcatagctagggtttcttctctgccccctccggcaactcaggagagagcgcggctcctacccggcggcggtgaagccgcgacgatccaacggagcagaggcgccatggctgctcccgaagcgcccgcatgctacgtcgggatcgcgcggcagtccgccgccttccgccttatgaaacaaatgggatgggaagaaggtgaaggccttggcaaagacaagcaaggcataaagggtcatgttagggtgaaaaacaagcaggacacactaggtgttggtgtagatagccctcataacaaatgggtatacgataccacccaatttgacaacatattgaagaaactgaaagtgcaatcagctaatcctgttcaagaagaggttgcagctgtagaaagtgattcacctgacatcacacccaagaaagacaaatcagcaaaacatgaagttactaaagttactcgacctcaaggaagatacaagaaaagagagagggggaaaagtgtgaactcttattcagcaacagatcttcaaggcatactcgtacgcaaaaatgaagataattccaaagtggatcagaaacttgaaccgacatgcttggatgaacctgatcccatcatctgtttggatgcagtatcccaagctgatgatgtgaactggtgggggcacaagtttggatttttatcaggagggtttctaggagcaaaatcccgtaaaaataaatcttcacaaaaagatcttgctaatgtccgccagacatttgcagaggaagatcaagaaaatttgtacaatcttgttcaggataaagctacttctggaaagcagggtcttggcatcaaaggcctgccaatgaaagttgctggccaacgttggaagggaaacaaaacttcgtttgttgatagtgatgatgataattcagcccagtccgatgagtattcagaaatcgaagagaatggcgatgaggaagaacatatcagtgcttctgaatcaatagacacagataagaatgcagacaaagaattgcttgtggatgctagacccaaaaccaaggtcaagaaactttgcaaaagaatacttcgtcaggccccatctcagtcaatgaaattgaaggatcttaaggtcgccgttgaggaacactcaaatgttgtattttccagcttctctggtagacgcgaagccctgttgtttttgaagaaaaagcttcaaggaagcaggaaattcaatgtggacggcaagaaagttcagctcgtgtcatgaaagccaagcaaataggaattctttacgttgttggtgtccagcactcgtatttgttgttgctcgaggttccaaacagatgtaggagcacattgagctatgtagtactagtactggtatagataaatagtcaaaacctatcgcagatgcggaggtaaaattttgcaaattttcgtgaggggcagagttcctaatttgtgtgcggcgcattcgatgtaaccgtggcttatttgttttgcatgagatgtgcaaactgcaatgctatgtattgctcgtaaattatgtctatggattcacataattggagtattaaggcatgtaaaatctaattaaacgaggggtctttagggggctaattataaaaaatcaagaggcaa

SEQ ID NO: 85888 - DNA, 2282 bp, Zea Mays
tagggtcgcaagccgagccaaaagcagctgcactgcagaccgaccaccacgcgacgctcctgctggctgctgccgcggaacccgggacaagcgacctcctccacctccccagctagctatagcttcctgcttgcagctgcaggtgccagccgagccgcctaccgggtacagccgcacaggcaggcggcggcatgcgctccagcctccagcagtgagggagggagctgtcccgctcccgccccttctacttctacccctccccccccgcgggccgagagggagtccgcccgccggcgccgcgcgactcaccgatgcccagccatgaggcctgctgcggcaccatgttctgggtgtacctcatgtcctgcgtcggcctcgtcgtcttcgccggcctcatgtcgggcctcaccctcggcctcatgtccctcagcctcgtcgacctcgaggtgctcgccaaggccggcacgcccaaggacaagctcaacgccgccaggatcctccccgtcatgaagaaccagcacctgctcctctgcacgctcctcatcggaaactcgctcgccatggaggcgctgcccatattcctcgacacgctcgtgccgccctacgtcgccatcctcatctccgtcacgctcatcctcgcgttcggggagatcatgccgcaagccatctgcacgcgctacgggcttagcgtgggggccaaggcggcgcccgtcgtccgcctactgctcatcctcttcttccccgtcgcctacccgatcagtaagttgttggaccgcctactgggaaagggacattttgcactaatgagaagagctgagctgaagacgttagttgatatgcacggcaatgaggctggaaaaggtggagagctcactcgtgatgaaacaactatcattacaggagctttggagctgactcaaaagattgcaaaagatgccatgactcctatatctgaaaccttctcacttgacataaatgctaagctggacttacacacaatgggtatgataatgactagagggcatagtcgtgttcctatatactctgggattccaagcaatattattggccttatattggtaaaaaacttgattacttgccgagctgaggatgaagtgcccattcgtaatgttactatcagaaaaattccaagggtggctgatgatcttcctctctatgacattctaaatgagttccagaaaggtcacagccacatggctgtggtagttaaacgaacaaaggaagcaggagtatccactgaaaaccaaaagagcacaactgcagattataaaataaaccccaaagatgctcatgctgatggctcatccccttcttatgctaacaacactgctggaagtcgtagatttaacatagagaagcatggagacgggcgctcatgtaataagaaatcagaaaagaagcgggaaaatattcttgattttaacacagatccacttccaagctattcaatggatgaggcggcagtcggaataatcacgatggaagatgtaatggaagaacttctacaggaagaaatctatgatgaaacagatgagtatgttgatgtacataacaagatcaggataaacatgttacctccaggcaaagcactgtcacctaccatatctcctggtggtggacccttacctcaggggctccgaaagactcctatgacatctccgttctcaccatactaccattgtaattcagtgttacgttccccagcttccaaccattgtcagtcacctgggactctaccgacaatactttcccctggaagatcacctactgcacaaacacctgggcaaagttcaccaaatggaagtcaggtttcaataaattccaacggtcaacataaaaaggacggtgagaactaacataccagaagattgttttccagacggtctcgtctcaagacgggatgcatgattaaaaatcatgaaattgctagcgtaggattaagctgcgaatataagtagcacagctctcttgaatggttagtggcccatgtatttattgattgtttgcttgtacatatatgcttcggcatccggaccttagtatggcctaatcctcactatgtatcatacataggaagtgaatggaagccaatataattttgctctagacaattttagcttgctttctggacccttatgtaagccttcaagatagtgaaaatgttaagtgagtagctcacgagctaaataatggctagatattctcggtaatgaccaaaatcgatcaagtacaacaccaaaagcaaataaaataaaaaacaa

SEQ ID NO: 85889 - DNA, 1018 bp, Zea Mays
ccttttgctgatcacatgtatttccaggaaatgactgatttgtttttggctttcaggctcatccccttcttatgctaacaacactgctggaagtcgtagatttaacatagagaagcatggagacgggcgctcatgtaataagaaatcagaaaagaagcgggaaaatattcttgattttaacacagatccacttccaagctattcaatggatgaggcggcagtcggaataatcacgatggaagatgtaatggaagaacttctacaggaagaaatctatgatgaaacagatgagtatgttgatgtacataacaagatcaggataaacatgttacctccaggcaaagcactgtcacctaccatatctcctggtggtggacccttacctcaggggctccgaaagactcctatgacatctccgttctcaccatactaccattgtaattcagtgttacgttccccagcttccaaccattgtcagtcacctgggactctaccgacaatactttcccctggaagatcacctactgcacaaacacctgggcaaagttcaccaaatggaagtcaggtttcaataaattccaacggtcaacataaaaaggacggtgagaactaacataccagaagattgttttccagacggtctcgtctcaagacgggatgcatgattaaaaatcatgaaattgctagcgtaggattaagctgcgaatataagtagcacagctctcttgaatggttagtggcccatgtatttattgattgtttgcttgtacatatatgcttcggcatccggaccttagtatggcctaatcctcactatgtatcatacataggaagtgaatggaagccaatataattttgctctagacaattttagcttgctttctggacccttatgtaagccttcaagatagtgaaaatgttaagtgagtagctcacgagctaaataatggctagatattctcggtaatgaccaaaatcgatcaagtacaacaccaaaagcaaataaaataaaaaacaa

SEQ ID NO: 85890 - DNA, 1027 bp, Zea Mays
attaaaacatcagttgtttgcaacattttagccatcataaggagtgcttgtacctgggtcattatggccctttattttccctctactttaatatatgggtgcgcagtcctcctgcgctctttcgaaaaaaaaaacattttagccatcataagtactagtattcaattaggagagaaactaggggggaaaatcagttgcacttgaattgtggtaatttgtttgtcttctcaagtttggcttctctcagatattgtaaactgacacggctctgttcgcaggaagaaatctatgatgaaacagatgagtatgttgatgtacataacaagatcaggataaacatgttacctccaggcaaagcactgtcacctaccatatctcctggtggtggacccttacctcaggggctccgaaagactcctatgacatctccgttctcaccatactaccattgtaattcagtgttacgttccccagcttccaaccattgtcagtcacctgggactctaccgacaatactttcccctggaagatcacctactgcacaaacacctgggcaaagttcaccaaatggaagtcaggtttcaataaattccaacggtcaacataaaaaggacggtgagaactaacataccagaagattgttttccagacggtctcgtctcaagacgggatgcatgattaaaaatcatgaaattgctagcgtaggattaagctgcgaatataagtagcacagctctcttgaatggttagtggcccatgtatttattgattgtttgcttgtacatatatgcttcggcatccggaccttagtatggcctaatcctcactatgtatcatacataggaagtgaatggaagccaatataattttgctctagacaattttagcttgctttctggacccttatgtaagccttcaagatagtgaaaatgttaagtgagtagctcacgagctaaataatggctagatattctcggtaatgaccaaaatcgatcaagtacaacaccaaaagcaaataaaataaaaa

SEQ ID NO: 85891 - DNA, 1122 bp, Zea Mays
ggtgcagagaaattctggtgaccgctcgaaagagtaacgaccaccaccaacgtactactgcaacggccaccccaagtctttgcagggtgcagctcactgaacgacgactgcagctgcggcggatccgcgtttgcccatcagcctgtcctgtcactcgctcacccatcttctagactctgaccgactcctcacagagttggagttctagacttgtatgcttgcgttgcgacccaacggaaggcacgcgcacaacgcctgcctttcttctagattccgtcggtttcgtgggccgaagttccgcgcctctggacgggggcctggcgtgtatcgtggtgcgttgcctcccgcgccaccactactccgtctccaagtcgcgtcgtcgcactcgaatccatccatccatcgatcgccttcctctctttttatatcgcacccccccgcttccgctcgctcgatcgtcggagtaggcgggcggcatgctgcaggccagctcggagaggccggcgggcctgctgtgggtgcccgggacgagcccgtggccgacgatggacgcggggccgtcggcgagggcgcaggagatcgcgcggcggcgggaggagatgctggggatgctgcgcgacctcccggagtccgagtacgagctctcgctcaccgacctcgtcgagaaggccggggccgaagccgaagccgaagccgaagccgcgcccgcgaccgcccccaccaaggcagaggacgggaaggacccgggcgccgcgcggtcggcggcagctgcggggaggcacgagcggagggcgtcggcgcggcagcggggcagcggcgggagcagcttccgcagcagcagcgacggcgtcctgctcaacttctacatgccgcgctcgctcacccgcagcttcaccgcgccgcgacccgcccggacgccgtcgttcgcctccggctgccggagccccagcgtcgcatccgactgcaacaagaggtaaaccaaatcatcgatcatggaacgactgcaattttcgttgtttcttcctattatgccatttgttgctccgtaggcaaattttcgaaacccactaaataaataatggtaaaatagcaaatttgtcgtcgatcggattcgtatccaag

SEQ ID NO: 85892 - DNA, 1087 bp, Zea Mays
gcctctggacgggggcctggcgtgtatcgtggtgcgttgcctcccgcgccaccactactccgtctccaagtcgcgtcgtcgcactcgaatccatccatccatcgatcgccttcctctctttttatatcgcacccccccgcttccgctcgctcgatcgtcggagtaggcgggcggcatgctgcaggccagctcggagaggccggcgggcctgctgtgggtgcccgggacgagcccgtggccgacgatggacgcggggccgtcggcgagggcgcaggagatcgcgcggcggcgggaggagatgctggggatgctgcgcgacctcccggagtccgagtacgagctctcgctcaccgacctcgtcgagaaggccggggccgaagccgaagccgaagccgaagccgcgcccgcgaccgcccccaccaaggcagaggacgggaaggacccgggcgccgcgcggtcggcggcagctgcggggaggcacgagcggagggcgtcggcgcggcagcggggcagcggcgggagcagcttccgcagcagcagcgacggcgtcctgctcaacttctacatgccgcgctcgctcacccgcagcttcaccgcgccgcgacccgcccggacgccgtcgttcgcctccggctgccggagccccagcgtcgcatccgactgcaacaagagggagagggacccggacgccgagaccgtcaagtgctggtcgttgctgtgggatcggcggtggcgaaagtccagccggcgggacccgcgcgcgccgcccagcgagggcgagtccgccatccgcgccgcgtcggcagccatcctcaaggcggccaagcactcccctccgccgcccaatacatgagctgccggatgcgttgctgctgtacgactcttgtgtctgtctgtacatattttgcctctgcgtgtgatgtgatgtgatatactgaacctactgatgcgctttgtttatagctcgctcgctctagtctagtgtctctagttattatagtattgttcacttggattggactgttatgtacaagtagaaggcgacaaacttccagttacatatatgctgcccgcagagcttccttct

SEQ ID NO: 85893 - DNA, 346 bp, Zea Mays
ctgatagaacttccaatacatttacgtatggtatccaaagcacaccgaggcatgcactgattctactattccagagcttagattcagttaaacatcgcagcactgttggatgctaaacgaacagtcgttgtcagtgaatgctactggacagctgttcacttaaatgaatttgtcactttgcggcaccacaaaggcatgcatgtgtgccagcagcagaataccactaaacaaactgttatgggctccaatcctcttgctgcaaattctgtcttttacatgctctctcctctctctaaagaaaaggatcagagttgttctaggctactatcaagattcagattctctc

SEQ ID NO: 85894 - DNA, 1423 bp, Zea Mays
atccaggctcgatctgagctgctgatccagagtcaagctgcagctgcgtacgtgcctgctacaggagcacggagtggtaccgctccacagcaggcagtgtgtgtgtgtcacagctgagaggtggagacctgtcacccgccgccactagctactccggtagtctgccctgcttctgtagcacagtcggccactgctcactccgcttcgcaccaacgctacctccgcgctctgcatctcctctccactcctgctatttagcgccgccctgcgcctcccactcccgaattcccctgcgcctctcacctccctgctcgaatccagcgctcacccgcgccgcgtcgagacatgtcgaagaaaatcgtggtgaagctggacctgcacgacaacaaggacaagcagaaggcgctgaaggccatctccgtgctcgtcggcatcgacgccgtgtcggtggacatggcggcgcacaagatgacggtgatcgggacggtggacccggtgcaggtggtgagcaagctgcgcagcaagtcgtgggcggcgcacatcgactccgtcgggccggccaaggagcccgagaagaaggaggagaagaaggacggcggcggcgagaagaaggacggcggcggtggcgagggcaagaaggaggaaggggacgggaagaaggacggcggcggcggtggcgacggcaagaaagacggcgagggcaagaaggaggacggcgacggcaagaagcaggacggcgagggcaagaaggaggatggcgatggcaagaaggacgacaagaaggacggcggcggcggcggcgcagaggagaagaagcccgccgccgcggtgcccccgattttgccgttcccgccgctgcaccagctgccgccgcagtacatgcacatgatcaccaacgactacatgagccagtaccaccaccgccccccgccgccgccgcccgtggcgtaccacccgtacgcggcgccgcccccgccgcccccgcagtactactacgtgcgcaacatgagcatggaggagaacccaaactcgtgcgccatctgctgaagcaatcgatcccggccgctttgtctctcgcgtcgcgcgcgcgaacgtgagtacgtacgtgtctcccggcccgccccgtccatcagtccatgtgtacatccgtcgtcgtgttacgttattattacgatgagaagacagacgaatcaaactagctactcgtagcttttattattttgtgagtcaaaagtccaaaccgtatagctgccagttcgtgaatgaatctgtaactaaattctccgtgacggtctttgggtggtgttggtggtcgtcgcagtgcgtgcatcgatctgcatcatcatcttctctcttttttttcctgctctgaagaagcaacgagatgaacgaacggatggatggatgggagccagaaacagaa

SEQ ID NO: 85895 - DNA, 107 bp, Zea Mays
taaacaccactgtacatgcccttactatatgagtaagctactaactcgtggatcattactccgccagcacttgatccaacaatccaactgcagttagctcaaggatc

SEQ ID NO: 85896 - DNA, 1918 bp, Zea Mays
acaggaacgtgagcggtgagcaaccctaccccaggcccagcttgcgcgctctctctctctctggacgacgacgcctacgccagggccccaggtcgctgccgccctacgccaggtccccttcgccggcgacgagcaccaggtctgttgttacttctctggtgatggaccggaattcagatcaaaactgaaagattggaggagcatataccagtttgagtgtaaatagaggatcttccttatgtttgatgattagctcattgagcaacatacagcaacagatagctacaaatcgtggcatatgactccaaaatggagtgcatgctcttcaaatagctacagagaactaccttcacatgaaaatggagagtgcaaatcaaccttaacagagtcagtcccttcacctacaagctgttttggcttgcacactgcaaacacaatgtgctccttatcttcacaaaagaaggatggtaatgtttataaaagaaggaagatggataaggattcaaattctcctataacatttgaagatgctaaagaaatggcaacccaaagttgcacaatttctgatgaccactcatcattactgctacccattatctcctcagaggcattgcttttaaattcaacagcaggcatggcaggtcctatcctagattgtgaggagcctgctgatgttccattggagccaaattctggtacagatgatagatgcttcatttcaaacatgtctccaacttccatgactccagacaaaaagaatgctgctgaatgttcctcatcgaatattggccctacagaatcaattaccgagcatatttcaccaagggatctttgcattgccatactgatgaaagatggactaataaatgaatcaagaacaagaatggcacataaagaggaattcactgacaatgatgctaaccctttgttggcatgcaataattgtggctgcttggaacattcattgaagatgctgatatgcgattcttgtgaagcaggatttcatttgtcttgctgcattccttgtattaaggagctacctactgatgaatggtattgtgctccatgcttgtgtaagaaacccaagagtctttatggcaaactctcagagggcaggataaatccttccaggaatactaacacaaggcctcatgggatgagtcacatagagtacatgctgaaggatgctgaaccatatgtaactggggttcgacttggtagagattttcaggcagaggtgccagaatggtctggtccatcatccagcagcgatgtttactttgacgagccctgtgcaattgattctgcagaactaactacatttaatttgtgcaaaatgagtaatcaaagtcattcttccattggtaattggatccaatgccgtgagaccttgaatccaggagattctgacaagcaagttgtctgtggaaaatggagaagggcacccttatatgttgtacagtcagataattgggattgtttttgttgtcttctttgggatccagtccatgctgattgtgctgttccacaggagttgaagactagtgaagttctaaagcagctgaagtttgtaaacatgctaaagaatcagctggtggaccaaaaccagaagcctgcttaaataaatgccagtaccagagtgggcgattcctcaagagaaggatacccattatgatggtatgaatgagttgccgtatgtggcgttctcttgtagtaactagccgtctgtgaacatgtgagaactatgttgttctagcctgttaaacgaaatgatctgtactgtcttctatagggtcttggtacacaagagttatacaacatagatctgtctgtgcagtccagggagcagcgtgtcgctactgctgtgatcgccgccaaacgatcctgtgatcctgcgccaagttttgtttcttggtaa

SEQ ID NO: 85897 - DNA, 2243 bp, Zea Mays
ccgcctcagcccgtccgcccgcccgtcaccaaacgccgattaaatttaatacccttaaaagcgcccgcgcgacccagtcgagccggccccgcatcccattccgtgccaccgccgccgcgctgcgtctgcgtctgcgtgcgtcgcccgcagtgtccgcagccagaaccagcgcacgcgctgctccgccgacgccgaagcctcgtccgcgagcgcgtggggctaagcaagcactcgagctccctcgagcggcgggtgcagtgcagccaggccgcgcgcgccgcagcatgaacggcgtcggcgacgcgcacgcggccgcggccgcggccgccatggtgcagcaaacgctggggatgtcgctgccgatggcggcgttcgtgcccgagcagggcagcgccaataggctgaccaggccgccggggctgccgccgctgccgcaggcgttcgcggcccagcagcgcggggacgtgtgcatggaggccgtcgaccccgcggctggcccgcgcaaggcgcaccggcgctcccgcagcgacgtcccgttcggctacttcccgccggcgggccaccaccagctcccgccgcccaaggtggaggccggctggggcggccacctccccgccggcggcggcggcggcggcgacgacgacctgttcaacgcgtacctcaacctggaggggctggacgggctcaactcctccgacgaccgcctcgacgacggggacagccgcggcagcagcatgaggaccaacggcgccgacagcagcgagaacgagtcggaggagtgcgccgccgacagccgcgccgggatccgcctctgcgccgccgctgccgacaggcgggaggggctcaagagggccgccgctgcgcccgtggcgcgccacgccaggagcctgtccatggatagcctcatcggcaagctcaacttctccgccggcgcgacgggcgccgctagcggcgtcattccgggacccaacaggttcagcctcgagttcggcaccggcgagttttcgccggtcgagatgaagaagatcatggccgacgagaagctggccgagatggcgctcgccgaccccaagcgcgtcaagagggtgctggccaacaggcagtcggcggcgcggtccaaggagcgcaagatgcgatacattggcgagctggagcacaaggtgcagatcctgcagacggaggccaccactctctccgcccagctcacgcttcttcagcgggactccgcggggatcgcgacgcagaacaacgagctcaagttccggctgcaggccatggagcagcaggcgcagctgcgtgacgcattgaatgaggcactgacagccgaggtccaacgcctgaaggtcgcgaccgcagagctcggggattcttgctcgtccagcaacctagcccagcagatccaaatcagcgttcaggaccagatgtttcaactgcatcagcagcaggcaacgcctataccgttctaccagctgcagcaggcgcagcagaatggcgcagggaagaagcatgagccgacggaatgatctcagacctgccattatccaccgctgcgtgagcaggggaaaaaaagatcggtttcgatggactgaaaacatttcttttcctaactcattggttaagtgtcgttaataagcaccgtgcatttttttccaggtgatgaacctgctgcttgtacctgtttatttattctttggatgattcagttgcttgagttgccaaactgatcaaattgtagccggttaatattcttttatagttgtagtgtttatggatgcttttgcactttggtaccttacgttgacttttattcttgagttatttttgacttttctatattatgtctgaatatatagaaaatcaactgtatataaaaagccaaatccttttatagtttgaatgtctttattttgtgttgaagaccaaacggcatccatttcgtacaacaccacgagctgctaaaaacatttaaagaataaaaaacaaatactgctacactacgcataatacaagctcatacagcgaatggtgcacgaacgaattgagatatttacagtgagcagtcaattccgtttaagctacccaacagaatcctcaaccatagcctcctcgctgtcgctgtcgctgccatctgaacctgaatctgaatcaccttcctcgacgccttcatccgtctcagcgtcagacatcggctcctcgtttccagctccactcctggacatttgcttcctgaattcaggatcaac

SEQ ID NO: 85898 - DNA, 4307 bp, Zea Mays
gccgtagctgccagttaactactccgcctactagtagcggcagcggccaccgcggcagagctggtgggtggtaatgccgctgcggctgcgtgcggtggcactggcacagcgcggcctgtccctgtcgcgatgacgcgccgctcccaggccacgcccgccgcttcggcggcgctgccgcttctcctggccccgtttcttctgcttctgctgctgctgcattgccagtgccaccgcgccggcgcggcgacggacgcggagcggcgggcgctgctggacttcaaggcggcggtgacggcggacccgcggggcgtgctggcgtcgtggacgcccgcgggggacccctgcggcttcgtcggggtcacctgcgacgcgtccacgggcgccgtgcagcgcctgcgcatccacggcgcggggctggcgggcacgctcgcgccctccctcgcgcgccttcccgcgctcgagtccgtctcgctcttcggcaacgccctcgcgggcggcgtcccgcccggcttccgcgcgctcgcgcccacgctccgcaagctcaacctcagccggaacgcgctcgccggcgagatcccgccgttcctcggcgccttcccgtggctccgcctgctcgacctctcctacaaccacttcgccggcgggatccccgccgggctcttcgacccctgcctccgcctccgctacgtctcgctcgcgcacaacgacctgacgggccccgtcccgcccggcattgccaactgctcgcgcctcgccggcttcgacttctcctacaaccgcctctccggcgagctcccggaccgggtctgcgcgccgccggagatgaactacatctccgtccggagcaacgcgctctctgggcaaatatccaacaagctcacctcctgcggcggcattgacctcttcgacgtcggcagcaacaacttctccggagctgcgccctttgcgctccttggctcggtaaacatcacctacttcaatgtctcctccaacgcctttgaaggcgaaatccccagcattgcgacctgcggcaccaaattctcacgcttggacgcgtccggcaaccggctcacggggccggtgccggagagcgtcgtgaattgccgcggcctgaggtttttggatttgggggcgaatgctcttggtggagctgtacctcctgtgattgggactctgcggtcgctctccttcctccggctcgcgggcaatcctggcatttccggttcgattccacctgagcttggagggatcgagatgcttgtcacactcgacctcgcgggccttgctctcacaggagagattccagggtccctcagccagtgccgattcttgcttgaactgaatctgtccggcaacaaactgcaaggagctatcccagacacactcaacaacataacctacctcaaggtgcttgatctccacaggaaccagcttgatgggggcattccagtcacacttgggcagctcacaaaccttgttcttctagacctctcggagaatcaactgactggggcaatacctccacagcttgggaacctctctaacctgacacatttcaacatgtccttcaataacctatctggcatgattcctcctgagccagtcttgcagaaatttgattacactgcctacatgggcaaccagtttctatgtggctctccattgcccaataactgtgggaccgggatgaagcaccgcaaacgagtgggtgtgcctgtcataatcgccattgttgctgcagccctcatacttattggaatatgcattgtttgtgctttaaacatcaaggcttatacgcgtaagagcacagatgaggacatgaaggaagaggaagaggttcttgtgtctgagagtactcctccaattgcatctccaggctcaaatgccatcatcggaaaattggtgcttttcagcaagagcttgccatcaaggtacgaagattgggaaactggaactaaggcgctacttgataaagactgtctcattggcggtggatcaatcggtacggtgtacaaggccacttttgaaaacggcatgtccattgctgtgaagaaactggagacactagggagcgtgagaggccaggatgagtttgagcatgagatgagccagcttggtaacctcagccaccccaatctggttgcttttcagggttactactggtcatcctcaatgcagttgcttctgtcggaatttgtggccagcgggagcttgtatgaccacctccacggtagccatcctcatgctttctctgagagcagcagcagaggtgctggaggtgaactgtcttgggaacagaggttcaacgtcgcacttggagcggcccgtgcacttgcttaccttcaccatgattgccggccacagatcctgcacctcaacatcaagtcctccaacattatgttagatgggaaatacgaagctaagctatctgactatggattggggaagctgttgccgattctaggaagcattgaattgagtagaattcacaccgcaattgggtacattgctccggagctgtcatctccgactttgagatatagcgacaagagtgatgtatttagctttggggtggttttgcttgagaccgtgacagggcggaaaccggtggacagccctggggtagctacagctgtggttctgcgtgattatgtaagagaggtattggaggatggaactgcatcggactgctttgatcgaagcctgaggggaattgttgaagctgaattggttcaagtgctcaaattaggtctggtatgcacttccaatacaccatcaagccggcctagcatggcagaagtggtacagttcttggagtcggttagaattagttcttgatcttctgctgtcagaacatagtcacagattaggatgttaacaggaaaagtgttttctgatttttttttcaacagatgaaggtcacattcttttttttttattctttactgtggcgcagcttcatttgtaaattgtatttagatttattgctgaataagtgattgttttggtcaagttaccaaatccatgtatatggttttatccttttggttttcggtctatgtaaggccctttctaagttgcattgaacctatgtaaaaaactgcaaatgctagagcagttgctgggatctgaacaccattttttcttcatggtctgagcttaaagaggagttggtactgtctaattgtattgcaggcacagcaaaggaacagttgaacaagagcagtgtgatgcaggagcagctcatctaacccacaagttctatcctacatatatcagcagtgcaggcaagatctgcagcagcacaacaaaaattccatctccaaagtccaaaccaaatatctgaaaaatggatggggagcttgaactgcccgaattcaaccctcgggaacgcgtcaagcagcagatttcagtcccgtttctctgggaggtgaagcccggtgccccgaagagggactgggtcatctcccagccagtgccagtagcgtttgcatgcccgtccccggccccgacaaagcttgttgtgagcgtgccattccagtgggaagaaaagcctgggaagcctctgcaggaagcatctcccttccatgtgctgcccccggatcacggtgccttttcagcatcttcccgctcgctgaacccgtttgtggtcgagagcgaggaggaatactcgcttggttttgagctggaagcatttggttttccagacagcagcgacgcctctggcgctgcagcgtgggcagatggctcctcctccggccgtcgtgacggctggttctcgttttcagagtcggaagactacagccactccagtggcgatacttcagcacacgacaaggagttccagtttccccgggcgccttcagagaagagctgggaggtggccaatgacgaggacaatccatggagccctccgaggagcgcggccacgacgctggaggagcttatggtgctcagccggagactgaggtgcggacaagctctgccggttgacgtcgggaagaagagactgccctccgtggagctcatgaagaagctcttcatcgtgtgttcttagctgcactgcacatggacgtgccaaaaggtacaggctgcatgtgagaccataatagaggaagcatggcaaagtggggcgttcgcaagtagaaagcctagctgtcgggtgactggagttgtaccgtcagagtcgtcaaaatgttggtcttttttttgtgtgtgaaatgaaacgttgtgcaggagagatactctggatttttgtttgtacgacaagtttgaaagaaatgttccgttgttgttgttccatctta

SEQ ID NO: 85899 - DNA, 188 bp, Zea Mays
tcaaaactcagcttgttcccatggtttgatttgaggattggatggaaagcagagtatgtgcttcctgagattcatggggctgttggcgcaggagaaccagccttcagtatgaactatagaaagttgcatgcatcgatagatggggtcgaggctatcgttactcagtcagatcggtattgatctcccag

SEQ ID NO: 85900 - DNA, 1729 bp, Zea Mays
cttccagcaatccaaaccctgggtcttctataccgtgcctcatctagtcatctcgtctcaggttgcggccgaaccagagccccgtcccaactccaccacctctcttctctacggcgcgagcaagggcggcgccggccgcggcgtcggcgggaaccgggcctcgctctccccatctctccgatcacttctgtcctgtgaaaatggcggatgaactacgctcaacgtctgtgggtcagaagttccatgggcagtccgtgctgttgagcagaatctcttcctattccgccatgaacaaccctgtattcaacaatgcctattctgcttacaatgtgccccagaggtcatatcatgggatgaatgcaactgctggactctcatctgtcatggcaccatctcctgtctttgcttctgccccaaaagagaaaggcttttctggatttatgatcgactttatgatgggtggagtttctgctgctgtctccaagacagctgcagctccgattgagcgtgtcaagcttttgattcagaaccaggatgaaatgctcaagactggcaggctttctgaaccgtacaagggtattggggactgctttggccggacaatcagagatgagggttttgtctcactgtggagaggaaacacagctaatgtcatccgttacttccccacacaggcattgaactttgcgttcaaggatcacttcaagcgcatgttcaactttaagaaggacaaggatgggtactggaagtggtttgctggaaatctggcttctggtggagctgctggtgcttgctctctattctttgtctattctctggactacgcccgtacgcgtttggccaatgatgccaaggctgcaaagaagggtggtgagaggcagttcaatggactcgttgatgtttaccgcaagacccttgccagtgatggtattcgtggcctctaccgtggattcaatatctcttgtgtggggatcattgtgtaccgaggtctttactttggtatgtatgattccctgaagccagtgcttcttgttggtaccctgcaggataacttcttggccagcttcttgctcgggtggggtataaccattggtgctggccttgcctcctaccccattgacactgttcgccgtcgcatgatgatgacatctggtgaggccgtcaagtacaacagctccttggacgctttcaagcagattgtcgcaaaggagggtaccaagtccctcttcaagggtgctggcgcaaacatcctccgcgctgtagctggtgctggtgtccttgctgggtacgacaagctccaggtggttgtcttcggcaagaagtacgggtctggtggtggctaaggatgtataatgatgatgacgacgaacaacaaacatgatgttttaggtgcctcctttaagtaaacatacgtacggaccctcgacaccattttaagttcgctctcgcagaggctggtgagtttgtagcgtggctgtgaccgcacctctttttatgtcagagattggaaataagtgacgttagaaattgctgtcttgctgcatcagttttttatactccgttttttgttttgcgcgtgcaaagggttgctcgaatgtatctatgtaggtttcggaatcacagcttactatgtttgatgaaggtgtatgttctgtgacctttggcagcatcacttcatctgtctagcgctacatgattttaaggatcatctggtattattacggtaaca

SEQ ID NO: 85901 - DNA, 1735 bp, Zea Mays
accgtgcctcatctagtcatctcgtctcaggttgcggccgaaccagagccccgtcccaactccaccacctctcttctctacggcgcgagcaagggcggcgccggccgcggcgtcggcgggaaccgggcctcgctctccccatctctccggtacgcactctccctcttccccaagccgagatctaagatcacttctgtcctgtgaaaatggcggatgaactacgctcaacgtctgtgggtcagaagttccatgggcagtccgtgctgttgagcagaatctcttcctattccgccatgaacaaccctgtattcaacaatgcctattctgcttacaatgtgccccagaggtcatatcatgggatgaatgcaactgctggactctcatctgtcatggcaccatctcctgtctttgcttctgccccaaaagagaaaggcttttctggatttatgatcgactttatgatgggtggagtttctgctgctgtctccaagacagctgcagctccgattgagcgtgtcaagcttttgattcagaaccaggatgaaatgctcaagactggcaggctttctgaaccgtacaagggtattggggactgctttggccggacaatcagagatgagggttttgtctcactgtggagaggaaacacagctaatgtcatccgttacttccccacacaggcattgaactttgcgttcaaggatcacttcaagcgcatgttcaactttaagaaggacaaggatgggtactggaagtggtttgctggaaatctggcttctggtggagctgctggtgcttgctctctattctttgtctattctctggactacgcccgtacgcgtttggccaatgatgccaaggctgcaaagaagggtggtgagaggcagttcaatggactcgttgatgtttaccgcaagacccttgccagtgatggtattcgtggcctctaccgtggattcaatatctcttgtgtggggatcattgtgtaccgaggtctttactttggtatgtatgattccctgaagccagtgcttcttgttggtaccctgcaggataacttcttggccagcttcttgctcgggtggggtataaccattggtgctggccttgcctcctaccccattgacactgttcgccgtcgcatgatgatgacatctggtgaggccgtcaagtacaacagctccttggacgctttcaagcagattgtcgcaaaggagggtaccaagtccctcttcaagggtgctggcgcaaacatcctccgcgctgtagctggtgctggtgtccttgctgggtacgacaagctccaggtggttgtcttcggcaagaagtacgggtctggtggtggctaaggatgtataatgatgatgacgacgaacaacaaacatgatgttttaggtgcctcctttaagtaaacatacgtacggaccctcgacaccattttaagttcgctctcgcagaggctggtgagtttgtagcgtggctgtgaccgcacctctttttatgtcagagattggaaataagtgacgttagaaattgctgtcttgctgcatcagttttttatactccgttttttgttttgcgcgtgcaaagggttgctcgaatgtatctatgtaggtttcggaatcacagcttactatgtttgatgaaggtgtatgttctgtgacctttggcagcatcacttcatctgtctagcgctacatgattttaaggatcatctggtattattacggtaaca

SEQ ID NO: 85902 - DNA, 811 bp, Zea Mays
aaagagcaatatcggtgttgttattgcaatttgggctccaatcattctggtatatttcatggatacacaaatttggtatacaatcttctccactctacttggtggaatttacggtgctttccaacggctcggagagattcgtactctggggatgctgcgatctcgctttgattcaatacctttagcctttaactcgtgcctaattcctgttgaaacatctgatgcaaaaaggaagaaaggtctgaggtcttacttacacaatcgtttcaaagagatggaacatgctgacaaggagaatatagcagcaaggttcgcacaaatgtggaatgaaattgtcaccagctttcgagatgaagatcttatagacaatagggagaaggagctgctacttgttccttatgtgtctgatcggacccttggtgtcgtgcagtggcctccatttttgcttgccagcaagatcccgatagcagttgacatggctaaagatagcaatggcaaagaccgagatctgagaaagaggcttgacaatgattattattttaagtgtgcaattgaggaatgttatgcatcatttaagaatatcatcaatggccttgtacagggtgaaccagagaaaagggtcataaataagatatttgtagaagttgaaaaatgcatctctgaggacaaagttattgcagatttgaacatgcgggccctgccagatctctacttcaagtttgttgagttggtaaactacttggagaagaatgaccacccaaacctacctagaaattacatgagaccaagatatgctggacaatatcattag

SEQ ID NO: 85903 - DNA, 3849 bp, Zea Mays
attttttccaatcccgtccaatccatatataatgggaataaccgaacaagaccctacagagaagaaaatacagatacaaccggctgaagtttgaccttctagattggaagggatcaaaaccaattgcaaggtgagacaaatctaacttcgatttgttctagactagttaaagtgataaacaaaccacgaccgttttacaagacctgtccgtgcctgtcgccgaacacgaaaacagccagccaccgcccaccacagagcaaatcgtttttgactcgtcggagccggctcgccgcccgccgagcgctgccctgccgaccgctgcggcttctgtcggtgtgcaaatactccgagactccgggtgccccgccgcaaaaacgtccccacgcagctgcgtcgcacctaacccgccccgccccgcccgcctataaaagccggctcgccccctcccgctcctctcttctcccccatctccatttttctcctcccactgattttgcattttagcccctcaggaagctcggatttcggccccgctccggcggaccgcttccgttcgtgctctgctccgaccgagcgcgccgcgccgtggggggcagctgcgaggactctcgttcggcggctctggttctcggcttggtcccgtttcttccccaacaaatctcgtaatttttcgtccagatttggcttctcgccgcccgtctgggtctttctcgtgcgtttcgcctttggtttcgccgatttggtgccggattcggtgggttgcggccgagtagcctggatctcgggcgcgggtctagcgctaggagccctcacactggggatttcctgccggaggaagcttttcaagggagctagcagctagtagctagctgcctttgggagcagtagctcttctagtctctgaaggtttcaccatacgcggtggagagcgctattagcttgaggagtagatttcgtgtagcggtgagcaaagtttgggtgtcaagtctggtggtggaagccttcaggcttgagattttctccaaggagcacgccgtctctggaaggaatttcctgccatcccagaggctgccgatttcctccctcccgggaagcaagcaagggctttcttctagacgagctcttctggttccttaagtttgtgggccgtggctatttaatctccaactgcatccccagatattcaccaaattctgtgagactgggaactccgggattggtttggataaggtgttctgggaatggggaaccaatgcccaaacgggacccttgggagtgactactacaaccgcccgacgtccaggttcgctgatggttgtcttgaggacgatcgctactctgacttgaagaagtttgacaagccatggcctgaggtgaactcgtttaagcccactgctgttggtattttgaagaggggattggatccaacgtcaatcactgtccttgaaaggaagacggccgacataagggaacattatatcattggtcggaggcttggtcaaggccagtttggcacaacattcctctgcaccgagatcagtacagggtgtgagtatgcatgcaagacaatcccaaagcgaaagctcatcaccaaggaggatgttgaggatgtgcgccgtgagatccagataatgcaccatttgtcaggccacaagaatgttgtttccatcaaggatgtatacgaggatgggcaggcggtgtatattgtgatggagctctgcgccggtggggagctctttgatcgaattcaggagaaagggcattatagcgaacagaaggctgcagagctcataagaatcattattagccttgtggctatgtgccattcacttggggttatgcaccgtgatctaaagccagaaaacttcctcctttgggataaagaagatgacctgtcaataaaagcaatcgattttggtctatctgtgttcttcaaaccaggtcaggttttcactgagctggttggaagtccatactacgttgctcctgaggtactacacaaacggtatggaccagaagcggatgtgtggtcagctggagtgatactgtatgttttgcttagtggggtgccacctttttgggcagagacgcaacaaggtatatttgatgctgtcttgaaggggcacattgattttgactcggacccatggcctaagatatctgaaagcgcaaagaatctcataaggaagatgctctgcccttgtccttcagagcgtctgaaagcccatgaagtactacgccatccttggatctgtgaaaatggagtggctactgatcaggctcttgatcccggtgttctctctcgtctcaaacaattctccacaatgaacaaattaaagaagttggctctgagagtgatagctgaacgactttctgaggaggagattgctgggttaagacaaatgttcaaggcagttgacgttcaaaatagaggcgtaattacttttggtgaacttagacaaggtttaaaaagatatggtagcgaattggagaatagagaaattagtgatataatggaagtggctgataatgacaataatgtgaccatcaattatgaagaatttatcgctgcaactgtgcctcttaacaaaatagaacgtgaggagcacctgatggcagcttttacctacttcgacaaagatggaagtggttatatcacagttgacaagctgcaacgagcttgtggagaacatgacatggatgacactttccttgaagagataattttagaagttgaccaaaacaatgacggtcagattgactacgccgaattcgtagccatgatgcaaggcagcaaagttggacttgggtggcaacaaatggaaaccactctgaatgtaaccttgagagatgcacctcaagtacactgtcactgatgcgctcgccatgtacagattttgttctcttctcgtgttcatcgtttctccacacgacctgagagttccggtcgacatgacatgtatcacgaggagagagcaaatcaatcgattcatttagtggtatttatcccaaataaagtgtgggctggcaggcagaatatggtttgtcatgagagacactagtatgggtttatatgtataaatatatagcagtggtggtatattggtttatgtagcgggtgatcctgtcaagcgatccaatcgaaataccaaaagtgcgttcagtttgcccgttttgttacgggtttcatgaagatgaatgtgattatgttttctcatgtcgagatttgcacttccttaaaacgcagcagatttaccaattcttttttacctgtcagtgtcagtgccgtataaacgatcgttttgtgcttacgctctacgcctgcaggcgcatgttctggcagccgctgtctttgcagtctgggctccatgagccagaccagtttggcagttgctaggcacgcagcgggaaaccagtttgcaaagcagccgtagcagggaaaggcagagccgggtgcatgaaacggccaaatgaacagaaatgttgcaatcgtctaaatgatgattgttaaggcgaagagtgttgaggttagacggccaagcagtcgttgtaccttcgattcgaagataccaaattgagttggctcatcgagcagcgcgttttgttctctgttggatcgggtatggccaattggccccgaagtcaagtggtctccgacacccggcgctcgtgggcggcagcgatctcctgcgagacaagagcaagccgtgcagggttagtctctgaattcactctggagctgcgaactgaaccactctgcgtgtcgatcgaccgctggaacccttgccttgacgtctccgtccttggacagaacgcagcgcgacgtgacggcgccgccgccgcccagag

SEQ ID NO: 85904 - DNA, 3189 bp, Zea Mays
tataatgggaataaccgaacaagaccctacagagaagaaaatacagatacaaccggctgaagtttgaccttctagattggaagggatcaaaaccaattgcaaggtgagacaaatctaacttcgatttgttctagactagttaaagtgataaacaaaccacgaccgttttacaagacctgtccgtgcctgtcgccgaacacgaaaacagccagccaccgcccaccacagagcaaatcgtttttgactcgtcggagccggctcgccgcccgccgagcgctgccctgccgaccgctgcggcttctgtcggtgtgcaaatactccgagactccgggtgccccgccgcaaaaacgtccccacgcagctgcgtcgcacctaacccgccccgccccgcccgcctataaaagccggctcgccccctcccgctcctctcttctcccccatctccatttttctcctcccactgattttgcattttagcccctcaggaagctcggatttcggccccgctccggcggaccgcttccgttcgtgctctgctccgaccgagcgcgccgcgccgtggggggcagctgcgaggactctcgttcggcggctctggttctcggcttggtcccgtttcttccccaacaaatctcgtaatttttcgtccagatttggcttctcgccgcccgtctgggtctttctcgtgcgtttcgcctttggtttcgccgatttggtgccggattcggtgggttgcggccgagtagcctggatctcgggcgcgggtctagcgctaggagccctcacactggggatttcctgccggaggaagcttttcaagggagctagcagctagtagctagctgcctttgggagcagtagctcttctagtctctgaaggtttcaccatacgcggtggagagcgctattagcttgaggagtagatttcgtgtagcggtgagcaaagtttgggtgtcaagtctggtggtggaagccttcaggcttgagattttctccaaggagcacgccgtctctggaaggaatttcctgccatcccagaggctgccgatttcctccctcccgggaagcaagcaagggctttcttctagacgagctcttctggttccttaagtttgtgggccgtggctatttaatctccaactgcatccccagatattcaccaaattctgtgagactgggaactccgggattggtttggataaggtgttctgggaatggggaaccaatgcccaaacgggacccttgggagtgactactacaaccgcccgacgtccaggttcgctgatggttgtcttgaggacgatcgctactctgacttgaagaagtttgacaagccatggcctgaggtgaactcgtttaagcccactgctgttggtattttgaagaggggattggatccaacgtcaatcactgtccttgaaaggaagacggccgacataagggaacattatatcattggtcggaggcttggtcaaggccagtttggcacaacattcctctgcaccgagatcagtacagggtgtgagtatgcatgcaagacaatcccaaagcgaaagctcatcaccaaggaggatgttgaggatgtgcgccgtgagatccagataatgcaccatttgtcaggccacaagaatgttgtttccatcaaggatgtatacgaggatgggcaggcggtgtatattgtgatggagctctgcgccggtggggagctctttgatcgaattcaggagaaagggcattatagcgaacagaaggctgcagagctcataagaatcattattagccttgtggctatgtgccattcacttggggttatgcaccgtgatctaaagccagaaaacttcctcctttgggataaagaagatgacctgtcaataaaagcaatcgattttggtctatctgtgttcttcaaaccaggtcaggttttcactgagctggttggaagtccatactacgttgctcctgaggtactacacaaacggtatggaccagaagcggatgtgtggtcagctggagtgatactgtatgttttgcttagtggggtgccacctttttgggcagagacgcaacaaggtatatttgatgctgtcttgaaggggcacattgattttgactcggacccatggcctaagatatctgaaagcgcaaagaatctcataaggaagatgctctgcccttgtccttcagagcgtctgaaagcccatgaagtactacgccatccttggatctgtgaaaatggagtggctactgatcaggctcttgatcccggtgttctctctcgtctcaaacaattctccacaatgaacaaattaaagaagttggctctgagagtgatagctgaacgactttctgaggaggagattgctgggttaagacaaatgttcaaggcagttgacgttcaaaatagaggcgtaattacttttggtgaacttagacaaggtttaaaaagatatggtagcgaattggagaatagagaaattagtgatataatggaagtggctgataatgacaataatgtgaccatcaattatgaagaatttatcgctgcaactgtgcctcttaacaaaatagaacgtgaggagcacctgatggcagcttttacctacttcgacaaagatggaagtggttatatcacagttgacaagctgcaacgagcttgtggagaacatgacatggatgacactttccttgaagagataattttagaagttgaccaaaacaatgacggtcagattgactacgccgaattcgtagccatgatgcaaggcagcaaagttggacttgggtggcaacaaatggaaaccactctgaatgtaaccttgagagatgcacctcaagtacactgtcactgatgcgctcgccatgtacagattttgttctcttctcgtgttcatcgtttctccacacgacctgagagttccggtcgacatgacatgtatcacgaggagagagcaaatcaatcgattcatttagtggtatttatcccaaataaagtgtgggctggcaggcagaatatggtttgtcatgagagacactagtatgggtttatatgtataaatatatagcagtggtggtatattggtttatgtagcgggtgatcctgtcaagcgatccaatcgaaataccaaaagtgcgttcagtttgcccgttttgttacgggtttcatgaagatgaatgtgattatgttttctc

SEQ ID NO: 85905 - DNA, 892 bp, Zea Mays
ctgctgttattagcctgccacagtgcatttcttcatctaaggagaagtacctaaatagtgcatttattacgtataatagcaactctctccattcatgatgaaaaaactctcctctattcttgtatgtcatgtatctgtttttagataatatttgctcgattgaagtgcttcagctaaagttcctgaatcttttgcaggctgataatgacaataatgtgaccatcaattatgaagaatttatcgctgcaactgtgcctcttaacaaaatagaacgtgaggagcacctgatggcagcttttacctacttcgacaaagatggaagtggttatatcacagttgacaagctgcaacgagcttgtggagaacatgacatggatgacactttccttgaagagataattttagaagttgaccaaaacaatgacggtcagattgactacgccgaattcgtagccatgatgcaaggcagcaaagttggacttgggtggcaacaaatggaaaccactctgaatgtaaccttgagagatgcacctcaagtacactgtcactgatgcgctcgccatgtacagattttgttctcttctcgtgttcatcgtttctccacacgacctgagagttccggtcgacatgacatgtatcacgaggagagagcaaatcaatcgattcatttagtggtatttatcccaaataaagtgtgggctggcaggcagaatatggtttgtcatgagagacactagtatgggtttatatgtataaatatatagcagtggtggtatattggtttatgtagcgggtgatcctgtcaagcgatccaatcgaaataccaaaagtgcgttcagtttgcccgttttgttacgggtttcatgaagatgaatgtgattatgttttctca

SEQ ID NO: 85906 - DNA, 1903 bp, Zea Mays
aagccgccacacatcggatatcgcccgcccgaacgggtggctgcggcgcatgcaatcgccttatccccccggcccgccgccccgcggccacaagcgcaagcagtgaacacggcgcctcctcgctcgcgcggccacgcccccgtcgtcgtcttctcccggcaggtactacagcgcataaatacgcagcaccgccgcccggctcggttcccgtctggccacccatccgatcccacccggcagcggcgctgcgcaatggccacccacgcagctctcgccgcctcccgcatccccgccggcgcccggctgcacagcagggcgccggcgtcgtccaggcacggcgtgcagaggctggacttcgccgacttctccgggctcaggccggggtcgtgctccgtgagcgctgccgcgcgggaggcgtccttctccgacgtccttggcgcgcagctcgtcgccaaggccaccggggagaacgccgtgagggcgcccgcagaggcgaagctgaaggtggcgatcaacggcttcggccgcatcggccggaacttcctccggtgctggcacggccgcgaggactcgccgatcgacgtcgtcgtcgtgaacgacagcggaggcgtcaggaacgcgtcccacctcctcaagtacgactcgatgctcggcaccttcaaggccgacgtcaagatcgtggacgacacgaccatcagcgtcgacggcaagcccatcacggtcgtctccagcagggacccgctcaagctcccatggggtgagctcggcattgacatcgtcatcgagggcaccggagtcttcgtcgacggccccggcgccggcaagcacatccaggccggcgcgaagaaggtgatcatcacggctcccgccaagggcgccgacatcccgacctatgtcgtcggcgtcaacgagggcgactacgaccacagcgtcgccgacatcatcagcaacgcgtcctgcacgaccaactgcctcgcgccattcgtcaagatcttggacgaggagttcggaatcgtgaaggggaccatgacgacgacgcactcgtacaccggcgaccagaggctgctggacgcgtcccaccgcgacctccggcgggcccgcgcggcggcgctgaacatcgtgccgacgagcacgggcgccgccaaggccgtggcgctggtgctgccgcagctcaaggggaagctgaacggcatcgcgctgcgggtgccgaccccgaacgtgtccgtggtggacctggtgatcaacaccgtgaagactggcatcacggccgacgacgtgaacgcggcgttccgcaaggccgccgccggcccgctgcagggcatcctggaggtctgcgacgtgccgctcgtgtccgtcgacttcaggtgctccgacgtgtcctgcaccatcgacgcgtcgctcagcatggtcatgggcgacgacatggtcaaggtcgtcgcctggtacgacaacgagtgggggtacagccaacgcgtggttgatctggcgcacctggtggcggccaagtggcccggcgcggcggcggccggcagcggcgaccctctggaggacttctgcaaggacaaccccgagaccgacgagtgcaaggtgtacgaagcatgaggccagggttctttccacgacgaaacgtacagcacgggcgcgagggttctttccatagagaataatatacagattattcgacgaaagagacgtatgttatatatatatatgagttgtatgcagtcaccgaactggcggtacaggcttccgctttccatttcctgttgggagtcgtgtagtgtaatcctggggtgtgtatttgtttcatcaaccatgcctgccgatttgaatctcgtttcaccagcatggcagcattatctgatttgggtatacaagtataaaccgcaacgagcgatcttgt

SEQ ID NO: 85907 - DNA, 300 bp, Zea Mays
ccctcgcaagctctcctcactcctctcctgtgcctgcctcttccattccttctgctacgccattatatgtttgcaagcgtcagaagtgcatgcttctgcgcagttgccctgtgatgaggcaaccaacagccaaacatcgctggcattccattccacacagctctactgcattgtgctagtactaaaagtttctcaggctctgcgtttggtttgcttgagatttttggaatctgcctttggtttaattgctagattctacagattcaattacatacaagcacattacccctaggcatagta

SEQ ID NO: 85908 - DNA, 369 bp, Zea Mays
atgccgtccctggcctccttcgggtcacccagcataccgaccatggcggcgtcgatggcgtcctggttctccaccctagacgccctggcggcgaacaagataacgtcgtccttcgtaacgcccgcggcgaagatctcaacgagggtgcggtcgacgctgagcttgttgagggtgagcgtgccggtcttgtcgctgcagagcacgtccatgcccgccatctcctcgatggcggtcatgcgcttggtgatagcgccctgcagcgacagcttgtgggatccgatcgccatggtgacggacagcactgtgggcatggcgatcgggatgccgccgatcagcagcacgaggaggttgtcgatgccctcgcggtag

SEQ ID NO: 85909 - DNA, 1050 bp, Zea Mays
atgaaggccgcgcgggggagacgctgggaaagccgcacctccgcgcccccatcaatcccgcccaccaccaagcttgccgcctaccaaacccgccagctccgcgcgagatccgccacagttatgccgcgcgagggagatggcgggatagccgctaggcagatccgcttgctcgcgagggagaggaaggaaggccgctccgggctaagcagatgcaagtcggtgcttgtcaagaacaaccggccatgcccggggttgccagggaagcccgtccacggtgtcgcaccattccccgcctcgaattcggggtctccaagcccggacgccatcagcacactccgtcagcgatttggaaaccgcgcagatccagaccatcaacgcctagggtggaggggattcttgcatgccgcgcagatccaggccattccccgcctagtacatggacaaacctccaatagtgtaccatcagagtttgtgaagtggagggatgtcgtcgttctctgcagcaagccagtgccatcatcgattaggagctttgaactcatgtacaattagtatagtgtctacggtgcaggtccatcgtttgaactccataagatttatcttcctggcaacccacgagtacatgggtgtatccttcttaatataatgagaatggagttttttgcgaatagctcaagcagaggaaatgttagtcggtcactctgtgtggattttttgttcacaaatgattttaaggctgttaagcaattttttagtcggcttctcattcatactgaactgtacatgtgcaacatgtttgcagctgaattttttcatgaccttcacgaagaggtaatggccactgcttctagaggacatggtttattgatccggttgcagcagttagaggcagaattttcaatggttgaaaaggctattgtatctcagacggggcactcaaattacccacatgatgatggattattcttcagatttgatgttgctgctggtgctggagcctcaaaaagaacctgtgaagctggttgctactgttcaacagttcagaattaa

SEQ ID NO: 85910 - DNA, 1161 bp, Zea Mays
gaacatataaagagaaaaacgatgacaaaattgaggtagggaatggactatctctcaaaactgaggtagggaatggcctatctctcaaaattgagggactaaagaagtaaagagtaaagaaatacttgtgccctttattttatttttttgttataataggttttattgtactgctactttttccgtgtaaaagaacttttgttttggatacttctcttttcatgtaggcatatatcagtatatcaatctatgtttcatttactcttagttctttcttccttttgaccagcagctcttgtctttgtagtctgagctagaatatctatccttcatgtacgttaaccccactggttttgctggagtaagaaaaagagttgaagacttgtacaaggcccatgaacaagaattgcaagattacgatactataacaccacatctgcttgatgtagtgttgtgctagcatgctctggtgttccctatatatttcttacacagttttctaactcatttcatatgggatcgtacaattaaccagtctgctacacattttcattagttccaaaatttgatggtggtattttaattcattaggctgatgcctatagggagctttacaattagctgcatgtaacaaggttcttagataactgtaggatccgagataggcagcttggacttcatggaggcgtcgtgggacgagcccgtcgccttgcactttgggattgaggtgagaggaatcaaggactaagtttcacggagggagacaacccctttgccgcatggagaagcttacgaaggcaaggcaacaactcagcggatgtcgttgcacagcaggcagacacctgtgatggagcagtatatagcgttagttctatacatgtattttaatatctatacagagtaatctcagaaataaaaccgagtgtttgacagcgaggccggagcaggcgtccccagcgtccccatacgcgtttctcgcccccaccccgacagaggccgctcacccgtggtgcagatatcgcccttcatcttctctgccttgggcatcgccgtctccatcggcgtcttcgtcctcggcatggcatggtgagtcacagtgtgcctccacaccctgtgtcgccaaatctgcacggcgttggaggctccagtggtgtcctccat

SEQ ID NO: 85911 - DNA, 1185 bp, Zea Mays
gaacatataaagagaaaaacgatgacaaaattgaggtagggaatggactatctctcaaaactgaggtagggaatggcctatctctcaaaattgagggactaaagaagtaaagagtaaagaaatacttgtgccctttattttatttttttgttataataggttttattgtactgctactttttccgtgtaaaagaacttttgttttggatacttctcttttcatgtaggcatatatcagtatatcaatctatgtttcatttactcttagttctttcttccttttgaccagcagctcttgtctttgtagtctgagctagaatatctatccttcatgtacgttaaccccactggttttgctggagtaagaaaaagagttgaagacttgtacaaggcccatgaacaagaattgcaagattacgatactataacaccacatctgcttgatgtagtgttgtgctagcatgctctggtgttccctatatatttcttacacagttttctaactcatttcatatgggatcgtacaattaaccagtctgctacacattttcattagttccaaaatttgatggtggtattttaattcattaggctgatgcctatagggagctttacaattagctgcatgtaacaaggttcttagataactgtaggatccgagataggcagcttggacttcatggaggcgtcgtgggacgagcccgtcgccttgcactttgggattgaggtgagaggaatcaaggactaaggtgaatagcaacttagcagtttcacggagggagacaacccctttgccgcatggagaagcttacgaaggcaaggcaacaactcagcggatgtcgttgcacagcaggcagacacctgtgatggagcagtatatagccgaggccggagcaggcgtccccagcgtccccatacgcgtttctcgcccccaccccgacagaggccgctcacccgtggtgcagatatcgcccttcatcttctctgccttgggcatcgccgtctccatcggcgtcttcgtcctcggcatggcatggtgagtcacagtgtgcctccacaccctgtgtcgccaaatctgcacggcgttggaggctccagtggtgtcctccatggaagagacataggtcaaagggccatacttcatagctatttccccctcgatgtttcaagtgaaaggtgagagca

SEQ ID NO: 85912 - DNA, 565 bp, Zea Mays
cgatactataacaccacatctgcttgatgtagtgttgtgctagcatgctctggatccgagataggcagcttggacttcatggaggcgtcgtgggacgagcccgtcgccttgcactttgggattgaggtgagaggaatcaaggactaagtttcacggagggagacaacccctttgccgcatggagaagcttacgaaggcaaggcaacaactcagcggatgtcgttgcacagcaggcagacacctgtgatggagcagtatatagccgaggccggagcaggcgtccccagcgtccccatacgcgtttctcgcccccaccccgacagaggccgctcacccgtggtgcagatatcgcccttcatcttctctgccttgggcatcgccgtctccatcggcgtcttcgtcctcggcatggcatggtgagtcacagtgtgcctccacaccctgtgtcgccaaatctgcacggcgttggaggctccagtggtgtcctccatggaagagacataggtcaaagggccatacttcatagctatttccccctcgatgtttcaagtgaaaggtgagagca

SEQ ID NO: 85913 - DNA, 360 bp, Zea Mays
tattttgttggttttaaacgttagtaattgctacgaagtagcataatttatatggagcgcattcagtttttattgatgcctgactttagcgatcacttcatattttggtttttttataagtttgacttcatgtgacttattttagaaactttagctcataaactttctattatttggtctctgtacgatgaaattatgtcattttataatctctgttcgttcagtcagtcgttgtgaactctcttctaatcgctcacttcatttatcgtgttgtacaagagacattgcatgtagtaaataataacatcagttagccaaatcaaaaagatattatacagtgagcggagacatcaataaaaa

SEQ ID NO: 85914 - DNA, 2047 bp, Zea Mays
aatacaccaccgctcgatccgctgcgcctcaaccatctcacctcgcctcgcctcgccagtcaccaacacgtacgctaagcaccatggaccagctccccaagcgcccggccaactacgtgccgctgagccccgtggggttccttccccgcgccaatgccgtctacggcgaccgcacgtccgtcatctaccggggcgtccgcttcacctggcgccagacgtacgcgcgctgccgccgcctcgcgtccgcgctgctgtccctcggcgtcgtccgcaggggcgacgtcgtctccgtgctcgcgcccaacgtgcctgccatgtacgagatgcacttcgccgtgcccatggccggcgccgtcctcaacaccatcaacacgcgcctcgacgccgccgccgtcgccaccatcctgcgccactccggggccaagctcttcttcgtcgactacgactacgtgcgcctcgccagcgacgcgctccgcctcctcgacgccgccgacgtcccgctcgtcgccgtcatcgacgacatccactcgcccacgggggcccgcctcggggagctcgagtacgaggcgctgctcgcgcacggcgaccccgacgccgacctcccgccgctccaagacgagtgggacgccgtcacgctcagctacacgtccggcaccacgtccgcgcccaagggcgtcgtctacagccaccgcggcgcgtacctcagcaccaccagcctgctgctgcagtggggggtgcccgccgagcccgtctacctctggacgctccccatgttccactgcaacggctggaccttcacctggggcatggcggcgcgcggcggcgtcaacgtctgcatccgcgacgcgcgccccgccgacatctaccgagccatcgcgcgccaccgcgtcacccacatgtgctgcgcgcccgtcgtcttcagcatcctcctcgacggcgacggcgacagcgacggcgccgccaggcagctccaagcccccgtccacgtcctcaccggcggcgcgccgccgccggccgcgctgctcgagcgcgtcgagcggatcggcttcaacgtcacgcacgcctacggcctcacggaggccacgggccccgcgctcgcgtgcgagtggcgcgaccagtgggaccgcctcccgctcccggagcgcgcgcgcctcaaggcgcgccagggggtcagcgtcctgtccctcgccgacgccgacgtcaagaacgccgacaccatgctcagcgtgccgcgcgacggcaggaccgtcggggagatcgtcctccggggcagcagcgtcatgaagggctacctcaacaacccggaggccaacgagagcgccttcagggccggctggttcctcaccggcgacgtcggcgtcgtgcacccggacggctacatcgagatcaaggaccgctccaaggacgtcatcatcagcggcggggagaacatctgcagcaaggagctggaggaggtgctgttccgccacccggccgtggccgacgccgcggtcgtggccatgccgcacccgcgctggggcgagacgccctgcgctttcgtcgtgcccagggacaaggccgccgtgctcagcgagggcgacgtgctcgccttctgcagcaagcgcatggcgcgcttcatggttcccaagaaggtggaggtcgtcggagcactaccgaggaacgcgcttggaaaggttgagaaggtcaagctccgggaggcggcacgtaagctggcgcccaccgtagcagcggcgcagaagcccaaggcgaagacgacgacggtcggcggtcgccgcgacgggcagccggtggcgcacgtcatggcggtgtcaaggctataggtagcagtggcagcacacagcgcgctccagggcacagctcgtgctacacagtaaacttctttttgccaaaagttttggagctactcacacatatgacatgccaaagctcctataataaggatgccgtacttttcaacttcttttacgggcagtgacagtgtaggtacactcgcacggatttcttttccttctatttttttctctctctctgtactttgatacttgac

SEQ ID NO: 85915 - DNA, 700 bp, Zea Mays
acgccatcacgtctcgtatcgcatcttgcgcactggccggcgcgcgggcggcgccgctcagctctttcctataaatagggcacaggccacagggaagaagggcaccagccggtgttggtttcagcttgtattcccactctgtcgcacagcgtcgcccgtcgccgctgagatcctaggaagaaatggagctctctcgcaagctcttcacggccgtcctcctcgtcatgctgctgctgctgtccgcagaggtcgggccggtggcggtggcggaggcgcggacgtgccagtcgcagagccacaggttccggggcccctgcctccgccggtccaactgcgccaacgtctgcaggaccgaggggttccccggcggcaggtgccgcggcttccgccgccgctgcttctgcaccacgcactgccactgattcgctcgcccagcggccggctggcgtcgccgtcgatcgcgtcgcgaccagtccatggctccatgcatgaataacaagggtgtgcgcggtttgtgttgtgatgccaaattgtatcctcgtcgtgtgttgagcagcggcgtgctgttgtacgtacgtctgcctctgttccatgtttcgggattttccatagcaaatgcatgcgtcgatcgagatctactccgaaagaaattcgatagacttcgcataatttccattcaaagagacgacgctgattgttt

SEQ ID NO: 85916 - DNA, 782 bp, Zea Mays
tctcgtatcgcatcttgcgcactggccggcgcgcgggcggcgccgctcagctctttcctataaatagggcacaggccacagggaagaagggcaccagccggtgttggtttcagcttgtattcccactctgtcgcacagcgtcgcccgtcgccgctgagatcctaggaagaaatggagctctctcgcaagctcttcacggccgtcctcctcgtcatgctgctgctgctgtccgcaggtacgttggtgcggccggctagccgtcttacatgtcttctgtgctgtggactcatcagccgctggcggccggcggcagcctactgatgatgatctgtctgagatgctgctgcgtgctgctgcagaggtcgggccggtggcggtggcggaggcgcggacgtgccagtcgcagagccacaggttccggggcccctgcctccgccggtccaactgcgccaacgtctgcaggaccgaggggttccccggcggcaggtgccgcggcttccgccgccgctgcttctgcaccacgcactgccactgattcgctcgcccagcggccggctggcgtcgccgtcgatcgcgtcgcgaccagtccatggctccatgcatgaataacaagggtgtgcgcggtttgtgttgtgatgccaaattgtatcctcgtcgtgtgttgagcagcggcgtgctgttgtacgtacgtctgcctctgttccatgtttcgggattttccatagcaaatgcatgcgtcgatcgagatctactccgaaagaaattcgatagacttcgcataa

SEQ ID NO: 85917 - DNA, 667 bp, Zea Mays
atctcagtatctcactcccagtcgcctccgcacatacaaatacgcgacgggaacggccagggccgaaccctaaaaccatcgccctgcccccgcctccgcctccgcctccgctgcatcccatggcggccgtgcagcgcctcctccgggcagtcgcccccggtggctcggcagcggcggcggtcaggaggcgcatgacgtcgcttgcgccggagcaggcgccgtctgcggccgccgggttcccattcgcggcggagcagagagcaaggcggccggtggcggcggagaggaacgtgcagtgggtgttcctgggctgccccggcgtgggcaagggcacctacgcgagccgcctgtcgcgcctcctcggcgtgccgcacatcgcgacgggggatcttgttcgcgacgagctcgcctccaccgggccacttgctacgcaggtgagagtgagcctcctctccgaacctctacggtccagatcggccccactctgctctgcgctgatctggatttcatatttagttgtgtggatcagcgacatggttgagcttatttagctagagaattgaggtcgcctcgtgtcgagtgtggatcagtacgcgaaattgttgatagatctgaacattgctgcctgaatttgaccttacgtaatacgctttggttgcaggcttca

SEQ ID NO: 85918 - DNA, 1359 bp, Zea Mays
atctcagtatctcactcccagtcgcctccgcacatacaaatacgcgacgggaacggccagggccgaaccctaaaaccatcgccctgcccccgcctccgcctccgcctccgctgcatcccatggcggccgtgcagcgcctcctccgggcagtcgcccccggtggctcggcagcggcggcggtcaggaggcgcatgacgtcgcttgcgccggagcaggcgccgtctgcggccgccgggttcccattcgcggcggagcagagagcaaggcggccggtggcggcggagaggaacgtgcagtgggtgttcctgggctgccccggcgtgggcaagggcacctacgcgagccgcctgtcgcgcctcctcggcgtgccgcacatcgcgacgggggatcttgttcgcgacgagctcgcctccaccgggccacttgctacgcagcttgctgaaattgttaatcaggggaaattagtttctgatgaaattatcatcaatcttttgtccaaaaggcttaagaaaggagaagaccagggagaatcaggatttattcttgatggttttccccgtacagtaaaacaagcggaaattcttgatggcgttacagacattgatatggtggttaatctgaaactaagagaagatgttatagtagagaagtgccttggcagaaggatttgcggccaatgtggaaagaacttcaatttggcctgcattgatgttaagggtgaaaatggactcccaccaatctacatggcaccactgttgcccccaaacaactgcatgtcgaagcttattacccgagctgatgataccgaagaggtggtcagaaatcggcttcagatatataatgacatgagtcaacctgtggaaggtttctaccgagagcaggggaagctcttggaatttgacttgcctggtgggatccctgaatcttggccaaagctgctccaggttctaaacctcgaggaccaagaggagttgaggttggctgcagcgtagccgcgtaggtctctgggagaccgacctacatactgggaaaaagaccataccacattttttttgaataatggagaagaggaaacttactccatagtttagtgcgttatgcagaagtaatggttttcttgtaaaaatcgatttgttggtttccaccggcgttttgatgatgagccggtactatgtaacttacgatagctgtaagcactaagcagcccattcttgcttgggacacagtttggagcgcatgaagacatgctgtagtgtttttttttttaattcataacaaacttgtagtacacatttgtgttcatgataaaacactgaagtagtatgatactacagaacaacacagacctgatgaatgcct

SEQ ID NO: 85919 - DNA, 601 bp, Zea Mays
ataaaatgtatgacatattctcattaatgtttgaactgtatgacatactgagtatgccatgttgatgactggtcattttgattctgcaagagtcaacctgtggaaggtttctaccgagagcaggggaagctcttggaatttgacttgcctggtgggatccctgaatcttggccaaagctgctccaggttctaaacctcgaggaccaagaggagttgaggttggctgcagcgtagccgcgtaggtctctgggagaccgacctacatactgggaaaaagaccataccacattttttttgaataatggagaagaggaaacttactccatagtttagtgcgttatgcagaagtaatggttttcttgtaaaaatcgatttgttggtttccaccggcgttttgatgatgagccggtactatgtaacttacgatagctgtaagcactaagcagcccattcttgcttgggacacagtttggagcgcatgaagacatgctgtagtgtttttttttttaattcataacaaacttgtagtacacatttgtgttcatgataaaacactgaagtagtatgatactacagaacaacacagacctgatgaatgcct

SEQ ID NO: 85920 - DNA, 2795 bp, Zea Mays
aggaggctagcttgtggagttttgctggggcaactgccctaatatctttgaccatagcaacgtaagtacagcatttcctgctgctataccatatcaacgttaatatagtgaaggaaataataggttatatggcgagaagttgtttcatacatgtaaactatataaacaaagacagacttggcgtaatttacaagatacagaaaaaatgtttacaaaaacaaagatataaacccaaacctgtccactttgtgcgtgagatggactcgaaaattgcacataaggaaaatggaagaaatgtcaggtaaaaaaatccatgttacgccagagttcgctcaaagaatctaaaccttgtattgacaaatcaagacgcaagacacaaaaccctaatcagagcagagagcatatcagaacttgggtggagaccggcttcccgatgctttaaaaggtccacttgaaccgaatgggtcggcgtcatcaaaagagtcaaaccggccaaaatttcgtgagctattccctgtgtcaaatcctgatacattctcgcccttggagctgctaatggagtcgaacctggagaaacggctttcctgagggaaggatccagtgtcttgggatctgaaggaatcaaacctcccgaagttataagaggagctatcgtcacggctttcgccaaattttggagagaacccagatgtgtatgcaggagaacttggaacagaatcgtcgaagaatgaattcctcttctttccaaatacactagcgccacttggtgagcctgcctccgacccaaagaaagagttatgcgtgccaccgcgttggtcggcctccttgttcagtacagtagaaccccaaacagagtcagtatcttgatcatcaaagttccaggaagtttcatcagcaaacttgtcaccaaaaacggattcagaaccaccatggtacctgtaactttctcttttgctgggagatgagtcatgcatgccaaagccggaagatttaaatggactccctgaggcacttcttccagcactgccaggactcctcacagattcatcaccaaaatcatatgctatttcactctcagccacttgatcacctccactgtaacgcctttcttccttgatatgaccattagaggatgcaacaggagacatatcaccatcatcccaaagagatggcacttttccattttcagcagaaactgggttttcctgtattgtaccattatccttaacaatactaaaccctgtcatgtcatatgattcaataaggaatacgatgtgataaattggaaatgaaagggaaaaaattgccccaagtgtaagacacaaaattaacaatagctcatgtcatcaaaatctatgtacagtatatcacacaaacaatgttctaacaacagaaggttcactagaacagaggcgggggcttggtatgttcaatgaaaggaacctaaacaaggatatcatagcagaaaaattatctccataaatggcactaataaataatatcagctacacaaatatcaagcttagaaacagtcaaggttgcttatttcaggatatggctttgctagtatacgttaacacgtgtaaaaggtatgaaatcttttgtctctttcacagattagttactagtattgaatttcttaaaacacacagtagtaaagtcacaaatattttttaaaacagtagcatggcaaacactggattgcaaaactcagcttgcaaccatgcagagtactccgatatataaacagacaattgccagctttaaaaagtaaccagacttcagggatgcttgagtaatagcagaggagaatgcagtggaagtatttaaccttcatcttcaaatttatcccagtcttcatcccactcaatgagtccctcttgtggcccaggttcccaacctataacaaataaagacagaaattatcagcatatgcaggttacgagtctgaaggctgcaggaagtaaattaaaatggtaacatccttgttttaaaggcgacgcctaggcgtccaggcgcccgaaagatccaaggtgttcccgtcgcataggtaagaatcagcaagagggcataggggaaggggaagggggcggcgccgtttcgggagcggcggaggccaaatcggaggccaaatccagggcagcgacatctgaatcgttggcggcagcttccaaatcgtcggcggcggcggcgaatctgaggcggcgacgacgaatatgaggcggcggcggctcaatcgggggcagcagcagctgaatggtgggggagagaggcaacctaggcttgccagaggaaggactatatgggctggctggtgggctgggcctccgaacccttccttctccttttttctttttctttttttctttttcttcctcctccatggggctgttttgctgattctcaggttgataaggcgtcgccttgctcgccttaggcgtctaggcggtggtccagcgccttatctcgccttaccgccttaagaaccatggataacatgccatagcatgaagttggactctcaattataataaaataaataataatatggagatggaaagccaggtaccggaaggaagctcaactgatgcagatggtttgaatttaagttcaaagtgtttgcaccgttcactaagagctttttccatctcttctaattgatattggattcgatcagctcgaacctaggaaataacaggtgttactgagagattaaaaaataagtacctagcaaagtaacagtgtacctgaagtaaaccatcaacacttccaccttgtaccattttaatcagtgc

SEQ ID NO: 85921 - DNA, 1088 bp, Zea Mays
aaactatataaacaaagacagacttggcgtaatttacaagatacagaaaaaatgtttacaaaaacaaagatataaacccaaacctgtccactttgtgcgtgagatggactcgaaaattgcacataaggaaaatggaagaaatgtcaggtaaaaaaatccatgttacgccagagttcgctcaaagaatctaaaccttgtattgacaaatcaagacgcaagacacaaaaccctaatcagagcagagagcatatcagaacttgggtggagaccggcttcccgatgctttaaaaggtccacttgaaccgaatgggtcggcgtcatcaaaagagtcaaaccggccaaaatttcgtgagctattccctgtgtcaaatcctgatacattctcgcccttggagctgctaatggagtcgaacctggagaaacggctttcctgagggaaggatccagtgtcttgggatctgaaggaatcaaacctcccgaagttataagaggagctatcgtcacggctttcgccaaattttggagagaacccagatgtgtatgcaggagaacttggaacagaatcgtcgaagaatgaattcctcttctttccaaatacactagcgccacttggtgagcctgcctccgacccaaagaaagagttatgcgtgccaccgcgttggtcggcctccttgttcagtacagtagaaccccaaacagagtcagtatcttgatcatcaaagttccaggaagtttcatcagcaaacttgtcaccaaaaacggattcagaaccaccatggtacctgtaactttctcttttgctgggagatgagtcatgcatgccaaagccggaagatttaaatggactccctgaggcacttcttccagcactgccaggactcctcacagattcatcaccaaaatcatatgctatttcactctcagccacttgatcacctccactgtaacgcctttcttccttgatatgaccattagaggatgcaacaggagacatatcaccatcatcccaaagagatggcacttttccattttcagcagaaactgggttttcctgtattgtaccattatccttaacaatactaaaccct

SEQ ID NO: 85922 - DNA, 1946 bp, Zea Mays
accaaacgcacgcaaagccacacgcacctcgacccgttcccaggccatcacaccaccagcaccacctcgtcccccgtacctgcctcgccgccgccgccgcctcctgccggcctccgatggcgaagacccgcaagcctccggcccctccttctccgccgccgccccccgcagaaacgccatccccgcagcggcggcgcaagaagaagggccgcccgtccctcctcgacctccagcgccgcagcctccgcctgcaggcccaaaaccctagccccgccgcctcgcccacccgccgggaccccaatccctccgacgacgatgaggacgggaccgggagcgggcggcggcggcagaagcgcctcaagagcgtcctctccggcgtcgtcaaggaggagcagggggaggggaagaaggatgcagcgaaagcgacggggaaagaggacgctgcgtcggatggtgggcccacggggactcccctcccagacaaaaagttgctactcttcatcctcgataggctccagaagaaggatacttatggagttttctcggagcctgtcgatgcagaggagcttccagattactttgacattattgaccatccaatggacttctcaacaatccgtgagaagctgttgaatgactcgtattctaagttggagcagtttgaggcacggtctattgaagctcttgccaaaaaggattttgagaacctgaggcaacccagtgatgaagaggaacccaaaccaccagctcgaaggggtaggccaccgaagaatcccaagacagagggtgatgtgtcaccagacctatctaatgtgaaagcaaataaacctgaagacaatgtcgatacattcagaaaaaggtcaactggagacagaactcgaaatacaaataccccaatgaaagatctgtccagttttcacgatacgtttggttcttttagtgcaaaaagaacagataaaattggtgattattctggttcatcgaagtggggaaagaaacctgttagtctagatgacgaccgcaggagtacatatgatcagcactattcacgtaatagctctctgtttgctgccctggatgatgagaggaaactactggtgccagtaggggttcagcagccacatgcatatgctaggagcttggcacgatttgcatcaaaattgggcccagttggctgggatgtggcagcaaatcgtatcagaagggcactcccccctgggacaagtttcggcccaggatgggttgtagatggtgaaccacctcaaaactctcagtgggctcctgcagcatcgactaatccctcctctgagcccactgctccacccaatatgccatccaagaatgatgtactcgatcacaagtctggaccgtcttctaatggggatgttactggtgaggagcatttaactagaactcaaacagtggcttctacatcaacaagctttgataagagctctgacatttccagtaaagtaaccaagcttgagaacggagttaccgagtcatgtggtggtacggacaatacgggatcagcagcgcctccaatgcagcaacacagccacagtcgagaaatccactctaacatcaatggctttactgctatgtcaaacgccatgagtcagtacgcggggcaagggttatttggatcaggcattcatatgacgcacgcccaagtgcttgggatgttttctggcatgaatggcaaagtcaatggctatatccataggcacccagtaactgctgatagtcttaaaacagcaggacagaacggagatgttggaaaggcaactgtgaaccccgtgcaaagcgcaggccaggatccaaagaccgcgaccgaaaatagctctgctcacccaggcttgaattccagagcccagtcatcaggttcctcgcctaggggaaagctgacaaatccgaagcaccctgatctggctttgcagctatga

SEQ ID NO: 85923 - DNA, 2603 bp, Zea Mays
accaaacgcacgcaaagccacacgcacctcgacccgttcccaggccatcacaccaccagcaccacctcgtcccccgtacctgcctcgccgccgccgccgcctcctgccggcctccgatggcgaagacccgcaagcctccggcccctccttctccgccgccgccccccgcagaaacgccatccccgcagcggcggcgcaagaagaagggccgcccgtccctcctcgacctccagcgccgcagcctccgcctgcaggcccaaaaccctagccccgccgcctcgcccacccgccgggaccccaatccctccgacgacgatgaggacgggaccgggagcgggcggcggcggcagaagcgcctcaagagcgtcctctccggcgtcgtcaaggaggagcagggggaggggaagaaggatgcagcgaaagcgacggggaaagaggacgctgcgtcggatggtgggcccacggggactcccctcccagacaaaaagttgctactcttcatcctcgataggctccagaagaaggatacttatggagttttctcggagcctgtcgatgcagaggagcttccagattactttgacattattgaccatccaatggacttctcaacaatccgtgagaagctgttgaatgactcgtattctaagttggagcagtttgaggcacggtctattgaagctcttgccaaaaaggattttgagaacctgaggcaacccagtgatgaagaggaacccaaaccaccagctcgaaggggtaggccaccgaagaatcccaagacagagggtgatgtgtcaccagacctatctaatgtgaaagcaaataaacctgaagacaatgtcgatacattcagaaaaaggtcaactggagacagaactcgaaatacaaataccccaatgaaagatctgtccagttttcacgatacgtttggttcttttagtgcaaaaagaacagataaaattggtgattattctggttcatcgaagtggggaaagaaacctgttagtctagatgacgaccgcaggagtacatatgatcagcactattcacgtaatagctctctgtttgctgccctggatgatgagaggaaactactggtgccagtaagcatactccgatcagatacagtttgtggtcaagagctacagatttcaatttttggctgacttgtaaaacctaccaacttaactatagttgatcattgcaaccaccgtcgtatttcaatctatccttgctggaacttgctgtgctaatatttcttgttcttttttttttgtttcttattgtctgaaccaggtaggggttcagcagccacatgcatatgctaggagcttggcacgatttgcatcaaaattgggcccagttggctgggatgtggcagcaaatcgtatcagaagggcactcccccctgggacaagtttcggcccaggatgggttgtagatggtgaaccacctcaaaactctcagtgggctcctgcagcatcgactaatccctcctctgagcccactgctccacccaatatgccatccaagaatgatgtactcgatcacaagtctggaccgtcttctaatggggatgttactggtgaggagcatttaactagaactcaaacagtggcttctacatcaacaagctttgataagagctctgacatttccagtaaagtaaccaagcttgagaacggagttaccgagtcatgtggtggtacggacaatacgggatcagcagcgcctccaatgcagcaacacagccacagtcgagaaatccactctaacatcaatggctttactgctatgtcaaacgccatgagtcagtacgcggggcaagggttatttggatcaggcattcatatgacgcacgcccaagtgcttgggatgttttctggcatgaatggcaaagtcaatggctatatccataggcacccagtaactgctgatagtcttaaaacagcaggacagaacggagatgttggaaaggcaactgtgaaccccgtgcaaagcgcaggccaggatccaaagaccgcgaccgaaaatagctctgctcacccaggcttgaattccagagcccagtcatcaggttcctcgcctaggggaaagctgacaaatccgaagcaccctgatctggctttgcagctatgagcgcggtagtaggcattgacatagtttggtttagtactgtgatctgtgacagaggcatgagctcctcgagcactgctcctccgggcctaattctcaagcttccggcacgctgatagacatttgtagcttgccaagcggttgaagaggtaacagatggttggattgttgtcagagaataataacgcaaagcagctgttgcatgaggcggcggcggaacaccatgtaggccccccattttaatcatttgacccccagtgagttgttgtaaaagggtagggtagcttctgtacaggttctaatcttattggagatgacagtgtttcggatgaggcggccgcctgttgtccaatttgtaacatttataggaggaagtatacaggcgaaaaaggcagtgaataattgtgccttttgaaatgttcgaacggccgattggcgacatgttgctgttgttttgatttcttgtg

SEQ ID NO: 85924 - DNA, 129 bp, Zea Mays
ggaccagtgcgtaaaatctcaaaaaaatttggaccatttctcgatttgtgcgtgtcatccttgcgcaggggccatgctaatcttctctgtatcgttccaattttatcggatgtctccgaagagacggag

SEQ ID NO: 85925 - DNA, 1356 bp, Zea Mays
caaggtgccgtacagataatccggtggaacgcgatgttaattccggcgtctatcttggctgcctcttcctcctcccgattcagcgtgaggggccagggccagatgcggggcctcccttcccttcccttccgtccggtccccatgggccatggcgtcgcccgctatgatttcttggcaaaccactcgcgccgttgcctcttaagccggggtcgccccctctctccagtctccacacagtccacacgcacggcttccctctcctcgccgccggaggcgcgccgcggaagacgccacaatgagtttcgtcccgtccgttggcgcactagaggatgccctgcctgaccctgcactgcaatccgtcgccgggtgctgaccaggcgagctcctgattcggagccattttgcggggttcttttggggggccccatcgccgtgcttcgtttccctgcccgccttggccgtgcattaatacccgcttccttgtgatagtcctctccctccctccctccctccgccctcacttcccactcacctcgcgctcgtcgcctcggctggttcggttcttgggagtgtcagtctgctgccggttgcggtgaccggcaccggcacgtagacgcagcacttctcggagaccatctgtctgcgccgttccgatgggttgcttcgggtgctttgcgccggaggtggatgaggacctcaggccctccaagcacgacgattcgtcaggggctgatgcgaggaggaaggtcgcgccggatgtggccagcggctacgcgcacagcttcaccttcaaggatctgcttgtggcaactggctacttcaacgaggccaatttcatcggagaaggtggattcgggaaggtgtacaagggcaagatcaacggacagatggtggcagtgaagcagctcgctcgagacggcgtgcaggggaggaacgagttcttggtcgaggtgctcatgcttacagtgctcaaccatcgcaaccttgtcagcttggtcgggttctgcgcgcagggggacgagaggctgctggtctacgagtacatgccgttcggaagcctggagagccatctgtttggtaagctcttcattctttagccttttgtggctcttcgttgggtgtagctgctaattgcagacgtcagttgaaatgctcgcccacctttttcgccttggatttatgacagttctctgcatttccccttttgatttgtgatagcaagttgctgaagtgtttaaggtggaaaagatttgggggcaactaattggacatttcataactctttttggagattgcataacttaatgtacgattggatgaaatgaaagatagaaatcagtaccattatatgttttt

SEQ ID NO: 85926 - DNA, 2255 bp, Zea Mays
caaggtgccgtacagataatccggtggaacgcgatgttaattccggcgtctatcttggctgcctcttcctcctcccgattcagcgtgaggggccagggccagatgcggggcctcccttcccttcccttccgtccggtccccatgggccatggcgtcgcccgctatgatttcttggcaaaccactcgcgccgttgcctcttaagccggggtcgccccctctctccagtctccacacagtccacacgcacggcttccctctcctcgccgccggaggcgcgccgcggaagacgccacaatgagtttcgtcccgtccgttggcgcactagaggatgccctgcctgaccctgcactgcaatccgtcgccgggtgctgaccaggcgagctcctgattcggagccattttgcggggttcttttggggggccccatcgccgtgcttcgtttccctgcccgccttggccgtgcattaatacccgcttccttgtgatagtcctctccctccctccctccctccgccctcacttcccactcacctcgcgctcgtcgcctcggctggttcggttcttgggagtgtcagtctgctgccggttgcggtgaccggcaccggcacgtagacgcagcacttctcggagaccatctgtctgcgccgttccgatgggttgcttcgggtgctttgcgccggaggtggatgaggacctcaggccctccaagcacgacgattcgtcaggggctgatgcgaggaggaaggtcgcgccggatgtggccagcggctacgcgcacagcttcaccttcaaggatctgcttgtggcaactggctacttcaacgaggccaatttcatcggagaaggtggattcgggaaggtgtacaagggcaagatcaacggacagatggtggcagtgaagcagctcgctcgagacggcgtgcaggggaggaacgagttcttggtcgaggtgctcatgcttacagtgctcaaccatcgcaaccttgtcagcttggtcgggttctgcgcgcagggggacgagaggctgctggtctacgagtacatgccgttcggaagcctggagagccatctgtttgacgtgcctctcggcaagaaaccactcgactggaacacgcgcgtgaggatagccgtgggagtcgcggaaggggtttcctacctgcacaacgtagccgacccgcctgtgatctaccgcgacatgaaggccgccaacattctgctgggcgaggacttcagcccgaggctctccgacttcgggctcgcgaaggtcgggccggttggagacaggactcacgtgtccacgagagtcatgggcacctatggctactgcgctcctgactacgtcgtgagcggcaagctcaccatgaaatccgacatatacagtttcggcgtgctcctgctggaactgatcacggggaggaggatctacgacgcctcgaggcctaaaccggagcagagtctgttgacatggtcgaggccgttcctgcatgacaagaggaagttctacaggctcgctgacccggctctgctgggctgctacccgtcctcggcactgaaccagctggtcgtgatcagcatcatgtgcctccaagaccagccccacgtccgcccgatcatctccgatgtcgtcataggcctgaaccacgtcgcgagccagccatacaccgctgagcgcccgccgcccgcgtccgtgagctccccggtgggcagcgggtcgccgcagctcgtcaggacgccgtccagaaggagaggcggtactggtaggaggagcgcgcagtgcgcttagggcttaggcccacaggctgcattgttgcacgcatgtctcgaagagcagcaagatacgtcgtcagctcagtcagatcagatgaggccggctaggaggagggatgttgaaattgatgaagccggcaagttcagttccgtttagccggccggagcctttttgattggagcggcggggtctcgagtgagtgacctctgccttgacagggagatgtagcgaggctgatggttaggaaggagagttcaggttgactatgcatgactaatgctcttttcatatgcttcttcattgttgttgttgttgtcagttttgaattctgtaggcagtgtacataggatcagtgtcctctgtaggggggtcgtgggatgttcatcatcaattcaccagccatgtacagagctgccatggctggcctgtagatgcaataagaagttcaccagggtttaagcttaagaggcatatcacatgttggtc

SEQ ID NO: 85927 - DNA, 1355 bp, Zea Mays
gtctcaccaaactagcccttaatctgttaggcactgctgtacgtcctcaccttccttttgtttggaaacaccttgttggaacagtctataccacagagaattattgaagtcctgaggttctcatggcttgtctcatgtctgaacatgacacgttcttcctgacggtagcatagctagacgtgcctctcggcaagaaaccactcgactggaacacgcgcgtgaggatagccgtgggagtcgcggaaggggtttcctacctgcacaacgtagccgacccgcctgtgatctaccgcgacatgaaggccgccaacattctgctgggcgaggacttcagcccgaggctctccgacttcgggctcgcgaaggtcgggccggttggagacaggactcacgtgtccacgagagtcatgggcacctatggctactgcgctcctgactacgtcgtgagcggcaagctcaccatgaaatccgacatatacagtttcggcgtgctcctgctggaactgatcacggggaggaggatctacgacgcctcgaggcctaaaccggagcagagtctgttgacatggtcgaggccgttcctgcatgacaagaggaagttctacaggctcgctgacccggctctgctgggctgctacccgtcctcggcactgaaccagctggtcgtgatcagcatcatgtgcctccaagaccagccccacgtccgcccgatcatctccgatgtcgtcataggcctgaaccacgtcgcgagccagccatacaccgctgagcgcccgccgcccgcgtccgtgagctccccggtgggcagcgggtcgccgcagctcgtcaggacgccgtccagaaggagaggcggtactggtaggaggagcgcgcagtgcgcttagggcttaggcccacaggctgcattgttgcacgcatgtctcgaagagcagcaagatacgtcgtcagctcagtcagatcagatgaggccggctaggaggagggatgttgaaattgatgaagccggcaagttcagttccgtttagccggccggagcctttttgattggagcggcggggtctcgagtgagtgacctctgccttgacagggagatgtagcgaggctgatggttaggaaggagagttcaggttgactatgcatgactaatgctcttttcatatgcttcttcattgttgttgttgttgtcagttttgaattctgtaggcagtgtacataggatcagtgtcctctgtaggggggtcgtgggatgttcatcatcaattcaccagccatgtacagagctgccatggctggcctgtagatgcaataagaagttcaccagggtttaagcttaagaggcatatcacatgttggtc

SEQ ID NO: 85928 - DNA, 1258 bp, Zea Mays
gccattagtttacatctgcattcttcttctgtttctcattcgtgatcgacagaggtctcttttcacctttgaatgaacagacgtgcctctcggcaagaaaccactcgactggaacacgcgcgtgaggatagccgtgggagtcgcggaaggggtttcctacctgcacaacgtagccgacccgcctgtgatctaccgcgacatgaaggccgccaacattctgctgggcgaggacttcagcccgaggctctccgacttcgggctcgcgaaggtcgggccggttggagacaggactcacgtgtccacgagagtcatgggcacctatggctactgcgctcctgactacgtcgtgagcggcaagctcaccatgaaatccgacatatacagtttcggcgtgctcctgctggaactgatcacggggaggaggatctacgacgcctcgaggcctaaaccggagcagagtctgttgacatggtcgaggccgttcctgcatgacaagaggaagttctacaggctcgctgacccggctctgctgggctgctacccgtcctcggcactgaaccagctggtcgtgatcagcatcatgtgcctccaagaccagccccacgtccgcccgatcatctccgatgtcgtcataggcctgaaccacgtcgcgagccagccatacaccgctgagcgcccgccgcccgcgtccgtgagctccccggtgggcagcgggtcgccgcagctcgtcaggacgccgtccagaaggagaggcggtactggtaggaggagcgcgcagtgcgcttagggcttaggcccacaggctgcattgttgcacgcatgtctcgaagagcagcaagatacgtcgtcagctcagtcagatcagatgaggccggctaggaggagggatgttgaaattgatgaagccggcaagttcagttccgtttagccggccggagcctttttgattggagcggcggggtctcgagtgagtgacctctgccttgacagggagatgtagcgaggctgatggttaggaaggagagttcaggttgactatgcatgactaatgctcttttcatatgcttcttcattgttgttgttgttgtcagttttgaattctgtaggcagtgtacataggatcagtgtcctctgtaggggggtcgtgggatgttcatcatcaattcaccagccatgtacagagctgccatggctggcctgtagatgcaataagaagttcaccagggtttaagcttaagaggcatatcacatgttggtc

SEQ ID NO: 85929 - DNA, 1700 bp, Zea Mays
atgtcgtctgccattgagaaacgcgtggttggttgctcggtgccgtacgccatgaggaactgctgtggctccgctgacgccgacgtgaatccgccgagtcgtcctcctaccgaaggtttacccggcttttcccacacgctgctagctccgagtctccgatcgagttctcggctggttttccgccgccacgccgtcggccgcggtacgtgatgtggttcgacttcgacggacccacgtttgatcgttgctggcttttgtgcacgtgcagggccgctgccgccgccgaagccgagcgacggcgggggagcgaagcaagagaagggaggaggagacggtcctgaccagtgcccgggtctcgggcgggttctggaagcgccgaggctgagggagttcacgctcgccgagctgcgggtggccacgcgcgggttgaagccggagatggtgctcggggagggcggcttcggcccggtctacaagggctgggtcgacgagcgcacgctcaatccagccaagagcaacgccggcgtcatcgtcgccgtcaagaagctcaacccggagagcttccggggcctgcaggagtggcagtcggaggtcaactttctgggtaggctgtcgcatcccaacctggtgaggctgctgggatactgtggcgactggcgaggacagggaactgctcctggtggtgtacgagttcatgtccaatggcagcctagaaaaccacctgttcagaagtaagaagccagcctgcccctctgccacggccagcattattgttggcactcttcagaagtggcaggcagatcgtcctgcagtctgacttgctgggagtcaaaatgtctgtctggccgggcagggggtggaaacttggaggcgctgtcgtggagccggaggctcaagatcgccacgggcgcggcgcgcggcctcgccttcctgcactcgtcggagaaacaggtcatccacagggacttcaaggcgtccaacatcctcctcgactcggatttcaccgcgaagctgtcggacttcgggctcgccaagaacgggccctccgcggggacgtcgcacgtcacgacccgggtcatggtcgcctacggctacgcggcgccggagtacgtcgccaccgggcaactgtacgtcaagagcgacgtgtacggcttcggcgtggtgctgctggagctgctgacggggctgcgcgcgcacgacctgaaccggccgacccaccagcacagcctggtggagtgggcgcggccttatctctccgccggcgccggcaagctcaagagcctcatggacgagcggatggacggccagtaccacaccaaggccgcgctctcggggtcgccaggctcgccggcaagtgcctcaacagcgaccgcaagagccgcccttccatggacgacgtcgtcgccgcgctcgaggacatcgaggccctgcagcaggggggcggtggggcagcgggacctgccgccgcggcccggggcgcgccggtcgtcgccgcaccatgatttttccaggccttgctgatgcggcatggtcgttgcttggcttgagcaaggctatagctgctgactcagaacagtactggcattgattcttcagcttcattcaactaatcgccacagagtacacatttttactcgattgatccctcattattacagcagtatataggttcagcaatgttcttggaatcggacaggatg

SEQ ID NO: 85930 - DNA, 1439 bp, Zea Mays
cattgagaaacgcgtggttggttgctcggtgccgtacgccatgaggaactgctgtggctccgctgacgccgacgtgaatccgccgagtcgtcctcctaccgaaggtttacccggcttttcccacacgctggccgctgccgccgccgaagccgagcgacggcgggggagcgaagcaagagaagggaggaggagacggtcctgaccagtgcccgggtctcgggcgggttctggaagcgccgaggctgagggagttcacgctcgccgagctgcgggtggccacgcgcgggttgaagccggagatggtgctcggggagggcggcttcggcccggtctacaagggctgggtcgacgagcgcacgctcaatccagccaagagcaacgccggcgtcatcgtcgccgtcaagaagctcaacccggagagcttccggggcctgcaggagtggcagtcggaggtcaactttctgggtaggctgtcgcatcccaacctggtgaggctgctgggatactgtggcgactggcgaggacagggaactgctcctggtggtgtacgagttcatgtccaatggcagcctagaaaaccacctgttcagaaggggtggaaacttggaggcgctgtcgtggagccggaggctcaagatcgccacgggcgcggcgcgcggcctcgccttcctgcactcgtcggagaaacaggtcatccacagggacttcaaggcgtccaacatcctcctcgactcggatttcaccgcgaagctgtcggacttcgggctcgccaagaacgggccctccgcggggacgtcgcacgtcacgacccgggtcatggtcgcctacggctacgcggcgccggagtacgtcgccaccgggcaactgtacgtcaagagcgacgtgtacggcttcggcgtggtgctgctggagctgctgacggggctgcgcgcgcacgacctgaaccggccgacccaccagcacagcctggtggagtgggcgcggccttatctctccgccggcgccggcaagctcaagagcctcatggacgagcggatggacggccagtaccacaccaaggccgcgctctcggggtcgccaggctcgccggcaagtgcctcaacagcgaccgcaagagccgcccttccatggacgacgtcgtcgccgcgctcgaggacatcgaggccctgcagcaggggggcggtggggcagcgggacctgccgccgcggcccggggcgcgccggtcgtcgccgcaccatgatttttccaggccttgctgatgcggcatggtcgttgcttggcttgagcaaggctatagctgctgactcagaacagtactggcattgattcttcagcttcattcaactaatcgccacagagtacacatttttactcgattgatccctcattattacagcagtatataggttcagcaatgttcttggaatcggacaggatg

SEQ ID NO: 85931 - DNA, 1311 bp, Zea Mays
agcccaaagactgacaaaatccagggataaaaagagcaaggtcaaccggcagcacatcgtgaaccccatatatccagctctaatctcaaacaaaaaaatgcctgttacaggagtaaagggaacaacaaatgccattgcgcaagttctgatcgccaaataggatagcacttcactcgtcatcctcatcatcatcgacaccacccgaggaattgagggcgttgagcctttccacgagtctggcctttctctgctcataggtcaacttcttgggggtatacctcttgtgctcctttggttgcgcctttgttgacttggccatgctaggatcagcacggatggccgcatggaccttcttgtacagagcttccatgtcatcggcttcaatccccttcttgatgtactcgctgaagtgagcctggtacttctcgggctcctcgtcagccagtaccttcatatactcagcaacatggagaccatagatgtacttgcggtggatatcagcatccagctgcttatcatccttcttgaagccagcaaacctcttatcgctgtgaggaatatctagaccaccatccaaagctccctgcagcaacaagcatcttggcaccaaagacacggtttccagtagtagtcctaataaggccgacatctaagagggcacggaaaggcctcctctcttccgctggctcgacagagaagtcctcaccagtggcctgataacagaaaatcatcacaaatgctcaattgttcacccaaagcaatatcacaaaaaaaaacagcaagcagaataaatttaaatatttgttttaattttacctcaacattgccctcatactcctgatccaaatcacggatcttgagaacacgacgagccaaaagaagaccagtgcagtaggctagaagatgtgggcaaggagttagcaatacaaaatatatgtgcttagtaacaatagacaatttacattctttgcagacataaatatacctgcagcatagttggtcagaccaacttctagaccgtatcgtggcagctcacgggaatatgcagcagcaagaataatatcacccgtgatacttgcagatacgatttgtgcaatgatgtccttgttggtctaaggagatttattaagagatacaatgccgccaatgcttaaagtgccaaaataataagcaggaggatgccaacaagaagtcaccaaataataaatttgaaggatacaaatcgcacaataaatcggtatttgggtgtattgtacttgttcttgtcttggttaatcaaccttatccttgccctgtagtctgtcttaccag

SEQ ID NO: 85932 - DNA, 178 bp, Zea Mays
atctcacaatgccaactacagatcgcatggatcagaacacagttatgttcgtcatcatattctattggcccatgtttccaagaagtcgctccactgcagcatgaacatttccagcagtggcggccaaggctcggatgttctcctgtgtgtcaaaaaaacccatttcttggagctgagc

SEQ ID NO: 85933 - DNA, 853 bp, Zea Mays
ctggctgctctcggaccttggacgacacgtcgacaccagtgcagcagccaccaaagatccggcccgcccgcgccgcacgagaccgccgcccgcgccgcacgagagtcatgacgacgccgcggcggcacgctgatccgtcgccctcgccctcgccctcttccccgccgcagcttctctcccgcctccgctccggggcctccagtttcctggcgcggcagtacagcacggggaagggaggcgataacaccggtccttcgaagccgaaaggtggtggctcctccgcgccaaggcacctcaggccaggattcgtggatccttcatcatggaaacattttgactcaagggctgttggcattaaaccgggtgctatacatacagatgcatgggcggttttaaaaaagctcagacgtgaaggttttcaagcttaccttgttggtggctgtgtgagagatttgctactcaaaagggtacctaaagattttgacgtgattaccactgcaagtctcgaacagcttaagaaaaatatattcaggagatctaggattgtaggcaaacgctttccaatatgtcttcttaaaatgcgtgactctgtaattgagatttcgagctttcgaacagttgctaattatgggaatagaagtgaagtggtagattatgtggcagagttgaatggctctgacgttagggatattcttcgctggaaggattctatgagaagagacttcacaataaatggtcttttctttaacccgatgaactgcaaaatttatgattacgtgaatggagtaagggatatgagaaaaaacaaagtaacagtcactgagctccatctttatttaagcataggttcatc

SEQ ID NO: 85934 - DNA, 2099 bp, Zea Mays
ctggctgctctcggaccttggacgacacgtcgacaccagtgcagcagccaccaaagatccggcccgcccgcgccgcacgagaccgccgcccgcgccgcacgagagtcatgacgacgccgcggcggcacgctgatccgtcgccctcgccctcgccctcttccccgccgcagcttctctcccgcctccgctccggggcctccagtttcctggcgcggcagtacagcacggggaagggaggcgataacaccggtccttcgaagccgaaaggtggtggctcctccgcgccaaggcacctcaggccaggattcgtggatccttcatcatggaaacattttgactcaagggctgttggcattaaaccgggtgctatacatacagatgcatgggcggttttaaaaaagctcagacgtgaaggttttcaagcttaccttgttggtggctgtgtgagagatttgctactcaaaagggtacctaaagattttgacgtgattaccactgcaagtctcgaacagcttaagaaaaatatattcaggagatctaggattgtaggcaaacgctttccaatatgtcttcttaaaatgcgtgactctgtaattgagatttcgagctttcgaacagttgctaattatgggaatagaagtgaagtggtagattatgtggcagagttgaatggctctgacgttagggatattcttcgctggaaggattctatgagaagagacttcacaataaatggtcttttctttaacccgatgaactgcaaaatttatgattacgtgaatggagtaagggatatgagaaaaaacaaagtgtgtacagtgattcctgctcacatttctttcatggaggaccctgcaaggattttacgtggcttcagaattgctgctcgccttggtttccagttttccagtgaaacttctaatgcgatacgtgatttttcttcatctataaataatatcgataaggcaaggctgatgatggaaatgaattatataatgtcttatggagcagcagcaccttctgttaggttgcttagaaaatatggactacttgatattttgctgcctttccagtcagcatatttgtctgagcagatgaaaggtggttcaagtgacagacatctgatgcttatgaaattactgtctaatcttgataggttactctctgcggaccgaccatgccatagctctttgtggctggcgttgttggcatttcacagtacattggttatatatccacaagacaccttggtaataagagcttttgctgcagtgttgtatttcggaacatgggaaacaacagtcaaatttctgagagaagaagttggagctgaagttccatttgccccagagacaatggggccttctcggaccaaactggattgtcttaaggaacaaacgtcacatctagcatcactagtcaattcttcagtagatatattgacatgtcctcatgatctggagcaatcgctagccagattctcggaacctctgcaattttcaggagtggtaagtatccctttgtatatgccaccaccatgatctgtgctagtttaatttcacggcatcttctctgaattgtgattccaggtagtcgcatctaacaatgataggaaaaagttgtcggccgtatttgagggccttgcttctgacctacattcatatgatgggagaagagggatgcgtgggattgattactcgtcgctgaaacttggggatcttgccgaggtccgatttgttctcggtaaagtgatcatggacacaatgtacgacaagttaccatgcgaatctactgaggatgagggcgctgctgcagatgttgctggtggaagcctacctccattgtccgcattgttttaatcgtagtgaagcatagggttcactcaacaaactaggcagcccttttctggttttagtcagtgctgcaaagcaatcgagttgttcagaattttcttgtgttgcaagatgaccacaacgacaactgtagacgtatttcagaatttttatcaaggaactcgaatgtgcagttgtagctaaactcccatgaatcctttcggtgaacatagggcgtgcacttatcaatctctttgctagggaaaa

SEQ ID NO: 85935 - DNA, 2024 bp, Zea Mays
ctggctgctctcggaccttggacgacacgtcgacaccagtgcagcagccaccaaagatccggcccgcccgcgccgcacgagaccgccgcccgcgccgcacgagagtcatgacgacgccgcggcggcacgctgatccgtcgccctcgccctcgccctcttccccgccgcagcttctctcccgcctccgctccggggcctccagtttcctggcgcggcagtacagcacggggaagggaggcgataacaccggtccttcgaagccgaaaggtggtggctcctccgcgccaaggcacctcaggccaggattcgtggatccttcatcatggaaacattttgactcaagggctgttggcattaaaccgggtgctatacatacagatgcatgggcggttttaaaaaagctcagacgtgaaggttttcaagcttaccttgttggtggctgtgtgagagatttgctactcaaaagggtacctaaagattttgacgtgattaccactgcaagtctcgaacagcttaagaaaaatatattcaggagatctaggattgtaggcaaacgctttccaatatgtcttcttaaaatgcgtgactctgtaattgagatttcgagctttcgaacagttgctaattatgggaatagaagtgaagtggtagattatgtggcagagttgaatggctctgacgttagggatattcttcgctggaaggattctatgagaagagacttcacaataaatggtcttttctttaacccgatgaactgcaaaatttatgattacgtgaatggagtaagggatatgagaaaaaacaaagtgtgtacagtgattcctgctcacatttctttcatggaggaccctgcaaggattttacgtggcttcagaattgctgctcgccttggtttccagttttccagtgaaacttctaatgcgatacgtgatttttcttcatctataaataatatcgataaggcaaggctgatgatggaaatgaattatataatgtcttatggagcagcagcaccttctgttaggttgcttagaaaatatggactacttgatattttgctgcctttccagtcagcatatttgtctgagcagatgaaaggtggttcaagtgacagacatctgatgcttatgaaattactgtctaatcttgataggttactctctgcggaccgaccatgccatagctctttgtggctggcgttgttggcatttcacagtacattggttatatatccacaagacaccttggtaataagagcttttgctgcagtgttgtatttcggaacatgggaaacaacagtcaaatttctgagagaagaagttggagctgaagttccatttgccccagagacaatggggccttctcggaccaaactggattgtcttaaggaacaaacgtcacatctagcatcactagtcaattcttcagtagatatattgacatgtcctcatgatctggagcaatcgctagccagattctcggaacctctgcaattttcaggagtggtagtcgcatctaacaatgataggaaaaagttgtcggccgtatttgagggccttgcttctgacctacattcatatgatgggagaagagggatgcgtgggattgattactcgtcgctgaaacttggggatcttgccgaggtccgatttgttctcggtaaagtgatcatggacacaatgtacgacaagttaccatgcgaatctactgaggatgagggcgctgctgcagatgttgctggtggaagcctacctccattgtccgcattgttttaatcgtagtgaagcatagggttcactcaacaaactaggcagcccttttctggttttagtcagtgctgcaaagcaatcgagttgttcagaattttcttgtgttgcaagatgaccacaacgacaactgtagacgtatttcagaatttttatcaaggaactcgaatgtgcagttgtagctaaactcccatgaatcctttcggtgaacatagggcgtgcacttatcaatctctttgctagggaaaactttag

SEQ ID NO: 85936 - DNA, 750 bp, Zea Mays
ctggagggggctgatgcgtcgcttcatttctgctcttctgccgtctagtcctttgtactgaccggcgctccggtcgtctcctcgcgcttgcgggttccccgtccccaccccacgccgggggcaagagatggagaacgcggtggtgctccgggagtggtttgaccgcgtcgacgccggccgcaccggcaacatcaccgctgcccagctccagggcgcgctcgctgtcggcaacctcaacttccccatctccgtcgtgcagcagatgattaggatgtatgacttcgatcggaatggcaccatgaacttcgaagagtttctggctcttaacaaattcctacagaaggtgcaaaatgtgttttccaccctggataggggtcgtggatttctaagtcttgaggaggtgtaccaggcattaatcaaacttggtttctcgttggattcaccagccttctatactgtttgtgaggtaaggaagaggattcagctgccttctactttggcccatggtgaatcctgtcttgttaaagggagttcatcctaggcctgtttaaacttaaatcttaacacataagttatttgtcctaaggctgtctccagtaacgtcccctaaattttgtccctaaaagaatattccatgtcctttacggaatcctctaaaagattttgtcctctatattttctgcatctccagcaacgtcccataaaatcgatcctctatatatacagtgttaacagaatccactaactacc

SEQ ID NO: 85937 - DNA, 1277 bp, Zea Mays
ctggagggggctgatgcgtcgcttcatttctgctcttctgccgtctagtcctttgtactgaccggcgctccggtcgtctcctcgcgcttgcgggttccccgtccccaccccacgccgggggcaagagatggagaacgcggtggtgctccgggagtggtttgaccgcgtcgacgccggccgcaccggcaacatcaccgctgcccagctccagggcgcgctcgctgtcggcaacctcaacttccccatctccgtcgtgcagcagatgattaggatgtatgacttcgatcggaatggcaccatgaacttcgaagagtttctggctcttaacaaattcctacagaaggtatgtatgtggcttctctaatttggatctgttgcgcatttaggaattaggattagatgattagtggattactcactcagacaagcatcttctgcaacaggcaatttttctgtttcataatcaactgggtctgatatgtctcataccaactaatggccgtgagaatgttatttaggcttatataagttatacagaagatgtttcgttatgataatgcacaaaagttatggtgtgcaatgaaaggtatatttgagagtaatagaaatagactcattgtgctgcatccttaactgtaagtttcttgtgtgcgactcatcgtaatcgcaggtgtttcctgtttccaatttgcaggtgcaaaatgtgttttccaccctggataggggtcgtggatttctaagtcttgaggaggtgtaccaggcattaatcaaacttggtttctcgttggattcaccagccttctatactgtttgtgagagctttgacaagagcaagaagggcatgattcaattggatgagtttatatcactctgcatttttgttcagtcagctcgtaacctgttcaattcgttcgatacaagcaagcaaggaagagtgactttagattttaaccaattcgtgtactgcacggcaaactgcaggatataatgtggttgtacatgggcgcccaaacaaaaaggttagcagtgtgaagtgctaaccgttcgccaatcaaacttcgtttctgaaccggcagctgggtattgcaattcactgttcgccatctaaggcttgttgtaccatcattttgcctgaatgtattcttggtcacctattggtcaatccgtgtccagttttctgacatcctgggctgtatatacagaataagacttggcaatttgtggctgtatttatataaaatatttcaagtaatccagacattcactcctttgcattg

SEQ ID NO: 85938 - DNA, 914 bp, Zea Mays
gatgcgtcgcttcatttctgctcttctgccgtctagtcctttgtactgaccggcgctccggtcgtctcctcgcgcttgcgggttccccgtccccaccccacgccgggggcaagagatggagaacgcggtggtgctccgggagtggtttgaccgcgtcgacgccggccgcaccggcaacatcaccgctgcccagctccagggcgcgctcgctgtcggcaacctcaacttccccatctccgtcgtgcagcagatgattaggatgtatgacttcgatcggaatggcaccatgaacttcgaagagtttctggctcttaacaaattcctacagaaggtgcaaaatgtgttttccaccctggataggggtcgtggatttctaagtcttgaggaggtgtaccaggcattaatcaaacttggtttctcgttggattcaccagccttctatactgtttgtgagagctttgacaagagcaagaagggcatgattcaattggatgagtttatatcactctgcatttttgttcagtcagctcgtaacctgttcaattcgttcgatacaagcaagcaaggaagagtgactttagattttaaccaattcgtgtactgcacggcaaactgcaggatataatgtggttgtacatgggcgcccaaacaaaaaggttagcagtgtgaagtgctaaccgttcgccaatcaaacttcgtttctgaaccggcagctgggtattgcaattcactgttcgccatctaaggcttgttgtaccatcattttgcctgaatgtattcttggtcacctattggtcaatccgtgtccagttttctgacatcctgggctgtatatacagaataagacttggcaatttgtggctgtatttatataaaatatttcaagtaatccagacattcactcctttgcattg

SEQ ID NO: 85939 - DNA, 877 bp, Zea Mays
gatgcgtcgcttcatttctgctcttctgccgtctagtcctttgtactgaccggcgctccggtcgtctcctcgcgcttgcgggttccccgtccccaccccacgccgggggcaagagatggagaacgcggtggtgctccgggagtggtttgaccgcgtcgacgccggccgcaccggcaacatcaccgctgcccagctccagggcgcgctcgctgtcggcaacctcaacttccccatctccgtcgtgcagcagatgattaggatgtatgacttcgatcggaatggcaccatgaacttcgaagagtttctggctcttaacaaattcctacagaaggtgcaaaatgtgttttccaccctggataggggtcgtggatttctaagtcttgaggaggtgtaccagccttctatactgtttgtgagagctttgacaagagcaagaagggcatgattcaattggatgagtttatatcactctgcatttttgttcagtcagctcgtaacctgttcaattcgttcgatacaagcaagcaaggaagagtgactttagattttaaccaattcgtgtactgcacggcaaactgcaggatataatgtggttgtacatgggcgcccaaacaaaaaggttagcagtgtgaagtgctaaccgttcgccaatcaaacttcgtttctgaaccggcagctgggtattgcaattcactgttcgccatctaaggcttgttgtaccatcattttgcctgaatgtattcttggtcacctattggtcaatccgtgtccagttttctgacatcctgggctgtatatacagaataagacttggcaatttgtggctgtatttatataaaatatttcaagtaatccagacattcactcctttgcattg

SEQ ID NO: 85940 - DNA, 655 bp, Zea Mays
gtggagtctagagatagagagcccctggatcgctgctctggggtgcaggcgtggtcgcgtgtagtcagctcgccttgcccgctctaatcggtcaccactgacctccgcccatggcgaccatgtctgcagccctcgccatctccttaccgtcgctaactcgcgttgccgtcgcaagtacgccctctgcttcctcgcgcatcaagagagccacacaattcaggtgctgcgcggattcttcttcccaggagcaggagatctccggcgcccctcccgccccgccgctggacaaatctgcaagatcgcccccttcctctctgctgggcatttccacgagcacctggtctgcgggtgtcgctgggctggggttcctggagactggttacctcacttacctcaagctcacgggctccgaggcgttctgccccatcactggcgcaggctgtggcgacgtcctcgacagcgactactccgtcgtctttggtaatcttcttggtggtgttgctgacagcttgttggtaaattgtgcactaactggtgcatcagcctcatgaaatttagatcgatttgtatagcaatcctcttgtgccttgctcctcgtacgaacggtaatcctcttgattaccagtcataggaatgctgaattatggtattcttg

SEQ ID NO: 85941 - DNA, 2103 bp, Zea Mays
gtcagccagacggccagaccccaaacagagcaggactagcactggcagtctagcacacccgcactgcgtctccgcagcacacactcgcacgcacgagaaggccggagaggcggcgcacccggagaggcaaaggcaagcgatccctctccctccctccctcgtatccaggacaacagcccgtgcgatccgatcccgatggcggcccggccggacgcgcgcagcggctactgcgccgcgacgcgcaccttccgtagcaagcgcgcggacgtcccgctccccgccgacgcggacctggacgtcgtcaggttcctcgcgtcccgccgccacgcgggcgtcgtcgcgctcgtcgacgccgccacgggccaccgggtcacgttccaggaactctggcgcgcggtggaaggggcggccaccgcgctcgccgcgccgccgctgtcgctccgcaagggccaggtcgcgctcatcctctccccgaactccgtccacttccccgttgccgccctcgcagccatgtccctcggcgccgtcctcaccaccgccaacccgctcaacacgcccgccgagatcgccaagcaggtcgccgacgcgcgccccgtcgtcgccttcaccacccgcgacctcctccccaagctcccgcgcgccggcgccggcgccggcatccgcgtcgtcctcctcgagcccgaccgcctcccctccgaccctagccccgtcgtcgccaccatcggggagatctccgccacgccgcccgaccccacgcgccgccgggaccgcgtcacacaggacgacccggccacgctgctctactcctcgggcaccacggggcccagcaagggcgtcgtcgccacgcaccggagcctcatctccatggtgcagatcatcatgtcgcgcttccgcctcgaggcctccaacaggaccgagaccttcctctgcacggtgcccatgttccacgtctacggcctcgtcgccttcgccacggggctgctcggctgcggcgccaccatcgtcgtgctctccaagtacgagctccccgagatgctgcgcgccatcaacgaatacggggtcacctacctcccactcgtgccgcccatcctcgtcgccatgctggcgcaccccaaccgcctgccgctcgggggcctgcgcaaggtgctctccggcggagcgccgctcagcaaggagctgatcgaggggtttaaggagaaatacccgcaggtggagatccttcaggggtacgggctgacggagagcacggctatcggcgcgtccacggactctgccgaggagagcagccggtacggtacggctgggctgctgtcgccaagcaccgaggctaagatcgtcgacccagagaccggcgaggcgctgccggtgaaccgcaccggcgagctctggatccgggggccatacgtcatgaaagggtatttcaagaacgcggaggcaacacaatcaacattgacacctgatggatggctcaagactggggatctctgctacatagatgaggatggttatctcttcgttgtggatcgtctgaaggagttgatcaaatacaaagggtaccaggtgcctccggcggagttggaagctcttttgctaacacatccagaaatcgaagatgtcgccgttataccgtttcccgaccgtgaggtcggccagttcccaatggcctacgtagtgaggaagaaagggagcaatttgtcagagcgcgaggtgatggagttcgtggcgaaacaggtagcgccttacaagaaggttagaaaggtggcgtttgtggcggagattcccaagaacgcgtccggcaagattctgaggaaggatctcatcaagctcgccacatccaaatccaaactatgaaaattgtttttcgtgtttacagtgctggaatacgcctgtcgtccacgagcggcgagccattctctacgctgccccggtagtttggttgtagaatgcttgtataactgaagatcccgtcggctatgtgcttgcttgtgtacagtgctctgttctcgtacaatacaatattgggagggaatactaggcgtctgtacgtaggcttggatggaaataatatccggtaatttcagtgttgagaaaaagaaagaaaaa

SEQ ID NO: 85942 - DNA, 1819 bp, Zea Mays
cgcacgagaaggccggagaggcggcgcacccggagaggcaaaggcaagcgatccctctccctccctccctcgtatccaggacaacagcccgtgcgatccgatcccgatggcggcccggccggacgcgcgcagcggctactgcgccgcgacgcgcaccttccgtagcaagcgcgcggacgtcccgctccccgccgacgcggacctggacgtcgtcaggttcctcgcgtcccgccgccacgcgggcgtcgtcgcgctcgtcgacgccgccacgggccaccgggtcacgttccaggaactctggcgcgcggtggaaggggcggccaccgcgctcgccgcgccgccgctgtcgctccgcaagggccaggtcgcgctcatcctctccccgaactccgtccacttccccgtcgccaccatcggggagatctccgccacgccgcccgaccccacgcgccgccgggaccgcgtcacacaggacgacccggccacgctgctctactcctcgggcaccacggggcccagcaagggcgtcgtcgccacgcaccggagcctcatctccatggtgcagatcatcatgtcgcgcttccgcctcgaggcctccaacaggaccgagaccttcctctgcacggtgcccatgttccacgtctacggcctcgtcgccttcgccacggggctgctcggctgcggcgccaccatcgtcgtgctctccaagtacgagctccccgagatgctgcgcgccatcaacgaatacggggtcacctacctcccactcgtgccgcccatcctcgtcgccatgctggcgcaccccaaccgcctgccgctcgggggcctgcgcaaggtgctctccggcggagcgccgctcagcaaggagctgatcgaggggtttaaggagaaatacccgcaggtggagatccttcaggggtacgggctgacggagagcacggctatcggcgcgtccacggactctgccgaggagagcagccggtacggtacggctgggctgctgtcgccaagcaccgaggctaagatcgtcgacccagagaccggcgaggcgctgccggtgaaccgcaccggcgagctctggatccgggggccatacgtcatgaaagggtatttcaagaacgcggaggcaacacaatcaacattgacacctgatggatggctcaagactggggatctctgctacatagatgaggatggttatctcttcgttgtggatcgtctgaaggagttgatcaaatacaaagggtaccaggtgcctccggcggagttggaagctcttttgctaacacatccagaaatcgaagatgtcgccgttataccgtttcccgaccgtgaggtcggccagttcccaatggcctacgtagtgaggaagaaagggagcaatttgtcagagcgcgaggtgatggagttcgtggcgaaacaggtagcgccttacaagaaggttagaaaggtggcgtttgtggcggagattcccaagaacgcgtccggcaagattctgaggaaggatctcatcaagctcgccacatccaaatccaaactatgaaaattgtttttcgtgtttacagtgctggaatacgcctgtcgtccacgagcggcgagccattctctacgctgccccggtagtttggttgtagaatgcttgtataactgaagatcccgtcggctatgtgcttgcttgtgtacagtgctctgttctcgtacaatacaatattgggagggaatactaggcgtctgtacgtaggcttggatggaaataatatccggtaatttcagtgttggtatcactagaaatttgtttttcgtgtacgtaggcacggat

SEQ ID NO: 85943 - DNA, 2436 bp, Zea Mays
ctgatacacacgtcgcgtagtatgccgtccctgtcagtcgctcgcttccatcgtatagatagtggctagctacggttacggcggcaaggagcgtggggaggaagacttgcctagccactagcactaggtgtgagagttttgagtcgtggtggtgtataaagcagtcgtcaagcacaagctcctcctctccctctccctcgtctcgcctgagcagagccaagcccatccatcgttccacacctccgcgatacgatgtccgtccctcctgcccgactcgccgcgtcctcgctcccgctgctcctcgtctggctccagctccagctcctcctcgcgtccgcctgcgaccgctgcgtgcgccactccaaggccgcctactacacctccgcgctgaccctcgccggcggctcctgtgggtacggcaccgatgccgcctccttcagcgccgggttcctcgccgccgccagccccgcgctgtaccgcgccggcgtcggctgcggcgcctgcttccaggtgcggtgcaaggacaagaagctgtgcggcgcggcgggcgccagggtggtggtcacggaccgcgccaggaccaaccgcaccgacctcgtgctcagcagcaccgcgttcgcggccatggcgcgccccggcatggccccacgcctcgcagcacgccgcgcagtcgacgtcgagtacaagagggtgccgtgcgagtacaagcacagaaacctgtcggtgagggtggaggagaggagccacgctgcggccccggcccccggcgacctcgccatcaggttcctctaccagggcgggcagaccgacatcgtcgccgtagacgtcgcgcaggagtgcatgcaggtgggttcgtccaactggaggttcatgacgcgcgacgacgggccggcgtggagcacgaggcaggcgccgccgggcccgctccagctcagggtggtggtgacgggcgggtacgacggcaagtgggtgtgggccgaccgcgaggtgctgccgcggtggcggcgcgccggcgaggtctacgacacgggcgtccagatcacggacgtcgcccaggagggctgcttcccgtgtgacacgcacgagtgggaggaggagtgacggcaccagcagagcagaggctgcaacggaactcgctgaggactggagcctgcgggctgcggagttgagttgctctgtctgcctcctccgtgtcagtgtcactcgctgcctttctttttttgagttttgccggagtggcacttttaacgacgagaggagagagccccgaaacccctctccctcccctgtacatgaattagctgcatgcgtcgtcgtcgttgccatggccgttgtttcaaccggatcacatgcctcgtcgtcgttgctttctgccaacacttaaacacttgtactagtaggctagtagcttcgttatttatatatatattcttctgacgcgggccggaagaaactctccatggccaccgatccgtctggtgccaggacagaacaagcggtgccggtgagcgagacagagaggcgccggcccggcggcggcacgactcgctgtccgtctctgcaccaggacattgggcagcaagcgtacgcttggccttgagttgattattactattctgatcctcacaagtcacaatcagttgctaatgtcgcagtcagcagtaccgatgatgtaacgctaagcatatctctcgcccgcttcgttggttcttatccgttaagctaagagcaggttgcgtggatattaaacagattcatgcgttcgtctgcttagggttgggttgggacttgggaggcatggctttgtttgcgttgcgttgcgtgtgttatgtgaagattggtcaccaaccataacggtcttgctgaatttctgttcagacagtcacacgctgaatttttgggtttgttggcttggattgaatttttgggtttgttagcttggattaaagccagctttgttcgtactgttccaactataatttgtagagacaaaacattgtaaaattgtagtagaagtcaatatgaattaaagctgagccaaccggccgtttgttctcgggcaaaacgagcctgttcctctggtagtttgtttgtttgtttatctgacgatgaagtgggctgctgattgatacagtattattgacgagtgctgacacggcagggacggaacgcgacgttgttttttagtagacaataaactaccaaggtgccgctgcagaggaaatggctatgcgttgctttcacaacaaggtcgggcgtcacgcttgagttgagtcactactgtgtcttcctgctggtgaagttgagtttggtcgccgccgactgaatgagtgcaccggtgagaaggctggggaggtgaagcttaaggtcctttctgtgggtgtttggtttgcccctgctaaaatttagcctctatcacatcgaatgtttgaacct

SEQ ID NO: 85944 - DNA, 862 bp, Zea Mays
aaggagcgtggggaggaagacttgcctagccactagcactaggtgtgagagttttgagtcgtggtggtgtataaagcagtcgtcaagcacaagctcctcctctccctctccctcgtctcgcctgagcagagccaagcccatccatcgttccacacctccgcgatacgatgtccgtccctcctgcccgactcgccgcgtcctcgctcccgctgctcctcgtctggctccagctccagctcctcctcgcgtccgcctgcgaccgctgcgtgcgccactccaaggccgcctactacacctccgcgctgaccctcgccggcggctcctgtgggtacggcaccgatgccgcctccttcagcgccgggttcctcgccgccgccagccccgcgctgtaccgcgccggcgtcggctgcggcgcctgcttccaggtgcggtgcaaggacaagaagctgtgcggcgcggcgggcgccagggtggtggtcacggaccgcgccaggaccaaccgcaccgacctcgtgctcagcagcaccgcgttcgcggccatggcgcgccccggcatggccccacgcctcgcagcacgccgcgcagtcgacgtcgagtacaagagggtgccgtgcgagtacaagcacagaaacctgtcggtgagggtggaggagaggagccacgctgcggccccggcccccggcgacctcgccatcaggttcctctaccagggcgggcagaccgacatcgtcgccgtagacgtcgcgcaggtacggtacgggtgcacgcacgaacgcagccgacctgtggatcagttcgacgacacgtacgtgtctccgaaggaaacttcggggctgaatgaatgaattggattgaaataaaa

SEQ ID NO: 85945 - DNA, 1589 bp, Zea Mays
aaggagcgtggggaggaagacttgcctagccactagcactaggtgtgagagttttgagtcgtggtggtgtataaagcagtcgtcaagcacaagctcctcctctccctctccctcgtctcgcctgagcagagccaagcccatccatcgttccacacctccgcgatacgatgtccgtccctcctgcccgactcgccgcgtcctcgctcccgctgctcctcgtctggctccagctccagctcctcctcgcgtccgcctgcgaccgctgcgtgcgccactccaaggccgcctactacacctccgcgctgaccctcgccggcggctcctgtgggtacggcaccgatgccgcctccttcagcgccgggttcctcgccgccgccagccccgcgctgtaccgcgccggcgtcggctgcggcgcctgcttccaggtgcggtgcaaggacaagaagctgtgcggcgcggcgggcgccagggtggtggtcacggaccgcgccaggaccaaccgcaccgacctcgtgctcagcagcaccgcgttcgcggccatggcgcgccccggcatggccccacgcctcgcagcacgccgcgcagtcgacgtcgagtacaagagggtgccgtgcgagtacaagcacagaaacctgtcggtgagggtggaggagaggagccacgctgcggccccggcccccggcgacctcgccatcaggttcctctaccagggcgggcagaccgacatcgtcgccgtagacgtcgcgcaggagtgcatgcaggtgggttcgtccaactggaggttcatgacgcgcgacgacgggccggcgtggagcacgaggcaggcgccgccgggcccgctccagctcagggtggtggtgacgggcgggtacgacggcaagtgggtgtgggccgaccgcgaggtgctgccgcggtggcggcgcgccggcgaggtctacgacacgggcgtccagatcacggacgtcgcccaggagggctgcttcccgtgtgacacgcacgagtgggaggaggagtgacggcaccagcagagcagaggctgcaacggaactcgctgaggactggagcctgcgggctgcggagttgagttgctctgtctgcctcctccgtgtcagtgtcactcgctgcctttctttttttgagttttgccggagtggcacttttaacgacgagaggagagagccccgaaacccctctccctcccctgtacatgaattagctgcatgcgtcgtcgtcgttgccatggccgttgtttcaaccggatcacatgcctcgtcgtcgttgctttctgccaacacttaaacacttgtactagtaggctagtagcttcgttatttatatatatattcttctgacgcgggccggaagaaactctccatggccaccgatccgtctggtgccaggacagaacaagcggtgccggtgagcgagacagagaggcgccggcccggcggcggcacgactcgctgtccgtctctgcaccaggacattgggcagcaagcgtacgcttggccttgagttgattattactattctgatcctcacaagtcacaatcagttgctaatgtcgcagtcagcagtaccgatgatgt

SEQ ID NO: 85946 - DNA, 1986 bp, Zea Mays
aaggagcgtggggaggaagacttgcctagccactagcactaggtgtgagagttttgagtcgtggtggtgtataaagcagtcgtcaagcacaagctcctcctctccctctccctcgtctcgcctgagcagagccaagcccatccatcgttccacacctccgcgatacgatgtccgtccctcctgcccgactcgccgcgtcctcgctcccgctgctcctcgtctggctccagctccagctcctcctcgcgtccgcctgcgaccgctgcgtgcgccactccaaggccgcctactacacctccgcgctgaccctcgccggcggctcctgtgggtacggcaccgatgccgcctccttcagcgccgggttcctcgccgccgccagccccgcgctgtaccgcgccggcgtcggctgcggcgcctgcttccaggtgcggtgcaaggacaagaagctgtgcggcgcggcgggcgccagggtggtggtcacggaccgcgccaggaccaaccgcaccgacctcgtgctcagcagcaccgcgttcgcggccatggcgcgccccggcatggccccacgcctcgcagcacgccgcgcagtcgacgtcgagtacaagagggtgccgtgcgagtacaagcacagaaacctgtcggtgagggtggaggagaggagccacgctgcggccccggcccccggcgacctcgccatcaggttcctctaccagggcgggcagaccgacatcgtcgccgtagacgtcgcgcaggtgggttcgtccaactggaggttcatgacgcgcgacgacgggccggcgtggagcacgaggcaggcgccgccgggcccgctccagctcagggtggtggtgacgggcgggtacgacggcaagtgggtgtgggccgaccgcgaggtgctgccgcggtggcggcgcgccggcgaggtctacgacacgggcgtccagatcacggacgtcgcccaggagggctgcttcccgtgtgacacgcacgagtgggaggaggagtgacggcaccagcagagcagaggctgcaacggaactcgctgaggactggagcctgcgggctgcggagttgagttgctctgtctgcctcctccgtgtcagtgtcactcgctgcctttctttttttgagttttgccggagtggcacttttaacgacgagaggagagagccccgaaacccctctccctcccctgtacatgaattagctgcatgcgtcgtcgtcgttgccatggccgttgtttcaaccggatcacatgcctcgtcgtcgttgctttctgccaacacttaaacacttgtactagtaggctagtagcttcgttatttatatatatattcttctgacgcgggccggaagaaactctccatggccaccgatccgtctggtgccaggacagaacaagcggtgccggtgagcgagacagagaggcgccggcccggcggcggcacgactcgctgtccgtctctgcaccaggacattgggcagcaagcgtacgcttggccttgagttgattattactattctgatcctcacaagtcacaatcagttgctaatgtcgcagtcagcagtaccgatgatgtaacgctaagcatatctctcgcccgcttcgttggttcttatccgttaagctaagagcaggttgcgtggatattaaacagattcatgcgttcgtctgcttagggttgggttgggacttgggaggcatggctttgtttgcgttgcgttgcgtgtgttatgtgaagattggtcaccaaccataacggtcttgctgaatttctgttcagacagtcacacgctgaatttttgggtttgttggcttggattgaatttttgggtttgttagcttggattaaagccagctttgttcgtactgttccaactataatttgtagagacaaaacattgtaaaattgtagtagaagtcaatatgaattaaagctgagccaaccggccgtttgttctcgggcaaaacgagcctgttcctctggt

SEQ ID NO: 85947 - DNA, 1077 bp, Zea Mays
atggcagcggggttccgccggcggctcacggcgctcaccgtcccgaaggcgtcgtcgctcctccgccgaacgcggcacaagaagctctcctactcccgtgtccgctgcaacagcctgccggggcgcttccacccggcggtggcgggcctgcacgagtcggcgaacgcgctcatccgctggaccgaggagccggcgcagcaggccagcccggcgtgggtcgccgacggggcggcgcacctggcccgcctcctgtcggggctgacggacctgctccaccacccgcaggcgcgggacccgctgatccgccaccaccgcggcggcaacggcaacggcaacggcaacggcaacaccaacagcaacagcaagacgccggcgtcgtgggccgagcgcctgctggacgacctcctcctcctggccgacgcgcacgggtgcgtccgcgaggcgctgctcacgcggcgccagcttctcggcgaggcgcacgccgcgctgcgccgccgcgacgccgcccgcctggcggcggcgctccgcgccaggcgccgcgccgaccgtgacctctcccgcctcgcctccacgctgcgctgcctctcccaccgctgctcgtccggcgccggcgcagcggtggcgccggaccacggcgaggccgcggtggccgacgccgtcgcggccgccacgtgcgccgcggcggccgcgtccgccgccatcttcgccgggctggcctccgcctccgcgtcgtcggcgtcccgcgcgatgccgtcccctcttgcgacggtctcgcccgcgaaggtggccgccgcgcccgtgtggtgggtcgccgacctcctcaggtggcgccggcgcacggtggccgtcgtcgctggcagtggcagcggcagcgagcccgggcccggcgcgagagaggcgaatttcgaggcggagcgctgcagcgatgaggaggagggggagagacaggcggccatggaacggctgcggaggctggaggactgcgtcgtggcggcggagaacggctgcgagcgggtgtaccgggcgctcgttaacgcgagggtgtcgctgctcaacgtgctcacgccgtgcttttga

SEQ ID NO: 85948 - DNA, 2067 bp, Zea Mays
tggaaattcgtgttaagatggcggctgcatcacagccaagaacgggacgaaaccgcccatacaaaggcagaaccgcagaaaggggggcggaggcggacagagacgcagaagccaaaagcaaccaaacccacccggccaccccccgagcccgaaggcaggcctctttcttcttcttcctcctcttcccctgctcggtcggctactcctactgtccggggaacccagcccagcccagcacctgaaccccacaccacacacacagggttgcccacccacgccacgcacgcgcagccgcggcggaagccaccggggggtgggctccgatgggctgctgcggctcctcgcagcgggcggggacgcacccggagaagaagccgccgggggcgctccccccgcaccgtccctcctactcgctcaaccagcaccaggcgccggcgccgccgcctccctccgcggctcgcgccggcgcccgccaggtgccgccgctcaaggagttctcgctcgcggagctgcgcgccgccacggccggcttcgcggcggggaacatcgtgtcggagagcggcgagaaggcgcccaatttcgtgtacaggggccgcctcgacgccggccgccgcgcgatcgccgtcaagaagttcaccaagatggcgtggcccgatcccaagcagttcgcggaggaggccaagggcgtcgggaagctgcgccactgccgcctggccaacctcatcggctactgctgcgacggggacgagcggctgctcgtcgccgagttcatgcccaacgacacgctcgccaagcacctcttccactgggaaaaccagacaattgaatgggctatgcgtctgagagttgcatactacatcgctgaagcactggagtattgcagcactgagggaaggcctttgtaccacgacctaaatgcatatagggtcctctttgatgagaatggtgatcctcgcctttcatgctttggcctgatgaaaaacagtagggatgggaaaagctatagcacaaatcttgcatatacacctccagaatatttaagaaatggaagagtaacatcagaaagtgtcatattcagctttggcactatactgctggacctcctaagtggaaagcgtatacctccttcccgtgctcttgatatgataaaaggcaacaatatccaagtactgatggattcacatttggagggaaactactcaacagatgaggcaaccacattggttgacctggcctcccagtgcctacagtatgagcctagggatcgggccaacactaaaaagctggtttccgtactcgagcccttgcaaataaaatcagaggtaccatcctacgagatgcttggcattccaaaacatgaggaagaagcgcctccccctccacaaccgcagcgccctctctctcccatgggtgaagcctgttctaggacggatctgacagctatccatcaaattctagtgaacacgcattacagggacgatgaagggagcaacgagctatcgttccaggaatggacgcagcagatgagggacatgctggaagctaggaagcgtggggacttcgcctttcgcgataaagatttcaaggcagccatagattgctacacgcagttcgttgacgtggggacgatggtatcgccaacggtgtacgcgaggcggagcctgtgccacctcatgtgtgaccagcctgacgccgccctccgcgacgcaatgcaggcgcagtgcgtgtacccggactggccaaccgcgttctacatgcaagctgtcgcgctcgcgaagctgaacatgcagagcgatgccacggacatgttgaacgaggcatcgcagctcgaagagaagcggcagaagaacacaaaaccctgatgatggcttgttcctggtccaggggttgggaatgtagctgggggagtgtgctgcagagtcctgcgattgtaactacctggtttcgcatttctgtcatgcattttttttgggcccgtgtacatgttacatcgacgaaagtcgaaacaggcagaatgcaaggggatttttttacttgtggttgtcaaaatctgagcttgtgctgttc

SEQ ID NO: 85949 - DNA, 1047 bp, Zea Mays
gaggcggacagagacgcagaagccaaaagcaaccaaacccacccggccaccccccgagcccgaaggcaggcctctttcttcttcttcctcctcttcccctgctcggtcggctactcctactgtccggggaacccagcccagcccagcacctgaaccccacaccacacacacagggttgcccacccacgccacgcacgcgcagccgcggcggaagccaccggggggtgggctccgatgggctgctgcggctcctcgcagcgggcggggacgcacccggagaagaagccgccgggggcgctccccccgcaccgtccctcctactcgctcaaccagcaccaggcgccggcgccgccgcctccctccgcggctcgcgccggcgcccgccaggtgccgccgctcaaggagttctcgctcgcggagctgcgcgccgccacggccggcttcgcggcggggaacatcgtgtcggagagcggcgagaaggcgcccaatttcgtgtacaggggccgcctcgacgccggccgccgcgcgatcgccgtcaagaagttcaccaagatggcgtggcccgatcccaagcagttcgcggaggaggccaagggcgtcgggaagctgcgccactgccgcctggccaacctcatcggctactgctgcgacggggacgagcggctgctcgtcgccgagttcatgcccaacgacacgctcgccaagcacctcttccactgggaaaaccagacaattgaatgggctatgcgtctgagagttgcatactacatcgctgaagcactggagtattgcagcactgagggaaggcctttgtaccacgacctaaatgcatatagggtcctctttgatgagaatggtgatcctcgcctttcatgctttggcctgatgaaaaacagtagggatgggaaaagctatagcacaaatcttgcatatacacctccagaatatttaagaaatggtaacatatgatttgtctatgacaaacttagccttctttgaattgtttagtcagggtatttagaagtgggtatacatgacagtacatgc

SEQ ID NO: 85950 - DNA, 1227 bp, Zea Mays
gagcatcaaagcaagccatgtggaggagggctttagcgatggtcctgttcatggctggcgccgcgctgctcgccggggctgccggcgccggcgcgcagcagggcgtgtggagcatcatcacccggcccatgttccagagcatgctgagccaccgcggcgacagcgggtgccagggcgccttctacacctacgacgccttcatcgaggccgccagcaagttccccggcttcggcaccaccggcgacgagcagacgcgcaggcgggagctcgccgccttcttcggccagacgtcccacgaaaccaccggtggatgggcgactgctccggatggaccgtttgcctggggatactgccgggtgaaggaacagaaacagacggacccaccctactatggacgaggacccatacagctaactcataagtacaactacaggctcgccgggcaagcgctgaacctgaacctggtgggcgacccggacctggtggcgagagaccccgtggtagccttcaagacggccatctggttctggatgacgccgcagtcgcccaagccctcgtgccacgccgtgatgaccggcgactggaggccctccgccaccgaccgcgccgcggggaggctccccggatacggcctgaccacgaacatcatcaacggtggtctagagtgcggcgaggaccgctccaccgacggcgccaaagccgccaaggaccgggtcggctactacaagaggtactgcggtatgctcggagtggggtacggggacaacatggcatgcgggagccagaagccttacggaggatgatgacactagtagctgatctatggttgctgcaatgcaagccttcacgtgtgtttgcctctctacctaaagaataaatcaagctagcagcaaacctaccttcggcgtgtgtctacttgcttatcatagtgtgtgtccgtgtatgagagatgatgtactgtcacgaactcacgtgtgtatgagagaggatacatggtaagactatcactactagaatccgcctctttactgactgacaaccaaaaaacactcgataagaaaatacttggtaaagtgttttttttttcgagtgttttatttttaactctcggcaaatagtttctttggagagtgttttttacacccgacaaagaacttatttgccgagtttttatatattttacatttatatgttatcaagtcattatataatgcaataatttatatc

SEQ ID NO: 85951 - DNA, 1016 bp, Zea Mays
gagcatcaaagcaagccatgtggaggagggctttagcgatggtcctgttcatggctggcgccgcgctgctcgccggggctgccggcgccggcgcgcagcagggcgtgtggagcatcatcacccggcccatgttccagagcatgctgagccaccgcggcgacagcgggtgccagggcgccttctacacctacgacgccttcatcgaggccgccagcaagttccccggcttcggcaccaccggcgacgagcagacgcgcaggcgggagctcgccgccttcttcggccagacgtcccacgaaaccaccggtggatgggcgactgctccgggtggaccgtttgcctggggatactgccgggtgaaggaacagaacccgacggacccaccctactatggacgaggacccatacagctaactcatgagtacaactacaggctcgccgggcaagcgctgaacctgaacctggtgggcaacccggacctggtggcgagcgaccccgtggtagccttcaagacggccatctggttctggatgacgccgcagtcgcccaagccgtcgtgccacgccgtgatgaccggcgcctggacgccgtccgccaccgaccgcgccgccgggaggctccccggatatggcctcacctcgaacatcatcaacggcgggctagagtgcggcaagggccagtccaccgacggcgccaaggaccgggtcggctactacaagaggtactgcgatatgctccgggtggggtacggggacaacgtgccctgcaaggaccagaagccttacggaggatgaggacgtacgtggacaacaataattatatggttgctgcaagccttcacgtgtttttgttgcctctctaccaactaagaataaatcaagctagcagcaaacaggggcaacctgctaccttcggcatgtgtctacttatcatatagtgtgtctatgtatggcacagtatctcatctctggatgcatgataacgaactaatcaacggttagcagcattcaccttta

SEQ ID NO: 85952 - DNA, 829 bp, Zea Mays
gagagcgcgaagttaagccaccatgtggacgagggctttagcgacggtgctgttcgtggcaggcgccgcgctgctcggcgtcggcgtcggcggcgccagcgcgcagcagggcgtgtggagcatcatcactcgtcccatgttccagagcatgctgagccaccgcggcgatagcgggtgccagggcgccttctacacctacgacgccttcatcgaggccgccagcaagttccccggcttcggcaccaccggcgacgagcagacgcgcaggcgggagctcgccgccttcttcggccagacgtcccacgaaaccaccggtggatgggcgactgctccgggtggaccgtttgcctggggatactgccgggtgaaggaacagaacccgacggacccaccctactatggacgaggacccatacagctaactcagtatgatcagcagcacaaacactctgcatgcgctatgtataggagtatatgttaacagcagcccagccctatagcttgttgatcatactgtcatcgcatcgcatgcagtgagtacaactacaggctcgccgggcaagcgctgaacctgaacctggtgggcaacccggacctggtggcgagcgaccccgtggtagccttcaagacggccatctggttctggatgacgccgcagtcgcccaagccgtcgtgccacgccgtgatgaccggcgcctggacgccgtccgccaccgaccgcgccgccgggaggctccccggatatggcctcacctcgaacatcatcaacggcgggctagagtgcggcaagggccagtccaccgacggcgccaaggaccgggtcggctac

SEQ ID NO: 85953 - DNA, 1024 bp, Zea Mays
gagagcgcgaagttaagccaccatgtggacgagggctttagcgacggtgctgttcgtggcaggcgccgcgctgctcggcgtcggcgtcggcggcgccagcgcgcagcagggcgtgtggagcatcatcactcgtcccatgttccagagcatgctgagccaccgcggcgatagcgggtgccagggcgccttctacacctacgacgccttcatcgaggccgccagcaagttccccggcttcggcaccaccggcgacgagcagacgcgcaggcgggagctcgccgccttcttcggccagacgtcccacgaaaccaccggtggatgggcgactgctccgggtggaccgtttgcctggggatactgccgggtgaaggaacagaacccgacggacccaccctactatggacgaggacccatacagctaactcatgagtacaactacaggctcgccgggcaagcgctgaacctgaacctggtgggcaacccggacctggtggcgagcgaccccgtggtagccttcaagacggccatctggttctggatgacgccgcagtcgcccaagccgtcgtgccacgccgtgatgaccggcgcctggacgccgtccgccaccgaccgcgccgccgggaggctccccggatatggcctcacctcgaacatcatcaacggcgggctagagtgcggcaagggccagtccaccgacggcgccaaggaccgggtcggctactacaagaggtactgcgatatgctccgggtggggtacggggacaacgtgccctgcaaggaccagaagccttacggaggatgaggacgtacgtggacaacaataattatatggttgctgcaagccttcacgtgtttttgttgcctctctaccaactaagaataaatcaagctagcagcaaacaggggcaacctgctaccttcggcatgtgtctacttatcatatagtgtgtctatgtatggcacagtatctcatctctggatgcatgataacgaactaatcaacggttagcagcattcaccttta

SEQ ID NO: 85954 - DNA, 101 bp, Zea Mays
ctcaaatacaggggcaggaggcgagcagttgaacgggtcgtgaagaccaaacagtgtcgcgcctgtcactgtacgtgttcggctgccgcgaatgcccgatc

SEQ ID NO: 85955 - DNA, 399 bp, Zea Mays
atggcgtacccggccgaggcggcgccaaaccctagcacgcgggatccagctcgagggagagagggagggcgagtggagatggcgtacccggccgagacgacggcaaaccctagcacgcgggatccagctcgagggagagctcgggaaaccctagcacgcggggctgcgcgagcgaatgcgcctgcgagcgagctgccgcgcgtggggagcctggctacggagcgacgcccaaaatggccgtatgagcccggcctggttgagaggtgggttttgcagcaagcgagacaggctccgacccccacacaggtaaccaaacaggtgggatctgtccgccatggtgcacctcgtttggctggcaaggcctccttccgccagtcgcgcgcgcgcaggttcacctga

SEQ ID NO: 85956 - DNA, 1487 bp, Zea Mays
atggtcgcgtgctccaggggactcgcgtggccgccgttcgatctgaccacggcgaggggggcggcgtcctggccgcgccggcgtgccgcgatccggtgctgctgcgccggagcagacgcacagccgcagaggcgactctcgagggcggccgcggtcgcgcccgagcgcgccgaggagtggcgcatcgatgggaacaagccgtccgccgcggcaccgggacggcggcgcaccagcctcaccgccatgcccccgctccccttccctgcacctcgctctagaagacaggtcaagcaaccggacttctacccgcggtgcactccgagggggtcggctcctcaatcccgtgataccccgcccaagagagacactggtattgctagtgagaaggaatggggaatcaacttgctggacgaagccgtcaaggagtctggaataaatgaagatggaagcacttggtacagggagagtggagatgatattggcgagaacgggtaccgctgccgctgggcaagaatgggaggacagagccatgatggttccaccgaatggaaagagacttggtgggagaaaagtgactggactggatataaggaattaggtgcggagaaatctgggaggaatgctgaaggagattcttggtgggagaaatggaaagaagttctgtaccaagacgaatggagtcagaaattagaacaatctcacttgagaggcagtgacatagtttaccttgtcgaatacagcaatcttgcaagaatagagagaagtgctgagaaacaagcaaaatcaggcatagaaaatgctgggtggtacgagaaatggtgggagaaatatgatgccaaaggttggacagaaaaaggtgctcacaaatatggaagattgaatgagcagtcctggtgggagagatggggtgaacattatgatggccgtggatttgttttgaaatggacagataagtgggcagagacagacttaggcaccaaatggggggacaagtgggaggagaaattctttgcaggaattggttctcgacaaggggagacatggcatgtatgtcctggcggtgaacgttggtcaagaacctggggagaagaacactttggtaacggaaaagtccacaagtatggaaagagcacaaccggcgagaggtgggacttggtagtcgacgaggagacatactacgaggcggagccccattacggatgggccgatgtcgtcggagactcgacgcagctgctgtccatacagcccgtggagaggccacccggcgtgttcccggccatcgacttcagctccgcgccgccgccgaaggacgctccgccgggcatgcccccttctcctctggactgagtgaattaggcctgccagcacagacggatttttctgtctatataggctccagattttgcctgtaagggaacagcattctttgtaggaagttgacggaaccccgttcctgcgttcattggttggctcattctttgctacgc

SEQ ID NO: 85957 - DNA, 873 bp, Zea Mays
actcaaacctccctcccaagccctcttttttccctcgccgcggcgcaggcagagcagaggcactagcatgtcgccgttcgccgcccgcgtggcctccttggccgcgctgctgctcgccctcctgctcgcggcgccggcctcggccgccaacttcacctgcgccacagtgggcaaaacgtgccagtcggcgatcgggtacgcggtgcccaacgcgaccacgtacggggagctggtggcgcggttcaacgccaccacgacgctggcggagctgctgggcgccaacggcctccccgccacgacgccggcctcgacgccgctggcggccaaggccacggtgcgcgtgccgttccggtgccggtgcgggagcaacggcgtggggcagtcggacgggggacccttctacgtggtgtacccgctggacgggctggaccacatcgcgcgggaggtgttcggcggcttcgtcacctaccaggagatcgccaccgccaacaacatcaccaacgtcaacctcatcgtcgtcgggcagaagctcaggatcccgctgccctgcacctgcgaccaggtggacggcgccgacgtcatgcacttcgcctacagcgtcgccaagggggacgacccgcccggcatcgccgccaggttcggggtcaccgagaccacgctgctgagtgtgaataagatcaccgaccccaagaccagcctgcagcaggggcagatcctggatgtccccctccctggtaagcgtcttcctcttcctcttcctcttcttacgccgcaatccatacctagttgtgaattgtgaggacgatggagtgaataatgcttgtagctctgcttaggacgtactacgagacatagaagtggtggatttttttt

SEQ ID NO: 85958 - DNA, 1571 bp, Zea Mays
atgttacattttgctgctacaggcaacctttgtgaggctgcccatggcgcgagccttgtcacggagaacaaacttctgcgtcttccccgtcgaagtcttgggcaaatcctcgaacaccaccgtcttaggcgccatgtagtggggcagcttctcccggcaaaagtttatgatctccgcttccgtggcgctggcgccgtccttgagcttgacgaacgcgcacggcgtctcgccccagtggtggtctggcctcgccacgaccgccgcctcgaggacggctgggtggctgaagatcacagactccacctcgatggagctgatgttctcgccgcccgagatgatgatgtccttggccctgtccttgatctggatgtacccgtcgggatgccgcacggcgaggtccccggtgtgcagccacccgccggccatggattccttggtcgccttgaggtccttgtagtagccgctcatcacggtgtttccccggaacatcacctcgcccaccgtctggccgtcgtgcggcacgctctccatggtgctcgggttcatgacgtccacgtcctgcatcgcgacgtggtggaacccctggcgggccttgagccgcgcgcgctcctccgccggcagcgcgtcccactcgggcatccacgtgcacacggtcgccgggccgtacgtctccgtgaggccgtagatctggtacaccacgaagccgagctcctccaccgcgaacaggacgcgcggcggcggcggcgcgccccccgtcatgacgcgcacgggccatggcagcggcttccgctccgcggtcgcggtacgcgcgttggccatcatgttcagcaccgtgggcgcgccgcccatgtgcgtcacgccgtgccgcgtgatgctgtcgaagatgacctcgccggtgaagtggcggaggcacacgttggtgccgccctgcatggcgacgccccacggcaggttccagccgttgcagtggaacatgggcacagtccacaggtacgtcggcatggcggtgatgtcgtacgcgagcaccgtcgcgatggtgttgaggtacgcgccgcggtggctgtacaccacgcccttgggccgcgacgtcgtgccggacgtgtagttgagcgcgatcgggtccagctcgtccgccggccaccggatgtcgaaccgggcggggccgttcctgacgagatcctcgtagtcgtcggagtcggtgtcgtctgagatggtgagcaggaccggaagagcggcggcggagttggactcggcgaggcgcttcatcgcggctctcccgacgtcgaggaggttcgactcgacgaggaacaccttagcgccggagtgcttcagcaggacggacaccatggccgcgtcatgcctcgtgttcaatgtgcagagcaccgcgccagccatgggcacggcgaagtgcagctcgtacatcgccggcacgttggggctgaggacagcgacctgaatatggtcagatcgatcatggtcattcgatggtgacttggtgagttttggccattttttgtttaaataaaagaaaactctgcgccatttggctgggttgagcccatagctaaaaa

SEQ ID NO: 85959 - DNA, 534 bp, Zea Mays
atgaaaacgacacgaacagcacaaggaaccatgttgatggatggcggcggtggcggcggcgcaggtagtttattcgtcggcgggaagggacggcaacagctagaagtgccgctcgttctggaccagccgttgggtcttcacgccgtggccgtcggtggacgacggcaggtgctgctgctggcccagctggccgttcttggcgctggcgtcggtggacgtggacggcgggcgctgcagggtcttgacgtacttccaggtgtcgcggccggagacgtcgtgccaccacctgctgacgttcttgcgggactcgaacatgcggcgggagcgcgggtcggagacgaggtggtccgcgtagggcaggtgcgacaggtcggcgatggtgaagttgtcgccggccaggaacgtggcctcctccaggcgctgctcgtagatgtccagcagcttctccaggtccttcttcctctgctcgaacagcttcagcatctcctcctccttctgcgcgctcaccttggtctggctcgccgccggctgtga

SEQ ID NO: 85960 - DNA, 479 bp, Zea Mays
gtggttttctcagcatccggcgtcggcttgaagaaatgcatgctcataattcaaagtgctgatgaactagcaggtgaagattagttgatctcacgaagatggatccggaagaaagattattgtacgtactcgatcgtgaagtagtcgatgtcatagtgtgtgtgtagatgttcaagcatgacatcgcacactgtgatctaccactactggagtcgaacacggcatcggagatcagagctgtaactgatgaaggggcagtgtatagtttactgccaagcctccaggcatctggcctgataattccttgtcggctcctcctttgaatttctgtgtgaggttgtgtgtaatgcatatccagcagccactcgacaggcttctaacgatgctttattcgatcacatcttacgtctatgtcgtgctctgaattcagacaagggaaatgttcgcttgttatatatacaaacaaatcagttgtacca

SEQ ID NO: 85961 - DNA, 627 bp, Zea Mays
catacggtcaaagctagacatataaccttgcaaatcacatgaatgttattccttggaactgatcacaaaaaatacttgaccaagtgttgtacacgagccttgttatgtgttagaccaacgtatttgctaattcatgacaaaacttgatcagcaaaaaactcatactaacaaaatttatatcattaaactctatcctacaactagtgtgatacaattaaatcatttgcaaattactgagaatcagccatgtcctttggccctgtaaggtagtaatgtgaaagtgtgatgcaaccaagcgatttaaactctaaaggtcactagggatcattattttccatacgaaagaagtcaatgaagcaaactagttggcacatgactaaggtcagtagtgattattattcaaacaacttgtgcatcacactcaagaaaatgccctacacctttgtacattgtgtaatgatttgacacaagaacatcagaagaattggatgagccacctaattattgagaaagccctgtacatctttgcatgcaaataagatgaactaaacatgtcatattttgaataaagagaattgtctcactaacccatgcacattcttttagtttcgttaactagtcagataa

SEQ ID NO: 85962 - DNA, 1798 bp, Zea Mays
ctcataaaaaaataactcggcagccgcaaaccctgcggggtgcgggccgcgcgtcccctgacgcatccgcactggtctcggcgcagccgtccgatcagatcgcaggctctcagcacccctcatctgcgccgcactcagcgctattactttactagtatacagtagtaccaaaaaaaaaaatcaccttgctcacgcgcgctctgccccgcttgctatatcctcctagagcccagccaaatcccccgacgtcctcctgttcatctcctcttctccctctcctcctcctcctcctcctcgtcccccttcctcgggttggaaattggaatggaggcggcgacgatggcgtggacggcggcggtggtcggggcggggctggtgtactggttcgtgtgggtgatgggcgcggcggaggtgaagggcaagcgggcggtggatctcaagatgggatccatcacgcgggacaaggtgcaggacaagtacacccagtactggtccttcttccgccgccccaaggagacggccaccacggcggcgtcggcggagaaggtgccggccttcgtggacaccttctacaacctggtgaccgacatctacgagtggggctggggccagtcgttccacttctcgccgtccctgcccggccgctcccaccgcgacgccacgcgcgtccacgaggagcgcgtggccgacctcctcggcgcccggccgggccaccgcctcctcgacgtgggctgcggcgtcggcgggcccatgcgcgccatcgccgcgcactcggggtccgacgtcgtcggcatcaccatcaacgagtaccaggtgaagcgcgcccgcgcgcacaaccgcaaggccggcctcgactccccccgctgcgaggtcgtctgcggcaacttcctctccatgcccttcccggacgcgtccttcgacggcgcctactccatcgaggccacctgccacgcgcccaggctgcaggacgtctacggcgaggtctaccgcgtgctcaagccggggcgcctctacgtctcctacgagtgggtcaccaccccgctgtaccacgccgaggacccgggccacgtcgagtgcgtccacggcatcgagcgcggcgacgcgctcccggggctccgccgccaggacgagatcgcggccatcgccaaggaggccggcttcgaggtgctcaaggagcaggacctggcgctgccccccgcgctgccctggtggacgcgcctcaagatgggccgcatcgcctactggcgcaactccatcgtcgtccgcgtgctcaccctgctccggatcgcgcccaagggcgtctccgaggtgcacgagatgctgtacgagaccgcgcagcacctcacccgcggcggcgagaccggcatcttcacgcccatgcacatggtgctcctccgcaagccgcccgccgccgcatccaccgaggaggaggccaaatagtgttttaagagaaataacctggcagaagcagcagcagaggtaagaagagcgagctactcggcgacttgaacaagtgaaaacttcatctgttagagaagaagaagatactactaggaaccatgcttgtctcgtttactctttttttttccttgtccccattcttcttcgtagctttcacttttatttttttttgtttttctggtggacggattattccgttggggacgaggtcgggatttaaatttgcttgatcgtggagatccatctataatctatcatcatcataagccatgttttgtctgctaagagtacattggaattgaactctctaacctaattgttattacctgcttgcttt

SEQ ID NO: 85963 - DNA, 1581 bp, Zea Mays
gtgactattcctaacaaatcttaatactgcgcgcgcgcaaacgcatccaggtgccagagaggacgaatgggcggcccttctcttacggctcggcggcgcccggctccgtctcgcgcgacatctcctcgagcgacttgcccttgggctccggcaccaggaacgtgagcaggaaccccaggaagctgcacccggccagcagcagcagcgagttgcgcacgccgatgcccggcgcgtacccgtgcgccgtcttggccgggtcctggctctgcgccaggtacaggaacccgaaggacccgatgatggcgcccaccttgcccgacgccgccgagatgccgtggcacgtcgcgcggagccgcgccgggtagatttccgcaggcacgatgaaggtcgtggcgttgggcccgaagttggcgaagaagaaggttctgcgagtagtaggcgatgtctaggaggagccacgtcgacgccgtgcccacaaggtggagcccgtgccggtgcgcaaactcgcgggagaagagcccgaacggcggccccgtcgtcgcttcttcctgttcgccgcgcaaccgcgcctctgtacccgtcgtcgcttcttcctctgcccccggctgctccttattgccgatgtcgacctggagcaccctggacatgtccgccgcggcgcgctccgcgttcctggctactagcgccgtgtaccgcgccgtctcgggcatcttcatgcgcgagtagaaggtgagcgccgcgggcacggcgccgaacatgagaatgatgcgccacaccaggtctgcctcggccggcgtggacgccgcggggtcgacgtcgtaggggggcgccgggaaacggctccggaacagcgcggtgacgcctatggcgacggcgccgccggccaggatgccgaacccctgcatggcgaagacggcggcgacaaacgcgccccgcgtccgtttgttggcgtactccgacatgatggtcgccgatagcgggtagtcgccgccaatgccgaacccgagccagaagcggaagaagcagagcgtggccatgacgcaggccggcgagcgcccgaacgagaggcctgacgcgacggagcagacgaccatcgtcaggagcgtcatcccgtacacgctcttccggcccaccctgtcgccgagccagccgaagaagagctgccctgacagcgttcccacgaacgccacgccgttgacggccgcggacacgtgcggcggcaggctgcccggcctgggcgagccgtcgacggtgtagtagatgcggccgatgagcttggtgacgagggagatgcagaagaggtcgtacgcgtcggtgaagaagcccatccccgccacgacgatcgccgtgaagtggtaccgctgcgtcttggcgccgtccagtgccgagagcacctgcatgttctgcccgcccgccattgccattggccgcgccccgggcgatcgatcgctgctgctccaacccggccaaatatagtggatgcggaggaggcaggagtgcgccgccaatgtatagtgaggaggaagtgaggatattctcggcgccgagtcgtccattccatggaaggcaacttcttcggcc

SEQ ID NO: 85964 - DNA, 819 bp, Zea Mays
acgaagagagagaaacttctcttccagaagggggcaaagctcgcggcctcgcgccggtcgttccggtccaacgcggcgacgcccaaggctgccgtccctgggcttcctcctccccctcaccccttcccctcgccaaaccacaggaagaagcgagcagggcaccgagttttctcgagcgatggcatcggcgcctgccgattcctacgggtgcgcggcgtgcggcgcgcccctgaacctgtcggcggcgcacctgtacccggcggacttctacttcgaggccgggaacaagggcacgctgtccttctcgtgggtggacgagtcgcgcctgcggttcgcgcccgaggaccgcatccgccccttcttcgagacccgcaactactggggcatccagcggaagcgcacgcgcatcagctgcgacgcctgcggccacctgcttggccacgtctacgacgacggtccgccggccatgcagggcaccggccagttcgggatggggcccagccaggtcatcccgcgccgccccaggtaccgcttcaagatcaaggccatcgccgccagctcctcggcacctgccgccgccgcctatgaaaagtgatgctccatagatttcttcatctggttgcgtgtcctgtgtgctgtcggtgctgtggttcgtgacttcctgtaaattacgtagcttcctgcaattcgcgtcctgcgttgttttctttagaaacagtgtgtttgaaatggcatgcgactgaaactatgattgaaatggcatgcgacttctaatatacacacaagacagaagatataaataaaaaactatgattgaaa

SEQ ID NO: 85965 - DNA, 1662 bp, Zea Mays
atgtcagctctaaagacaaagcattctacacccaagtatgggctcgtctaccttgcatccttaattggcaaggcttctcaaaagcacaaggggaaaatctctctatctctagctacgaaaactgctcttgctatctattatgatggcgaggacaactccattaccactgagtgtcaaatcaagttcttgaaggtagagaacttgggaaatcaattggttcaacaaaaaggaaagcccaagatagaagtgtatgaaaaggacaggaagaagggtgttggggctttgacaactcatgctagggatagctctgacatcattgccatagtgctggtttactgcatggctaataacaacattattcgtttccatcccacaagaaggaatatcaatggtcttctacgaagtaagcctatactagactggcatgagaattccaatgatgaggtagcagagaagtgtgatgccataacatctgacattgagtcgaaattgagacagatagaggaagatcctgaaggtgcaggtactgctcacttgtattcagtgacactaaaaattagtggtgtggcaaatcgtgcatttgagcctctatttgagaggcagacaattgcacaagtaagaacagtgtactcttttgtcggagagagcaaagcgctcaattcatattatgaagcaatccagaacacactgaagcttggttacaaagctgggatggccaaaggaggattaaatcaaacagtccccatcaggaggattgcatgtcatgggcactggtatttgggcgaagcagtacatcgagaaccactacaagtcgtagatgaagtcgcttcaggagcgcaaggagaggtcagtccactccactccactttccttcctggtgtgatggcaatgcgcgtgtgtctgggtgggcgttgcagaacacaggagccttccaaaattctgaaaggtgccatactcttgaaacaaatagctagagtctttgctatagggctagagtctttgctagggatagcaatggtgtcgacgcatggcgatacagccgggccgagctctagccaggaagatctggcagccaccatgaagaaatgcattagcaataggcctcaggatcatccatttactcaacaacagcttccagcttgcaagactatacttgcgactcagacatggaaccagcacggcctgggcggcgacaacgtgttcggtagctgctgccctctccataacgggctcgtcagcctcatgcactgttctgggaagggcaagccatgggaccgtctcgacgccggcaagccttgcgcactggaccacacctggaaggcgtacgacctctatattggcgagaatgattcatcatcagcatcagcttcatcgggcgtggtcttgctgtatcgctcgcagggcaaggtgatgaactgcgatggcggcggaagttgtggcacttgcatcgtcgagataatcgatggaaaggagctcctgaatgagaggacgagcaccgagaatcgatacctgaagaagaaaccagactcatggaggctagcttgccagactattgtaggcaacaaagagaactctggcaaggcaagcttcattttgttccccacacatcctgcaatcaacacttcacttccatatgcattgaaaaagaaagttgttcagtga

SEQ ID NO: 85966 - DNA, 338 bp, Zea Mays
gggcggaggcgaccagcgacgagaagctcctctgtgacgtcatgaacgagaacaagatcgagctctacgccgcatacggcaaggtgatgaactgcgatggcggcggaagttgtggcacttgcatcgtcgagataatcgatggaaaggagctcctgaatgagaggacgagcaccgagaatcgatacctgaagaagaaaccagactcatggaggctagcttgccagactattgtaggcaacaaagagaactctggcaaggcaagcttcattttgttccccacacatcctgcaatcaacacttcacttccatatgcattgaaaaagaaagttgttcagtga

SEQ ID NO: 85967 - DNA, 1973 bp, Zea Mays
ctgagcgcatactagtctctgcatcagctgcatcagagagtagagacctccgagctgctcttcaacacgcagattgggcagagccgcaaggtgcctgccgggagagagtgaaaagtgagagagcgcgcgctcaagggggccaaaaggaatttttttttatccagcttcttagcttgattctatctgatccgggagagcagccgccagtccaactaatccttgctgttggtgtgccggggctttgattgctctccagatctgaggcacctgctgggtggattccaggaatcctagcacgaagttgacagtggagttctcaggtaaaagggaggaaggaagaggctgaaagggcggcggagagagaaaggctataagagcgagctgggtccctcgaggatgccatcaagaaaccgcgtggaggggagggcgatgagatgagggatgctggccgcggtgatggactactttagctcctgctggggcccgcgatcgggtgccgggcaccgggaaaagggctccgacgccgctggccggcaggacggtctcctctggtacaaggacgtcgggcagctcgtcactggggagttctccatggccgtggtgcaggccaaccagctgctcgaggaccagagccaagtggagtccggatcgctctccctggctgacacgggcccgcagggcaccttcgtcggcgtctatgatggccatggcggcccggagacgtcccggttcatcaatgaccacctcttcaaccatctcagaaggtttgcaactgagcacaagtttatgtcagcggacgtgatccggaaagctttccaagcaactgaggagggctttctttctctagtcagcaaggaatggtctttgaagcctcagattgcttcagtgggctcctgctgccttgttggtgtaatctgtgctgggactctctatgttgcaaacctgggcgactcacgtgcagttcttggaaggcttgttaaggcaactggagaggttttggccattcagttgtcatcggagcacaatgcgtgctatgaggaagttagacaagagctgcagtcatcacatcctgatgatccacatattgttgttctcaaacacaatgtttggcgtgtgaagggtatcatccagatctcaagatctattggagatgtatatctaaagaaaccagagtataatagagaaccgcttcacagcaagtttcggcttcgagaaaccttccagaggccgatccttagttctgaacctcaaattactgaacatcgaatacagccaaacgatcaatttgttatatttgcttctgatggtctatgggagcacctcagcaataaggaagcagttgaccttgtccaaagtagtccccgaaatggaatcgctcggagactagtgaaagccgcgatgcaagaagctgccaagaagagggagatgagatattcagacctcaagaagatcgaccgtggtgtgagaaggcatttccacgacgatataactgtcgtcgtggtgttcatgccatgagcaaagctagctggagcaaaagcccctcggtttctcttcgagggggcggtgtcacccttcctgcggagtccctcgcacctttctcagctccggcatggttgaagagcaccaactgaagctgctgctactcttgaaaggaagagcacagtgcaggtctgcaggagagatgaaaaaagaacagcaatcaagtgtagcgttacacttgcacctgctgtgttgttgctcttcgcgaaactactgtcttgactctagactacgcctggtaattagtgcactgatagcgacgcaaatcctttcacattcttttctctccctcgacatgagatgagaattgagatactccattcatccaggaaaataggaccgattatggagaaaagacaaaatttaaccaacaattactcaatgtatgtgtaagtttaggatacaacttatattagtagatttattatattcaa

SEQ ID NO: 85968 - DNA, 1898 bp, Zea Mays
cacacagattcggcagagcctgccgagagagagtgaaaagagagggagcgcgctcaaggtgtggcgcaaggagatttttcttttatccagcttcttagcatgattctctttgatcccggagagcagccaccggtccaactagtccttgctgttggtctgccggaacttttgattgctctccagatctgaggcacctgctgggtggattccaggaacccgagcacgaagttgacaggtgagttctcagggaaaaaggggaggaaggaagaggctgaaagggcggtggagagagaaagactataagggcgagctgagtcccttgaggatgccgtcaagaaaccgcgtggagaggagggcgatgagatgagggatgctggccgcggtgatggactacttcagctcctgctggggcccgcgatcgggcgccgggcaccggggcaagggctccgacgccgccggccggcaggacggtctcctctggtacaaggacgccggccagctcgtcactggggagttctccatggccgtggtgcaggccaaccagctcctcgaggaccagagccaagtagagtccggatcgctctccctggctgacccgggcccacagggcaccttcgtcggcgtctatgatggccatggcggcccggagacgtcccggttcatcaatgaccacctcttcaaccatctcagaaggtttgcaactgagcacaagtttatgtcagcggacgtgatccggaaagctttccaagcaactgaggagggctttctttctctagtcagcaaggaatggtctttgaagcctcagattgcttcagtgggctcctgctgccttgttggtgtaatctgtgctgggactctctatgttgcaaacgtgggcgactcacgtgcagttcttggaaggcttgttaaggcaactggagaggttgtggccatgcagttgtcatcggagcacaatgcgtgctatgaggaagttagacaagaactgcagtcatcacatcctgacgatccacatattgtggttctcaaacacaatgtttggcgagtgaagggtctcatccagatctcaagatctattggagatgtatatctaaagaaaccagagtacaacagagaaccacttcacagcaagtttcggcttcgagaaaccttccagaggccgatccttagttctgaacctcaaattactgaacatcgaatacagccgaacgatcaatttgttatatttgcttctgatggtctatgggagcacctcagcaataaggaagcagttgaccttgtccaaagtagtccccgaaatggaatcgctcggaggctagtgaaagccgcgatgcaagaagctgccaagaagagggagatgagatactcagacctcaagaagatcgaccgtggtgtgagaaggcatttccacgacgatataactgtcgtcgtggtattcctcgattcggatgccatgagcaaagctagctggagcaaaagcccctcggtttctctccgagggggcggtgtcgccctccctgcgaagtccctcgcacctttctcagctccggcacggctgaacagcacctactgaagttgctaccactcttgaaaggaagaacacagtgcagatctgcagtggtgagagagagagaaaacagcaaccaagtgtagcgttacagttacacctgctgtgttgttgctctttgcaaaactactgtctagactccgcctggtaattagtgtactgatagcgaggtaaaaaagttagattatttgttagcgacacacatcctttcaccttctcttctctccctcgattcctatcccttttctcttcatccttgagagaacaggtggttgtaaattgttcagaacatgttttcccttatagtccatcatatcccgcttttttcgtgttg

SEQ ID NO: 85969 - DNA, 1878 bp, Zea Mays
cacacagattcggcagagcctgccgagagagagtgaaaagagagggagcgcgctcaaggtgtggcgcaaggagatttttcttttatccagcttcttagcatgattctctttgatcccggagagcagccaccggtccaactagtccttgctgttggtctgccggaacttttgattgctctccagatctgaggcacctgctgggtggattccaggaacccgagcacgaagttgacaggggaggaaggaagaggctgaaagggcggtggagagagaaagactataagggcgagctgagtcccttgaggatgccgtcaagaaaccgcgtggagaggagggcgatgagatgagggatgctggccgcggtgatggactacttcagctcctgctggggcccgcgatcgggcgccgggcaccggggcaagggctccgacgccgccggccggcaggacggtctcctctggtacaaggacgccggccagctcgtcactggggagttctccatggccgtggtgcaggccaaccagctcctcgaggaccagagccaagtagagtccggatcgctctccctggctgacccgggcccacagggcaccttcgtcggcgtctatgatggccatggcggcccggagacgtcccggttcatcaatgaccacctcttcaaccatctcagaaggtttgcaactgagcacaagtttatgtcagcggacgtgatccggaaagctttccaagcaactgaggagggctttctttctctagtcagcaaggaatggtctttgaagcctcagattgcttcagtgggctcctgctgccttgttggtgtaatctgtgctgggactctctatgttgcaaacgtgggcgactcacgtgcagttcttggaaggcttgttaaggcaactggagaggttgtggccatgcagttgtcatcggagcacaatgcgtgctatgaggaagttagacaagaactgcagtcatcacatcctgacgatccacatattgtggttctcaaacacaatgtttggcgagtgaagggtctcatccagatctcaagatctattggagatgtatatctaaagaaaccagagtacaacagagaaccacttcacagcaagtttcggcttcgagaaaccttccagaggccgatccttagttctgaacctcaaattactgaacatcgaatacagccgaacgatcaatttgttatatttgcttctgatggtctatgggagcacctcagcaataaggaagcagttgaccttgtccaaagtagtccccgaaatggaatcgctcggaggctagtgaaagccgcgatgcaagaagctgccaagaagagggagatgagatactcagacctcaagaagatcgaccgtggtgtgagaaggcatttccacgacgatataactgtcgtcgtggtattcctcgattcggatgccatgagcaaagctagctggagcaaaagcccctcggtttctctccgagggggcggtgtcgccctccctgcgaagtccctcgcacctttctcagctccggcacggctgaacagcacctactgaagttgctaccactcttgaaaggaagaacacagtgcagatctgcagtggtgagagagagagaaaacagcaaccaagtgtagcgttacagttacacctgctgtgttgttgctctttgcaaaactactgtctagactccgcctggtaattagtgtactgatagcgaggtaaaaaagttagattatttgttagcgacacacatcctttcaccttctcttctctccctcgattcctatcccttttctcttcatccttgagagaacaggtggttgtaaattgttcagaacatgttttcccttatagtccatcatatcccgcttttttcgtgttg

SEQ ID NO: 85970 - DNA, 940 bp, Zea Mays
gcaccttacaagagagaagtcggcccaagtagcgtgcgcgcagaagctactcccgaagagtcgctctcctgcgtccacgcctcgcttgcggcgactagggcgactgccgccgccgcccttcgcccagctgcccaggtcttcgtcgggcgctttaccggtgaagagcgcccaccataccagtcgtggcgccgagccctactcctcctcccgccgccgccgccgccgccgcagactcttcctcgcgactcgccgctcgcccgactttccgagctccgacaccaaggtctgagtgtctgactaccacgctgcacctacgacctcgaggcgtctccaccgcgccattggcaaactaactcactttacaggaacaccatgggagagtcgagcaaggagctcctggacctgccctccgaccccaggcctcccgcctccttcatcgagtcgcttctcgctggcagggagcagcagcagcaggataaggagggaaagcgtaagttgggggcgtccactgatcccctgcccaaaagccaagttatcgggaaagtgaaggatttcttgggggagattgcaagggccaaccagaagttgcagcttgatgcacagaacaagcctcctgtggagtacgatattgaagcccttactgggaacgaggaggaatacattgagatggatctgcttctaggtgtcgctgatcttcattcagagcaggctgtggaggcagctgaagcaacaataaacggacgccagacttcagaaatgtcatttgctttgcagctcatctgactcggaagatgatagtgatgacagcgatgaagatgctgatgacaaacctctcacgtctgacaaagataataaatgtaaaagtcctgatgatgcggagatgggtccagcgaaaggaaagaagcccaataaaagacagaaaattgttgttctcaactag

SEQ ID NO: 85971 - DNA, 1191 bp, Zea Mays
gcaccttacaagagagaagtcggcccaagtagcgtgcgcgcagaagctactcccgaagagtcgctctcctgcgtccacgcctcgcttgcggcgactagggcgactgccgccgccgcccttcgcccagctgcccaggtcttcgtcgggcgctttaccggtgaagagcgcccaccataccagtcgtggcgccgagccctactcctcctcccgccgccgccgccgccgccgcagactcttcctcgcgactcgccgctcgcccgactttccgagctccgacaccaaggtctgagtgtctgactaccacgctgcacctacgacctcgaggcgtctccaccgcgccattggcaaactaactcactttacaggaacaccatgggagagtcgagcaaggagctcctggacctgccctccgaccccaggcctcccgcctccttcatcgagtcgcttctcgctggcagggagcagcagcagcaggataaggagggaaagcgtaagttgggggcgtccactgatcccctgcccaaaagccaagttatcgggaaagtgaaggatttcttgggggagattgcaagggccaaccagaagttgcagcttgatgcacagaacaagcctcctgtggagtacgatattgaagcccttactgggaacgaggaggaatacattgagatggatctgcttctaggtgtcgctgatcttcattcagagcaggctgtggaggcagctgaagcaacaataaacggacgccagacttcagaaatgtcatttgctttgcagctcatctgactcggaagatgatagtgatgacagcgatgaagatgctgatgacaaacctctcacgtctgacaaagataataaatgtaaaagtcctgatgatgcggagatgggtccagcgaaaggaaagaagcccaataaaagacagaaaattgttgttctcaactagtacccttgtcttctgtacacctaagaacaagggctggagcgcaagtggtgaatgtgttggcctggtattatcagaagttacggagggactctctctgttcttttttatttgtcacggtttagtttaaaaatgaacaggggacaaatattcgagaagggaggttgtatttttttcagtgttgtgcaatgttcaggccagctagggcaacgtgcacgggggctaaaagaagtaatgcatattccagtttatac

SEQ ID NO: 85972 - DNA, 1135 bp, Zea Mays
gcaccttacaagagagaagtcggcccaagtagcgtgcgcgcagaagctactcccgaagagtcgctctcctgcgtccacgcctcgcttgcggcgactagggcgactgccgccgccgcccttcgcccagctgcccaggtcttcgtcgggcgctttaccggtgaagagcgcccaccataccaggccccgcaccttttaacaagttccagtcgtggcgccgagccctactcctcctcccgccgccgccgccgccgccgcagactcttcctcgcgactcgccgctcgcccgactttccgagctccgacaccaaggaacaccatgggagagtcgagcaaggagctcctggacctgccctccgaccccaggcctcccgcctccttcatcgagtcgcttctcgctggcagggagcagcagcagcaggataaggagggaaagcgtaagttgggggcgtccactgatcccctgcccaaaagccaagttatcgggaaagtgaaggatttcttgggggagattgcaagggccaaccagaagttgcagcttgatgcacagaacaagcctcctgtggagtacgatattgaagcccttactgggaacgaggaggaatacattgagatggatctgcttctaggtgtcgctgatcttcattcagagcaggctgtggaggcagctgaagcaacaataaacggacgccagacttcagaaatgtcatttgctttgcagctcatctgactcggaagatgatagtgatgacagcgatgaagatgctgatgacaaacctctcacgtctgacaaagataataaatgtaaaagtcctgatgatgcggagatgggtccagcgaaaggaaagaagcccaataaaagacagaaaattgttgttctcaactagtacccttgtcttctgtacacctaagaacaagggctggagcgcaagtggtgaatgtgttggcctggtattatcagaagttacggagggactctctctgttcttttttatttgtcacggtttagtttaaaaatgaacaggggacaaatattcgagaagggaggttgtatttttttcagtgttgtgcaatgttcaggccagctagggcaacgtgcacgggggctaaaagaagtaatgcatattccagtttatac

SEQ ID NO: 85973 - DNA, 1480 bp, Zea Mays
gcaccttacaagagagaagtcggcccaagtagcgtgcgcgcagaagctactcccgaagagtcgctctcctgcgtccacgcctcgcttgcggcgactagggcgactgccgccgccgcccttcgcccagctgcccaggtcttcgtcgggcgctttaccggtgaagagcgcccaccataccagattggccaccagaggattgctacatttgggaaggatgagcaaaggccctgttccattcgccaacattgggaagagagcaaaagatctcttgtacaaggactacaactttgaccaaaagttttctttgtcgacatgttctaactctggtttgaatctcacagccactggtgtgaagatcaatgaagacttcattggtgatatacggacacagcataaaagcggcagaaccactgttgatgtcataatcgatagtgattctaaagtgtcaaccacagtcactgttgatgaagcactaactggtttgaagacttcatttgccttcaaggttccagatcacaagtctgggaagcttgatctgcaatatgcccacaatcgtttttcaatgaattcgaccattggtttgacatcaacacctttggttgagctcgctgcaactgtcggcacaagtgaacttgccattggtgctgagttcgggtttgatagtacttcagctgctgttaccaaatacaactcaggggttggatacaacaagtctgatttctctgcttccttgctacttgctgataaaggggagactttgaaggcatcttacgttcatttattcaatccgaccaacggggctacagttgcagctgaggtaacacacaagctgaaaaccaaggagaactatttcacacttgggagctcccatgcacttgatccttcaacattgctaaagacgagattcagcaactcggggaaggtcggtctgctctgtcagcatgagtggaggccaaagtccctcgtgactctttcagctgagtatgatccaaaggtggtaagtgcgccttcaaggatcggcgtggccatatcgctcaagccttgagatatgggtcaagtcaccttctgtaaaacagtacaagcgttacgtactgatactcgtgtccaagaacataaacttttggagcgatacctagaacaaccctctccattttagccttgtttttggtaagagccttgggcaaagaagtgttgtcagggagttggacttgttttgtggaatgtttccattaagagccaaccccacaccgaggattgcaaacacagaagtttgtattagtgcagaagtttcactctgcgatattttttccccatgttttcctagtcgacgcaaaatgattttggaggtgattgaacacctaacgtcttgagttgatggtagctttaacagctgtgatgataaaggggccacttgtacccagcaacagaagaatttgctcccaattcgtcgaattggttattctggtggatcattttttgt

SEQ ID NO: 85974 - DNA, 1251 bp, Zea Mays
atggctgcctttgacgaggccaaggatgtcggtgatctcttgtacaaggactacaactttgaccaaaagttttctttgtcgacatgttctaactctggtttgaatctcacagccactggtgtgaagatcaatgaagacttcattggtgatatacggacacagcataaaagcggcagaaccactgttgatgtcataatcgatagtgattctaaagtgtcaaccacagtcactgttgatgaagcactaactggtttgaagacttcatttgccttcaaggttccagatcacaagtctgggaagcttgatctgcaatatgcccacaatcgtttttcaatgaattcgaccattggtttgacatcaacacctttggttgagctcgctgcaactgtcggcacaagtgaacttgccattggtgctgagttcgggtttgatagtacttcagctgctgttaccaaatacaactcaggggttggatacaacaagtctgatttctctgcttccttgctacttgctgataaaggggagactttgaaggcatcttacgttcatttattcaatccgaccaacggggctacagttgcagctgaggtaacacacaagctgaaaaccaaggagaactatttcacacttgggagctcccatgcacttgatccttcaacattgctaaagacgagattcagcaactcggggaaggtcggtctgctctgtcagcatgagtggaggccaaagtccctcgtgactctttcagctgagtatgatccaaaggtggtaagtgcgccttcaaggatcggcgtggccatatcgctcaagccttgagatatgggtcaagtcaccttctgtaaaacagtacaagcgttacgtactgatactcgtgtccaagaacataaacttttggagcgatacctagaacaaccctctccattttagccttgtttttggtaagagccttgggcaaagaagtgttgtcagggagttggacttgttttgtggaatgtttccattaagagccaaccccacaccgaggattgcaaacacagaagtttgtattagtgcagaagtttcactctgcgatattttttccccatgttttcctagtcgacgcaaaatgattttggaggtgattgaacacctaacgtcttgagttgatggtagctttaacagctgtgatgataaaggggccacttgtacccagcaacagaagaatttgctcccaattcgtcgaattggttattctggtggatcattttttgt

SEQ ID NO: 85975 - DNA, 1139 bp, Zea Mays
aagctcttcctcggaccctttaatgcactacggaccaccaccaccaccccaccgcgcgcgcgtgtgctcgcctcacttcgcttggcccggctgtctccacgccacgctgcccacaatcccctttcccctccagtaggtagagtggcgagaaggatggtggccgtgtccacggcgacgatggcgagctcgctgctcctccggccgcgcgcgctcctgccaccccatccgattcctagctccagccgccggccattgccagctccgcgtgtacaactacaggggagcatccaggagaagccgggccttccggcgaaaagcgacggcgagcggaggcggccggctgggacgcggctctactcgctggcgccctaccctctgctgctggccgcgctgctgccgggagctgagccggtgacggccgtgttcgcgccgttcgtggagctggtgaagacgtgggatctccccggctggctcgtgcactggggccacccgggtaacatggctgtggtgctcttcgcaatgggtggttacgggacatacctgggcttcaggatcaaactatcagacgaccttgaagagaaggccaaggctaaagatctccacccgaaactcctcgccgggatgttctttttcttcgccctgggcgcgaccggtgggatcacagctcttctcacctcagacaaacccatctttgaaagccctcatgccgtgactggagtcatcggccttgcgctcctgaccattcagtctgtcctgccaaaactgttcgagggaaacccagggcttaggactacacatggtctgctcggcagtggcatcatgactctgtttctaatccacgcggcactaggcctgcagcttgggatcagtttctaacttgtggctacaatatcttggggtttgcttctctttttctttaactcactctaagtattatcacacgaagcatccccttaaatgaaaataatgtaagagaaagcaaaattattttccttggctttgttggcaactgcagtccatgttatatgataatatgatattgccatacgacactagaatatccatgtagagacaactagacatggatacatgtctgtcacctaaacgaagaacagatcacacaaaaagaagaggaaaga

SEQ ID NO: 85976 - DNA, 165 bp, Zea Mays
gtttcattagtatgcacaattcaaacaagttttgtgtgtttatacgatcacaatggacagttgatcaattgcttatacaataatcaattctttcatggcttcatccacctcatcgttggttcttcgttgtttaataataagggtctggttcatagaaccaatctg

SEQ ID NO: 85977 - DNA, 597 bp, Zea Mays
atgctagccccttctctgcactggcgctcctctctcttcctcactgctcgcgcgcgcccgtgcttcctgttcctggcgccagatccccttccccacgcgtcctcttctccgccaggcatccatggagccgtcggccatctcccctgcgtcgagcgccctctcctactcgagcatcgccgccatggtctcaaccctagcgctcggctgctgccccaggccgagttcctttccatggccgccctcaaccccatggtcgagctcgcccaaccaatcgcctccatcacaggattcgtcatcgactcgagccaggtgagggttcagcgtggaggttcatcgaggtctgctgctcgtagctcccgtcgctccactcaagatccagcagaagtggtgcaactgcgagaagaacttaggcgacatcaggattacttgaagcaacaagctacgcaacatgaatattatgctacacagattcaacaacagcaaacactcatacaaacccctctagctaccttgccgacgcatgaacgagaagacatgttagactttgttgaaaccctcttcgctagtggaggtatcgaccatcactcgtcactgtaa

SEQ ID NO: 85978 - DNA, 1446 bp, Zea Mays
cgcacgacatccccagtgccggccgtctccgtccgcggcacgggcacggcaccaccccctgcttctctcccagcaggcccaggccgccagccgcctctcctgttctctttctctaaatagcagcgcccgcccgcgcgggacaccgcccgccctcccgcgcctttttccgctagccaacgcacggctgacggcaccacaaggcaagcccgcccgctctcggctctcgctctgctcctgccccccttctctctctctctctctctctctctcggtctctccctctttcagcctgcagcgctagcgagccctcgccttcccttccccattattcccaggattccccttgcgactgcaccacgccccacccaaacccacctaccgcctccgctcccctctccagcgagtcgggggcacggacgggaccagacgaccaggccatggggaagtacatgcgcaagggcaaggtgtccggggaggtcgccgtcatggaggtacccggcggcgcgctgctcggcgtccgcacccgctcccgcacgctcgcgctgcagcgcgcgcagaggccgctcgacaagggcgacgcggaggacgccgccgcggagtacctcgagctcaggagccggaggctcgagaagccgcacaaggagcatccgtcgccgcccgcgaccgcgaccaagaggggcgccgggaggaaggccgccgccgccgccgcggtgcagcacgtgctgatgcaggacgaggtcgaggtcgaggtctcgttcggggacaacgtgcttgacttggacaccatggaaaggagtaccagagagacaacaccgtgcagcctgattaggaacccagagatgataagcaccccaggatccacaactaaaagcaaaaccagcagcaactcgacgacttcccgccgcagaacggaggaaaccccgagctgccggttcataccgagctcgctcgagatggaggagttcttctcggcggccgagcaacaggagcagcatagcttcagggagaagtacaacttctgtcccgtgaacgactgtcctctccctggccggtacgaatgggcgaggctagactgctagattccccacccagcacaagagcaccattgatctgattgatatgtgtctaccacaccacaatgtgactagctccgccgccgccgccgtggaccgtggaggaggcgcaaccaactgtggatctcgatcgcattagctttgttgtctgttgtaaaaattagagtagttagctttgtagccggatgaatgatcttgtgtaaccaacaggcgtggttcacccctggtcacacaacctcactgtaacctgttaactgctcaagctgctgtaaccgaaccaatctcatgtagcgtaggcctagcgcagtcttctcatctgttcgtagctctcgaaattgattgaatggaattagagttaaaatttgcatggcaa

SEQ ID NO: 85979 - DNA, 1536 bp, Zea Mays
ccagagtccagagcagcagctccttcatgacgagctttctccagctctgagcgcgcggagggatcggagaggcgcgatgaacgggggagaaggagaaggaggaggagcgggaagcggggcggcagccggcggggccggggccgggacaccgcgggtgccgacgtggagggagcgcgagaacaaccggcggcgggagcgccggcgccgcgcgatcgcgtccaagatcttcaccggcctgcgcgcccacggcaactacgctctccgcaggcactgcgacaacaacgacgtgctcaaggcgctgtgcgaggaggccggctggaccgtggagcccgacggcaccacctaccgcaagggatgcaagcctccgggcagcagagatccatatacggctgcctttatccccggcggcatggtgtcctgcccggtgagtccgcgagcttacaacggcctcagctacccgtcgtcgccctcccacgtcggcggcagaggcagcagcttcttctacggcggtgcgggcagcagccgcggcgttgtcattggcggaggcgtaggcggactcccgtggctcaacaacctgtcccgctactccgacgacgcctcgtacgccgacgactactccttcagcgcgccggtcacgccgcagaacggctccccgccgcggcgcaagatggcgcgctgggcgtcgggcaacgccgccgccggctccaacgtgcagtcgccgtgggccgccagccctggccccagccgctacgcctccctgccagtaaccatgccgcatacccctgtccacggcgaggccgtggcggccgacccggtgagcctgctcacggggctgcagatatccgccgccgcggccaacaagccaccggcgtacagcatgttcgacttcgacgccgggagctactcgtcgaggcctgggcagagcagcgacggggcggcatgggcggcggcatcgtctcgtggcgccgccggcgacggtgacgcacaggtggccccgcacgggttctccttcggctggagcggcgggccggcgttcagcgcgtgggagggggagaaggcgagcgtggcgttcaacgcgtgggagggggagaaggcgagcggggcgttcagcgcgtgggagggggagaaggtgagcgacgagtacgtcgacgagggcgacctggagctcaccctggggaactcgagggccggcgccggcgctgaccgcgcttgagctcactgctcaccgagaccgatccagctactgctgcaatgcagcaagacgatgagtgcatgagatgatggattgatgggaagggaagatgtcttcattagccttatagggactagggagtggccgtagttactgctgccgttgaaccataacctaatgtcatcgtgattcctgagttaccccttttttccttaacaaagtagtatcttttgattttcaagaaactaaaaacaaaacaggcatagcgagggagagtgactgttcttgtgatcttggattaattgccgggctgctggactaatggaaaagtaccagttttaagc

SEQ ID NO: 85980 - DNA, 1292 bp, Zea Mays
ggccagacctgctcgcctgattcgctctcccgcgattccacccccacaaatcctccgacccaacccaatccagcgtctcaaaattcacgcaacttcgcgtcgcgtcggctccaaatttgcccccttcgatccataaatcccttcccccacccccgattttgcgccgaattcggttagcttattactctccgagcttatcgccaaccgtctggttagattcgattccccgtttgttttcgcttgaatgtttagctttcttgatattttcccctttattattttgggttgattgttgttcgttgtttctccctttctgaaatccggattgggcctttttcaaattcgcgatcagtcccgacctcgagatccggctcattttttcaccctcttacgtattcggatcgagcccgagctgccaattcgaggagctccgaacgcgggccgcataaagcgaatcgaatgaatcaagcttgcgcgacgggcagttgatgccacccggcgatggatcgccgcatcctcaggacctcgtcgtgcaacggcagcggtaagaacccgtccccttcctctcccgcggcggtctcacggcctgcgtcctccgggggcatcggctccaaggacgacgccgctgccggcgagcgcaaggcgctgctgccgcggcagcctcctggcggcatggcgcggaagggccgcaaggggtccaaccgccgcgtgcagtggaaagataagcatggcagcaagctcaccgatgtcagggagttccagcctagtgactcaagtgactcagatgatgaatatttggatacatgcatatgctcaatcatgtaaatacatcttgcacaggtggattctatcatgtgtataaggagctgtatctcagtattactgtcttcggcttggccctaacagtacagtgacaatcatgcatgcatgcatagttcgttccaacagactccgaactggtgataatcagctggccttaactgggagttacatcaaagacctagaaaatgatcaccggattcagtaggtagacatgattaaagaagccgagaaagaatgcctttctttggtttaattttggataccaacagcatcctgagtttttggcagagtaatgattcatgtgataatgcaaatgctattagaatcgaacattactaattcctgtgcatgattcagatcgattttgtcaaataggatttgatgtattaacatggtatgtttcttttaaaaagaatccttgctaccatcatttgttacttacaggagctagtgcccagatttgtgctgaa

SEQ ID NO: 85981 - DNA, 1098 bp, Zea Mays
gctctcccgcgattccacccccacaaatcctccgacccaacccaatccagcgtctcaaaattcacgcaacttcgcgtcgcgtcggctccaaatttgcccccttcgatccataaatcccttcccccacccccgattttgcgccgaattcggttagcttattactctccgagcttatcgccaaccgtctgtcccgacctcgagatccggctcattttttcaccctcttacgtattcggatcgagcccgagctgccaattcgaggagctccgaacgcgggccgcataaagcgaatcgaatgaatcaagcttgcgcgacgggcagttgatgccacccggcgatggatcgccgcatcctcaggacctcgtcgtgcaacggcagcggtaagaacccgtccccttcctctcccgcggcggtctcacggcctgcgtcctccgggggcatcggctccaaggacgacgccgctgccggcgagcgcaaggcgctgctgccgcggcagcctcctggcggcatggcgcggaagggccgcaaggggtccaaccgccgcgtgcagtggaaagataagcatggcagcaagctcaccgatgtcagggagttccagcctagtgactcaagtgactcagatgatgaatatttggatacatgcatatgctcaatcatgtaaatacatcttgcacaggtggattctatcatgtgtataaggagctgtatctcagtattactgtcttcggcttggccctaacagtacagtgacaatcatgcatgcatgcatagttcgttccaacagactccgaactggtgataatcagctggccttaactgggagttacatcaaagacctagaaaatgatcaccggattcagtaggtagacatgattaaagaagccgagaaagaatgcctttctttggtttaattttggataccaacagcatcctgagtttttggcagagtaatgattcatgtgataatgcaaatgctattagaatcgaacattactaattcctgtgcatgattcagatcgattttgtcaaataggatttgatgtattaacatggtatgtttcttttaaaaagaatccttgctaccatcatttgttactt

SEQ ID NO: 85982 - DNA, 1646 bp, Zea Mays
gccgttcccccaccaattgtgttttcctttccttcccgctcccccaaatgccgcctcctcatcactagtcaccacttccccgcgctgccctcccactcccacacactttctgctgcctctcgccgcggccgatgggctgcttccttggctgcttcgggggggccaaggagcgccgccgccgccgccgcaagcggtcgccgtcacagtcccccaacggccgtgcccgggccttgccgcgggttacgccgaacaaggttgatctggatggggaggccgtctccgccgccgcgccgctactagcgacgctcctcgagttgagggactccacggacgacatgtgcctggccctcgtgaagaagaaggtgacattcgaccccaacgtcaccacattcgaggcggccccgatcccggaggacgacggcgaggaagccgatccggaggatggtgggaatagcaaggagaaggggtggatgctggcgtcggagtgcgccaagtccgaggccttccccttgaaccacaggtacagcaagttcgccggcagcggcaacgtcagcgactacgaggacgccgaggaggacgaattcgaagacgaggaggaggaggaggacgactacgaggatgaggaaggggaagacgggctcgatgagtgtcggatcgacgacgatgacgaagacgagcacggcctcctcggcatcggacgcagcgaggaggatgcgtgcgagtcgctcttcctgtttccgtttggcaagatgtccagggattccggcggccaggtagcggcgcccgtcgcgcccccggcggaggcccccgcggtgctcggctccgtagagagcctgaacctcacccggtggaaggaacccaagcctcgcggtgccgccgcgcccaagtcctcggacaaggagaacgtcactgtggagcgggagaaccggatggacttcctcgccgaaccacccgcggtggcggccaagaggaaggaggaaccgaggccggcggtctcggacaacagctacacccccagcacgccgagcaaacaggaggcctccgtggacgccagcctctccacgtggctcggttcctcggcgacgcccgagagcaactcggtccggtcctactcgccgatcagccgggacgaacggccgatcctcggcgccctcaccgtggaggacatcaaggtatcgtccgccaactcaacgcctcggaggtcgaggtccccgagcccgagtcccgatgacatgccgatcctggggacggtgggggcttactggaactgcagtgccaaggagtctgatccggtcacgagaggagggtttatgaggaccagaaccagatttggccaggtcaggtgagcagctttgtctcggtagtctgacttgactgttgtaatccatgtttgctattatcttctgttgaaataatggaacacctcccgctaggaggagagagagagagagggtaccgaacctgggtgggaatgcaaagatatacaagtatgtgtgagaatgcgagatcgtgaaaccagatagatttgtgtgatcatatttctttcatatgtttgtaaacattacattgccatccatattctaggatggtattttttgtagcttcaatgtcattcttttgtcaatatgatcgattgtttttgtgta

SEQ ID NO: 85983 - DNA, 507 bp, Zea Mays
atgtatcgagccaagaacactcgagagcacctgggtgtacaccgggtcacggtgctcctgcttcgcgtcggctgccacatcaccgagcaccgtgagtgcggcgccggcgaggtccggctcgatctgcccggtggccacgtactgctggaagagcacccaagcgaagcacacgttgtggatcatcttgtcgatccccagcgtctgccatgcccgcctcatgagctccaggagctcatccacctcgtcgagcacaacggtctcctccttgaggtcaaatatggcctggagcagcgagacgtagaggagcacgttgagtgggtacccgtcggcccagtggcaggcctcgcccggggaccccgtgccgggagcgcagcgccaggcgagggcgagcacggcatcgcagatggcgcgcatggtgtccgaggccttgccggtgtcgatggcgcgagcgtcggcgacctgcatgatctcccggaaccggagcacgggggcgttgaggcggtctag

SEQ ID NO: 85984 - DNA, 855 bp, Zea Mays
gcgaccctcccacaggaaaccagtgccctaacggcgccgagggcaggttcgtcaggcgtccaaaaccctagttcccaagtcctatataatcagagagctaggtgaaatcctacggatcggttccaacaccagccgccgtcatgtcgaagcgaggtaggggaggttcggctgggaacaagttccgcatgtcactgggtctaccggtggcggccacggtgaactgcgcggacaacacgggcgcgaagaacctctacatcatctccgtcaagggaatcaagggccgcctcaaccgcctcccgtccgcctgcgtcggcgacatggtcatggccaccgtcaagaagggaaagcccgacctcaggaagaaagtgatgcctgccgtcatcgtccgccagcgcaagccgtggcgtcgcaaggacggtgtctacatgtacttcgaagataatgctggagtgattgtgaatcccaagggtgagatgaaaggttctgcaatcactggacctatcggcaaggagtgtgctgacctttggcctaggatcgctagtgcagcaaatgccatcgtttgagagcttgttggaatgtgtttagacttgagtatgatcatctcaattgtgtgttgcagctgttgtaagggtgctattggacttgatggctccttttatgtttggtcactcaattttgtagtgaacagaaatttgtctaccctggttgcctcaagtttgctgtctgagatggttatattatttattttgttctaaagcggacttcttgtttgtatgccacgtatacttttgtgactgcgaatttgttggtattggctacactcacattctactatcatattgtttcccatccacc

SEQ ID NO: 85985 - DNA, 111 bp, Zea Mays
tttttttttacttatttcgtcgttagctttgccaaagatgtaattgtatttaaaataaagattcaaaaaattacctagctattacgtggatgctcgctctcaaatcgctgc

SEQ ID NO: 85986 - DNA, 1110 bp, Zea Mays
atggcggccgcgtccacgtcacgcctcgccatccaaatccgtgtccctttcgttccttggccttttccgtttccaccccgcctcgctaccttggcggtttccacccgcacccggctcgcctcctatggcctttgcctccccacgcggcccgccggcatgcctcctctcgccgagcacgagctcgcggccgcggccgccacctccgcgctcggcgtagccttcggggtgcgcctgctcgtcgccctctcccgctcccgcgcgctcaagccgctggcggccgccacgtccgccgccgccgccgcgctccggacgccgcgggcgctcgccaccgcctcctcccctgtcgccgccatcctagccgcgtccaaggccgcctccaagtcgtacaaggcggcacgcacgctcggccccgccgccgcgcgcctcccctcgctcccctcctccaagcgcctcaaggccgcgctcgccgccgcctcgctcctccgcctcgccgccgccgcgccggcgggcctccacgccgcgtcgcccgcgggcgtcgccgtgctcgccgtcctcaagtccagctacaagctctccaagaacacctccaaggtcgtcgagggcttcctcggcctccagctgcacaagggcttcaggaacgggatcgacgcgctcggggtggtcgtcaaggtcgccgtcattgtctctgaggtcgccgtctgggtcggggcccgattctggggttatgggcgcgctcgctgcgtcatgttcctcggcttcaccagacccactggcttagtcctgcttggctgtagcaaatctgagccccaggttgcactattcgatccggttatagttgggatggatgctcaggggtgcgaattggaggagcgagggctctcagaattgttctctcttgctgtgccagtgccccaggccacaacattaatgactatgagttagccttaccacatagctgtttgtacatttgcttctatcagatgattttttgatccactgcgtgcaactatattcttgtataatcaacaagtgtgggtgaacaaactgtacagcaattgaaggatccaaatgcattgacttaaacgataaaatcttgtctggcagagcaaa

SEQ ID NO: 85987 - DNA, 404 bp, Zea Mays
atctatcaaaatattatattatacaaatgtcaagtatatacatctaaatatcattgtaaaatttctagcatcatttaatcatccattcaacacaccaaagataattggataaaatagtaacactaagacagtactacatagcacattacatgttccattacatggtcattaaattgtcgttaagtcttctatgacattatgatctaaaaggttgttaaatagtaaaaaagatggatgactaaagtccaagatcatgcttgggctaagtttatattgggtattttatacccgcgggttaacgggtatgggtgaaggtggaacgttctaatacccgtttacccagtgggtgaagatttttgcccaataactgacccacaggtagaatatttagcccatatgcatac

SEQ ID NO: 85988 - DNA, 120 bp, Zea Mays
ttagcaatagtagcctgcctttttgtgttctgccattctgcgatctcagccgtccattctaccgttctacaatctcagccgtccaatcccgcacaccagtttttcgcgcgcagaaaaaaa

SEQ ID NO: 85989 - DNA, 2028 bp, Zea Mays
cataaagcagtgcagactggcctgccctggtgcaatcagaatatccaattccagtcttcactcgtattaaagccttagcctttagcatacgtcctaatgatcgatccgatccacatagccattggcagttcagttctccgatcctctaccgcagcagcgtaggcaaagtaggaggcaaggatcaatggcgccgccgcggatctccttcctggagctctgcctctccttcctctgcttcgtggtcttctactacttccacatgagatccaagcggaagaaccctttcgtgccgctggactggccgctggtgggcatgctcccggccctcctcggcaacctccaccacctccacgactggatcacctccctcctggtcgccagccagctcagcttcctcttcacaggcccgccgcgctccggcatgcagttcttcgtcaccgccgaccccgccaacgtccgccacgtcttcacctccaacttcgccaactaccccaagggccccgagttcgaggagatcttcgacgtcctcggcggcggcatcttcaacgccgacggcgagtcgtggcgccggcagcgcgccaaggcgcagctgctcatgtccagcgccccgttccgggccctggtgtcgcggtacagccgcgccaaggtggacaccgccctgctcccgctgctctcgcacatggccgccaccggggaggcgttcgacctccaggacgtgttcctccggctgacgttcgacaccacgacgacgctggtgttcggcgtcgaccccgggtgcctgtccgtcggcctccccgaggtgccgttcgcgcgcgccatggacgacgccatgggcgtgctcctcctccgccacgtcgtcccgatgacgtggtggaagctggcgcggaggctccggatcgggcacgagcgcaagatggcggaggcgtggcgcaccatcgaccagttcgtcgccgacacgatcgccaagcggcgggccgagaaggcgaggcacggcaacgggcaggtctcggcggacctgctctcgtcctacatcaacgacgacgaggacgaggaaggcggcgtggacgcgttcctgcgcgacacgaccatcaacctcatgctggccggccgcgacacgacgggctcggcgctgtcctggttcttctacctcctgacgcggaacccgcgcgtggtgggcaagatacggcaggagctggagtgcgtcaagagcaagagcagcggcagcggcggcggcatggcgagcttcgacccggacgagctgagccggctgacgtacctgcacgcggcgctgtgcgagtcgctgaggctgtacccgcccgtgccgcaggagctcaaggaggcggcggcggcggacgtgctgccgtgcgggcacgaggtgcgggccggggacaagatcctggtgtctctgtacgcgatgggaaggatggaggaggtgtggggcagcgactgccgggagttcaggccggagcggtggatcccggagttggaggacgggcgcagggtggtgcaggtgcggtacgtgccgtcgtacaagttcatgtcgttcaactcggggccccggacctgcctcggcaaggacatggcgttcgtgcagctgaaggcggcggcggccgccgtggtcagcaacttcgacgtggaggcggtgccggggcacgtcgtggagcccaagctgtccatcatacttcacatgaagaatggctttatggccacggtcaagaggaggcgccagacgtttgcttagcttcgacgtacgtacgtacggtccattattatctgtggtaaacatgagatcacacagtcggtacgtacgttagctcgctcacatgtatgtaccagcaggtgcaagtacacgtggtcgtcgtggcatgtacgtgtacgacactccgtccgccgttgaaaggtacgtagtgttattacgtgtacttgtacgtgtgtgctgtgcgatgtcgatcagtgcatatagcatatgggtgttttctgtggtgtggtggggcgaaatgagagtatgagaccaaacctcctagcaaa

SEQ ID NO: 85990 - DNA, 2548 bp, Zea Mays
tctactgcgacttccgtcgcgagctccgtcaggtcatcccgacccttccccctagaaccccactccgcgcccctcccgtgtcccacagcaccggcaccgctcggtgctcgcaccaccccgcgctgtcgaccccgcccccctcgctcctcacaaaagccgccaaaaccctagcgccgccatcaggaatccagcgaggagcaccaaaaaacagatatcaactttgatgcgtacgaggccatcgacgccatccacccccgcaccgacgcccaggctctagcgatccggactgccccgcgccaccatctgcctcgttgccccggcacccccgcgtcgactttggcgaccaggcatgcccagcgccaccctctgcctccagcgacatcccctcagcatcccatgccctcgcctctctccggccgcacaggaagttcctatgagcccctattgttgttccgttgcccaaaccctaagattgattttctattcgtacctactggtttggatgcagcatatgcaggatgaggatgtcgggcggccgtacaggaagttcctctgagcagcgtcacagcctgcaagaggattccattttctgtatgtgttgtggaaatcatttgataggattagtgtcagtatattggttcctgcgatgctggtgttcgtttctgggattatcaagtatggggagagggtgtgggctctgaagagtgcgagccgaaagggccttgacaagacatcagctaatcccagttcacatgaagacacaatcgatgatgtattgacttgtaccaaggaatcatatgctctttggacggtgcttatagctcgaggattttttgtggggcgaactatgctcctgatgggacaggggcctgcatcaacactatggttttatttcaagacaaagtatcaaggtagagaagagaagctgaagatggtaatgatggagcttggcatgatgttcgatctcctctacaccaaagccaacgtgctccagagaaggattggtgtcctattcctgtgtgcttcccaggccttgatggtcgttgccctggttctcttcatgatacgacgtgaggaaggcgcccacaataacaaggttaatgtcgcgattacctacacattattcagtggcgccatttttgtggagacctgctgtgttgctgcggcgattgcgtcgccttggacaagggcacacttgaaggagagcagctgccttcatggtctcagtgactccttgtttgaggctgttcatctgtgcaaatccaccgctaataacatggcacagtttaacttattggatcactgcatctctgtcaactccaaaccaagagttttctcaaaggccctcagtgctattggtctggataagcaatggtacgtccaccacatggataagcaatgctactggtggattatcaaccgtgttttggaacatttggccacattgcccgacgaattctcaggtctagcaactgtacactttacaattaatgcacccactgaacatccagtatggttcaaccagctgagtacatccttcgagcaagtcctctacggcttacacctatacactgacctacatctaagcaggcacttcaacaactgcagcacgggtagcgtcgtacaaccacctccacctgagattatgcgacttaaggaagaatgcgagacactatcaaactacatgatgtacctgatggtggtgcatccttccatgttgccagtcaacacagttgcggcaggagatcttgttcaacaacttattggctgggttactaaccaccctggacatggggcgacgacgaccaagctagcaattctgcgagggtactcaaggaccttttacattctgggcatagacgaaccaggccaacacagatcattttattatttgcatcacttacttacgcagatcaaggagatgtgggtgaggcttctcatgtatgctgctggcaaatgcagcggagaggtgcacgcacgccaacttggtgaaggacgtgagctcatcacctttgtctggctactcatgctgcatcatggacttggagacatggcagctgagttcaagcttttaagatctaatgatccaaatgtagccgagcggggggcgtggattgtttcacctccaggaaattatcaagagccgacttgtgccttcaaccacgtgacctttgtagtccattgtaaaagaaatgtctctatgctctttactcatacattacaacaattttttttgtaagtttacacttatgcaagtaacctagagccttagcaactgaaatgttttaggttaggttgcctagatacagtggagggtggaactggaaccaatatgtgattcgttatatgtatactgccgcaggttgccatttattcaatacaacagtacatgtgtacataataaagataaaagaatatattgatgattcaaacaagcgattctgatattaatatcaattttggtttagaatattgctatatttgagaaacaccctgagttttgttgcctctttccataacaaactcttcgatttttaattttgttttt

SEQ ID NO: 85991 - DNA, 1080 bp, Zea Mays
atgcccccacaatgtctttgtccacattctccttccgtgctctccctcccatcagtaatcaccatccttcttcttgaccaggctcctggcgaaaagcaagcagatgaccacgaaacccaggcctacggctcccccgagcacaatggctacagtctttgctgtctgctgccctccggtgccgccgccgtggggcacgccgtgggggtagtagctgtagctgatgtagcacttgtcgaggtagacctggccggagggcgcgccgccgcactcgacctcgacgtgctgcacggcctgggtgacgcactggctgcagtcccccgtggagaggtcgccctcgcactgcgccatggcgtagacggcctggtagctggtggcgacgaagccgccggagctggtggcgacgccgccctcgagcgcggagaaggcggtgtccctgcgcatctcgaagtcgccgccgccgccgccgctgccggtgccgcaggtcttgaagagcatctggacgccggagacctgggggaagccggacacctcgtagagcgcgaggcagccggcgagctggacccgcgcggcgacggaggcgccgcagacgccgggccaggaggacatggcgcgggagacgcaggcggcgcagtcggaggccgagaggtccccgcggcactggaagaggccgaagacggaggtggaggaggaggccgccgaggacgaggaggaggtcttgtagaacttggcggaggcggactgcgccgagagcgtggtggagagcgcggcgacgctcgggggcgccaccccgcccgggaagctctggttggcgcagcccttgtagatgagcgcgtagaggtcggcggacgtcgcgggcagcggcgcgtggagcagcaagacggcggcggccaggaagaggaaccggcgagctctgcgaatgcccatctcgccaccggggtcctggggatctctcggcctcgtctccccgccctagccctctctgctctgctctatcactgccctctgccccctcgtcacggcggcggcggcggcggtgatggtgtggagtgtactggagtggagagtggagactggacctga

SEQ ID NO: 85992 - DNA, 876 bp, Zea Mays
atgcccccacaatgtctttgtccacattctccttccgtgctctccctcccatcagtaatcaccatccttcttcttgaccaggctcctggcgaaaagcaagcagatgaccacgaaacccaggcctacggctcccccgagcacaatggctacagtctttgctgtctgctgccctccggtgccgccgccgtggggcacgccgtgggggtagtagctgtagctgatgtagcacttgtcgaggtagacctggccggagggcgcgccgccgcactcgacctcgacgtgctgcacggcctgggtgacgcactggctgcagtcccccgtggagaggtcgccctcgcactgcgccatggcgtagacggcctggtagctggtggcgacgaagccgccggagctggtggcgacgccgccctcgagcgcggagaaggcggtgtccctgcgcatctcgaagtcgccgccgccgccgccgctgccggtgccgcaggtcttgaagagcatctggacgccggagacctgggggaagccggacacctcgtagagcgcgaggcagccggcgagctggacccgcgcggcgacggaggcgccgcagacgccgggccaggaggacatggcgcgggagacgcaggcggcgcagtcggaggccgagaggtccccgcggcactggaagaggccgaagacggaggcggccaggaagaggaaccggcgagctctgcgaatgcccatctcgccaccggggtcctggggatctctcggcctcgtctccccgccctagccctctctgctctgctctatcactgccctctgccccctcgtcacggcggcggcggcggcggtgatggtgtggagtgtactggagtggagagtggagactggacctga

SEQ ID NO: 85993 - DNA, 1539 bp, Zea Mays
atgctcatgcctccgcctccctgcccgccgacgctgccgcaccttctccgccacctccgcggccgcatgctcaccacccagctcctcgaccacctcatcaggtcaacctcatcctcgccgttcccctccctctccttctccgtcttcatcctcctcctccgctcctccctccgcccgtcccacttcactttcccattccttgcccgcgccgccgcgcgcctttcctccgcctccctcgcgtctgcgctccacgcgcacccgctgcggctcgggctcctccccgccgacctccacgtcgccaactccctcgtccacatgtacgcggcctgcgccctgccggaccacgccaaccgagtgttcgacgaaatcccgcgccccaaccttgtctcctggaacgcgctcctcgatgggtacgccaagtgccacgacctccccgctgcgcgaaaggtgttcgctcggatgccccagcgggacgtggtgtcctggagcgccatgatcgacgggtgcgtcaagtgtggggagcaccgcgaggcgctcgcgctgttcgagatgatggagaatgctgccgccaggtcagcagaggaggaggatggtgggggtggggcgagggctaacgacgtcacgatggtgagcgtgcttggagcctgtgctcagcttggagacctcgagcgcggaaggcgggcgcaccggtgcctgagggaacgtggctttgcattgaacctcaggcttgcaacctcgctcgttgacatgtatgccaagtgtggggccatcagtgaggcaatggaggtgttctgggctgtgccggtggagagcaccgatgttctgatatggaatgctgtgatcggtggccttgcggtgcatggcatggccaccaaatcggtggagatattcctggagatgcagcgtgctggggttgcgccggatgagatcacgtacctttgtctgctgagcgcttgtgcccacggcggtctagtggatgaggcttgggagttcttccgctcacttgaagcgcaagggctcagaccacatgtcgagcattatgcttgcctggtagatgtgcttggcagagcaggacgcctggaggaagtgtacggtgttgttaaaagtatgccaatgaaacctagtgtttctgtgcttggtgctctcttaaatgcctgtcatttgcatggatgggtggagctgggcgaggtactcggtaggcggcttgtccagttgcagccagaccacgatggcaggtacattggcctgtccaatatctatgctgttgccagacggtggcaagaggcaaagaaagctagaaaggtgatggaggataggggtgtaaaaaaggtccctggatttagtgagattgatgttggtggagggctctccaggttcactgcccaggacaagactcatcctggctcagtgaagatctatgagttgctgaatctaatagcaatagagatgaaaatgaaggatgatgctactattccagattacctcctgtgcacactgctagaatgatggttgcgcttgcacctgtagatcactcaacaa

SEQ ID NO: 85994 - DNA, 107 bp, Zea Mays
tacttataggtactaaatttggtcatggggtggatggtatcaaggagtggatattgtcaaagctccctgtggttactgcttattattccaaggtgttagcaaatcat

SEQ ID NO: 85995 - DNA, 1629 bp, Zea Mays
atggggtctgcggcggaggtgcctgttgtgatcagttccgacgaggacggcgcgcagacgcccgccgctggcaagcgccagtcaccggaagacgccgcccttgcgtgggcggagggaatactggcccaagacgactacgacgacaacgcggtttgtgagggagtgggttatccagcgatgatgctggagctgttggattccctgaaggatgaaacagggactgttgtgggtgacaaggaggttgcggttggtgccaagaacacgaacaccatgcctgatgctcgttgcgacgatgatggcgatgattgcgtcattcttgacggtgaccctgataagccggttgccgttgcaaaggaggaggggggaccgccacgagatgcccctgaggatgaactgcagatagttgcggagaaaggagagttagcatgcagagatttccctcatccacgacatctatgcgctgccttgccattcagcagcagttctcatgcaagtcattgtagcatgtgccattgttatgtctgtgattgtcctgctccctgtgccctatgggacaagcattgtcatgctacggacaaggatagaaagtggaagagacttagggaaatatccaaaaataaaagccagccaaatcctaaacgaagaataccccagcatttcaaacgctcagtcacgacaggaccatcatcctcacagtattccgcaaatatgactggttttactggaagatttcctgcttcgggtactgcgaaccaaattcaacaggtggatatctctgttatggttgcacaggatatggtgaggggtatcagtctgccgagtgcaccatctcctacgccaagaactaaaaatcggagctatggatccaaaggtgcccagattgctcctccaatttatacattctcaaatgataatcatttccagccttctgttcctagctatggtctggtgcggcctcatgcatctaaaactgcacatgtttcatcaggaggtcatgttagcgctaagacttttcagagtaacccatctcagttttgtgttcgtgcaccaatgggatctcatggacacaggtaccgaccaccatcatatcctcagcctcctcctaacacagttgttggcactggtgtgcccctctcacggtgcgcctcgctgaacgctgaggctcagggaacacaacgcccacaagttccgccggcaggtacaatatcgaaggaatcacttgcaaatttggcacgtcggctgggattaccttattacaatactaatcagccattaggtcagcagtcaacgagcacatctcaatttctgcatatgcatcctcacgagatgctacctgctcaaggtgctcaaaacacgacctggcaagcttacgttaagaaaagtgtggcaacaacttcacaaatcgtgccttctagtgaacataattcgtcaattcatgcacctgggagcactgttcttccatctggttcagttcagatccagcagcctttgcgccaattcaaatcgggcactgttctatcatctggtgcagcccagatccaccagcagcctctgcgccaactcgattctcagagcagtgttactccgagtgaaaccgttccaagtactctctaccttccgcagccatga

SEQ ID NO: 85996 - DNA, 1157 bp, Zea Mays
atggcgaaccccttgaaacagcatgagcccaccacgtcgttataggatcatcagttcccagcctagtaacgcaagaaaatgcagcccatgaaggcccatttcaaaaccagcacagagtcatcgctaccaggccaccgcccaaaggtcacacatacaagtgtcacgtccccggtccctcgcgaaccctagagccgcagcagcacactcccgcagtagcagcagccgccgccgccgccgcccagccgcaggaaacaggaggaagatgccggcggggcacgggcttcggtcgcggacccgcgacctgttcgcgcggccgttccgcaagaagggttacatcccgctcaccacgtacctgcgcacctacaagatcggcgactacgtcgacgtcaaggtgaacggcgccgtgcacaagggcatgccgcacaagttctaccacggccgcaccggtcgcgtctggaacgtcaccaagcgcgccatcggcgttgagatcaacaagcaggttaatggccgcatcatcaggaagcgtatccatgtccgtgtggagcatgtgcagccctcccgttgcacagaggagttccgcttgaggaaagccaagaacgatcagctcaaggttgatgccaaggaccgtggcgaggtgatcagcaccaagaggcagcctgtgggacccaaacctggcttcatggttgagggtgctacacttgagaccgttactcctattccctatgatgtggtaaatgatctcaaggggggttactagagagaattatgtatcttgagcagttcaagcgagctggcataaatacctatctgaatctttttgacaactgtctagttcttttgttctagaagggcaggcatggtacattggtgatatttgtctcaggcattcgaaccagactccacatttctaggggcggtttgtcccttcttgagtatcgtcttgagagcctcgtgcactgggtcggcctctctggttctttttgttctggtgttataaacctatgtggctattgctagttaatgctaaagattttgccatcgtttattgtaaccttttatgtggattgtattgtctaaattttctttagtcttatagcttgtttgtttggatcatatgcattgaaaccaatatataagaattgctttacattttatta

SEQ ID NO: 85997 - DNA, 2305 bp, Zea Mays
gcttcccccgtaataataaccgaatccccagaccaaatcgccgtcgccgtcgccgtcgcatcgcagcagcgggagtcccagggtcccggaccgaatccatttccagacacccaaggccaagatccatcgctcgttccaaccagccttcttcttcttctgcttggtcgtctgatctcgttttccattcgtgtccaatccgatccagccaaccgctgtgaatgatggcgctcaacctgtcccaccagaccggcgcggccgtggcggcggcaccggcggcgccacgcgcggccgtcgtcgcggcggcggccacggcgccacgctcggccgtcgtcgccgcggcggccaccgtggcgccgccgcccgcgtcggcgcccgcccccgctccggcgctccagctgcagacgatgacggtggacccggcccccgcgcaggcgcccgacgcggtgaagccggacctcgccatggcgtgccaggcgctggtggaggccgcgcccgaggcggagcacgccgacgtggccgccgagctccggagcagggccggggtgcccgtcttcgtcatgatgccgctcgacaccgtgcgcaaggacggcaactcgctcaaccggcgcaaggccgtggaggccagcctggcggcgctcaagagcgccggggtggagggcatcatggtggacgtctggtggggcatcgccgaggccgacgggcccgggcagtacaacttcaacgggtacatggagctcatggagatggccaagaagaccgggctcaaggtccaggccgtcatgtccttccaccagtgcggcggcaacgtcggtgattcagtcaccataccacttccgggatgggtcttggaggagatggacaaggaccaggacctggcctacacggaccggagcggccgccggaactacgagtacgtctccctgggctgcgacgcgatgcccgtgctcaagggccgcacccccatccagtgctacgccgacttcatgcgcgccttccgcgaccacttcgccaccttcatgggcaacaccatcgtggagatccaggtcggcatgggccctgccggcgagctgcgctacccgtcctacccggagagcgacggcacctggtcgttccctggcatcggcgagttccagtgctacgacaggttcatgctgagtagcttgaaggcggctgctgaggccgtgggcaagccggagtggggcaacgcgggtccgggcgactccggcagctacaaggactggccggaggacacgggcttcttccggcgcgagggcgggtggagcacggagtacggggagttcttcatgagctggtactcgcagatgctcctggagcacggcgagcgcatcctgtcggcggcgacgggcgtgttcacgggttcccccggcgtgaagatctcggtgaaggtggccgggatccactggcactacggcacccggtcccacgcggcggagctgacggcggggtactacaacacccggtcgcacgacgggtacgcgcccatcgcgcgcatgctggcgcgccacggcgccgtgctcaacttcacgtgcgtggagatgcgcgaccacgagcagccgcaggacgcgcagtgccgccccgaggcgctggtgcagcaggtggccgccgcggcgcgggaggccggcgtgggcctggccggcgagaacgcgctgccgcgctacgacgacacggcgcacgaccaggtggtggccacggccgccgacagggccgccgaggaccgcatggtggccttcacgtacctgcgcatggggcccgacctgttccagcccgacaactggcgccgcttcgccgcgttcgtcaagcgcatgacggagccgggcgcgcgggaggcgtgccgggagcaggtggagcgggaggccgagggcgtcgcgcacgccacccagcccctcgtgcacgaggccgccgtcgcgctcaccaactgaccggaccggccggcgttccccgtcgactgtgttcgatcgctagacggggtggcacgctgcgatgactacctgtatggcgagtccctatacttactcatacataagctgcgccgccgtgtcgtcggtgcgtgcaccgcgcagtagtgtgcgtacagcggaagctgcgactgcgagcgaggtagggtgtggggtgggtgactggggtacggtacgtaggtgccacgttggaggctttggcgtttgctcagagcctggcaggagatgggtttgatgttctgctgctgtgttactgtatcctacacctacagaatgtgctatgatttgtactgctataatttttaacgaagatacaaacttctacaaaa

SEQ ID NO: 85998 - DNA, 2863 bp, Zea Mays
accgaatccccagaccaaatcgccgtcgccgtcgccgtcgcatcgcagcagcgggagtcccagggtcccggaccgaatccatttccagacacccaaggccaagatccatcgctcgttccaaccagccttcttcttcttctgcttggtcgtctgatctcgttttccattcgtgtccaatccgatccagccaaccgctgtgaatgatggcgctcaacctgtcccaccagaccggcgcggccgtggcggcggcaccggcggcgccacgcgcggccgtcgtcgcggcggcggccacggcgccacgctcggccgtcgtcgccgcggcggccaccgtggcgccgccgcccgcgtcggcgcccgcccccgctccggcgctccagctgcagacgatgacggtggacccggcccccgcgcaggcgcccgacgcggtgaagccggacctcgccatggcgtgccaggcgctggtggaggccgcgcccgaggcggagcacgccgacgtggccgccgagctccggagcagggccggggtgcccgtcttcgtcatgatgccgctcgacaccgtgcgcaaggacggcaactcgctcaaccggcgcaaggccgtggaggccagcctggcggcgctcaagagcgccggggtggagggcatcatggtggacgtctggtggggcatcgccgaggccgacgggcccgggcagtacaacttcaacgggtacatggagctcatggagatggccaagaagaccgggctcaaggtccaggccgtcatgtccttccaccagtgcggcggcaacgtcggtgattcagtcacgtacgtgtcttcgtcgtctctttctctagcactttctggcttcaccatcaccagtgcattctttcgattaaacgtaaattacctgacgttagtttttagagtacttgtttaaccgtatgtggattacacgaaacgaaatgcacatagaagatcagtactacaatcagaagccgcatgttggtatctgattctgagctggagctgatctgatcttcagaaaagttctgacgccttcacggttttttagctgaactgaataaaacgcttccactagacacagtagttgatgtggactcgaacgcaaggtccccgtgacttgagccacggagaagcacaagttcaccatccgccaccctgcatatatagcgtactgaagaagaaaaaagtcgatcctttttctccttacagacagtggcgcttccctcttcctgccgactcggcatgtgatctgctcacgagatccgtgagcagaaagtttaggctccagcagaacccataatcctgaattcctgacgaagatatgttatcctttttggtttcctgccacgtgatcctgcatgctttggttgtttgcagcataccacttccgggatgggtcttggaggagatggacaaggaccaggacctggcctacacggaccggagcggccgccggaactacgagtacgtctccctgggctgcgacgcgatgcccgtgctcaagggccgcacccccatccagtgctacgccgacttcatgcgcgccttccgcgaccacttcgccaccttcatgggcaacaccatcgtggagatccaggtcggcatgggccctgccggcgagctgcgctacccgtcctacccggagagcgacggcacctggtcgttccctggcatcggcgagttccagtgctacgacaggttcatgctgagtagcttgaaggcggctgctgaggccgtgggcaagccggagtggggcaacgcgggtccgggcgactccggcagctacaaggactggccggaggacacgggcttcttccggcgcgagggcgggtggagcacggagtacggggagttcttcatgagctggtactcgcagatgctcctggagcacggcgagcgcatcctgtcggcggcgacgggcgtgttcacgggttcccccggcgtgaagatctcggtgaaggtggccgggatccactggcactacggcacccggtcccacgcggcggagctgacggcggggtactacaacacccggtcgcacgacgggtacgcgcccatcgcgcgcatgctggcgcgccacggcgccgtgctcaacttcacgtgcgtggagatgcgcgaccacgagcagccgcaggacgcgcagtgccgccccgaggcgctggtgcagcaggtggccgccgcggcgcgggaggccggcgtgggcctggccggcgagaacgcgctgccgcgctacgacgacacggcgcacgaccaggtggtggccacggccgccgacagggccgccgaggaccgcatggtggccttcacgtacctgcgcatggggcccgacctgttccagcccgacaactggcgccgcttcgccgcgttcgtcaagcgcatgacggagccgggcgcgcgggaggcgtgccgggagcaggtggagcgggaggccgagggcgtcgcgcacgccacccagcccctcgtgcacgaggccgccgtcgcgctcaccaactgaccggaccggccggcgttccccgtcgactgtgttcgatcgctagacggggtggcacgctgcgatgactacctgtatggcgagtccctatacttactcatacataagctgcgccgccgtgtcgtcggtgcgtgcaccgcgcagtagtgtgcgtacagcggaagctgcgactgcgagcgaggtagggtgtggggtgggtgactggggtacggtacgtaggtgccacgttggaggctttggcgtttgctcagagcctggcaggagatgggtttgatgttctgctgctgtgttactgtatcctacacctacagaatgtgctatgatttgtactgctataatttttaacgaagatacaaacttctacaaaa

SEQ ID NO: 85999 - DNA, 2301 bp, Zea Mays
gttttatacccagagccatcactgattctatcgttctcatagcacctcgtcgagatggaaggtcctgaacagagcaacccttgcgccatatgcctgggtgccatgggcgccgacggagggcaggctatggccaccttcacggcagagtgctcccacacgttccacttccactgcatctccgcgagcgtggcgcatggccacctcgtctgcccgctctgcaacgcgcagtggcgtgagctgccctccgtgcgcccgtcgcagccgtcgtcgatgccacccatgctaccgcggcagccacttccccgcatggagcctatgcacggagtacagccgcttccccgcatggagcccatgcacggagtacagccgcggcccgtccctgcaacgcagccagcgcggcagcccgcggagccagaagtgttcgacgacgacgacgagttggagctgctctctggtgaaggcgaccagcgacaagctgctggatccggtgggacgttggccgtcaagacacacgtcgagtcgtcggctgttgcctcgggctcgtcgcacgacaacttcgccgttctcgtgcacgtgaaggctccgggggtgatcggtagcgaggcggcagacggagacggaaaccgagaccgagaccgagacgcgccccgcgctcctctcgacctcgtgacggtgctcgacgtaagcggaagcatgcgcggcaacaagctcgccctggtgaagcaggccatggggttcgtcatcggcagcctcggcccccacgaccgcctcagcgtggtgtccttctcgtccggggcgcgccgcgtgaccaggctcctgcgcatgtcggacaccgggaagggcctcgcatcggagggagtggaatccctcagagcgggcggcggcaccaacatcgccgaggggctccggacagccgccaaggtgctcggcgagcgccggcaccggaacgccgtctccagcatcattctcctctccgacggccaggacaactacagcatgccgcggctggggcggggaagcgtgcccagcaaccccaactacgaggtactggtgccaccatccttggtgcctggcactggcagcaccagcgaggggtctgcgcccatccacacctttggtttcggtaacgaccatgacgcggcggcgatgcacgtcgttgccgaggccaccggcgggacgttctctttcatcgagaacgaggcggttatccaggacgccttcgcgcagtgcatcggcgggctgctcaccgtcgtggcgcaggaggcccgcgtcgccgtcgcctgcgggcatcccggcgtccgcatcaggtcggtcaagtccgggcgttacgagagccgcgtcgacgaggacggccgctctgcgtcgatcgcagtgggcgaactctacgcggacgaggagaggcgcttcttgctgttcctgtccgttccaaccgcagaagcaacgggcggcggcgagagcgagagggagagcgagactctcctcctcaaagtccgctgcagctacatagaagccgccggcggtggtgcgcgcgtcgacgtggcggcggacgacacggtggtggcgaggccggagcacgcggcggcggcggacgcggagcggtcagccgaggtggagcaggagcgcgcccgggtggaggcggtcgaggacatggcggcggctagggcggccgcggagcggggcgcgcaccaggaggcggcggagatactcgggaaccggcggcgagccatggcacgggcggcgggaccaggcggcggcggcggcggcggcccctccaacgcggttctgcgggccgaggtgcggcgtatgagcaggcgcgtggcgaaccgggagagctacgagaggtcggggcgcgcgtacgtgctcgccagcctgagctcgcacgcgcagcagcgcgcgaccacgaggcagctgtccccccagcgtggcgtgctgcagccctcggcgggcagcgctgggggtggagaggcgaccaactcggtggcagctgcattcgcacccgcgcaggcgcaggtggcttgtgcggcggcgatggacttggacgacgcggactcgatggagtttttcggtgtcggcggtggaccggccggaggggcagcgacgtccaacgctgcatcggctgatgtggcgtcggacgaggcggcggatgcggatgcggcggcgtcgtacctgaccccggccatgcgcgccatgctgttgcggtcgcggcaggcgcgtgaggcatcgggcgttgagcagcagcgacccaagggtgcagaaggagccgggagctctggatcgaaggaagtgccgcctgagcagtaa

SEQ ID NO: 86000 - DNA, 115 bp, Zea Mays
cttttttggagttttcagagcagcaaaagaggtactccaaaaaattgtactgcagctccaaaaactccatagagtttacaactctggagttagggtgtttggcatgctctggcca

SEQ ID NO: 86001 - DNA, 2509 bp, Zea Mays
gctcgctctcccgcgacgaccaaaaccccgacaccgaaccgcgccagcacgccacgcgccccgcggccaccgcaaattccgccgcctcccgcagcgatggcgagaaccattcagccccgagccccgctctcctgatctcgctcgtagccaacaattcctccgccgacgccgaggccgagcaggcgccagcatttcgtgcgctcgaaaggagccccgccgttcgtgccccgaggaccaatggcggcggcgtgggcccgcgcgaagcgcgcactcgccaccggcctctgcgtcggcgtgcccgcgcgccagctggccatcgaggacgcgccgccggtggtggaggcgccgtcttcggtggccgaggacaagctggagtccgcccccgtgtccgtgcgtcggctgacgagctttgggagccggagctcgcagcagaagacatgtgccatttgccttggtggcatgagatcagggcagggtcatgccttgttcactgctgaatgctcccacaagttccattttcattgcatttcttcaaatatcaagcatggcaacctcatctgcccgatatgccgtgctaagtggaaagaactcccaggcgctcaacctgcagatgccagttatggacgagctagagttaacccattaaattggccccaggatgaagggcacatggctgttgtccgcaggctttcccatacatacagcggaaacctgcaggagcaccttcctttcttccgtactctggaggcaggcgttttcaatgatgatgagcacatagatcttcagtctgataatatcagtgaacataatgcagtcgctggttcagttaaaatcaaggcatattcagaagttccagctattgaacaatcaacgaccaaggagatctttgctatcttgatccatctcagggctccaaaatcttcacactcagcgagctcccgtgcacctcttgacctcgtcaccgtgcttgatgtcagtggtagcatggcagggaccaaaattgcacttctgaagaatgccatgagctttgtcatccaaacccttggacccaacgaccgcctgtctgtcgttgctttctcatctacagcacgcagactcttccctcttcggcgaatgacattatctggcaggcagcaagcattgcaagctgtcagttcccttgttgcaagtggtggcacaaacattgctgatgggctaaagaaggctgctaaagtgattgaggaccgtcggttgaagaattctgtttgcagtatcattcttctctctgacggtcaagacacatatacactcccttctgacaggaatctgcaagattacagtgccgttgtcccaccttcaatccttcctggaacatgccagcatgtacagatccacacctttggtttcggctcagatcatgattctgctgccatgcatgctattgctgagatctccagtggcacattttcattcatcgatgctgaaggctcaatccaagatggatttgcccagtgtattggtggccttcttagtgttgtggttaaggaggtgaggttgggcattgagtgtgtcgacaatggtgtgctactgacttccatcaagtctggcgggtatacaagtcaagttgctgaagatggacgcggcggttcagttgatatcggtgatctgtatgcagatgaagagagggggtttctggtcactctacatgtcccagctgcacagggacagactgtgctgatcaaaccaagctgcatgtatcatgacgctatcactacggagaacatcgaagtacatggtgaggaagtaaggattcagcgccctgaacatcgcgtggactgcaaaatgtctcctgaggttgagcgtgagtggcaccgtgttcaggccacagaggacatgtctgccgcacgggctgcagcggaggtaggtgctttctctcaggccgtggcaatcctggaagcccgtaggaggatactggaagcacaagcagcacaatcttcagacgaccagttcctggcattgatggcggagctgagggagatgcagcagagagtggagaaccggcggaggtacgaggagtcaggcagagctttcatgctggcaggcctgagctcacactcatggcagagagcaactgcacgaggggactcaacagagatcactaccactattcatacctaccagacgccatccatggttgacatgctgcagcgctctcagatcctcgtgccacccattgctgacatgctgaacagctccccaactgtggcgcctccaaatagattcagccggccatccaggtccaggacaataaaatccttctctgagcaactcctgtgatgcatcctgatcatgacacatgtctagctataattgtcaaaatattaggtgaatgtaagctgtccatttttttagtttgttcctgcagctggtacttccattttcttcagtattctatatagcagacatggggctagaagtcctggggtataaattggtttggtgtacatggttggtatttggaaaggatttg

SEQ ID NO: 86002 - DNA, 2506 bp, Zea Mays
gctcgctctcccgcgacgaccaaaaccccgacaccgaaccgcgccagcacgccacgcgccccgcggccaccgcaaattccgccgcctcccgcagcgatggcgagaaccattcagccccgagccccgctctcctgatctcgctcgtagccaacaattcctccgccgacgccgaggccgagcaggcgccagcatttcgtgcgctcgaaaggagccccgccgttcgtgccccgaggaccaatggcggcggcgtgggcccgcgcgaagcgcgcactcgccaccggcctctgcgtcggcgtgcccgcgcgccagctggccatcgaggacgcgccgccggtggtggaggcgccgtcttcggtggccgaggacaagctggagtccgcccccgtgtccgtgcgtcggctgacgagctttgggagccggagctcgcagcagacatgtgccatttgccttggtggcatgagatcagggcagggtcatgccttgttcactgctgaatgctcccacaagttccattttcattgcatttcttcaaatatcaagcatggcaacctcatctgcccgatatgccgtgctaagtggaaagaactcccaggcgctcaacctgcagatgccagttatggacgagctagagttaacccattaaattggccccaggatgaagggcacatggctgttgtccgcaggctttcccatacatacagcggaaacctgcaggagcaccttcctttcttccgtactctggaggcaggcgttttcaatgatgatgagcacatagatcttcagtctgataatatcagtgaacataatgcagtcgctggttcagttaaaatcaaggcatattcagaagttccagctattgaacaatcaacgaccaaggagatctttgctatcttgatccatctcagggctccaaaatcttcacactcagcgagctcccgtgcacctcttgacctcgtcaccgtgcttgatgtcagtggtagcatggcagggaccaaaattgcacttctgaagaatgccatgagctttgtcatccaaacccttggacccaacgaccgcctgtctgtcgttgctttctcatctacagcacgcagactcttccctcttcggcgaatgacattatctggcaggcagcaagcattgcaagctgtcagttcccttgttgcaagtggtggcacaaacattgctgatgggctaaagaaggctgctaaagtgattgaggaccgtcggttgaagaattctgtttgcagtatcattcttctctctgacggtcaagacacatatacactcccttctgacaggaatctgcaagattacagtgccgttgtcccaccttcaatccttcctggaacatgccagcatgtacagatccacacctttggtttcggctcagatcatgattctgctgccatgcatgctattgctgagatctccagtggcacattttcattcatcgatgctgaaggctcaatccaagatggatttgcccagtgtattggtggccttcttagtgttgtggttaaggaggtgaggttgggcattgagtgtgtcgacaatggtgtgctactgacttccatcaagtctggcgggtatacaagtcaagttgctgaagatggacgcggcggttcagttgatatcggtgatctgtatgcagatgaagagagggggtttctggtcactctacatgtcccagctgcacagggacagactgtgctgatcaaaccaagctgcatgtatcatgacgctatcactacggagaacatcgaagtacatggtgaggaagtaaggattcagcgccctgaacatcgcgtggactgcaaaatgtctcctgaggttgagcgtgagtggcaccgtgttcaggccacagaggacatgtctgccgcacgggctgcagcggaggtaggtgctttctctcaggccgtggcaatcctggaagcccgtaggaggatactggaagcacaagcagcacaatcttcagacgaccagttcctggcattgatggcggagctgagggagatgcagcagagagtggagaaccggcggaggtacgaggagtcaggcagagctttcatgctggcaggcctgagctcacactcatggcagagagcaactgcacgaggggactcaacagagatcactaccactattcatacctaccagacgccatccatggttgacatgctgcagcgctctcagatcctcgtgccacccattgctgacatgctgaacagctccccaactgtggcgcctccaaatagattcagccggccatccaggtccaggacaataaaatccttctctgagcaactcctgtgatgcatcctgatcatgacacatgtctagctataattgtcaaaatattaggtgaatgtaagctgtccatttttttagtttgttcctgcagctggtacttccattttcttcagtattctatatagcagacatggggctagaagtcctggggtataaattggtttggtgtacatggttggtatttggaaaggatttg

SEQ ID NO: 86003 - DNA, 2314 bp, Zea Mays
aagaggagatgcccggtcccacagcggagcttgctccctcctcccttcctctcgagagggactccctcggcgtcaccatcgaccccgcggaagcgggggcgtgcgcgtatccactcctcaaccaagtggagcatcccctcacgctagaccggagctggggggcgacgacgagccagccgccgccggtttgaccagacctgtggtgatggactgataaggtatgcctgtaggagggagagagctttcggtttagaaaataagagggtgccgcgggctggactgagagagcggaaggaaggaaggagccggcgatgggcgggtggaactggctcttctgcggccgatccaaagccggaggcggcgagctccggcctcccgagcccttccagctgccggcgcccttgcccgagtggccgcaaggaggggattttgctaagggcacaatatgcataggagaggttgatgttacaagtattaccaaattccggagtatatggacctgctcagatgctacattttatgagccagaaggaattcctgatggtttccactgccttgggcactacgcccaacagaatgaccgccccttacagggatttcttctggtggcaagggaagtggctagccaccaagttattgataccaagcccgcccttgagaaaccatcagattactcccttgtttggaccagtgctgacgcaaatgaagatgacaatagcgaatgtggttgcatctggctgccatgtccacccaatgggtataaagcccttggctatgtggttactaaaggaccaaagaagccctcactggaagcagttcggtgtgtgcgagatgacctaacggacacgcgcgaaaatttccattcaattgcaaatatggacaacgcatgccagatttggaagacaaggccttgccaccgaggagtgggagggcgtggtataccggttggtacattctcctgcgaaaccgattcaacagatagtgatgaatcaagcactccctgcctgaaaaatgtcgactcgaatctgggtgccatgcctaatctggagcagatcaatgctctgatcaagcactacggcccaaccgttttcttccacccgcaagagacgtacttaccgtcatcagtttcttggttctttgagaacggagctacattgcacgagaaagacgcaaaaatgggagatgcaatactccctggtggcttgaatctgcctgttggtgggacaaacgatggcgagtactggattgatctccctgatgatgacaggaaggagctcgtcagagctggcaatctgaagagcgctgagctatacgctcatgtgaagccagctcatggagggaccttcactgacattgcaatgtgggtgttctgcccgttcaacgggcctgccaccatcaaggttgggtttgcgagtttcgctctgcagaaggtcggtaggcacattggagactgggagcacttcaccctccgagtgagcaacttctcaggtcagctgtcgtctatctacttctcgcagcacagcgggggcgagtgggttgaagcttgcgatctggagttcatctctgggaacaaggcgatcatctactcgtccaggaacgggcacgcgagctacccccacccaggctgctacctgatgggttccgagacgctcggtgtcggagttagaaacgatgtggcgcgaagtgatctgtcagtggattcgagcacgcggtatgagatcatctcggcagggcatctcggggaggacgctgttgcggaaccgtgctggctgcagtacatgagggagtggggaccgaccatcacgtacagctcacgttcagagatagacacggcgctgagcttcctgccgttctttctccggttcacagcagaggcaatattcaacagccttccggcggaactgtacgaggaggaaggtcctacggggcccaaggagaagaacaactgggaaggcgacgagagatgctaggctttgtcgccatcattgtttacccctgtcaccttaatctgtaccctagagctgtattgtacttgatgaaaaagattgatactgtatgtgataagaatatacagtttcgtacatatggtgggctggtggctgagccctgagggttcagtgcacttgtcaggttaggcatctcgctgcttatttagcccgatgcggtggtgcaagtgcatgactacttgccctgtgcatctgccaaccagattgcgcttgtattgtgcctgtcatacttccttttctagtggagtattttggtaagagacagatatatagttcaaaatcaataatctcgtgagttcctatcttgc

SEQ ID NO: 86004 - DNA, 2454 bp, Zea Mays
ccttccaaccaaccgtcgcaatcgcaattcgcaaacaagaccagttggcgcgagcagcagctagcagagaagatggatgtccccagggtggtgctagtttgccactcgttgttctggctgctccttccggcggtcgtcctcggtgccactgcggaggagacgatgcagacctacatcgtgcagctgcacccgcaccacgacggcggcagcggcgaggccacgctgcccgcctccaactccaaggtcgactggcacctctccttcctcgagaggtccgtggcgtgggagcaggagaagcgccccgcctcgcgcctcctctactcctaccataccgtgttcgacggcttcgcggcgcagctctcggacggcgaggccgcggcgctgcgcgcgctgcctggcgtcgcgtccgtgcgcgccgaccggcgggtggagctgcacaccacctactcgtaccgcttcctggggctcggcttctgccccaccggcgcgtgggcgcggtccgggtacggccgcggcaccatcatcggcgtgctcgacacgggcgtgtggcccgagagccctagcttcgacgaccgcgggatgccgcccgcgccggtgcgctggtccggcgcgtgccagggcggggagcacttcaacgcctccaactgcaaccggaagctcatcggcgcgcgcttctactccaagggccaccgcgccaactacccgaccaacccctcggaggcggcggctctgctggagtacgtgtcgccgcgggacgcgcacgggcacggcacgcacacggcgtccaccgcggcgggcgcggccgtcgccggggccagcgtcctgggcgccggcctcggggaggcgcgcggcgtcgccccgggcgcgcacgtcgccgcctacaaggtctgctggttcaacggctgctacagctccgacatcctcgccgggatggacgacgcggtgcgcgacggcgtcgacgtcctgtccctctccctcggtgggttccccatcccgctcttcgaggacagcatcgccatcggcagcttccgcgccacggcgcgtggcgtctccgtcgtgtgcgccgctgggaacaacggcccggcgcggagctccgtcgccaacgaggcgccgtgggtgctgactgtcggcgcggccaccatggaccgccgcttcccggcgtacgtccggctcggtgacggacgtgtcctgtacggcgagtccatgtccatgtaccccggggaaaccggtttgaaaaaaggcgggaaggacctggagctggagctagtgtacgccgttggtgggacccgggaatccgagtactgcctcaaggggtcccttgataaagccgccgtcgccggaaagatggtggtatgcgaccgcggcatcacgggccgcgccgacaaaggcgaggcagtaaaagaagcaggcggcgcggccatggtgctcaccaactccgagataaaccggcaggaggactccgtcgacgtccacgttctgccagcgaccctcatagggtaccgtgaggccgtggagctgaagaagtacatcagctcgacgccacggccggtggcgaggatcgtattcggcggcacgcggatcggacgagcgcgcgccccggcggtggccgtgttctcggcgcgcgggccgagcctgaccaacccgtcggtgctgaagcccgacgtggtcgcccccggggtgaacatcatcgcggcgtggcccgggaacctgggcccgtcggggctggagagcgacgcccgccggtccaacttcaccgtgctctcggggacatcgatggcggcgcctcatgtgagtggcatcgcggcgctgatccggtcggcgcacccgtcctggagcccagcgatggtccggtccgcgatcatgaccacggctgacataatcgaccggcaggggaaggcgatcatggacggcggcggcggcggcgggcgcgccagcgtgttcgccatgggcgcggggcacgtgagccccgcgcgcgccgtcgacccgggcctcgtctacgatatccagcccgccgactacgtgacgcacctgtgcacgctcgggtacagccacatggagatcttcaagatcacccacactggcgtcaactgcagcgcggcgctccacgaggacaggaacaggggcttcttcagcctcaactacccgtcgatcgctgtggcgctcaggaacggcgccaggtcggcggtgctgcggcgtacggtgaccaacgtcggcgcgcccaactcgacgtacgccgtgcaggtgtcagcgccaccgggagtgaaggtcacggtggcgcccatgacgctgtcgttcgtggagttcggcgagcagcggagcttccaggtgaccgtggacgcgccgtcccctccggcggcgaaggacagcgcggaggggtacctggtgtggaagcagagcggggggcaggggaggcacgtcgtgaggagccccatcgccgtgacctgggtggagtag

SEQ ID NO: 86005 - DNA, 3413 bp, Zea Mays
ccttccgctacgatacaaaagctcgagaacccacgcacgcgcgcaccccccacccaccccacgtctcgcttctccccaccccgcccgctacagcgccggtggggggcccccgcggctgccggcgaccggtcgccgccgccgaggccgtcctcgccgccccgacattctccagctggtgcgttctcgttcctggcttccggccttggctggcctcctccccgcggaactgaggcgaattggcgcgggagggcacgggatcttgccgtcctgtcctggcgtctcctgccgcaccgcgtttgggcaacttttttttgtcggcgaaaaaagaatacatgaaaacgccgccttttgctcggggcgcttcacgggcctccgcagcattagccatggtttagcggaggcgattctccttgcaggcttgcagctgtttccggggtggtggattttcaaggaataaagaatgatcaacctcttcgaattgagcgttggagccagcgccaaggtctcctcaagagatggctctccggtgagaggaactcagtcggagcggaaggagtacgccggatcaaagttgactggcagcacgaggaggagctcgtcggatagatcgggcggtacgcccatgaaaatgctgatagctcaggaaatggccaaggagggggacgcgaatcagaagaccactaacgttgtggcgaggctgatggggcttgacgataatgtggatcttgctaagcctgtcgtgcccccaaacaggaggagtttcccggacggccatttatctgctacactggcaagagtaaacaaccaaattccatttgagaagcacacgagttccgccgaagatgtggagtacaaggatgtctacgaagttgggtaccagccaccaagaggtgatgaatatccaaggaggaggaggccgagtgaagatcatgacaagagaaggatggatcttgtccgccagaagtttgttgaagcaaagcggcttgcgtcacatgataatatcctccagtcgaaggaattccacgatgctcttgaggttctgaattcaaacaaagatctgtttctcaaatttctcgaagaacctaactctctctttgcgaagcagtctgggggactcggttctgcaccaacatcacctcagagaaagcacattactgtgttgaagccctcgaaatcagtggagatgaagggtgacaaagcaattagaaggcagacaaaccatgcagccggaaacagaacagacaggagcaacgtgcacaagtctgatgcagctcatgtgaaggaagataagcttcccaaacacaccaggatagtggtcttgaaacctacctcggtaattgcttccatggagcaatctgagcaaagttatcatgctgatctcgatgattctgaagcgcctgttctgtcaaggcatctgagtgatgagatagattggtcggtacatggaatttctcgacgccacactgaatctttgcagggttgcatacagtcaaatatgttcggcgcagatagaccataccatcagtatgctgaagaagagggcaatagcttgagtgactcagatattggaaccccaacatcacatcactcttgggagtacatctaccggtttagcaatccttactttggctctttgagccatgcttcttgctcccctgagtcacatgtaactagggaggctaagaagcatgcttctgacagatgggcaaccgttccatccagtgagatgacccaggacaaggtaccagtgcgaagaagtttgagcacacttggtgaaatgcttgccatgccggatatgaagaaagaagaggctgctgaacaagcatctcctgatgctacccaccagttgtgtgagccaacagttggcgtatcatctaattgtgctgttggcgaaggtgagggagaaagctccctcaggaaaatctcgaggtcacgatctgttccggtctcttcaacagcttttgatagcctgcggttagatggtggatgtttggatgctcagcataaagaacctacagtgccgaaggaggtcaaacctaagagtgggaaatcatctttgaagggaaaaatcacgagtttcttctcaaaacgtaagaaagcagaaaaggagaagcctagcccatctcccttgggaaccctgaacggtcgaggttcgtcagtcagcactgtagcagttgctaaaccagatgctccacagcatgtttgtgctagttcacaggatgatgtttccttcgaaagtttagaagaccagtttaatcacggaccaatcggagctccggttgatgaacccgaagcaccctctgtgtctaagcctccagcttcgcttgagaagacgctatcatttgagattcgagcttcccacttcgaccagcccagccctacatcggtttttgatgtacaatttgaggatatcagcgagaaatcccccatttcatcagaaagcgcgattactgctaaacaagagcctctatccaggtctataccaatcggatcgatcgcgaggaccttatcatgggacgacgcttcccaagaggctcctccgcagtgttctaccaaaggagacagcaaccacgagcaggagcagcacgagttcgtcgagaagacgctggcatccgctggcttctgcaacgagaagacccaggacatctttgcccggtggcattcgctcgaccggcccttggaccccgccgtggtcgagcagctgctggaacgcaaggtggaggacgccaagtgccgagagaggcggtcgaaccagaggctcctaatcgactctgtcaacgccgccctgctcgacatcggccagagcaaagtctgggggggcgcgtacccttgcaccgcacggcactattccaacgctccgggagttggcacgtgcgatgatgatgtgctagtgaccgacgaggcgtggaggctggtgaggagctggctcttcgatgacgagaacgacatcgccgggttgggggacaacgcgggccttgcggcggactgggttgtcggtagggagatccacggcaaagggtgggccgagacgctgcggatggaggtggacgagatgagcagggagatatgtggcgaggtcctgggcgagttggttggggaggcgttttcggagcttgccggcgctgcggggtggcattgaagctgcctgccttctattttccctgcttgtggtggcgtccacctgctgctgctgcttttacttccaatccggttcttgtgtgtatattaccctcgtaactgctcaaagtgttccctgctgctgcctctctatctgtgttgcatctctttcagcattgatacattcacggtaataacatttacggatgaatacagctgctgcactgcacttgaaatcctctctctttttcctggccacatgttcctttctctgctatggctatgaggttgcacaa

SEQ ID NO: 86006 - DNA, 3411 bp, Zea Mays
ccttccgctacgatacaaaagctcgagaacccacgcacgcgcgcaccccccacccaccccacgtctcgcttctccccaccccgcccgctacagcgccggtggggggcccccgcggctgccggcgaccggtcgccgccgccgaggccgtcctcgccgccccgacattctccagctgttctcgttcctggcttccggccttggctggcctcctccccgcggaactgaggcgaattggcgcgggagggcacgggatcttgccgtcctgtcctggcgtctcctgccgcaccgcgtttgggcaacttttttttgtcggcgaaaaaagaatacatgaaaacgccgccttttgctcggggcgcttcacgggcctccgcagcattagccatggtttagcggaggcgattctccttgcaggcttgcagctgtttccggggtggtggattttcaaggaataaagaatgatcaacctcttcgaattgagcgttggagccagcgccaaggtctcctcaagagatggctctccggtgagaggaactcagtcggagcggaaggagtacgccggatcaaaggcgttgactggcagcacgaggaggagctcgtcggatagatcgggcggtacgcccatgaaaatgctgatagctcaggaaatggccaaggagggggacgcgaatcagaagaccactaacgttgtggcgaggctgatggggcttgacgataatgtggatcttgctaagcctgtcgtgcccccaaacaggaggagtttcccggacggccatttatctgctacactggcaagagtaaacaaccaaattccatttgagaagcacacgagttccgccgaagatgtggagtacaaggatgtctacgaagttgggtaccagccaccaagaggtgatgaatatccaaggaggaggaggccgagtgaagatcatgacaagagaaggatggatcttgtccgccagaagtttgttgaagcaaagcggcttgcgtcacatgataatatcctccagtcgaaggaattccacgatgctcttgaggttctgaattcaaacaaagatctgtttctcaaatttctcgaagaacctaactctctctttgcgaagcagtctgggggactcggttctgcaccaacatcacctcagagaaagcacattactgtgttgaagccctcgaaatcagtggagatgaagggtgacaaagcaattagaaggcagacaaaccatgcagccggaaacagaacagacaggagcaacgtgcacaagtctgatgcagctcatgtgaaggaagataagcttcccaaacacaccaggatagtggtcttgaaacctacctcggtaattgcttccatggagcaatctgagcaaagttatcatgctgatctcgatgattctgaagcgcctgttctgtcaaggcatctgagtgatgagatagattggtcggtacatggaatttctcgacgccacactgaatctttgcagggttgcatacagtcaaatatgttcggcgcagatagaccataccatcagtatgctgaagaagagggcaatagcttgagtgactcagatattggaaccccaacatcacatcactcttgggagtacatctaccggtttagcaatccttactttggctctttgagccatgcttcttgctcccctgagtcacatgtaactagggaggctaagaagcatgcttctgacagatgggcaaccgttccatccagtgagatgacccaggacaaggtaccagtgcgaagaagtttgagcacacttggtgaaatgcttgccatgccggatatgaagaaagaagaggctgctgaacaagcatctcctgatgctacccaccagttgtgtgagccaacagttggcgtatcatctaattgtgctgttggcgaaggtgagggagaaagctccctcaggaaaatctcgaggtcacgatctgttccggtctcttcaacagcttttgatagcctgcggttagatggtggatgtttggatgctcagcataaagaacctacagtgccgaaggaggtcaaacctaagagtgggaaatcatctttgaagggaaaaatcacgagtttcttctcaaaacgtaagaaagcagaaaaggagaagcctagcccatctcccttgggaaccctgaacggtcgaggttcgtcagtcagcactgtagcagttgctaaaccagatgctccacagcatgtttgtgctagttcacaggatgatgtttccttcgaaagtttagaagaccagtttaatcacggaccaatcggagctccggttgatgaacccgaagcaccctctgtgtctaagcctccagcttcgcttgagaagacgctatcatttgagattcgagcttcccacttcgaccagcccagccctacatcggtttttgatgtacaatttgaggatatcagcgagaaatcccccatttcatcagaaagcgcgattactgctaaacaagagcctctatccaggtctataccaatcggatcgatcgcgaggaccttatcatgggacgacgcttcccaagaggctcctccgcagtgttctaccaaaggagacagcaaccacgagcaggagcagcacgagttcgtcgagaagacgctggcatccgctggcttctgcaacgagaagacccaggacatctttgcccggtggcattcgctcgaccggcccttggaccccgccgtggtcgagcagctgctggaacgcaaggtggaggacgccaagtgccgagagaggcggtcgaaccagaggctcctaatcgactctgtcaacgccgccctgctcgacatcggccagagcaaagtctgggggggcgcgtacccttgcaccgcacggcactattccaacgctccgggagttggcacgtgcgatgatgatgtgctagtgaccgacgaggcgtggaggctggtgaggagctggctcttcgatgacgagaacgacatcgccgggttgggggacaacgcgggccttgcggcggactgggttgtcggtagggagatccacggcaaagggtgggccgagacgctgcggatggaggtggacgagatgagcagggagatatgtggcgaggtcctgggcgagttggttggggaggcgttttcggagcttgccggcgctgcggggtggcattgaagctgcctgccttctattttccctgcttgtggtggcgtccacctgctgctgctgcttttacttccaatccggttcttgtgtgtatattaccctcgtaactgctcaaagtgttccctgctgctgcctctctatctgtgttgcatctctttcagcattgatacattcacggtaataacatttacggatgaatacagctgctgcactgcacttgaaatcctctctctttttcctggccacatgttcctttctctgctatggctatgaggttgcacaa

SEQ ID NO: 86007 - DNA, 3240 bp, Zea Mays
ccttccgctacgatacaaaagctcgagaacccacgcacgcgcgcaccccccacccaccccacgtctcgcttctccccaccccgcccgctacagcgccggtggggggcccccgcggctgccggcgaccggtcgccgccgccgaggccgtcctcgccgccccgacattctccagctggtgcggcagcattagccatggtttagcggaggcgattctccttgcaggcttgcagctgtttccggggtggtggattttcaaggaataaagaatgatcaacctcttcgaattgagcgttggagccagcgccaaggtctcctcaagagatggctctccggtgagaggaactcagtcggagcggaaggagtacgccggatcaaaggcgcatgatctatgtcggcagttgactggcagcacgaggaggagctcgtcggatagatcgggcggtacgcccatgaaaatgctgatagctcaggaaatggccaaggagggggacgcgaatcagaagaccactaacgttgtggcgaggctgatggggcttgacgataatgtggatcttgctaagcctgtcgtgcccccaaacaggaggagtttcccggacggccatttatctgctacactggcaagagtaaacaaccaaattccatttgagaagcacacgagttccgccgaagatgtggagtacaaggatgtctacgaagttgggtaccagccaccaagaggtgatgaatatccaaggaggaggaggccgagtgaagatcatgacaagagaaggatggatcttgtccgccagaagtttgttgaagcaaagcggcttgcgtcacatgataatatcctccagtcgaaggaattccacgatgctcttgaggttctgaattcaaacaaagatctgtttctcaaatttctcgaagaacctaactctctctttgcgaagcagtctgggggactcggttctgcaccaacatcacctcagagaaagcacattactgtgttgaagccctcgaaatcagtggagatgaagggtgacaaagcaattagaaggcagacaaaccatgcagccggaaacagaacagacaggagcaacgtgcacaagtctgatgcagctcatgtgaaggaagataagcttcccaaacacaccaggatagtggtcttgaaacctacctcggtaattgcttccatggagcaatctgagcaaagttatcatgctgatctcgatgattctgaagcgcctgttctgtcaaggcatctgagtgatgagatagattggtcggtacatggaatttctcgacgccacactgaatctttgcagggttgcatacagtcaaatatgttcggcgcagatagaccataccatcagtatgctgaagaagagggcaatagcttgagtgactcagatattggaaccccaacatcacatcactcttgggagtacatctaccggtttagcaatccttactttggctctttgagccatgcttcttgctcccctgagtcacatgtaactagggaggctaagaagcatgcttctgacagatgggcaaccgttccatccagtgagatgacccaggacaaggtaccagtgcgaagaagtttgagcacacttggtgaaatgcttgccatgccggatatgaagaaagaagaggctgctgaacaagcatctcctgatgctacccaccagttgtgtgagccaacagttggcgtatcatctaattgtgctgttggcgaaggtgagggagaaagctccctcaggaaaatctcgaggtcacgatctgttccggtctcttcaacagcttttgatagcctgcggttagatggtggatgtttggatgctcagcataaagaacctacagtgccgaaggaggtcaaacctaagagtgggaaatcatctttgaagggaaaaatcacgagtttcttctcaaaacgtaagaaagcagaaaaggagaagcctagcccatctcccttgggaaccctgaacggtcgaggttcgtcagtcagcactgtagcagttgctaaaccagatgctccacagcatgtttgtgctagttcacaggatgatgtttccttcgaaagtttagaagaccagtttaatcacggaccaatcggagctccggttgatgaacccgaagcaccctctgtgtctaagcctccagcttcgcttgagaagacgctatcatttgagattcgagcttcccacttcgaccagcccagccctacatcggtttttgatgtacaatttgaggatatcagcgagaaatcccccatttcatcagaaagcgcgattactgctaaacaagagcctctatccaggtctataccaatcggatcgatcgcgaggaccttatcatgggacgacgcttcccaagaggctcctccgcagtgttctaccaaaggagacagcaaccacgagcaggagcagcacgagttcgtcgagaagacgctggcatccgctggcttctgcaacgagaagacccaggacatctttgcccggtggcattcgctcgaccggcccttggaccccgccgtggtcgagcagctgctggaacgcaaggtggaggacgccaagtgccgagagaggcggtcgaaccagaggctcctaatcgactctgtcaacgccgccctgctcgacatcggccagagcaaagtctgggggggcgcgtacccttgcaccgcacggcactattccaacgctccgggagttggcacgtgcgatgatgatgtgctagtgaccgacgaggcgtggaggctggtgaggagctggctcttcgatgacgagaacgacatcgccgggttgggggacaacgcgggccttgcggcggactgggttgtcggtagggagatccacggcaaagggtgggccgagacgctgcggatggaggtggacgagatgagcagggagatatgtggcgaggtcctgggcgagttggttggggaggcgttttcggagcttgccggcgctgcggggtggcattgaagctgcctgccttctattttccctgcttgtggtggcgtccacctgctgctgctgcttttacttccaatccggttcttgtgtgtatattaccctcgtaactgctcaaagtgttccctgctgctgcctctctatctgtgttgcatctctttcagcattgatacattcacggtaataacatttacggatgaatacagctgctgcactgcacttgaaatcctctctctttttcctggccacatgttcctttctctgctatggctatgaggttgcacaa

SEQ ID NO: 86008 - DNA, 3222 bp, Zea Mays
ccttccgctacgatacaaaagctcgagaacccacgcacgcgcgcaccccccacccaccccacgtctcgcttctccccaccccgcccgctacagcgccggtggggggcccccgcggctgccggcgaccggtcgccgccgccgaggccgtcctcgccgccccgacattctccagctggtgcggcagcattagccatggtttagcggaggcgattctccttgcaggcttgcagctgtttccggggtggtggattttcaaggaataaagaatgatcaacctcttcgaattgagcgttggagccagcgccaaggtctcctcaagagatggctctccggtgagaggaactcagtcggagcggaaggagtacgccggatcaaaggcgttgactggcagcacgaggaggagctcgtcggatagatcgggcggtacgcccatgaaaatgctgatagctcaggaaatggccaaggagggggacgcgaatcagaagaccactaacgttgtggcgaggctgatggggcttgacgataatgtggatcttgctaagcctgtcgtgcccccaaacaggaggagtttcccggacggccatttatctgctacactggcaagagtaaacaaccaaattccatttgagaagcacacgagttccgccgaagatgtggagtacaaggatgtctacgaagttgggtaccagccaccaagaggtgatgaatatccaaggaggaggaggccgagtgaagatcatgacaagagaaggatggatcttgtccgccagaagtttgttgaagcaaagcggcttgcgtcacatgataatatcctccagtcgaaggaattccacgatgctcttgaggttctgaattcaaacaaagatctgtttctcaaatttctcgaagaacctaactctctctttgcgaagcagtctgggggactcggttctgcaccaacatcacctcagagaaagcacattactgtgttgaagccctcgaaatcagtggagatgaagggtgacaaagcaattagaaggcagacaaaccatgcagccggaaacagaacagacaggagcaacgtgcacaagtctgatgcagctcatgtgaaggaagataagcttcccaaacacaccaggatagtggtcttgaaacctacctcggtaattgcttccatggagcaatctgagcaaagttatcatgctgatctcgatgattctgaagcgcctgttctgtcaaggcatctgagtgatgagatagattggtcggtacatggaatttctcgacgccacactgaatctttgcagggttgcatacagtcaaatatgttcggcgcagatagaccataccatcagtatgctgaagaagagggcaatagcttgagtgactcagatattggaaccccaacatcacatcactcttgggagtacatctaccggtttagcaatccttactttggctctttgagccatgcttcttgctcccctgagtcacatgtaactagggaggctaagaagcatgcttctgacagatgggcaaccgttccatccagtgagatgacccaggacaaggtaccagtgcgaagaagtttgagcacacttggtgaaatgcttgccatgccggatatgaagaaagaagaggctgctgaacaagcatctcctgatgctacccaccagttgtgtgagccaacagttggcgtatcatctaattgtgctgttggcgaaggtgagggagaaagctccctcaggaaaatctcgaggtcacgatctgttccggtctcttcaacagcttttgatagcctgcggttagatggtggatgtttggatgctcagcataaagaacctacagtgccgaaggaggtcaaacctaagagtgggaaatcatctttgaagggaaaaatcacgagtttcttctcaaaacgtaagaaagcagaaaaggagaagcctagcccatctcccttgggaaccctgaacggtcgaggttcgtcagtcagcactgtagcagttgctaaaccagatgctccacagcatgtttgtgctagttcacaggatgatgtttccttcgaaagtttagaagaccagtttaatcacggaccaatcggagctccggttgatgaacccgaagcaccctctgtgtctaagcctccagcttcgcttgagaagacgctatcatttgagattcgagcttcccacttcgaccagcccagccctacatcggtttttgatgtacaatttgaggatatcagcgagaaatcccccatttcatcagaaagcgcgattactgctaaacaagagcctctatccaggtctataccaatcggatcgatcgcgaggaccttatcatgggacgacgcttcccaagaggctcctccgcagtgttctaccaaaggagacagcaaccacgagcaggagcagcacgagttcgtcgagaagacgctggcatccgctggcttctgcaacgagaagacccaggacatctttgcccggtggcattcgctcgaccggcccttggaccccgccgtggtcgagcagctgctggaacgcaaggtggaggacgccaagtgccgagagaggcggtcgaaccagaggctcctaatcgactctgtcaacgccgccctgctcgacatcggccagagcaaagtctgggggggcgcgtacccttgcaccgcacggcactattccaacgctccgggagttggcacgtgcgatgatgatgtgctagtgaccgacgaggcgtggaggctggtgaggagctggctcttcgatgacgagaacgacatcgccgggttgggggacaacgcgggccttgcggcggactgggttgtcggtagggagatccacggcaaagggtgggccgagacgctgcggatggaggtggacgagatgagcagggagatatgtggcgaggtcctgggcgagttggttggggaggcgttttcggagcttgccggcgctgcggggtggcattgaagctgcctgccttctattttccctgcttgtggtggcgtccacctgctgctgctgcttttacttccaatccggttcttgtgtgtatattaccctcgtaactgctcaaagtgttccctgctgctgcctctctatctgtgttgcatctctttcagcattgatacattcacggtaataacatttacggatgaatacagctgctgcactgcacttgaaatcctctctctttttcctggccacatgttcctttctctgctatggctatgaggttgcacaa

SEQ ID NO: 86009 - DNA, 3217 bp, Zea Mays
ccttccgctacgatacaaaagctcgagaacccacgcacgcgcgcaccccccacccaccccacgtctcgcttctccccaccccgcccgctacagcgccggtggggggcccccgcggctgccggcgaccggtcgccgccgccgaggccgtcctcgccgccccgacattctccagctggcagcattagccatggtttagcggaggcgattctccttgcaggcttgcagctgtttccggggtggtggattttcaaggaataaagaatgatcaacctcttcgaattgagcgttggagccagcgccaaggtctcctcaagagatggctctccggtgagaggaactcagtcggagcggaaggagtacgccggatcaaaggcgttgactggcagcacgaggaggagctcgtcggatagatcgggcggtacgcccatgaaaatgctgatagctcaggaaatggccaaggagggggacgcgaatcagaagaccactaacgttgtggcgaggctgatggggcttgacgataatgtggatcttgctaagcctgtcgtgcccccaaacaggaggagtttcccggacggccatttatctgctacactggcaagagtaaacaaccaaattccatttgagaagcacacgagttccgccgaagatgtggagtacaaggatgtctacgaagttgggtaccagccaccaagaggtgatgaatatccaaggaggaggaggccgagtgaagatcatgacaagagaaggatggatcttgtccgccagaagtttgttgaagcaaagcggcttgcgtcacatgataatatcctccagtcgaaggaattccacgatgctcttgaggttctgaattcaaacaaagatctgtttctcaaatttctcgaagaacctaactctctctttgcgaagcagtctgggggactcggttctgcaccaacatcacctcagagaaagcacattactgtgttgaagccctcgaaatcagtggagatgaagggtgacaaagcaattagaaggcagacaaaccatgcagccggaaacagaacagacaggagcaacgtgcacaagtctgatgcagctcatgtgaaggaagataagcttcccaaacacaccaggatagtggtcttgaaacctacctcggtaattgcttccatggagcaatctgagcaaagttatcatgctgatctcgatgattctgaagcgcctgttctgtcaaggcatctgagtgatgagatagattggtcggtacatggaatttctcgacgccacactgaatctttgcagggttgcatacagtcaaatatgttcggcgcagatagaccataccatcagtatgctgaagaagagggcaatagcttgagtgactcagatattggaaccccaacatcacatcactcttgggagtacatctaccggtttagcaatccttactttggctctttgagccatgcttcttgctcccctgagtcacatgtaactagggaggctaagaagcatgcttctgacagatgggcaaccgttccatccagtgagatgacccaggacaaggtaccagtgcgaagaagtttgagcacacttggtgaaatgcttgccatgccggatatgaagaaagaagaggctgctgaacaagcatctcctgatgctacccaccagttgtgtgagccaacagttggcgtatcatctaattgtgctgttggcgaaggtgagggagaaagctccctcaggaaaatctcgaggtcacgatctgttccggtctcttcaacagcttttgatagcctgcggttagatggtggatgtttggatgctcagcataaagaacctacagtgccgaaggaggtcaaacctaagagtgggaaatcatctttgaagggaaaaatcacgagtttcttctcaaaacgtaagaaagcagaaaaggagaagcctagcccatctcccttgggaaccctgaacggtcgaggttcgtcagtcagcactgtagcagttgctaaaccagatgctccacagcatgtttgtgctagttcacaggatgatgtttccttcgaaagtttagaagaccagtttaatcacggaccaatcggagctccggttgatgaacccgaagcaccctctgtgtctaagcctccagcttcgcttgagaagacgctatcatttgagattcgagcttcccacttcgaccagcccagccctacatcggtttttgatgtacaatttgaggatatcagcgagaaatcccccatttcatcagaaagcgcgattactgctaaacaagagcctctatccaggtctataccaatcggatcgatcgcgaggaccttatcatgggacgacgcttcccaagaggctcctccgcagtgttctaccaaaggagacagcaaccacgagcaggagcagcacgagttcgtcgagaagacgctggcatccgctggcttctgcaacgagaagacccaggacatctttgcccggtggcattcgctcgaccggcccttggaccccgccgtggtcgagcagctgctggaacgcaaggtggaggacgccaagtgccgagagaggcggtcgaaccagaggctcctaatcgactctgtcaacgccgccctgctcgacatcggccagagcaaagtctgggggggcgcgtacccttgcaccgcacggcactattccaacgctccgggagttggcacgtgcgatgatgatgtgctagtgaccgacgaggcgtggaggctggtgaggagctggctcttcgatgacgagaacgacatcgccgggttgggggacaacgcgggccttgcggcggactgggttgtcggtagggagatccacggcaaagggtgggccgagacgctgcggatggaggtggacgagatgagcagggagatatgtggcgaggtcctgggcgagttggttggggaggcgttttcggagcttgccggcgctgcggggtggcattgaagctgcctgccttctattttccctgcttgtggtggcgtccacctgctgctgctgcttttacttccaatccggttcttgtgtgtatattaccctcgtaactgctcaaagtgttccctgctgctgcctctctatctgtgttgcatctctttcagcattgatacattcacggtaataacatttacggatgaatacagctgctgcactgcacttgaaatcctctctctttttcctggccacatgttcctttctctgctatggctatgaggttgcacaa

SEQ ID NO: 86010 - DNA, 634 bp, Zea Mays
actcccaaccactccgccaccaccgctctcctgcgcctgcgtccgcgcctcctccctgcggccccggccgcaccggcgacatggccatccccgttgaggaggccatcgccgccctctccaccttctcgctcgaggatgagcaaccggatgtgcaggggttagctgtgctcctgtctagtgaaagatatgcgactaacagtcctattgagtacagcgatgttgctgcttatcgtctatcactaggagaagatacaaaagcaatcaaccagctgaatacactgatcaaagaaggaaaagaaatgacatctttgctgtacacataccgtagctgtgtaaaagctctacctcagctgcctgattcaatgaagcataatcaagcagacttgtatcttgaaacctatcaagttcttgacatggaaatgagccatttacgtgaaattcagagatggcaagcttctgctgcttctaagttagcggctgacatgcagagattctctaggccagagagactggttaatggacccacaatcactcatttttggtctatgcttaagttgcttgacgtcctactgcagcttgatcatctcaagaatgcaaaagcaagcataccaaatgatttttcatggtacaagag

SEQ ID NO: 86011 - DNA, 82 bp, Zea Mays
aacgttcactcaagtaagcacccagtggcaggatactgacaccatgagagaagagctggatgatcttcaggttgctgtttta

SEQ ID NO: 86012 - DNA, 1674 bp, Zea Mays
ttgcagatttttctgagcaccagatgggccatcttgttaaatttgcatgctgagatgtttcggacaaataccgttgaggatattctacaggttcttatagtattttgtgtggagtcattggaattggactttgctcttctttttcctgagcgccataccctacttcgtgtcctcccagttttggttgtcctagcaacctcatcagagaaggagagtgagtcactttataaaagggtgaagataaatcgtcttctcaatgtttttaagaatgatccagtgatcccggcatttccagatctgcatctttctcctgctgcaattttgaaggaattgtcatcatattttcaaaatttttccagtcaaactcgtctccttgctcttcaagcgcctcatgaaattcagggtcgtgagctacaagattatcagaggcattacttgattttgaatcacatgggaactatcagagctgatcatgacgacttctctatacgttttgcctctgctatggatcagatgataaggttgaagtcatcagatggtgtgtataatgactggtcccgcgatatcaaagggaacatgtatgatattgttgttgaaggcttccagcttcttagtcgttggactggcaggatttgggaacaatgtgcatggaaattctctcgccctatttcagattctcaacaaaactccatgacatgttttgactatgaaaaggtagtacgctataactatactgctgaagaacgaagggctctgcttgaattaattggttacataaagagtattggattgatgatgcagcattgtgatactttagtgtctgaagctttgtgggaaacgatacacatggaggtccaagattttgtacaggataaacttgatactatgcttcgtacaacatttagaaagaagaaggacctttcccggattctctctgatatgcggaccctctcagcagattggatggccagcactagtaaagcagacccagagcagcactcgctacaccaagaaactgaggaaatgagacaaaacacattttacccaagaccagttgcaccaacagctgcacagattcattgtttgcaatttcttatatgtgaacttgtatctggtggtaatctgagaaaagttggaggactatttgggaatagtggctctggcatacctgtggaagatcttaaacaactagagacatttttctacaagcttagttttttcttgcatattttggattatacagcgactattggtactctaactgatcttggatttctttggttcagagaattttaccttgaatcttctcgtgtcattcagtttccaattgaatgctcgctcccgtggatgctggtgggccatgtcattgaatcagaagatgctggtcttctcgaaagcattttgattccatttgacctgtacaatgactctgctcaacatgcactaacttctctcaagcagagatttctttatgatgaaattgaagctgaggctgatctttgcttcgatcttcttgctcagaagcttaatgagatcatctttacatattataagagctgtgcagcaagtactcttcttgatagttcatttacatatgcatgcgatgatggtgacaagtattttgtcaaacctttgcgattcgacgcgattttcaagttaaggagagtaatggta

SEQ ID NO: 86013 - DNA, 1957 bp, Zea Mays
tttcattttgcatcccaggttttagggaggacaattgatctaagaagcataattactcagagaatgaacaaaatattcagggaaaatattgactttctacttgagcgctttgaaaatggagatctttgtggtgttgtggaactgcaacaactgctggatattttggagcttacacaccaatcaatatcaagatttcttgaattggattcttactctcttatgcttagcgagatgcaagaaaatctttcgttggtttcttattcaagtcgcatctcttctcagatatggagtgagatgcagacagatttcttgccgaatttcatcttatgtaataccacacagcggtttgtccggtccgcaaaaggaactcaccactcttcgcatagatcaagcgcttctactgggaaaccttacttctattgtggatcacatgatttgaccatggcataccagggtcttgctgggctgtaccgtgacttttttggagtccctcatatgtttgcagttgttaaacttcttggttccagatcattacctgcaatcatccgtgctttactggatcatatatcaagtaagattacaggtttgctaccgaaaataaatgcactgcaagaagcattaccaaaatctattgggcttctttcatttgatggtggtatagcaggttgccaaaagatagttcatgaaattttgacatgggaagcaaaatctgaagttaaaactgaagttcttcatgaccttaaggaaattggaagtgctttgtattggatgagcattctggacattgtgttgagacaaatcgacactacacagttcatgcagtcagctccgtggctaggattggttccaggaaatgatgggcaagtgaagcatgcctactctgataatactccatttaccacacttttaagtgctgcctctaatgctgtgacatcaagccctacatgcccaaatccatctacgtttcttgtcatgtcaaagcaagctgaagctgcgagtctgctgtacaaatcaaacctcaactctggtagtgtgctggagtatgctcttgcattcacaagtgctgccctggatagacactatagcaaatggagcgcaactccaaaaacaggctttatcgacattactacttcaaaggatttctatcgcatttttagcggtcttcagtatagttacttagaagatagcattaacaatccttcgaagaaacaagaaatgctgggtgattctgtagcctgggctggctgtacgataatgtacttactgggacagcagcagcacttcgagctttttgatttctcctatcaatttctcaatgtggcagaagtagaaagtgcgacagtatcacactatcaatcttcagagaggactaaaagttcaaatttcttgcaaggctacgagggcatcctggaagcgatgaggaaggctaggaggctcaataaccatgttttctccatgttgagggcacgatgtccccttgaggacaaggttgcatgtgctatcaagccaagtggggcaccgcttcaccggatgaagtttatgaacaccgtttctgcattcgagacattgccacaaagagtcacctaaccagcttccaggcaatgtgcagaatgtactcttgtatgcggggttatatgttatgttgtaaggtaaatgtatattatgtagtcacaagtcacaaccatcaaccgtggatcctggacctgaacaggagaatgtgtttgcttgctatatatgaaaattaggtgggtatgttgaagttgaccctgagttcgcaagtttagctttcaactttgagactatctcgctgaaccaaatatgtaaaccagctggagagttgagccagaggacacgtgctagttagctgttcttctcgtgtctgtatttctcagactgctctcaaagtatatttaatgtatgacgattcagattagcttaaaaagttgtgttatccgag

SEQ ID NO: 86014 - DNA, 1128 bp, Zea Mays
tatacacagctgatcgatcgagcagcagaaacctgcacgtccaaccaaccaaaacccaagatgtcgagcttcttcccatttccgtccgcccctctcgccgttcttctcatcgtcacgctccacgcctccgccatccatgcgcagatacctgcctcggcaacgaccggcgccgcggtggccgccacaaacccgcagccaggaggcagtggcactggcggcggcgtagtgggcgcgggcgggccggacgcgcctctggaactctacatgcacgacatcctgggcgggtcgagcccgacggcgcggcccatcaccggtttgctgggcaacatctacaacgggcaggtccccttcgcgcggcccatcggcttcagcgcgcccaggaacggcgtggcgatccccaacgccaacgggcaggtgcccacgtacaacggcaacaccggcatcccgctggacaccggcttgtccggcgccgggttcttgcagccagggactgggaacggcggcggcgcggcggcggcggcaccggcgcaggtgcagctgggccccgacggcctcagcctcgggttcggcaccatcacggtcatcgacgacgtgctgacgagcgggcccgacctcggcgcgcagccgctcgggcgcgcgcagggcgtgtacgtggcgagctccgccgatgggtcgtcgcagatgatggcgttcacggccatgatggagggcggcgagtacggcgacacgatcaacttcttcggggtgtacaaggtgggcaccccgctgtgccggctgtccatcaccggaggcaccggcaagttcaagggtgcctgcgggttcgccgaggtacgcccgctcatcgcttccggccagcacgtcaccgatggcgcagagacgctgctgaggatcaccgtccatcttgcttaagttgtgaccgtaaagtaagccagcgcttgtcggctgtcgtggctgcagtgaagcctgggctgtgttgtttcggacgtgtcgaggtcgtcgcctcgtcggtggatgcatgcatgcatgcaattgcaatgtagtgtttgcatgggtcaaaaattgtattcgcctcgtctgcagggtgtactaccaattgttaaattaaagcagtacatgatgtcgtgtggt

SEQ ID NO: 86015 - DNA, 963 bp, Zea Mays
atgtactctgtctgggaacaagctaagcaattggagcagtggcagaagggaaagtctcgagtgcctccacttcacctgatgggcaaggcaccaactcctttcggtaactttgccaactacgcccacatgggcgaaggaggggtgattgttggaggtatgattccaccagaagtggagaaagggataactacgcagatattgagtgatgatgaaagtagtggggatcatggtgatccaactattaatattcaggaggagacagaggatgatgaggcagtgattgttgggtcaatcccatgtcctactgcagggaagttgaatgagaaacagggggagcaacatgattgttccattggggcaaaggtgaatgacaaacagggggagcaacctatcgtatactatcgaaagcggacgaagaagcagggggagcaaccacaacctggatgtgttgaagctccagtcccatatctctcctcagactcctctccagacctagctgatccatggtttgttctccacagatctagagccgtggagttagaacaccaccgtaggtggcggtacggtggcgccctcctcctcgagctttgtcggcggtggctgccgggccttgtggcactccgcatcggggaagaatcgggtcgtctacggcgctcctgccctaggcgcaagcggttgcacgttgcgcgtggacgaccggagcacgggagcgcgtcgcgcgcggatgaccatagcaccttgggagtcggggcgggcatcgtggggagcaggcccggggaggaggcgaggccgtcatctggatctgggaggtgggaggaggcgggaccagcatctgggagtcggggcgggcatcgcggggagcaggccggggaggaggcggggccgacatctggatttgggaggtgggaggaggcgagggccggcatctgggagtcggggtgggcattgcggggagcaggctga

SEQ ID NO: 86016 - DNA, 1420 bp, Zea Mays
caaagtaaactgatcgaaggtgcacacttctgagttctgacacaacaccaaacgcaagacagcccgcgagtctcatcagtttcaccagccgcccatcaatactttggcaaagtttcctcttcctctcccgcagagcagggcgcagcaggcagccgcccagaaaatttcccctctccacccatgcaatgcaatccgccgcggcggccgcgccctcctcccttccgctcagcgtcttccccaaggattcccgcccgctcccgtgcctcctcctcacttccctgctgctgctcctgaccctccatttcctctcctcctcccccaccccctcgccgcctccaccgcagccccgcctcgcgccgctcccgtccacagcctccgcgggcccggccccgtcagcgctcgcgttcctcctcacgggatccgcgggcgacgcagaccgcctccagcggctgcttctcgccacctaccacccccgcaacgtctacctcctcctgctcgaccgcgccgcctccgcggccgaccgcgcgcggcttgctcgcagcgcgcgggctgcccccggccgcgacaacgtccatgtcgtcggggaccccgggttcgccaacccgcgcggtgcatccgccctcgccgccaccctgcacggggccgcgctgctgctgagggtcgaccagggatgggactggttcgtgcacctcgacgccgatgagtacccgctcgtgacccccgatgatctcctgcatgttttttcatacctacctaaggatctcaacttcattcagcacactagctatattggttggaaggagaatgacattttctacgccacccaaaagcgtgatataccaaatgcttacaaattatttacaggctcttcgtctgttatcctttctcggaaatttattgaatattgtattgttggtatggataatctgccaagaactctgctgatgtactacactaacatgcccttgccacacaggaagtattttcagacagttctttgcaactccgctgaattcaacaagactgtagttaaccatgacctacactattcaacatgggatgctcgttccaaaaacgagccacgcctactgactatagatgatgtagaaaatatgaccgaaagtggtgcagcctttgggactagatttcccaaagatgatcatgcgcttgatcgcatcgatgaagaaattttgcaccgtcatcctggagagctagttacaggaggatggtgcataggtgttgggcatgatagtccatgcgacatttcaggtaacccagatgttctgagacctgggcctaaagctataaaacttgctaagtttctttctgaaaggctgtcatatcggaacttttattcccagcaatgtatatgggattgatgcttgtataatttcattatcagggaactgttatctctcgg

SEQ ID NO: 86017 - DNA, 1604 bp, Zea Mays
caaagtaaactgatcgaaggtgcacacttctgagttctgacacaacaccaaacgcaagacagcccgcgagtctcatcagtttcaccagccgcccatcaatactttggcaaagtttcctcttcctctcccgcagagcagggcgcagcaggcagccgcccagaaaatttcccctctccacccatgcaatgcaatccgccgcggcggccgcgccctcctcccttccgctcagcgtcttccccaaggattcccgcccgctcccgtgcctcctcctcacttccctgctgctgctcctgaccctccatttcctctcctcctcccccaccccctcgccgcctccaccgcagccccgcctcgcgccgctcccgtccacagcctccgcgggcccggccccgtcagcgctcgcgttcctcctcacgggatccgcgggcgacgcagaccgcctccagcggctgcttctcgccacctaccacccccgcaacgtctacctcctcctgctcgaccgcgccgcctccgcggccgaccgcgcgcggcttgctcgcagcgcgcgggctgcccccggccgcgacaacgtccatgtcgtcggggaccccgggttcgccaacccgcgcggtgcatccgccctcgccgccaccctgcacggggccgcgctgctgctgagggtcgaccagggatgggactggttcgtgcacctcgacgccgatgagtacccgctcgtgacccccgatgatctcctgcatgttttttcatacctacctaaggatctcaacttcattcagcacactagctatattggttggaaggaggaaagacaaataaggccaattatcgttgatcctggtctatatctctcatccaggaatgacattttctacgccacccaaaagcgtgatataccaaatgcttacaaattatttacaggctcttcgtctgttatcctttctcggaaatttattgaatattgtattgttggtatggataatctgccaagaactctgctgatgtactacactaacatgcccttgccacacaggaagtattttcagacagttctttgcaactccgctgaattcaacaagactgtagttaaccatgacctacactattcaacatgggatgctcgttccaaaaacgagccacgcctactgactatagatgatgtagaaaatatgaccgaaagtggtgcagcctttgggactagatttcccaaagatgatcatgcgcttgatcgcatcgatgaagaaattttgcaccgtcatcctggagagctagttacaggaggatggtgcataggtgttgggcatgatagtccatgcgacatttcaggtaacccagatgttctgagacctgggcctaaagctataaaacttgctaagtttctttctgaaaggctgtcatatcggaacttttattcccagcaatgtatatgggattgatgcttgtataatttcattatcagggaactgttatctctcgggttatgtgtttgcggtttgcctcatactgcggtgcatttcgttcgccatcatttgcatatgatgtctgtagttgattctcttgtgataacctaaaacagtacaagtggatcataagaaatgttctaccat

SEQ ID NO: 86018 - DNA, 1672 bp, Zea Mays
atgggcggcagaggaaggccgaggcaaaggcaatcaggtgtggggtcaacgtggcatccgtgggacccttcgcggattgcggagtggcattgggttggcagcacgcccctgcacacggtgacacgggccacggcgcggcgcggcgcggcacggggagcgagcgccgagcgagagcaagcaaccgctgtccgccgggccggccacggcgctgccccctgcttcgcgccttcgccggtgcgctcacgcctcacgcaggtgcatgcatcgacctacggtatcctagtctgggatcagaaaagaacacagcaacaacaaagaagaaaggcgcgagcgatggacggtgacgccggaccagagcaacacgggtgcgtgcactacaggagggggtgcaagataagggcgccgtgctgcggcgaggtatttggttgcaggcactgccacaacgaagccaaggactcgctggaggtcagcgtccacgaccgccacgtgcttccccgtcacgacatcaagctggttatctgctctctctgcaacaaagaacaggatgtaagttccctgacgaagcagggacagtgttcttcggccactgttggtgttacctgccacacaccacatgaaaaaaaaaacccatctcgtctgtcgacaggtgcagcaagactgtgcgaactgcggagcatgtctcggcaaatacttctgcgcgaaatgcaacttcttcgacgacgatgtaagctctccccccctttttttgatgtgttaagcgaagtggccgatgggattttacgcgctaatttagatgtaatttcagaagtgttccctcttctgttttctccggttttgttgtcgcgttccctggcatttcaggtgtcgaagaaccaatttcactgcgatgggtgcggcatatgcaggactggtggcgcagagaatttctatcactgtggcagatgtggatgctgctacaccactacgctgaaggattctcaccgctgcgtggacggagctatgcatcacaactgccctgtctgcatggagtatctattcgactcgatgaaagctatcagcgtgctccactgcggacacaccatccacctggaatgcctttacgagatgagagcgcaccagcagttttcatgcccggtgtgcctgaggtctgcctgcaacatgtccgacatctggcaaaagctggatcagcaggttgcagcgtccccgatgccagcgatctatcagaagaagatggtatggatcctttgcaacgactgtggcgtgacgtccaacgtgcagttccacatcttggcgcacaagtgccctggatgcagctcttacaacacccggcagacgaggggcgatccagccgcatgctctagagtttgagagcaaataaaactgcagtactgcactgcacataaactcgtggggttgtgcggtcgatcgataggtagcttgcatggaggaaattaaagactaccattgcgcatggacacgattggtgccggcagttgagtacgtgtattaggcctgtcatatgtagatgtatcatatgctatgccttcgcaaagaagaatttggcgcagcggacagggtatatacatttcttttgttgctatatatacacacatatttttgttgcgcggtgcttgtgccaatgatggagagttcgcacgttgtttttcttata

SEQ ID NO: 86019 - DNA, 1535 bp, Zea Mays
atgggcggcagaggaaggccgaggcaaaggcaatcaggtgtggggtcaacgtggcatccgtgggacccttcgcggattgcggagtggcattgggttggcagcacgcccctgcacacggtgacacgggccacggcgcggcgcggcgcggcacggggagcgagcgccgagcgagagcaagcaaccgctgtccgccgggccggccacggcgctgccccctgcttcgcgccttcgccggtgcgctcacgcctcacgcaggtgcatgcatcgacctacggtatcctagtctgggatcagaaaagaacacagcaacaacaaagaagaaaggcgcgagcgatggacggtgacgccggaccagagcaacacgggtgcgtgcactacaggagggggtgcaagataagggcgccgtgctgcggcgaggtatttggttgcaggcactgccacaacgaagccaaggactcgctggaggtcagcgtccacgaccgccacgtgcttccccgtcacgacatcaagctggttatctgctctctctgcaacaaagaacaggatgtaagttccctgacgaagcagggacagtgttcttcggccactgttggtgttacctgccacacaccacatgaaaaaaaaaacccatctcgtctgtcgacaggtgcagcaagactgtgcgaactgcggagcatgtctcggcaaatacttctgcgcgaaatgcaacttcttcgacgacgatgtgtcgaagaaccaatttcactgcgatgggtgcggcatatgcaggactggtggcgcagagaatttctatcactgtggcagatgtggatgctgctacaccactacgctgaaggattctcaccgctgcgtggacggagctatgcatcacaactgccctgtctgcatggagtatctattcgactcgatgaaagctatcagcgtgctccactgcggacacaccatccacctggaatgcctttacgagatgagagcgcaccagcagttttcatgcccggtgtgcctgaggtctgcctgcaacatgtccgacatctggcaaaagctggatcagcaggttgcagcgtccccgatgccagcgatctatcagaagaagatggtatggatcctttgcaacgactgtggcgtgacgtccaacgtgcagttccacatcttggcgcacaagtgccctggatgcagctcttacaacacccggcagacgaggggcgatccagccgcatgctctagagtttgagagcaaataaaactgcagtactgcactgcacataaactcgtggggttgtgcggtcgatcgataggtagcttgcatggaggaaattaaagactaccattgcgcatggacacgattggtgccggcagttgagtacgtgtattaggcctgtcatatgtagatgtatcatatgctatgccttcgcaaagaagaatttggcgcagcggacagggtatatacatttcttttgttgctatatatacacacatatttttgttgcgcggtgcttgtgccaatgatggagagttcgcacgttgtttttcttata

SEQ ID NO: 86020 - DNA, 1435 bp, Zea Mays
atgggcggcagaggaaggccgaggcaaaggcaatcaggtgtggggtcaacgtggcatccgtgggacccttcgcggattgcggagtggcattgggttggcagcacgcccctgcacacggtgacacgggccacggcgcggcgcggcgcggcacggggagcgagcgccgagcgagagcaagcaaccgctgtccgccgggccggccacggcgctgccccctgcttcgcgccttcgccggtgcgctcacgcctcacgcaggtgcatgcatcgacctacggtatcctagtctgggatcagaaaagaacacagcaacaacaaagaagaaaggcgcgagcgatggacggtgacgccggaccagagcaacacgggtgcgtgcactacaggagggggtgcaagataagggcgccgtgctgcggcgaggtatttggttgcaggcactgccacaacgaagccaaggactcgctggaggtcagcgtccacgaccgccacgtgcttccccgtcacgacatcaagctggttatctgctctctctgcaacaaagaacaggatgtgcagcaagactgtgcgaactgcggagcatgtctcggcaaatacttctgcgcgaaatgcaacttcttcgacgacgatgtgtcgaagaaccaatttcactgcgatgggtgcggcatatgcaggactggtggcgcagagaatttctatcactgtggcagatgtggatgctgctacaccactacgctgaaggattctcaccgctgcgtggacggagctatgcatcacaactgccctgtctgcatggagtatctattcgactcgatgaaagctatcagcgtgctccactgcggacacaccatccacctggaatgcctttacgagatgagagcgcaccagcagttttcatgcccggtgtgcctgaggtctgcctgcaacatgtccgacatctggcaaaagctggatcagcaggttgcagcgtccccgatgccagcgatctatcagaagaagatggtatggatcctttgcaacgactgtggcgtgacgtccaacgtgcagttccacatcttggcgcacaagtgccctggatgcagctcttacaacacccggcagacgaggggcgatccagccgcatgctctagagtttgagagcaaataaaactgcagtactgcactgcacataaactcgtggggttgtgcggtcgatcgataggtagcttgcatggaggaaattaaagactaccattgcgcatggacacgattggtgccggcagttgagtacgtgtattaggcctgtcatatgtagatgtatcatatgctatgccttcgcaaagaagaatttggcgcagcggacagggtatatacatttcttttgttgctatatatacacacatatttttgttgcgcggtgcttgtgccaatgatggagagttcgcacgttgtttttcttata

SEQ ID NO: 86021 - DNA, 1572 bp, Zea Mays
atgggcggcagaggaaggccgaggcaaaggcaatcaggtgtggggtcaacgtggcatccgtgggacccttcgcggattgcggagtggcattgggttggcagcacgcccctgcacacggtgacacgggccacggcgcggcgcggcgcggcacggggagcgagcgccgagcgagagcaagcaaccgctgtccgccgggccggccacggcgctgccccctgcttcgcgccttcgccggtgcgctcacgcctcacgcaggtgcatgcatcgacctacggtatcctagtctgggatcagaaaagaacacagcaacaacaaagaagaaaggcgcgagcgatggacggtgacgccggaccagagcaacacgggtgcgtgcactacaggagggggtgcaagataagggcgccgtgctgcggcgaggtatttggttgcaggcactgccacaacgaagccaaggactcgctggaggtcagcgtccacgaccgccacgtgcttccccgtcacgacatcaagctggttatctgctctctctgcaacaaagaacaggatgtgcagcaagactgtgcgaactgcggagcatgtctcggcaaatacttctgcgcgaaatgcaacttcttcgacgacgatgtaagctctccccccctttttttgatgtgttaagcgaagtggccgatgggattttacgcgctaatttagatgtaatttcagaagtgttccctcttctgttttctccggttttgttgtcgcgttccctggcatttcaggtgtcgaagaaccaatttcactgcgatgggtgcggcatatgcaggactggtggcgcagagaatttctatcactgtggcagatgtggatgctgctacaccactacgctgaaggattctcaccgctgcgtggacggagctatgcatcacaactgccctgtctgcatggagtatctattcgactcgatgaaagctatcagcgtgctccactgcggacacaccatccacctggaatgcctttacgagatgagagcgcaccagcagttttcatgcccggtgtgcctgaggtctgcctgcaacatgtccgacatctggcaaaagctggatcagcaggttgcagcgtccccgatgccagcgatctatcagaagaagatggtatggatcctttgcaacgactgtggcgtgacgtccaacgtgcagttccacatcttggcgcacaagtgccctggatgcagctcttacaacacccggcagacgaggggcgatccagccgcatgctctagagtttgagagcaaataaaactgcagtactgcactgcacataaactcgtggggttgtgcggtcgatcgataggtagcttgcatggaggaaattaaagactaccattgcgcatggacacgattggtgccggcagttgagtacgtgtattaggcctgtcatatgtagatgtatcatatgctatgccttcgcaaagaagaatttggcgcagcggacagggtatatacatttcttttgttgctatatatacacacatatttttgttgcgcggtgcttgtgccaatgatggagagttcgcacgttgtttttcttata

SEQ ID NO: 86022 - DNA, 1008 bp, Zea Mays
ccactaatcaataataataattatgaaattaattatttttgagtttactagcagataacaatgtgtattattactataaatatggcagtgttttttgaaactccaaaaacaaatgtaaaaaaagttaaattgctcagttaaaagataaaaagaaaactgaataggaagaatgataagagagaagataaaataatatttaaatatgaataaaaagtataaatagcggggctttgagagggggaatggtaggagatactataaggtacgtcccgacgcccgttgccttctcaccccaaatcctccaatttcttgtcttctccgcgaaatgttcctctgtctgtcgtgtctttgttctggtcgtttcccgattcggtagttggcttggggatttcactgcaagtttggggattttctgtaggaaagttgatcgagaagtcttggtagacatggagcagatccagtactccgagaagtactacgacgacacctatgaatacaggcacgtcgtcctcccgcccgaggtcgccaagctcctccccaggaacatccttctctccgagaagcagtggcggttggtgggtgtgcagcagagccgcgggtgggtgcactacgcgatccaccggccggagccgcacatcatgctgttccgccgcccgatcaactaccagcagcagcaggaggaagcggctgccgcgcatgtgctgcccaagtgaagcctctgctggcgaccaggaatgttaaaaacccctagccctcttttcatctctaaaaggggcgtagctgttgtgttgattaatccctctggctgttagttggaaacttgggatctagttgggtcgacttggtgtgtgcgtggcgatctgtttgtgctgacatttaatctgtgcgatgtgatctttgtgattgtgattctggttagtagcgctggaatcaggtttaatctgttctatgtgagattaaaattgtcaccatgcatttcaaagttcaaacatgctgaggaagaaacta

SEQ ID NO: 86023 - DNA, 857 bp, Zea Mays
ccactaatcaataataataattatgaaattaattatttttgagtttactagcagataacaatgtgtattattactataaatatggcagtgttttttgaaactccaaaaacaaatgtaaaaaaagttaaattgctcagttaaaagataaaaagaaaactgaataggaagaatgataagagagaagataaaataatatttaaatatgaataaaaagtataaatagcggggctttgagagggggaatggtaggagatactataaggaaagttgatcgagaagtcttggtagacatggagcagatccagtactccgagaagtactacgacgacacctatgaatacaggcacgtcgtcctcccgcccgaggtcgccaagctcctccccaggaacatccttctctccgagaagcagtggcggttggtgggtgtgcagcagagccgcgggtgggtgcactacgcgatccaccggccggagccgcacatcatgctgttccgccgcccgatcaactaccagcagcagcaggaggaagcggctgccgcgcatgtgctgcccaagtgaagcctctgctggcgaccaggaatgttaaaaacccctagccctcttttcatctctaaaaggggcgtagctgttgtgttgattaatccctctggctgttagttggaaacttgggatctagttgggtcgacttggtgtgtgcgtggcgatctgtttgtgctgacatttaatctgtgcgatgtgatctttgtgattgtgattctggttagtagcgctggaatcaggtttaatctgttctatgtgagattaaaattgtcaccatgcatttcaaagttcaaacatgctgaggaagaaactatccta

SEQ ID NO: 86024 - DNA, 2120 bp, Zea Mays
ttacgggttttttgcccagccctactagttcttccctcgcgttcactccccagcgtgggaaaatcccggaattttcttgtttgtccactggttttcttgcgccaaaaccaggtttctccccgttgccgtggcagaactctgttcttgcccagtctagaagatctgcaccgttccaaccaccgactccggccgccaagcatatagccagcgcggcgaagaattcccaacgcgaaagccaaaacctcttcacttcacttcacgtcgacacgtgcggggagaatatgcgcgcgacaatcccagccctgtcgctcctggtgacgccgcggctcccctcgctcgccgtgccgctggctggaggccgcctccgcgtgggcggtcgttctcggacccgcctccgcgtggcggcgccgacgtccgtcccaggggaagcggcggagcaggcggagccgagcacgtcggcgcccgagtccggcgagaagttctcgtggagggatcactggtacccggtctccctcgtcgaggacctcgaccccagccgccccaccccgttccagctcctcaaccgcgacctcgtcatctggaaggaacccaagtccggcgagtgggtcgcgctcgacgaccgctgcccccaccgccttgccccgctctcggagggcaggatcgatgagacggggtgcttgcagtgctcgtatcacggatggtcattcgatggctccggcgcctgcaccaagatcccccaggccatgcccgagggtcctgaggcccgtgcggtgcggtcaccgaaggcgtgcgcgatcaagttccccaccctcgtctcccaggggctgctcttcgtgtggcccgatgagaatgggtgggagaaagcggccgccaccaagcctccaatgttgccgaaagaatttgaggacccggccttctccacggtgacaatccagagggacttgttctatggttatgatacgttgatggagaacgtctctgatccgtcccatatagaatttgctcaccacaaggttactggacgaagagatagagccaggcctttgacattcaggatggaatcaagtggtgcctggggttactcaggagcaaattctggtaatcctcgcattactgcaacttttgaggccccttgttatgcattaaacaaaatagagatagacacaaagttacccatttttggcgaccagaaatgggtcatatggatttgctctttcaacattccaatggccccagggaagactcgttctattgtctgtagcgctcgaaactttttccagttcacaatgccaggaaaagcatggtggcagcttgttcctcgatggtatgaacattggacttcaaatttggtctatgatggcgatatgatcgttcttcaaggccaggagaagattttcctagctgcaaccaaggagtcttctacggatattaatcagcagtacacaaagatcacattcacgcccacacaagctgatcgatttgttttagcattccgcacgtggctaaggaaatttggcaatagccagccggagtggtttggaaatcctacacaagaagcattgccttccaccgtcctttcaaagcgcgagatgctagacagatacgagcagcacacgttgaaatgctcgtcttgcaaaggagcatataatgctttccagaatctgcagaaggtattcatgggagcgacagtagtttgctgtgctgccgctggtattcctccagatgttcagctcaggctattgatcggtgcggctgctttggtcagtgccgctatagcatacgcattccatgagctccagaagaattttgtattcgtggattacgtgcatgctgacattgattgaaagattcgtgaggatctgttgtgtcgacatcactcgctcgcgagtcgtgtctgtagtctagggctctaggcgtctaggtagggaaagtaactttttgccgggtataggtcatattgctcacatatgtattttgtatagtgtatgcactcaactgtagccgatgcagtgcgaaaatatagtttttatgttattatctattggattaaaattgtctccagatccttttagcatgtaaaatgccatttttcaaatggaagttctcaattgcgcctatag

SEQ ID NO: 86025 - DNA, 563 bp, Zea Mays
ctagaagggggctaccccaccccagtgtgtgccccctttgcgaccaagaagaggaaacaatacaacatcttctcatctcttgcgtctttgcacgacagttctggtattcctttttaagcaggtctgggttgcctaacctttcaccagaaaatgctagttgcagccttgatgactggtggagcagagctgtggagaagattccctgtgatctccaatccggcttcaattctctagttattcttggcgcttggagcctttggcgtcatcgcaacgactgcgtgtttaatgggagatcgccaagcctggcgtgtgctctcaccctcgctggcgatgagctcaggatgtggtgtagtgccgcggcaaaagggttgaacctgctttcaactcttatgtttatgcttgacccagggggatagtctagtggcttgttcagagtggttgtgtgtggttgctgtgttgcgtcttgtgtcttgttgtgtcatgtgtgtgtgtgtcgtgtcaggtgtgtgtcgggtgtggtgtgttgtaccttcttctatctattaatggaatgatacgcagat

SEQ ID NO: 86026 - DNA, 941 bp, Zea Mays
gtcattgttgccgagccacaatgcctgatgcagcagctttgacttcaccttgcaaagcccatcttcacccgcataccagacgtcgagaatcaaaagcaaccatcgaaggcgaagctgaggccgagataaacttcaatgcgacgcctttaggaagggagtgacgtcggggacgacatcgtcgcgagtccgagatggaccaggctttcgcccaaggaagaaaatgttggggaatacgacgcccccaacagggaagcggcgcccacgggcgtcgccgtcgcctaggctctcgcccaagaagcacccagcaccaacgctaggccaagagctaccgtcgtcgccgtcctccataccatatgcgtcacacaggcacgtgtcagagtcgcacccagcagccgatggcactagcacacacggccaccgaatctagatgtcgccgagcaccctgccaccttgcgtcgtcctggccactgaccggcgccacccctcataaacgtgcgacctcaagcaccgccacgccgacgccggagcgtcgagccaccaccatcgcagcatcacacagccgcacgccgaggccacaaatgaccaacgtcgttggcccggcacctgtcgatgttgccgccatcatccgccagcagccacaggacgtgtgccccaccatctcgggtgtcgcccctgccctgaggccaccggatctggatggcaggccccaaaaccggtgtccctgcagacgtcgcggcctccgtgtcgaccacaaccgtgagcaccaccctgggtcatcgccaaacgccaaggccaccgcccgaacaccgctagtcggtcggtcgaaggaggttgtcgcccccaccacagcagcagtcaaggccgtgaggggagaggttgcaaagaagagagcgccaccccacaacacctgcacaagccccaaccaactgccgccaccgtaa

SEQ ID NO: 86027 - DNA, 1201 bp, Zea Mays
tccattccctccctcgtggcctcgtctcctcccgtggcccgtgggggacggcacgcaaccacacgcagccactcaccggtgagcggcgaggcgactggcgcggccgcgcaccgcagtcacgcacgcaggcgctcaatggctgcgtcactctgctccccgcctccgctcccttccgccttccgccgatcccgcgccgtcgtccgcgcctcctcctcctcctcgtcgtcatccgccgtctcgtcgtcgtcgtccgcccccaaagcgcggttcgtcgcccgccgctccgagtccgtccccgtccagcagctggtccgcccgctcgcggagtacatgagcttgccagccagccagtactcggtgctggacgccgagcgcatcgaacgcgtcgacgactccaccttccggtgctacgtgtaccgcttccgtttcttcgcgcttgaggtctgccccgtcctcctggtccgcgtcgatgaggaacccgacggctgttgtattcgcctcctctcctgcaaactggagggatcaccgctcgtggaggcgcagaatgataaattctcagcttccatggcgaatagggttttctgcagcagcaagtcgcaagattcgacccttcaacaacttacatcagatactacaatagaggttgcaattgatataccttttccatttcgagcaataccagttgaagccattgaatcaagtggcaggcaagtgcttgaacagttactcagagtcatgcttccaagatttctgaagcagcttgttaaagactaccaagcttgggcttctggcgatgcttctaggaaaccacttggcactggtgaaatctgaagctgcccagtgtctccattacgcatgatagtttgatcgtagaattcagttattgcccccttgtgttgtatagcaatcctgccaaaacaatgggcatgcttgtttcagtttttttttgctgattttggctgccaaaagctgttgtatgctaaacgctcagtttttcattccacttttatgagaatcgttttgatgaaaaaatgtccaaaattaacttaaacacaatcgatcgacaggaggaatctgtcacttcctgcattctaaaccctatggatccttttatctttcttcgtatataatttttataattttgtattctctctacagctagattctctcaaaaaagctcgtcagaaaaaacaaacaaaca

SEQ ID NO: 86028 - DNA, 708 bp, Zea Mays
gttcctccctcatgcttccccgttgcagcgattgctcccggtggctcggcgccaatagaggcgccgccacctgactcggccgacccccatctcgctcgacgagatcgtcgctggtatccgcggtgaggttgcaaattttccttcgctggctccccccgcgctaacgaacgcagactgctccatcaccattgacgatgttggcaataccaggttggaagcatcactagcgcctgatttattcctaacgcccttctcgtgaacccccaggtatatcttagagaatgttcatgccaagagtggcaacatatcgagaagccatgccaccatgccttatgccaagagtggcaacagacctattgatcattcatgtgatgcacctgctgctattccaactgaggtgccaacaccagtgttttcttcagctgaagttggtttgttgatgtccaccccgaggaaaattaggagagctgtcaataagcttactcccaagaagaagatgcatggcatgtagacagcttcaatggtgaatgtcgactgtattttgtttcagaatatctatggcatgaagacagcttcaacgcatgttaactgaatgtatctgtctttcctttcagttatgtgttgtttcagaaacaaatgtgcatgtgattatgtgaactgaatgtatctgtgaaccgaatgtgcctgtgcaatgaatgttcgtgttaa

SEQ ID NO: 86029 - DNA, 626 bp, Zea Mays
gttcctccctcatgcttccccgttgcagcgattgctcccggtggctcggcgccaatagaggcgccgccacctgactcggccgacccccatctcgctcgacgagatcgtcgctggtatccgcggttggaagcatcactagcgcctgatttattcctaacgcccttctcgtgaacccccaggtatatcttagagaatgttcatgccaagagtggcaacatatcgagaagccatgccaccatgccttatgccaagagtggcaacagacctattgatcattcatgtgatgcacctgctgctattccaactgaggtgccaacaccagtgttttcttcagctgaagttggtttgttgatgtccaccccgaggaaaattaggagagctgtcaataagcttactcccaagaagaagatgcatggcatgtagacagcttcaatggtgaatgtcgactgtattttgtttcagaatatctatggcatgaagacagcttcaacgcatgttaactgaatgtatctgtctttcctttcagttatgtgttgtttcagaaacaaatgtgcatgtgattatgtgaactgaatgtatctgtgaaccgaatgtgcctgtgcaatgaatgttcgtgttaattgaat

SEQ ID NO: 86030 - DNA, 1047 bp, Zea Mays
aaggaaatggctgttataataataatactacaaaagcaattgcatcgttccgagtagcacttttccaaagctctaccaataaggaaaaaaaaaaactcttctccacgcgtccttcctattctcctcgtcatcttcctgctgcgcgtccctgccagcacagcgccgcctcccctaacggccccaccatctcctcacatcgttatcgtgtcacggcctctcggcctcgcgcccttctgagctgtcgtcgtctccccctctctcgctcggctgtcgccgcggatctccctgcgtcggccgcaacgatggcctcctcatccgccgcggcgtcggccgccgccctagaggccgtgcaggtgctcgtcgcctcgctcgccgatgactccccagtcgcccgtgacgccgcgctcgctgccctccgcgacatcgcgccgttgaacccgatgctcatcctcgactgctgcgccaccgtctcccgtggcggacgtcggcggtttggcaacatggctggggtttttcttgtcatggcatctgcagtcagggctctcgatcactctgacgccgagagcgagttcctccggaaaatcgcgaagattgcaactgctgagattgttacctcaaaggaattcaatgttgattggcaaagagcagctgcttgtcttctggttgctataggttcacatgatccagacttgatgatgggggaaatttttcttcacttctctggaccaacttctgctctgccagccatgttacaaatacttgcagattttgcgtcttctgaagctttgcagttcaccccacggttgaaggacgtgcttttgcgtgttttacctatcctaggaagtgtgcgagatggccaacggcctgtttttgcgaatgcattcaagtgttggtgccaggctgcatggcagtacctgggagatgccccctctgagcttcctcttgataacgatgttatgtccttcatgaattcagtatttgagttacttataaaagtatggacaggctcacgtgatctaaaggtgcgtccgaattttggctttgagt

SEQ ID NO: 86031 - DNA, 891 bp, Zea Mays
atgactaacatggtggatttgtttgctcgtttggttgtgcttctgcataatccacttgctaggggtcaactggccacccagatcctgacgagggagcttccccgagcactagagatatcctgcagcacatccaggaggatgctacgctgtggggttctgtgctacttgggtccacttttccccagaaacctttctttattttggcaagatgaggtccctaagatgaaagcttacatcagtgatcctgaagacctaaagcaagatagcacataccaggaaaaatgggatgacatgataataaattttttggcagaatgtttggatgttgtgaatgatactgagtgggtcatttctttgggtgatgcatttgcacggcagtatgatctgtattctatatctgacggacacgctgctttgctgcacagatgcttgggaatgcttcttcagaaggttgatgataggatttatgtcagcgagaagattgattggatgtgtagacactcaagtatgtctattcctattaatcgccttggacttgctcaaggcatcgggctggttgcggcttctcatttagatacagtgttggagaaactgaagaacatactagatagtgcagagcaaagtgctttccagaggttcctctcatttttctcattcggcccaaaagtggaagatgttgatgacacatatgcagcattggcgttgatgtatggttatgccgcaagatatgctccatcaactgttattgaagccagaattaatgcacttgtggggagtaatatgcttggaaggttgcttcatgttcagcatcctactgcaaagcaagctgtgattactgcaatcgaccttttaggtgttttccttcataacatgctgcaaatcacatcttag

SEQ ID NO: 86032 - DNA, 3047 bp, Zea Mays
ttacttcacatctatgtgctttctgcactatcatatgtaatcagttttggtgtttaggtcgagctgttattagtgctgctgaaatgggaatctcattcccactgaaacgaagagatcagttactggagtacgttttaactctaatgggtagggatcaaagtaatgatctcactgatttcaacactgagcttttgcacacacagagccttgctttaagtgcctgtactactcttgtctcgctagaaccaagattgccaatggaaacaagaaaccgtgtcatgaaggcaacattaggtttttttgctttgccaacagagccctcaagcattgttgagagtctcgtaacaaacctaattattctgttaggtgccatcctgcttacaagtggtgaagatggtcgaagtcgagcagagcagttgctgcatattcttaggcagcttgatccatatgtatcatcatctctggaacaccaaagaagaagaggatgtgttgctgtacaggaggtgttaataaagtttcgcaatctttgttctggtggattcggtgcattgggctcctatccaactttcacaatgaataaacaaatcgatcgagggactaggagcttgtcaagtttgccatctgcatttgtgttgcctagtcgagattctttaagcttgggagagaggacaatggcataccttcctcgttgtgctgatacagacacggaagttaggaaagttgcaattcagatcattgcacttttcttcgacatttcattgtcacttccaaagcagaaggcatatcctaatgatattgatctggaatcctcgtatagtgctttgtcctcccttgaggagttagtctctattgtcagaagggaggcatctgttgatcaaactgaactatttcagagggttgtatcctcagtgtgtattctattatcaaaggatgagctggtcgtcttgctacactcttgtacgttggcaacatgtgataagataaaacagtcagcagatgcttcaattcaagctattatcatgtttattatcagaagaggcaaggagctacgtgaagctgatgtctcgaggacaactcaatctttgctctcatctgctatttctcttactgacacacactcacgccaagaggttctgaatgctatatcatgcctagcagaaaacaccaatcacgttgtggtctttgatgaggttctatctgtggctggaaaagatatctgtacaaaagacataccaaggattcgtggaggctgggccatacaggatgttttttatgcattttcccagcacaaggagcttgcacttctattcctggagtacactttatctatacttcacaaagaacctgtcataataaacagttctgagaagggggagagtacctctgagtcattggctgatgactgtattctacaggcaactatgtttgctctcaatgcatttatgagaggtggtgggaagattgggaaacaagcagttgagaaaagttacccttctgttctttcgggccttatactgaagctcggaagtcttaatggtgttgctgaattgggccgaaatgaacttctacgatcgttgttaattgcatttcagtcattttgcgaatgtgttggtgatgtagaaatgggaaagctattagctcgagatggggaacaaactgagaaggacaaatggatcgagcttgttcaggaaatcgcatgcagttcctcagtaaaacgaccaaaagatgttctgccaacttgtgttatcttgtgtaatgctctcaaccgaaatcagagggctgaaagggaggctgctgctgctgcactatcagaatttatccaccacattgaaaaagaacctacattgcttgaacaaatggttgaggaaatgtgtcaacatgtttctgatgattcaccaactgtcaggagcctctgtttgcgtggacttgtgcaggctcctgagagccacatgcttaaatacatccagcaagtgttaggagtaatattagcacttcttgaagaccccaacgagtctgttcaattaactgctgtccaatgcttgttaaatgtccttaatttgtcagaacaagatgctgttggtccaatcttaataaatctcttagtaaggctgcgaaatcttcaggtctcaatgaatacgaaaatgaggtccaatgcgtttgcagcttatggtgctttaagtgcatatggtgttggtttgcagcgcactgcttttattgagcagatacatgctacccttccccgtctgatcctccatcttcacgatgatgacctaagtgttcgtcttgcctgtcggaacacattccagctccttgcgacattgatggaagtagagggcttgtctgtgctcctcagcaagcagtattttgcttctgatcgccgttctgactatgaggacttcattagagacttaacaagacaactttgtcggttgtctcccgccagagtcgacagctacctagaatcggctatccaggcattcgatgcaccttggccagtcataagagcaaacgcagtttgtttggtgagttgcatgctatcctttttggatgatcagcgattcattgctccttatttctcccaggtatttgctacgttggttggtagaatgagccaatcgccagacgcaattgttcgagcatcagcatcgtctgcgctgggcattctgatcaagagatctaacatgctgaggtcactggtttcacgatatgatcgagcagattcatcacgcaattcccagagcggtgattctaacaccaagacaccatcagagtttcaagaacaggcagaaggaaatccgaatgatggcgcaagtggagcggcaataaaggggactgaagccgatcactgatgtaaatttactcgtatatacgtatagtgttctagctatgcatgcttgtgtatatgctgtacttccctcgcaaataggaacaggagagcaaatttatgctgccatgtcaatagatcttcagtacacctgtaaagcaaccactcacagttagatgattatttattgaatcaaatattatttatatattgaattgaattt

SEQ ID NO: 86033 - DNA, 2622 bp, Zea Mays
gtctactacttgaagaatctttatatagtttttacttgatttatgttccactttcaggcaacattaggtttttttgctttgccaacagagccctcaagcattgttgagagtctcgtaacaaacctaattattctgttaggtgccatcctgcttacaagtggtgaagatggtcgaagtcgagcagagcagttgctgcatattcttaggcagcttgatccatatgtatcatcatctctggaacaccaaagaagaagaggatgtgttgctgtacaggaggtgttaataaagtttcgcaatctttgttctggtggattcggtgcattgggctcctatccaactttcacaatgaataaacaaatcgatcgagggactaggagcttgtcaagtttgccatctgcatttgtgttgcctagtcgagattctttaagcttgggagagaggacaatggcataccttcctcgttgtgctgatacagacacggaagttaggaaagttgcaattcagatcattgcacttttcttcgacatttcattgtcacttccaaagcagaaggcatatcctaatgatattgatctggaatcctcgtatagtgctttgtcctcccttgaggagttagtctctattgtcagaagggaggcatctgttgatcaaactgaactatttcagagggttgtatcctcagtgtgtattctattatcaaaggatgagctggtcgtcttgctacactcttgtacgttggcaacatgtgataagataaaacagtcagcagatgcttcaattcaagctattatcatgtttattatcagaagaggcaaggagctacgtgaagctgatgtctcgaggacaactcaatctttgctctcatctgctatttctcttactgacacacactcacgccaagaggttctgaatgctatatcatgcctagcagaaaacaccaatcacgttgtggtctttgatgaggttctatctgtggctggaaaagatatctgtacaaaagacataccaaggattcgtggaggctgggccatacaggatgttttttatgcattttcccagcacaaggagcttgcacttctattcctggagtacactttatctatacttcacaaagaacctgtcataataaacagttctgagaagggggagagtacctctgagtcattggctgatgactgtattctacaggcaactatgtttgctctcaatgcatttatgagaggtggtgggaagattgggaaacaagcagttgagaaaagttacccttctgttctttcgggccttatactgaagctcggaagtcttaatggtgttgctgaattgggccgaaatgaacttctacgatcgttgttaattgcatttcagtcattttgcgaatgtgttggtgatgtagaaatgggaaagctattagctcgagatggggaacaaactgagaaggacaaatggatcgagcttgttcaggaaatcgcatgcagttcctcagtaaaacgaccaaaagatgttctgccaacttgtgttatcttgtgtaatgctctcaaccgaaatcagagggctgaaagggaggctgctgctgctgcactatcagaatttatccaccacattgaaaaagaacctacattgcttgaacaaatggttgaggaaatgtgtcaacatgtttctgatgattcaccaactgtcaggagcctctgtttgcgtggacttgtgcaggctcctgagagccacatgcttaaatacatccagcaagtgttaggagtaatattagcacttcttgaagaccccaacgagtctgttcaattaactgctgtccaatgcttgttaaatgtccttaatttgtcagaacaagatgctgttggtccaatcttaataaatctcttagtaaggctgcgaaatcttcaggtctcaatgaatacgaaaatgaggtccaatgcgtttgcagcttatggtgctttaagtgcatatggtgttggtttgcagcgcactgcttttattgagcagatacatgctacccttccccgtctgatcctccatcttcacgatgatgacctaagtgttcgtcttgcctgtcggaacacattccagctccttgcgacattgatggaagtagagggcttgtctgtgctcctcagcaagcagtattttgcttctgatcgccgttctgactatgaggacttcattagagacttaacaagacaactttgtcggttgtctcccgccagagtcgacagctacctagaatcggctatccaggcattcgatgcaccttggccagtcataagagcaaacgcagtttgtttggtgagttgcatgctatcctttttggatgatcagcgattcattgctccttatttctcccaggtatttgctacgttggttggtagaatgagccaatcgccagacgcaattgttcgagcatcagcatcgtctgcgctgggcattctgatcaagagatctaacatgctgaggtcactggtttcacgatatgatcgagcagattcatcacgcaattcccagagcggtgattctaacaccaagacaccatcagagtttcaagaacaggcagaaggaaatccgaatgatggcgcaagtggagcggcaataaaggggactgaagccgatcactga

SEQ ID NO: 86034 - DNA, 542 bp, Zea Mays
tgataagcccacgtcggcggcagggggggcggccgccaggcttgctatagctggtccatggcaccatacatgtaagcacgcacacaggcacacacacacacgcacgcaatgatctacgtatctagcagcagcttatcatgtcgtcatcatgcatgcatggccgacggaggtcgtcatcttatctgggagcgtgtgtgtcttggcaatgggaagctgcatgcgcctctcgggcgtcggcgcgtcggcgcctagctgtagggcggcgtgccatagagctgcctcctgccgctcacaccatgctgttgacgaggactgatggtggccatggcctctcggcgtcggtggcggcggcgccggcgccgagttttacctctctactaaggtagggcaacttgtatcctttggcaattgttctcatctatctgggtctgtctgttggctgcccggtgacggtatacggtgatgttctaatagtactcaattggtcttggatcggagttcatgctacggctcctctgttatatattacacggctgacggct

SEQ ID NO: 86035 - DNA, 228 bp, Zea Mays
ctcagcatacggaggcagccgccggtaagccgcgcgcgcgtgcagtcacccatccgtccgtccgtccgtccgtcgtccgccgtccaccgccagcgcgcgctcgccaccgcacccagctagcagcacaagaaaagtctggtggcgtcggcggcggcggcggcggccggcttgccacagtccaatccttgtaccggaccaaaaagcagttgaagggcgcgagcgagcaag

SEQ ID NO: 86036 - DNA, 2561 bp, Zea Mays
gaagctccctcacgaatcgaatcacatgaatcaccacgcgggagaggaaaaagtgctaggtgtacataaacctggccattagtttcgcaacgttaatggtaacggtaatggttcacactcgataaccaacggtaacaagattgaatataccaatatcaatttctagtatgatatccaattacggttagacttaaataaacaagatttaatcttatcggttaaatatgtgaaccaaacaacacctaaaacttttatactccagtactagacagttgcaacctgcatatatttattcgaaaagaaaacatgattcagcaaacagacaaattctctgtgacataagaaaaaaaccgtccaacttttttaccatccagaaaacgggagctctaccagtgtgccgggtgcgcctggtaaattacgggcgtccatgcatggagccccacccccacctccatgtaggacccacgcccaagtgaccccaccacatacccgtgaatgaaaggaagactgaaaagcagagttcctgccatgttccccgtccccacacgctcacgcggctcccatggtgcacacccacggccacgggccatagcgacaccccccgcggcccgcctatttagccgcccccacccacatcgcggcggggtctccatgcctccagtgtccagtccagagtccaggctccaggactaccaccactccgtctcgtctcgtcctcacaccccactccaccaccacctctgccttgcaaagctttccaccgatccgccgcctcgtccgcgcgctcgcaggcagcagtgtggactacccgccccatactccatcccctactcgaaggatacaccgacctcgagttattaagttgggcgaggagaggtggttcattccagcagggatccttctcgtgagcccagtcgatctgaccgtccttggtatctggggggggttgttctgtactctctctttaatttggacctccaaagtagtgctgggatgtatcgcctttgggattttctgggtgatggccgtcttccccaccgtcccgttcatgcctgttgggcggacggctgggtccctccttggtgctatgctaatggtcctgttccgcgtcatctccccggaggacgcgtacgccgcgattgacctcccgatcatcggcctgctcttcgggacaatggtcgtcagcatcttccttgagagggctgacatgtttaagtacctcgggaacctgctctcgtggaagagcagaggcagcaaggacctgctcttccgagtctgcatcgtgtccgcgtttgccagcgcgcttttcaccaatgacacatgctgtgttgtcctcaccgagttcatcctcaaggttgctaggcaaaacaacctgccaccacagcctttccttctggcccttgccactagttcgaacatcggctctgctgccacgccgatcggcaaccctcagaaccttgtcatagctgtcgagagtgggatctcatttggccagttcttgctgggagttttcccagctatgatcgttggggttctcacaaacgctgctatcctccttttgtacttctggaaatacttgtcggtggagaaggatcaggagggtgggcagcccacaggaccagaggtggttgccgacgatgaggttacttcccatcggttcacaccggctagaatgtcacatgtttcttctctgaatccagatgacatggattgcgtaagcgaaccgatcatcaggagcaacagtgtcagtactactgggaatgagaacctgagaagcagaagcatcaattctgaggctgacattcagcttgcgatcaagtctctgcgggcatcaagcatgtcgcatgagatggtagaggtctcgacggttcctgatcggagagatgaaggtgcatcctcaaggaagttcacaaggactgctagccagcaaaggagcgtgataatagaggatttagcaccctccccagagattaatggggaaaaggagaaagaaactgaagttgcagagaagagatggaaagtacttgtgtggaagactgctgtttatcttatcactctcggtatgctcattgcacttctaatgggactgaacatgtcctggactgcaatcactgcagctcttgttcttctggcactcgattttacggacgcacaagcttgtcttgagaaggtgtcatattcactgctgatctttttctgcgggatgtttatcactgttgatggcttcaacaaaacgggcataccgaacacactatgggagttagtggaaccatattcacgaatcgatagtgcgaaaggtgttgcacttcttgccgtggtgattcttatcctttcaaacgtggcctctaatgttcctacaggtaatttttcttacgcatatgaccatgtataaccatttaatactttatatacatatatgctcttctgtttgcaaaattcataacacatggtatttcgagaggttgtgtgctcaatgccgccatctggcctctgttctttattcatgacaagcatgattaaatgaaggaaatggaagcattacattatcttgtgtacatagg

SEQ ID NO: 86037 - DNA, 3130 bp, Zea Mays
gaagctccctcacgaatcgaatcacatgaatcaccacgcgggagaggaaaaagtgctaggtgtacataaacctggccattagtttcgcaacgttaatggtaacggtaatggttcacactcgataaccaacggtaacaagattgaatataccaatatcaatttctagtatgatatccaattacggttagacttaaataaacaagatttaatcttatcggttaaatatgtgaaccaaacaacacctaaaacttttatactccagtactagacagttgcaacctgcatatatttattcgaaaagaaaacatgattcagcaaacagacaaattctctgtgacataagaaaaaaaccgtccaacttttttaccatccagaaaacgggagctctaccagtgtgccgggtgcgcctggtaaattacgggcgtccatgcatggagccccacccccacctccatgtaggacccacgcccaagtgaccccaccacatacccgtgaatgaaaggaagactgaaaagcagagttcctgccatgttccccgtccccacacgctcacgcggctcccatggtgcacacccacggccacgggccatagcgacaccccccgcggcccgcctatttagccgcccccacccacatcgcggcggggtctccatgcctccagtgtccagtccagagtccaggctccaggactaccaccactccgtctcgtctcgtcctcacaccccactccaccaccacctctgccttgcaaagctttccaccgatccgccgcctcgtccgcgcgctcgcaggcagcagtgtggactacccgccccatactccatcccctactcgaaggatacaccgacctcgagttattaagttgggcgaggagaggtggttcattccagcagggatccttctcgtgagcccagtcgatctgaccgtccttggtatctggggggggttgttctgtactctctctttaatttgtgagtcgtgacaggttcttgaagtgcaattgttaagagttttagttgtagaggaagagaagggtttgctaatatggcgttggcagggacctccaaagtagtgctgggatgtatcgcctttgggattttctgggtgatggccgtcttccccaccgtcccgttcatgcctgttgggcggacggctgggtccctccttggtgctatgctaatggtcctgttccgcgtcatctccccggaggacgcgtacgccgcgattgacctcccgatcatcggcctgctcttcgggacaatggtcgtcagcatcttccttgagagggctgacatgtttaagtacctcgggaacctgctctcgtggaagagcagaggcagcaaggacctgctcttccgagtctgcatcgtgtccgcgtttgccagcgcgcttttcaccaatgacacatgctgtgttgtcctcaccgagttcatcctcaaggttgctaggcaaaacaacctgccaccacagcctttccttctggcccttgccactagttcgaacatcggctctgctgccacgccgatcggcaaccctcagaaccttgtcatagctgtcgagagtgggatctcatttggccagttcttgctgggagttttcccagctatgatcgttggggttctcacaaacgctgctatcctccttttgtacttctggaaatacttgtcggtggagaaggatcaggagggtgggcagcccacaggaccagaggtggttgccgacgatgaggttacttcccatcggttcacaccggctagaatgtcacatgtttcttctctgaatccagatgacatggattgcgtaagcgaaccgatcatcaggagcaacagtgtcagtactactgggaatgagaacctgagaagcagaagcatcaattctgaggctgacattcagcttgcgatcaagtctctgcgggcatcaagcatgtcgcatgagatggtagaggtctcgacggttcctgatcggagagatgaaggtgcatcctcaaggaagttcacaaggactgctagccagcaaaggagcgtgataatagaggatttagcaccctccccagagattaatggggaaaaggagaaagaaactgaagttgcagagaagagatggaaagtacttgtgtggaagactgctgtttatcttatcactctcggtatgctcattgcacttctaatgggactgaacatgtcctggactgcaatcactgcagctcttgttcttctggcactcgattttacggacgcacaagcttgtcttgagaaggtgtcatattcactgctgatctttttctgcgggatgtttatcactgttgatggcttcaacaaaacgggcataccgaacacactatgggagttagtggaaccatattcacgaatcgatagtgcgaaaggtgttgcacttcttgccgtggtgattcttatcctttcaaacgtggcctctaatgttcctacagtcctattgctcggtacaagagtggctgcatcagcggcttcgatttctcatggttcagagaggaaagcctggctcatccttgcatgggtcagcaccgtggctgggaacctcaccctcctaggctctgcggcgaatctgattgtctgcgagcaggccaggcgggcccagttcttcggctacaacctcaccttctggagccacctccgattcggggtcccgtcgaccatcatcgtcacggcgattggtttgctcatcgtcatcagttactgaaacagctgaaggcagaagagcgtagtgtaagagaagcagaatggataaaaatccttccaataagaagtacatgtaaattaggcttgccctataactcaagtgtgtatcggtacgttatgtctccgtctgtgctcttgctcgtgagcaagcagcacatggctgaccgtgtagcttgcatttccattgcataataggcttatgaagaatgctttggtaatatgattttacagtctgacaaggattgtgaagcagaggcagtgtaccatcaagataatacttctggaagcatataaaaaaatttcgtatatttggatttcaaatccagtctgcttcagactggaaattcatattatcttctggaatcgtgctttattgtcagaaacatgggctaaaattggaaagtccgtcatttatt

SEQ ID NO: 86038 - DNA, 2349 bp, Zea Mays
gaagctccctcacgaatcgaatcacatgaatcaccacgcgggagaggaaaaagtgctaggtgtacataaacctggccattagtttcgcaacgttaatggtaacggtaatggttcacactcgataaccaacggtaacaagattgaatataccaatatcaatttctagtatgatatccaattacggttagacttaaataaacaagatttaatcttatcggttaaatatgtgaaccaaacaacacctaaaacttttatactccagtactagacagttgcaacctgcatatatttattcgaaaagaaaacatgattcagcaaacagacaaattctctgtgacataagaaaaaaaccgtccaacttttttaccatccagaaaacgggagctctaccagtgtgccgggtgcgcctggtaaattacgggcgtccatgcatggagccccacccccacctccatgtaggacccacgcccaagtgaccccaccacatacccgtgaatgaaaggaagactgaaaagcagagttcctgccatgttccccgtccccacacgctcacgcggctcccatggtgcacacccacggccacgggccatagcgacaccccccgcggcccgcctatttagccgcccccacccacatcgcggcggggtctccatgcctccagtgtccagtccagagtccaggctccaggactaccaccactccgtctcgtctcgtcctcacaccccactccaccaccacctctgccttgcaaagctttccaccgatccgccgcctcgtccgcgcgctcgcaggcagcagtgtggactacccgccccatactccatcccctactcgaagatgacatggattgcgtaagcgaaccgatcatcaggagcaacagtgtcagtactactgggaatgagaacctgagaagcagaagcatcaattctgaggctgacattcagcttgcgatcaagtctctgcgggcatcaagcatgtcgcatgagatggtagaggtctcgacggttcctgatcggagagatgaaggtgcatcctcaaggaagttcacaaggactgctagccagcaaaggagcgtgataatagaggatttagcaccctccccagagattaatggggaaaaggagaaagaaactgaagttgcagagaagagatggaaagtacttgtgtggaagactgctgtttatcttatcactctcggtatgctcattgcacttctaatgggactgaacatgtcctggactgcaatcactgcagctcttgttcttctggcactcgattttacggacgcacaagcttgtcttgagaaggtgtcatattcactgctgatctttttctgcgggatgtttatcactgttgatggcttcaacaaaacgggcataccgaacacactatgggagttagtggaaccatattcacgaatcgatagtgcgaaaggtgttgcacttcttgccgtggtgattcttatcctttcaaacgtggcctctaatgttcctacagtcctattgctcggtacaagagtggctgcatcagcggcttcgatttctcatggttcagagaggaaagcctggctcatccttgcatgggtcagcaccgtggctgggaacctcaccctcctaggctctgcggcgaatctgattgtctgcgagcaggccaggcgggcccagttcttcggctacaacctcaccttctggagccacctccgattcggggtcccgtcgaccatcatcgtcacggcgattggtttgctcatcgtcatcagttactgaaacagctgaaggcagaagagcgtagtgtaagagaagcagaatggataaaaatccttccaataagaagtacatgtaaattaggcttgccctataactcaagtgtgtatcggtacgttatgtctccgtctgtgctcttgctcgtgagcaagcagcacatggctgaccgtgtagcttgcatttccattgcataataggcttatgaagaatgctttggtaatatgattttacagtctgacaaggattgtgaagcagaggcagtgtaccatcaagataatacttctggaagcatataaaaaaatttcgtatatttggatttcaaatccagtctgcttcagactggaaattcatattatcttctggaatcgtgctttattgtcagaaacatgggctaaaattggaaagtccgtcatttattgggcttgcaatgggacaaccttttgggtctgttatatatcactataaccagtgacaactttggttcgcaaactcaaaccagtttctaatctttattttatgatttttatataaagttcttaataggtcctcttgctattttcaatctaaattctaaatactaaaaaaa

SEQ ID NO: 86039 - DNA, 101 bp, Zea Mays
ctgctgcaaggaacagcaagaactcttccgtggacgagctaagctattacagtgcatcgcgggcgagatagcaccaagtagtcaagtaccaacccaagtcc

SEQ ID NO: 86040 - DNA, 2337 bp, Zea Mays
attattaaatgtatcgttgatattatttcttattaagttaaaaatataaatataaatattatagagacatttagaggagtttctgattgaaaaaagtaaaacaaaaataacaaagcgcatgctgcaggctgggcctactcgcagaactcttcctgacccgaaccagtccaacttgaggcaccgaacacagagcgcgaaactccacggctccgagtctccgaccattctcgcccccggctctttccttcttcccgtgtcatcgtcaaaccgccgctttccaattccaggccatcaagacgtagcagctccccttgcgtctgcgcacgccaccgaaggatcctcgccgcgcgtgcagtgcgatccgaggggaggggtccaaggccatgatgaagagcgtcagcggcaccggctcggccgggagccggagcgatccgggcggcagcggcgagctgtcccgcttctccgtcgccaccacggcgtcgtccgcctcgcagccttccgcgaacggtggcgcgcgcgggatctccttcctcgacgccttccggtcctgcttcgtgcccccggaggcgcgctcgccggagaactccatgtccgacgaatcccacccttcccaccaactctcgcagtctttgagctcacaaggttctaacagtgggagcgtgtttgggagcaagcgatcgattaaaggaatgtatagtcccatgcacaagagttctttagatagggagatccctggcagcacaaaattctccttgccgcagatccagaaagcaacaaagaacttctcgccgaacttcaagattgggcagggtggttctgggactgtatacaagggtcagcttgctgatggtactcttgtcgctgtcaaacgtgccaagaagaatgtttatgacaagcatatgggtcgtgagttctggaacgagattgagacattgcaacgcattgagcacctgaatttggttaggtttcatgggtacctggagtttggtggcgagcagttgattattgtggagtatgttcccaatgggaatcttcgagagcacctcgactgtataaatggtaaaatattggaattctcactgagattggaaattgcaattgatgtggctcatgctattacatatcttcatacctattcagatcatccagtcatccacagagacatcaaatcctcaaacattcttctaatgaacaattgtcgagccaaggttgctgactttggattcgccaaactggctccaactgattctagtcatatatctactcaagtcaaaggaacagcaggctatctcgatccagaatatctcagaacataccagctcaatgagaagagtgatgtctactcctttggagtccttctggtggagttggttactgggaggcgccctatagagccaaaaaaggcaatcattgagcgtgttaccacaaaatgggcaatggaaaaatttgtggagggcaatgctatccaaacactagatccgaatctggaagcgaccgatgcgatcaatctagcggtcgagaagctgtatgagctggctctgcaatgcttagccccaactaagaggaaccgaccgagcatgaagcggtgcgcagagattctgtggagcatccgtaaagattacagggagttggttgtacccacctctgccatgaactgaagcaggtcgtctggagcagtcaagtgaacaaaaagatgtatcattccagtttgcctctcttgattcgcttcaaagattggtggttgaaatcatccgattgctgggattctttcagttaccgcaagtggtcgtgaacaggactgatggccttcctagatgctgtgtttgtgctagaaaccagaaaagtccctgtgtgaaagtgttgctgagtaaacatgtacgagtatatatcagatatctaatggtgtgtatatcttgtaggttctcttatacaggtaagtgcatcacgcatgaagaaatctagttgtttccattgcatctttttttttgttgttgttgtctatgatgaacaatattcagcgtatgattagcaagcaacactcaggagctgtacttgtgctcttcctttcctggcgtccaatctgtgccttatcccggcacgggggtgcagaggtcactgctgtagtaatctggacggagagccagactggagctgccttcttggcaggcagctccgtcacctctttatcctgtagcaaaatcgtccgtgcattgacgtgactattttatgtccaaatatggttcttttaaattgtcactcgatgtttttatgcttcggtgtcacgtttttgacaactaaagaaggaatatactcggccgaaaaaggtccgacttcctg

SEQ ID NO: 86041 - DNA, 106 bp, Zea Mays
ctcaacattgcattcacttttacaatctagtgcaaatctaaacagtgcattgaattattacaataatatctatttaaggaagtaagattcgccattaaaattaaat

SEQ ID NO: 86042 - DNA, 1066 bp, Zea Mays
tgtggctcgcaacttgcagtaggtgacaggtgttaacaggagctggctgagcttctcttgcttctgcaagtagtagctgtagccgccctgtaggcagagagaggagagacgacgtacgtgagggagcgagcgagcgacgacagcatcaggcaggcgttgacggccatggcttcctccggcagcggtggcggctcgccggggtccccgtgtggcgcctgcaagttcctgcggcgcaagtgcgcggcggagtgcgtgttcgctccccacttctgcgccgaggacggggcggcgcagttcgcggccatccacaaggtgttcggcgccagcaacgcggccaagctgctgcagcaggtggcccccgccgaccggagcgaggcggcggccaccgtcacctacgaggcgcaggccaggctgcgcgaccccatctacggctgcgtcgcccacatcttcgcgctgcagcaacaggtaccctacatatacgctcttcttctataccttgtgcatgcctaactagagactaggatcggatcggaggacggaataccttattacctccacacccaacgcgttccgcacgcgcgggcgcatgcacgtgcatgccctccccccgcgtgtgtgtgcatgggattaccgatttaccgctgacacaaacgcatgcacatgatgcatatatatgtgctgtgctgtgcaggtggcgagcttgcagatgcaggtgctgcaggcgaaggcgcaggtggcgcagacgatggcggcggccgggccgcaggggggcagcagccctctcctgcagcggtggccgctggagcctgagtcgctgtcgacgcagagctccgggtgctacagcgacatgtactgcggcttcggcgaccaggaggaaggcagctacacgagatgaataatgaatggatcattcgcgcgcgcgcgcgcacgcatcgacacagatactttcttctattagcgccaagagacaacaacaaccgagggcctcaactttcttgttggtttgcagtgcgttttgttcagttcagcagctagctctccggtttggggaggagcttaatttcga

SEQ ID NO: 86043 - DNA, 962 bp, Zea Mays
gcaacttgcagtaggtgacaggtgttaacaggagctggctgagcttctcttgcttctgcaagtagtagctgtagccgccctgtaggcagagagaggagagacgacgtacgtgagggagcgagcgagcgacgacagcatcaggcaggcgttgacggccatggcttcctccggcagcggtggcggctcgccggggtccccgtgtggcgcctgcaagttcctgcggcgcaagtgcgcggcggagtgcgtgttcgctccccacttctgcgccgaggacggggcggcgcagttcgcggccatccacaaggtgttcggcgccagcaacgcggccaagctgctgcagcaggtggcccccgccgaccggagcgaggcggcggccaccgtcacctacgaggcgcaggccaggctgcgcgaccccatctacggctgcgtcgcccacatcttcgcgctgcagcaacaggtggcgagcttgcagatgcaggtgctgcaggcgaaggcgcaggtggcgcagacgatggcggcggccgggccgcaggggggcagcagccctctcctgcagcggtggccgctggagcctgagtcgctgtcgacgcagagctccgggtgctacagcgacatgtactgcggcttcggcgaccaggaggaaggcagctacacgagatgaataatgaatggatcattcgcgcgcgcgcgcgcacgcatcgacacagatactttcttctattagcgccaagagacaacaacaaccgagggcctcaactttcttgttggtttgcagtgcgttttgttcagttcagcagctagctctccggtttggggaggagcttaatttcgatgagatttcgtgcgatccataaacttgtatttcttgccggttcgagctgtaaaatggaagtgcagctcatcatcatgtgtgtggttattaaacggaggcacaaatcgaggataatttcatattccctaaa

SEQ ID NO: 86044 - DNA, 271 bp, Zea Mays
tttttttatttttttcatttattttcttatcttctttcctattttcagatttcaaattcaatttcaagtgaggttttgaaatccagaccctatttgaatgcacaaacaaacaccaatatgaaatgattatttcacatttatttactccttatttactttgttcaaataagtatttgtgtgtataaaatttaataagcatggagttcacatagttatatataccccataggagtaatttatatagaataactcactatcctatttattatag

SEQ ID NO: 86045 - DNA, 2134 bp, Zea Mays
ttcactgacaaccgctaaaaccctctatctcctgccaccgcggcggccccttctcttccctgtaataaacccccggcgagcgatgcggcggctggcgaaatccctcctcctcgcctccctctccaggaccctccgccaccgcccccagctcccgctgcttcacccttggcctccccagccccgtcgcccggagccccgcctcctccccttctccactcaaaccctagccccgggccctgctcccccgcctgcgcttgttgcggcgtcgacgggcgagcccacaggcctcgcgcttctagagtccgcggagctgcacgagtccgagggggaccaccaggaggccctcggcctcgccctcaaggcgctcgcgccgctgcaggcgtcccacggcgggtggtcgctccccgtcgcgcgcgcgctccgtctcgccggcgccgcggccacccgcgccggcagcctcagcgacgggctcgagtccctcggcgctgccgcggatatcgtcgactacctggcacccgcgcggcgcaagggggtgcctgcggaggtggcggtggtcggcgctgccgtgtacgagcagctggcgcgcgccaaaatggccatcgggcgccggtgggacgcggtgggcgacctccagcgtgcactggacctgaagactctgttcctggaggccgggagtgctgagcttgggaacgcctacagggacgtcgccgaggcctatgcgggtgtgctggacttcgacaaggcgctgccattgtgttctaaggcattggggattgcggagagacggtttggtgaggactcggcagaagtggctaagctacggcggcttctcatgtctgtctatactggtttgggtcgccatgaggaggctctggctcaaattgagcttgctaaggtggtatatgagcgattgggattgaatgttgaactttctcaggctgaaattgatggggctaatatccgtatcttgttggggagatcggaggaggcgctgaataacattaagagggtaatgcagcgggcagacaaggagagcgaggagcgtgcactagcatatgtcacaatggcaaagatattgatgtccgaggatacggttttggactcaaagcggtgcttggagatcgctcaggggatcatagatgcaaaggattccatcgaccctggtcggtttgctgaggcatatgctgagatatcaatgttgtatgagtcgttggcaaattttgaaacgtcttcgggctcgtttgaaatggcttcgaacttgatgaagaaaacactggcaattcttgagagcgccaaggagatgcatcacatcgaaggcagcatctcagcaaggctagggtggctcctcctgtatattaaaaatgttgatgagtctgtccaatatctggagagagcggttgataaattgaagaattgctttggaccacgacactttgggttaggttttgcttataggaatctggggcaggcctatcttgaaatgaaccaacatcaatcagctgtggagttcttcaaacttgcgcttgatattattgaagctacatttggaccgctacatgatgataccattgacacaaaacagtgcattgcaaatgcatacggactgatgaaaagctacaaacttgctatggagtttcaagaacaagtcatggatgcctacagtaggtgtggccatggtgccttggatgatttcaaggaagctgaaaggcttttagagcagatcaagatgaaggctcaaggattgcgtcatgcagtatttcctgcaaattcattgcctgattcagctctagctctagctcaacgcaacaaagacgattagttcttctgtatcagtgccaacttagatgagttaatggtaaactgttattttacaagtgatccctcaagttttttatttagggtccttttcattcttattcttatactccctccgtttctttttataagtcgctggatagtgcaattttgcactatccagcgactaataaaaagaaacggagggagtatattttatgttaccctacaatagaaatgacgagttgaccatgccagaatttctatttgagaaacaaataggctatgcttatgatgtttgtactttacaatacagaaaatcagaatattggcagttgaa

SEQ ID NO: 86046 - DNA, 393 bp, Zea Mays
atggaggacgacaagaaggagggcaagtaccgcggcgtgcggaagcggccgtggggcaagttcgccgcggagatccgggacccggagcgcggcggctcccgcgtctggctcggcaccttcgacaccgccgaggaggccgccagggcctacgaccgcgccgcattcgccatgaagggcgccacggccgtgctcaacttccccgccagcggaggatcgtcagctggcgcggctcccggcggccggaccagcggcggctcctcctcgtccaccacgtcggctccggccagcagggggagggcccgtgttcccgactcggagaaggtggagctggagtgcctcgacgacagggtcttggaggagctgctcgcggaggacaagtacaacaagaactaa

SEQ ID NO: 86047 - DNA, 83 bp, Zea Mays
tgtcgccgctcagatgcctttcgaaaaggtttgaacggtgaagaacatttatgtcgttgcaactacctggcagaccaaaatat

SEQ ID NO: 86048 - DNA, 1305 bp, Zea Mays
agccaggcacggctccagcaacgacacccgagtacggagtacccgacccgcctgcctgcctcctgcctgcctgtggtcgcctgtatcacaagctcccaaaaccgccgcgcacgctgccaccaccggtacccaacgaacatggcggcggcgccgtcctccctcgcctcctcgtcgcatatcccccgccgcgccacagccacggccccagcacagtcgcactcgcctccgttgccgcagcagctccgccccgccaggtccttcaaacgcggggcgctcgcgcagcacgtccggtacagctttgccggcagggaggcatcgaggcggcgcacaccaggtgcttgcttcgtggtctcatccagccagccaggccttgctgccatcgatgtgccggcagcgactattcctgatgccacgacgacaagcgtcactgagcggacttcggtttcatctcttttagaggttgtatcggaggacttgctcagccttaacaacaatctgaaatcgcttgttggtgcagaaaatccagttttggtttctgcagctgaacaaatttttggtgctggtggaaaaagattaaggccagcattggttttcctggtgtctagagcaactgctgaattagctggtttgtcggagttaactgcagaacatcgacggttggcagagataatcgagatgattcacactgcgagtttaatacatgatgatgtcatagatgatagtgggatgagaagaggtacatgatgatataatgctattatctaatatgccaaaagtactatcaataaaaccatgtcattttgggaatagatgaatgttatattcttcttagaaacatttctagctatagaaacatggattactacgaaagggcctctatctgagttggttatacggtccgagtagtacttctcatgtcctaagtttacccctttgtaggagtgaatttcagactgggggttaaaaaatcccctcgtctgagaaatattctcttaatacaatactaggggttgtcttacccctgtaggtcgagtttttagaaacatggattatttgctgcactctttttcaagtgctctttagggaacatttgattattgtaataacataatataagtagcacagttccgttttcgttttccttcttttctgaaaattggccagtaacttttaaattgattgagatagagatgagcattcacttcggttctaagtgttgggcctaaagcaggcagaggttaaccaggcatcccaccatcacaataggatattgcttgttttgaatgtaaggccactctcgttttt

SEQ ID NO: 86049 - DNA, 1566 bp, Zea Mays
agccaggcacggctccagcaacgacacccgagtacggagtacccgacccgcctgcctgcctcctgcctgcctgtggtcgcctgtatcacaagctcccaaaaccgccgcgcacgctgccaccaccggtacccaacgaacatggcggcggcgccgtcctccctcgcctcctcgtcgcatatcccccgccgcgccacagccacggccccagcacagtcgcactcgcctccgttgccgcagcagctccgccccgccaggtccttcaaacgcggggcgctcgcgcagcacgtccggtacagctttgccggcagggaggcatcgaggcggcgcacaccaggtgcttgcttcgtggtctcatccagccagccaggccttgctgccatcgatgtgccggcagcgactattcctgatgccacgacgacaagcgtcactgagcggacttcggtttcatctcttttagaggttgtatcggaggacttgctcagccttaacaacaatctgaaatcgcttgttggtgcagaaaatccagttttggtttctgcagctgaacaaatttttggtgctggtggaaaaagattaaggccagcattggttttcctggtgtctagagcaactgctgaattagctggtttgtcggagttaactgcagaacatcgacggttggcagagataatcgagatgattcacactgcgagtttaatacatgatgatgtcatagatgatagtgggatgagaagagggaaggaaactattcaccaactatatggtacacgtgtggctgtacttgctggtgattttatgtttgcacaatcttcttggtttcttgcaaacctagaaaatattgaagttataaaattgatcagtcaggtcatcaaggactttgcaagcggcgagataaaacaagcttccactctttttgattgtgacatcacacttgacgactaccttctcaagagctactacaagactgcatctttgattgcagccagcacaaaatcagcttccatattcagtggcgtcagcaccactatttgtgaaaaaatgtatgcatatggcaggaatcttggtctatccttccaggttgtcgatgacatcctggatttcacccagtcagccgaacaacttggcaaaccagcagcaagtgacttggcaaagggaaacctgactgctccagtcatcttcgctttgcaaagtgaaccagagctaagggagatcattgattctgagttcagtgacacggattcgttagctactgcaatagagctcgttcatagaagtggtgggatacggagggcacatgagcttgcaagagagaagggtgacttggcaatccaaaatctgcagtgccttccaagaagtgacttcagaagtgcccttgagaagatggtggaatacaatcttgagaggattgagtagtggattttacttgaatgctccatcagaatcataagaaaccctaggacttgaccgcagccccttgcgcctacatgtatccgagcattctacttggcagttcttgtaaataatagaaccatacagtaacttagcattcttttttgttttgcaatc

SEQ ID NO: 86050 - DNA, 1904 bp, Zea Mays
agccaggcacggctccagcaacgacacccgagtacggagtacccgacccgcctgcctgcctcctgcctgcctgtggtcgcctgtatcacaagctcccaaaaccgccgcgcacgctgccaccaccggtacccaacgaacatggcggcggcgccgtcctccctcgcctcctcgtcgcatatcccccgccgcgccacagccacggccccagcacagtcgcactcgcctccgttgccgcagcagctccgccccgccaggtccttcaaacgcggggcgctcgcgcagcacgtccggtacagctttgccggcagggaggcatcgaggcggcgcacaccaggtgcttgcttcgtggtctcatccagccagccaggccttgctgccatcgatgtgccggcagcgactattcctgatgccacgacgacaagcgtcactgagcggacttcggtttcatctcttttagaggttgtatcggaggacttgctcagccttaacaacaatctgaaatcgcttgttggtgcagaaaatccagttttggtttctgcagctgaacaaatttttggtgctggtggaaaaagattaaggccagcattggttttcctggtgtctagagcaactgctgaattagctggtttgtcggagttaactgcagaacatcgacggttggcagagataatcgagatgattcacactgcgagtttaatacatgatgatgtcatagatgatagtgggatgagaagagggaaggaaactattcaccaactatatggtacacgtgtggctgtacttgctggtgattttatgtttgcacaatcttcttggtttcttgcaaacctagaaaatattgaagttataaaattgatcagtcaggtcatcaaggactttgcaagcggcgagataaaacaagcttccactctttttgattgtgacatcacacttgacgactaccttctcaagagctactacaagactgcatctttgattgcagccagcacaaaatcagcttccatattcagtggcgtcagcaccactatttgtgaaaaaatgtatgcatatggcaggaatcttggtctatccttccaggttgtcgatgacatcctggatttcacccagtcagccgaacaacttggcaaaccagcagcaagtgacttggcaaagggaaacctgactgctccagtcatcttcgctttgcaaagtgaaccagagctaagggagatcattgattctgagttcagtgacacggattcgttagctactgcaatagagctcgttcatagaagtggtgggatacggagggcacatgagcttgcaagagagaagggtgacttggcaatccaaaatctgcagtgccttccaagaagtgacttcagaagtgcccttgagaagatggtggaatacaatcttgagaggattgagtagtggattttacttgaatgctccatcaggtacatatctccatttggggtttggggtagttctcatatagatctttatattcagcccctttgggaagatacatttcactgaaaaatcagatgaatcacactatttcatacaaattctggggatagcctttgagcaggccactactatcaagttgattttgtaacagcttgtgcagaatcataagaaaccctaggacttgaccgcagccccttgcgcctacatgtatccgagcattctacttggcagttcttgtaaataatagaaccatacagtaacttagcattcttttttgttttgcaatctgagcatgcttacaagcaacaaagtgtgtgctatatttgtacggatctacgtgcacctaacatcatgcacttgtacaattgctttgcactattatgtactatttccgatttaacagtaatacggatttaacagtaataataccgttcattttctacataaga

SEQ ID NO: 86051 - DNA, 1891 bp, Zea Mays
agccaggcacggctccagcaacgacacccgagtacggagtacccgacccgcctgcctgcctcctgcctgcctgtggtcgcctgtatcacaagctcccaaaaccgccgcgcacgctgccaccaccggtacccaacgaacatggcggcggcgccgtcctccctcgcctcctcgtcgcatatcccccgccgcgccacagccacggccccagcacagtcgcactcgcctccgttgccgcagcagctccgccccgccaggtccttcaaacgcggggcgctcgcgcagcacgtccggtacagctttgccggcagggaggcatcgaggcggcgcacaccaggtgcttgcttcgtggtctcatccagccagccaggccttgctgccatcgatgtgccggcagcgactattcctgatgccacgacgacaagcgtcactgagcggacttcggtttcatctcttttagaggttgtatcggaggacttgctcagccttaacaacaatctgaaatcgaaaatccagttttggtttctgcagctgaacaaatttttggtgctggtggaaaaagattaaggccagcattggttttcctggtgtctagagcaactgctgaattagctggtttgtcggagttaactgcagaacatcgacggttggcagagataatcgagatgattcacactgcgagtttaatacatgatgatgtcatagatgatagtgggatgagaagagggaaggaaactattcaccaactatatggtacacgtgtggctgtacttgctggtgattttatgtttgcacaatcttcttggtttcttgcaaacctagaaaatattgaagttataaaattgatcagtcaggtcatcaaggactttgcaagcggcgagataaaacaagcttccactctttttgattgtgacatcacacttgacgactaccttctcaagagctactacaagactgcatctttgattgcagccagcacaaaatcagcttccatattcagtggcgtcagcaccactatttgtgaaaaaatgtatgcatatggcaggaatcttggtctatccttccaggttgtcgatgacatcctggatttcacccagtcagccgaacaacttggcaaaccagcagcaagtgacttggcaaagggaaacctgactgctccagtcatcttcgctttgcaaagtgaaccagagctaagggagatcattgattctgagttcagtgacacggattcgttagctactgcaatagagctcgttcatagaagtggtgggatacggagggcacatgagcttgcaagagagaagggtgacttggcaatccaaaatctgcagtgccttccaagaagtgacttcagaagtgcccttgagaagatggtggaatacaatcttgagaggattgagtagtggattttacttgaatgctccatcaggtacatatctccatttggggtttggggtagttctcatatagatctttatattcagcccctttgggaagatacatttcactgaaaaatcagatgaatcacactatttcatacaaattctggggatagcctttgagcaggccactactatcaagttgattttgtaacagcttgtgcagaatcataagaaaccctaggacttgaccgcagccccttgcgcctacatgtatccgagcattctacttggcagttcttgtaaataatagaaccatacagtaacttagcattcttttttgttttgcaatctgagcatgcttacaagcaacaaagtgtgtgctatatttgtacggatctacgtgcacctaacatcatgcacttgtacaattgctttgcactattatgtactatttccgatttaacagtaatacggatttaacagtaataataccgttcattttctacataaga

SEQ ID NO: 86052 - DNA, 1850 bp, Zea Mays
cgacacccgagtacggagtacccgacccgcctgcctgcctcctgcctgcctgtggtcgcctgtatcacaagctcccaaaaccgccgcgcacgctgccaccaccggtacccaacgaacatggcggcggcgccgtcctccctcgcctcctcgtcgcatatcccccgccgcgccacagccacggccccagcacagtcgcactcgcctccgttgccgcagcagctccgccccgccaggtccttcaaacgcggggcgctcgcgcagcacgtccggtacagctttgccggcagggaggcatcgaggcggcgcacaccaggccttgctgccatcgatgtgccggcagcgactattcctgatgccacgacgacaagcgtcactgagcggacttcggtttcatctcttttagaggttgtatcggaggacttgctcagccttaacaacaatctgaaatcgcttgttggtgcagaaaatccagttttggtttctgcagctgaacaaatttttggtgctggtggaaaaagattaaggccagcattggttttcctggtgtctagagcaactgctgaattagctggtttgtcggagttaactgcagaacatcgacggttggcagagataatcgagatgattcacactgcgagtttaatacatgatgatgtcatagatgatagtgggatgagaagagggaaggaaactattcaccaactatatggtacacgtgtggctgtacttgctggtgattttatgtttgcacaatcttcttggtttcttgcaaacctagaaaatattgaagttataaaattgatcagtcaggtcatcaaggactttgcaagcggcgagataaaacaagcttccactctttttgattgtgacatcacacttgacgactaccttctcaagagctactacaagactgcatctttgattgcagccagcacaaaatcagcttccatattcagtggcgtcagcaccactatttgtgaaaaaatgtatgcatatggcaggaatcttggtctatccttccaggttgtcgatgacatcctggatttcacccagtcagccgaacaacttggcaaaccagcagcaagtgacttggcaaagggaaacctgactgctccagtcatcttcgctttgcaaagtgaaccagagctaagggagatcattgattctgagttcagtgacacggattcgttagctactgcaatagagctcgttcatagaagtggtgggatacggagggcacatgagcttgcaagagagaagggtgacttggcaatccaaaatctgcagtgccttccaagaagtgacttcagaagtgcccttgagaagatggtggaatacaatcttgagaggattgagtagtggattttacttgaatgctccatcaggtacatatctccatttggggtttggggtagttctcatatagatctttatattcagcccctttgggaagatacatttcactgaaaaatcagatgaatcacactatttcatacaaattctggggatagcctttgagcaggccactactatcaagttgattttgtaacagcttgtgcagaatcataagaaaccctaggacttgaccgcagccccttgcgcctacatgtatccgagcattctacttggcagttcttgtaaataatagaaccatacagtaacttagcattcttttttgttttgcaatctgagcatgcttacaagcaacaaagtgtgtgctatatttgtacggatctacgtgcacctaacatcatgcacttgtacaattgctttgcactattatgtactatttccgatttaacagtaatacggatttaacagtaataataccgttcattttctacataaga

SEQ ID NO: 86053 - DNA, 3060 bp, Zea Mays
atggatatagtggtggaggaaggaaatgccgatgttggcaatactgttgaaccatcgtatgaggttgtggctagaagtggttgttcagcacaattgtcaactaatgacactaatgaacatgaattggatatagagagcgaggatagtaaggtcagtgttggtaatgctgcaaaacaatcacacgatgttgtgggagtaggcattgactgtattttcaatcatgtaaaagtgtcaactgaagccgatcttgggacacaaccggatgtgatacacctgacatctttggatgttccaaatgaatcaagtcaaataagttctgatgcggatatggtagagcagaacaaacaagatgctttggacacacttattagaatatcacaacataagaaaccaaagaaattgaatgtagctcgagttgtctctgaagattataagtgcaccccagaagatgttcagcttattgaatacattaaaacattaccggggaaacaagttgtggtggacatcgacagcgcatggttaaataaaaatgatatggaatgtctttttcatggtgacatccaagtgtctggcgaagccctcagtgcatatatacactgtattagggatgaagagcatttacttcatagagaaggtggaaaggtcttcttggagaacacattcatttccagtctgcttaagcgtgatggcgaccctaagatgctcttaaattgtttaagttacctgcaatattatgaccacaatgtggatgaagatggagagagttcaagtgatgttcaaataatcgatactccattaacatcaacaaacacgcaagaactgatgtttgtattatgcacatatatcatggggatagacaacgccaaatatttaaagaaacattggattcagagcactaaaccttatccaatttctttaagtcttcaaaaacttaaagatatattggatgtaaataagccgatggatacagattgttttaacatggctgttcggatgatcgcatgcaatgatgtcttgttcttgttggaagacaaataccactacatggatctacagttctgttccataactaaatttggtcgagaccctcgccttcgtgcaaagccagatatcaacatgttggcaaaattattagaatgttggcttgacatggagtacgatgtttcagattgcaaacaaattctattgcccttttctttcatgggtcacttcaccttatatgtacttaacatggacacgagaagcatctatataatggactccatgcctataccatcatggtttaagggtgatcatcctagcatgcattatatacataatatacattatattgccaataatatgaatgctgccatggaattggccaatcctacatggaaagacgatatttatatgtggcgtcgtatagtaccaacatgggttccaagaacattaaactgggatttatctggctttcttgttatcaactttatgcacaattggaatggtataaggttaccctgcatttgcactgtcaatcaaagttgtttcgagatgcctgccaacactgattgttctgaagatttattccaaagccatgaagatctgcagaaccaatcaagaacttctaacttggacaatgaacattttccaagggatgcatcaaaccacgctaatgttgaagcaactggacctccatatgatctctcaaatggtggtatatccacacagcactcagattggagtgaaattaaatgggggagtacagatgagatgcttggtaatgctggtcaggatgatgaccatttcactccgatgggcatgttttgtcttaccaataacacatatattcttgatatttcttgcattgagtccaacatgggtgagagaatggaaagcattcgcaatggcaacagtagttgccttactatgcaggaagaacatttacaggcagaatgtggaggatatcctcatccagattatatatctgttgatatggttgatgaaagatcactgcatgatttgccacatgggttatcacaaaacaatgagcacaaccaacacacgtttaagaacatggaatatcaaaaacctttggtattggataaacaatatgcatatagaagcaacaactcttctattcacaattcatcaaaaggttgcttcagtagagatggggacatggcttctgatttatgtgtgctagagggtaatacgaatcctgctcctgctcacctatggccttatcaggggaagttccatcataattttagcaacctgtgtatgcttggtgctgggacctcactgccaggattagtagctgcaaaggttggggcagatgtaacactaacagacattgcgcagaatgcagaagtactgaacaacatcagaagcatatgtgctctcaatgacaccaattgtactgtttcaggacttacatggggagactgggatgaatcggtatttgatttacgtcctgacattattcttggagctgatgtactttacgactcagcaaatttcaatgatctattcgcgacggtgacctttcttctcgaaaattcttctggggcggttttcataaccacataccacaaccgcagtggtcagcatctgattgagtttttgatggtcaagtggggtttgaagtgtttgaaactgctggatggtttctccttcctaccgccatgtaaggctgctttacttcaggggaatattcagcttgttgaaattgcgcttgacaaggaaaaatataaatgaccctgagtttgattacaggagttgacgaaaagcacagaaatggaatgccatatttggtcctctgcatacatgtacgagcaactccatgtcaagccatccgtttggactgtcatcataagggtgttcttttaattaaaagaaactcatggggagcatcgtcgttcgaatagcctatgcatgcaagaaaaaacagaaaatgttagcagatatgtactcttttgtgacatctgtaaagaacatgttggtttcctgaaaaaaggtgcagaatgtccttttcttgatgtattcgaaaaaatgagctaaatgcataactttacacaa

SEQ ID NO: 86054 - DNA, 1208 bp, Zea Mays
gatatgataactgttgaagacagcctaatatcagatacacgtggtagtccaagatgtgatgatacgggcaaccaattagacggttagtcacagaggatcctactagtgcacgtgtcgctagtggcccacctcactcgcacgcaggctgtgcggcacacggacagtgcgcggtggccgtgcacccagccacccaccagggcaccaggccatcgtgacgagccgcgcgctaggcgcacgagcgcgaacacgaacacgaacaccataacgcggcggccatggtgggcggcggcggcgacccaaggccggaggacgagcccttctccgacggagacgccacggagtcggacaccgacgagtctcctccgcaggggattagtgctcgccgccccggcgccaccactaacccgatcctgactcgcctcgcggtgtcgcggaacccgagcccgctggccgcggccaccgcggcccccggggtgtgcctcctccgcttcgcctgggagtccgccgcgggatccctcgtcggcgccgttgtcggatacggtaaaggtctggtcatgaggaagggttttaaaggatcatttcctgatgctgcttcgtctgctaagatatttgctgtccttgctggcgtacaaagtttggtagcctgctctttgcgaaaactacgtggaaaagatgatggtatcaatgcaggagtggcaggctgttgcactggccttgcgctgagctttccaggtgcaccgcaaactctgattcagagctgcctgacctttgggactttctcgtacatcatagagacgctaaacaagcagcagcccgcactggcgctaccactggctacagagattaaggatcaaaaggctggacaaagtgttcttcctcccttcacgctccctcttccgcaggatgcgatggatggattttctaagttccagaactttttgtcgtcgaaatttcagggaaaatgagtcaccttatggagtgacgtttagttgccttgtaaatgcctcaatctgagcccttttttgggtttatttctctgcaaatgtatgtttctaaggtagtgtgttgttaatgttaatgattctacacctttctgtgacagttttgcgaataagaggagcacctcatcctttgttcagctgttgtagtatttgttggggcattcgatgccgaaaatcacttgcctaacctttttacctccgcacaag

SEQ ID NO: 86055 - DNA, 3151 bp, Zea Mays
ataaaccctaagacacaagcgcgctgcctgaaccacccagcccacgcgccggcggccgcccgccatggtgaaggcttacctccgctacgagccggccctcaccttcggtgtgattgcgtcgccggagtccaacgtcgtctacgacccctcgggccgccgcctcctcgccgccgccctcgaccgcctcgccgcctgggacatcaagcgtggtcttccctctgtctccttcgcaccttcctcctcctccccttcgctcgccgtctcctgcatcgcttcctcccactccgccgccgtctcctcttcgattgcgagcgggcacgcagatgggagcatcaggctgtgggacgcggaaacaggtgcttgcgaggcaaccctccacggccaccgctccgctgcctccgccctccgcttcggcccctctggcgccgtcctcgcttctggcagcaaggactgcgatgtcatcctctgggacgtcgttgcgcaggctgggctcttccgtctgcgtggccaccgtgaccaggtcaccgatttggtgtttctggattctggtaagaagctgatgagctgctccaaggacaagtttattagggtttgggaccttgaaacacagcactgtcttcaaatcgttggtggtcaccgcagtgagatttggtcaatggatgttgatcctagcgagagatttttagtgtctgggtctgctgatccagagctgcaagtgtttagaatccggcaatcagtggaggaaggcgaggattggagcaagtgggatgtgctcaagctatttggtgagattccacggcagagcaaggaacgagtggcaaatgttaggtttaatagggacggcagtcttgtggtatgccaggtggctgggaagacagcagatatttatagggttcttgatgaaacagaggctgcacgtaaggccaaaaggcgggtgagcagaaagaaggagaaagcatctgcgaaatccatgattgctgaagagaatggcactatcattgatcctttaccagttcaaaacttacaaaatcctactgttattgtcaccgatgtatttaagctatttcaagttttacgtgcaagcaaaaaaatatgttcgattacattctctccaagtaatcctccaagaggatgccttgccactttgtctctatcactcaacaataacatgcttgagacatattcagtggataaggagaaggtatcaaagatgtactcagttgagatgcatggacaccgttctgacatcaggagtgtctcccttaattcggaggacaacctccttatgtcgactagtcataacgctgtcaagatatggaaccctagtacaggggaatgccttcggaccattgactctggatatgggttgtcaagtgctttcgttggaaatcggtatgctcttgttggtacaaaaagtggtacgttggagattatggatattgctagtgggagcttaactgaggccatagaagctcatgctggctccatacggtcaattgtacctattccagatgaagatggaactgttggtgcacgaggctttgtcactggaagtgctgatcatgatgtcaagttctgggaataccaattggtgcagaagtctgataacgactctaagcagctgactgtaactaatgtgaggaccttgaaaatgacagaagatgttcttgctgtctcgatcagtcccgaaggaaagcacattgctgttgctctcttggattgccatgtcaaggtcttccacatggacacactgaaaccatctttaaacctttatgggcacaaacttccagttctctgtatggacatatcatcagatggagctttgctagttactggctctgcggacaaaaatttgaagatatggggtatggattttggggactgccacaggtctatatttgctcactcagacagtgtgatggatgttaagtttgtgtatagaactcattatatgttcagtgtggggaaagatcgcactatgaagtactgggatgctgataaatttgagttattgttaacacttgaaggacatcatgctgaagtttggtgcctcacactcagcagtcgcggtgattttgttgtaacaggttcacatgatcgttccattcggcgttgggatcgtactgaagaacaactgttcattgaggaagagaaggagaaaagattggaagaaacctttgaggctgatttagaaaacgataatgactatagatatgggcagaaagatgatgcccctgatgaaggttctgtgggtgttcctggtaggaaaacaaaagagacagtaacttctgctgatgcaatcatggatgcacttgacactgctgaggaggaactaaaacgcattaatcaacataaaatggaagagcaaattactgcgaaggcagctaaatttcaacctaatgttataatgcaagggcattcaccttcagattatgttctgaatgtagtttcaagcatccgtccaaatgatctggagcaggccctcttggcattgccgttctcggatgcactaaagctcatgtcttacttgaaggagtggtctttggttccttcaaaggttgagcttgtttgtagggtttgcttagtgctccttcagacacatcacaatcaattaactgccacgccagctgcaagatccttgttgacagaactgaaggatattctttactgtagagtaaaggaatgcaaggatactataggcttcaacctcgccgcaatggatcatataaaagaattgttggcgttgagatcagatgcacctttccgtgatgccaaggcgaaactcatggaaatcaagaaggagcagtcgaagcggtcaagtagtaggcttgacggagatgaaaaaaggaaaaagaagagaaagaaagcgtccgctgaaagctgagccaacaaacaaaaacaaaagaatgttgtattgttgttcttaccttctgcaactactacatggacgtgctcgtttccttggttcacgagcacgcagaatttttgttagatgggtgtaatcggaaagtgcgtggacataaagatttctagaggttcgtcttgcgtatctgatgaaagggaatatatcaggtggaacatatacattggtgtagtcgtgtaactaaggtcccgtctggtaggactttagcttgcccaaacacggttttag

SEQ ID NO: 86056 - DNA, 2856 bp, Zea Mays
tggcacgattcagaggatcgtaccaaaatattaacttaagtattatataggtacagcgactccgcgtcttgcacgtagtctactataataagcatataacgaagcaaagtactcaatatgcgtcacaacacaggactgctaatttaactgtataagtcatcatcgtcagctgctgctgcagcggatgcgaagggatcggccgcagcagcagctgccgtcggttggtcggggaaccggaactcgctgccaaacccgcgggactgctggagtgtctgggcgaaggcctggtacttgcggatgtcggcgtcactcacgctgcgacgggcgtacttcatggactcctcgaagtgagcagccttgatctcagcgatgtcgtctacctcgtcttcctccatagcctcggggttgtctttgctgcgcctctccctctcgatatcctgaaatcaaatgtcccgttagcaaacaggtatactactctacgaaaccaaatgctgcaaaaaaccgattatgggccaagagattactacaccttctcgatgttctccctgatggcatacttgcacgcgcgctggcagatctctgtgatatctgcaccgctgaaaccctgggtgtatttggcgagagcattcaagtcaacatccttggccacaggagacttcctgagacaggctttgaagatctgaagcctggactgctcatcgggcagaggaatatagataagctgatcaagacgcccaggcctcagcaaggctgggtcaatgatgtccggtctgttagttgcaccgataataaaaaccgtcttcttggcattcatgccatccatctcagtaagcagctggttcaacaccctatcagcagcaccaccggcgtcaccaacactgcttcctctctgaaattcgcaatagctgtcagttacaactcatttgcaggttgtgtcagtgcgtgagcacattgcataatcgagagaccatacctgagtagcaatggagtcgagctcatcaaaaaagaggacacatggagcagactgcctagccttgtcaaaaatctcacggacattggcctcactctcaccaaaccacatggtaagcagttcaggacccttcacactaatgaagttagcttggcattcattggcaattgccttggccaacaaagtcttgccacagccaggagggccataaaacaaaacaccctttgaaggagacatgccaaacttttcaaatttctctggatgctccactggatattgaacagtctgcaagaatttgaagttcgttagcaaaatgagaagtaagaaacagcaatttaacagcagaaccaaattatatacaaaaccaaaatacctcctgtagctccctcttaacattttccaggccaccaatatcttcccaagagacatttggcacttcaacaacctgaaaaaagaagttcaaggttgcttttggaataagtagaaatttatcagaacataaagaagaggctactactagagatactcacagtttcacgcagagcagatgggttgcttgtcccaagtgcagtcttgaaatgatcatttgagacagccatagagttcagtatctccgcatctattgtctcatcctcaagatctataatatccatcttctcacgaatgcattgaagagcagcttcagtacaaagggcagcaagatcagcaccaacataaccatgagtatccttcgcaatgatctccaagtcaacctgcaacaggattatattgtaattgagaatttgagatcagttttaaatataaaacagaataaataaataaataaataacataggaaacaaatctccaaatcaacacaggtatcagtgaaggtcactcacatcttcagcaagcttcatgtttttcgtgtgaatccgaagaacctcaaggcgcccaacttcatctggaacaccgatatcaatctcacgatcaaaccgaccaaaccttctaagagcaggatcgatactgtttggacggtttgtggcacccataacaataacatgtgcacgagacttgaggccatccataagagtcaagagctgtgaaacaatacgcctttcaacttctccatgggtcttttctctcttgggtgctatggaatctatctcatcaataaaaatgattgaaggtgcatttttctcagcttcttcaaatgcctttctgaggttgctttcactttctcctgctagctttgacatgatttctggtccattgatcaaaaagaagaaagcacctgtctcattagctacagctctagcaataagggtcttgccagagccaggaggcccatacagcaatatgccctttggtggcttcacaccaatagacttgaaaagctgggggtgacgcaggggaagttcaaccagttctctgatttgggccatctgctttctaactccaccaacatcatcatagccaacttcatcgagtctttcctcatcctccctcttaataggctcaccctcacagaatatttctgtatctggtgcaacaatacaatactctgcaggatcagtctctatgactttgaattctacacttctcatgccacccctgactaggaaaaggtctcctttcctcaaaggacgataggcttcaagaaagtatgctgaaaaaaaggcatcaaataagttgccagtgatgccttcaatggtgtcatcaattggaagtatgtgcacacgcttcccgtatttgacatctgggcattgatggacagataccacatcactaagccgaaccctcaagttcttcctgacgaccttgttcatccggacctttggctcctcacacgtctcgtctgcgagcacaatgcagatagtgtcctttctcttcttaccctgcaacga

SEQ ID NO: 86057 - DNA, 1629 bp, Zea Mays
cctccccacctccacctcccctcctttcggttgttgtctgacttgtctcctactctcctcgccttcccccttgccttagggtttatcccgcgctccgcctcgctccgtccctccctgattcgcgcgatctccgcgcggccatggtctccggcgcggcgcccaacccggacgggggcggcgcccaaaacacccagcgcccgccgccgcttactcaggccggggcccggacggccctcgccacgccgccggcggtctccggcggcgccgcgcactccgcttctaccagtgggggcagcgccggctcaccaccgtccagccgcagcgagcagcacgcccccgacggtgctgccaagggtcccgccctcggggccgcgcccgcggcggccgcgtccacgccggccagcgacagcacgttcctccgcttgaataatctcgacatcaacggcgacgacgcgccgtcgtcgcaggctcctacgagcaagaagaaaaggagaggcacacgggcagtgggtcctgataaaggtaaccggggactgcgccagtttagtatgaaagtttgtgagaaagttgaaagtaaagggagaacaacatataatgaggtggcagatgaacttgttgctgagtttacagaccccaacaataatattgaggcaccagatcctgataaccctaacgcgcaacaatatgatgagaaaaatatacgacgaagagtttatgatgctttgaatgttctgatggctatggacattatatctaaagataaaaaggagatccagtggaagggcttgccgcgtactagtataagtgacattgaagaaatgaagacggagcttgtgggactgaaaggtaggattgaaaagaaaagtgcttatctacaggagctacaagaccaatatgtaggtctgcaaaacctgattcaacgaaatgaacagtcatatggttcaggaaacacgccttctggtggagtggctttgccatttatcctagttcagacccgacctcatgctaccgtggaagttgagatatcagaagatatgcagctggtgcattttgacttcaatagcaccccattcgagctgcacgacgactcatacgtcctaaaagaaatgcgattctgtggaagagaacaacatgacagcactcaagagtcgatatcaaatggaggtgagagctcaagcgtgtcaaatatttattggcaacacgtacagcatgtggaaaggccaaacaatggcacaggtaggttaccgagctcaccgcctattccagggatcttgaaagggcgtgcgaagcacgagcactaacgctagggtgttggttcactttccttttcgtctgagcagttggttttattgcatttctccgttgtgtaaagggccctgtaaattattaggcaagcgggagcgtagcttgatctaatttagctctgcaccagattggtagaacgacgggtgctctaagtagttgtgtaactataactatccttgaatcggtttctttagtatggttgagagaagggttgacatgtaattttgtagagccttgtaaaattaaaattgttgatttctatcagggtgaaatttctgggcacaatctttatttcgtgttccttttcccatcagtgaacgtaaa

SEQ ID NO: 86058 - DNA, 1796 bp, Zea Mays
gcgtaccctgcccggacgagtgtcctagcatcgcaccgcaccggctacctcccctctccatctctgcgtgatggacgcccgcctcgtcttcctcctcctcctcgcggccgcggcgtccgcgccgctggcctccgcgcagctctcggcggatttctacaagacgtcgtgccccgacgccgagaagatcatcttcgacgtcgtccagaagcggttcaaagctgaccccggcaccgccgccggcctcctccgcctcgtcttccacgactgcttcgcaaacggctgcgacgcgtccatcctgatcgacccgatgtcgaaccaggcctccgagaaggaggccggccccaacgtctccgtgaagggctacgacgtgatcgaggagatcaagacggagctggagaagaagtgcccgaacgtggtgtcgtgcgcggacatcatctcggtgagcgcccgcgactcggtgaagctgacgggcgggcccgagtacgcggtgcccctgggacggcgcgactcgctcgtgtccaaccgcgaggacgccgacaacctgccgggcccggacatcgcggtgcccaagctcatcgacgagttcgacaagcagggcttcaacgtcgaggagatggtcgcgatgctgggcggcggccacagcatcggcgtctgcaggtgcttcttcatcgagaccgacgcggcgcccatcgaccccaagtacaagaagacgatcagcgacgcgtgcgacggcaaggactcgggctccgtccccatggactccacctcgcccaacgacctggacgggagctacttcggcctggtgctggagaagaagatgccgctcaccatcgaccgcctgatggggatggacaagaagacggagcccatagtgaaggccatgtcggacaagaccaccgacttcgtcccgatcttcgccaaggccatggagaagctcagcgtgctcaaggtgctcacggggaaggaaggcgagatcaggaagacgtgctccgagttcaacaacccgcagaacagcagcggcagcacgtcggtgatacggatcagctccatcgaccccgaccagatggccgggctgtcgcagccagggtcgtcgtccaggaaggtgggccctcctcccgtcgaggaggaaacacccgccatggtggcgaccgaggcggccgccaaggttccgggtggtgtggtcgtcagcgtcggaggaggacagcagccggccgcccaagcgtcaggccaggagaaggtggcggatacgcccggccccaagctccgcggaagccaggagactgtgaacccggccccggtggtgtccggcgccggcgccgaggaggccgacaagcaggagggggcggcggccctggaggagaagaagaagaggaacatggccaaactccgcggcggtgcctaggcccagcagagcagatggatcggagcaggtgcctaggcccagtctgccaggccgcgctgcgctcccgtcatcatctattcatctcctcacccagattttgcttccctcgctcgctctctcattcgtttgtgcagctgattacgctaggtctatttacgcaactgtcgtgtgtcgaattttaacagcgacggccatgcaccaaacccccaccccacacatcattttctttcttcctttcttttgattcgacgacgcctgtgattcatgcatgctctcgatcgaggcaaagctgttgtatgttgttatggtgtactgttttttttattatttataaagttttgataaaaaacatgtaaacaaaacaatcacatacatcattcaaggatacaaggaa

SEQ ID NO: 86059 - DNA, 1151 bp, Zea Mays
gcgtttgcgtcggctcccaggccccagcttctccgtggcgatatgccgatatccgataaaccccgcacatcctgactgcaactctgaacagcgaagcacccatggccctcgccaccacagccgtctccctccaccttttcctcacccggcccgcctccgtgctccgcgtaggccgcggcctcccatgcctcctcctccgagccacttcgtccacctccgcctccccggacttcaacatcaccttcgcggagcccgcgccgtccaaaaaggccccgtccgcgcagccgctggtcccgtggatcgtccgcggggaggacggcaagccccgcctcagcacctccccgccgccggacgtaatccaggccatcgcgctcgcggaggcggaggccaagaaggccgccaagaaggaaaccctcaagggccagaatggcgcagttgccgccgccgccgcggctgcttccaatgccagcgtcaagggcaaggaaaggaagcccgccccgaccgtgccgcccaagttctccaaggcagccaggaggttttacaatgagaatatcaaggagcgggagccgcaacggctcgccaaggtccttgccgccgcaggagtggcatcaagaaggaccagtgaggagctcatcttccaagggaaggtgactgtcaatggttcagtctgtacttctcctcagaccaaagttgacatctcaaaggattctatctacgttaacgggaaccgcatttccaagaagttgcctccaaagctgtattttgctgttaacaagccaaaggggtacatttgctcatgtggtgaagagtcaaaatctgttgtctccttatttaatgattatttgaagggctggaacaagattcaaccagggttgccaaaaccacgcttgtttactgtgggtcgtcttgatgttgccacggctggtctgataatagtcacaaatgatggtgagtttgctcaaaagcttgcacatccttcttcaaatgtaacaaaagaatatgtggtgactattgatggtgccgtgcacaaaaaacatctcatagctatcagtgaaggcacaaaaattgatggggtcatgtgcattcctgatttagtagaaccattggctgcccaatcagatacaagaaagacccgcctaaggatagtggta

SEQ ID NO: 86060 - DNA, 102 bp, Zea Mays
tttttttatttgtttgcgattggaaaaggcactatcacctgatggactaatgctggaacctttttattgtattgttatatttcaaagcctggtggaatggac

SEQ ID NO: 86061 - DNA, 717 bp, Zea Mays
ggttcatgaaggacggaatcatgaagttcgtgaacttgtacagaatgcagggctacaggtttatgcattgaaacgtgttcggataggcaggttcaggcttccagcagatctgggaattgggaagtttgttgagctcaaacaggctgatatcaaggcactagatggcaacaactagagatgacatctgatgtggctaataagcgcatcttgtccaaagatggtagtaatcctcaaagtcacaatacatgagctgctactcaactcagaaagcttgtgaatgttctggatgtccattggtggtggtggctgatgatcaagtgtggcaaacatgttttgccttgaagaacttgtgaactactccatacttcgcctgcgctgcgaatctccacatcatatcaaacggcagaaccaagtccgcgatgcagcagtcgtttggtgaggatggaacattgtcaaatagcgatcttctgttggcatatacattttactctctattctaaattataatttttttagatgcattgtttttactaaattaaaatatcttatagtttagaatgcatcttgtccaacaggtagtcaataatggcagacgagttatatttggccaaattacattgtactccgtgtaccgagaactgtttttttaagaatcctttattgaccaggaatttttttcttgtaattgtggcactgttatttctatagtcatgagaa

SEQ ID NO: 86062 - DNA, 918 bp, Zea Mays
caattgacactcagttggtcttccaaacgtgcttgctctgttgaagtctgaagatctagatgtgcagatccatgctgtcaaggtggttgctaatcttgctgctgaagatgttaatcaggaaagaatcgttgaggaaggagggctcgatgctcttctatcccttctagaaacatcagaaaacaccactattcatcgagtcactgctggtgctgttgctaacttggcaatgaatggatcaaaccagggagtgattatgaataaaggtggagctcgattattagcaaatgttgcttctgaaactgatgatcctcaaactttgcggatggtggctggcgcaattgccaatttatgtgggaatgaaaagctgcacttaatgttgaaacaagatggtggaatcaaggcactactgggaatgtttcgtagtggacacgccgatgtcatagcccagatagcacgaggaatagcaaactttgcaaaatgcgaatcccggatgataagccaaggtcacaggaaagggaggtcccttctgattgaagatggtgttctttcttggatggtggcccattcaactatgttttctgcttcaacacgaagacatattgagcttgctttttgccacctagctcagaacgaagacaacacttgtgacatcattgcttctggcggaatcaaggagctgcttcgcatatcgagggagtccccgagagaagatacacgtaatttagctaagaaggctttagattcgaatcctgcttttttaagagagatccaatgactcttctatggccaagacaaacatttcattgtagactcatccatgatactatacatatgcagatgatgttccattttctcaaggtcccacgctgccacgctcatgctcatccaaacagcaaaaaaaaaaaaaaaaagataaga

SEQ ID NO: 86063 - DNA, 943 bp, Zea Mays
gctgcgtcgccgcgctcctatttaagcaccgccgcgatcaccgccctctccctcaccgctacccagccggcctcatcatcacctccccgtgccgtcgtccctcccacgttgcatccagctcgcgcccaccaactgacctagctagctacagcagggtacattgtcaatcggcatggcgcgcaaggtcctgctgctggtggctgccgtagccgcgtgcctcgccgcgacggttcgcgcggggtggcagaggggctcggcgacgttctacggcggggccgacgcctccggcacgatgggtggcgcgtgcgggtacggcaacctgtactcggcggggtacggcgcgagcacggcggcgctgagctcgacgctgttcaacgacggcgcggcgtgcgggcagtgctaccaggtgcagtgcgaccagcagaacagccggtggtgcaagccgggcgtggtcgtcaccgtcaccgccaccaacctgtgcccggccgactactccaagcccagcaacgacggcggctggtgcaacccgccgcgccagcacctggacatgtcccagccgtcctgggagaagatcggcgtctacagcggcggcatcgtcccggtcttcttccagcgggtgtcgtgctccaggagcggcggggtgcgcttcaccgtcaacggcaacaggtacttcaagctggtgctcgtcagcaacgtgggcggcccgggctccgtcagcgccgtgcagatcaagggctcctacacggcgtggatcaccatgtcacggaactggggcgccaactggcaggccaacagcgacctcaccggccagagcatctccttccgggtcaccgccaccaacggccagtttcttcagttcgacaacgtcgccggctctggctggcagctgggccagaccttcaccaacggcaataatttctactagcggcggcgcagagccggc

SEQ ID NO: 86064 - DNA, 1177 bp, Zea Mays
gtatcagctccccttcactgtcactcatccatctttctagtactactgcacctgtaaaagttcatggagatgcacagaccactgcgcatcctgttgcccatcgtcgtcctcgtcgccgcggcgtggccatcggtgccggcgggggcggacgacagcgcctggtccaagggcacggcgacgttctacggcgggggcgacgcctcgggcacgatgggcggcgcgtgcgggtacggggacctgtactggtcggggtacgggacggagacggcggcgctgagctcggcgctgttcaacgacggcgcggcgtgcggggagtgctacagggtgacgtgcgacgacggcgcgtcccagtggtgcctgccggggacggggaggaggtcggtgaccgtcacggccaccaacctgtgcccgcccaaccacgagctctccggcgacgacggcggctggtgcaacccgccccgccgccacttcgacatggcgcagcccgcctggctccggatcgcccagtacaagggcggcatcgtgccggtgctctaccagaggacggcgtgcgtgaagcagggaggggtgcggttcacggtgtccggatccaactacttcgtgctggtgctcatcagcaacgtcgccggcagcgggtcggtgaaggcggtgtgggtgaaggggagcgccacggacaggatgcccatggccaggaactggggcgccaactggcagtcgctcgcgggtcttgccggccaggcgctcaccttcggggtcacctccaccgacggccgcaccgtcgtcgtccccgacgtcgtgccggcctggtggaagttcgggcagtctttcacctccggcgtccagttctccaactgaggctcggctcactttgggagaatggggcagctcagcccagggaacagtcacacaccctcctccattatttgattcagtttcacgattcactgatgatctgatgtaccagtggctattactagtagagtgtattctctaggtcttaataaaaagaggaatatcttctgttatttagtgctgccattctggacagaagctacagtttcaagacaatttacaagctgctatcttatctggatgcaggatgttaccttgtgtactgcttttttgttacatcttcagagtttatttggtatcgaaataaagcaacgtggtttcgttc

SEQ ID NO: 86065 - DNA, 1707 bp, Zea Mays
cgtatggaagctccccgaggccgcgacggttcccgtcgcggtggtggtcgaaaaccccatcatggatgccgactcctggccggcgctgcccgggctgtcgtctccgccgccgccggctgcggggccagtggccaaggcatctccaaaggccgcttctccggcttccactggggcggtgatgtcgccgccgtctttggccaatcccggcgctccggatgctaaccctggtagtgaggctccggtgcgcaatcctgtggtccagcgtgccctggtgatgcctgcggcaaatgggctggagaagattgcccctgcaccggagccgtcccctgtttatgtgcctaacgctcggagcaacggtgcggatcctcatcagaatggacgttttggctcccatccccatggccgtggtggtggttatgttgggggaaacaggaggggtaatggtggaggtggggggcggcgtgggagtgagcaccatgggttttttgatgggcaacggcgtggaggtggccgcagagatggtcatggaccagttcatcatcagcgtggccaccagccaacatacattaggactcctactctagctgttgtagcaggagcacctcccccaccgcctccatttgttagccctgctactcctcaggcaccaccttatgggacacctatgggcttccctgacatggcaccacaagtttactattacgcggcacccacctcggagggcattcaaggcctgccttttatgtctcatccagcaagcccccaagctgttttaattgatccttttagaaagggtcttctggaccagatagaatactatttcagtgatgccaatttgtgcaaggacctatacttgcggcaacgcatggatgaccaaggttgggtgccattacccctgattgctgggtttccccaggtccagaagattactaacaatattcagtttatcttggaaacagtcatgctatctaacgttgtggaagtgcagggcgacaagctacgaaggcgtggtgcatgggagaattggctgcttccaaaacaaaattattctgctgggagttcttctggttcgttgccccctgtgacatctaacattgattctctgacgtctcagtttcgatttgttggactcgagggggcaacataccatgctaccatgccagtaatgcatggtgaagctctcttgacaagatcagcaacttcagttagtttaggttatcatgcatcaaccatgggtgggctaccgagcaacgggagtgaaccacttttggggccgaagtctgcaagaaatttactcaggagcgataccttttgaggctatatatttcaagatgaagaagtataacggcaggccgagttttcacagtgacggcctgcacactatctcgtgtgaggtgaagatcagttggtcaaaaaaaaaacaaaaaaaaagaggaaaagcataatataccaaaaaaatagagataggtatacacagaactgaaaaaaaacaaaaaaaggcaaaatacaaaaataaaaataaaataaaaaagcaagaggcaacttttgtgctggtactcatgccctttgtgttatgtggtcttagtgggtttgttttcgaatgttagcagtttgatggttctattgtgtaaaccggagttattgaagtgtcttggtatcattcggagactgctgagtggatgaagttatataagtacaagacattat

SEQ ID NO: 86066 - DNA, 1555 bp, Zea Mays
cgccgaagcaaccggtgaggagggaggggaggggctggccgcatccactctccccttccacttgcaggcattgcctgttctccactccagttcccagctccgcagctcgaggacggaacggagggagatagggccaggggaagggacggagagccccgtctccaattcacaacactgccacggccggagccggaggaggaaggcgccagccgtagtccacaggcaacgcaagggaatgccactgttctagtctcgctctcgcagatctgctccgccgcgccctgttcaccgggaattctggagctgagggcgcaggttcgagcagaagctcggagcatggccatggccgagggggagaagcaccatgcccggtgccggtggtaggtagggctctctgatatcgcaggcctttcacgcggcccggcccaaaggcttcccgtccgtaccgtcggctagccgaggacggaaaccgagatcgggtgattgcttgactcgggagctgagccgaggtcgcaatggcgtcgtgggacaacctcggagagctctccaacatcgcgcagctcacggggctggacgccgtcaagctcatttccctcatcgtcagggcggcgtccacggcgcggctgcacaagcgcaactgccgccgcttcgcgcagcacctcaagctcatcggcggcctgctggagcagctccgcgtgtcggagctcaggaagtacccggagacgcgggagccgctggagcagctcgaggacgcgctccgccggggctacctgctcgtcaactcctgccaggaccgctcctacctctacctcctcgccatgggctggaacatcgtctaccagttccgcaaggcgcagagcgagatcgacaattacctccgcctcgtcccgctcatcacgctcgtcgacaatgcccgcattcgggtcggtaatcggctttcatctctctcccttttctacccaagctgtttgtttacattcttctcacgcattcgggtaggctcctagactggatgtgggccttgtaggctttttcaaccagaaacactggaattcttatctgatggggatattctggtttatgcgcaccattctttggttctactagagtactggactactggtatcgatcggggtgcctagaatatcttctattcttcttttgaggttctaatagtcactaggggtggtttttctgcatgatctgattggattcttgttttctgttagttggccatgaagctggcacgaccaagaatctctgatgtttttgggtacttctttatgctgtcgttttcattgttcacgcacctgcaaagtgaacttgtagacagttgtaggttaagttgaattctgtatagtgttgccaattgttttgctccagtgaaatacatttttttttcttaactataccctgtttatcttattcttcatcttttcttttcctaggatcggcttgagtatattgagagggaccaatgtgaatattcctttgacgaggaagacaagaaagtgcaagatgctcttttgaatcctgacccttgctcgaatcctac

SEQ ID NO: 86067 - DNA, 2118 bp, Zea Mays
cgccgaagcaaccggtgaggagggaggggaggggctggccgcatccactctccccttccacttgcaggcattgcctgttctccactccagttcccagctccgcagctcgaggacggaacggagggagatagggccaggggaagggacggagagccccgtctccaattcacaacactgccacggccggagccggaggaggaaggcgccagccgtagtccacaggcaacgcaagggaatgccactgttctagtctcgctctcgcagatctgctccgccgcgccctgttcaccgggaattctggagctgagggcgcaggttcgagcagaagctcggagcatggccatggccgagggggagaagcaccatgcccggtgccggtggtaggtagggctctctgatatcgcaggcctttcacgcggcccggcccaaaggcttcccgtccgtaccgtcggctagccgaggacggaaaccgagatcgggtgattgcttgactcgggagctgagccgaggtcgcaatggcgtcgtgggacaacctcggagagctctccaacatcgcgcagctcacggggctggacgccgtcaagctcatttccctcatcgtcagggcggcgtccacggcgcggctgcacaagcgcaactgccgccgcttcgcgcagcacctcaagctcatcggcggcctgctggagcagctccgcgtgtcggagctcaggaagtacccggagacgcgggagccgctggagcagctcgaggacgcgctccgccggggctacctgctcgtcaactcctgccaggaccgctcctacctctacctcctcgccatgggctggaacatcgtctaccagttccgcaaggcgcagagcgagatcgacaattacctccgcctcgtcccgctcatcacgctcgtcgacaatgcccgcattcgggatcggcttgagtatattgagagggaccaatgtgaatattcctttgacgaggaagacaagaaagtgcaagatgctcttttgaatcctgacccttgctcgaatcctacaattgtgctcaagaagactctctcatgttcctatccaaacttgcctttcaatgaggccctccgaaaggaaagtgagaagcttcaggttgaacttcaaaggtcacagagcaacatggatctgggttcgtgtgaggttatccaacacctgcttggagtaaccaaaactgtggaatctacaattccagagaaagaaacaaatgttaaagctccagaaaagaagggttcaaactacagtgaatccaaaggagagactgcaaaatcgtttgatgatgatgacgactatcctaagaagcaaaacgatgactatcctaagaagcaaaaggaaacctgcagcacacaacgatgctcttcacaagttccatatggtcatgatcttgtctcaagtagaggatcgtacagcgatgaatggcatgcagatttacttggctgctgttcagaaccggctttgtgtttgaagaccttgttcttcccctgtggaaccttctcgagaattgcttcaatcgccaaggacaggccaatgtcttctggggaggcttgcaatgatattatggcgtactccctaatattgtcctgctgctgttatacatgctgtgtaaggagaaagcttcgtcaaaagttggacattgcgggaggctgctgtgacgacttcctttcacatctgctgtgttgttgctgcgcgcttgttcaagaatggcgggaagttgagattcgcggagcttatagcgaaaagacgaaggtcacaccaccagcatgccagtatatggagcactgaacagctgtatgcccgtacgggtagacccgaacttctgtaaagatattaacagaatatctgatatcgtactgcaagagcagtggtactacactgctcctgtgtagtgtttattcttactgtctattgttcgtcctggtcctggaacttgcatgtatatgttggggcatagcaccagagtatgtactctgtaaaaacacatcagttacaggctggtagagcctaacatcgcttaacaccgtcagttattggcaaaaaagttctttgtgcgtgtgcgtgtttaccttaatagcagttaaaaaaaagaagagctttagtc

SEQ ID NO: 86068 - DNA, 555 bp, Zea Mays
attgaacctgctcaatttgcccgactagggcttcttgcaatcacacttgttagtatagcatctcctgatcatgaattaaggatgttgggctacgagtgcctaggaaaattcaaaaaatcccttgagtatgctcagagaagtaaggaaacctggcagcttcagctgcttctaacataccttcagaatgggatatccgaacagtggcagaagataccttccattattgctgtttttgctgcagaagcatctttgacgctaccagatggctcacatgctcaatttactgtcatgagaaattttttaatgcattccactcctgtcagcctgcagagcattccattatttccaaccttattgcagagcagttttgtgcattttaaagccgaacgtttgtggatgcttcgattattatctgctggatcaaatctagctgatgatgctaaaatatacaagagaggaagagtattagaacttgctcttgccttctgttcttcacctatttcagattttgaatcgaaggttttagtccttaaggtgttgaagaagtgtgtttaa

SEQ ID NO: 86069 - DNA, 2194 bp, Zea Mays
aaacctccaccgccgtcaatataagcgacagctgcaggagggcccgggccgggcccgcagttgaaaccgccagccgttccttcccacgctcctccccgcccccggtccgccccccacctcaattccacaccccgcggcgaggccgcggggcgcccgcgcccaaacgccaaaaccctagctccccacccacccaccccaagcaccgcggggccgccgcgcgctcgcccacggtcgccacggatgcgcgcggcccgctcgcggacctcgacgacaccccgctcgcttgccgcggctgttccgccatggacgagcccgagaaagtgaggggcagggaggatgcggcgtcgggccgcgaggctggcggcgccgaggaggccggggatgggttccagctcgtgatccatggcaagaagaagaagagggcggccagcggccaggactgcgggactgctggctctggctctggcgctggcgccgggccagtgcgggcgttgaccagggagaagggagccgcgccggcgccgggggccaaggccaaggtgcctttccacgatccaagcattccccggccgcaggacgtatacaaaatcagagtggataactacaagccattcgagcatgtctggctggagcgcagcgaagacggcacccgacgtgttcacccgctggaaaacctgcctgttgaacagttcgttgacagaaatgttcctgacagagaaccagtgaagccagctgatttagaggatacaccatttacgctggttcaagatcacaaaggcttaacagaattagctaagaagttgaagagcgtaactgaatttgctgtagatctggagcataatcaatataggtcatttcagggcttgacctgcttgatgcagatttcaacaagaacagaagactttattgtggacactcttaagctacgcatatacattggtctctatttgcaagagcctttcaaagatccaacaaagagaaaggtaatgcatggtgcggatcgtgatataatgtggctccagcgggacttccacatctatgtgtgcaatctttttgacacaggacaggcttcaagggtcttacagatggagagaaacagccttgagcacctattgcttcatttttgtggagtaacagcaaagaaggagtatcaaaatgcagactggaggtcgagaccacttcctgatgaaatgatcaagtatgctagagaagatacacactatctgttgtacatatatgatttaatgagacagagactacagagggagtcaacatttgaaaatgatcttcttctagaggtccataagcgcagtaatgaaatttgcttacagttctatgagaaggagcttctgacagatacatcctatctccacatatacgggttgcaggaacatgaactggatgcaagacagctggctgttgttgctgctctacatgagtggagagatcgtatagctcgtcaggaagatgagagtactggttatatactgccaaataaggctttaattgagatagcaaagcagatgcctacagatgttggacatttgaaaagaattgtgaaatcaaaatatccatatgttgagagcaatcttgagctaattgcttacactgtctggaatgcacttgagtattcttatgccttcgaaggaatagctgagcaactaaagaaggaacggctggaacaggtggcactgaaaagtggtcagaccagtgatgaagtgactcctttggatgctgacattgataggagtaattttgattcatctgatcagtctgcaaatgtcaatgttgcttctggtagtagggctggttttatgagtgaagcagctttgatcagcagcatccacctagaggacaaaactcaaaccatgtcctcagttaagacctctcagaccttgctaggccagatcagaccagtgaataaggatgtcctgagcaataatatacatcagcaggctattcaggacctaagtctcactttaaaagctctaaaaggaaacttggcatctggaggagagtcaaatgagcaggtataggcaaactattcttgaacaatgaaaacatcgaagcagtcattctgaatacatgtgattttctatgtatcaatctgcctttttttctgttggaatgttgttgaagagtacacatttggtttgtctacagttaattttatgcaacttggtattgttctgaa

SEQ ID NO: 86070 - DNA, 2855 bp, Zea Mays
aaacctccaccgccgtcaatataagcgacagctgcaggagggcccgggccgggcccgcagttgaaaccgccagccgttccttcccacgctcctccccgcccccggtccgccccccacctcaattccacaccccgcggcgaggccgcggggcgcccgcgcccaaacgccaaaaccctagctccccacccacccaccccaagcaccgcggggccgccgcgcgctcgcccacggtcgccacggatgcgcgcggcccgctcgcggacctcgacgacaccccgctcgcttgccgcggctgttccgccatggacgagcccgagaaagtgaggggcagggaggatgcggcgtcgggccgcgaggctggcggcgccgaggaggccggggatgggttccagctcgtgatccatggcaagaagaagaagagggcggccagcggccaggactgcgggactgctggctctggctctggcgctggcgccgggccagtgcgggcgttgaccagggagaagggagccgcgccggcgccgggggccaaggccaaggtgcctttccacgatccaagcattccccggccgcaggacgtatacaaaatcagagtggataactacaagccattcgagcatgtctggctggagcgcagcgaagacggcacccgacgtgttcacccgctggaaaacctgcctgttgaacagttcgttgacagaaatgttcctgacagagaaccagtgaagccagctgatttagaggatacaccatttacgctggttcaagatcacaaaggcttaacagaattagctaagaagttgaagagcgtaactgaatttgctgtagatctggagcataatcaatataggtcatttcagggcttgacctgcttgatgcagatttcaacaagaacagaagactttattgtggacactcttaagctacgcatatacattggtctctatttgcaagagcctttcaaagatccaacaaagagaaaggtaatgcatggtgcggatcgtgatataatgtggctccagcgggacttccacatctatgtgtgcaatctttttgacacaggacaggcttcaagggtcttacagatggagagaaacagccttgagcacctattgcttcatttttgtggagtaacagcaaagaaggagtatcaaaatgcagactggaggtcgagaccacttcctgatgaaatgatcaagtatgctagagaagatacacactatctgttgtacatatatgatttaatgagacagagactacagagggagtcaacatttgaaaatgatcttcttctagaggtccataagcgcagtaatgaaatttgcttacagttctatgagaaggagcttctgacagatacatcctatctccacatatacgggttgcaggaacatgaactggatgcaagacagctggctgttgttgctgctctacatgagtggagagatcgtatagctcgtcaggaagatgagagtactggttatatactgccaaataaggctttaattgagatagcaaagcagatgcctacagatgttggacatttgaaaagaattgtgaaatcaaaatatccatatgttgagagcaatcttgagctaattgcttacactgtctggaatgcacttgagtattcttatgccttcgaaggaatagctgagcaactaaagaaggaacggctggaacaggtggcactgaaaagtggtcagaccagtgatgaagtgactcctttggatgctgacattgataggagtaattttgattcatctgatcagtctgcaaatgtcaatgttgcttctggtagtagggctggttttatgagtgaagcagctttgatcagcagcatccacctagaggacaaaactcaaaccatgtcctcagttaagacctctcagaccttgctaggccagatcagaccagtgaataaggatgtcctgagcaataatatacatcagcaggctattcaggacctaagtctcactttaaaagctctaaaaggaaacttggcatctggaggagagtcaaatgagcaggctgggatcaacgtggagaactttagatcttctgtatttccttcccggcagttgtctggtgaggtaaaaccattttatccaaatcctggaatgcacagtgagaatgtttggattcaaacaactcagacaaacgagacaatgaagctgtgcaacacaacttactacagacagcttccaggacatagcactgagtcaataaaccaaagaagtacaggaagtttccagagttcggtgagacgtcaatctttcccaccttcaagttacaagaaatgagattcataccagtagccgtcctgatgtatagcagaaagggagaaaaagatgaacccctgtcattgatccttgttgtgctagtgcacatattgactgtagagaacaaagacttggggctgttttacttgccctctgaatgcctctttggatttttggcattcggttaactgaaaggtgaggaacccaatattgactgtaggtgcagggtatcggaagtgccatctcattgcccattggctcatggaatgggtggatgggactaacaaacatgttctggttcaatgatgaatactggaatcgcacaggaaaaatatactgtgacattgcgacagtgcaacacctaaatacaaagacttggaaacaaacaacttgctttgttctgttctttttccctcgtgtcaatgcctcttcttttaatttttctgtatatttctttacatgcgtttcattattgaactttttatttctatagacgtgtagttgtatagcgtcctggtgcgtgtggccatattggctaggaaagtactcattccctcagttctaaattagtag

SEQ ID NO: 86071 - DNA, 2022 bp, Zea Mays
gctggcttgccatcagttatatataagtggatttacttctgcctaggtatgctagagaagatacacattatctgctgtacatatatgacttaatgagacaggccatattctgaatttcttttttgttgtgtttggtgttggatatttttttgtttgctgcttttctttatttctgacttgccatcagttatatataagtggctttacttctgcccaggtatgctagagaagatacaaactatctgctgtacatatatgacttatttcttttttattgtgtttggtgttggatattttttgtttgcttcttttctttatttctgacttgccatcagttatatataagtggctttacttctgcccaggtatgctagagaagatacacactatctgttgtacatatatgatttaatgagacagagactacagagggagtcaacatttgaaaatgatcttcttctagaggtccataagcgcagtaatgaaatttgcttacagttctatgagaaggagcttctgacagatacatcctatctccacatatacgggttgcaggaacatgaactggatgcaagacagctggctgttgttgctgctctacatgagtggagagatcgtatagctcgtcaggaagatgagagtactggttatatactgccaaataaggctttaattgagatagcaaagcagatgcctacagatgttggacatttgaaaagaattgtgaaatcaaaatatccatatgttgagagcaatcttgagctaattgcttacactgtctggaatgcacttgagtattcttatgccttcgaaggaatagctgagcaactaaagaaggaacggctggaacaggtggcactgaaaagtggtcagaccagtgatgaagtgactcctttggatgctgacattgataggagtaattttgattcatctgatcagtctgcaaatgtcaatgttgcttctggtagtagggctggttttatgagtgaagcagctttgatcagcagcatccacctagaggacaaaactcaaaccatgtcctcagttaagacctctcagaccttgctaggccagatcagaccagtgaataaggatgtcctgagcaataatatacatcagcaggctattcaggacctaagtctcactttaaaagctctaaaaggaaacttggcatctggaggagagtcaaatgagcaggctgggatcaacgtggagaactttagatcttctgtatttccttcccggcagttgtctggtgaggtaaaaccattttatccaaatcctggaatgcacagtgagaatgtttggattcaaacaactcagacaaacgagacaatgaagctgtgcaacacaacttactacagacagcttccaggacatagcactgagtcaataaaccaaagaagtacaggaagtttccagagttcggtgagacgtcaatctttcccaccttcaagttacaagaaatgagattcataccagtagccgtcctgatgtatagcagaaagggagaaaaagatgaacccctgtcattgatccttgttgtgctagtgcacatattgactgtagagaacaaagacttggggctgttttacttgccctctgaatgcctctttggatttttggcattcggttaactgaaaggtgaggaacccaatattgactgtaggtgcagggtatcggaagtgccatctcattgcccattggctcatggaatgggtggatgggactaacaaacatgttctggttcaatgatgaatactggaatcgcacaggaaaaatatactgtgacattgcgacagtgcaacacctaaatacaaagacttggaaacaaacaacttgctttgttctgttctttttccctcgtgtcaatgcctcttcttttaatttttctgtatatttctttacatgcgtttcattattgaactttttatttctatagacgtgtagttgtatagcgtcctggtgcgtgtggccatattggctaggaaagtactcattccctcagttctaaattagtag

SEQ ID NO: 86072 - DNA, 1745 bp, Zea Mays
gccgccccctttctccccatttccgcaccacgcccagtcgcccacgcagccggcccaagcccaaaaacctttctccatcctctactctcatccccacgatggccgccgccgccaccacgccgcactccctcctcctccagcgcgccgcgatcccggccgcgccgtcgagggcgtccgccgccgcctctcccgtccgcctcccggtccgcgccgccaggatctcgtgcgcggcggtggcggcgccgtccccggccgcagccgccgcggcggacgaggtggagcgcggcgtctacaacttcgcggcgggtcccgcgacgctccctctctccgtgctcaagcgggcgcaggcggagctggtggactaccacggctccgggatgagcatcatggagatgagccaccgcgggaaggagttcgacgccgccatcaagaaggccgagtccgacctgcgcgcgctcctcgcggtgcccgacacccacgccgtgctcttcctccagggcggcgccaccacgcagttcgccgccgtcccgctcaacctctgcacggggccctccgacccggccgacttcgtcgtgtccggatcctggagcgacaaggccttcaaggaggccaagaagttctccgccgcctccgtcgcctggtcgggtaaagacggcaagtacacggccctcccgccgttcgacgccatcgcccagaaccccgaggccaggttcctccacatctgctccaacgagaccatccacggcgtcgagttcaaggactacccggagccccgcaacaggtcgggcatcctcgtcgccgacatgtcctccaacttctgctccaagcccgtcgacgtctcccgcttcggcgtcatctacgccggcgcacagaagaacgtcgggccctccggcgtcaccatcgccatcgtgcgcaaggacctcatcggcgccgctcagcccatcacgcccgtcatgctcgacttcaagacgcacgccgacaacgcctccctctacaacaccccgccctgcttcgccatctacgtctgcggtctcgtcttcgaggacctgctcgcgcagggcggcctcgccgaggtcgagaagaagaacgcgcgcaaggccggcgccctctacgacaccatcgatgccagcggagggtactacgtctgccccgtcgacaagtccgtgcgctcgcacatgaacgtgcccttcaccctggccaagggcccggacttcgagaagcagttcatcgccgaggcggccaaggagggcatggtgcagctcaaggggcacaggtctgtcggcggtgtccgcgcctccatctacaatgccatgccgctcgccggcgtcgagaagctcgtcgccttcatgaaggacttccaagccaggaacccttgattgccttgtgcttatgatcatttggtattgctactcagtctttcttcctagcataagtgagctcgtgcaagagctgtctcgcgttgcgcactgggatctatctgtagtattagtaccataacgtaacggctactgtattttgcaatgttttttttcctctctcgcttttgttatgtgttcatggaatttcatttctatgtatcaccattgcagttgtaatgtgtttttgctggaaataaggaataaggtagatggccggttgcctcgcctcgatggagatcagctattcaggagtgacttgtcgaagcttatataaaacattaatacgaaggttgcttggtttttgcctcttcaaaaaaaaggagcaaa

SEQ ID NO: 86073 - DNA, 1517 bp, Zea Mays
aaaaaaaacacgaacccactagccctctctgcttcctctccgtttctcctccactcaccagtcaccactcctgattgctgtcgagtctcgatctgccagcgcgcggcgcgatggccgacaaggcggcgtccccggagaagaagtcatgggccgacgtcgaagaggaggaggaggccaaggctaaggcgaccgcggcagccgaagcggcggcggcggccgccgcggcgtcctcttcctcctccatcaccgagccggcggtggaggagcaggccaagcagatcgaggcgctctccctcgccccgtcggtggacgacgccgcaggcgaagagggcccgcccctcctcgatgactccgacgactcgcaaatccaagccgtgatttcgggtggcacggtgtacgagtcggccaccacgttcgaggatctgaagctgtcgcccgagctgcttaaggggctgcacgacgagatggggttcagccgcccgagcaagatccaggcgatcaccctgcccatgatcctcacgccgccctacaaggacctcgtcgcgcaggcgcacaacggctctggcaagaccacctgtttcgtcctcggcatgctcagccgcgtcgacccgcaacgcaagataccccaggctatctgcatttgccccaccagggagcttgcgcagcagaataaggcagttctcatgaggatgggcaagtttactggcattacatgcgcctgtgcaatcccgccagctcaaaaagactacatgccgatctcgaaaatggctccgatcactgaccagatcgttatcggcacatctgatcatatgcttgctgaggatggctttaggagtgattctgaaaggatgatgagggatatacaaagaagcgctggtggttgtcaggtgcttctcttttctgcgaccttcaatgatagggtgaaggattttgttacaaaggtcattagggatggaaatcagatatttgtgaagaaggaagagcttactttggaaaaagttaaacagtacaaagttcaagtacctgatgaatcggcaaaaatagaggttataagggacaagatatttgaatttggacagaaagttggccaggttatcatatttgttagaacaaagcaaagtactaagaatgttcacaatgctttgacgagggaggactatgtgtgctcctcaatccaaggatcccttgaccaatcagagagggaaaagataatacaggaattcaaagatggctacaccaaggttcttatatcaactgatgttcttgctcgaggttttgaccaagcacaggttaacctcgtcatcaactacgacatgccaatcaaatttggtacaagagatgaacctgattatgaggtgtacttgcacagaattggcagagctgggcgcttttggccggaaaggttcggaattggcaacgtgaagaagattttgaggctgctctcaaggatgcaggtttactttaaagtaaccaccgaaacctgtggtgagcagcgctctccggctcaggacaattga

SEQ ID NO: 86074 - DNA, 1928 bp, Zea Mays
tctttgcaacaactccctagtccccactagcccaatgcggtagtggtctagtggagcaccgagccgaatccagcagccgagcaccaacaccatcaccatcaccagacggtggacagaaggagcaagagacggtccgcaataatcaaacaggtaaaggaaagagaaagaaaaggaaagctccaatctaacccacattcattcggatccactcaatataacgacgaacacaaccggccatactcgaccccaatgacgacgcaacacacccagccagacggccttcgcaaattcctcttgtccggccaaaggtctctggcattccaatactacagcagaaaagtcttcgggctataagcaaactgaaacggggaacagagagagagactagggaaaacgctaacagctagccagctgctctccagcagcgacgagatggagccgcaacgctctagggcgccatgcctgcccagttccacagcctgccttggttggtcaccagtttcccttgtacagtgattcggtcgagctcttggggacgtcgaccgtcgctcgcggctagctatggagcatcggttgggcggtccagctaaccggtcttagcgactccgttggcgagcacaggtttctctgttgctgcttgggccacctttgccgcgtaggaaatagctggagtggcggtgccgttctctgcagaagccttcgccgccttcacctctgcagggacaccgtttggtacagacggattgggcttcccattggcagcttcctgctgttgctcgcttccagtgacagaaatgggggtcctactgtcccagacctgcatgattcaatagccaacacgcagggcattagacgagcaaggtgatgaaatatgcattgtatccagaattacaaatgcacctgcttttggacctgctgctgtttcgacctcttatcctgcatcagcttctggcgactctcatagaaggcgaagtcatccaggatggacgtcttgctgacatgctccttgaatatcttgagcatctgaaggccttgttctaggtgtatctacattatcgttcaatgagtaaagaggcaacgcggcagtttttgcaattcacagaacttggggggaaacagcatggactatgcttacctcttgagtgtcgcggctgttcgtgacaggcttgttctcgttgttctctaggatgatgtgtttgagaatgttgttaggcacgtccttgacaatgtgccacttaacagagaaggaaccattccacttgtcctgttgccaataccccagggttttctcaaaatcgacagcccccgtcatttcagcaacaccaacaaactgcccacttgtccttactgagaaaaacaagaatatagggcacgcagaacccttcgactgagcttcttgataagcagcatcgagcttcttatttccattggttgtgcttgcccacacattgtattttacactcttgtggatgtcatcctcactgtacgatttaatgacaaagaactttgcagcatcatactgaacagggaaatcgtctctattgaactgtgctctatcaggcacggcactatcatccttgctttcaccagaaggaaggctctgccctttcacagcaatagtgacagtatggccgtacaatttctggttcttgaaacggccagatctaggacctctgtttaactcgattgttccatcctgactctcgttgccataaccatagtatccattacggcccctaggcctgtacctgttatccataccaagaccccatcgcccatatatcctggaatcataaccgttgctcccgtagggaaggccagtttttattgaattcccatactgggtgtacggtcgggagctagggtacatcctattgggataagtaggagctggtgatgtagttgtaggtcttctattctgcataccc

SEQ ID NO: 86075 - DNA, 714 bp, Zea Mays
ctccgtagtaatacgctggtagataaaacaggttgggatccgtaaagtcttggatcaccggcgtgatggacggctccggcgggatcgccacgctcagcggctggctcgccgcggcgccctgctggtttaaatttaaatgaacagcacaaagaagcgacgaatcagaaccgcggattatctcgacaaaaccatgagcatggggacaggacgagaagccacgggcgcttgtgctgttatccctttacctttttggcggtggcagcagcaggctgtgttgcgtccgccgccttgggctgcgagtcgagcgacagcttctgcagcagatccgtggtttcttcgcgcaacagcaaagcggagaattaaggtgcaacggtttggacggtggcaggagcaggagccggaaccggtgccggcgcgggggccgggggcggcgcgacggcggccatggcgcgagatcccaacgaacgaacgaacgaacggggaggcagcggcgagatccgagagccccccgaccgaccgaccgaccgaccgggccttgtcccctcttcctctcctacggataggtaggcaggtacgcgcgagcttaagctcggggtaaaaggagggagcgagaggaggtggcggcggcggcggcggggcgtggggactggggaggagggaggcgagccgcagcagcgcggcgggtagcggtagcgggggatagcagcacggttt

SEQ ID NO: 86076 - DNA, 1093 bp, Zea Mays
gaaatcttctgacagtgacaggctcactcagaccgtgcgccgcctgcctagaaccggaggcagctagggaggctacgcggcggcctgggaaccgtcgcccgtggcgttggcggcctggaccaccttgacgccgtcgtccggcaggttggtcaccctgacgacgagcggcgtgcggacgcggtggaagccgtccgaccagaccacctcgccgaagtcgaagcggccgcgggacagcttcgcgggggtgacggtcaagtagtacgaggcctgctcgccgccggggcgcgcggagaaggccagctcccgcggccacacctcggcgcgcgcgccctgcgggctggccacggcggcgcggtacacggcgtcccggttcgcgcccacgttcgtcaccgtccgcttcaccgtcaccgtgccgcccaggtccgggagcacgatggccgggtagttcaggtccgcctccgggccgccgccgccgccgccgccgcgggggcagctcgtgtccagcgccggctgggggagcaccatgttccggatcgcggcctccgtgtagcccaggctgcagaggaacaccacgtggtcgcgcgcgcccgcgtcgtacaccagccccgggtccagcgcgcgcagcgggtccacgtgccccgcgcccacgtcgaacgcgtccgccgccttcaccgtcccgccggcctgcatcacgtccgacgtgccgtcgtacatgtacgctgcaaagacgacattttacagggacggcaaaattcctgatgcaaagcttttacatttcgtgattattactccttcctagccaggaggacaccggtcggtagaagctagctatagctactagtgtcgtcgatctatacctgtggtcatgagggcggacttgacggccgccggggaccaggtcgggtgcacggacttgatgaccgcggcgatgccggagacgtgcgggcacgacatggacgtgccggagtccatgttccactctgtcaagcgcttgtccaaggggatcaccgtcggcgacgacttgggcggccatgctgccaggatgttcactccgggggcggtcacgtcgggctgccatcatcagaacgcacca

SEQ ID NO: 86077 - DNA, 2029 bp, Zea Mays
ggaaacggactaccagcgctgagccgttccgtttcttttcaatcttggcgttttgtctccattcaatagggaaagggatgtttcgcttgaggctttcctttgtgcctgtgtcttctctgtagctttcaagagaataaaaatttggagcttctctcgcaccagcgtcctttccttcttccttggtttcatgctgacaactagggctgatcttcaggacggcctgttcttggttcggttcctgagagcgattgataggtctgagattatatattggtgtcgttgttgtttgttttttttcgtgctcatccgttgctaaataagcaaaccatcagcccatcagcttactacaagcactcttttgcctccttttctgttcttggtgttcttggtgagacacagcgccagacggagtttcttctttaggagtcgtgcactatgggtaattgctggtttaaggggaatccatactttaacagggtttcttccaatgcaaccaaagcagaatctcccaaaattcagagcccctcggagagaactgaaaaggaggattgccagctaccatccaacccgaaagaggtggaggcgctgagaaaggatacagctcgcaatcctttgatagcgttcacatttgaggagctcaagagaatgacaaaaaatttcaggcaagattcgttactaggcggtggtggatttggcagagtctacaaaggttttatcaccaaggatctccgcgaagggttagagatagaagagcccacaagagttgccgttaaggtccatgatggtgacaatagcttccagggccatagggagtggctggctgaggttatatttcttggacagctctctcacccgaatttagtgaagttgatcggctattgttgtgaagatgaccacagggtccttgtttacgagttcatgcctctaggaagtgtggagtctcatttgttttcaagggttatggtgccacttacgtggtcgatcagaatgaaaattgcgctcggtgctgcgaaaggacttgcttttctgcatgaagctgagaagcccgtcatctatcgggacttcaagacatcaaatatattactagatgaggaatataatgcaaaactatctgactttgggcttgcaaaagatggaccagttggcgataagtcccatgtttcaactcgtattatgggtacctacggttatgctgcaccagagtacattatgacagggcatctaacggcgatgagtgatgtctacagctatggtgttgtactactggagctcctcacgggccggaagtcactggacaagtcccggccagtcagggagcagatgctggcagactgggcactcccattgttggcacagaagaagaaggtgcttggcatagtagacccaaggcttgccgaggactacccagtgaaggcagtgcagaagacggcgatgctggcgtaccattgcctcagccgcaacccaaaggctaggccgctgatgcgcgacatcgtcgcgactttggagcctcttcaacagctggaggagacccctggagacagcgtggcagtgacacttgaagggacttgaagcagtgttccattcacagctcacatcacagtcacacacagctctggaaaactcgggtgccacgtacttaactatgcatgataatagtagctagctagtgttcttgatatgcaggatgatttcttgattgtttaattaatccatggagacagtagctttgttcagcagaaagttagtgtgtatctcagtaggacggttcatgtgtgtgtatccaggtgttcagtcctggcgtagcgaactccctggcatttcggatgcgggcaagtctgtgcaatctgtatttgcaatgcttgttgcccgcagaggaagcttgcttaccagtgtttgtaacctagtattgtgcagttcatgatctatgcatgttgaataatgtgtgtgtatatatatatataacaggtataacgggagcactgagcttccaatagttaaagaaagcctaagccgaccaaccctgcaacct

SEQ ID NO: 86078 - DNA, 1140 bp, Zea Mays
acatttggatctataaatacggttctcacgtcgggttggctgcgggatgagaactccttccaacagcccgacaaggtggtgccgacggcaagtccaataaccaacgtgggcaagcaaatgagtgttatattgaactcatactccctgacctcatttgatctcctcttggactcggaccagacgatgccttcagtctcagggtcgagcctccatccaaggtcttctaaggactttgctgatgtccatggacttgtcatgcatgcttacaacccaccaaatgcagattcacttgttgatcatcttggtttgcacaaggcattgtgtgtccttatgggatggaattatacaaaagtccctgagaactctaagggctaccaatcattaccttctgaccttgtccaagcaagtagggaagacctcattgtgtggccgcctactgttatcattcacaatacttcgactgggaggaagaaagatggtcgctttgagggtttagggaacaaagaaatggataagaaaatgacagaactagggttttctggtgggaagtcaaagtccttgtatggaaaggaaggacacatgggtttgacacttatcaagtttgcaaacaacccatctggcttgaaggaggctgagcgtcttgctgagttccttgagaggcaagatcgtggacgtataggttggtctcgtgttcatgccagtcgttctgtagattctgatcagaaccctttgttggtcgaaatggatatcaggacagctgagaaaaagaggatactttgtgggtacctagcaattgcatccgatctggatgaacttgactcagattctagaaaaagggctttcctaaagagtagaagagaattcgacccaaacgaatgatctcttgccataaagcccacctccatcagtttatttaatttgcaccgaggcgcgcatacctgtctctgatcccaaattatagattcatgtgctgctactgtggacaaaatatgttaccttgaatataatatctacaagcagttgagctataacctttagttctggaagctgtatttgcagtaggtgtattttcttgcaagcacctacgggcaacggtttgactggttatttggaagagatctgtcttcctatttaagtatc

SEQ ID NO: 86079 - DNA, 1466 bp, Zea Mays
atccattaggcccgtttccagtttccaccgtcaacagaggatggctatcgccgccgttcgccggctcttgtggcgcgaggtggggactgcggccgccgccgcggccttggggacggacgggaatctgttcgctcgcctggtctcggagccggagtgccgtgtcaaggcgaccatggaggaggctgcctcctccgggacccaccgcgacggcgccttctgggagccccccgtcaccgcgctcctccgcgcgtcgtctcctaccaaggcgcacctcatattggaatggaaactagagaagctgctgaaggaagacattcaagattgcgagccctactccaggataattcgtttctgtggtcagacaaggaatgcaacgtttgcaatgagagttttcgaatgcgtggaggcgaagggaatccagctgaacactaacatttgcaatgcccttgtcgatgctttcttgtcagccggagacctcctttctgcaatgaccttatacgagactatggaaagcatggacgcttgcagtcccaattccgctacatatgatgcattcatctgtgcattttcgctgcttggaagtggccatgctatgatgagctggtatgtagctgcaaagaacgccgggtttacgccaagtattcaagcttttgaatctttgatcactgggtttgttcggttgaacatgctagacgatgccaaaacggtgtttgaggaaatgattgccttggagattaagccaaactctactattttggaggccagccttgagattctctctagaaaggaggagaccagcagagtaggagactttttaaaacgtgcaagggatggcaattgggagttgaacaaagccacagttgtgaggttgacaagaatatgcctagatggaggggtaatagatgaaatggagcagctgcttgccctaatacaaaagggaacacacttgaattctgaaacacaactgcaccatggaattatcaggttctatgctaatgcagatcgattagcggatatggaggatgcaatttatcggatgttggacaatggtgtgatgtttacgtgcccggaggatgttgatgtcataatctgttgttattttcgtcacagggaatttgataggttggatctctttttgaatcgcatccgaagtttgttcaagctcaataggtctacatatgacatactggttgctggataccgaaagtttgatttacatgaaagacttgattcaaccatagctgatatgatgagggaagctggatttgcatgagatcacaaagaactatctgtgcaccatgactttccacggtaaggccatctccagcggaacgtggatatgggcgtgcaaaacactgtttgcactgtagagtgcactgtttacagagcgaagtttgaaataggaagtgagataagaagtgttatagagaggctgctggagatagcctaatatttccatagcctta

SEQ ID NO: 86080 - DNA, 3117 bp, Zea Mays
atgaagagcctgttcaagagtaagatcaggtggcagcaccggtccaacgacccggcgtccccgtcggggcagccgcagccacagccgcagcaggcgttgggcccgccgtcgccgtcgccttcgagctccccgtcgtctgcggcgccgctctccgtgtcaacggcggccacctcctccccctcctcgcccccctccgcggcggcgacgcccacgggtgctggggcagcagcggcagcgggagcgggagcggcaggggaggactacatagcgtcggaggaggagttccagatgcagctggccatggcgctgtccgcgtcttccaacagcgattgcgtgggggacctggacggggagcagatcaggaaggccaagctcataagcctcgatcgcttcgctgcccaccgcgacgagggccacaccgcggagtcgctctcccgccgatactgggactataactttcttgattatcatgagaaagttattgatggcttctatgacatctttggctctatggaatcctctaggcagggaaatatgccatcattagcagatctccaaacaggcataggggacctaggctttgaagtcattgtagtaaaccgtgccattgatagtaccttgcaggagatggagcaagtggcacagtgcatcctgttggacttccctgttgccaatattgcactcttagtgcaaagaatagctgagcttgttacagataatatgggtggacctgtcaaagatgctaacgacatgctcacaaggtggctggagaagagtactgagttgagaacctcgctacaaacaagtttgttgcctattggttgcatcaagatagggctatcacgtcaccgtgccttacttttcaagatccttgcagatagtgttgggattctatgcaaacttgtcaaagggagcaattatactggtggtgatgatgacgatgctataaacataattaagatggacaatgaaagggagtttttggttgatctgatggctgctcctggtgctcttattccagcagatatcttaagttggaaaggcaattcgttaaattctaatagaaaacttggcctgagtcagacagctggatcatcgagtaccgttggtgctaatatgggtcctagtgtattgccacttgaacctaaaggtgatcagctgcctttgttcagcagtggtgattggatatcagagagtggttctggatatggggcagcagaaactgcagcttctactcaaacctcttctggtgccacatcatctgttcctgctggaagtgcttttgacagttcatggatgctgattaatcatgaccaatcagatggaccatcaacttctgctggtacatcatcccagcagaaagttgtacctcaaaacgaacatccacggaatttaaaccgtcttccagatttgcaggaaattccagagtcaaaaaacctttttgctgaccttaatccttttggggatacgaagtccaagaaaacttcagtaccattcaaaggaccagatcaaaggaacaatgagttgcaaaagcgcagagagaacattgtccctaatggtggaagaccacagcagcggttagttatgaagaattggtctccttataatgatgtttctaacaacaaacagtacaattatgtcgaggattcatttgcacgtagaaatgttggcaacaatgccgcatcatcatcatcccagataacacaacaagccgcaaggtctaatcttaattctggattgcgtaatgatgcatcatatcataattatgatagtattatggctggtacctctgccacgaatattacatctacagctgagactgggaaggttcctgaaagggttctgcgtggtgatttggataaaggtcaaacaaattatagacttcaggatcaacatgttgtaggtcaaccaccacaggaaagacttccatggggtaatcctgctgaaggaagagttccaatgaatagatttcagaatcaagcaaaacaacacatgggaaacattgatacaaagcaagaccataagaaattgctccctgatccaaaaaaatctccccttgacagattcatggacacgtcattgccatcaagaaacttggacgtgaggtcacagaggcttgactttgatgatgtgtctgaatgtgaaattccttgggaagatcttgtgattggtgaaaggattggcttaggttcatatggagaggtttaccgtgctgactggaatggaacagaagtagctgtaaaaaaattcttggatcaagatttctatggtgatgctctggatgagtttaggagtgaagtccgaattatgcgtcggctgcgccatccaaatattgttctctttatgggtgctgttacacgccctccgaacttatctattgtatctgaataccttccaaggtgcgacgtttacagctttggtgtcatattatgggagctggcaacgcttagaatgccatggagtgggatgaatccaatgcaggttgtgggggcagttggtttccaggatagacggcttgatattcccaaggaagttgatcctctggtagcaaggatcatattcgaatgctggcagaaggacccaaatctgcgcccttcatttgcacagttaacaagtgccctaaagactgttcaaagactagtgaccccttctcaccaggagacccagagcccccatgttcatcaagaaatctcagtgaacttgactccataggagggctgtcaacttcccgttgtgcatagtttttgttcttttgccgtttgtgttttgtccaagagcccgcaaatgcgggcgcggcttgtagattgagcgccccaggcggtggtagacactctgccgtctgcgacaaggaccccgtggtagggtatgtatagagttgcccatcatcgggagaagtgattcagtgtgtagcaactgatcgtcaatccctcttttagtcctttgtacacccaaccggtcgaccgggtgcgagccctctgaaagcagtgagctctgtgttcattgtgaagtgcgtggctatgctaagtggattttctgtcttgctgcgcaataggcagcagcgtatctggaagtttgaagcgttgtaaaactctgtacaatcaggacacttgaatacag

SEQ ID NO: 86081 - DNA, 649 bp, Zea Mays
atggagggcgtcctggagttcgcgccgacgtacaagtacgagctcggctcgaggaggagtttaatagtaagtattatcatccaagcaacgctaggatctggttctatggtgatgatgacccaaaagagcacacattctaagtgtggtgtgcatgaaggatttgagctccccgtgctctactcgccaggccagtcgacatcccagtcttgcgctacagatcgggtgtttttgacgatagagttgcctgacgccaagggtgtgaagcagagcttaaagcctaaaggccatttcaacttgtctagctcagatgactcgccttgcgagtttgatcttgagttgtttgatgttgtcgatttaatacatgttgaattagcgtttcagattttgattgtattggtcttcctatttgcaggagagcaaagcagttgttgtcccaagaaccatatgctaccagaacaagaaagatgagagcggttggtggccaaggctcatgaaaaaggacttgtgttcttgaaggttgactggataaatggtaggatgaggatggcgaagatgttggatgttagtatttcacttttggttgattatattttttcttatgcgcctgacaaatctagatttgcaaccagacatgctttattcttgttcc

SEQ ID NO: 86082 - DNA, 125 bp, Zea Mays
ttattttttgttttagcttctatcattttcaaactacttgtttaaaactccaaggcaaccttgaccgattttatccaatcctgcccccaaatagaaacacgctgtagagactataaatgcagtag

SEQ ID NO: 86083 - DNA, 447 bp, Zea Mays
atgcagcttgatgtagtaaaggcaacttgtggcatggttcaagcaggaagacatcaggtgttactgcttgggcttctctttgttttggttcgccaggctttgtacttggatgctttgttttttttcccaacttctcttaatggaatacatgcaatgaacattcttggaaaccttactccttggacaacttctgtagctgataaacagctagaaagaagcatctctaaccttttggtacaccctcctgtatatcgttgctccttcaagctctgcatggatttctcgctctgtccggattcccattgggttgtccagaagccatccttcattgtcacactgaagatcttgatcaacataattaacatgtgccaaaataccagagtacccatcaaacctttccctcatgtctacagatacttccagtacatcagattgtatgaaaaccta

SEQ ID NO: 86084 - DNA, 1139 bp, Zea Mays
gcgcctgccaaccgccctcgcccctttccctccctcccacttaaaacgcaaccaaaggaaagcgacgacgaacgaaacgaacacaaccgccccgcccccaagcgcggagcggagtccagtcctccaagtccaggaaaggcgcgcgagatccaacgagcggtgaagtgaccctgatcttccaagatgctccgccgagcaagggttccctgcgccgcggcgcccgcgcccgcgcccgcggtcgtcgtggcggtggcgctcctggccctcagcgccgtggccgccgccgacttcttctcccctctcgcccccatcttctcccccgtcatcaattccatatgcagcacggtggcctgcgggcagggcaactgcacggtggcgccgggcacgctgggctaccgctgcgactgccgcccgggctggacgcagctccacgtcggcgacagcctcaggttcctgccctgcgtcatcccaaactgctccatcgacagctcatgtttcaatggttcgccggcgccggcaccggcgctagcgctgacgcctttgccgccacctaaaaacttctcgctcgacccatgcgagctagcgtactgcggcgccggcggcacgtgcaggaagaacggctccggcatgagctaccactgcgagtgcaaggaggggtacagcaacctcctcaacatgaccgcgatgccttgcttccagaactgttccatcggcgcagactgcgcgagcataggtattcatccctcctcgaccagcaacagcccgcccgcgccacctggctccgagagcatttctaaccaaggcagtacagcggcaccaggatccatttcacagcggattctactgccactgctgctgatggtggtggtctcattggccgtcggttacgtgatgtaggtcgaggatggagcgtcccacggcaacactagactgttttttttttatccgcaggacagggtagagctgatagtttgttagggtggtgatacacttttggatgtgtattgtactgctgcgtggttacgttttggcgattggtttgtgtagatgttacccggccgggtcattttatgtcgatatggaataaagcgcctctgtgaatactactggggtgattaaactgactctgcattgggtaa

SEQ ID NO: 86085 - DNA, 786 bp, Zea Mays
tcttacttgttccttgccgtgttctccatgtctctctgtgtgtacacctacaccagcagtagcactggtagacagagctagccttcgatcccatgtatgcgtgcagtgcgtgcaccggtaccagcgtgtgcgcagcagggagaggtggcgccgccgtcgccgtcgccgttgtcgttgccgttggaccggtcagggcatgaagagcttgttgccgcacttgcagcgccaggcctccgggtagtactcgagcgggaagctgcggccgggctggatggcgacgtggacggggcggcaggggtggcagcccccgcagcggctgcggcacgtgggcggcgacgaccccggccccaccagccccctgcgcgccgccgtcgccgccgggtcccaccaggaccaggagtacccgtcctgctccgtcgtcggcggcggcgccacccctctcgccggcgtgcacgtccctgcagaacgcatggccagcaggtggaggaagagcagcgccgcggcggacacgttccgtcgccggtcgccccagccgctgctcggcggccagcccatggacggccgcgagcacgtgggtgtagattcccgctcgcgccggggtcggaggcggagcaaggtactgcggctgacgagctcgctaggagtaagtaggacacggtgcagcagggagagagggctgggactgggagagtgggagtctgggactgagagagcgtgcgcgagtcaattggcacgcttggaccgcgcacgcatgccctcgggaggggaaggaaagggaggtggcct

SEQ ID NO: 86086 - DNA, 1914 bp, Zea Mays
cctgcccgggcggagggaggcgcggcgcaacggacttcatgctgccacccgccgacccgcacctcaccggctcacctacaccctcctcttcgttcgtctcttatccatgcaatgcatcgtctgaccttgccttttgtcttttacaaacactgccatcagcaaatcatgctatttttatgccgtcacgtttcatgcagctatgtgtaaataaataaaacgtatataacgcattttaatcatagatccccgacgcaacaacaattgcagccacacccccgcggagccatcacctttcactctaattagaaacatcgacctgctcaacccaccgaggaatatagactgtttttttttctatgtggaaataccaagtagtagtgccaaacgctaaaagggtatgcatcttaattgatgagctgtgagggtgcaatctacaagagtgcgggttcgcgttcagtccaagctgaacataaacgcaacgcaaggcccctcgacgcagataccgcgctcaggagcattcgagaagccgaagaaaattcgaagacgaggaccagctacactgcggacggacttcgggcatggagggccagttccaggttggcaaggaggaggtcatccaagcatggtacatggacgacagtgaagaggaccagaggcttcctcatcatcgtgagcccaaagaattcattcctctcgacaaactttccgaactaggaatattaagctggcgcctaaatgctgatgattgggagaatgatgagaacctcaagaaaattcgtgaagccaggggttactcttacatggacatttgtgatgtgtgcccagagaagttgccaaattacgaggctaagataaagaatttctttgaagaacacttgcatactgatgaagagatacgatattgccttgagggtagcggctactttgatgtgagggaccaagatgatcagtggatccgtgtagcggtaaagaaagggggcatgatcgttttgcctgcaggaatgtatcatcgctttacgttggatagtgacaactacatcaaggcaatgcgtctatttgtgggtgagcctgtctggacaccatacaatcgtccgcatgaccatctcccggctaggaaggagtacgtcgagaaaatcatcaaccgaggtggaaaccaagccgtcgaagctcgttgagcgtgtccactctacatgtcctcctgccgtctcagcctcttgtgttttacaccctacaactcctagtaccgccgaataagatttgctatctgcaatgtgctcatgccaccgctgtgtgtgccagttaacagtttgcacgaaaccctagatattttgttatacgaatgaatgacatgtggtgtttgataaatgatgaaacgatgatggttcaaatcaacccacctgtctttcacaagttcgatgaaacgttgcgcgcaatggttgtttactgaaaaggatgcctctaaccagccgtcagtctgactggatgtcgtggatcaactgccgaccaacatcttgtctgcgctcgtgccgcgtgagtaactgctgtcgttctcactgagggcgagcagggccttggtaatgatgtactgtttcacagtaacagttctgttgatcaccgaaaggtttgtgcaggttgatgtgatgtgacgatgctgggtggctcctgcctagaaaacgtgtggtggttgaaatgaacgcgttccatgtctgtcgtctagtcactcgtcgagctttggtcggcggagccgatcaccggccaagaacatttgtgatctcgatgatatacttgtgtgcggctgcattgccgcacaaaaggttcatattgccatcatcgttcctgctcacagatggtagtggtgacgcactggcaaatagacctgatttcattgcgcagccagattcatctatggctgac

SEQ ID NO: 86087 - DNA, 1749 bp, Zea Mays
cgctaaaagggtatgcatcttaattgatgagctgtgagggtgcaatctacaagagtgcgggttcgcgttcagtccaagctgaacataaacgcaacgcaaggcccctcgacgcagataccgcgctcaggagcattcgagaagccgaagaaaattcgaagacgaggaccagctacactgcggacggacttcgggcatggagggccagttccaggttggcaaggaggaggtcatccaagcatggtacatggacgacagtgaagaggaccagaggcttcctcatcatcgtgagcccaaagaattcattcctctcgacaaactttccgaactaggaatattaagctggcgcctaaatgctgatgattgggagaatgatgagaacctcaagaaaattcgtgaagccaggggttactcttacatggtttgctaataagtttatttttgggcacttgttgttttgttactctaccttgagtagcaaggtcaatacctattcaaagattcagactagtatgataagcatttttccttatgtaggacatttgtgatgtgtgcccagagaagttgccaaattacgaggctaagataaagaatttctttgaagaacacttgcatactgatgaagagatacgatattgccttgagggtagcggtaggtgcctttgttttgcatctggaggcgttttttttgaagacagaaaatctaatagtcagcaggttttctttctagttactgtcgatgtttaatcgtttttacacttatgttctcaaggctactttgatgtgagggaccaagatgatcagtggatccgtgtagcggtaaagaaagggggcatgatcgttttgcctgcaggaatgtatcatcgctttacgttggatagtgacaactacatcaaggtatctttgacttctttctctgttcacactatgagttttgttctttttaactctggtaattgttgattagatgatgataccttttctttgtgaagccgtttatgccattcatttactcttgatttagtcggctacacttattttaagtggaaggtagtagttcctgtttagttttagacttttagagggcgtttatcttgtccctgtcgtgtgattgtgtgattgtgcgtgttatatcatctttgcaaattttggcgttcagtcttctgttactttcttgtcttaagtcttctgtaaacaagaaccagctaaataacgacgctgctgcattgtggattttttttcctgctatgattcctcaggcaatgcgtctatttgtgggtgagcctgtctggacaccatacaatcgtccgcatgaccatctcccggctaggtatgatcctgcgtctgaagcctaaagctggactgctggagcattgttgtgtcccattctctctttcttggattctctcgcttccactttcgttattctctggttcctgttggctttaacaaaacggaacattcgcatggtttcaggaaggagtacgtcgagaaaatcatcaaccgaggtggaaaccaagccgtcgaagctcgttgagcgtgtccactctacatgtcctcctgccgtctcagcctcttgtgttttacaccctacaactcctagtaccgccgaataagatttgctatctgcaatgtgctcatgccaccgctgtgtgtgccagttaacagtttgcacgaaaccctagatattttgttatacgaatgaatgacatgtggtgtttgataaatgatgaaacgatgatggttcaaatc

SEQ ID NO: 86088 - DNA, 1401 bp, Zea Mays
agataccgcgctcaggagcattcgagaagccgaagaaaattcgaagacgaggaccagctacactgcggacggacttcgggcatggagggccagttccaggttggcaaggaggaggtcatccaagcatggtacatggacgacagtgaagaggaccagaggcttcctcatcatcgtgagcccaaagaattcattcctctcgacaaactttccgaactaggaatattaagctggcgcctaaatgctgatgattgggagaatgatgagaacctcaagaaaattcgtgaagccaggggttactcttacatggacatttgtgatgtgtgcccagagaagttgccaaattacgaggctaagataaagaatttctttgaagaacacttgcatactgatgaagagatacgatattgccttgagggtagcggctactttgatgtgagggaccaagatgatcagtggatccgtgtagcggtaaagaaagggggcatgatcgttttgcctgcaggaatgtatcatcgctttacgttggatagtgacaactacatcaaggtatctttgacttctttctctgttcacactatgagttttgttctttttaactctggtaattgttgattagatgatgataccttttctttgtgaagccgtttatgccattcatttactcttgatttagtcggctacacttattttaagtggaaggtagtagttcctgtttagttttagacttttagagggcgtttatcttgtccctgtcgtgtgattgtgtgattgtgcgtgttatatcatctttgcaaattttggcgttcagtcttctgttactttcttgtcttaagtcttctgtaaacaagaaccagctaaataacgacgctgctgcattgtggattttttttcctgctatgattcctcaggcaatgcgtctatttgtgggtgagcctgtctggacaccatacaatcgtccgcatgaccatctcccggctaggtatgatcctgcgtctgaagcctaaagctggactgctggagcattgttgtgtcccattctctctttcttggattctctcgcttccactttcgttattctctggttcctgttggctttaacaaaacggaacattcgcatggtttcaggaaggagtacgtcgagaaaatcatcaaccgaggtggaaaccaagccgtcgaagctcgttgagcgtgtccactctacatgtcctcctgccgtctcagcctcttgtgttttacaccctacaactcctagtaccgccgaataagatttgctatctgcaatgtgctcatgccaccgctgtgtgtgccagttaacagtttgcacgaaaccctagatattttgttatacgaatgaatgacatgtggtgtttgataaatgatgaaacgatgatggttcaaatc

SEQ ID NO: 86089 - DNA, 796 bp, Zea Mays
agcaggagaagagagacgacacagcagcttttttggtttccccttccctttccccgcgcggtgatcgctgggttctccgcgagcgaggcagagcactgcgcgtcctccgtgaccgcctggtgatcgctgggggttctggacgttggcgtttcatttggttggttggtggttggcagcagccgtggcgagatggacctgatgctgccggtgacggtgaaggaggagtggccgccggaagaggaggaggaggaggacgtggacgcggacgcggacgctccgcggccgatggaggggctgcacgaggtcgggccaccgccgttcctgaccaagacgttcgacctggtggccgacccggccaccgacgaggtcatctcctggggccgcgccggcaacagtttcgtggtctgggatccccacgtgttcgccgccgtgctgctccccaggttctttaagcacaacaacttctccagctttgtccgccagctgaacacctatgtgagtgccccaagtactctgcttgctcagttgctgtcgtgtgattttttgtttctggttggctttgtgctcgcgcgctctggttttgcagttcatctcgcctcttgcattgtggagtacagtagcatgagctatcagtcgacaagtctgtctctattattattacttaccgaaagaacaagtctgtatatatatataagcattttgtgtgattcacaatgacttggagctgatacaatcgttgaacgcgtattgcttttctttggcggcctagcaaatacaatggcaaaatgggcaaatg

SEQ ID NO: 86090 - DNA, 1911 bp, Zea Mays
agcaggagaagagagacgacacagcagcttttttggtttccccttccctttccccgcgcggtgatcgctgggttctccgcgagcgaggcagagcactgcgcgtcctccgtgaccgcctggtgatcgctgggggttctggacgttggcgtttcatttggttggttggtggttggcagcagccgtggcgagatggacctgatgctgccggtgacggtgaaggaggagtggccgccggaagaggaggaggaggaggacgtggacgcggacgcggacgctccgcggccgatggaggggctgcacgaggtcgggccaccgccgttcctgaccaagacgttcgacctggtggccgacccggccaccgacgaggtcatctcctggggccgcgccggcaacagtttcgtggtctgggatccccacgtgttcgccgccgtgctgctccccaggttctttaagcacaacaacttctccagctttgtccgccagctgaacacctatctagatggaccaggacaagggatgaacgaagctactacagcctacgagaaagaaacaaactgcttgtttgtcctaaagataaagaagactcactcctttgatcaccactcaccaccaagcaatatactgctagtgtataccactgcccgtgcctgtaaattcggtcgcaaaacttatgtgaaacctaaagttttacataaatttgccatcttgtcttgttaattggctcagcgtcggcatttgtcgattcttagtgtgtgatggcttctggaaatgcagcttactgaacgctgcgcgtgttcatcgctttgcgacgtgcagggcttcagaaagatcgacccggacagctgggagttcgcgaacgaaggattcctgaggggccagaggcatcttctccggctgatcaagcgtcgaaggccggcgccaccgccgccgtacctccaggcgtcgcagtcgcaggggtcgtgcctggaggtgggccggttcggagggctggacggagagatggagcggctgaggcgtgacaagagcatcctgctggcggaggtggtgaagctgcggcaggagcagcagagcacgcgggcgggcatgcgggccatggaggagcggctgcggcacgcggagcacaagcaggtgcagatgatggggttcctggcgcgggcggtgcagagcccagacttgttccagctgctggcacagcagcaagcccggcggagggagctggagggcgcggcgctgctctccgccgcctcccggaagcggaggcggcccatcggcgccgcgccggccaacggcggcttgcagcagcaggaggaggagcagcagcagggcgacgacgacgaccccaccgccacgcgggcgctgttcgcggagctggacgagcgagggaccacgtcggagctggagaacctggcgctcaacatccaggggctcggcaagcgcaggcaggacgggagcgagaagcagggtggccgcgcgcggagccagcagcagggcgggttcgagacggcggagctcaccgacgacttttgggaggagctgctgaacgaagggatgaagggcggtgcggaggctgagacgctgccgccggagaggagacgaccggcttggtacgtcgacgcgctggcgcagaagttgagctccatgagcaataacaccacggcgaagtagagatgatcgcgttaattaatcctatacgactagtaacagtagcttaattatccctccgacaggggtcagtgaatactcttagcgatagctccattgttgtagattatagtatataggagtgggatcgtggtggttacactatgtcattttgtgcagagtgcagacgtgtagtgtatatagtattcttggtacctaccctgtgttgtacccagcgcaagtatattccacagtcgccgggccgtgtca

SEQ ID NO: 86091 - DNA, 221 bp, Zea Mays
tcagaagctggcagggaggtgaaagagattgaggagctggaggagaaggcatcatttttcagaagctggcaggtctcatggaggtgaaacatgatttcatggacttcttgcaggggccgagcaaggaagagatggagttgttggatcagctgaacatggaagcgactgaagttgagaaagtcttcagtcgctcactaccattgaggaagctaaggtagctg

SEQ ID NO: 86092 - DNA, 2439 bp, Zea Mays
gctcactaggccttttcattttttttcaactcccctccgtgcttccgctgtcactgtagtgcatgcaagaggagtggtaaaaagagacgttgcctataccttgagctacctctcatccatcagagctgagcgagacagggagtgtgtgtgtgatgcaacggatggtgtccatcgtcctttcctatgactaggaggagtcagctgctagctagtgttgcgtcgtccatcgcatcacctgcttgcttccgttgccggtgctttgcaatacatacgtcttgcaagagctgagctaagctgagctgagagacggcttgcatttggtgttgtgtgcctagctagctacatatattctgtagctaataagctaagctttagctcattggtggggtgcttgtattggcttgttgcaccggccggccgccatgcaggggcaagttgctggtgacgacgcaggtggtgcaggcagccctagcaggcggcgggagagctcggccgccgcgcgcttggtgcgtggccccatcatcgtcggcgcggggccgtccgggctggccgtggcggcgacgctgagccggcacgcggtgcccttcacggtgctggagcgttccgacggcatcgccgacctgtggacgaaccgcacgtacgaccggctccggctgcacctccccaaggtgttctgcgagctcccgcacgcccgcttcccggccgacttccccacgtacccgacgaagcacgacttcctccggtacctccgctcctacgccgcgcgcttcgccgtggccccgctgttcgggcgcacggtgacctgcgcgcggtacgacgcggaggcgtcgctctggagggtcacggcggtgtcgtcgtcgtcgactgccgcgggcggcggcgcggcggcggagacgacgactgagaccgagtacgtgtcgccgtggctggtggtggccagcggggagaacgcggaggtggtggtgcccacggtgaaggggagggagaggttcggcggggaggtgctgcactccagcacgtacaggagcggggagaggttcaagggcatgagggtcctggtcgtgggctgtggcaactccggcatggagatgtgcttggacttgtgcgagcacggtgccatgcccttcatgtccgtcaggagcggggtgcacgttctgccgagagagatgttcggggcctcaacgttcggcatcgccatgaaactgctccgatggctgccgatcaagatggtggacaggctcctgctcctggtggcgaggatggtcctgggtgacaccgagaagcacgggctgaggaggcccaagctaggcccgctggagatcaagaacgtcaccggcaagagccctgttctggacgtgggagcatggtcgttcatcaaatctggaaacatcaagatcgtgccagaagtggagtcattcaccggcagcaacggggtgaggttcgtgaacggcgacgagatggccttcgactctgtcatcttcgccaccggctacagaagcaacgtcccttgctggctcaaggatgacggcgagctgttcaccgaggacggaaaggcgaaagctgagcagccgagcgacgacgacaggtggaggggtcccaacgggctgtaccgcgtggggttctccggccagggcttgctcggcgctggcgcggacgcgctgagggccgccgccgacatcgccgggaggtggcaggcggaggtggcagcagcggtggctggagccaaggtttcctcggcctcggtgtagtcgtcgtccacagagcgtgcatgcatggtggtgttgctgcgcctgctgctcgctgctccgtgtgacgacgacgatcgtgacctagctagcggtcggccggccggccggctgctatgtatgtactaccccgtatgtagcaagccaagagggatgtcgagcggggactgctggtgacgacgactgggcggcgtgagtgagcaagcgaggagcagcacgcagcaggtgcccctgatggacggcgctgtgcgctgctgtgcatgtgcgtgctgaagcagcagcagctgcctgcgcgctccctgcagctagctctccgatcgatccagtccttgtgctgcacagatcactgacgacgtgtgtgtgtgtgtgtgtggtggggtgctgcgctgaggaggaagaggccgccgggtgaccagccggcgtcgctctgtgtacgtgtacgtgtgcgcgcgtatgtgcaggaggctggggctgtgacaaaattttgcataggacgtcgtttgtctcatgtacccgtgcatgcacatagcgatgaaatagcgcatgcgtctttttctttcttgtgtccaaggatgcaggcgctgatgtcgtccgcattacgcgtctccgattccaatacccttcggttggtttgcccccacactctgtctctctgcctccttttacttttccttctcaatgcagtgctgccctg

SEQ ID NO: 86093 - DNA, 96 bp, Zea Mays
gaagaaggtctttatcaaaagcaagagaagaaagaacatgctacatgtgtggtagctaatatcatcttattgttgagtatccatagaataatgaag

SEQ ID NO: 86094 - DNA, 345 bp, Zea Mays
atgggggtgcaggatttgctgcgagctgaaatgagtgaaacttttgccgccaaggaggcgctttctgaagatgaactgaggaatgagaagctggccaggctgcttggagttgaggaagttaagaacaaacggcttcaaaactccctcaaaaggatggagaagacttctaatctggatgaggaaaacagaatgattcgacaggctatggcgttaaaccctgctattgtcaggtcgtcatcaagcgaaaaccatgaaggcacctgcagatttgatataaggtttgatgaactgatggagagtgctaggaaactgatcaaagcgacatcaaaggagatcaacaagtga

SEQ ID NO: 86095 - DNA, 1137 bp, Zea Mays
ttccgtttttgcaactgcgagcgcgaggtttcgacctgctctggctgtctgggctctggtaggccaactagtgggccagatatcaccagccggaaattagcaaaaatgctacggcctagcccaggtcacccagtcaccctggtatgcgaaaacgcaaaattttcgcgccacccaaaaaaattcgcgcccgggaacgaaaacccggcgcgcgcgcgccatcgggactcggcgcccacccgattcaaaccccaacccaaaattttcccctgcgtggcgcgtttaaagacctttgctcccgcattgaacagggacgggagaaaatctccaaacgcagcagagcccctcgcgccgccggcctcttcagccttgcagcacaccgccgccagcccgagtgaccgctgcagcctaggtttccggcgccgatggcgggtaagggagggaagggtctgctggcggccaagacgacggcggccaagagcaccgacaaggacaaggacaggaagaaggcccccgtgtcgcgctcttcccgcgccggcctccagttcccggtgggtcgcatccaccgccagctcaagtcgcgtgcctctgcgcacggccgcgtcggcgccaccgccgccgtctattccgccgccatcctcgagtacctcaccgccgaggtcctcgagctggccggcaacgccagcaaggacctcaaggtcaagcgcatcaccccgcgccacctgcagctcgccatccgcggggacgaggagctcgacaccctcatcaagggcaccatcgccgggggcggcgtcatcccgcacatccacaagtcgctcatcaacaagaccgccaaggagtgaatcaaggccgtgctgctgcttctgcctgactacagtcccatctcgttctgtacttgtgcaatctgagtttaagtgcatgttggcacagttctagtaaactcatcctgttcacctatgcttctatcttgttaatttaagctctattccgcgagctttttggattgctggtatcgtgattaacgggttcgtaaaattagtacgtcgaaccttgcaattgaatccgattgtttggttctttttttttgctatcgttctgacgtcgtagacagctatttaagctattaaccgtaaacgctgc

SEQ ID NO: 86096 - DNA, 1739 bp, Zea Mays
ccaacagatcaagcctagcaggaaataaaaatctgtaagagagaacaaaaaaaaaggagtcaatcgccggcgacgggtacgggtgtgtacgcctgaggcgatcggcagagaagaccgagaccgacggctccagtgccgctgtgccactgccagtctgccacagccagccgcctagcttgatccgccttttgtgctgtgcggatatgagggccgcgcagatcgatccgtcccccgcggcgccgcccaagtcgcggctgaagcgcctcttcgagcgccagctgctgcgggtctcgccggccgagcgcctcccgtcggcgcctcccggtggcggggacaaggatgagctgccggagcctagctcgctgtgcctggacggcatggtgcggagcttcctggaggacggcggcggcggcggcggagccgagcgggcggcagcggccgcgcggtgctgcaactgcttccacgccggcgacacctccgacgacgaggacggcccggctgccgccgacgccgcggccgctgacatcgcggagacaatcaaggggctcgtccactgcgccagcctccgggagcgcaacctgctggccgacgtgtcgacgctggtggagcgccaccgcgcgtcgggggcgcgcaagcgcgacctgctccgcctgctggcggggtccctccgcgcggcgggccacgacgccgcggtctgcctctcccgctgggacaggtcgccgtcccaccccgccggggaccacgcgtacctggacgtgctcctcccggccgcgtcggagcgcgccgggcgcgagcgcgtgctggtggacgtcgacttccggtccgccttcgaggtggcgcggcccaccaaggcgtaccgcgccgtgctgcagcgtctgccgccggtcttcgtcgggcgggacgaccgcctgcgcctcctcgtggcggccgccgccgacgcggcccgcgccagcctcaagaagcgcggcctccacctgccgccgtggcgcaagcccgagtacatgcgcgccaggtggctttccccctacgaccgcgaggctccgcagcccgaggccagcaccggtgagctcgccggcgacggcgagggaggtgggcccactgcttaatcaccgaggtcgtttttggaatttcctttttgctcttgcccttggggaatttgccgtgtggtccttgtgtgcgtacagggactagacgcgaatgtcctgctctgtttgtttttttcccttttcacccttttgatgggggtgtctgtttcgccgcgccggaagtcgtagtactgtagtagtagtagctagtgctggtaatgatggagaagagaaaggacacaccaaaaaaaattgcagctttattagattgatgatgaggtaaaagaaaaaggagattccggacagagacccgtcgttgttccaggcagcggaacctgacagcgaagaaagaaccacggagatgcatgatttgttgctcgcgatcctgtatgatctgtcttcgttctggagaagccgctcccaccctcgatttggatttgggatggtgtgtcggggaaagaggtcgacgcatcggaatcgcagtagctcgcttgcgggatggaaacgccattacgaagttgtttatgctgagtttgttgtgctgcgggttaatctcaggtgggataaagtggggatctggtcagcaaagtgcaaggggtgggatagcaagcgggcgggctatcctgtcggattcaacgagatcgttttgccccc

SEQ ID NO: 86097 - DNA, 1935 bp, Zea Mays
gctcagtgttcagctagctcacacactatactctgctctcgttccttctctagcagcacgtacacgttgtggtgtagctggatcgatcaacaagaaccccagccacgaatccacgatagcattcccatggcgtcgttgaatcagcatcggtccatggccacggaccgagagctgttccggacggtgcggcaggcggcactgaaccacgcgaggcagctgtaccaccggctggtgaggcgcctgccgcacctcctggccgtgacgctggtcgtgggcgcggtccagctcgtgccgccgtcgtccgcgccgctgccgccgctcggggcgctgctgcgcgaggcggcggcgcgcgcgcgcgccgacgcggggctcgtggccgcggcggccgcggggctggcggcggcggcgtgcgcgtacgcggcgtcgcgcccgcggcccgtgtacctggtggagctggcggcgtaccggccgggccccgcgcaccgggccacccgcgccgagtccgtgcggcacttcgcgcgggcggggcggttcacggacgagagcgtggcgttccagacgcggatgctggagcgcgcgggcgtcggggatgccacccacttcccggcctccatcctcgcgttccccgtggacatgagcctccgcgccgccagggaggagtccgaggccgtcgtgttcggcgtggtcgacggcgtcctggccgccgccgccgtgcgcgcggcggacatcggcgtggtcatcgtcaactccagcctcttcagccccacgccgtccttcacgtcgctgctcgtcagccgctacggactccggcacgacgtcgtcacccacaacctcagcggcatgggctgcagcgccagcatcatcgccattgacctcgccaagcacctgcttcaggtgcacccggagacgtacgcgctggtggtgagcacggagaacatcacgctcaacgcctacctgggcaaccaccgcccgatgctggtgaccaacacgctgttccggatgggcggcgccgcggtgctcctctccaaccgccgcgccgaccgggcccgcgccaggtaccggctggtgcacacggtgcggacgcaccggggcggcgccagcgacgagagctacgcgtgcgtcacgcaggaggaggacgccgagggcaacgtcggcgtctcgctctccaggggcctcatgtccgtggccggcgacgcgctgcgctccaacatcacggcgctgggcccgctcgtcctcccgctgtcggagcagctgcgcttcctggccgccgcgctgctccgccgcgtcgccgcggtcaagccctacgtgccggacttcaagctcgcgctggagcacttctgcatccacgccggcggccgcggcgtgctggacgagctggagcgcagcctcggcctcagcgcctggcacatggagccgtcgaggatgacgctctaccgcttcggcaacacctccagcagctcgctctggtacgagctcgcctactgcgaggccaagggccggatcaagagaggggaccgcgtctggcagatcgcctttgggtcgggcttcaagtgcaacagcgccgtctggaaggcgctacggacggtggacgacgccggccgccgggacaccaacccctgggccgacgacatccacgacctgccggtgcacgtgcccaaggtgtcgcccttcgcttcttccgaccaggcgccgcccaccaacgcccagcatgcctagctatagccaacgttgcccgtgctacgccaatcttgcttctgctgctactacctacgtatactgtatgccccaagcaaagaaccggagcatgtgcctgcacttctgcttattggccgccattgttatcatcattgttgttactaattatacagggcattattgctcagtttgtactgctacgaattacaattactagtagtgtgtaaatcgcaatggact

SEQ ID NO: 86098 - DNA, 3038 bp, Zea Mays
cttcatcttcctcctcagtccctcacccggcacgaatttctctctctcccagcaatggcgggctggccgccgccgccctaggcgtgctagcctactgtatggtgcagaatataggtggcagggctcctttgctggcttcgggcgacgcccagtatttgctccgcgcctgctcctgctcctgctccagccaggtctgcccatcagccctcatcaaacccggctcctaccccgtcccgcgggggcctggctgccttcaccaccgaagccgaagcggtagccgcgcctcctaggatccgccacctgctagcggtgaaagagacccggcggtccgagctcctcgccaccgccagcacgtcgtgtcgggcgtgaacctgcgccgacaaccgggtggataacagcagggtgacatgctgaccccgtgcgattgctttctccatgtccccgcccatccacggccgagtcttaaagctccggcgccctggagagacaatgttctcagcttccagataaacacagtctctgcgccagataggactgttgaaatttgcccagatttggtagttccatgcacggtttccaaacgggctgtcagagggaggaagaagaaaggcaactgggtccattacggtgggttgcttccggcaatgctggagacactagaggatgttcgggatgttggggaagcgctctgggcgtggaaggacaccctgagcaacagggagaagactatcatcctcaaggagcagaaagattggcgacgggcagtcgaaatctttgactggtttcgcagggagcaaggccatgagcttaatgtgattcactacaatgtcgtgctcaatacagttgggaaggcaaggaggtgggacctcgttcttaggctgtggtatgagatgcattcctttggcgtggctccggacaactcaacatatggtacgctgatcaatgtctgttgtcaaggcggaagagaatggacggctttgctttggcttggggacatgtgcaagcgtggtctgatgcctgatgaggtcactatgagtattgtgatgcaggcacataagaaggctggagagtatgaaacagctgagattttctttgaaaggtggtcctcagattcaatcagaaggatggagggacgttctcactacaacctatatacttacaacaccttgattgatacttatggaaaggctggtcatcttgagaaagtatcagatacattcaaccaaatgttgagcgaaggtgttgcaccaagcgttgttacatttaactcaatgattcatgcttggggtaagcaccaccgaatggagaaagttgcttctttggttcgaatgatggaggaattccagtgctttcctgacaccaggacttacaatatactgatcgcactttacagagaaagcgatgatattgatattgcagagtactactactggaagatgaaaacagaaaacttggtaccagatgttgtgagctgccgcacgctcttatatggatactctatcaggggcatggtcactaaagcggaagcccttctgaaggaaatggatgagaggggcttcatggtagatgaatacacacaatcagctttgacaaggatgtatgtaaatgttgggatgcttgaacaagcttggcgttggtttgacaggttccaccaccatatgaattctgaatgcttttctgcaaatattgatgcttttggagagaaaggatacatagttcttgcagagaaggcttttgtatgttgcctaaagaagaagatgatcagtgtttctgcatgcaatgttatgatcaaagcatatgggttggtagggatgcttgatgaggcatgcgagatagctaatggcatggagaggtatgacattttgcctgattatgtgacatacacttctctcattcaacttctgtcaactgctaaactgccaaagaaggctatttactacttagaaaaaatgaaagttgtgaaattgctgtcagattgtatcccatactctgtggtaattagtagctttgctaagaatggtgatctacgaatgtccgaatacctatttagagaaatgatcatgtcaggggtccgtcctgatatttttgtctactctatcttaattgatgcatacgctgaagttggaaatgtccaacaagcttcagcatattttggtttaatgaaaaaggatggtttatatgagaatgttacaatctacaattctttgataaagctctacacaaaagtagggtatgtgccagaggcccgaggagcatataagttactcaaatcattggataccaatgccatcctttatgcatctaattgcatgattgatctctatagtgatcattgtatggtgaaggaagcatgtgaggtttttgacagtttgaaagttaggggaattgccaatgaattctcacatgcaatgatggtgtgtatgtacaagaaagttggtcgctatgatgtggctcacagggtttgcaaggaaatgcaagctttaggacttctaactcagttactaagctacaattctgtaatccaaatgtatgtgtctggtggaagaacggaggaggctcttaaaatattcaagaagatgttggcatcgaacacaccaccaaatgatgcaacattccaggcactaaaggttattctagtaagaagtggagtcacaaagaatgagacaagaaagttagaattgttaagaagaaataacagtcatgattgcttgcatcagtggtacagggcaatatcttcagctgtaagatcaaatgcaaattcttttcaaacagggttattgatcgatctgctacaagggcacatccttttgacattaataattgtaggagtagaaaaggaagtacacaaaagcaagtaacttcctaactgataatggttgaaacttagatgtagatacactttaatgatgttccatctactgaactgtacacagaatggggtgaaccatctttgagaaaaagaatgttgacagttgattggctgtctggctgatgcacggtgaattcataggaatcattttcacatgggtgtggatcct

SEQ ID NO: 86099 - DNA, 2799 bp, Zea Mays
atgctgaccccgtgcgattgctttctccatgtccccgcccatccacggccgagtcttaaagctccggcgccctggagagacaatgttctcagcttccagataaacacagtctctgcgccagataggactgttgaaatttgcccagatttggtagttccatgcacggtttccaaacgggctgtcagagggaggaagaagaaaggcaactgggtccattacggtgggttgcttccggcaatgctggagacactagaggatgttcgggatgttggggaagcgctctgggcgtggaaggacaccctgagcaacagggagaagactatcatcctcaaggagcagaaagattggcgacgggcagtcgaaatctttgactggtttcgcagggagcaaggccatgagcttaatgtgattcactacaatgtcgtgctcaatacagttgggaaggcaaggaggtgggacctcgttcttaggctgtggtatgagatgcattcctttggcgtggctccggacaactcaacatatggtacgctgatcaatgtctgttgtcaaggcggaagagaatggacggctttgctttggcttggggacatgtgcaagcgtggtctgatgcctgatgaggtcactatgagtattgtgatgcaggcacataagaaggctggagagtatgaaacagctgagattttctttgaaaggtggtcctcagattcaatcagaaggatggagggacgttctcactacaacctatatacttacaacaccttgattgatacttatggaaaggctggtcatcttgagaaagtatcagatacattcaaccaaatgttgagcgaaggtgttgcaccaagcgttgttacatttaactcaatgattcatgcttggggtaagcaccaccgaatggagaaagttgcttctttggttcgaatgatggaggaattccagtgctttcctgacaccaggacttacaatatactgatcgcactttacagagaaagcgatgatattgatattgcagagtactactactggaagatgaaaacagaaaacttggtaccagatgttgtgagctgccgcacgctcttatatggatactctatcaggggcatggtcactaaagcggaagcccttctgaaggaaatggatgagaggggcttcatggtagatgaatacacacaatcagctttgacaaggatgtatgtaaatgttgggatgcttgaacaagcttggcgttggtttgacaggttccaccaccatatgaattctgaatgcttttctgcaaatattgatgcttttggagagaaaggatacatagttcttgcagagaaggcttttgtatgttgcctaaagaagaagatgatcagtgtttctgcatgcaatgttatgatcaaagcatatgggttggtagggatgcttgatgaggcatgcgagatagctaatggcatggagaggtatgacattttgcctgattatgtgacatacacttctctcattcaacttctgtcaactgctaaactgccaaagaaggctatttactacttagaaaaaatgaaagttgtgaaattgctgtcagattgtatcccatactctgtggtaattagtagctttgctaagaatggtgatctacgaatgtccgaatacctatttagagaaatgatcatgtcaggggtccgtcctgatatttttgtctactctatcttaattgatgcatacgctgaagttggaaatgtccaacaagcttcagcatattttggtttaatgaaaaaggatggtttatatgagaatgttacaatctacaattctttgataaagctctacacaaaagtagggtatgtgccagaggcccgaggagcatataagttactcaaatcattggataccaatgccatcctttatgcatctaattgcatgattgatctctatagtgatcattgtatggtgaaggaagcatgtgaggtttttgacagtttgaaagttaggggaattgccaatgaattctcacatgcaatgatggtgtgtatgtacaagaaagttggtcgctatgatgtggctcacagggtttgcaaggaaatgcaagctttaggacttctaactcagttactaagctacaattctgtaatccaaatgtatgtgtctggtggaagaacggaggaggctcttaaaatattcaagaagatgttggcatcgaacacaccaccaaatgatgcaacattccaggcactaaaggttattctagtaagaagtggagtcacaaagaatgagacaagaaagttagaattgttaagaagaaataacagtcatgattgcttgcatcagtggtacagggcaatatcttcagctgtaagatcaaatgcaaattcttttcaaacataatggtgcctggaatgtttgaaaagaaacataatggcaccaccattccaggcactacagggttattgatcgatctgctacaagggcacatccttttgacattaataattgtaggagtagaaaaggaagtacacaaaagcaagtaacttcctaactgataatggttgaaacttagatgtagatacactttaatgatgttccatctactgaactgtacacagaatggggtgaaccatctttgagaaaaagaatgttgacagttgattggctgtctggctgatgcacggtgaattcataggaatcattttcacatgggtgtggatcctgctgaaatcttctgcaggtgaattttgttactttcgcaatccatgcttctactaaaaattgaactgctttatctgacctcaacaaaagattcagtactgatatctccaa

SEQ ID NO: 86100 - DNA, 968 bp, Zea Mays
gtatcacgcagttctcagtttcgtctcggcactgctctgcctcttcccttgccttgccctgcccttttcccccttctcccccgcgggcgcggggcgggcctgcggccgccttcggggctagggtttcgtgctcgcctcgcccagtcggtatcttgcgcgtcgtcgtccgggatcgatccgagcgcgccccctaccgctccgtgccccgtttttccggcccgctcggctcgatcgtgctctccccgacggcatcggtttgaagtgagctgcctggtgtttgtctgtatagttaattagctgggccccactgtctgcagaagtggcatatcctggattcaattctgagcaaagtcgttccatgtttcttgcggatcatttgtgatctactgatggtttcttgtttgcccgcattgattctcctgtatgctggccgcatataacatggtgaggccatggggagtggagcgaaagctggtgatggtagggaatggcaacttgaggccccggaggaattccttgtacataccgctctctacttggtcttggagaagataacctgagaccccgctcaggtgaaagccccaacgcagctgacccctcgcaagaggagttactcgtctgcacgtgcccatcaactactcctgcaactattctccacactaacactgatgagctcatcccggtggttctccatcaagttgaggtctagtgatagctaactatatagtacgctactaccacccttggtttctcatttcttcaagcttgacagcgcgctttattttgtttgtggtcgacccctaaagtgagctagtgttgcgcgctcaactcaagatggaccttcaaagcgtcgtgtcgtgtgttttaggcgtgagtgtattgtagactggggattggtggactggatgcttatatatattattattatactaaatttgcaatgcaattgtaatcctgatcctgaataa

SEQ ID NO: 86101 - DNA, 787 bp, Zea Mays
gtatcacgcagttctcagtttcgtctcggcactgctctgcctcttcccttgccttgccctgcccttttcccccttctcccccgcgggcgcggggcgggcctgcggccgccttcggggctagggtttcgtgctcgcctcgcccagtcggtatcttgcgcgtcgtcgtccgggatcgatccgagcgcgccccctaccgctccgtgccccgtttttccggcccgctcggctcgatcgtgctctccccgacggcatcggtttgaagggtgaggccatggggagtggagcgaaagctggtgatggtagggaatggcaacttgaggccccggaggaattccttgtacataccgctctctacttggtcttggagaagataacctgagaccccgctcaggtgaaagccccaacgcagctgacccctcgcaagaggagttactcgtctgcacgtgcccatcaactactcctgcaactattctccacactaacactgatgagctcatcccggtggttctccatcaagttgaggtctagtgatagctaactatatagtacgctactaccacccttggtttctcatttcttcaagcttgacagcgcgctttattttgtttgtggtcgacccctaaagtgagctagtgttgcgcgctcaactcaagatggaccttcaaagcgtcgtgtcgtgtgttttaggcgtgagtgtattgtagactggggattggtggactggatgcttatatatattattattatactaaatttgcaatgcaattgtaatcctgatcctgaataa

SEQ ID NO: 86102 - DNA, 3124 bp, Zea Mays
cgccctcatcctgttttgcttgcccgcatccccgtcagtcattttggtgaaaaccgaaaagcgcctcccctcctgctctgctcctgcctctctcgtcactcgtcattgcggccgggcactgggccactggcatcgtaacaactgccgatacgcccgagacagcgcgggcggagccagcgagagggaaggccatgaggtcgcagctcaacgcgtccttctcgccgccgccctcgctccggcgagctctcccctctgccacgccccgcgccctcaggtacggcgagcgcaccgcttcgatcggctccgcgtttctgctccgcagagcgacggaggctggcaggctgctgaacacagctctccctggttccaggttccacgcgttcccgtggcggttccgcgctcctcagcaccacggccgcggcgctggagctcgctgcgctaccaatctgcccgcgcccggcagccatggagtcggagtgctcgcctccgagaggagggccgacgatggcgacactaccgtgaaaaatgcagatgcgcctagcacttcaacggcgacgcagggaaacctcaacatggctgccattgttagcatagcattctgctttctacacagaattgtttctggacggatgcagtcgatgatgaatttgttcccttggatgtcaaacggcattgcaagcttgccatttgcttgcatatctgatcctaccagaaaacccatgcctcttaagctagatttgactcttccaccactgcctgatttcggatggaatttttcgcgactgtactatcggttcaattctcagcttgatcggaacattgccttgtctatcattaccttgctcatcacttgcttttcatttgtcattgttggaggattactgtttcataagttcaggaagcaacaacaatccctggaggactgcttttgggaagcttgggcatgtctatgttcatcatctacccatctaaggcaaaagacacgtgttgagcgtgtcattgggttctttcttgctatctggggtatattattctattctcgattattaagtgcaatgacagaacaatttagaaaccagatgcataaagtaagggaaggggcacaggtgcaggttattgaggatgatcatatcattatttgtggagtcaatagtcatctgatgtctatattgaaccaattgaataagtaccatgaatcatcaattcgcttaggtttagctacagcaaggaagcagaaaatccttcttctctccgatcttccaaggaagcagattgataaacttgcagatagcttggccaaagatttaaaccatattgatgtattcaccaagagttgtagtcttagcatgtcaacgtcatttgagagagcagcagcacacaaagcaaaatctataattatcttgccagcacagcatgaacgatatgaagtggatacagatgcatttgtctctctattggctctacaaccctgtaaacaaattgcacctgttcctatcattgtcgaggcttccaatgcaaccacttgtgaacttctgaaatcaatcactggcttaaatgtgcaacctgtggagatggttgcttctaagttatttgtgcagtgctctaggcaaaaggaccttctgaaaatctacaagcacttgcttaatcagcacaaaaatgttttcaaccttttcaggcggcctgaattagagggcatgaagtatatggatgcagtcgtttgtggtatcttccggtctggaaaaattcattttcacccaagcgaggaagaactactgaaagaaacagacaaattgcttcttattgctcctgttcgtgggatgaaaagaccacaatatagagcattaagtgtacggaaagaaacacaaacattgagtcgtaactcagagccaagagagggtcaaggatcatttaatatggctactaccatggataatgaaacacggctaaataacattgtaaagcgccccttgaaatctctttctaagagcagtgattatatgcttggacccaaggaatgtgtacttattgttggttggcggccaaaagttaccgaaatgatacgggagtacgataattaccttggacctggtagtacagtggaaatcttgtcggaaacccctattaaagagaggagcagtatcatcaacccccttttgcagagccagcttaaaaatgttaaagttactcaccgggtggggtgtcctttgaactacgatactctgaaggaaacaataattaacgtacgagaatctgccaagtcagataaagaggttccactgtcaatagttgtgatatctgacagagactggtttgttggagcagatgctgcacaggctgataaacagttggcatacacccttcttcttgctgaaaacatttgccagaaacatggcgttatggttgagaatcttgtatcagaaatcgttgacatgggactaggaaaacaaatatctaaaataagaccatccctttcatttattggagcagaggaaataatgagtcgtgtgacagcacaagttgcggaaagtagtgagctgaatgaagtatggaaggatatcctgaacgctgaaggcgatgagatctatattaaggaaattgggctgtacatgaaggaaggagagaaaatatcattcttggagctctctgaaagagcagttttacgccgtgaagttgcgattggttacatcaaggacggcaagcagcatattaatcctatcaacaaatcggagccgctgtcccttgaaatgaatgattcgctcattgtgatatcggagtttgaaggtgaacaaccaattatgatgggcggagaaacttcaggatgaaattttcagctttatatctcttcacagaaactctaacaactcttgctaccatgaagagatgacatataacctgtttataatccttttctttttgtacaaagggaaagcaaaatatagtttaaaggccacaaatcaagttttgttcctcccatagccgtagaacttctttgatgcaaatattttactgcacagtttaaccgcagaatcttttctatttatctgtaaacatagtgaataacacaggcaacttgtatggtacagatgtctgaataaaggaaggatgaaggaaaattgattgacta

SEQ ID NO: 86103 - DNA, 2094 bp, Zea Mays
cacaccactacaccagacgaaccgtctatctggccaggcctcgccacgcctatccgcaccctcccctcccctcccctcccctcccctactctctcggaagcggcgccgctgccgccgcagcggcgaggagccagccatggcggcgcacgcgacgctccccttctcctgctcctccacgctgcagaccctgacccgcaccctctcctcgcgcggggctcaccagctccgcgggggcttcctccgcctcccctccctcgcggcgctcccgaggctggcccacccctgccgccgccacgtctcggcgtccgctgcggcggcgcccaatggcgcctccgttgagggggagtacgactacgacctcttcaccatcggtgccgggagcggcggcgtccgcgcgtcgcgcttcgcctccgcgctctacggctcgcgcgtcgccatctgcgagatgcccttcgccacgatcgcctcggacgagctcggtggcctcggcggcacatgcgtgcttcgtggatgtgttccaaagaaattgctagtgtacgcatccaagtactctcacgagtttgaagagtctcgtggatttggatggacatatgagactgatccgaagcatgattggagcactctcatagccaataaaaatacagagctgcagcgcctggttggcatttacaggaatattttaaacaatgcaggagtcactctgatcgaaggtcgtggaaagatagtcgatcctcatactgtcagtgtgaatggtaagctctacactgctaagcacatactagttagtgttggtggccgaccatcgatgccagatatccctggtatagagcatgttatagattcggatgctgcgctggatttgccttcaaaacctgagaaaattgcaatagtgggaggtgggtatattgctttggagtttgctggcattttcaatggcttaaagagtgaagtccatgtgtttattcgtcagaagaaagttttaagaggatttgatgaagaggttagagattttgtcgctgaacaaatgtctttaaggggcatcacgtttcatacagaacagagccctcaagctataactaaatcaaatgatggtctgttatctttgaagaccaataaagaaaattttggtgggttctcacatgtaatgtttgcaacaggtcgcagaccaaattcaaagaaccttggactggaagcggtgggggttgaaatggataagaacggtgcaatagtggttgatgagtattcacgtacctcagttgattccatttgggctgttggagatgttaccaatagggtcaacctgacaccagttgcactgatggagggtggggcatttgcgaaaactgtctttggcaatgaacctaccaaaccagattacagagctataccttctgctgtgttctcccaaccaccaataggacaagttggtcttactgaggagcaggcaattgaagagtatggagatgttgatgtcttcgttgccaacttcaggcccctcaaggccactctgtctggactacctgatcgtgtattgatgaagattcttgtgtgcgctacgtcaaacaaagttgtaggagtgcacatgtgtggtgatgatgcacctgagataattcagggaattgcaattgctgttaaagctggattgacgaagcaagattttgatgccaccattggcattcaccccacatccgctgaggaattcgtcacaatgaggagcccgactagaaaaattcgaaaaagttctacagatcaggtagaatctaaagatgaggttgtaagtaagcagtagatagcattttttcctaggaggtgttctcgggggagggagtattcctgctgcaggacgacagctggacggaattttggaatacaccggcagagtagctgaaataacggctaggaatttctgagaaatttcatgttagggaaccaacgatgctgtttaatagaattggctgtacatacctgtccgccgagctattttcctgtgtcttgtacgttgaaataaaatactgcaaatgtttgccttacggtcatgaaattttgcaataaccaataagtaatcaatgcgccttcctaagcgttcgctgtgat

SEQ ID NO: 86104 - DNA, 2103 bp, Zea Mays
agacgaaccgtctatctggccaggcctcgccacgcctatccgcaccctcccctcccctcccctcccctcccctactctctcggaagcggcgccgctgccgccgcagcggcgaggagccagccatggcggcgcacgcgacgctccccttctcctgctcctccacgctgcagaccctgacccgcaccctctcctcgcgcggggctcaccagctccgcgggggcttcctccgcctcccctccctcgcggcgctcccgaggctggcccacccctgccgccgccacgtctcggcgtccgctgcggcggcgcccaatggcgcctccgttgagggggagtacgactacgacctcttcaccatcggtgccgggagcggcggcgtccgcgcgtcgcgcttcgcctccgcgctctacggctcgcgcgtcgccatctgcgagatgcccttcgccacgatcgcctcggacgagctcggtggcctcggcggcacatgcgtgcttcgtggatgtgttccaaagaaattgctagtgtacgcatccaagtactctcacgagtttgaagagtctcgtggatttggatggacatatgagactgatccgaagcatgattggagcactctcatagccaataaaaatacagagctgcagcgcctggttggcatttacaggaatattttaaacaatgcaggagtcactctgatcgaaggtcgtggaaaggttgggtgatgtttgtatatcagatagtcgatcctcatactgtcagtgtgaatggtaagctctacactgctaagcacatactagttagtgttggtggccgaccatcgatgccagatatccctggtatagagcatgttatagattcggatgctgcgctggatttgccttcaaaacctgagaaaattgcaatagtgggaggtgggtatattgctttggagtttgctggcattttcaatggcttaaagagtgaagtccatgtgtttattcgtcagaagaaagttttaagaggatttgatgaagaggttagagattttgtcgctgaacaaatgtctttaaggggcatcacgtttcatacagaacagagccctcaagctataactaaatcaaatgatggtctgttatctttgaagaccaataaagaaaattttggtgggttctcacatgtaatgtttgcaacaggtcgcagaccaaattcaaagaaccttggactggaagcggtgggggttgaaatggataagaacggtgcaatagtggttgatgagtattcacgtacctcagttgattccatttgggctgttggagatgttaccaatagggtcaacctgacaccagttgcactgatggagggtggggcatttgcgaaaactgtctttggcaatgaacctaccaaaccagattacagagctataccttctgctgtgttctcccaaccaccaataggacaagttggtcttactgaggagcaggcaattgaagagtatggagatgttgatgtcttcgttgccaacttcaggcccctcaaggccactctgtctggactacctgatcgtgtattgatgaagattcttgtgtgcgctacgtcaaacaaagttgtaggagtgcacatgtgtggtgatgatgcacctgagataattcagggaattgcaattgctgttaaagctggattgacgaagcaagattttgatgccaccattggcattcaccccacatccgctgaggaattcgtcacaatgaggagcccgactagaaaaattcgaaaaagttctacagatcaggtagaatctaaagatgaggttgtaagtaagcagtagatagcattttttcctaggaggtgttctcgggggagggagtattcctgctgcaggacgacagctggacggaattttggaatacaccggcagagtagctgaaataacggctaggaatttctgagaaatttcatgttagggaaccaacgatgctgtttaatagaattggctgtacatacctgtccgccgagctattttcctgtgtcttgtacgttgaaataaaatactgcaaatgtttgccttacggtcatgaaattttgcaataaccaataagtaatcaatgcgccttcctaagcgttcgctgtgat

SEQ ID NO: 86105 - DNA, 1270 bp, Zea Mays
gatacaacgaaacagactctaacccaacacaggtgacctggccattagatgattcctgcattacagcatggccacgcatagcctggtctagaaatctagccaggtcagggctacacaagtagccaaacagaccctatagctatctggatgtacggttacatgcctagtgcacactatctacaatgagaagggactgatgatactatcatgtagctaatttatcgatgaactagtgttgtagtgcacgtaaaatgtagtacacgatcatgttatttggaacaggggatttcacgagactatgaatcaagtcaatcaacgtgcatgggcagtgccactggttgagtgccaacaaagtggctgtatgtatgatgttaaccatttaaatcattgtccaatgatcacaactttgctttgcccaggctcagttaaatttttgggtccgccactgctccacccgattgtgtctatcccgtccgacactggccatggggccatgctatttatggatatcaactcaactgaccactcttccattgtgaattacaatttttggcagagctataccttctgctgtgttctcccaaccaccaataggacaagttggtcttactgaggagcaggcaattgaagagtatggagatgttgatgtcttcgttgccaacttcaggcccctcaaggccactctgtctggactacctgatcgtgtattgatgaagattcttgtgtgcgctacgtcaaacaaagttgtaggagtgcacatgtgtggtgatgatgcacctgagataattcagggaattgcaattgctgttaaagctggattgacgaagcaagattttgatgccaccattggcattcaccccacatccgctgaggaattcgtcacaatgaggagcccgactagaaaaattcgaaaaagttctacagatcaggtagaatctaaagatgaggttgtaagtaagcagtagatagcattttttcctaggaggtgttctcgggggagggagtattcctgctgcaggacgacagctggacggaattttggaatacaccggcagagtagctgaaataacggctaggaatttctgagaaatttcatgttagggaaccaacgatgctgtttaatagaattggctgtacatacctgtccgccgagctattttcctgtgtcttgtacgttgaaataaaatactgcaaatgtttgccttacggtcatgaaattttgcaataaccaataagtaatcaatgcgccttcctaagcgttcgctgtgat

SEQ ID NO: 86106 - DNA, 113 bp, Zea Mays
gtcgcttcgacgggtccagggctgggaaaacactcgcattctctcgcccttcttggactgacgcctggtgcgggtgcctcttggtttggagctgtttcggctgggcttatttc

SEQ ID NO: 86107 - DNA, 1300 bp, Zea Mays
cacacctgacgttctgcctcccatagtcccacccgacatcctcgcccagatcgcgtcgctaatctcgcggtcgcgcctcggccgatccgcgcccgcctgccgccgcctgcgattgtagctcaccccgacaccgcgccccctcctctcccctgacgtgatgcccgcctcccacccccttctccgcatcgcacggatctagcgcgggaattgctcggccacggctccgcacaccctcccttcccatgagacggagccgccgtatcctgctcgcgaggcaacggaagggtacgtgatcctctgtctacatggaaggtgaggcagatcagggggagagtggctcgtggcagtcgcctcgacggcgtccttcgcgccgtccggcgaggtgtcgtccaagcacggcgtcgtcggctacgggatcgtgggcgggcccaatggcaacgccgtcgcgcccgccgccaagtccaccgtcgtcgagaccaccgtcgagagggttatcttcgatttctggttcctggcgctcctccccaccgctcgggaaccactccaccgccgagaccgtcttaacgatcagctccgttgtggcccgcccgcgaccccgtatccgctcgcgctcagctagggttcagatctgaaaatggctgatgacggtgcgaggaggggaatgcccgctgaaggctgaagctgcccccacgggctacagtaggtgccatcgctcaccacaccgaacaccccactgcccccagaccgtgctccagggccctacggcgataggaggccactgaggatggcccggtgcggtactgctgccttccagaggacgccgagcgccggagaggggctcttctattggacttggagcaagcccacggcgacaacgccggaagcaaaatggcctcttctctagaaggacatgagttcgatccaccacagggaggcgcgcccgccaggctccatcttcggatctgatcgcccaccaagtgggttgagttcggatgacgagagtttgcctgcaaccgatctaaaggttagagcgagcggcatgtgatgcggaaaaatgaagtcagcaaggaatacttcttaaaaactgtaaggaatattgttggtgataaaagctgcttcacgatatcaaatgcaggcacaacgaagccctcagacaaacccaagcaactattctttatcaggtcaagtttttggtcagcagactgctcccagtggttctgtgataggagatgaacagaagggatatccatgggcgcacaccatccctatgagacaagctattgccagcactcgaccacct

SEQ ID NO: 86108 - DNA, 3343 bp, Zea Mays
cctgacgttctgcctcccatagtcccacccgacatcctcgcccagatcgcgtcgctaatctcgcggtcgcgcctcggccgatccgcgcccgcctgccgccgcctgcgattgtagctcaccccgacaccgcgccccctcctctcccctgacgtgatgcccgcctcccacccccttctccgcatcgcacggatctagcgcgggaattgctcggccacggctccgcacaccctcccttcccatgagacggagccgccgtatcctgctcgcgaggcaacggaagggtacgtgatcctctgtctacatggaaggtgaggcagatcagggggagagtggctcgtggcagtcgcctcgacggcgtccttcgcgccgtccggcgaggtgtcgtccaagcacggcgtcgtcggctacgggatcgtgggcgggcccaatggcaacgccgtcgcgcccgccgccaagtccaccgtcgtcgagaccaccgtcgagagggttatcttcgatttctggttcctggcgctcctccccaccgctcgggaaccactccaccgccgagaccgtcttaacgatcagctccgttgtggcccgcccgcgaccccgtatccgctcgcgctcagctagggttcagatctgaaaatggctgatgacggtgcgaggaggggaatgcccgctgaaggctgaagctgcccccacgggctacagtaggtgccatcgctcaccacaccgaacaccccactgcccccagaccgtgctccagggccctacggcgataggaggccactgaggatggcccggtgcggtactgctgccttccagaggacgccgagcgccggagaggggctcttctattggacttggagcaagcccacggcgacaacgccggaagcaaaatggcctcttctctagaaggacatgagttcgatccaccacagggaggcgcgcccgccaggctccatcttcggatctgatcgcccaccaagtgggttgagttcgaaaaatgaagtcagcaaggaatacttcttaaaaactgtaaggaatattgttggtgataaaagctgcttcacgatatcaaatgcaggtaaataatatttccacttcattgtgttatatgtaaacataacctatcttgccaccatagctttgtatttttggtgtgatgcaatcttattagtcattcttactagcactttttgttttgttttgtgggttatttactcatgtttgctcaggcacaacgaagccctcagacaaacccaagcaactattctttatcaggtcaagtttttggtcagcagactgctcccagtggttctgtgataggagatgaacagaagggatatccatgggcgcacaccatccctatgagacaagctattgccagcactcgaccacctcaattttggccttcctcgtctggccaaatgcggagtaatatggtacaaacaatgcagcatcacatgcagtgaccacaaacatcttcaccagtgtttggggcaaatagtattcatgcacgtccatttccgcggccagttggaggtccaactgcaccatttagaccacaaatggcagattccaatccaagagcacacttgattcagggagctgcgaccacagtatctgggagtgtgccaacacgatccatagtgtctggaaatgcgccagtcaatcaagccttgggatcttcaaaagtcagtgctggcatggaaagccagtcacaacaattgagtgcgcctaagcctttagctgcaacaagcttaagtcagactcaatctcttggcattcaagaagagcctaaaattcaggggaagaaacaactattattcgagagtttgcctgcaaccgatctaaaggttagagcgagcggcatgtgatgcggattacgaactaaacttaaatcaaatacttcagtattggtctctagagaggaagctctgccaaccattactaataactgagaagatgttcgcgtacagggagacggtgttggaggaggcacatcggggcatggagctgcgtgagcactgccgccatatagttgacaacgatgaccgacactatagattccattctctgtgtgtacaccaaggttactgcgaccgtgatgggcatctaggtgctcgaaccattagttgggctaaggaacacggagcagcagcaacaatatcgtaaggagagtgcagacgttggacaaatggtatgccatatcttcagttctcttatgatgcttcagcgctgcatcttcagttttctcggctaaaaagagatcatagtcaatagtatacctatgtgtgaaatactgtcaaacttgcatggtatatggacctcagaaagtataggaaagcgctatgctatttgcatgtttgctgggagaaagaaaagatagatgaaggtaattatacagtttctaatacattgttcagcttttgttatttatgccatatgatacacactggtcatgaggacatgtcgattgtagttcactggtattgttttttttgaaaggaagcggcaaaagacttgcctcttcattgtattagattaggaaaaataagataatccacaggaccgaaacacacaccggaagagaaaaaacaaaatcaaaatacaaaaaaagttcaccggtattgtaagctttgcagataagagcacaacttttccccctcttttctaaaagggaagctcatgttcatttcagcaattcagcttcaaccatttggcattcatgtaatatttcataggagttaaagggcacatacctaatcaagtctgtgggtctccaattctgaaatagaaagataatttatgttctcatctttctgaaatgaacaagatgactggcttatgggttaaggtttttttatagagcaccatgacttatcaggtaaagttatagttgtgcacaaaatgtcattttttaatccttaatgcgtgtgctattcacacctgtcttcttttgcagttttgtgaacaaccctaacttatgtggtcctggcaccacaaaaccttgtcctgatgctcctcccttttctccacctcctccatacaaccctacaaccccgatgcaatcaccaggaagtagctcttccactactggagcaattgttggtggagtggctgctggcgcagccttgctatttgctgttcctgctatcagttttgcctattggcggcacaggaaaccacaagagcaagcatttttttcaatgtatctggcttcaaagttagtctttgattattatctttctcgcaacataagggcaaacaatgtttatatgtagcaaacaaatacggtttgcaaacgttttaggaacatgtttttacaataaagatatacttatagtttcaccaa

SEQ ID NO: 86109 - DNA, 867 bp, Zea Mays
gatctctcaggaatatatgaggccttggagttgagggatggaggatctgattatcttggcaaggattacgaactaaacttaaatcaaatacttcagtattggtctctagagaggaagctctgccaaccattactaataactgagaagatgttcgcgtacagggagacggtgttggaggaggcacatcggggcatggagctgcgtgagcactgccgccatatagttgacaacgatgaccgacactatagattccattctctgtgtgtacaccaaggtgctcgaaccattagttgggctaaggaacacggagcagcagcaacaatatcgtaaggagagtgcagacgttggacaaatggtatgccatatcttcagttctcttatgatgcttcagcgctgcatcttcagttttctcggctaaaaagagatcatagtcaatagtatacctatgtgtgaaatactgtcaaacttgcatggtatatggacctcagaaagtataggaaagcgctatgctatttgcatgtttgctgggagaaagaaaagatagatgaaggtaattatacagtttctaatacattgttcagcttttgttatttatgccatatgatacacactggtcatgaggacatgtcgattgtagttcactggtattgttttttttgaaaggaagcggcaaaagacttgcctcttcattgtattagattaggaaaaataagataatccacaggaccgaaacacacaccggaagagaaaaaacaaaatcaaaatacaaaaaaagttcaccggtattgtaagctttgcagataagagcacaacttttccccctcttttctaaaagggaagctcatgttcatttcagcaattcagctt

SEQ ID NO: 86110 - DNA, 1122 bp, Zea Mays
gatctctcaggaatatatgaggccttggagttgagggatggaggatctgattatcttggcaaggattacgaactaaacttaaatcaaatacttcagtattggtctctagagaggaagctctgccaaccattactaataactgagaagatgttcgcgtacagggagacggtgttggaggaggcacatcggggcatggagctgcgtgagcactgccgccatatagttgacaacgatgaccgacactatagattccattctctgtgtgtacaccaaggtgctcgaaccattagttgggctaaggaacacggagcagcagcaacaatatcgtaaggagagtgcagacgttggacaaatggtatgccatatcttcagttctcttatgatgcttcagcgctgcatcttcagttttctcggctaaaaagagatcatagtcaatagtatacctatgtgtgaaatactgtcaaacttgcatggtatatggacctcagaaagtataggaaagcgctatgctatttgcatgtttgctgggagaaagaaaagatagatgaagggaagctcatgttcatttcagcaattcagcttcaaccatttggcattcatgtaatatttcataggagttaaagggcacatacctaatcaagtctgtgggtctccaattctgaaatagaaagataatttatgttctcatctttctgaaatgaacaagatgactggcttatgggttaaggtttttttatagagcaccatgacttatcagttttgtgaacaaccctaacttatgtggtcctggcaccacaaaaccttgtcctgatgctcctcccttttctccacctcctccatacaaccctacaaccccgatgcaatcaccaggaagtagctcttccactactggagcaattgttggtggagtggctgctggcgcagccttgctatttgctgttcctgctatcagttttgcctattggcggcacaggaaaccacaagagcaagcatttttttcaatgtatctggcttcaaagttagtctttgattattatctttctcgcaacataagggcaaacaatgtttatatgtagcaaacaaatacggtttgcaaacgttttaggaacatgtttttacaat

SEQ ID NO: 86111 - DNA, 745 bp, Zea Mays
gatctctcaggaatatatgaggccttggagttgagggatggaggatctgattatcttggcaaggattacgaactaaacttaaatcaaatacttcagtattggtctctagagaggaagctctgccaaccattactaataactgagaagatgttcgcgtacagggagacggtgttggaggaggcacatcggggcatggagctgcgtgagcactgccgccatatagttgacaacgatgaccgacactatagattccattctctgtgtgtacaccaaggtgctcgaaccattagttgggctaaggaacacggagcagcagcaacaatatcgtaaggagagtgcagacgttggacaaatgttttgtgaacaaccctaacttatgtggtcctggcaccacaaaaccttgtcctgatgctcctcccttttctccacctcctccatacaaccctacaaccccgatgcaatcaccaggaagtagctcttccactactggagcaattgttggtggagtggctgctggcgcagccttgctatttgctgttcctgctatcagttttgcctattggcggcacaggaaaccacaagagcaagcatttttttcaatgtatctggcttcaaagttagtctttgattattatctttctcgcaacataagggcaaacaatgtttatatgtagcaaacaaatacggtttgcaaacgttttaggaacatgtttttacaataaagatatacttatagtttcaccaa

SEQ ID NO: 86112 - DNA, 1910 bp, Zea Mays
atgggttgacgtcgctgggccctaaggttctctcgatgctgattaggggagctgcaccgccgcgatcagcctcagcttcttcttgctgcacgagaaccatagatgcttgatctcttagaggctgctgccctgcaatttgtcttcacgaatttagttaattgaagctgatcgagaggtatttgagagacaagaggggtttcagctggcaattggaaatgagaaaaatgcagagggaggagaaggggatgatggattgcttctttggaactatgctatataaaagatttttttctagcttgacttctagcattggctgaggcatgagcatggacgactgagcatgtaatagtcttcaaaattctgctttagttctcatataatctttgttccactctccccgtgtgctatgccatgatctggaatcatctctgaactcttcttgaatactgaatattctgatactgatatcagaacatgtatttgtttaacaaaaaattatatcctgacctactgtttccagatgttcgcgtacagggagacggtgttggaggaggcacatcggggcatggagctgcgtgagcactgccgccatatagttgacaacgatgaccgacactatagattccattctctgtgtgtacaccaaggttactgcgaccgtgatgggcatctaggtgctcgaaccattagttgggctaaggaacacggagcagcagcaacaatatcgtaaggagagtgcagacgttggacaaatggtatgccatatcttcagttctcttatgatgcttcagcgctgcatcttcagttttctcggctaaaaagagatcatagtcaatagtatacctatgtgtgaaatactgtcaaacttgcatggtatatggacctcagaaagtataggaaagcgctatgctatttgcatgtttgctgggagaaagaaaagatagatgaaggtaattatacagtttctaatacattgttcagcttttgttatttatgccatatgatacacactggtcatgaggacatgtcgattgtagttcactggtattgttttttttgaaaggaagcggcaaaagacttgcctcttcattgtattagattaggaaaaataagataatccacaggaccgaaacacacaccggaagagaaaaaacaaaatcaaaatacaaaaaaagttcaccggtattgtaagctttgcagataagagcacaacttttccccctcttttctaaaagggaagctcatgttcatttcagcaattcagcttcaaccatttggcattcatgtaatatttcataggagttaaagggcacatacctaatcaagtctgtgggtctccaattctgaaatagaaagataatttatgttctcatctttctgaaatgaacaagatgactggcttatgggttaaggtttttttatagagcaccatgacttatcaggtaaagttatagttgtgcacaaaatgtcattttttaatccttaatgcgtgtgctattcacacctgtcttcttttgcagttttgtgaacaaccctaacttatgtggtcctggcaccacaaaaccttgtcctgatgctcctcccttttctccacctcctccatacaaccctacaaccccgatgcaatcaccaggaagtagctcttccactactggagcaattgttggtggagtggctgctggcgcagccttgctatttgctgttcctgctatcagttttgcctattggcggcacaggaaaccacaagagcaagcatttttttcaatgtatctggcttcaaagttagtctttgattattatctttctcgcaacataagggcaaacaatgtttatatgtagcaaacaaatacggtttgcaaacgttttaggaacatgtttttacaataaagatatacttatagtttcaccaa

SEQ ID NO: 86113 - DNA, 453 bp, Zea Mays
gtggatcgccgctctctaccgccacctcaatggaaggttcgccgctctctacgcggatctgccacctccttttcggctgccgccaatggaaggtcccagatctcctctcccattactcctctccccattaccgcgctcgaggtccaccatttttggaggtccgccacctccgccttggcctgccgtcaatggaaggtcccagatctcctctccccattactcctctccccattacagcgctcgagtcagtgggagttccgccatttttggaaggtccaccacctcctcctcggcccgcggcaaaaatggcgtgggagatccgccacctcacctcctccaattctcgcgctcgcgcctgatatggaaggtccatcggagggactcgggcgtcgaggccatggcggagccgcaccccttctcccccctgcctcgcgcgcggcggccgagatggtg

SEQ ID NO: 86114 - DNA, 719 bp, Zea Mays
gttttacttagatgttaagttccattgagtttttttacaaggagtcatggtttttgggtgatggtggagtggtttgtatcgatgaatttgataagatgtgacctgaagacaggttggcaccagtttatatgtttggtgaaactagaatagacatactaaatcttctttcttggtatgctctgttgaaacctcattaacccagtccctgttttcttatagaattccagagctgcgattcccgaggccatggagcagcaaacaatatcaattgccaaagctgccattacaatagtactcattttagggacttcagttcttgcagctgtcaatccaattgcaggatgctatgacgctcttaagtgatcatgaacttatacattgaaatcctgacgggcctcgagaggccaggaggtggagatgagttcaacaagtactacatcttgtcagctctctcctatccgtggattggtgagttagtttggatgtttgcactggtattgttatccatcaaccccaaaccaattgcagttccttttagtcatgtcatgtttaatttccctaaaaattgcgtactgcatttcatatatatgtatcaaatatggaccctgaaactgaagcaggcgttccttttcaattcgtgttgcttcttcatttcctttatcagtaagggcatgtccagatccattagcactaaaatttagcagctaaaattagtacga

SEQ ID NO: 86115 - DNA, 1258 bp, Zea Mays
ttatattctatattcttttggtttctgaaagggtgcctgaaatatcctatagatgtctttagtagagggtccaaataatggcctgcaaggtttcttgaattggatcgcacaaaattccatctgcttcagaattgagctaagcgcatcctaacatcttgactcctaataccgactaagaattactagcatttcatctcgaaagatcactctgtcgaccaatccaaggaaggcacctgaagcttagggaggacacctcacaagtcacggctacccgtgctgcatctgtgtgattttgtaatttgaatgagcaaatctatctggcgtcagtgcggggttggggtagtttcctagagggaggaacatcgtgggatgcaggtcccaaggaacaccagatattttgaggcagaccgtggcgaggtgcccaagggcagcgcctagatcttcttctggatggtcaagttctggaacgataatgtggcagaggagatgccctggtcttcgtacgtatatgttacttactcccactctcaacatagcagtagtgttatgcaatgacatgtctttccctaatgcaccgaagcttggatgggtccgttgaaggttgtgttgtttaggttgaaggatgtatgcatggaatagaagtcagataaaacttttgtgcaacaggctgaagtcattcttgttgatgggaaattaatagaggctaatgctgaccaacttgctaaggtttaaatgcaggatattacaaaagtcaggttggagaactcccttgtttaggcttttgtcttgcttctgcagaaggagagatgacgtgtttcatctctgcatgacatgatggcatgtgaggcagcagtctctgctccgcaacccttgtcatggcttggagttggtattctaggaaggggcacaattttattagggtagccactagagttgaggtcccttttcaatggacgaacttggtgctgtggacgacatctgctattgtagctaggcgcatacatgttttcctataaatgctagctctgcaatcaccaaaggaaaacacaagagtactcttggaggaaagtttagcattcaatttaaaaaaccttaccaactcatgccttatttgaatgcaataatgcatgttctgttgccatgctgttgcttggacacatgcttggcatggctattttctggttatgtcacaactcatatctcccatgtaaatttatggctatgatatgcatcaaacaagcttatattttgctctcaa

SEQ ID NO: 86116 - DNA, 2442 bp, Zea Mays
atccatgcggcggagctctcttcgtctcccgttccccctaacgcgtgcgctccttcgccgactgggcgaccgccgccgccggcctcgcccaggtctccgtccggccctacgacaggttccatcgggcccttagccggcgacaagcaccaccaggtgcactttctctattcagagactgattaggagttcgaggagcaaatcaattcgtaccaaatataaccaagcttacatggctaagccaagtgattcatcacatcatggagttgtggacaatagctccaatggatcccaggctaggcgtgaggaagctgggaaacttggtccatcgtggtatttcagtagaagggaaatagaggaaaactctccatccaggagggatggcatcgatttgaagaaagagtctagcattcggaagttatattgcaagtttctacaagagttgggcatggcgcttaaaatgccccaagtgacgattgccacagcaatggtattctgtcatcgtttttaccttcgtcaatcccttgcaaaaaatgatagacgaataatcgctactgtttgtatattcttggctggaaaagttgaagaaacacctaaacctttgaaggatgtcatcgtggtttcttacgggattattaataagaatgatcctaaggctagtcagagaatcaagcaacagaaggaaatctatgataaacaaaaagaacttattttacttggagagcgagttgtacttgtaacacttgggtttgaccttaatattaaccatgcctataagcccttggttgaagcaataaggagattcaatattgataaaagaagtccacttcctcaggttgcctggaattttgtaaatgatgggctgcgtacttcgctttgcctgcagtttgagcctcatcatattgcagctggtgctatctatttggctgctaaatttctcaaagtgaatctcccatctgatggtgataagatttggtggcaggattttgatgtcacgccacgacaacttgaagaggttagcagtcaattgctggagttgtatgagcaaaaccgtacaacgcaggcacaatcatcacagggaagtgaagcggaggggagctctgctggtgtgtgtaatcaacgttcaactgtaaagtctgaagcgaactccaaggaaccatctgctcatggtcatcttcaggcatccagaccgccaaatttgcagcactcgtcctcaacaggtgcttcaggtcaccatgacgatgggcagtcaaattcagacaagcatatttctggccacaaaatgcttcaaaatgacaattttaaccatggtggtagcagagaaaagaacaaaagtggaaccaaaactggtactgttatggacaaattgcacaatgacaaaaagttctcgcctggacatcattattccaaggccagccatgagtctcataatccagtggaagaacatcaaccacatggatcagatgataattccaatgaaacaagagatggtgttggtggcaatgaagctcctgttgtgtcaacatccagaatggatgcgatgaataaaattgacaaggataaggtaaaagcagctttggagaagcgaaggaaatcgaaaggtggttttgccacgaaggtaaatgtgattgatgatgatgatctacttgagagagagctagaacaaggtgttgagttggctgttgagtttgagaagattaatcaagataagaagcagaactcgtccgatggtagcatgcatccaccagaccttgaaaacgctgacgaattaatggagaatggccaccatgtcaagcagagtctaccaacgacagctgaagacatgggctgtccgatggacagtaaagaacgacatcctccagcacttcataagcaaaatgatgtttctgagcacaagtcacagcagcttgatgacacattgaaacaccaaaagagctgtgatcatcctcaacctgtaggaagccctgagcaggatggaaaagactacaagaggcctaagcttgacggataggtttatatatatgattttggatgggttttctggaagctgacaagcaatttggtgccggattcattgtatgatgacgtatacatgttgatgagcacgtgtcttcttcgctggtgcctgaagaagtgaagatgccgcgccacaaaattgctgtgctgcggagagcaccaagatgatgcgccccacaactgattgcagcttacagtttgaggaaagtcgggcagcaattattgttaggttccaacaaacattggaatataatatatatatgaacgaaacatgctgtcgcgcttctggtatcagctgcattcgtttcttgtatgtaatgttctggttaaagcgatggaaaggttttatcaaggtcgcaaatattaatgcagctttccatttctgggtttacatattttccaaattaaacggcttccttttttatgtcc

SEQ ID NO: 86117 - DNA, 2423 bp, Zea Mays
atccatgcggcggagctctcttcgtctcccgttccccctaacgcgtgcgctccttcgccgactgggcgaccgccgccgccggcctcgcccaggtctccgtccggccctacgacaggttccatcgggcccttagccggcgacaagcaccaccagagactgattaggagttcgaggagcaaatcaattcgtaccaaatataaccaagcttacatggctaagccaagtgattcatcacatcatggagttgtggacaatagctccaatggatcccaggctaggcgtgaggaagctgggaaacttggtccatcgtggtatttcagtagaagggaaatagaggaaaactctccatccaggagggatggcatcgatttgaagaaagagtctagcattcggaagttatattgcaagtttctacaagagttgggcatggcgcttaaaatgccccaagtgacgattgccacagcaatggtattctgtcatcgtttttaccttcgtcaatcccttgcaaaaaatgatagacgaataatcgctactgtttgtatattcttggctggaaaagttgaagaaacacctaaacctttgaaggatgtcatcgtggtttcttacgggattattaataagaatgatcctaaggctagtcagagaatcaagcaacagaaggaaatctatgataaacaaaaagaacttattttacttggagagcgagttgtacttgtaacacttgggtttgaccttaatattaaccatgcctataagcccttggttgaagcaataaggagattcaatattgataaaagaagtccacttcctcaggttgcctggaattttgtaaatgatgggctgcgtacttcgctttgcctgcagtttgagcctcatcatattgcagctggtgctatctatttggctgctaaatttctcaaagtgaatctcccatctgatggtgataagatttggtggcaggattttgatgtcacgccacgacaacttgaagaggttagcagtcaattgctggagttgtatgagcaaaaccgtacaacgcaggcacaatcatcacagggaagtgaagcggaggggagctctgctggtgtgtgtaatcaacgttcaactgtaaagtctgaagcgaactccaaggaaccatctgctcatggtcatcttcaggcatccagaccgccaaatttgcagcactcgtcctcaacaggtgcttcaggtcaccatgacgatgggcagtcaaattcagacaagcatatttctggccacaaaatgcttcaaaatgacaattttaaccatggtggtagcagagaaaagaacaaaagtggaaccaaaactggtactgttatggacaaattgcacaatgacaaaaagttctcgcctggacatcattattccaaggccagccatgagtctcataatccagtggaagaacatcaaccacatggatcagatgataattccaatgaaacaagagatggtgttggtggcaatgaagctcctgttgtgtcaacatccagaatggatgcgatgaataaaattgacaaggataaggtaaaagcagctttggagaagcgaaggaaatcgaaaggtggttttgccacgaaggtaaatgtgattgatgatgatgatctacttgagagagagctagaacaaggtgttgagttggctgttgagtttgagaagattaatcaagataagaagcagaactcgtccgatggtagcatgcatccaccagaccttgaaaacgctgacgaattaatggagaatggccaccatgtcaagcagagtctaccaacgacagctgaagacatgggctgtccgatggacagtaaagaacgacatcctccagcacttcataagcaaaatgatgtttctgagcacaagtcacagcagcttgatgacacattgaaacaccaaaagagctgtgatcatcctcaacctgtaggaagccctgagcaggatggaaaagactacaagaggcctaagcttgacggataggtttatatatatgattttggatgggttttctggaagctgacaagcaatttggtgccggattcattgtatgatgacgtatacatgttgatgagcacgtgtcttcttcgctggtgcctgaagaagtgaagatgccgcgccacaaaattgctgtgctgcggagagcaccaagatgatgcgccccacaactgattgcagcttacagtttgaggaaagtcgggcagcaattattgttaggttccaacaaacattggaatataatatatatatgaacgaaacatgctgtcgcgcttctggtatcagctgcattcgtttcttgtatgtaatgttctggttaaagcgatggaaaggttttatcaaggtcgcaaatattaatgcagctttccatttctgggtttacatattttccaaattaaacggcttccttttttatgtcc

SEQ ID NO: 86118 - DNA, 2507 bp, Zea Mays
atccatgcggcggagctctcttcgtctcccgttccccctaacgcgtgcgctccttcgccgactgggcgaccgccgccgccggcctcgcccaggtctccgtccggccctacgacaggttccatcgggcccttagccggcgacaagcaccaccagagactgattaggagttcgaggagcaaatcaattcgtaccaaatataaccaagcttacatggctaagccaagtgattcatcacatcatggagttgtggacaatagctccaatggatcccaggctaggcgtgaggaagctgggaaacttggtccatcgtggtatttcagtagaagggaaatagaggaaaactctccatccaggagggatggcatcgatttgaagaaagagtctagcattcggaagttatattgcaagtttctacaagagttgggcatggcgcttaaaatgccccaagtgacgattgccacagcaatggtattctgtcatcgtttttaccttcgtcaatcccttgcaaaaaatgatagacgaataatcgctactgtttgtatattcttggctggaaaagttgaagaaacacctaaacctttgaaggatgtcatcgtggtttcttacgggattattaataagaatgatcctaaggctagtcagagaatcaagcaacagaaggaaatctatgataaacaaaaagaacttattttacttggagagcgagttgtacttgtaacacttgggtttgaccttaatattaaccatgcctataagcccttggttgaagcaataaggagattcaatattgataaaagaagtccacttcctcaggttgcctggaattttgtaaatgatgggtatgctagtgctaccctttctgtcttttgaaattacagttcacagttgtgtatctactacacttaatgttgtgcactgtacaggctgcgtacttcgctttgcctgcagtttgagcctcatcatattgcagctggtgctatctatttggctgctaaatttctcaaagtgaatctcccatctgatggtgataagatttggtggcaggattttgatgtcacgccacgacaacttgaagaggttagcagtcaattgctggagttgtatgagcaaaaccgtacaacgcaggcacaatcatcacagggaagtgaagcggaggggagctctgctggtgtgtgtaatcaacgttcaactgtaaagtctgaagcgaactccaaggaaccatctgctcatggtcatcttcaggcatccagaccgccaaatttgcagcactcgtcctcaacaggtgcttcaggtcaccatgacgatgggcagtcaaattcagacaagcatatttctggccacaaaatgcttcaaaatgacaattttaaccatggtggtagcagagaaaagaacaaaagtggaaccaaaactggtactgttatggacaaattgcacaatgacaaaaagttctcgcctggacatcattattccaaggccagccatgagtctcataatccagtggaagaacatcaaccacatggatcagatgataattccaatgaaacaagagatggtgttggtggcaatgaagctcctgttgtgtcaacatccagaatggatgcgatgaataaaattgacaaggataaggtaaaagcagctttggagaagcgaaggaaatcgaaaggtggttttgccacgaaggtaaatgtgattgatgatgatgatctacttgagagagagctagaacaaggtgttgagttggctgttgagtttgagaagattaatcaagataagaagcagaactcgtccgatggtagcatgcatccaccagaccttgaaaacgctgacgaattaatggagaatggccaccatgtcaagcagagtctaccaacgacagctgaagacatgggctgtccgatggacagtaaagaacgacatcctccagcacttcataagcaaaatgatgtttctgagcacaagtcacagcagcttgatgacacattgaaacaccaaaagagctgtgatcatcctcaacctgtaggaagccctgagcaggatggaaaagactacaagaggcctaagcttgacggataggtttatatatatgattttggatgggttttctggaagctgacaagcaatttggtgccggattcattgtatgatgacgtatacatgttgatgagcacgtgtcttcttcgctggtgcctgaagaagtgaagatgccgcgccacaaaattgctgtgctgcggagagcaccaagatgatgcgccccacaactgattgcagcttacagtttgaggaaagtcgggcagcaattattgttaggttccaacaaacattggaatataatatatatatgaacgaaacatgctgtcgcgcttctggtatcagctgcattcgtttcttgtatgtaatgttctggttaaagcgatggaaaggttttatcaaggtcgcaaatattaatgcagctttccatttctgggtttacatattttccaaattaaacggcttccttttttatgtcc

SEQ ID NO: 86119 - DNA, 2423 bp, Zea Mays
gacggctggaaagggtaacttcgcctcctgatttcctcccccgcccgcgctcacccggtgaccgcatctcgggcgcagccacctcccaatctccgatggcgctccaaaccctaaacccctaccggcacgcggcggccgtctccccggtcccgtcgcccgtcccgcaccgcggccacccgccgccgcatgccgtcctgcacctccctccccgccgccgcctagcgggcggcgccgcccggccgctcgccgtcgctgccgccgtctcgggggccgtcaacgaggccaggaggcgtggggttcctcaagagggcggggaggacgggaggaaggacacggacctcgccacgctcggaaacctatgcgtcgacgtcgtgctcagcgtgccccagctcccgccggcgcagcaggaggagcggaaggcctacatggagcgactcgccgcctcaccgcccgatcagaaattttgggaggctggtggaaactgcaatttagcatttgctgcagctaggcttgggcttaactgttccactctgggacatgtaggagaggaaatatatggaaaatttcttcttgatgtgcttcaagcagagggcattagtgttgttgggatgcttgaaaataccaatgctgctgcatgccgccaggcctatgaaacacttctatgctgggttcttgtagacccatttcagaaacatggtttttgcagccgtgcagacttcagtaaagagcctgctttcagttggatacgtaaactcccagtggatatcaggacagctattcatcactccaaaatactgttttgtaatggctacgcttttgatgagttcttccctgatgtgatcgcatcctctatcgactgtgcgatttgttcgggaacagcagtgttttttgatcctggtccccgtgggaaatctctcttacatgggaacttggatgagcagagagcacttgagcatgcactgaggcttagtgatgtcctcctcttgacatcagacgaggctgaatcactaaccaacatcagaaacccagttcaggctgggcaagagttgctaaagagggggatccgcacaaagcaggttgtcatcaaaatgggctccaggggttcgatcatgatcactaagaacacaatatcctgtgcgcctgctttcaagatcgacgttgtggacacagttggatgtggagatagctttacggctgctatagcttttgggttcctccatgacttgccagcagttaacacattaaccctggcaaatgcagttggtgccgcaaccgctactggctgtggggctggcagaaatgttgctcgcctggataaagtactacagctcatgagagaagccgatctcaatgaagacatcacgttgtggactgagctgactgaaggaaactctctccgtatagaggtctcgattctgtctgggatagcaagaaatggttttagtgagaacattgtggctgttcctgttaccaaagtggtttctgaagttttgccaatgttcgaagcagtgccagtgcgaagcgctgtccaggcttgattacatactgagctgactgaaggaaactccccgcgctgaggtctcaattctgtctgggatgacaagaaatggttttagcgagcacattgtggatgttcctattaccgaagtagtttctgaacttttgcctacgttcgaagcagtgccagacgaagggctgtccaggcttgattccatactgaatagttgatggttgtattcattttgtcattcacatagattcttattttacctccacgattacacgctgttttctggtgatgagtggtagttgggggctagcctccaggtaaagatactttctgaacagaatatggttgctgaagctattgatagctgtacagttatggccgcttgggatggtgtgccatctggagttttgtgctaacatgcatgtgatttgacgctgcaatgtgtactagcaacagacttggttttcttgatgatttcaggcattcgacgcaagcgtgctgtgaatgtggtgcagcctgcaggatctgcatgcgtcccaggtctaagcaaactcatgtaccatgaatccatgatcaccaactaaccgaactggtctcaacaaaacctgacgattttaattgcactgacaaactagctcctaacaagcaacaaccaccacaaccagatgatgagatgatacaagaattatccgtttctcagtagtaaactagtccgagacatcaccagtgcctttttttttgtcaaatctccgagatatgtatgttctgcgctccatgtcgtgcaaaatcacatctgggtgaatgctctaccgctgccatttgtcaaatctccgagctgaagcatcatgctaccatgaagtttgtcagcaatgtgagagaaccaaccagtcccaagtgaatgcgtcggcccaat

SEQ ID NO: 86120 - DNA, 1356 bp, Zea Mays
ctcgggcgcagccacctcccaatctccgatggcgctccaaaccctaaacccctaccggcacgcggcggccgtctccccggtcccgtcgcccgtcccgcaccgcggccacccgccgccgcatgccgtcctgcacctccctccccgccgccgcctagcgggcggcgccgcccggccgctcgccgtcgctgccgccgtctcgggggccgtcaacgaggccaggaggcgtggggttcctcaagagggcggggaggacgggaggaaggacacggacctcgccacgctcggaaacctatgcgtcgacgtcgtgctcagcgtgccccagctcccgccggcgcagcaggaggagcggaaggcctacatggagcgactcgccgcctcaccgcccgatcagccgtgcagacttcagtaaagagcctgctttcagttggatacgtaaactcccagtggatatcaggacagctattcatcactccaaaatactgttttgtaatggctacgcttttgatgagttcttccctgatgtgatcgcatcctctatcgactgtgcgatttgttcgggaacagcagtgttttttgatcctggtccccgtgggaaatctctcttacatgggaacttggatgagcagagagcacttgagcatgcactgaggcttagtgatgtcctcctcttgacatcagacgaggctgaatcactaaccaacatcagaaacccagttcaggctgggcaagagttgctaaagagggggatccgcacaaagcaggttgtcatcaaaatgggctccaggggttcgatcatgatcactaagaacacaatatcctgtgcgcctgctttcaagttggtgccgcaaccgctactggctgtggggctggcagaaatgttgctcgcctggataaagtactacagctcatgagagaagccgatctcaatgaagacatcacgttgtggactgagctgactgaaggaaactctctccgtatagaggtctcgattctgtctgggatagcaagaaatggttttagtgagaacattgtggctgttcctgttaccaaagtggtttctgaagttttgccaatgttcgaagcagtgccagtgcgaagcgctgtccaggcttgattacatactgagctgactgaaggaaactccccgcgctgaggtctcaattctgtctgggatgacaagaaatggttttagcgagcacattgtggatgttcctattaccgaagtagtttctgaacttttgcctacgttcgaagcagtgccagacgaagggctgtccaggcttgattccatactgaatagttgatggttgtattcattttgtcattcacatagattcttattttacctccacgatt

SEQ ID NO: 86121 - DNA, 1950 bp, Zea Mays
atggcgatcccccgtcgcctatcttgccttcccacggttgccgcggccaccaagtggtcggccgggaatctcgccatagacatcggcacaatcggcgcgagaccctcaacggcagccctggctgccgccgcgacggcggccgccgccgccggccgcgcctcggagtgccagtccctcctcctccgcatgtcgcgccgccgcggcgcctctcgacgcgagatcgtctcttccctcctcgcctcgtcccccactccgcagccgcaggtgttcgacctcctcatccgcacctacacccagtcgcggaagccccgggaggcctttgaggccttccgcctcctcctcgaccaccgcgtccccgtcccagcctctgcgtccaacgctctccttgccgtgctctcccgcgccgggtggcctcacctcgcccaggaggcctaccgcctcgtcctctcgtctgactcggaggtaaacgcctacacgcttaacatcatggtccacagctactgtaaaaccctagagttcgatggggctgacactgtcatctccgagatggagaagagatgcgtgttcccggatgtggttacacacaatgtgttgattgatgccagattccgtgctggagatgtggatgcagcgatcgcattggttgattccatggccaatagggggttgaagcctgggattgtgacatacaattcggttttgaaggggttgtgtaagcacagaaggtttgataaggcaaaggaggtgttcaggacaatggaccagtgcagtgttgcaccagatgttcggagtttcaatattttgatcggaggattttgtagggttggggaggttaaggaggcagtgaagttttacaaggagatgcaacatcgttatgttacaccagatgtggtcagctttagctgtttgattggattattctcgaggagaggggagatggaccatgcaggggcatacttgagggaaatgaaggggcttggattggtgcctgatggtgtgatttacacaatggtcataggtgggttttgtagggctggatcaatgtcagaggctctaagagttagggatgagatggttggctttggatgtctgccagatgtggtaacatacaataccctgttgaatgggctctgtaagcagcacaggttgcttgacgcggagaaacttttgaatgagatggaggagagaggggttacaccagatttatgcactttcacaactttgattcatgggtactgtaggcaaggtaactttgagaatgcattgcaattgtttgacacactgttgcgccagcgtttgaggccagatgtcgtgacatacaatagtttgattgatgggatgtgcagaaaaggtgatctggccaaagctaatgagctatgggatgatatgcatgctcgagaaatcttacccaatcacattacctacagtatcctaatagacagccactgtgagaagggacaagttgaggatgcattcggttttctggatgaaatggtcaagaagggaaatttgcctaatatcaggacctataattccatcatcaagggttattgccgatcaggtaatgtaaaaaaggggcagcagtttttgcaaaagatgaggcaagataacgtattcccagatctgattactttcaacaccctgatccatggttatataaaagaagaaaacatgcatggagctttcaatgtgtttaatataatggagaaggaaatggtacggccagatgctgtcacgtataatatgatcataaatgggttttctgaacaaggcaatatgcaagatgctggtcgtgttttcaagggaatgggtgacagtggaattgaaccggatagatatacatacatgtcattgataaatggtcatgttacagctggcaactcgaagcaggcgttccaacttcatgacgagatgatccatagagggtttgctcccgatgacaaattttga

SEQ ID NO: 86122 - DNA, 411 bp, Zea Mays
atgtctgaagattctcatgggcgtgggcatcttcctccaggattgttgggatcaaatgtgcagccagacgctccaggcatcgaggatgtcagggacaccgagcttcctcgttgtggctgtgatttctctctcaggacacggaatgcagcgatggtagtggcttgtgccgccagggccaggcagattatgagaaccagaggaaaaaataatccacagcaataccacaaaacttctgcgtcagttctgtcatctttcattggagcatccctgatccgtgcctcgcaaggttctacaaatgtcaacctcatttcgttgcaggttcacaactataattttatagttttacctgaccgaccaggctcacgtgagactgggtgtgcggacacagtaaaccaatcaggcgcaatataa

SEQ ID NO: 86123 - DNA, 1230 bp, Zea Mays
gtctcgcccccacccctcacaccaccgcaccaccggccaccccctgccccgatgcagcccgacggcggcggcgcgattcgcgtgctgaacgtggcggagaagccgtcggtggcgaaggcagtggctgagatcctgtcgcgccgctcggcgcagtcgcgtgcgggccggtcccagtacaaccgcattttcgagttcaactacgccatcaatggccgcgcctgccacatgctcgtcacctccgtcacgggccacctcatggaactcgaattcgatgaccgcttccgccgctggcactcctgcgaccccgccgaacttttccacgccccagtccgcaagtccgtgccccaggacaagcaggccataaaacaaactttggaagaagaagctaggagatgccagtggctggtgctatggcttgattgtgatagagagggtgagaacatagcatatgaagtgatcgatgtttgtacacgtgccaacagtcatcttaacatttggagggctcgcttctcagctttgattgatagggagatacatgaatctgtgcaacatcttggcaggcccaacaagctctttgcagatgctgtggatgcaagacaggaaattgaccttcgcattggtgcctccttcacaaggtttcaaaccatgctgttaaaggatgcatttgtaattgatgtgactggggatgagagaagtttggttctgagctatggtccttgtcagtttccaaccctaggattcattgttgagcgtttctgggagattcaagctcatgaacctgaagagttctggacaataaattgtactcatacttcagatgaaggcactgcatcttttggttggatacgtggtcatttgtttgattattcatgtgctattagtatctatgaaatgtgtgtttcagaaccaatggcaacagtacaaaatgttaggaatcaagagaagctaaaataccccccatatccactaagtacagtggagcttcagaaacgtgcttctaggtactttagaatgagttcagagcacacaatgaaggtctaagaatatcttgtcttatagttttaatttcccttccagttccactatctaataatggacatacctcagtagcttcgttgtttgcttgttttttctttggtggtctcttccctttcaacaccaggtggctgaagaactttatcaagctggattcattagttatccgaggacagaaactgataacttctcccc

SEQ ID NO: 86124 - DNA, 3006 bp, Zea Mays
gtctcgcccccacccctcacaccaccgcaccaccggccaccccctgccccgatgcagcccgacggcggcggcgcgattcgcgtgctgaacgtggcggagaagccgtcggtggcgaaggcagtggctgagatcctgtcgcgccgctcggcgcagtcgcgtgcgggccggtcccagtacaaccgcattttcgagttcaactacgccatcaatggccgcgcctgccacatgctcgtcacctccgtcacgggccacctcatggaactcgaattcgatgaccgcttccgccgctggcactcctgcgaccccgccgaacttttccacgccccagtccgcaagtccgtgccccaggacaagcaggccataaaacaaactttggaagaagaagctaggagatgccagtggctggtgctatggcttgattgtgatagagagggtgagaacatagcatatgaagtgatcgatgtttgtacacgtgccaacagtcatcttaacatttggagggctcgcttctcagctttgattgatagggagatacatgaatctgtgcaacatcttggcaggcccaacaagctctttgcagatgctgtggatgcaagacaggaaattgaccttcgcattggtgcctccttcacaaggtttcaaaccatgctgttaaaggatgcatttgtaattgatgtgactggggatgagagaagtttggttctgagctatggtccttgtcagtttccaaccctaggattcattgttgagcgtttctgggagattcaagctcatgaacctgaagagttctggacaataaattgtactcatacttcagatgaaggcactgcatcttttggttggatacgtggtcatttgtttgattattcatgtgctattagtatctatgaaatgtgtgtttcagaaccaatggcaacagtacaaaatgttaggaatcaagagaagctaaaataccccccatatccactaagtacagtggagcttcagaaacgtgcttctaggtactttagaatgagttcagagcacacaatgaaggtggctgaagaactttatcaagctggattcattagttatccgaggacagaaactgataacttctccccaaacactgacctgcatgcaatcgtacgtgaacaagtgaatcatccagtttggggagcatatgctcagcgacttctaaatcctgaagcaagactttggaggaatcccagtaatggtggtcatgatgacaaggcacatcctcctattcatccaaccaaattttcagaaggtgaaagaaactggagtccagaccacactagattgtatgagtttgttgtccgacatttccttgcatgttgctctcaaccggccgttggagctgaaacaactgtggaaattgacatagctggtgaacagtttaatgcatcagggcgtgtcatacttgctaaaaattatctggatgtttaccgctttgactcatggggtggaacgttacttccaacatacaacattgggcagcagtttgttccgacaactttaacacttgattctggagtgactcggccaccgcctcttctggctgaagccgaccttcttagctgtatggataaagcaggaattggcactgatgcaaccatgcatgatcacataaaaaagttgcttgaccgttgttatgcaaccaaagatgaaaacacacgtttctccccgacaaatcttggtgaggcattggtgatgggttatgatgaaatggggtatgagctttggaagccttatttaagatcaatgatggaagctgatatgaaatcagttagcgtgggtactaagagtaaatcagaagtacttgagagttgtttgcagcagatgaaggcctgttttcttgacgcaagggtgaagaaagcaaaactccttgatgcaatggggacattctttgcaaggtctaataggcctataaatgaaactcaaaatccagtagaggttgtgaggccttgtggtgcatgcaatggatctgaaatgttgcttaagcgaagggcgagtggtgaatttatggttgggtgccgaagttatccacaatgtagaaacgtggtatggctcccaggatctctttcagaagcggctgtaactaatcaagtttgtcctatctgcgcaccaggccctgtttataagattcaattcaagttccgtcggagggatattccaccaaatttcgatgttgatcacctaggttgtgttggtggttgtgatgatatcctcaaagaccttatggagataagtaggtttggaagtcgcagccaggctgcaacaccagcaagaggaccaacaccaaatggtgtgggtcaggggactccaagacaggatttacatactatttttcgtccggcaagccagcttaataatgataacccatcggttatgcattctcaaggtttccgttcaacccatacccaaaatccaagtaatgcatcagatgcaggtcaagtgctgtgcacctcatgtggagcgctttgcatatcacgaattgctaatacagaggctaacagggggaggaggttctacaaatgtcaagatcctggctgtggcttcttcaaatgggaagacgaagtggacaatggtacggggagaggccgccgtgggcgcggcagcagcaggcaggcgtctgcgtctgcatctgcaggacggagaggcggaggccggagaggcagaggccgtaacgctgacggcgggatgttcgtttcagcgacgggcgacaccgtgctcggctgctgctttaactgcggcgatccttcccacttcgcaaacgcctgcccgaaccggagatagttatcagggagctgctcgctatgcgtgtacagagactggcagcgtccgccaaacgatgaagccttcggatggttttcgtgtactgaggtgcatataagtgcacctgacaagctcattttctagacaattactaatatttttaaacaaaatgcagctattaggctgatgctagttcagcaaatctgacggcacttatttacaaaagtt

SEQ ID NO: 86125 - DNA, 706 bp, Zea Mays
ctgggctcccgggcgcgcggaatcgctgcggaatcgccgctcggcgccgcctaggcgctccaaacgcctagcagcccgcctacccccctagtccaggcgggaggccgtggcctagcgcctaggcgcgcctaggcgcgtcgtaatcgtggattttcaaaaccctgttttgaatacatgtctatccttgacctaggcaatcgtacgtgaacaagtgaatcatccagtttggggagcatatgctcagcgacttctaaatcctgaagcaagactttggaggaatcccagtaatggtggtcatgatgacaaggcacatcctcctattcatccaaccaaattttcagaagagattgtatgagtttgttgtccgacatttccttgcatgttgctctcaaccggccgttggagctgaaacaactgtggaaattgacatagctggtgaacagtttaatgcatcagggcgtgtcatacttgctaaaaattatctggatgtttaccgctttgactcatggggtggaacgttacttccaacatacaacattgggcagcagtttgttccgacaactttaacacttgattctggagtgactcggccaccgcctcttctggctgaagccgaccttcttagctgtatggataaagcaggaattggcactgatgcaaccatgcatgatcacataaaaaagttgcttgaccgttgttatgcaac

SEQ ID NO: 86126 - DNA, 2080 bp, Zea Mays
ctgggctcccgggcgcgcggaatcgctgcggaatcgccgctcggcgccgcctaggcgctccaaacgcctagcagcccgcctacccccctagtccaggcgggaggccgtggcctagcgcctaggcgcgcctaggcgcgtcgtaatcgtggattttcaaaaccctgttttgaatacatgtctatccttgacctaggcaatcgtacgtgaacaagtgaatcatccagtttggggagcatatgctcagcgacttctaaatcctgaagcaagactttggaggaatcccagtaatggtggtcatgatgacaaggcacatcctcctattcatccaaccaaattttcagaaggtgaaagaaactggagtccagaccacactagattgtatgagtttgttgtccgacatttccttgcatgttgctctcaaccggccgttggagctgaaacaactgtggaaattgacatagctggtgaacagtttaatgcatcagggcgtgtcatacttgctaaaaattatctggatgtttaccgctttgactcatggggtggaacgttacttccaacatacaacattgggcagcagtttgttccgacaactttaacacttgattctggagtgactcggccaccgcctcttctggctgaagccgaccttcttagctgtatggataaagcaggaattggcactgatgcaaccatgcatgatcacataaaaaagttgcttgaccgttgttatgcaaccaaagatgaaaacacacgtttctccccgacaaatcttggtgaggcattggtgatgggttatgatgaaatggggtatgagctttggaagccttatttaagatcaatgatggaagctgatatgaaatcagttagcgtgggtactaagagtaaatcagaagtacttgagagttgtttgcagcagatgaaggcctgttttcttgacgcaagggtgaagaaagcaaaactccttgatgcaatggggacattctttgcaaggtctaataggcctataaatgaaactcaaaatccagtagaggttgtgaggccttgtggtgcatgcaatggatctgaaatgttgcttaagcgaagggcgagtggtgaatttatggttgggtgccgaagttatccacaatgtagaaacgtggtatggctcccaggatctctttcagaagcggctgtaactaatcaagtttgtcctatctgcgcaccaggccctgtttataagattcaattcaagttccgtcggagggatattccaccaaatttcgatgttgatcacctaggttgtgttggtggttgtgatgatatcctcaaagaccttatggagataagtaggtttggaagtcgcagccaggctgcaacaccagcaagaggaccaacaccaaatggtgtgggtcaggggactccaagacaggatttacatactatttttcgtccggcaagccagcttaataatgataacccatcggttatgcattctcaaggtttccgttcaacccatacccaaaatccaagtaatgcatcagatgcaggtcaagtgctgtgcacctcatgtggagcgctttgcatatcacgaattgctaatacagaggctaacagggggaggaggttctacaaatgtcaagatcctggctgtggcttcttcaaatgggaagacgaagtggacaatggtacggggagaggccgccgtgggcgcggcagcagcaggcaggcgtctgcgtctgcatctgcaggacggagaggcggaggccggagaggcagaggccgtaacgctgacggcgggatgttcgtttcagcgacgggcgacaccgtgctcggctgctgctttaactgcggcgatccttcccacttcgcaaacgcctgcccgaaccggagatagttatcagggagctgctcgctatgcgtgtacagagactggcagcgtccgccaaacgatgaagccttcggatggttttcgtgtactgaggtgcatataagtgcacctgacaagctcattttctagacaattactaatatttttaaacaaaatgcagctattaggctgatgctagttcagcaaatctgacggcacttatttacaaaagtt

SEQ ID NO: 86127 - DNA, 941 bp, Zea Mays
tcttttttattgctctaaatgcgatgcacttgtttctgttgaacctacccccatctatctccagtattcaggttctactaaaacaaccagtgtaattttcattctaaaatatttaattacttctgtgaccatattacttcacagcaagaggaccaacaccaaatggtgtgggtcaggggactccaagacaggatttacatactatttttcgtccggcaagccagcttaataatgataacccatcggttatgcattctcaaggtttccgttcaacccatacccaaaatccaagtaatgcatcagatgcaggtcaagtgctgtgcacctcatgtggagcgctttgcatatcacgaattgctaatacagaggctaacagggggaggaggttctacaaatgtcaagatcctggctgtggcttcttcaaatgggaagacgaagtggacaatggtacggggagaggccgccgtgggcgcggcagcagcaggcaggcgtctgcgtctgcatctgcaggacggagaggcggaggccggagaggcagaggccgtaacgctgacggcgggatgttcgtttcagcgacgggcgacaccgtgctcggctgctgctttaactgcggcgatccttcccacttcgcaaacgcctgcccgaaccggagatagttatcagggagctgctcgctatgcgtgtacagagactggcagcgtccgccaaacgatgaagccttcggatggttttcgtgtactgaggtgcatataagtgcacctgacaagctcattttctagacaattactaatatttttaaacaaaatgcagctattaggctgatgctagttcagcaaatctgacggcacttatttacaaaagttagggcgcgaaaaactgacaaaggaagagatgcaaacacgagctgatctactaaggtttcgataacaagtttctactca

SEQ ID NO: 86128 - DNA, 549 bp, Zea Mays
cacaggactagcgttaggattgcaagaatgaccaaccatataatatctccttacattgcaagagaaggttacagcaggacaactactactagcacactactagcggcaggattacaactagaggaggcggtggcaataacacagcaagcaacgggagggggaacagagcaactagcctagcacggacacggactattaactcgccttgttcgaaccgacgagctactacttagccgggaaaacttagcatagatccagacggacggatctgtctggggctcagatcatgccgcacgtccagcgaatcgggccccctctcctttcgccgcctttgggagcggcgtctcggggggcggcgcggttgctagccaagtcaggcgtacacgacgctggaggagagcgccatgagcaggatggccgcgcgctcctcctcgcccaggcggcgcctccgccgcatccgccgccgctgcttcagcaccaccttgtcgaaccccaccgcgcggagctccacggtgacctcgtccgcctccttgttccgctcccgctccc

SEQ ID NO: 86129 - DNA, 735 bp, Zea Mays
gactgcccgtgcgcgcacctcaggtgcaccttggccctgcggtgctcgcgctcgccgtagctctcgatctgccacttcttgatgttcggatggtcctcggacacgtcggcacagacgctcgagaccgacctcttggctagggcgatcttcgacgagtccccaccacccagttcctccaagactaccagtaggtttctgctgggctgcagccaggaccttggcacatggtacctacacatatactaccacagtttcagttttgttggagcgatcgaataggcgggtaggtagttcaggaatccatccaaatgtcccttaccaacgctgggtgggctggccgcagcctgcttggcacttgggtgcccggaaggtcccggtgtagctgcaccctttgcagtccccgtctgcatacgctgtccagtagcgtccaatgctttgtccgtttatccagacctgtcccttgcccatgctgcccatatccaaagccaatggctcgtccccgctgggagtctcgaagccaacggctgttgcttctgagctatcagtgacccttgcatccattcaactgagcctgagccttctacggagttcagattcatctgctcgcctttcaggccaacctaagcatggacaaaggcaagcttagcttcttccttgacaatagctcatcgaccaaggcatgtggtgctgttcaacatacctgataggaccaggtctgccaagtaaggtctcgcg

SEQ ID NO: 86130 - DNA, 1241 bp, Zea Mays
ccacaccgggtttaaaaaactcaccggtactcattgccatctctacgttctccagcaccgccgttgaacctcctccctattcccgttctctagcaccgccgttgaacctcctcccctctccctcttgcttccctctctcatcctctctgccgcttccccgctctccccaaactactctgtgccccgtcagatcgacctggactttggcgacagctacttctcgacgggcggcacgggcgtgctgctacttctgcttcctctcccacgcttgctgagctgatggctacatcagagccagtacaagagagtttggtggtgcactactcacaacctagtaggccccgggtcctccttgctgcttcaggaagtgtagccgctataaaatttgaaagcctttgccgtagcttctctgagtgggcggatgtccgagctgtggccaccacgtcatccttgcacttcgttgatagatcatctctaccaagtggcatcgttctttacactgatgacgatgaatggtctacctggaagaagataggagatgaagtcttacacatcgagctgcggaaatgggcagacgttatggtgattgctccattgtcagcaaataccctggctaaggtatatatattttttttctcttcgtggatagcgaattagtttcattgtattacacagagtgatgctagattgttctgctcagatcgccggtgggttatgcgacaacctcttgacctgcatcgtgagagcgtgggactacagcaaaccgctctttgttgccccagccatgaacacgttaatgtggaacaacccattcacggagcggcatcttcacacaatcaaccaactgggcatagccttgatccccccagttaccaaaaggctggcctgtggcgattacgggaacggcgcaatggccgaaacctcgcagatccatacttccgtgaggctcgcgtgcaagacgcaaccgcacgatgcgagcagttcactcgcgggtcctgtcagtaataaccggccatctagctgatgcagcggttggccacttgattgtcaagcttaggaatttgttttatctgcagtgtgcatctggagtgttgtaccagattttttttcaactagagtttgtgtgtattgaattagggggaaaggttgttgtcacatgataacaataacttccaatgatgactctattcagtttgtaattgtctgtgggagtacaattatgcagctgtattgtctgctac

SEQ ID NO: 86131 - DNA, 1467 bp, Zea Mays
ccacaccgggtttaaaaaactcaccggtactcattgccatctctacgttctccagcaccgccgttgaacctcctccctattcccgttctctagcaccgccgttgaacctcctcccctctccctcttgcttccctctctcatcctctctgccgcttccccgctctccccaaactactctgtgccccgtcagatcgacctggactttggcgacagctacttctcgacgggcggcacgggcgtgctgctacttctgcttcctctcccacgcttgctgcagagctgatggctacatcagagccagtacaagagagtttggtggtgcactactcacaacctagtaggccccgggtcctccttgctgcttcaggaagtgtagccgctataaaatttgaaagcctttgccgtagcttctctgagtgggcggatgtccgagctgtggccaccacgtcatccttgcacttcgttgatagatcatctctaccaagtggcatcgttctttacactgatgacgatgaatggtctacctggaagaagataggagatgaagtcttacacatcgagctgcggaaatgggcagacgttatggtgattgctccattgtcagcaaataccctggctaagatcgccggtgggttatgcgacaacctcttgacctgcatcgtgagagcgtgggactacagcaaaccgctctttgttgccccagccatgaacacgttaatgtggaacaacccattcacggagcggcatcttcacacaatcaaccaactgggcatagccttgatccccccagttaccaaaaggctggcctgtggcgattacgggaacggcgcaatggccgaaacctcgcagatccatacttccgtgaggctcgcgtgcaagacgcaaccgcacgatgcgagcagttcactcgcgggtcctgtcagtaataaccggccatctagctgatgcagcggttggccacttgattgtcaagcttaggaatttgttttatctgcagtgtgcatctggagtgttgtaccagattttttttcaactagagtttgtgtgtattgaattagggggaaaggttgttgtcacatgataacaataacttccaatgatgactctattcagtttgtaattgtctgtgggagtacaattatgcagctgtattgtctgctacaatattgtttgtttgtgtgtgtgggagtggggggtgctgttgccacagagatagattcctccctgcccagtaatggtagtgattattcagtttgtagttgttagtggaagtgtccagcaaacttttctacccttcgatattcctggtacaaatgttgaaacgactgtcccgaccatttgagtgatttgctttccacctgccattgatgtgcgcatgtcgcttcttcattctcggattcttgcctatctgtttttactggtgtagctgtccgaaatctggatgttgtcgatgcatatctttacgac

SEQ ID NO: 86132 - DNA, 1464 bp, Zea Mays
ccacaccgggtttaaaaaactcaccggtactcattgccatctctacgttctccagcaccgccgttgaacctcctccctattcccgttctctagcaccgccgttgaacctcctcccctctccctcttgcttccctctctcatcctctctgccgcttccccgctctccccaaactactctgtgccccgtcagatcgacctggactttggcgacagctacttctcgacgggcggcacgggcgtgctgctacttctgcttcctctcccacgcttgctgagctgatggctacatcagagccagtacaagagagtttggtggtgcactactcacaacctagtaggccccgggtcctccttgctgcttcaggaagtgtagccgctataaaatttgaaagcctttgccgtagcttctctgagtgggcggatgtccgagctgtggccaccacgtcatccttgcacttcgttgatagatcatctctaccaagtggcatcgttctttacactgatgacgatgaatggtctacctggaagaagataggagatgaagtcttacacatcgagctgcggaaatgggcagacgttatggtgattgctccattgtcagcaaataccctggctaagatcgccggtgggttatgcgacaacctcttgacctgcatcgtgagagcgtgggactacagcaaaccgctctttgttgccccagccatgaacacgttaatgtggaacaacccattcacggagcggcatcttcacacaatcaaccaactgggcatagccttgatccccccagttaccaaaaggctggcctgtggcgattacgggaacggcgcaatggccgaaacctcgcagatccatacttccgtgaggctcgcgtgcaagacgcaaccgcacgatgcgagcagttcactcgcgggtcctgtcagtaataaccggccatctagctgatgcagcggttggccacttgattgtcaagcttaggaatttgttttatctgcagtgtgcatctggagtgttgtaccagattttttttcaactagagtttgtgtgtattgaattagggggaaaggttgttgtcacatgataacaataacttccaatgatgactctattcagtttgtaattgtctgtgggagtacaattatgcagctgtattgtctgctacaatattgtttgtttgtgtgtgtgggagtggggggtgctgttgccacagagatagattcctccctgcccagtaatggtagtgattattcagtttgtagttgttagtggaagtgtccagcaaacttttctacccttcgatattcctggtacaaatgttgaaacgactgtcccgaccatttgagtgatttgctttccacctgccattgatgtgcgcatgtcgcttcttcattctcggattcttgcctatctgtttttactggtgtagctgtccgaaatctggatgttgtcgatgcatatctttacgac

SEQ ID NO: 86133 - DNA, 1124 bp, Zea Mays
gagattcaaaccggaaaaaaattattgtgctaaaaatacatcagagaaaaaaattatagaataattaaaaaaaggggaaatatctctcatctcacgccactctctttctctctcccagattttttttttcacagccgcatgccttgagtccttatcccattgctgttgttcggctgccaaagatttttcacgcatgcaagcccaggcacgcatcgttccagctccatgtcccacgggatatttcttatctcctgtgcgctcactcaactggatgagtctcctgcgtaccggtctttgatttttctctggaatgtgcttgagcttgtacaggctgtggccttatccatcgctcgattcatctccctgtctttatcttctccaagccgtggagcttcttccccagcgcgcccctctccctggctcttccctgcgcgccgcggtgctccagcttggccctgctcaactcgcctctacacagcgttcctctgctcggccctttttcccctgcacgcgagctttgcgtcttcctgcgcgccggctcctgctgggccatgcgccctggtggctatcgcgactgatctgtggccgccaccttcagctcgccggcatttcttctctgcgcgcagctcacgccctgctagcccctgctgcgggttgtcgagctctctgcgcatgctcagctcactctttctttgtttgccgcgcgcacgaattttatctgcttgccacagcgtgtcgagctcccgcactatcatcacttctatcgcaagctcgttagccacagttattttgaccacgttagctcgccagacctgcaactctatatacgccacccttccgtatcattgtcgagcccgtcgaacctcgttcttctctgctcgctctcgtcgaactccgaatcccagatattagataaaaataagcgaggcccctgtgtatcgcttatcaagtactcggttgaagacatcaatcgaagatcgtcgtcgtttggtgcgtcgtcaagaaatcccaagacgaagctagcagcgcgatatttctcaagcactcgacaaattgcttggatcagaaaatcgctaccgatctcgcggattcgtgtcagctatggaaacggtaagctgataaat

SEQ ID NO: 86134 - DNA, 1008 bp, Zea Mays
atggagctcgatcgaaagatgatgatgctgctgctaatctatatcagccatctgctattctgctcgcgagatctcctcaaagaccggcagcctcctgctcttcttccggtacggcaccgccacgtcgagcaaagccagcatctggttctcgacccagtcatcgtcgtcgctctcgctcccgctcccgctcttatccgccgggcgtcgtcgtccgtcaccgccgccaccgcccggccacgtcgtatgcgccatgatccgggccagcagctcctccactttccggacgatcttgccgtcctgctggtcgcgggcctgcaggtacctcccggcgagcacgtcggcgaggacgagctcggcgtcggcgagccgggcctgctcgatgaggcagagggcgaggttgcacgccttgttggcgtccgggtcgatcatctgcgccttccggtacaccacctccgccgccatgaagttgcgctgctgcatgtacgcccacgcgaggttgcccaggacgcgcgatgtctcttgcttgacggagacgtggatcttgcggccgtgcgagcgggcgcgcttggtggtcctgccatggaacgcctcgccgaggtagatcttgcggagcttctgcttgagcagctcgatctcctccttggtccgcccgctggccttgtagaggtccaggaggatgttgtccagcggctcctgggactgcttcgggcacaggtgccgcagcgacctgatggcgtcgatggcctccgccaggtacccgcgctgcttcatcaccaccgccatgtccttgagcgcgctgtccaacttgtcgcccgcgctgatcgccttccagaaccacgcgatcgacgcgtccaggtccttctccaccagctggaagtgcttggccctcgcgtaaggcccgtcgccgggcgggatcttgtgcgcgacgtgcggcgaggtcgggctcgccggctgagccaccgctgccatggcgacaagttgatgattatccatgcctcttcctactag

SEQ ID NO: 86135 - DNA, 931 bp, Zea Mays
tcatacctttctcggccttttggctaagatcaagtgtagtatctgttcttatcagtttaatatctgatatgtgaactatgtgttcacttcgatattaaatttattttttgtgggggagggtccgtatagtagcttgctacttggtcctcgtgtgtcgctcgggcgttgcacttctgcccgagccaggcgcatcccaaccagttcaaatcaaatttcgtgttctctgcttaaacggcttacagtagtttgttttcagtttattttgattgcggaatcttgttgtattaccggttaagatgatttttatcttgtatatgtccacagaccagtaatcagataaatctatattgaacagaaaagtgacttccacgcacctcaacacttgaccgtcccaaactaaatccgtacctcaacatcagacccttgctttgcttgagatcatcgaaactaagccgttttagagttaaaaacctgtgattatcagtaaccggttttctatttttaaatctaaaaacaattttcaggtttctcagctggttttggcgttttcgactgattttcttcgctgattcttgatggtttttggaatttaagttttcggtcgagaaaatcgttgattcttgatggttttccgaattttcggaccggaaatcggcttttgccggttttcaaattcaattaaattggtttcacgacgaggaatcactattttcaccattaactagtttctattttctatttttaaaatttaaaaaacaaatcgatgcataactaataccgatcccgatccgataacgacaaactagatcggtttttgcccattttcgatgtttttgtagtccttgttttgagccacctgcccttgcgttaccttgagcatggttaggagcttgttcattttcacgacaatgatggggttaggaacattgtc

SEQ ID NO: 86136 - DNA, 2349 bp, Zea Mays
accaccaagtggacgcagcagctttaaccccccaaagcctcgacgccgcgagcacagctccgccgccaccgcccccttctcatccgcggtctcctccgcctgctgcatctctatcgatctagcgggactggctccttcccgtgctgggtccttcgtcaatcgtcagcgcgcaagatcggcacttgtgtacatctgagcagtttccggtgccctaattcaggcgcgggcgttgttgggttttcgataattttgggggttcacctgaaccctcatgacccaggtgaagcccgcccctgggggaaggatgctgaccgtgctgcgggtgcacctcccgtcggagatcccgatcgtcggctgtgagatcacgccgtatgtgctcctgcggcgccccgacggaggcgtcttcaccgacgacgtgtctgagaccgcgcccgtggatgggtacttcatgcgctacaagtggtaccgcatacaaagtgatcgtagagctgctatctgcagtgtacacccaacagaacaagcaacacttcagtgcatagggtgtctgaagtcaaaaatacctgttgctaagagctaccattgttcttctaagtgcttctccgatgcttggcaacaccacaaggttttgcatgaccgtgctataagtgctttaaatgaaaacggaaccgaagatgatgagttgtttggcagatttggtagcggcagttcgagctcaggggttattagtgctgcgttgtctggttcaacatcaaacctttcactgagctcaggtgttaataatggacctacacctgtgtatccaacaggcactgagaagagttctggtgaaacttggtttgaagtgggatggtcacgaacatatacggcaactactgatgatattggacatgtgctaagatttgaatgtatagttgtggatgtggaaacacgggggactgtgagagctcctacttcagtcatgacatcccgtgtaatcccagcaccgaccccgacaccacgccgcttgatccctgttaatgcagctgatgcaatggtccacttcgatttagatagccggacttcttcttttgggacatttactgtgctgtcctacaatattcttgctgatacatatgcaacaagtgatacatacagctattgtccaacttgggcacttacatgggcttatagaaggcaaaatttgttgcgtgaaattattggttaccatgctgatattatctgccttcaggaggtacaaagtaatcactttgaagattttttttcaccggagcttgataaacatgggtaccaacctctatataagaaaaggacgacagaggtgtacagcggaagtcctcaagcaattgatggttgcgctactttctttcgtcgggacagattttcgcatgtcaaaaaatatgaggtcgagttcaataaggctgcacagtctttaactgatgcaattattcctgccgctcaaaaaaagttagctctaaatcgtttggttaaggataatattgcgctaattgcagttttagaagctaaatttagtaaccatggaactgaaaaccctagtaaaaggcaacttctctgtgtggctaatacacatataaatatccaccatgaccttaaagatgtgaagctatggcagattcataccctcctaaaagggttggaaaaaatagctgttagtgcagacattccaatgttggtctgtggagattttaattcaactcctggaagtacgtcacatgggcttcttgcaaggggcaaagttgatcatttgcatccagatctagcaatagatcctcttggaattttgcgcccactaagcaagctgacacaccagcttcctctggtcagtgcatactcatcattcgtgagtatggctggtgttggctatgatttggatcaccagcgaaggaggatggaccctgggacaaatgagccattgttcacaaattgcacaagggattttaccggtaccctagattacatattttacacagcggattcattgactgtagagtcattattggagctgttggatgaggatagcttgagaaaagacacggctcttccttctcctgaatggtcatcggatcatatagcgctcctagcagaattccggtgcaagcttagagttagacgatgatactttaggaggagctgtaggggagggattcttgacaatcgcatgagatgatgagaatgtaccctggcgaaggcaggaacgagaagcctaagggaaagaggcttgttatgttcctcacccttttacatttccgcctcgatgttctctagtggcactagttggaatgcgacttccaatagaagatatattatcaatgcaaagagaaatgatttaat

SEQ ID NO: 86137 - DNA, 1265 bp, Zea Mays
ctgcccctcaccaaacatcccagccagctctcactcactcactcacaagtcacacagccacacttgaaccgctgcccgcagcggagggagcttgcacgggccaacgcacacataacacaagctcgtcgtcgatggcgcggtgggctgcggtgctggcgctggccgcggccacggccatcgccgtggcgtccgtggcgggcggcgacatgagcgcggacaagacggagtgcgcggaccagctggtgggcctggcgccgtgcctgcagtacgtgcaggggcaggcccgcgcgccgccgcccgactgctgcggcggcctgcgccaggtgctggggaagagccccaagtgcctgtgcgtgctcgtcaaggacaaggacgaccccaacctgggcatcaagatcaacgccaccctcgcgctcgcgctccccaacgcctgcggcgccacccgcgccaacgtctcccactgcgctcgtacgtcctcgctttcttcttccttcagccggccagccagtgctagcgaagccacaaggccgccgcccgggcccggcgttgcttttcttactgcttcattcttttctccccaagccaaatcatgtctgtgtcattttattttattttattttatttttgctgcagagctcctgcatattcccccgggctccaaagacgccgccgtcttcagccccggcggcgacaagggctccactgccgctccaggtcagcctgcctctctacctccactgcctcctcgttgctcttcgttcatttgacgtttccttttcgatctgagaccactctcttgtctgtccttttgcagccaaggacaactcgacggcgacgaccgactcccgcgcgctgcaggcgaccaccggacgcggcgtctcctcctcggcggcgaccgccggtgctgcactcgcggtgctgctcgccggctacctcctcctgctcgtgccagagctgtcgcctagctcgttctagaccctctgtcaagttgtgccaccagtaggatttgatgtgttgttgttctttctagtacgtgacgtgacagacaatttgctgctggtgtccttgttgttgtagtagttgcactgtgtgttcctgttatgctatgggtacgagatgttagggcatgggttaagctaagctaaggcgatggggtatcagcagtaccttacctctcatctggctgctgatcctttttgttcttggcactgctgttttatctgaacatttgatcagccaagagaacttccactcgtgacacggtt

SEQ ID NO: 86138 - DNA, 1057 bp, Zea Mays
ctgcccctcaccaaacatcccagccagctctcactcactcactcacaagtcacacagccacacttgaaccgctgcccgcagcggagggagcttgcacgggccaacgcacacataacacaagctcgtcgtcgatggcgcggtgggctgcggtgctggcgctggccgcggccacggccatcgccgtggcgtccgtggcgggcggcgacatgagcgcggacaagacggagtgcgcggaccagctggtgggcctggcgccgtgcctgcagtacgtgcaggggcaggcccgcgcgccgccgcccgactgctgcggcggcctgcgccaggtgctggggaagagccccaagtgcctgtgcgtgctcgtcaaggacaaggacgaccccaacctgggcatcaagatcaacgccaccctcgcgctcgcgctccccaacgcctgcggcgccacccgcgccaacgtctcccactgcgctcagctcctgcatattcccccgggctccaaagacgccgccgtcttcagccccggcggcgacaagggctccactgccgctccagccaaggacaactcgacggcgacgaccgactcccgcgcgctgcaggcgaccaccggacgcggcgtctcctcctcggcggcgaccgccggtgctgcactcgcggtgctgctcgccggctacctcctcctgctcgtgccagagctgtcgcctagctcgttctagaccctctgtcaagttgtgccaccagtaggatttgatgtgttgttgttctttctagtacgtgacgtgacagacaatttgctgctggtgtccttgttgttgtagtagttgcactgtgtgttcctgttatgctatgggtacgagatgttagggcatgggttaagctaagctaaggcgatggggtatcagcagtaccttacctctcatctggctgctgatcctttttgttcttggcactgctgttttatctgaacatttgatcagccaagagaacttccactcgtgacacggttaatgggatagatcttagtaatgtacgaatgtcgatgtaaaatacatctgcggttctt

SEQ ID NO: 86139 - DNA, 1222 bp, Zea Mays
ctgcccctcaccaaacatcccagccagctctcactcactcactcacaagtcacacagccacacttgaaccgctgcccgcagcggagggagcttgcacgggccaacgcacacataacacaagctcgtcgtcgatggcgcggtgggctgcggtgctggcgctggccgcggccacggccatcgccgtggcgtccgtggcgggcggcgacatgagcgcggacaagacggagtgcgcggaccagctggtgggcctggcgccgtgcctgcagtacgtgcaggggcaggcccgcgcgccgccgcccgactgctgcggcggcctgcgccaggtgctggggaagagccccaagtgcctgtgcgtgctcgtcaaggacaaggacgaccccaacctgggcatcaagatcaacgccaccctcgcgctcgcgctccccaacgcctgcggcgccacccgcgccaacgtctcccactgcgctcgtacgtcctcgctttcttcttccttcagccggccagccagtgctagcgaagccacaaggccgccgcccgggcccggcgttgcttttcttactgcttcattcttttctccccaagccaaatcatgtctgtgtcattttattttattttattttatttttgctgcagagctcctgcatattcccccgggctccaaagacgccgccgtcttcagccccggcggcgacaagggctccactgccgctccagccaaggacaactcgacggcgacgaccgactcccgcgcgctgcaggcgaccaccggacgcggcgtctcctcctcggcggcgaccgccggtgctgcactcgcggtgctgctcgccggctacctcctcctgctcgtgccagagctgtcgcctagctcgttctagaccctctgtcaagttgtgccaccagtaggatttgatgtgttgttgttctttctagtacgtgacgtgacagacaatttgctgctggtgtccttgttgttgtagtagttgcactgtgtgttcctgttatgctatgggtacgagatgttagggcatgggttaagctaagctaaggcgatggggtatcagcagtaccttacctctcatctggctgctgatcctttttgttcttggcactgctgttttatctgaacatttgatcagccaagagaacttccactcgtgacacggttaatgggatagatcttagtaatgtacgaatgtcgatgtaaaatacatctgcggttctt

SEQ ID NO: 86140 - DNA, 856 bp, Zea Mays
tatatataggcctagggtttccttcctcctccagtgctgtcatcgccgccgccgccccggtttccttcgtaagcccgtcgtcctccgtccgcgactctgcgcgagaagcgagagtatggacacccaagtgaagcttgctgttgtggtgaaggtgatgggaaggaccggctccaggggtcaggttacccaggtcagagtgaagttcttggatgaccagaaccgtctcatcatgaggaacgtcaagggaccggttcgcgagggagacatcctcacactgctcgagtctgagagggaggctaggaggctgcgttgaggcggaatagtgtattggtagttttcgtatggagttggatgtcatctaattgtgctatgtttgtcaaactttggtatgaccttcaaaacacctgccttgtatgattatttgtgagcctggtgataagattgcagtttggttttttatgatccggttgagggtatgtttggcaacagtatttatcaaaatcatagttttacaatactataatatgtaattgtcggcaacgactgctatgcaagcagtccttctatgcaagcgtgcaagcaaacaatctgatccattagatcgtgatccaaccgtaggtcacatttaacacttaaacccttccaccaccagctcaataatctttataaaaaaacctctgacaaactatggttgtatctgtggttggatcgtaatctaatggatcagatggtttgcttgcacgcttgcacagaacgactgcttgcatagcagtcgttgccgtaattgtcatggctctaaaaataccttggttttgagaaatattgtctggtattgtataaaagctagcaatgcaat

SEQ ID NO: 86141 - DNA, 1559 bp, Zea Mays
cgagaagaagcaacagctgagctgcctcgagcagcagcaacaaacacgcgcggcacggcacggcagcctgactcggaagctacacgcaggccggccgtagcgagatgaagtcgagggtggcgctggagccgctggcggaggagcccggctgcggggaggaggacgcggcgcgccggcgctcgggcctccacgcggcgctgcaccggtgggcgcgcctcctctccggtggcgtggcaggggacgacgcccgaccggccgccgacctgcgcgtgctcctctccgtgctcgcctgcccgctctcccccgtgcccctcctcccgcgccttccacgccacgtacgtacgtgcgcgcgccgcagccgcagccgcagccgccgcgccaacactctaaaaccttcctcctccgggtccctcccgcaccccaccatatatgcgggcgtttgcttcgcttagaatgacggcacgccgtacgtgcaggtcgcgtcgtcggcgcagtacatcatcgagcagttcagggccacgacggggtgcgggaagctggaggacggcgccgtcaagagcatgtacgcgtccggccgggtgcgcctctccatgctgcaggagcccggcggtgggggaggcggcgggcgcggccacgaggggagcttcgtgctgtggcagctcgcgcccagcatgtggctcgtcgagatgtccgtggccgggcagagcgtcgccgcgggcagcgacggccgcgtcgcctggcgccgcacgccctggctcggcgcccacgccgcgcgcggcggctcccgcccgctccgacgcgcgctccagggcctggaccctgtgacgatcgcgtccatcttctcgacggccgagcacgccggcgagaaggaggtggacggcgaggactgcttcgtgctgcgcctggacgtggggccgtcggtgctgtcgagctggagcgacggaaccgcggaggtgatccggcacgggctgacgggcttcttcagccagcgcagcgggctcctggcgcggctggaggactcgcagctgacccggatccagtcccccggcgcggccgccatgtactgggagaccaccatcgcgtcggcggtgtcggactaccgcgccgtggacggcggcgtggccgtcgcgcacgcgggcacgtccacggcgcacctcgcccggttcggcgtgggcgtccgcgccgcgcgcgtcgtcacgcggatggaggagtcgtggaccatcgacgacgtggcgttcaacgtgccggggctcggcccggacgccttcataccgccggaggaggtcaggaggagccggtcctacggcgccgccatcgcaggcggcaagtgagctctctctccgccgtgtcagtcagggctcaagcgtctgtgtaacatagtctgcaactgcatagagagagctttgctgtttggtagcttcgtcgtctttgtctgtcttccctttattttgtaacctgtgagtgagtgagtgagtgagtgagagtggcatcggtgatcgtgcatgtacatatatggatctgatttacccaaaaataataatgacaaaaattctaaagcc

SEQ ID NO: 86142 - DNA, 1422 bp, Zea Mays
cgagaagaagcaacagctgagctgcctcgagcagcagcaacaaacacgcgcggcacggcacggcagcctgactcggaagctacacgcaggccggccgtagcgagatgaagtcgagggtggcgctggagccgctggcggaggagcccggctgcggggaggaggacgcggcgcgccggcgctcgggcctccacgcggcgctgcaccggtgggcgcgcctcctctccggtggcgtggcaggggacgacgcccgaccggccgccgacctgcgcgtgctcctctccgtgctcgcctgcccgctctcccccgtgcccctcctcccgcgccttccacgccacgtcgcgtcgtcggcgcagtacatcatcgagcagttcagggccacgacggggtgcgggaagctggaggacggcgccgtcaagagcatgtacgcgtccggccgggtgcgcctctccatgctgcaggagcccggcggtgggggaggcggcgggcgcggccacgaggggagcttcgtgctgtggcagctcgcgcccagcatgtggctcgtcgagatgtccgtggccgggcagagcgtcgccgcgggcagcgacggccgcgtcgcctggcgccgcacgccctggctcggcgcccacgccgcgcgcggcggctcccgcccgctccgacgcgcgctccagggcctggaccctgtgacgatcgcgtccatcttctcgacggccgagcacgccggcgagaaggaggtggacggcgaggactgcttcgtgctgcgcctggacgtggggccgtcggtgctgtcgagctggagcgacggaaccgcggaggtgatccggcacgggctgacgggcttcttcagccagcgcagcgggctcctggcgcggctggaggactcgcagctgacccggatccagtcccccggcgcggccgccatgtactgggagaccaccatcgcgtcggcggtgtcggactaccgcgccgtggacggcggcgtggccgtcgcgcacgcgggcacgtccacggcgcacctcgcccggttcggcgtgggcgtccgcgccgcgcgcgtcgtcacgcggatggaggagtcgtggaccatcgacgacgtggcgttcaacgtgccggggctcggcccggacgccttcataccgccggaggaggtcaggaggagccggtcctacggcgccgccatcgcaggcggcaagtgagctctctctccgccgtgtcagtcagggctcaagcgtctgtgtaacatagtctgcaactgcatagagagagctttgctgtttggtagcttcgtcgtctttgtctgtcttccctttattttgtaacctgtgagtgagtgagtgagtgagtgagagtggcatcggtgatcgtgcatgtacatatatggatctgatttacccaaaaataataatgacaaaaattctaaagcctctg

SEQ ID NO: 86143 - DNA, 1320 bp, Zea Mays
ggtgtactgacatgttcttaccgaaacactgacgctgggaacgcactagactgccggttcccacttgctagctgttgcatgttccactgtcctctatgagagtagctgaatgttctgaaattttttctcgaggtggaactaattatatctgatacgtataaaatttcagagcgagagcgtatgcacttgggctgacttagattaccatttttgttggagaatctgatccgcccatctgattttttttttttttttgctcgcattggtggtcctaaaggcaccgaacacatgcgtgccaacaagtcaaggaggttttcatctgctcagctttgctgacatatgcatctttttttttatttcatttgtggtttcgttgcatcccatgatcatgttactactgcaatgtaatgtaacaagttgtcagcgtgttcgctgagcggattggtgattaattcgtgcacgcagggcctggaccctgtgacgatcgcgtccatcttctcgacggccgagcacgccggcgagaaggaggtggacggcgaggactgcttcgtgctgcgcctggacgtggggccgtcggtgctgtcgagctggagcgacggaaccgcggaggtgatccggcacgggctgacgggcttcttcagccagcgcagcgggctcctggcgcggctggaggactcgcagctgacccggatccagtcccccggcgcggccgccatgtactgggagaccaccatcgcgtcggcggtgtcggactaccgcgccgtggacggcggcgtggccgtcgcgcacgcgggcacgtccacggcgcacctcgcccggttcggcgtgggcgtccgcgccgcgcgcgtcgtcacgcggatggaggagtcgtggaccatcgacgacgtggcgttcaacgtgccggggctcggcccggacgccttcataccgccggaggaggtcaggaggagccggtcctacggcgccgccatcgcaggcggcaagtgagctctctctccgccgtgtcagtcagggctcaagcgtctgtgtaacatagtctgcaactgcatagagagagctttgctgtttggtagcttcgtcgtctttgtctgtcttccctttattttgtaacctgtgagtgagtgagtgagtgagtgagagtggcatcggtgatcgtgcatgtacatatatggatctgatttacccaaaaataataatgacaaaaattctaaagcctctgaatctagacatctttttttttggggtactactaaggaaaagaagactgtttgaatctgtgattgattgattcagtctactttcatggatacaggatacaca

SEQ ID NO: 86144 - DNA, 713 bp, Zea Mays
acaccactacaccacaccttggacatatatatggaaaatagcttcacagtctagattccatggcatcaaggatggggatggtggctattctgtccttgtttgtttgtgctcttgttgcttcaacatctgtcaatgctaatgtgtggcagactgatgaggatgctttttatagtacaaataaactgggagtcaatggcaacatggagatggcacaacaacaaggtggatttattggccatcgcccaagacttgcattattcaatagggcatcaaaacaactggaccgtgaaaaaagacctgtgcctagcgggccagaccccatacatcacagcatcccatcacatgctcctcagcatccaccatcatatggcaaagctccttatgaagatgacaagagcatagcatctcctggtctgtccaacccgataggtcctccaccatttttagatagatactagttcatgcaaaagtagtgagtatttatgcacctatgccaatgaataacctctaattacctacatgtattggcctggtgtttggtaaacatgaagcaataactttctcttatcgaaatactggtctcaactccgcctatgttgtctcagcatatgttagtgcagcatagtctggccctaagtctaggtactaggaggagggttgagttaggcacggtgagctagctataaaaaacttagccactccaatggagatga

SEQ ID NO: 86145 - DNA, 240 bp, Zea Mays
cccaaaaggaatctaggaaagtcgtgcgccgccaccggggaattaggcctcctaagcattggggggggattcgtcgccggtggtcagcatcctctaggaggcttcggccgcgtggaccgctcggagatcttcgttggcgcgcggcgggcgaagttctggggaattttgggctcgtgtgtgatcgatgcggggcgaattgcttgccggagcgcagcgccgccacgaaaccgcacgctgtcg

SEQ ID NO: 86146 - DNA, 583 bp, Zea Mays
acaccactacaccacaccttagatatatatacagaaaatagcttcactatctagattccatggcatcaaggatgggaatggtggctattgtgtcactatttgtttgtgctcttgctgcttcaacatcagttaatgctaatgtgtggcagactgatgatataccagttgttaatagcaacatggtgaggcatagcaacatggagaggcaacaacaacaaggtggatttattggccatcgtccaagacttgcatcttttaatagggcatcaaatcaagatggtgatcgaaaaagaactgtgcctagtgggccagaccacatgcatcacagcatcccatcgcatacccctcagcatccaccagtgtatgtccaagctctttatgaagatgatagaagtagaacatcttctggtccatccaaatcgataggccctccaccattatcggatagatactagttcatgcaaaggtatagagtgtttatgcacctacgccaatgaataatctctaactacccacatgtactggcatggtgtttggtaaacatgaagcaataatttcctcttatcgaaatacaggtctcgag

SEQ ID NO: 86147 - DNA, 102 bp, Zea Mays
atggcattaaggttgggaatggtggctattgtgtcactatttgtttgcgctcttgttgcttcaacatcagttaatgctaatgtgtggcagactgaagtgtat

SEQ ID NO: 86148 - DNA, 556 bp, Zea Mays
ctacaccactacaccactccttagacacatatatggaaaatagcttcactgtctagattccatggcatcaaggatgggaatggtggctattatgtcactatttgtttacgctattgttgttccaacgtcagttaatgctaatgcgtggcagactgatgataaaccaggtgttaatagaaacatggagatgcaacaacaacaaggtggatttattggccatcgtccaagacttgcatcttttaatagggcatcaaatcaagagggtgatcgaaaaagaactgtgcctagcgggccaaaccacaaacataacaacatcccatcgcatacccctcatcatccaccatcatatgtccaagctctttatgaagatgatagaactataacatctcctggtccgtccaaatcgataggccctccaccattaccagatagatactagttcatgcaaaagtagtgagtgtttatacacctatgccaatgaataacttctaactacccacatgtactggcctggtgtttggtaaacatgaagcaataatttcctcttatcaaaata

SEQ ID NO: 86149 - DNA, 220 bp, Zea Mays
gttgacactaacctaacacaggctataaatacaaccgacattttaatatccatcggcattgcacaagatataaaatgtagatcgaacaatatgcatatattacataccatagcaggtcctgcagccttcagaaactcctcacacttcacaattcggccaacaggtgatctagccacctaaaatgtataggaaaattgaaattatttttctgaaaaacttg

SEQ ID NO: 86150 - DNA, 784 bp, Zea Mays
attactcggccacgacttgccgactacgatgccagcgccaagcctccgccgcccagctaaaaatcccccaggcgttcctgagcacccgtttatcatcacatgaccggagtcggccagaatttgccgtagctctcgcccccgctcgccgtgcgcttctcgtcccattcccccgggatcgtagattctcgagctgagctgagctgagctgagctgagcgatggatcgcgagctcagccccaggggcaatgctccagggagagggagcggcggcgcgtcgtcatcgaagcacaagaacggcggcggcggcaagaagccgatcaaggtgctttacatcgccaaccccatgcgcgtccagaccagcgccgagggtttccgcgccctcgtgcaggagctcaccggccaacacgccgatccctccaagtacagccccggcgaccttgactccggcgctgccgcacagggtctgagccccagggccagggtcgcggacgtttcgtcggaaaccatcgtcgcaagccacagccctggcagtaaggccgcgccgcacggaggggactactacgacgtcgaggaagacgaagatgacgtcttcaggtcgcctcacatgctgctggagaacaattatacggtgttctcgccgccgacgctactatatgaccatcacccgcacagcaagttattttcaatggaaagcatcaaattaacaaaagacaattgcatgaagaaacgtcaaagacatcagattatagccaatggggaacaagagcagcaaccattagttcat

SEQ ID NO: 86151 - DNA, 931 bp, Zea Mays
gtagatgctggtggaagcgttttctttcctatactggccttctcgaaacctgtaggagttgctctaacagtgtttgcgagccgacatccagatgccctgtgcagtattttcacgtcaagctaagaatttgtaacagtgtgacgagtctgtgccatcgcttaggctgctttggtataaaagaccaaggtaaaagctatgcaatattttcatgtcatggattatattatctcatatatatatatatatgcaaaatgagtcatgctggaatcaatagctaataccgatagcaccctcatcagttcaagtactcttgctagctgtactccttgcattaactcttgctttcactgcatggatcttatttcggcaaagcatcactagtcaattttatttgatgtttcttatagctagacatatcctttctcttgatgattactaaacctatctagctaatgcaggctacttctgaatcggaggctgggttcgcagcggagcatgacaatttctggtccaaatgaagctgaacaagttaatacgactatagctacgaatggtttcagtgaggagcatagcacaagacaacactggtacaagagactataagcatgaatacgaagatggctacgtacggcaatggtggtgaaggctacgacgaaaggattgcggcgatattacggttgatgaatggcatgatgtataattttcttgatggacaaaaggatatatacacctccgatctgttttgtccattgagcagcaatctatgtaatcttatgcctaatgaacaggctaaggatgttttagacacaactactctagttggcacaatgttggattcggaagggaaacattgtaaaacgttggttgcttccttgtgtacatgttgcgcgcagcattatattatatgtctattgtttgtcatggtggcata

SEQ ID NO: 86152 - DNA, 231 bp, Zea Mays
caacatattcacaaaggagacaaaccacaacatcaccatgcaccagcctctgtttcatagaacagtccgccacaacacaacacagattactgactcttcaacacagcaagtataaaaccaaactgagaaagtgagaagcaacatagcacagcatagttgccaccatatcacaacaatttgattctacagctgttggagttgacaaacaaatgaagacaattgatgttcaac

SEQ ID NO: 86153 - DNA, 1550 bp, Zea Mays
gagcttgcgactgcaaaccaatccctagtgcctagtcgcctgatctggggagaacgcatctgagactgattttcgagtcaaagctactgctcgtttgaaggggagccacctgtgcggttgcgctcctctttgctcgttgggttttggttcaagagggggaaaccttcgtggagactgaagaggaaggccaagttcgagggtgttcctcgtccactcttctcgatccgcaatgcgtgcggccgccggagacgccccgccgcggcgtgcggggggtatccgcgtccgtgtcccactggtagagtctgtctcctgccactgcagggtagatggaggtcttaaaaccgttgtaagtgctaggaagtttgtccccggtgcaaagctgtgcatgcaacctgatatcataccaaacaagcgcaagtcaaggagctcacgcaaggagagatccaaaactcaatcaccactgctgcctgggcttcctgatgaactggctatttcctgtctcatgcgggctgctcggatcgaacacccaaatatgcggttagtctgtaaacgatggaacccgacttttgtctggaaattattattactccttgcgtaagaaattcggcatggcagaagaatggatctatgtcttcaaaagggaccgtgatcagaagctatcttggtatgcgtttgatcctgtaaaccagctctggaagtcattgcctccagttccaccagagtattctgaagctgttggttttggtagtgctgttctcaacggatgctatctgtacttatttggcggcaaagacccagtacatggatctatgaggcgcgttgtattttacaatgctcggataaacaaatggctacgagctccagatatgctgcaaaaacggcacttctttggttcttgtgtcataaacaactgcctttatgttgctggtggagagtgtgtagggatacagagaattctaagatccgctgaggtatatgatccgaacaggaatagatggtctagcattgctgaaatgagcacaggaatggtgccctctattggagtagtacatgatggcaagtggtatctaaaaggtctaaattctcatcgccaggtcgtgagtgaggtctatcttccagcatccaaaatgtggtcagccaccggtaatgaaatggtaacgggctggcggaatccaagcatttccctcaatgggcatctttattctgctgattgtcgtgatggctgtaagcttcgagtttataatagagagatgggatcatggacaaggttcattgacaccagacaccatatgggaagctcacggtctctcgaagccgcagcctttgtctcccttaatgggaagctctgcatcatccgtaacaatatgagtatcactattgttgatatattggacccaacaacagctactgaggtcgacagtgcgcgcatgtgggaggcttttgctcgaaaggggcagcacagatcatcattcatggcaaacctatggttaatcatcacaggtcgtaatctgaagacagacattatgcattgtcaggtgctccaagtttga

SEQ ID NO: 86154 - DNA, 2469 bp, Zea Mays
gagcttgcgactgcaaaccaatccctagtgcctagtcgcctgatctggggagaacgcatctgagactgattttcgagtcaaagctactgctcgtttgaaggggagccacctgtgcggttgcgctcctctttgctcgttgggttttggttcaagagggggaaaccttcgtggagactgaagaggaaggccaagttcgagggtgttcctcgtccactcttctcgatccgcaatgcgtgcggccgccggagacgccccgccgcggcgtgcggggggtatccgcgtccgtgtcccactggtagagtctgtctcctgccactgcagggtagatggaggtcttaaaaccgttgtaagtgctaggaagtttgtccccggtgcaaagctgtgcatgcaacctgatatcataccaaacaagcgcaagtcaaggagctcacgcaaggagagatccaaaactcaatcaccactgctgcctgggcttcctgatgaactggctatttcctgtctcatgcgggctgctcggatcgaacacccaaatatgcggttagtctgtaaacgatggaacccgacttttgtctggaaattattattactccttgcgtaagaaattcggcatggcagaagaatggatctatgtcttcaaaagggaccgtgatcagaagctatcttggtatgcgtttgatcctgtaaaccagctctggaagtcattgcctccagttccaccagagtattctgaagctgttggttttggtagtgctgttctcaacggatgctatctgtacttatttggcggcaaagacccagtacatggatctatgaggcgcgttgtattttacaatgctcggataaacaaatggctacgagctccagatatgctgcaaaaacggcacttctttggttcttgtgtcataaacaactgcctttatgttgctggtggagagtgtgtagggatacagagaattctaagatccgctgaggtatatgatccgaacaggaatagatggtctagcattgctgaaatgagcacaggaatggtgccctctattggagtagtacatgatggcaagtggtatctaaaaggtctaaattctcatcgccaggtcgtgagtgaggtctatcttccagcatccaaaatgtggtcagccaccggtaatgaaatggtaacgggctggcggaatccaagcatttccctcaatgggcatctttattctgctgattgtcgtgatggctgtaagcttcgagtttataatagagagatgggatcatggacaaggttcattgacaccagacaccatatgggaagctcacggtctctcgaagccgcagcctttgtctcccttaatgggaagctctgcatcatccgtaacaatatgagtatcactattgttgatatattggacccaacaacagctactgaggtcgacagtgcgcgcatgtgggaggcttttgctcgaaaggggcagcacagatcatcattcatggcaaacctatggttaatcatcacaggtcgtaatctgaagacagacattatgcattgtcaggtgctccaagtttgagtttgtccatgtatgaagtggagtatacttacacaacctcagagcctgacttggaagctgaaatgggtacatgagccataccaaagagaccagctttcgctttgaactctgtaaatatccctgatttcgtccttttgaactttctaattttggcacctatctgtcagtgagcttccaagagattggtcctggggactggagaaagaatatgccatggctcatgaggcattaagggtttgaatggcagcatgaaccccataggtcagaagcgtaggaagcactgacgaaagatggtataagcccagagctggaacagagcagaggcagggctattgactactaaagccccagaggtgttacttcagtttggtaaaatgcaggtctccaataacttccatagaattgatgctttgtttcagaatggcaagctgactcatcaggaatttgcacaactgatacagttgatgtaggccgccgcacaggttactgccatgctgtcatacattttcaggataggaagtacagccgctagtttgaaaactcaaatccccacaatcctcgagggtatatgagtttccaaactagccctgactgtgcatatcctcctctatgagtttccaaactagccctgactgtacatatcctcctcttggtttatcagtcatgggaagtactcgtatgctttataccttgaaatcttccctccttaattattgtttgctgagaaatctgtagaaactgatcggtgctatttctgaaaggaaattctagacaccatcgaattatgtgttgctaataatgcggtcttgtgagaactttgaaccatgaacatatcgactcttatcttatgaatgtcatggccattggataatatttggcagtggtttgatatataaatataaaagaacatgtcagctca

SEQ ID NO: 86155 - DNA, 2576 bp, Zea Mays
ctttatttttcttttttccttttcatatgttttctcttctactaggctgaaatgggcctactaggccttaggtgctcgccttaacgctttaataactatggtccggaactgaagctgaaccccctgaatcaaatcccagattttgaaatactcactgctgaatgatctgttccctcgattttgtatgttgaaactcccaagatagatagtttcaagcatggttagttttctagcactaactgtctgaatctcatctgcataacatcttactagtaggtggacaagaatttgtttcattggtaatttcatgcccagctaaaagtatggtttttttatttttatctcctttttccatgttcaggtgaatattagcgttctaacttggtaaatcaataactgcaggtagagtctgtctcctgccactgcagggtagatggaggtcttaaaaccgttgtaagtgctaggaagtttgtccccggtgcaaagctgtgcatgcaacctgatatcataccaaacaagcgcaagtcaaggagctcacgcaaggagagatccaaaactcaatcaccactgctgcctgggcttcctgatgaactggctatttcctgtctcatgcgggctgctcggatcgaacacccaaatatgcggttagtctgtaaacgatggaacccgacttttgtctggaaattattattactccttgcgtaagaaattcggcatggcagaagaatggatctatgtcttcaaaagggaccgtgatcagaagctatcttggtatgcgtttgatcctgtaaaccagctctggaagtcattgcctccagttccaccagagtattctgaagctgttggttttggtagtgctgttctcaacggatgctatctgtacttatttggcggcaaagacccagtacatggatctatgaggcgcgttgtattttacaatgctcggataaacaaatggctacgagctccagatatgctgcaaaaacggcacttctttggttcttgtgtcataaacaactgcctttatgttgctggtggagagtgtgtagggatacagagaattctaagatccgctgaggtatatgatccgaacaggaatagatggtctagcattgctgaaatgagcacaggaatggtgccctctattggagtagtacatgatggcaagtggtatctaaaaggtctaaattctcatcgccaggtcgtgagtgaggtctatcttccagcatccaaaatgtggtcagccaccggtaatgaaatggtaacgggctggcggaatccaagcatttccctcaatgggcatctttattctgctgattgtcgtgatggctgtaagcttcgagtttataatagagagatgggatcatggacaaggttcattgacaccagacaccatatgggaagctcacggtctctcgaagccgcagcctttgtctcccttaatgggaagctctgcatcatccgtaacaatatgagtatcactattgttgatatattggacccaacaacagctactgaggtcgacagtgcgcgcatgtgggaggcttttgctcgaaaggggcagcacagatcatcattcatggcaaacctatggttaatcatcacaggtcgtaatctgaagacagacattatgcattgtcaggtgctccaagtttgagtttgtccatgtatgaagtggagtatacttacacaacctcagagcctgacttggaagctgaaatgggtacatgagccataccaaagagaccagctttcgctttgaactctgtaaatatccctgatttcgtccttttgaactttctaattttggcacctatctgtcagtgagcttccaagagattggtcctggggactggagaaagaatatgccatggctcatgaggcattaagggtttgaatggcagcatgaaccccataggtcagaagcgtaggaagcactgacgaaagatggtataagcccagagctggaacagagcagaggcagggctattgactactaaagccccagaggtgttacttcagtttggtaaaatgcaggtctccaataacttccatagaattgatgctttgtttcagaatggcaagctgactcatcaggaatttgcacaactgatacagttgatgtaggccgccgcacaggttactgccatgctgtcatacattttcaggataggaagtacagccgctagtttgaaaactcaaatccccacaatcctcgagggtatatgagtttccaaactagccctgactgtgcatatcctcctctatgagtttccaaactagccctgactgtacatatcctcctcttggtttatcagtcatgggaagtactcgtatgctttataccttgaaatcttccctccttaattattgtttgctgagaaatctgtagaaactgatcggtgctatttctgaaaggaaattctagacaccatcgaattatgtgttgctaataatgcggtcttgtgagaactttgaaccatgaacatatcgactcttatcttatgaatgtcatggccattggataatatttggcagtggtttgatatataaatataaaagaacatgtcagctca

SEQ ID NO: 86156 - DNA, 2614 bp, Zea Mays
cgcatccgcgccgcaacccgcagccgccctgcaggcaaccgcccgcatccgcggcagcgccgcggctgcttccatccatggcgccgcggcttccatcaatcgccagcgcgtcctccgtactcctgtcatccgaggaaagccttccatccatggcgccgttgctgcaattccccccgcgatccacgctacctccattgcccacacgatccgcgctccctccattgctaccgcgatgccccttcccaggaacccttccatccatggcgtcgttgctgcaggtgccccgcaatcaactccattgccgccacgatccccttccaccgacgacactcaccttccatcgacaaaactgatcttcctccattccaccgacggcactcacctctcagatcccgtgctcatcaccatcgtgcccctcgctcgccgcccccacctcaccaagagccttagccgtccctagagaagacacggaggtgcagtgccagtgctttcctcaagtgcacctcggattttcggtaccggccagattgggacgaattcaacattcatcggctccaccaaaacactgccactatgatgtgtatgcttgcgtcaggacaggagacccaaaagtacttcatagatgaatgtgacattttccacaagaacgagatacgaaatggccaaggactgctgacgatgatgacgacatggccaccatcgctgccctcaggctgacattctggctctccaacacagttgtcctcagggagataattgtacaaacttttggcatctcacatcaatttactccatccatgatgaatctgagcatgaatggtggtgccaaaaaacttgatgggaaatctatgacaatgctgtggagaaacagctacaatggcatgcaagccaagtttgctgcaaggcagatgccagatgattggcaggaaacaagtacacttttggctacattagagaagattgagtcttggatattttctcgcattgttgagacaatatggtggcaggcactaactcctcacatgcaaaaacgagtagaaggatcatcaactccaaaggctggtagagtgctatgtcctactttgggtgatcagcagtagggcaccttttctgttaacctgtggaaggctgcgtttcacgacgcattcaacagaatgtgccccctcagtgctggcggacatgagtgtggctgtttaccaatattagcaaaactggtgatggagcagtgtgtagcccgtttgaatgttgccatgtttaatgccatccttcgtgaatcatcaagtgagataccaacagactctatatctgacccaattgttgacccaaaagtcctaccaattccagttggtgatctaagctttgggtcaggcgcgcagctgaagaactctattggaaacgggtctagatggctgacagataatcttggcatagatcatgatgactttgaggacataggagatgttgaagacgaaagaagagttgcagctgaaacgaaatcgtttcaacttctcaatgagctaagtgatcatctattttttagtttttcataattttcctttcatggcctccttacatgtttgatttcctatgatccatgagctgccaatcatgataacgcggtttcactatgcaggagatgaacaaggatgcagtcacaactgatgctatcggcagtatcagaacttgatggtgcttgtagactgttcatggtgcttgtagggatgatgtatgtctatggcttactgagctccaaccaactatggcaggagcgttagctaggacagcagtcagtctaacaattgtggacaaagttcagtctaccatacactgaagcgcacccttgttgctaaagctgcaggtgtgaacaactttgctcagcagaatggaggatcattgtcactagcagcaagacctcgagcccagttaaccatcagtttctttccttctttctttgggccgagagagcaaagaaggatgatgcactttccaacctgtgtagcacgttgggacaactcaagaaatggcagtggatatggacatagaaattgacaggcaaaacaaagcgctggttcctttcagcgacgacatcactgaactgaattttagactgaaaggcgtgaatcagtgtggacaccagttgctgggcaagtgatatggagccagaattcgggcagttcggagactatcgccttgattgcagaatttaagaacattgttgttttacatgtttttttgcagtgaatcaggccacacatgttgtattagtgagagaatgatgatttattttatattattatggatttcatagattattttagttttccctgaactgcaattgtttcaataacataggaggggactaccttcaatgacatttaggtgaatttttaaggtatgtccattattccattatagagcacaaagcctacttcttacaactcactgtatgttttataattgtatcaaaagcactgaacaaacatagttagctatcacgttcactgttgtctaaatagattgaaataatgtggtgaagccgtcatggactcttaagtagcttagccactgcaaaggatacaattaattataaaacaccaatgaatcaataaaaaaa

SEQ ID NO: 86157 - DNA, 3582 bp, Zea Mays
aatttggagcagaaatctggacaaacgttcgaagctgatgcccattctgcgctaaaattgtgctctggtatcgggagtgtagttatagccaagtgttctcacatatttgagagaaatggggacacctttgatgggaactgcagtttgcaagatatcctcaagcctggtttatggctctcaccggagaccctccgccggttttggcgtgtctctgagctgaagcctaaggattttcttgacattttgaatggttttggactcagtgccgtaaaagtgagaaatgcaagatttctatggaatttgtacaggtggacatcgcggcagagcaaagagttccaacatctgccaaggtcaaatgagacaatggtatccatacttgcagatgctcatatgctcagtcaagcagaatcactactgctttcattgattgatcatatgactccagctgtttctagtgaactattcagtcagattatccaggtgtattcagaagcaggcaaccttgggaaatcagttgcactttatgattatgcaaggggcaagcatttgattccttcagcttcatgctatcaagtacttcttcattttctaaccagaaacagaaaggatgaattgattttgagagtatatctggacatgcttgaagttggatttggttcttgcaccgaaggaaatattcttgattctgttgtcatggctttaatcaggaaaggtaaacttttggaagctcttggtattcttcggcaattaaagagtttgggtcttaaattaagcaagggagccttgtcaaatatagttgaagaatttaacaagaaaaaggatattggggatctgatgaatttcttggaagattggaggtgtatacctgagttgcgtctttgcaacagaatccttgcgtctttgtgcacaaatcttggtacttgtcaggcatggttggtcttccaaagtttggaggccttagggtttgctccagatgctacgacttttggaattttcatttttcacagctgtagagaaatgaaactaaaatctgcacttgtatatttatcagagtgctttgctaggcatgttaaacctggagtgtgtgcctataatgctattttaggtggtgttttcagggaggggctatatagacatgcaaagtatatatttgaagacatgattgaaagagaagtaacacccaatctttcaacatataagataattcttgcagggtattgcaggtataggcggtttgatgatattgaacaagtcttgaggcacatgaaaaccaatggtgtaaatgttcttctctctggaaactgtgtgctctccaaggccttatcattcttggggctagatcacctaggggtgaaaatcaagagagataatgtcactggtttcccaaaagctgagttttttgattcagttggcaatggattgtatttggacactgattccaaaatgtttgaggtttcattgtcacaagttttggatagcgcacttctcccagatattaactcagagctaatcagggcatctcagcaaggcgatgttgcaagtgctcttcttgtgaaagacaaagcttttcaatggggatatgacatttcaccagatagctgctctgagctattcaaggccttatgtgtgagccctgcttatgttatagatgtcattgaccttatggaggagatgccagatatactttacaaacttgatgctcaaaatctagatttggttgcccaaacattgagtaggaatggaatgtctgctcatgcaaaactggttttagaaaaaatgttgagagaagacttgtcaatcagtcacaatacatatacttatttaatgataggtttatgcgaagaaaggaacatagcagggttttgggaatgttggaatcttgcaacaaagtgcagatggtcacctgatagcaaggatatgatgggcctcatcagttacttgtgcaaatggggagtgattgaggaagccctgaaacttatgaactctttatttgactgctaccatgatctgttttttagtgcatattgtgcacttctcaaagagttgtgcaggacaggtcataccagcattggatgcgcaatgttggaggctctcaaagaaaagggtgtggctgtggatcgatcattattcttttatgtgatggagggcttcctaaaggagcaaagaactgctgaatcaattggaatgcatgacatgtggcttagcaaaagcaaagaacttgatgtttttacttaccgatctgtgttgccttcattaccatggctggacacagatcgagccaagaacttggtagaatctatgctgaccgtgaaacttactgaattctcatatcgcggttgcattgtgaatgaattaatgcaaacaaggaatataaaatgggccattccagtcttgcaagaatcagctcctgggaagctcagtgccactttgttaaattccttacttcaagcctatggttggctaaaaaattggagaaagttagatgcagttctttgcaagatgctaaagatgcatgccaccctttctatatctagctaccgctttcttgtgtgcagaatgtgtgagcaaagtcgtttttctagcgcttcaagccttagagcacttttccaacatactgacaagtcaagagaactgattgcatgcaacattctaatattttatctttttcaaagaagaaacagctcacagattcatgatttattgaaggacattgaaggtaatggtatttctcttgacaaaaccacatatgatttccttgtctatggatttcacaaatctggggatatcaatgattcagttaatgcgcttgatgcctgcattgctcagggaataaaaccaagcaaccgcagtctcagaatagtgttaagtcattactgcaggctaggaaaccatgagaaatcactagcattatttcacttgattgagcgcaatggatggaagcatggtttaatcattaagaccaccctagcttcatgtctcctttcatttgggagacaattggaagcaaaatcatgtctgaacaacctgagcaaaggtgagtttatcggatgttcaagcaattttgatgatctcatcaaggaattctgcattctaggagatttgaaaatgactctttatctgctaaatacaatgttaaagaaaggcacactgcctaatgaagccagttacagttctgttatatataaactttgtacattgaaggagttcgatcaggcacttgattttcttgctgaaatgcagctggcaagtctaaaatcaagtgaaatctcctgtgatgcacttgtacatggcctttgtgccatgggaagaccttctgatgctagaaaggttttggaaatgctaaccaccttgggatctgcaccatcctatggcatgtttagagttgtttttgataactattgcagaagtagcaatctacagaaagctgcggcacttctgcatgacatgcaacaagcaggacaagtgcccaactttgagatgcattggtctgttataagcaatttaagcagtaccaatgagaaaactgaaggacatggagagtgcattttgccaaacctttttctttctgcaaattccccttaa

SEQ ID NO: 86158 - DNA, 718 bp, Zea Mays
cgatcttatgagaccaagatgttttctggtcccaaacccatgatggtatgccttagtttgcttgcagacaaatgcttttttttgacaacttcactcatcccttgttttgaatagatgacataattggagactctggccatttatctgtgttgtttccattaatgtgtcttctcataggtactctgttatggtcgctagatcggtgagggattggagagggatattgatgggcaggaacgtcggtcgggggcctctgcccacggccgagcaagaggagggtttctctcttctaattcttacctactttatttctcatccattgattacataaatagaccagctggctgtccttatctagctagagatccttatctcctaaaaactctcctaaaactactaactgataaccttcctagataatctcaaccaatctcctaaataatcttaactaatcttctaatattactagctgaatgcccgtgcgttgcaacgggaatatataataccagtatactacgataacttatatacaaaatatgtgttataccattatgagaaaatgtttcataatcaatttgtgattctggccatacataaattttgttatttataatctatctgtttcaccactgcattacaaccatcagtatcatgcagacttcgatatatgtcacgatttgtatggtctcattattggagagcatgtttcacacatacc

SEQ ID NO: 86159 - DNA, 529 bp, Zea Mays
cagaatatattattgttgcactctcaaatggtgggttgctaacttgctatgtcatgggagtttgggtgaaggccagaaggatgtgatagacgtcgattcgatgcaggtccatgggatgctctgtacaggggtgggaatatcctagcgttcgccttggtttcggtcttctctggcagcaagtgtgctcccagttttcaagctgtcaaagctgtccaactcagttccttggggaaggcctcgattcgctcatctcctcggacccggaggactacaacaatatgaagcagtatgagaagctgaccgtcgcgtcaatttactttcttgtgatgagtgttgagcatcatcatatgattcatacaattgatatgcaactagaacccagattttaatgtgtacggttatgatttatcttttctcgttaaataatgtgagatattgaggtgtatgataaattatatgttcatctctatgtaatcattatacactaacattttaataacgagagcatagaacgataaatagtgcttct

SEQ ID NO: 86160 - DNA, 689 bp, Zea Mays
gcccgctccatctaatccaacccgcccgataaaaactctacggccagatcaacaacattcccacgccactcccagagctcctaacccggaaccacgaaggggatccatggcggcggcgggttggctccgacgtgcggcggcggtatcgctgccccgcctgccttccggacttcccctcataccgcctcctccttccggccctctcaccgaggcgcagtcgctcgtggtccccggcctcggcgccgccgccgggccagccatggagctcatggccgtccctaagaagaaggtctccaagtacaagaaaggtttgaggaatggacccaaagctttgaagcctgtgccggtgattgttcgttgcaggtgctgcggccgagtgaagctaccccacttctattgctgcagtggagaaagaggaaacccaagcgagtcgaactcataaatgttttgttttcctactttgctcactatgctacgtctgaaatctggacatcgtaataccaatgaaataaattgtcagatcgctcttggtattcaccttgttctccttccaagcattgaatcaatacacacttactctagtttgaattcgaagtgtaagactatcatcaagagcctttctaattttctgatatcatttgagtaaaacttattttttatatttttataccctccaacagtttttttta

SEQ ID NO: 86161 - DNA, 715 bp, Zea Mays
gcccgctccatctaatccaacccgcccgataaaaactctacggccagatcaacaacattcccacgccactcccagagctcctaacccggaaccacgaaggggatccatggcggcggcgggttggctccgacgtgcggcggcggtatcgctgccccgcctgccttccggacttcccctcataccgcctcctccttccggccctctcaccgaggcgcagtcgctcgtggtccccggcctcggcgccgccgccgggccagccatggagctcatggccgtccctaagaagaaggtctccaagtacaagaaaggtttgaggaatggacccaaagctttgaagcctgtgccggtgattgttcgttgcagcctgtgccggtgattgttcgttgcaggtgctgcggccgagtgaagctaccccacttctattgctgcagtggagaaagaggaaacccaagcgagtcgaactcataaatgttttgttttcctactttgctcactatgctacgtctgaaatctggacatcgtaataccaatgaaataaattgtcagatcgctcttggtattcaccttgttctccttccaagcattgaatcaatacacacttactctagtttgaattcgaagtgtaagactatcatcaagagcctttctaattttctgatatcatttgagtaaaacttattttttatatttttataccctccaacagtttttttta

SEQ ID NO: 86162 - DNA, 519 bp, Zea Mays
ctatgttgattggaagacttccttgagtcgtttcaacatagccggtcccaagcccggtaaaggaggagggttgtgttaggtccggcaaaccaacgtaaaaaaccagccaaatcttatggagatgaaaccacaaagaaaaccgttggggcgtaaccctcttagcgacgcgccatatcggaacccgggtatggtgttaaatgagcaagggccgggtcgtcacccctcaagtgacgcgctgtctcttgatctggagccggtgataagtgagcaaggatcgggtcgtcgcatccttagtggcgcgctacatcggcgcccgggtgtagtgaaaaatgagcaagggtctttgcatcttcctcggcgggtgcgaagggtaaggaagctagtcgagccaactagggtccgtgtaggcagttggaacgtaggttccttaacaggtaagttacgagaaatagttgacgttgcggtgaggagacgggtaaatattttatgcgttcaagagaccaagtggaagggacagaa

SEQ ID NO: 86163 - DNA, 152 bp, Zea Mays
atatgtttccccgtttcgttgttttcggttctcctttgcctttgtttcccttttctgttctttggggttgagctctgaggttttcatacggggtttcatctctagcctaccccaacgtgcttgggacaaaaaaggctttgttgttgttgttg

SEQ ID NO: 86164 - DNA, 1766 bp, Zea Mays
ggaaaacaacagctgatgccccccgcgaagatcccgatgctgtttcggtgatggatcgtcggcgtcgcaggcgaggcggcccacgcccacacgccacgagcccacgacggccgagggaagggagaagggaccgacccggcgcccgcggctgcggtcgttgggctcgggcgccgcgctaccaaccaaaccaaaccccgtaaccccaccccatcttcccaaaaaagcgacgaatcgcgcagcgcggaagggggaatcgctgcgatttcttgtggcccggcggctccagccccacggctgccgagcggataacgaacgactggcggcggctcgcgtcggccttcctcctctccttctctctcctcgcatcgcagtcgcagcaggcaacaaaccaaatcgcttaccgcccccgaagcgtctcggttcgcatagcagagctgctcttgcaacaagccaaacaacccagtggctgctagccgagacaggggatagattgagagaggcgcgcagatggcgacgccgtcgtcgtcgctttgctccagcttcgcctccctgcggaccgcctccatcggccacccccgtggcatcgcctcctccacgcccaggaaggcattccatgtgagggcatcagctcgggttgacaagttctcaaagagtgacatcatcgtgtccccttcgattctgtctgcaaactttgcgaagcttggtgatcaggtaaaagctgtggaggtggcaggatgcgactggattcatgttgatgtcatggatgggcgctttgtgccaaacatcacaattggacccttggttgttgatgctctgcgtccagtgactgatcttccgttggatgtacatctgatgattgtggaacctgagcagcgagtccctgattttatcaaggcaggtgctgatattgttagtgtccactgtgaacagacatcgaccatccatttgcaccgaacagtcaatcagattaaaagtctaggagcaaaggcaggagttgttttgaatccagcgactccactcactgcaattgattacgttcttgatgttgttgacctggtgctgattatgtctgtgaatcctgggtttggtggccagagctttatcgagagtcaagtaaagaaaattgcagaactgagaaggttatgtgcagagaagggagtgaacccctggattgaggttgatggtggtgttggtccgaaaaatgcctacaaggttattgaagctggcgcaaatgccattgtcgcaggttctgcagtttttggggctccagactacgctgaagctatcaaaggaataaagaccagccaaagacctctagctgtagccgcataaagagctggacgtgtaatcatttactctgtgcaagtttaccagtgatgcgatctgtatagatgtgtgtcttgtccagctatacgtataccggagatgaaaggagacggaggcagtgaagaaatatccttttttttcttctcatttttcacgaggatgccgtgcactgctcccagaatgctgtgtccaatttacaaacgcacaggtggcacatgaactagcagagtagctctctcttgaaaggaaactgtatttggggtcgatgaaccctctggtgttattcttcagactggtaaacgatgtaacatgtttgataatcaataaagtgcgtcgtatggctttcctaaaaaaaagcacagcagcacacgaatgtaacatgtttgtacatcggcatctgactgagtctgaagcccttgtacatgattggaatttacctt

SEQ ID NO: 86165 - DNA, 302 bp, Zea Mays
cttggccacggccaccctgtaccccgtccaggccctcaggctcacccctgctgcactgtccgtcgggctcccatcgagctcggccctgcgtgcgctggcgaaggccgcgccgaccgccacgttgggcgagatcacactaggcgagagcgcgctgggtgatgtaatgctgacaggggtgcctcgtccgcatcataagcccaccccagggacacgccgtccatggaagttgtatcatcgtcctggtgtttcatgagtattacgtgaacattaagagttgtttgcatcctgcaagttacaaatac

SEQ ID NO: 86166 - DNA, 1517 bp, Zea Mays
tcaccgtcaccggctgatctagttgcctgctcaggccagtgctccacgaagcgcgatctccggctcctccatgccgttctcctccgtcgccgccacatacttccgaaggtccatgccttggcggtgctcgccaagctcctccgcttcgccgcggtgtctcccgctggcgacatccgccacgcctccgtgctcctctctctccacctccctttcatctctgccgccacttccccacttgcctttttctacaacacctcattcgcggcctcgcctgtctcctcatcgcccagcgctgcatcgagctcttcatggcgatgcgccgcgcgggcgccactcccgacgccttcaccttcaccttcgtcctcaaagtcttgctcccgctgccattcgccttgttcggttacctttctgacctccacgcgcaggcgttcaagcatggttgcctcggcgcgggtagcgagcacggccatgtccacaatgctttgctgcacgcatacgcgtctcggtccgcagtagacgacgccagcagggtgttcgacgaaatgcccgtccgggatgtggtctccttctcggggctacttacggcgcacctaaaaaacaatcatctggactccgtgcgcatggtgttcgaccagatgccacaccgtgacgttgtttcctggactgccatgatctctgcctatgccagggcttggcgcccacaggaggccctggcattgtttgatgcaatgacagtgcagccagatgaggtgaccatggtgagtgttgtttcggcatgcactgcacttggggaccttgagactggtgagcgtctgcggcaatatgttgattccaatggctttgggtggatggtttcactccgcaatgcgcttatggacatgtatgctaagtgtggttgcctaactgaagcacgtgttttgtttgatgggatggcgataaggagcttggcatcttggaatacacttatctcagcatatgcatcacatggtgatgtggaaaacacacttgctttgtttcatatgatgctggccgatgacaattatgtgaagccagatggggtgacgctgcttgcagtgctcacggtgtatgcacacaagggctgtgttgaggaggggcgcactgtgttcgatgcaattgaaagaggagattatggcaaagtggaagtgaccattgagcactatgggtgcatggtagacttgcttagtcgggcagggcaacttgatgaagcgtacaagatgatagagcaaatgtcgattccaaacaatgatgtggtctggggcgttttacttggtgcatgccgtatgcatggcaatattgacatggccgagaaggcagtccagaaactaaggatcctaaacccacatgagggtggttactacattttgctcatagatatgtacacagccgctggccgaacagcagaagccatggagattagacggaccatgaatgagactggggccaataaaactacaggctggagctgttcaaccaccgcctgtcttccttaacagtaa

SEQ ID NO: 86167 - DNA, 2627 bp, Zea Mays
actccgagatctggtcttctcggtgtccaacggtccacagcccaaccctctcgagtctcgtcttctcccccggactccgagatcttgccgatctgcaccgacgccgcggtccgcggccatggcggtgccctctcccgccccgcggtccccgcgccgaccggatgccattgtggccccggacccctcgtccgctgacgtgccaccatccctcgacttcggcgacccggcctccctcgccgcgctccgagtcctcaccgacgcgggtgccgccacccgcctcctccacgagtgcgtggcctaccagcgcgggctcgacgcccgtctcgacgctctcctcgcccgccgtgctgacctcgaccgcgccgctgcttcgctcctccgctctgccccgcctctgctctcgctcgcggcttccgacgccgccgcgcttaaggaatcctcctccaccaccgcggcgctcgccgacgcgctctcgtcccgcgtccgccatctcgacgcggcgcactccagggcggacgctgcgctggcacgtgccgaggccgcgctcgatcgttctcgcgcgctcgaagccgcgcggcgggccttggccgccgacgacctcgccgccgccgccaccgccgtgcacgaattcctcgctatcgacgctcggttccccaccgacgacgatctccgccgcgatctgcttgacatgaaacgtcgcctcgaggggctcgcgcgtcggaggctagcggcggtcgttgatgcacaggaccatcctgctgtgcttcgcctcgtccgcctattcccactgctcggactcgctgatgaaggactccaggtctacgtcgcctacctgaagaaggttgtcgctctgcgtgcccgcgcagactttgagcacctcgcggagctgacctccgcgacccagccgacctctgagcggccggattttgttggctgcctcacccgtctctttaaggacattgtgctcgctgttgaggagaatgatgctgtgcttcgtgagctcaggggagacgatggtgttgcttatgccatcattgagctgcaggaggagtgtgattcgcggggcacccagatactacgccgttatgctgattacaggaagcttgcacgacttgcatcggatataaactcctatacaaagaacctcctttcggtcatgggttccatggccagtgctgctggaggtagtgaagggcctgatcccagggaaattgagctttatcttgaggagattcttgcgttgacccagcttggtgaggactacactgaatttatggtgaacaagatccgtggattgagagatgtcaagcctgagcttgggccgcgggcgatgaaggccttccgtaatggtaacttctataaaacggagcaggatctgactgggttctatgtgatctttgaggagtttttcatggtggagaatgtgaggaaagccatacggattgatgagcccatatcagatggtctcacaacgtctatggtggatgatgtattctttgtactgcagagttgctgccgccgggctgcttccactgcaagcataaactctgttcttgctgtgcttggtggggcaatgagccttctaagcaatgagtatcaggaggcactacagtggaggatgcgggagccaaatttgggtgcaaagctcttccttggtggtgttggagtgcagaagacaggtgaggagattgcgactgcactgaacaacattgacattagctctgagtatgttctgaagctccgtcatgagattgaggagctctgcgtggaggtttttcatactccagctgatcgagagaagatcaagtcctgtttatcagagctaggagaggtcagtgcttcatttaagaagatccttcattctgcactggagcatttggtggcatctgtggtaccacgcattcgtccagtccttgacactgttgctactgtcagttatgagttggatgatactgaatatggggaaaatgaggtgaacgatccatgggtgcagaagcttatacttacagttaacactaatgttgcttggctccagccagttatgacattaaacaactacgattcctttgtgcacttgatcattgacttcattgtcaagaggctcgaggtgattatgatgcagaagaggttcagccagctcggcgggctccagctggataaggaggtccgctctctgatcaaccatttctcagagatgtcccagagaccagtcagagacaagttctctaggctttcgcagatgtcgaccattttgaacttcgagcgggtatcggagatattggatttctggggtgacaatgctggccatctgacgtggctgttgacacctgcagaggtgcggagagtgttaggacttaggattgacttcaggcctgaagctattgctgctttgaggctctgaatcgtgcatttatttgtacttgttaattcattatatgtgatatatagcaacgagatgccttagaaaattttgttgtaatgacgaaagacctgcatcgtagaagaagtctgcgaccatatctgtgtgtctgttatgagcttatgatattgcgaactggcgatgcttgtgtccatccatgccgcaagctgtaatattttcttctaataagcttttatacattgcctct

SEQ ID NO: 86168 - DNA, 2002 bp, Zea Mays
aaatcaagcttgtggctctcggccaccgcccgctcgcccacgtggcccccacccccgactccggctcccgctccttaaaactatccccaattccccgtccgctatcccgatcgatccatccatcgatcgcccacgcttccgtccatccagactccagagagataaaatctaattcctggacctggagtgcagaccgatcgccgccgccgccgcgttgtttcttgtctgctcagctgtggtgatggtgcggtaaaagaaggctgctccatcgctccaacaaaaaaaaaggttgggatcgcacgcggcaggcgacaagcagtttccaaagagaagggaagcctagaggaagggagctagagatgggggagggcagagcaggagacggcctcatcaagctgttcgggaagaccatccccgtgccggagacggccgccgtcggcgaggctgccaaggacatgcaacaaagcggcggcagcggcagcggtacgactgatccgaaagggcaagagaacaacgttcaggactccacaggctcgcctccgcagcaggaggtcgcggacaccgaagactcgtcggcagacaaacagcagggcgaggcgggcaacccaaaggagaagctcaagaagcccgacaagatcctgccgtgcccgcggtgcaacagcatggacaccaagttctgctactacaacaactacaacatcaaccagccgcgccacttctgcaagaactgccagaggtactggactgccggcggtgccatgcgcaacgtgcccgtgggcgcaggccggcgcaagagcaagagcgcgtcggccacttcccacttcctccagagggtcagggccggtctgcccgtcgacccgctcgtctgcgcggcagccaagactaacggcacggtgctcagcttcggctctgccatgtccagcttagacctcacggagcagatgaaacagctcaaggaaaagctcgtcccgatagcgggggacgagcgctcagttgggtctcgcactcaaggaccttctgccaaggcagaagacccggaccggaaggagaatgttacagcagataaatccgcgagagttgttcagcatccatgcatgacgaacggggtggccatgtggccatttagctgtgcgccaccagtaccggcctctgcctgttacggcccaggcagcatcgcaatcccgttctacccggcagcagctgctgctgctgcctactggggttgcatggttccaggagcttggagtggcgcatggccgcctcactccggccagtccgagacgggctcgtccattacctccgcctctccagcagcatccaccaagtccaacatctgcttcacgccaggaaagcaccctagagaccgcgacgaggaaggaggcgccaaaggaaatggcaaggtgtgggtgcccaagacgatccggatcgacgacgtggacgaggtggccaggagctctatcctgtcgctaatcgggatcggcggcgacaaggcaggcaaagatggcggcagaggctgcaagctcgcaagggtttttgagcagaacgaagaggcggcaaggacggcaactcctcactcggcagccatcagcggcttgccgttcttgcaggggaacccagctgcgctctcgcggtcactgaccttccaggaggggtcttgagcctcgctcgattcacagctgagaattttgtacattagagggttgtatgtaatctaatctaggtggggaggtggggctcatagctgccagcggacattgaaactatacaatagatagatatttgtagatagccaatatatatgggtcgggggaggaaaaaattgataatgagagcaagtccccttatttgtatatattatggattggaatatttggttgccaagtggtcttccagcaatagcgccagatgttctgatccactggctgttggcccatcgatctcagtggacaaaagtggtccaccttattctgggaaatttcagcatatattcagtttgtttcca

SEQ ID NO: 86169 - DNA, 852 bp, Zea Mays
atgggcctggagggctactaccactgcctcctcaactatctcgtcgacctctgtgtccccgttgtcgtcctcgaggcgcgctcttgcccagtagcttcccctcggaccttgcctccaacgtcatcgtcacgctgcagggctctagttctactagacgacgtcacattgtacaggcccatgctctccgcgggatgcgcccgtgatgccgacgaccacgtcaagtggcgtgacgggcgcaatgccgtcttgcttatgaggaccatgtcagcgccgccatacgcagacaccgtctaccactgctcaacattctcagtgcgttgcagccgcagggccctaggtcgccgccacggcactaacaaagatatcgtgctcaatggccttgaacgtggcgatggcgtcacccgccggcccgatcaccccatcatcgggcgtcgtggaggggaggaatgtcgtcggctagagaacagtgtgtctgcccgcgccagcgtccatggtcggcgccaccatgtttggcgccttcgtggcctccttcacgggcgtcgtgatctgggcgttggcgcaccgtgcaagggccatgaagcggtagaccgcactggtatgggctcctttgggatggaccgaaaccagaaggccttcttgcatgggctcccagtgctcaaggaccatggcgtccgcgccgacacgcacctcgatgccatggccacagaagctgctgcagcggcagggtggcgatccctgcgctggacaggccagcacccaggccttcttgccgtctttggcggtgctcttgatgatcttccgctcgcgtactatgcatgggttgcttcttcttcaccgccagcaaccccatga

SEQ ID NO: 86170 - DNA, 1336 bp, Zea Mays
tgatcacattggcaggcagtctgcagcccacttggcgctttggccgtgtgtgtacattggtgccatggggtgcaccacctcaaggcaggcccgtcacgacctccggtactgcccgtcaccgctgccgcgcagccagtcgttcccggctcggtgccccagcgacgtcggcgtccacgtggtgcggctcacgtcgtccacgctcgggtccctggagctggacaaggccctgccgcgggcgccggagcccgcgcccacgaggctggcgccgcgcacgcccaccatgacgccgcccaacgagcccgaggacatcgacgcgtgggcgctcatggccggcctcgaggaccgctccccgctgctgggcgcgccgttcgggcgccactccttctcgttcccggtcgccacggcgcctgcgcaggacctcgcggcgtccgccaaggtgacgccgctgccgatgccgatgcctcggcccgacgccgccccgacgagcggcggggaggggaaggcgctgccgccgcggagggcggtgctctacttcacgtcgctgcgcggcgtgcgcgccacgcacgaggactgctgcctggcgcgcgccatcctcaagggctacggcgtgcgcctcgacgagcgcgacgtgtccatgcaccgcgggttccgggacgagctccgcggccttctcggcctcgggctcggccaagccggcggcacgcccgccgccctccccagcctcttcgtggacggggagctcgtgggcaacgccgaggagctgaagcggctgcacgaggccggggagctcgcgccgaggctggccgggtgcgagagcgctgcgtcgacggccggcccacacggcggcgacgccggcgcgtgcgaggcctgcggggacatgcggttcgtgctctgcgatgtctgctcgggcagctgcaaggtgtacgtgggtgacgaagacgaggcggaggaggaggaggagggcgacgaatgcggcggcgggttccggcggtgcacggagtgcaacgagaacggcatcgtgaggtgccccgtgtgctgctgctgagagccgagacgtccgcggggttggatacgcgacgtgacagtgagcattattgttttttttcgctcccctgcgtgcaacgcagcacttgggtttggtgtggggcacgctagcccctgtgtgtttttttttttttgtgaatggtcttcagtaatttgcgtgcgtgatctacggcgcgaggcgatcgtgctgccagtgtctggatatccgatctctggattgcactacatgttaagagtacatgtcagtgcccccattcattggcgtttccagaagaaccaaccaaccttctcc

SEQ ID NO: 86171 - DNA, 1756 bp, Zea Mays
tttgttttaccgaggttcggttcttgcaaacctactccccgttgaggtggtcacaaagaccgggtctctttcaaccctttccctctctcaaacggtcacttagaccgagtgagcttctcttctcaatcacacgggacactaagtccccgcaaggaccaccacacaattggtgtctcttgccttggttacaattgagttgatcacaagaaagaatgagaaagaaaagaagcaatccaagcgcaagagctcaaatgaacacaaatgtcactctctctagtcactatttgatttgtagtgattccggacttgggagagaatttgatctctttggttgtgtctagaattgaatgttgtagctcttgtaaggtgtagaagtctgaaaacttggatgcaatgaatggtggggtggttggggtatttatagccccaaccaccaaactagtcgtttggtggaggctgctgtcgcatggcgcaccggacagtccggtgcgccagccacgtcacccggccgttagggttcaccgttggagctctgacaggtggggtcttctggctgtccggtggtgcaccggacaagtactgtagactgtccggtgcgccttctgacgctgctctgactctggcgcgcactgtagtgcattgaatgcggttgcagtcgaccgttggcgctgaagtagccgttgctccgctggcacaccggacagtccggtgaattatagcggagcgcctctgattttcctgaaggtgacgagtttggagctgagttccctggtacaccggacactgtccggtggcacaccggacagtccggtgcgccagaccaaggcagccttcggttgtcttttgctctctttagttgaaccctttcttggtcattttattggtcaattgtgaacctttggcacctgtaaaacttataatctagagcaaactagttagtctaattatttgtgttggacaattcaaccaccaaaatcaattaggaaaaggtgtaagcctatttccctttcagaaagcatcgccagaagtctggccttggtctccctactgcagtctttattaaatcagtaaagaccacagttatcaacacaacgaaaagaacacctagaggatttatatgaattattcagcgacatgtgaatcagcaactcagcacaatgaagtaaactaatagaagatagcagggacatttaaaaaaacctagtgctgccgaatgcagatcataaatggctctcgtggcaacatatatggatatgaagatgagccaaggacagagtatagagaccatctagcaaaaggttgaacaccccacatcagtgctaaatagagtgagttcgagcttgcatcagacaacataattggaaggtagtgtcataaacatacatcggagcccaaaaacttcactgcatgtatcacacagtaatattacttacttgtcgagggaattgtagacatatagtgcacacaaatgtcaacatgacaatagtagatcaatgaagcatcataagttatttatgacaataccaaatagaatatatccactagttcaaatctgacatctattacctatgatgctcaactttgtacagcaatggcatatttcagtatagaatttagaaacatacatgttcaccctttagatgagcaagttcccctttcatctcctccggaacagctctaagccaggcagctttacctgttgatgctgcttcaatttcagctatttttgatctttctccattaataccacctgcaa

SEQ ID NO: 86172 - DNA, 473 bp, Zea Mays
cgtttcaatagagactatatgattttagatgcctttgccctttctgtagaaacttcagctagctgcgcctgcaaagctttctatttacagaggacaaaaagaaataaagatagatcaccttaatgctccccaaatttcactcctagattttctcttaccttctgatgcttagcagtgaattatgaaattattgccatccccctatcttcagaagattgaagggatccttggactttatctagcaactttacaaacatcacatctgtcacttgtgtccacatcacatacactaaataagagaatgctattatattaacagttctgtacatttgaccctgtgataccggtttagttcagaaggacagataattgttagttatgaccaaatacatcaaaactacctgtttttatgaaatgaatgacaagaaattaggtacaaattgacgacagtattgacctgcctatagatccag

SEQ ID NO: 86173 - DNA, 2126 bp, Zea Mays
cgacgagccaaaacagacggacgcacacaaaagcgaaagggaggagagagaggggcagggcagagcaggagagagaaattcgatagggttcccatgccccttccccaccggccaccacttgccaagcgaaagcgggagtgaaggaggggagagtcccatttccccaagccctacacgagagaaagagagagaggggggagcagaggagcacgctacgagagagggaggtcgagggagacagcagaggctgcagcagaggccagaagcattagaagcggcagttgtaaccaagtggcatcagaagatagagccagccatccgtctatccatctatctagctctacaggtataaatcctcgcgcatcggtagggggcgaggggaggaccgggaaccggaggggatttctcgggggtggagtggcggccaggacctctgattgggctccagtgcgcgatctttgaacgcagatttggtgcccgcaatctgccatggatttggtttaagatttggtgagatcggtcgggttcgcgctgcaagattagatttttgtgcctgttttattcacgagattaggaggagcaaataaagcaagaatagaaagatttttgggggagaaggcatgatgctggaagggaagtcctaccttgtgtcacgctccgtgccgagctcctgcgagccggaggcggagtgggagtacctcgcccacgcggtcctcagcggcaagcgcccggcgccggaagatgacgtcgaggtcgaagacccggacgaaactggcagcggcggcaagcgcagcaagccgccatctccgcagccgcacacgccggacatctgcgagggccacggctccaaccgccacgcaaccggttccggagagcagcggatcaccgggagcaaccccatgacttcgatcggtcgtgacctgaccctcaattgcctcctccggctatctcggtccgactacggctcggtggcctccctcagccgggacttccgctccatggtccgcagcggggagatctaccggctgcggcgccagaacggggtggccgagcattgggtctacttctcctgcaacgttctcgaatgggatgcctacgacccataccgggagcggtggatccaagtgcccaagatgccgcctgatgaatgcttcaagtgctccgacaaggaatcgcttgcggtgggcactgagctgcttgtgttcgggatggcgcgtatcgtcttccgatacagcatcctgaccaactcatggagcagggctgatccgatgaactctccgcggtgcctgttcgggtcaacgagtgtcggcgggaaggccttcgtcgccggaggcactgattgtgtcggcaacatactgagctctgcagagatgtatgactctgagacacatacctggacgcccctcccgagcatgaacacggcgaggaagatgtgttctggggtgttcatggatggcaagttctacgtgataggtggtgtggccaacagcaacagagtgctgacctgcggggaggagtacgacttgaagaggggttcttggaggacaatcgagaacatgtctggaggcctcaatggagtgaccggtgctcctccccttattgcggttgtcagcaacgagctctacgccgccgattacggcgagaaggatctcaagaagtatgacaagaagaacaacaggtggatcaccctcggaaaactgcctgagcggtccgtgtcaatgaatgggtgggggcttgccttccgagcgtgcggtgaccgcttgattgtcatcggaggtccgaggacctataccggtggtaccatcgagctcaactcgtggatcccagatgagcggccgcccgtgtggaatttgattgccaggcggccatctgggaacttcgtgtataactgcgccgtgatgggttgctgagtccactgaataaagatacaagtgaagtggacttcctcgtatttatgaaggatgctatctatgcacagaggcagcagcctgtccaattgcttcagcccttattcttcttcatagcgatttctgccgtctgcgcggttccggaattaactggacatcggctgattgtcagcagtctcatgtaaccattacgttctaatactcctgtttccctgctaa

SEQ ID NO: 86174 - DNA, 2550 bp, Zea Mays
cgacgagccaaaacagacggacgcacacaaaagcgaaagggaggagagagaggggcagggcagagcaggagagagaaattcgatagggttcccatgccccttccccaccggccaccacttgccaagcgaaagcgggagtgaaggaggggagagtcccatttccccaagccctacacgagagaaagagagagaggggggagcagaggagcacgctacgagagagggaggtcgagggagacagcagaggctgcagcagaggccagaagcattagaagcggcagttgtaaccaagtggcatcagaagatagagccagccatccgtctatccatctatctagctctacaggtataaatcctcgcgcatcggtagggggcgaggggaggaccgggaaccggaggggatttctcgggggtggagtggcggccaggacctctgattgggctccagtgcgcgatctttgaacgcagatttggtgcccgcaatctgccatggatttggtttaagatttggtgagatcggtcgggttcgcgctgcaagattagatttttgtgcctgttttattcacgagatcgcaacaacgatattgctaagcaagataagatttcaactttttttcccctggatcgatctcagattaggaggagcaaataaagcaagaatagaaagatttttgggggagaaggcatgatgctggaagggaagtcctaccttgtgtcacgctccgtgccgagctcctgcgagccggaggcggagtgggagtacctcgcccacgcggtcctcagcggcaagcgcccggcgccggaagatgacgtcgaggtcgaagacccggacgaaactggcagcggcggcaagcgcagcaagccgccatctccgcagccgcacacgccggacatctgcgagggccacggctccaaccgccacgcaaccggttccggagagcagcggatcaccgggagcaaccccatgacttcgatcggtcgtgacctgaccctcaattgcctcctccggctatctcggtccgactacggctcggtggcctccctcagccgggacttccgctccatggtccgcagcggggagatctaccggctgcggcgccagaacggggtggccgagcattgggtctacttctcctgcaacgttctcgaatgggatgcctacgacccataccgggagcggtggatccaagtgcccaagatgccgcctgatgaatgcttcaagtgctccgacaaggaatcgcttgcggtgggcactgagctgcttgtgttcgggatggcgcgtatcgtcttccgatacagcatcctgaccaactcatggagcagggctgatccgatgaactctccgcggtgcctgttcgggtcaacgagtgtcggcgggaaggccttcgtcgccggaggcactgattgtgtcggcaacatactgagctctgcagagatgtatgactctgagacacatacctggacgcccctcccgagcatgaacacggcgaggaagatgtgttctggggtgttcatggatggcaagttctacgtgataggtggtgtggccaacagcaacagagtgctgacctgcggggaggagtacgacttgaagaggggttcttggaggacaatcgagaacatgtctggaggcctcaatggagtgaccggtgctcctccccttattgcggttgtcagcaacgagctctacgccgccgattacggcgagaaggatctcaagaagtatgacaagaagaacaacaggtggatcaccctcggaaaactgcctgagcggtccgtgtcaatgaatgggtgggggcttgccttccgagcgtgcggtgaccgcttgattgtcatcggaggtccgaggacctataccggtggtaccatcgagctcaactcgtggatcccagatgagcggccgcccgtgtggaatttgattgccaggcggccatctgggaacttcgtgtataactgcgccgtgatgggttgctgagtccactgaataaagatacaagtgaagtggacttcctcgtatttatgaaggatgctatctatgcacagaggcagcagcctgtccaattgcttcagcccttattcttcttcatagcgatttctgccgtctgcgcggttccggaattaactggacatcggctgattgtcagcagtctcatgtaaccattacgttctaatactcctgtttccctgctaatccattcctacattttgcattttcatcagctgatcgtgattccaaagatacgagactgtgcaaaaaaaatgtcatattaataatctagaaacaacctcgaggtggtttttatctattgatgaggaacctgtcaagaaatgctactacttcttttccgttcatcttgcatgttccaaactgtgcatatctttcatgatgttatgagccactaagctggtgctgaagccatgttgcaatagcctgtatttcttcagctggagtctatggttctactcttgatgtttatagtttataatggttacccaccatcgcttaacgtgccacaaaatgatccgtgaaaaccatgatgaagctgtttg

SEQ ID NO: 86175 - DNA, 923 bp, Zea Mays
cctagctcgagtttttgtcgcgcacttggtgaatattaccctgctagctttgtcttcatccgacgcttgggatttcttgacgacgcgcggaacgacgacgaccttcagctgaacacccgcgagctatgtacactggcttcgctttcttcatccgcacacataaattgcatcgacgaacgacgagatagggattttaaagccaagcgagcctagaggacacactggcgagcaggaaactgcgcgagcactggacagagaaaacgatgatgctatcgcacacagtgcgaagacgaacaacgtgacgtcgaggacctaggatgtgcgacacacgacacgcagtcagcctgtcgcgcgaccgagcgacgacgacaaacagccgagtgcggtaaggagctggagaacgacgatgggccaaacagaagagctcgcatgcgcacagggaagaactcatggccactagaacgaactatgatattcggacttggcgacaacaacgagttgaagcgttggcgagcttgaaagttcaatggcagaatcggcggcagccgacgccagtgcgcatggcgaggggacttcggcggcgcggacagcaagcaggcgattcgacggcgcgggagctaaagccgctcggcagggagaggaagatggccggcgagcttgggcgggaagaagctccggccatggagcttgggaccaaaaccagggcgcacaggagatgtgtaggggcgcagggaggatggagggacaccgggaatctgagctgtggggcgcggcactggcaagggccaaggaagagctaagggccgcgggaggggagctcggcggctagccatggaagcaggggcagagggacgcgcgcgcaagaactgcagagcgagccaggcaacaggatgcacagcggaggaaggagcggctgggggaat

SEQ ID NO: 86176 - DNA, 1204 bp, Zea Mays
ccactcgcccctagcaataatctgcttctacctctcgatcgcttcccagttgcctccgctcaccactcgcttctctctgccagagtgcaagtgctctctccctcgcacactacacacacagtaacaacactccccggagtttcaccagctagctagctcccggttttagcaggcattaaaaccctatcctttcaggtctctctcaccttttctttttcgttctccggccgttcactcctatctccgtttgcacgcttgctcttgacccgaggtcgcacacgtacactgcacaaataggcgagccgcgagagaggctgaggcagagacgacgaggacgaaacgatccaggggctgtagcttccgagcgcggctggtgtctccgagcaagctactgccgtcgtcgccgccggaaatatgtcgtcggggcgacgtggcaggatcagcgacgacgagatcaacgagctcatctccaagctccaggcgctcctccctgagtcctcacgccgccggaacgcgagccggtcgtcggcgtcgaagcttctcaaggagacgtgcgcctacatcaagagcctgcaccgggaggtggacgacctctcggaacggctgtcggggctcatgtcgaccatggacaacgacagcccccaggccgagatcatccggagcctcctccggtgacccggccatgccgcccaggcgcgcgcgcgcggggctggccctcttcgattctgcctgccatctagtagctagctgcagcagccagcgcagctgcactgaagacgacgacgacaacgcgacgaccttaattatgttcctttgttcttcttccggtgtgtgtgagtgtgtgtgtttccgtgtttaattaatttgagagcgaggagctggatggagccttcgttcagaagaggatgaccaagagggctctcgatcctctcgatcgtgtaccacgccttggggttagtagagatatatatggacttgtattaaccggcgaggtaccacgtactggtagcttgtagttgcagttgcagtagactactatagcagtttctacgttgcagacgtgtcctaagagttgttgttttgtagatttgcacgctgctcttgtctctgcccttagcttgccaatgggcggacaagcagcttaacgtacgacgactactctggagacaaatatatatatatactatcatgtgcttttcctgtc

SEQ ID NO: 86177 - DNA, 2213 bp, Zea Mays
cgaaacgactctccactcgcacacgccatcactcccaccagatagccaccaaccgattcgtcggcccacatttcagagcgacgagtacacgccgcaccacgtcaggaagataaaataaagatcccacgaggagaatcaagatgcgtccctatcggaatctggacctttgcccacccactgccactaatccttcctacccttgcgtgcttaatccttcttccattgccttatctctccttcctcagtttaatcaccagacggccagccctagcgagctcatattccgctcctggttgtccgtccatggccgcgtcgctgcttcgccgtggcgccgtcaccagccgccggcgatgcccggtggagatgctgcggcggctggtctcgtccgaggcggcggctgatcgggcaccgtcgcggccgccgccggagatgccgccgttcgactaccggccccgcccatatgccgggctgggtggcgccgagatcttcgagaagaggaaggcggtgctcggcccgtctctcttccattactaccagaagccgctcaacattgtggaggggaagatgcagtacctgtatgacgagcatggaaagagatatctcgattgctttgggggcatcgtgacagtgtcgtgtggccactgccatccggatattgtgaatgctgtggtggagcagaccaagttgctccagcacacaaccaccatttacttgcaccacactattgtagagtttgcagaggcactcacctccaaaatgcctggcaatctcaaggttgcgtattttgtgaattctgggaccgaagcgaatgagttggcaatgttgatggcccggctgtatagtgggaatctcagtatggttgcgctcagaaatgcatatcatggcggaagtgccggtacgattggattgactggtatgcagacgtggaaatacccaattcctcagggtgaaatacatcatgtcatgaaccctgatccttatcgggggactttcgggtctgatgctgcagcttatgctaaggaagtcgaagaacacataacttatggaagttcaggaagggttgcaggcttcattgcagaaacattccaaggtgtgggaggtgctgttgaactagctcctggatacctaaagttagcttatgacattgtgcgcaaggctggtggcgtttgtattgctgatgaagtccagagtggttttggccgtactggcagtcattactggggattccagacacaaggtgtcattcctgacatagtcaccatggcaaagggaattggcaatggcctaccattgggggcagttgtgacaactcctgagattgcaagtgtgttagctcaaaaaatccaatttaacacatttggtggaaatccagtttgttctgctggtgggttagctgtgcttaaggttcttgacaaggagaaacgccaggcacattgtgctgatgttggatctcacttgttggagcgtctaaaatcgcttcaggagaagcacgaaatcataggtgatgttagaggaaggggactgatgcttggggtggaactcgttacggacagaaaggagaagacccctgccaagtcagaaaccattgaactgtttgagaagctcagagatctcggggtactagttggaaagggcggtctgcatggtaacgtcttcagaataaaaccaccgatgtgcttttcgaaggacgatgcagacttcttggtggactccatggactacgcaatgtcaaggctctgaaggaacatgctctgagttgacaatgtgtctgcgtggaaacaacacttcctgcaaccgcaagatgcatggcctgaaatgaaactgaaaggcagatgatttaatgggcatgctccccgggtggtatgttggtggtgttatggtgaagtttaatagtccccctcccccgaataaattgatgaaaggggacagaacgtcttgcccagcttgtgagttgtttgtagaagaactgcagttaataaatagaacagcgagcgagcaagcgtgatatcaatctgcatacggtcattttcatttattaccagataagttgacaactgcatgagcccggccatgtgtggagtctctcgtcgaggttcgggtcgggtgagtcggctcctgtttggtaggcagatccaaagagaggccaaagagtcatggctcactcaattttttataacctttttatacctaatgttaaagatagaaaaaataaa

SEQ ID NO: 86178 - DNA, 413 bp, Zea Mays
catcacagatcatccacagaggagaccatcttccgtgtagagactagactagagagagagggggatatatggcagacatcgtccaaggtgtggagctcgtgggtggagtccgccgccgcgtccggggtgaggttcagcgtcgcgctgcacctggagcccaagaccgcgctcgccctggccgccgccgatggcctcttctccgcctagctagctagctagcctagctgcttccaggcccttctcctgagtgagcagagcactgagcagcagtagtcgagttcttctggaccatataatacaatgcgcggttcacctgtacattcattcttcgcttctcctgcgctcattgatatgcgcatctgcttgattgttttctccttgtcgtgacattttttttaaggacatttacattt

SEQ ID NO: 86179 - DNA, 300 bp, Zea Mays
atgacggtgcggccgcagctgcggccgaggcggcccttcacggccctcagccaagaagaagctgacctcgccctcgcccgcgtcctgcaggaacgggagcgggcgtacatgttgcttcggatgaacgggggcggtggcgagggcagcgactacgagagctctgatgaagggagctacgaatatgatgaagatggagaggaggactacgaagaggaactagagctctcgctggtctcagtgattggcgaacagtggaggtggagcacaaggaggatcatgcgaatgatccataggttgtga

SEQ ID NO: 86180 - DNA, 1811 bp, Zea Mays
atcagcgagcacaaatcgaaccgtggtcgtacacgggcctgtttgcagcagcaagcgttcaagaaatcaagcggccgcctcgtcccctccgcgcccggcgcctccgacgcccaagcagcgtgaccgtggaagggacgaagaagagcaccctcaagcggccgcactaatcccaaaccggcctccgacccccaagcagcctcacgctgctcgatggcggcgccgtatcaccagcctacgagcctggaggaggtccgcactctgtggatcggcgacctccagtactggaccgacgagaactacctctacagctgcttcgctcacaccggggaggtacaatctgttaaaataatacgcaacaaagtaacaagccttcctgagggttatgggtttatagagtttgtttcacatgaagctgctgagaaaattctccagacttacaatggcacacagatgcctggaactgaacacacattcagattgaattgggcctctttcagctctggtgagaggcgccctgatccaggatctgatcattcgattttcgtaggggacctggcacctgatgtcacagattacttactacaggaaacattccgagtgaactattcatctgttagaggtgctaaggttgtcacggatccaaataccgggagatctaaaggatatggatttgtaaagttcgcagatgaaaatgaaaagaaccgtgcaatgacagaaatgaatggtgtgtactgttcaacgagacctatgcggataagtgctgcaatacctaagaaatccactggctctcagcttcagtattcagctgctaaagcggtgtatccagcaacagcgtatgcaatgcctcagctccaggcagttctccctgacagtgatcctacaaacactacgatatttattgggaatttggacccaaatgtgatagaagatgagctgaggcagatatgtgtacagtttggagaacttatatatgtgaaaattcctgttggtaaaggatgtggttttgtacagtatgcatctagggcatcagctgaagaggcagtacaacgtcttcatggcacaatgattggccaacaagctgttcggctttcatggggccgaagtcctgcgagtaaacaggattcatcagctgtgtggagtcagcaagcagatccaaatcagtgggcaaacacttactatggctatgggtatgatgcatatggatatgctcaggatccgtcatacgcttatggtgcttatgcaggatatagccaatatccccaacaggttgagggaactgttgacgccacttctgttgctggtagccatccaggcatggagcaaaaggaggagccatatgatccaatgaacatacctgatgttgacaagttgaatgcttcatacatggctgttcatggtagagccatgctagggcggtccttgtggttgaagaccaacccgctgccccaaccgacataagcatgtttcctcccccgaagactacagccagtgctggtgggcgcagctgggtttcatcgcgcagatgattttgcccttcccagtagtcacgttaaactctgaaattgttgtaggctggccagcagcttcgtctatattgagaacattcgatgtatgataggcgtgactcttttgtactgtatttcttaggctgttggttaatattattaggacaatattgagggagcggtgaaagtcaactgtctgtatttccaactgattattctgctgttcgatactcaactcccgactcccgttcacttggcaggacaatggcatatctgatatttctatcgttgaattacctttactta

SEQ ID NO: 86181 - DNA, 1475 bp, Zea Mays
ataacacgcgcaacggctctcgccctcgccagtgccccggcacgtctcacgagtgcgacaaaggaggagcggcgaccaagcaatccctctctttctatcgctcggggctcctcctccaccgcgcccgcacggcaggacgcaggagataacagaggggagcgcgcgggagcaaaggggaggacggcatggagttcatggagcccaaggacatcgactggagcagggtggtgtcacggtacgtgcgcgacgagacctacgaggacatcgaggccccgcactgggcggacctcaccgaccccaacgccggccgcgccgccgtcgacgacgaggcctggttctgccgccccgattgccagcatccgaagacggccgacgatttcctcaagctgagccccagccccaagggcaagctgctgcgatcggtttcggccatgctgccgttcgtggaaagggacgccaatgccagtagcctcagggacggcagtggcaatctcaactggcagggcggcggcgccgttaccgcctccacgccgccgaagctaaaggcagcgcccaagaagaggttccaggaggacagcgagaaccaggacccttcgctggccacgccgcccccacggcaggggccaagtaggccgccgttcggtgcccctcggtggaacaagcatgccaaggagaccattaagtccagtgcggagaagcggccggacaacgctgagaaggaggcgctgctcaataagcacgccccgccgaggcagctcaagagcactctctcagcgaggaatctcttctctggaaaggatatacttggacagatttcggagttctacgatgagctgaagcggatggttggcggcagccggcccgttacagacacacaggaggtttacagcttaaacccgatgaatccgagcgatttgatggagaaggtggttcctgatgcccctgacagtttcatcagcaatccagttcccgcagagatcgtgaaggaggtggcgacgcaagaaagagtgaaaaagagtccaagcccaatgtaatttgcaaatattcatcgcaatgcaaacttatgtgtatataggttgtactgattgttgcttacgacgccgacgctggtttctaaaggaagggaaagaaggtggggttgaaggtggaagcagggaagccaaggtctccctctgtgctcaaggaggtgaaggcaacaccgccgactccgcagcggtttccatccccatcgccgaaccgcattaagaatgttaagcttggaggggcggccatagcaggatcgccactcaagaacccactgaaggtgactcttactcaatgcccgtggctttaaaccatagtgtttacttggtgaattttcactttcttcatttctaggacttcgaattcttcaagggcatgtaatgttcacaaaaagcatggtccacttttacagatcttagtatggaagaatacataagagtgacttctgctct

SEQ ID NO: 86182 - DNA, 1650 bp, Zea Mays
ataacacgcgcaacggctctcgccctcgccagtgccccggcacgtctcacgagtgcgacaaaggaggagcggcgaccaagcaatccctctctttctatcgctcggggctcctcctccaccgcgcccgcacggcaggacgcaggagataacagaggggagcgcgcgggagcaaaggggaggacggcatggagttcatggagcccaaggacatcgactggagcagggtggtgtcacggtacgtgcgcgacgagacctacgaggacatcgaggccccgcactgggcggacctcaccgaccccaacgccggccgcgccgccgtcgacgacgaggcctggttctgccgccccgattgccagcatccgaagacggccgacgatttcctcaagctgagccccagccccaagggcaagctgctgcgatcggtttcggccatgctgccgttcgtggaaagggacgccaatgccagtagcctcagggacggcagtggcaatctcaactggcagggcggcggcgccgttaccgcctccacgccgccgaagctaaaggcagcgcccaagaagaggttccaggaggacagcgagaaccaggacccttcgctggccacgccgcccccacggcaggggccaagtaggccgccgttcggtgcccctcggtggaacaagcatgccaaggagaccattaagtccagtgcggagaagcggccggacaacgctgagaaggaggcgctgctcaataagcacgccccgccgaggcagctcaagagcactctctcagcgaggaatctcttctctggaaaggatatacttggacagatttcggagttctacgatgagctgaagcggatggttggcggcagccggcccgttacagacacacaggaggtttacagcttaaacccgatgaatccgagcgatttgatggagaaggtggttcctgatgcccctgacagtttcatcagcaatccagttcccgcagagatcgtgaaggaggtggcgacgcaagaaagagtgaaaaagagtccaagcccaatgaagggaaagaaggtggggttgaaggtggaagcagggaagccaaggtctccctctgtgctcaaggaggtgaaggcaacaccgccgactccgcagcggtttccatccccatcgccgaaccgcattaagaatgttaagcttggaggggcggccatagcaggatcgccactcaagaacccactgaaggagaaggggacccctagtaacagtaaggatccggagagcaaaaaatatgctgtgaggcaaccctttggggttaaggatatgaataatacaagagcatgtgatgcagaagggagctccagcagcatgttttggttcttgaagccctgcactttccttgtggagtagcatcataacactacaaaattttaacgagcaacacttgatgtagctagaatccgttacttcattaatttccaaattttgagttcctatttgattgattcatttgatgggtaccatatccgggaagtaaaaaaaccatgtatagtcatacagattcaaagggtctttccaaatgcataatttgagatgtagcaaaacacttttctgctgcttcattgtttgttcaaacaaactgcattcttgtctcttgaagttatatactaaggttatacaa

SEQ ID NO: 86183 - DNA, 966 bp, Zea Mays
atggagagctacggccggaagcgcgcgtggaagaagggcccgacgcgtgggaagggcggcccgcagaacgcggcgtgcgagtaccgcggcgtgcgccagcggacgtggggcaagtgggtggccgagatccgcgagcccaacaagcgcacccgcctctggctcggctccttcgccaccgccgaggaggccgcgctcgcctacgacgaggccgcgcgcaggctctacgggcccgacgccttcctcaacctgccgcacctccgcgtctccgccgccgccgcccaccagaggatcaggtggctcccggcctccgccaggggcgccgccgccgccgccgtcccggcctacggcctgctcaacctcaacgcgcagcacaacgtgcacgtcatccaccagaggctgcaggagctcaagaacaacggctcgcccgccaagccaccgccgccggcaccgcgggtttctcctgctgcccgccagcagcagctcgccccggccgatcatctcccggtggcctccacgtctccctgctccaccgtcaccacccacgcggctgcggcggctctgccgccgcccatgtcctgcttccacgccctggacctggacctggagcaggcggtggccacggccgccatgacgacggtcgacgacgccgagccgttcgagggcggcggcgccttcccgcccggcgcggacaagccccagctcgacctcagggagttcttgcagcagatcggcgtgctcaagaccgacgacgacggcacggccactgccaaaggcagccttcacggtgatgccgccgacgctggctgcttcggtggcaatggcgagttcgactgggacgcgctagcagcggatctcaacgacattgcgggagcccacggcggcgccaacggagggtttcagatggacgatctgcatgaggtcgaccagttcggaacctgcctgcccatccctgtctgggacgtctag

SEQ ID NO: 86184 - DNA, 695 bp, Zea Mays
aacgactcgactgtccccaatccagtatcgcgagaagcgctacgcggccggcgaggcgctccccccaatatggtgcgcgtcgtcgtctccaccctccccgccctccgtccgcttctccgccgtggctctctgctaaaccataaacccctgccccgctcacgccttcagccgtggccgttctgcacgctctcgtcctcgcccgccgccggcgcgcccagcgccgcggtgaagggggaggaggttgcgttggacaagcaccttacccggtgcgcggcggcaggcatagcaccgttgcgggtggcggtgctggtgagcggcggggtggatagcagcgtggcgcttcgcctcctccacgccgccggccatcgctgcaccgcgttctacctgaagatttggttccaggaagatttcaggaatttctggtccgagtgcccatgggacgaggatttgaagtatgcacaagctgtttgtgacaagattgatgtgccattggaggtggtccacctatccgatgaatactggaaccatgtggtgagtaagcttcatttgagcctttcccccccatagatttgcacacaacactttttagagcctttgctttgagaagaaatactgtgaatttgatatctaggtatcacatatgatcaatgagtatcgctgtggtcgtacaccaaatcccgatgttctgtgcaaca

SEQ ID NO: 86185 - DNA, 2000 bp, Zea Mays
aacgactcgactgtccccaatccagtatcgcgagaagcgctacgcggccggcgaggcgctccccccaatatggtgcgcgtcgtcgtctccaccctccccgccctccgtccgcttctccgccgtggctctctgctaaaccataaacccctgccccgctcacgccttcagccgtggccgttctgcacgctctcgtcctcgcccgccgccggcgcgcccagcgccgcggtgaagggggaggaggttgcgttggacaagcaccttacccggtgcgcggcggcaggcatagcaccgttgcgggtggcggtgctggtgagcggcggggtggatagcagcgtggcgcttcgcctcctccacgccgccggccatcgctgcaccgcgttctacctgaagatttggttccaggaagatttcaggaatttctggtccgagtgcccatgggacgaggatttgaagtatgcacaagctgtttgtgacaagattgatgtgccattggaggtggtccacctatccgatgaatactggaaccatgtggtatcacatatgatcaatgagtatcgctgtggtcgtacaccaaatcccgatgttctgtgcaacacgagaataaagttcgggtctttcttagaagccattgaaaatttaggatttgactacatagcttcaggacactatgcacacgtagtacatccttccgctgaaaataccgaagcgccatccgtactacaattatcaaaggacaagatcaaggatcaaacctatttcctctcacatctatctcaatctcagcttagaaggcttcttttcccactaggatgtattacaaaggatgaggttcgcagactggctactcaaatgggccttcctaaccaaggtaggaaagactcacaagggatatgctttcttggaaaggtcaagtttagtgagtttgttgaaagacatataggagaaaaggaaggaatcatactggaagctgagtccggagattacctagggatacaccgtgggttttggttttatacaattggtcagcggcaaggattacggcttcctggaggaccttggtacgttgtagagaaagatgttcaaaacaatgtggtttttgtatcaaggaattattattcattggataagcggaggcgcacatttcgtgttggatcactaaactggtttgataattgtggacctggaaacaatgagcaactcaaatgcaaggtgcgacatagccctgaatttcatgattgcactttggtaaaagagcgtagtgaagaaaatggggatgctttggtggtgcatctggctgaagatgaccagggcttggcagctggtcagtttgcagcgttctatagtgaaaatgtatgcctggggtcaggcataattttggattcatgggacaagatgagcttccctgtctgctcaagggcactcgaaatcgcaaagttggcggacaagtcgagcttagggaagccaataagaatcgtgaacctggaacatatcgtgaaacctgaacaacaggaggaaatcaaagttgcctgacagattggtgccgtaaccttctcctagctccgccagctgcccccttcaaatcaattcatcaatcaaccgtatcgcaggccctggaaatcgaaggatgaggggtcttctagaatctaccgatatatacccccagttggaaactccaggtccttcttggaaggatgatatagtggaatatggcatgacttggtgcgctcgtgttgcagaggaacgatgaagcttcgtgcgtggatagggttgatctgaattaactgttgacagtgattttacgatctcgcgggaaagcaacacaatagtttgggcacgtcctctcctgagtggaatgatctggattcagtagtagtcagtggcacttcattaaaactaatacagggaaatcgtgacgttgtatgatagtggtaagatattgtattgtgaattttgacgataatatcggtgcgtgattgtgccactggatttgttcatcagta

SEQ ID NO: 86186 - DNA, 1657 bp, Zea Mays
cccaatccagtatcgcgagaagcgctacgcggccggcgaggcgctccccccaatatggtgcgcgtcgtcgtctccaccctccccgccctccgtccgcttctccgccgtggctctctgctaaaccataaacccctgccccgctcacgccttcagccgtggccgttctgcacgctctcgtcctcgcccgccgccggcgcgcccagcgccgcggtgaagggggaggaggttgcgttggacaagcaccttacccggtgcgcggcggcaggcatagcaccgttgcgggtggcggtgctggtgagcggcggggtggatagcagcgtggcgcttcgcctcctccacgccgccggccatcgctgcaccgcgttctacctgaagatttggttccagatttcaggaatttctggtccgagtgcccatgggacgaggatttgaagtatgcacaagctgtttgtgacaagattgatgtgccattggaggtggtccacctatccgatgaatactggaaccatgtggtgagtaagcttcatttgagcctttcccccccatagatttgcacacaacactttttagagcctttgctttgagaagaaatactgtgaatttgatatctaggtatcacatatgatcaatgagtatcgctgtggtcgtacaccaaatcccgatgttctgtgcaacacgagaataaagttcgggtctttcttagaagccattgaaaatttaggatttgactacatagcttcaggacactatgcacacgtagtacatccttccgctgaaaataccgaagcgccatccgtactacaattatcaaaggacaagatcaaggatcaaacctatttcctctcacatctatctcaatctcagcttagaaggcttcttttcccactaggatgtattacaaaggatgaggttcgcagactggctactcaaatgggccttcctaaccaaggtaggaaagactcacaagggatatgctttcttggaaaggtcaagtttagtgagtttgttgaaagacatataggagaaaaggaaggaatcatactggaagctgagtccggagattacctagggatacaccgtgggttttggttttatacaattggtcagcggcaaggattacggcttcctggaggaccttggtacgttgtagagaaagatgttcaaaacaatgtggtttttgtatcaaggaattattattcattggataagcggaggcgcacatttcgtgttggatcactaaactggtttgataattgtggacctggaaacaatgagcaactcaaatgcaaggtgcgacatagccctgaatttcatgattgcactttggtaaaagagcgtagtgaagaaaatggggatgctttggtggtgcatctggctgaagatgaccagggcttggcagctggtcagtttgcagcgttctatagtgaaaatgtatgcctggggtcaggcataattttggattcatgggacaagatgagcttccctgtctgctcaagggcactcgaaatcgcaaagttggcggacaagtcgagcttagggaagccaataagaatcgtgaacctggaacatatcgtgaaacctgaacaacaggaggaaatcaaagttgcctgacagattggtgccgtaaccttctcctagctccgccagctgccccctt

SEQ ID NO: 86187 - DNA, 2286 bp, Zea Mays
cggtcgatccggccccccgcgcaacaggaaccgataagcccaatgtcccgacaagcacctcagccgccacgtgccggtccacgcccgggcatctcgctcccgataagggcttgttcggttctaccctaatccatatggattgagggggattgagggggtttcaatccctagtaaatcaaaatctctcccaatccgtatcaatcccctccaatccatatggattgaaaataaccgaacaagccctaaggcagtacagtgcgggtgtgtggccacgccaccaacctcccgtataaatatttcacttaccccctcgagatccagaagaatcgcacactccgccttgcttcacactcgtcacccttttcccgtttcgaggacccggagcgctgcgcttttgtgccctcggttgggatttctgctcgcagggagtcggaaggaggacgagcttctgtcggtggacggagtaggttctgcagggccgagatggtggtgcatctggtgcttgcttgagttgctgcctcgtgaggttcgatcgggttttgctggtgtctgctagtaagtataggagcttaatcggaaggaagcaatactggaggagacgatgagcttcggtgccgtggacatggaggaggagagcggcgccgcggcggcggccgcagcggtggaggagatccggcggctgccggccgaggtgaactgggagatgctggacaagtcgcggttcttcgtcctcggcgctgcgctcttctcgggcgtgtctgcggcgctgtacccggccgtggtggtcaagacgcacctgcaggtggcgccgccgccgcaggcggccacggcgacggctgccgccatcctccggcgggacggcctccgggggttctaccgcgggttcggcgcgtcgctggccggcacggtgcccgcgcgcgcgctctacatggcggcgctggaggccaccaagagctccgtcgggtcggccgccgtccggctgggcgtctcggagcccgcggcgtcggccgccgcctccgccgcggccggcgtgtccgcggccgtcgcggcgcaggtggtgtggacccccgtggacgtcatcagccagcggctcatggtccagaccccggacgcctgccgctaccgcggcggcgcggacgccttccggaagatcctcctcgcggacggcgtccgcggcctgtaccgcgggtttggcctgtccatcctcacctacgcgccgtcgaacgcggtgtggtggtccacctacgccgtggcgcagcggtgcctgtggcgcgccgtggggaccgagcgctccgagagctgcgcctgcctgatggccgtgcagggcgcgagcgcggccctggccgggggcaccgcggcgctggtgacgatgccgctggacaccgtgaagacgcggctgcaggtgatggaggccgacgcggcggcgcggcccacgctggccagcaccgtgcgcgggctgctcaaggagggcggctgggcggcgtgctaccgtgggctggggcccaggtgggggtccatgtcgctgtccgcggccaccatggtgaccacctacgagttcctcaagcggctctccgccaaggagggctccttgggctagatccttccttggccgtcctcaagcgactctacggtatcgcccgcgcgtctccgccgtcctcgaagtcgaagatcgacgcgatcgatcgatccatggggatgaagttaatgataattaggatcctcttctctcttgtacatattgctcatcaggtttatttcccgtcgttcttgtttccttagatccggcgctatagagggtgggcaggaagaagaactagaaggggttttaggatgcagaattttgctggcctttgctgtggccctgctgccgatgccgatgatgatgatgaaaacctgcgtgaaatgcagaacttgtatccaaagcttgcgtcgatttccctgtccagtacagtactccgatgtcttgcatctgccaatggatagctctcagtggtggtagctctagccgcgtcaatgtcatggcgttgcttcatggaatggaagacccgatgcgcttctgctgtcgcatcgcttcgtcttttctccattttcttcgcttcgttgtacacgcagtacccgggggtggagtggagagcttggcccgggacagcgagggcgaagaagaattgtaccactggacttttttattaatccatcggcttgctgtagcctgcaccgcgcgtccgcccgtcgatgaacctctttcaggattcccggaacctgggaagaaaaaggaaaaaaaagaga

SEQ ID NO: 86188 - DNA, 1803 bp, Zea Mays
gcacatcctactgacaaaccggtcccactagctgctgatgcgcatccatccggcaactactcacgctcaggtcgccgtcgcgactcgcgccgcctctcggctcgctagccgctacgctatctacgccgccccggcacctcccatgagatgagagccgcagccgcagccacatccacagccgccgcgctcctcgcccccggtctaaagctctgcgcgggcggcgcccgcgcgcgcgtctcctgtccctcccgctcccgcctcccactccaccgcatcgccgccatggcctccgcccccaacccctccttccgcccggaggaggcacgctcccctcccgccctcgagctcccgaccccgccgctctccaagttcaaggtggcgctgtgccagctctcggtgacggcggacaagaatcgcaacatcgcgcacgcgcgcgcggccatcgagaaggcggcctccgagggcgctaagctcgtccttctcccagagatatggaatggtccgtattcaaatgacagctttccagagtacgcggaggacattgaagctggcggagatgcggccccttcattttcaatgatgtcggaggttgctcgcatcttacaagtcactcttgttggtgggtccatagctgaacgttcgggaaacaacttatacaatacatgctgcatctttggttcagatggcaaacttaagggtaaacatagaaagatccatctttttgacattgacattccaggaaagatcactttcaaggaatcgaagactcttactgctgggcagaatcctactgttgtagacacagatgttgggcgaattggtattggtatatgttatgacatccgtttccaggaattagcaatgttgtatgctgcaagaggtgctcatttgttatgctatcctggtgcattcaatatgactactggaccactgcattgggagttgctgcaaagggcaagggctacagacaaccagctgtttgttgcaacatgcggcccagctcgagataccagtgcaggatatgttgcttggggacactccactcttgttggaccttttggagaggtgattgcaacaactgagcatgaggaggcaactataatagcagaaattgactactcactgattgagcagaggaggcaatttcttcctctgcaacaccaacgccgtggcgatctctatcagctggttgatgtccagaggctgggttctcattagcacagggacgaagcaggagagcagttgactctgcaggcttgctcgtactacttcgttcatgagatgcatgcccatgcccatcgagagatcgatcaacttgatgtgtgaaggtggagaggacggaataaagcgactatagtttgtaccttcagcgctagtttggcaactctattttacaagagattcttatttttctaaggaaaaattgattaatttttcttaggaaaatagaaatcacttgggaaaatatgattgccagactagccctcagtgtaaatgtctccatgtcaagggcggtattgcccaaggtaggaggacctcggctacgtagatcgtagccttgacccgtggttgccggcagggttatgcccccacgccgagctacccgtcgacaggagaagttctcctggtcgccggtttagagaagagaggaagagacttgataggtaattcttgattgatttccaagtgccaccctacatggctatatatagccggcagcttacacaaatggagaaggttctccttgattgaagatctaatcaaaataggaaggatactaatcagctagctactttctctcct

SEQ ID NO: 86189 - DNA, 2359 bp, Zea Mays
gcacatcctactgacaaaccggtcccactagctgctgatgcgcatccatccggcaactactcacgctcaggtcgccgtcgcgactcgcgccgcctctcggctcgctagccgctacgctatctacgccgccccggcacctcccatgagatgagagccgcagccgcagccacatccacagccgccgcgctcctcgcccccggtctaaagctctgcgcgggcggcgcccgcgcgcgcgtctcctgtccctcccgctcccgcctcccactccaccgcatcgccgccatggcctccgcccccaacccctccttccgcccggaggaggcacgctcccctcccgccctcgagctcccgaccccgccgctctccaagttcaaggtggcgctgtgccagctctcggtgacggcggacaagaatcgcaacatcgcgcacgcgcgcgcggccatcgagaaggcggcctccgagggcgctaagctcgtccttctcccagagatatggaatggtccgtattcaaatgacagctttccagagtacgcggaggacattgaagctggcggagatgcggccccttcattttcaatgatgtcggaggttgctcgcatcttacaagtcactcttgttggtgggtccatagctgaacgttcgggaaacaacttatacaatacatgctgcatctttggttcagatggcaaacttaagggtaaacatagaaagatccatctttttgacattgacattccaggaaagatcactttcaaggaatcgaagactcttactgctgggcagaatcctactgttgtagacacagatgttgggcgaattggtattggtatatgttatgacatccgtttccaggaattagcaatgttgtatgctgcaagaggtgctcatttgttatgctatcctggtgcattcaatatgactactggaccactgcattgggagttgctgcaaagggcaagggctacagacaaccagctgtttgttgcaacatgcggcccagctcgagataccagtgcaggatatgttgcttggggacactccactcttgttggaccttttggagaggtgattgcaacaactgagcatgaggaggcaactataatagcagaaattgactactcactgattgagcagaggaggcaatttcttcctctgcaacaccaacgccgtggcgatctctatcagctggttgatgtccagaggctgggttctcattagcacagggacgaagcaggagagcagttgactctgcaggcttgctcgtactacttcgttcatgagatgcatgcccatgcccatcgagagatcgatcaacttgatgtgtgaaggtggagaggacggaataaagcgactatagtttgtaccttcagcgctagtttggcaactctattttacaagagattcttatttttctaaggaaaaattgattaatttttcttaggaaaatagaaatcacttgggaaaatatgattgccagactagccctcagtgtaaatgtctccatttgtcgaataaattgattactttaacctatgaagaaaacctttctccatgaaacaaagataaacggaggatcttctccgatttccttttgggccgtaccaatttgaattttgaactagcttgtgcgcctcctggagccgatgtagcaatggatactccagtgtttggccatcagcagccacagtactagagtatgcatgggtatattttcgtatgggtatgatggcagggaagggcaaacctgtgaacaggttccctgtcgatgctgcagagggcggcagacctgcacggtgcacaactgtcagctgtttgttgcagcatgcgctccgggtcgagataccataccagtgcaggttatgttgcttggggatggggacacactactcttgttggacttatgtgattgcaacaaccgagctagcatggagaggcaactatagggaggtacgcagagtgaaacacctttggttgaacggggtggcgcaagatcttctctaggcaatttcttcctctgcaacaccaacggcgtggcgatccctaccagctgcaagatgtcccggagactggatggatcctcagcagcgagcctggatgcagctgtgaggctggctgtgacgaagcaggagagcagttgactctgcaggcttgctcgtactaccgcgttcatcatgacatgcatgtcgatgccctgtctagagatcgatcgacctgatgtgtgaaggtggagagcaggggacgagggcgagtaaaggcgacaatagtacgtaccttcactgtgtctccggttgccaaataataaatagattacagtaggaagaacaccgctctacatgaaacaaagataaacggattatct

SEQ ID NO: 86190 - DNA, 387 bp, Zea Mays
atggctgacaatttttcttcccagcccacacctcccatggtgccgctccatcacgcggtaaccattcgtctaaacaagagcaataacctgctatggcgtgttcaacttctcccctacctgcggagctgcaggttgatcgggttcctcgatgggaccaagccggcgccagcacggatgatcgctgcgtccactgcgccagatgctgcgcaagttatcaaccctgcgtatatcaagtggtatgatcaagaccagcaactcctgagcggattgctgtcgtccatgtcggaggactccctccgtgatgtggttatggccacgactgccaaggaagtctgggattccttacagacgcagttcgcttcctccacacgagcgtgtattctctag

SEQ ID NO: 86191 - DNA, 316 bp, Zea Mays
tcctctgccggcgagtagatgccctgctcatgtgctgcctcatcgagttccaggagagttcagggaatacaagcaaggcaggatgggtgcattcatgcggaagatgaaagcggcgttccccgccatggagcaggtgtgcgtgtggcacgcgctgtgcaggtactggggtggcctccgccctggcacgcccggcctgccgcccaccaaggtggtagcgcccaagttctcctccggcctacagcgcaccatggaggacctcgccgtcgacaagatcgtcagcaacggtgtcggcctcatcgagcacaagcgcgcgcaa

SEQ ID NO: 86192 - DNA, 645 bp, Zea Mays
atggcgtccgccaccgagaactcgagcctacggagatgctcctctcttcccaacctactggtctggctcctcaacctctccctcctcgtcctcgccgccgccgcgctcggcccggtcttcctcctccgcccgcggccgacgcccttcggctgggcgctcgtctccgtgcacgccaccaccctgctctccgcactcgcagcgctccacgcgcagctcacccacctctgcctcgccgcgagcacggcgctcgcgctcgccgcgctgtccggccacgcactggcctccctggccttcttcctccgccacgaccacagcctccgcctcctcggctccgccagggatcgccgggagcagttcgtgctggcgttcctcgaggagctactgctgctggccatgttcatggcgcaggccgtcgcgctagctgcaacatgcgtgctgagccggcgttgggcgagggagtaccaggaggccgagacggagaaggcggccgcggcgagaaagcgagggaggaagatggcgcgtgtgcaggccgagtcggcggcagctgcggaggccggggtgaaggccgtcgacgagaaggtgatgcggagcagcagcggcaagaaggtgcactgggccaacaacgatggatacgaagagtgctag

SEQ ID NO: 86193 - DNA, 1192 bp, Zea Mays
atctgaagcctgtaacatctccgccatccgcctgaaggctcgaagcacgacgccaatggcctcccccaacgccgacccggctcagcaccacgcctcgacgccgccgctcctcctcgccgtacgccacctgccgttccccggcgtccaccggacgcgcgcgctccccggccccgacgtcctgacccctctcgcccgccgcctcgaggagctcgcgtccgcggcgacctcccacccgctcctgaagccgctcttcgccgcccactcacacctctcttccttctcccagggcaggaggcggctggtggcggcgcggcgtgcgacggtgctgtccggggggcactgcttcgcggcggtgctagggaactcggtggccgggttggtggtgtccaacggcatcaacaacttcctcaacctctacaacacggtgctcgtcgtcaggctcgtgctcacgtggttccccaacacgccgcccgccatcgtcgcgcctctcagcacgatatgtgacccgtacctgaacatcttccggggcatcatcccgccgctcgggggaacgctggacctgtcgccgatcctcgctttcctcgtcctcaacgccttcaccagcacggcggccgcgcttccggcggagctcccgagctcggcagcggcgcagcaccaccagaggactgctgcttcatccagctcggcgactcccagtcccaaccagaggaaatggatgcggagaatgcgatcaaagacatcacagggagaagatggtggtcactaggcatgtgagcttgtggctgggttcgtcaaatgccttattgttaccagctggggatcatgcttcgcatcagacgctcgagatctgcacagcaatgtgttggacatgcatgctcctcgctctctagccatcgaatgcaaactctgtcaatgccgcatgcagagttcgcccctttggttcaccacgttgcttcagagcttcaaatggtttttgtgcgttgtaatgcgttggcgttgcggagctttcttcaaatggtttttgtgctttgtaatgctttggcggtgagggctgtgctttctgctgcatgtatgtgtagcactttcggtcagctttcttgaattccgatagtgtgatcgcgatgcgtagccaaattcagtcttgagagagtaccaatcgaactttcatctgttgttggttaacaaattcaga

SEQ ID NO: 86194 - DNA, 974 bp, Zea Mays
gccctatgtctgagtcattatagcgcgtcccatgttttagtatgaacattcaaatgagtttgctatataggagaactgacgttcaaaacaccatacggccaacatttagaatacacacacaggcatatttgttgtacctaagacacactaaagctcactaaacataaaaacctttctttctatattcatttgcttttgtcttagatcctagagctaaactcaagggtttcaacagtgcacttcagtttctttctaatgtgacttttactgattactctgattattacaataacgtgcgtactgatttatctaatgtttttgccaagtatgatagcaaatttggtggcaccaggttgcaaagggcaactcaatccgtaagtactagcaaagtgaaatctgcttggggtaagatttatggtacttcatcttctaacactggaactactactacttctgttggccatacttcttcgccttctaatttctgtacagtctctgagttgtccatgtatgttgacagtgatccaattactgtgtttgatgatgattttgatattcttagttggtggcgtgagcataagaatacataccctattctctccattttagctaaggatgttctaactgtacctgtttcaactattagctccgaatctgtttttagtcttactggcagggtgcttgaggagaggagacgttgtctaactagtgagatggtggagattttgacatgtttgaaggattggcagatgggcgacgatcgagaacaacacaacttggagaatccagagcttcaacaagttttcgagaatcagtatctagatggtgatggtgatgataatcaagatgctcaacctgttgctgttgcctagtgtgcatgtggtcgtgtaggattttatcattgtatctgtatttcgtatgtatggctgtattactcaactaaactctcgaaacattgaactgattactatttt

SEQ ID NO: 86195 - DNA, 704 bp, Zea Mays
agctccgccatgagcgctacggctgatggcggcagcatcggtactggtatgagccaccggatcatcgtcgccctcttcctctccgccgccctgtgcaggtgcgatcccgacctcctcctggactactgcgtcgccgacacgtcgtcgtcccagctccacctgaacggcctggcctgcatcgacccggcgtcggcgcgggcggagcacttcgccacgtcggcgctgtcgcgggcgtcggagacggagacggcgtacgggttcagcgtgacggtgacgagcccggcgtcgtccctccccggcgccaacgcgcaggggctggccatggcgcgcaccgacctggccccgggcgggctggcgccgccgcacacccacccgcgcgcgtcggaggtggcgctggtgctggcgggcagcgtcctggtgggcttcgccgacacgtcgtaccgcctgtacacgcagctgctgcgcgccggggaggccttcgtggtcccgcgcgggatggtgcacttcatgtacaacgtggacgtcgcggcgcccgccgtcgtgctgtcggggctcaacagccagagccccggcgcgcagctcgtgcccttctcggcgttccggaccgagccgcgcgtgccggacgaggtgctcaagatggcgttcaggatcaacggccaggacgtgcagaggatccaaagaaacctcggcgggtcctcgtagac

SEQ ID NO: 86196 - DNA, 1775 bp, Zea Mays
gtcgccggtctccctagtccctaccaaaccgcaccccgggacgccgctaatcaggcaccccccaaccactcctcccccctggaggattaagcgtaatcaacccaccccacacagccaccgtatatgtatatataccccgatgcgtccagccaaagccgctggtgggaggccggccgggtaaaggtagtaaaccgtcgcagcgcgcggagtccctccatctccatccggcgaccgaccaaccgacctagactagacgcggccggccgggcatggcgaggccggggtggggctcgctgttcggctgcttcagcagcagcagcagctcccgcggggacggtaagaagaagcagggcaagggcaagggaaagggcgccgggaataagatgaagaagaagcagaagagcaagcagcagcagaaggtagcggcggggagcggcggcggtagccggccgcggtcgctgcagagccggatgtcgttcacggagctgagcctcagcgggatggtgtcgcccgaggacctgtcgctctcgctcgtcggctccaacctccacgtcttcaccatcgccgagctgcgcgccgtcacccgcgacttctccatgacccacttcatcggcgagggcggcttcggccccgtctacaggggctacgtcgacgacaagaccaagcgggggctcgccgcgcagcccgtcgccgtcaagctgctcgacctcgagggcggccaaggacacaccgaatggctgacggaggtcttcttcctgggacaactgaggcaccctcacctcgtgaagctgatcggctactgctacgaggacgagcacaggctgctcgtctacgagttcatgaccaggggcagcctggagaagcatctcttcaaaaagtacgcggcgtcgttgccttggtccacacggctgaagatcgccattggcgctgccaaagggttggccttcctccatgaagccgagaagccggtcatctaccgggacttcaagacctccaacatcctgctggactcggattacaaggcgaagctgtcggatttcggtctagccaaagacgggccggaagacgacgagacgcacgtgtcgacccgggtgatggggacccaaggatacgccgcgccggagtacatcatgacgggccacttgacggcgaagagcgacgtgtacggcttcggcgtggtgctgctggagctgctgtcggggcggaaggcggtggacaagagccgccccccgcgggagcagaacctggtggagtgggcgcggccgtacctgacggacgcgcgccgcctggaccgcgtcatggaccccagcctggtgggccagtactccagccgggccgcgcacaaggccgccgccgtggcgcaccagtgcgtcgccctcaaccccaagtcccgcccacacatgtccgccgtcgtcgaagcgctcgagccgctcctcgcgctcgacgactgcctcgtcgggcccttcgtctacatcgcaccgccggagacgacgaccgccaacggggacgaagcggcgccggtgagtagtaataaggaaggatccggcagacgaggaggccggaggaggtcgtcaggcgaaggcgcggccgtcgtgcggccagaggagtgatgttccctcttccgtccgtgctatgacgacgatgataatatgggtggatttactagcttccacgtcttgtacgtgaccggactgttgttgcctgtcgcgtgcatgcagcttggctgagatatatctatcgatcgagcagctatacgatcggtggaagttaacgtc

SEQ ID NO: 86197 - DNA, 751 bp, Zea Mays
catgatgattacttccaattaaagttcaatgcagcaaatatagctggattaagttgcttccagaaggtgaccgcattattccgtatgctaacttatggagtagctgcagatgccacagatgagtatgtacgtattggagaaagtactgttatagatagtctgagaaggtttgtaaaggcagtaattcaagtgtttggtgatgaatatttgagatctcccaatgaaaacgatacaactcggttacttgaatttggagaacaaagaggatttcctagaatgttaggttcaatagattgcatgcattggaggtggaagaattgtccttctgcatggcatgctgaaggtcaagctccacaagtgcattactccataaatggtcataattatacgatggggtactatcttgttgatggcatatatccatcatgggcaacacttgtgaagactaccagagccacaagagaataagcgaagatattttgccaaagcacaagaagctgtaagaaaggatgttgagcgtgcatttggagttctacgatctcgttttgctattgttcgtggtccaacatgtttttgggatgaagagacgttatgtgacatcatgaaagcatgtgttattatgcacaacatgattgttgaagacgaggaagaaattgtcctagatgaacgttttcaggatggtggacaaaatgtgcaaccttcacatgatcatcgtcaagatttggatgaattcattgaggtccatagaaaa

SEQ ID NO: 86198 - DNA, 3392 bp, Zea Mays
gatataagactcctaacaaactcctaataaggacctaagaaactttaattaattagaacaaatttatgataagaactccaataaactaactaactaattggctgtctgagtgtgcgtgttttttagatgacggctggtcgctggtaaactaatatattattgctcctacatgtctacaacagtgtttgattaactgtgtaaacgtagcagtttcagactcgcgcagggcgcgagctaagttactggtcataacaagatgacggttttctcaggtcaaacaggaacagggagcaggccagcttccgtgcaatgccaccaagactccgttcccttccgtcctgccaggacttgcaaacataaaaaagagcagcgcacgaggccgaggcatcctcctcctcctctgcttaaatcctagtcactgctgcagtgcggctgccgccgctgctccatcacgacgacgccaaccacctcagctcactagctcccgcggacccgcctgagcgcagccaaaaccggggatcccaggcgcagcagctagcatggccgcgccatgcagggacctcacgggccttcgccgggggcttgccgcggcgaggctggcgccggggcgccggggcgcgaacaagctctgcctcgcgccgttccaccaccgcgcgccgccgccgcagcagcagcaggggaggaggaggcagcggcaggggctcaaggtggtggctgccatcagcgaggacctgccgaggctcgcggcgcccgggaccgggaagggcgcgccggagggcaggcggccggagaaggtgctggtgcgggccgcgctcacggtgcgccgcaagcacaaggaggacctcaaggaggcgctggccggccacctcgacgcgctatgggacatggttggccggagcgtcgcgctcgagctcattagcaccaagatccaccccaggaccaagaagccgttgcacagcggtcaggcatcgatcaaagactggtgccagaagaggggcgtcaagggagagcacgtcgtgtacacggctgagttcatggtggattcagacttcggcgagcctggcgccatcaccgtggccaaccggcaccatcgggagttctttctggaaagcatcgtcgtcgagggtgggctgccgtgtggtccggtgcacttcgcctgcaactcctgggtgcagtccaccagggaactgccgggaaagagggtgttcttcagtaacaagccgtacttaccatctgaaacaccacccgggcttagagaactacgggataaggaattgaaggaccttagaggagatggcacaggagtacggaagctatctgacagaatctatgattatgcaacatacaatgatttggggaatccagatcgggggaaagagttcatcaggccaatccttggaggtgacaacatcccttatccacggcgatgccgaactggtcgcccaccaactgatacaaacatgctagctgagagcagagtagagaaacctcacaggatatatgtacctcgggatgaggcgtttgaggagctgaagcaaggtgccttctcatcagggaggctgcgggcagtacttcatacgcttatcccatcgatgattgcaaccatctcagctgagacccacagcttccaaggctttcaccacgttgataatctatacaaggaaggcctcaggctgaagttgggtctccaggagcacctgttccagaaaataccccttgttcagaagattcaggaatcaagtgaggggatgcttcgctatgatacacctagaattctttccaaggacaagtttgcatggctccgtgacgatgagtttgctcgacagactgtggcaggaataaacccagttagcatcaccaggctcacggttttcccaccagtaagcaagatggatcctgcaatctatggcccgccagaatcatcgatcacagaagcgcacatcactggacagctcaatggactcacggtacaacaggcggtggacgaggcaaagctgttcatattggactaccatgatgtatatatgccattcctggaccggatcaatgcaatagaggggcggaaggcgtatgcaacccggacaatcttgtttcttaccaaagctggcacattgaaaccgattgctattgaacttagccttcctccgagcaaggcaggcgagccccggccaagcaaggtccttactcctcccgctgatgctacctccaattggctatggatgcttgccaaagctcatgtcagctccaacgacgccggtgttcaccagctcgttaatcactggctgaggacacatgctgtaatggagccgttcatattggcagcgcatcggcgtatgagcgcaatgcacccagtcttcaagctcctgcacccccacatgcggtacacgctggagatcaatgcgctagcacggcagagcctgatcagcgcggacggtgtcatcgagtcgtgcttcacccctggtcccgtctccttcgagatcagcgctgcatactaccgcgaccactggcggttcgacctagagggcctcccttctgacctcgtccgcaggcattcatgccgttgccccatccctgtctgtagttgcttgtttttgccactgagcactgacatttcttcatctcttgtcatcaggagagtggccgtggaggatgcgtcgcagcctcatggcatcagactcctcatcgaggactacccttacgcaaacgacgggctcctgctgtggtcggccattcgcagctgggtggagtcgtatgtgcagctctactacccggacgccggcaccgttcagtccgacgacgagctccaagggtggtaccacgaaacggtccacgtcgggcacgccgacatccggcacgcgccctggtggccctcgctctccacgccgggggacctcgcgtccatcctgaccacgctcgtctggctcgcgtcggcgcagcacgcggcgctcaacttcgggcagtacccgctgggcgggtacgtcccgaaccgcccgccgctgatgcgccggctgctaccggacccggagcgcgacgccgccgagtacgcgacgttcatggcggacccgcaccggttcttcctgaacgcgatgcccggggtgctggaggccaccaagttcatggctgtggtggacacgctgtcgacgcactcccccgacgaggagtacctcggcgaggagcgcgacgagccgtggacgggcgacgctgccgccgtggcggcgcacgacatgttcacggccgacgtgcgccgcgccgaggaagccatcgatagtcgaaacgcggaccagcgcaggaagaaccggtgcggcgccggggtgctgccgtacgagctgctggcgcccagctcgccgccgggggtcacgtgccgcggcgtgcctaacagcatctccatatga

SEQ ID NO: 86199 - DNA, 3057 bp, Zea Mays
aatcctagtcactgctgcagtgcggctgccgccgctgctccatcacgacgacgccaaccacctcagctcactagctcccgcggacccgcctgagcgcagccaaaaccggggatcccaggcgcagcagctagcatggccgcgccatgcagggacctcacgggccttcgccgggggcttgccgcggcgaggctggcgccggggcgccggggcgcgaacaagctctgcctcgcgccgttccaccaccgcgcgccgccgccgcagcagcagcaggggaggaggaggcagcggcaggggctcaaggtggtggctgccatcagcgaggacctgccgaggctcgcggcgcccgggaccgggaagggcgcgccggagggcaggcggccggagaaggtgctggtgcgggccgcgctcacggtgcgccgcaagcacaaggaggacctcaaggaggcgctggccggccacctcgacgcgctatgggacatggttggccggagcgtcgcgctcgagctcattagcaccaagatccaccccaggaccaagaagccgttgcacagcggtcaggcatcgatcaaagactggtgccagaagaggggcgtcaagggagagcacgtcgtgtacacggctgagttcatggtggattcagacttcggcgagcctggcgccatcaccgtggccaaccggcaccatcgggagttctttctggaaagcatcgtcgtcgagggtgggctgccgtgtggtccggtgcacttcgcctgcaactcctgggtgcagtccaccagggaactgccgggaaagagggtgttcttcagtaacaagccgtacttaccatctgaaacaccacccgggcttagagaactacgggataaggaattgaaggaccttagaggagatggcacaggagtacggaagctatctgacagaatctatgattatgcaacatacaatgatttggggaatccagatcgggggaaagagttcatcaggccaatccttggaggtgacaacatcccttatccacggcgatgccgaactggtcgcccaccaactgatacaaacatgctagctgagagcagagtagagaaacctcacaggatatatgtacctcgggatgaggcgtttgaggagctgaagcaaggtgccttctcatcagggaggctgcgggcagtacttcatacgcttatcccatcgatgattgcaaccatctcagctgagacccacagcttccaaggctttcaccacgttgataatctatacaaggaaggcctcaggctgaagttgggtctccaggagcacctgttccagaaaataccccttgttcagaagattcaggaatcaagtgaggggatgcttcgctatgatacacctagaattctttccaaggacaagtttgcatggctccgtgacgatgagtttgctcgacagactgtggcaggaataaacccagttagcatcaccaggctcacggttttcccaccagtaagcaagatggatcctgcaatctatggcccgccagaatcatcgatcacagaagcgcacatcactggacagctcaatggactcacggtacaacaggcggtggacgaggcaaagctgttcatattggactaccatgatgtatatatgccattcctggaccggatcaatgcaatagaggggcggaaggcgtatgcaacccggacaatcttgtttcttaccaaagctggcacattgaaaccgattgctattgaacttagccttcctccgagcaaggcaggcgagccccggccaagcaaggtccttactcctcccgctgatgctacctccaattggctatggatgcttgccaaagctcatgtcagctccaacgacgccggtgttcaccagctcgttaatcactggctgaggacacatgctgtaatggagccgttcatattggcagcgcatcggcgtatgagcgcaatgcacccagtcttcaagctcctgcacccccacatgcggtacacgctggagatcaatgcgctagcacggcagagcctgatcagcgcggacggtgtcatcgagtcgtgcttcacccctggtcccgtctccttcgagatcagcgctgcatactaccgcgaccactggcggttcgacctagagggcctcccttctgacctcgtccgcaggagagtggccgtggaggatgcgtcgcagcctcatggcatcagactcctcatcgaggactacccttacgcaaacgacgggctcctgctgtggtcggccattcgcagctgggtggagtcgtatgtgcagctctactacccggacgccggcaccgttcagtccgacgacgagctccaagggtggtaccacgaaacggtccacgtcgggcacgccgacatccggcacgcgccctggtggccctcgctctccacgccgggggacctcgcgtccatcctgaccacgctcgtctggctcgcgtcggcgcagcacgcggcgctcaacttcgggcagtacccgctgggcgggtacgtcccgaaccgcccgccgctgatgcgccggctgctaccggacccggagcgcgacgccgccgagtacgcgacgttcatggcggacccgcaccggttcttcctgaacgcgatgcccggggtgctggaggccaccaagttcatggctgtggtggacacgctgtcgacgcactcccccgacgaggagtacctcggcgaggagcgcgacgagccgtggacgggcgacgctgccgccgtggcggcgcacgacatgttcacggccgacgtgcgccgcgccgaggaagccatcgatagtcgaaacgcggaccagcgcaggaagaaccggtgcggcgccggggtgctgccgtacgagctgctggcgcccagctcgccgccgggggtcacgtgccgcggcgtgcctaacagcatctccatatgaatgagtgcatcgttcgttgtttttccacattttttttctacgggtactattatgtattggttttcaagcaaattcgtgcctacgccagcacttgtagagaatacactacgaacatatatcgaaaataccaaatctgccaagaatgaggattgaaca

SEQ ID NO: 86200 - DNA, 1993 bp, Zea Mays
tgggcgtagggcgaaggcaacaggtgaagtgtcaacgtgtggctgcaatctgcctccgcactcactccacgcacacgccgccgctatacgcgacggcgccgagcgcatcgccgccggcccctccctccctgcgcctgtactcagcccgctgcttctcagtccacttcatccacagctcctcttctctcggtctagagatccgtccgggcacggtagtctcgccttcgttttgaggtacatctgtccgtcagcgatgtccatagaagagaggaagataagtatgataagcaagagcactgcactaaatccaaatgcagaggaatttgttccttcgtcccttagatctttcagtgattcctccaagaaatcagatgcaactatgattgtctcagggtcatctaaagaatctagcacagacaagccagaatccattttacgaagtaactctgatgaagaagcacatcagtactggcagcaacagctccctgacgacatcacccctgatttcaaagtcctgggacaagacgaaagtcctggacctgacagtctatcactcacaggcctgtcgattaatgatggcattgacacatcaatattttctccaaaccagacactgggcgtgcagcaccatgcttcaccttttatcagggacaaactgaatacacgcccaaaaattaacttgtctggcccaacttatatggacgaacggtcccaagccgcaattttgagtccaactgcaggttccatgagtccaaatgctgctccatgggtgaagaatctaaggaatgggggacattataacacaagcagaagggatgccactgccagtcactacaatggagattctagcattggggcttcattgcacaacctcactgatgcgtatcatggaagcaggcgcagcttaagcacgactatggatatcatgagtcagctggagagtaaagtcgatgggcgactcaatcagaacctcaggtcactgtcgtttggaaattcaagtcctccatcaccagcatcatatgcccaaaatggtcttggaaactatactggacgtgaacatatatccctcgatgttcctagaggaaggtataagacaactagtttgcctgttcctggtcttggttcaagcagaggttctcaggtgttgggtggcccatataatggaaaccatgatatgatctcaaccaataccctacaaaacatggctggaattcagacaggagcagcttggcttgaaactgatgctgcggcaaacacatatttggaatcaaaggatgaagttcatgattttgcaagcctgcgacatgcagttcttgaacaggatagacaggcttttctgatgggaaacaaccctttagcaaaggatctaacattgaaggagctatacagtatacaaagcaggttggctcaggagaaagctagagaaacaacataccgacaaagattccaaataccagagcttcaaggcctcatccaggagcagaatcccccaatcgatctctgtggtcttcacatcagcgaggccatgcacgtcctgaactacgagctcaacaaccgaagaaagatcgtgagatccactggtcgccgactccaggctatgatcatatcaagcgcccgcaccccagcacggctgactgctgccgtcgagcagtacctcatggaacacggccttcagtacacgcaggcacaaccaggcctcttccgcgtcctgctctagtgatggagccggcctagctgttgtcacaactggatcagacgagaaagaagaaaaaaaaagttgtacttttgtatatggcagagatggctagcaggatagaagcgttaagatagctcatgcattcacatatcaggctttagcaaatgtatacatcttaaaatttgcggagttaggtctttggtgctggtggatgcataaggtgatagcatcttcaaaatcatgttctcgttcacaatctttggtgctggtggatgcatagttcttttgttgctggtg

SEQ ID NO: 86201 - DNA, 2170 bp, Zea Mays
tgggcgtagggcgaaggcaacaggtgaagtgtcaacgtgtggctgcaatctgcctccgcactcactccacgcacacgccgccgctatacgcgacggcgccgagcgcatcgccgccggcccctccctccctgcgcctgtactcagcccgctgcttctcagtccacttcatccacagctcctcttctctcggtctagagatccgtccgggcacggtagtctcgccttcgttttggcacaacgaacaattactctagaagagttgtactctttggtgtgccgtactctctgtaacaatcttaccaattaccattcttgagaagaggtacatctgtccgtcagcgatgtccatagaagagaggaagataagtatgataagcaagagcactgcactaaatccaaatgcagaggaatttgttccttcgtcccttagatctttcagtgattcctccaagaaatcagatgcaactatgattgtctcagggtcatctaaagaatctagcacagacaagccagaatccattttacgaagtaactctgatgaagaagcacatcagtactggcagcaacagctccctgacgacatcacccctgatttcaaagtcctgggacaagacgaaagtcctggacctgacagtctatcactcacaggcctgtcgattaatgatggcattgacacatcaatattttctccaaaccagacactgggcgtgcagcaccatgcttcaccttttatcagggacaaactgaatacacgcccaaaaattaacttgtctggcccaacttatatggacgaacggtcccaagccgcaattttgagtccaactgcaggttccatgagtccaaatgctgctccatgggtgaagaatctaaggaatgggggacattataacacaagcagaagggatgccactgccagtcactacaatggagattctagcattggggcttcattgcacaacctcactgatgcgtatcatggaagcaggcgcagcttaagcacgactatggatatcatgagtcagctggagagtaaagtcgatgggcgactcaatcagaacctcaggtcactgtcgtttggaaattcaagtcctccatcaccagcatcatatgcccaaaatggtcttggaaactatagtaatgaagcttttggtctgccaaacagtccatatagatctcattcagctatactcgcagatgatattgtttcaccttcagctggacgtgaacatatatccctcgatgttcctagaggaaggtataagacaactagtttgcctgttcctggtcttggttcaagcagaggttctcaggtgttgggtggcccatataatggaaaccatgatatgatctcaaccaataccctacaaaacatggctggaattcagacaggagcagcttggcttgaaactgatgctgcggcaaacacatatttggaatcaaaggatgaagttcatgattttgcaagcctgcgacatgcagttcttgaacagcaggatagacaggcttttctgatgggaaacaaccctttagcaaaggatctaacattgaaggagctatacagtatacaaagcaggttggctcaggagaaagctagagaaacaacataccgacaaagattccaaataccagagcttcaaggcctcatccaggagcagaatcccccaatcgatctctgtggtcttcacatcagcgaggccatgcacgtcctgaactacgagctcaacaaccgaagaaagatcgtgagatccactggtcgccgactccaggctatgatcatatcaagcgcccgcaccccagcacggctgactgctgccgtcgagcagtacctcatggaacacggccttcagtacacgcaggcacaaccaggcctcttccgcgtcctgctctagtgatggagccggcctagctgttgtcacaactggatcagacgagaaagaagaaaaaaaaagttgtacttttgtatatggcagagatggctagcaggatagaagcgttaagatagctcatgcattcacatatcaggctttagcaaatgtatacatcttaaaatttgcggagttaggtctttggtgctggtggatgcataaggtgatagcatcttcaaaatcatgttctcgttcacaatctttggtgctggtggatgcatagttcttttgttgctggtgcgttc

SEQ ID NO: 86202 - DNA, 2170 bp, Zea Mays
tgggcgtagggcgaaggcaacaggtgaagtgtcaacgtgtggctgcaatctgcctccgcactcactccacgcacacgccgccgctatacgcgacggcgccgagcgcatcgccgccggcccctccctccctgcgcctgtactcagcccgctgcttctcagtccacttcatccacagctcctcttctctcggtctagagatccgtccgggcacggtagtctcgccttcgttttggcacaacgaacaattactctagaagagttgtactctttggtgtgccgtactctctgtaacaatcttaccaattaccattcttgagaagaggtacatctgtccgtcagcgatgtccatagaagagaggaagataagtatgataagcaagagcactgcactaaatccaaatgcagaggaatttgttccttcgtcccttagatctttcagtgattcctccaagaaatcagatgcaactatgattgtctcagggtcatctaaagaatctagcacagacaagccagaatccattttacgaagtaactctgatgaagaagcacatcagtactggcagcaacagctccctgacgacatcacccctgatttcaaagtcctgggacaagacgaaagtcctggacctgacagtctatcactcacaggcctgtcgattaatgatggcattgacacatcaatattttctccaaaccagacactgggcgtgcagcaccatgcttcaccttttatcagggacaaactgaatacacgcccaaaaattaacttgtctggcccaacttatatggacgaacggtcccaagccgcaattttgagtccaactgcaggttccatgagtccaaatgctgctccatgggtgaagaatctaaggaatgggggacattataacacaagcagaagggatgccactgccagtcactacaatggagattctagcattggggcttcattgcacaacctcactgatgcgtatcatggaagcaggcgcagcttaagcacgactatggatatcatgagtcagctggagagtaaagtcgatgggcgactcaatcagaacctcaggtcactgtcgtttggaaattcaagtcctccatcaccagcatcatatgcccaaaatggtcttggaaactatagtaatgaagcttttggtctgccaaacagtccatatagatctcattcagctatactcgcagatgatattgtttcaccttcagctggacgtgaacatatatccctcgatgttcctagaggaaggtataagacaactagtttgcctgttcctggtcttggttcaagcagaggttctcaggtgttgggtggcccatataatggaaaccatgatatgatctcaaccaataccctacaaaacatggctggaattcagacaggagcagcttggcttgaaactgatgctgcggcaaacacatatttggaatcaaaggatgaagttcatgattttgcaagcctgcgacatgcagttcttgaacaggatagacaggcttttctgatgggaaacaaccctttagcaaaggatctaacattgaaggagctatacagtatacaaagcaggttggctcaggagaaagctagagaaacaacataccgacaaagattccaaataccagagcttcaaggcctcatccaggagcagaatcccccaatcgatctctgtggtcttcacatcagcgaggccatgcacgtcctgaactacgagctcaacaaccgaagaaagatcgtgagatccactggtcgccgactccaggctatgatcatatcaagcgcccgcaccccagcacggctgactgctgccgtcgagcagtacctcatggaacacggccttcagtacacgcaggcacaaccaggcctcttccgcgtcctgctctagtgatggagccggcctagctgttgtcacaactggatcagacgagaaagaagaaaaaaaaagttgtacttttgtatatggcagagatggctagcaggatagaagcgttaagatagctcatgcattcacatatcaggctttagcaaatgtatacatcttaaaatttgcggagttaggtctttggtgctggtggatgcataaggtgatagcatcttcaaaatcatgttctcgttcacaatctttggtgctggtggatgcatagttcttttgttgctggtgcgttcaaa

SEQ ID NO: 86203 - DNA, 1280 bp, Zea Mays
gaccgcacctcgtatcgtcgtctagctccgtttcgtttccgggaagcaaccaaccttcgttcccgggcagccgacgacccttgcgccgtcttcgtctgtcaagagtacagtttgacgcgagcagctgccggttccttctctcgtgcgcctttgctagcttgggatcgatcaaagccggtgagcgaccgagcgagcgagtgaggatcggaacatctgccatcatggcctccgagcatgcgcagctgtctgccaaggccgccgccggcagcaggttcgcggtgacgtacggcctgctgaggcagtacatgaaggagcagggcggcagcggcgccaccaggagcctcgcgccggccgtgggcgtgggcctcatgccggaagccgacgctgctgcggcggcggaggcgaccgaggagaggaccaccgtgctggagctcttcccgcagcaggctggcacgctcaaagacgagcagcaaaggtgtgttaactcgccgttgccttcagtcagtgcctcaccgtgcgcgtgtgaacttctgatcgcggatctctccgtcgtccgtcgtccccttaggaagaggaaggagcgtgctgacgggagagcgccgctgaccatcttctacggcggcaagatggtggtcttcgacgacttccccgccgagaaggccgaggagctgatgcagctcgccggctccggcaacgccgcccaggacgcgctgggacagcccagcctcacagacatgcccctcgcgaggaaggtgtcgctaaagaggttcctggagaagaggaagaaccggctcaccgcggcagatccatacccagcagcggcggcgacggcggcggcaagcgagtcgtcgactaagcctccggcagtgaaagacgagggcgcgccgtgggtcggcgtgaactcggcgctcagcctcagctgaacaatctcatcgacggcagcctgcctacctatcgctatagggaaaaactagctatttcccggccgtaaaaatatgtacgtgtttggccccccttgacatttacaccagtaaaatggctgcttcagttcaggggaattattagctgggtagctaattaccatgatcggtttatttagttgtctgtttgagaattctttggccagaacgaagaagaattctttttttcttccttgctggtattcatcatatctgcgaggatacgaactgattaattagacctagtcgaactcatatatatacatagtgtgtaaattcaaataagatgatggaacaggttatatgcaattctttcgcttc

SEQ ID NO: 86204 - DNA, 1187 bp, Zea Mays
gaccgcacctcgtatcgtcgtctagctccgtttcgtttccgggaagcaaccaaccttcgttcccgggcagccgacgacccttgcgccgtcttcgtctgtcaagagtacagtttgacgcgagcagctgccggttccttctctcgtgcgcctttgctagcttgggatcgatcaaagccggtgagcgaccgagcgagcgagtgaggatcggaacatctgccatcatggcctccgagcatgcgcagctgtctgccaaggccgccgccggcagcaggttcgcggtgacgtacggcctgctgaggcagtacatgaaggagcagggcggcagcggcgccaccaggagcctcgcgccggccgtgggcgtgggcctcatgccggaagccgacgctgctgcggcggcggaggcgaccgaggagaggaccaccgtgctggagctcttcccgcagcaggctggcacgctcaaagacgagcagcaaaggaagaggaaggagcgtgctgacgggagagcgccgctgaccatcttctacggcggcaagatggtggtcttcgacgacttccccgccgagaaggccgaggagctgatgcagctcgccggctccggcaacgccgcccaggacgcgctgggacagcccagcctcacagacatgcccctcgcgaggaaggtgtcgctaaagaggttcctggagaagaggaagaaccggctcaccgcggcagatccatacccagcagcggcggcgacggcggcggcaagcgagtcgtcgactaagcctccggcagtgaaagacgagggcgcgccgtgggtcggcgtgaactcggcgctcagcctcagctgaacaatctcatcgacggcagcctgcctacctatcgctatagggaaaaactagctatttcccggccgtaaaaatatgtacgtgtttggccccccttgacatttacaccagtaaaatggctgcttcagttcaggggaattattagctgggtagctaattaccatgatcggtttatttagttgtctgtttgagaattctttggccagaacgaagaagaattctttttttcttccttgctggtattcatcatatctgcgaggatacgaactgattaattagacctagtcgaactcatatatatacatagtgtgtaaattcaaataagatgatggaacaggttatatgcaattctttcgcttc

SEQ ID NO: 86205 - DNA, 1433 bp, Zea Mays
gaccgcacctcgtatcgtcgtctagctccgtttcgtttccgggaagcaaccaaccttcgttcccgggcagccgacgacccttgcgccgtcttcgtctgtcaagagtacagtttgacgcgagcagctgccggttccttctctcgtgcgcctttgctagcttgggatcgatcaaagccggtgagcgaccgagcgagcgagtgaggatcggaacatctgccatcatggcctccgagcatgcgcagctgtctgccaaggccgccgccggcagcaggttcgcggtgacgtacggcctgctgaggcagtacatgaaggagcagggcggcagcggcgccaccaggagcctcgcgccggccgtgggcgtgggcctcatgccggaagccgacgctgctgcggcggcggaggcgaccgaggagaggaccaccgtgctggagctcttcccgcagcaggctggcacgctcaaagacgagcagcaaaggtgtgttaactcgccgttgccttcagtcagtgcctcaccgtgcgcgtgtgaacttctgatcgcggatctctccgtcgtccgtcgtccccttaggaagaggaaggagcgtgctgacgggagagcgccgctgaccatcttctacggcggcaagatggtggtcttcgacgacttccccgccgagaaggccgaggagctgatgcagctcgccggctccggcaacgccgcccaggacgcgctgggacagcccagcctcacaggtacgaacacgaacgactcaacgcatatacgtacgctgtccagagctcacacgggcagcctgcagaggcccatgtagtagcgtccagcagccgttcatacagcggagatgataacgacagcattcatttgtcccttgcacgcgtttcttcagacatgcccctcgcgaggaaggtgtcgctaaagaggttcctggagaagaggaagaaccggctcaccgcggcagatccatacccagcagcggcggcgacggcggcggcaagcgagtcgtcgactaagcctccggcagtgaaagacgagggcgcgccgtgggtcggcgtgaactcggcgctcagcctcagctgaacaatctcatcgacggcagcctgcctacctatcgctatagggaaaaactagctatttcccggccgtaaaaatatgtacgtgtttggccccccttgacatttacaccagtaaaatggctgcttcagttcaggggaattattagctgggtagctaattaccatgatcggtttatttagttgtctgtttgagaattctttggccagaacgaagaagaattctttttttcttccttgctggtattcatcatatctgcgaggatacgaactgattaattagacctagtcgaactcatatatatacatagtgtgtaaattcaaataagatgatggaacaggttatatgcaattctttcgcttca

SEQ ID NO: 86206 - DNA, 873 bp, Zea Mays
ccccgcccccatcccgctataaaagacaagagcaacacaagccaaggcagcaaacgacccgcggcgacgcaagaagagaagccagcagtcgtctggatccatcgattgacatggccatggcggcggcagcggagggcaagagccggaggttcgcgctggcctgcggggtgctgagccagtacgtgaaggccgagcagcagatggcggccgccggggcccctgccccgcgcgccccggccacgacgctgagcctcatgcccggcgcggacgtcggcgccgagcaggagcaggccgccgcgagggggcaggagacggccgggtccgcctccacggcggcgccgctcaccatcttctacggcggcagggtggtcgtgttcgacgacttcccggcggagaaggcggccgaggtcatgcgcctcgcagctggcgccgagcgcccggcggccccggccccggcgccggcgccgcgcgacgacctgcccatcgcccggaaggcgtcgctgcagcggttcctggccaagcgcaaggaccgcctcgtggagcgcgccccctacgcccgcccgtccccatccgaggaggcggagaaggcgaagccggcctcctcgtggctcgggctcggcggcacggacgccgagcgcctcaacatcgcgctgtgatttggatctcgcttgctacccacctggatcgaccgggggcgatttgattggctgggttcctggcttcctttgggtctgctggattggggttggtgtggagatcggagacggaggattgtagaaacgtattcttgttttttttctctctcccttacgagagagtttggctgttaattgattcgataatagaaagatggaggatgtacaattcgtgtct

SEQ ID NO: 86207 - DNA, 2204 bp, Zea Mays
ggaagcaatttttttgctaaaagccgactttctcacagtgcaaaactgaaagcacccctggacctgttttaagtggctttcggatgaaactgtgaaaacatatatcgaagaatttttaacgactattagtggtttacactaaacgttttttagctttttaatagctcacagcctacaacagcttcttccacatttcacaatctataacattttttttcacaaccacaacgcaaccgaacagacttcgtagactcgtagttccctaaaactgactactagaatcaattcgatcgaaacagggccttatcgtgggcttcacagtcctgacggcaaatatcaagatgagcccatcaaatacagtagagattatgggctctaatttatacctgaccacagcgtcttcctctgtggtcaagcacggcccttttacatttctctttcctcctcctcccgcccggcggccccgcgccgccgctttgttctcctcttctcgccgccgttcagcggcgcgactagcctcgtgctctttgcccctctaggttgttcgtgttacaatagctttgttactgctcctgtttcggccctcctgttttagaagttcctggccgcctcacacgccatgcacgcagcatgttcgcgcaattgcttgagcgacctgcttcactgccagaggcattggcgatgccgatgcccgtaccagctctctccggcacgaggcatgacgcgtggccgcagtgtgaaggaccggagcaagaagaagcgcgtccacgcgctcgaggtagccaccgagcgctggaaggttctctccaaagtgctcgccgtcgtcgacgcgctcaagaaggaggatgagcacgtcaccccgctcaagcgcctcgagatcctgcggccgcagctcggcctcgtcaagccgcacaaggtggcccacttcgtgcgtcgctcgccgcacctgttcgaggtctgccgcgacagccgcggcgtcatgtgggcaggcctctcgccgcaggcagaggcgctcgtcgaggaggaagcgcgcctgctagaggatcactcccctgtggccgtgcagtacgtcaccaggatgctcatgatgtccgtggaccggcggctgccggtcgacaagatcgcccacttccggcgcgacatgggacttcctcatgactttcgaacacggtgggtgcacatgtttccggagcatttcaggctggtcagattggaggatggtgagtatttggagctcatctcttgggacccaacctgggcagtcactgagcttgagaagaaggcgtctgtgtcgactggcgatgccattgccagttcgccaggagagctgtcgcttccgtttccaatgaaattcccaccaaatttcactacttactacagatttcgaggaaaagctcatcattatgtgaaaatgggcaataccgatcagtttcagaaggtcacctacctgtccccttatgcagaggcaaagggattgactcctggatcgccagagtttgataagagggctgttgcagtgatgcatgagatactgagcttcatgctggaaaagaggctggtgactgatcaccttacacatttccgtcgtgagtttgtaatgccacagaagcttatgaggttactattgaagcattatggcatcttttatgtttctgagaggggaaagaggttgagtgtgttcttaactgaggcatatgatgggaacgaactgatagagaagtgtccgttggtgcggtggagggaaaaactccttcaacttactggttacagagggagattgaagaatcttggtaaagtcgacgtgtgttctgattcagatgagtacttattaggccatgatgatgatgatgatgtattggatgttgaaagtgaaaatccagatgacatcttagatgactgttctatttcagatgattctgagatggatttaggggatgcagatgcagatgaattttgcagagactgagttggtggcatgtgtgtagcagaaaagaacaaaaaaaaaagttgtgttaagtttgttatgaaaacaaagttcagcaataactgtttgtgactttaagctcaggatataattgtgtactatactctagctgctgtcatctatggagttccaagtaacacttgaggcggactgtattcttctctcgtcagttgtatttggactttcaaatattagtcaaagctcaaacagatcacaatga

SEQ ID NO: 86208 - DNA, 797 bp, Zea Mays
tgttgttcctgctctacagatctcccagcccacccatccatccatcctctactccccgtttcctgtttatgcttattcggacgggtgccaccaccatgttcctcatttaaggctccacacggcaacgcgtcctgattctctcgaaggacctaacaatggcggtgctgctggaagttcgccggactgacaaaattgcattcccattggcatgcttccggatattctctcgccgtccagacttccggaatttatgggttatgggcgatggaacggaggatcctcctctcctcatcctaaaaggggttatccatgccggttgtctggatcaatccgacgcctggaccatcggaccggaatacctctccagctgaaaccgttgcgacagtgccattaagagatacgactacgagaacggaacgctactgggatggaagccaaagattgcgagtgatgccgcggactgacgaaccctcaaccaactggttgtatcgtatggatgtccgagactccgagtgcgagaggatgaacgtcactagcagagtggttaaccctcgcggactgtggtcaagctgtcgcttttgctgccgctgtccactctgcctgtcaggcgcgctatgagcctgagtgaggtcttcgctggctggctcgcggttcacatgtggccagcagatcgttcgtgtcactgtgtaaaacactgttatatccttgttttcatacgctacaatcattgtttatttttctaataatgtaatttacttcttatataaaatacatgatttaggactttaaccgataga

SEQ ID NO: 86209 - DNA, 2435 bp, Zea Mays
gtggcaacaatagcagcagccgggcgggagctcccgcctcccgcttccccccctccatcagatgatcagatcagtccgtccctgcccatctgccctgctctctaatggcattaactgccgcccacccacccgccatctcctcccctacccagctgcacgctcctcttctcctgctagcagtactgctatatatcaataatactagctggaccctttccactcccctcacctctcactaccaccaccactgccccggatccataccagctgcagcagcagcgcgcgcgagctagcttcggtcggtcgatagatcgatcgatcgctcggccatcatggcgcgggaggagcaggcgctgctgtcgacggagatcgtgaaccgcggcgtggagccgtcgggcccggacgccggctcgccggccttctcggtgcgcgtgcgccgccgcctgccggacttcctgcagtcggtgaacctcaagtacgtgcgcctcgggtaccactacctcatcagccacggcgtgtacctggccaccatccccgtcatcgtgctggtgtgcggcgccgagctgggcagcctcagccgcgacgagctgtggcgcaaggtgtggggggaggccacctacgacctcgccaccgtgctcgccttcctcgccgtcctcgccttcaccatctccgtctacatcatgtccaggcccaggcccgtgtacctcatcgacttcgcatgctacaagccggccgacgagctcaaggtgtccaaggcggagttcatcgacctggcgcgcaagtccggcaagttcgacgaggacagcctggcgttccagtcgcgtctgctggccaagtccggcatcggcgacgagtcgtacatgccgcgctgcgtgttcgagcccaacgccagctgcgccaccatgaaggagggccgcgccgaggcgtccacggccatgttcgcggcgctggacgagctgttcgacaagtgccgcgtccggcccaaggacgtgggcgtgctggtggtcaactgcagcctcttcaacccgacgccctccctgtccgccatgatcgtcaaccactacaagatgcgcggcaacatcctgagctacaacctggggggcatgggctgcagcgcgggcgtcatcgccatcgacctggcccgcgacatgctccaggccagcggcgctggcctggccgtggtggtcagcacggaggccgtctccttcacgtggtaccccgggaagcggcgctccatgctcatcccgaacgccttcttccgggccggctgcgcggcggtgctgctgtccaaccggcgccgcgacttccaccgcgccaagtaccagctggagcacgtggtgcgcacgcacaagggcgcggacgaccgcgccttccgctccgtgtaccaggaggaggacgagcagcggatcaagggcctgtccatcagccgcgacctgctggaggtgggcggccacgcgctcaagaccaacatcaccacgctggggcccctggtgctgcccttctccgagcagctgctcttcttcgcgggcgtgctgttccgccacctgttcccgtccaaggcctccacgccggcgccgccgaccaccccaggggacgcctcggccgccgcgccctacatcccggacttcaagcgcgcgttcgagcacttctgcatgcacgcggccagccgcgacgtgctggagcacctgcagagcaacctgggcctgcgcgacgccgacctggaggcctcccgcgccgcgctgcaccgcttcggcaacacctcaagcagcagcatctggtacgagctggcgtacctggaggccaagggccgcgtccgccgcggcgaccgcgtctggcagctcgccttcgggtcgggcttcaagtgcaacagcgcggtgtggcgcgccgtccgccgcgtgcgccgccccgcgcgcagcccctggctggactgcatcgaccagtacccggcgcgcatggacgcctagcacgtacctgcaatgcaatggctgctatctatctatcgctcgcttcgctatctaccagtgcagtgctgcacttcaccgatgcatgatggatcggatatgatatggtataggacgcagtcggtcgatttgcatgcatgcaccaagtgttactataccgttctgaaggtacgtttgaactttgttcgtttgtattgcactattgcttgttgtttaagtagcggttaagggagggagtcgtacgctgtgctaccataatggaagtactccggtccggtccggtcctgtgtgagccttatgtacgtgcaattttaatgtcttttgatattacaagactcgacggttggcaatagatgttgctgttgtgtttcgattgatcaaaataagcaccggccgatgcttctgaaattgatacgcatacgcatgtactaacaagtggcggaccctggaacaaaggaatctgttctattaaaa

SEQ ID NO: 86210 - DNA, 1719 bp, Zea Mays
atggcatctcttactccaggaatactattaaaggttctaaaacatattaactctgatgtcaaagtatgtggagaataccggtccattcttctccaagttattagcatagtccctgcaataactggttcagaactttggccggaccatgggttctttatcaaagtttcagattcttcacactcaacttatgtttccttgtctaaggaggacaatgaactcatcttatcaaacaaactacaacttggacagtttatatatgttgagaaggtccagtcaagtatacctgttccggttcttgttggggtccgcccagttccaggaaggaacccttgcattggaaacccaaaggatttgatgcaaatgtcaactccctctggagttatggaagcactggatcatcaacggacaacttccaagtcagctgatctgtctgaaagtgaaaaggaaaatttgcagagaaaggtagttatcaaagagcagaagacagttgtcgcttcccgttacatgcttggggtgtcaagcaacaacgggaaaattaccaacctcaactccagcattgatagtgaaaaaagtaatggaggaagtaccatatctgaatcaaataaaaaatctgttgccctgaaagtcagacaagaggcaaaacctcaggaacggtcaaataatacatctcctagtaacgctaagttagtttccacaaagcaagaaattagcaaggacacacgcaagaatattggcacttcacctagtccaaatggttctgctgtagtcaagaagcaaatgccaaaggagagcaaaaaggaagttgctactgagagaagatcaccaccaaagcttcataggagttcgccaacaccagcgaggacttcaccaacaaagctcagtccagcagcaaagcagaatggaaactctggtccagtttcttctgtatctactgttaaaaaaagagttagtgaaactatctcttgggactccctcccaacaagcctaatcaattcaggaaaggctgttgtccggaggaagaacattgctcttattgtagcggctgaggctcaaagggaggctgctgcagctgcgtatcttgtaaaaggccttggaattttttctgagataagggaatcttctgaagtagatccacaagctgcaatcaccaagtttttcgagctgcacaggcttatcgttcagcaaagtgctgtctggaaagcttacactcctgagcctagcaaagaatctcgaccggagaaggaaaaaccgtcgaggaaagcttctgcatctcatcatcaccagaacaaagctggcacacgcgacacagctaagaatcccgaaggtgcccagggcagtgagaagacggaatgggcccgggaggacggtttcaaggagatctgcaggtcatggattgttctgaggaaagaatcgcggtcgtggtttctgagcttcctggaggatgcacttgaatcaggattcatgtccgagggccaaaccaccaagaacacgagagaacgcgtgcggggacaacccaaacccaagggtggggacgggaggatcgcggtcctgctgtcgcagctcaaggagacgagcaactggctcgatcagctgctgcaggacgaggcggacacttccgcggacggtttggccgaaaccgttgaccagctgaagcagaaggtgtacaaatgcttgcttggaacggtcgaaaccgcggcgtcggcactcggaggaagataa

SEQ ID NO: 86211 - DNA, 1027 bp, Zea Mays
gcctcgcctattgttggcacatgtcttcccgcggccgttgtttacgcagaatcctcctgttccactcctcgccaaatgtcttttgttagagttcatatgaaatttctggtcgttcaattttagatcgatttctttacggcgtattttgattgcatcgcgaccggctccggagccatccggtcataagaccgtaccaacgcatttctttggtttgaggtgcgggacggcgggcgccgaacggtcgtgtgccgtagatccaaagtcgcgggaaatctctggtcgaggagtcgatttggatccgtttatcgctagtttggtcgtcgttgatctgaaaggtggagctttggtcgattttctcttccagaagcatttgtgtttctgaggtgctaaggtgctatatctgaagcagccgacgaggagctgagtctttgattttttttttaccaatttctgtcgtcgtttgttgatctgatccgatggaggctatgacgggtggcaaattccttcaaaagtttcggctctacgaaaccagatcgaaattttatcttattggaagagacaagagcaggattcactggagggtgctaaaaattgatcggtcggagttcactgagttgggtgtcgaggaggatccaactatttacacagagaatgaatgccaagaactgcttcggcggatccatgaggggaacaggttgaccggtggactgaaatttgtcacaaaatgttacggaatagttggttttgtaaagtttcttggtccttattacatggttataataaccaggagaaggaaaattggcacaatatgtggccatgaaatttattccgttggcaagagcgaaatgattgcaattccgagtgttacagtctggcccaacatggcttattctagggatgaaaacaggtcttttatttttttcaacatgtaaatattgtgtattgcctgttgtaattccatcagtggttcttaacattatctataatgcgagcttgctatctagtgtatgttctatagctttgctat

SEQ ID NO: 86212 - DNA, 3372 bp, Zea Mays
gcctcgcctattgttggcacatgtcttcccgcggccgttgtttacgcagaatcctcctgttccactcctcgccaaatgtcttttgttagagttcatatgaaatttctggtcgttcaattttagatcgatttctttacggcgtattttgattgcatcgcgaccggctccggagccatccggtcataagaccgtaccaacgcatttctttggtttgaggtgcgggacggcgggcgccgaacggtcgtgtgccgtagatccaaagtcgcgggaaatctctggtcgaggagtcgatttggatccgtttatcgctagtttggtcgtcgttgatctgaaaggtggagctttggtcgattttctcttccagaagcatttgtgtttctgaggtgctaaggtgctatatctgaagcagccgacgaggagctgagtctttgattttttttttaccaatttctgtcgtcgtttgttgatctgatccgatggaggctatgacgggtggcaaattccttcaaaagtttcggctctacgaaaccagatcgaaattttatcttattggaagagacaagagcaggattcactggagggtgctaaaaattgatcggtcggagttcactgagttgggtgtcgaggaggatccaactatttacacagagaatgaatgccaagaactgcttcggcggatccatgaggggaacaggttgaccggtggactgaaatttgtcacaaaatgttacggaatagttggttttgtaaagtttcttggtccttattacatggttataataaccaggagaaggaaaattggcacaatatgtggccatgaaatttattccgttggcaagagcgaaatgattgcaattccgagtgttacagtctggcccaacatggcttattctagggatgaaaacagatataagcacctgctttgctcagttgatctttcgaaggatttcttcttcagctactcttacaacatcatgcacagccttcagaagaacataaccgagaagaacattgggcaggtttatgaaacaatgtgtgtatggaatgaatttatgacacgagcaattcgggatcatctcatgaatacctgttggactgttgctttagtccatggattttttaagcagtcaaggttctctgtgtctgggaaggatttttggctgacgcttatagctaggcgctcacgccattttgctgggaccagattcttgaaacgtggtgttaatggaaagggcagggtagccaatgatgttgagactgaacagattgtttttgaagacacatctggtggaatcccaactcagatggcttctgttgtacaacatagaggatcgatacctcttgtctggtttcaggaaacttcaagacttaatattagaccagatattatattaaaacctgatctggactacaaggcaacccgccttcattttgagaaccttgcacttagatatgggaatccaataatcatattgaacttaataaagacccacgagaagaagccccgtgaatctctgctctgtgcagaatttgcaaaggctattcattacattaacaagagcctatctgatgacaagtgtctaaaatttctgcacatggatctgagtaatctttttcgaaggaaaggcaccaatgtgcttgcactgttgagcaaggtggcatcagatgtgttggatctaactgaattcctccactgcgaaataagtacatcaacaaaatctgatgacatctcaagtgaagaaaaaactgttgccaaaccacgtgatgacagaagtagcagagatcaaactgaatgtgcagctaagttggtacctcttttattacagaagggtgtcctcaggacaaattgtatagactgcttggatcgcacaaatgttgcacaattttcatatggtttagctgctttagggcgtcaacttcatgcactgggacttgctgaagcacataaaattgaattgcatgatcctctggttgatgatctgatggatttctatgaacggatgggtgatacattagctattcagtatggtggctctgctgctcacaacaagatcttctgtgagcaaaggggccaatggaaggcaacaacccaatctcaggagttccttcgaacccttcaacgctactacaataacgcctacactgatcacgagaagcaggatgctataaacatgttcttaggtcatttccaacctcagcaagggaaacctgcattgtggaagctggactcagatcagcattacaacattgggaggcaaggaactttaaaagaagagattggaagatcattcataaagaggtcactatcagatggtaacatactgttggagagcagcttgcctgtaactatctgtaacaatgaaacagacaacacagaattgctcccagtgcaacagctggatgatattagagaagcttctgattctgcgccagagatctccatatgcgaacctaacctgtgctccagtatgaactatggcacagtgcctggaagacactccatgtcagaagagcggcagagttatttgaaaagattaggttaccctgaattgcactcttcaaatttctttgaccttgatttgttgtcatcttcaggaaattcgtttgacgaggaagtttttgagaggtcattactgatcaattcacctatggatgtgatcagtcctgaatcatctatgtcatacagtgaacaaggacacactgatgagggaagagatgacacggatctttcccgttctagcagccagctctcagacattcgggactactctgaccactttgcgcagtgggtcgtgaatggagacacgctttgctactaggccctggacttttgtcttggtgacagctcagtagatgtgacacggcaggaaatggaagtctgacggatagagcagatgaaatggctgacgactagccgggctaggtgccgtgcatctacctgcagaggcggcgtagcagaagaggtggtggacatgggagaagtctcgcatcggcatgcttgtggtcactggaaggcttgaacgatgaacgctgatattcgtcggatgcagctttcggtggggtacatgattcaatttgctatggtgaaaattttgaccgtagcttagacaataaataggcaaaatatatctgttcttttagtttagcttaccttgcgtttcccttctccatagaaaagtatcaaaaggaaaaacaatggaaaatctattaggaaaaggaaaaaacaaacaaaccataggtaaagaacacttctgttgtaaatagttagtttgctacagaagtataaatatctggtacttgttgggtttcttggcggtgtctgtttcataattgtttctgtgaaaaagctgaaagaaactcggtatgtctttt

SEQ ID NO: 86213 - DNA, 1774 bp, Zea Mays
agtgaagaaaaaactgttgccaaaccacgtgatgacagaagtagcagagatcaaactgaatgtgcagctaaggcgtcaacttcatgcactgggacttgctgaagcacataaaattgaattgcatgatcctctggttgatgatctgatggatttctatgaacggatgggtgatacattagctattcagtatggtggctctgctgctcacaacaagatcttctgtgagcaaaggggccaatggaaggcaacaacccaatctcaggagttccttcgaacccttcaacgctactacaataacgcctacactgatcacgagaagcaggatgctataaacatgttcttaggtcatttccaacctcagcaagggaaacctgcattgtggaagctggactcagatcagcattacaacattgggaggcaaggaactttaaaagaagagattggaagatcattcataaagaggtcactatcagatggtaacatactgttggagagcagcttgcctgtaactatctgtaacaatgaaacagacaacacagaattgctcccagtgcaacagctggatgatattagagaagcttctgattctgcgccagagatctccatatgcgaacctaacctgtgctccagtatgaactatggcacagtgcctggaagacactccatgtcagaagagcggcagagttatttgaaaagattaggttaccctgaattgcactcttcaaatttctttgaccttgatttgttgtcatcttcaggaaattcgtttgacgaggaagtttttgagaggtcattactgatcaattcacctatggatgtgatcagtcctgaatcatctatgtcatacagtgaacaaggacacactgatgagggaagagatgacacggatctttcccgttctagcagccagctctcagacattcgggactactctgaccactttgcgcagtgggtcgtgaatggagacacgctttgctactaggccctggacttttgtcttggtgacagctcagtagatgtgacacggcaggaaatggaagtctgacggatagagcagatgaaatggctgacgactagccgggctaggtgccgtgcatctacctgcagaggcggcgtagcagaagaggtggtggacatgggagaagtctcgcatcggcatgcttgtggtcactggaaggcttgaacgatgaacgctgatattcgtcggatgcagctttcggtggggtacatgattcaatttgctatggtgaaaattttgaccgtagcttagacaataaataggcaaaatatatctgttcttttagtttagcttaccttgcgtttcccttctccatagaaaagtatcaaaaggaaaaacaatggaaaatctattaggaaaaggaaaaaacaaacaaaccataggtaaagaacacttctgttgtaaatagttagtttgctacagaagtataaatatctggtacttgttgggtttcttggcggtgtctgtttcataattgtttctgtgaaaaagctgaaagaaactcggtatgtcttttaatatgcaccatttttgcttgaggactctccatgacattgcgcagagaggagtgcaagaacttgaatgtctcatgcttctcttgcggtggacatccacgtcgatgacaaaattctagtatatggtacgtagttcattcgaaaggtgcaaggtatccaatttagttttggatatctagagttcacaagatagtacttatctgaaaaatgaaatcaaattaccattgcaaaatataaataa

SEQ ID NO: 86214 - DNA, 733 bp, Zea Mays
cataatatgtgtaaattaaatacaaaggtagtgatgtggcgtctctgttgctgcaattgccaagtggatgaaacagatcggtgtgagagtcatgtcaaggccacaaccaacaaaattgacggggtgacgaagggtttgagggattctgctactgcaaaagtcgagccacacgatgatgctccccctatcgatgtcgatgttctatccttggatgatctgataaaaaattgttgactttggttcaagagccttgataggtgaaggtatttatgggacattgtactatgcaactcttggtaatgtaacaaaaatgacagtaaagaaactttactgaaaatgaacccattgtcgagttcttggtcgaggttggtgttgccattgattattgatcacgggggttactaccaaacaatgatgcttacttctgataccaagtctcattggtttcaaggatgacacatgaaaactttgttgacatgttgggggaccgtatcaagcgtaatcttcgcatagtatcctacgaattcgcgaccatgggttctctccatgatgttctacatggaagaaaagtatttcaaggtgctcgacctggcccaacgtttggttggatgcagcgagtgcaaattgttgttgacgctacaaaaggactcgatattttcatgggaaagttcatcagtccattgtccatagggataatagaacaattaatatcatcttgtttgaaggcttcaag

SEQ ID NO: 86215 - DNA, 430 bp, Zea Mays
agtagcagtgcttttagctggagtttctgaaattgctaaggcttcatttttcacatgtcctttcttccacatttatagctatggaacaaactgtgtcctttcttccacgtttataagattgattgattagcaaaaaaacaaagaacacttcaataaatatattatatatgcgcttgtcatgaattcccgttgtatataatgcctaaacagtactacttgcttaattagggcgatgaggcggctaaactaaatagagtggggttaagtccctaattgccttgcctgcagttgacttgcaacattttccctgggatgtccatttcaagccccacaagctctagaagcttaaagccatccatgtctggcatgtgcacatcgctgatacaagatcaaacaagttcttgttttgactcaacatggtcaagatcac

SEQ ID NO: 86216 - DNA, 1655 bp, Zea Mays
ctcggcctcgaatacgcgtctacggtctaccctactcgccgcacgccgccgcagaccgcagactgcagtccgccactcgccgccagccgccaagccctgctcgccgcacgccgctgcagtctgcaaccatcagccaatatccagcgcaaatagcagagaacaacagcgatccgcgttccgcgagaccaggatcgcgacgaacgatcaggtggtgaaggaagtgggtgcgaaggaagttggggctcgcgttcggaaagcttttcagcctctcttcgccaagaaggagattccgatttttggcgcccacacgcatgttgtacaatggcttgttcgttctgttgcagtatcttattcttgcggtttcggaatgtaatccagctctgattcaagatttattaggctggagagattatttctcgctttgagaagacaaagtttttgttgaaatgctaaaaacttttccagtgcaccaaagacttgggtcaggcaccatcagaaaaccacatggctcggcaaccttggagcaataatggtcatagaaattccccttcaaattcattagatggaggagttcctggacccatgcctctgctccctttccaggacgaacttgcagttggttgttaagagatttgtagaattgctgctaataatactcttgtgctagaggatattttgggccttaggcaagaattagctgtcattgaagacgagatccatatacttgccaaacaaaccattcctagacttcgtgttgataatgaaatggaatacagggatattatccagggaggcatgaagttagaggaacatatgcatgctcttaaacttatcaaggaagaagtgttggtcctaagttctgaaaagatggagttggaagctttgtgcaaagagctatttgtgaaggttcagtcattgtacagggagctggagcagatccaatccgagaacaagcagatacctgctataagagaagggttgcatgatatacaagaggagatttcgagggccaggatggcatacgagcatgagaaacgtgcaaaagttgagcttcttgaggagagtcaggccatagagagtgattttatcaacataaaaatagaagcacagagattacggacagagctggagaagcggaggtctggtgtgttcaagcatcatgcatttggctcatactataaaaagatagagcatggcattgcatcctccaactggtaggtgggtgtcacaaagcgtagctaagggtttggtgtctatcagagaaattagtcgaactcaggagtcaagaccaaatgcgtttgtctttcggatgagcagctgatagttatttgcgaacacattgctattactatatctcattattaagtaggagtacaaattggacgattgaaagaagaatattatcaatttggtctttattgtactcctacttatttttttctctcgagaagtactcctacttatttttaatggatgttttatgtcttattatccacttctacactgtcctttgtttttcttaagataaatcaactgcgagacactcttttggatgtcttcatttttatgttgataaggacatgaagctggacgacagctctgcttgctgcccaggagctccgcgtagctgctgcaaggtccaggggaagctggac

SEQ ID NO: 86217 - DNA, 1736 bp, Zea Mays
gaacgataaaagtaggaatcacattattttgcggtcccagaaatctatatctatctagccttctcctttcccttgcccagtttacttactacccacgcttggcgcgtgcatcggatcggatcccggccccgcgtcatcccttcctttccacggcccggtcgtcgactgtctcgcgctccactttccacggcgaatccattcttaaatgatctacactgctgcataaacccctgcggccgggtagtctcgaagactccacctaaaacggccaggccagacttggtcgtgccggcgtgcggcgtgcccccgagctagctgtggacctgggagccacgacggcgatcatgggctcttcttccggggcgccgctgctcgtcgctcacccgagccgggggaaggaggacctgggagatcagcgccgcctccgctggtgctgcggcgtttcgtcggaagggcggtgggcggaggcgacggcggaggccgggcggctggcggcgctggcggcgcccatgatcgccgtggcgctgctgcagctcatgatgcaggtcatctccaccatcatggtgggccacctcggcgaggtgcccctcgccggcgccgctatcgccggctcgctcaccaacgtctccggatttagcgtcctcatgggactggcatgcggattggaaactatttgtggacaggccttcggggcagaacagtatcataagtcagcatctgtgactgggttgaagtcacggttcttggtctttatattaagttctcaccttcttgtgagaaaactcgtgctccattcacgtgggaagcttttcaagggattggcagtttcatgcggttggctgtaccttcggctcttatggtttgtcttgaatggtggtcatatgagctgcttgttctgctttctgggatgttaccaaatgcagcacttgaaacttctgtgctctctatatgtatctctacagtaatactggtgtacaatctcccatatggcatcggaacagctgcaagcgtgcgtgtgtcaaatgaactaggcgcggggaacccagatagtgcccgcttagtagtagttgtcgccttatccattataatcttcacggcagttctggtgagcgtaactcttctatcgttgcgccatttcatcggaattgctttcagcaatgaggaggaggttgtaaattatgtcaccagaatggtaccgttgctttcgatttcagttattactgacaacctccaaggagtcctttcaggtatttctagaggctgtggttggcagcatttaggcgcctatgttaacttgggcgcgttctatcttgttggcattcctgtggcgctcgttgccggttttgctttgcatctaggaggagctgggttctggattggtatgatagctggtggagccacacaggtcactctcctaacaatcattactgcaatgacaaactggcggaagatggctgacaaagctagagatagagtatatgagggaagtctgcctatacaagcaaattgattattacgaacttgaagtcatatccgattatctccaaatttcgctgcatcctagttgtttgttgaaagagctatccatgccacggacaccctaccccccacccaaaaaaaagttggcaatgaaagtcgtaaaagatgggctatttttatacctactttgaactaggtgatgatgagaaccgtcttatcttataggtgatgatgctgtgtctagcttatagcttaga

SEQ ID NO: 86218 - DNA, 2249 bp, Zea Mays
gaacgataaaagtaggaatcacattattttgcggtcccagaaatctatatctatctagccttctcctttcccttgcccagtttacttactacccacgcttggcgcgtgcatcggatcggatcccggccccgcgtcatcccttcctttccacggcccggtcgtcgactgtctcgcgctccactttccacggcgaatccattcttaaatgatctacactgctgcataaacccctgcggccgggtagtctcgaagactccacctaaaacggccaggccagacttggtcgtgccggcgtgcggcgtgcccccgagctagctgtggacctgggagccacgacggcgatcatgggctcttcttccggggcgccgctgctcgtcgctcacccgagccgggggaaggaggacctgggagatcagcgccgcctccgctggtgctgcggcgtttcgtcggaagggcggtgggcggaggcgacggcggaggccgggcggctggcggcgctggcggcgcccatgatcgccgtggcgctgctgcagctcatgatgcaggtcatctccaccatcatggtgggccacctcggcgaggtgcccctcgccggcgccgctatcgccggctcgctcaccaacgtctccggatttagcgtcctcatgggactggcatgcggattggaaactatttgtggacaggccttcggggcagaacagtatcataaggtagctttatatacctaccggtctatagtcgtactccttattgcgagtgtacccatggccattttatgggttttcctcccagacgtacttcctctcataggtcaggatccacaaatagcgattgaggccgggaggtatgccttgtggcttatccctggtttattcgccttcagtgtggctcaatgcctttcaaagttcctccaatctcagagcttgatttttcccctggttctgagctccttgactacactcgctgtcttcattcctttgtgctggttcatggtttacaaagttgggatgggtaatgctggagctgcttttgcagtcagcatctgtgactgggttgaagtcacggttcttggtctttatattaagttctcaccttcttgtgagaaaactcgtgctccattcacgtgggaagcttttcaagggattggcagtttcatgcggttggctgtaccttcggctcttatggtttgtcttgaatggtggtcatatgagctgcttgttctgctttctgggatgttaccaaatgcagcacttgaaacttctgtgctctctatatgtatctctacagtaatactggtgtacaatctcccatatggcatcggaacagctgcaagcgtgcgtgtgtcaaatgaactaggcgcggggaacccagatagtgcccgcttagtagtagttgtcgccttatccattataatcttcacggcagttctggtgagcgtaactcttctatcgttgcgccatttcatcggaattgctttcagcaatgaggaggaggttgtaaattatgtcaccagaatggtaccgttgctttcgatttcagttattactgacaacctccaaggagtcctttcaggtatttctagaggctgtggttggcagcatttaggcgcctatgttaacttgggcgcgttctatcttgttggcattcctgtggcgctcgttgccggttttgctttgcatctaggaggagctgggttctggattggtatgatagctggtggagccacacaggtcactctcctaacaatcattactgcaatgacaaactggcggaagatggctgacaaagctagagatagagtatatgagggaagtctgcctatacaagcaaattgattattacgaacttgaagtcatatccgattatctccaaatttcgctgcatcctagttgtttgttgaaagagctatccatgccacggacaccctaccccccacccaaaaaaaagttggcaatgaaagtcgtaaaagatgggctatttttatacctactttgaactaggtgatgatgagaaccgtcttatcttataggtgatgatgctgtgtctagcttatagcttagactatctctaggctcaagcaatttatttatcttcatctcattttaaactctattttgtaaacatataggacctgtttggttcagtcccagtagacctgtctggcctaggcagcgtcccaggccattgattttggacgcttgagggctacaatggaatggctgcatgcatatctgcctggtaggctgcaa

SEQ ID NO: 86219 - DNA, 108 bp, Zea Mays
ttgcaagttcacatctgaattatccaaagaaattcaattaaacgaactaaatctaatagttatagcaaacactttgataattgtgccaaaattggacatgtaggtata

SEQ ID NO: 86220 - DNA, 327 bp, Zea Mays
atggggaactgcggcaagcacaacaagcaaggctgcacgacgagcgtcggcacggcgtggaagctgcaggacgacgtcagccctcaccaacgaggtcggcggatggcaaagcgtggagttggaagacggtaccaggccggcgagctggaacgtgtgcgatggagcagcgacagatggtcggtcgagcgcgtgaggaagcagctcaaggcatggaagagcagcaacagcgcccaagccagcgtgagaagggagctcgcgtccaggctcagtatctgggacttgagcacagggtacaaggcgaaggcgagtgctatgcgctatgcgtga

SEQ ID NO: 86221 - DNA, 341 bp, Zea Mays
atggggaactgcggcaagcacaacaagcaaggctgcacgacgagcgtcggcacggcgtggaagctgcaggacgacgtcagccctcaccaacgaggtcggcggatggcaaagcgtggagttggaagacggtaccaggccggcgagctggaacgtgtgcgatggagcagcgacagatggtcggtcgagcgcgtgaggaagcagctcaaggcatggaagagcagcaacagcgcccaagccagcgtgagaagggagctcgcgtccaggctcagtatctgggacttgagcacagggtacaaggcgaaggcgagtgctatgcgctatgcgtgagagttcaattggag

SEQ ID NO: 86222 - DNA, 111 bp, Zea Mays
tgtttcccctcctcgttatgctagttttcaaaggaggtgctgccggatttttcttgctttatattctttctttattacatctcttgtgttgagtcagtttggtgggtgggg

SEQ ID NO: 86223 - DNA, 321 bp, Zea Mays
cgtattgttttttgtaagatgtaattatttttgtttcattcttttttgctttgtgtgtgtgtttcatggtgtgggggtgcttttagcggtgtgcagttttttgtgctccgtctttttttcctctaatttgctttttttttaaaccagaatattgatccacggattgttcagtagcaaaacccaaatattccaatttagctgatcgcgttgtcgttggatgttcggaggagcaatggcagagaccgagcatctttatttttttctcattctcaaaaagtgtaccaccaatttgcaatgactcctgaatcaaacaatgtcaag

SEQ ID NO: 86224 - DNA, 433 bp, Zea Mays
tcaattccgtagcatattagcatttttttatttgttcacggagacatgaacgagctccctcaatatgatgttggattgtttatttgttttctattctaaacttgtacgtgctaggctggttaggctcctcctctacttattttattttttgtgtattaataaattaatcgactattgtccaaatcccatgaactacagattcatccgccgacggattaatatatcaatcaatatattatatcaagtcttttatctttttttcttaatgactcacagatctcctgcttttgttctaaaaaaccacttcctttcttttctacttaataaagtttttgacttttcattgtctatgagatgcaactttatccattggtacaacttaatggaggcattcgaatgataactctaatgatatttttatatagtgaatcta

SEQ ID NO: 86225 - DNA, 284 bp, Zea Mays
tatttttcttacttttaatttaataaacctaatttagtagcaaggtttgccatcacatcatcagtctgaagtgctataacatttttacagatacatctgacatggtgttagaactcggaggaaatttcaaagaaacattaaggcaattgggtggccttgatgatatttttaatgtcatggtgaattgccattcagaactggagtatacttggagctgcaatctgatgaatattattttgagcaacatgaaaaacatgttgcaagacaaggatatgttgcagtaa

SEQ ID NO: 86226 - DNA, 1056 bp, Zea Mays
ccacgttcggacagaaaagaaattataggaaatatcggctgtaaaaaacggtttgcttattagggttccactacatcctttttttttacaggggcaactcggcagcaaggattggaagaaggaaaaccggccggcctagaagcaaacactgtcgtcgaagctccagagtcccacgctgtcgtcgcaaaacacggcgtcgccgcccaacaactggcagtccatcgtcacggcaggctcgtagcacaagccgccgtcgaagaagctgaacgggtcgccgaacatgaaagcgtccatcagcagcgtatcggcggaatcgtcggacggcgccagcgcaggcgccaccttcttctcccttccctgggcttcttcctggggctctgtccgggcgcgcttcgaggcgccgccgagttcgacgcacaagccgaccgcggacatgccctggcacgacctgtcgggcagggcgccgcctcctccgttctcgtcctcgtcctcgtcctcgtccacgcgcggcgccgccttggcaacggcggagcggcgcttggagttggacgggaagttgagcctggcggtggcgccgcggaggtcgcgcgcggcgtggtcgtaggcgcgcgccgcggcctcggcggtggcgaaggtgccgagccagacgcggacgccccggacggggtcgcgcacctcggccgcccacttgccccacggccggcgccgcacgccgtagtacgggctgctgggccgcctgcgccgggtcccggcgaacccgaacgccttcttcgtaatcgcgcccaccggctcttcctcggagtcctcgtcgaagtcacggaacgcggcctcgaagtcgtcgtcgtcgttggccgcagtccgacccttgccgccgctaccgtggcctggcgtgacgccgcgccgcgccggcgcgctgggtatgagctcggcgaggatcgcaccgccgcacatgttgctaaatgctagctcgctactcgctcgtcggaaggtcagctgtctagtagcgtgtacgtgcttaatttacttggattggagttggcggtgagtagtgtcgtg

SEQ ID NO: 86227 - DNA, 1998 bp, Zea Mays
ggattaagggcatctagcaaaatcctgatttgttttgctcattttttagtagcatgtatgccaaaccggatttgtcaacactgaattattccagatttttaaaaagtggtatatcgtcaacccaaacatggacacgcatgtgcctccgtcgagcaggcgagggtccgtcttcaacatggtctagaagatgcatcttctagtcgggttaggctgtcgatcaattatgaaattagtgtgttcatgacttttagaatggagggatgttcctttgttttacttcctgagaaggatgatttcattcagctcaccatcgatacagatatacatgagcagaaactccaaaaaaaaaacaggtcgtaatttacaaaactcaagacacaacaacagtcgccgaagcttaaaacgagaggttgtcctcgacgaggcagccgtcgtcgaagctccacagcggcatgtcctggtccgccgcggcggcggcgttgctctgcacggcgtcggcgctgaacaggctgtccagcgactcgtacgcgccggcgtcgaagaaggcgaactggtcgccgaagaggagcgagtcgaacagcgcgtccgactcggagtcggaggcccggggcgacgcctcgtccgcggcgctctccggccgcgcctcgaagtcgaaggccgggcgcggcgcggggggctcgtcgtaggccgccgacacgccctgccacgagaagtccgggagcgcgtcggatccggagcactcggcggcctcgtgcttcagggccgccgcggccgggcgctgctcttgttcctcgaggtcgatgacggcgtcggcgtcggcggtgcgggcgcgcttgcggctggcgggggccccggcggcggaggaggaggaggaggggaagttgagcttggccctgggcccgcggatgccgcgcgcggcgtggtcgtaggcgcgcgcggcggcctcggcggaggggaaggtgccgagccagacgcggacgcccttgacggggtcgcggatctcggcggcccacttgccccacgggcggcgccggacgcccctgtactgctgctggtcgggcgcccggcgccggctccgctgctcctggcgcgccctgggctgcgtcgccgcggacgaggcgcggacgacgaaggcgggcttgctctccaccaccccctcgtcctcctcctcctcctcggagtcctcgtcgaactcccggaacgcggcctcgaagtcgttcgccttccgccgcttgcacttgccggcgggccacgccgcgccgccgcggcgcgccggcgtggtcgggatgagctcggcgaggatcgcaccaccacacatctttgctctctgcctctctgtaacctgtactcgaactccttcttttcgcgtgtgtttggctgtttgcttgggaatggaggtctcgggacgacggggcgctcttaaataggggaagccaggaggagaaagcgctggggttgggcgaggaaagtgtgtgtgtgtgtgtgcctgtgtggtggtggtggactgatggcgtgggggctccaaaattcgcggggcgggcgggggaggctagagctgcgtgatcgtgaacgtgtcatgtcagcgtgtgaggggataaggctaccatgtcgccgcgggcacgggccaccttgtcgctattcggcggttggaactccgcaagaggtggtgcaatgcatgtgccccgccccaccttccattcagttgcgtctgcggccagccgctgtcgctctgttgagggcggaggacagacaggcagacagcgacggccgtgtagacccgggcgtccgggctggggacgcgccgcggacgtggctggtacgccgcggtttctgagcttttcggggatccgggacagcggtctactctgcggccatcgctgttgccgccgaacggacagaccgccagagcgcgtggccgccacgcgccggaacccttggagcgcgccgtgactcacgaggcggccacagccgatgccgcagagatggttgccagcgtcg

SEQ ID NO: 86228 - DNA, 2703 bp, Zea Mays
atcagtcggatttggaggagccgaataaataaccaaggatactgcgaagggactcctcccggccccaaaagcactttccttgcgtccccgtcagggagggagggagggaggggagcattgctgtgcgggatggcgaggaggaggatgaggaggggaggcggtggcggtggcggtggcggtggcggggtggtggatgtggtgcgggtgcggcggctgctgctgctgtccctgacctgctgcagcagcatttggccaggcggacggatcttcgctgctgcggacactgaccccaacgatcttaacgtcctcaacacgctcttcaccagtctgaattctcctgggcagctcacaggttggcaggcgaatgggggtgatccttgtggccagtcatggaagggcattacttgctcaggatcaggggtcactaaaatccaattaccaaacttgtcactcactggaaatttggcctacaacatgaataacttgggttcattagttgagcttgacatgagccaaaataaccttggcggtggaggtcaaatacagtacaatcttcccaatatgaagcttgagaaactcaatcttgcaggaaatcaatttggtggaaatttaccctactcaatttcgacgatgcctaatcttaagtatttaaaccttaatcataaccaactacaaggaaacatcagtgatgtattttccaacctttacagtttgtcagaactggatctgtcctttaattcccttactggtgatctaccacaaagtttcactggattgtcaagcctgaaaaaagtgtatttgcagaacaaccaatttactggtaatatcaatgtcttagccaatctcccccttgaaactttgaatgttgcgaacaaccatttcactggttggattcctagtcagcttaagaagataaacagtctacagactgatggaaattcttggagcacaggaccagcgccacctccacctccatacacagcgccgcctcctcctccaaaccattggaatgctgatggttcatcaagttcatcaagttctggtggaagatctgggataggtggtggaggtgtagcaggaatcattatatcgttgctggttgttggatcagttgttgcatttcttgtgatcaaaagaagaaaacgcaaagctgctatgaaagaacattttgaacagcaccagccattcacttccttcccttcaaatgaagttaaagacatgaagcctgtctacgaggccaccacagtagacatagagtctttggcttcacctgcttcagttaatctgaaaccacctccgaagatagaacgaaacaaatcatttgatgatgacgatgatttttcaaacaagcttgttgcaaagaaaagtaatataacacctataaatgcaactgtttattcagttgcagatctacagatggcaacagatagctttagcttcgacaaccttgttggagagggtacttttggacgtgtttacagggcacaattcaatgatggaaaggttctggcgatcaagaaattagatagtactgtgatgccatttcaatcatctgatgactttgctgaactggtctcgaacatttcaaaattgcaccatccgaatctgaatgagcttgtgggctattgcatggaacatggccagcacttgcttgtgtatgatttccacaggaatggatcacttcatgatctactccacctttcagatgagtacagcaagccacttagctggaacactcgtatcaagatcgcactcggctctgcccgtgcactggagtaccttcatgaaatatgttctccatccatcatccataagaatttcaagtcgtcaaacattttgctggactcagaattcaatccacacctttcagatgctggacttgcaagctttattcctgatgctgaattccaggcagcagaacaaagtgccggatacactgccccagaagtggacatgaccggtcagtacaccctcaagagtgatgtctacagctttggagttgtcatgcttgaactattgacaggacgtagaccatttgacagctctagacccaggtcagagcagtcacttgtgcggtgggcaacaccccagctgcatgacatcgacgcattggacaggatggtcgatcctgcactcaagggtctatacccagccaaatctctatcccgatttgctgatgtccttgccctgtgtgtccagcctgaaccagaattcaggccaccaatgtcagaggtggtgcaagcattggttcgacttgtgcagagggccaacatgacgaagaggatgcttgatggggatacttctcggcgaccagatgacctggaccaagatttcatatgacaagctgaactcttgtcagattgtatttatttcgttcgactagcggcccagcagagacataatcacacaagaggaagaaacagaactctgtcagcttcgccagtacataatcacaagtttttcttggtagcaaagttgtgctatatggttgtactgtgtctacaaaatagtaccttgatcttacgctaatggcatattgttataattctttggtaacttatatgcaaatgccccagataaacaaaactatggtgaagtgtgccgaatgttaaaataactgattagtccagtactgctgcatcaactgaaacaagttgcacagtggaaatatttatcttggtccctcaactatccccttgaggc

SEQ ID NO: 86229 - DNA, 1216 bp, Zea Mays
gccctttttacttttgacataacttgctattcatatatgagctggtagcatctttgcgtattatatttttagataataaaaccaaacataggcttctgtttgggcatattttctgctcttttctacttctgtgaatatgcactgaccattgtcaaaatattacactgagtgattgaagaatatgcttcaatgattattgagcttgttcattacttgatatatactataacatttttccttatgaaatgtgtagttccttataactttgaactaaaatataactcgtaggtaccttcatgaaatatgttctccatccatcatccataagaatttcaagtcgtcaaacattttgctggactcagaattcaatccacacctttcagatgctggacttgcaagctttattcctgatgctgaattccaggcagcagaacaaagtgccggatacactgccccagaagtggacatgaccggtcagtacaccctcaagagtgatgtctacagctttggagttgtcatgcttgaactattgacaggacgtagaccatttgacagctctagacccaggtcagagcagtcacttgtgcggtgggcaacaccccagctgcatgacatcgacgcattggacaggatggtcgatcctgcactcaagggtctatacccagccaaatctctatcccgatttgctgatgtccttgccctgtgtgtccagcctgaaccagaattcaggccaccaatgtcagaggtggtgcaagcattggttcgacttgtgcagagggccaacatgacgaagaggatgcttgatggggatacttctcggcgaccagatgacctggaccaagatttcatatgacaagctgaactcttgtcagattgtatttatttcgttcgactagcggcccagcagagacataatcacacaagaggaagaaacagaactctgtcagcttcgccagtacataatcacaagtttttcttggtagcaaagttgtgctatatggttgtactgtgtctacaaaatagtaccttgatcttacgctaatggcatattgttataattctttggtaacttatatgcaaatgccccagataaacaaaactatggtgaagtgtgccgaatgttaaaataactgattagtccagtactgctgcatcaactgaaacaagttgcacagtggaaatatttatcttggtccctcaactatccccttgaggc

SEQ ID NO: 86230 - DNA, 534 bp, Zea Mays
atgcccccatggccccacaccgacgcagagctcgcccatgccaccgtgcacgtgccccggcggcgtcgcgatgcccgtgtatccccgccgtcgcgcgcctacgtcagcatgtacctggagcagaagcgatttcgacagcattgccgaggagctcaccgctgtgaaagtgtgttagtcccgtcccctccaggtcctgactctacaattcacttgtgtattcccccgaagcattacgagacagtctgcacggctcctatcaaggattgtgaattactaaaccttggcgataggccacagaaactaattgtgacagtgccacctatttctatacggccttctgttgttgttggtaatagtagaacaaggagcttgaagtatggtgatagaaggactactgctcagtatttaaagtgtggatgtatagttgaaaaacatttagaagatggagacgttgtcctctttaatagacaaccgagcttgcttttgtacttgaacacatgcaagtataatgccatggagaacactcagatttga

SEQ ID NO: 86231 - DNA, 849 bp, Zea Mays
acaaatgcggaggtctccactcttctctcttcctccatcttatcatcgcccacgtacacacccaattcctcgcaactgggctcccccgcctccacgacactgccccccgcctcaagtccgccgcctccattcttcagctctcctatcctccgtagtctgcctgtacctattggctgaagcagagctgacccccactttatcaagagttgctcaacaatggacactggctgcctgtcatctatgaatattactggagctagccagacaagatcttttgcggggcaacttcctcctcagagatgttttgcgagtagtcactatacaagctttgccgtgaaaaaacttgtctcaaggaataaaggaaggagatcacaccgtagacatcctgccttgcaggttgtctgcaaggattttccaagacctccactagaaagcacaataaactatttggaagctggacagctctcttcattttttagaaacagcgaacgccccagtaagccgttgcaggtcgtggttgctggtgcaggattggctggtctatcaacagcgaagtatctggcagatgctggacataaacccatattgcttgaggcaagagatgttttgggtggaaaggtagctgcttggaaggatgaagatggagattggtacgagactgggcttcatatcttttgtaagttacagttctggtccttgaggtcctcttcatcatatttcatgttcttgattatttcttttagaaaaattacagttaaaatgatggtttctacacatattaacaaactgttcagacacaccatcacacaaacttctaaggcactctttccttgtatcatgcctttattt

SEQ ID NO: 86232 - DNA, 2154 bp, Zea Mays
acaaatgcggaggtctccactcttctctcttcctccatcttatcatcgcccacgtacacacccaattcctcgcaactgggctcccccgcctccacgacactgccccccgcctcaagtccgccgcctccattcttcagctctcctatcctccgtagtctgcctgtacctattggctgaagcagagctgacccccactttatcaagagttgctcaacaatggacactggctgcctgtcatctatgaatattactggagctagccagacaagatcttttgcggggcaacttcctcctcagagatgttttgcgagtagtcactatacaagctttgccgtgaaaaaacttgtctcaaggaataaaggaaggagatcacaccgtagacatcctgccttgcaggttgtctgcaaggattttccaagacctccactagaaagcacaataaactatttggaagctggacagctctcttcattttttagaaacagcgaacgccccagtaagccgttgcaggtcgtggttgctggtgcaggattggctggtctatcaacagcgaagtatctggcagatgctggacataaacccatattgcttgaggcaagagatgttttgggtggaaaggtagctgcttggaaggatgaagatggagattggtacgagactgggcttcatatcttttttggagcttatcccaacatacagaatctgtttggcgagcttaggattgaggatcgtttacagtggaaagaacactctatgatattcgccatgccaaacaagccaggagaattcagccggtttgatttcccagaaactttgccagcacctataaatgggatatgggccatattgagaaacaatgaaatgcttacctggcccgagaaggtgaagtttgcaatcggacttctgccagcaatggttggtggtcaaccttatgttgaagctcaagatggcttaaccgtttcagaatggatgaaaaagcagggtgttcctgatcgggtgaacgatgaggtttttattgcaatgtccaaggcactcaatttcataaatcctgatgagctatctatgcagtgcattttgattgctttgaaccgatttcttcaggagaagcatggttctaaaatggcattcttggatggtaatccgcctgaaaggctatgcatgcctattgttgatcacattcggtctaggggtggagaggtccgcctgaattctcgtattaaaaagatagagctgaatcctgatggaactgtaaaacacttcgcacttagtgatggaactcagataactggagatgcttatgtttgtgcaacaccagtcgatatcttcaagcttcttgtacctcaagagtggagtgaaattacttatttcaagaaactggagaagttggtgggagttcctgttatcaatgttcatatatggtttgacagaaaactgaacaacacatatgaccaccttcttttcagcaggagttcacttttaagtgtctatgcagacatgtcagtaacctgcaaggaatactatgacccaaaccgttcaatgctggagttggtctttgctcctgcagacgaatggattggtcgaagtgacactgaaatcatcgatgcaactatggaagagctagccaagttatttcctgatgaaattgctgctgatcagagtaaagcaaagattcttaagtatcatattgtgaagacaccgagatcggtttacaaaactgtcccaaactgtgagccttgccggcctctccaaaggtcacctatcgaaggtttctatctagctggtgattacacaaagcagaaatacctggcttccatggaaggtgcagtcctatccgggaagctttgcgcccagtccattgtgcaggattatagcaggctcacactcaggagccagaaaagcctacaatcaggagaagttcccgtcccatcttagttgtagttggctttagctatcgtcatccccactgggtgctatcttatctcctatttcaatgggaacccacccaatggtcatgttggagacaacacctgttatggtcctttgaccatctcgtggtgactgtagttgatgtcatattcggatatatatgtaaaaggatctgcatagcaattgttagacctttgggaaagcaaaagcgataaagagatctcagat

SEQ ID NO: 86233 - DNA, 1920 bp, Zea Mays
ctactactatcatcgccgtccttgtgtttcatttttaatgaccattctctcatctgctgctggctgcggctatatacccccctctctctgtctctctatctcctcctgttcttagacgtttctccagagcctgaagccaaatctagggggcttgcttcatctgctgtccgagcgtggtttggtttctcggggctggcgcggtcaagagctcacctgagttccaccgaaatctgccacggtagttcttgcctaggtgtgtcgttgcgttgtgacccttgcggattttcttgtttcttttgagttgcgatctttgcaggttagtctcccccccaatccgtagtcatccggcgtctaggaaattgcagtccagtttgcttatttgttcgtctagtgccttctccccatcctggttagaaagaatatcggaaggggggatttttttttttttgcctgttcgtagaggaagcagtgaagacataattgttgcatctgataaagctcgggcgaaatacaagcaaatccttggaattttgcatccctttgctggctcttttctgattcagagaacccaatgggggatgtgtccttgaatggacccgttaaggccgagccaactgccggtggcattgccaagggaaaccgagttctggacacgatgtccgccgggtggacggacgagagacacatgctgtatataagctccatggaggcttctttcgtcgaccagctatacaaccatggaaaccatccgcaggacgcaaatggtgctggcttcaaggttctccgcaggggggtgtgggagtacatcgagtatgagaagaccagtgcccctgtgcgaagtggggctaaatgctgcgtccctgcaaatccttggatccggcatttcaggccacgtgactgcggtagtaacgcacagagtgacgcggtcgaggcctcagtgggcgaccatgagtcgggtactcaggcaagccgcaagagcccttcagtgtctcatggaagggaacggggagcttgtaagggagaaccccagattctacatgaaagtacaggtgactgaacatctttacttagtatctgaacactgttttttttttagtttttactaagcatcgtcacagcccagctacaaagtgtcctaattagttatgcagctagttcttaaaaatcaatgcagttgatccttgatttttttccatggcacgtactgagattgcataaacttcactcatgcatttagcagcagtaacatatctgtagaagagacatgaataacaggacagctcaattactccaataacctgtttgcttttattctgatttctgaactcaacgagcactgctcagcagtagcatcgtgctgttaacttgtttctaatacccaattctgtgtcttccctccctctccagaggtctctgatcaaaattttgctgacgatgaggctgaagctgaaacagaatcaatgaaagcatgcaagaaaaggagactaagcagggctttgcactccggtgctgaatgatcaagtaaattcgcaggaacaattagcttagcctgttgcaagaatcgatatgatttatcctaaaagaaggtgttaagatgatgggacatggctttcaaaactttcagctgttgcctgctggtagccaagacacactgaatccgaaggaaggcgttgaagggtagctgttagtgattttgtgatataaagagtactggggcagttagcatcggcatttttagcggatttaagttcttgttatgtatatctgtcttctgtcttcatcagtagtgctgcttagtacctcactctctcgtcagcaggatatttctatatattgtctgtacttggtagatatatgtattggttgatcctatgagtgtaatgtttttttttgctgcagcttttgggggcagttggtatt

SEQ ID NO: 86234 - DNA, 1563 bp, Zea Mays
ctactactatcatcgccgtccttgtgtttcatttttaatgaccattctctcatctgctgctggctgcggctatatacccccctctctctgtctctctatctcctcctgttcttagacgtttctccagagcctgaagccaaatctagggggcttgcttcatctgctgtccgagcgtggtttggtttctcggggctggcgcggtcaagagctcacctgagttccaccgaaatctgccacggtagttcttgcctaggtgtgtcgttgcgttgtgacccttgcggattttcttgtttcttttgagttgcgatctttgcaggttagtctcccccccaatccgtagtcatccggcgtctaggaaattgcagtccagtttgcttatttgttcgtctagtgccttctccccatcctggttagaaagaatatcggaaggggggatttttttttttttgcctgttcgtagaggaagcagtgaagacataattgttgcatctgataaagctcgggcgaaatacaagcaaatccttggaattttgcatccctttgctggctcttttctgattcagagaacccaatgggggatgtgtccttgaatggacccgttaaggccgagccaactgccggtggcattgccaagggaaaccgagttctggacacgatgtccgccgggtggacggacgagagacacatgctgtatataagctccatggaggcttctttcgtcgaccagctatacaaccatggaaaccatccgcaggacgcaaatggtgctggcttcaaggttctccgcaggggggtgtgggagtacatcgagtatgagaagaccagtgcccctgtgcgaagtggggctaaatgctgcgtccctgcaaatccttggatccggcatttcaggccacgtgactgcggtagtaacgcacagagtgacgcggtcgaggcctcagtgggcgaccatgagtcgggtactcaggcaagccgcaagagcccttcagtgtctcatggaagggaacggggagcttgtaagggagaaccccagattctacatgaaagtacagaggtctctgatcaaaattttgctgacgatgaggctgaagctgaaacagaatcaatgaaagcatgcaagaaaaggagactaagcagggctttgcactccggtgctgaatgatcaagtaaattcgcaggaacaattagcttagcctgttgcaagaatcgatatgatttatcctaaaagaaggtgttaagatgatgggacatggctttcaaaactttcagctgttgcctgctggtagccaagacacactgaatccgaaggaaggcgttgaagggtagctgttagtgattttgtgatataaagagtactggggcagttagcatcggcatttttagcggatttaagttcttgttatgtatatctgtcttctgtcttcatcagtagtgctgcttagtacctcactctctcgtcagcaggatatttctatatattgtctgtacttggtagatatatgtattggttgatcctatgagtgtaatgtttttttttgctgcagcttttgggggcagttggtatta

SEQ ID NO: 86235 - DNA, 5952 bp, Zea Mays
atggccatccaccgcagcaatctctctagacgcttcaagatctcaaggatctggcatcaatcggagcaatatcgcgccaaatccttcgcctcctcatctccaacgagcgagactacacccctcaaggtcctaaccgggctcctgcgcgacgcctattcgctgaaatgcctcagggagttgcacgcgcatctcgccgtcgcgggtgcgatccaggacacattcgtcgtcacaggtcttgtcgaaaggtatgtttattttgggaaggccgcgtctgcggcgttgctatttgccgaaacctaccgcagccgccccgctgtgtactcactgaatctcgcggtccggtgcttctcggaccatggcttccaccgggagcttcttcatctttaccgggagctatgttgctttggctcggacaacttcaccttccctccggtcatcagggcgtgcacagctgtctcttgccttcggctggggagggagatgcactgcagggttcttcgtacaggtcatggtggcaatgttggcgtgcagactgcgctccttgacctgtatgctaaggctggccagattgatgtgtcaaggagagtctttgactgcatggtgctgagggacttgatttcttggaatgctatggtctcagggtactcactcaatgaatgcttccgagaagctgttgagatgttgcaggagatgcagcagggtggcatgaggccgaatgcaagcacttttgttggcatagttggcatgtgcggaagtgtcggagacagggatgttggtgattcgctgcatgcatttgcactgaaaggtggagtgattaatgacgaatctcttacatccgcattaatcacaatgtatgctgcatttgatgatctttcctcatctcgaatggtattcgatctgcatcctgtgaaagatttggtatctttcaattccatgatatcagcatacatgcagcaccacatttggaaggaagcttttgagatctttcgattgatgcattgtgtagctgtacggcctaacctggtcacagtggtgtctgtccttccttcttgcagtgatttctttggtataaaccatggggagtctgtgcacggcatgattatcaaacttggccttgcagagcacgtttctgttgctagcgctcttgtgtccatgtattcgaagcttgggaaattggactcatcgttgctccttttctgctgttgtgttgctccagatgctacaactatcatgaatgtaatatctggatgtagatacacaaaagatttacacatggcaaagtcaatacatgcatatgctgttagaaataaatttgaatcatatcatagcgttatgaatgcactcctagccatgtacgcagactgcagagatatatcaacatcccatacattattccagaaaatggaagtgcggatgttgatatcttggaacactatgatatctggttttgctgaaattggagattcagatacttgtctaatattattctgccagatgttccacgaagaagtgcaatttgatctagttactctgattggtcttatcagtagcttttcagtacccggggatgccatagttggagaatcagttcattctttagcaatcaaaagtggatgtaattcagatgtttctcttactaatgccctcattaccatgtacgccaactgtggtattgttgaagcaggtcagcaactttttgacagttgctgttctaggaatacaattacttacaatgctttgatgagtggatatcgcaaaaacaacatatctgcgaagatattgccattgttttaccaaatggtcgagaatgacgagaaaccgaaccttgtaaccttactgaatttattgcctgtttgtcagagccagttgcaggggaagtgtatacacagctatgcagtacgtaatttcaccaggttggaaacacccctcttcacatcagccatgggtatgtatagtaggttcaataatatagaatactgcagcaaaattttcagtttgatcggtgcaagaaaccttatagtatggaatgccttcttatctgcatgtgttcaatgcaagcaagctgatatggtagttgattgctttaagcatatgctcttccttaatgtcagacctgatgcagtaactatgctggcactcatctcagcatgttcacaacttggaaatgcatattttgctgcatgtattatggctgtcatacttcagaagggctttagcacgaatattttggttcttaatgctcttattgacacacattcgaggtgcggaagcatatcacttgcaagggagctctttgatagctcagtggagaaagattcagtcacttggggtgcaatgatcaacgcatacagtatgcatgggaatggtgaggctgcccttgatcttttctcaatgatgatagattcaggagtggatccagatgatataacttttgttagtatattatcggcctgcgctcataatggactcgtagagcaaggaagaacattgttcaaatcgctacaggcagactatggcattacaccgcgaatggagcattatgcatgtatggtggatctattgggccgaactggccacttggatgaagcatatgatgttgttaggtcaatgccattcaggccatcagataacttgcttgaatcattgcttggagcatgcagattccatggtaattataaaattggcgagtctataggaaaattactcatcaaatctgagtatggcaagtcaaggtcttatgttatgctctcgaacatatatgcttcagctggcaaatggagtgattgcgagcagctaagattagacatggaagcaaaaggattgcggaaaaatgtgggggacaggcctgacgtagtggcgaaaagcctttccactgagccaaaagttagtatcaaatttgttgagctgtggcttgagaagatgccagacaagaagatcgaaggggctgattcatctcacattgtctcttcaacaaaatctttggaaagttcagtagggcctaatctaattgaaagtactgatggagattattgtaataaccttcacaagacagcagttgccaattttgtggcatcaatgctgcaagaacatcctatgagccttatattggctgagaacaaaagcaatttgcaagaaatttcagttgaacagaagattcctatctttgtttctatcaacctttcaccaaaagtggatggcagtgaattgccatgccccattgaagttcatgatggtattacatcttcctctagcaaaactaacgaaccaatggaagcccaagattattcgaacacaatgaaatcaaacacagctagttgcatgttcgaggcatcaaagcggcaagaatgccctataagcctcatattggcagacaagaaaggcagtttgcaagaagtttcagttgaacaaaatgttccttgtggtgattatgttgccctttcacaaaaagcagacggtagtgaattgacatcaacccgtgaagctcctgaaggctttctaacttcctctagcaaagtttatgtattaaaggaagcccaagatggttctatcacaacggaagcttctaaagtaaatgtttgtgcagcttcacactccatgcttaggttaattgaaggagtccaggatgaggcttcttgtattgattctgataaggttacttgtgaaacaccacctgccatcctgaaaaagttgaaagaagataagccactggtcgtccatagatttcataagcaccaaatgagcctaggagacacacatcaaaaggtgcctgcacctgtgagcagatcaaacaccagcaaatacttaagaatggataaaaacattgttgatactacgactcccattgaatcagtaaaggctgttgcatcaaaatttggtggcagcatgaactggaaaactcgcaagacacagacagcacaggtgagtgaccgtatcgtacttgagcttgataagctgaagaacgaaatttcagaatgtaaacatcaagcagaagctgcagaggctgcaaagttatcagtattaaaagagctggagagaacaaagaagcttatcgacgaaatgaaacacgtcctggagagggaacaagctgaggaggtggatgccaaggatgacttggagttatttcaaattatattacaagcgatggagggagttgactgtaatgatagtgttgtggttagagagaagctgaataatattcaagaacgacacaaagcattggatgccaaagtgatttcagtgaaatatgtgttgggaaaagtgcaggaggattatgattctttgttgatcggaactgatatttccattaacaaagctcaggcagccttcacaatgtccaaaggtgcagagaaagaagtagaggagctcaccatagagctccaaagactaaaggaagtgtttgatttggctaacgccaaattccaggacgtggaagaacgcaagaacacgttgatggcacgtgatgaggatcgtcttgcatgggaagaggatctcaggcaatcagacaaagagctgaatcagatcagcatggacctttgttcttttcaagaattgcaatcaaagcatgatacgtcagccaccatgttgctcaatctgaagaatgaggtagccaattatttggaggcaaagcgaatcgaggaagcacgagaacaagaaagtggaactcataaacccgtgcaagaagtcatcattatgttaaagagcgagctcgtggagcagaggaagagcatagcgagggtgacggatgaattatgtgttctgaaagccacagctgaattgctaaaatcgcaattgaagaaagagaaagcagcacttgctgccgctcagcagatggaagtgatggcatccatgtccactcagtctctcaagatggacatcaaactgtcacagcaggaacttgaagcacttcatgccaaggcaaaggagtgccgagatagatcgggcaaggctctgcaagatgcgtcccatgaagctgacgaggcgaaggttattgctaccaaggctcagggggagctaaaaaagacagaggaagaagtggcgcaagcgaaggctgctctgagcactgtggaatccaagctcgaagcagttctgagggacatacaggcagcgaaagcgtccgagaggctggcgctcgatactctgacgacgacgacactggaggagcacagcaaggtcggcgctcgatactctgagacggtcacgcttgacctggatgagtacacgtctctggttcagaggtcacgtcaggcagaagaggctgcgcacgagaagacaacagctgcttccaccgcagaggttgaggcggcaaaggagtccgcggcgcgcaccatatccagactgaacgagatcttgcaggccttggaagagcagaagcaggcactggcagccgccaccgagcgggcgggcagggcgagcgaaggcaagctggccatggagcaggagctgaggcaacggagagaggaggagaacgggaagcgccgccgcatggccagtgaagctccaaagcctgtaaccgggcctcggagcgctgcagagatcgcgggtagagtcgacatgacgttgacgtgcacgggcaaaggagatagtagctgtcccgccgcgtcggtccatccggtgtcggacgcgtccgggaccgggaccgggaggagcagccccagcgatgcggccctgccagtgccagtgccagcgaagacgaagaaggcaaagaagctgccgttcttcactcgcgtcgtcatgttcctggggggcaggaggaggaggaggctcagagctgccaggtgattttccgtttccttgtgttccttatctgtgtgcccgtgtcgcgtgtggtgtttgtcagtgctgggagcgtgtaaacttcactggtttttactcgattgcacgttgttcgtgctggatgtgttcgaagattgtgtgagattgcatggggtgttcggtttgctggacaagacaaga

SEQ ID NO: 86236 - DNA, 2018 bp, Zea Mays
ttagccagctcgaccgacgagacgacaacgccgccgtgccgcgcgcacgcccgacgccgacgacacgccctccgctcggccccggtgaggcagcgaacgcccgccacacgtacagataccgtgcgcgcccggcatgggggtgaccaccgccggggaggccgtctgtaagtccccggcgcgggcctcggtcatcgtgaggctcaacgccgcgttcctcgccttcttcctcttcgcctacgtggcgctcctcctccaccccaagtactcgggcctcctcgaccgcggcgccacctccctcgtccgctgcaccttccgcgactcctgcccgccgccgtcgccgtcgaaccagcagctctcacggaaggtaagctgggaggcgtggcggcgaacaaggtggcggaggaggagcgcatcgtgaacgcggggcgcgcggcggccatgttcgacgagctccggggccggctgcggatggggctggtgaacatcgggcgcgacgagctgctggcgctgggcgtggagggcgacgcggtgcgcgtggacttcgagcgcgtgtcggacgcgttccggtggtcggacctgttcccggagtggatcgacgaggaggaggacgacgagggcccgtcctgcccggagctgcccatgccggactgggcccggtacggcggcgacgtggacgtggtggtggcgtcgctgccgtgcaaccgcagcgcgcccgggtggaaccgcgacgtgttcaggctgcaggtgcacctggtggcggcgcaggtggcggcgcgcaagggccggcgcgacggcgccggggcggtgcgcgtggtgctgcggagccagtgcgagcccatgatggacctgttccgctgcgacgaggaggtggggcgggagggggactggtacatgtacaaggtcgacgtgccgcgcctggaggagaagctccgcctgcccgtgggatcgtgcaacctcgctatgccgctgtggggatcaggagggatccatgaggtgttgaacgcgacgtcgtggtcgggcgggcgtcgtccccggcgcgaggcgtacgcgacggttctgcactcgtcggacacgtacctgtgcggcgcgatcgtgctggcgcagagcatccggcgcgcggggtcgacccgcgacctggtcctcctgcacgaccacacggtgtcgaggccggcgctgcgcgcgctgtcggcggccgggtggacgccccggcggatcaagcgcatccgcaacccgcgcgcggcgcggggcacctacaacgagtacaactacagcaagttccggctgtggcagctggccgactacgaccgcgtggtgttcgtggacgccgacatcctggtgctgcgcgacctggacgcgctgttcgcgttcccgcagctggcggcggtgggcaacgacggctcgctcttcaactcgggcgtgatggtgatcgaaccgtcggcgtgcacgttcgacgcgctcatgcgggggcgccggaccgtccgctcgtacaacggcggcgaccaggggttcctcaacgaggtgttcgtgtggtggcaccgcctgccgcgccgggtcaactacctcaagaacttctgggccaacaccacgggggagcgcgcgctcaaggagaggctgttccgggcggacccgcccgaggtctggtccgtccactacctggggatgaagccatggacgtgctacagggactacgactgcaactggaacgtggcggaccagagggtgtacgccagcgacgaggcgcacgcgcgctggtggcaggtgtacgaccagatgggggaccacatgcgcgggccctgccgcctctccgagcggaggaaggtggagatcgcatgggacaggcacgtcgccgaggagctcgggtacaccgaccagcactggaagatcaacatcacggacccgcggaaatgggactgatccacgactactccgtccgtcgcctgctgcattttcgtacataataccccacacgtagctggtcgagagccagatcgctaggcgcgcagcattttggttcgtgg

SEQ ID NO: 86237 - DNA, 2315 bp, Zea Mays
ttagccagctcgaccgacgagacgacaacgccgccgtgccgcgcgcacgcccgacgccgacgacacgccctccgctcggccccggtgaggcagcgaacgcccgccacacgtacagataccgtgcgcgcccggcatgggggtgaccaccgccggggaggccgtctgtaagtccccggcgcgggcctcggtcatcgtgaggctcaacgccgcgttcctcgccttcttcctcttcgcctacgtggcgctcctcctccaccccaagtactcgggcctcctcgaccgcggcgccacctccctcgtccgctgcaccttccgcgactcctgcccgccgccgtcgccgtcgaaccagcagctctcacggaagctgggaggcgtggcggcgaacaaggtggcggaggaggagcgcatcgtgaacgcggggcgcgcggcggccatgttcgacgagctccggggccggctgcggatggggctggtgaacatcgggcgcgacgagctgctggcgctgggcgtggagggcgacgcggtgcgcgtggacttcgagcgcgtgtcggacgcgttccggtggtcggacctgttcccggagtggatcgacgaggaggaggacgacgagggcccgtcctgcccggagctgcccatgccggactgggcccggtacggcggcgacgtggacgtggtggtggcgtcgctgccgtgcaaccgcagcgcgcccgggtggaaccgcgacgtgttcaggctgcaggtgcacctggtggcggcgcaggtggcggcgcgcaagggccggcgcgacggcgccggggcggtgcgcgtggtgctgcggagccagtgcgagcccatgatggacctgttccgctgcgacgaggaggtggggcgggagggggactggtacatgtacaaggtcgacgtgccgcgcctggaggagaagctccgcctgcccgtgggatcgtgcaacctcgctatgccgctgtggggatcaggaggtcgagggatccatgaggtgttgaacgcgacgtcgtggtcgggcgggcgtcgtccccggcgcgaggcgtacgcgacggttctgcactcgtcggacacgtacctgtgcggcgcgatcgtgctggcgcagagcatccggcgcgcggggtcgacccgcgacctggtcctcctgcacgaccacacggtgtcgaggccggcgctgcgcgcgctgtcggcggccgggtggacgccccggcggatcaagcgcatccgcaacccgcgcgcggcgcggggcacctacaacgagtacaactacagcaagttccggctgtggcagctggccgactacgaccgcgtggtgttcgtggacgccgacatcctggtgctgcgcgacctggacgcgctgttcgcgttcccgcagctggcggcggtgggcaacgacggctcgctcttcaactcgggcgtgatggtgatcgaaccgtcggcgtgcacgttcgacgcgctcatgcgggggcgccggaccgtccgctcgtacaacggcggcgaccaggggttcctcaacgaggtgttcgtgtggtggcaccgcctgccgcgccgggtcaactacctcaagaacttctgggccaacaccacgggggagcgcgcgctcaaggagaggctgttccgggcggacccgcccgaggtctggtccgtccactacctggggatgaagccatggacgtgctacagggactacgactgcaactggaacgtggcggaccagagggtgtacgccagcgacgaggcgcacgcgcgctggtggcaggtgtacgaccagatgggggaccacatgcgcgggccctgccgcctctccgagcggaggaaggtggagatcgcatgggacaggcacgtcgccgaggagctcgggtacaccgaccagcactggaagatcaacatcacggacccgcggaaatgggactgatccacgactactccgtccgtcgcctgctgcattttcgtacataataccccacacgtagctggtcgagagccagatcgctaggcgcgcagcattttggttcgtgggtacatttaggccagctcagtttcataagtggagctgttgttccgaggtttttagcttcacgtacgaacagcttttccgatgaagctgaggggttttcgtgatcttatttggcaaatcagctttgcattggacaataaacaaataaaatgaccgtaatgctctctgcttttgtttccttctattttttttccctcgtctccttttcacgggagaggattttcgctttgctcattttttttctgtagaatcccgatggcacgggcgcacggcattgccagtaccagacctgcctaag

SEQ ID NO: 86238 - DNA, 1326 bp, Zea Mays
cgacagacatgggcctacccaacaaagaatttaccagcccagcagcagtcactctcggcccaagcctttttttggatggccgcgtatatcacggcccaaagatttcgttagtcggatcggatcagcggctgctgcgcttcagttgccgccggcggcatgagggtggtggtgacgggcgcgacggggtacctgggaggccgcctgtgcgcggcgctggccggcgcgggccacgccgtgcgcgcgctcgtccgccactccagcgacgtctccggcctgccccgcgacatcgagatgacctacggcgacgtcaccgacgccgagtccctcgccgtggccttcgacggctgcgacgtcgtgttccacgtcgccgcggccgttgagccgtggttgcccgacccctccgttttcttcaaagttaatgtaggtggacttgagaatgtgttgaaggctgtcaagagaacaccaactgtgaagaagataatctacacatcttctttctttgcaattggtccaactgatggttatgttgcagatgagacacagatgcatcgagggaaggaattttgtactgaatatgagaaatcgaagtttcttgcagatagaatcgcactgcaggcagcagcagataaggtgccaatcaccattgtctacccaggtgttctctacggccctggaaaacttacgactggaaatcttgtctcacgcattctaatagagaggtttaatgggcgcttgcctggttacataggagatgggtatgatagagaatcgttctgccatgttgatgatgttgttaacgggcacatagcagctatggagaagggcagagtgggccaacggtatctcctcactggtgaaaacatgtcgttcgtgctgatttttaacatggttgctaatatcacaaacacaagggctcccatgttccacgtacctctctggttgattgaagcgtatgggtggatttcagtttttgtttctcgcatcactggaaaactcccacttatcagttaccctactgtgcgtgttctgagacatcagtgggcatactcgtgtgacaaagcaaagatggagctgggctataccccaagaaacttgaccgaaggtttgtcggagatgctcctgtggctcaaggaagaaaaactaatcaagttttagcgttctctactacacaccacatcacatatttaatgtacaccgatacattggggatgtgctggggattttgaagtgtatatgcttcggcattgcatcacgtcgtattatgctagaggaaatctaagatgttgacgtgtgatactgatgttggcaacaaagagagaaattatg

SEQ ID NO: 86239 - DNA, 1540 bp, Zea Mays
ttttttggatggccgcgtatatcacggcccaaagatttcgttagtcggcgtggtttctgtgggtgggttgaggtcttgaggagttgactacacagatcgttcttcacggctttggttaggcagcaaatccgaatccagtttaaataaggagacaggctgtgtagtgtagtctagtgctaccaggatcggatcagcggctgctgcgcttcagttgccgccggcggcatgagggtggtggtgacgggcgcgacggggtacctgggaggccgcctgtgcgcggcgctggccggcgcgggccacgccgtgcgcgcgctcgtccgccactccagcgacgtctccggcctgccccgcgacatcgagatgacctacggcgacgtcaccgacgccgagtccctcgccgtggccttcgacggctgcgacgtcgtgttccacgtcgccgcggccgttgagccgtggttgcccgacccctccgttttcttcaaagttaatgtaggtggacttgagaatgtgttgaaggctgtcaagagaacaccaactgtgaagaagataatctacacatcttctttctttgcaattggtccaactgatggttatgttgcagatgagacacagatgcatcgagggaaggaattttgtactgaatatgagaaatcgaagtttcttgcagatagaatcgcactgcaggcagcagcagataaggtgccaatcaccattgtctacccaggtgttctctacggccctggaaaacttacgactggaaatcttgtctcacgcattctaatagagaggtttaatgggcgcttgcctggttacataggagatgggtatgatagagaatcgttctgccatgttgatgatgttgttaacgggcacatagcagctatggagaagggcagagtgggccaacggtatctcctcactggtgaaaacatgtcgttcgtgctgatttttaacatggttgctaatatcacaaacacaagggctcccatgttccacgtacctctctggttgattgaagcgtatgggtggatttcagtttttgtttctcgcatcactggaaaactcccacttatcagttaccctactgtgcgtgttctgagacatcagtgggcatactcgtgtgacaaagcaaagatggagctgggctataccccaagaaacttgaccgaaggtttgtcggagatgctcctgtggctcaaggaagaaaaactaatcaagttttagcgttctctactacacaccacatcacatatttaatgtacaccgatacattggggatgtgctggggattttgaagtgtatatgcttcggcattgcatcacgtcgtattatgctagaggaaatctaagatgttgacgtgtgatactgatgttggcaacaaagagagaaattatgcattatttttacatcaatgtatttagttcgaggctttgcaggctgtaattgtataactagttgcttgaattgaaacataggtaattcaaatttcaaaggcgtgcccaagacaatcaaactattctgctgggcgtttgcgatgcat

SEQ ID NO: 86240 - DNA, 1542 bp, Zea Mays
gggtgggttgaggtcttgaggagttgactacacagatcgttcttcacggctttggttaggcagcaaatccgaatccagtttaaataaggtgaataatctccccccaaatccctaaacatcctcctctcgctctcaggcgcatcattcttctcgcctcgtgtcgctgacttccccaagctttgctgggttgccttcgagcaggagacaggctgtgtagtgtagtctagtgctaccaggatcggatcagcggctgctgcgcttcagttgccgccggcggcatgagggtggtggtgacgggcgcgacggggtacctgggaggccgcctgtgcgcggcgctggccggcgcgggccacgccgtgcgcgcgctcgtccgccactccagcgacgtctccggcctgccccgcgacatcgagatgacctacggcgacgtcaccgacgccgagtccctcgccgtggccttcgacggctgcgacgtcgtgttccacgtcgccgcggccgttgagccgtggttgcccgacccctccgttttcttcaaagttaatgtaggtggacttgagaatgtgttgaaggctgtcaagagaacaccaactgtgaagaagataatctacacatcttctttctttgcaattggtccaactgatggttatgttgcagatgagacacagatgcatcgagggaaggaattttgtactgaatatgagaaatcgaagtttcttgcagatagaatcgcactgcaggcagcagcagataaggtgccaatcaccattgtctacccaggtgttctctacggccctggaaaacttacgactggaaatcttgtctcacgcattctaatagagaggtttaatgggcgcttgcctggttacataggagatgggtatgatagagaatcgttctgccatgttgatgatgttgttaacgggcacatagcagctatggagaagggcagagtgggccaacggtatctcctcactggtgaaaacatgtcgttcgtgctgatttttaacatggttgctaatatcacaaacacaagggctcccatgttccacgtacctctctggttgattgaagcgtatgggtggatttcagtttttgtttctcgcatcactggaaaactcccacttatcagttaccctactgtgcgtgttctgagacatcagtgggcatactcgtgtgacaaagcaaagatggagctgggctataccccaagaaacttgaccgaaggtttgtcggagatgctcctgtggctcaaggaagaaaaactaatcaagttttagcgttctctactacacaccacatcacatatttaatgtacaccgatacattggggatgtgctggggattttgaagtgtatatgcttcggcattgcatcacgtcgtattatgctagaggaaatctaagatgttgacgtgtgatactgatgttggcaacaaagagagaaattatgcattatttttacatcaatgtatttagttcgaggctttgcaggctgtaattgtataactagttgcttgaattgaaacataggtaattcaaatttc

SEQ ID NO: 86241 - DNA, 4095 bp, Zea Mays
aaccgcctcgctatagtctttcttccccttcttccccggcgaatattccccgcgccgcttgccctcgctagccttcctctccacggcaacagccccctccccgcatcgccggaataactcaaataatcacatcctaccgaagaggagaagccacccgcgacgtttcccggcgccggcaatgctacgacgcgtcctcctcctccgccatttccagcaccaccgccatcggctccgcctgctctccacaacccccaccccacacgcctccccctccacctcggcctcctccctcccgatcgccgccacgcccgcggcgccgcaccacctcgcgccccatcgcgggggcgcgcgccgcctcgccccgctcctcgccttctcctctctctccctcgccgctgcgggcgcggtttacctcactaccgacaacctcgaggatacgctgcagcggtccagggactctgcgggccgcgtcgtggagcggatgcagcacacgtggacggcagcgcgggtgctctggaagtcgctcctgtccgtgctctcgtccgccaaccatgaggtgcggtccgggttcgagctgcgggtcgccgcgctgctcgccgacatcgcggccgccagcgccgctcgccgcacggccatcgtttctgcgggcggcggcgccgtcctcgactggctgctcgagagcgtcgtgcggggggccacgcaggccgaggctgccagggcgctcgcgcacctgctggccgacccctgggtcgcgcccgccgttctcggccgcccgcacgctgtgccatgccttctccacttcatcttctcattccagcccacgcgcggcaagaagaaatcttcatttgatggtttagatcattctaaagggaggagcatgcttgtggctgcacttatggatataatcacttctaactgcgataatgcagactattcgtcctttaagcctttgttgcctgctgatgctgatacaagagatattgcaacagcaattgaagttattgagcaaggggggatgcattttgatgaccatgaggataatagcagtaatgatggtgactctggattaaaggggatagggattaaggtgcttggtggaaccacggtattggggttctctagaggaaataactcattggagttggataactcagactatgatactatggatgtatcatatgatagtagtagatccgtggtggaacagagtactgccgagtctccactacttaggaaattaagctcctctgctgttccagggctttgggatgacttacagagggaacatgtagctgtaccttttgctacatgggctcttgcaaactgggctatagcatcagatctgaatcgcactcttgttcaagaacttgatagtgatggacatgcagttgcaactgcgttgaaagcagccgaaagaactgttaaatggcatggaactctggtggctcgagctcttttagaagaccagaatttggccttggctccatcagttcctgattggtgctctagtcttctttctacagcttctcaggctactgcaaatgatgacatgccattgggtcaactgtcattatcaacattcctattatctatgatgcgatgtaatgagtcaaaatttgtaataaggcagaagggccttcatcctcttcgtagtattgcaaaaaagatagaaaatcagaatggccagaacagtatgaaagaatcaatagcaagtgctctaagtttgctttatgctggtgaagttcctttatcacttgaggaatctcaaagatggtctggcattcttcttagatggctttttgataaatctgtatcaaataaaacacatcttacagccatgaaaatcctttcatgcatacttgaagattatggtccagcttctgtgccaatttctcagggatggttagctcttgtcctttctgagattcttggggacaacaaggcccaaggttcaaaaggaacgacacagcctgaaccagagaaagtgaagaatccggttgattaccataatgcttcaactgcaactcaggtcctgaatcaattaggtagtgctgttgttaaattagcaagcacccaatcgaactgtgagcctgggtctgatgacaaagataaaggaccactttctgattttctatctcttgagccatttgctacagttctaaagaatatgaacaaaaagaatctgcccaaatttgatgccgctgactcagcatcagcaacgctcaagggaataaaagctctagctgagctttgttctgaggatggtgcatgccaaaagagaatagctgatttaggagctcttcccttgttgaggcacatcctcttgggtgatgattatgagaaacttgctgcaattgaagcatatgatgcatctcgtactcgagaagtgcaagacaagaacgtggctcctaatgtttcgtctactgatgctaccactgatccctcaagtgtacgggttcctcctgcagcacatatccgaaggcatgctgggaggctgcttaccattctctctcttctacctaattcaaagaaggaaattatttctgatgctgtatggtgcaaatggctcgaggattgtgctagtgggcgaattccctgcaatgatataaaactaaaaagttactgcaggttaacattattgaatatattatgttctgagagtccaaatacaagaaaagcctctgatgaatatcctgactcagaaagtgagtataaaagaaactgtccccagtttggagatgcacttttcttgctaaatccagagttacctcttgaagttcatgtggacaacagtggttttgggattttaagagtttcaagagataattgtaaggaagatggaggtattggaggctctggctctgaaactgtgaactctgtagatgatgctgaagctgcatccaaaagtgtccctttgatggatgttgtgtttgttcatggccttcgtggcggcccattcaactcatggcgaattgctgatgacaaatcatcaactaccaaagctggtttagtggaaagcattgacgaggatgctgggaaagagggtacatgctggccaagagaatggcttgcggcagattttcctcaagcacgtttttttacagtaaaatacaagacaaatttgacccaatggactggagccagcttgcctcttcaggaggtgagctctatgctgctgaggaagttggtggctgctgggattggtagtcggcctgtcattttcgtgacacatagcatgggaggactggtggttaaacagcttttatatcaagcaaagctgaataactatgacaagttcctgaataatactattgggctagttttctatagttgtccgcattttggcagtaaacttgcagacatgccatggcgtatgggtttagtgtttcgtcctgctccttcgattggggagttaagaagtgggtctccaagactagttgaactgaacgattttgtgcgtcaacgacacaacaaaggatttcttgatgttcttagttttagtgagacccaggtcacaccgattgttgaaggatatggcggttgggcacttcgtatggagatagtgccaattgaatctgcatacccaggctttggggagcttgtcgttctaccgtccactgatcatataaattcatgtaagccagttaacaagaacgatccttcttatgcggaaaccttggcatttttggagaagaacttcaaattatgcctggaaagagcagagtcctaggtcttgtcaatggcgccgtggagttttcagcaatctgaaggcttcattttccatttaccgccagagacttttctcccgttaacgacgaatggtggttgatctgaccaaatgatctgggcgtgctgtggtttatgaagctcgcaccgaactttgtagtaacattgcacatagcggttaggctgtaaatagctgtcttttaccttttagttgacatgagttgcccccatgtaagatcaagctatataccccaatgcctgtatcatctcaacagttttcagcaacagattttttacaaaacaatctcataatatataagccattttcataaaattactttctatgtgctttctccgttcttgaataag

SEQ ID NO: 86242 - DNA, 999 bp, Zea Mays
tatataataagatataaatgatgttttttagaaaaagatagaatcttttagataattttaaagttacggggggagggatgcaacctcagggatgcgaactgaatgtcgaaacgaactttcagcccatttacagcccgacaccgtctccaggactccagccgacaccgtcttcagccaccatcatctccttcgccgcagaagagattggagctgaagagaggaagcagcgcgtcctcgcctaaagccctcgccgccctctttcggctcctcgcctctcgtccacgcgcgacgacgtgtcggcaaacactcagtccatcactccatcccaaggtgtcactcctaattctccacctctttcttccccttgcctcacaatttccctgtggcccctgggatttcgatcaaatctgatcgtgcagcaccgattttcccgcagactcgcgaggcgatggtggacgcgtggtggcctctgctgggcgcggcgatcccggcgctggtggcgggtcagtttgtccgcatcaagcgccgccgcgacgaggagcagcgcctcaaggcggcgcgcgggcgggagaagagctccgacgaggtattcgtctgcgagcgcgtgtgcacctccaagcgtatgctcaagaaggtaggggccttctccaaggaccccataccggagacctgcgtcaccgtctgcggcgtctctgaactcgacgcctgcgccgacgcttgcgcgcgcaccgtctgcgtcaaccagcaccaggtgcccaattggaacgacgtctgcctcaagaggtgccagagcgagtgtctcaaactctcctcaaacctcatgtaatgaccatctcgctattgtgctgcgctccttatataccaccccgtcaggttcttctctgcttctatccatatcatggttgaggaacttcagacgtcgataaccgaaatttatatatctcaaggaattggagtgagtgaatgtagctggtcaaggcggttatgtctttcattaca

SEQ ID NO: 86243 - DNA, 1044 bp, Zea Mays
agggatgcgaactgaatgtcgaaacgaactttcagcccatttacagcccgacaccgtctccaggactccagccgacaccgtcttcagccaccatcatctccttcgccgcagaagagattggagctgaagagaggaagcagcgcgtcctcgcctaaagccctcgccgccctctttcggctcctcgcctctcgtccacgcgcgacgacgtgtcggcaaacactcagtccatcactccatcccaagactcgcgaggcgatggtggacgcgtggtggcctctgctgggcgcggcgatcccggcgctggtggcgggtcagtttgtccgcatcaagcgccgccgcgacgaggagcagcgcctcaaggcggcgcgcgggcgggagaagagctccgacgaggtattcgtctgcgagcgcgtgtgcacctccaagcgtatgctcaagaaggtaggggccttctccaaggaccccataccggagacctgcgtcaccgtctgcggcgtctctgaactcgacgcctgcgccgacgcttgcgcgcgcaccgtctgcgtcaaccagcaccaggtgcccaattggaacgacgtctgcctcaagaggtgccagagcgagtgtctcaaactctcctcaaacctcatgtaatgaccatctcgctattgtgctgcgctccttatataccaccccgtcaggttcttctctgcttctatccatatcatggttgaggaacttcagacgtcgataaccgaaatttatatatctcaaggaattggagtgagtgaatgtagctggtcaaggcggttatgtctttcattacattggctcttgcacatttctcttcggcagaatttgtttccctaccgaagatttgtttctctttggcagaatttgtttccaactaattgtgagtactaggtaccatatcctgttttttgagtcacaacaggacctctgagttctcccggatgaatgctgatttcgacattgatttttagttggttgcttatgtcttctaataattgaattatttttatggattgaatattataaatttct

SEQ ID NO: 86244 - DNA, 465 bp, Zea Mays
atgccaccgactgggggtgctgatgccgatggctctgctgttggctcatcgtcatcggcatccaaggccaagagcttcatcctggatccaccattgccggtggtggtgcatagcaccacacttcccacaccaaatccaacatcaggatctaagcgatcaaggtcagaaaatatgtgccaaaaccttagtggtttgtgtctacatcaaaatgatggcagtggtagaggttctggtgcagcagcaacaaatgatggctgtggtagtggttgtggtgcagctgatgtaggtagggatactttgccaagtggaggtggcagagataagaaggttggttcaattgttggtgatcttgaagttattgaggctattgtttcaaacttgaaggttgaggacgatgatgtcatagacagtgatggagatatagatgggctaaatgcagatgatcagagctactttgacatgtag

SEQ ID NO: 86245 - DNA, 1643 bp, Zea Mays
tgcatgcacgcacgcactaccctactccacgaccacgtgtacgggtgtagttataatcatcacgtacactctgcttaatcagcgattaattacaagctttgtaattattacacgggtgatatcacacgtacacgcattagattagaatggagattatcacgacggcaagcacgatggtgaagcccgtctactctaccccgcaccctctcgccggcgagaaggtcccgctgaccgtcttcgaccgcgccgccttcgacatcttcgtgcccatcgtgttcgcctacccggcaccggcgccgtccaacgaggccctcaaggagggcctccgcagggccgtggcgctctaccctcacctcgcgggccgcctcgccgtcgacggccggggccgccggttcttccacctaaacgacgagggcgtgcttgtggtagaagcagccgtctcgggcgacctggccgacgtgctcggcgacggtatggccaccgccaacgtcgacgagctgtaccccacgcctccagaggacaactttggcgcggcactgctgcagatcaagctcaaccgctacaagtgcggcggcctcgtgatcggcatcaccagccaccaccaagtcgccgacggccactccatgagcaccttcctgaccacgtgggctaacgcggtgcgcgcgggcaaggacttcagcgttccggcggcggcgaaggcgcccttcctcaaccgcgcggcgaccgccgtgccccgcgccgcgccggcgccggctttcgaccaccgctccatcgagttcaagggaggggacgacgatggcgcccgcgcctccaagccttacaccgtcgtgcccatggacaagatcaagaacgtcaccgtgcatttcaccgacgagttcatcgctggcctcaaagcgcgcgtcggcgtccggtgcagcaccttccagtgcctcctcgcgcacgtgtggaagaagatcacggcggcgcgggacctcgacctggaggagctcacgcaggtcagggtggcggtgaactgcaggggtagggccagccctgccgtgcccacggacttcttcggcaacatggtgctgtgggcattcccaaggctccaggtcagggacctactcaactccagctacagccgcgtggtcgacgctatccgcgacgccgtggcgcgcgtcgacggcgagtacatccagtccttcgtcgactttggggccgtggcggacgcgagcggggaggagctcgtcgcgacggctgcggcgcccggcacgatgctgagcccggacatggaggtggacagctggctagggttccagttccaccagatggacctaggcaccgggccaccgtgcgcgttcctgccgccggacctgcccatcgaggggctcatgatcttcgtgccgtcgcgcactgccaagggcggcgtcgacctgttcatggccgtcgcggagtgccacgtcaacgcgtttgagcagatctgccactccatcgattgatcaaacggctgccggggcacaacaatttggtttcggttccatgaattaagttgtgatttcatttattactgtccaatttctattactgtgtagaaatgcctattatggcatgtacaaagccaattaataacatgtatcttgagtcatgcatgtctaggaaactaa

SEQ ID NO: 86246 - DNA, 1899 bp, Zea Mays
atgcaccagtcgactctccatattcgccacatcttcttacgtagctctctctctctctctcgctaatacaaggaggagacggagtagaagaaagggtgcagcaaattaatcgggggcactagttcaccttcatcctcaatccattcattcatcagtactcccagccttttccggcacacgcatctatggccccgccatcacacttctacaacaacaatggcgccccgcaggacgccgccagctacctccatgcgggaccaggaaatgcacctccacaggactcctgcttgctcgacgcagacgagttccgccggcagggccaccaagtcatcgacttcatcgccgactactacggccgcatggacgactaccccgtgcaccccagtgtcaaccccggcttcctgcgccgccagctccccgacaaggcgccgtcgcgtccggagtcgtccgacgcgttcggtgccgcgctgcgggacgtccgtgacctcatcctgccaggcatgacgcactggcagagcgcccgccacttcgcgcacttcccggcgtccagcagcaccgtcggcgccctcggcgaggccctcacggccggcatcaactccgtccctttcacgtgggccgcctcgccggccgccacggagctcgagatggtcgtcgtggactggctcggcaaggcgctccacctgcccgagagcctaatgttctgcggcggcggcggaggcacgcttctcggcaccacgtgcgaggccatcctctgcgccctcgtcgccgcgagggaccgcaagctcgcggacatcggcagcgggaggatcggagacctcgtcgtctactgttccgaccagacgcactttgccttccgcaaggcagcgcatattgccgggatccaccgcgacaactgccgcgagatcgccacgtaccgtgacgacatgttcgcgctctcgccagccgagctgcaggccaccatgcaggcggacgtggacgccgggctggtcccgctcttcctgtgcgcgacggtcggaaccactcagacgacggccgtcgaccctatcagagggctctgcgccgtcgcagcgacacacggtgtctgggtgcacgtggatgcggcctacgcgggctcggcgctcgtctgcccagagttccggcacctgatcgacggcgccgaagccgtggactccttcagcatgaatgctcacaagtggctgctggccaacaacgactgctgcgctctgtgggtgaagaagccagctctgctcgtcgcggctctcggcacggagcaggagtacatcctcaaagacgcggccgctgaggggcacgacgtcgtggactacaaggactggtccgtgacgctgacccgccggttccgcgcgctcaagctatggctcgtgctccgctgctatggcgtcgagggcctgcgcgaccacatccgcgcccatgtgcgcatggccgcgtcattcgaggacatggtcaaggccgacccacgcttccaagtcatggcaaagaggcaattcgcactcgtttgctttaggctccgggcgcccgaggagatgggcggccccaaggcggccaacgcgctcaaccgaaggctcctagaggaggtgaatgcggcttgctccggaccctacatgagctccgctaatgttggtggcgtctacatgctcagatgcgctatcgggagcacgcttacggaggagcgacacgtccgcgaggcatggacggttgtgcagaacgtagcttcttccctcctcgctaaaatggagatgcatgaagattattgacatcgcctttgcctaataagctcaactcattccactttgttgttgtttattaatttattctattattaagcatcaagttgtgtaacctattatatatacattacggcatgcattatacaactattaa

SEQ ID NO: 86247 - DNA, 601 bp, Zea Mays
cgtttcctcttcttcgttctctcccccatcccaatcgtgcgtgttcctcactcctcagctccgaccttcacggggcccacggggcccgacgcccggcggctttactcagggcaccatggccttctcttcgtcactggcgccgttcttcccaccttctggaaccttccgagcccatcccgctaggaggctgcgggccgatgcacccgggagattcgtggcgtcctgcttgccccctcccgacgtcgtggtgacgcgcgagcagggaaagaacgccaggctcatctccgcgctggaaaagcataatgtacaccctctggaacttcctcttattaagcatgttgaaggccctgatacagataggcttttagatgtcctacgtaatgacaagttcgactggattattgtaacctctcctgaggcagctgcagtgttccttcagggatggaaggctgctggaagtcctaaggtgcgagtagctgttgttggagaaggaactgcaagggtttttcatgaagtgtcagaatctgatgatcaatctctagagcttgcattttcaccttccaaagctttgggtaaagtctggacgaatctctagattcga

SEQ ID NO: 86248 - DNA, 327 bp, Zea Mays
cttgccttcttttctttggcagtggcatttagttctgttcctgtagaagatgtcgacccgctgacattaaaccttgctatatcagctccagttgttgcgttagcttctccttctgcactgagggcatggctaaatcttatctcaaaatctgataactggaacaactccgtcgcctgcatcggtgagaccactgcgtctgcagcgaagaaactgggcctgaagagcatatattacccaacgacccctggacttgaggggtgggtcgagagcattctcgaggcgctcagagtccacaggacagcatcaaaagaggccccaaaacgttga

SEQ ID NO: 86249 - DNA, 101 bp, Zea Mays
attttattcaatataatattactgcaaaattattacatcaaaacgaacaacacatatcatcaacctcaatatctcacaaagtgtttggcaacaatcaatac

SEQ ID NO: 86250 - DNA, 3898 bp, Zea Mays
cttttttcgttttcccattttccgccgtggattcccatggtcaccaccacagtgaagtcccgaccgccgcatgcttccttcgccatgagcggcggccgccgccgctcttcgccggtggcgccttcctgctcctccgtccccgggcgttcgttggttccgctatgctgcttgatcttggtgctcctttctttctccatgtcgtcgtccgcggtggcggcggaggattgcgttgaggatagtgacggcgctgatggcgacggttgctgtctcagcttccgggatgtgtgtgccgaccggagctccttctgcttctcgtcctcggtggctcagatgttgcttgcaagcgaggacgccgccgaggcgccggatttggagctgccaaggggctgggaaccgtcgtctctgccattgtccttcccgatgtccggcggcggaggcatggtaacttgctcttctgttgactcgtcgctcacacgggcgcgcgatggattgggacgaggtgacgacgctagagcgaggtatgacgtcgcgtcatgccaggcgccgcttgtgcctgacaattggatgcgggcatctgctggggtgcccatggaggtggagggccctgccacagatgccgacccgagtggtcttcaaagccccttgtcgatgaatgtggaaattaaccccccggtgctggattggggcaggagcgacttgtatgctgcaaccaaggccaacttgaccgtggtgaatttgaacaagaacagtgccctgcgtctgtatgaacccttcagcactgacccccagttttatgtgtatggttatgaggatctggagctgcagcctggggagaacgccacagtcaccttcgttttcttgccaaagttgttaggctcttcatcagctcatctagttgtgcagacaaattttggcggatttattatacatgcaaagggcatggctgtcagttcaccctatcagatactgccattgacagggatagatgttcttataggtggacagctagagaggaacttatcgatatacaacccatatgacgatactctctatgttgaggaagtgtctgtttggatgtcttcattggagagcacaaggtattcttctcaccttgtctgccagctgggcccctttgatggagcattggagctatcctcttcacgtagcaactggtatacagcaagcagtgaagaatttagatggccagtggtcaatatcaggcctagtgaacaatgggaggtgcttccttcaaagaggaacactgtgattgagttaaagctgcaagctgtttctgaaggcaaggtgtttggtgctatctgcttgaaactgcgcaattgcactcttagtacgactcatgcttttgtgatacctattgagctagaggtgcatacacgaacttactatgattccagtggcttaattgctgtcacatttgagcatgtatggacttgtgatgaaactgggccgatcttttcgctttccttacggaatgatggaccaaagttactgaggattatagatattactgagcatgccataaagggcccaatgatttttcaggttaaatacctgaatggattaatactctaccctgatactgtaacagatatagctttagtaagatatacttcttcagttacagaggacatttcatctgacagctgcaatatagttgtagaaacaaatagtacccttggtagttcaatcataataccatgcaaagatttagtgcgcgcatctgaatccgttggaccgtttgccagacaagtatatgaggaagatatctctgctaatgcaagaacaagaacattgggcagcatgctgcaagtaaaacactcgcatcatgtgaagccaatggtcaggaaagcagtcaaagctgatgatagaatgcttaaacaatggaaatctcatggaacaagtgatgggatttctgttcttatggatcatgaaatgatgtttcccgttgtgcaaattggttcacagttttctaaatggataaaagtccataacccaagcctggagcgtgcagccatgcagctgatagtgaactccgaggagatcattgaccaatgcaaaactgtaactgatgtatgtgaactcacattctcaagcaaatctccagaggttaactcaactgagactagatttggtttctcgttaggtgatgcagcaatcaccgaggcctatgtcgatccttcagagactgctttgcttggtcctattgtcttccgtccctcgaatcactgtatgtggtcaagcatggttttgatcagaaacaacctgtcgggtgtggagatgctgcctctccgggcatatggtgggcgacaatctattgtccttctagaggaatctgagcctgcttggaagctagagttcagccttgggtccaatgttcataataaatcaacgatgaccaaacaagagatcccaagctctttgtgcagtcaacagctaaccaaagagatacatgttaaaaacagcggtgaccttcctctacaagtgacaaaggttaaagtttcaggagctgattgtggtgtggatggatttaccgtggacaactgcaaaggatttagcttagcaccgagtgaatcaataagaatgctcatttcttttcaagctgacttctcttcagctatggttcagagagatcttgagttggtcatgactactggcatctttccgatccctatgactgcaacaattccggtctgcatgcttaaccagtgcagaaaatcttatctcagatctgcccactggaagctgttggtaatcttgtttggagctttagcactgcttattctggtctttgtccgttatgccccagattctttgacagtgggctctcaagactatatcaagattgatgacaaaaaaagtgccattttcgaggagaacaagaaaagtaccattaacaagacccttttccttaaccaaagcagcaaaaagtccaggacaaataaggaacacaaaagaactgaagaagctgttgctgagaagtaccctgccagtgttgttgatagctcaaagagagcagatgacaagaataaacctgatgaacaactgcacacaacttcgacggtatccgtgtcccgaggtaatccagtggaagataaggcctcaagagaagctccgcagaccagtgaaaacctcacgatcaggattgctcgagacaaagggaaacgaaggaagcggaaagttggtgcaggactggcagggaagtttgaggtttctagcagccacagcgggaactcaacaccgtcttcgccattgtcgcagagctcaaccccgaaacatggctggtctttttctggggcgccatcagagccgaagcatgaaaacaaagtcgagagcagattcgatgtcgaggcaacggcatcaccaactcgcgctaatcatgagaagaagaaaacttggtcgcaagtcgctaaggagcagcctcgctctcgttcagcctcaccaggaatcacatcaccacctccaagccctgcagtgaccgcccccgtcgcatggcgctctccgtcattggcccccacgtcttcaccgacagctccacagtctcgtgctcctggctccaatctggtgaaagacaaggctgtgaagagagacgtgggtgctgctgcggctgcggctgcgccttccccgaagaaagagttcacctacgacatatggggagaccatttcccaggaaacctgctggtggtcgcaagggaggccgcgccacgcaagatgcctgacgcttctgaaggcgcctcctatagcttgtttgctagagagccccagaccctcatgatgaagccatcatcatctgcaccgccgcccatgtctcgcggccgcggttcgccgccgtctcatgtagcatctggttacggaataaaatgaccctgaaagcttaaaataa

SEQ ID NO: 86251 - DNA, 949 bp, Zea Mays
attttcactatccgaatatggattcgaatattttttcatctttttgttgtagcgagaaaataatgcacataacaaattatacaaaattttatttaaatacttcataatattcttaataacaatgcaaaaaattagctttaaattaaatgtatatattaacatatattagatttgtcatataagtcggatattttaggaacatccctaattcgatgctaggtccgcaactcaacttgaggtgcatctgtgacgaagaattgatgactaagtacaatgcaagactccagacggtactaactactcattgcaaatatttcatatttactgctagcttttttttttcttttggtacaaaatcatatacccgaacgcgttaatcaatagttttaaatagcaatgggcaacgacagcagcggtagatatagatcatgtttggttggccgtcgcaaatgcccacacgcgacacagattttgtgccgcagttctgtcgaccaaatggagcgtcgcgggttaggcgcggcggtttcggccccacaccaaacaggcctactccctccggttttctattagttgtcgtttaggacaacgacacggtctccaaaatataactttgaccaatgtttttttgttaaaatacaaataaactcttaatacatttatacttttataaaagtactttttatgataaattggtgcataatattgttgggtgtttgttggccgttggcacaagtagatttatggccgattgaccatggtctgcctgggacgagtggcccacccgcactcgcgcgacgcgtcccgctaccggccccacgcgcccatgcgctgtgcctgtgccggactaggtggggctgcctctgtgggccgttttagggagaacgataacaaaagctcttgggccgggttctggtaacgaacgcccatatgtacaatggtccacgaagcc

SEQ ID NO: 86252 - DNA, 1146 bp, Zea Mays
cctaattgcaatccgcgtaaacgtagctttctctcagttcagacgcttcaccatcggaaaggccacagctagggttcgatacttcgatccccactccatctccaccgaagaccgtcgcgtcgctccgccaccgaagcagctcaaatttctctataagatgagctggagatttcctctcttcggctctcagcagcagcaagcagatccaagtttccaggacatccctacgcagtcttggtaccctccctcggtggtaggttcctcttcacgtccatccacccctacctcttctagtgctagtctacaccaaagagcttcagatagtccgcagtcttcatcccgtgggcaaccatctcctgctgaggctgcagggataattgcccgtttgaaggataagagtattgaggagttacaaaggctattgaaagacagagaggcatataatgcattctttaactcacttgatcaagtgaaaacccagaacaatgtgcgtgatgagcttaaaaaagagacattgcaacttgcaagggaaaatttagaaaaggagcagcggattttggaacttaggaatcagtgcacaataattagaaccacggaactggctgctgctcaagaccgcctaactgatttggagaggcaaaaggatgatattatgaggtcctattcccctgccgcactgctcaacaagctccaaacatcaatggcaaagttggatgaggagtccgaggagctgcaccagaagttcctggagaaggacatcgaccttccaacctttgtgcagaagtacaagaagctccgcacggcttaccacaagcaggcgttgctccatctcgccggccagacatcactccgctgacatccggccaggcgtcatggcaactttgttgtatttctgctcgcctgttcttgttctacactatgcttggccctgttttacgagtgcagcctcttgtagggatttgccgaacatcagcggatattgcatgtatagttttatgtcttgcaaaaacgtcttatgtactctgtcctggtgtagtggtgtttacgtatctagtgtccaagttgggattcatttgtggtaactaaacactttgcctattttgttcaattcgatgataataaagcttttgtacgtttgtgtacaca

SEQ ID NO: 86253 - DNA, 1207 bp, Zea Mays
accatcggaaaggccacagctagggttcgatacttcgatccccactccatctccaccgaagaccgtcgcgtcgctccgccaccgaagcagctcaaggactggctcgggtggggctgcgactgtcgcgcggttggatccgaggctatggagcagtgagctccgtagttgacggccacctcaatctccttggtgaatctgtatagatttctctataagatgagctggagatttcctctcttcggctctcagcagcagcaagcagatccaagtttccaggacatccctacgcagtcttggtaccctccctcggtggtaggttcctcttcacgtccatccacccctacctcttctagtgctagtctacaccaaagagcttcagatagtccgcagtcttcatcccgtgggcaaccatctcctgctgaggctgcagggataattgcccgtttgaaggataagagtattgaggagttacaaaggctattgaaagacagagaggcatataatgcattctttaactcacttgatcaagtgaaaacccagaacaatgtgcgtgatgagcttaaaaaagagacattgcaacttgcaagggaaaatttagaaaaggagcagcggattttggaacttaggaatcagtgcacaataattagaaccacggaactggctgctgctcaagaccgcctaactgatttggagaggcaaaaggatgatattatgaggtcctattcccctgccgcactgctcaacaagctccaaacatcaatggcaaagttggatgaggagtccgaggagctgcaccagaagttcctggagaaggacatcgaccttccaacctttgtgcagaagtacaagaagctccgcacggcttaccacaagcaggcgttgctccatctcgccggccagacatcactccgctgacatccggccaggcgtcatggcaactttgttgtatttctgctcgcctgttcttgttctacactatgcttggccctgttttacgagtgcagcctcttgtagggatttgccgaacatcagcggatattgcatgtatagttttatgtcttgcaaaaacgtcttatgtactctgtcctggtgtagtggtgtttacgtatctagtgtccaagttgggattcatttgtggtaactaaacactttgcctattttgttcaattcgatgataataaagcttttgtacgtttgtgtacacatc

SEQ ID NO: 86254 - DNA, 1107 bp, Zea Mays
accatcggaaaggccacagctagggttcgatacttcgatccccactccatctccaccgaagaccgtcgcgtcgctccgccaccgaagcagctcaaatttctctataagatgagctggagatttcctctcttcggcagctctcagcagcagcaagcagatccaagtttccaggacatccctacgcagtcttggtaccctccctcggtggtaggttcctcttcacgtccatccacccctacctcttctagtgctagtctacaccaaagagcttcagatagtccgcagtcttcatcccgtgggcaaccatctcctgctgaggctgcagggataattgcccgtttgaaggataagagtattgaggagttacaaaggctattgaaagacagagaggcatataatgcattctttaactcacttgatcaagtgaaaacccagaacaatgtgcgtgatgagcttaaaaaagagacattgcaacttgcaagggaaaatttagaaaaggagcagcggattttggaacttaggaatcagtgcacaataattagaaccacggaactggctgctgctcaagaccgcctaactgatttggagaggcaaaaggatgatattatgaggtcctattcccctgccgcactgctcaacaagctccaaacatcaatggcaaagttggatgaggagtccgaggagctgcaccagaagttcctggagaaggacatcgaccttccaacctttgtgcagaagtacaagaagctccgcacggcttaccacaagcaggcgttgctccatctcgccggccagacatcactccgctgacatccggccaggcgtcatggcaactttgttgtatttctgctcgcctgttcttgttctacactatgcttggccctgttttacgagtgcagcctcttgtagggatttgccgaacatcagcggatattgcatgtatagttttatgtcttgcaaaaacgtcttatgtactctgtcctggtgtagtggtgtttacgtatctagtgtccaagttgggattcatttgtggtaactaaacactttgcctattttgttcaattcgatgataataaagcttttgtacgtttgtgtacacatccgttc

SEQ ID NO: 86255 - DNA, 2755 bp, Zea Mays
ctgactacccaccaccaattcgtccaaattccccaacgtcacctcccgcgccatgccgccgcgcgcggtgctccgccgccttctccccaccaaccctcaccactccgctgctcgccacgctccgcgtcaggcgcctcctccgccttcagcgatcgacgagggaccccttcccgacccgtatgcgctcctcgttcacgaccccatcgacctgctctcatccctgtggcgccgcgcgttcgcgcacccgctcccctcccccttccccaacctctccggctatgcctcccgcctcgatctttggctcctctcctaccagcgtgcctgcgcccatgccacgggcaccttcccgccacgccacgccgtcccgctccccactcttcattcgctcctccgccttcgcgcctccgcgctccgccgccaccccgccttcccctggggcgcatccacgcacctcctcctccgttcccccgccgacaagccctccaccgtccccatctcccgccgcaagctcgaagcccggttcgcggacgcgccgccgccgttccaggaccgcgtcgtccaggagctcctcctcttcctccttgaaccagtcctcgagccgcgcttctcccctaaatctcatgccttccgccccggccgcgggccccacagcgccatccgctctgttcggtctcgctttgccgcctacctctggttcgtctccgccgacctcacggcggtggtcgacgggctctcgccggacaccatcctgtcatgcgtccagaaggccgtctccgaccgtaaggtgctgtcgttactcaagtccgcgctcaccgctcctgtcaggcctgggtctgtaccgccaatggagaaggacctcgatgggctgaccaagaagaggctgaaaaggaaggtgctcaggaagagcaggaagaagaaggtgcttaacgagaatgagcctaagcctgacccatattggttgaggatgttctttgggtttgctccagagcaggcacgccacgtgccaaattatggacattgcgggataatcagtcctttgcttgccaatgtgtgccttaacgaattggattggtggatggaggagaaaattaaccagtacttttgcccatccaagcatgattcaatttggaaggaggtaggtgatgatgggtgccacaatcccgcttggcctgagttcgtcccatcagctgggaaggagaagacaagaaaaatggatttccttcgatttggttcccatgtcttaattgggatcagggggccgagggaggatgcagttgacataaggagacaactgatggagttttgtgagagaacatttggtttaaggccagagaattcgatggtggaaattgagcatatcacaagggggattgaattcttggatcatgtgatcacgcgcagggtcatctacccaaccttacgatatactgccagtggagggaacattgtcagcgagaagggtgtcggaacactgttgtctgtaacagcgagcctgcagaggtgcataaggcatttcaggaagcttgagcttgtaaagggggacagggatcctgagccattgccgtgctcaccgatgctgtactctgggcaggcgcacactaattcccagatgaacaagtttcttgagacaatggctgattggtacaggtatgcagataaccggaagaagattgtagggttctgtgcttatgtcataaggagctcactagcaaagctctacgcggcaaggtatagactgaagtctcgagctaaggtctacaagattgcttcacgggatcttagccgtcctttgagagaaagcacaaggaatgatgcaccagaatactctgatcttttgaggatggggctagttgatgttattgaaggtgtacaatttgcgcgcatgtcatcgattccaacgtgcgactacacacctttccctaggaactgggtgccacaccatgaacttatattgcttgagtatattaagctgcaagatccaaagttcttttgtgaacttcacaagactatcaaacgtcaggaaataagttcaccgcaggatgatgtatcaaagatggtgtggtattataaagtccacggtgtttatgatgacaaaagatccttagttggcgccaaggaattgagaaatgatgaaattatcaatgggaacaagcaacttctattggatacatagttccgagtcctatgttcccaattgtttatagaactattgatatgtgctatttcaatgggcatcaagaagatgtttctcctgtgattcaagggtatccatgatcttttgacagatcgccccagttctcgttatttttagaaaataatcacgggtatccatggacagcatatcatctattcaggcactcaggagccaggattactcaacttttaatgtttacacaagcatttcacctattatcaaggtaaactcttttgttgtcgtaattcagggttccatgctaactttttaagtgttctgctcgtaacagcggagcattactgtttcccagttgttagcagaactagaatacagaaatacaggcagtattaaagtgctgacttgtgaaacttcccagatgccacatgtttagcattatgccaattcccacatgtttagctttgttaaataacaggcgttttactttgcatgcttactctatcaatgtgtactttttcttctcttgtcctccaaattgttgaaaattttgaggtactgaagtagtagtagtaaattccaagctttcatattcattatcagttc

SEQ ID NO: 86256 - DNA, 1818 bp, Zea Mays
ccaaaatcctagctaaagcatcaccatcgcagtacgcactccgagaacccagctatataaacccacctcgcacactcatcactctcacactctgcccagctaagctccctccgtccatcggcatggcgactaccactactaccatcctcctcctcctcctcgtcgcagccactgccgtctcggcggccgacctctccgtgtaccacaacgtgcacccgccgtccccgtccccgctcgagtccatcatcgcgctcgcccgcgccgacgacgcgcggctcctcttcctctcatccaaggcggcctcgtccggcggcgtcacctccgctcccgtcgcctccggccagactccgccctcgtacgtcgtccgcgcggggctcggcaccccggtccagcagctgctcctcgcgctcgacaccagcgccgacgccacctggtcgcactgcgcgccgtgcgacacgtgccccgccggcagccgcttcatcccggccagctcctcctcgtacgcctccctcccgtgcgcctccgactggtgcccgctcttcgagggccagccgtgcccggcgaaccaggacgcctcggcgccgctgccggcgtgcgccttctccaagccgttcgcggacacctcgttccaggcgtcgctgggcagcgacacgctgcgcctgggcaaggacgccatcgccggctacgcgttcgggtgcgtgggcgcggtggccgggccgacgaccaacctgccgaagcaggggctcctcggcctcggccggggccccatgtctctgctgtcccagaccgggagcaggtacaacggcgtcttctcctactgcctgcccagctacaggtcctactacttctccggctccctccggctgggcgccgccgggcagcccaggaacgtccggtacacgccgctgctgaccaacccgcaccgcccgtcgctctactacgtgaacgtgacggggctcagcgtggggcggacctgggtgaaggtccccgcggggtcgttcgcgttcgacccggccaccggcgccggcacggtgatcgactcgggcacggtgatcacgcggtggacagcgcccgtgtacgcggcgctgcgcgaggagttccggcggcaggtggcggcgccgagcgggtacacgtcgctgggagcgttcgacacgtgcttcaacacggacgaggtggcggcgggcggcgcgccgcccgtgacgctgcacatggacggcggcgtggacctgacgctgccgatggagaacacgctgatccacagcagcgccacgccgctggcgtgcctggccatggccgaggcgccgcagaacgtgaacgccgtcgtgaacgtggtggccaaccttcagcagcagaacgtgcgggtcgtcgtcgacgtcgccggctcgcgcgtcgggttcgcgagggagccctgcaactgagcccctgaatccgtccgtgccctatgcacgggaggaaggaggagacgcgctgcggctgccgcatcggtcggtgtgcagttagttgtcctgttagtctatgctacgttgtctgcactctgcaataacggacgtgacccggggaaaaaaactgtttcgtcacgggtagctagagaatcacgtaatggctcttgttttcgtttgtgtcctataatgtatggctattggcctgtttcgagaggttaaaatttggaggtgctgcatcaaattcgtacgtcgacagtgtcagactcacgagcgtgtacagcacagtacaaaagctgccttgtcatggatacgcgagaggatggcgatgcgattcacaagctgtcacttgaccgtatctctgaacgtgtaccatttc

SEQ ID NO: 86257 - DNA, 510 bp, Zea Mays
atggctgaacccgagatggaggtggccgtagcgacagcagcaccagccggtcagaagagagagagggaggaaggaggcgatcctgctgctgaatgcggcggcgaggagacggaggtggaaggggcggcggcgaagaagccgaagttggaggaggccaaggaggcggagaaggggagggtagaggagacggcggaggggaagacacaggaggcaaatgaggagaaggcagtggaggcggaggacaagcctgtgacagaggaggcaaatgagaagaaggcagttgaagcggagggaaagcctgtgacacaggaggcaaatgaggagaaggcagcggaggcggagggcaagcctgtgaagctggggcctaaagaattcgcctcggccatcgatatgttcaactacttctacgctctgctccactcctggacgccgcagcttgagttcaataaggtgagggttagggttgttatcttggttgcgaagaagattgttcctttacctttgatctga

SEQ ID NO: 86258 - DNA, 373 bp, Zea Mays
gatctgtggatgacttcagcttccgcaaatgtgtggacaacatactgcccctccctgaggactttaagatcggcaatggcaagaagtctggtggccaccaaaaggatggcggtggagggcgggcaggaggacgccgtggaggaggccgaggcggctggcgtggtggacggggccggggcaggaggggagggtaggttcttacttcttaactggccctgcaattttgcccagttaactataccggggttgccgtggaaacgaaggtaggttcttactattatgttggtttattatgtggtgcctgtcctaaagaccgataccaacttttttaccttgcaaccggtatatgatccacgccgagtgcttgccgcat

SEQ ID NO: 86259 - DNA, 4147 bp, Zea Mays
atgtacaagctcagtggccgtggtggtgggcgcggcggcagcggcgcggcaaagcgcccgctgcccccccacggccgcggccggggcggcgcctcctctatcggcgggatggccgggccgccccgcggtcgcgccggcgccggcgctgcaacgcagccggcggggcgcgacgaggcgttccgcctcgagtccagcgggccgccagcctttgcggctataatacggctgacgcccgacctcgtcgacgagatccggcgggcggaggaggccggtggaggcgcccgcatcaagttcaaccctaacatgtacaactcgtcggagaacgttatagatgttagtggaaaagaattcaaattcacctgggcatctgaacgtggcgaattgtgtgatatttatgaagaacgtcagagtggagaggatggaaatgggttgcttctggagtgtggctctgcttggcgcaaggtgaatgtgcaacgcattttggatgaatcaacaaagaaccttgtgaaaatgcgctcagaggaggctgaacgtctctcaaaatctcgaaaatcaatcgtgctggaccctgccaatccatctgtcaagagtcaggccaagtcaatggctgcagcagctgtagaaggcaatccacggaggatgcactggaagcagaagaatgaattttttaagaagaataaagctgctgttatcaccccaaccaaatcagtttcgaaggtcaagttatctaacaatattcccaaagggaatatctcgagttcacctgcaccttctcctgaacaacctggagcaagcaatccttcatttcctgttggatcagatgcaaataatgaagtcacaacaccttttgatttgaacaaaggggaaaacagtaaacatgagaaatcgactgcaagtaagatgtctaacaaaggtataaatcgccgtgcaagttctcatgctgcaaatgtggataataatacaaaagaagtgcgaagctacttgatatctgtgctctcaaaaaatccaaaaggaatgggcctaaaggccttggagaaagttgctgcagatgcatttccaaatgcatcaaagaaaatagagagcatcgtcaagaatattgcaaattaccaagggcctgagaggtatgttctcaaaccagggttggaggtagaaagctctaaaaggcatgcatctgaaggagtaagatccatcagcgagaatattgaggaatctgctccaagcctaaagattgatgatcctgatatatgtgagaggattgacattgtgggctccccacttgctgtaacagatggaaaactcagtaatgatagtgaaggtaaggctggaacttccagtgacagtggaagtgacagcgatagtgatagtgacagcagtgacagtggaagtgatagtgagagccaaagcagaagtgctgcggaaactggtagtgggagtagcagtgatagtgacagtgatgcctcatcaagcagcaaggaaggatctgatgcaattgttgatattacaagtgatgatgacaaagcaaatacagcacacacaaaagtagtagatgaccttaatttgtcttcatcaccaagagatttgacaagacttaatgttgacgatgaacaaattgacattggaacaaatctggactacaggagtgcatcaccccatattgatctgaacaattttaatactggcaatgatgatgcagcagcagagggctttagttctggcaacctgaacaagccatctgaaatgccgggaagcaagaacatgacaaacaccagaatggattctatcggagttgataacaagcacaatgaaatgtctttcgtggacaaccttttcgatgattccatgagagcagccagtgagaactcacccaagggggaagctggtcaattgacagtgcagcatggcaataagagaaaatcaacatctaaggatgaatcaaaactcgtcccagtgaatattgccaaacccaaattaaaaaggtcttctggtagtgagaactccacagcaaagcctgagagtgccaaaaaggccaaacctgacgtaacatcaccaataggttctttatcagaacacaaaagaagtttaccccctgaaaagcataccaatgataggttgaacaaggagacggggaatgttagccgtgatgcttcacgagatagcagtcctgccatgaaaggaagaccttcagctcctggaaatttacagaggatagatcagagcccaaatttacctatcccaacaatgcattctgagggaacaaaaggaaatgctgttaaatcaagttcaaagaaaaaatcagataagatgcagaaaccatggcatggtattgatggtgactttggctcatgttattcacatggtgtagatcaccatgccaattttgatggctctgatgattcttccacaagaaaaaggagtagacatgagaatcctcttattgatgataaaatgcttaagcattcgaaggacactaatgctaatataaattccatgaatttaaccaaaagttccagagaaattgttgtgcctgatgaggtaactgcttttcctgaatctaatgaaagtaatggtgagccatcaaattcacaaagagataatgttgagaaatcaccttatggtaaaaaaaagctccagagagagctttctgatcttgagttgggtgaacttcgcgagacttctttggaaaatgatgatggaaggataaggaagcaatttgagagaaatagttcctccaagtcgcttgatgctaaactaactggtgtaaataacttctaccccagtataaatgacaggaagactcctgtaaccgtctttcatgataagaggaaaccttcacctcaagaatatggaaatagaggccatgtaaaccaggaagggtttcagaggaaggcagcagtgtacgcgtttgatgataataggcctcaacaaagagagaattttccagagagcctgcatttgccaaagattgataattcagattctgagaacataatgtatccagataggtcaggagaaaaaacaagcaaaagggaaactaggatggcacatagtggaatgctagagtatgctgatatgcagaagaagaaagcaacctcaaggcttccacagaacggtactaataatgtcatagtgtctcgaatgcagaaatcaatatccacatcagataatgaggaaagaagtagaaacaactctttgattgagacaaagacaggtagaaagagaagagacagttcttcagatgatgataatttatttttctccaagtatgataaagatgcaccagaactcaaaggtccaataaaagatttctcacaattcgaagattatgtgcaggagtacaatgagaagtatggagtctattcttacttgagcagtcagatagacaaaactaagtcagattttttaagggttcaggatgatctcaatgttgcgaaagaaagagacaaggaacagtattataacacggtggaaagactcagagacatgtatcatgaatcaggagcaaggcataaattgatgaagaaggtcttccttttgcttcatgaggaactgcagattattaagcaaagaattaaagatttttcagaggcctattgaaatgagtcactcataacatgtgagttaagctctaactgtcacttgcaattgtgtttcggagactgtcgctcatcgtaaggctgataatgtctgggcatgagcattatgctttgcctttgtagaagtttgcttgtcttggaaagattcagtcaatggcgcatatcacaggaaacctgagagactccgtgatttctggaatcacatcgtgctgaatttgatagtaatcacggtgaagtggaggcaaggacagttcaaatatcaatgacgttgttggacacctccgcagccccgcacgggggagatagcagaagaaatgattcatcactcagggaagaggtaatgtcgggaagcgaggaggccttacctcagcagttttgcagctagtttggcactgaactgtaaccgggcggttctctttgtagatgttctgtatcttttacccccacccccagtgaagggcgcgatctctccttccctggcattgtacatcactttgtattagtgtgattcatgtcaaactgaagtaagttgctagctgtgtacatatatatag

SEQ ID NO: 86260 - DNA, 1061 bp, Zea Mays
cactcccccacttcgacccgggggcgccctctctctgtctccggaacccttccagccttctcgctcctggaacccagacctcaacccttccgtccccgaccatcgacccccgaaggacctggcggtgtccagatttccagaagcatcccccatccagcccccggcgatcgtgcggaacctggcggctggggacgcgggagaagcggcgagggctagctggagatggacacggcggagaagatgcggtggcccttttcggacggcagcgtcaccgatctcctggacgcccgcagcctccacggctcccccgacattaagaaaaaagcacagtttcattcttctctagtgcaaaagcttgctttggaaaaggagatggagggtcatgttggttgcgtgaatgctatcgcgtggaactcaagtggttcgcttcttgtatcaggatcagatgacactagaattaacctctggaattataataatcgagagctggtgcatgatattgacactggccattctgcaaatatcttttgcaccaagtttgtccctgaaacatgtgatgaagtagtagtttctggagcaggagatgcagaggttcgtgttttcaatatgtctcgattaagtggcagaaggcctagagaaatttctatggaaccaacaatggtttaccagtgtcactcaaaaagggtcaagaaactagctgttgaacttggcaatcctaacgtagtgtggagtgcaagcgaggatggtactctgagacaacatgattttcgggagtgtagttcctgtcctcgtgcaggatccgctaatcaggaatgtcacaatgtgcttcttgatctacggtgcggagcaaagaagtctttagccgatttacccaaacatccattggcactgaagtcttgtgacattagctctgtttgtccccatcaaatcattgtcggtgggaggtaacctagcttctggtcatcaacagtcagtagataacaagccttttgtgtttttatacctgactaatgactagcacttctctgctacatgatgttcatgcagtgatgcatttgcta

SEQ ID NO: 86261 - DNA, 663 bp, Zea Mays
agctttggacacccgatgcaaatgctacatctatggttgctggaccagaacttgatgtattaagtgccatagagaataaccagcggacgttatgtcggaagcgtcaaattgtactgccttttgaatttttggaacgagttcggatgcgagagttttcagaaagtttcgagtgtaaccagagctgatttactatcgctggagttgctgaggtacttgtattgacataaaatttcagggcatccaaaggatgaaaggaatcggtttgctatggtgagctaaacacaattacaccttttgtttagcttcttcaggaaaagggtaatagttggaagaatgatatcatccaagctacaagcagcctatgtttgaagtagtgaaatcgcaaggccttgctacgaatagagtgtagacacacctggatagataagcaggtgtgctggtgctgaaactattacttgagatgtcaataaacattggaattatgttgtggtttggggtggtataatgattcatacgtgtgtaatgcagtgtggattcattccctttacagattgtagatataggtgaaattctgcagtaagtgaaaatcacaaatgtaaatgtgcggtattgtctctgcgtgccgcaggcaggtcatgctagtttgtggttgacgattggggc

SEQ ID NO: 86262 - DNA, 1158 bp, Zea Mays
aaaagagggcagcttcggcaagatcttgagatgtgtgaagactgcagaagacaccgcatcaggcaccaccgtccaccacaccaccaccttcatcaattcctgcaacgtccagccacgccctccccacaggacatccacccccagtctcatcacccaggaggagcgacgaggaatcaagcagccagctaaacaaccaaccccatcgtcggtagatagccacgctgctgggctcgatccggccgatcgatcgcatgcggcacctacggatgccccacgcatccgtcttctgagatctcggttgctccatggggagcggcaaggcatcgtccccgccaggcgccgctgccggcgggagcgccccgccgccgggcggcgccgtcgtctgctgcatgtgcggcgaccgcggcgtcctgtccgagctcttccgctgctccgcctgctccgtccgctcccagcacacatactgcacggataggtacccgaaggcggagtcgtacggcacctgcaactggtgcctcagggcggatgggcgcgtggcttctacttctaactcgccgagatccgctggcaaagcggctgcccggccgccatctcacggtggtgacacgatcggcagcggaagatcgcccaaggttgccgctcgtggcgactttgcgtcttccaacctgagcaagcctgtcaagaagcagcatgcgcagcggatcctgctgcggcggtcggcgtcggaccttggcagccgcgttcctaccgaccacaacgcgccgccgtcgcccggcgtcgcgcgtggcaggccgaaggtccggaggtacaagctcctggaagaggtgatcagtagctaataatagtctaactagcgatacccggtgcggtgtcgatgtcgtggaaaacattatcgagtgcgtgtgcgtattagatgtataatacgtacgtgcatgtgtatctagctaatatataggggtagacacggcatcttgcggtgctgccatgcatgcatggaaatactacgtgctgatcgatctcaagcattactcagggtgctcgcgtcgtgttgtatttgtatatgaggtattgtataaagcatcggttcccacggtttctaacatcgtcgtgggagttatgcataaatgagcacactacctcactggtattcttttacaa

SEQ ID NO: 86263 - DNA, 799 bp, Zea Mays
aaataaatttccacaaccgaaacctgcagtcgggtcatctcgtccacgaaacgtacggacttcgggcatcggccccaacgccagcggcaccgcacccgcaccaccaagctcgtcggcgacatgaatccgcccgcagcagccgcgtccaccggcgcaggaggccacgccgcggcgcctgcggcagccccggagtacgcgcactacccgaggctctcgccagaggaggtggccccgcccccgcccccgccttatcacgccgccaccgccgcgccgtccgcctacggaggcaacccctacatctactcccccgccggcggcgccgccacctccccgaagaatacgatggactccgtgaaggacgtgctcggcaagatgggaaagaggtttggcgaggcggcccgcaagaccgagaccatcaccggcaatttctggcagcactgtgagcttttcgatttcgttgccgtattttcacgaaatcgggttccgaagttgtttctgtgtgtttttcatcaatttgctaatcgtgttgtgcattttcatgtacattttgttattgtaatatgaaattaggttgtcgtcaagctgttacttagccacaaccacaatgaaattgaactagaatcccatcttcatgggctcagacaaaaagaggggcaactaatttaatcgacacagaattcagcttatttcattggcgtgcactaaattcggcatttctggtgggcattgacagggattaggattcattatgctgcttcttttataactataaaagttttattccatatatttcactata

SEQ ID NO: 86264 - DNA, 1746 bp, Zea Mays
aaataaatttccacaaccgaaacctgcagtcgggtcatctcgtccacgaaacgtacggacttcgggcatcggccccaacgccagcggcaccgcacccgcaccaccaagctcgtcggcgacatgaatccgcccgcagcagccgcgtccaccggcgcaggaggccacgccgcggcgcctgcggcagccccggagtacgcgcactacccgaggctctcgccagaggaggtggccccgcccccgcccccgccttatcacgccgccaccgccgcgccgtccgcctacggaggcaacccctacatctactcccccgccggcggcgccgccacctccccgaagaatacgatggactccgtgaaggacgtgctcggcaagatgggaaagaggtttggcgaggcggcccgcaagaccgagaccatcaccggcaatttctggcagcacttgaaaactggaccaagcattactgatgcagcaatgagcaggatctcacaggtcaccaaagtcattgcagaaggtggatatgacaaaattttccatcaaacttttgaggtcgcccctggtgaaaagctcaagaagccatatgcatgttatctgtcaacctcggctggtcctgttatgggtgtgctttacctgtccaatgtaaaactggcattttgtagtgataacccacttgcataccaggttggagacaaaactgagtggagttactacaaggtggtcatcccccttgctcaactgcgatcaattaattcatcaacaagcagaacaaatgcagcagagaaatacattcaggtggtttctgttgataaccatgagttttggtttatgggcttcgtttactatgacagtgcggtgaagaatctgcaggaagcacttcaggaggctcagaatttacgtgcttagtgatgttcatggattggaactagcatgtcttatacattacagttgtgatatactgttttcccgtcagtttcgactgtttgtccagatttagtttgcgtaggtatcagctgtttctgtgttttgtactgacttaaaccgatgttcaatatgtgacgtgcatcctttcatggttgttctctgctatgatgagcccatttgcttcgagcagtaacaatgggtgtgcttcttctgagttttaaatccgaccacagtaagattggcgaagtggaacgcacttcacaaatcaattcggatttgggattgtgatatggattcaaattattgatttatccatgctcagtgatttctataggtcttgagcagcgcgtgtttgtatacttcgtgctttgacaaatcccagtttagttggccccgctttaaggtttacactgacttgggggctggtcaggcaaccatttacaactttaggttatttgtgtctgacaattcctctgactgacctgtgcagattttcgaactgtgacagtgcatcttgatcccgtcgtgtctgccctgtgcagcctggtgcccaggatgtgttatttgggcatattttgcttcatgtagtaacagttaactcacaaacatcagtggaaatatctgaacgagtagcttatccataactccttgtttttcagctacatcctgtatccatgcatgatccctttacctaccagcgtttgctttgacaaagataaacttgtggctgtggtcaacattcactattttaaaactaaggctagtttggcagcccaaaaagccacagattttccggcctttttcctggaaagaaagcccacacggata

SEQ ID NO: 86265 - DNA, 2660 bp, Zea Mays
aaataaatttccacaaccgaaacctgcagtcgggtcatctcgtccacgaaacgtacggacttcgggcatcggccccaacgccagcggcaccgcacccgcaccaccaagctcgtcggcgacatgaatccgcccgcagcagccgcgtccaccggcgcaggaggccacgccgcggcgcctgcggcagccccggagtacgcgcactacccgaggctctcgccagaggaggtggccccgcccccgcccccgccttatcacgccgccaccgccgcgccgtccgcctacggaggcaacccctacatctactcccccgccggcggcgccgccacctccccgaagaatacgatggactccgtgaaggacgtgctcggcaagatgggaaagaggtttggcgaggcggcccgcaagaccgagaccatcaccggcaatttctggcagcactgtgagcttttcgatttcgttgccgtattttcacgaaatcgggttccgaagttgtttctgtgtgtttttcatcaatttgctaatcgtgttgtgcattttcatgtacattttgttattgtaatatgaaattaggttgtcgtcaagctgttacttagccacaaccacaatgaaattgaactagaatcccatcttcatgggctcagacaaaaagaggggcaactaatttaatcgacacagaattcagcttatttcattggcgtgcactaaattcggcatttctggtgggcattgacagggattaggattcattatgctgcttcttttataactataaaagttttattccatatatttcactatattgatgatgtttgatgtggcttttctaggtaccatgtatctagacacagtgtatatctaagcacatagaaaaatctatgtgtagccttgtttctttaagtcaaatgggaatgggagcactagattatagccttgtttcgttaagtccatacaatgtggagaaactgatcaggtcttcctgattctttaaacagtgaaaactggaccaagcattactgatgcagcaatgagcaggatctcacaggtcaccaaagtcattgcagaaggtggatatgacaaaattttccatcaaacttttgaggtcgcccctggtgaaaagctcaagaagccatatgcatgttatctgtcaacctcggctggtcctgttatgggtgtgctttacctgtccaatgtaaaactggcattttgtagtgataacccacttgcataccaggttggagacaaaactgagtggagttactacaaggtaattatgtgtattgctgtgttttgctttagttcagtaaatataaagtttgttcaaggaaatgcaattcgtactgaagcttattcattatgacaattaggcttacagaattatgttaagaaacaatacatcttactctggagtattgttttgtatgaaaacatcaagtttcagaatttgtttcatctgttttcatcagtgcaccaatataataactattgtcgatcttatttactggtagtactcattaattctgaaatccatatatttcaacatgcaacttacgatttgtttgtctatatctgaaataggtggtcatcccccttgctcaactgcgatcaattaattcatcaacaagcagaacaaatgcagcagagaaatacattcaggtggtttctgttgataaccatgagttttggtttatgggcttcgtttactatgacagtgcggtgaagaatctgcaggaagcacttcaggaggctcagaatttacgtgcttagtgatgttcatggattggaactagcatgtcttatacattacagttgtgatatactgttttcccgtcagtttcgactgtttgtccagatttagtttgcgtaggtatcagctgtttctgtgttttgtactgacttaaaccgatgttcaatatgtgacgtgcatcctttcatggttgttctctgctatgatgagcccatttgcttcgagcagtaacaatgggtgtgcttcttctgagttttaaatccgaccacagtaagattggcgaagtggaacgcacttcacaaatcaattcggatttgggattgtgatatggattcaaattattgatttatccatgctcagtgatttctataggtcttgagcagcgcgtgtttgtatacttcgtgctttgacaaatcccagtttagttggccccgctttaaggtttacactgacttgggggctggtcaggcaaccatttacaactttaggttatttgtgtctgacaattcctctgactgacctgtgcagattttcgaactgtgacagtgcatcttgatcccgtcgtgtctgccctgtgcagcctggtgcccaggatgtgttatttgggcatattttgcttcatgtagtaacagttaactcacaaacatcagtggaaatatctgaacgagtagcttatccataactccttgtttttcagctacatcctgtatccatgcatgatccctttacctaccagcgtttgctttgacaaagataaacttgtggctgtggtcaacattcactattttaaaactaaggctagtttggcagcccaaaaagccacagattttccggcctttttcctggaaagaaagcccacacggatacttttcttgcgtttattcatctgcctgtttagaagcccatcatccgacgg

SEQ ID NO: 86266 - DNA, 1329 bp, Zea Mays
gggagagaaagccagacaggactcctcctcctcccccttccctccccctaaaagctaaaaacatttggagagagagagagggagatcgaggggaaaccgagagcaaccaagacgcacacgacgatggagcgagcggacgaggacgcgtgccgggtggcgctgctggacgctgacggcggcggcggcggcgagggcggcaagaagcagcagcagcagctcgcggcgcgggtgtgggaggagtcgaggaagctgtgggacatcgtggcgccggccatcttcagccgcgtcgtgacctacagcatgaacgtcatcacgcaggccttcgccggccacctcggcgacctcgagctcgccgccatctccatcgccaacaccgtcgtcgtcggcttcaacttcggcctcatggtacgtacgctatcgctatacgcaggctccctccctctcgtttgcccgtccaccaagctctctcgatcgctccggccgaccgattgatcgagaaagccagctccgttagatttggctcgtgagtcgcgcgtgaaggcgtgataatgcgtcccgccgcctgctagctatttccagagctgagctaggctgtaccacgtacacgtgacctaatgtacgcgtgtgtagtattgtgtagtactgtcagctagctagctacatcttgtctcaatcccatccacatgatgctaccaagtaccagtaatttaaatgccgacgtccatccatatgacgaaaccgacgacaatacatgcatgccaactcacccccaaaagcccaaaacaatactctcttcgttgttttttagttgtcactggatagttcaattttgcactatccagcgacaactaaaacgaaaagaagtgactaccgcgctttcgttttccatggcaactcagctagcagcgcctcagcaaatgccctgcaggagatatttccagatgcgaagccacgaaggtaacgccaagcgtggtcgagccccatctgtgctgtgcctgtgctccttggagccttggtccggacatctgtttggcggtttgggtcgataagatatagtaggggcggtactcctttcgtttcgcgtccagacagacagccgcgcaccaccgaaattggctctttcctctgattttctcgagcgggggtccaaaggtcagctagctgtcaagaagaccgatcgaacggctgaaactttaaaatacacggttccaaaaaccagttgcgttaaatccagggcaattctaggttcagacgtctgtctcaaaactattcgcatcgcaaatacattgtcattttcggtaaacgaatagagtgcccttttttttgttg

SEQ ID NO: 86267 - DNA, 2019 bp, Zea Mays
gggagagaaagccagacaggactcctcctcctcccccttccctccccctaaaagctaaaaacatttggagagagagagagggagatcgaggggaaaccgagagcaaccaagacgcacacgacgatggagcgagcggacgaggacgcgtgccgggtggcgctgctggacgctgacggcggcggcggcggcgagggcggcaagaagcagcagcagcagctcgcggcgcgggtgtgggaggagtcgaggaagctgtgggacatcgtggcgccggccatcttcagccgcgtcgtgacctacagcatgaacgtcatcacgcaggccttcgccggccacctcggcgacctcgagctcgccgccatctccatcgccaacaccgtcgtcgtcggcttcaacttcggcctcatgctgggcatggcgagcgcgctggagacgctgtgcgggcaggcgttcggcgcgaagaagttccacatgatgggcgtgtacatgcagcggtcgtggatcgtgctgttcatgtgcgcggtgctgctgctgcccatgtacttcttcgcggaggacgtgctgctgctgacggggcagccgccggagctggcggcgatggcggggaaggtgtgcgtgtggttcatcccgctgcacttctccttcgccttcctcttcccgctgcagcgcttcctgcagtgccagatgaggaactccgccaacgccgccgccgccgcagccgcgctctgcgtccacctcctcgcaagctggctcctcgtctccaggctccgcttcggcctcgcgggcatcgccctcacgctcaacttctcatggtgggccaccggcgccatgctcttcgcctacgtcgcatgcggcggctgccccgacacctggcacggcttctcgctcgaggccttcgccggcatgtgggagttcgtcaagctatcctccgcgtccggtgtcatgctatgcttggagaactggtactaccggatcctcgtcttgttgacgggaaacctaaaagatgcagccattgccgtcgacgctctgtccatatgcatgtcaattaacgggtggcagatgatgattccgttggcgttcttcgccggcaccggagtgcgtgtggccaacgagctcggcgcgggcaacggggagggcgccaggttcgcgaccatcgtgtcgacggtgacgtcgctggtgatcgggctcttcttctgggtgctcatcatgggcctgcacgacaagtacgcgctcatcttcacctccagccccgtcgtcctcgacgccgtcgaccacctctcggttcttctcgccttcaccatcctcctcaacagcatccagcccatcctctcaggtgtggccgtcggctccggctggcaatccatggtggcctacgtcaacatcggctgctactacctcatcggaatccccatgggcatcctgctcggatggctcttcaaccttggcgtgctggggatctgggcggggatgatcggcgggaccgccgtccagacgctcgtcctggccatcatgacagtccgctgcgactgggaaaaggaggccttgatcgcgagcacgcgcatgggcaaactgtcggaagttcggtgatggcaggatctggtgctgcacatctgaacgagcgcccgtgatttttaagctctggcgggatcgtgtgttcccgcatgttagtttcgccaaattttgcctcgtggaaaagcaacgcaaggtgctcaggaatcagggacacaggtcgccggggcagctcttgaagacgacggaggaggggcttggtgtggctatgatggttttggtgcttttgcttatgggctttatggtggtaacttcaaatcaaatagcttgactgtggaccgttgatctggatgtgttttatcatatattacttcatagaaggtaataataaaatttaattgttttaaattttggaaaaaacgaagttttcaaatatgttgtgtatttctttttggaaacctggtagatcatatctaatccttttgtccgacgtgacggataattagcagtgtt

SEQ ID NO: 86268 - DNA, 1643 bp, Zea Mays
gggagagaaagccagacaggactcctcctcctcccccttccctccccctaaaagctaaaaacatttggagagagagagagggagatcgaggggaaaccgagagcaaccaagacgcacacgacgatggagcgagcggacgaggacgcgtgccgggtggcgctgctggacgctgacggcggcggcggcggcgagggcggcaagaagcagcagcagcagctcgcggcgcgggtgtgggaggagtcgaggaagctgtgggacatcgtggcgccggccatcttcagccgcgtcgtgacctacagcatgaacgtcatcacgcaggccttcgccggccacctcggcgacctcgagctcgccgccatctccatcgccaacaccgtcgtcgtcggctccgcttcggcctcgcgggcatcgccctcacgctcaacttctcatggtgggccaccggcgccatgctcttcgcctacgtcgcatgcggcggctgccccgacacctggcacggcttctcgctcgaggccttcgccggcatgtgggagttcgtcaagctatcctccgcgtccggtgtcatgctatgcttggagaactggtactaccggatcctcgtcttgttgacgggaaacctaaaagatgcagccattgccgtcgacgctctgtccatatgcatgtcaattaacgggtggcagatgatgattccgttggcgttcttcgccggcaccggagtgcgtgtggccaacgagctcggcgcgggcaacggggagggcgccaggttcgcgaccatcgtgtcgacggtgacgtcgctggtgatcgggctcttcttctgggtgctcatcatgggcctgcacgacaagtacgcgctcatcttcacctccagccccgtcgtcctcgacgccgtcgaccacctctcggttcttctcgccttcaccatcctcctcaacagcatccagcccatcctctcaggtgtggccgtcggctccggctggcaatccatggtggcctacgtcaacatcggctgctactacctcatcggaatccccatgggcatcctgctcggatggctcttcaaccttggcgtgctggggatctgggcggggatgatcggcgggaccgccgtccagacgctcgtcctggccatcatgacagtccgctgcgactgggaaaaggaggccttgatcgcgagcacgcgcatgggcaaactgtcggaagttcggtgatggcaggatctggtgctgcacatctgaacgagcgcccgtgatttttaagctctggcgggatcgtgtgttcccgcatgttagtttcgccaaattttgcctcgtggaaaagcaacgcaaggtgctcaggaatcagggacacaggtcgccggggcagctcttgaagacgacggaggaggggcttggtgtggctatgatggttttggtgcttttgcttatgggctttatggtggtaacttcaaatcaaatagcttgactgtggaccgttgatctggatgtgttttatcatatattacttcatagaaggtaataataaaatttaattgttttaaattttggaaaaaacgaagttttcaaatatgttgtgtatttctttttggaaacctggtagatcatatctaatccttttgtccgacgtgacggataattagcagtgtt

SEQ ID NO: 86269 - DNA, 115 bp, Zea Mays
gcgtcgacggcggcggcggcgagcggcgagcgtcgacggcggcggcggcgagcgggcagagacagagagaagagagaagcgagcgcgcgcgcgtgaaaatgaaccgcgcaccggg

SEQ ID NO: 86270 - DNA, 1624 bp, Zea Mays
accacacacacacagacacaccaccacacgccggtgagccggtctctctcgcccccgtgcccgtgcgcgccacctagccgttcgttcgcatccatccgtccatccgtcacacgcacaccaccaccaacccgcgcggccgtgtctatctgggtctgggatcgagtagcaagcaatggcgctggaggccgtggtgttctcccagccccaggcgggccacttcggctgcggccgcggggactcgccgtacgcggtgccgtggagcgacctgctgcagggaggaggaggaggagggtttggcgatgtctgcgccgcgggggagtgggtcgaccagcacgacctcgacacctgctgggccgcgcccaccgtgggggacgactgggactggggggaggcgctctcgcgggaccactcctcctcggacgccgcctccacggaccacggcagcaggaaggcggcgcccgagccggcggcggggaggaggaagcggaggcgcaccagggtcgtcaagaacaaggaggagatcgagagccagcggatcacccacattgccgtcgagcgcaaccgccggcgccagatgaacgagtacctcgccgtgctccgctccctcatgccgccgtcccacgcgcacaggggtgaccaagcatcgatcgtgggtggcgcgatcaactacgtgagggagctggagcagctgctccagtcgctggaggtccaaaagagcctgaagcagagccgggggcggcggccagcaggcggcggcgccagctgctcccccccgttcgccggcttcttcagcttcccgcagtactccaccgccccaagcaccacgagcagcagcggcggagagaaatgctgcggccacgacgccgcggccgcggacatcgaggtgacgatggtggaaggccacgccagcctcaaggtgctggcgcgccgccggcccaagcagctcctgaagctcgtcgccgggctgcaccagctgcgcgtcccgccgctccacctcaacgtcaccgccgccgtcgacgccatggtcctctacaccttcagcctcaaggtggaggatgactccaagatgggctctgtcgaggacattgccaccgccgtgcacgagattctcggcagcatacagcggcagcagcaggaggaggaggaggaggagaccgccgccatgtgaaactctgcaccacctgcatgtccggcaggcacactgccatcctgccaatggaatccattgcctgtgcatgtgatgactgtgattgcgcccccttgctaggcacagacacctgagcctgccatgatgcagcaatactgtcccagtccggccgtggtcgcaaagaatatgctatgagaaatcttaggctagctgtaatctaagcaccacctcccttctggagtgagagcacttgtgtagattattgacagatacagctgatctgccctctcgagctacataccactgcgcgcttacatacgccgtcgttggcgttaacaggtctcgactctcgagcctgcctgccagacagaatgatggctcggcccgtgatctatatatgatgtgcttactgtgtatcagtagctgctagcccgctaccatatactactatatacacaccactacttcatccggaca

SEQ ID NO: 86271 - DNA, 477 bp, Zea Mays
atgacggcggctgcgaccgcgccggcgacggcgacgaagccgagggcggaggcgcgcgaggcggcgccgctgccggaaggcgcgacggtgggggcgccggccggggtggtggagacggacgaggtcggggccttcgcggacggcgcagaggcggcggggccctcggtgggcggggccggaggagaggccagcggggacggcgccgcggcggtcggcggcttggcggccggcgccggggcggtggccggggaccgcacagggggtggcggcagcggggccatcctgggcgcggccttgggagctgtggtcggggtggcggccggggcctgcgccgccgcgacgacggcgaggagggcgacgatggcggcgaccacggcgaagcgagccattaggatagttgcggcggcggaggaggaggaggagatagactcggctagagatgcggctggagaagcgggcggttactggagagtgtga

SEQ ID NO: 86272 - DNA, 1347 bp, Zea Mays
atgcagcagattttggaagccttgggccagatggaggagcgattgatgacaacgctgggaagcagatgcgacgcgatcgagcaccgcagcacgacgaccgtggaaaatctgaggggccgccgcggccccaccaccacttcctccgtcgccgcgccgcggtacgacgacgacgcgttcggctcttcggcgacctcggcgtacgatgacgagttcggctcttcggcgacctcggtgtacgatgacgtgttcaccactgtcgcccgcttcgcggcaccttctccttgccacgacgacgacctgcttggtgcgtttgggattttcatccccgaccgcgaggcgctcaacggcaaggcgacggcccacaaccgcttcgacaccgcaccgcgcatggaatcggagtcggagtcagagttcctcacctcccttgctgcccaggcttcctcggccgaggaggccatggtcacggccgcggacgcggggagccccgcaaggctcaacccgcgctacccgtgcctccccgagggcgcggtgttgttccatcgggatccggacgagaaggtcatcatcgacgggacggagttgtccggcgaagtccaccgcctctgtttctccttgtcgtcaccagaccaggcgatgaaccccgccactcggagtcagaggcgatccgctggaccctgctcgtcatcaagttggaagcgcggcacgtgcgactgcgtcaggacttgcgtcggcgtcgacgtccccctggagcggctcgacctagcggggagagcgtccgacctgggcaccctcgccgtgctccccggcctgcacaccctccgcatctccgacaacgtgcgctccggtgcgttctccaacatatccacgctcgccgtgctcaacatgtcagcggaggtgatggggttgtccgagtcgggaaatggcgggaacgagcatccgcaggagcaaggtgatacttcagttggtgtcgtacgtgatgttttcaacccgtgcctcagtgaatctggtttcgataagcatctgaccagggccatcttcatcgaccttgactcaactaacgttggcactggcttcgggttgtggtccagcggggctaacaacaagaacacgtccatggttgagcagatgccgaggtacggggtcttcaggtcaaccaaagtcgcgaaggtgatggaggccatcgataggggtttatttgtgccacctgggagctctccctaccacgatagccccttgctgcttgggtacaatgccaccttattagcacaacacatgcatgtggcttgcctggagctcctcgagaagaatcttcagcctataatctacatctgggatgcaggcaaataa

SEQ ID NO: 86273 - DNA, 1909 bp, Zea Mays
actcgtattgttcaaaggaaaacgggagaccaggttcacttctaaaaacggaggaaccggcattggccccaaccggcaatgccagcacaacacatggatcctacaaaaatctcgggcacatggcatcgcggcgctgtccaaccggggggtgtgcccggcccggcgagccgcttgcttttattgtatttatatttatacgagccccatgggcgcttgcctcagtcgtttgcccctttggtccctctccctcccccgtccgccctgcactctccagctcaacaaggaagaagagggggccttcaccacaccactcgattcctctttagagcacgacttacgaagtgtgcccaggccgtcgccgccgaccagcaaaagggctggaaagcccccctcttttgtgctgtgcgtgcaactcggctcctgccctgccatcttgctttccaagacccctgcgcccccagtcccataattagttaggattaggatcaccaccatttccaaatccttgcagagctgccgaagcgcggatcacagatgaagaggcaatccaagaggcccaccgccagccgcgaatccccagaaacaggggagaagcagaagctggcgttcgcggaggaagaggccccgccggcgcggaaggtggagcccgacgacgaggccgagatggacgaggacgaggacgagctgggcccgggcctgggcggcgggcgcgcggcgcggtcgccgtgcgggctcggggagaagaagcggcgcctggcgctggagcaggtgcgcgcgctggagcgctgcttcgagacggacaacaagctggacccggaccgcaaggcccgcatcgcgcgcgacctcgcgctgcagccgcgccaggtcgccgtctggttccagaaccgccgcgcccgctggaagaccaagacgctcgagcgcgacttcgcggcgctgcgcgcgcgccacgacgccctccgcgccgactgcgacgcgctccgccgcgacaaggacgccctcgccgccgagataagggagctgaggcagaagctgctgcccaagccggaagccacggtgaagctggaggcgacgacgggcaatgacacggcggaggagcgccgccaggcgacggccggcgcgccgcccgcgggggcctgcaaggacggctcctcggacagcgactccagcgtggtcttcagcgacgtcgaggcgtcgccctactccggcggcgcggcgttcgagccgccggccttggccgggctcggcgcgccgttcctggacacgtcggtggcgccgacgggctgctcgtctccccccgttttcgtcgagaccaagtggcagcagcacgggccgacacagtacccgttcccattcgactcgtacaaggcctgcgccggctatggcttcacggaggaatggctcgccagctcggacctcatcggcagcgacggcggcgcggcggggttcttctccgaggatcacgcctccagcctcaacttcaactggtgcccgagtggcatccagggctgggagtgaagaggggtttttgatctgcacggctagtgtaaaaaaaccgatgttacggtggcatttgtacatgcatggaactggagtctagtgacctggcctggcgagtgtggtgtggccaaagctagaggacatccagcgcaaaaggcgggaacaggagcagtagtagcctgtaacaataacggaataacttgagccaggctagtaaaaaaagaggatgtaaatgtaaaaagaggctgtcgcaccactacggcactatcacttggatgcaacatgcaatgcagcaaatcggcgacgagagcgtctgaaggggaaactggtaagcaggctgcaatttacggtgccggatgagatacgtcaaacctctaatcaaaataaatgttctttgactcgtttacatttg

SEQ ID NO: 86274 - DNA, 1595 bp, Zea Mays
atgggcgcttgcctcagtcgtttgcccctttggtccctctccctcccccgtccgccctgcactctccagctcaacaaggaagaagagggggccttcaccacaccactcgattcctctttagagcacgacttacgaagtgtgcccaggccgtcgccgccgaccagcaaaagggctggaaagcccccctcttttgtgctagctgccgaagcgcggatcacagatgaagaggcaatccaagaggcccaccgccagccgcgaatccccagaaacaggggagaagcagaagctggcgttcgcggaggaagaggccccgccggcgcggaaggtggagcccgacgacgaggccgagatggacgaggacgaggacgagctgggcccgggcctgggcggcgggcgcgcggcgcggtcgccgtgcgggctcggggagaagaagcggcgcctggcgctggagcaggtgcgcgcgctggagcgctgcttcgagacggacaacaagctggacccggaccgcaaggcccgcatcgcgcgcgacctcgcgctgcagccgcgccaggtcgccgtctggttccagaaccgccgcgcccgctggaagaccaagacgctcgagcgcgacttcgcggcgctgcgcgcgcgccacgacgccctccgcgccgactgcgacgcgctccgccgcgacaaggacgccctcgccgccgagataagggagctgaggcagaagctgctgcccaagccggaagccacggtgaagctggaggcgacgacgggcaatgacacggcggaggagcgccgccaggcgacggccggcgcgccgcccgcgggggcctgcaaggacggctcctcggacagcgactccagcgtggtcttcagcgacgtcgaggcgtcgccctactccggcggcgcggcgttcgagccgccggccttggccgggctcggcgcgccgttcctggacacgtcggtggcgccgacgggctgctcgtctccccccgttttcgtcgagaccaagtggcagcagcacgggccgacacagtacccgttcccattcgactcgtacaaggcctgcgccggctatggcttcacggaggaatggctcgccagctcggacctcatcggcagcgacggcggcgcggcggggttcttctccgaggatcacgcctccagcctcaacttcaactggtgcccgagtggcatccagggctgggagtgaagaggggtttttgatctgcacggctagtgtaaaaaaaccgatgttacggtggcatttgtacatgcatggaactggagtctagtgacctggcctggcgagtgtggtgtggccaaagctagaggacatccagcgcaaaaggcgggaacaggagcagtagtagcctgtaacaataacggaataacttgagccaggctagtaaaaaaagaggatgtaaatgtaaaaagaggctgtcgcaccactacggcactatcacttggatgcaacatgcaatgcagcaaatcggcgacgagagcgtctgaaggggaaactggtaagcaggctgcaatttacggtgccggatgagatacgtcaaacctctaatcaaaataaatgttctttgactcgtttacatttg

SEQ ID NO: 86275 - DNA, 1145 bp, Zea Mays
gcggccccgcccccttttttatctcaacgacccttcccttaccttcccatcccccatttcctcaacggaccccgcccgcgatttcactccttctctcccccgcgcgcgcggcctccccgtgcccgtgcgtgcgccaacaccgcgcagccacgccacgccacgcccgtcgaaagccccaagcacccggccagcacgcgcagtaggccgccgaggcacagagccggcggccggcgcctcggctatgcggcggtcagagtgggaggaccggtgcaagcggcacccggagcaccggacgtccaagggcgtgtgcccctactgcctccgcgaccgcctcgcgcacctctccgcgtcctcctcggcgaccaccaccacgcgcgcgtcctcgtcctcggcgcccacgtccccgtgctcctccggcggctcgtccccgccgccccagtaccgcgccgcgctctccgcggacgtcagctccgtccacgtcgtcgttgccgggtcctccttcgccgacgtcgccgccttctcccagccgctcatgccgacctccgccaacaagaagccgccgcccgcgagccaggacgagccggccagggggaagggcgaggcgaagaggaggaagagcggcaagaagaagaagatcgggaggttcctgtccaggctcgttggcgcggagaggcggcggcacaccggcgacggcggcggcgacggcgacggcgccgagctcttccactccagaaccatgaaggagaagacggcgtccaaatgggtgttcttctgaatcccctcgtcagatcagatgccagcaccatgctgcacacacacgcgcgcttgagggccggtttcctcgatcggtcggtatgggagttttttccccccacttcaagtactcctgtgcttcaatccgctgcagttagttagcatggtttctctttccgactgtgtacacgagacaagccaaaactatggatcattataaggttatttgagaaatattgtatgcttattttgtaaaattagaagaataaaaaaaagaaaacagctacgaagtgtatattgtgtggctgccagttctatttccagtatccaacagtgtttagtttgtatatatggcttgtgtgccatgataatttctttggattggcgacgaa

SEQ ID NO: 86276 - DNA, 105 bp, Zea Mays
cttttaccaaccatcagttggtcttggtcatggactcataccagagccaattccttttctacttactaatcgctagcacttaccatcaattggtcttgtcatagc

SEQ ID NO: 86277 - DNA, 1165 bp, Zea Mays
aagagcctgccaacccgcctatccaagtctactccccctcactccccacatcctaatctcccaccacttcccccacacactcccctcttccgccatggtcatggacaagtccaacctcccacagccgccgccgcctcctccctcctccgcctcctcgctcaagtccctcaacaaggcctcctacaagatctccaagcagtcgtcctccgcctcttccgctccctctcccgctcccccttccaccatgagagcgccttccccgccgccgccggctccccgcccacccgcaccacttccgccgccgcaggcctcctccgtccctgccgaccacccgcctccccagcccccggtgtacaacatcgacaagtcggacttccgcgacgtcgtccagaagctcaccggctcgccgtcccacctcctgccgccccagcccgcggccgcccccgcccccgcccccgtcatggcgccacccccgcctcccctcatggcgcgtcctcctccgctgcctcacaccatggcgcccccgcctccgccgccgacggcgataccctcccgcctccaccgcatccgcccgccgcctctggccccgccgcgcccgccgcccatcctccagccggccccgccggcgctctccccgctcccgccgctcccggccgtctgcatgaccgcggagtcgcccatctccgcctacatgcgccgcctccgcgggatgccgtcgccgatccacgtgcccacgtcgccgctcggcttcggctgcctgccctcgccgcggacgccgccgtcgcccggcgtgcccatgccggccaccagtccacgcgtccgcgacccgtgacgcgggaacccaccaccactgctgcgccgccgccagcgccgatgtgtagatacggctggtgtaggagagagagatccggcgaccaaaggcggaagcagcgagaccttcacattctgttagctccatctctctctctctctctctctctctctctctctctctctctctctctctctctctctctctctcttcaaaatcaaaatctttagctataaaaattctttcttttttttcctcctagcgtgctccacctgccttgatattttgttggtgtatatgggacatgcggcgcttggttggcaaccaatatggattgctcatgtttgcctaatt

SEQ ID NO: 86278 - DNA, 807 bp, Zea Mays
ccaaaatgaaaagatgggtgctgagttttgttgaataaatctggatgtattacctgttttgcttatggactacaaaatatttcagggagctgggtatccgaagatgggccataactgataacaaactagaagaattgttttagttatccctgcgaatgttcgatacaagattaccaccaggtgtaactgttatgtcaccttttgccgatgattcttcgcttaacaaaattggagtggaggtatggtcactccttcaagaatcgaacaggcaaacatataacctatacatttttcttaaccaatcctatattcgtgcccatccatttatctgcattatctacacacattgacacataaacaatctatccatgtactaatgtgtagtttgacctcctaatctgcttccttaaaaatgacttgtcgttttctatttgaagagcttcctggaggagctattttcagggcttcgaacaatccagcttttgcgagggttgactgtaggcatgtgcctttcattctcgtgcgcccaacattggagaccgatggctgaggcggtgttgttaaaagatggaagacaaagcggtctctattgcgccaacaaagagtcctgaacattttgaccgagcaagctctccggaagagccaacctcttattatatccaacttaaatcatgaaaatgctgaattactgactgccgaaggcctcaaggggacggtaaagatcgaacagctatctttccaaatgtttcaaagactcagctgtatcgcaaagtgagagagatatctgactatgttggcaatcattag

SEQ ID NO: 86279 - DNA, 288 bp, Zea Mays
agacccggagaaactggagttccaaatcgtagtccgtgtcaaccagttcaatctcatcaatcttatcaggccatctcaagtccagtgactcatcaaccagaacaaatcagtacatgttgcgccccatcgtctgtatctcctgtggaagctcgtcgcatacgtagacaattgttgaatgagagaaggttaatatactccggtgcattcgcatcctctcaacaggcctcaacattacaatgtggtcacttcgacccaaattttgttgaagcactcaaaggtacgtctaat

SEQ ID NO: 86280 - DNA, 915 bp, Zea Mays
tcctcaccgttggactggacgtgcccttatcctcttatcccagcagccggcgcccgccgcgcgctcgacaaactgccgcgaactctcccggcctcacactccttgcgcccgccgcggcagatgccgctcgccggcattgccctcacgcccctcctcgtctcacctctcgcgccttccccgcgccgtagccgtgtagccacttccgccgcgagaaggccaagggctctccagcgagctcggtgctcggctacagccgcttccggtgaagccggtgagctgtcgcacgcgacactgctatggagggcggcgaagctacccatctactccgtagcgctaataccactcacagtagggagcgcttctgcttattatcatgcaggcttattctttaccaagcgctattttgttctcctgacagcagcagtcctcgtgatcacttggctcaatctcaggtaaaaatgatttttttttaaaaaaaatgggaagtcatttttaacgcaatgtcagttcattgaacagaggcttatggtgtggattattagttgaaaacctagaacagagattgtagaagtcaaatcctttgtttgacttgactgcagcaatgatgtttatgactcggatacaggggctgatagggacaagaaagaatctgttgtcagcattactggcaggtgccgtactcttgtttcatagagctagtagcattgtaaatggctggcaactggcatggttggttttagaagtgaaacatgatgctatgttgtgatctggttatgcagccgagcaatgacacaaaatgcggcgaacttttcccttttcctcggctttgcagggctactttgggcctttgcagaagccaaggatatcagattcattttattggtgatctctgcaatcttctgtggttatgtttac

SEQ ID NO: 86281 - DNA, 1711 bp, Zea Mays
tcctcaccgttggactggacgtgcccttatcctcttatcccagcagccggcgcccgccgcgcgctcgacaaactgccgcgaactctcccggcctcacactccttgcgcccgccgcggcagatgccgctcgccggcattgccctcacgcccctcctcgtctcacctctcgcgccttccccgcgccgtagccgtgtagccacttccgccgcgagaaggccaagggctctccagcgagctcggtgctcggctacagccgcttccggtgaagccggtgagctgtcgcacgcgacactgctatggagggcggcgaagctacccatctactccgtagcgctaataccactcacagtagggagcgcttctgcttattatcatgcaggcttattctttaccaagcgctattttgttctcctgacagcagcagtcctcgtgatcacttggctcaatctcagcaatgatgtttatgactcggatacaggggctgatagggacaagaaagaatctgttgtcagcattactggcagccgagcaatgacacaaaatgcggcgaacttttcccttttcctcggctttgcagggctactttgggcctttgcagaagccaaggatatcagattcattttattggtgatctctgcaatcttctgtggttatgtttaccagtgtcctccattccgattaagctaccaaggactaggcgagccgttgtgtttcgctgcatttggtcctttggcaaccacagccttttacttctcaaacagcagcttaaatacttcgagcggaggagcggctcttctccctctcactaaaacagttatagcttcatctgttctcgtcgggctgacaactactctgatactcttctgcagccatttccatcagatcgatggagatctcgccgttggaaagatgtctcctctggtaagaatcggcactaaagcaggatcgcggatagtgtcgattgggattgtcatgctttacattctcttggctacgtttgggacatgcggatctctcccgccatcttgcattgtcctctgtgcccttactctgcccatgggcaaaacggtcgtggactacgtgctgaaacatcacgaggacaacgcgaagatattcatggcgaagtactactgcgtgcgcctgcacgcgctgtttgggatggcactggcctctggtttggtcttggcccgaaatggtatattagcctgacagacaggctcataggcggcgctgaaatccaggagagggtccagagcaccctggagtttcagaatcagcgagcaccctgttcctcaatttatgttctgaatctgaactacttctgattcgactatcgaacaggccgatgagaatggggcgcagtactgagcagctgcagttttgccaagaaacggtggagggaatgggccctaggagaagtagaactactacagcgtcagaactcagatgcacaccggcccgtatcggacggcaagttcggtgctcgagttcatttggttcagcgtccttgtacgctttggtccgctctcgggggcttgcttgctcgtgcacggtcagactgccgttgcgccggggtccgggggatgccagtgtatgtatgcatatggattgaatcccaagcaaggacgagtcatgcactcatgtacaagcattacttctgtgcacagacgaccatacagattatatgagatctcactcacacctttttttt

SEQ ID NO: 86282 - DNA, 198 bp, Zea Mays
gtctggcgggcacaggcagagcaaaagtgcaaggtttttgcttggattcttctacaggacaagctccttactgctaacaatcttgtcacttggggttggccgcaccaaccaaaccgctccctctgcaatggtcccttggagaccagcccccacctctgtttgcaatgcccttttgcccgtgcggtgtggcatcagatt

SEQ ID NO: 86283 - DNA, 276 bp, Zea Mays
atggggagctggagatcatgtcatgctgctgcctgcgtggtgcatgcattgttcatcagcctgcgcagggcatgtgacgcagccatctcgatcggaagcgtcgtgcgccgacaccagttcgtgttcgtgactgcatcagactctctgcgccggtttccgcggccaccggggtcactcttcctgatcgaggagggccgcagtgatccatttgcagctcgatcgcagccgccttcgctcccatgccaggttcagttcacctgggcgatcagacaataa

SEQ ID NO: 86284 - DNA, 909 bp, Zea Mays
gtgatgaggagaatcctaatatcgcgagcttggtctacctcgtttctgaatgcgtgacaaatggatctttaagaagtcaccttactgagtggaggaagcgtgaaatgctcaaatggccccaacgggtttgcgctgccattggcattgcgagaggggttcagtttctgcataatctgactgctcctgggatcgtacagaacaatctcaacatagaacatatcctgctggacaagaccctcacgtctaagatcagcaacttcagtcttccaatgatatcaactagcaagaacggcaagattctctcagagaccccatttgctgtccatgaagacaatgatattggcagtgctcagaacgcggcacaaggtgacaaggaagacatctaccagattggcctaattctcctggaggtgatcacaggcaaaccaacagagtcccaaaggcaactggagtccctgaaagctcagctaagtgaggcgctaactgaagacccagacaggctgaaagacatggcagacccggcgatacacggtacttttgcagtggactcactgagcacagttgccgagatagccctcaagtgcacgactggcgacccaagcgaccgaccttccatcgacgacgtgctctggaacctgcagtactccatgcaggtgcaggatgggtgggcgagcagcgagagcttaggcttgagcgtcaaatctcaggcttagataaaggcgcagtgattcggttcctatgcaaatgatgattatgaagctctatgcgccatcactctgcctctagttttctggggttttttttttgggaggaagagaggtcgttggtatagtctctactgtatatatgtggaccttacttttttcagaactgttgtttatggtacctgtaaaactcaggttctcttaa

SEQ ID NO: 86285 - DNA, 94 bp, Zea Mays
atttacaagcgagggggcttgaaccaaagccctcaactgaacagactttacagaatcaaggacaattcgacatgtttaatacacaaacatttgt

SEQ ID NO: 86286 - DNA, 828 bp, Zea Mays
atggcggagaggtccctcccgcccgcggtgccggcgtcgcccgagccagcctcctcctccgcggtctccaccacgttcagctcgccgctcgagcccgtctccgcgccggcggcggcgacacccgtgcacagcacgtacgtggtgcaggtgcagaaggaccagatataccgcgtcccgccccccgagaacgcctacttcgccgagcgctaccggaacgagcgcggcggcgggggcaagaagaagaagcgcgggagcagcgagtggtcggccgcgtgctccccgtgcgtcctgcgcacgctcggcgcgctgctcgcggccgccgcgctggtgggcgccgccgtgctcatctcgctcgtcgtgctgcggccgggcgtcccgggcttctccgtcgagaggatcgccgtgatcaactcgacgcggcagcagcgcgtggactacgacttgttcctcacggccgtgaaccccaacaagatgacagcgctgtggtacaggagcggcagggcgaggctcacgcaccacgggacgaccctcgccaagggcgacgtcgggcagcccgcggacggcggcgaggacgccaccgacttcagcgtgctgctgcaggggcagaagcacaacggacgcacgcccagggcggtggagaaggggttcagcgggtccaaggaccacctcgcgctccagctggccgtggaggtcaccgtgcaggtgcacgtcggcgcgttcgggttcgggcagaggaggctggccgtggactgcgggatcaccgccgccgggcttagcaaggacgtccacattgcgtcgcagaattgcaggagcagcttccggaactga

SEQ ID NO: 86287 - DNA, 1862 bp, Zea Mays
gaacacaacccattcaggggtggacaccaaccgaagcaacagaatttagcctctctcgaaattctgcgtccgcctataaatccgtagctcgaaatacacgggcggcgcactttccatcgaaagcccccggcctctctctctctctcgcctcgcggcgttggattgaatggcgacgaccatgaacgtcagggcgctgtgcctggccgtcgcgaccgtcttctgcgtgctctcacggcagagcctcgccgccggcgagggctccaaggaggcggacaggatcgccgcgctgcctgggcagccaccggacgcggccgtccagcagtactccggctacgtcagcctcgatgacaaggccggcaagtcgctcttctactacttcgtggaggccaccgctgatccggctacgaaaccgcttcttctctggctcaatggagggcctggctgctcttcgtttggaatcggagcattccaggagataggtcctttccgcgtggacacggacggcaagaccctctgcaatttcaaatatgcctggaacacagtggcgaacgtgctgtacctggagagccccgtgggcgtgggcttctcgtacgccgccaacacgggcgtgtacaaggtgatgggcgacaacatgaccgcggacgactcgctccagttcctgctcaagtggctggaccgcttcccggagtacaagggccgcgacttcttcatcgccggcgagagctacgccggccactacgtcccggagctcgccgcctccatcctcgccgccaataacgcgcggcccaaggacatggcctccgtcaacctcaagggaatcgcgatcgggaacgccatcctggagttcgcggcggagcagagcgcgttgtacgagtacttgtggcagcacgcgttcctgtcggacacggcgcacacgctcatcggccagcgctgcaagaacgccgaggacaactcgccgctctgctcggggaccaaggacgccgcctacaaccagctcggcaacatcgacgcgtacaacatctacgcgacgacctgccatgacaagaaagtcaagcccagaggatccaactgcatggacttggctgatccttgcgctcaatactacgtggaggcgtacctgaaccagccagaggtgatgaagaccatccgtgccaacacagggctcaagtacagatggactagatgcaggggcacgttctacaacctgctcaagttcggtgactcgccgtcgaaatcgatgctgccctacgtcaaggccgtcgccgccgccggcgtccgcgtgtgggtcttcagtggcgacctggacgccatggttcccgtgatcgcgacgaagcggtccatggagaagctcggcctcggcgtcgtggaggactggcgcccctggtccatcgacgccaaggaccaggaggtcgccgggtacgtgatcgagtacaagggcgtggtgttcgcgacggtgcgcgggtccgggcacatggtaccgatcgaccagccgggccgcggcttcgctctcttctcgtccttcatcaaggggcagccgctccccaaggccgcgccgatggtcgacggatgaagagccacggtcgttgggattccggagtttcacccttgtctcgtcaagtcaccatgcatattgtctccatttccacgttaactaccagaccgtgtacatactgactaaacgctcgatctgtgacctcaactgttgtatgaatgtttcgctgcagtaaacttactaattaagggtgtgtttggttctgattttaaaatctgcttctgaagctgaaccaaagggattcagcttttttgttgctactttgaaaaagctgcttttatgtattacaaatttaaaagtagtttggacc

SEQ ID NO: 86288 - DNA, 3283 bp, Zea Mays
gcctagactccttgagccttctcgtctccccccttcgtccgcaccctataacctttgcatcatcttccttgcccgcgccctaacccttgcaccctcctccttgctgccgccggggccgatctccgctgccgccagccatggaggacttctgcgtggtgtgcgcagatacgctggagtgggtggcctacggtccgtgcggtcaccgcgacgtgtgctccacctgcgtcgctcgcctccgtttcgtgatggacgataagaagtgctgcatctgcaagaccgtctgccccttcgtcttcgttactaaggccatgggtgaatacactagagtggttgctgatttctcagtgttccccattggggtaaatgagggcaaagctggtgatttctggtaccatgaggatactcaggcatactttgatgatgtggaccactacaggatgatacgggcaatgtgtcgactttcttgtagcgtttgtgacaatgcagaagatcaggttgcccttgctgctcaagcaaagcgcagaagcaagttcaggagcatcgatcaactaaagggacatttattccatgtgcataggttgcacatgtgcaatctttgcttggaggggaggaaggtgttcatttgtgaacaaaagctttattcaaggtctcagttagctcagcatatcaagactggtgactctgaagtggatggctctgaggtagagcgcaatggttttgctggtcatccattgtgtgagttttgcaaaagttcattttacggagataatgagatttacatgcatatgtccagggaacactattcttgccacatatgccagaggcagcatcctgagcagtatgactattttcggaactatgatgaccttgagctcaggcaaattgtatctacagttttacttggcgcctagctgggctccgagacccttggggaagtggtcataactgcattctcatatgtgctcattcaattcaattcagttgcattttcgaaaggaccattttctttgtgaagatgaagcatgcttggcaaagaagtttgttgtttttctgagtgaagcagagctgaagaggcataatgctatggagcacggtgggcgaatgtctcgttcccagaggaatgctgcacttcagatacctaccagttttatatatcgcagaaatgagcaagcacaacggcgtggcagaggtagggggcgtaatgctctccatgaccgatttgacagtcatatctcatcatctgcacaaaacggccaagcaactgccgatcgccgtcttgatagtgtttcagggtcatttcagtcattaagcattggatctagttctgggggagctgaagttggccaaggctcgaggactggacaagtgctcgaacagttgtccttcccacctcttttagacccagatattcctgacaacaacgttgattcttttcatgatgaaacctcatttccttcattatccgagcagcaatcaaggtatgcactagctctcagtcagagtgcaaggggcactgcgaggcttggggatgagtcactattcccccctttgcctgggtctagtgggtctaataacaataggggtgctggttcagtccaacagggactacaaagtctagccaagagcacacttgcagcaagacttcaacaacgtagcaagggccctgtgaaggtacttaatactgctcggccacgtccccctgaaaatgttgaagccctctctagttccacccagacatggcctacacctgatcagggcctagtcctgtctggatattctcagcttcgatctggaactcaaccaacaagggaaaatgccatgccaactatctccagtaacacagtgtggaatcctgttgctccaaacaagatgaagcactctgtttctacgcctaatcttgtgtctggtggatcctctgcccaagtatcattgagtacagcttatggtagcaacaaaagtcaggatcctcctcaaggtaaccaaactttgcctgttccagaggatttccgtgctgcaaacaaaactctggttgaaagaatgcgttctgctctgggaatggacgaggacaggtactctgcattcaaagagattgctggtgaataccgtcaaggtatcataggtactctggagtatctttcatatgtcgagcagtttggactgtcacaccttgttcctgaaatggctaggctattgcctgatcctcaaaaacagagggaacttgctgatgcatattatacaaatactcgatttaaaagcctacaagaaaacggaggtggaactagctcacaagagggcaaccgtaaaaagaaggggaaggggaaagctcctgtcacagaaagcagtgctgctaatgatgtgaatagtgcactagcagataacattctggagactgtaagaaggcttcaatcaaaccagcaggctcgggaaggaggagctgaggtgctgtcgaaggatgggtatcgaccttccaagggggtccaaccggcagctggatcttcatctaatctggacagtgatactagttccaacacaaaatcatctggtgcaaaagataacataggcaagggaggaggcaataagcaaccgaagaagacagcaaagtttctcagagctcgtttaggtgacaactcattagccacacttgatttaagtcgtccaagtgcaagccctgaacgtccagaaagggaattacaaggccctgagacagggttgccagcgcgaggtgcttggaagaatggcggggggcagaaactcttttcgagcaatggacggaaataagtcattccaactgcatagccgtggggacggggttgacagcgccaggtgcttggaagaaatggtggccagaaactcgtttttgagcaatggacaaagtgagtcactgcaactgcatttaggtgtgtccatatacctgatcaacaattaggcaatgccctgttcattgctaccggcagactgcgcaaatttcatagtcatccatttcaaattcgtaatgatgtggtgggcaacatttaatgtggtacaaatatactactagattttctgtgcattacaacggaacatgtttggtagtattgtccaaaaaaaacttgtcaagctaaaaccaagatacagagggtccgtgtcaacatgttactatgtgttttcagtgctttgtttttttaaaggaaatatcttgctgaagtatgcaaaccgtaatgtctaattaaacttatgattccataattttttcttagcccgttgtatcgtgaattggcgatagatgtatagtatatagcattag

SEQ ID NO: 86289 - DNA, 3174 bp, Zea Mays
gcctagactccttgagccttctcgtctccccccttcgtccgcaccctataacctttgcatcatcttccttgcccgcgccctaacccttgcaccctcctccttgctgccgccggggccgatctccgctgccgccagccatggaggacttctgcgtggtgtgcgcagatacgctggagtgggtggcctacggtccgtgcggtcaccgcgacgtgtgctccacctgcgtcgctcgcctccgtttcgtgatggacgataagaagtgctgcatctgcaagaccgtctgccccttcgtcttcgttactaaggccatgggtgaatacactagagtggttgctgatttctcagtgttccccattggggtaaatgagggcaaagctggtgatttctggtaccatgaggatactcaggcatactttgatgatgtggaccactacaggatgatacgggcaatgtgtcgactttcttgtagcgtttgtgacaatgcagaagatcaggttgcccttgctgctcaagcaaagcgcagaagcaagttcaggagcatcgatcaactaaagggacatttattccatgtgcataggttgcacatgtgcaatctttgcttggaggggaggaaggtgttcatttgtgaacaaaagctttattcaaggtctcagttagctcagcatatcaagactggtgactctgaagtggatggctctgaggtagagcgcaatggttttgctggtcatccattgtgtgagttttgcaaaagttcattttacggagataatgagatttacatgcatatgtccagggaacactattcttgccacatatgccagaggcagcatcctgagcagtatgactattttcggaactatgatgaccttgagttgcattttcgaaaggaccattttctttgtgaagatgaagcatgcttggcaaagaagtttgttgtttttctgagtgaagcagagctgaagaggcataatgctatggagcacggtgggcgaatgtctcgttcccagaggaatgctgcacttcagatacctaccagttttatatatcgcagaaatgagcaagcacaacggcgtggcagaggtagggggcgtaatgctctccatgaccgatttgacagtcatatctcatcatctgcacaaaacggccaagcaactgccgatcgccgtcttgatagtgtttcagggtcatttcagtcattaagcattggatctagttctgggggagctgaagttggccaaggctcgaggactggacaagtgctcgaacagttgtccttcccacctcttttagacccagatattcctgacaacaacgttgattcttttcatgatgaaacctcatttccttcattatccgagcagcaatcaaggtatgcactagctctcagtcagagtgcaaggggcactgcgaggcttggggatgagtcactattcccccctttgcctgggtctagtgggtctaataacaataggggtgctggttcagtccaacagggactacaaagtctagccaagagcacacttgcagcaagacttcaacaacgtagcaagggccctgtgaaggtacttaatactgctcggccacgtccccctgaaaatgttgaagccctctctagttccacccagacatggcctacacctgatcagggcctagtcctgtctggatattctcagcttcgatctggaactcaaccaacaagggaaaatgccatgccaactatctccagtaacacagtgtggaatcctgttgctccaaacaagatgaagcactctgtttctacgcctaatcttgtgtctggtggatcctctgcccaagtatcattgagtacagcttatggtagcaacaaaagtcaggatcctcctcaaggtaaccaaactttgcctgttccagaggatttccgtgctgcaaacaaaactctggttgaaagaatgcgttctgctctgggaatggacgaggacaggtactctgcattcaaagagattgctggtgaataccgtcaaggtatcataggtactctggagtatctttcatatgtcgagcagtttggactgtcacaccttgttcctgaaatggctaggctattgcctgatcctcaaaaacagagggaacttgctgatgcatattatacaaatactcgatttaaaagcctacaagaaaacggaggtggaactagctcacaagagggcaaccgtaaaaagaaggggaaggggaaagctcctgtcacagaaagcagtgctgctaatgatgtgaatagtgcactagcagataacattctggagactgtaagaaggcttcaatcaaaccagcaggctcgggaaggaggagctgaggtgctgtcgaaggatgggtatcgaccttccaagggggtccaaccggcagctggatcttcatctaatctggacagtgatactagttccaacacaaaatcatctggtgcaaaagataacataggcaagggaggaggcaataagcaaccgaagaagacagcaaagtttctcagagctcgtttaggtgacaactcattagccacacttgatttaagtcgtccaagtgcaagccctgaacgtccagaaagggaattacaaggccctgagacagggttgccagcgcgaggtgcttggaagaatggcggggggcagaaactcttttcgagcaatggacggaaataagtcattccaactgcatagccgtggggacggggttgacagcgccaggtgcttggaagaaatggtggccagaaactcgtttttgagcaatggacaaagtgagtcactgcaactgcatttaggtgtgtccatatacctgatcaacaattaggcaatgccctgttcattgctaccggcagactgcgcaaatttcatagtcatccatttcaaattcgtaatgatgtggtgggcaacatttaatgtggtacaaatatactactagattttctgtgcattacaacggaacatgtttggtagtattgtccaaaaaaaacttgtcaagctaaaaccaagatacagagggtccgtgtcaacatgttactatgtgttttcagtgctttgtttttttaaaggaaatatcttgctgaagtatgcaaaccgtaatgtctaattaaacttatgattccataattttttcttagcccgttgtatcgtgaattggcgatagatgtatagtatatagcattag

SEQ ID NO: 86290 - DNA, 402 bp, Zea Mays
atggagcagcgatgtcatgaatcacagattcgtcggcgcttccaaaataattcccagaatatgttgttcgcgaactgcagcgaatgtcggcatcctgtccggtttctcgggactggagtcgactcccagccccgatctcccccggctggagttcctggagaaatggaatggtcagttgcgattgctcgcctcagttacctattgagttcttgtgaaggcccttgttcttgccgcaaggcgcaagcttaccatccggataaccagaagaagtacgctgagttggataacaggttcaagaagtccaaggtgctgcaggacttgctcgagaagtccaagaagaacaaagagaagaacgagaggctgatccaggacaagtactgcctgcagggcgtcggggactgg

SEQ ID NO: 86291 - DNA, 171 bp, Zea Mays
tgcatattacagtaatcacattcgatacacacacttcggagataagagcggaagactttacaaacattctttaccttttcaaaactcaagttttacatgtttcgaaagagtaatatttattacaagtcctgatatactcagagtgcataacttattacaaaagcaggaagg

SEQ ID NO: 86292 - DNA, 691 bp, Zea Mays
caatgtaaataaaatacatggattattaatggtattatatagtatacttctggcagaccaaacctctagtaaacagactacagatgaagattatcgtcaaacaaacaggttgcatcagaagatcatcctctatagcactaacaggaggaatatcttctggaagttacattataatactcagtaccaaattccatccgccacatcaattttattaaccaaagaagatacataatcaggcaacctctttatgcgagttaatacaaatatagtatttgcagacatacaagagccaaaatctcggccatcgcatcttttgaggaaaatgatctgagtgttttttcaccagacacttgggctaagtccactgcccacggtattcatacaatcattctgttccccttccgactccatgccagcatgttgaccttgcttcttcaagaacggctgtcccagatttccttccacgttgaagtgtgactgcattccagcccaattaccaaaaaaaaacatgcaattatgccaatcatctctcagaaacttgattggctgatgcacatatgtacgtgttacaagtaatatcttggttgtttgactgtttcaatcccatgaactttgtcatcatcagtaataagagaaacttttttatcatgagtgaagccaattggggtagcgcacccgataaccattcaag

SEQ ID NO: 86293 - DNA, 342 bp, Zea Mays
catggacttcaacatggcatcggagccgaggttctcggaggcgattgtggtggcgacgaggcggtgcacgtggagctgctgaggtggtgctccggctggactgtagcggcgctcggtctcctccgaatccgcttcgtcttcctcggcggcggcgggtgcgtcatccttccgcgcgtgcggtagcagctgcttctcctgctcggcctccttctcctccacttccgtcggcgctgcacagcggtcgtccgcgtgcgagatccggctgccggaggacaccgggacggacgacatcaaggtgcaggtggaggacgagcgggtgctggtgatcagcgacgagcggcg

SEQ ID NO: 86294 - DNA, 414 bp, Zea Mays
atggccatcttgacgcgctacgtagttgttgtctcgagttttgctgcccccaaatggatatctaatcaaaataatttaaggcgctgctttctccccactaacggtgcccttccccaacggctgcgaacgcccttccccaatgtctccttctacgcgcgtcttcctccccacgcgctgctctggccgagatgccgccttctacgacgcgaacgccaacagagccagagcccgagcccatcccgccttcaacgccggatctcgccccaaatcctcgcccgccttcaacgccggcagccgctccccaaattcctccccaccaacgacacccttccccaaacccctccccgccttcaacgcagacagctcacccaaatcctcgcccacttcccatcgatggagcaaataatgcagtga

SEQ ID NO: 86295 - DNA, 438 bp, Zea Mays
atggtggaggcagaagtgctccttgcgctggagtacctgcacgtgattagggtggtctacagagacttgaagacagagaacgtcctcgtgagagaggatggccacatcatgtctccgactttgatctttcaggtaggctacgcggtcttgtcgatgctgatgagatcttccatgagctccgaccccaagtacctgcgcccagcccgcctgcatccaacccacatgcttcatgcccaagctcttcggccaaaggagcccaaagagcagcagcaccgacaagaaacccaagggcggcgagcccaggcagcggcctcgtgtccgacctcgatctcacggcgtaggctgggtgccgaactcgacgagatcccggcaataggcctctggcatctgcctaaggactccagccctactactccaggatgccatacaatttcttag

SEQ ID NO: 86296 - DNA, 2277 bp, Zea Mays
aacacacttacatcctccacaacgatcaccccaatccattctctcctcacacgggcgcgacccaaaaccccattcatcccctcctccggtctcgactgccatggccgccgggcgggccttccttggcgcgccgtgctcctccctcgccgccggcgcccgttgccttgccttcgcttcccctttgccccggaacctcacccccgcgctccgctgcggcgttcgcggtcgctgcatcgcctccgcctcctcgtcccctgactcgccccccttgccggagccctacgtgctcaccactcctctctactacgtcaacgctccgccgcatatgggaagcgcctacaccaccatcgcagcggacgccatcgcccgcttccagaggttgctagagaagaatgttatatttattaccggaacagatgaacacggtgagaaaatatctgcttccgcagaggccagtggtagaaacccaaaggagcattgtgatgcaatttcaagttcatataggacgctctgggctgacttagacatagaatatgacaagtttattcgcacaacggatcgtaagcatgaggctgttgtgaacgaattctattccagagtgttaaacaatggcgacatatatagagctgattatgaaggactttattgtgtgagctgtgaagagtacaaggatgaaaaagagctattggagaacaattgttgccctgtgcatctgaagccttgtgttgaaagaaaagaagataactatttctttgccttgtcaaagtaccaacataaattggaagagctactgacaagaaatcctgattttgtaaggccatcatatcgcttgaacgaggtccaaggctggattaaaagcggattaagggacttttctatttctcgtgcatctgtagaatggggcattccggtgccaaacgataccaagcagacaatatatgtgtggtttgatgctctattagggtatatttcagcattactagatgatggtgagcaggcaagtttgcagcaagctgttgatcatggttggccagcctcactgcacttgattggaaaggacatattacggtttcatgcagtttattggccagccatgttaatgtcagcaggtttaagtgttcctgatacagtttttggtcatggattcttgactaaggatggcatgaagatgggaaagtcactaggcaacacacttgaaccaaaagatctggtagaaagatttggtgctgatgctgttaggtatttcttcttgcgggaagtagaatttggcaatgatggggactattcagaagaacgctttatcaatatagtgaatgctcatcttgctaatacaattggaaacctccttaatcgtacacttgggctactaaaaaagaactgtaaatccgtactagcttttgattcaattgctgccgcagatggaggtttgttcagaaataagatagaaaatctggtggacaaggcaaaacaccaatatgaaaatcttttactgtcatcagcatgtgaaactgttttagagattggtgatcttggaaacttgtacatcgatgagcaagcaccatggtcctgttttaagcaagggggtgagagtgctgaaaaggctgcaaaggatctcgtacttattttagagacaatgaggataattgcaatcacactatctcctatcactccaagcctttctctgaggatttacacacagcttggtttcacagaagaccagtttagggtgttgagatgggaggatacgaaatggggaggccttaaagcaggccaggtaatgtcggagccaaagccagtatttgcaaggatagaaaccgaggtggaagaggaagcccaaacaagttcaaaagcagcaaaaggtgggaagaaagcacgcaggaaaggacttgtggaggcatagtttctgttggaacagtgtatcagcatcgttaaaaggagaatatttcatcttctcttttttttggaaaaaaatctttagcctatctgttcctgaaatttgttctttgctaacgtgtcacattgtatcatgtagatagccaaaaaaagaccactattgattctgatgctctgtcagagagagagctaggataattgcgagtagagctagcagcggatttggatcatccaaaatctaattggatatttgttgttttggataaggtggagagcaacttaaaaaaacccaatgtccattagatatctttggacttgacttgtttctaatgtttggagacatgctgatttttatgaactaataacacagtagctggttgttat

SEQ ID NO: 86297 - DNA, 2285 bp, Zea Mays
cacttacatcctccacaacgatcaccccaatccattctctcctcacacgggcgcgacccaaaaccccattcatcccctcctccggtctcgactgccatggccgccgggcgggccttccttggcgcgccgtgctcctccctcgccgccggcgcccgttgccttgccttcgcttcccctttgccccggaacctcacccccgcgctccgctgcggcgttcgcggtcgctgcatcgcctccgcctcctcgtcccctgactcgccccccttgccggagccctacgtgctcaccactcctctctactacgtcaacgctccgccgcatatgggaagcgcctacaccaccatcgcagcggacgccatcgcccgcttccagaggttgctagagaagaatgttatatttattaccggaacagatgaacacggtgagaaaatatctgcttccgcagaggccagtggtagaaacccaaaggagcattgtgatgcaatttcaagttcatataggacgctctgggctgacttagacatagaatatgacaagtttattcgcacaacggatcgtaagcatgaggctgttgtgaacgaattctattccagagtgttaaacaatggcgacatatatagagctgattatgaaggactttattgtgtgagctgtgaagagtacaaggatgaaaaagagctattggagaacaattgttgccctgtgcatctgaagccttgtgttgaaagaaaagaagataactatttctttgccttgtcaaagtaccaacataaattggaagagctactgacaagaaatcctgattttgtaaggccatcatatcgcttgaacgaggtccaaggctggattaaaagcggattaagggacttttctatttctcgtgcatctgtagaatggggcattccggtgccaaacgataccaagcagacaatatatgtgtggtttgatgctctattagggtatatttcagcattactagatgatggtgagcaggcaagtttgcagcaagctgttgatcatggttggccagcctcactgcacttgattggaaaggacatattacggtttcatgcagtttattggccagccatgttaatgtcagcaggtttaagtgttcctgatacagtttttggtcatggattcttgactaaggatggcatgaagatgggaaagtcactaggcaacacacttgaaccaaaagatctggtagaaagatttggtgctgatgctgttaggtatttcttcttgcgggaagtagaatttggcaatgatggggactattcagaagaacgctttatcaatatagtgaatgctcatcttgctaatacaattggaaacctccttaatcgtacacttgggctactaaaaaagaactgtaaatccgtactagcttttgattcaattgctgccgcagatggaggtttgttcagaaataagatagaaaatctggtggacaaggcaaaacaccaatatgaaaatcttttactgtcatcagcatgtgaaactgttttagagattggtgatcttggaaacttgtacatcgatgagcaagcaccatggtcctgttttaagcaagggggtgagagtgctgaaaaggctgcaaaggatctcgtacttattttagagacaatgaggataattgcaatcacactatctcctatcactccaagcctttctctgaggatttacacacagcttggtttcacagaagaccagtttagggtgttgagatggttatgtcattaggaggatacgaaatggggaggccttaaagcaggccaggtaatgtcggagccaaagccagtatttgcaaggatagaaaccgaggtggaagaggaagcccaaacaagttcaaaagcagcaaaaggtgggaagaaagcacgcaggaaaggacttgtggaggcatagtttctgttggaacagtgtatcagcatcgttaaaaggagaatatttcatcttctcttttttttggaaaaaaatctttagcctatctgttcctgaaatttgttctttgctaacgtgtcacattgtatcatgtagatagccaaaaaaagaccactattgattctgatgctctgtcagagagagagctaggataattgcgagtagagctagcagcggatttggatcatccaaaatctaattggatatttgttgttttggataaggtggagagcaacttaaaaaaacccaatgtccattagatatctttggacttgacttgtttctaatgtttggagacatgctgatttttatgaactaataacacagtagctggttgttat

SEQ ID NO: 86298 - DNA, 2448 bp, Zea Mays
aggcacactgtcgtcatactcccgtcccgacttcccgagacgccgcattggatgctccctccgctcgaatctgccgctttccattatcgctgacccaagcaacattctctgcttcttggtccttgccttcttggttcgccctcccgcaatctctggttctggcctctgggcatcgcgggagtaaggcatttcttggttttcctttcctgagatgggtctgagaaagagaagcgccatggttggtgaggcagccgtgttcgccgcatcttggtagccctcactcagcattggcatcctctcgttcttggacttggagttaactcagccatgaggaagcatgggtggcagctgccgtaccaccctctccaggtggttgcgatagccgtgttctcggcactggggttcgccttctacgtcttcttcgtgccgttcgtggggacgaagccgttccagattgtggccatggctatctacactccattgattacatgtgttgttgtgttatacatatggtgtgcggcaacaaatcctggagacccaggcattttcgattcaacgaagaatttgaaattagataagaatgaaaagcactcctatgtgaattcggatcaggggattaatcatggaggaaggccattaagtgagacttttggtactgctgataacagtgagaagctgagcagcatgcttgagaggaacgattcgccttcttggcccagattttctggaattatttccctggtttgtctcccattctcttgcctttgcaaacggtgtctccattcagacagtctatcttcagaacacaaaatgtgtgaagaaggcatgtttttctgcagcttatgcgaagcagaggttttgaagaacagtaagcattgtagagtatgtgacaaatgtgttgatggctttgaccatcactgcagatggcttaacaattgcatagggaaaaggaactacaaaggtttctttgttctaatggcttctgcagttatcctgcttgtgatgcagtggttgtcggggggacttgtgttgattctctgtattgtgaagcgaggagaattctccaggcaggttgtcacaaagttgggaagcagcttctcaacagtggcttttgtaattgttgtggcaacttgcaccattttagcaatggttgcaaccgtaccacttgcccagcttttatgttttcatgtccttcttgtaaaaaagggaattagcacatatgattacatcatagctttgagggagcacgaggaacaacaagaggttcctggacaccaaagcccgcagatgtctattgttagttctgttactggttttagcacagccagttcttttgggcctcttcatcgtggttcatggtgcactccaccaagattattcctggaagaccagttcgatgccattcctccagagattggcatttcacggaattcaggcagtaagaaaactaaggaagaggaaggagcaaggagaaaagctggagcagtgaaaatcagtccatggacattggcgcggcttaatgcagaggaagtctcaaaggcagccgcggaggcaaggaagaaatccaaaatcctgaaaccagttggaaaacatggcgccccagagaacagcagcaaaccagaccatttgcctagctacaagagacggctagacaggagaggtttccctgctgaactctctcttgacccacttgcaactctatctgcaagcggcaccgaaagcaactacagcgacgcagcaacagaaatctgtggcagtctagccccgttacagctcgaagcgagaagtgctttccaaccgagtactgcagcgtccacaagaaatgttgcttcatcgcctgaaagtagctttgactcaccaaatctccaccccttccgcacttcctcggccacagctgatgagatgcagggagccatgatgcatacagctcacaggggcatcgagtttaaaagatcgtcaagcgatggttatgaagcatcaggaggtgaagatagcgaccgcatcccttcaaggatcgtgcacaggtcgtcaaactgggccagtgtctttctgcattctggtcagggagaccctccagctgatctgctgacgacatcagctgaaggttttgtagctaacgactctggttcctagagcaggcattgctgggtatgacagagcgatgttgacaagacattgactagtatctggcattaggtttaggtttaggcgcttaatttgtctgattacatgcggggatttggattagttctaggggccgattacatgtctgtaaaactgccttcttgctggtgccacttttttggcattccattgtcgccttcggcaaaatgtgaatttgacgccattgtgcttgctgagcttgatccaaagtactgtcgctgagtagtcttttgtaatcacatccgagtgagattaataaggtgtttggctcggcaattaccgtct

SEQ ID NO: 86299 - DNA, 2235 bp, Zea Mays
cttcccgagacgccgcattggatgctccctccgctcgaatctgccgctttccattatcgctgacccaagcaacattctctgcttcttggtccttgccttcttggttcgccctcccgcaatctctggttctggcctctgggcatcgcgggagtaaggcatttcttggttttcctttcctgagatgggtctgagaaagagaagcgccatggttggtgaggcagccgtgttcgccgcatcttggtagccctcactcagcattggcatcctctcgttcttggacttggagttaactcagccatgaggaagcatgggtggcagctgccgtaccaccctctccaggtggttgcgatagccgtgttctcggcactggggttcgccttctacgtcttcttcgtgccgttcgtggggacgaagccgttccagattgtggccatggctatctacactccattgattacatgtgttgttgtgttatacatatggtgtgcggcaacaaatcctggagacccaggcattttcgattcaacgaagaatttgaaattagataagaatgaaaagcactcctatgtgaattcggatcaggggattaatcatggaggaaggccattaagtgagacttttggtactgctgataacagtgagaagctgagcagcatgcttgagaggaacgattcgccttcttggcccagattttctggaattatttccctggttttgaagaacagtaagcattgtagagtatgtgacaaatgtgttgatggctttgaccatcactgcagatggcttaacaattgcatagggaaaaggaactacaaaggtttctttgttctaatggcttctgcagttatcctgcttgtgatgcagtggttgtcggggggacttgtgttgattctctgtattgtgaagcgaggagaattctccaggcaggttgtcacaaagttgggaagcagcttctcaacagtggcttttgtaattgttgtggcaacttgcaccattttagcaatggttgcaaccgtaccacttgcccagcttttatgttttcatgtccttcttgtaaaaaagggaattagcacatatgattacatcatagctttgagggagcacgaggaacaacaagaggttcctggacaccaaagcccgcagatgtctattgttagttctgttactggttttagcacagccagttcttttgggcctcttcatcgtggttcatggtgcactccaccaagattattcctggaagaccagttcgatgccattcctccagagattggcatttcacggaattcaggcagtaagaaaactaaggaagaggaaggagcaaggagaaaagctggagcagtgaaaatcagtccatggacattggcgcggcttaatgcagaggaagtctcaaaggcagccgcggaggcaaggaagaaatccaaaatcctgaaaccagttggaaaacatggcgccccagagaacagcagcaaaccagaccatttgcctagctacaagagacggctagacaggagaggtttccctgctgaactctctcttgacccacttgcaactctatctgcaagcggcaccgaaagcaactacagcgacgcagcaacagaaatctgtggcagtctagccccgttacagctcgaagcgagaagtgctttccaaccgagtactgcagcgtccacaagaaatgttgcttcatcgcctgaaagtagctttgactcaccaaatctccaccccttccgcacttcctcggccacagctgatgagatgcagggagccatgatgcatacagctcacaggggcatcgagtttaaaagatcgtcaagcgatggttatgaagcatcaggaggtgaagatagcgaccgcatcccttcaaggatcgtgcacaggtcgtcaaactgggccagtgtctttctgcattctggtcagggagaccctccagctgatctgctgacgacatcagctgaaggttttgtagctaacgactctggttcctagagcaggcattgctgggtatgacagagcgatgttgacaagacattgactagtatctggcattaggtttaggtttaggcgcttaatttgtctgattacatgcggggatttggattagttctaggggccgattacatgtctgtaaaactgccttcttgctggtgccacttttttggcattccattgtcgccttcggcaaaatgtgaatttgacgccattgtgcttgctgagcttgatccaaagtactgt

SEQ ID NO: 86300 - DNA, 645 bp, Zea Mays
atggctccgccctcaccctccccccaacctgtccacgcccgcgcggcctccctcgcaccccacctcaatctcctacggatgtccccgcatctcgcggccgccgtgcccatgcgccatcgcccttccccgtcgtgccccccgtacccccatgctcgcaactgccaacacatggctacctccatggccgccgccttcactcgctatctctcctcacccttccctgtaccgcatccaccggatctaggagcacggcgtcgcgtggaagcccgtgccatacccgcaggcccgccacccacctcccctggcgtgcaacagctttcgcgctccccctgcccccgccatgcccgcactggatctgcaaaacatccgccgctggcacactcctcaggtgcggcggctgcactgcacagccggttcgtcaccaagctcctcaatgaccttttcggagtccagtccaggggtgactgcgcgtgcgcggtacggcccgcgctcctcggcgtcggcgaggacctcgcgctacgcatccgtgacgccatcgttaagggctaccacggcatgaagcctgggtggacgcggttcaggttggcctactacctatcccacgacgagttcttcaaatgcccgctcagtagtgtaccacaataa

SEQ ID NO: 86301 - DNA, 324 bp, Zea Mays
gaaactaatttgatggtacaaaatggcattctagagaagacactggtttcccttggccggacagatttcaaattgaatatgtggttgtctctatcggcagcaagggatgaaaccttgatggtgaatcctggaagatggcgaatcctggaagatggcgagtgctctatcttggagacttggaagatggcgaatcctggaagaacaagcaaaagtatggaaacaccttgccgcggtgatagcgccagatcagccgtcgacggcttcaagctcctgcgtgtgtttccggcgttcggtcattgcgtctgtaccctgcgagacttgtag

SEQ ID NO: 86302 - DNA, 1866 bp, Zea Mays
cgccagttcaaccccgcacccgcaccccggtgcggcacggatcccaccgggcgcagcgcacgacccacaaagtcagaaagccgctgcccggaaatcgcccgcctccgctccgctacgctctcaccacctcctccgacgtctgatcggcatcgccttcgcctccgctaaaatactcgcggtccacgctctcctccaaatcccatcgccacgccttcgcccgcgcgcgtctctccctcccccacactccgccaccagcgccgaagcagagcagccatggccggttacgagcagcgcgtcgttgccgtcatcatggtcggcggccccaccaaagggacgcggttccggccgctgtcgctgaacgtgcccaagccgctcttccctatcgccggccagcccatggtgcaccaccccatctccgcctgcagccggatccccaacctggcacagatataccttatcgggttctacgacgagcgggaattcgcgctatatgtctcgtctatctccaacgagctcaggatccctgtcagggtctctggccaatttaaattttaggtacctgcgagaggataagcctcacgggtcagctggagggctctacatctttagagattacatcatggaagacagcccgtcacacatagttctgcttaactgcgacgtctgttctagcttcccccttccagacatgctggaggcccataaaaaatatggaggaatgggtactttactagtcaacaaggtatctgcagagtcagctaaccagtttggcgagttggtagctgatcctgaaacaaacgaactgctgcactatacggaaaagccagagacttttgtgagtgatctcataaattgtggagtatatatatttacccccaatatctttagcgccattgaggatgtcttaaaacagaaaaaagacagagcaaatttgcggcgtgtatctagctttgaagctcttcattcagcaaccaaggctcttccaccagactttgttcggttagatcaagacattttatcccctcgagcaggaaagaaagagctgtacacataccagacacttgatttttgggaacagataaaaaccccagggatgtctttgagatgctctggattatatctttctcggttccgccgtacctctcctcatcttttagcctcaggagatggcaaaagaactgccactattgtaggcgatgtgtatatccatccatctgccaaggtgcatcctacttcaaagattggccccaatgtttctatatcagcaaatgcgcgcgttggagctggtgccaggcttatcaattgcataattctagatggtgttgaaattatggaaaatgcggttgttatacattcaattgtggggtggaagtcatccattggaaaatggtcacgtgtacagggcgaaggtgatcaaaatgccaaacttggcattactattcttggtgaagccgttgatgttgaagatgaagtagtgatagttaacagcatcgtgctcccaaataaaactctcaatgtcagtgtccaagaggagatcatcctataatagccgtcattttttgttttatccctaataaggtctgagtaccaatcacatagtttaagtttattcattctcaccatgtaagcttctattagattgagattattgttttgggtttataccttgcagcatgccactgcacaatcttgacttgctgtgctactttgattagcgagtgtggtgtaaaatgtacgaacaactaacacccgagctgctagcttcagattaaagcaagctgttcaaactgccgcagctgtaatccatagagacaaaacactattgaagacttctagcccacaagtgaaattggaagtataatcaaa

SEQ ID NO: 86303 - DNA, 1841 bp, Zea Mays
cgccagttcaaccccgcacccgcaccccggtgcggcacggatcccaccgggcgcagcgcacgacccacaaagtcagaaagccgctgcccggaaatcgcccgcctccgctccgctacgctctcaccacctcctccgacgtctgatcggcatcgccttcgcctccgctaaaatactcgcggtccacgctctcctccaaatcccatcgccacgccttcgcccgcgcgcgtctctccctcccccacactccgccaccagcgccgaagcagagcagccatggccggttacgagcagcgcgtcgttgccgtcatcatggtcggcggccccaccaaagggacgcggttccggccgctgtcgctgaacgtgcccaagccgctcttccctatcgccggccagcccatggtgcaccaccccatctccgcctgcagccggatccccaacctggcacagatataccttatcgggttctacgacgagcgggaattcgcgctatatgtctcgtctatctccaacgagctcaggatccctgtcaggtacctgcgagaggataagcctcacgggtcagctggagggctctacatctttagagattacatcatggaagacagcccgtcacacatagttctgcttaactgcgacgtctgttctagcttcccccttccagacatgctggaggcccataaaaaatatggaggaatgggtactttactagtcaacaaggtatctgcagagtcagctaaccagtttggcgagttggtagctgatcctgaaacaaacgaactgctgcactatacggaaaagccagagacttttgtgagtgatctcataaattgtggagtatatatatttacccccaatatctttagcgccattgaggatgtcttaaaacagaaaaaagacagagcaaatttgcggcgtgtatctagctttgaagctcttcattcagcaaccaaggctcttccaccagactttgttcggttagatcaagacattttatcccctcgagcaggaaagaaagagctgtacacataccagacacttgatttttgggaacagataaaaaccccagggatgtctttgagatgctctggattatatctttctcggttccgccgtacctctcctcatcttttagcctcaggagatggcaaaagaactgccactattgtaggcgatgtgtatatccatccatctgccaaggtgcatcctacttcaaagattggccccaatgtttctatatcagcaaatgcgcgcgttggagctggtgccaggcttatcaattgcataattctagatggtgttgaaattatggaaaatgcggttgttatacattcaattgtggggtggaagtcatccattggaaaatggtcacgtgtacagggcgaaggtgatcaaaatgccaaacttggcattactattcttggtgaagccgttgatgttgaagatgaagtagtgatagttaacagcatcgtgctcccaaataaaactctcaatgtcagtgtccaagaggagatcatcctataatagccgtcattttttgttttatccctaataaggtctgagtaccaatcacatagtttaagtttattcattctcaccatgtaagcttctattagattgagattattgttttgggtttataccttgcagcatgccactgcacaatcttgacttgctgtgctactttgattagcgagtgtggtgtaaaatgtacgaacaactaacacccgagctgctagcttcagattaaagcaagctgttcaaactgccgcagctgtaatccatagagacaaaacactattgaagacttctagcccacaagtgaaattggaagtataatcaaa

SEQ ID NO: 86304 - DNA, 2038 bp, Zea Mays
cgccagttcaaccccgcacccgcaccccggtgcggcacggatcccaccgggcgcagcgcacgacccacaaagtcagaaagccgctgcccggaaatcgcccgcctccgctccgctacgctctcaccacctcctccgacgtctgatcggcatcgccttcgcctccgctaaaatactcgcggtccacgctctcctccaaatcccatcgccacgccttcgcccgcgcgcgtctctccctcccccacactccgccaccagcgccgaagcagagcagccatggccggttacgagcagcgcgtcgttgccgtcatcatggtcggcggccccaccaaagggacgcggttccggccgctgtcgctgaacgtgcccaagccgctcttccctatcgccggccagcccatggtgcaccaccccatctccgcctgcagccggatccccaacctggcacagatataccttatcgggttctacgacgagcgggaattcgcgctatatgtctcgtctatctccaacgagctcaggatccctgtcaggtacctgcgagaggataagcctcacgggtcagctggagggctctacatctttagagattacatcatggaagacagcccgtcacacatagttctgcttaactgcgacgtctgttctagcttcccccttccagacatgctggaggcccataaaaaatatggaggaatgggtactttactagtcaacaaggtatctgcagagtcagctaaccagtttggcgagttggtagctgatcctgaaacaaacgaactgctgcactatacggaaaagccagagacttttgtgagtgatctcataaattgtggagtatatatatttacccccaatatctttagcgccattgaggatgtcttaaaacagaaaaaagacagagcaaatttgcggcgtgtatctagctttgaagctcttcattcagcaaccaagtatgtattgtgttatactgtttatgtttttttttttacaaatcttctttgtcctgcagttatcacctttctcttcgccattatgtggaggttcttccaaaaactagccaggcctagtatataatttatatcactgctattaattcaactacaaagtatttatcattatgtagaccttataagcttaatatcaacagggctcttccaccagactttgttcggttagatcaagacattttatcccctcgagcaggaaagaaagagctgtacacataccagacacttgatttttgggaacagataaaaaccccagggatgtctttgagatgctctggattatatctttctcggttccgccgtacctctcctcatcttttagcctcaggagatggcaaaagaactgccactattgtaggcgatgtgtatatccatccatctgccaaggtgcatcctacttcaaagattggccccaatgtttctatatcagcaaatgcgcgcgttggagctggtgccaggcttatcaattgcataattctagatggtgttgaaattatggaaaatgcggttgttatacattcaattgtggggtggaagtcatccattggaaaatggtcacgtgtacagggcgaaggtgatcaaaatgccaaacttggcattactattcttggtgaagccgttgatgttgaagatgaagtagtgatagttaacagcatcgtgctcccaaataaaactctcaatgtcagtgtccaagaggagatcatcctataatagccgtcattttttgttttatccctaataaggtctgagtaccaatcacatagtttaagtttattcattctcaccatgtaagcttctattagattgagattattgttttgggtttataccttgcagcatgccactgcacaatcttgacttgctgtgctactttgattagcgagtgtggtgtaaaatgtacgaacaactaacacccgagctgctagcttcagattaaagcaagctgttcaaactgccgcagctgtaatccatagagacaaaacactattgaagacttctagcccacaagtgaaattggaagtataatcaaa

SEQ ID NO: 86305 - DNA, 1780 bp, Zea Mays
cgccagttcaaccccgcacccgcaccccggtgcggcacggatcccaccgggcgcagcgcacgacccacaaagtcagaaagccgctgcccggaaatcgcccgcctccgctccgctacgctctcaccacctcctccgacgtctgatcggcatcgccttcgcctccgctaaaatactcgcggtccacgctctcctccaaatcccatcgccacgccttcgcccgcgcgcgtctctccctcccccacactccgccaccagcgccgaagcagagcagccatggccggttacgagcagcgcgtcgttgccgtcatcatggtcggcggccccaccaaagggacgcggttccggccgctgtcgctgaacgtgcccaagccgctcttccctatcgccggccagcccatggtgcaccaccccatctccgcctgcagccggatccccaacctggcacagatataccttatcgggttctacgacgagcgggaattcgcgctatatgtctcgtctatctccaacgagctcaggatccctgtcaggtacctgcgagaggataagcctcacgggtcagctggagggctctacatctttagagattacatcatggaagacagcccgaggcccataaaaaatatggaggaatgggtactttactagtcaacaaggtatctgcagagtcagctaaccagtttggcgagttggtagctgatcctgaaacaaacgaactgctgcactatacggaaaagccagagacttttgtgagtgatctcataaattgtggagtatatatatttacccccaatatctttagcgccattgaggatgtcttaaaacagaaaaaagacagagcaaatttgcggcgtgtatctagctttgaagctcttcattcagcaaccaaggctcttccaccagactttgttcggttagatcaagacattttatcccctcgagcaggaaagaaagagctgtacacataccagacacttgatttttgggaacagataaaaaccccagggatgtctttgagatgctctggattatatctttctcggttccgccgtacctctcctcatcttttagcctcaggagatggcaaaagaactgccactattgtaggcgatgtgtatatccatccatctgccaaggtgcatcctacttcaaagattggccccaatgtttctatatcagcaaatgcgcgcgttggagctggtgccaggcttatcaattgcataattctagatggtgttgaaattatggaaaatgcggttgttatacattcaattgtggggtggaagtcatccattggaaaatggtcacgtgtacagggcgaaggtgatcaaaatgccaaacttggcattactattcttggtgaagccgttgatgttgaagatgaagtagtgatagttaacagcatcgtgctcccaaataaaactctcaatgtcagtgtccaagaggagatcatcctataatagccgtcattttttgttttatccctaataaggtctgagtaccaatcacatagtttaagtttattcattctcaccatgtaagcttctattagattgagattattgttttgggtttataccttgcagcatgccactgcacaatcttgacttgctgtgctactttgattagcgagtgtggtgtaaaatgtacgaacaactaacacccgagctgctagcttcagattaaagcaagctgttcaaactgccgcagctgtaatccatagagacaaaacactattgaagacttctagcccacaagtgaaattggaagtataatcaaa

SEQ ID NO: 86306 - DNA, 820 bp, Zea Mays
caatatattagaacttctgacatatcattgcttcatcttgagttaggatgtctttgagatgctctggattatatctttctcggttccgccgtacctctcctcatcttttagcctcaggagatggcaaaagaactgccactattgtaggcgatgtgtatatccatccatctgccaaggtgcatcctacttcaaagattggccccaatgtttctatatcagcaaatgcgcgcgttggagctggtgccaggcttatcaattgcataattctagatggtgttgaaattatggaaaatgcggttgttatacattcaattgtggggtggaagtcatccattggaaaatggtcacgtgtacagggcgaaggtgatcaaaatgccaaacttggcattactattcttggtgaagccgttgatgttgaagatgaagtagtgatagttaacagcatcgtgctcccaaataaaactctcaatgtcagtgtccaagaggagatcatcctataatagccgtcattttttgttttatccctaataaggtctgagtaccaatcacatagtttaagtttattcattctcaccatgtaagcttctattagattgagattattgttttgggtttataccttgcagcatgccactgcacaatcttgacttgctgtgctactttgattagcgagtgtggtgtaaaatgtacgaacaactaacacccgagctgctagcttcagattaaagcaagctgttcaaactgccgcagctgtaatccatagagacaaaacactattgaagacttctagcccacaagtgaaattggaagtataatcaaa

SEQ ID NO: 86307 - DNA, 605 bp, Zea Mays
caaaccaccgccaccgctagcaccaccgtcgctaccactactagcagcaggatcttcgaagtggtgccgtggcgctgccctgggtacacgttccaggagtcggggccggtgggcacgacgaacctgagccgcaccgaggtgcgcgcgctcatggcggagctcgccgctgacttcctgggaacgcctcgaccaggacgacgactcggttcgcggacgaagccagccgtagtactcccttctcagatatgcgcgctcgtggtgcaggagcgctcctggcgccccgccgcgacggtggccggggccccctcgctggcgtcccggtcgcgtcaaccacctcaatctcgctggcgtccgcctccgcgatgtcaagaggtggatcttgtttctgcagtgagttgctcatctggagacaatcgagcgtagattgttgaaggcacatctccaatattcctgcacaaaaaaacaatgcgcatcaactaacagaagtgcaacacactctcatctgagtgttcacatctttctttttttttggttgattcgtttaaacctcactatgtacatacaaggcagaatcacagtccctgcatcgttggcttgccaagttt

SEQ ID NO: 86308 - DNA, 1432 bp, Zea Mays
caaaccaccgccaccgctagcaccaccgtcgctaccactactagcagcaggatcttcgaagtggtgccgtggcgctgccctgggtacacgttccaggagtcggggccggtgggcacgacgaacctgagccgcaccgaggtgcgcgcgctcatggcggagctcgccgctgacttcctgggaacgcctcgaccaggacgacgactcggttcgcggacgaagccagccgtagtactcccttctcagatatgcgcgctcgtggtgcaggagcgctcctggcgccccgccgcgacggtggccggggccccctcgctggcgtcccggtcgcgtcaaccacctcaatctcgctggcgtccgcctccgcgatgtcaagaggtggatcttgtttctgcagtgagttgctcatctggagacaatcgagcgtagattgttgaaggcacatctccaatattcctgcacaaaaaaacaatgcgcatcaactaacagaagtgcaacacactctcatctgagtgttcacatctttctttttttttggttgattcgtttaaacctcactatgtacatacaaggcagaatcacagtccctgcatcgttggcttgccaagttttgccctcttttgccacctcctaggtcaactattgctaatgctttcagtccagatggaaaaacacttgcgtccacaagatcattgtatacaaactgaactgaaagacatttattttgttagtggtgaggtgaccatactgtgaaattaattgactgtaatatagggaaatgtttgaaggttttgagtggacatcacagtatacaaactgaactgaaagacatctattttgttagttatcagcctcatcaaactgattgaaagacaccaaactgaactgaaagacaacaaacatgccaggtaactgtatcgcgaaagacaacaaacatcatacttttttcggctctggtatgtttttgtagctcccattttagattttaccaagtattaaatgtacactgcttactgtttgatgactaacatcatgcagaggtcttaattttaaaaaatatcgctgaaccttgaaatacatattcaaaccattccttttgcagtggtatgtttctgcagccttttttgctagttggatttagtccagcatctgacactattatagttttcaatccatggatcgatgggttaaatggttattttaagctaaagcttgttttcctttacaagagggatttttatctaaaagaatatctttggagtggctctttgacattctatgaaactatcctttttatttgataccacatgtcaggcgttatattcaaatgtgcataaacaaatatactaattgttttagctgacctagagtttatgtagaagactatgataggctgtatgtatgagttgtttcttgctgtatatggattggtaatgaa

SEQ ID NO: 86309 - DNA, 584 bp, Zea Mays
attttttattcacaaattttgatatctaatcctcggtgatctacatgaatttcattcaatctaaatgtgaactgctagtagaaatatgattcccatggcttgctggtagaacataaaactagagtgtactgctggtattggttgctttagactttttgcctttttgtactgttgtgatgtttgtgaatggatgttgaacactgagttcatagggctatgattttttggtttgcagctccaacagctgtaataccgctgttgtatgttcatgtgagaatcgtgaattcgaagcacttcaagacactgacaaatttgatagaagagaaaaggagttgctatcactgatcgtggtgccatgggagtccatcctcatggatgaggcagaatggctgaactccatttttagattttgcatatgcaccaatttctgtggcacaccacattcaatatcaacttcttatgatatccaacttttgttcttcactattttgtaattattcagtaaattgtttgtttcatctttcaaagaacgtgtttattaacatccggatcccattttattaataaacaattggctcccatct

SEQ ID NO: 86310 - DNA, 1982 bp, Zea Mays
cgccctttctccgcaactccaccccaggcagccctcaccccctcaccgccgcggccacctgcgtccgcccgtcccgacctccgtcctccgcctccggcaccgtcgcggccccctgaacgcagtccgattccagcctccgccagcccgcccaccagccaccggcttccggcctccgcccgccggcggcggcctctgctctccgcccacctggccacctccgcatccggcctcagcctccggtgtccggtgtccgcccccgcagtgggcgtgccgcactgggctgaggaagaacagcttccggttcctgctgctgatcttgaacggcgcggcgctcaggtcggaggaggcctgccgacgagactgaggtagcagaaggagccataccaaaaagagaatcttcctccgccactgtcgactcccatctgcgagggtagcttcgcgccgaggcgtcagtggcgcgatgaacgtccctgtagtcgatccatatcagggggaatttcctgagacaatcgaagagtacttgcatcacggtactatgaaatgtatcgcgtttaaccgcaaaggaacacttcttgctgctggatgctcaaatggtagctgtattatatgggactttgaaacaagggggcttgcaaaagaatttcgtgataaagatagcaccgcacctataacaagtgtgtcctggtccaggtatggccaccgtttgcttgcctctgctactgacaagtcattgacactttgggatgtgccaactggggaaaaaattgcacgtattactcttcagcagactccattacgtgccagccttcaacctggttctccaactccatctatttgtttggcatgccctctatcttctgcacctcttcttgttgatttgaatactggaagtactacagttctccctgtttctgtatctgagaatggtaacccccctgcacctaacccccgcaataaatttgcggatggtaccccacctttcacgccaacagctgcaacatttgataagcatggggccctgatatatgtgggcaactccaagggagaaattttaatcatagattcaaaaagcatccaggtacatgcaatagttcccatccctggtggaagtgttgttaaggatattgttttaagccgggatggtcaatatctgctgacaaattctaatgatcgggtcattagagtctaccgaaacattctacctgttaaaggttctagagaggagatcagaaacataagcagcaacagtaatgaatatggaagtcactacgataaattaaaagcaaatggtacaagctgccttattctttcctgtgaacttttggatgccatcacaaagatacagtggaaggcaccatgtttcagtggtaatggtgagtggatagttggtgcttctgcaaacaaaggagagcacaggttgcagatatggaaccaagcagggcgccttgtaaagatgcttgaaggtccaaaagaagctctcattgatcttgcctggcatcctgttgagcctacaattgctacagtatctgtgacaggcttcgtatacatttgggccaaggagcatgtagagaattggagcgcttttgctcctgatttcgtagagttagaagaaaatgaagagtacgccgaacgagaggatgagtttgacttgaatccacgtgaagaacaggctgagaaagtagtgatagatgaggatgctgatgttgatatcgagacatctgagaagaatacagtgttcagtgatgtggaggattctgtggatgagatctcctacttaccagcaattccttacccagattctcctgatgagcagccagagaaatgccttggaagttcaaagttggaggatagcaaccattctggttccccatcctcaatggatgctgtacagaatggacaagccattcctccagcatcaagcccaatggaaggtaaagctttcttgtgccagtgtttgttttccatctctgtgcaactgttaa

SEQ ID NO: 86311 - DNA, 2385 bp, Zea Mays
cgccctttctccgcaactccaccccaggcagccctcaccccctcaccgccgcggccacctgcgtccgcccgtcccgacctccgtcctccgcctccggcaccgtcgcggccccctgaacgcagtccgattccagcctccgccagcccgcccaccagccaccggcttccggcctccgcccgccggcggcggcctctgctctccgcccacctggccacctccgcatccggcctcagcctccggtgtccggtgtccgcccccgcagtgggcgtgccgcactgggctgaggaagaacagcttccggttcctgctgctgatcttgaacggcgcggcgctcaggtcggaggaggcctgccgacgagactgaggtagcagaaggagccataccaaaaagagaatcttcctccgccactgtcgactcccatctgcgagggtagcttcgcgccgaggcgtcagtggcgcgatgaacgtccctgtagtcgatccatatcagggggaatttcctgagacaatcgaagagtacttgcatcacggtactatgaaatgtatcgcgtttaaccgcaaaggaacacttcttgctgctggatgctcaaatggtagctgtattatatgggactttgaaacaagggggcttgcaaaagaatttcgtgataaagatagcaccgcacctataacaagtgtgtcctggtccaggtatggccaccgtttgcttgcctctgctactgacaagtcattgacactttgggatgtgccaactggggaaaaaattgcacgtattactcttcagcagactccattacgtgccagccttcaacctggttctccaactccatctatttgtttggcatgccctctatcttctgcacctcttcttgttgatttgaatactggaagtactacagttctccctgtttctgtatctgagaatggtaacccccctgcacctaacccccgcaataaatttgcggatggtaccccacctttcacgccaacagctgcaacatttgataagcatggggccctgatatatgtgggcaactccaagggagaaattttaatcatagattcaaaaagcatccaggtacatgcaatagttcccatccctggtggaagtgttgttaaggatattgttttaagccgggatggtcaatatctgctgacaaattctaatgatcgggtcattagagtctaccgaaacattctacctgttaaaggttctagagaggagatcagaaacataagcagcaacagtaatgaatatggaagtcactacgataaattaaaagcaaatggtacaagctgccttattctttcctgtgaacttttggatgccatcacaaagatacagtggaaggcaccatgtttcagtggtaatggtgagtggatagttggtgcttctgcaaacaaaggagagcacaggttgcagatatggaaccaagcagggcgccttgtaaagatgcttgaaggtccaaaagaagctctcattgatcttgcctggcatcctgttgagcctacaattgctacagtatctgtgacaggcttcgtatacatttgggccaaggagcatgtagagaattggagcgcttttgctcctgatttcgtagagttagaagaaaatgaagagtacgccgaacgagaggatgagtttgacttgaatccacgtgaagaacaggctgagaaagtagtgatagatgaggatgctgatgttgatatcgagacatctgagaagaatacagtgttcagtgatgtggaggattctgtggatgagatctcctacttaccagcaattccttacccagattctcctgatgagcagccagagaaatgccttggaagttcaaagttggaggatagcaaccattctggttccccatcctcaatggatgctgtacagaatggacaagccattcctccagcatcaagcccaatggaagttgacaactctactgctgaagacccagaagaagggccaaactcaaagcggaagcggcggctgtcagtgaaggggcttgagttgcagcagtccgagaaaggcaaaaagggatcaacaaagaacaagtccctcgggaagtccacaaaatccagcgccaagaagatggaatctgccaatggtaacagctctgccttcgatgatgaagccactgaggatgatgagattaacattgatagctagtgtgtttctgactgagggcaataggcgtgggggatagaaaatgccttttccccaccacccatccaccacctaattaaaattaactgttgtatgctgtgacaatataaacgcatgtatcagtgttcttgactgtaaattgatatgtgctgtttctcgtattccttagctctctgctttgcacccatgagtatttggttgatgcagtaattcgttct

SEQ ID NO: 86312 - DNA, 2008 bp, Zea Mays
gtttcctttcgattgatagtggaatgagttcttcctccaccctggctctctccgatggatgctccaacatgctatggtcacctcaagctgaccctaaactagatccatatcagggggaatttcctgagacaatcgaagagtacttgcatcacggtactatgaaatgtatcgcgtttaaccgcaaaggaacacttcttgctgctggatgctcaaatggtagctgtattatatgggactttgaaacaagggggcttgcaaaagaatttcgtgataaagatagcaccgcacctataacaagtgtgtcctggtccaggtatggccaccgtttgcttgcctctgctactgacaagtcattgacactttgggatgtgccaactggggaaaaaattgcacgtattactcttcagcagactccattacgtgccagccttcaacctggttctccaactccatctatttgtttggcatgccctctatcttctgcacctcttcttgttgatttgaatactggaagtactacagttctccctgtttctgtatctgagaatggtaacccccctgcacctaacccccgcaataaatttgcggatggtaccccacctttcacgccaacagctgcaacatttgataagcatggggccctgatatatgtgggcaactccaagggagaaattttaatcatagattcaaaaagcatccaggtacatgcaatagttcccatccctggtggaagtgttgttaaggatattgttttaagccgggatggtcaatatctgctgacaaattctaatgatcgggtcattagagtctaccgaaacattctacctgttaaaggttctagagaggagatcagaaacataagcagcaacagtaatgaatatggaagtcactacgataaattaaaagcaaatggtacaagctgccttattctttcctgtgaacttttggatgccatcacaaagatacagtggaaggcaccatgtttcagtggtaatggtgagtggatagttggtgcttctgcaaacaaaggagagcacaggttgcagatatggaaccaagcagggcgccttgtaaagatgcttgaaggtccaaaagaagctctcattgatcttgcctggcatcctgttgagcctacaattgctacagtatctgtgacaggcttcgtatacatttgggccaaggagcatgtagagaattggagcgcttttgctcctgatttcgtagagttagaagaaaatgaagagtacgccgaacgagaggatgagtttgacttgaatccacgtgaagaacaggctgagaaagtagtgatagatgaggatgctgatgttgatatcgagacatctgagaagaatacagtgttcagtgatgtggaggattctgtggatgagatctcctacttaccagcaattccttacccagattctcctgatgagcagccagagaaatgccttggaagttcaaagttggaggatagcaaccattctggttccccatcctcaatggatgctgtacagaatggacaagccattcctccagcatcaagcccaatggaagttgacaactctactgctgaagacccagaagaagggccaaactcaaagcggaagcggcggctgtcagtgaaggggcttgagttgcagcagtccgagaaaggcaaaaagggatcaacaaagaacaagtccctcgggaagtccacaaaatccagcgccaagaagatggaatctgccaatggtaacagctctgccttcgatgatgaagccactgaggatgatgagattaacattgatagctagtgtgtttctgactgagggcaataggcgtgggggatagaaaatgccttttccccaccacccatccaccacctaattaaaattaactgttgtatgctgtgacaatataaacgcatgtatcagtgttcttgactgtaaattgatatgtgctgtttctcgtattccttagctctctgctttgcacccatgagtatttggttgatgcagtaattcgttct

SEQ ID NO: 86313 - DNA, 1432 bp, Zea Mays
agctgtaaacaggcccggaagattattgctccccttcgttcacctcgcgtacgcgacaaactaggccgaccgccgccgccctacgctcagctgcccacctgccctggtcttcgactcttcgtcgtgcgctttgccggcggcgagcacccatcacaccaggtgctttattgggtccgtccatacggcaggatggcgctaaggggggtctggcagctgcagaagctcgtggtaaactactgcgactggggagggagcagcaggggcatcaggtatgatgatatagtttggttcctctcttcggtagtggtaccattagaccattgtttttcggtatgatttccttggttctgttgcgaaaagccgaaaattagttgagatcctgctggtacatgttcttcaatagtcggatggttggtcgactcttcccagccatggatttgtcgttgcagatgagtgcggtttggaagttggaactgaagacaactatcctattgcctctagcttctctagggcattcctgcatggaaatttcatttctactagacagaaatgtgttatgggactagcgggtactgatgtctgggaagcccatttagtcgttagttcaattacatgctatttattgcaacaatagaatcaggcactttatgcctatgcttgtattcctttatcagattttagctcgagctatggcgctttccttgtacagcagtacactatagtttagtggcagctgtatgggcttcagatcaaacatggtgctggttagtagtcttcattactggatatcgatgcctgaatcttctctttaacaactaccaccgtttttttttactgcagggccttcatggaggcacatcttccagcctttaaggaaaagaatccacacttagaggtggtgacagagcttgtccgcggtcaacatcctaacttgaagggaatttacaaaaaccataacgagcgagtggtatgcgtgagaaatttaccgccagaggaaatactcctgcaagccaccaggctaaggaactctctgggcaggaaagtggtgaagctgcggaccagacatgtaacgaaacgccccagtgttcaggggacgtggacgacggaactgaagatgtgaagcaacaagccaaggtgtttcattgttctttggtggtctgattgcagaaaatgtcagctgtgtcgataactttggtagagctgccgttaggcttgcctgtttgaatagctaaaccgtttactccatttgttccggagtacaatctggtaataacataggagtacacttgactttcttagaccaggccgtcacatttgatatttcagtctggtgatatctgtctcctatattagaccagtacaatgtttcaactcgcgagatactgcgaacacagaattttgctatgctatggccattaccaaggtttttttt

SEQ ID NO: 86314 - DNA, 861 bp, Zea Mays
agctgtaaacaggcccggaagattattgctccccttcgttcacctcgcgtacgcgacaaactaggccgaccgccgccgccctacgctcagctgcccacctgccctggtcttcgactcttcgtcgtgcgctttgccggcggcgagcacccatcacaccaggtgctttattgggtccgtccatacggcaggatggcgctaaggggggtctggcagctgcagaagctcgtggtaaactactgcgactggggagggagcagcaggggcatcagggccttcatggaggcacatcttccagcctttaaggaaaagaatccacacttagaggtggtgacagagcttgtccgcggtcaacatcctaacttgaagggaatttacaaaaaccataacgagcgagtggtatgcgtgagaaatttaccgccagaggaaatactcctgcaagccaccaggctaaggaactctctgggcaggaaagtggtgaagctgcggaccagacatgtaacgaaacgccccagtgttcaggggacgtggacgacggaactgaagatgtgaagcaacaagccaaggtgtttcattgttctttggtggtctgattgcagaaaatgtcagctgtgtcgataactttggtagagctgccgttaggcttgcctgtttgaatagctaaaccgtttactccatttgttccggagtacaatctggtaataacataggagtacacttgactttcttagaccaggccgtcacatttgatatttcagtctggtgatatctgtctcctatattagaccagtacaatgtttcaactcgcgagatactgcgaacacagaattttgctatgctatggccattaccaaggtttttttt

SEQ ID NO: 86315 - DNA, 832 bp, Zea Mays
agctgtaaacaggcccggaagattattgctccccttcgttcacctcgcgtacgcgacaaactaggccgaccgccgccgccctacgctcagctgcccacctgccctggtcttcgactcttcgtcgtgcgctttgccggcggcgagcacccatcacaccaggatggcgctaaggggggtctggcagctgcagaagctcgtggtaaactactgcgactggggagggagcagcaggggcatcagggccttcatggaggcacatcttccagcctttaaggaaaagaatccacacttagaggtggtgacagagcttgtccgcggtcaacatcctaacttgaagggaatttacaaaaaccataacgagcgagtggtatgcgtgagaaatttaccgccagaggaaatactcctgcaagccaccaggctaaggaactctctgggcaggaaagtggtgaagctgcggaccagacatgtaacgaaacgccccagtgttcaggggacgtggacgacggaactgaagatgtgaagcaacaagccaaggtgtttcattgttctttggtggtctgattgcagaaaatgtcagctgtgtcgataactttggtagagctgccgttaggcttgcctgtttgaatagctaaaccgtttactccatttgttccggagtacaatctggtaataacataggagtacacttgactttcttagaccaggccgtcacatttgatatttcagtctggtgatatctgtctcctatattagaccagtacaatgtttcaactcgcgagatactgcgaacacagaattttgctatgctatggccattaccaaggtttttttt

SEQ ID NO: 86316 - DNA, 2248 bp, Zea Mays
gctaccagtggcatcctacgcggcagaggaatagccacgccaccacgtcccccgcgcccgccgacccacccgcaaacgcaacgcaataataataggctaggcagccagcagccaccatccccaccagcccagcaccaggaaggaaatagcggcgagcaagagctggcggaaagaagaggaaagccaggcacgccgctcacccaccgcgccaccaaccgcagatcctaaatccgatctctctctccctccctccctccctcccgctcgaggttttcggtttcgatccggcaagcgggcgagatcttcatggcgacgtcgttcgaccgctgggagaaggaccccttcttcctcgccgccgaggaggtccaggaatccgccgatcggatggaatcggtttatcgggtatgggtgcaggagaggagcgggggcgattccgaggcggcaagcgtcactggaggccctacagctgcgcagcttcgccgcgagctgcacacggcgcttggtaccgccaagtggcagcttgatgaactggcgcgggcagtcagatcgaacgatctggttatgtcagcaggaaaagacacaagggctaggcatgatgattttgttacagcaatcggctatcgcatattagaggtcgagaactacttgaaagaatccaatcttgcggacgggagggggccattgagctgggttcacttggatgaggatgaaagggacgaccttgcagcttttctatctgccagtccttttcaacagaaagacaaagtggtcacaattccttcagcaggtgacattgaagtgggcagcaatgcagcaaggatgaaaaatgatatatcaactgacagctccaaggattcagctggttccacggatttgatttcaggcacagcaaagcaagatttgcatcgtgggcacagaagagcagctagtgccagtgctgatataggctcatggagcatgtcaatccctaatgaatgtgaaggaactacagaacagttatctgatggctcagacaaattgcctttgcataagatagtgaaaacatgtgctttgacaagtaccttgcaatctaagactagaacgaagtggaaaaatggagctgttaggtgggcaggcagtaaccaacaggatgttgaagaggctatccctctgaatacttctcagttgagtcagggcttagaggaatgctttgaaaggaacaagagttgcttaagtacatgtgatgagcatacatacaataagaaacttcatggttggctcggagcccttcgtagacaacttcaaaggtctcagtaccaaattcaatatgggcatcatattcaattgattgttttggcacttgctgcccttgtaatcattgtatgcatagtgaggacaatctggtgactatatttatttgctcatgattggatttctagcctcacaagatcagcagcttgtatggtaaattcactggcagttaagttactcttggtcaacttgatcctgaagcatgcatatgaggcaactatggtagaccattttggtagtcaaggttcaaaatcacgtataatgatctggttggggccacttatcttgccacatgttcagggcaggctgcctcgtccttggaagaacatctacaggacaatccttgcagcacggttgcttcgccacacttggatatgctcccgaatggtgccttgaacaattgatgcacctcgagaactcaatcctccgtggtgagttggtgactgggtggcacctatgcaatggcccagtataaattagtggtgcagtgggctggcgatcatgctgctagcaaccgaaattgcaagacttgtatcatacatcaacgctattgcttttaccgcctgacacggaagggtggtgatcatgcatcaatgctattgcttttactgcctgacacagaagggtgtcattttttttttgtaggagttgccatctgaactgtagagctccataggggataggttctgatcggaatgtgaatggcactagaaaattacttttactgtatctgcttgtgttgtcaagaaccgaatgaggtgcctggcagccttgtctgtaccctgtacactaaaattggagaatgttgaagccctcggcagtaatcggctggacttgtaaggtgccagtgtgtgttgagcctgcatattacggctaaattcggtgaagattatagcactttactgtgcatcctaatgtcaaagcccccaaccaatctttggtattccaaaccccgaag

SEQ ID NO: 86317 - DNA, 2222 bp, Zea Mays
caggcgtgcgatggcgccattgtgtggcctggcttccgttccgcccgccgaggccagtgtggcaggcagctcccgcgcgagcgcgagcgcgatccagaggctggcgcacctgcgtcactcgctccgcgctgccgcgatctcctctgacgtcgaagtcgcccgggggatgacacagggggaaggggtggtgtgggaggggtgaacaggagctcggtgacttttgtgagggccgccagatggaggagcgccggctcgacacgccggcgatgaggagaatcagcgagtggattctttcactagagttcccaagcgatattaccatccaggttggggaggcgaccttcaacttgcacaagctcccgttggcatcgaggtgcggctacataagggagcaggtgtcggggatcaatggctccagggtcacccacatcgacatcacgggcttgccgggcggcgccgcggcgttcgagctcgtcaccaaattctgctacggcgagaacttcgagctcacggaggacaacgtcgccatgctgcggtgcgccgccgagcacctgcagatgaccgacgacgacagcaggggcgggaacctggccggcaggaccgaggcctacctggaggccgtggcgctgatgagcctcgcgggcgcggtcaccgtgctccggaggtcggaggacctcctcccggtgtccgaggaggtggacctcgtcggcaggtgcgtcgacgccatcgcctacttcacctgcaacgacagtcagttcagcatgtccaacggtaacggcatggacgtgtcgtcgtccaaggtcatcatcgatgattggttggctgacgagctcacgtcgctgcggattgacacgttccagagagtcgtaattgccatgaaggcgagggggttcaagggcattgctctgggcacgctcatcatgctctatgcgcagaagtcgctgcgaacgctggacacacacggaagggagaagcaaaagatggagccgaggcaggaacacgagaagcgtgtggtgcttgagaccatcgtgactctgctgcccaaggagaggaactccatgtccgtgagcttcctctcgatgctgcttcgagcagcgctgtgcctggacacgaccctggcgtgccggctcgacctcgagaagcggatggccgcgcagctcgggcaggccgtgctcgacgacctcctgatcccgatcttcttgcccgacgccggcaacacgttcgacgtcgacgcggtccagaggatcctggtcgggtacctggagcacgaggccgaggcggaccggctggactacaacaccgacgacgacttcacctcgacggcgtcgccgcccaacgacgtcggaatggtcggcaagctcatggagtcctacctggctgagatcgcctcggacgtggacctgcccgttgacaagttcaccggcctcgccgagatgatcccggaacgcgctaggttcaacgacgacggcatgtaccgttccatcgacatctacttgaaggcgcatccgtatctgagcgaggccgagcggaagacggtgtgccgggtgatggactgccagaagctgtcgcgcgaggcgtgcgcgcacgcggcgcagaacaatcggctgccagtgcagacagtggtgcaggttctccaccacgagcagcggcgcctgcgcgaggcccctacgtcgtcgttctacggcggcgagtccccgaccccggcgccgagcctccagggccggcacggccggagcgtgccggacgagatgtcacagctgcagcgggagaacgaggagctcaagatggagctgctgcggctgaagatgaacctgagggacccgtcggcgcccccgcagcacagcgacgctccaccatcggggcgccgcccgctgccgaagaaggcggcaggcggcagcggggggttcattaacaacgtgtccaagaagctcgggcggctgaacccgttcctgcggcctgacgccgtgggtggcgccaaagtgcgcaccaagccgtccaggaccaaggatcggaggcactccatcggctagtgattggaattggctcatgctcattgccggcttctttcatcttgaatcttcttgacggctatttcactcgatgaacgtaaaaaaacactcgttgattgattgattgaatggccgagtcgtgagtaaagatgtgtagctatcgcacttgaacataaataagatgctatgttatactttcttcattcttttttt

SEQ ID NO: 86318 - DNA, 2533 bp, Zea Mays
caggcgtgcgatggcgccattgtgtggcctggcttccgttccgcccgccgaggccagtgtggcaggcagctcccgcgcgagcgcgagcgcgatccagaggctggcgcacctgcgtcactcgctccgcgctgccgcgatctcctctgacgtcgaagtcgcccgggggatgacacagggggaaggggtggtgtgggaggggtgaacaggagctcggtgacttttgtgagggccgccagatggaggagcgccggctcgacacgccggcgatgaggagaatcagcgagtggtatatacgttcctagcttctcctaccatccctgctgcgtctccttgctctacttttcattaattggcatgttgctgctgctgtttcgcatttgattcgatgagttcgtgtccgtaaccggcgctgatagcttgttcagtccgattttgaactgaaaacaaacagctatcgtcattaagctagcaacacgtgacctgtgctttcagatcttcacgtcttttacccgctgaaccgctcgctctagccaaaccctgcaaatgaagttttgcggagtttgaggctggctcttttgcttcgcttgattgttgcaggattctttcactagagttcccaagcgatattaccatccaggttggggaggcgaccttcaacttgcacaagctcccgttggcatcgaggtgcggctacataagggagcaggtgtcggggatcaatggctccagggtcacccacatcgacatcacgggcttgccgggcggcgccgcggcgttcgagctcgtcaccaaattctgctacggcgagaacttcgagctcacggaggacaacgtcgccatgctgcggtgcgccgccgagcacctgcagatgaccgacgacgacagcaggggcgggaacctggccggcaggaccgaggcctacctggaggccgtggcgctgatgagcctcgcgggcgcggtcaccgtgctccggaggtcggaggacctcctcccggtgtccgaggaggtggacctcgtcggcaggtgcgtcgacgccatcgcctacttcacctgcaacgacagtcagttcagcatgtccaacggtaacggcatggacgtgtcgtcgtccaaggtcatcatcgatgattggttggctgacgagctcacgtcgctgcggattgacacgttccagagagtcgtaattgccatgaaggcgagggggttcaagggcattgctctgggcacgctcatcatgctctatgcgcagaagtcgctgcgaacgctggacacacacggaagggagaagcaaaagatggagccgaggcaggaacacgagaagcgtgtggtgcttgagaccatcgtgactctgctgcccaaggagaggaactccatgtccgtgagcttcctctcgatgctgcttcgagcagcgctgtgcctggacacgaccctggcgtgccggctcgacctcgagaagcggatggccgcgcagctcgggcaggccgtgctcgacgacctcctgatcccgatcttcttgcccgacgccggcaacacgttcgacgtcgacgcggtccagaggatcctggtcgggtacctggagcacgaggccgaggcggaccggctggactacaacaccgacgacgacttcacctcgacggcgtcgccgcccaacgacgtcggaatggtcggcaagctcatggagtcctacctggctgagatcgcctcggacgtggacctgcccgttgacaagttcaccggcctcgccgagatgatcccggaacgcgctaggttcaacgacgacggcatgtaccgttccatcgacatctacttgaaggcgcatccgtatctgagcgaggccgagcggaagacggtgtgccgggtgatggactgccagaagctgtcgcgcgaggcgtgcgcgcacgcggcgcagaacaatcggctgccagtgcagacagtggtgcaggttctccaccacgagcagcggcgcctgcgcgaggcccctacgtcgtcgttctacggcggcgagtccccgaccccggcgccgagcctccagggccggcacggccggagcgtgccggacgagatgtcacagctgcagcgggagaacgaggagctcaagatggagctgctgcggctgaagatgaacctgagggacccgtcggcgcccccgcagcacagcgacgctccaccatcggggcgccgcccgctgccgaagaaggcggcaggcggcagcggggggttcattaacaacgtgtccaagaagctcgggcggctgaacccgttcctgcggcctgacgccgtgggtggcgccaaagtgcgcaccaagccgtccaggaccaaggatcggaggcactccatcggctagtgattggaattggctcatgctcattgccggcttctttcatcttgaatcttcttgacggctatttcactcgatgaacgtaaaaaaacactcgttgattgattgattgaatggccgagtcgtgagtaaagatgtgtagctatcgcacttgaacataaataagatgctatgttatactttcttcattcttttttt

SEQ ID NO: 86319 - DNA, 776 bp, Zea Mays
atggagatcattgctatagctggttatataactgatgcgaagatgcatattgctcgagactatctagaaaagaatacaagacaggcttgtggcattaaggctgatcagttagataacttgaggtggaggccaagaaagaggagtagaagatctggctcaagaaagcagtcagatacaagcagtggaagcagcagcggggacatggacttgtccagccctggccctagtgggttttgtcaacttaatttagtgcccgacgaggagacatgcaagagcagtggagagcagccttttatgggcgtgcctgtgcaggtgcccaatcttgtgatgtccaggtgaaaaccgattctgcaccggttgaagatttacatattagcttctttctggagttacgccgaccttggcgggatgtggtttttgtgcatccctaggttatttttgccagcacaacctagatccaggtttctgcagttttttgaaggctcatcagctgtgatcagttagatgtgaagatgtctcaacaagaacaagtaatacagtttgtatgtattactgacttagataagttttcatatgttccctataatttctagggttgatagctttcttaacattttctaggaggaaaggctcagtttggtttctggtgttagagcttccagattgtttttgttgttgttgatttgttgatccagtctcgtagcagtgtcatgacgtacataaagttatcctctactgatcttcaattaaaatgtcaggtaggctatttattgggt

SEQ ID NO: 86320 - DNA, 823 bp, Zea Mays
agaggagactaccgaccggaccccggtctagttatcgatcgaggggaacgaagcaagacaagagggagaccgaggaggcctagccgcctagggtagtcccgtccggtctcccgcggccagcgacggactgcctggcgccggcgaatcgatgggctactggtggcaccgcgtcgtgctgccggtgcggcgggcgtggctcggcgtcgcgtcccgcttcggggttcgccaaaccggtacggcacagcagcggcgcgacgcaggcggctctcgtacgaccctcccgggccggctactctggtcgtctaactagctcgcaccgatcgactccttggctggtttcttgcagggctgtggaggctgcggcaggaggtgagcacgtgcgagtacgaggacgtgcacgtgatgtgggagatgctgagccgcaccacggcgccggcgcccgcgcccactaggcggcagcacagtcggttccggccgcagccgcagccgcggccgtggggcgacaggttccgcctctgccgaggcttctagtagaccaaggccgccgccgccgccgccgccgccgccgccgccgccgccgccgcgcgtgtcagctccgctgctgttgctgcgggatagatatagcgcttccacttaatttcttctgtctttttcggtttcttcttcttctctggttcccgctgcttgtattgtattgtatctagtatgtatcgtcgtccatccctccggcgggctctgagatgtacctccattcctcctcgtgtacccgtctcgatgcagatgataccggggcatgtgaatgaacagagctggttccgatcag

SEQ ID NO: 86321 - DNA, 787 bp, Zea Mays
agaggagactaccgaccggaccccggtctagttatcgatcgaggggaacgaagcaagacaagagggagaccgaggaggcctagccgcctagggtagtcccgtccggtctcccgcggccagcgacggactgcctggcgccggcgaatcgatgggctactggtggcaccgcgtcgtgctgccggtgcggcgggcgtggctcggcgtcgcgtcccgcttcggggttcgccaaaccgggctgtggaggctgcggcaggaggtgagcacgtgcgagtacgaggacgtgcacgtgatgtgggagatgctgagccgcaccacggcgccggcgcccgcgcccactaggcggcagcacagtcggttccggccgcagccgcagccgcggccgtggggcgacaggttccgcctctgccgaggcttctagtagaccaaggccgccgccgccgccgccgccgccgccgccgccgccgccgccgcgcgtgtcagctccgctgctgttgctgcgggatagatatagcgcttccacttaatttcttctgtctttttcggtttcttcttcttctctggttcccgctgcttgtattgtattgtatctagtatgtatcgtcgtccatccctccggcgggctctgagatgtacctccattcctcctcgtgtacccgtctcgatgcagatgataccggggcatgtgaatgaacagagctggttccgatcaggttactgtgtgtgcttgttttctaatataccacacctggttctgttctccatctctgttgcaaaaaccatgccccct

SEQ ID NO: 86322 - DNA, 1075 bp, Zea Mays
taccccgggtccccaccacacgcacgcgagcccgcggccaccacctcgatgccactgacgggctggaatccgctggcgcccgtcctccagaccgtcgccgctttctcccgccacatcctcatcgcccccgacgccgggctcgacgaccaccgcctccgcccccttctagcgctctccctctccccgccttcgccggcaccaccgcaaccggaggtccggaaggagaagaaggatgccaaggaggcgccactgacgaaggaggaggtcggccgggccacgtggatgctgcttcacaccatcgcagcgcagttccctgacgaacctacgaggcaacaaagacgggatgcaaaggagttgatgcatataatctcgagactatatccttgcaaagaatgtgctgatcacttcaaggaagttttgaaagcaaatcctgtgcaggcaggatctcaggctgatttctcccagtggttatgttatgtccataacgtggttaatcgaagccttgggaagccaatatttccctgccaaagagtaactgcacgttggggtaaactggattgtcctgagcgctcgtgtgatctagaaggcagcatcgacatcatgccaaaccgatgacatggccaagaaatcgcttgaactttctacccgtagatgatttcatttcaataccactcattgatgagcacttgagcaataccagggagataagaaagagaattcaggactccgtgctgacatagcagggcgtccatatgcttctgtatctttggcgttggaccgttgtagtaaaagatatgaatgtctcgtgatatttgtacttgtctatgcctagtctgatgtctgacgactcttccataacccataccagtccgtgcagattttcatttttgtgcaaccgtcttatgtctgagcagtttttttataatatcacaggagtcagaagtgtactcccctttcgagggtaggaagatgtgtcgtcctttctaatacttaaatttctgtatcacaggagtcagaagtgtactcctttctatatagaattctggaaaacaagatgctgatgacacttctacta

SEQ ID NO: 86323 - DNA, 1699 bp, Zea Mays
taccccgggtccccaccacacgcacgcgagcccgcggccaccacctcgatgccactgacgggctggaatccgctggcgcccgtcctccagaccgtcgccgctttctcccgccacatcctcatcgcccccgacgccgggctcgacgaccaccgcctccgcccccttctagcgctctccctctccccgccttcgccggcaccaccgcaaccggaggtccggaaggagaagaaggatgccaaggaggcgccactgacgaaggaggaggtcggccgggccacgtggatgctgcttcacaccatcgcagcgcagttccctgacgaacctacgaggcaacaaagacgggatgcaaaggagttgatgcatataatctcgagactatatccttgcaaagaatgtgctgatcacttcaaggaagttttgaagtaagcatttctcaccaacaacttggataaatacttgtaatatcaattttaattgcttgattccttgatgtttctttgtgttacaacttacaagtattctctctgtgaagtggtcacatggttcccttgacagtttgctgctttataatatgatgcaaaatagcacatattagctacgaactcttgctactttctgcagtttgagatctgtgcatgaatcttagtttctggtgctctgaagtcatgggtttggctggtagcctgatacagtatacacctatttattaagtgtttacacagttttttgtccatatgatgcacagggtgagtaagctctttttttttaataaggaatgtgtaagctctttacatgctcatctattgatgacttgaatataacaatgaatcacaatgattgtttgtgtttatatttgtgaaggttcatgttgttaatatctgatacggaaacatggctgagttgcgtgttattttatctaacttttggttatctgaaagtttatgtagaggacagccctctcattcatcaggctgaatatatcatagttcagtgatagcaataattcttgaaaactaaactgacttaactgtgttgtacttctgtagagcaaatcctgtgcaggcaggatctcaggctgatttctcccagtggttatgttatgtccataacgtggttaatcgaagccttgggaagccaatatttccctgccaaagagtaactgcacgttggggtaaactggattgtcctgagcgctcgtgtgatctagaaggcagcatcgacatcatgccaaaccgatgacatggccaagaaatcgcttgaactttctacccgtagatgatttcatttcaataccactcattgatgagcacttgagcaataccagggagataagaaagagaattcaggactccgtgctgacatagcagggcgtccatatgcttctgtatctttggcgttggaccgttgtagtaaaagatatgaatgtctcgtgatatttgtacttgtctatgcctagtctgatgtctgacgactcttccataacccataccagtccgtgcagattttcatttttgtgcaaccgtcttatgtctgagcagtttttttataatatcacaggagtcagaagtgtactcccctttcgagggtaggaagatgtgtcgtcctttctaatacttaaatttctgtatcacaggagtcagaagtgtactcctttctatatagaattctggaaaacaagatgctgatgacacttctacta

SEQ ID NO: 86324 - DNA, 589 bp, Zea Mays
aatgctaatggaggcgcatcacgcagggacgtctccctatcttaagaagaggagctgcaggaagccaaaggaaacgaagcatagccgtagaagcatttcacaagtcttgaagggattgtgcttgctgcttgcatagtggtaggagatggagcgtccatctgtgctgattttgctgatatttgcatttgctggaggaaatctgctcgtgggcatcgcctctaacgcaagaagcatcaagaacacagatccaggacatggaagcatagatctaaacgacaggaaactgaaggaacgatatacttttaccatccgaaagacaaggggcctggaaaatgtcaggacggacgactaccaacccgttgacccgagcccaagctccaaagccacgatcaggccaggtccaattgagcatggagctccgcttcttccttatgtaccgcggtacccgccgccgccgcctgcctcctgttgaatcccctggatcccctttcaggctttcacttggatacatctggtcgtcaaaatctgctgtcatacttttattaaggtcactagtgtgaccatatatgtatcaaatataagtgtgtta

SEQ ID NO: 86325 - DNA, 2473 bp, Zea Mays
cccacccacacaggcacacacagcagcagcgcaatcgcagggcagggcgagaccagcaaagatccccggaaccagagcaaagcaagacacaaaacgagcaaaacaacagcaaaagaaggagcgagggaaaaaaaaactcacgcaaaatccccacttcacttcgcttcgcctcctccctcctcctctcaaactgtaaacacttcttcaccagttcgctgcttctcctcgtcctcacaggcgcgtcgtcgatccggaaggcgcccgccaccgggagcggaggcctgagcgggagcaggagcggggccggcgaatctggagcccgggggacctgcattgcctcgggaccgccgcgcgtagccagatctcccccgtcccctgccgcggcaccggcacggcatggtggctgccgcggcggcggccaccgcgccagatccggaccaatcctcgcgcccgccgctcacgccggcgctcgacaagcccaactccgccgccgcgcggaggaactcgcgctccaacaagcccgtctcctcgaggtacctgtccgccgccgcatccccggcctcctccacttcgtcctccacgtcgtcgtcgtcttcctcgtcctcctcccgccgctccctctccgcgcagcgcacccggacgtccactccgccgccgcagcactccacgtcgtccacaaccaccgcgtcggcagcggcagcatccgccaccgcgaccacgatgcggagcctctccgtgtcgttccagggggagtccttcttctacaagacgtcgcgcgcgccgcgggcttcgtcgccgtcctcaccggcagcgcgccgcgggcccacgccggagcgccggaagagcgtctcctccgtgccggaggccgagaacgcgcggccgtcgggacgatggccggcggcgaagcccaaggcgtcggacccgctagcgcggagccttgaatgcagcctcgaccgcaaggactccatcctcgccgccgttcacctcctccgccgttctatggccttcgactcctccacgtcactctcgccgtccgaccgggcagctgcagccgctccagacctctccgcgtcctccgacaccgacagtgcctcgtctggtagcaactccggcgccggggatcccccgcgccgcggcatcagcgtgccggcgagattctggcaggaaaccaacagccgcctgcgccgacttccagagcctggactgccgctaccgtcgtctggccggaggtcgttttcagacagcccaatgtcacccagactgccaggtcggtccccgtctccatgccgtggaagccggggcgctccgagtccatcaagagggcgcagtggggaggcatcgccaaatggacatacggtgcaggctccagcaaatgcgccatctatcatcagttttgcggcagaggtgagaagggcgaaaaagggggagaagagaatcgaggaggcacacagattgcggctgctggacaatcggcatttgcagtggcgatgcatcaatgctcggacagatgcgacgcttctggtgcagagcttcactgctgagaaaactcttcacagtgcatggaaagaaatatcaagattgcgtgacaatgtcagtaacaaaaggagcagactccagcttcaaaagcaaaaactcaagctgtttgctattcttaggggacagatgtcatatctagaggcctggtctcatatcgaaaaacatcattcaagtgctttatcagcagcaatcaaagctctgaaggctagtactcttcgtcttccagttgttgatggcgcaaaggctgatgctcaagccgtgaaggaagcagttaactcagcagtggatgtgatgcacacaatgacatcctcgatttgtaatttgctatctaaggtcgagggaacaagctctgtggtgtctgagcttgccaaagttgcaacgcaagaacaaatgttgttggaccaatcaaaggatctcttgtccacggttgcagcaatacatgtcaaaaattgcagcctgcaaactcatatgctacaacgtaaccaaaagcagagcccgacacaattgtagaccagtttgcctcgccacgttggtggtcactaacatcacacggcctcatgttttctcaccggagactgtggtacaggtaataaaagctgtaaccatttgctgggtgtgaagcgtttcctaatctgctcgatcgacctcactgagtgtagcagattcatgtaattttttgagtgcatatcaaccataggagcggcccttcttacctgcagtcgctgcagttggtgtatacagaaatccctagccctgacccaaagataagcttcctgtagatatgaaaagagcttgtcgtttgcgtgcttagtcttgtgtggagtgctcgagtggtgatgagtgtttgtattgtgaaagggagacggttgttggcttgatacaggtgttttcttgtctaaatccacacgaaagttgttcatcctgatttgctcatgga

SEQ ID NO: 86326 - DNA, 1320 bp, Zea Mays
gttagttttgcttctttcgtttttatgctggtggtgggttgctgtttcgagcgcgtcagtttgattttgatctcgacaatgaacaggtagctgagacgtccgggccggacggccggatcgtcgccctcgtccggggaaccgtcaagtctgtcgcctccggcaagagccgccctggcgcgcccgccttcgccagagtcggctacattcttggcctccgcgtcgcgccttcccacaggcggatgggcatcgcgcggcagctggtgcatcggctggagcagtggttcgagctgatgggcgccgagtacgcgtacatggccaccgacaggtccaacgaggcgtcgctgcggctcttcaccggccgctgcggctactccaagttccggacgccgtcgctgctggtgcacccggtgcactcgcaccgcctcaggccgcccccgcgcgccacggtggtccgcctgggcgcccgcgacgccgagcggctgtaccgcagccggctcgcgcacgtcgagttcttccccgccgacatcggcgccgtcctgggcaacgcgctctcccgcggcacgttcctggccaccgtgggcggctacgagtggggcggcgtcgaccgcttcctggcgtgcccgccggcgtcgtgggccgtggccagcgcgtgggactgcggcggcgtgttccggctccaggtgcgcggcgcgtcgcgcctgcgccgcgccgccgcggccgccacccgcgcgctggaccgcgccgccaagtggctgcgcgtgccgtccgtgcccgacttcttccgccccttcgcgggctggttcgtctacggcctcgccgggagcggcggccgcgacgccgcgatggccgccgaggcggtcttcgcgtccatcgtcaacatggcgcgcggcagggcggccgccgtggcggtggaggttgcggccatggaccccctccgcgggcgcatcccgcactggcgccgactgtcgtgcaccgaggacctgtggtgcatgaagcggctcggcgctggtggtggcggccacgcggacggatgggactgggccaggtcggcccctggtcgatccatcttcgtggaccctagggaggtgtgagggtgactcggcggccgcttcagagcagagctctagtgctctgtttttctttctttcttttttgccactgagcttcattctctctttttttttcccctaacacttccaaattttgcgacccttcagttttgttctggttctggtagacgagatactgtcttttttcttttgtagaatcaccagggagtacgacgatggaaaatctatgatgtagatacatttcccttga

SEQ ID NO: 86327 - DNA, 601 bp, Zea Mays
cagaacagtcgtgcttcaactctctaacaaagtaggcttcttatgacataaaccctcacagcacaacccaaggtctcataggtttcatggcaagcctacatgctaacaacatcacctaacaacgtacgcgtaccatcccgggctcccggcctacaagacgtttaagaacatggtccttgcttctatgcaacattcataacgcaaagaaaagaacggacgacgactgctaaaacctagtgctccttgagcatctcactgagcaaagggccgggcagctactactacacagcggctgacttggtggtgctccttgctgcggccctcttgggatgctccagctggcaaggcaaaatggcgctgtcggatgagtccgagctgctgcgctccccagcctgccctttgttgcctgacatcgtcgtcctcccgaccgccttcttcggcatcacgccacctttcgccctgccgttggcacccttgttgccgccgtggttcttctccgagacggtgctagctgcgtcacatttctctagcttcgtcgtcttggacgacagactgaggtcttccacggccatgacgccgtcccactcgtcttctgtgtttg

SEQ ID NO: 86328 - DNA, 1140 bp, Zea Mays
acactgagggaggctataaactctggaaatatataattttgtaggcactaaaagttcgatgaaagtatcatagctgtattggattcatggtgaatagtgcttaatacctccagaggataaacttaagcataaacctacagtgccaactacataaaacacaataactcagatcatttctaactgaaataaaagaaaatcagtcagattctaaagaacaacacgagggttcaaaggcagcattaaagaagcaagggaaaagaaagcaaaagaagcgatgggtcacctgacttcattcccatcgtcctgaaaggtatccggattcgatccaagcttcatgaacttcatcttgaacaagaaagaagagccgcgcagcttcacgctcttctagaccaaatgctcacacggagaccagaccaccaccaccactaccagttgtaagaagcaagaactgcacagcacagcagcactatcccatacttgtccgcagcatcaacggcaaacggcccagagcagcgaagtagcagtgcacaagaacaagttgctgctgcgccgagaagaccgaatattacaacgtgccggagcccggccaggagagagatcgctcgtacaacgaaaccaaacaaataatgggatcggttcagacgcagcaacagcgctctcgtgcttgaagcgcactccagccctcccccccaacctacttatgcggccggtgccgctgctgctatcgtaggcagtgaggccaggaggggagagcaggagcacaagtacctcaggagaagtaaacaatatggagtgagagagaggggggcagtgagccagaggagggacacccacaaagcacaaagctgacacacccccacctccccctgctgctgcttgtttaattgcgtgtccttgttgatctgggaaaaagattagtataataggtataatagttccttgcaccctccagtccagctctcttcactccctcttctcataagaaaaaaatactgccaagattcagaggggatcttgcgtccaatgcgttgtcatattattaagcaactagtagtagtccacattcctcgccacagcgtaccgttccccgagtatgatctctcaacggtctctgcggcagcaacggcaaaaaaaaaaaaa

SEQ ID NO: 86329 - DNA, 609 bp, Zea Mays
ctatttggcggctaaccctagggcctagcttcgttttggcggcggctgctctggtgcgcagtgcagtgcctggcggctgctcttcagctcttgtgcgcactgcgcagtgcgctccatgccttagtgcctgccgcggtgccgccctcccacctccagcgaatggcgacggtccagggctcttggcgtccagccctccagctccatccgttggactcctgctcgtcatccactcgagctcagctactcggcttcctggttccttctcggcggctgttctagtgctcctagcctcctgctcgtcggtcggtcctggcccctgctgctcggctgctcacttgctcgttgggccctgctgctcgggttccatttccagatatccaggtgagcaacgcctcctgctcgttgacccctagcccctgtgctcggctgctcgtcggtcggtcgacccctgctgctcggcttccatttctagttccagaacgcctcctgctcggatttgcagagcaacttaagtagcaaataagtttagtagtatcacgcatagatctacagtttgtgcatggttgttgatttgaagtctaaatcttgctcggatatgctattgattta

SEQ ID NO: 86330 - DNA, 389 bp, Zea Mays
gttgggactttctgtgcagggggtgaaaaggcgctcaagaactttccgaaaatggacagggagacaaaactatatatcgatcgtgtggacacctgtcgatccggtggaataagttgggcagagatgacaacaatataatgtgtgaggtcgaatgtcagaattatttgtgcttgtccgttgagatggagatacgttagctggcatggagatttttcagttattcgggtgatctttggtggtgcagctacgttttctttttgagaattcagcaggggaacccctactgtgtttttttgtgtattttgggcatagaaatatctagaactaagtgtacagctttatatgagaatatatgttcactcatggaaagaatctaagtcattctgtat

SEQ ID NO: 86331 - DNA, 553 bp, Zea Mays
cgcgccgcggtagtttcgcaccgttggccgtcgcaactcgcagcctcacccctcacaggcttgcggtgctgcgcgcttgcgccgccgacccctccgactacgagctcgtcccccgccgtcgctcgcgtgtcgcggattcgctgtgtcgggtgaccgggtcgacctcctcctcctcacatcttccattgaccgcctccgaactccgtcatccgcaaccgcaagcggcaagagacatatcaagttgtttggtgataatggatccaaagcattcggctgaagtgtccaagcatttagacaagcaaaatcaagcactaatggaaacatatggagcaatgtcccatgagttgcataaactgcaggtagaagaagagacaatcatgcgcaagttgtatgaactgatgtccgcggaagggcttcttccaaagcgcaagaaagaaaagcaacatggggaaaatatagtggcttcaactgagagcaaagaacaggaaccataaattcttatgcgacgtgtaatgtgatatgacagcaatgccattttatctggagagttggt

SEQ ID NO: 86332 - DNA, 2702 bp, Zea Mays
atgacgaggcggtcgcggcgggtctcggcggcctcgatgcacacgagtcgcaggtcgtcgtcgaccacctcaacgacgcacttgccgcgctccttcgggccaagcctcgcgagttctggctccgggtggcacagaacacttctttgcatgaattccttgatagttatctacaattcaggcacaggtgcccttctgctggagaaaaaattgcttgatctaccaaaattgttggacatatgtgctatatatgagcatgacaacggcaagttaacaagttcactggttacgaatgttattaatgtgcagccgagtgtactggatgacattaatattgtcattccccagttcctcaacattttccacacgatgcatgataggtgcatgacatctttacaggtgctcacctcaaccggatcaattgataatggatatgttcagcttcagaaagatttcatggaggtgttagattttataaatgatgcgattgttactctggattcttttgttggtgcttatcaacctgccgctttattgttctgtactaattttgaaatgagctatggagttgaggaattgctgaatgctcttgcaaggctgtatagttcattgctaccatcattgctccatgggtttaaagttatgcccaagtctcagagcaatgcagaggcatcacttgacagcacacttagtgacattcctcttgctataaggatgttgtcaaagagaacagcgagatttggttggagattgttgcactactgttatttgaatgatcaagttagggagcatgatgctcaaacttctactaagatgtttccagctaaagtcgaagatcctatgatcaggggagacatcttggttcaaacacttaaagatataaatagagaatccacttactcttctcaagtgaatcatggaaatacttttctccaagaacttgaaagtgaatttcaattaatgagccagattggtgatattcggaacaaaggatggatatacatggatgatgagcagttccagttcttatcacgattgtgtggatctactcacacttcttggaatggcatatctgatttgccagtctcttctcatggtggtgaattacagcagaaggatgaggaaacagcgatggttgagtccaaaattagtcagataagggatcttttccctgattatgggaagggtttcctttctgcttgtctggaagcctacaacctgaaccctgaggaagttatccaaaggatattagaaggaacacttcatcaagatctgctagctttggatacttcattagaagagatgccacacgaaaaacctgcaccaactgctgtgaaagataaagggaagggtatattggtggaaactgtgcctcaaattacaaagaaaccccataaagttgctgagacacattactttgttcaagatggcctatcttcagcaacttcatcagcatcacaaggtccatcttctgcaatttcaccagcatcccttgggccatcttctgcaatttcctcagcattccagggaccatcttctgctatttcatcagcatctctgggcccatcctcatccatatcatctgtcccaaaaggtagatttacaaggaaggccaatgatgatttgccggacactgcaatcctggactcgaaaaatgctaaaaatgcagctagatctgttatccttgactcgcaatatgagtatgaagatgagtacgatgattcatttgatgatcttggcttcagtgtggtagagtcaagttatgaggaaactgatggtgtcaatgacgctgaggcttcatcacatggcccaagatggagttcacagaagaaaccacagttttatgtcaaggatgggaagaattatagctacaaggttgctggttcggttgctgtatccagtgctcgagaagcagctgtcatgaggcaaactcaaaaagagacaatctatggtctgggtcgtggtggaaatgttccttttggtgtcccgaacaggcaacatatagatgtggaggcagaggaggttggtgatgctgacaactcaggcagaggttcaaattcccgtggccggggaagaaaaggcggaagggaaggcaaccgtccggaggagaatgagagctccaatggacgaggctctggctttggtggtaaaagaggaggctggagtcagggcaatccggctgaggaaaactggaaccctaatggtcaacaaggttttggccgtggtggcagaagagggggctggaatcagggtggcccagcgaaggaagacggtaactctagtggcaggcaagaaagttttggccgtggagcaagacggggcagcatgaaccatgaccaatcagccgaggataatgaaggccataataatcccgcacaagactttactcgaggaccagctcctcgtggtggccatggaaggggaggtggccggaaccatcacaggagagatcgggcaatgaagaagcatatgcaaggattgacagggctttagctgctggtagccttatgcttttgatgtgccgtactgtaaatggcatttttggaggcactcctacttgaccatccaaatttttgtgcttgttctgtttttaaatcaaataacgccatgaagtaacccacatatgttctcgtaacatttgtgattgccctaaaaagggtaatagtgtatgtagttctaaacatgcttgtaactcgttaaataca

SEQ ID NO: 86333 - DNA, 630 bp, Zea Mays
atggcaaaccaagggcaagggtatcgagattatttctctcaagctgcatcttctttggctgatcgctccttctcgcctccccccacagcccccaacaccgatgagctaggcctcttttcccagtcggtggtgggccccagacccttggctcctttggtgaccatggaaaacctagacctcaactctcatattgacagcttctcgttccttgacacctactcggggtacatgcagccagaaggaggtatcagcgagcaaggggttcctcctgtggccctggtggttcctgctccaatgattggaggcagacgacactcactgggatctggtccccaggttcctgctccggggatgggaggtagccgacaaccactaggatctggtccccaggttcctgctctaggaattggaggcagccgacactcactgaggtccggtccccaggttcctgctccaaggatggaagtaggaggtcgtgggagatcgaggaacatctcatttcctacagaagacatcgacacccatgatggaacagaggaagatgataacgcctcccagttggtaatatccaatttcatgatccagtacaatattttgcaactatttcataatatttttcttgtccaatga

SEQ ID NO: 86334 - DNA, 1649 bp, Zea Mays
gagtaaaaaaaattgtagaaggcatcggaaccaaactattggtgccattttccatctaataacagcacgtttcaccagcgaagatcaagccgcaacagttcatgcacgggctctgattgacgccatgggggatgccgccgccgccgcagcaacggcctccacgtccgctcccgccacgcccacctccatcctcatctgcctggaggacggcagcgaccttctctccgacgcctacgatggcgccggcgccaccgacttcgtcgtcgcccgcgacgagcatctgcttgtcgaggaccaggacgaggagtacgtcgcgctgctcctgtccaaggagagcgcggcagtatgcgccccggcggaggaggaaacggaggagtggatgaagaccgcacgctccggatgcgtccgctggatcatcaagaccacggcgatgttcgggttcggcgggaagaccgcgtacgtcgcggtgacttacctcgatcgcttcctggttcaacggcgagtcaatagggggaacgagtgggctttgcggctgctcacggtggcgtgcctgtcgctggcgatcaagctggaggaggagcacgcgccgcggctgtcggagttcccgctagacgaggacgagttcgacagcgcgtccatcctgcggatggagctcctcgtcctgggcaccctcgagtggcggatgatcgccgtcacccccttcccctacatcagctacttcgcggcgcggttccgggaggacgagcgccgggcgatcctcatgcgcgccgtggagtgcgtcttcgcggcgatcaaagtgataagctcggtggagtaccggccgtcgaccatcgccgtggcatccatcctcgtcgcgcgcggccgggaggagactcccgccggcagcctggacgcgctcaaggcgatcctggggtcatcgtgcccgcaactagacaccgggcacgtgtactcctgctacagagcgatgattcgggaggacgacaagtcgccgacgcactcgacgtcgacgggggtggcgtcctcgggcgtctctgtcgccgggaacgggagccccagcccgggcgccaataatgccgctggctccggcccgcctgcaaccccggatagccacaagcacaaccacaaccagaggagacggttgcgctcacctcagcgacagtaggaggctaggagctgctgggcagtgcagttgcagtccagctgcatttttcagctcaccattttctttttgctaccgattgtttgtttcttcaggggtggccagaacgcccgaatccaagcgggggcgagatctgattcttcgggttagtgcggtgtcgcagggtgatctggtgatttagtgtcggaaagatcttttgttttgtggagatcttttcccgggatcaaagtgggagggcagtgtaaagactagaccaaagctgaaacagagcaaagctcttgctcaaagcgccaaggcctcagccggtcagacctcacagggtacctaccgaggtgaaagtgatgtcaggagtcggaagtcaatttttgtttttttgtgtgtgtgtgtgaatgccgtctgtaccagctagtccgtctgtctgtcctctatctttctctgattattaaatagcctgtctgtcactgcatcagtggcaaccgttaactagata

SEQ ID NO: 86335 - DNA, 1864 bp, Zea Mays
acgcctcccacttctctccctctgcaactgctcaccccctgtgaaagcgcgcgagcgtggagaagagtagggaggaagttcagttccgtgccgtgctcgcgcgcacccaccccgcacgccgcatgccgccttttactccgcgctgctgctgctgctgggacgaagaaaatcttttccttcacctttctctcctctttcccagttcatgcacgggctctgattgacgccatgggggatgccgccgccgccgcagcaacggcctccacgtccgctcccgccacgcccacctccatcctcatctgcctggaggacggcagcgaccttctctccgacgcctacgatggcgccggcgccaccgacttcgtcgtcgcccgcgacgagcatctgcttgtcgaggaccaggacgaggagtacgtcgcgctgctcctgtccaaggagagcgcggcagtatgcgccccggcggaggaggaaacggaggagtggatgaagaccgcacgctccggatgcgtccgctggatcatcaagaccacggcgatgttcgggttcggcgggaagaccgcgtacgtcgcggtgacttacctcgatcgcttcctggttcaacggcgagtcaatagggggaacgagtgggctttgcggctgctcacggtggcgtgcctgtcgctggcgatcaagctggaggaggagcacgcgccgcggctgtcggagttcccgctagacgaggacgagttcgacagcgcgtccatcctgcggatggagctcctcgtcctgggcaccctcgagtggcggatgatcgccgtcacccccttcccctacatcagctacttcgcggcgcggttccgggaggacgagcgccgggcgatcctcatgcgcgccgtggagtgcgtcttcgcggcgatcaaagtgataagctcggtggagtaccggccgtcgaccatcgccgtggcatccatcctcgtcgcgcgcggccgggaggagactcccgccggcagcctggacgcgctcaaggcgatcctggggtcatcgtgcccgcaactagacaccgggcacgtgtactcctgctacagagcgatgattcgggaggacgacaagtcgccgacgcactcgacgtcgacgggggtggcgtcctcgggcgtctctgtcgccgggaacgggagccccagcccgggcgccaataatgccgctggctccggcccgcctgcaaccccggatagccacaagcacaaccacaaccagaggagacggttgcgctcacctcagcgacagtaggaggctaggagctgctgggcagtgcagttgcagtccagctgcatttttcagctcaccattttctttttgctaccgattgtttgtttcttcaggggtggccagaacgcccgaatccaagcgggggcgagatctgattcttcgggttagtgcggtgtcgcagggtgatctggtgatttagtgtcggaaagatcttttgttttgtggagatcttttcccgggatcaaagtgggagggcagtgtaaagactagaccaaagctgaaacagagcaaagctcttgctcaaagcgccaaggcctcagccggtcagacctcacagggtacctaccgaggtgaaagtgatgtcaggagtcggaagtcaatttttgtttttttgtgtgtgtgtgtgaatgccgtctgtaccagctagtccgtctgtctgtcctctatctttctctgattattaaatagcctgtctgtcactgcatcagtggcaaccgttaactagatagtactatttcatttgattatcttgcttcgccttctgttgagtcgatgtcctgttcttcagactgatttccgtcgatgaatcaaagggcaaaggctgaccttgtgattgatg

SEQ ID NO: 86336 - DNA, 450 bp, Zea Mays
attgcaaatgcaaggctcagtgtcacggccagcggtagcccttcaggtactgccacaacgacgatggtgacagcaatggcgaagaactcaagcagctccaatgcgtcatctccagtccagctcaagtacgtaccatcaatgatcttgcgccggaacaggctttgggtgagcactgcgaatgtgaccactgcaaagataagtcctatcttaccgatgatggtggccacaccattcagcttgacctgcaatggtgtctcgtcatcaccaccttcgctgagagtggccatcagcttcccccactgagtcctcatgccgactgtcgtgacgagcattttgcaagaaccgtcctgcaccttcgtccctgacaaaaggaatgggtactcaacgttgacggcaactggctcactctctccggtcaagctcgactcgttgatcagaagcgagaagcct

SEQ ID NO: 86337 - DNA, 3369 bp, Zea Mays
aatgacaccagccgcaatagctgaatgctgcagcttgagttatttggcagtgtggttagaaattcgaccgctagctcaatctttctgcacaaataaacatgccgttgtgaagatgtagattacaagtgagaagattagaataaggttgatctaaacaggattccacaaaatactccagcttcagtgcttctgtatgaatcagaaaaattacataaggtactaatcatgaacataatatgtcaaatttgtccatcttactgcttctatcatcctagaaagtaaaaagagaaagtactatttggcatacatcaatgcgattattgtgcaaaatcaacaaatataaagccaagctaaaaatgctaacaacaaaattgtatctcttataaaatcctattcacactgaattaacaaaatcatctcgtgcattgtttatggcagtaaacaagtaatacgcaatcctccattaaaagaggcgactaaaacgatggaagcataatcacataaacggaattcctagccacagggttacatgagctaacgttcaccgaaacagaagcagaagggtgacctttcgagcgacagctccttgctctggagggagaggacgaggtcgaggtgttcccacgcgcccttggcgccgccgtcgccgtcgaagcgaagtctagcgaacttgagatcgctcggaccctccccttggcaaggctgcgattggttccaccgccgcttcctcgctgcgccgggcctcgcggtcgcggcagccgtctccatggcaatggcgtctgtcatgagcggaagtggaggctagggttctgggtttggaggcacgtgctgcctcgcccgtttgatttctccgtgcccgaagacgcgccgtgaaaccttcttccgcgtccgaccaatattaataaagcacgaatcttaaagatgtgctaaccagactgaccgaccgagtcaccgtcacggtcaccgcggccccagcccaacccagagcattcttggtcccgatttcctcagctcaggtgccgggttccccaggcacaagctacaaaccctaacccatccgggagcaccggaaattttggaggctgaaacggaaaggggagaaggcgatgacgacgagggagccgcgcgaggcgtcccggcgcgatgggcgcgactcgcacgggaggcgcccccactcctcgttcaggtcgcggagggacgatcccagcccaaggagaagagatgacaggaggcgtgaatcggacagggcgcaccacagaagtcgagatggagaatttttggaggtggtggaccatgatcagaagcggaatagagatgctgcgcagagcgctgaccctccgaatgctgagtcgaagtcagcgagtgatatgaagaatggcccctccaccaggcatgagagatcacctaggggaaccaaacgattttctgagtcgagtgaggcatggcggcctcggtctttctttcaggttcttatcttttctcagtgtattatatcaaaagggaataccaccaatagcttctgctctctattacaaattgtttcatcatagctacaaatagtgtgctttgactatcacggttacatacatatgtgctcacgatgttacagagctcactattttggatagctaatagtaatatagtattttatggagttgctattttagatagccgaacagcaagtattccacattcggtaacttcaccggtactggaaaatgtacctaacagattagtgttattaggtggatccataggtcattatttgcttgtggtctggattgcaaacatcctggttatgacagctctggtaactaatgcaattgtgccgagtgttgtctaataacaaatattgtgttgatagtagagacatttaatgtgcccaaaacattataagtattccatgtttgtgttattctgaataaatgctatatatttattttaagactcacggttaaaggacttctgagtcgtatgttaagaggctctggagtgcatatgatttttttaggatttgtgttatcctatgtagaatgtagaaaccgatatttgagataatcagctcaaattagtacctataggttcgttttcacccatgtttagctcaaatattcattagctatcctctgtttgtgattatgtgtgaaccactgaacctgtcgttgcatttctgttatttaagttcatgaaatgtagttttagtgtacagattagttagattcatggatatggtttgccagctttggttaacatgaatatacttgtcttaattaatggttgcaagtaacaactctaacattcatatgcatcttttgtagaatcatctgaagtgtggaggttggtctctgcataaagaatgttaggtcattgttaaatcatacaaaaattcttccacttgtcgtacatacataacacattcctcctgatgtagtgggacttcttttatgacacattgattcaaatgcccactgtttgtaacaatgttagactacctgtgcttctatgtacagcacaatgagcgtggaagtgctgggcaaggtggtcggcattatgaccgccaggctagtggtgagatgccttcttagtttgtattttgtgcatttatttaattatccattctctatacatgctaagttatttattgtttctaagactatggaaggcaaagggagcatctctctgatagagataaacagaagacagagagacacagtttgcagggaaagattgagctggaccagcaaaagaaggatggtgattcaacatggaagcatgatggatttttccagttggaggaagcagcaccccttgccaagaagaggccaccatttcaggagatgaagatacaagaatctgctgacactgtaacagaaccagattctagatcaaggaattatcaggcacggggatatggaaatcatcgacccttcctaaggccagatgatcgaggctttagaagggggtttcctgaccacaggagtgatggccagaggaatgggcatgatataaggggaagattttctgttaggggaggaatggacagagacaggtttaacaattcatatggtgggagaagcaacgcagagcaggcttctggtgatcaagaagaaaaatggaagcatgacctctatgatcagacaaacaggagcccgcctccaaagactgaggaagagcagattgccaaagttgaagcgctgttggcactgtagctgtcttatttatgtctggagttgttttttgtgatagattatcatgtacttggtttcagatgtgttgaatactgtcttttttattctatatattctgcatatctatgtggaattgtggattaaaccaccttatgaagctattccatttggactgataata

SEQ ID NO: 86338 - DNA, 2322 bp, Zea Mays
aatgacaccagccgcaatagctgaatgctgcagcttgagttatttggcagtgtggttagaaattcgaccgctagctcaatctttctgcacaaataaacatgccgttgtgaagatgtagattacaagtgagaagattagaataaggttgatctaaacaggattccacaaaatactccagcttcagtgcttctgtatgaatcagaaaaattacataaggtactaatcatgaacataatatgtcaaatttgtccatcttactgcttctatcatcctagaaagtaaaaagagaaagtactatttggcatacatcaatgcgattattgtgcaaaatcaacaaatataaagccaagctaaaaatgctaacaacaaaattgtatctcttataaaatcctattcacactgaattaacaaaatcatctcgtgcattgtttatggcagtaaacaagtaatacgcaatcctccattaaaagaggcgactaaaacgatggaagcataatcacataaacggaattcctagccacagggttacatgagctaacgttcaccgaaacagaagcagaagggtgacctttcgagcgacagctccttgctctggagggagaggacgaggtcgaggtgttcccacgcgcccttggcgccgccgtcgccgtcgaagcgaagtctagcgaacttgagatcgctcggaccctccccttggcaaggctgcgattggttccaccgccgcttcctcgctgcgccgggcctcgcggtcgcggcagccgtctccatggcaatggcgtctgtcatgagcggaagtggaggctagggttctgggtttggaggcacgtgctgcctcgcccgtttgatttctccgtgcccgaagacgcgccgtgaaaccttcttccgcgtccgaccaatattaataaagcacgaatcttaaagatgtgctaaccagactgaccgaccgagtcaccgtcacggtcaccgcggccccagcccaacccagagcattcttggtcccgatttcctcagctcaggtgccgggttccccaggcacaagctacaaaccctaacccatccgggagcaccggaaattttggaggctgaaacggaaaggggagaaggcgatgacgacgagggagccgcgcgaggcgtcccggcgcgatgggcgcgactcgcacgggaggcgcccccactcctcgttcaggtcgcggagggacgatcccagcccaaggagaagagatgacaggaggcgtgaatcggacagggcgcaccacagaagtcgagatggagaatttttggaggtggtggaccatgatcagaagcggaatagagatgctgcgcagagcgctgaccctccgaatgctgagtcgaagtcagcgagtgatatgaagaatggcccctccaccaggcatgagagatcacctaggggaaccaaacgattttctgagtcgagtgaggcatggcggcctcggtctttctttcagcacaatgagcgtggaagtgctgggcaaggtggtcggcattatgaccgccaggctagtgactatggaaggcaaagggagcatctctctgatagagataaacagaagacagagagacacagtttgcagggaaagattgagctggaccagcaaaagaaggatggtgattcaacatggaagcatgatggatttttccagttggaggaagcagcaccccttgccaagaagaggccaccatttcaggagatgaagatacaagaatctgctgacactgtaacagaaccagattctagatcaaggaattatcaggcacggggatatggaaatcatcgacccttcctaaggccagatgatcgaggctttagaagggggtttcctgaccacaggagtgatggccagaggaatgggcatgatataaggggaagattttctgttaggggaggaatggacagagacaggtttaacaattcatatggtgggagaagcaacgcagagcaggcttctggtgatcaagaagaaaaatggaagcatgacctctatgatcagacaaacaggagcccgcctccaaagactgaggaagagcagattgccaaagttgaagcgctgttggcactgtagctgtcttatttatgtctggagttgttttttgtgatagattatcatgtacttggtttcagatgtgttgaatactgtcttttttattctatatattctgcatatctatgtggaattgtggattaaaccaccttatgaagctattccatttggactgataatattgtactagataatcatgagtttcataatgtagaaccatcaagcgaagtacaagacaatcatgagtttggtaggtaaacaa

SEQ ID NO: 86339 - DNA, 1773 bp, Zea Mays
acaccagagccccactcccgtagtcctgtggctgtactccacacaagccgtaaacgcaatttcgcacacgaagttccaaaccccgccggccgccgcgtccgttccccttccccttccctttcctctctcggaccccaatggcgtcgtcgtcgaaggcgccgtcatcgcgccgttccgtcttcgacgccgtccacatccgctcggagttttccgcggccggcatctccgcccacttcatccctctcatctggaagtacgtacttcaaaaccctaggtgcagcgacctggatggcgttccgtcgctgccggcggccgcgtacgcgctcctccggcagaagttccggccgaccacttcgacgctaaccgctgccgcggactccaaggaccgcaccacgaccaagcttctcatctgcctgcagaatggggagtctgtagaagcagtggtcatgcgatatgacacacggctggggaagtatgatggaaagcctcggcctggtggagtgcggtcaaccctctgtgtgtcatcacaggttgggtgcaagatgggctgcagattctgtgctactggaacaatgggcttcaaaagcaatctgtcttctggagaaattgtagagcagctggtccatgcatctcgctattctcagatccgaaatgttgttttcatgggaatgggggagccgatgaacaactataatgctttggttgaagcaatcggagtgtttactggatctccttttcagctttcacctaagagaattactgtatctactgtcggaatcattcatggaatcaacaaattcaatggtgaccttccaaaggtgaatttagcagtgtcattgcatgctcctgaccaagacattcgctgtcagataatgcctgctgcacgtgcctttcctttaggaaagctaatgaatgccctgcagtcctatcaaaatgagagtaagcagaccatcttcattgagtatattatgcttgatggagttaacgatcaggaggagcatgcacatcagcttggtaaactgcttgaaacgtttaaagcggttgtaaatctaataccattcaatccaattgggtcatcaagcaatttcaagacaagcagtgaccaaaatgtgaagaacttccaaaaggttttaaaaggcatctaccgcatcagaactactattcgccagcagatgggtcaggacatagctggcgcttgtggccagttggtggttagcctcccagatgaaagatcagctggtggagcaactcttttgtcagacatcgaagaccttcggatctgacctctcccccaattgttaattctaccattttctcaagatcagatcctcttactaattagcctcacatgatatggtaactggtgctatagtttcaagtcaagctttaaaacatgagatgtttagtttgaccattgttgtgttccccttttgttctgggatacacaattttgctgtacacaatggtgaagacccctgcagttctgctcttgtggataggtggccactgaaacggttggtaacttggtattgtaaatgggacaaccggacaatgttatctcaacaatgccatggtgatatgctatcgtcagtgtaagatgactttcctgtcagatctcaatgagtatctgatgctcccccctcctatctatcaccctctcttgtacttgcagcatttcattgccattagtcgttttatgctttgctttgtgctttagattctatgtcggtaggctgtatgtaatggtggtggtggaactggcatggggcttgg

SEQ ID NO: 86340 - DNA, 405 bp, Zea Mays
atggccgcagacgcagcactaccgcgagcgggtggcgcgtaccacgagcgcgagcaggaggagaccgtagaggcaccagtgcggctgacggacccgcagagcgtgaggaggcctgtctcccacggcgaaacgcctactttgacatctgccgaggtgaaacgcgtagcggatcaggaggcggaagtggagacgccgaacatggactccgacgtggacaatgtcgggcggtggagtagccgatggagcgaggacgatggagatcggagtaggagcaattcccccacgatgaagcagccatttggccaccgcggagcacgggtcctccgctctacgtacccgtgcgagagaggtatttccctcgtcaagaatcaaaccgtggaaatagtatgcggcagcttgagataa

SEQ ID NO: 86341 - DNA, 1424 bp, Zea Mays
ggccaagagcgaggcaaggggaggatgtcggaggcaggcagaaccgtgcgccaggccaatgtgcccacagctcaggaatccccacagctcacacaggcacacagctcctcttggcggcgcctctgacttctcctttttcgtcgcccttctcctttttcgtcgccttcgatcggcggccgcctccttcctccacttccgtcccttcaccgagccgccgccgccactatgaagggacccggcctcttctccgacatcggcaagaaggccaaggatctactcagtaaggactacacttacgaccagaagctgaccatctccaccgccagcgcctctggactgggcctgacttccacagctgtgaagaaaggagggctttattctcttgatgtcagttcagtttacaagtacaagaataccactgttgatgttaaagtggacactgaatcaaatatctctactacattgaccgtgttggacgccttgccatgcacaaagcttgtcacttctgtgaagctgcctgactacaattatggaaaggtggagctgcaatacttccatgagaatgcaacttttgccactgttgttggcacgaagccttctccagtgattgatctttctgggacagtaggtgctcaaggagttgcatttggtgcagaagctgggtatgacactgctacgggaaaatttaccaagtacactgctgcaattggtgtaaccaagccagactaccatgctgcattcattctggcggacaaaggtgacaccattaaagtgtcaggtgtttatcacctggatgagaaacagaaggcctcagctgtggctgagctaacccggaggctttcaacaaatcagaacacactcacagttggtggactgtacacagttgattctcagacagccgtgaaggcaaggctcaacaacaatggaacgcttgccgcgcttcttcagcacgagcttaaacccaagtcactcttgacgatctctggtgaattcgacaccaaggctctggacagaccccccaagtttggcttggcgcttgcgctgaagccctgatcagatcaccccgcagcgattgttggtgaattttgaattctttggttgtttttcgcaaagctgtagccaataatccgttccacgaaccttttctgttattctggcaaacgtttggagcactgtggcttagatccggatgggtcgtctacaggaattttacctgcctgcttttattgttggaagcatctggccgtcggtagatgtacactgtgctcgcttctttagcacctaggcctctgccactgtgttactgagtagacgctacggtaatcttttgcatgcaggattagcatgctaattttgtgcggtgtttgatttaccgctctttacggtctaccacttgtttggagctcatttcttctgcgcatatg

SEQ ID NO: 86342 - DNA, 2112 bp, Zea Mays
ctagcctagcactagcagctgcagcgcctggcctcctccctctctctctgcctcttccttcggccatctcagtatacggctgagagagagagagagagagagagagagagagagacggtgagagataacatggaagagagaggggttccagcaatggggagaaccttgttcctgccgctgctgtggatcgccatgctgacgagtgctgctcgcgtggtgcaatgtcttccttacgactactcgtccagctctgagtgcttgccggagccgctggagcctcagtacggcggcggcatcctccggaacgccaacttcagcgcgggcctccagggctggtcggcgttcgggtacggcgcagtggaggaaggcctgtcagcgaccggcaacggctacggcgtggcgcggaaccggacgcggccgtaccagagcgtcagccagaaggtgtacctgcagaacgacacgcactacaccctgtcagcttggttgcaggtcagcaatggtagcgccgatgtcagagccgtggtgaagaccgacggcgagttcatccacgccggcgccgtcgaagcgcggtccggctgctggtccatcctcaaaggcggcctcaccgcgcccgcatccggggcggcagaactctacttcgagagcaacgcgacggtggacatatgggtggacagcgtctcgctgcagcctttctcccgggaggagtgggcggcgcaccaccacgcggccatcaagtcggcgcgcaagaagacggtgcggctgcgcgccagggactccgccggcaagccggtgcccggcgcgcaggtgcgcgtcgagcacgtgcggagcggcttcccgctggggtcggccatgagcgcggagatcctgcagagcccggcgtaccagcggtggttcacgtcgcggttcacggtgaccaccttcgagaacgagatgaagtggtacagcacggagcgggtgcagggccgcgaggactactcggtccccgacgcgatgctcaggttcgccaagagccacggcatcgccgtgcgcggccacaacgtgttctgggaccagccgagccagcagccggcgtgggtgcggtcgctgtcgcagcggcagctccagcaggcgacggcgcggcggatccggtcggtcatgtcgcgctacgccgggcaggtgatcgcgtgggacgtggtgaacgagaacctccacttccagttcttcgaggacaagttcgggtgggacgcgtcggcggagttctaccgcagggcgcaccagatggacgggcaggcgctcatgtccatgaacgagtacaacacgctggagtggcccggggacacgttggccgggcccagcaagtacctgggcaagctgttccagatcaagaagttcccgggcaacgccaacgacgccaggatggccatcggcctcgagggccacttctccgtgcccagcatcccctacatccgcgccgcgctcgacaccatgtcaaaggccaacgcgcccatctggctcaccgagatcgacgtcgcgccggggcccaaccaggcgcactacctggagcagatactcagggaggtgtacgcgcacccggccgtgcacggcatcatcctctggacggcgcgccacccgcaggggtgctacgtcatgtgcctcaccgacgacaacttcaggaacctccccaccggcgacgtcgtcgacaagctcatcgccgagtggaagacgcactcgctcgccggcgtggcggacgccgacggctactacgaggccgagctgttccacggggactacaaggtcaccgtcagccacccggtggccaactccaccgtggtgcagagcctgagcatcgacagggagaccgacactgatagcgagtacaccatacacgtctagccgccttagctcctagatagcctccttccaaggaggatccatatatacgcatatacacatgtgcatgattgtgggtctagagtctagggtattgtggtttgtgatgtcgttagtcatatacacatacatatatgtatggcgcccgagagtgaggcgatccatgtgatgtatgttcatatacaacaaaggaggaattccatttgtttcttcgatcaatatacatacttccttctgtagctc

SEQ ID NO: 86343 - DNA, 1498 bp, Zea Mays
tgcggcgacctgggaggcgaatgcggccgcgatgtggagcatcgcacccgccgcgagcgggcagcacttgagtgatccctccacagccagtgccggcgcgtgctcgccgtcgagccgtccgtcccggaggcacctcacgaccgcctccgccatcctccccgccgccgccggccgccgcttagtgcctaaaccctagcccccacaagagcccgagacgggtcgccaaactcccggaaggcctggaggcaagagtaacgcggggcccagctgtcagagaaacacgggaccccttacccgtgtcggatataatcaagccgtcgtttgaccccgcctcgaaaccttttgccgtcttgcggcggccttctgctccgccgctcgttctcatatcttgcggcggcctggggaaaaagaggagagatcggagatgaaggcgtgtgcgaaggctgcgggggagaggctgtcgctggtctgtgctccgtcaactaggcagcctctagctcggagctttgttaaggcaagaagattaccctctcaacatgagacgaagtcacaagtatcctgctcggttagggtgtcagaaaacacagctcacagaatagatgccacagcagaaaatattttcccagcagtgaaagatcatgtcttgaaagcaactgatgcaatcaacagaggagaagtgattgcggtgcctactgataccatatacgggtttgcatgtgatgcatgctctgcaggagcagttaatcgtatttatgagatcaaaggacgcatacaaacaaggcctctggcaatttgtgttggtgatgtctcagacatatcacggtttgctttagtggaccacttgccacatggcttgcttgatagtctacttcctgggcctgtcactattgttctaaaacgaggtgaaaacagcatattagagagatcacttaatcctggcttggatagcattggagttcgtgtgccggatctggatttcatacgatccattgctcgtggtactggaagtgcacttgcactcaccagcgccaacttaagcggacagcctagtagtgtctgtgtcaaagatttcgagggtttatggccacattgttcatatgtctttgatggtggagtacttccttctgggcgtgctggttcaacaatcgttgatctaataacaccaggagtttacaagatattgagggatggaagctcaaggaaggaaacagcagcagtgctcggcaagttcggctttgttgaagcgttgtaactactcggcactttaagaaagtaagcacgatcaaagagtggctgtcttatccacattatatcttgtttaattagtgatacattagagcttttgttgctgtttgtgcttttcttttacatcttcaaacttattgtattattgcgaatgtgatgttgagtagaataacagagttcacattatttaagctgtgtagagtgtgtgacatgggcttgttttgtagcaaatgaagcagctcagttgtggatt

SEQ ID NO: 86344 - DNA, 2229 bp, Zea Mays
gaaagccgcatcttccccagcccacttgtgacctaccgatctagacccgcgcttgccgccgtcgagtcgccggccaggccagccttcaccttgtcaccggcgaaatccacggcggtgaggcaaccggcagttgagagtgcgcctacagttggggggcggagatggggaagaagcagcacagcaaggaccgcatgttcatcacacggacggagtgggcgactgaatggggcggcgccaagcagaaggacgtcggcacgccgttcaagcgcctccccttctactgttgctcgctcacgtttcttccattcgaggatccagtgtgcaccgtcgatggaagcgtctttgatttaatgagcataatcccataccttaaaaagtttgggaagcatccagtaaccggagcaccactcaagcacgaagatctgattcctctcacattccacaagaactcagatggagagtttcagtgtcctgttctgaacaaagtttttacagaattcacacacatagttgctgtaaaaactactggaaatgtcttctgctatgaggcaatccaagaacttaacatcaagccaaaaaattggaaagagttgctaactgacgagcccttcactcgcaatgacttgataacgattcagaacccaaacgtggttgatggcaaggtccttggggaattcgaccatgtcaaaaagggcctcaaacttgaggatgaagagttgcagcggatgaaagatgatccaacctataacataaatatttctggtgatcttaagcaaatgattaaggaacttgggacagaaaaaggaaatgaagcttttttgcagggaggtggagggctgaaagctcaaaaggaaagagctgcggctcttgctgcaattttagcaaggaaggagaaggatgactcaaaagcaggaaaagaacctaaacctaaccaaagtttcagtattgtagatgctgcttctgcttctgttcatggcaggagtgcagcagcagcaaaagcaacttctgctgaaaaaaccgctgctagaatcgctatgcatatggcaggggaacgagctcctgtaaatgctaaactggtcaaaagtcgttacactactggagcagcgtcgcgttctttcacatcgacttcttatgatcctgttaccaaaaatgaatatgagtatgttaaagttgaaaggaatccaaaaaagaaaggttacgttcagctgcatacaacgcatggtgatttgaatttagagcttcattgtgatataactcctcgaacttgtgaaaatttcctcacacattgtgaaaatggttactacaatggtcttatcttccatcggagcatcaaaaacttcatgatccaaggcggcgatccaactggcacaggaagtggaggagagtccatatggggtaaaccgttcaaggacgagccaaactcaaagctgctacattctggaagaggtgtagtcagcatggcaaattcaggccctcataccaatggatcccaattttttatcttatacaagtctgcaccacacttaaattacaagcacacggtatttggcatggtggtgggtggtttgaccacactttcaacgatggaaagggttcctgtcgatgatgatgaccggccaatggaggaaataaagattctaaaagtcagcatattcgtgaatccttacacagagccagatgaggaagaagaaaaggcaaaggaggaaaagaaaaaggatgaggattatgataaggtgggatcatggtatagcaacccaggaactggtgttgctggttcaacaagtactggtggtggggttggcaagtatttaaaagctcgggctgctggttctattgatgtgactggaagtgctggtgtagctgatgattcgagcaagaagagaaaagcgactgcatctagtgtagagttcaaagatttttctggatggtagatgttatgtgtgtgtacgtatgtcgatttctgcttctcaggaaaaaaatggcggttgcatactatggttgtatcggtgttctggacacgttcaaatcatgtggtgtggtatgttaagtgttaactgtgtaaaatcacatggcctacttggaagtgtgctctgtaagttttgattcgagcttgcttcatactgaagagtgaaaaatatgtatattgcatcatctggtcaactgattccagtgtaaactgtgacggttgtgcttacctagctaaagattgtgttccttctgatttctgag

SEQ ID NO: 86345 - DNA, 2049 bp, Zea Mays
gaaagccgcatcttccccagcccacttgtgacctaccgatctagacccgcgcttgccgccgtcgagtcgccggccaggccagccttcaccttgtcaccggcgaaatccacggcggtgaggcaaccggcagttgagagtgcgcctacagttggggggcggagatggggaagaagcagcacagcaaggaccgcatgttcatcacacggacggagtgggcgactgaatggggcggcgccaagcagaaggacgtcggcacgccgttcaagcgcctccccttctactgttgctcgctcacgtttcttccattcgaggatccagtgtgcaccgtcgatggaagcgtctttgatttaatgagcataatcccataccttaaaaagtttgggaagcatccagtaaccggagcaccactcaagcacgaagatctgattcctctcacattccacaagaactcagatgtttcagtgtcctgttctgaacaaagtttttacagaattcacacacatagttgctgtaaaaactactggaaatgtcttctgctatgaggcaatccaagaacttaacatcaagccaaaaaattggaaagagttgctaactgacgagcccttcactcgcaatgacttgataacgattcagaacccaaacgtggttgatggcaaggtccttggggaattcgaccatgtcaaaaagggcctcaaacttgaggatgaagagttgcagcggatgaaagatgatccaacctataacataaatatttctggtgatcttaagcaaatgattaaggaacttgggacagaaaaaggaaatgaagcttttttgcagggaggtggagggctgaaagctcaaaaggaaagagctgcggctcttgctgcaattttagcaaggaaggagaaggatgactcaaaagcaggaaaagaacctaaacctaaccaaagtttcagtattgtagatgctgcttctgcttctgttcatggcaggagtgcagcagcagcaaaagcaacttctgctgaaaaaaccgctgctagaatcgctatgcatatggcaggggaacgagctcctgtaaatgctaaactggtcaaaagtcgttacactactggagcagcgtcgcgttctttcacatcgacttcttatgatcctgttaccaaaaatgaatatgagtatgttaaagttgaaaggaatccaaaaaagaaaggttacgttcagctgcatacaacgcatggtgatttgaatttagagcttcattgtgatataactcctcgaacttgtgaaaatttcctcacacattgtgaaaatggttactacaatggtcttatcttccatcggagcatcaaaaacttcatgatccaaggcggcgatccaactggcacaggaagtggaggagagtccatatggggtaaaccgttcaaggacgagccaaactcaaagctgctacattctggaagaggtgtagtcagcatggcaaattcaggccctcataccaatggatcccaattttttatcttatacaagtctgcaccacacttaaattacaagcacacggtatttggcatggtggtgggtggtttgaccacactttcaacgatggaaagggttcctgtcgatgatgatgaccggccaatggaggaaataaagattctaaaagtcagcatattcgtgaatccttacacagagccagatgaggaagaagaaaaggcaaaggaggaaaagaaaaaggatgaggattatgataaggtgggatcatggtatagcaacccaggaactggtgttgctggttcaacaagtactggtggtggggttggcaagtatttaaaagctcgggctgctggttctattgatgtgactggaagtgctggtgtagctgatgattcgagcaagaagagaaaagcgactgcatctagtgtagagttcaaagatttttctggatggaaaaaaatggcggttgcatactatggttgtatcggtgttctggacacgttcaaatcatgtggtgtgctaaagattgtgttccttctgatttctgagcatgaacactttgttccttctgatttctga

SEQ ID NO: 86346 - DNA, 1231 bp, Zea Mays
tggcgacgggagcggacaccggaacggaacggaacggaactcgtggttggacgacctatcagcagcggccacgccagcgcgtatgattggcggaccggacgccaataataccctcgcctcgaggcctcgactcgacgcatcgccggtcgccgctgctcgctcgcgttcgcggcgccctcgcctccctgtcactccctcgtcccccgccccatccacgccgcgtcgccctccgcctccaaataaagtaaatgcgggtgacaggacgccaccaccaaatccacctgcgcccttaacccatcgccgccccgctcgatcccctccgccttcttcgccgccggcccccggactgcgaagctcccaggagcctagaaggacccggcgccatggggttctgggagttttttcttaactggctccgcagcctcttcttcaagcaagagatggagctttcattggtagggctccaaaatgctgggaaaacatcacttgtgaactccattgctactggaggttttagtgaggatatgatccctactgtaggattcaatatgagaaaggttaccaaagggaatgtgacgataaaattgtgggatattggaggccaacctagattccggagcatgtgggagagatactgccgtgcggtttctgcaattgtgtatgttgttgacgcggcagatcgtgaaaacatggccattgcaaaaggggagctccatgatctcttgagcaagccatctttgaccggaataccattactagtaattggcaacaaaattgacaagcctgaagctttccctaaacaaaccttcacagaaataatgggcctaaagacgatcactgaccgagaagtggcatgcttcatgacatcatgcaagaactcgaccaacattgattctgtcattgactggctggtgaagaactcgaaaaagaagaattgaacttaaatctgtactagctattaaagcgcacgccaatctctctatttttgcatgtcgcatagcattggagctgtaaattatgcaagaggtattaatcagggatgttgtgttcataattttgttaacctggtttagcagtatgttggtggacagcgtctggtattgtgcacgcccgtgctctgaggctgcctcctgtgttccactcaattttagctgtgcgatttgttctcttgtgttccactcaattttatctgcttgatttgtttcacattctttacgttaaatcaaacaaa

SEQ ID NO: 86347 - DNA, 1891 bp, Zea Mays
tggcgacgggagcggacaccggaacggaacggaacggaactcgtggttggacgacctatcagcagcggccacgccagcgcgtatgattggcggaccggacgccaataataccctcgcctcgaggcctcgactcgacgcatcgccggtcgccgctgctcgctcgcgttcgcggcgccctcgcctccctgtcactccctcgtcccccgccccatccacgccgcgtcgccctccgcctccaaataaagtaaatgcgggtgacaggacgccaccaccaaatccacctgcgcccttaacccatcgccgccccgctcgatcccctccgccttcttcgccgccggcccccggactgcgaagctcccaggagcctagaaggacccggcgccatggggttctgggagttttttcttaactggctccgcagcctcttcttcaagcaagagatggagctttcattggtagggctccaaaatgctgggaaaacatcacttgtgaactccattgctactggaggttttagtgaggatatgatccctactgtaggattcaatatgagaaaggttaccaaagggaatgtgacgataaaattgtgggatattggaggccaacctagattccggagcatgtgggagagatactgccgtgcggtttctgcaattgtgtatgcctttcatccccgatcaccagctgtcatgcttagttgtgtcgtcttgcacacatgcctattattttgttaagacagtgttcataccattctgataatgcaatttatcaatttatgtacaaattctttctcatctatcctacttttctaaacgctttctttaaggttctcaaagcctacttctctttctcatctatcctactttttctaaacgctttctttaagacagttagcttgcttctcgtgtcttagttgtcgtgtgatgccttgattataagtttatgcttctattaatttgctttttttaatatatactgatgtttctgtttattgttgtacatttttatgttgttttttccgtctatgatggtggtggtgcattgtttctttctttaaatcctttgctgtttttcttttatgtagataatgatgaagcatttttatctgtttctgacttctgttatatttctgaaatgatgagctggaagttgtgccacatgtatagttttttattatgatttacttccacagtttttatattttatacctcactgtattgaaacctgctgcatgaccttcttattctgaaggtcgtagctgatacaaaatcaataagaacttctagtgttggatatttatattattttgtttctgcaggtatgttgttgacgcggcagatcgtgaaaacatggccattgcaaaaggggagctccatgatctcttgagcaagccatctttgaccggaataccattactagtaattggcaacaaaattgacaagcctgaagctttccctaaacaaaccttcacagaaataatgggcctaaagacgatcactgaccgagaagtggcatgcttcatgacatcatgcaagaactcgaccaacattgattctgtcattgactggctggtgaagaactcgaaaaagaagaattgaacttaaatctgtactagctattaaagcgcacgccaatctctctatttttgcatgtcgcatagcattggagctgtaaattatgcaagaggtattaatcagggatgttgtgttcataattttgttaacctggtttagcagtatgttggtggacagcgtctggtattgtgcacgcccgtgctctgaggctgcctcctgtgttccactcaattttagctgtgcgatttgttctcttgtgttccactcaattttatctgcttgatttgtttcacattctttacgttaaatcaaacaaa

SEQ ID NO: 86348 - DNA, 97 bp, Zea Mays
gatgatattttcgtttccactgcatgcatgcaaaaaaataggatgacatggttcacgcagagcataaattcttatacaaagtcacataaaatacaac

SEQ ID NO: 86349 - DNA, 1670 bp, Zea Mays
acattctcgaaactctgttccaacgaaaaaaattgcaaactttttctatctgcgctggtggctgctgccttctccgttctcccgtccagtccgagctctcgagtccaaagtccaaacgaccaacccctggccctcgctgacctccgagatggcggcatcgctctccaagcacctccgcctccgtctgcgcggcggcggcggcggcgagcactgcctcctcccctctcgcgcatccacttctcacacctcatcgccaccacctccccttctatcgcgtcctcccgcagcggccgcgccgccgcccccaggggcaggcaatgaggccagcgcgtggtccaaactcttcctcttcgctcccggcgccatcaccttcgggctcggcacatggcagctcttccggaggcaggaaaagatagagatgctggattacaggacgcggaggctggagatggagcccgtggcgtggaacgagtccgccttatcctcggtccttcgtgatccgtcagcactggagttccgaaaaattgtgtgcgagggtgatttcgacaaggagaagtcggtattcatcgggcctcgctcccggagcatctcaggtgtcacggagaatgggtattatgtgatcactccattgattcctaggtcgacgcctgacagtcacctatccttgtgaatagaggatgggttcctcgtggatggcatgataaaaacgttaaggatctccagatcctggatgaagcttcagagcccccaaaagctgttaagccagacgaaaaaggttcgtggtggaagttttggtctaacaagcctaaatcgtctcctgagtttgaaaaacctaggatgccacctgtaagggttattggagtaatccgtggaagtgagaagccaagcatatttgttccagctaatgagcccaatagtggccagtggttttatgtggatgttcccatgattgctcgtgcttgtggacttcctgagaatactgtttatattgaagatataaatgaagatgtatctccaacaaacccttatcctgttccaaaagatgtcaacaccttgattcgtcactcagtgatgccagatgaccatcttaaatacacgtttacatggtacactctttctgctgctgtgacttacatggcttccaagcggataaaagcaaagaaggtcaggttatagcaggaatttagtccaaacttccgcatgaacgtccatttgcgcgcatggtttatgcttctgcactggaagatgcccatggtactggttctttcgtgtctggcaataagtataacattgcacttttttgttccaagttgttctacattgatactgggtatctcacagttgagctctggggttacagcaattttgttagtcagatttctgatgatcataacttggaaggcctgtaagacttgtggtttccttgtagtaatattttggcggggaactttagctgcttgttcttccagcgtttttttttcacgttgactgctccaccggaaaagttgttctgtcgcgggctcgcgtcgaggacacaccagctcaagacagagtttgttcccagattattcatctcctaatggatgcttgcacaggcagctctgttctactagttgccataatatatgaaaactgacatctgaatgaattgtgtctgtattcagtttcac

SEQ ID NO: 86350 - DNA, 1684 bp, Zea Mays
acattctcgaaactctgttccaacgaaaaaaattgcaaactttttctatctgcgctggtggctgctgccttctccgttctcccgtccagtccgagctctcgagtccaaagtccaaacgaccaacccctggccctcgctgacctccgagatggcggcatcgctctccaagcacctccgcctccgtctgcgcggcggcggcggcggcgagcactgcctcctcccctctcgcgcatccacttctcacacctcatcgccaccacctccccttctatcgcgtcctcccgcagcggccgcgccgccgcccccaggggcaggcaatgaggccagcgcgtggtccaaactcttcctcttcgctcccggcgccatcaccttcgggctcggcacatggcagctcttccggaggcaggaaaagatagagatgctggattacaggacgcggaggctggagatggagcccgtggcgtggaacgagtccgccttatcctcggtccttcgtgatccgtcagcactggagttccgaaaaattgtgtgcgagggtgatttcgacaaggagaagtcggtattcatcgggcctcgctcccggagcatctcaggtgtcacggagaatgggtattatgtgatcactccattgattcctaggtcgacgcctgacagcttgcagtcacctatccttgtgaatagaggatgggttcctcgtggatggcatgataaaaacgttaaggatctccagatcctggatgaagcttcagagcccccaaaagctgttaagccagacgaaaaaggttcgtggtggaagttttggtctaacaagcctaaatcgtctcctgagtttgaaaaacctaggatgccacctgtaagggttattggagtaatccgtggaagtgagaagccaagcatatttgttccagctaatgagcccaatagtggccagtggttttatgtggatgttcccatgattgctcgtgcttgtggacttcctgagaatactgtttatattgaagatataaatgaagatgtatctccaacaaacccttatcctgttccaaaagatgtcaacaccttgattcgtcactcagtgatgccagatgaccatcttaaatacacgtttacatggtacactctttctgctgctgtgacttacatggcttccaagcggataaaagcaaagaaggtcaggttatagcaggaatttagtccaaacttccgcatgaacgtccatttgcgcgcatggtttatgcttctgcactggaagatgcccatggtactggttctttcgtgtctggcaataagtataacattgcacttttttgttccaagttgttctacattgatactgggtatctcacagttgagctctggggttacagcaattttgttagtcagatttctgatgatcataacttggaaggcctgtaagacttgtggtttccttgtagtaatattttggcggggaactttagctgcttgttcttccagcgtttttttttcacgttgactgctccaccggaaaagttgttctgtcgcgggctcgcgtcgaggacacaccagctcaagacagagtttgttcccagattattcatctcctaatggatgcttgcacaggcagctctgttctactagttgccataatatatgaaaactgacatctgaatgaattgtgtctgtattcagtttcactgcacga

SEQ ID NO: 86351 - DNA, 3046 bp, Zea Mays
ctttcaggccttcaccgcttcaaacctcgtctgatcctctcacctgctcaccgagtcacctgctgtccaaggctccaagcacccgccaatcggccgctgccgaacccgcaaccggaacctgcctccaggctgcttccaccgggcgagggcgagggcgaggcacacgccgcaaaccgcagtaacgcacacgccggggcacgccgcacggcacacaacaaacaacgtgccctcgtaagcgtctcctcggctcgccttctcatctgctcctattggattttgcggggctgggcgtgagcgtgtgggctcttgtagcgggggatccatgagcagccaaccctagcttgcctggacgggaactctctacagctgtctttcgcgattctcctcgggcgtgggttttgttgcaggaggtgtttcaagctgcattgagccaccgtgcccggagtttcctgtctcttagtccttcgttcagttgcggatttctttgctgcgttctggagtggaggatcgacgtgctcctttcgtggctgtttgatgcttgttgagttcgagtaggttcgtattcctggttcggaattcagtaaggccctgcagtctacctggttctattgtgccccgacagaagatcctgagagctagagctgtttttttccctacatatagttaagttaaattatctgcacagccgaagatgtccgcgatcatgttatgtacctgcagcggggaccagtccaagtttgaagatcttcctagatcgccagaatctcttgcaacacgtgacttttcagcgaattgctcttcttcaaagatggcaagtcgagaaacaactcctgatgacagccaagtaaatgaagtagaatcagacctaaaagaaaccctttcactaaattatgaggaggctcgagcattgttaggtagactggaacatcagagagggaactttgatgcagcattgcaagttcttcaggggattgatataagaagcctgagaccacgaatgaccactgctattgctgaaagtgtcaagcctagaatgcccccacgctcttcaagacgaaaatcttcacaagtgaacggaatgcttatgcatatgtccatgcattctgtaagcttgcttctagaggccatactgcttaaagcaaaatctctggacacccttggtagagcagcagatgctgcagaagaatgcagaaccatcatagacattatagagtctgcatggccatatggtgttccggatggtacttctgaagagtgtaagctaatagacatattccattcggctctagaatatcttcctaaactgtggatgaggagtggttgttttgatgaagccatcatcgcataccgcagagctcttgcaaagccatggaatctaggttctcaaaggtccgccaaattgcaaaaagagttggcagtgagtctgttgtactgtggcgttgaagtgaagttccctcaagaattttctcaggaaaggaatctggtaacccctgggaacaacttagaggaagcaattttgttattactcatgctaacaagaaagctatttctccgagaaatacaatgggatcctgaccttgtgaatcatttggtgtatgcactctcattatctgggcactatgaagttttggccagccatcttgaaatgctgttgcctggaacctataccagatcagagagatggtatatccttgcactttgctacagtgcagctggcatggatgacagtgcgttaaacatcataaggaatggtttttctgtactggagagaaagggaaagcctcatgttccatctcttcttttaggagcaaaactatgttgtaagaacccaaagcatgcttccgaagggataaagtttgcaaataaagccatgaagtctttcagaagtcgtgatctgcatttcatcagcactacaaaacactttcttggtgtttgttatggacctttttctaggtcctccacctcatacttggacaaatcgagactgcaagataatgcactgaggctgttgcaggatgctgccacaacagcgaagtataatcctgaaataatgtatagcctagcttgggaaaatgcgatgcagcgcaaactcaatgcagctgttgaaagtgcaacagaatgtcttgagatggtgatgggtggttctgttagtgcctggaagttactaattcttgtattatctgcacagcagaatttgcaagaagctgaagcagtagcagattttgcaatggacgaggctgagaaaaatgatcagttggatattttgagactgaaagcacaaattcaagcttcccgtggacagttcaagtctgcagttgaaacttttcgggttttgcttgctgctatccaagtaaagaaggaagtctggaaattgaccacttgtaatgaggttaaatgcctacaaaagttggagatggacgcatggttagatttggcatcaatctattcaaagcttgaggcatggcatgactcaaacatctgccttgacaaagctatatccattgatttctattatcccaagtgttggcatgtcagaggtcttctattggaggctcaattcttgcacaaggaagccctgatggcattctctttcgcgctatcaattgacccagattacgtcccgggcatggtttgtatggcaggaattctccgaaatattggaggggattcattatcaattgcaagaacttacttgcgcaatgccctccgtttagagcctacaaaccaccgtgcctggttgagtcttgggcttgtcctgaaagctgaaggatcgctgcaggaggccgcggattgcttccaggcagcatatgagcttagagaattatcaccaattcaggatttctctgagcaactcccgatcatgctgcattaggaatctatagcaaaggagttcacattttttgtggattttccccatagttgtcttagttattaacttatcccttgcaaaggtaggaaacatatgtttttgtgaatgtaaattagtccacttttgttcgtgaggaaatttactcgctcttgaaaacatcaaagttatataacttac

SEQ ID NO: 86352 - DNA, 2708 bp, Zea Mays
ctttcaggccttcaccgcttcaaacctcgtctgatcctctcacctgctcaccgagtcacctgctgtccaaggctccaagcacccgccaatcggccgctgccgaacccgcaaccggaacctgcctccaggctgcttccaccgggcgagggcgagggcgaggcacacgccgcaaaccgcagtaacgcacacgccggggcacgccgcacggcacacaacaaacaacgtgccctcgccctgcagtctacctggttctattgtgccccgacagaagatcctgagagctagagctgtttttttccctacatatagttaagttaaattatctgcacagccgaagatgtccgcgatcatgttatgtacctgcagcggggaccagtccaagtttgaagatcttcctagatcgccagaatctcttgcaacacgtgacttttcagcgaattgctcttcttcaaagatggcaagtcgagaaacaactcctgatgacagccaagtaaatgaagtagaatcagacctaaaagaaaccctttcactaaattatgaggaggctcgagcattgttaggtagactggaacatcagagagggaactttgatgcagcattgcaagttcttcaggggattgatataagaagcctgagaccacgaatgaccactgctattgctgaaagtgtcaagcctagaatgcccccacgctcttcaagacgaaaatcttcacaagtgaacggaatgcttatgcatatgtccatgcattctgtaagcttgcttctagaggccatactgcttaaagcaaaatctctggacacccttggtagagcagcagatgctgcagaagaatgcagaaccatcatagacattatagagtctgcatggccatatggtgttccggatggtacttctgaagagtgtaagctaatagacatattccattcggctctagaatatcttcctaaactgtggatgaggagtggttgttttgatgaagccatcatcgcataccgcagagctcttgcaaagccatggaatctaggttctcaaaggtccgccaaattgcaaaaagagttggcagtgagtctgttgtactgtggcgttgaagtgaagttccctcaagaattttctcaggaaaggaatctggtaacccctgggaacaacttagaggaagcaattttgttattactcatgctaacaagaaagctatttctccgagaaatacaatgggatcctgaccttgtgaatcatttggtgtatgcactctcattatctgggcactatgaagttttggccagccatcttgaaatgctgttgcctggaacctataccagatcagagagatggtatatccttgcactttgctacagtgcagctggcatggatgacagtgcgttaaacatcataaggaatggtttttctgtactggagagaaagggaaagcctcatgttccatctcttcttttaggagcaaaactatgttgtaagaacccaaagcatgcttccgaagggataaagtttgcaaataaagccatgaagtctttcagaagtcgtgatctgcatttcatcagcactacaaaacactttcttggtgtttgttatggacctttttctaggtcctccacctcatacttggacaaatcgagactgcaagataatgcactgaggctgttgcaggatgctgccacaacagcgaagtataatcctgaaataatgtatagcctagcttgggaaaatgcgatgcagcgcaaactcaatgcagctgttgaaagtgcaacagaatgtcttgagatggtgatgggtggttctgttagtgcctggaagttactaattcttgtattatctgcacagcagaatttgcaagaagctgaagcagtagcagattttgcaatggacgaggctgagaaaaatgatcagttggatattttgagactgaaagcacaaattcaagcttcccgtggacagttcaagtctgcagttgaaacttttcgggttttgcttgctgctatccaagtaaagaaggaagtctggaaattgaccacttgtaatgaggttaaatgcctacaaaagttggagatggacgcatggttagatttggcatcaatctattcaaagcttgaggcatggcatgactcaaacatctgccttgacaaagctatatccattgatttctattatcccaagtgttggcatgtcagaggtcttctattggaggctcaattcttgcacaaggaagccctgatggcattctctttcgcgctatcaattgacccagattacgtcccgggcatggtttgtatggcaggaattctccgaaatattggaggggattcattatcaattgcaagaacttacttgcgcaatgccctccgtttagagcctacaaaccaccgtgcctggttgagtcttgggcttgtcctgaaagctgaaggatcgctgcaggaggccgcggattgcttccaggcagcatatgagcttagagaattatcaccaattcaggatttctctgagcaactcccgatcatgctgcattaggaatctatagcaaaggagttcacattttttgtggattttccccatagttgtcttagttattaacttatcccttgcaaaggtaggaaacatatgtttttgtgaatgtaaattagtccacttttgttcgtgaggaaatttactcgctcttgaaaacatcaaagttatataacttactagtacaattgatacg

SEQ ID NO: 86353 - DNA, 633 bp, Zea Mays
atggtagccgccgccgccgcgccggtgcttggggtacagactacggagtgtctggcggcgctgcaggtgctcgagaacttcagtttggctggcggactacatatatatttgattcgagggtttccagggttcgatcgtgcgcggccagccgccagctcgtcctatcatcccgtcggccgccgccccgcttggctgaacgactcccgcctccagcgaacgcgagtatgcgacgcccacagccgccgtgaccgagccccttccgtcgctccaggctgccaggggccaggccgccaggctgccaatctgccatctctgaattcctccacggcgacgcacaggactacaggacgccaggtccaagctccagttcgcctgtcactatcagtgatggaatcagccgtggaaggaaaggggaggaatgcaagtgatggaactgattcagaaagtaattcgtttgacaagagggatgatatgtctgaagatgaactggtagtgcttggtggaaaaattgatgattcagcggacaatgtcaatattgatgaatctgaggacaatggaagtaaaaaaggagtcaagagaaggcgcaagagggtgcagatgaaggctacagctgaaaggagatctgaattctaa

SEQ ID NO: 86354 - DNA, 1266 bp, Zea Mays
aacacaacacagcaccgctcgtgtactgcccgctactctaatttgtcctctacacttgaccactgcagctggctggctggctcgtgagggattcgttaggggtggacgggtgggagagtagagaagagcgtagacagacagggacgccgcgtacgtgcggtgtggcattgttcgagggccggcagctgtgcggtgggggaggaatggacgagaagctggcgatggcgatggcggcggcggcggcgagctccgagtgcagcagcggctgccagtccggctggaccacctacctcgacgaccacacctcttcctactcctgcggcaccgcgcgcttcaacggcaagccgtgccagccgtactactgcgagtactactcggaggaggacgacctgtcaatgatctccgacgcctcctccggcccgcgccagcacagctccgccggcaacgacgtcgaaggtggcgccgccgctgcgcacgccaatgcggagaggaaggggaggcgtgaggagacggccgccgcggcgaggcggcagaagaacaagagggccgccgccgccgcggcgtcgtctctgctcgaggacacggccagctcgccgcccttctttgtctactccaaggcgacgagctcgggggaggccaacggcggctatggcggcgctgatgatgcccagatgacagagatgggcaatgccgccgacttctcgtacgccttctccaccacgacgggattcaagtctcccttaaacggggctgctttgagcggctacatgcaaatgcagtactccccggcccccgtcaagccgatgcccagacgacaggtgtgcagagatgcgtcggagaagaagaggtggtgactgcctgcccgatgccggttggactttgtccgtgctccgcgtcttcttcctcgctcggcggctctctgttgtgtacctgtcccagaaaagccataggagatgggcaggcaggctcgagtgcgtttgcaaatcttccccggatctccaagagatcttcccttgcgttgcgatgcgtctattaatctccacctgctttgccacctatctctctctctctctctctctgcctgtctgtctgtcccatgtagtatgtttttcttcttctttcacggtggctctctgcacctgttgtgttcctatctccagttagtctcccactttttagctgtcattgcagtgggaaacaacaacctgaggcagaacaaaaacaaaacatgcgcgccgacgtgaaatccctttttgcacctcctct

SEQ ID NO: 86355 - DNA, 1718 bp, Zea Mays
ccagcttcttcttgatctcctccaccccaaatttcaccgcctcctcatcccgctccgcaaactctacacagtctaccattgagctgatctccacctccacccggttgatgaggactctgatactgtccaaatccttgatggcaatgaacgtgccaacctgcattgcgctcaccacctccttctgtccacggagcgcgtcctgataccctttcagcaaagaatctatccacttccccatagatcccagcgggactgcagcggccgcggccaatgccgcagcgacaggcggggcagcgatggccgcggcaaccaccgagcagatgagcacggccgcgaacgtggtcgcgaagatgatgcttgacacccggcgccacgccttgatggtcttgaccttcttgtcgagccggtgcttgcgctgctgcagcttctccagcatggccagctgctgccggtaaacggcctggaaggcggcgaagaactcgtccgtgaagggatccccggccgccttgaactggcgcagctcgtgcagcgtgcgcgcgtaccgggcggagggagcggcggcggcggcgtcgctgccttcctcgtcgtcgaagcgctggagcgcgacgtggaggagaagctgggagtcgcgggctcgcttgaggcacttgtcgagtgcggtgcagaaatcgagggtctggaggctgctctcgaagtaatcctcgacgaggtcgaacagctcggggctcttccagatgtccttcttgcagtcgaggatgacgcgcaccacctcctggttcatgtcgaggaggcagccggtgacctctcggagcgagtccagcgacatcgaccgcacctcgacgcccaccgccagcgtcgagatggcgcggctggtgcgccgctgcagcgtcgtgtcgaacgtgcgcagctccgggtccgaccggcacgctgcctcataagagctcagctcttccgccggcgacgcctcgggcggcagcgccgactccgagtgctccggacgcctgttgccgccgccgctgctgctgttgttccccattgccggaagcaaaggtgacacactcaaatcaggatccaaaaaaagaagagccttttccccccttttgaacttggaaggacgaacgatgtattttagaaccaaatcaacaggcgcttcggcaactaggacggatcaaaccagcgagcaatggcggaacccacaaatgccagggggtctccgaagaatcgaaccagaagaaaaacttcgacagctcaggaaattcaagggactgaatttggcggaacaagcgaatgccgcgagctttatctcagggatcgaggacgcgttgcgtcaggtcagaccaagcgcgaggtttcggggaagcaagaagaatggatgcaatgcaggggccgggaggggaggggggatggatttgtggtgcagtgccggtgcggggatgacgtcaggcgaggaggaggtggaggagcggcgatgtggggatgtcttgtacgcatgacgaaggagatggggcggggttggcaatggccaccgccggaagcaacccgatgcctgtcagttgtcactccaccgccaggcgcgtgtgtggatgtggtgtgcactgctgcggtgtgtgccgtaactcagcaactgcgcgtgttctgccgccacttcgtcgaggtcggcggaggctcagctgactgggggtgggggaagcaagcaaagcagcgagagagagagagag

SEQ ID NO: 86356 - DNA, 3204 bp, Zea Mays
gacgctcgaaggaaggggacccagcggttcagacttcagattctcctaattcccaaacccttgccgctgccgccgcagatggaagtctgcgacgagctgcggtcatttgaggccacaggcgtctaccgcctcaatggcacctgcaccagcgccggagccacttacctcgacccggtccgcctcctcaacgcgtcctaccagcgcttccgcatcgtcccttctgcgtactactcccgaagcttcggcccccagcatcaggaaggcgagccagagatcgagcggcccgagaaaaggaggaaacgcaagcgtaatcagaagccgaagcccagggagctcaatccaatggaacggatcgctgaagcccggcaccaggaagcgaagcctttactattgaacgcacatgaatcactcgttaaggctaaacatctactggagtacatttccaagacaatcaaaggcaatgagcacacacttgatgcgggtagtggttctgagaataatttcgttgagcttgggacctcatggcgagcacctttctatgagatcactatttgcttccggaacccccatgttctgggcaatgaggaaggtttctttcatgcccaaaagacatcatttcctctatttaatagcttaatcagtgttgaagggactgacgaagctgaaggagaattccgtaataggcgttatattttaccaagaggaagttgcttcttgatggctgatttcaaacgagttagagatctcattccttgtagtccaaatcaagggtataatcttatagttgttgacccaccatgggagaatggatgtgttcggcagaaagaagtgtatcctacacttcccaacaaaaatttcttatatcttccagtgcaacaacttgcccatccaaccggagcgcttcttgttttgtggattacaaatagggagaaactgcgggcatttgttgagaaaaaactgcttccttcttggggagtggaagattccaccgtgttttattggcttaaggtgaaacctgatggctctctaattggtgatttagacttgttccatcacaggccctatgagtgcctcctccttggctacataaatgttaatgcaaatgctaagaaagggtcaaatttcaagttgttagaaagaagccaagtaatcatgagtgtccctggtgctcactcaaggaaacctccccttgagaaattactttcagaatatattccaggtcctaaaccttcaagatgcatcgagcttttcgccagagagttgtttcccagatggacctcttggggaaatgagccgcttcatttccaggataccatgtacttctcggagaaatagttcgatagccaagagcaggatataagtatgtggattctgatgcaactgccacgtgccacctaaggcaagtggttttgcaatagcattgtaccttgtgtttttcggcctttcttcaggtgatgaaaacgccccatctccagacgagtttgccgtctgctattgctgagtgctgacctactgtgtgacttctcgcttcccagcacttgattggtatcaagtcctttttttggccaaaagctggaggtttggcgaatcctatttatagggtgacctgtggggcagacatctcatattatttcttgcactacgcagttccctgcattgcagtgttcagtgtgcttctgggaatctcaatcaagttgtaacgggcagtcagagagatggaaagaatttgtacacagctagattcgttgggctcatctgcatcctggttactttccctagaacaattcggaaagttcctgtaaagttaggacagaggtttccatttccctgagcggctgagcagaactggttcgaagacaatggatgcaggccgtatccagtgccgattcttttggtgataccacattcttccgttatgtgtccattcgtcttatcgtgttccttgcattgttacgttacaatctggaaaggtggttctccaaggacgacttacaagtacctgccgaatgttcaggggaagatcagcttgctctccgcctctgccggctgccgcaagcaagctaacggaagcctgggctgcaaattggacgacgcgcgcgacggagactgactatacgtgttgatagttgagacctggggcggcgtcagagtccccctcgccggaggtaagccgcgtccggatggccctacccactgcttccgccaagatagccagtgccagggcgaaggtcggtgagagagccaagacgccggccaactcgaaggcgaagggacgatcggatgctcaagagaagcggggcaggaatggaaggctcgtcccgtcacttgggtgcatgagctcgcctcctctggtgccaattggcccggactcggagaagaggaggtgttcctggatcactgcaaactcggagccccactacgtcgcattccacgatggagaatggggagttcccgttcacgatgaccgaatgcttttcgagctgctcacactttcacaagccttaggcgaactcacctggccttctattctgagcaagagggaggaactcagcctttgtaccagggagattttttgtggcttcaacttagtattggtatctgaattctcagagaataagataaacctgttgagatcaaatggaatcgtgccgctgtcagagcaaaagattcgcgcagttgtaacaaatgccaagcaaatacagaaggtggttgaggaattcgggtcgttcagcaactgagggcttcaactacgtgcaagttttcgagatgtttgactctagctagcacctagcacgccaactcatctaagaaacttctttgcaccttgccgatggagggagaatcgtcctcaaaaaccacccggttacgttgcagccataaataccaagcactattaaagcctttcttcttgtctttatgcactcggttgcaaactcttctccaccagtcagcaaaagcgatatcctctacaccagaggagaggtgaccaagaacgaaaggagataggaggttgtaacaaaataccgagcaatgacacacgtagtcaagagatgttgaattgtttcttactcttggtcacaaagagggcatgcttccgaatgtgggaggcctctttttgccaaagtattagcagtccaacatttatttctcatataaatcaccttttatttaattttgaatagaaatgaatttaatccagtccaa

SEQ ID NO: 86357 - DNA, 3174 bp, Zea Mays
gacgctcgaaggaaggggacccagcggttcagacttcagattctcctaattcccaaacccttgccgctgccgccgcagatggaagtctgcgacgagctgcggtcatttgaggccacaggcgtctaccgcctcaatggcacctgcaccagcgccggagccacttacctcgacccggtccgcctcctcaacgcgtcctaccagcgcttccgcatcgtcccttctgcgtactactcccgaagcttcggcccccagcatcaggaaggcgagccagagatcgagcggcccgagaaaaggaggaaacgcaagcgtaatcagaagccgaagcccagggagctcaatccaatggaacggatcgctgaagcccggcaccaggaagcgaagcctttactattgaacgcacatgaatcactcgttaaggctaaacatctactggagtacatttccaagacaatcaaaggcaatgagcacacacttgatgcgggtagtggttctgagaataatttcgttgagcttgggacctcatggcgagcacctttctatgagatcactatttgcttccggaacccccatgttctgggcaatgaggaaggtttctttcatgcccaaaagacatcatttcctctatttaatagcttaatcagtgttgaagggactgacgaagctgaaggagaattccgtaataggcgttatattttaccaagaggaagttgcttcttgatggctgatttcaaacgagttagagatctcattccttgtagtccaaatcaagggtataatcttatagttgttgacccaccatgggagaatggatgtgttcggcagaaagaagtgtatcctacacttcccaacaaaaatttcttatatcttccagtgcaacaacttgcccatccaaccggagcgcttcttgttttgtggattacaaatagggagaaactgcgggcatttgttgagaaaaaactgcttccttcttggggagtggaagattccaccgtgttttattggcttaaggtgaaacctgatggctctctaattggtgatttagacttgttccatcacaggccctatgagtgcctcctccttggctacataaatgttaatgcaaatgctaagaaagggtcaaatttcaagttgttagaaagaagccaagtaatcatgagtgtccctggtgctcactcaaggaaacctccccttgagaaattactttcagaatatattccaggtcctaaaccttcaagatgcatcgagcttttcgccagagagttgtttcccagatggacctcttggggaaatgagccgcttcatttccaggataccatgtacttctcggagaaatagttcgatagccaagagcaggatataagtatgtggattctgatgcaactgccacgtgccacctaaggcaagtggttttgcaatagcattgtaccttgtgtttttcggcctttcttcaggtgatgaaaacgccccatctccagacgagtttgccgtctgctattgctgagtgctgacctactgtgtgacttctcgcttcccagcacttgattggtatcaagtcctttttttggccaaaagctggaggtttggcgaatcctatttatagggtgacctgtggggcagacatctcatattatttcttgcactacgcagttccctgcattgcagtgttcagtgtgcttctgggaatctcaatcaagttgtaacgggcagtcagagagatggaaagaatttgtacacagctagattcgttgggctcatctgcatcctggttactttccctagaacaattcggaaagttcctgtaaagttaggacagaggtttccatttccctgagcggctgagcagaactggttcgaagacaatggatgcaggccgtatccagtgccgattcttttggtgataccacattcttccgttatgtgtccattcgtcttatcgtgttccttgcattgttacgttacaatctggaaaggtggttctccaaggacgacttacaagtacctgccgaatgttcaggggaagatcagcttgctctccgcctctgccggctgccgcaagcaagctaacggaagcctgggctgcaaattggacgacgcgcgcgacggagactgactatacgtgttgatagttgagacctggggcggcgtcagagtccccctcgccggaggtaagccgcgtccggatggccctacccactgcttccgccaagatagccagtgccagggcgaaggtcggtgagagagccaagacgccggccaactcgaaggcgaagggacgatcggatgctcaagagaagcggggcaggaatggaaggctcgtcccgtcacttgggtgcatgagctcgcctcctctggtgccaattggcccggactcggagaagaggaggtgttcctggatcactgcaaactcggagccccactacgtcgcattccacgatggagaatggggagttcccgttcacgatgaccgaatgcttttcgagctgctcacactttcacaagccttaggcgaactcacctggccttctattctgagcaagagggaggaactcagcctttgtaccagggagattttttgtggcttcaacttagtattggtatctgaattctcagagaataagataaacctgttgagatcaaatggaatcgtgccgctgtcagagcaaaagattcgcgcagttgtaacaaatgccaagcaaatacagaaggtggttgaggaattggggtcgttcagcaactactgctggagctttgtgaaccacaggcccatcgcaaacggcttccgctatgctcgccaggtgcctacaaagacgccgaaagctgaagccataagcaaggacttgatgcgccgagggttccagtgcgttggccctacaacgatctactccttcatgcaggttgccgggatcgttaacgaccatctgtcatgttgcttcagatttcaggcttgcagccagcacaaggccagtgaaaagtgaaaacggtgcgagggcagagccagcattgcctgatagaaggttgggctcggcagcttcggagggttcagatatcagggaggtgtagcaagtctactagagtgaacctgagctgttttttttaatctgtgattgtcaggacagtttgacagtgcattgggatgctactgagcaagtggttcatactgtatatgcgttgtat

SEQ ID NO: 86358 - DNA, 905 bp, Zea Mays
ctcgaaggaaggggacccagcggttcagacttcagattctcctaattcccaaacccttgccgctgccgccgcagatggaagtctgcgacgagctgcggtcatttgaggccacaggcgtctaccgcctcaatggcacctgcaccagcgccggagccacttacctcgacccggtccgcctcctcaacgcgtcctaccagcgcttccgcatcgtcccttctgcgtactactcccgaagcttcggcccccagcatcaggaaggcgagccagagatcgagcggcccgagaaaaggaggaaacgcaagcgtaatcagaagccgaagcccagggagctcaatccaatggaacggatcgctgaagcccggcaccaggaagcgaagcctttactattgaacgcacatgaatcactcgttaaggctaaacatctactggagtacatttccaagacaatcaaaggcaatgagcacacacttgatgcgggtagtggttctgagaataatttcgttgagcttgggacctcatggcgagcacctttctatgagatcactatttgcttccggaacccccatgttctgggcaatgaggaaggtaaagtgatgaaacagatgctttattcttttttaccatgtttggaggtacatgatgcagtactgaagcagtgttcattgattctaacatcttaggtttctttcatgcccaaaagacatcatttcctctatttaatagcttaatcagtgttgaagggactgacgaagctgaaggagaattccgtaataggcgttatattttaccaagaggaagttgcttcttgatggtacataaataccttttttctatagtttcagataactgaatgatctgtccttaatttcgaaatgacttttcatgctttgggtcacccgttgaca

SEQ ID NO: 86359 - DNA, 2101 bp, Zea Mays
ctcgaaggaaggggacccagcggttcagacttcagattctcctaattcccaaacccttgccgctgccgccgcagatggaagtctgcgacgagctgcggtcatttgaggccacaggcgtctaccgcctcaatggcacctgcaccagcgccggagccacttacctcgacccggtccgcctcctcaacgcgtcctaccagcgcttccgcatcgtcccttctgcgtactactcccgaagcttcggcccccagcatcaggaaggcgagccagagatcgagcggcccgagaaaaggaggaaacgcaagcgtaatcagaagccgaagcccagggagctcaatccaatggaacggatcgctgaagcccggcaccaggaagcgaagcctttactattgaacgcacatgaatcactcgttaaggctaaacatctactggagtacatttccaagacaatcaaaggcaatgagcacacacttgatgcgggtagtggttctgagaataatttcgttgagcttgggacctcatggcgagcacctttctatgagatcactatttgcttccggaacccccatgttctgggcaatgaggaaggtttctttcatgcccaaaagacatcatttcctctatttaatagcttaatcagtgttgaagggactgacgaagctgaaggagaattccgtaataggcgttatattttaccaagaggaagttgcttcttgatggctgatttcaaacgagttagagatctcattccttgtagtccaaatcaagggtataatcttatagttgttgacccaccatgggagaatggatgtgttcggcagaaagaagtgtatcctacacttcccaacaaaaatttcttatatcttccagtgcaacaacttgcccatccaaccggagcgcttcttgttttgtggattacaaatagggagaaactgcgggcatttgttgagaaaaaactgcttccttcttggggagtggaagattccaccgtgttttattggcttaaggtgaaacctgatggctctctaattggtgatttagacttgttccatcacaggccctatgagtgcctcctccttggctacataaatgttaatgcaaatgctaagaaagggtcaaatttcaagttgttagaaagaagccaagtaatcatgagtgtccctggtgctcactcaaggaaacctccccttgagaaattactttcagaatatattccaggtcctaaaccttcaagatgcatcgagcttttcgccagagagttgtttcccagatggacctcttggggaaatgagccgcttcatttccaggataccatgtacttctcggagaaatagttcgatagccaagagcaggatataagtatgtggattctgatgcaactgccacgacaggcctttcttcaggtgatgaaaacgccccatctccagacgagtttgccgtctgctattgctgagtgctgacctactgtgtgacttctcgcttcccagcacttgattggtatcaagtcctttttttggccaaaagctggaggtttggcgaatcctatttatagggtgacctgtggggcagacatctcatattatttcttgcactacgcagttccctgcattgcagtgttcagtgtgcttctgggaatctcaatcaagttgtaacgggcagtcagagagatggaaagaatttgtacacagctagattcgttgggctcatctgcatcctggttactttccctagaacaattcggaaagttcctgtaaagttaggacagaggtttccatttccctgagcggctgagcagaactggttcgaagacaatggatgcaggccgtatccagtgccgattcttttggtgataccacattcttccgttatgtgtccattcgtcttatcgtgttccttgcattgttacgttacaatctggaaaggtggttctccaaggacgacttacaagtacctgccgaatgttcaggggaagatcagcttgttcgctgcggcttgctgcggctgcaatccggctgcggctgcggcttctacagtatttttctctctatggattgcagctgcagcagtccaaacagctgcaacagtgtcggcttgtagccagccg

SEQ ID NO: 86360 - DNA, 2504 bp, Zea Mays
ctcgaaggaaggggacccagcggttcagacttcagattctcctaattcccaaacccttgccgctgccgccgcagatggaagtctgcgacgagctgcggtcatttgaggccacaggcgtctaccgcctcaatggcacctgcaccagcgccggagccacttacctcgacccggtccgcctcctcaacgcgtcctaccagcgcttccgcatcgtcccttctgcgtactactcccgaagcttcggcccccagcatcaggaaggcgagccagagatcgagcggcccgagaaaaggaggaaacgcaagcgtaatcagaagccgaagcccagggagctcaatccaatggaacggatcgctgaagcccggcaccagcttgccaggggatttagaattgtaactactggcaagtgaaaacaaaatgtttgtggagaagaactctggaatttgttttgcaagtgtagtgattagtgtttagtgcctgaagatgttgtggttaacttctgctaggaagcgaagcctttactattgaacgcacatgaatcactcgttaaggctaaacatctactggagtacatttccaagacaatcaaaggcaatgagcacacacttgatgcgggtagtggttctgagaataatttcgttgagcttgggacctcatggcgagcacctttctatgagatcactatttgcttccggaacccccatgttctgggcaatgaggaaggtttctttcatgcccaaaagacatcatttcctctatttaatagcttaatcagtgttgaagggactgacgaagctgaaggagaattccgtaataggcgttatattttaccaagaggaagttgcttcttgatggtacataaataccttttttctatagtttcagataactgaatgatctgtccttaatttcgaaatgacttttcatgctttgggtcacccgttgacataaaggctgatttcaaacgagttagagatctcattccttgtaagtgacaatgttgcaccaatgctggctaaatatgcttacggatttctatgcttgtgataattgtgttgtcagatttacttgattccctaattaattgggtgttactctttttcctctaggtagtccaaatcaagggtataatcttatagttgttgacccaccatgggagaatggatgtgttcggcagaaagaagtgtatcctacacttcccaacaaaaatttcttatatcttccagtgcaacaacttgcccatccaaccggagcgcttcttgttttgtggattacaaatagggagaaactgcgggcatttgttgagaaaaaactgcttccttcttggggagtggaagattccaccgtgttttattggcttaaggtgaaacctgatggctctctaattggtgatttagacttgttccatcacaggccctatgagtgcctcctccttggctacataaatgttaatgcaaatgctaagaaagggtcaaatttcaagttgttagaaagaagccaagtaatcatgagtgtccctggtgctcactcaaggaaacctccccttgagaaattactttcagaatatattccaggtcctaaaccttcaagatgcatcgagcttttcgccagagagttgtttcccagatggacctcttggggaaatgagccgcttcatttccaggataccatgtacttctcggagaaatagttcgatagccaagagcaggatataagtatgtggattctgatgcaactgccacgtgccacctaaggcaagtggttttgcaatagcattgtaccttgtgtttttcggcctttcttcaggtgatgaaaacgccccatctccagacgagtttgccgtctgctattgctgagtgctgacctactgtgtgacttctcgcttcccagcacttgattggtatcaagtcctttttttggccaaaagctggaggtttggcgaatcctatttatagggtgacctgtggggcagacatctcatattatttcttgcactacgcagttccctgcattgcagtgttcagtgtgcttctgggaatctcaatcaagttgtaacgggcagtcagagagatggaaagaatttgtacacagctagattcgttgggctcatctgcatcctggttactttccctagaacaattcggaaagttcctgtaaagttaggacagaggtttccatttccctgagcggctgagcagaactggttcgaagacaatggatgcaggccgtatccagtgccgattcttttggtgataccacattcttccgttatgtgtccattcgtcttatcgtgttccttgcattgttacgttacaatctggaaaggtggttctccaaggacgacttacaagtacctgccgaatgttcaggggaagatcagcttgttcgctgcggcttgctgcggctgcaatccggctgcggctgcggcttctacagtatttttctctctatggattgcagctgcagcagtccaaacagctgcaacagtgtcggcttgtagccagccg

SEQ ID NO: 86361 - DNA, 2230 bp, Zea Mays
gctaacactcctgtatccgagctactactcctagtcctagtacaggctacagaggcagagcgagcaaaactgcctgtacatagcaaccatcaacgacgaccgatccaagtagtgagcattagtggatctactacgtacatatatagaaggaaacagctgcagctctctctctcgctgtttcctgcgtgatctgcttgtgtagctactagctagctagcggagcggaaccacccatgggctgcgaggaggaagagaggctgctgttcccgtccttcgtctttcccgagagcttcgcggaggccgccacccccggctccggtggtgagcagaagaaggctcggcagcgtcggaggcgcaagccgcggccggcggagggcggcgagggcgcggacgagcaggccaggaagcggcggctgagcgacgaccaggcgcggttcctggagctcagcttcaggaaggagcgcaagctggagacgccccgcaaggtgcagctggccgccgagctgggcctcgacgccaagcaggtggccgtctggttccagaaccgccgcgcccgccacaagagcaagctcatggaggaggagttctccaagctccgcgccgcgcacgacgccgtcgtcctccacaactgccacctcgagaccgagctgctgaagatgaaggacaggctggcggaggtggaggaggagaagacgaagctcgtcgcggcggcggcggcggcggccggcggcgcagcgggcgcagggagcagcagcccgagctcgtcgtcgttctcgacggtgacgcaccacccggccgcggcgctgcaggtggggcagttcggggtggagccggaggaggccgccgacctcgcctacatgaccgagtacgcctacaacagctacatgaacatgatggacctcgcgcccgcctacttcggtggagtcgtctacgactacgaccacttcaactgatccacgagcatgcaggaggaggaggagggaagctacaagacgaaggaaggattgactggcctatcagctaggtactattttcgtgttaatggatggatggaccgatttgcagggcgcgcgtagcagtagtagcaatcaaggtcactagtatagtctgtcagtacgacgacgtcgatcagtcaatgtctcctgacgataattattaagtcgatctattcagtagtaacttgttaagccatgtagattagtagcagctggtaatctttgtaaatgtgtgtggattatcatgcaagtgcgcgcttatcatgatcgaaccagtggtctctgcgatgtaatattggggggaacgggggttaatcggaatcagaaaatgcatgcttgtagatgctttatttggtgaatgttctcttagtacttggcccatttgagtgggcttcatttgagttctgggctgtttcacaagttaaattctcttagaacaacaagttgatcttttatatatataatacctggacgaccacgatccgttctcctctctcctggttcctccaatttaaattacagccaaagcctttttttaactgtaatgaagttcatagaaaaatacaccaacgtttacaatataaaattagcctcgtccagtacatttatttgaacttatagtttatagcgtttttttttctctctctttttgctttttccaacagctgaaagaataatggattaatatacaaatccctgagtagagtacataggcggcgggtagaaccgagtggcaattcaccctcccaacagatcttgcgaggcagatcagcagcacacgtcgctaggggttttttacatgatacaacatcaggcatctgatttttaccgaccaaaaaacaagtacctgacagaaagctacagcgcagcacagcacagcactcgccgtgcggatccagatgttgacaccgcaggaattagcacgacgactcggaagttacgcaggggcgcgccccagggcaggctacctatttttcggagacgccgtgctgcttttcctcgacgagcaacgggggaggccccctttcacaggagatggtgggaaaggagatgacgacggcagctgccggtggctcgagatcgaagagaagcagctgaatgggttcctcagacgcctcttctccgagtcttcggattgactgtttgggtcatggccaaccggagagatcttaagcgactccgggagaaggcagttgcaaatggcgcctgcaaaggagaagatgcacttgatcatc

SEQ ID NO: 86362 - DNA, 459 bp, Zea Mays
atggcggcggtgaaaggcaccgacgaagatttgttagggtttggggaggccttgagctcccagtgctcccctcctcaaccaccccggatcgaccggcggttcagcgtggtgaacacgctgctggggaagaactcgtacaacgtcaccgtcaacccagggatcgactacgccttcatcgtcgcgctcgtcaatgaatacttcttcaggtacagggatgaccggaatgcagcagaaattttcagagctaatggtgatataaatggacttaaatcacagtgtaataatcagagcaatcaagtgaagagtgggtcgatggatgcgggcgggtggggcgtgtggagggggaggctgctggagcagcgccgaggcagggggagcggagtcgagggacaggggcgtgggcgcggacctaggagaggcagcgcggggatgaggcagagcgtagccgcggtatcgtga

SEQ ID NO: 86363 - DNA, 459 bp, Zea Mays
atggcggccgttacctccattgaaggagagaggacgtggggagggaaaaggggagaagaaacggcagccgtttccggcttggggactcgggtcgcggtcggtgcgctgctcgacggggcatcgggatggcggggtccttgctcggctcctgggctgctgcgcggtcgcggcaaggtcttcgggtcgcgtcgtcctgggtgcggtcaggcaggggcgcgcgcagctcagtcttcggcagggctgctcggcatcggtctgagcgggcgtgggcagggacgctggtgcgcagggcgacgacggcctgggcgcgggagagagaagcgaggagatgcggcggctgctcgggagattgaggaggcagcgcagctgtccaagatacgtattgcagaagaaaaggtgggatgggagagagaaggcgggtcccactcgtcattcaaaccaaaggggaaacagttctag

SEQ ID NO: 86364 - DNA, 1278 bp, Zea Mays
ttttttttagaatgtttcaaaagagccagagtactttaaatatacaatttatttagtgcggcttgtttcgactttaatccaactcgttttttatagtattttgcctatatgtacagcgattgcgaggcagccgaacaataaaccccgccgagacccaaccccctatttacacctcgtcacttgccaagttgacatcgcctccgggcaaggcccatcaagcttcgtcgctcctccgttacttccgcccatggccaagcgactcttccactcctgccgctcgccgtctgccgcagccgcggtcagccccacgacgacactcctcccgacagctcacccgcccgttgttccggctccatcgggcggtgcgtgctgcccgcgccgcgtgcctcggcgggggcgggcccagacacctgcagcctgtggcgccgggggctgcaccgtcgactacggcgccgacgacctccctccggcgcgtggaacgccagcgtaccgctggctgaagagctcccgatggcacgtcatcgaggccgccaacgcgtacgcctccgacggcgacggcgacgacacgccccgcctgaagatcgacgcgcggcgccgggtgcggcactcgcgccgccgccgccgccgcagggtgctccaccggaggctggcaggcccggcgagctggtcgtcgggcgacagcgggtggttcagcagcgacgacgacgagccgttcggcgcggggtcggcgctgcacgtggcggcgtcgtcgagcaccacaacggagtcctcgtcgacgggcgcgagacagaacagcgccggcgccgcgaggggggagggggaggctgcggccgcgtcgctggccgggggcttcgcggtggtgaagcgctccgacgacccgcgcgccgacttccggcggtccatggcggagatggtcgtgggccgcggcatctacgacgccgacggcctcgagcgcctgctccgctgcttcctggcgctcaacgaccgacgccaccgtcccgacatcgtggcggcgttcggcgacgtgtgggaggccgtcttatccgacctgccgtcgcagtcccactcccacggcaccgctgccgctgccacctccgccatgtctcacccctagaggcctagactagcgtgctcatcgacatcatcgtcattgcgctcgcgcgcacgtaggtctattccattaggtgaagcaactactctattatatgtaaaaaaatgcgattataatgttcacgtaatgcggctgtaaattaagctttcttgtgcgggtttgcggca

SEQ ID NO: 86365 - DNA, 1368 bp, Zea Mays
aagcgcaaggaagcaatcgggaagagacaacggcaagcgacgggactcgggaggaagcaagtgcaaagcagcattcttgtaggagagtgagtgagtttcttcgtaccgagctaagagaaacaaaagaacagcaagaaccggcagtgcaacataagactacgtagctgctaatcgaacctggcgtctactgtttcctcttccttttgcccaaaatcacagcgcctggggttcaatccaaactacttgcattgctatccaagtttttagttacaggatcggcgagctactcggattcctctcccacggcgttgcctgcgcgccacgcccggcgccgaacgtctcggctgcgccggccccggtcccggccatgccgccgatgggctggacgaacgcggggaggcctcgtcctgccgacgcgcccgacgggctcatcccgagccccaggaagtccagcgtcgccggcttcccgctgaacagagacgactggcccatcatgagctccggcaggctcacctgagccccggtggagtcgtacggcagcccaaggccgagcccggccgacagcattggcgccggctccagctccagccgcggcggccattgctgcagcgaggcgtccgggagtgacacccgcatggcctcctggtgctggtgctgctggcctgacgacgaggcgcccggcgacgacgaggagacgtccaggcccagcccgcgcaggaacgaggagctcgacgaggtggcgcccatctgcgcggccttctgcagcagcgcggtggccgacatgtgtgcggacggggacggggacggaggcggcggcgcgaactgctggcgctcggcggtcaccgccggcgccgccgagaagatcgacgacgatgcgtccgtggcgaggcacagcggcgggggcttggcgggatgggcgcgctccggccggccgccgaggtccgcgtactgcggcgctgacgccatcgacgacggcgcgaacataccgccgagcaggctctgcgacgtccccgcgacgctgctgctgctgctgctggcgccaacgttggcagcagcgctcaccgaagcttgcgaaagcaccggtacctgtaactgcggcggcggcggtggcggaggcggcggcggtggcggaggcggcggcgcgaactggacggcctcagtcgcattcgtgtcagtctctgcatgcattgcaacgaagcattagcgaatcgggggcatggattagattcagactagattgattagtgtaaaaggcgctaaaagctcgggagatgcagaaagcaacgagaggccatgatggcgtccttttcatgttgctcgtgggcgtgcttttgtcatcggatttcaatgctctgagaagttcagaaa

SEQ ID NO: 86366 - DNA, 624 bp, Zea Mays
gacggaccgggagaagagggtgccgcaatcgcagcggtactcgcgggagccgcaggtcttgacgtgcgccttccagtccgactgcacggcgtacttcttggagcacttgtcgcacttccacttcttctcgccgtgcttgcggcagaagtgcttcttgatcccggtgaggtcgccgagcgcgcgcgacgggtcgtggtgcacgcagctgggctccgggcacacgtacacccgcttccggacctccttgccgctccgctgccgcagcttccacggcaggttgtggccccgccggtggagctgcaggttctggtcccgctggaaccccttgttgcagatctcgcacacgaaccggttcgtcgccagcagcgtcttgggcgacagcgcgatcacctccgcgtcaggatctgcgccaccaccaccacggccacggcgccgtcgccatcgatcacgacaaagagctagctatccccggcacgcacacacacctcggaccactctggcatgccggggagggcacgctttttcttggcgggcgggccgggcggcggcagctgcgcggccacgccggaagatgacacggccgtcgtgggcgtcgcctccacctccataccggaatcttcgctt

SEQ ID NO: 86367 - DNA, 211 bp, Zea Mays
atcagagtctttatccgactcaaacgggaccgaaaagccaaacaggttctgagaaaattgcccagtctaaccaaactacaaaaagtctcctgcgtctgaatttgacaaaaaaaagacatttatttccttccatttgattggccgggaggaggcactcaaaatctaattaaaattcgagcatcggcgtggcgtattagcttctgcttgaaag

SEQ ID NO: 86368 - DNA, 579 bp, Zea Mays
atgccgtcgccggttgtagtggccgcgacgctgctggtggtagcactggcggcattctgcggcacggacccgctccggacggacagcatggtggacttcccggggtttgagtcccacctcgtcgacctccccaatcccgccgagatgccgacgcacgcggatgaatgggagcggctctgtggagccgatgtgcggttctgcggcgaggtgcaggggcccgagagcatcaccttcgaccagcagggccatacacgggcgtcgccgacggccgggtcgtcttctgggacggcgagcggagctccacggagggccgaaggcctcgccgctggagtatctcccagcgagcatatctgcaaccgcccgctcgggctctgtttcgataagactggggacctgtacatcgccgacgcctacttcggcttgctcaaagtccgccgcgaggccgggctggccacgctgctcgcaacggaggccgagggcgtgcgcttcaacttcaccaacgacctcgacctcgacctcgacgacgagggcaacatctacttcactgactctagcattcactaccaaagacgtctgtga

SEQ ID NO: 86369 - DNA, 1092 bp, Zea Mays
atggtctgttggtatgacctcgctgaggttgttgccctcaccgagagcatcggcaagccgctcgccgaggtgctcaaggagctcgggaagagggttccagactcccttgtgaagacccgcatcgaggatgatggcttcactatcaaattttatttcgcttgtgggcaagtgaaatcatatgagagggcaataatctccgtggagcaactgaatgctattcttagacaggcttctaaaaccaaggaaaaggaagatctcaggaagatagataactggcaatatattagttgtgtcaccctatgggttcggtttctgtgttgtcactataaggattacaatctccatcccttattttctcaagttcttcaattgctctttgactgcctagaattaagagaagtttctcagaaagaacaaacacaaagaacaaagatcaacttttcgtctttgttgaaggtgccaaagaacctgctgaaaccaagggattttcaagaggagtgtattctttcagcgattcagattctatcagcacattttgcccagtggagttaccatgtttccttcctagaagtagccaccattcctcttgtcctcttgaagaggctacatgagcagacaacagttgaatcacttcgccatcctattaagtgtttgatagaccaggtgacggagaacaaggattttatagaaaggaaaagagaggttgtatccttttcaccaaatgataaggcgtcagttgatagcttccttcagtcaattgcttcacatttactattcaacatctggcctgctgagtttgctgaaaaacatattactgttgaatgcaggaggagaagtccacacagaatgtcggacagggacgccgtggcccccgcgggcggcggtgaccggaaggcggccaagctcgggagctggagcagcatgagcagcaactacggcaacaagaagcggaagagcagcagcagcagcttcgggaggagatccacatccacctgcgaggaaaggcagggggtcttccgcatgctcatgagctggaaccaggagagccggttcagcaacaagatcaagacgacgacgagcaaagaaagatga

SEQ ID NO: 86370 - DNA, 1669 bp, Zea Mays
ggtgctttttaccgtttcctttgttgcaaacgctaaatttctcacgaattcttccgtcgtcggcggcgcagattgaatgccaaaaccctagctcgccctccccaattccccatttcggccacaccctccttgcctccacggctccacccctgcttcaggttacctgtgccagcgacgccggtagaagccatggacagctctctcgcgagcgcggcggcgatagccgatcagcgccagaagatcgagcagtaccgccacatcctcgcctccgtcctctcgtcttccccaccggacatctctcaggccaagcgcttcctcgaccacatggtttcggacgaagttccgctcgtggtgtcgcgtcaattgctccagacgttcgcgcaggacctagggaagctggagtcggacgcgcagaaggaggttgcccactacgcgctcacgcagatccagccgcgtgtggtctccttcgaggagcaggtggtagtgattagagagaagcttgcagagctatatgagtctgaacaacaatggtcaaaagcagcacaaatgcttagtgggattgacttggattcaggaatcaggatgcttgatgacaccaacaaattatccaagtgtgttcaaattgcacgactctatttagaggatgatgatgcagtgaatgctgaggcttttataaacaaggcttcatttttggtcaccaacagccatcaggaggttctaaacttacagtacaaggtctgttatgcaaggattttggatctgaaaagaagatttctggaagctgcacttcgatattatgacatttctcaaattgaacaacgcaagattggagacgaagagattgatgaaaatgcactagaacaagctcttagtgctgctgtgacatgcacaatattggctggtgctggtccacaacgctcccgtgttcttgctactctgtacaaggatgaaagatgctcgaagttgaaaatatacccaatactgcagaaggtttaccttgaaagaattttgaggaaaccagaaattgatgcatttgcagaggagctgaggccgcatcaaaaagctttattaccagataagtcgactgtgcttgaccgagcaatgatcgagcataatctccttagtgccagtaaactttacacaaatatcagctttgatgagcttgggacattactggggattgatccaaggaaggctgagaagatagcatctcggatgatttatgaggatagaatgcggggctcaattgatcaggttgaggctgtgatacattttgatgatgacacggaagagctgcagcaatgggatcagcagattgctggactgtgccaagccctgaacgacatccttgacagcatgtcaagcaagggaataactattccggtgtgaataaatatctcatgctgtcggtcgatggtgcatggcagaactgcttccatgccccggaatccagaatcaacattttgtatagtttgcagctgcaaatgtgtatcttgtgattttggggggaggatgcttgtttaagtaacgctcactggataccttgtagcactactgtttcaagagcgctcgaatgattcagtaagggctttcggtttcatcagaatccatatgtggattggctgagtttcaatccatagcaagtcaaaattctttataatttttccaa

SEQ ID NO: 86371 - DNA, 815 bp, Zea Mays
gcgagtccacaccttatctaccgtgcttgtctctttttctttatttacacatgcatttattttgcctcttattgcattatgcccctttcaggatgaaagatgctcgaagttgaaaatatacccaatactgcagaaggtttaccttgaaagaattttgaggaaaccagaaattgatgcatttgcagaggagctgaggccgcatcaaaaagctttattaccagataagtcgactgtgcttgaccgagcaatgatcgagcataatctccttagtgccagtaaactttacacaaatatcagctttgatgagcttgggacattactggggattgatccaaggaaggctgagaagatagcatctcggatgatttatgaggatagaatgcggggctcaattgatcaggttgaggctgtgatacattttgatgatgacacggaagagctgcagcaatgggatcagcagattgctggactgtgccaagccctgaacgacatccttgacagcatgtcaagcaagggaataactattccggtgtgaataaatatctcatgctgtcggtcgatggtgcatggcagaactgcttccatgccccggaatccagaatcaacattttgtatagtttgcagctgcaaatgtgtatcttgtgattttggggggaggatgcttgtttaagtaacgctcactggataccttgtagcactactgtttcaagagcgctcgaatgattcagtaagggctttcggtttcatcagaatccatatgtggattggctgagtttcaatccatagcaagtcaaaattctttataatttttccaa

SEQ ID NO: 86372 - DNA, 552 bp, Zea Mays
aggtactagatagaaattatttactggtcacttgtcatgtccctgttcacagtaagtaccatttttgctgatttcctaagtacgaaactgagcaacagactccaacaaccagtatttttctgtgctcataatcctctacttaaaagttacaaccgtgttcactgcataagtttagcaattgaagcaggcgagactaattttattatctttctgtttgttcccgtagcatgtgtctttggagcatccaggatgtagcatgtgtctttggagcatccaggatcgattggcaggatgtgctttgtcactccatttatttcacgccaactgatgttgagaattacatggtctctgcaccttgccatggagctatgctaggagcatggctcggtgcttggcctatgccccttgactaggagagaccatggcaggaatggccaatgtgtgtcacctatggttcagttgttgggtatttgttcggaatggcagtgtcattggtcctaagtcctaatagctattcacaagagaagggtttgtgcaaaaactgactggcct

SEQ ID NO: 86373 - DNA, 159 bp, Zea Mays
atggaggcgagcagggcgcaggcgaaggcgtacttgttgatgggcgggcgcttcgccggcgccacggcgaccgggacggcgtccgtggccgtgctcatggccaagtgtcggtggtgtagacctaccgatcacaggcgtgttctgtcggtttggcactag

SEQ ID NO: 86374 - DNA, 1497 bp, Zea Mays
gaaaaatcccgagtaggtaattcaaacacgccccacccaataggtgaatctttcgaagtgtggaattatcccctttcttcagtcctagaatcgatgcctaagaaaaaggttatatctattaaaatgctcaacccattcatgcgattcaatcctctgctctcctcgtcggaagaggatccattcagccgcttcggggccgtttgggttccttggatctgcaactgtagcgtccgccttcacgcgcggcgctgatgctgccgtgcctccgcctccacgcccggttctgttgctgccgtgacgccgccgggctcgggggaagcgcgtggcaccactcgtcgcttgcctgcacctgcaggttcaactcgcttggaagcatttgtggcaagtgaggcctccgtcttcatgaatcagccccctccacatatgtctagaccaacaattattatcaagctcattttgtggttgctgtggaccatcacccacttagcaatcagcattttaaatttatggtctcatctgatttatagtctagactgctatcttatttcatctggattgttgcggaagtatcagaatcttcatctgggtagactgaagtacttggctattgtggtagatagcaaagaagctaaaagtactgtgaaggtcaagcgactgttatgctggctctcatctatgggtgtgaagtatgtatgtctctacgacattgagggagttctgaagaaatcttttgaacctgctgtgaatgtttcaagagataggactgcaggagaacattttggcattggagcaaacatcaaagatctacactgtagccaaagagagatgatgatagattgtctttctggctctgatggcaaggagggtattgctaaagcagccagtttactttgctcaacttacctcaatggtgatactcatggagatgacaaaaggaaaccagcatttacagaagctgacatggctggtgcactgaaggctgtaggttgtggtggaccagaacctgatctccttctcatgtatggtcctgctagatgccatttaggatttcctacatggagattacggtatactgaaattatgtatatggggccactgaaatcaatgaaatatggtgcaattgtgaaagccttatataacttctcaaagaaacaccaaaattatgggaaatgatagctgatactagtttaaagaagaccatttgatcatggagaatcgacaccttggaactactggacagttactctgcggcccgcatccatttgcttctgctgctgcttactggagcacaggagtatttaacgttagacataccattgacactcatttcatgtttgcttgtaataagataaaaagtgctgtcgatagaacatacatacgggacaacatcccactgaaagttccacccatagcaatgagcaatgaaagaaacacaagaaatcttaccatctcatctattatttcctatgctatgattcctaatgatttatctgtttt

SEQ ID NO: 86375 - DNA, 1484 bp, Zea Mays
gaaaaatcccgagtaggtaattcaaacacgccccacccaataggtgaatctttcgaagtgtggaattatcccctttcttcagtcctagaatcgatgcctaagaaaaaggttatatctattaaaatgctcaacccattcatgcgattcaatcctctgctctcctcgtcggaagaggatccattcagccgcttcggggccgtttgggttccttggatctgcaactgtagcgtccgccttcacgcgcggcgctgatgctgccgtgcctccgcctccacgcccggttctgttgctgccgtgacgccgccgggctcgggggaagcgcgtggcaccactcgtcgcttgcctgcacctgcagggaagcatttgtggcaagtgaggcctccgtcttcatgaatcagccccctccacatatgtctagaccaacaattattatcaagctcattttgtggttgctgtggaccatcacccacttagcaatcagcattttaaatttatggtctcatctgatttatagtctagactgctatcttatttcatctggattgttgcggaagtatcagaatcttcatctgggtagactgaagtacttggctattgtggtagatagcaaagaagctaaaagtactgtgaaggtcaagcgactgttatgctggctctcatctatgggtgtgaagtatgtatgtctctacgacattgagggagttctgaagaaatcttttgaacctgctgtgaatgtttcaagagataggactgcaggagaacattttggcattggagcaaacatcaaagatctacactgtagccaaagagagatgatgatagattgtctttctggctctgatggcaaggagggtattgctaaagcagccagtttactttgctcaacttacctcaatggtgatactcatggagatgacaaaaggaaaccagcatttacagaagctgacatggctggtgcactgaaggctgtaggttgtggtggaccagaacctgatctccttctcatgtatggtcctgctagatgccatttaggatttcctacatggagattacggtatactgaaattatgtatatggggccactgaaatcaatgaaatatggtgcaattgtgaaagccttatataacttctcaaagaaacaccaaaattatgggaaatgatagctgatactagtttaaagaagaccatttgatcatggagaatcgacaccttggaactactggacagttactctgcggcccgcatccatttgcttctgctgctgcttactggagcacaggagtatttaacgttagacataccattgacactcatttcatgtttgcttgtaataagataaaaagtgctgtcgatagaacatacatacgggacaacatcccactgaaagttccacccatagcaatgagcaatgaaagaaacacaagaaatcttaccatctcatctattatttcctatgctatgattcctaatgatttatctgtttt

SEQ ID NO: 86376 - DNA, 1431 bp, Zea Mays
ggaaggtgaattatttatcaattatgtgaagcctctctctgaaaacaaacaagggatgtcaaaactcaacaggacaaccgggtcacgtcgatgtgatatgactatatgaggcaccagcttatggatctttctgtgcctactaccgtttttgcctagtccagcagtccagccctggccacaattaaggtttctctaatttgactgccacaggcacctggttttcttgctgcttccgctgtttcttcctcaacctctccagctcagctgccgcaggctgcgactgccatggattccaaatccatggaagcatttgtggcaagtgaggcctccgtcttcatgaatcagccccctccacatatgtctagaccaacaattattatcaagctcattttgtggttgctgtggaccatcacccacttagcaatcagcattttaaatttatggtctcatctgatttatagtctagactgctatcttatttcatctggattgttgcggaagtatcagaatcttcatctgggtagactgaagtacttggctattgtggtagatagcaaagaagctaaaagtactgtgaaggtcaagcgactgttatgctggctctcatctatgggtgtgaagtatgtatgtctctacgacattgagggagttctgaagaaatcttttgaacctgctgtgaatgtttcaagagataggactgcaggagaacattttggcattggagcaaacatcaaagatctacactgtagccaaagagagatgatgatagattgtctttctggctctgatggcaaggagggtattgctaaagcagccagtttactttgctcaacttacctcaatggtgatactcatggagatgacaaaaggaaaccagcatttacagaagctgacatggctggtgcactgaaggctgtaggttgtggtggaccagaacctgatctccttctcatgtatggtcctgctagatgccatttaggatttcctacatggagattacggtatactgaaattatgtatatggggccactgaaatcaatgaaatatggtgcaattgtgaaagccttatataacttctcaaagaaacaccaaaattatgggaaatgatagctgatactagtttaaagaagaccatttgatcatggagaatcgacaccttggaactactggacagttactctgcggcccgcatccatttgcttctgctgctgcttactggagcacaggagtatttaacgttagacataccattgacactcatttcatgtttgcttgtaataagataaaaagtgctgtcgatagaacatacatacgggacaacatcccactgaaagttccacccatagcaatgagcaatgaaagaaacacaagaaatcttaccatctcatctattatttcctatgctatgattcctaatgatttatctgtttt

SEQ ID NO: 86377 - DNA, 1463 bp, Zea Mays
ggaaggtgaattatttatcaattatgtgaagcctctctctgaaaacaaacaagggatgtcaaaactcaacaggacaaccgggtcacgtcgatgtgatatgactatatgaggcacctggttttcttgctgcttccgctgtttcttcctcaacctctccagctcagctgccgcaggctgcgactgccatggattccaaatccatggaagcatttgtggcaagtgaggcctccgtcttcatgaatcagccccctccacatatgtctagaccaacaattattatcaagctcattttgtggttgctgtggaccatcacccacttagcaatcagcattttaaatttatggtctcatctgatttatagtctagactgctatcttatttcatctggattgttgcggaagtatcagaatcttcatctgggtagactgaagtacttggctattgtggtagatagcaaagaagctaaaagtactgtgaaggtcaagcgactgttatgctggctctcatctatgggtgtgaagtatgtatgtctctacgacattgagggagttctgaagaaatcttttgaacctgctgtgaatgtttcaagagataggactgcaggagaacattttgtaagctgcgctactgagctttctgctacattttatatcagggtcttacttttgtgtatattctctactggtatgcttgtccatttttgttgttgtttgtaaatctgtattataattcatggcgacatatagggcattggagcaaacatcaaagatctacactgtagccaaagagagatgatgatagattgtctttctggctctgatggcaaggagggtattgctaaagcagccagtttactttgctcaacttacctcaatggtgatactcatggagatgacaaaaggaaaccagcatttacagaagctgacatggctggtgcactgaaggctgtaggttgtggtggaccagaacctgatctccttctcatgtatggtcctgctagatgccatttaggatttcctacatggagattacggtatactgaaattatgtatatggggccactgaaatcaatgaaatatggtgcaattgtgaaagccttatataacttctcaaagaaacaccaaaattatgggaaatgatagctgatactagtttaaagaagaccatttgatcatggagaatcgacaccttggaactactggacagttactctgcggcccgcatccatttgcttctgctgctgcttactggagcacaggagtatttaacgttagacataccattgacactcatttcatgtttgcttgtaataagataaaaagtgctgtcgatagaacatacatacgggacaacatcccactgaaagttccacccatagcaatgagcaatgaaagaaacacaagaaatcttaccatctcatctattatttcctatgctatgattcctaatgatttatctgtttt

SEQ ID NO: 86378 - DNA, 262 bp, Zea Mays
atgaattctgatagaacagtcatcacagcgaaaccaacttttggtgatcgattgtcgaacaaatcaaatacagttccatctcccagcaccagcaggcagcttaaccaggggggggggggggggggggctgctactgcaaccgttccatcatattcaaggcttcgtgggcagcagtcgggcttagatcttgtagctgctctcaaggggattgggaaaaaggagtgctggggattgtggtgatggccgggataaagaagggaag

SEQ ID NO: 86379 - DNA, 1318 bp, Zea Mays
cctggaaccggataacacaccgcgatagcgaagcagaggtcttccaaaacccaacgcggcaaacggcttcctcaccccccctcccctcgccatggccgtccccacctccacctcctccccgctccccctcctcttcctccatcgctgcaccgcaaactctagcccctcggttctctccttcccgtcctccctccgcggcgcgtccctccgctcccgggccgcggccgcaccgcccgcagagaccctctctgacgacggcatccccgacgcgccaccggaaggggcaggaacgggaattccgttgccatcgtcgattggggatgatggggagcagcttgcacccaagcagaagatcagaatcaagctgcggtcctactgggtgccgttgatagaggactcgtgcaagaagataatcgaagctgccaaaacaaccaacgcaaagaccatgggtcccgttcctctgcccactaagaggagagtctattgtgtgcttaactctcctcacgtgcacaaggactcacggttccatttcgagatccggacgcatcagcggctgattgatatcatgtatccaactgcccaaacaattgattcgttgatgcaactccagctccctgccggtgtggatgttgaggttaagctatgattctgttggagctgaactttccgaagtttgatgtaatgaggtattcattttctgcagcttttctctgggactgaaagaaatgtagtgcctgtactaggaaagaagatgttcagaattgaatgtacttgatttgaagtatatcagatgatatggttcatgctagctgtatacttgtattactgtattggtggcactaaaatttcttctagcaagtctgaagcagacgaaggattggccaaatttgtaagcttctgaaggatcgtttgagtcgtctggataagcaaaatactctttcttgctggttgcactgattctgctcaacagactgacggtgctttgtaacttgtaaaggggatttctttctatttttctttgatagtttggaaacttaaatccgctccgggaattcatgattctcggagaggatttaaatttccaaactattccttagggcttgtttagtagcaaagatactggagaggattagaggggctaaaatcctacgagaatggtagtttctttctttctcttttcaaaaaaaagtacactttcagttggctaggtgtgctgttctatttttaatagatcaagtgatattcgttttttctgaagaaaaggaaggcataaagttggtctttagcagccccccgactcctgcctcaatagtcctcg

SEQ ID NO: 86380 - DNA, 1459 bp, Zea Mays
cccacgtatacattttttttgtcacgcttcacgcacctgtaacccagacgcagtctgcttcctcgaaacttcgccttctcggttgcctgcctccgccgccgcaggcagacacgtatatataggagcgcaaacaccttgccctgtctaagcggccacaacctcccagccgtcgctagtcgctcgctccatcaccgataaccaagatcccaagacctcctccagcctcctctgctctcgcgccggcacccgcacgcatggctgcctgtgtcgacaagtggcaccccacgcacgccggccgcctcaccggcgccatctaccgctacttgccggacggcgccacggaccgcgcggtggccgccgccgccgccgcgccggcgtccgcgagcggcggcgacgacgacgacgtctgggacgagctgcgcgcggaggcgcaggccgacgcggacgccgagcctctgctccgcaagtactacgccgacctcgtcctgtcgcgcccgtcgctggaggccgccctcgccgcgcacctgtcggccaagctctgcgtccccggcgcgctgccgcaggacgcgctccgggacctcctggccgccgcactggccgcgcgcccggagtccggccgcgccgcgcgcgccgacctccgcgcggcgcgcgaccgcgacgcggcctgcggccggatggtgcactgcttcctctactacaagggcttcctcgccctgcaggcgcaccgcgccgcgcacgggctgtggtgcgagggccgctccgcgccggccttcctcctccagagccgcgcgtccgaggtgttcggcgtcgacatccaccccggcgcgcgcattggctcggggatcctgttcgaccacgccacgggcatcgtcatcggcgagacggccgtcgttgggaacgacgtctccatcctgcacggcgtcaccctcggcggcacgggaaaggagtccggcgaccggcacccgaaggtcggggacggggtgctgatcggcgccggcgccagcgtgctcggcaatgtgcgcgttggagccggggcgaagattggagcaggggcggtcgtgctacgggacgtgccggaggggaccacggccgtcgggaaccccgccaaggcggtcgggaagaaggcggcgccgcagcggcggccggaagagcagcctggggtcaccatggagcaagggtggtcggactacgtgatttgataacttccagagggtctgtttgcaaatatttagtgcaggagagtttccctcccagaagatatttagtcaagtcgttattgagagataggtgcattgccgttgctgcattgcataaagagggagctcaattaggcattgagccctagagcaactccatatttttctttgttttgcgtgaggggaataacaatactatatgcatctgataagttatcggttgcttgtacatatactttcaagctataaattattgtgtccgc

SEQ ID NO: 86381 - DNA, 1024 bp, Zea Mays
cgctctccgcccgcagccgctcactccactccacttccagagcgtgccttgctcgttgctgctcactcagtcacctcccctgcctctgcacgtactacgtacgtgccgaggacacagcggccggcgatgggaggcgcaggcgaggtgacggagctggagctgcgcatccagctgcctgacggcggcggcggcggcggctacaacatcaacgacaacgccgacatcctggccgagatcctggcgcgtctggacgggcgctcgctggccgcggccgcctgcgtgtgccgcctgtgggccgccgtggcgcgccgcgacgccgtctgggaggcgctgtgcctccgccacgtcggccccgcgccacctgcggcggccgcgggcccggccacccgcgccgtcgtcgccgcgctcggcgggtaccgccgcctctaccgcctctgcctcggcccggcgctcgaccggctggcgcaggcccaggcccaggcggcgcgggcgcaccacctgtcgctctccctctcgctctcgctcttctccatcgactgctacgagcgcctcggcggcggcgggggagcggcggggcccagcgccggcgcgggtgcgcgcgggagacagcagcagcagccgtcgtcgctgctgttcctctgcaagcccgtcgacgtgtcgtgatggcaatggcattcagcttcagccgtcgtccttcctccgcgagcccgtacgtcgacgtgtcgcgatggcattcagctctcgtcgctcctctgctcgtcctttccatgtcgtcgcgtcgtccttggcgtacgctgtctgccctgggcgcctggcctttgctgctgctagctgcaacctgcaatgctcgtttgcgtgtctcacggccgccgccgcttaacataatcgttttaattggtttggttttgttgattagcacggacgaacaacaggcaaggaagagctcttcaatcaattcaagctgtacccggagaggcttattaaattctaataatgcttattctttcttcctttgctttgcttt

SEQ ID NO: 86382 - DNA, 266 bp, Zea Mays
gcttgccagcgtggctgtgacggagtccacgcgtccgtggaaggcggcgatctgggcgcatctgtggccaggcaaaagtgctttggtccgtccgaattattttattggactggatcatcgtctatctgggatctggcgatgcaggtggataaaaatgagactgttttccacggtctaatctgcatgtttgtgcaatgcgcgatgtgtggccatgcacgaagcaagccaacggatgggagatggcgtggaccatttcctcctctgta

SEQ ID NO: 86383 - DNA, 799 bp, Zea Mays
ggctgcagctacctgcttgcttgctagctagctccaaacagaccgatagatacaacccccggcccttcacatcatcagtccacacacccaacccaacaagcgagtcacgactgaagctgcagcctaatagctagccgctagcctagcagtccaatgagaaggcacggcgccagcgaggcctccccttccatcatccacacgtcctccatagctctcctccaggagaggttcagaaacctgcagaaggtgaaggagatgagggaaggcagggagctgcagagggtgcacgctgctgatactactactaccaccaccaaccgcaccgcttcgtcgccgtcgtcctcgtcgtccctgtcgtcggctctcagcctcggcctccaacaggccgccaacgccaacgaccacccgaggtggttcttgcacccggacttgatccggccgtccaggccgctgcgcggacacgcgtgccacggcctcggcgccaccggtggtggtgtcgtcgtccagacgacgtcgccgccgccactaccgccgagctcatcgtggggaggagcgcagaattcgggctataggactgatatagatgtcgatacctcgctccatctgtaatctcttctataataagcacgtatggccgtgctgttctttcgttgcttttttttttggtatggcttgtcagtttcccggccttatttgcagctagctagcactacgtacttcttctgtcgtctcgcggcctgccttgtaactgcttgggtacttttactatatatgaggcttcctagatcgatgatataaa

SEQ ID NO: 86384 - DNA, 741 bp, Zea Mays
tgatatgttaatcatcaggcacccatatctgctgatccatgaagcatttgatctccatcactgagtgcttgccaacgcggaacagactccacaaccacaaggactgacatagacgcccaactaggccaccaactgttttctatccaaccacacctcgcaaacgtgatgcactccaactccggagcatcttctttatttaccattccgcgaaccatgttatttactcccgttctgttctgtttctgctctataaatccataattgccactgaactttgccacataatagatagacttcttgctcgtactgtacatgacccagaaactccatcagacattatcgaccatcttaggagcaaatttcttcacagcgtcgccgaccgtgaggaatatcttgtcttcaccaatcatgtccgtgaatttcgctgagcggagcttctggatcaccgccggcccgggattggtaagaaccagctccagccatgtaattaactgctgaccgcgagaaagaacctgcaatgaacgacttctgtcaaaaggatgatgcatctgtatggtgcaatgaattgttagtttttttctgaattaattggtacctgtggctacgtagcaagaagtcagtgaaccaacaatgttcatggtccctagagccatcatttctttgttcccatctatctggtaatccttgagggctgcaaatgttcttccaattgcaatcgcttcctgataaagtttgcatcag

SEQ ID NO: 86385 - DNA, 222 bp, Zea Mays
ggcgcttgctcacctgaagaatccgagcgctgcctgagtgacccctgcgaaaaaggttgctgtgaaggctaggcgcctgtactcgagcgggtgtgtcttggggtcgatctcattctgaaggagagtaccgagcagcagcgacaccacggccactgggccgatggctatgtccctggagctgcccatcactgcgtatatcagaggcggcacgaagctactgtc

SEQ ID NO: 86386 - DNA, 2650 bp, Zea Mays
gagcatttcctcccccggccgggacggggctcatccacgctcggggacgggatggatgtcttcttcctctaaccgtacccacggcctcttgccagagaatcatcccatatcttcgtcccgtccgtccatatgcatgatccatcgtctcctaggctagggccggtgatgtttacacgagaggagggggagaggaattctagccagctgcgcatgtgatcgttgtcatgccaaccgtaccgcaagattctccgtccagccgccagaaccaagaaacccttttaaagccaagggagctccagctcccgagtttccccaaacacttcatccaggctccagccatggaggcctcggcagcggtcgagtcgtcggccgccgtgtctgtcttcgaggtagtatccagcaagcagcggcggccgccggacacggcgaagctggtgctgaatagccccagcccgccgagcctgcgggaggagctcgtcggcgtggtcggcaaggcgttccggccgcgcgcccacgccggggccgctgctggcgccggtggccgcccgccgccgcgccgcgcgtgggtcctcacggcgctgcagtgcgtgttcccggtgctgcagtgggggaggagctacaccctcgagtccttcaggagtgacgtcatggccggcctcactcttgccagccttggcatccctcagagcattggatacgccaatctagccaagctggaccctcagtacggtctttacacgagcgtcgtgccaccgctgatctacgctgtgatggggacatcgagggagatcgccatcgggccagtcgccgtcgtctcgctgctgctgtcctcgatgatccagaaggtcgtcgacccggccgccgacccggcgacctacaggtcgctcgtcttcacggtgactttcctcgccggggtcttccaggtctccttcggcctcttcaggctggggtttctcgtggatttcctgtcgcacgctgccatcgtggggttcatgggcggggcggccatcgtgatcgggatgcagcagctcaaggggctgcttggcctcgcccatttcaccaacagcaccgatgttgtttctgtcctcaaggctgtctgctctgcgctacgacatgacccgtggcacccgggcaacttcctcatcggatgctccttcctcatattcatcctcaccacacggttcatcgggaggaggtacaagaagctgttctggctgtcagcgatctcgcctctgctgtcggtcatcctgtccaccgctgcggtctacgcgacaagggctgacaggcacggcgtcaagatcatccagaaggtgcacgcgggcctaaacccaagctccgtgaagcagatacacctcaacgggccgcacacaacggagtgcgccaagatcgccgtcatctgcgcagtcatcgccctcacggaagctatcgccgttggccgatctttcgcctccgtaagagggtacagactcgacggcaacaaggagatgctggccatggggttctccaacgttgctggttctctgtcctcgtgctatgtggcaacaggttcgttctcccgaacggcagtgaacttcagcgcgggggccaggtcgaccgtttcaaacatcgtcatgtccatcaccgtgttcgtcaccctggagctgttcatgaagctcctctactacacgcccatggcggtgctcgcctccatcatcctgtcggctcttccgggactgatcgacatcaaggaggcctgcagcatatggaagatcgacaagatggatttcctcacctgcctcggtgcgtttgttggcgtcctgtttgggtcggtggagattgggcttgcagttgcacttggcatttccttcgcaaagatcatcatacagtcgcttcggcctcaggtggagatccttggcaggctacaagggacagatatcttctgcagcgtcaggcagtaccctgtagcctgcctaactccgactgtactgcctatacgcgtcgacacatccttcctctgcttcatcaacgccacttccgtcaaagaaaggatcacagagtgggtttgggaaggagtggagacctcaaatggaaaagcgagggagaggatacaagcagttgtccttgatatgtcaagtgtggtaaacatcgacacttcaggactcactgcactggaagaaatacacaaggagttggtgtctcttggcttacagatggctatagccagtccgggatggaaggcagttcagaagatgaaagtgtcacaggtggtggacagggtaggacaggactggatcttcatgacagtaggtgaagcggtggaggcctgtctagctgctcataagggcacagctctcgcatgttgagtatgcgttaattactactattagtactcctaaggataatcccataagcgatgcggttatttgcatcctatgaaggtgttactggaaatgcttacgaaacagaaatgcatggtttgcacatgatggaggcaaaatacctatggtatgacttgactggagtggtcgtggcgagaaacaaacctgctctgggaaggacattccttgagctccacaaaaacatgtatggtgatatcttgatgatgtgtaactgtacttagtaagtaaacaagtctttttgttttaacaaaacagaaaataataaaaaaaaa

SEQ ID NO: 86387 - DNA, 1959 bp, Zea Mays
cgactacctctctttttttttctctccctggtggtggtgaaaagacacgagcgtcgtgccaccgctgatctacgctgtgatggggacatcgagggagatcgccatcgggccagtcgccgtcgtctcgctgctgctgtcctcgatgatccagaaggtcgtcgacccggccgccgacccggcgacctacaggtcgctcgtcttcacggtgactttcctcgccggggtcttccaggtctccttcggcctcttcaggctggggtttctcgtggatttcctgtcgcacgctgccatcgtggggttcatgggcggggcggccatcgtgatcgggatgcagcagctcaaggggctgcttggcctcgcccatttcaccaacagcaccgatgttgtttctgtcctcaaggctgtctgctctgcgctacgacatgacccgtggcacccgggcaacttcctcatcggatgctccttcctcatattcatcctcaccacacggttcatcgggaggaggtacaagaagctgttctggctgtcagcgatctcgcctctgctgtcggtcatcctgtccaccgctgcggtctacgcgacaagggctgacaggcacggcgtcaagatcatccagaaggtgcacgcgggcctaaacccaagctccgtgaagcagatacacctcaacgggccgcacacaacggagtgcgccaagatcgccgtcatctgcgcagtcatcgccctcacggaagctatcgccgttggccgatctttcgcctccgtaagagggtacagactcgacggcaacaaggagatgctggccatggggttctccaacgttgctggttctctgtcctcgtgctatgtggcaacaggttcgttctcccgaacggcagtgaacttcagcgcgggggccaggtcgaccgtttcaaacatcgtcatgtccatcaccgtgttcgtcaccctggagctgttcatgaagctcctctactacacgcccatggcggtgctcgcctccatcatcctgtcggctcttccgggactgatcgacatcaaggaggcctgcagcatatggaagatcgacaagatggatttcctcacctgcctcggtgcgtttgttggcgtcctgtttgggtcggtggagattgggcttgcagttgcacttggcatttccttcgcaaagatcatcatacagtcgcttcggcctcaggtggagatccttggcaggctacaagggacagatatcttctgcagcgtcaggcagtaccctgtagcctgcctaactccgactgtactgcctatacgcgtcgacacatccttcctctgcttcatcaacgccacttccgtcaaagaaaggatcacagagtgggtttgggaaggagtggagacctcaaatggaaaagcgagggagaggatacaagcagttgtccttgatatgtcaagtgtggtaaacatcgacacttcaggactcactgcactggaagaaatacacaaggagttggtgtctcttggcttacagatggctatagccagtccgggatggaaggcagttcagaagatgaaagtgtcacaggtggtggacagggtaggacaggactggatcttcatgacagtaggtgaagcggtggaggcctgtctagctgctcataagggcacagctctcgcatgttgagtatgcgttaattactactattagtactcctaaggataatcccataagcgatgcggttatttgcatcctatgaaggtgttactggaaatgcttacgaaacagaaatgcatggtttgcacatgatggaggcaaaatacctatggtatgacttgactggagtggtcgtggcgagaaacaaacctgctctgggaaggacattccttgagctccacaaaaacatgtatggtgatatcttgatgatgtgtaactgtacttagtaagtaaacaagtctttttgttttaacaaaacagaaaataataaaaaaaaa

SEQ ID NO: 86388 - DNA, 77 bp, Zea Mays
ctgaaattcacatcagggcccgaaattcaatttttggcccggaattcacatcagagccctaaattcaaaacaaataa

SEQ ID NO: 86389 - DNA, 2363 bp, Zea Mays
ggtgggcggggaggcgcagcctatgcggcggtggtagccgcaagtgaccagcaacccatgctggaccgacttcttcttcagcatgcctccacattcgaggagccccgaggcctgccgccggcccgaccatacgaccatcgcatccatctgctcccgggaacagcaccggtcgccgtgcgaccataccgatacccccagctgcagaaggatgagctggagcaccagtgcgacgccatgctcacccaggggattatccgccctagcacttcgccattctcggcgccggtactccttgtccgcaaggcggataagtcctggcgtttctgcatcgactaccgcaccctcaacgccaagactgccaaggacaagtttcccatccccgtcgtggacgagcttctcgacgagctccatggggctcgcttcttcaccaagctcgatttgcgctcgggctatcatcaggtgcggatgtgcgtcgacgacatcgccaagatggcgttccgcactcatcatggccactatgagttcctagtgatgccgttcgggctttccaatgccccggcgacattccaggccttgatgaacgacgtcctacagccgtacctaaggaggtttgtgctcgtcttcttcgatgacattcttatctacaactcatcatgggcagagcatctgcagcaagtcgccatcgtcctgaatgagcttcgggcgcactagctccacctaaagcgcttgaagtgctcattcggggcgccttcggtggcctatttgggccacgtcatctccaaggacggtgtggccatggatgtcgccaaggtggcggcagtcacctcgtggccaacaccacgctccgcccggggtctccgtggtttcctaggcttggccggttactaccggaaattcatccgggacttcggcctcatcgcagcgcccctgacacgtcttctacgccgagacgccttcgcatgggatgaggaggccgcggaggccttccaagcgctcaagcgcgccctcaccacggggccggtcctccagatgcccgacttcgacaaggacttcatggtggactgcgacgcctccggcgtggggttcggcgccgtcctacactagggcgtcgagcctctcgctttcttcagcaagccgttcgccgctcgccacctcaagctggcggcatatgagcgcgagctaattgggctggtgcaggcagtacgccattggcgcccttacttgtgggggcgtcattttattattcgtactaaccattacagtttgaagttcttgctggaccagcgcttgtcgaccgtgcctcagcaccaatggatcagcaagctctttggctacgacttcgacgtcatgtaccgtccaggacgcctcaacgtcatagcggacgccttgtcccgccgcgacactgaggagggcagcaccagcttcgggtcggccttatgcgtgcgctcggggccgtcttttaccttcatcgacgacatccgccgcgcgacgtcgcacgcggacgatgctaaggatgtgcgccgccgcttcgaggcgggagagctgcagggcccatggcgcatcgatgacgggctactactccatggtaaccgcatctacgtgccgggccatgctaacttgcgccaccaggccctctccctggcccactccgccggccacgaaggcgtgtgggctgatatctccatcgacttcattgaaggattgcccaaggtgggtggcaagtcattgatcctgacggtcgtcgatcgcttctccaaatatgcacacttcatcgcgctcgggcacccctacactgcgacaacagtcgctcgagcgttcttcgaggacattgttcgtctacacagcttcccctcctccatcgtcagcgacagagaccctgtctttacggggcacgtctggcgcgacctcttcgggatggtaggcgtgaagctgcacatgagcaccgccttccatccacagacggacgaccagtccgaggtggtcaacaaggtgctcgctatgtacctgcgctgcgtcacaggcgatcgaccccgtgcgtggttcgactggctcgcgtgggcggaatactgctacaacacctccttccacaccgctctgcgagccaccccctttgaggtggtctacggtcgttccccgcgcccatcctgccctatacaccagggtcaacacggacagaggcgactgagactcttctacgcagtcgggacgagatacttgctgaagctcgtcaacgtcttcttcaagcccagcagatgtccaagaaatactacaatgccaaccaccacgacgtggagtatgctgtgggagactgggtttggctgcgtctgctgcaccgaacgacgcagtccttggacccccgtgcc

SEQ ID NO: 86390 - DNA, 2714 bp, Zea Mays
atgcgagcattcaacggccgccgcctccacgatccgaagcccccctcattcctccccctccccttagccccacgcaccacaacgccgccaccgccgcccccctcctcgccgccgcacgccatcccgccgctcaacttccgctacctcaccccctgtccgcgctggtctgcctgggtcgccaccgcactcagcgaccccgttttcgctcccatcctcgcctcgtccgccatctccggcgccgtcgccgcctccaccgccgtcgtctcccccgaccgtgcggccctctccgctctgctctcgctctgggacccggatacccacgcgttccgtctcccagcgggccccgccaccttcacactcgaggatgcgctcgtcctcgctggtctaccgcccgcaggcgcgccgctggaccggaccctcacgccagaggaggatgacctccgcgttcgcctcgttgtcgagagggagaagatcaaggagctccacccctgtgcccgcgccgcgcgccgcgtgtctgcggaggtgtggctcgagtggttcgacggcggtggcatacgccccggcgaggacgacgaactgcggtggcttgggttcctcgcttactggctcgctttttttgttacgccaaggctccggtcaaggggtggcgagctgccggagcgcgtcttcgcacatgctgcgaggcttagtcttggcgagcgcattgcccttggccaggggatggtggcaaatctatatgcggaaatggataagattgttacttgcactgtggccgatggtgtgtgtggccgtctagatgtctgcgtgccagtctggatgctgcaggtgtggatgtgggagcgctacaagaggctgtgcccgccggagctgaaggcaccgcagttccctgtctccaatgtcagggtattgtattggagccggaggaagaagaagagcacatctgaagaggctctaaagattttgctggacgaagtatgctttgagtggaggccctatcggcacaactccctcaactggatggaacccaagtggttcaacaaggacaccattttggtgacctgtcatggtaaagataagccagagtggttgttggattacattgctgttatcagtcaaacaatgttgaccgggtttcatagtgatgacaccgacaattcagtactgtacaatccacagcttgttgcgagacagtttggttatgatcaggctgctcctgtgtccattgtcagggaaatccactttgagggaatcgagttgtggataccaagtatcggtagatatgggatgcctggtgaagattatgttgcatggtgtagcagcagtgggcagttctacaagcatcaaaatgatgtccaatatggttgctcggtattacgaaatcatgaaaatggggctatttcgtcgcaactgaatgtaaatgagaaatgtgttgtagtgccaacacttgatcaatttatcacccaagtcactaggagagaccacatcaattacattgtagaagggcagccggagaaaatggataatggaagtcatgaggatgaaacagaggtgattgtctgtggccttgaagcttgtgtcaaggatagcagaactacttcagtgaaacagaatgtgcagaaacaaagagataaatttgctgaagatggaggtgatagtaagaagaaaagaaaagtagaaagtaacacgaaaaggagttcgttgcaattggaaggtcagaagtattcttcactccagaaagctctaaattctgattctaagaaatgtgaggagttggctcaagttgacagtgatgatgaatgcattgttctcgaacagcccaagaataaatgtgaagtaataaacctggatgatgatgaggaacagagtgtttctaatcgagaacatcataacatgcaacttgtcctagaactggaagagtttgtccgctctggtcttctctcgcaatgggaggaaagctcagatgaagatgatgtaagtggaagcaagcaagaaacccagaagaaaagcaacaatgacccctatgctgaagcagccatgagggagtaccctctgttctttgagttcattcctcagaaaccacattacagaggcttcgtgaactatgatgaaactttaggagatctaccttacagtggattatggtttttgctaattggcttggctaaggaggtgctcaagacgtcatgtgacacagatgcttctgaaattgcatatctgatgaaaaaagcccagcatttagagcaactgggtttcaacgtgacacatctcattgcccgcttaaaggagccacaaattaggcttaagaagcttcaagattctagagcaaggcttgatcatgcccgtgagaaagaggagggcaacgtagtcgagtctctttcaagccatctgaataaactgaagggcaacataaggatgatggatagtcatctggatggaacgaagcaagcttttatttcaaatatacaagataaattgaatgaaggaattaatcttgccagtttggaaaaggaagtagaaactgctgaaaaatgttgtcaggcaatgaaggatgaagtagctgcaatgagaatgaggtactcggaccgtggaatttagattgttccagtgtccgctatcttcatttaagaagttactttcttcctgacatagagcttgcttgatatctgtctgtatcatcaagagtctgatcaatagaatataaccatcttactttc

SEQ ID NO: 86391 - DNA, 1751 bp, Zea Mays
gtcatcatcaccctcgcaccccgaaacgccccactaaaaccccacttacgcgcgcaaacaaagcctaagcacacacacacacacacaccaggagccgcgcacctcacggcacactatctcgtgccgtcgtgggagtggtgtggtcgtgtggctaaacctgttcgcggcgcgccacttgccgtgcgacacggctgcgcagcgatgtggcagacgcgcagcttgctactactcatcgttgcggtggtcgtcgccgccgccctccccgactgggcggtggccgcggcggcggggcggtgcacgacgtccacgccagtcaagacgtacgacaagtgcatcgcgctgccgacgcagggcgccacgctggcgtggacctacgacgcgcggaacgcgacgctggacgcggcgttcacgggctccttcatctcgccgtcgggctgggtggcctggggcgtgaacgcggacgcgccggcgatgacgggggcgcgcgtgctcgccgccttcgccgacccgtccacgggcgcgctcctggcgctgccgttcctcctctcccccgacgtgaagctgcaggcgtcgccgctcgtgtcccggccgctggacatcccgctgctggcgtcctccgcgtcgctcgcctcccccgcgcgcaccgtccgcgacggcgccagggtgacggtcgcggccaccatccggctgtccccgaaccgcaccagggtgcacttcgtgtggaaccgggggctgtacgtgcagggctactccccgaccatccaccccacggacgcctccgacctggcgtcgcacgccaccgtcgacatcctcaccaccgccaccgaggcgtcgcccatcgcctccgccgcgctgcagtggctgcacggctccctgaacgcgctctcgtgggggctcctcctcccggtcggcgcggcggtggcgcggtacctgcggccgtgcgcgtccacggggcccgcctggttctacgcgcacgcggcaatgcaggcgaccgggtacaccctgggcgccgccggcttcgcgctggggctggtgatgggctccgcgtcgcccggcgtcacgtacaagctgcaccgcgggctgggcatcgcggcggccacggcggggagcctgcagacgctggccatgttcttccggcccaagaccaccaaccgctaccgcaagtactggaagtcgtaccaccacctggtcgggtacggctgcgtcgtggtcggggtcgtcaacgtgttccagggcttcgaggtcatggggctcggcgcctcctactggaagctcggctactgcctggcgctcgccacgctgatgggcgcctgcgtggcgctggaggtgaacgcgtgggtggtcttctgccggaggcagcaggaggagaagcttatgaggagggaggtggaggacgtcgtcgtcaaggatagggcagccgccttctagttctagtgcttgtcttgctaccctccggcctccgctccgctgccaggacatgctggaggtttcggccgacgggggacccaggggctggtgagagcgacgtctcgaggatgcgggcacgctcacagtcacaggctcacagctactgggtggggagtggggacaaagtgccacggcgtgctctattttgtcgcatgataagagtgtggttttttcagatccttctcaatcaatatatacagtagaaattcttgtacaattaacaccattggcttccaccagtttactcaacgaaatatatatatgtgaatgttgtatgttggatt

SEQ ID NO: 86392 - DNA, 1873 bp, Zea Mays
cctcccgttctcccgtctcgcactctcgctctcgcatcaccaacaacttgcccgcaaattccttccacagcgggtcacctcgcttcaccccgttaatctccccggcgaagaagtacttggcacaccagcaatggcggctacttaccaaattggccttgtggctgagccgcagttgctgaacaccgaaattatcactcagagggccaccagctttgttgctgacgctaacaaaaaaggcaaatgcattggctacttggatgtgtttgtacaccaggcacgcgacatccacaatgtttgtatctatcacaagcaggacgtgtatgcgaagctgtgcctcacgagcagccctgatgtttcatgctcaaccaaggtgatcaacagtgctgggcgcaacccggtattcgaggaaagcctacggcttgatgttcaaactgcggatgcttcgctcaagtgcgaaatatggatgttgagcagagtgaggaactacctggaggatcagcttcttggctttgcccttgttcctctggcagacattgtaatgggcgacggaaagctggtccaggagttctccttgacatccactgacctgttccacacaccagctggatttgtgaagatgtccttgtcatatgctggttgttccccagatgttatcctcgtcccatcacccaataagtccctgtcagaagtggacggttctggaaatgatcatgtggttcattctcagcttgaaaagattgtgttcccagacctaaatgtggagaaggaagacgagattatggtgtcaaagtatctcgagatggagtctttggactctgaaaaccctatagaagttgagaacggcatgttgctgcattctggaaataatgacgatgttccttctacactgggaaaggtcgagtccacagattctgaaaaccctgcaaaggctgcaaatggcaagttgacgcgatttggtgtagctgtgcctgatactgcaggtaaggctgagggacaccacaatgaaagccctctaagttgtgtctcaaccacagtctccttcactaccctttacgcaacaacacaatcattttctgagccaaattctgagccttcggagaccaacgttgaggcatccccaagacaatgtcatagggagaaaagccaagatgttacagatggtgaggccgattcttctgaaacaccacccaaggatgaagttatcaagcctgtgatcagcgttaaccttcagccggagcagtcagttgtcgaacaggacatagttgacatgtacatgaagagcatgcagcagttcacggaatctctcgcaaaaatgaaacttccactggacgttgagaaccgttgtccctcaaacgaaggttcctactccagcacaattgagaaggcatccccatccccgccttcctccgcatcgaagggttctagggtcttttacggaagcagggccttcttctaagtttctgatgcaaagtagtgcactagctcgtaatcccctatatatacatatacatggtccaggtctgtcagatgtcggctggcacgtaatcacatactttctgtctccgtagtatgcttctaggactcactcttggtactgctattattagtattatgctttgttagaagataataatttcatcccatagtcatagattaatcccgtgtactaatacataccaatgaatataatgttacgaaatcagttctgactcaggtactgtgtctatctgaaaatctgcgcgagtattcgtttggaaaggttctacggattgtctgtttatatccaaatctcttctagctaactaattgaggtctcattctggtgttgccatttttatcttcacatggactattattagatgaaggcgatctc

SEQ ID NO: 86393 - DNA, 265 bp, Zea Mays
aacgatcgggtacttggggaatatgtagaatggaatttatttactgttggtttacctagtacttgcctaccagccaggcgccccagggaacgacggcactgatacagtctcgggtattaggatggcaaaggcagcgatagataaattctactccaagtatatgttgggatcacgtaagctggtgcttgacccacattcaacgatctttggcaaaaggatgcttgtcaaaagtgcgatcatgttcaattacaagaacaaaagatag

SEQ ID NO: 86394 - DNA, 1703 bp, Zea Mays
ccgtctcactctcccatcagccaacaacttgctcgcaaattccttccacagcgggtcacctcgcttcacccccttcaccccgttaattcccccggcgaagaagtacttggcacaccagcaatggcggctacttaccaaattggccttgtggctgagccgcagttgctgaacaccgaaattatcactcagagggccaccagctttgttgctgacgctaacaaaaaagacaaatgcattggctacttggatgtgtttgtacaccaggcacgcgacatccacaatgtttgtatctatcacaagcaggacgtgtatgcgaagctgtgcctcacgagcagccctgatgtttcatgctcaaccaaggtgatcaacagtgctgggcgcaacccggtattcgaggaaagcctacggcttgatgtccagactgcggatgcttcgctcaagtgcgagatatggatgttaagcagagtgaggaactatctggaggatcagcttcttggctttgcccttgttcctctggcagacattgtaatgggcgatggaaagctggtccaggagttctccttgacatccactgacctgttccacacaccagctggatttgtgaagctgtccttgtcatatgctggttgttccccagatgttatcctcgtcccatcacccaataagtccctgtcagaagtggacggttctggaaatgatcatgtggttcattctcagcttgaaaagattgtgttcccagacctaaatgtggagaaggaagacgagattatggtgtcaaagtatctcgagatggagtctttggactctgaaaaccctatagaagttgagaacggtatgttgctgcattctggaaataatgatgatgttccttctagactgggaaaggtcgagttcacagattctgaaaaccctgcaaaggatgaaaatggcaagttgacgcgatttggtgtagctgtgcctgataccgcaggtaaggctgagggacaccacaatgaaagccctctaagttgtgtctcaaccacaggctccttcactaccctttatgcaacaacacaatcattttctgagccaaattctgagccttcggagaccaacgttgaggcatccccaagacaatgtcatagggagaaaagccaagatgttacagatggtgaggccgattcttctgaaacaccacccaaggatgaagttatcaagcctgtgatcagcgttaaccttcagccggagcagtcagttgtcgaacaggacatagttgacatgtacatgaagagcatgcagcagttcacggaatctctcgcaaaaatgaaacttccactggacgttgagaaccgttgtccctcagacgaaggttcctactccagcacaattgagaaggcatccccatccccgccttcctccgcatcgaagggttctagggtcttttacggaagcagggccttcttctaagtttctgatgcaaagtagtgcactagctcgtaatcccctatatatacatatacatggtccaggtctgtcagatgtcggctggcacgtaatcacatactttctgtctccgtagtatgcttctaggactcactcttggtactgctattattagtattatgctttgttagaagataataatttcatcccatagtcatagattaatcccgtgtactaatacataccaatgaatataatgttacgaaatcagttctgactca

SEQ ID NO: 86395 - DNA, 136 bp, Zea Mays
acaaaaaacgcatatacatatatacaatttatattcaatattaaaaacatctgagcatgatgttttactggttagacagcttcactcagtgtttcccgcccttcttccatcagggcatgcgttcgaaccccacctg

SEQ ID NO: 86396 - DNA, 1015 bp, Zea Mays
cagaccacgcaccagggacctcaccgagcacaggtagggtttcggccaccagccatggccgactccgcgccgtccatcccgggcgtcatcgcctccctccaggcctactccacggccctctccgcctttaccgccgcatggcgtgccgtcgagacccacgcctccaccctcgactccgccctcgccgcccgcctagccggcttctcggagctcgagctgatctgctcggcgatggacggagccggcctccgcgcgtacctcaccgagcacagggacgagctcaaggatcccacgcgcgccctcgacgcagccctccaagttgcgcccgacccggggcttctggtcctctccgcggcagcgagtttctgccgcacgctgccggaggtggccaagagcgacggtagcgtcaaggcgtcctgccgcctgctcatcgccttgctcgaccggctgcgcgcgattggtgtcaagccgtcgcctgaggcgcgcgaggaggccagagctgttgcgacggactggaagcgaggcaagcggatcgggacggagacgatgtttaagcaggagacgttcgccttcttgcatctcgtgggagtgtttgggctcgtggaggatgtgggcggtaccagcgaggtgcttgatcttgtcgtgtcgatctcaggtcgtgagcgcgccgttgatgcgttcgtcgtcctgggcctggacctcgaccagcatatgccaagtaagtcacatttctctctttcttggacaaggaggagggcggtaaaatgtcttgtttaaccagaggagtgtttctcaggatgcgtatgagtgataggttaaggggtgaattctgtgtcttggtcttgtgagtaagctattgcttaaaaatgatcaactcaatatcaggatagttagtgacctttagttcaattgaataattctgtataattcctaagttagcactcgttcatgcttcaatcaattcaatatcaaacttcatgtcactttcttattattctgagttgttattcctatt

SEQ ID NO: 86397 - DNA, 1806 bp, Zea Mays
cagaccacgcaccagggacctcaccgagcacaggtagggtttcggccaccagccatggccgactccgcgccgtccatcccgggcgtcatcgcctccctccaggcctactccacggccctctccgcctttaccgccgcatggcgtgccgtcgagacccacgcctccaccctcgactccgccctcgccgcccgcctagccggcttctcggagctcgagctgatctgctcggcgatggacggagccggcctccgcgcgtacctcaccgagcacagggacgagctcaaggatcccacgcgcgccctcgacgcagccctccaagttgcgcccgacccggggcttctggtcctctccgcggcagcgagtttctgccgcacgctgccggaggtggccaagagcgacggtagcgtcaaggcgtcctgccgcctgctcatcgccttgctcgaccggctgcgcgcgattggtgtcaagccgtcgcctgaggcgcgcgaggaggccagagctgttgcgacggactggaagcgaggcaagcggatcgggacggagacgatgtttaagcaggagacgttcgccttcttgcatctcgtgggagtgtttgggctcgtggaggatgtgggcggtaccagcgaggtgcttgatcttgtcgtgtcgatctcaggtcgtgagcgcgccgttgatgcgttcgtcgtcctgggcctggacctcgaccagcatatgccaattgctggtaagatgatccgcatcaggggagatgatcttgctactcagaatgcagctgatgcaaaagagcgcacacttattggaacattgcagaagttcattaaggaacagaagctagaagaactgcccatttttgaagaagctaacaagcgaatggcacatttggatcagcaaagtgctgagagaaaaagaactgctgctgcagcggctgcggctgctcgaaaggttagtaagaacattgaggagcagcagaaaaggatacaggagctgatgcagcctgctaagagaccaaggtctgagaatgtggtgaaaggatcttcgggccagaacgtgaactttgctggaacctctactcaacagtttaagccacaacagagcattcataaagctggagtgtcaaatcagtatcaagctgctttaacccagaatgtactgccagcaatcgctcagatttcacagctagttgctgggagccatcgtccagttggcatcccaaatcaggcccttgctgttccgcctcaatatggtagtggtagtgcaaattattatggagtgacgtccaccaggccatacaggcccatcactctacctcctggacctggtgctttgaatggtccaagtgcgcaggcatcttcaagatcaaggctctattctggagatccccttgcggctgtctcccgatcatcagataagaagggatcgtcttacaagtattctttgtccagtatgtcaacttatgatcgtaaatgaggatttgttttatctgccagtggacgaacctagtgaaccttgaaagtttgggtttcagaccagagatttggtccctccgtagatgttaagtcattgtagctaacaatgggccttttttacagtaaaggatgtgggtttgtatctagaagagattctcctacagagtctaataaatattgtaggaattctaacttataaggacaagttaggtgtaatggtgagagttatcttaccgagccaccagatcctaggtttgaagtagcctcttcctattttcattgggtcatgaatttgtagtatctgtatttgcagcggaaagcttaccttgttttatgcctt

SEQ ID NO: 86398 - DNA, 1932 bp, Zea Mays
cagaccacgcaccagggacctcaccgagcacaggtagggtttcggccaccagccatggccgactccgcgccgtccatcccgggcgtcatcgcctccctccaggcctactccacggccctctccgcctttaccgccgcatggcgtgccgtcgagacccacgcctccaccctcgactccgccctcgccgcccgcctagccggcttctcggagctcgagctgatctgctcggcgatggacggagccggcctccgcgcgtacctcaccgagcacagggacgagctcaaggatcccacgcgcgccctcgacgcagccctccaagttgcgcccgacccggggcttctggtcctctccgcggcagcgagtttctgccgcacgctgccggaggtggccaagagcgacggtagcgtcaaggcgtcctgccgcctgctcatcgccttgctcgaccggctgcgcgcgattggtgtcaagccgtcgcctgaggcgcgcgaggaggccagagctgttgcgacggactggaagcgaggcaagcggatcgggacggagacgatgtttaagcaggagacgttcgccttcttgcatctcgtgggagtgtttgggctcgtggaggatgtgggcggtaccagcgaggtgcttgatcttgtcgtgtcgatctcaggtcgtgagcgcgccgttgatgcgttcgtcgtcctgggcctggacctcgaccagcatatgccaatcctcattcagaaaatggtaaacaaaaacaaacagctagaggcagtcaaattcattcaagctcttaatatagcgcacaaatacgctttgttgcctattatgagatcgtacattgatcatgccgcagttgctggtaagatgatccgcatcaggggagatgatcttgctactcagaatgcagctgatgcaaaagagcgcacacttattggaacattgcagaagttcattaaggaacagaagctagaagaactgcccatttttgaagaagctaacaagcgaatggcacatttggatcagcaaagtgctgagagaaaaagaactgctgctgcagcggctgcggctgctcgaaaggttagtaagaacattgaggagcagcagaaaaggatacaggagctgatgcagcctgctaagagaccaaggtctgagaatgtggtgaaaggatcttcgggccagaacgtgaactttgctggaacctctactcaacagtttaagccacaacagagcattcataaagctggagtgtcaaatcagtatcaagctgctttaacccagaatgtactgccagcaatcgctcagatttcacagctagttgctgggagccatcgtccagttggcatcccaaatcaggcccttgctgttccgcctcaatatggtagtggtagtgcaaattattatggagtgacgtccaccaggccatacaggcccatcactctacctcctggacctggtgctttgaatggtccaagtgcgcaggcatcttcaagatcaaggctctattctggagatccccttgcggctgtctcccgatcatcagataagaagggatcgtcttacaagtattctttgtccagtatgtcaacttatgatcgtaaatgaggatttgttttatctgccagtggacgaacctagtgaaccttgaaagtttgggtttcagaccagagatttggtccctccgtagatgttaagtcattgtagctaacaatgggccttttttacagtaaaggatgtgggtttgtatctagaagagattctcctacagagtctaataaatattgtaggaattctaacttataaggacaagttaggtgtaatggtgagagttatcttaccgagccaccagatcctaggtttgaagtagcctcttcctattttcattgggtcatgaatttgtagtatctgtatttgcagcggaaagcttaccttgttttatgcctt

SEQ ID NO: 86399 - DNA, 2111 bp, Zea Mays
cagaccacgcaccagggacctcaccgagcacaggtagggtttcggccaccagccatggccgactccgcgccgtccatcccgggcgtcatcgcctccctccaggcctactccacggccctctccgcctttaccgccgcatggcgtgccgtcgagacccacgcctccaccctcgactccgccctcgccgcccgcctagccggcttctcggagctcgagctgatctgctcggcgatggacggagccggcctccgcgcgtacctcaccgagcacagggacgagctcaaggatcccacgcgcgccctcgacgcagccctccaagttgcgcccgacccggggcttctggtcctctccgcggcagcgagtttctgccgcacgctgccggaggtggccaagagcgacggtagcgtcaaggcgtcctgccgcctgctcatcgccttgctcgaccggctgcgcgcgattggtgtcaagccgtcgcctgaggcgcgcgaggaggccagagctgttgcgacggactggaagcgaggcaagcggatcgggacggagacgatgtttaagcaggagacgttcgccttcttgcatctcgtgggagtgtttgggctcgtggaggatgtgggcggtaccagcgaggtgcttgatcttgtcgtgtcgatctcaggtcgtgagcgcgccgttgatgcgttcgtcgtcctgggcctggacctcgaccagcatatgccaatcctcattcagaaaatggtaaacaaaaacaaacagctagaggcagtcaaattcattcaagctcttaatatagcgcacaaatacgctttgttgcctattatgagatcgtacattgatcatgccgcagttgctggtaagatgatccgcatcaggggagatgatcttgctactcaggtgcatgtctgctgcattgtttattgtaaacagtatacgttcaaggttgtaggcagttcttgatttctaaattatcttaacactttggcagaatgcagctgatgcaaaagagcgcacacttattggaacattgcagaagttcattaaggaacagaagctagaagaactgcccatttttgaagaagctaacaagcgaatggcacatttggatcagcaaagtgctgagagaaaaagaactgctgctgcagcggctgcggctgctcgaaaggttagtaagaacattgaggagcagcagaaaaggatacaggagctgatgcagcctgctaagagaccaaggtctgagaatgtggtgaaaggatcttcgggccagaacgtgaactttgctggaacctctactcaacagtttaagccacaacagagcattcataaagctggagtgtcaaatcagtatcaagctgctttaacccagaatgtactgccagcaatcgctcagatttcacagctagttgctgggagccatcgtccagttggcatcccaaatcaggcccttgctgttccgcctcaatatggtagtggtagtgcaaattattatggagtgacgtccaccaggccatacaggcccatcactctacctcctggacctggtgctttgaatggtccaagtgcgcaggcatcttcaagatcaaggctctattctggagatccccttgcggctgtctcccgatcatcagataagaagggatcgtcttacaagtattctttgtccagtatgtcaacttatgatcgtaaatgaggatttgttttatctgccagtggacgaacctagtgaaccttgaaagtttgggtttcagaccagagatttggtccctccgtagatgttaagtcattgtagctaacaatgggccttttttacagtaaaggatgtgggtttgtatctagaagagattctcctacagagtctaataaatattgtaggaattctaacttataaggacaagttaggtgtaatggtgagagttatcttaccgagccaccagatcctaggtttgaagtagcctcttcctattttcattgggtcatgaatttgtagtatctgtatttgcagcggaaagcttaccttgttttatgcctttgtcgtgtgagtcttcggtagtgagtctaccctttagggtttgttcgattatttccattccatatggattggaggggattgatatgga

SEQ ID NO: 86400 - DNA, 229 bp, Zea Mays
gatccgaagtcgcctcctcgtccttccttcgctagatgttctccttcgccggcggtcttgttgctagaggcgcccccgacctgtgcatccgtttcaacgccaactcctccaccagtcagttcaatttctacagcctatggctaactcattcggagtaggtttagaaattgattgggattcaattcagctagaccctagatgggaggaggaagactacaagaagttgtta

SEQ ID NO: 86401 - DNA, 863 bp, Zea Mays
atacatccaaccaaacacaccctaaatgtttatattgtggggagctaggccacaagaagaacagccctaaatgtcctttaaatggcacgaagaagaggcgtgtgttttatgtgttgatctttgttcctgtttcctgttctgttttttttttcaaaaacttacagctggtgtgtattcttataggccaaggaagcagcgacataactctactcaaaaatggttttatgtgttgatctttgttcctgtttcctgttctgtttttttcaaaaacttacagctggtctgtattcttataggccaaggaagcagcgacattactcaaaaatggtttcctcgcgacgacagatttacacaagaacctagaacaccgcatttcgacaaagttatacaagaccctggtacaccacatgaacagccatcgtcttcgcagccacttccaagggtattgataaaaaaaatcactccaagaaagaggaagtcggttccactaagcatggacgagatgtagtatctgttagttgtatcatccatgtgttgtcagcatgtgactgcagacatgtgccatgtatcagacttattgtatcagactacgttcagcctacttgttagtagctgagttattgtgtttcctactacgttcagactacatctatcagacttattacatctcgttcagacttatgtgtttcctgtttgtgccatgtatcagtggaagtctcaatgccctgggaaaagaagaagagagccacgagaaaggaaggggcaaaactggaagtctcaatgtcgctccctggttaacgcccagcgttctcagttccaaatgtgaaagaacatcagctttcaaccattgatagtcatggatc

SEQ ID NO: 86402 - DNA, 303 bp, Zea Mays
ctcttgctgcgcaggtctgggttgcctaatctttcaccagataatgctctttgcagccttgatgactgatggagcagggcggtggagaagattccccgagatctccaatcaggcttcaattctctagttattcttggcgcttggagcctttggcgtcatcgcaacgactgtgtgttcaatgggaggtcgccgagcctagcgagtgctctcaccctcgctggtgatgagcttaggatgtggtgtcgtgtcggggctaaagggttgaacttgctttcaactcttgtgtttatgcttgacacaggg

SEQ ID NO: 86403 - DNA, 540 bp, Zea Mays
ttatgtccatgaaactggccaccgtgaatccaggtggacttaaatagcctgcctaacatcctccctaaagatgtacatcagtcttgtggtccgccacatttctcgctggagacctcaggcgctccgttgtcgtacctcagccagcctcaccatggaagccctcttggctgcatggacaaccagagttgtatgcacccacttgacacggcgttttgcctggcgataaatccgcagtatcatttcctcaacggtgttagcgatgcatcgtctcagttgtagctaatttgatgcttgtgtttgtggaaaccaagaggtggcgctgattcattggaaacctggtcgtgtatgaatgggtttccagctacttctattcttggagatagaaaccaacatgtttggtttttgtttttattcgttttagaacaactcatttttgtacggaaagaggcatttagctataattgtttgttgtagtatgtttatcacaggatagccgattccatgaaatacataaaaacctgatattgttgctatatttgg

SEQ ID NO: 86404 - DNA, 2268 bp, Zea Mays
ctgtcttctttctatcgctcacaaccaacaaccatagcccacaggccgccggcggccgccagccgacgtcctcccatttcgctccccctcctccgctgcggtcgagcaaaagttccggccatccggcaatcccccggcacccggcggttcaaatcgtatctttctgacctgacgcggctacgacgtcgctcctccggtcccttcgatccggtggggtccgtttctttcaagcgcggcctcgctggccgcctcgtggcagtgaccgtcgaaccctctataaatcccgtgccccgagcacccttcctcgatcacacaacccaaagcagccacagcagcctccttcctcctctcactctcgctcgtgctgcgctcgctacctcgcttcgcattccattcgaggagagcggtgagaggggaggaaaggcaagatgttcatcgagagcttccgcgtcgagagcccccacgtgcggtacggcccgacggagatcgagtcggagtaccggtacgacacgacggagctggtacacgagggcaaggacggcgcctcacgctgggtcgtccgccccaagtccgtcaagtacaacttccggaccagaaccgccgtccccaagctcggggtgatgcttgtggggtggggaggcaacaacgggtccacgctgacggctggggtcattgccaacagggaggggatctcatgggcgaccaaggacaaggtgcagcaagccaactactacggctccctcacccaggcctccaccatcagagtcggcagctacaacggggaggagatctatgcgccgttcaagagcctccttcccatggtgaacccagacgacattgtgttcggaggctgggacattagcaacatgaacctggccgactccatgaccagggccaaggtgctggatattgacctgcagaagcagctcaggccctacatggagtccatggtgccacttcccggtatctatgatccggacttcatcgcggctaaccagggctctcgcgccaacagtgtcatcaagggcaccaagaaagaacaggtggagcagatcatcaaggatatcagggagtttaaggagaagaacaaagtggacaagatagttgtgttgtggactgcaaacactgaaaggtatagcaatgtgtgcgctggtctcaacgacacgatggagaatctactggcatctgtggacaagaacgaggcggaggtatcaccatcaacactatatgccattgcctgtgtcatggagggggtgccgttcatcaatgggagcccccagaacacctttgtgcctgggctgattgatcttgctataaaaaacaactgcttgattggtggtgacgacttcaagagtggacagaccaagatgaaatctgtcttggtcgatttccttgttggtgctggaataaagcccacctcaatcgtgagctacaaccacttgggaaacaacgatggcatgaacctgtctgcccctcaaacattcaggtccaaggagatctccaagagcaacgtggtggatgacatggtctcgagcaatgccatcctctatgagcccggcgagcatcccgatcatgtcgttgtcatcaagtatgtgccgtacgtgggagacagcaagagggctatggacgagtacacctcagagatcttcatgggcggcaagaacaccatcgtgctgcacaacacctgtgaggactcgctcctcgccgcacctatcatccttgatctggtgctcttggctgagctcagcaccaggatccagctgaaagctgagggagaggacaaattccactccttccacccggtggccaccatcctgagctacctcaccaaggcacccctggttccccctggcacaccggtggtgaacgctctggccaagcagagggcgatgctggagaacatcatgagggcctgcgttgggctggccccagagaacaacatgatcctggagtacaagtgagccaagtggcgtgccctgcagcgcgaggttagctgctggaagggaactagaaaggcgagattagctgtgggattgtgttgggcttgtcgtgttttcttttgcgttctttcctagtcattgctgttgcgcttttgtatttgtcggacccgtaactaccagggctctgctattagcggcacggagcctgtaattgtattgtatgataatgtgatcgagggtgctacttcccctcggcattcctagtgttggttaaaagtcgttcgacagcaacttatcgacccaccactgacttcaccctatccgccgg

SEQ ID NO: 86405 - DNA, 1237 bp, Zea Mays
ttaacgtggttgaagaaatatggttcactagtataagtaatccattacagaagctatggcttatgtagctaatgaaacagggagtttaaggagaagaacaaagtggacaagatagttgtgttgtggactgcaaacactgaaaggtatagcaatgtgtgcgctggtctcaacgacacgatggagaatctactggcatctgtggacaagaacgaggcggaggtatcaccatcaacactatatgccattgcctgtgtcatggagggggtgccgttcatcaatgggagcccccagaacacctttgtgcctgggctgattgatcttgctataaaaaacaactgcttgattggtggtgacgacttcaagagtggacagaccaagatgaaatctgtcttggtcgatttccttgttggtgctggaataaagcccacctcaatcgtgagctacaaccacttgggaaacaacgatggcatgaacctgtctgcccctcaaacattcaggtccaaggagatctccaagagcaacgtggtggatgacatggtctcgagcaatgccatcctctatgagcccggcgagcatcccgatcatgtcgttgtcatcaagtatgtgccgtacgtgggagacagcaagagggctatggacgagtacacctcagagatcttcatgggcggcaagaacaccatcgtgctgcacaacacctgtgaggactcgctcctcgccgcacctatcatccttgatctggtgctcttggctgagctcagcaccaggatccagctgaaagctgagggagaggacaaattccactccttccacccggtggccaccatcctgagctacctcaccaaggcacccctggttccccctggcacaccggtggtgaacgctctggccaagcagagggcgatgctggagaacatcatgagggcctgcgttgggctggccccagagaacaacatgatcctggagtacaagtgagccaagtggcgtgccctgcagcgcgaggttagctgctggaagggaactagaaaggcgagattagctgtgggattgtgttgggcttgtcgtgttttcttttgcgttctttcctagtcattgctgttgcgcttttgtatttgtcggacccgtaactaccagggctctgctattagcggcacggagcctgtaattgtattgtatgataatgtgatcgagggtgctacttcccctcggcattcctagtgttggttaaaagtcgttcgac

SEQ ID NO: 86406 - DNA, 865 bp, Zea Mays
tattgtacatattatgttggagacagtctatcgccccccaattcgcaacacaatcgtcctccgccaccctccattaaccctagcggcagcagcgctcgtttgatccccgcggcggtccggcgtccgggtaggggagcgaggatgacggagtccctggtgcggaacaagccggggatggccagcatcaaggagatgccggtgctgcaggacgggccgccgccgggcggtttcgcgcccgtgcgctacgcgcgccggattcccacctcgggccccagcgccactgccatcttcctcacggccttcggcgccttcgcgtatggcatgtaccaggtcggtcaggggaacaaggtgcgccggtaagtgcgcgctcagccagctcattcagttgcccgcctattacgctgcgcatctcattttttggcagaggcagcttgctttaaattggtttatgttatagtatgactcgtacgcagatgcacgtatcatgttctgatcaacgtttcctaatcacggaatacaaactactgatagcttcctaatttcaaaggaaccagatccttgtaatttaactgtctgtctggtagacaagagacgggtaatctcagtccaattaatgtttgttcttatggatactatggtgtctgaaaaatgtggtttagtgaacaatacatcgttttaatgttacaatgcagcttattggttaggaatatggattgtaattatgccgcaatgcatttctatttgaagaggggagagatactgggctgagccaatgaaccaatggcatttcggatcactttagctaagacaagaaaaaaacactgatatgagcagagggacttatgaattatgataactccgtttg

SEQ ID NO: 86407 - DNA, 832 bp, Zea Mays
tattgtacatattatgttggagacagtctatcgccccccaattcgcaacacaatcgtcctccgccaccctccattaaccctagcggcagcagcgctcgtttgatccccgcggcggtccggcgtccgggtaggggagcgaggatgacggagtccctggtgcggaacaagccggggatggccagcatcaaggagatgccggtgctgcaggacgggccgccgccgggcggtttcgcgcccgtgcgctacgcgcgccggattcccacctcgggccccagcgccactgccatcttcctcacggccttcggcgccttcgcgtatggcatgtaccaggtcggtcaggggaacaaggtgcgccgggcactcaaagaagagaaaattgctgctcgtagtgctatactaccgatgctccaagctgaagaggatgaaagatttgtcaaagagtggaagaagtatcttgaggaggaggcgaggattatgaaagatgttccagggtggaaggttggcgagagtgtgtacaattccgggaaatggatgcccccggccaccggtgagctccgccctgaggtgtggtaagggcctgttgtaggcattgagaatgcaatcatgtcatgagggcatgaataaggctatcagacatgggcatccttctttgttcactaaggatcagctgttcaaatacctgtatctattttactcttatgaaatctggctggttaataatatgaagccgacgctttgcctcatctatgctcgtgcattgatgtaacgtgtccttgtttgatattaagaaactactatggaatataagaaagaaaacagcctgcttcttgca

SEQ ID NO: 86408 - DNA, 844 bp, Zea Mays
tattgtacatattatgttggagacagtctatcgccccccaattcgcaacacaatcgtcctccgccaccctccattaaccctagcggcagcagcgctcgtttgatccccgcggcggtccggcgtccgggtaggggagcgaggatgacggagtccctggtgcggaacaagccggggatggccagcatcaaggagatgccggtgctgcaggacgggccgccgccgggcggtttcgcgcccgtgcgctacgcgcgccggattcccacctcgggccccagcgccactgccatcttcctcacggccttcggcgccttcgcgtatggcatgtaccaggtcggtcaggggaacaagggcactcaaagaagagaaaattgctgctcgtagtgctatactaccgatgctccaagctgaagaggatgaaagatttgtcaaagagtggaagaagtatcttgaggaggaggcgaggattatgaaagatgttccagggtggaaggttggcgagagtgtgtacaattccgggaaatggatgcccccggccaccggtgagctccgccctgaggtgtggtaagggcctgttgtaggcattgagaatgcaatcatgtcatgagggcatgaataaggctatcagacatgggcatccttctttgttcactaaggatcagctgttcaaatacctgtatctattttactcttatgaaatctggctggttaataatatgaagccgacgctttgcctcatctatgctcgtgcattgatgtaacgtgtccttgtttgatattaagaaactactatggaatataagaaagaaaacagcctgcttcttgcatctccgtggcgtattttgtg

SEQ ID NO: 86409 - DNA, 861 bp, Zea Mays
tgttgcagtgtttattagtacttgtgtgattttccatctattacgtctaattgtgctgctatccaagtttctcctgaaatgctcatctccttgtcatgccttattgcttttgcagtgtttgttagtacttatgtgattttccatctgttgcgtctaattgtgctgctatccaagtttctcctgaaatgctcctccttgtcatgccttattgctttgcagtgtttattagtacttgtgtggtttccatctgttacgtgtttgtgttttagtatcaccagccttaagtgctaatgattacccattagtttatatgatttccatgccggtgctgtatatacttttatctcttcggtcttagcttcatgggtgtgaaattacgtttgcagggcactcaaagaagagaaaattgctgctcgtagtgctatactaccgatgctccaagctgaagaggatgaaagatttgtcaaagagtggaagaagtatcttgaggaggaggcgaggattatgaaagatgttccagggtggaaggttggcgagagtgtgtacaattccgggaaatggatgcccccggccaccggtgagctccgccctgaggtgtggtaagggcctgttgtaggcattgagaatgcaatcatgtcatgagggcatgaataaggctatcagacatgggcatccttctttgttcactaaggatcagctgttcaaatacctgtatctattttactcttatgaaatctggctggttaataatatgaagccgacgctttgcctcatctatgctcgtgcattgatgtaacgtgtccttgtttgatattaagaaactactatggaatataagaaagaaaacagcctgcttcttgc

SEQ ID NO: 86410 - DNA, 785 bp, Zea Mays
actactctactcggctgacgactgacgttccattcccgctccattcgtcgtcgcccttcgctccccctcctcccgaaatcccagagcggcctccttcgcaggcccgtacagcctgcgggggggccggtagagtagcctccaaggtcgccgactcgtcgtagttcctgctgtttcgtgcgtgacaccggagcgagccggaggggggaggaggaggcatggaggcgggagggaggaggctggcggcgggcagggtggaggcgagccccgagcgcggcaggccggcggcgtacgcgtcggcggggaggccggcgccggcgaggcccatgcggagggtgcagatcatctactacctctgccgcaacgggcagctggagcacccgcacttcatggagctcgcgcagcacccgcaccagccccttcgcctcaaagatgtcatggacaggctgacgctgctgaggggcaagggcatgccggctctcttctcgtggtcctgcaagaggaactacaagaacgggtacgtgtggaacgacctgtcggagaacgacgtgatctacccgtcggacggcgtggagtacgtgctcaagggctccgagatcttccctggctgctcttcttccggtacgcatctcattcctcgtctcttttgcgtccatctcgttcgagttctatctaccatggtttccttccttctcaccggcgtcagccgggctgctgctgtgctgagattagtaaaagcgagcgcagcctttttggtctgcttcacacggttgcattgcagcgtagcg

SEQ ID NO: 86411 - DNA, 1736 bp, Zea Mays
actactctactcggctgacgactgacgttccattcccgctccattcgtcgtcgcccttcgctccccctcctcccgaaatcccagagcggcctccttcgcaggcccgtacagcctgcgggggggccggtagagtagcctccaaggtcgccgactcgtcgtagttcctgctgtttcgtgcgtgacaccggagcgagccggaggggggaggaggaggcatggaggcgggagggaggaggctggcggcgggcagggtggaggcgagccccgagcgcggcaggccggcggcgtacgcgtcggcggggaggccggcgccggcgaggcccatgcggagggtgcagatcatctactacctctgccgcaacgggcagctggagcacccgcacttcatggagctcgcgcagcacccgcaccagccccttcgcctcaaagatgtcatggacaggctgacgctgctgaggggcaagggcatgccggctctcttctcgtggtcctgcaagaggaactacaagaacgggtacgtgtggaacgacctgtcggagaacgacgtgatctacccgtcggacggcgtggagtacgtgctcaagggctccgagatcttccctggctgctcttcttccgatcggttccagcacctacgcgtgaccgaccggtcgccgacgaagccgccgctggcgctccctcacatgagccacaacaagcagtaccccgtggacggctacggagactacgacgccgtggaggaccgggacgacgacgagctgggccactcgtaccaccaccgccggacggcgtcggggcggcccgagaaggccgccgccgccgccgtctcggcgcgcgcggccaccaaccgggcccgccccgtggagctccccgtcgaggagacctcgccgccgtcctccacgtcctcggacaagcccccgccgccagcggcgctgctgatgcagcagcagcagcagccggggaggagggccacgtcggaagtgcctgagccgagccgtcccgggtccatgctgctgcagctcatcgcgtgtgggtcgacgacggcgccgtccgcggcaggcggcggcggcggcccggggaagtgccgcgccgagccgaggcggagctgcggcctcgtgagccggctctcggcccgcggcggcgcggacgcggacgaggacgaggacggtgtgggcgcggggaccgacctgggccgccggttcggccgcctcgccgccgaggacaaggagtacttcagcggcagcatcgtggagggcggcggcggcaggggcacgccgctgccggcgtcgtcgctcaagcgctccaactcgtacaatgaggagaggagctgtaggcccggcggcgttgctggtggtgccgccatcggcgaggaggccatggatgaaggcgacggaggggtcaggggaagatgcatcccggggaggaaaaagccgccgccgcagcagcagcagcagaaatagcgcatttggctcatccttctttatgtgtaaacgcaaatcttgatctgaagacaagcgtagctttgtttagcattttcaattttcaaacatgccgttgtcgtggaggccatgcaggcagcaagtacttagctgtgtctaagtgttgaaaacttgaaatcacgttgagcactacacttgtcttcttttaacgagtgcgggacgctgtaggcccgaggggccggtggccccacgtgcgactggaagcgatgcatgatgctgtcattcactgttggatcc

SEQ ID NO: 86412 - DNA, 1772 bp, Zea Mays
actactctactcggctgacgactgacgttccattcccgctccattcgtcgtcgcccttcgctccccctcctcccgaaatcccagagcggcctccttcgcaggcccgtacagcctgcgggggggccggtagagtagcctccaaggtcgccgactcgtcgtagttcctgctgtttcgtgcgtgacaccggagcgagccggaggggggaggaggaggcatggaggcgggagggaggaggctggcggcgggcagggtggaggcgagccccgagcgcggcaggccggcggcgtacgcgtcggcggggaggccggcgccggcgaggcccatgcggagggtgcagatcatctactacctctgccgcaacgggcagctggagcacccgcacttcatggagctcgcgcagcacccgcaccagccccttcgcctcaaagatgtcatggacaggctgacgctgctgaggggcaagggcatgccggctctcttctcgtggtcctgcaagaggaactacaagaacgggtacgtgtggaacgacctgtcggagaacgacgtgatctacccgtcggacggcgtggagtacgtgctcaagggctccgagatcttccctggctgctcttcttccgatcggttccagcacctacgcgtgaccgaccggtcgccgacgaagccgccgctggcgctccctcacatgagccacaacaagcagtaccccgtggacggctacggagactacgacgccgtggaggaccgggacgacgacgagctgggccactcgtaccaccaccgccggacggcgtcggggcggcccgagaaggccgccgccgccgccgtctcggcgcgcgcggccaccaaccgggcccgccccgtggagctccccgtcgaggagacctcgccgccgtcctccacgtcctcggacaagcccccgccgccagcggcgctgctgatgcagcagcagcagcagccggggaggagggccacgtcggaagtgcctgagccgagccgtcccgggtccatgctgctgcagctcatcgcgtgtgggtcgacgacggcgccgtccgcggcaggcggcggcggcggcccggggaagtgccgcgccgagccgaggcggagctgcggcctcgtgagccggctctcggcccgcggcggcgcggacgcggacgaggacgaggacggtgtgggcgcggggaccgacctgggccgccggttcggccgcctcgccgccgaggacaaggagtacttcagcggcagcatcgtggagggcggcggcggcaggggcacgccgctgccggcgtcgtcgctcaagcgctccaactcgtacaatgaggagaggcccggcggcgttgctggtggtgccgccatcggcgaggaggccatggatgaaggcgacggaggggtcaggggaagatgcatcccggggaggaaaaagccgccgccgcagcagcagcagcagaaatagcgcatttggctcatccttctttatgtgtaaacgcaaatcttgatctgaagacaagcgtagctttgtttagcattttcaattttcaaacatgccgttgtcgtggaggccatgcaggcagcaagtacttagctgtgtctaagtgttgaaaacttgaaatcacgttgagcactacacttgtcttcttttaacgagtgcgggacgctgtaggcccgaggggccggtggccccacgtgcgactggaagcgatgcatgatgctgtcattcactgttggatcctgtcgtgcactgtgctttcctgacggctagctgacgcaccggcca

SEQ ID NO: 86413 - DNA, 1649 bp, Zea Mays
  misc_feature (781)..(880): n is a, c, g, or t
acacctaggctccaccaccgccatgcccctgcgtccgcgtatctcgcccccacgcccgcgtatctcgcccaacgcacactgtgcccctgccccacgctcgagcaggtagccgcagctcccgccggatccttccccacgcccaagcaggcaaccacggatctcgaccactcctgagcagtcatcgcggatctcgcccctgctgtgcccccgatgcatggctcctcattctcctctcggaatcgctccctccctccgcgttcggcaccgtgcacccccctcgcctcgcatggccgccacgggggtcagccgaggctggcgggaatacacgggccgcgtctggcatgcggctgaggagctttgcctccgcatcctcacatcctctgccatcagcctcctcttcgcgttgctcctgcatccacctctgaatcgaaaggtgaggtaccctggctgatctcatccggaatagtctgattcttcacacgatctgggcgccgatctcacctccacgctgctcatttgatgtgatgccaagtaattggtccacgtgtaattcctgctattcaactttggttaagggaagggatactataaatcactagaatattatatgggcaaaaagttcatatttttgggtgactcctaaagtagcataagatggatgaccgacctgaaatctgtcgttggagctgtcttggtctctgattggcatggcaatacattatacaagggacatgacctgtacggaatatttgtgccctctttggtttgtgcgagagctatnnnnnnnnnnnnnnnnnnnnnnnnnnnnnnnnnnnnnnnnnnnnnnnnnnnnnnnnnnnnnnnnnnnnnnnnnnnnnnnnnnnnnnnnnnnnnnnnnnnngtttagactcgagatcagcttgattcgttttgctaagtcttctccacctaagtcctcaaaaatttgaacaaggccatattatcagataaaagcagatgtagctttcataggacttagttccagcaaagcaaaggttgacattgcaccaaacaatagcgtctatacttcattcttatggcttggagaagcctatgcaacatgacaagccagatgacatgtagatgagaaggttctgcatcaagagaaaccaaagcaaaatctttgcatcaagagagcaccgatgaaaagctgatgtagaggccagttgacaaacttatggaagaccagctgaccaaataattgaaaatctattgaactatgtatcaagttcattaatttgtgtaattctgaatgagaccttttatgctactgcaacgtctgtgaccacaaatgactgttgcagcaagaccatactccaggagtggagctgtctatatgaagagtgtaggtagagacaattggctaatattgtacaggttcagtttgcaggatcgtagcaacagggttcaaagacgtgtgtttgaaagggcagttgctgatgatcagcatgatggaaggtggggagttccattgctggtttaagctggagctagcttctgaagtccggtcaggtgtctgtatgtgttgcccttttttatttcatttcatgagagaggattgttatttgttccttgaactgtacttggtcgtacttgtgaataaatgttttagcatggttgttcaacttctt

SEQ ID NO: 86414 - DNA, 2130 bp, Zea Mays
caatccatctggaagcgcaattttcaccagttctgtcgatttgcccccctttttttggatttgttcctctcagtctttccaagatcagcgaagagagccccgcgtgttgatgaaatatttggatttcgttactattcgcgtcggccatggctacggtttggagcggctgcagcacgagctgcggctccttcggccaagaactgcccccgcgcggcaaacggggcggtggtgagggcacaagattccttccgcgaaggagaggccggatcagaggtgacgcccgccagacacaagctctaagcgccgccatggttacggtcggagcttgcgtttgtagagcggctccatgcttgcttgattcggtggtcgacgggacggaggacgtcagcgttgggtttgggggcatcgacggtgaaccgctcgccgatgggtatgatggtggcaagaggcgcggtccgcgtcggcgtccgacgaggccgaccgtttttcagaaggaggtgggcgcaagaactgctccaccggcgatggcgtcggagccggacagcaaatctgagcatggggtgtcgaggctgcacttcctggaggagagggacgaggagacgctgtcaagaaggttgataaagctcagccaaaacaacaaggtcagaagtgccactgagctgtttgattcaatgcgcgcatctgggctgcaaccgagcgcacatgcctgcaactccctgttggcttgctatgtgcgtagaagtccactggcggatgcaatgaggatgtttgagttcatgaaggcgaaaggaatggcgacagggcacacgtataccatgatactcaaggctgttgcgagcaatcagggttatgtttctgcactggaaatgttcgataagattgaggaggaggagggttcaaagaaaatcattgacgtaattgtttataatacgatgatatctgtttgtggaagagcgaaagaatggatgcttgtggagagactatggagaaggctagagcaacattctttgaatggaactttactgacatacgatttgttagtcagcatattcgtgcaatgtgggcagtctgagttagcaattgctgcatatcaggaaatgctccagaagggacttgatccgagcgaggatataatgaaggctatcattgcatcctgcactaaagaagggaaatgggagtttgcaatgtcaacatttagtagaatgctgagggctggcatgaaacccagtttaattttgttcaactcaatcatcaactcactggggaaggctggtcaagatgaactcgcctttaggatgtaccatctgctggaaaaatcaggccttaagcctgatcaatatacatggagcgcactgttgttggcattatacaggtccgggcgatgctgggattgcctaaagcttttccatggaatcaaaggcaagcatccgacactcttaaatgatcatctctacaacactgctttgatgtcctgcgaaaagcttggtcaatgggaacatggtttgcagctgctgtggttgatggaaaaaagaggactgaaattatcagtggtatcttacaatcatgtgataggtgcttgtgaggttgctagcaagccaaaagttgctcttaaagtgtaccagcgcatgattaatcagaggtgttcgccagacacattcacacatttgtctgttatacgagcttgcatctggggatctctttggactgaagtagaggatatattggaggaggtggctccagactcttcgatctacaacgcggtcatccacgggctgtgtttgcgaggcaagaccgggctagccaacaaggtgtacgccaagatgcggagcatggggctggtaccggacggcaagacgagagcgttcatgctgcagcacattgctacggactaggaccagcctcgtgaaaggccaagactgacgatctcctcgtagctgcacgcagcccccgaatgaaatgggcgtacgcgcatgtatgtacaggatcaaaggtgtggtggagcagagttgtcgggctgggtactgtgtacaacaggatcaaagcatggaccaagcggaagctagcaatgccggtgtttacagaatctgacacttgccaaggttcctttgcgttccaacgtggatgtcattc

SEQ ID NO: 86415 - DNA, 129 bp, Zea Mays
atggcgcagcagcctggctgcgctctcgggctgcagctcccgtgtttgcgtcgcctggcttgctcgggagccaggctgtgggcgtgcaaatttagcctctcagcctggctccacagaaacgagctcaag

SEQ ID NO: 86416 - DNA, 2175 bp, Zea Mays
agcagacatgtcgagccggtaggtatacagtctctgctggtctcacgtggccacgttgctcggttccgcatccgcgattccgcgaggcaaagcaacgagccgctttcggtgttctactgccgcgtagcagcggcagcggcaccgacggcatcccaaaaggcagcgacgtctgggtcggacttggaggccccggggatcggtggccaggctgagctcctcccagagtcccagtacgcctccggagtccggatccgcggagccaggctgagctgctcccgtggtctactctccagtacgcggctcggcagggaccgggagcgaggacgagcgtcctgcgtcgacgggatcggcgtgccaggggagcgctgaaatctgcgcttccgtctccggacggccgatgccaggccttgctcgggagaggtagcaaacgaaacatggagctgaggcggctgctgctgcttgcgctcatctgcctgcgtgctccccgtttggcttcggctcagcagccggatgaggcgacggtcatagttaagggctccactaggattgcggaaacggatgacaactacgtctgtgctacaattgattggtggccgccggagaagtgcaactacaatcagtgcccatggggccaggcgtcaattcttaatctggatctggatcacccgtttctggctcaggccattcaagcatttgaccatttgaggattaggctgggaggctccttgcaagaccgagttgtttatgatgtgggaacagaaagtccatgctccccatttacaaatgtatccaatgccttgtttggtttctcagttggttgccttggtatggataggtgggacaaactgaatgacctattcgagagaacaggagcaattgtcacatttggtgtgaatgcactctacgggaggtataatgttcgacgttccatctgggcaggcaaatggaattccactaatgcatatgattttgtaaaatacacaatctcaaagggatacccagttggctcttgggaatttggcaatgagctgagtgggcatggaatcggagcaaaagttgatgctaaactttatggaaaagatgtaattgaatttaaatccatccttcggcaattgtataaggcaccactgtcccagccactcctgttagccccgggagggttctttgatcaacagtggtattctcagctacttgagacttcaggtcatggtgttgttaatgccttatctcaccatgtatataatcttggtggagggaatgatgttcatcttataaggaagatcttagacccaaagtacttggatcgtgctgaagatacttacagagacatgcaacttaccatccaaaggcatggaacatgggcttctgcttgggtcagtgaaagtggcggtgtattcaacaatggtggtcaactggtgtcaaatacattcatcaacagtatctggtatctagatcagcttgggatggcatctaagtacaacacaaaagtgttctgcagacagactctcatcggtggcaactatggactgctcgacacgcaaacttttctgccaaatcctgattactacagcgctctactatggcatcggcttatgggcaatggagttctttcagttgatataaacgcaccgcgtcaaatacgcgcttatgctcattgtaggaaacaacagcaaggcatcacgattctgttgatcaacctgagcaacactactggatacaacgtcactctccagaacgacatcaacgtcagcttgggcaaaagacctgaccttgagaagcgcagttctttcacgcacaggctcaggaaagcagtctcatggctggggaggaaaccagcaagcaacaccaggaggcgggaggagtaccatctgaccgccaaggacggcgatctccagagcaaaacgatgctgctcaacggggccccgttggaacttggagacgctggcagcattccagctatggatccggtgctcgtcgccgttgatttgccggtgcagctagcaccaacatccatcgccttcgtagtcctacccaagtttgaggccaaggcttgttcttgacacatgagctcttgaaatcagtttttttttgtgtgtgccttgaaatgttccatagacctatttcgtgaaagaaatcatacaacgcggcacaaaaacggcaaagcgttgttgtgtg

SEQ ID NO: 86417 - DNA, 1845 bp, Zea Mays
agcagacatgtcgagccggtaggtatacagtctctgctggtctcacgtggccacgttgctcggttccgcatccgcgattccgcgaggcaaagcaacgagccgctttcggtgttctactgccgcgtagcagcggcagcggcaccgacggcatcccaaaaggcagcgacgtctgggtcggacttggaggccccggggatcggtggccaggctgagctcctcccagagtcccagtacgcctccggagtccggatccgcggagccaggctgagctgctcccgtggtctactctccagtacgcggctcggcagggaccgggagcgaggacgagcgtcctgcgtcgacgggatcggcgtgccaggggagcgctgaaatctgcgcttccgtctccggacggccgatgccaggccttgctcgggagaggtagcaaacgaaacatggagctgaggcggctgctgctgcttgcgctcatctgcctgcgtgctccccgtttggcttcggctcagcagccggatgaggcgacggtcatagttaagggctccactaggattgcggaaacggatgacaactacgtctgtgctacaattgattggtggccgccggagaagtgcaactacaatcagtgcccatggggccaggcgtcaattcttaatctggatctggatcacccgtttctggctcaggccattcaaggcaatgagctgagtgggcatggaatcggagcaaaagttgatgctaaactttatggaaaagatgtaattgaatttaaatccatccttcggcaattgtataaggcaccactgtcccagccactcctgttagccccgggagggttctttgatcaacagtggtattctcagctacttgagacttcaggtcatggtgttgttaatgccttatctcaccatgtatataatcttggtggagggaatgatgttcatcttataaggaagatcttagacccaaagtacttggatcgtgctgaagatacttacagagacatgcaacttaccatccaaaggcatggaacatgggcttctgcttgggtcagtgaaagtggcggtgtattcaacaatggtggtcaactggtgtcaaatacattcatcaacagtatctggtatctagatcagcttgggatggcatctaagtacaacacaaaagtgttctgcagacagactctcatcggtggcaactatggactgctcgacacgcaaacttttctgccaaatcctgattactacagcgctctactatggcatcggcttatgggcaatggagttctttcagttgatataaacgcaccgcgtcaaatacgcgcttatgctcattgtaggaaacaacagcaaggcatcacgattctgttgatcaacctgagcaacactactggatacaacgtcactctccagaacgacatcaacgtcagcttgggcaaaagacctgaccttgagaagcgcagttctttcacgcacaggctcaggaaagcagtctcatggctggggaggaaaccagcaagcaacaccaggaggcgggaggagtaccatctgaccgccaaggacggcgatctccagagcaaaacgatgctgctcaacggggccccgttggaacttggagacgctggcagcattccagctatggatccggtgctcgtcgccgttgatttgccggtgcagctagcaccaacatccatcgccttcgtagtcctacccaagtttgaggccaaggcttgttcttgacacatgagctcttgaaatcagtttttttttgtgtgtgccttgaaatgttccatagacctatttcgtgaaagaaatcatacaacgcggcacaaaaacggcaaagcgttgttgtgtg

SEQ ID NO: 86418 - DNA, 941 bp, Zea Mays
agttgagattccccaggaaattggtacacttgcgaacatgcaaaggcttgttttggctggtaatttgattgaaatcatcccagctaacattggatacctgcagaatcttaaaatcctcacacttgaccgaaataggatatctatcttgcctgaagaattgggttcactgtcaaaccttcagcaactttctgttcctcaaaattttttactgtgcctgcctaagagcataggagatttgcgcaatatgtcagtactcaatgtatctgataacaaactaaaggaacttccagaatcaattggaggttgcagttccctggaagaatttcaagccaatggaaatgctattgaagatgtgccagcgtcaatttgcaacctagtttgcctgaaatccttatcactgaacggcaacaaaattcgacagcttccacaaaacttactgaaagactgcacggctcttcagagtttatccctgcacgacaacccaatcacaatggaccagttccaacaaatggatggatttggagagtttgaggcgcgcagaaggaagaaattcgacaagcagattgattcaggggtcatgatgggctcgacggccctggatgaaggggttgatttccactgattttagaactcgagtgtctcccattctttctagttggtcaggagtcaggaccgattgtagatttgtagatatcagtctcaacctacaaaacagggttcaccaaaccggttgtaaggtgaaaaccggcgcccagtgaaaactggtaaaaactggccgaaatcaaaatcaccccacttttcaatttgaaacggtttgaaaccgataaatcggctcattaatcggctcctaggctgattaaccggcgtcatagaagcagaaaccgatccatatgtatttttgcaaataaagcacattgagatctcataatttgaataaaaga

SEQ ID NO: 86419 - DNA, 130 bp, Zea Mays
cacttggtcggggaggaaaagaccgtcctcccggtattaaattaagaagagaccgaaacatggttccagccgagaaaaccctcgaatcctgccccccatcactaacaggccgatcaacttttcactctac

SEQ ID NO: 86420 - DNA, 2352 bp, Zea Mays
ccgaaaataggacgcggtcggcggtcgtgaaccgaacaaacctttccccaaaatttcccctcccccgcaccgaacgaactctcgatccgatcccgatccctgcagggagccgcctcggctcaccgatccggccccggatccgctcgttgctcgacgggatctctcgatcgtctggacaagcatgctgcatcaggagaacagtgaggctttcgggaggcaccactctgagcagcttgcatgtgtcaacatgaggggagcagataatggtcatccgaatttccttcctgagaaatgccagattgcagtttgtcctgaagttcaccaaaggggtgaaaaagttggactatttgatgaagagctggtacatggtattcatctaaccagtccttgtgttcagtcaccatttttgccaagtggtgtcaaagaaacacctatagtggatcataacaagagacctgcatccagtgacatactggacatagttgaatgcaaacggctgaagcaggaagatcaaatcgttactaaggaagacaaccatacatctgctgaggaggaatttcatgactaccccacatacacgacttgcgaaagaagctttgactcaccactatatgagagtgaggaaagtgaagatgagggcgtagattcacctctccattgttcacatgctcgcacctatgttgaagatggtctatggcctgccagctttcatcaatctgttggccctttttccttgaggaaacctgttcctatcgggtcaaatcatcaggctgaattacctgagtgcaggccatttggtggaagaactgaagaagacgaaagtgtcaagtggatcagaaacagtgttgtgccaatgcctggtactgatgcatcgtctttggtgttggagcctgttcactgcaaagcaggttgtgattgtcttgacgaaggttcaatcaattgtgtgaaaaagcatgtgatggaagcaagagaaaatttgaaggattctgttggtgcagacgccttcagggagttgggtttctatgacatgggggaagaggttgcctcaaggtggtcagaagaggaggaacgtttgttccagcaagtggtctcgtcaaaccgtgcttctctgcgcaggaacttttgggatgaacttcctcttgccttcccttccaagtccagcaaagagctagtgagctactacttcaatgtcttcatgttgaggaagagggctgagcagaacaggttcgacccagcgaacattgacagtgacgacgatgagtggcaggcaggtggtgattttgagtttccaataacaggaagaactgatgaatacatgccaatcgagtcccttactgatcaagatgatgttgcttgcaatccatttcccttggagggggatttatatggagattctgatgatgaggacgagcttgacaattccagtggagacaggcataatggtgtgcagagggctggtatgttgtcagagggtcatcccgaaatgtcatttatagatcatgatcaacagacgttgaagctagatgcagatgcacaagatgactcttgcacatcatttgaggctcatcaggttggttgcgatggtggggcacatactgatattggcaatcactacaggagtgacgacggcctttgtggtggtgcagaacatgggttctttggtgaccattgtgacacaaaagagtggggcttcggtttcagtactggttgggagaggcatgattttttgtcaacgaacaatgtcatagaagaggtgttcgggaagggctccagtgaagatggaagtgacactgctactggccaggaccttatctgagccagaggcggaggcttcttttcagctgcgaaacctttagcagcccccccttgttctctgaatctgtacagcagtagtagttggctattttgatttgatgcctcacttgttcgtataggaatctctcatccctgtccttgaacatcatctgcttgcgatattggtcgcatggctaatgtaaatccgacgatgatatcatctgtcgatgatctgttgttaggctgtagcatgtacgtatcatctttgtagtgacggtgtgttttgacctgagcatttttcccatgtgccaacgagggtcatgtaataaaaggctgctgttgttccttgcccaatatatctcaccagctcgtcatgtactcccaaacgtcatttttatatgaaatttgttgtcgttctcgcggctcgttttaaacccgccttgaatcgtaatgattgcaacggaaattccagcctagcagtgatgttgggttcgcgttctatttttcttgcatcgtagtcacgttacacacgccgaggccgaggcttgtttttttttt

SEQ ID NO: 86421 - DNA, 2259 bp, Zea Mays
cgaaaataggacgcggtcggcggtcgtgaaccgaacaaacctttccccaaaatttcccctcccccgcaccgaacgaactctcgatccgatcccgatccctgcagggagccgcctcggctcaccgatccggccccggatccgctcgttgctcgacgggatctctcgatcgtctggacaagcatgctgcatcaggagaacagtgaggctttcgggaggcaccactctgagcagcttgcatgtgtcaacatgaggggagcagataatggtcatccgaatttccttcctgagaaatgccagattgcagtcaccatttttgccaagtggtgtcaaagaaacacctatagtggatcataacaagagacctgcatccagtgacatactggacatagttgaatgcaaacggctgaagcaggaagatcaaatcgttactaaggaagacaaccatacatctgctgaggaggaatttcatgactaccccacatacacgacttgcgaaagaagctttgactcaccactatatgagagtgaggaaagtgaagatgagggcgtagattcacctctccattgttcacatgctcgcacctatgttgaagatggtctatggcctgccagctttcatcaatctgttggccctttttccttgaggaaacctgttcctatcgggtcaaatcatcaggctgaattacctgagtgcaggccatttggtggaagaactgaagaagacgaaagtgtcaagtggatcagaaacagtgttgtgccaatgcctggtactgatgcatcgtctttggtgttggagcctgttcactgcaaagcaggttgtgattgtcttgacgaaggttcaatcaattgtgtgaaaaagcatgtgatggaagcaagagaaaatttgaaggattctgttggtgcagacgccttcagggagttgggtttctatgacatgggggaagaggttgcctcaaggtggtcagaagaggaggaacgtttgttccagcaagtggtctcgtcaaaccgtgcttctctgcgcaggaacttttgggatgaacttcctcttgccttcccttccaagtccagcaaagagctagtgagctactacttcaatgtcttcatgttgaggaagagggctgagcagaacaggttcgacccagcgaacattgacagtgacgacgatgagtggcaggcaggtggtgattttgagtttccaataacaggaagaactgatgaatacatgccaatcgagtcccttactgatcaagatgatgttgcttgcaatccatttcccttggagggggatttatatggagattctgatgatgaggacgagcttgacaattccagtggagacaggcataatggtgtgcagagggctggtatgttgtcagagggtcatcccgaaatgtcatttatagatcatgatcaacagacgttgaagctagatgcagatgcacaagatgactcttgcacatcatttgaggctcatcaggttggttgcgatggtggggcacatactgatattggcaatcactacaggagtgacgacggcctttgtggtggtgcagaacatgggttctttggtgaccattgtgacacaaaagagtggggcttcggtttcagtactggttgggagaggcatgattttttgtcaacgaacaatgtcatagaagaggtgttcgggaagggctccagtgaagatggaagtgacactgctactggccaggaccttatctgagccagaggcggaggcttcttttcagctgcgaaacctttagcagcccccccttgttctctgaatctgtacagcagtagtagttggctattttgatttgatgcctcacttgttcgtataggaatctctcatccctgtccttgaacatcatctgcttgcgatattggtcgcatggctaatgtaaatccgacgatgatatcatctgtcgatgatctgttgttaggctgtagcatgtacgtatcatctttgtagtgacggtgtgttttgacctgagcatttttcccatgtgccaacgagggtcatgtaataaaaggctgctgttgttccttgcccaatatatctcaccagctcgtcatgtactcccaaacgtcatttttatatgaaatttgttgtcgttctcgcggctcgttttaaacccgccttgaatcgtaatgattgcaacggaaattccagcctagcagtgatgttgggttcgcgttctatttttcttgcatcgtagtcacgttacacacgccgaggccgaggcttgtttttttttt

SEQ ID NO: 86422 - DNA, 589 bp, Zea Mays
gaaccgaacaaacctttccccaaaatttcccctcccccgcaccgaacgaactctcgatccgatcccgatccctgcagggagccgcctcggctcaccgatccggccccggatccgctcgttgctcgacgggatctctcgatcgtctggacaagcatgctgcatcaggagaacagtgaggctttcgggaggcaccactctgagcagcttgcatgtgtcaacatgaggggagcagataatggtcatccgaatttccttcctgagaaatgccagattgcagtcaccatttttgccaagtggtgtcaaagaaacacctatagtggatcataacaagagacctgcatccagtgacatactggacatagttgaatgcaaacggctgaagcaggaagatcaaatcgttactaaggaagacaaccatacatctgctgaggaggaatttcatgactaccccacatacacgacttgcgaaagaagctttgactcaccactatatgagagtgaggaaagtgaagatgagggcgtagattcacctctccattgttcacatgctcgcacctatgttgaagatggtctatggcctgccagcttt

SEQ ID NO: 86423 - DNA, 681 bp, Zea Mays
gaaccgaacaaacctttccccaaaatttcccctcccccgcaccgaacgaactctcgatccgatcccgatccctgcagggagccgcctcggctcaccgatccggccccggatccgctcgttgctcgacgggatctctcgatcgtctggacaagcatgctgcatcaggagaacagtgaggctttcgggaggcaccactctgagcagcttgcatgtgtcaacatgaggggagcagataatggtcatccgaatttccttcctgagaaatgccagattgcagtttgtcctgaagttcaccaaaggggtgaaaaagttggactatttgatgaagagctggtacatggtattcatctaaccagtccttgtgttcagtcaccatttttgccaagtggtgtcaaagaaacacctatagtggatcataacaagagacctgcatccagtgacatactggacatagttgaatgcaaacggctgaagcaggaagatcaaatcgttactaaggaagacaaccatacatctgctgaggaggaatttcatgactaccccacatacacgacttgcgaaagaagctttgactcaccactatatgagagtgaggaaagtgaagatgagggcgtagattcacctctccattgttcacatgctcgcacctatgttgaagatggtctatggcctgccagcttt

SEQ ID NO: 86424 - DNA, 940 bp, Zea Mays
ttgacaattccagtggagacaggcataatggtgtgcagagggctggtatgttgtcagagggtcatcccgaaatgtcatttatagatcatgatcaacagacgttgaagctagatgcagatgcacaagatgactcttgcacatcatttgaggctcatcaggttggttgcgatggtggggcacatactgatattggcaatcactacaggagtgacgacggcctttgtggtggtgcagaacatgggttctttggtgaccattgtgacacaaaagagtggggcttcggtttcagtactggttgggagaggcatgattttttgtcaacgaacaatgtcatagaagaggtgttcgggaagggctccagtgaagatggaagtgacactgctactggccaggaccttatctgagccagaggcggaggcttcttttcagctgcgaaacctttagcagcccccccttgttctctgaatctgtacagcagtagtagttggctattttgatttgatgcctcacttgttcgtataggaatctctcatccctgtccttgaacatcatctgcttgcgatattggtcgcatggctaatgtaaatccgacgatgatatcatctgtcgatgatctgttgttaggctgtagcatgtacgtatcatctttgtagtgacggtgtgttttgacctgagcatttttcccatgtgccaacgagggtcatgtaataaaaggctgctgttgttccttgcccaatatatctcaccagctcgtcatgtactcccaaacgtcatttttatatgaaatttgttgtcgttctcgcggctcgttttaaacccgccttgaatcgtaatgattgcaacggaaattccagcctagcagtgatgttgggttcgcgttctatttttcttgcatcgtagtcacgttacacacgccgaggccgaggcttgtttttttttt

SEQ ID NO: 86425 - DNA, 1797 bp, Zea Mays
atttctctctctcctctcatctccacctctcctccggctagggtgttcacgcctgccgcggcgaagcttctgccctccccggcgtcgcgctctggtcgtcgtcggccgggaagatggctggcggcttcagggtacttcatctggtcaggccctttctggctttcttgccagaggtgcagagcgcggataggaagataccattcagagaaaaagttatctacactgttatttctctcttcatttttctggtgtgcagccagctcccactctatggcattcattcgacgactggagctgatcctttctactggatgcgtgttatccttgcatcaaaccgtggcactgtgatggagttgggtattactccaattgtgacctctggtatggtaatgcaacttcttgtcggatcgaagatcattgaagttgacaacagtgtgagagaggatcgtgctctgctgaatggtgcacaaaagttgcttggtatcttgatcgctattggggaagctgtggcatatgtcctgtctggaatgtatggtagtgtaagccaacttggaacagggaatgctattctcattatacttcagcttttctttgctggcatcattgtcatctgtttggatgaacttctccagaaaggttatggtttgggatctggtatttctctgttcattgctaccaatatctgtgagaatatcatctggaaggcatttagccccacaaccatcaacagtggtcgtggcgctgaattcgaaggggctgtcattgcactgttccatctgttgattacgagaaccgataaagtccgtgctcttcgtgaggctttctaccgccagaaccttccaaatgtgaccaatttgcttgccactgtcttggtattcctcatagttatctatttccaaggcttccgtgttgtgcttccagtgagatcaaagaatgctcgtggccagcaaggctcatatccaattaagctgttctacacttcaaacatgcccatcatccttcactctgcgctgattaccaacctctattttatatcccagcttctctacaggaagtacagtggaaacttccttgttaaccttcttgggaagtggaaggagtctgaatactctggccattctattcctgttggtggtcttgcttactatgtaactgccccatcaagtttggctgatgtccttgcaaatccattccatgcactgttttatgtggtcttcatgctgtcagcctgtgctctgttctcaaagacatggattgaagtttccggttcatcagcaaaggatgttgctaagcagctcaaggaacaacaaatggtgatgccaggccatcgtgagtcgaacttgcagaaggaacttaaccgatacatccccactgctgctgcatttggtggtgtatgcattggcgcattgaccgtcctggctgatttcatgggtgcgattggttcaggaactggtatattgctcgctgtgacaatcatataccaatacttcgaaacctttgagaaggaaagggcgactgagcttggtttctttggtttttgattagtagctgtggaaccttaacttggctatagctgaattttcttgtaagtccctgtagtgcttagccagttgtaacttaaagagttctgtttaggttgccttcttgcggccacaatcatgtagcagaatgtgcgtgtgtttcaggttagcgtgggggtatgtgcatctgtccaaagagagtctgcaatttggcaaccggatattttgttatcaatttcagttacttcgaactgagcatgttctcattcccactttc

SEQ ID NO: 86426 - DNA, 1431 bp, Zea Mays
gagaacttaccaatttctctttttccttattacaggaagatggctggcggcttcagggtacttcatctggtcaggccctttctggctttcttgccagaggtgcagagcgcggataggaagataccattcagagaaaaagttatctacactgttatttctctcttcatttttctggtgtgcagccagctcccactctatggcattcattcgacgactggagctgatcctttctactggatgcgtgttatccttgcatcaaaccgtggcactgtgatggagttgggtattactccaattgtgacctctggtatggtaatgcaacttcttgtcggatcgaagatcattgaagttgacaacagtgtgagagaggatcgtgctctgctgaatggtgcacaaaagttgcttggtatcttgatcgctattggggaagctgtggcatatgtcctgtctggaatgtatggtagtgtaagccaacttggaacagggaatgctattctcattatacttcagcttttctttgctggcatcattgtcatctgtttggatgaacttctccagaaaggttatggtttgggatctggtatttctctgttcattgctaccaatatctgtgagaatatcatctggaaggcatttagccccacaaccatcaacagtggtcgtggcgctgaattcgaaggggctgtcattgcactgttccatctgttgattacgagaaccgataaagtccgtgctcttcgtgaggctttctaccgccagaaccttccaaatgtgaccaatttgcttgccactgtcttggtattcctcatagttatctatttccaaggcttccgtgttgtgcttccagtgagatcaaagaatgctcgtggccagcaaggctcatatccaattaagctgttctacacttcaaacatgcccatcatccttcactctgcgctgattaccaacctctattttatatcccaggtacacacctcatttctaatgctgcagtaagttatatcttctgtatgtgtaactgctaatgtattttactgctatcacagcttctctacaggaagtacagtggaaacttccttgttaaccttcttgggaagtggaaggagtctgaatactctggccattctattcctgttggtggtcttgcttactatgtaactgccccatcaaggtgaaaagctagttccttcattggggactggggaggccttctcgccatgatcatttttgttgtttttgttattcaataattaggtattcttttgactaacaatagcacattggaaaccacgcagtttggctgatgtccttgcaaatccattccatgcactgttttatgtggtcttcatgctgtcagcctgtgctctgttctcaaagacatggattgaagtttccggttcatcagcaaaggatgttgctaagcagctcaag

SEQ ID NO: 86427 - DNA, 1525 bp, Zea Mays
tctctttttccttattacaggaagatggctggcggcttcagggtacttcatctggtcaggccctttctggctttcttgccagaggtgcagagcgcggataggaagataccattcagagaaaaagttatctacactgttatttctctcttcatttttctggtgtgcagccagctcccactctatggcattcattcgacgactggagctgatcctttctactggatgcgtgttatccttgcatcaaaccgtggcactgtgatggagttgggtattactccaattgtgacctctggtatggtaatgcaacttcttgtcggatcgaagatcattgaagttgacaacagtgtgagagaggatcgtgctctgctgaatggtgcacaaaagttgcttggtatcttgatcgctattggggaagctgtggcatatgtcctgtctggaatgtatggtagtaaccttccaaatgtgaccaatttgcttgccactgtcttggtattcctcatagttatctatttccaaggcttccgtgttgtgcttccagtgagatcaaagaatgctcgtggccagcaaggctcatatccaattaagctgttctacacttcaaacatgcccatcatccttcactctgcgctgattaccaacctctattttatatcccagcttctctacaggaagtacagtggaaacttccttgttaaccttcttgggaagtggaaggagtctgaatactctggccattctattcctgttggtggtcttgcttactatgtaactgccccatcaagtttggctgatgtccttgcaaatccattccatgcactgttttatgtggtcttcatgctgtcagcctgtgctctgttctcaaagacatggattgaagtttccggttcatcagcaaaggatgttgctaagcagctcaaggaacaacaaatggtgatgccaggccatcgtgagtcgaacttgcagaaggaacttaaccgatacatccccactgctgctgcatttggtggtgtatgcattggcgcattgaccgtcctggctgatttcatgggtgcgattggttcaggaactggtatattgctcgctgtgacaatcatataccaatacttcgaaacctttgagaaggaaagggcgactgagcttggtttctttggtttttgattagtagctgtggaaccttaacttggctatagctgaattttcttgtaagtccctgtagtgcttagccagttgtaacttaaagagttctgtttaggttgccttcttgcggccacaatcatgtagcagaatgtgcgtgtgtttcaggttagcgtgggggtatgtgcatctgtccaaagagagtctgcaatttggcaaccggatattttgttatcaatttcagttacttcgaactgagcatgttctcattcccactttctgtttcggtctgttactaatttctcagaacattagatgctcacaggcgctttattctaatgtctctatttcatgacgagatatgaacatctctgaatctgattgcttcttt

SEQ ID NO: 86428 - DNA, 571 bp, Zea Mays
gggatgcgcgcgacggcggcgggggcggggaggcgcgcgaaacaggacttacgcctgggtgcattcaatatagagaatgcacccaggtgcattttagcagcgccgtatatatatatatatatcgaattattcaacattttagtggatcttataaagctgtttgtgacaattgcctaatgaatgaatgaaatagcaggcaggtggagctgacatgcagaggacaggttcttcgtcccttgttgctggtcaaatacgtgagacaatcaggtgctccacggcaccgcccatggaagaagacctgacaacaccagtcgacaatgatccctatgaaaatcagaatcccacatttttcctataaaattatcttgagacaaaagaggcctaacttattggatgcattgtttagtttagcaggaccaacgactagcttatgatctgatgctcaagtcaatacatatgcatgcaaatgggtcagctgtgtaattccagcaagcatgatcaaagcatttgtaggcgagcagatgctccatgtggttgtagcatggttgcaagctagcagatgctccactct

SEQ ID NO: 86429 - DNA, 354 bp, Zea Mays
atgcagtgcctaaactcaatcagagttgggattcactctgtgaacgttcctaagaccaagaagacgtactgcaagaacaaagagtgcaagaagcacaccgtccacaaggtgactcagtataagaagggcaaggatagcatgtctgcccagggaaagcgtcgttatgaccgcaagcagtcaggacatggtggtcagaccaagcctgtcttccacaagaaggccaagaccaccaagaagattgttctgaagctgcagtgccagagctgcaagcactactcacagcacgccatcaagaggtgcaagcattttgagattggtggagacaagaatggcaagggcacgtctcttttctaa

SEQ ID NO: 86430 - DNA, 5403 bp, Zea Mays
caactgcaaattggccactctttaacgggcattagacccttagggacacttcaggaatgtcacattttcatcccacacagcatgcgggtgacaatgattttcagatgtggcagcagcagatgatgttcaagcagttgcaggagtttcagaggcagcaacaactacagcaatctgatcatggagccaggatgcagccatcttttggccagtttcatgctcctgcaaaacctttacctgctgatcaattgtcgacaatgtcaaatgaaatggccaacaatgaggccatgaattctgcatggccacataattttacaggtggtgatcccagtttgacaagcaactcccaaatgttgaataatggtagcacaaattgggatcagattgttggtgctcctggtgtaggcaatttcatgaacagttcaatgtttgcgaatgctcagaatcaatcgatgagaccaatgggaatagctacccaccaagtggatcaatctttttatccaatgcatcctaccagcagcagagggcatggaaaccagtattcccaatttttagggattcatgctgattctcagagtgcagtggcaagggttggtccagatcagtcagaaaagacatccagaccattcaactcttcaatgaatgaacatggtcttcatatgcaaggtcctgccagttcgatgcataattttcgtggaaaagggggtttcttgaataacagtctgatgcaaagtcaaggtgatagtatcagggcaggcagtccggttacagtgaatcaactacaacatggtattcaaacccaagattttcatggtaggtcaaaccaagttgaccttcaagtgggcatgcaagataaatcagcaatgcaggtagggcaagcaagtcgtggggctagccttgaccccaccgaggagaaaattttatttgggggcgatgaggatggcaactggggagctttgttgaggggcgacaatgataatggcaattctttggacaatgataattatggtggtggctactcatctctacagagtggtagctggagtgcccttatgcaggaagctctccagtctacaaccagtgaaaacagtcccaaagaagagtggagtggcttgagtttccataaaactgagcaggtgatggctaacaatgcaactttatcaggccatgatgataataagcttactaggttaagcggtgcaaacctagaaaatgcacgtccttcaccaacatccagctacgctgatggaacaatgaataacccaaatctcgccagttttcagcatgccataaggcctccattcgagcgaagggaccatatgactcatgaatctcctaatgctcctgttaacaatcatcaatcaacttctgaagtcaacaatgggtacattcaacatggcttaaaacaaattcaatctgatggaaggcaagaacaagtgcacctagcaaatggaatttggccacatcaaaagactgaactgctcagaaataattcacagtcaactggtatgcatgctacaccacctggtgcacatggattttggatttcacaacaaaatacagctgatcacaatatgaatagagagtccagtaataaccaaaatgactggaaagctaacaatgtgcttggacaagacatgcacaatagccaaaatgtcttcaatagcaatgagaactcttggaagtcaactggaggtaatgttaattcagtccagagacttcagcagaggaagtctgatgtaagcactactaatgaaagttcagatggtaaaagtattagcatgatgagctcaagcatgtcaatgatggcacaggatcattatcagatggtcactagtcggagtggcgagcaaattggcatgaaccgtaatatggcgcatagagctccagaaatctctgaatcaccaagaaaaagcacagaacaaagaccaggtgatttcaaccaggaatatctaaatgcaactcctaacgaaaggcaaacacacactttaaaccatggacaacacataagtgattctgcccccagaaggcattctatatttgctgggaaggaatccgaaaatttaggtcagtctagtcagcaagcaatgggatcttacatgttgcaaaatcgtgctatggggagctctggaatgaacattggcccatctccaggcaatccagtgtcaaataatctgtttccacctcagatgcgaaataatctgcagcatcattttggcacaaactcccttgtttccaataatatgccttcagtaagtgagaaaatgatgatggcacaggaacaacttcaatctcgacatggtctccctaatagctctagtgcattaccttttggaggagctgatactggtctgtctcagaacagagcagttcaaaacagtcaacatatgcttcagcttcttcataaggtggataactcaagaaatagcgatgtggctgctgacatacccaacaacccccttggcgttgtttctgcccagcaacaacctaaccattctttgcagggatttgggttgagactggcaccaccatcccaacgccaatcaaattcgggtaatttatggtctagtcagactaatgttgatggcaagcaatctgaccactcagcacaagatgatgaccgcacaccacaaccttccacgcctagccagtcattgactcctcagcatcaaaactctcaaccttcaccatttcacagttcagaaacagaaaataccgggcaaccaattgcacgctttccccagttaagtccaggtcaacattatcctgtcacagatgatagatctggtcctgcacccatgctgcagcagcagtctcagcaaagcaacttcgcaacagtattcaagaatgtatggacaaacatatcagcacagcgcctaggtggtatgcaagctaacaagattacacccaacatccttcagtctatgatgtttccaaataattcttcagcttccaacttatggagctctcagaaggcagatgatcaagggcagagggcatcaactccatcagatattgcaacaacttcagctaactcacagaatcaagatccaaaacgagctgctgataatgatgcagggttagcatcttcccagaaggcaaacctagagtcgaaaggaactaccgtaacaggaggaaatgaatccttgcagaagcctttttcagatgggaattccatgaatgctgtttcatcctttgcacaattgcatcagcaaggcatccttggtgctaaacatggggaaaacccaggagccaattttcaggctatgaattcttcccacaatagtgttaataatagtggtggcattgttttacatggaagcccagcaccttcaaacattcagcagcaaaattactctcttctacatcaaatgcatgccttgaggcatacggatattgatccaggcagtttagctggaaagacgacaagacctgatgttggttctgatgcttcacagattgactggaaatctggccagaggtttgctcatgtagacaataaccaaaccaaatcagctgcagataacgttggaagccctggtgtcccagggtcattcacttcagacatgaaaatactgagttttgcttcaaggagtgaggagagaaatgtcaatataccttctcatcttccatctggagagcgcccgtttcctggtatggttactgcacaaaatgataatcagaatcaagttcagcctatgggcacaagtgcaacatcaaattctgttgaaagcagtgagaggccgaggataaaccctcaaatggcaccttcgtggtttggacactacggaaactatagaaatggtcagagtgttgctgtgcttaatgctcagaagcccacggctttgccatataattttccgaaagttccttgtaacaatgaaaataataactctgctgaaaatagagttgaatctggccaatctgttacgcctgggcatcatctcccatcaacaagaatggaagctttggttccttccaatgtaaaagtatctccaatgatgagaaggcctaagaagcgtaaagctatggactctgcacttgtttcttggcataaaataattgaaagcccacaaaacttgaggagcatcagcacatctgagatggactgggcttgggcagctaatcggttaatcgagaaggatgaagcagaaacttcagacgatacttctttacattatttaccgcggaagaggctaattttgacaacccagttgattcagcaacttctcccttctataccagcaaccattctgagagctcaagctgtgtctgcttttgaaagtgcgacatacactctatcaatgctgacactaagggatgcatgcagcatggcatcatcatcattatataactcttgctcccctgtggaggatgaaaataacccatctgaacaaacaagaagtgctaagaaaatggaagacaaagtgtctaaggtcgtggaagtctttgttggaagaatccggaagatggaaaatgactttataagtttgaacaagagggcctcgatgttggatgtgcaactggagtgccaagatctggagagaatttctatcgtaaatcgtttgggaagatttcatggccggaaccatgcagcagcagtcgagagttcatctgcttcagaaatgactccccggagaatttttcctgaaagacatgtcatgtcttttgcagtccctggaaatcttcctgaaggagtacactgtttatcactctagtggaatgatcttcaattactctctagccactcagatgatctcaggttgcgccccgtgattcccagtgctccttatccatgcaaaacatggccaaacagaagagtcatattatcaagaggtaactagagaaccggaagcgtcacaataccacgatgagggcaggccaggggacgtgttccagccgatcaagtctgtgctggctgtggttgttgtcccttatatcaagtataggtccatgtatattgtggaaagtcaaggaaaaaactgtggatctcccatcatttttctctgatgaagagtaattaacttcagatttttttagagaagtcgatgcatactagcttagtacatctagcgagtttcttcgctatttgtcagtctctaagaaatccctgatgatggagtgttggcaggctagagtggagataataatgtgagcctttctctgggttctttggttcctttaggatgggatgcaaattggctagtgtgtccagtctaactgaccacccttgttaggcagcagttaattactagttttatgtagtgctgaaagcattcatggaacaagtggcgggtaaagtgcttggaaattcttgtaacttgtgtacccgtgatgtttaaagcgctaacgggctattgtaaatttaaagtgccaatattcctgaggttatattttgtttcatgc

SEQ ID NO: 86431 - DNA, 1164 bp, Zea Mays
agccgcagtgttgactaatattttcatctatagctacgtttgtcatgatatttgttttcgcatgagccatcgaaaccatttccttcctgtatttggataactaataactatcccgccctgtatcctaggaggattcctaaattagttttgtgctgatacatctatattaagctcaaatgaaacacgattttttatcaacacaatttgcctccttttcggttgaaacacaatttgcctcttgttacagtttgaacaagagggcctcgatgttggatgtgcaactggagtgccaagatctggagagaatttctatcgtaaatcgtttgggaagatttcatggccggaaccatgcagcagcagtcgagagttcatctgcttcagaaatgactccccggagaatttttcctgaaagacatgtcatgtcttttgcagtccctggaaatcttcctgaaggagtacactgtttatcactctagtggaatgatcttcaattactctctagccactcagatgatctcaggttgcgccccgtgattcccagtgctccttatccatgcaaaacatggccaaacagaagagtcatattatcaagaggtaactagagaaccggaagcgtcacaataccacgatgagggcaggccaggggacgtgttccagccgatcaagtctgtgctggctgtggttgttgtcccttatatcaagtataggtccatgtatattgtggaaagtcaaggaaaaaactgtggatctcccatcatttttctctgatgaagagtaattaacttcagatttttttagagaagtcgatgcatactagcttagtacatctagcgagtttcttcgctatttgtcagtctctaagaaatccctgatgatggagtgttggcaggctagagtggagataataatgtgagcctttctctgggttctttggttcctttaggatgggatgcaaattggctagtgtgtccagtctaactgaccacccttgttaggcagcagttaattactagttttatgtagtgctgaaagcattcatggaacaagtggcgggtaaagtgcttggaaattcttgtaacttgtgtacccgtgatgtttaaagcgctaacgggctattgtaaatttaaagtgccaatattcctgaggttatattttgtttcatgc

SEQ ID NO: 86432 - DNA, 1954 bp, Zea Mays
gtctgcgcacacccaaaccaccccgccacacaaagagcaaaaccctctttctctgcccctcagtcaccgccgcgaacttgcgtcttgcgatcgagggaggaacccaccaaatggctcgcgtggagaggcagccgcggaaccctagtaggctcgcccccacctcccacccggcgccggcgcttccgacgacgccggctgctcgccgccccggcacgccacggaacgctgcccagggcacagtttgtgcaacatgtgtttgcggttcaggaaataatgcccgctgtcactgcaagcaagacgcaagatccagacataaccaaacacaccacggtaatgatggaacagccacagccgggggaattgcaaaaccagactctcaagataagctcaagatggctagattttctggtggtacatattcaaaacctgatgcaagagtgaagctgattcctgcagaagatattacctatttacagcgtcggaaaccatgtggtagaactgttgggtcagttgggtcacagaaaagacattgcagaagaagtgtcacaccacctccaagttcacgaagagtgtctctcctaggatctagatcgcttgctgaaaatcctatcccatcagtgtcatcccatgactcgtgtttaccccataagaggcttgagacagctgaaaatagggacccatgtgctggggggcacataagtagctctgtgactccctgcacttctttgaaaaaccttgcatcaccgagttgcaaatcctcacaacctttgagtactaatttgaatactgatgctactccaagaaatttagacagaatggtaggcatacaaacacaagcactcgccaggagctccagttcgagtattttgcattctcaaggccagaacagtgaaaaagtgtctgctagtttgccaaaagaggcagtgacaaatcctgcgtctcctagtcccaagcaaattggtgctcaacatccaagtgacaatcctcttgttacgaaggcaggaccttctaagagtgtgtgcacacatgagagtgaaaagttgtgcagcagagacatcaatttaactgcaacaagtactacagttcctgtcttgcaagctcctgttgtggagcctgcattgctaagctcaacatctgtgttcactgaaaggccctttgaggtttatcctgacacaagaactgctgctcctggcatgcaggaacttagtgtgaagcatgtgttgctgaccccaatacctgtgcgtcatgaaccttctacggagtgcctaaaggttcctccaaaacacagcctgcattccattgcatctgcgcaacatggtgcattgtcgcaagaaagaaactcaggggcatcaattagccatggcagatcttcagcttcagaatttcatcgtaacatggatattgtggacacaggtgcactatcaatcttacatatgaagctggccaagaagcattatcaatcacaagcctgctggaagggcaactttcatgttactggaggactgatacatacttgtgatggacttgaagcccatttccctttagaaatttctgtaagagtttatgaagcttcaaaccaaatgcctgaaattttaaatctagaggctgtacctatttcccagctgtggccaaaaaaattcaagatggtacctcccgacattgaggatattggactatggtttctgagcagtcgccaaaggccacactggagttttgatcaccttcttgaaaaagtttgttcacatactggtctgttcacaaaaattggtgatattgagttggcagtgttttcatcgaagttgcttacaccacaagatcagaggaaagatggcaaattatatttctggggtgtttttgggaagcatatgaggaagaagtcatgccaaccaaacagtcatataaaaaatgtggagataagcaatcccagtcaaccaaatggcaaatctgaggaagt

SEQ ID NO: 86433 - DNA, 1781 bp, Zea Mays
ttttgttattttagtatccatgtactttcctttccattaactatcaacatcaggcttctatttttcttttaggggcaactttcatgttactggaggactgatacatacttgtgatggacttgaagcccatttccctttagaaatttctgtaagagtttatgaagcttcaaaccaaatgcctgaaattttaaatctagaggctgtacctatttcccagctgtggccaaaaaaattcaagatggtacctcccgacattgaggatattggactatggtttctgagcagtcgccaaaggccacactggagttttgatcaccttcttgaaaaagtttgttcacatactggtctgttcacaaaaattggtgatattgagttggcagtgttttcatcgaagttgcttacaccacaagatcagaggaaagatggcaaattatatttctggggtgtttttgggaagcatatgaggaagaagtcatgccaaccaaacagtcatataaaaaatgtggagataagcaatcccagtcaaccaaatggcaaatctgaggaagtaggcatgaaattggatatgagaaaaggcaaagaaaaagagagtgctaaatctgacgaggtattggattcaacaggaggcaatgataccgatagggtcaatggctgcgtggcagtgcttgaggctcctgattcagaccctgcatccagttgctcggttccggctgcctcttctcttggcggatattgccatcatgactctgcaaaaaatagctcttctatcttagattcttcatgccagcctgctgacggatcttctgttagcccagacctcatgctggacataccccctggaatttctgcgcatatacctcctggcttcacaaaagcccactgtcagcttcagatgggaactgctgctctgtcttttgctgataggcatcgcagtctgatttcggacattcctccaggctttactgaagttcatcgtggactccctcctgcaattccacctgctggaccagcttgtgtgtcgacccctgggactgaaaagaagcccttcgttaggttctcgcttaatgtcccaaggcctgttggaatgggagctccacctggatttactccactgcatgcagtgaagaaagagcctgggctgcctgatgtccatgagaccgcagataagcacacactacattctttggcagctgcggcagctgcagtggttaagcctgggaaaggaggtgaaatgaaaatcgcagacaatgaggtaaagactgaacaagatgaaaactcagaggaacgagattttccaaagatcaggaggctttcagacctgtactgtaggccttcggaggacagcactgaattttcccagcgtatgcctgcacgcttgcccgacaagtttcaggagcagagacccgagaaacgtcttgtgcatccacgggaggaggtcgggcggcgatgatgcctgcaaaggggccgatggcagcatcgccaggtggtcgtctggatagcgagtgcgttgtatgtggtgaagagttccccgcagagtgatttctaggattacctcgacaaagggtactagactgctttgtgttagtgattatcctgttcagcggcaatgatgtacatgcctggacaattagcatgctgagcttgtgcgtacaggccagcacttatcgtgaagtccgtgctacatcatcgaaacggttaacgatattgggtagttttggtgaaacccatgcatcaaatgtgatggtcgagcagcattactgtttttatagtgggaccaacct

SEQ ID NO: 86434 - DNA, 1106 bp, Zea Mays
atattgaaagaggtagtcgaaggggatttgaaatatagaatatacttaaagatttagccttgaataggagtgcatgaaaaacagctatctatttgtatgaaccttgacctgtggctttgggcttcaactctagcctaccctaacttacttgagactaaaatgttttgtggttgttgttaataacgatgatgacatttaggaatacattcacattagttccttttttatttaaatattttttttgttgctctgaaatttaatgctttcaattcaatggatttcagattgctgtgctcgcggatgacatattgaaaaatgtggaatatgatgctctaagggttattttcaacaagttccattctgtcatatcgtttaagcccacaatggtaacgatactgtcccctgaggttgcagaaaaagaagcagaagctggtgggaagacgggtgacctagattcttatgagattgaaggcggtgagacaaaagcagagatattgcaaaacctagctgagttccagttttcttgtgtcatgtacaatggtgccctagagaatgcatgcagtgagcttggagcccgtatgtctgccatggacagctctagcagaaatgctggcgatatgcttgatcgtctcacgcttacttacaacaggacacgccaagcatccatcaccacagagcttactgagattatatctggtgcatcagcccttgaaggataggtgaagagactatgtggacttctccctttttccccatttgtgttcctctcacatgaaggcttcttttcttccggaggctcagtttcaacccttctcgtttcacttttccttgataaacgtattctcatgctttattgcaataattaggccaacgacagtgatgatgccgtgcgcctttgcatattgcaaaaatgatgttctacatctatggtgaatggctggttttcataaatggtgatgatcaatatatgtatcttgcacatgattagcaagttcacgtgtctgccaaattgagccatataacgatatagcattaatgacatctgttcaatctgaacttccaacatttatccagctgaagaatctattttgaattttgatgctata

SEQ ID NO: 86435 - DNA, 2428 bp, Zea Mays
cgagggcaaaggggcaacgcgtccaaccggccggacctcaccggctcatccctcatcgccctagtccccaagggccaagtccccaaccccggctgacgactgtgcccgtctccttccctgattcatccgcaagcccacccgtcggcgatcgtccatgacggaggatcgagcgcacaaggtcgccgacgagcccgccgcctcaggcaggcaaagacctgaaaggaagaagaggaagtgggatcaacccgcggaggacttggtctccgcggcggtgacggctgctgccgtgtcggggatgcctgtgatgaatttcggtgctcttcctggcgttgtactgcctggcgtcaccgcatatggagctgctacattgccaagtgtagtccctgttccgtattcattgccgccccatattgcaccatcggtgctccagaatgctgctgcagcagcccagaaattgagtcaggcaaaaataccagatgaggtcattgcacgggaaattgttataaacgatgcagatccatctgtgcgatataagcttacaaaacgacaaacacaagaagagattcagaaatgcacaaacactgtcatcattaccaggggaaaatatcaccctccaaatttacttcctgatggtgagaagcccctctatctacatatctctgctggatctcagttgaaagatactgctgagcgcattaaggcagttgatcgtgcagcttcaatgattgaggaaatattgaaacaaggaacaacctcagagtccatatcggtccctttctcctctagcactggacaagctgttcgtccttttagtgcctcagtttttttgggttttgatgcagatccatcattgaatatcacagctcgaatccgtggtccaaatgatcagtacataaatcatatcatgaaagaaacaggggttactgttgtactaagaggaaaagattcggagaatcttggcagttgtcatagtgaagcctcacaacaacctctacacctatacctcacaagtatgcatttaaagaacctagaagctgcaaaagttttggcagagaacctcctggatacagtagcagcagaattcggtgcttccagaatttcttcttcaaaagtatatggtgctgttccacctcctcagcagttgttagctggtgtcgacacctcaggaacgaaatcagatgttcactatattgtagggcccaatgtgttatcgggagctacacattcctttgcatctactggagttattgctcctgttgttgctcctgcagtgacagtgcaatcaggggctccaacatattctggggttccactacccagtaacatggcctatcctattccaccagcaaacggtggggcattttacagtggttatggggacatttatccccaagcaactccgttgcagcagctggcattcacactcaagcatgcctcatcgtcggcaactcaggctgttccagtgacgtccacaccaacaagcatggctacaaaggggaactcaatcttggatgcggagatggataaacgatcccgaaggaaattccaggaactaccggtttcgaagggcccagcaacagaaagtcagaactcacaacaggggtccaaatttgttaagacaggtttagatagttcaggtaacattgggagctcatcaattgcacctccgaagaaagttcaccctggatcaaatggaatgcttccgcaagaagaagcggatatgccatcacatctctctatatccactaagatgctaccaccacccctgaagagcatgctgccactgccacccagaagcatgcccccaccaccacctaagagcatgcctccaccgccaccaaaatttccttcagatgagtttttgtcaagaaacgagaacaagttttttcctttaaaggagccaacagcacctccaaggtcctttgatgcaatatcagtcttgccatctgaacgacgaccaagggagcctaaggaggaaaaaacaaaaggcacacctgtgtctgatactttgctgaaacttattgattatggagatgacgacgatgacggcgatattgatgtgacagacaacacacctaagggcaatccaactcctggttcagagcagaaaccattttgggctgtttaaaactgggtctgctaacgtagtctagtgtgaattcttgttgataaggatgcttgctgccttggtgcatcttctgaattgaagaggcaatcgagctccttgttcgtgtactgtagtaattctaacaggcaatgagatttctttgaacttgtattcattctggcctagtcaaaatgaaccgtttgttgttttggttcagatacgatgatgtttcgtttttagattcgacgttggttgctgaactcgtagcattttaatgtcggtattatataattgttagagcctatgtcaattttgtatcca

SEQ ID NO: 86436 - DNA, 2709 bp, Zea Mays
ggggcaacgcgtccaaccggccggacctcaccggctcatccctcatcgccctagtccccaagggccaagtccccaaccccggctgacgactgtgcccgtctccttccctgattcatccgcaagcccacccgtcggcgatcgtccatgacggaggatcgagcgcacaaggtcgccgacgagcccgccgcctcaggcaggcaaagacctgaaaggaagaagaggaagtgggatcaacccgcggaggacttggtctccgcggcggtgacggctgctgccgtgtcggggatgcctgtgatgaatttcggtgctcttcctggcgttgtactgcctggcgtcaccgcatatggagctgctacattgccaagtgtagtccctgttccgtattcattgccgccccatattgcaccatcggtgctccagaatgctgctgcagcagcccagaaattgagtcaggcaaaaataccagatgaggtcattgcacgggaaattgttataaacgatgcagatccatctgtgcgatataagcttacaaaacgacaaacacaagaagagattcagaaatgcacaaacactgtcatcattaccaggggaaaatatcaccctccaaatttacttcctgatggtgagaagcccctctatctacatatctctgctggatctcagttgaaagatactgctgagcgcattaaggcagttgatcgtgcagcttcaatgattgaggaaatattgaaacaaggaacaacctcagagtccatatcggtccctttctcctctagcactggacaagctgttcgtccttttagtgcctcagtttttttgggttttgatgcagatccatcattgaatatcacagctcgaatccgtggtccaaatgtatgactatgtgatcctggttttatttgatcattttgttactagcacatctcagttaattttgttaattactcaatttatgtgctgttgtctttcaattttttgaaagatctaatcataaagctttctctggcatcccaatttggatgggagaaactgcttttctgctgttggtgcttgtgctcttttgttattatataggatcagtacataaatcatatcatgaaagaaacaggggttactgttgtactaagaggaaaagattcggagaatcttggcagttgtcatagtgaagcctcacaacaacctctacacctatacctcacaagtatgcatttaaagaacctagaagctgcaaaagttttggcagagaacctcctggatacagtagcagcagaattcggtgcttccagaatttcttcttcaaaagtatatggtgctgttccacctcctcagcagttgttagctggtgtcgacacctcaggaacgaaatcagatgttcactatattgtagggcccaatgtgttatcgggagctacacattcctttgcatctactggagttattgctcctgttgttgctcctgcagtgacagtgcaatcaggggctccaacatattctggggttccactacccagtaacatggcctatcctattccaccagcaaacggtggggcattttacagtggttatggggacatttatccccaagcaactccgttgcagcagctggcattcacactcaagcatgcctcatcgtcggcaactcaggctgttccagtgacgtccacaccaacaagcatggctacaaaggggaactcaatcttggatgcggagatggataaacgatcccgaaggaaattccaggaactaccggtttcgaagggcccagcaacagaaagtcagaactcacaacaggggtccaaatttgttaagacaggtttagatagttcaggtaacattgggagctcatcaattgcacctccgaagaaagttcaccctggatcaaatggaatgcttccgcaagaagaagcggatatgccatcacatctctctatatccactaagatgctaccaccacccctgaagagcatgctgccactgccacccagaagcatgcccccaccaccacctaagagcatgcctccaccgccaccaaaatttccttcagatgagtttttgtcaagaaacgagaacaagttttttcctttaaaggagccaacagcacctccaaggtcctttgatgcaatatcagtcttgccatctgaacgacgaccaagggagcctaaggaggaaaaaacaaaaggcacacctgtgtctgatactttgctgaaacttattgattatggagatgacgacgatgacggcgatattgatgtgacagacaacacacctaagggcaatccaactcctggttcagagcagaaaccattttgggctgtttaaaactgggtctgctaacgtagtctagtgtgaattcttgttgataaggatgcttgctgccttggtgcatcttctgaattgaagaggcaatcgagctccttgttcgtgtactgtagtaattctaacaggcaatgagatttctttgaacttgtattcattctggcctagtcaaaatgaaccgtttgttgttttggttcagatacgatgatgtttcgtttttagattcgacgttggttgctgaactcgtagcattttaatgtcggtattatataattgttagagcctatgtcaattttgtatccactgtcgtgcaaatttaatttttgtaatcagcctaaggtcacgacattgcttggaaacactttttttaatgaaggaaaatggcaggacata

SEQ ID NO: 86437 - DNA, 2283 bp, Zea Mays
cccaaatctaccttataagcgcgcgtagccttggcagctcgacgcatcttcgccgccgctcaacgttccccccacgccccaacctatccacgcgaaaccttctttcccccgggagacgattcgtcagggagaggaaagaggcaagaggggccatggacgctgccaagttggtgacgccggtcgctgtgtctcacattctggcgcacccgtcggcgggctccgacggcgcagtgaccgatctcgtcgttcaggtcctcgacctgaagtccgtcggcacgggcagccggttcagtttcacagcaactgacgggaaggataagatcaaggcgatgcttcccaccaacttcgggtcggaggtccgctctggcaacctgaagaacctcggcctcatccgcatcatcgactacacttgcaacgtcgtcaaaggcaaagatgacaaagtcttggttgtcatcaaatgcgagcttgtgtgccaagcgcttgacgccgagatcaacggcgaggccaaaaaagaggagcctccaattgtgctgaagcctaaggacgaatgcgtgggcgtgactcccccactcgctatgaagcccaagcaggaggtgaagtctgcgtcccagatcgtgaatgagcagcgtggaaatactgctcctgtcaagcccctttccatgacaaagagggtccatcctttgatcactctgaacccctaccagggtaactgggtcattaaggtgcgggtcacgagcaaaggcaacctgagaacctacaggaatgctcgcggagaaggctgtgtcttcaatgtagagctcaccgatgaggatggcacccagatccaagccaccatgtttaatgacgctgcaaagaagttctatccgatttttgagctgggaaaggtctattatgtctcaaaaggatctcttagaattgctaacaagcagttcaagactgtccaaaatgactacgagatgtcactaaacgagaatgctattgttgaagaagcagagggggagacttgcattccgcaagtgcaatacaaccttgtcaagattgatcagctaggatcgtatgtcggtggcagggagcttgtagatattgttggtgtggttcagagcgtatctcccacactcagtgttaggagaaagattgacaacgagacaataccgaagcgtgacattgttgtggcggatgactctggcaaaactgttagcatctctctttggaatgatcttgctactacgaccggccaagagcttttgaacatggctgacagttcgcctgttgttgcgataaagagcctaaaagtgtctgacttccaaggcgtgtctctttctactgtaggcaaaagtactcttgcgattaatcctgatctacacgaggctcagaatctcaaatcatggtatgactctgaaggcaaagatacttcgctggcaccaattggtgcagaaatgggtgccgcacgggccggtggcttcaagtccacgtattctgatagagtttttctgtctcacattactagtgatcctgccatgggccaggaaaagcctgttttcttcagtttgtatgccaccataagccacatcaagcctgaccagaacatgtggtaccgtgcttgcaagacctgcaacaagaaggtgactgaaacttttggatctggatactggtgtgagggatgccaaaagaatgactcggaatgctcactgagatacatcatggtcatcaaggtctccgatcctactggcgaggcatggttctctgtgttcaacgagcatgcagagaagatcattggctgcagcgccgacgagcttgatcggatcaggaaagaggagggggacgacagttatgttctgaagctcaaggaagccacctgggttcctcacctgttccgcgtcagcgtcacacagcatgaatacaataacgagaaaaggcagagaatcactgtgaggagtgaagcgccggtcgagcacgcagctgaatccaagtacctgcttgaacagatagcgaagcttactgcttgatagtagaagatgcaaccttactgcaaatagcgaggattattaggactaattgatggtgtcaggtcattgcggccctaagctttagctatgtatcagcagtcagatgtattaaccattccctgctctaatagtcatctatcagcagtcagatgtatttaaccattccctgcttaatagctctctaccaggagtcggaagtttttaaccattccctgctctaagacaagataaattgctcgatctacatcgttgtgccacgtattcagtcttttccccg

SEQ ID NO: 86438 - DNA, 195 bp, Zea Mays
ttatttttttattttattttatttactttctgtgattatatttactgtattttaagtaggctaatcactgttcatgctatgggaaaataggaagtttaatttaaaattccgttatgctattgattcacgtagttaattgtttaccctgtgcaatgttgatcaactaaaagtgattaggtttccattagtatatat

SEQ ID NO: 86439 - DNA, 104 bp, Zea Mays
cctctaaacttcttgtgggctctcttgagttacctaagagtagtttttcatacgtctacaccaccacacctaactggactcaaccaagtcaagttagcaatctc

SEQ ID NO: 86440 - DNA, 510 bp, Zea Mays
catgagctgctcttcgggcccctgatggtggcgggctcgaggaggggaacctcttcgctgaggagcgcctgcggcgagagcgcagcttcggggtcacccgctatgatgtcgaggccaccccagtggtcggctacttcccctttgggtacgactgtatcctttactgggtccgcccttattctgtacaacgcatcccttcccttcgtgaggcacagccagatcagactattttatgagttcattagccaccctacatgaagtttttagaatacacccccttcgacaggtaaacgtggtgttttcttttgtcggtgatgtgcttttggttgcatgagatcaattcgttttccccaatctacttattttttgttgttttgttgatgtttccagcataaatttgttcctcgagcagctcaaccctggtgattgtacaatcaaagggaacctcgatgccttctcatggaagcacactatgacgaccttcggctttcaacaaacctaaaacgtgag

SEQ ID NO: 86441 - DNA, 1228 bp, Zea Mays
ccagctctccgcccgatcgctgcgtggttggtctcgtgcgtacggacccatgtgtgcggggggcccagacattattgcaggaatagaaaccctacccctatcttctcttgcaacccaactctctctctctctctctctatctgtctgcccgtggcgtgctccactgattcttcttcttcttctacctcccggcctcctcccccttcttctttgcctgccttattagtatctcgcctcacaccacacagctagcagacagccagacacgcgctgctttctgatctctccccggatcggaggctcctcccaacataccaccctgccagccgcgccgccacgtccacgccggccggccaccaagcaagcatggatatggtttcgcagtccgagcacctgtgctacgtccgctgcacctactgcaacaccgtgctcgcgctgcaggttggggttccatgcaagaggctgatggacacggtgactgtcaagtgcggccactgcaacaacctctcctacctcagtccacggccccccatggtgcagccgctctcgccgactgatcaccctttggggccattccagtgtcagggaccctgcaacgactgcaggaggaaccaaccgctgccgctggcttcgccgtcatcaactgagctaagcccgagaatgcccttcgtagtcaagcccccggagaagaaacaccgcctcccatctgcttataatcgcttcatgagggaggagattcagcgcatcaaagctgcgaagccagatatccctcacagggaggccttcagcatggctgccaagaattgggcaaagtgtgacccgcgctgctcgacggctgcctctaccgaaacttctaacagcgctcctgctgagcctagagttgtgcccactccccagttaactgagccacgctttgacctggaggatagggccaaggggcaagtcattgagagcttcgacatcttcaagcatattgagcgcagcatctagaggtcgttcgatgccgctgttgtagcccagtatcgatcgagtaccatcagctatatgtataacctatcccgtatcgccgtcgtcgcctcgcaatcatgcatccccatcctgtacttttacccccgtacgtgttactgttgctgttattctcgttatggttggattgtacgcaccatttaattatgaacagctgctacctatatatataatatttgccttcttttttgttcctaatata

SEQ ID NO: 86442 - DNA, 1225 bp, Zea Mays
ccagctctccgcccgatcgctgcgtggttggtctcgtgcgtacggacccatgtgtgcggggggcccagacattattgcaggaatagaaaccctacccctatcttctcttgcaacccaactctctctctctctctctctatctgtctgcccgtggcgtgctccactgattcttcttcttcttctacctcccggcctcctcccccttcttctttgcctgccttattagtatctcgcctcacaccacacagctagcagacagccagacacgcgctgctttctgatctctccccggatcggaggctcctcccaacataccaccctgccagccgcgccgccacgtccacgccggccggccaccaagcaagcatggatatggtttcgcagtccgagcacctgtgctacgtccgctgcacctactgcaacaccgtgctcgcggttggggttccatgcaagaggctgatggacacggtgactgtcaagtgcggccactgcaacaacctctcctacctcagtccacggccccccatggtgcagccgctctcgccgactgatcaccctttggggccattccagtgtcagggaccctgcaacgactgcaggaggaaccaaccgctgccgctggcttcgccgtcatcaactgagctaagcccgagaatgcccttcgtagtcaagcccccggagaagaaacaccgcctcccatctgcttataatcgcttcatgagggaggagattcagcgcatcaaagctgcgaagccagatatccctcacagggaggccttcagcatggctgccaagaattgggcaaagtgtgacccgcgctgctcgacggctgcctctaccgaaacttctaacagcgctcctgctgagcctagagttgtgcccactccccagttaactgagccacgctttgacctggaggatagggccaaggggcaagtcattgagagcttcgacatcttcaagcatattgagcgcagcatctagaggtcgttcgatgccgctgttgtagcccagtatcgatcgagtaccatcagctatatgtataacctatcccgtatcgccgtcgtcgcctcgcaatcatgcatccccatcctgtacttttacccccgtacgtgttactgttgctgttattctcgttatggttggattgtacgcaccatttaattatgaacagctgctacctatatatataatatttgccttcttttttgttcctaatatatgc

SEQ ID NO: 86443 - DNA, 296 bp, Zea Mays
gccgggggaggggcgggcgaggccgcgggagggaggccgggcgggggagccggggtcgggcgccgatcgggcgagccgggcgccgccggggaggggtcgagcggggaggatcgatcggggaggtcgggttttttttttttttttttttttttttttttttttttttttttttctttttttttttttttttttttttttcttttccgctggtgagctttttttttttttttttttttttttttttttttttttttttttttttttccttttgtgtgttgttttgttttttttttttt

SEQ ID NO: 86444 - DNA, 100 bp, Zea Mays
gccacatctatgttgatcagactagtcagaaactcccagtttgtaataatcaacttcttatccttactgcctagtacaatccactaactgaaacaggata

SEQ ID NO: 86445 - DNA, 96 bp, Zea Mays
aaatatctagccaggacaacatagttagtctggtgcgaatgatgccacagtttaccgacctgcactggaccttttcgcctgtatgtaataataatc

SEQ ID NO: 86446 - DNA, 2182 bp, Zea Mays
cgcgatcgtgccgccgccttctcttcaacagcactcatctatcgcgctagctccacttcacacggtcaattcccctcgcgtaagccaagcgttggggtgatcctgaagaaaccggccggcctgcaggcgccatataatcccaaccacaccgcatcgtttggatgtgcagttcttcgtatccacaccgcatctagctagcttgtggccaagtgttcgagatagcattgccggccggggggagcaagagatatgggtagcttgggagaggtcggtgatggcaaggagatattccatggccatggccattctgaccctgtcgtcgacgagctcaaccgtctgcagaatctcctcagagaaaaggaaagagagctaggacatgcatacagtgaaatcaaaggcttgaaggtgacggaagctctgaaggacaaggctattgctgagctgagcaaggaactaaagagacaggacgagaggatgagaagtatggagaaacaacttgagcagaagaatctagaagtgaaaagactaaataacgagcgtaaagaagcattgtctgcgcagttcgctgcagaggcgacacttagaaggatccactcttctcaaaaagatgaggaatcagttccattcgacgccatcatagcgcccttggagtcagacataagaaaatacagacatgagattgcagtgctacaagatgacaagaaggcactagaacgacatctaaagttgaaggaggtggcgcttgttgaagcaggcaacattttgcacaccgcgcttgaaagggcactcatagtagaggatgttcagaatcagaacattgaattgaagaagcatatggagatataccatgaagagaataaattgttagagaaggctaacagacagaaggtgctagaggttgagaagctcacacaaacaattaatgagcttgaagagtccattctcgcaaccggtgaggttgccaatgtggtccacttctaccagaatcaagctacaaagttgaatgaggaaaagaggacccttgagagggagctagctcgagcaaaggtttatgtcaatcgtgttgcatccacagcagcaaatgaatggaaagatgactctgacaagctcatgccagtcaagagatggctagaagaacgaaggctcctgcagggagaaatacagcgattgcgtgacaggataacagtagcagagaaatctgcaaagattgaagcccaacttaatgataaactcaaaaggaggctcaagtcgcttgaagaggatatgagaaataaaacatccaattcgtctacaaaagaaattaataaacaagccactcctaaaagatcattgtctcaaccaaaacaacctaaaacaatgagagtgttacctcaactatattcacctgaagtcgttgacaagagaaggcctatatctcaaccaagggcatcaatggtagggaaagtattgaagcaacctaattcagaaatcgagcctacaaagaaaagtacagttgttaagcgatttgatagccctggaaggagaacaatttctagtaaagaagagtgtcccatgaaaaatcaactatgggcatcaaaaaccaaaacagatgttattgttgggaaagagaacaaagtacaaaagccaaattccaaggcacgtttaaatgcttcacattcacaaggccatgtggacacaaaagtatttgatggaaatgatgaatatggacttcaaaatagtgaacatcatgaagccatggcaaatgagagaaatgggaatagctcgagtgatgaaagtagcccttagaacaacaagacaagttggagtgttggggtttacttttgcatgaagacacaaaatggaagcacaaataacattattatgtacagatgtagcatgacttattttaaaggaagcgtgtgcccatctacatctattttattctgcccgggagattgcttgaacaacaaaactagttgtggtgtcatcattttgttttgtctctttgttctctcatgtacatacaaactatacctcaaactttacaaatgtaattttgtgcgactattgaaaaaatcaatatgtgcttttttgaggaattggttactttataaaataaaaaggtgtctaatgtaatagaagcaacagagaaaaaagtgaagggtgtgaatcaataaaaccatggatgttgaatgttgatgtt

SEQ ID NO: 86447 - DNA, 1042 bp, Zea Mays
gtttatataaaagcaactattttaagcaatttaaatcgaacaaaccttaaagtatattttctttaatgttggtttgtttcctaggataaactcaaaaggaggctcaagtcgcttgaagaggatatgagaaataaaacatccaattcgtctacaaaagaaattaataaacaagccactcctaaaagatcattgtctcaaccaaaacaacctaaaacaatgagagtgttacctcaactatattcacctgaagtcgttgacaagagaaggcctatatctcaaccaagggcatcaatggtagggaaagtattgaagcaacctaattcagaaatcgagcctacaaagaaaagtacagttgttaagcgatttgatagccctggaaggagaacaatttctagtaaagaagagtgtcccatgaaaaatcaactatgggcatcaaaaaccaaaacagatgttattgttgggaaagagaacaaagtacaaaagccaaattccaaggcacgtttaaatgcttcacattcacaaggccatgtggacacaaaagtatttgatggaaatgatgaatatggacttcaaaatagtgaacatcatgaagccatggcaaatgagagaaatgggaatagctcgagtgatgaaagtagcccttagaacaacaagacaagttggagtgttggggtttacttttgcatgaagacacaaaatggaagcacaaataacattattatgtacagatgtagcatgacttattttaaaggaagcgtgtgcccatctacatctattttattctgcccgggagattgcttgaacaacaaaactagttgtggtgtcatcattttgttttgtctctttgttctctcatgtacatacaaactatacctcaaactttacaaatgtaattttgtgcgactattgaaaaaatcaatatgtgcttttttgaggaattggttactttataaaataaaaaggtgtctaatgtaatagaagcaacagagaaaaaagtgaagggtgtgaatcaataaaaccatggatgttgaatgttgatgtt

SEQ ID NO: 86448 - DNA, 435 bp, Zea Mays
cgaacagggaaagtgaaaaatcgctttcgcacaagtcgcggaacagaggcaagcgctgtgccacacagcgggagtcctccccgactccccgagagatttgctgcccagagccttcgaatcgggttcaatcccgtcgatctttctgcccgccgccgccacgggactccagaagttgccttcgattcggccggggccgtggaagcggggatggggctcggagaggcggcggggcggctcctggcggccgtggactgggagcgcgaggcctaccctgcgtacgacgacttcctcgcgctccccgccttcgttctcttcttccctaccgtccgcttcctcctcgaccgcttcgtcttcaaggtgcgactgcccttgccgtctttcgtttttccttccgttgtttcggtgaaggtcttcgactctggcgctgaacgctag

SEQ ID NO: 86449 - DNA, 502 bp, Zea Mays
cagcaccagatctgaaccgtgctattttgtccggacctgtgtcagcccaacgaccctgggccgtttggacaactctagtctgttcgggcgatgcagttggcccatataccacgggtctctcgaagctcgtttgcttctctcgcgctccgcctctcccttgacatggcggctgcgacggcggcaggggccgccgccacggccgccgccgtatccctaatcgcctgctacatcctcctccacaagagtagagccaaactctcgtggttccctacggttgggttctcccgcgcgagcggccggcgggtgcgacggaggggtctcgtggaggccatcggcaacacacctctcattcgcatcaacagcctctccgacgctacaggatgcgagattctggggaaggctgagttcctgaacccgggtggcagcgtgaaggaccgcgtggcggttaagatcatcgaggaggctctagaatctggaaatctcgtaaaatggtggacctgga

SEQ ID NO: 86450 - DNA, 1053 bp, Zea Mays
  misc_feature (85)..(85): n is a, c, g, or t
atctggagatctcgtatatgtgggtactgtacagagggggagtgctggaagcacagcaattagcttggctactgttgctcctgcntatggttgtaggtgtcatgtgtaaatacccgatgatgctgccatgaaaaggtctcaaataattgaggcgcttggagctactgttgaacgagtgcgccctgtttcaataactcacagagaccattttgtcaacattgccagaagaagggctttagaagcaaacaagttagcagctgcacagagagaatcaagcgagaaacaaactaatggtttaacacatgtcgattctgagatgctggatgacaaattagcggttatgcagagggaatcaaacaagatgcaaaatggtggtccagcacatgtcaatactgaattttcacactgtgggaaatgcgatgtgaattctgattcaaagggaggtttttttgctgaccagtttgagaatttggcaaactatcgagcacattatgaatgtactggtcctgagatttggaaacagactaaaggtaacctgcatgccttcgttgcagcagctggtactggcggtacaattgccggagtctcacgatatcttaaggaaaagaacaggagcatcaaatgttttttaatggaccctcctggatctggtctgttcaataaggttaccagaggggtgatgtacacaaaagaggaggccgaggggaagcggcttaagaacccttttgatactattactgaaggaataggaatcaatagggtcactaaaaatttcatgatggcggaactggatggagcctatcgaggatcagatagggaagctgttgagatgtcaaggtacatggttacgagtgaaatttttgttgttatttagaagttttgatctgtaataacaataagtgtgcataagttagccctgcaccacaatttttatttactacattctacagtatagtctgtggactgacatattagactaagaacatttttttccttcttttattgcatcccacttctcttcacttgttgcactgtacctttatcttgtcaaac

SEQ ID NO: 86451 - DNA, 1411 bp, Zea Mays
  misc_feature (85)..(85): n is a, c, g, or t
atctggagatctcgtatatgtgggtactgtacagagggggagtgctggaagcacagcaattagcttggctactgttgctcctgcntatggttgtaggtgtcatgtgtaaatacccgatgatgctgccatgaaaaggtctcaaataattgaggcgcttggagctactgttgaacgagtgcgccctgtttcaataactcacagagaccattttgtcaacattgccagaagaagggctttagaagcaaacaagttagcagctgcacagagagaatcaagcgagaaacaaactaatggtttaacacatgtcgattctgagatgctggatgacaaattagcggttatgcagagggaatcaaacaagatgcaaaatggtggtccagcacatgtcaatactgaattttcacactgtgggaaatgcgatgtgaattctgattcaaagggaggtttttttgctgaccagtttgagaatttggcaaactatcgagcacattatgaatgtactggtcctgagatttggaaacagactaaaggtaacctgcatgccttcgttgcagcagctggtactggcggtacaattgccggagtctcacgatatcttaaggaaaagaacaggagcatcaaatgttttttaatggaccctcctggatctggtctgttcaataaggttaccagaggggtgatgtacacaaaagaggaggccgaggggaagcggcttaagaacccttttgatactattactgaaggaataggaatcaatagggtcactaaaaatttcatgatggcggaactggatggagcctatcgaggatcagatagggaagctgttgagatgtcaaggttcttgctgaaaaacgatggactatttgttggcagttcttcagccatgaattgcgttggcgctgtaagagttgctcaagatttgggtccagggcatacaatcgtgacaattctttgtgacagtgggatgagacatttaagcaagttcttcaatgagcagtatttggctgatcatggattgacaccaacagctactggtctggaatttcttgataaatgagcatttcacagggacttttcaatttcaggaagttggcatcctccctgtgactgcgatgataccttgacacaagggtgaacgctgaataggtcaaagcatgaatatatgccatacaaatggtgaacctgatgtgttttaagtactaattgtagtctagtataggcattgccattggataggattgggatagccagtgttttgatccttgttttgatatatatctattgaggctcaggctgttaccagttagaatgctgcactgagcatctttgctgtaaacaactgcaacatatgcattttttttgttaaaaaatgtttcaagaacaattcacccgtattgatcttttgtgttgt

SEQ ID NO: 86452 - DNA, 1706 bp, Zea Mays
cctaaaacccccctcagcaaaaaccctgccatttcccgtgctgcccccctcgccgcccgccgccgtcgccgcctcctatgcccttccgcccctccctaccttgccgctgtccctttgaccgcaagctcacgtccttcctgtcggcggtcgcctccctcgccgactcccgctcccgctcgcccttcccccctgccggcgctgtgcctgcaactctcactcccactgcctacaacgcccttatgtccgcctactcccgcgccggccgccacgacgaggttcttcgtctcttcttctcccttcctttcgcgcctactgcgccactcttcaccaccctgatttcctctctcgccgcctccggcagcaaaagcgccgcattggacgccttctccctccttgcttccggcatcggacccaccacctccgccttcaccgcgctgcttaagtccatcgacgctgcctcttccgagtcggtgtatcgtgccttcttcgcaaccatggccgctatggagtgcgcccctgacgctgccacgtacaactgcctcatttggatactctgcgattcccagcggctggacgaggcatggggcgtccttgacagcatgctagaggtaggcgtgtgccccaccgtccgctcctacaccgcgatcctgcacgggtactgtaagcagggcagggtcctcgaggcggagaggttacttgataccatgattcaagtcggatgcgcaccggatgtcatctcatacagcgtgctcatccaggggctttgtcgtgtaggggaatttggcaaggtggaaagaattttaggggagagtgaggcgaaggggtggacgccgaatgctgtcacctacaatatttacatgtctgccctgtgcagaatgggtttcttggatgaggcattccggcaagtagatgttatgcatagcagaggagtgtacatgaccattgagacagtgaatattctattcgattgcttgtgccgtggctcgatgttttcagaagcattgacattgctggaatgcagtgaagaactcaactgggatgttgatgtgttctgctataacactatgatgagtaggctctgcgacactggtgatattgctagagtcctgaagctgttagttgatcttgtaaagaagggaattgggccagatatgtttagttttactattgcaatccggagcctctgtagggctggaaaattcaaggtggcaaaatgcctactggataataagggaattgaatatgacgtcgtggcattcaatactttgattcatggtttgtgcatggctggagagctacatgaaatgttgcaaacctatatggatatgaccagtagaaatgtttttccaaacaactttaccattggtatggtaattgacagtttctgcaaaaatcgagaatttggtgcagcaatcaaagtttttcttgaatattcagaaggatgtttagttcctgatcatttttttcgcctgaatacttggttggtaaaagcaaaaggatgggaatatttactgaccctgctccgcacaatgcgttctaaaggtcttgtgctagatgtttgcttatttaattcattggttaggatgttttgctgtgaggggtactgtaatcgtgaaactttttgtgaagtttctcttatacttgacagtatgctggaatgtctctccagcacacagcacaagtcagccagtggtgtaactgtataa

SEQ ID NO: 86453 - DNA, 3109 bp, Zea Mays
gccagggaagtctgctactgcctccagtcccagatccacccgtctgttccgccccgccgcgcgcaccatggatcccccgcggcggcggctacccgccgcgctcgtcgtcttcctcctgctcctcgccgcggcctctcccgtcgcgcgcgcgtggaagaaggacgagtttcgcaactgcaaccagacgcccttctgcaagcgcgctcggacccgcgccccgcactcgctcgacgcgccgctctccctcgccgccagctccctggccatctcccccgacggctctatctccgctgagctctcccacccgtcccgcccgcggcccctcgtgctccgcctctctgcgctgcccccgcacgcgctgcggctccagatcgatgaggactactccaccgccacgccgccgcaccgccggtttcacgtccccgatgtcctcctcccggacctcgaggcccgcacgctccacctccccgagcccaagactgccgctggcgtatccaccgttgcgctctcctccgaccttgacgtcgtcgttagacacgatccgttcgagcttgccgtccgccgtgctgggtcgggcgatcccgtgctctccttcaactcccacggcctcttcgacttcgagccgatgcgggagtccaagccggaggacgacacgtgggaggagcacttccggagtcacaccgacaagcgcccccgcggcccgcagtccatcaccttcgacctctccttctatggcgcggacttcgtctacggtctcccggagcacgggtccacctcgctcgccctccgccccacccgcggcccgggggttgaggagtccgagccctaccgcctcttcaaccttgatgtcttcgagtacctccacgaatcgcccttcggtctgtatggctcgatccccttcatgattgggcatggcggccgggcgtcgtctggcttcttctggctcaacgcagcggagatgcagattgacgtgcttgcaccaggttgggatggggtcactgaccatgagaacgggcggatcgacacactgtggatggctgaggctggtgtcatcgatgcattcttctttgttggttctgagcctaaggatgtgatcaagcagtacataagtgtcacgggcacaccttcaatgccacaacagtttgctactgcgtatcaccaatgccggtggaactaccgggatgaggcagatgttgacggtgtagatgctggttttgatgagcatgatattccatatgatgtgctctggctcgacattgagcatacggatggcaagcggtactttacatgggatcattctgctttccccaatccagaggagatgcagcgaaagatagcagataaggggaggaagatggtcaccattgtggatccccacatcaagcgtgacagttcattccacctccacaaggaggcaacagacaaggggtactatgtgaaagatgcgaatgggaatgactttgatgggtggtgctggcctggatcatcatcctatcctgacatgttgaatcctgagatacgtgagtggtgggctgacaagttctcctatgaaaattacaagggatcaactccaacactgtacatttggaatgatatgaatgagccatctgtcttcaatggccccgaggtcaccatgcccagggatgcaatgcattatggagatgttgaacaccgagaattgcataatgcatatgggtactactttcatatggctaccgcagatggacttctcaagcgaggcgaggggaaagatagaccctttgttttgtcaagggccttctttgctggaagtcaacggtatggtgcagtttggacaggcgacaactccgcagactgggatcacttgaaatcttctatcccaatggtcttaactcttggtcttactggcttgcctttctctggcgcggatattggtggattctttggaaacccagaaccagacctattggtgcgttggtaccaagtaggagcattttatcctttctttaggggtcatgctcatcatgacaccaagagacgtgagccatggttatttggagagcgaagaactgccatcataagggaggcgatacatatgcggtattcattgttgccctacttctacacgctgttcagagaggctagtgtaaatggcattcctgtcatgcgtcctttatggttagaatttcctgacgataaagaaacttataacaatggcgaggcatttatggtggggcccagccttttagctcaaggaatatacgaagagggccagaaatcagtgtcggtctaccttcctgggaaggagtcatggtatgacttgagaaatggatctccatacaagggaagcgcgacacacaagctacaggttttagaagatagcattcccagcttccaaagggctggtacaattgtgccaagaaaggacagattcagacgcagttctactcagatggtgaatgatccatacactctggtgatagcactcaatagctcaggtgctggagaaggcgaactttatgtggatgacgggaaaagttatgagtaccagcaaggggcattcatccatcgccgatttgtctttgcagacaataagctaacttcattcaatattgggcctgacgatttgggcaagaaatttagaagtgattgcgtgattgaaagaattataatcctcggtttacgatccggagtgaagaaggctattattgagcctggaaatcaagaactagaaattgaatcagggccaattagtttaaggagtggttccagcccagtcgcgccaacaatccggaggcccaatgtttgcattgcagacagttggactataaggatagcataaaaggtaggccattcacatctggatcctgatgtctgatgtcttcttttgtctgctgtcaggttgcaaaattaggccagcctttagaagtttagttgtggccttgaaatatttgcatgtaactggtacttaagctgttccaactgccaattttgacataaatacttatatacattgctgatgtatattgtagctttgatacatgagcattttatcttgcaaaaatgatatacagttagtcagttacaaattctctgagaacatgacaatcgagttctttttttatttttt

SEQ ID NO: 86454 - DNA, 1632 bp, Zea Mays
aagggggggaaaaggagaaaagaatggagttactagagagacactttaccgatgtatggtattaaactgacatcctggcatgatacaacataaatcaacggagcaacgtaaactctccacgcaaggccacaagtcagacgatcaggaggggatagtcccatagctacatctacctccgatatccgaagctttaaacaccagcagaacacgtactatacttcgctgatgctacatgagaggcgcatgcgcagcgcggcgcagccttatctgtcagcagtgtgccgcagatcatcagttccaagccaatccatcatcagttccggagaaacgtccatggtcccctcgctgcccccatcctccaggtgctagctatggtcctcagactcatgtagatcgtcaatgcgatccatataccgatgaatccgttatgcgcagaaaggtacagcaggcatggtatcgacacagacgcaacagcaacctgaagattctcattcaggtccattttcattgttgggaagagtttcagagttgaaacctgacttttttatcagaatgggagatgtgaaaagagtttaccatggagtaagcagagtatctgtagtctgacgctccaaagttgatgccatcaaacacgaaggccagggaattgatggtctgcgtcccggcgacaaactgaaccgagataaaagatgtctaattcagtgtctgaatcttgtgaaatgcttgcgtatggagcggcgttgtttcgatagccaggccagggcacgtccttaccgggatgcctctgtgaatgacttggatcacgggcacgtcgcttgtgaaaatgccagccccgaacctcatagcaagtcccagcacgacggtgagacccatgcccaggacaatgctcagctgcaaggcaaagaggaccattagcacggtatgacacctgggttgctgttgcaggaaaagggttgacaaggacctgatacacactgctgttctatattgtgactttacctgcaacacacgggatgtcgcggcagcgaccttcttactgtcgttcttggcgaacgcgcttgcaagcaccgcctgcagtcagtcaacaacagcaggattcaattcgtgagtcgtgacgcaccgtctggttatgaacgaagctcactacgccgactagtctaaaaaaaatggttgtaaacctgacctgtcctgccacggccaatccatcggcgagaagagacgtggccagccagagctggcagcagatctggaagcctgccatgacggtgggtccatggcgagcggccagggacgccgccagcgtgacgcagaacgtcaccgcgacaacccttgcgagcagcaggaatcctgaagcagaaacaaaaagttcaatctccttcctgagggtagatattattatccgggctctggattccaacggtatctcaccacatccaagaaacctcccaaatttcagagatttaatgctgggtgggataacgtgaactcgctggacgagccggcacagcagtatcaacgttatcatgtacctgcaataaggggagagagagagagaaaacagagagaggataagcttatcatagaaatagaaaagctgttatactttctctatcggggaaagcaagacgcgtg

SEQ ID NO: 86455 - DNA, 110 bp, Zea Mays
tggccagacgccgcttctttctttctttctttctttcttttctcgctgctgctgttgtgatgctcagttgcttgctgtgtgttgcctgattgcctctataaataggcggc

SEQ ID NO: 86456 - DNA, 2163 bp, Zea Mays
cacccgtcgtgcacccggccttttttttcctcccgacgccttctccctccgaccaacaccttccacagacccaaagccacccgaccgttgccgcctcatcacagcccgaggaaaagagaagcccctcgtctcgtccgtcaacatccctgtatccacgcgcgcacgttcaccggcggccccccctctctttccgttcggacctcctaggcctgagcggcctcgatgtcggcgcggcgggcggccaagagccagcacgcggcggcgacgccgaggatcatcaacttcaacctggcgaggaggtcgggtggcgggaggcccagccgggccgcgggccgcgcgcagccccgcccgccggcaccgccggcggggccggtcaacctcggcgcgctgttcgagatggagcgccgcgcgcgcgggctcgagtccgcgccggcgtcgccgccgtgctcccgggcggtgctgcggtcgcaggaggacgccgaggaacaggaggagaagtggcggtttcaggcggagatcctccgcgccgagtgcaacttcctccggatggagcgcgaggtcgcgctccgcaagctcgaccgccaccgcggccagatggaggccgcgctcaagtccgccgtcgaaacgctcgtatcgggtaggaagaagatcgatgggaagggcgacgtcggcctggcggcgacgctggacgaggggatcgaggacctcgaggagatgatggaggagctgcgcgtggaggagagcgggaggagggcgatgagcggtgtccgtgagctgcagcggagccacggcaggaacttcgatcggcaggcgtcctcgctccgccgccgcctcgagaagatgacgccggccgaccccgagccctgcatcaaggacatccgcgagatcgccctgcccgtccctgcgccaccgccaccaccggccgagcgaagcgacgacgacgaacgcgtccacggcgccaacacccccgatgtggaaatgctgaggatgaagatggaggggatgtcaaagggcatgcgcgagcggatggcggagtacagccggcgcctggaagccgtcgcctccggcgacaacactggctgcgagtcagggaaatgcggcaaccggcacagccgaaaggcgagcgcgagcagccagagaagctggagcggcggcagcacggcgagcaacggcaacgcgccgtcgaccctcgacgccggcccgcacggccgcagccgccagaacgtggcggccgagaagcgccagcagcagcagacgattatggctggagagtgcaaactggtgggctcggcaagttgctgccactgcagggaaatcgtgtggaaggtaatggagcaagtaaaggcagaatctgatcaatggactgagatgcaagaaatgttggagcaggtgaggttggagatgcaagagctgcaggcttccagagatgcatggcagcatcgggctatggcttctgacatcagtctacgctccttgaattcccaagtactggagtggaaaaaccgggcacaagcgtccgaacagcgtgtagaagagctgcatagggagattttagagctcgaaagcaagctacacactttcaaagcccacttaccagctccagctgctattcctaaccaaaagcaatggtcggatgcgtgcaagatggagtacccgagagcaaagcctcagcacccgcggtcccaggaatccggcaaggaggagatcaagaagcacgtcctcatctgccgcgtgaagcgctcacccagcagcgtgctctcgaagcggtcgccgttccaggagataggcaacatcagcttgccgcggcattagtgaggaccgaggagcatgggtggcgatgttgctctgtgacctgtgtgtgagtgatggggatactgcagcgaaaccgcgaagggttcagccgtaagcgggagagagagtagcatcgtgatcgatcagcatctacgtaataaataatttatgtatgacccactgatgagtaacaaggcctgacttctcgtcagatcggtagtaataattataagtagtcagtgactgagttgagagcctgagatggagttaatctgcccggagtacagtgccggtgaataggtcagatatgtatgtaacgataacgcctctttttgctaatatatatgtgcaattttgttcctcctgcattcc

SEQ ID NO: 86457 - DNA, 327 bp, Zea Mays
atgccgatggtgacgttgagctggaacaggatgttgagcccgccgcggatcctcgtcggcgcgatctcagacaggaacaggggaacggcctggttggcgaagccgacgccgcagccgagcaagatcctgccgacgatgagcatggcgaggttctgggcggcgccgttgaagatcacccccacgatgaagaagacgccggcgaccagcatggtgaggcgccggccgaggcgccgcgtcgtgtacgaggcgaagaaggtggccgtcagccccgcgaggtacagcgacgacgtgaacagctgcagcggctggttatcgtacttgcagtag

SEQ ID NO: 86458 - DNA, 1579 bp, Zea Mays
ctgcccccctttcggcctttcctctcagtcctctctcgccactccgcctcgccgtccacacctccctctccgtgaaaattgctgagatggccatcgacaaggtggacgccaaggagagggagaagatcgaggccgtacgcaagctgctgtgcaagcaggcgccgctctccgcgaagcaggcgcagtactgcaacgacgcgtgcttggagcggttcctgcggtcgcggggggacagcgtcaagaaggcggcgaagcacctgaggaccgtcctctcatggagggagagcgtcggagctgatcacatcatggccgacgagttctccgccgagctcgccgacggcgtggccttcgtctccggccacgacgacgacggccgcccagtcgtggtgtttcgaatcaagcaggactaccccaagttccactctcagaaatcgttcgtgcgcctgctggtgttcacgctggaggtggccgtggcgtgcatgtcccggttcgtggaccagttcgtcgtcctcttcgacgcaagctttttccgctcggcgtcggctttcctcaacctactcatgggcacgctcaagatcgtcgccgactactaccccggccgcctccaccgcgccttcgtcatcgacccgccctccctcttctccgtcctctggaagggggtgcggccgttcgtggagctggcgccagcgacggcggtggtgtgctccctggacttcgaggactcgctcgaggacgcgtctttcacggcgtacccgcggaccgcgtcgctgcggttcgagccggcggccgtcgtggggaagaacccgggcgtggggtcggtctcgtcgcggttctccgtcacccccaccgacaaccccatcaagccgtggtacctctccaccatccccacctcggtgggctcccgctccgtggtgcccacctccagcagcccgtcgctggtcggcgcgtccccgctctccgcgcgctccttctccttcgcctcgcccgccacgctgcgctccacggtcgccacgccgccgccgttcccgcgcggcgcgggcgcgcccctgacgccgtcctccgccgccaaggcccagaagaccccgccgcagccgcagcagttcccgcggacgccgcgcccgtcgttcctgcagtcgccgtcgatgctgttcgcgttccggaaggacgggcaggccagccgcgtggagcgcgagcgcgagtccttcctcccgtacctgcgcttctaccgccggccctacgacgagatttcctaccgcgccaagatgcgccccccgctcggcggcctcatatccatcgtcggcgacaagttcaggcagaagccggtgccgcagccgcagccgctgcgtcgccacgctgggctccaccaccagcaccattaccagcagcagcagaggatctgattctcgtctcgtcgctgcatggcgaccagagaatttttctccatacaccatagatccgatgctatattatgccaagttccaactttttttcccctccagtgcttagtgcctatgatattcttgaatccatgtataataacatcccgaaaaatgtgagtaaaatcgacccctttctgcac

SEQ ID NO: 86459 - DNA, 2309 bp, Zea Mays
ctgcccccctttcggcctttcctctcagtcctctctcgccactccgcctcgccgtccacacctccctctccgtgaaaattgctgagatggccatcgacaaggtggacgccaaggagagggagaagatcgaggccgtacgcaagctgctgtgcaagcaggcgccgctctccgcgaagcaggcgcagtactgcaacgacgcgtgcttggagcggttcctgcggtcgcggggggacagcgtcaagaaggcggcgaagcacctgaggaccgtcctctcatggagggagagcgtcggagctgatcacatcatggccgacgagttctccgccgagctcgccgacggcgtggccttcgtctccggccacgacgacgacggccgcccagtcgtggtgtttcgaatcaagcaggactaccccaagttccactctcagaaatcgttcgtgcgcctgctggtgttcacgctggaggtggccgtggcgtgcatgtcccggttcgtggaccagttcgtcgtcctcttcgacgcaagtaagccgccgatccttgtcaccgtcaggaccgatacaaaacacagtgcgtgcgctacgctccattctcgttcttggtggagcatttgtccgctactcctccagaagcgaaagaaaaaaccaaggcagagaagcagcattcatattcgtcggcatgccttttgctgttttgcaagagcgggagccagccaggcacactctcggtcagtgcagcggctggtctggaggtcagacgcgcacatgcggctggctcggtgaagcctctgctctcaggcccggtcagacagacaccgagagacacacacacacacaccagccgctgccctgcgtcggcactacgcctggtgtcccccgcggcctcgggtccggtcgggccggcgctgccgtgcccgctgctgcttccgcgcgtggcgtggcgtggcgtggtccccgggccttgactgggcgagcgctttgggtgtagcctgcttgctttggcttgcacagtggctggcagacaccgcttttgggggaggccgttcttctcctcccctcggcagctcgctggcttcccgccggtgcggtttgaatcgagtagtgtgatatgataggagtagcaaaactggtggtcgagctcgctgcggctgcgggaaagtgcgagccgtggaatcgggaaaaaggaggggaagaatgagtgagtaggttggttgaccgatgattgacgagacgatgcgaatctctttgcggcgcaggctttttccgctcggcgtcggctttcctcaacctactcatgggcacgctcaagatcgtcgccgactactaccccggccgcctccaccgcgccttcgtcatcgacccgccctccctcttctccgtcctctggaagggggtgcggccgttcgtggagctggcgccagcgacggcggtggtgtgctccctggacttcgaggactcgctcgaggacgcgtctttcacggcgtacccgcggaccgcgtcgctgcggttcgagccggcggccgtcgtggggaagaacccgggcgtggggtcggtctcgtcgcggttctccgtcacccccaccgacaaccccatcaagccgtggtacctctccaccatccccacctcggtgggctcccgctccgtggtgcccacctccagcagcccgtcgctggtcggcgcgtccccgctctccgcgcgctccttctccttcgcctcgcccgccacgctgcgctccacggtcgccacgccgccgccgttcccgcgcggcgcgggcgcgcccctgacgccgtcctccgccgccaaggcccagaagaccccgccgcagccgcagcagttcccgcggacgccgcgcccgtcgttcctgcagtcgccgtcgatgctgttcgcgttccggaaggacgggcaggccagccgcgtggagcgcgagcgcgagtccttcctcccgtacctgcgcttctaccgccggccctacgacgagatttcctaccgcgccaagatgcgccccccgctcggcggcctcatatccatcgtcggcgacaagttcaggcagaagccggtgccgcagccgcagccgctgcgtcgccacgctgggctccaccaccagcaccattaccagcagcagcagaggatctgattctcgtctcgtcgctgcatggcgaccagagaatttttctccatacaccatagatccgatgctatattatgccaagttccaactttttttcccctccagtgcttagtgcctatgatattcttgaatccatgtataataacatcccgaaaaatgtgagtaaaatcgacccctttctgcac

SEQ ID NO: 86460 - DNA, 1676 bp, Zea Mays
ctgcccccctttcggcctttcctctcagtcctctctcgccactccgcctcgccgtccacacctccctctccgtgaaaattgctgagatggccatcgacaaggtggacgccaaggagagggagaagatcgaggccgtacgcaagctgctgtgcaagcaggcgccgctctccgcgaagcaggcgcagtactgcaacgacgcgtgcttggagcggttcctgcggtcgcggggggacagcgtcaagaaggcggcgaagcacctgaggaccgtcctctcatggagggagagcgtcggagctgatcacatcatggccgacgagttctccgccgagctcgccgacggcgtggccttcgtctccggccacgacgacgacggccgcccagtcgtggtgtttcgaatcaagcaggactaccccaagttccactctcagaaatcgtaagaactagcacgcgtccctgcttttcctcttcctccgttccgttcttccgtctctccctgccacacactgtcttcttcttacacttccctttaggttcgtgcgcctgctggtgttcacgctggaggtggccgtggcgtgcatgtcccggttcgtggaccagttcgtcgtcctcttcgacgcaagctttttccgctcggcgtcggctttcctcaacctactcatgggcacgctcaagatcgtcgccgactactaccccggccgcctccaccgcgccttcgtcatcgacccgccctccctcttctccgtcctctggaagggggtgcggccgttcgtggagctggcgccagcgacggcggtggtgtgctccctggacttcgaggactcgctcgaggacgcgtctttcacggcgtacccgcggaccgcgtcgctgcggttcgagccggcggccgtcgtggggaagaacccgggcgtggggtcggtctcgtcgcggttctccgtcacccccaccgacaaccccatcaagccgtggtacctctccaccatccccacctcggtgggctcccgctccgtggtgcccacctccagcagcccgtcgctggtcggcgcgtccccgctctccgcgcgctccttctccttcgcctcgcccgccacgctgcgctccacggtcgccacgccgccgccgttcccgcgcggcgcgggcgcgcccctgacgccgtcctccgccgccaaggcccagaagaccccgccgcagccgcagcagttcccgcggacgccgcgcccgtcgttcctgcagtcgccgtcgatgctgttcgcgttccggaaggacgggcaggccagccgcgtggagcgcgagcgcgagtccttcctcccgtacctgcgcttctaccgccggccctacgacgagatttcctaccgcgccaagatgcgccccccgctcggcggcctcatatccatcgtcggcgacaagttcaggcagaagccggtgccgcagccgcagccgctgcgtcgccacgctgggctccaccaccagcaccattaccagcagcagcagaggatctgattctcgtctcgtcgctgcatggcgaccagagaatttttctccatacaccatagatccgatgctatattatgccaagttccaactttttttcccctccagtgcttagtgcctatgatattcttgaatccatgtataataacatcccgaaaaatgtgagtaaaatcgacccctttctgcac

SEQ ID NO: 86461 - DNA, 1637 bp, Zea Mays
ctttcacaacctgtgtacctgactaaccccgtgacgtcggagggtggaggctttgcctaaaccctcgttgctggccccttaacctcaccctaacccggccatggtgagctcggatccggacgggaacggaggcgcgccggacgtctccgagcttttctgccactacaactccctctacttccgcgattccctcggttcgtgcgctgtctcatggaccgaggacccactacctgattgtgatgtaagcacatgtgactattatccgggaggtggtggctgtataatactgctttccaaatcattatgcgggtctcataatggatctgatctgaagaatgctttgcttcatgagatgattcatgcctatatttgcatcaaagacaataacagtaaccatagtgatcatggtgcaaaatttcagaaactgatgaatacaatcaatttgagttctgtagctgatccccatcgaccagttgatggctacagcataactctgctccatgagatccataagaaatattatcactacaaatgtcaaagctgtgcagattttatcaagtcaaccaatatgagaggaccttctggtgatgactgcattgagagaaaaggtgtagatgacccatgtcataattctaactgtcactggcatagacacaagcagcagtgttcgggtaattattgtagagttcaagaatcatcaccaggaggtccagaactaaaatgtttggaagctgtagaagcattcaatgagggcaaggttgaagaacctgcctgtacaagttggcacaccacacatacatcaaataagagcagaagaagcaataaaaacgagcgggaagatgcctctgtggagttccttcatgttgcacataatgcagttgtctgttcaggactggattcctcttcaaaagacaggtccaataagaaaatcaaaatttcaaaggatgttaactctgaccttggaaggacagaaactgttcaggaagcaccaaaacgcagaagaacagctgtactagataaccaagagtgcagcagacggaagaaaaggaaacaaagcaatcggtgtggttcctattcggtaataattgaatggttgaattactattgtcttagtgagtcggatgaagatgaggtgccgttgatcaataagcgaacagaaagaaggcgccgacaaagattacatgaaatgtatctagccagggaatccaatgatgttgagtttggcagctcaacttctcataaggttggttcttgctcactagctcccaaggacaataacaaaggtgaaagtgtgccagcttctcaacctgaagaaagatcctgctcaagtcatcctgtgagtagcaacggagttgctggaaatcaagctggtcatgaacatatgtcttctccaacggattcaccaattagaggtgaaattgtagacatttcagatggttgagtgcaagagttccgcgttagttccttgtagctggatcctggatgaaataatatacagtgtaatggctataaagaccctgggttttcctatgcaccttccaactgctagacatgcgcacactgccaagcagcctttgtactgttttccccccttcatctagcctttgtatataagcttatttgttcctttctgcatt

SEQ ID NO: 86462 - DNA, 1687 bp, Zea Mays
aaccccgtgacgtcggagggtggaggctttgcctaaaccctcgttgctggccccttaacctcaccctaacccggccatggtgagctcggatccggacgggaacggaggcgcgccggacgtctccgagcttttctgccactacaactccctctacttccgcgattccctcggttcgtgcgctgtctcatggaccgaggacccactacctgattgtgatgtaagcacatgtgactattatccgggaggtggtggctgtataatactgctttccaaatcattatgcgggtctcataatggatctgatctgaagaatgctttgcttcatgagatgattcatgcctatatttgcatcaaagacaataacagtaaccatagtgatcatggtgcaaaatttcagaaactgatgaatacaatcaatttgagttctgtagctgatccccatgtgagttgaagtcctgcatcaactatgagctattctctgctccatgatgaatttctgtttaacatcattggttaattacattcagcgaccagttgatggctacagcataactctgctccatgagatccataagaaatattatcactacaaatgtcaaagctgtgcagattttatcaagtcaaccaatatgagaggaccttctggtgatgactgcattgagagaaaaggtgtagatgacccatgtcataattctaactgtcactggcatagacacaagcagcagtgttcgggtaattattgtagagttcaagaatcatcaccaggaggtccagaactaaaatgtttggaagctgtagaagcattcaatgagggcaaggttgaagaacctgcctgtacaagttggcacaccacacatacatcaaataagagcagaagaagcaataaaaacgagcgggaagatgcctctgtggagttccttcatgttgcacataatgcagttgtctgttcaggactggattcctcttcaaaagacaggtccaataagaaaatcaaaatttcaaaggatgttaactctgaccttggaaggacagaaactgttcaggaagcaccaaaacgcagaagaacagctgtactagataaccaagagtgcagcagacggaagaaaaggaaacaaagcaatcggtgtggttcctattcggtaataattgaatggttgaattactattgtcttagtgagtcggatgaagatgaggtgccgttgatcaataagcgaacagaaagaaggcgccgacaaagattacatgaaatgtatctagccagggaatccaatgatgttgagtttggcagctcaacttctcataaggttggttcttgctcactagctcccaaggacaataacaaaggtgaaagtgtgccagcttctcaacctgaagaaagatcctgctcaagtcatcctgtgagtagcaacggagttgctggaaatcaagctggtcatgaacatatgtcttctccaacggattcaccaattagaggtgaaattgtagacatttcagatggttgagtgcaagagttccgcgttagttccttgtagctggatcctggatgaaataatatacagtgtaatggctataaagaccctgggttttcctatgcaccttccaactgctagacatgcgcacactgccaagcagcctttgtactgttttccccccttcatctagcctttgtatataagcttatttgttc

SEQ ID NO: 86463 - DNA, 1089 bp, Zea Mays
aaaacaggcccaaataaagagtggaagaggcccatcgtctccatcttatctcgttcccaaaccccaattatccgcttctatccacaatcgcaattcgcaagcccttccaacggcagtcatggcttccatcaccctcctctccctcgctcccaccgccatcttcctccacatcccggctttcacctcctcctccgtcgttggtcccggaatcctagccggccgctgggccgcgccccgcgccctcccgctccgcgcgctcccgccccgtcgcgtcaccgtcgtctgcagcagcgccgcggcggcagccgaggcctcggacgccgcagcgccagtggagaagttccggctcgacaatttggggccccagaaggggtcccgccggcggcccaagcgtaagggacgcggtattgctgcaggccagggcgcgagctgcgggttcggtatgcgcgggcagaaatcgcgctcggggcccggcgtccggcgcgggttcgagggagggcagatgccgctctaccgccgtctccccaagctacggggcattgccggcgggatgcacattggcctgccgaagtatgtgccattcaatttaaaagacatagtgcgcggcggattcaaagatggtgacgaaatatcactggaaagcctgaaatcacggggtctgatcaatccatcaggcagggaaaggaagctgccgctgaagatcttaggagatggggatgtatcagttaagttgaatatcaaggctggagcgttttcagcttcagctaaagagaagcttgaggcagctggttgttccctaactctgttacctaaacgaaagaaatggcttccacaaaattatctaaagaaccaagcccgagcagaagagtactttgccaagaaaaaagctggtgctggtgaatctgatagcggctctgcatagaatttctttgcgatgtactcttctcttgcttttagcatatgcttattactgagcaagacacaccggctcaactaaaaatgttcataacttcttcatccaaactctgacttcgatgatattagacatttcggaaattttatttaaagggctacgatagccactttaat

SEQ ID NO: 86464 - DNA, 2547 bp, Zea Mays
gttgccttcacacctctctgcctgccttccaccgcagtgcattgctcttccttccttccttcccgtctcttcttcccacttccttccacttcttgtccctgctcctgttggttttagcatcctgctcggccgaatgctggatcagaggctgcagcaaaggtagtaagtcgcttctcgtatttcccgtcgagagagggacagggggggagaacccccaaccgaggcgctgcaagttccccacggccggggcgggcttctcttgcgggaacatgaggaagctgttgttcatctccttcgtcctctcgctgtccgctgcagcagttcacggtgaagacggtgcgtacattggcgtgaacattggcacggccatgtcgtcggtgccagcgccgacgcagatcaccacgctgctccggtcgcagaacatccgccacgtgcgtctctacgacgcggacccggcgatgctggcggcgctgtccaacaccggcatccgcgtcatcgtgtccgtgcccaacgagcagctgctggccatcggcaactcgaacgcgacggcggccaactgggtggcgcgcaacgtggccgcgcacttccccgccgtgaacatcacggccatcgccgtggggtccgaggtgctctcggcgcagccgagcgcggcgccgctgctcatgcccgccatgcgctacctccagaacgcgctggtggccgcggcgctggaccggtacatcaaggtctcgacgccgcactcgtcgtccatcatcctcgactcgttcccgccgtcccaggccttcttcaaccggtcgctggacggcgtgctggtgccgatgctcaggttcctgcagtccacggggtcgccgctcatgctcaacgtgtacccttactacgactacatgcgctccaacggcgtcatcccgctggactacgcgctgttccggccgctgccgcccaacaaggaggccgtggacgccaacaccctgctgcactacaccaacgtgttcgacgcggtggtggacgccgcctacttcgccatggcgtacctgaacgtcaccaacgtgccggtgatggtgacggagaccgggtggccgcacaagggcgactcctcctccgagcccgacgccacctctgacaacgccgacacgtacaacagcaacctcatccgccacgtgatgaacagcaccggcacgccgaagcaccccggggtggccgtgccgacctacgtctacgagctgtacgacgaggacacccgcccgggctccacgtcggagaagtactggggcctgttcgacatgaacggcgtccctgcctacaccctgcacctgacgggctccggcgtcctgctggccaacgacacgacgaaccagacctactgcgtggcgcgggagggcgcggaccccaagatgctgcaggcggcgctggactgggcgtgcggccccgggaaggtggactgctccgtgctgatgcagggccagccgtgctacgacccggacaccgtggacgcgcacgccacgtacgccttcaacgcctactaccacggcatgggaatgggctccgggacgtgctacttcagcggcgtcgcggtggtcacgacgaccgacccgagtcacggatcttgtgtttatgctgggaagaacgggacgtcgttgatgaacggcacctccctggcgccgtcgtccaactccacggagggaggctccggcgcgcaccgggcgttcggcgacgtctcgtcactcgtccgcatcgtctccaccgcgctgctcttcagcgtcgtcctcctcctgttgtaggcagtagttagtactagaggtagaaggcaccttggaatggaaccatgcagtctttgcagaattaggcattcgtgagggagagggagggataattctttttgctgtcaagtggcgggccgggaatgttctgaggctctattctcccgtctggtattggtatggtatggaacaaaaattggtttgcatcccagcagttgctcacctacactgccggttggtcgagtgtgaggcaaacagttttaggctgctagatgggctgggccgaacaatgtcatttttggcccacgcggcaagaatgggcatagttgtaatttgcccggtcagccgtgcgcatgccctaaccaaggcctatataaggctgcaaaggcatcgcactcgttccacctgtgcgccgccgtcttcgttactcagcaacaatttctttggcatctcctttcgcagtttctgtcctcgaaaattctgcttcttgtctcgctctctggtcgcaaatttgctctgaaatcttgttctattttcttggtttagtttttctcgagcactcttcgcgttttgaaagatctgaagcccctggtcgccgttttgcggatcctggcttcggttttctgaagagatgcgatatcatacctctggacctctggacatgcgggttcgttctatacatcctcgcattttctcgaaggtccaacaatctgcttcaaatacaccagtgaatcataagaattgttcttggcagtttgcattttttttgttttttctattttttgctatg

SEQ ID NO: 86465 - DNA, 3285 bp, Zea Mays
gttgccttcacacctctctgcctgccttccaccgcagtgcattgctcttccttccttccttcccgtctcttcttcccacttccttccacttcttgtccctgctcctgttggttttagcatcctgctcggccgaatgctggatcagaggctgcagcaaagcagttcacggtgaagacggtgcgtacattggcgtgaacattggcacggccatgtcgtcggtgccagcgccgacgcagatcaccacgctgctccggtcgcagaacatccgccacgtgcgtctctacgacgcggacccggcgatgctggcggcgctgtccaacaccggcatccgcgtcatcgtgtccgtgcccaacgagcagctgctggccatcggcaactcgaacgcgacggcggccaactgggtggcgcgcaacgtggccgcgcacttccccgccgtgaacatcacggccatcgccgtggggtccgaggtgctctcggcgcagccgagcgcggcgccgctgctcatgcccgccatgcgctacctccagaacgcgctggtggccgcggcgctggaccggtacatcaaggtctcgacgccgcactcgtcgtccatcatcctcgactcgttcccgccgtcccaggccttcttcaaccggtcgctggacggcgtgctggtgccgatgctcaggttcctgcagtccacggggtcgccgctcatgctcaacgtgtacccttactacgactacatgcgctccaacggcgtcatcccgctggactacgcgctgttccggccgctgccgcccaacaaggaggccgtggacgccaacaccctgctgcactacaccaacgtgttcgacgcggtggtggacgccgcctacttcgccatggcgtacctgaacgtcaccaacgtgccggtgatggtgacggagaccgggtggccgcacaagggcgactcctcctccgagcccgacgccacctctgacaacgccgacacgtacaacagcaacctcatccgccacgtgatgaacagcaccggcacgccgaagcaccccggggtggccgtgccgacctacgtctacgagctgtacgacgaggacacccgcccgggctccacgtcggagaagtactggggcctgttcgacatgaacggcgtccctgcctacaccctgcacctgacgggctccggcgtcctgctggccaacgacacgacgaaccagacctactgcgtggcgcgggagggcgcggaccccaagatgctgcaggcggcgctggactgggcgtgcggccccgggaaggtggactgctccgtgctgatgcagggccagccgtgctacgacccggacaccgtggacgcgcacgccacgtacgccttcaacgcctactaccacggcatgggaatgggctccgggacgtgctacttcagcggcgtcgcggtggtcacgacgaccgacccgagtcacggatcttgtgtttatgctgggaagaacgggacgtcgttgatgaacggcacctccctggcgccgtcgtccaactccacggagggaggctccggcgcgcaccgggcgttcggcgacgtctcgtcactcgtccgcatcgtctccaccgcgctgctcttcagcgtcgtcctcctcctgttgtaggcagtagttagtactagaggtagaaggcaccttggaatggaaccatgcagtctttgcagaattaggcattcgtgagggagagggagggataattctttttgctgtcaagtggcgggccgggaatgttctgaggctctattctcccgtctggtattggtatggtatggaacaaaaattggtttgcatcccagcagttgctcacctacactgccggttggtcgagtgtgaggcaaacagttttaggctgctagatgggctgggccgaacaatgtcatttttggcccacgcggcaagaatgggcatagttgtaatttgcccggtcagccgtgcgcatgccctaaccaaggcctatataaggctgcaaaggcatcgcactcgttccacctgtgcgccgccgtcttcgttactcagcaacaatttctttggcatctcctttcgcagtttctgtcctcgaaaattctgcttcttgtctcgctctctggtcgcaaatttgctctgaaatcttgttctattttcttggtttagtttttctcgagcactcttcgcgttttgaaagatctgaagcccctggtcgccgttttgcggatcctggcttcggttttctgaagagatgcgatatcatacctctggacctctggacatgcgggttcgttctatacatcctcgcattttctcgaaggtccaacaatctgcttcaaatacaccagtgaatcataagaattgttcttggcagtttgcattttttttgttttttctattttttgctatgtgaatctatttgaatgaatcatatgcatcttgaatccgtgacgacgaatcgatggctcgatgatgattattcttgctttaaccacaccgaactaaaggctattggaagggtgctttcttccttcctccatttgcgccaggctcctctttcttggtgtttcctcatgaaaccttgctttcttgttgaagaatgcagttcctgttttcttccgcgagagtgcgaggtagaaggattcggtaagatttggtagcgtagcaaggggggaaagctggaggcctcgtccgctggttcttggcttgtagaaaaacctggcctttctctgagagcctttgccctgtatttgcaattgatacccctctttgaataagtatttcccccttttcaagccaatatgttccgctgatcaattatttatatgggtgttggacgataatctggaataaaatttgtcgctaacaaaacatattatgaaagtgattcggattattaaaatgattcttaatctgagatatatataaccatctagttacaaaacagttaactattcgcggacaggccggtctgccggtgcacaacctgcgagcgtcattgcatatctggtactttgaactaaattcccagagtgcaggagcccactaatcccttccaaatccgagcttcggtccctgctgctccccagctacccgcaggccgcagcaatggtgccgctttgttacgtagtccttatgtttcagacattctgcacaagaccacaacacaaatttacgaaaattttagtctatctgaacggccaaatttttgtgtcaaatcaattttggatatgtacttggctgtttcagatatccaaatcgtatctgttttctcagattaagataagcttgtacaattttaatgccg

SEQ ID NO: 86466 - DNA, 2380 bp, Zea Mays
cacacctctctgcctgccttccaccgcagtgcattgctcttccttccttccttcccgtctcttcttcccacttccttccacttcttgtccctgctcctgttggttttagcatcctgctcggccgaatgctggatcagaggctgcagcaaagcagttcacggtgaagacggtgcgtacattggcgtgaacattggcacggccatgtcgtcggtgccagcgccgacgcagatcaccacgctgctccggtcgcagaacatccgccacgtgcgtctctacgacgcggacccggcgatgctggcggcgctgtccaacaccggcatccgcgtcatcgtgtccgtgcccaacgagcagctgctggccatcggcaactcgaacgcgacggcggccaactgggtggcgcgcaacgtggccgcgcacttccccgccgtgaacatcacggccatcgccgtggggtccgaggtgctctcggcgcagccgagcgcggcgccgctgctcatgcccgccatgcgctacctccagaacgcgctggtggccgcggcgctggaccggtacatcaaggtctcgacgccgcactcgtcgtccatcatcctcgactcgttcccgccgtcccaggccttcttcaaccggtcgctggacggcgtgctggtgccgatgctcaggttcctgcagtccacggggtcgccgctcatgctcaacgtgtacccttactacgactacatgcgctccaacggcgtcatcccgctggactacgcgctgttccggccgctgccgcccaacaaggaggccgtggacgccaacaccctgctgcactacaccaacgtgttcgacgcggtggtggacgccgcctacttcgccatggcgtacctgaacgtcaccaacgtgccggtgatggtgacggagaccgggtggccgcacaagggcgactcctcctccgagcccgacgccacctctgacaacgccgacacgtacaacagcaacctcatccgccacgtgatgaacagcaccggcacgccgaagcaccccggggtggccgtgccgacctacgtctacgagctgtacgacgaggacacccgcccgggctccacgtcggagaagtactggggcctgttcgacatgaacggcgtccctgcctacaccctgcacctgacgggctccggcgtcctgctggccaacgacacgacgaaccagacctactgcgtggcgcgggagggcgcggaccccaagatgctgcaggcggcgctggactgggcgtgcggccccgggaaggtggactgctccgtgctgatgcagggccagccgtgctacgacccggacaccgtggacgcgcacgccacgtacgccttcaacgcctactaccacggcatgggaatgggctccgggacgtgctacttcagcggcgtcgcggtggtcacgacgaccgacccgagtcacggatcttgtgtttatgctgggaagaacgggacgtcgttgatgaacggcacctccctggcgccgtcgtccaactccacggagggaggctccggcgcgcaccgggcgttcggcgacgtctcgtcactcgtccgcatcgtctccaccgcgctgctcttcagcgtcgtcctcctcctgttgtaggcagtagttagtactagaggtagaaggcaccttggaatggaaccatgcagtctttgcagaattaggcattcgtgagggagagggagggataattctttttgctgtcaagtggcgggccgggaatgttctgaggctctattctcccgtctggtattggtatggtatggaacaaaaattggtttgcatcccagcagttgctcacctacactgccggttggtcgagtgtgaggcaaacagttttaggctgctagatgggctgggccgaacaatgtcatttttggcccacgcggcaagaatgggcatagttgtaatttgcccggtcagccgtgcgcatgccctaaccaaggcctatataaggctgcaaaggcatcgcactcgttccacctgtgcgccgccgtcttcgttactcagcaacaatttctttggcatctcctttcgcagtttctgtcctcgaaaattctgcttcttgtctcgctctctggtcgcaaatttgctctgaaatcttgttctattttcttggtttagtttttctcgagcactcttcgcgttttgaaagatctgaagcccctggtcgccgttttgcggatcctggcttcggttttctgaagagatgcgatatcatacctctggacctctggacatgcgggttcgttctatacatcctcgcattttctcgaaggtccaacaatctgcttcaaatacaccagtgaatcataagaattgttcttggcagtttgcattttttttgttttttctattttttgctatg

SEQ ID NO: 86467 - DNA, 2803 bp, Zea Mays
agatgcacgcgtgacgcttatatataattgcctcggcctgattcttgtttctgaaacaacaaacaaagaccaacaatccttaggtcaagaagtaggagctgtaactacaagccaccatgctgctcatcctcgttttcctgctctccttctccagcttggacctccaaataagtggagcaacgactgacactctcaccttgggccagtctctcccatggaaccagacgctggtatccaagggcggcaacttcgagctcggcctcttctcgccgggcaactccaagaagcattacatcggcatctggttcaagaaggtctccaagcaaacggtcgtgtgggtggcgaaccgggacagcccgatccttgacccgtcggcctctcgcttcactctgagcaaccgcggcgagctcctcctccacgcgacgccatcgaacaccctgctgtggtcgtccaacgcgtcctccccttcgccgcgcaccaccgtcgccacgctccaggatgacggcaacctcgtggtgcggagcaacgcgtcgtcggccctcgtggcgtggcagagcttcgaccaccccacggacacgtggctccccggtgccaggctcggctacgacagggcccgcggcgtgcacagcttcctcacgtcgtggaccgacgcggacaacccggcgcccggcgccttctccatggagatcgacccgcgcgggcaggccaagtttgatctgctcgccggcggcacgcaccagtactggacgaccggcgtgtgggacggcgaggtcttcgaaaacgtgccggagatgcggtcgggctacttcgaaggcgtcacgtacgcacccaacgccagcgtgaacttcttcagctacaagaaccgggtaccgggcatcggcaacttcgtgctggaaacgaacgggcagatgcagcggcggcagtggagcccggaggccgggaagtggatcctcttctgctccgagccccacgacgggtgcgacgtctacggctcgtgcgggcccttcggcgtgtgcagcaacacctccagcgccatgtgcgagtgccccacggccttcgcgccgcggtcgcgggaggagtggaagctggggaacacggcctcagggtgcgtgaggcggaccaaactggactgtcccaacgacggcttcctgaagctgccgtacgccgtgcagcttccgggcggttcggcagaggcggccggagccccgcggagcgacaagatgtgcgctctctcctgcttgcgagactgctcctgcactgcctacgcttacgaggcagccaagtgcttggtgtggaacggcgagctcgtcagccttaggacactccctaacgatcaaggcgtcgcgggggctgttgttcttcacgtccgtgtcgcggcctcggaggtgccaccgtctgcggcgcatcattcttggcgaaaatcaatggtgatccttagcagctcggtctccgccgtggtcctactcctggcgggcctcataatcgttgtcgcggtggcggtggtcgtgcggaagcggcggggaaagggcaaggtgacggcggtgcagggctcgctgctgctgttcgactaccaggccgtgaaagcggcggcgcgggatttcacggagaagctcggcagcggcagcttcggctcggtgtacaaggggactctccccgacacgacgcccgtggccatcaagaagctcgacggcctgcggcagggcgagaagcagttccgcgccgaggtcgtcaccctcggcatgatccagcacatcaacctcgtccgcctccgcggcttctgctccgaggggaacaagagggcgctcgtatacgattacatgcccaacggctcgctggacgcgcacctgttcaagaacagctcgggctccaaggtcttgagctggagccagaggtttggcatcgcagttggcgtggccagggggctgtcttacttgcacgagaagtgccgggagtgcatcatacactgcgacatcaagccagagaacatcctccttgatgaggagatgggcgccaaggttgcggacttcggcatggccaagcttgtcggccacgacttcagccgcgttctgaccaccatgcggggaacgatgggctatctggcgccagagtggctcgcgggcgcgccgatcaccgccaaggccgacgtgtacagcttcggcctgctcctgttcgagctcatctcgggacgccggaacaacggctcctcggagacagggtccaactccgctgtgtacttcccggtgcacgccgccgtcaggctgcacgcgggggacgtggtcgggctgctagacgacaagatcgccggggatgccaacgtggagctcgagagggtctgcaaggtcgcgtgctggtgcatccaggatgaagaaggcgaccggccgaccatggggctcgtcgtgcagcagctggaaggtgtcgctgatgtcggcctgccgccgatcccgtcacggcttcacatgctggcgatgatgaataaatgtgccgtcggtggggaagcagaggttgaaccctgttcaaatagcggtagcaaaatagacacagaagtttgaaggtactacgcaggtccgataggtaattgtagtttcagcatgcgagtcccattgttcatatgcctgtttgccgtagctgctaaactgtgattcttcgcaatctgtcgcgtgagttcctttcctgatcaaaccatcgcgcctcctgaggttttgaaccaactttacgaaaccgcccgttgccaaaactgcaaccccattcacttacactcacttctagctctgttctgtacaacttcagggtgggaaaatcatct

SEQ ID NO: 86468 - DNA, 372 bp, Zea Mays
tgacagcaaggaaggtatgcacatttatgaaacaggcaagatgaaccaaaaaaaagttagcattccttgcagctacatgcgaatcaaacatttcttaacaggttcctcatcaatagataaaactcatctcgaagttgtttctagattattaatatgacatttgttttgcatagtctcatatctttgaaatcacgagcagttgattcaaatgcaaatgtagaaatggattagcagggaaataggagtgttagaactcaagggttacatgagactgctgacaattagctgttgtccacataattccagaactgggccagacgacagaaaccgctacgaagaataagggctgaagcaattgggacagggccttct

SEQ ID NO: 86469 - DNA, 1337 bp, Zea Mays
gcggctgcaatccggctgcggctgcggcttctacagtatttttctctctatggattgcagctgcagcagtccaaacagctgcaacagtgtcggcttgtagccagccgaacacgctctctatactctgtgcaaactgctggcgcgttgcccttgtgcaggtttatttttttgcggaatttcaatgcctgccgctgctgtccacgtgtagttcgcgtgccctgtgcgctgctgccgctttaaagcagaggggtctctctcgtgtctcgtcgtctcggtgcctttctctatcgtcccgatccgtcgttcatcagagtcgtaaccgtacgccctcgttcccctcgtcgctctcccaagtcccaaccccggttcctttggtctgcgcgagcgagcatggcgtcgccgtcgcccgccgtctcgtctctggagacggaggcgccccaggctaccgtcacgagggagcgcaggctcaaccccgacctgcaggagcaccttcccaagccatatctcgcgagggctatggtggcggtggacccggaccatccgaccgggaccgaggggcgcgacccccgcggcatgagcgtgcttcagcagcacgtggctttcttcgaccgcaacggcgacggcgtcgtctacccctgggagactttcaaaggcatgcgagcaatagggtgtgggttctttacatccctcgtcatctcgttcctcatcaacctcgtcatgagttatcccactcagccgggatggctaccctcccttttgctctccgttcatgtaaagaacattcataaggctaaacacgggagtgactccgaaacgtatgacactgaagggaggtttgacccatcaaaattcgacgctatatttagcaagtatggtcgtactcatccagatgcgttgacaaaagatgagatgaattcgatgcttaaggcaaaccgcaatatatatgatttcctcggctggatcgctgctatcggtgaatggcatctactctacagcgtggcaaaggacaaagatggcctgttgcagcgagaaattgtccggggcctgttcgatgcgagtctatttgagcgactgcaggacagcaaaaaatcctcctgagtcctgatgaatgggctagagaggagttcccacctcaagaagaccgacagtagaaaactagcatgttataattattgtcctccgtaatttctttagaaaatgtaatttgagtcgtcttcgaataagaaatgtttccatgatgtagtcaatacatattattgtagaactatcatggtcatcttgtttatttaatactctctttgtttcaaaatataatttgcttgactgttttaatccta

SEQ ID NO: 86470 - DNA, 1291 bp, Zea Mays
atcccagcagcaggtagcagcagcgcatgactttgtatctgcaactcgtttcgactagcctgcacgccgggagccctcgtctcgcccttctccacctccgaaggtagggtacctgatacttccctgccccgcgcatcgcatccgcggttttagtttgctggcctcggttccgatcgattcctcgatcctccctccgggcgggcgtccaccgacttcatcatccactcgccggccgaaccgatttgtttcgtttgccgttcgatccgcagatcctgcgagttcaacccgcgagtgagcatgtcgtcctactccccgccgccgccgccgccgcgggaccagtccatggacaccgaggcacccaacgcgcccatcaccagggagcggaggctcaaccccgatctgcaggagcagctccccaagccatatctcgcgagagctctcgaggcggtggacccgagccacccgcaggggaccaaggggcgcgacccccgcggcatgagcgtgcttcagcagcacgccgccttcttcgaccgcaatggcgacggcgtcatctacccctgggagacgtttcaaggactgcgagcgataggatgtggactcactgtatcattcgcgttctccatactgatcaacctcttcctcagttatcccactcagccgggatggttaccttctcctttgctgtccatccgtatagacaacatccacaagggtaagcacgggagtgattctgaaacttacgacactgaagggaggtttgatccatcaaagttcgatgctgtattcagtaagtatggtcgaacccatcctaatgctctaacaaaagacgagttgagctcaatgcttcaaggaaaccgcaatacgtacgatttccttggctggttggccgctgccggtgaatggctcttactctacagcttggcgaaagacaaggatggcctcttgcagcgcgaaactgtccgtggtctatttgatgggagcctatttgagcgactggaagacgacaacaacaagaagaaatcgtcctgaatgctgagcagccttgtacagctcagggaagtgctgtcagtacaaaactaccagatataccattggtcgtgttcaaataacaaatgcttcggctttgttcatccgtcattaactatgagtgctgggatttgtttgtatgtgtgtcgtgctaccagtttcttctcctgtcgtctcacacaggtactgtattacgcatgtgttttctagtgtccgtgcggaagctgtattataagctgaaatatgtgcgtttgaaatttactag

SEQ ID NO: 86471 - DNA, 494 bp, Zea Mays
acgccgggagccctcgtctcgcccttctccacctccgaagatcctgcgagttcaacccgcgagtgagcatgtcgtcctactccccgccgccgccgccgccgcgggaccagtccatggacaccgaggcacccaacgcgcccatcaccagggagcggaggctcaaccccgatctgcaggagcagctccccaagccatatctcgcgagagctctcgaggcggtggacccgagccacccgcaggggaccaaggggcgcgacccccgcggcatgagcgtgcttcagcagcacgccgccttcttcgaccgcaatggcgacggcgtcatctacccctgggagacgtttcaaggactgcgagcgataggatgtggactcactgtatcattcgcgttctccatactgatcaacctcttcctcagttatcccactcagccggtaaaagagaaatcatcaaaacacaagatcgagatacaataccaattgaaagcaccaagatag

SEQ ID NO: 86472 - DNA, 1160 bp, Zea Mays
gtcgctcgcgccttcttcgacggcgtcatccggttacatgggtttccctcctccatcgtcagcgacagggatcccgtgttcaccggccatgtgtggcgcgatctcttcaagttagccggtgtcaagctgcgcttaagcacggctttccaccctcagacggatggccaatccgaggtggtaaacaaggtgatagccatgtatcttcgatgtgtgacaggtgaccgaccgcgcgcttgggtggaatggttgccgtgggcggaatattgctacaacacatcatttcacacagcgttgcgggcaaccccctttgaggtggtctacggtcgaccccctccggccctcttgccttacaagccagggaccacacggacagagacagcggatgctctccttcgcagccgcgatgaggtcctggcagaagtccgtcaacgtcttgttcaagcacaacagatctccaagaagtattacgatgccacacatcgggagatggagttcaagaccggtgattgggtttggttgcgattgctacatcgcaccaccaagtccttggatcctcatgccaagggcaaattgggtccgcgctatgcaggacctttccaggtgctggagcgtatcggcagcgtggcgtatcgtctacagctgccggagggtgctcgtatccacgacgtcttccacgtgggcctcctgaaagcccacaaaggagatccgcctgccatgccgacgccactaccaccaatccaggatgggcgactgctgccagtaccagtgacagccctcaaagcacagctgcgccgtgacatctggtatattcttattcagtggcaagggatgacgcgcgaggaagcaacatgggaactactggctgaattcaaagacctctaccctgacttccagctcgaggacgagctgttttcgcaggcagggagagatgttatgaccggcatgcagtacaaaaggaaacagcaggccagggggcatgcggcaggagaaggggatcaaggctgggacagccagcagtaattcagtaatcctaggatctatttccttttgagagtttccttttatttagagataagcttccttttattcagagagattagtttccttttattaagagataagctgccttctattgagagagaggctagtataaataggag

SEQ ID NO: 86473 - DNA, 601 bp, Zea Mays
ttaaccttttttgcagctgctatagcggcaagctttaggctacacaagacagttcctgagctaagtggaaataaatcctagctcgtattggatatctgaggaagttggcattcctaattccacggtggttgtgaataagctacatccattagatggatcaaactggacaaacatcatcttcagcattgtccctttcccagagaacgcaactatatcatcaacatggttgagcattcttagatcaaagttcatgtccttggttgtacagcagtcaacaatccacttgactaagcctctattcgataattcatcatactttgaagtaattaaattcccaggaggaataacaattatccctccacaaactgcttttcttcttcagaagcctcatgcgacatttaattttactctgaactatccgatctacaaattacaagacaggactaatgagttaaaggatcaaatggaggcagcactactactcaatccatatgaggttagttgtaccttctggccttgtttctttgtgtttgtctgttcaattttatagcttcaaaggaggaaacatatgtacatgtaagatttgttcatttgatctcca

SEQ ID NO: 86474 - DNA, 225 bp, Zea Mays
atggaccagtccatgcagctgtacctcttgcgttcgccgccggaaaaaattgatggcagatcaaattccagaatgctccagcagggtgagaaagatcgtcatcaggttctaaaggatttctcaaagttgcttgatgatcaggagtttaatagtaagtattatcatccaagcaacgctaggatctggttctatggtgatgatgacccaaaagagcacacattctaa

SEQ ID NO: 86475 - DNA, 544 bp, Zea Mays
atctagcaggttgtttttgatgatagagttgtctgacgccaagggtgtgaagcagaatttaaagcctaaaggccatttcaacttgtcagctaagggctcagatgactcgccctgcgagtttgatcttgagttgtttgatgttgtctatttaatacatgttgaattagcgttttagattttgattgtattggccttcctatttgcaggagagcaaagcagttgttgtcctaagaaccatatgctaccagaacaagaaagatgagagcggttggtggccaaggctcctgaaaaaggacctgtgttcttgaaggttgactggacaaatggtaggatgaggatgacgaagatgttggatgttagtatttcacttttggttgattatgttttttcttatgcgcctgacaaatctagatatgcaaccagacatgctttattcttgttcctgttttgttttccttatgtattaattacttcacttgtaatgcacatgatgttttccttatgtattaatttcttaacttgtaatgcacatgatgttttcctt

SEQ ID NO: 86476 - DNA, 2832 bp, Zea Mays
gagaagccgaaatgtaccccccacggccggcggcgcgtttgccaccgtccagttccatgtcggccaccgtgttctttctgcccgcaaatccaagctcgacggctagtcccgctaacactctccggcaacttacgccggcttccacctccggaaagctccacttcgcggcgttcccgctccgcctcccccgccatgcctgcgcaaggacctatcgctccgccgcattcgggaggggatcgcctgtggccgggcgtagagagaaggactactacgccacgctgaacatccgccgcgactccacgctccaggagatcaagtctgcctaccggattcttgcccgcaagtaccatcctgatatgaataagagtcctgaagcagaagaaaagttcaaggagatcagtgctgcatatgaggttctatctgatcaagacaaaagatcattatatgatcgctttggagaagaggggctcagcggtgactacagaaatggagatattggcacacatgggattgatccatatgaactcttcaatgctttctttggtagttccgacaaactttttggggatagtatggggtctgggggatttcattatagtgcagaagcaaaggacaatagggcacttaacatcagctataatctgctcctttcttttgaagagtccatcctcggaggcaaacgtgaaatcaatgtttttcgccatgaaacatgtggcacctgccatggaactggagctaaatgtagcaatgacattacagaatgcacccgatgcagaggtcaaggcaggttgatgaaaactcaaaggacaccttttggtatagtttctcagaattacatgttatgcatttctatcttattgtgcaggggtgcaagtggtgacctgtatatatttgttcgcgttaataaaaaacaaggcatccacagagatggtctcaatctgtactcagatgcttcagttgattatactgatgtgattttaggtaccacagtgaaggttgaaacaatagaaggactcaaggatcttcacattcctcctggcacccagcctggagagaacttaaaattttctcagctgggagttcccgacattaagaagcctaatgtcagaggagatcactacttcatgataaaggtgaaaatcccgaagagtatcagtggccaggaacgtttgctagttgaagagcttgctgcactaaagaaagctcagaatatctcagttccagaacctacaaagatagaaaattttcgggagagaaaccatcatccatctgcaaagagaagatcattctggggacgtgtctggaattttttcagggatgataaaggtgataaaagatttgcttcaatcagtgtgcaacctattatcccaggatggaattcttgccgaggaactgatacggctgtccccttgctattaaaaggattcctcatgaccgcaatattcttatttgtaatcagaagtaaactcaggtacactgggaagcgcattgaccgtccaactcaagctgaaatacctgttgagccagagtgaatttctgtcgtcttcatttctgaacgtttgcgacatcacagttttgatgatgatcataaatacgtaactttgccgcgcaaagcttcgtcctgggaaaagaatccggctttgcttgcagtgtatggtatccagacgcagcagtacaggttaacagaatatgggttgcttctcattagtcatttcttgattcattattccaatatgtagaagacacctgcagcaattccgagttttgacgaaagccacatgaaagacatgaagaaacatggccgtaggctaatgtacactgtatgtatcttgtctgcacaaagttttgtaaccatcccggcttgatatcgtttaacgattttgttgcaacataattcataagcactgaatttatgcaaacaacagttctgacgcgagacgaattggaataatcacaattcacaaacacaacaatgctcctattcacaaaaaaaatgctcctatccatacagttcaaatgcctctgtcatgttcaaatggaaacgattcgtttcgctttgagacgaagcagttcaaatgcctctgccgtgttcaaatgaaaacgattcatttcgctttgagacgaagtagttcaaatgcctctgccatgttcgatcgatttccagaccgagacaagcgccgcagcccgcagcagaaggctcgcgacatcagctcgagccagctgacgggatccacacggtgccatgtcttcccggcggccgtcgcatccgtcccaccggaatccacggcgattcccgtccgcctgctatcttctagtactcacccttgccctcctcgtcgtctccgccgccgccaagtcctcccgccgccccatctccgacaacgagatccggcagaagaaggaggcctgctacaccgacgtcgagaacgggctgtggggatgggtgtgcaggtactcgccgacggagaaggagaactgcgtgctgcgctgcctctcgccggagtgctacgacctcatatacggcggggatccgcttgaggaaggggagttggactatgttcgaagccaggagtacaagtattgtatgcacaaatcatcccttggagaaagcttggatggtgtgaagggatccttcagctactcatgaaggaatgagaagaaaaaggttctgttagtctgctgtaaattttatttacaatcttgaacagacatgcatctttttagataatggaattgtaattccagactttgctttttctcaaagcatcaccggtgcatcatcttatattaaacttacaaatgcaaattaaacattggattcatttgttggcc

SEQ ID NO: 86477 - DNA, 850 bp, Zea Mays
aatcaaaaatcaaccgaacttgccagccccgccgcccctccctgcctccatcgcgcactagggtttttcctcgctctcacgttcggccgttccccaccacttgcgcgttgtgccgcgacgctccggccatggcgtggggggaggacgaggccatcggtcccgacgtggcctcggcgggtcttcacgtctcggagcggatcggccgcgacgccgccgcgcagcccgacctggaggaggcccttgaagcctcgcgctacgcgtcccacccctactcctcgcaccccaaggaggcaagccctgcgcgacctgtggtcagctgcgtgtgtactgatagacgcgcacgcttgagttgttgatgtgtcagtgtccggtttgggcgaatgttaccgttgtattcagggttcctgcagttgtcctgggggattcgtgtcattgtttttcccagtagaatgggggtgacgaggaatcgaaagatgaaggtggaggaaaacatggcgagcagtgatttcatctgattatttctggtgtttttttttggttgcttcagacctgcagtagaagttcggactttcggttcatatattgcattgtagtatgagtagttttgggtcaaattttgggagtgagactccatgacagaagtactatatgtcacacgggagcaatttacaattgtgtgtcatacacatgacatgattccctggcaggatgtgaatcctgattctgacattagaaaacggtgaaagagtttttggtcctttaagttacgctgaaacttggaaattgaggcaaacacgtggaaattagcataaaccgaaggacactagtttttgcaaaaaagaaaaaaaaa

SEQ ID NO: 86478 - DNA, 5158 bp, Zea Mays
ctccatcgcgcactagggtttttcctcgctctcacgttcggccgttccccaccacttgcgcgttgtgccgcgacgctccggccatggcgtggggggaggacgaggccatcggtcccgacgtggcctcggcgggtcttcacgtctcggagcggatcggccgcgacgccgccgcgcagcccgacctggaggaggcccttgaagcctcgcgctacgcgtcccacccctactcctcgcaccccaaggagtggcctcctttggtagaagttgcagaaactcgtcaactccctcctatgttgattgaaagatataacacagctgccggtgaaggaacagctctttgcgggattttttctgacatacatcgggcctgggcaacagttgacaattcatttttcatctggcgatttgataaatgggacgggcattgccaagagcataatgttgacgagcaagcaatttgtgctgttggccttgctagggcaaaacctgggattttcattgaagccattcaataccttttagttttagcaactcctgttgaactgatacttgttggagtttgctgttctgctagtgctgatggaacagacccatatgctgagctttcattacaaccattacctgagtacatgattgccactgatggtgtcacaatgacatgcatcacatgtacagacaagggccaaatttttgtagctggtcgcgatggccatatatatgaattgcagtatacaactggttcaggttggcgtaaacgttgccgtaaagtttgtcttactactggcattggcagtcttctttctaggtgggtactgccaaatgcattcaaattctcaactgttgatccaattgttgatatggtcatggatgaggagaggaacactatctatgcgcgtaccgagggcatgaagttgcaattatttgatctaggagttaatggtgatggccctttgacaaaaattactgaagaaaagaacattgttgatccacgggatggaccttatggtggtcggaggtctaatgcgccaagagctgcacgatcaccaagaccatcaattgtttgcatctcacctgtatcttctgtggaatcaaagtggctccatgctgttgctgttttatcagatgggaagagattattcctcactacatctggtggaagtggttcttcagttggattgaacagtggtctgcagaggccaacctgtttaaaaattgttgctactaggccgtccccacctctgggggttggtggtgggcttacatttggtgctgtttctgtggctggcagggctcttcctgaagatctagcattgaaagttgagtctgcattctattctgctggtgctcttgtaatgtcagattcatccgctacagccatgtcatctcttctggctgtgcagaaagattcagctgcgcagctatctctccccagcacctttggaacagcttctagaacctccagagctctacgagaaacagtctctgctttacctgttgagggtcgaatgctttgtgcctctgatgtcttaccacttcccgatgctgcttacatgatgcagtctttatatgctgatgtggaatgtttcacatgtttcagaaaaccttctgagaaggcatgtataaaactgtgggcaaaaggggatcttcctacccagcatatcttgcctcggaggagggtggttgtattcaatactatgggtttgatggagttgatttttaacaggcctgttgatattctaaggaaattgtttgacgggaacaccctgagatcacaaattgaagaattctttaatcgctttggtgctggagaggctgcggcaatgtgcttaatgttagctgcgaagctactttatgctgaagatagtctgataagcaatgctgtttctgagaaagctgctgaggcgtttgaggaccctgggcttgttgggatgcctcaaattaacggcaccactgctttatctaatacacgaactcaggctggaggctttagtatgggccaagttgttcaagaggcagaacctttgttttctggtgcatatgaagggctttgtttgtgctcgtcaagactactttatcccatctgggagcttcctattatgtcgattcgaggaccgtctggtaataataaacgcgaggatggcgtaattgtttgcaggctttcagctggggccatgaaaattcttgagagtaagattcattcactggaaacatttttaagatctagaagaaacaagagaaggggcctttatggttatgttgctggtcttggcgattctggttccatactctacaaaacagggcctattattggccctggagggcatagcaatggaaggagtccctacaactcccaaattcgagatatgaaccctgtagataaatctgcatcgaataaaaagccaaggctgctttatacatcagcagaactagccgctatggaggtgagggcaatggagtgtcttaggcggttgcttaggagatctggtgaagcactgtttctgcttcaacttatttgccagcataatgttgcccgtttggctcagacactgggcaatgatttatgcaagaaatttgttcaattaacatttcatcaattggtatgttcagaggatggtgatcagctcgcgatgcgtcttatttctgcactcatggagtactatattggcccagagggcagaggaactgttgaagaaatcagtactaaattgagggagggttgccctagttacttcaatgagtcagactacaaatattacttggcagtggaatgccttgagagagcatctatgactaataatgctgatgagagagatattcttgctagagatgctttcaacctcttgactaaaattccagactctgctgatttgagtgccatatgcaagagatttgagaacctaagattttatgaggctgtagtccgattgcctctgcagaaagctcaagcacttgactccaatgctgatattatcaatggtcaaatagacccaaggcatcatgatacaataatgttgcagcgtgaacaatgctataggattgttatggatgcgctgtgcactctcaagggtgttgggcatagtcgaatgcaaagtgcagacaagtcatctgctctagcaactgctgctgatccagcttctcgaagcaagtatatcaaacaaatcatacaacttagtgtccaatggccggacacagttttccatgagcatctatacaggacacttattgagcttggtctagaaaatgagcttttagagtatggtggatctgatttggtttcttttctgcagagtgctggccgtaagcatcaagaagaggttcgggcagtttcttcagttacacctggagctgctaagatgcatgatttaggtgcacctatctcgactagtcaaacaaagtatctcgagctcctagctaggtactatgtccgcaagggggaacatattgctgctgccaggatgttgttaatattggcagagagacagtgctctaattctgaagaagctccagctcttgacaagcggtatgaatatctcagagatgcagtgcttcaggccaaaagcgcaggcatcgctgctgatttgtccaaaaatcctgttgatagcagcacagtggatttgcttgaaggaaaacttgtcgtgctacgcttccaaattcaaattaaagaagaattggagctcatggttgcacggctcgaaaatattccaagcagttctgaattacctaatgttccgttccctcgtgacaacattcttgctaatgcagagactgctaaggctgctaaggataaggcaaaagaactatcattaaatctcaagagtatcactcaactgtataacgattatgctgttccatttgatctctgggaggtttgcttggaaatgctgagctttgctaattactctggagacgctgatagcaaaattgttcgagaagtttgggctagactccttgatcaggcacttactaaagggggtgttgcagaagcttgttctgttgtgaaaagagtaggctcgaaacttgatcctgcagatggagcttgtttacctttagatatcatatgccttcaccttgagaaggctgcagtggatagattaagttcaggagaagaattagttggtgatgatgatgttgcaagagctcttcttggtgcctgtaaaggtcttcctggacctgtactttctgtgtatgatcacctgttatcgaacggtgcaatcataccctcactaaatctgaagttgcgccttctgcgatcagttctagcaatcctccgtgagtgggggatatctgtcattgcacacaggctaggcaccacaagtgctggggcttcattctttcttgatggaacattctcattgaaccaaacagggactgcgaatcaaggtgctcgagataaaataattagtttggcgaacaggtacatgactgaggtgaggcgattaaaccttccacagaaccaaacggagaatgtctaccgtggtttccgtgaacttgaggagaaattactatcttcttattaagcagattgcagtcattcctcaagatagtgaagaatgatcttgcatctgttgtaccacaaaaccaaggaatagagtcgagggcttctggattcacctcagcatgatctgtattgttccttacacttatctgcaagaacccggggctgctgcaggactctagctgaggtggttagatggctctagtaccactcatgtcctggctgagttggttagatggctctaatagcacttctgatgtcctgggtttgacttctaggtaaagatctagatctggtctatagggagcggattctcttgctgcatgggaggcagttttcgtgacttggtcgtactccgattgagcttcttaatataataacgggggacagtcttttctcaccgttcgagttcttttcttttttgaacccaaggctgctttaatcattattaatcagatgtttttcatgactaagtgcagccttcttttatttgacttgagtcagtatggactgcagagccgtagatttggaaaattgtttagatgtcttcattacttgctaatctagtggtagatactgccggtcctgttttaagggtggactttgtccctgaacaacattaaactgttgaatacaagttgggttttgatgcaggaatcggaa

SEQ ID NO: 86479 - DNA, 1158 bp, Zea Mays
acgttcggccgttccccaccacttgcgcgttgtgccgcgacgctccggccatggcgtggggggaggacgaggccatcggtcccgacgtggcctcggcgggtcttcacgtctcggagcggatcggccgcgacgccgccgcgcagcccgacctggaggaggcccttgaagcctcgcgctacgcgtcccacccctactcctcgcaccccaaggagtggcctcctttggtagaagttgcagaaactcgtcaactccctcctatgttgattgaaagatataacacagctgccggtgaaggaacagctctttgcgggattttttctgacatacatcgggcctgggcaacagttgacaattcatttttcatctggcgatttgataaatgggacgggcattgccaagagcataatgttgacgagcaagcaatttgtgctgttggccttgctagggcaaaacctgggattttcattgaagccattcaataccttttagttttagcaactcctgttgaagtaaggatgattatgatttccctttgaattgaaacacacttgctgaccttgattgacacttgataatcaagttggtatttgaagacaagcaaaatctacagtaatatagattgcctgcaaaattcaattgtcaagttaaaacacactaagcatttgacacatattttctagataaatttactcttcacattatccattttctgtttcttatacctaacacacaaggactaaaatctacaggatgctaaatcaaattatatcctggagttatctgttgttttttgattttcgtgatgatataacttgtcaagtgttcaacactgcaaggaagagcggaccatcgaatcctttcagggcatgtttagtttccttgccttgtttgatctagcctcattagtggctgggtaatgagtcaagattcattgttacctgctaatcttgcttggtgaggtcttggctaatgcaaatggccactttgcctattataacatcgaagctgttcctaatagttttgcttatgcttccaatgtaattgaaccatcacttgaccttgagagcatctccaacaggagacctcaaatcaggacccctacttttgatttgagtttgagggctcccctactctcgaggcttcttttttccatctatt

SEQ ID NO: 86480 - DNA, 1720 bp, Zea Mays
taagcacccgccattggttatggttcgggcagtttcttcagttacacctggagctgctaagatgcatgatttaggtgcacctatctcgactagtcaaacaaagtatctcgagctcctagctaggtactatgtccgcaagggggaacatattgctgctgccaggatgttgttaatattggcagagagacagtgctctaattctgaagaagctccagctcttgacaagcggtatgaatatctcagagatgcagtgcttcaggccaaaagcgcaggcatcgctgctgatttgtccaaaaatcctgttgatagcagcacagtggatttgcttgaaggaaaacttgtcgtgctacgcttccaaattcaaattaaagaagaattggagctcatggttgcacggctcgaaaatattccaagcagttctgaattacctaatgttccgttccctcgtgacaacattcttgctaatgcagagactgctaaggctgctaaggataaggcaaaagaactatcattaaatctcaagagtatcactcaactgtataacgattatgctgttccatttgatctctgggaggtttgcttggaaatgctgagctttgctaattactctggagacgctgatagcaaaattgttcgagaagtttgggctagactccttgatcaggcacttactaaagggggtgttgcagaagcttgttctgttgtgaaaagagtaggctcgaaacttgatcctgcagatggagcttgtttacctttagatatcatatgccttcaccttgagaaggctgcagtggatagattaagttcaggagaagaattagttggtgatgatgatgttgcaagagctcttcttggtgcctgtaaaggtcttcctggacctgtactttctgtgtatgatcacctgttatcgaacggtgcaatcataccctcactaaatctgaagttgcgccttctgcgatcagttctagcaatcctccgtgagtgggggatatctgtcattgcacacaggctaggcaccacaagtgctggggcttcattctttcttgatggaacattctcattgaaccaaacagggactgcgaatcaaggtgctcgagataaaataattagtttggcgaacaggtacatgactgaggtgaggcgattaaaccttccacagaaccaaacggagaatgtctaccgtggtttccgtgaacttgaggagaaattactatcttcttattaagcagattgcagtcattcctcaagatagtgaagaatgatcttgcatctgttgtaccacaaaaccaaggaatagagtcgagggcttctggattcacctcagcatgatctgtattgttccttacacttatctgcaagaacccggggctgctgcaggactctagctgaggtggttagatggctctagtaccactcatgtcctggctgagttggttagatggctctaatagcacttctgatgtcctgggtttgacttctaggtgagagcaaatttcagacgggttgaaaaaggtcatttgttggttcctctgtttgtgtgcacacaacggactgaccaatggatcctcgtgtaggtaaagatctagatctggtctatagggagcggattctcttgctgcatgggaggcagttttcgtgacttggtcgtactccgattgagcttcttaatataataacgggggacagtcttttctcaccgttcgagttcttttcttttttg

SEQ ID NO: 86481 - DNA, 1933 bp, Zea Mays
taagcacccgccattggttatggttcgggcagtttcttcagttacacctggagctgctaagatgcatgatttaggtgcacctatctcgactagtcaaacaaagtatctcgagctcctagctaggtactatgtccgcaagggggaacatattgctgctgccaggatgttgttaatattggcagagagacagtgctctaattctgaagaagctccagctcttgacaagcggtatgaatatctcagagatgcagtgcttcaggccaaaagcgcaggcatcgctgctgatttgtccaaaaatcctgttgatagcagcacagtggatttgcttgaaggaaaacttgtcgtgctacgcttccaaattcaaattaaagaagaattggagctcatggttgcacggctcgaaaatattccaagcagttctgaattacctaatgttccgttccctcgtgacaacattcttgctaatgcagagactgctaaggctgctaaggataaggcaaaagaactatcattaaatctcaagagtatcactcaactgtataacgattatgctgttccatttgatctctgggaggtttgcttggaaatgctgagctttgctaattactctggagacgctgatagcaaaattgttcgagaagtttgggctagactccttgatcaggcacttactaaagggggtgttgcagaagcttgttctgttgtgaaaagagtaggctcgaaacttgatcctgcagatggagcttgtttacctttagatatcatatgccttcaccttgagaaggctgcagtggatagattaagttcaggagaagaattagttggtgatgatgatgttgcaagagctcttcttggtgcctgtaaaggtcttcctggacctgtactttctgtgtatgatcacctgttatcgaacggtgcaatcataccctcactaaatctgaagttgcgccttctgcgatcagttctagcaatcctccgtgagtgggggatatctgtcattgcacacaggctaggcaccacaagtgctggggcttcattctttcttgatggaacattctcattgaaccaaacagggactgcgaatcaaggtgctcgagataaaataattagtttggcgaacaggtacatgactgaggtgaggcgattaaaccttccacagaaccaaacggagaatgtctaccgtggtttccgtgaacttgaggagaaattactatcttcttattaagcagattgcagtcattcctcaagatagtgaagaatgatcttgcatctgttgtaccacaaaaccaaggaatagagtcgagggcttctggattcacctcagcatgatctgtattgttccttacacttatctgcaagaacccggggctgctgcaggactctagctgaggtggttagatggctctagtaccactcatgtcctggctgagttggttagatggctctaatagcacttctgatgtcctgggtttgacttctaggtaaagatctagatctggtctatagggagcggattctcttgctgcatgggaggcagttttcgtgacttggtcgtactccgattgagcttcttaatataataacgggggacagtcttttctcaccgttcgagttcttttcttttttgaacccaaggctgctttaatcattattaatcagatgtttttcatgactaagtgcagccttcttttatttgacttgagtcagtatggactgcagagccgtagatttggaaaattgtttagatgtcttcattacttgctaatctagtggtagatactgccggtcctgttttaagggtggactttgtccctgaacaacattaaactgttgaatacaagttgggttttgatgcaggaatcggaatttagtatgtgccatgacattgtacagttctatagtagattattctcagtgttgtaagcttttacgc

SEQ ID NO: 86482 - DNA, 830 bp, Zea Mays
cacgctcggctgagcactttcccgccgtcttcagaccgtcacaccctcggtcgtgacaggtttctgcctccactgccttccccaccgccgccatgccctcctccgccgcccgggccctcacatccgtctcccgcgcagccttctcctggaagccgacggggcggccgcagcaaacgctggcggcggcggtgagcaggtcgggcgtggggctccactcgggagcgcgcgtcaccgccacgctgtttccgacgcaagctggagagggtaggtatttcctcgtggagggtgatgaggaggcgagggtagcggcagaggtggggaacgccgagccactgtcgcagctctgcacgacgcttcgtcggggcgaaggcgcccacacgcgggtccggacggtggaacaccttctttcggcgatggaggcgcttggcgtcgacaactgccgtatcgaggttagcggcggggatgagttccctattttcaatgtgggaaggtgtagagttatcgttgtattttccatttatgtgaaagtgattaagcaatgccagattcctttgcttgatggatcagcgcaagagtgggtagaggcagtacaaggcgttggcttgtgtgcggcagaggatgccaatggggaaaagttggataaactggcgcctgaaattcaggagcctgtttacctacggaaacacgattgctttatagctgcattccctagcccacaaatccacataacctgtggcattgatttcccaaagatcctagcttcgcccctggtaaggatggctcaggaaaagatgatccaacaggagaagatgaagcatcagaaggattga

SEQ ID NO: 86483 - DNA, 1311 bp, Zea Mays
tcatatgttctcacaagtttgattcctttgtcctgctgtgtgccttttcttttccttggaaggttctagaattatttgttataactttctcagaaattttctggctctgtaacacttgtctatacttctcattctcccattaatttttggagtttgcaagatcttttgttatggcgttctgtattaatgattttttggtcatgaatcacagatacatagtgactcacttctgcttgctgcatttttgagttcaacaggttgaaaaaatgcgtgctgctggactcatcaaaggagggtcactagaaaatgctatggtttgcagcatatctggtggctggctgaatccaccactgcggttcgaggatgaaccttgccgccacaagattttagatcttattggtgacttctcgctgtttgcacagaatggtaaccagggctttccaattgctcatataattgcctataaggctggtcacgcgctgcacactgatttcctccgccatctgtctggaaagatcactgtggaccaagagcagcttgctgggcggtgttcagatgtgcacggctcatgttcatcgtatgttcggtagtggttaggatagaaagaggtgcatttcaggacaagcacgcggtgacacccctcgtttctcagtataaggctagtactgagatgagggttctactgtgacatttttccttcagattcgtgggctgcaacagccatggtctttcagaaaattgaattttgccggcccgtgtggagttttggtaacttggtatggaagatcatttttttcccatcgtactttgaagtttgcggatgtggccgggccgtgtctgttcttttgatggctgaacccaggtgggggtggagtccggtggacgctccaggaagcagggactgcagaaacatttggattaggatccattgcgacgacccagtggctgtggctcggggtcgccggtcgccacgtcgtggtcgcccctccttttccctgtggataaccacgaacagcgttgaggtggcactgcgacgcgcgggtggacgactggacccggagagcgacgttctcgcgcgcgtgggaaaatttggccaccacgatgaagtggcggctgatggagaaaaggcgaccgaaagtgcaagcgcccgcggccctctggagttccgccgtctcgccgcgcggcttcctgctcctccccctccggaacgggtttgtccatccgttggcagttgcactaggggggtcagctgcttcgcccccattggagccaccggttgagatggtggtcctgagctgacacccatctcca

SEQ ID NO: 86484 - DNA, 2401 bp, Zea Mays
agtctcctcctcctcttcaccccacctcttcctccctcccttccctccctgttccctttcccacccctgcctgaggccttccgccttcgtctctgaatcgcggcggctcctgagtcccgaggcgccgcctgatgagcggctaggcgccggatctacggcagcgttggaggtctgatttggacgggagagagcgaggtgaggtctcggttttctcgatataggagatggcggcggcagaggcgcggggagcggacttccccgtggggatgaaggttctggttgtggacgacgacccgacgtgcctcgtcgtgctcaagaggatgctccttgagtgccggtacgacgtgacaacatgtccgcaggctacaagagcactaactatgttgcgagaaaataggcgtggttttgatgttataataagtgatgtccacatgccggatatggatggattcaggctacttgaacttgtaggccttgagatggatcttccggttatcatgatgtctgctgattcaagaacggatattgtaatgaagggaattaagcatggagcatgtgactatttaataaaacctgtcagaatggaggagttgaaaaacatctggcaacatgttgttaggaaaaaatttaatggaaacaaggatcatgagcattctggtagcctagatgataccgatcgtaacagaccaaccaataatgataatgaatatgcttcctctgcgaatgatggaggtgatggcagctggaaatctcagaaaaagaaaagagagaaagaagatgatgaaactgacctagaaagtggcgatccttctacatcaaagaaaccaagagttgtttggtcagttgagcttcatcaacaatttgtgaatgcagtcaatcacctcgggatagacaaagctgttccaaagaaaattttggaattgatgaatgtccctggcttaaccagggaaaatgttgccagccatttgcagaaattcagactctacctgaagagaattgcacagcatcatgctggaatacctcatccatttgttgcgtctgcttctagtgctaaagttgctccgttaggaggactggaattccaagctttggctgcttctggtcagatccctcctcaagctctggctgctttgcaggatgaactccttggtcgacctacaagcagtttggcattgcctggaagagaccagtcatctttgcgactggctgcaatcaaaggaaacaagccccatggagagagagaaatagcatttggtcaacccatatacaagtgtcagaataacacgtatggtgcattttctcaaagcagcccagcagttggaggattgccatcttttgcagcttggcccaataacaaacttggtatgactgattcttcaaacacattgggaaatgtgggcaattctcaaaatagcaatatgttattgcatgaattgcagcaacagccagacaccttgctgtcaggaacccttcacaatattgatgtcaaaccttctggtgtagttatgccatctcagtcgttaaatgtgttcccggctagtgaaggcatctcacataatcaaaatccattggttataccatctcaatccccaagctttctggcatcagttcctccatccatgaaacatgaatcccttcttggatcaccttcaccatcaaccagtctgttgggtgggcttgatatggttaatcaagcttcaacaagtcagcctttgattagtagccatggagcaaatcttcctggtctcatgaaccgcagctcaaatgcaatgccttcaccaggaattagtaattttcaaagtgggaatattccttatgtggttactcagaatgctatgggagttagctcaagaccaccaggtgttctaaagactgagtgcactgaatcgctgactcatagttatggctatattggtggtagcaccagtgtggactctagcttgctctcttctcaggccaaaaatccacagtatggtttattgcagagtcaaaatgatgttagcagcagctggttgtcttcacaagattttgatagttttggaaattctcttgggcaaggccaccctggttccacttcgtctagcttccagagttccgctcttggcaaattgcctgaccaaggacgagggaggaatcatgggtttgtcgggaaaggcacttgcattccaagtcgctttgcggtggatgaggttggatctccaactaacttgagccacaacattgtaaacagtggagacatagtgaacccggacatattcggatttagtggacagatgtgaaactttcttgaatttgtaattaggtaagcacacattccacctgatgtgaaattccacaatgacttttgccctccttttgaacttgatgcaataatgccgaacatgattatcctttttagttc

SEQ ID NO: 86485 - DNA, 2577 bp, Zea Mays
agtctcctcctcctcttcaccccacctcttcctccctcccttccctccctgttccctttcccacccctgcctgaggccttccgccttcgtctctgaatcgcggcggctcctgagtcccgaggcgccgcctgatgagcggctaggcgccggatctacggcagcgttggaggtctgatttggacgggagagagcgaggtgaggtctcggttttctcgatataggagatggcggcggcagaggcgcggggagcggacttccccgtggggatgaaggttctggttgtggacgacgacccgacgtgcctcgtcgtgctcaagaggatgctccttgagtgccggtacgacgtgacaacatgtccgcaggctacaagagcactaactatgttgcgagaaaataggcgtggttttgatgttataataagtgatgtccacatgccggatatggatggattcaggctacttgaacttgtaggccttgagatggatcttccggttatcatgatgtctgctgattcaagaacggatattgtaatgaagggaattaagcatggagcatgtgactatttaataaaacctgtcagaatggaggagttgaaaaacatctggcaacatgttgttaggaaaaaatttaatggaaacaaggatcatgagcattctggtagcctagatgataccgatcgtaacagaccaaccaataatgataatgaatatgcttcctctgcgaatgatggaggtgatggcagctggaaatctcagaaaaagaaaagagagaaagaagatgatgaaactgacctagaaagtggcgatccttctacatcaaagaaaccaagagttgtttggtcagttgagcttcatcaacaatttgtgaatgcagtcaatcacctcgggatagacaaagctgttccaaagaaaattttggaattgatgaatgtccctggcttaaccagggaaaatgttgccagccatttgcagaaattcagactctacctgaagagaattgcacagcatcatgctggaatacctcatccatttgttgcgtctgcttctagtgctaaagttgctccgttaggaggactggaattccaagctttggctgcttctggtcagatccctcctcaagctctggctgctttgcaggatgaactccttggtcgacctacaagcagtttggcattgcctggaagagaccagtcatctttgcgactggctgcaatcaaaggaaacaagccccatggagagagagaaatagcatttggtcaacccatatacaagtgtcagaataacacgtatggtgcattttctcaaagcagcccagcagttggaggattgccatcttttgcagcttggcccaataacaaacttggtatgactgattcttcaaacacattgggaaatgtgggcaattctcaaaatagcaatatgttattgcatgaattgcagcaacagccagacaccttgctgtcaggaacccttcacaatattgatgtcaaaccttctggtgtagttatgccatctcagtcgttaaatgtgttcccggctagtgaaggcatctcacataatcaaaatccattggttataccatctcaatccccaagctttctggcatcagttcctccatccatgaaacatgaatcccttcttggatcaccttcaccatcaaccagtctgttgggtgggcttgatatggttaatcaagcttcaacaagtcagcctttgattagtagccatggagcaaatcttcctggtctcatgaaccgcagctcaaatgcaatgccttcaccaggaattagtaattttcaaagtgggaatattccttatgtggttactcagaatgctatgggagttagctcaagaccaccaggtgttctaaagactgagtgcactgaatcgctgactcatagttatggctatattggtggtagcaccagtgtggactctagcttgctctcttctcaggccaaaaatccacagtatggtttattgcagagtcaaaatgatgttagcagcagctggttgtcttcacaagattttgatagttttggaaattctcttgggcaaggccaccctggttccacttcgtctagcttccagagttccgctcttggcaaattgcctgaccaaggacgagggaggaatcatgggtttgtcgggaaaggcacttgcattccaagtcgctttgcggtggatgaggttggatctccaactaacttgagccacaacattgtaaacagtggagacatagtgaacccggacatattcggatttagtggacagatgtgaaactttcttgaatttgtaattagggttgatcagtgaggactggaaacaaatttagtggtttgaatggttgctcgtattttcgtttcttccttttccttctgtaattggtttataaggggaatcggctatgtgacagcatatggaatcttgctttatagaagtttgttcagtttaaaggacttgaaattaatcagtcccttgccatatagctcctttcctttgttctcttgtagcacaatttttatgacagtcgtaactcaacctagccgatttattcctaaccatattctttctacta

SEQ ID NO: 86486 - DNA, 832 bp, Zea Mays
ctgttccctttcccacccctgcctgaggccttccgccttcgtctctgaatcgcggcggctcctgagtcccgaggcgccgcctgatgagcggctaggcgccggatctacggcagcgttggaggtctgatttggacgggagagagcgaggtgaggtctcggttttctcgatataggagatggcggcggcagaggcgcggggagcggacttccccgtggggatgaaggttctggttgtggacgacgacccgacgtgcctcgtcgtgctcaagaggatgctccttgagtgccggtacgacgtgacaacatgtccgcaggctacaagagcactaactatgttgcgagaaaataggcgtggttttgatgttataataagtgatgtccacatgccggatatggatggattcaggctacttgaacttgtaggccttgagatggatcttccggttatcagtcagtatatatttcttcttgtttttctgtttagtatgttaacatgtggtgttggaacacatcagaaataattgctgatgaaattgcagtgatgtctgctgattcaagaacggatattgtaatgaagggaattaagcatggagcatgtgactatttaataaaacctgtcagaatggaggagttgaaaaacatctggcaacatgttgttaggaaaaaatttaatggaaacaaggatcatgagcattctggtagcctagatgataccgatcgtaacagaccaaccaataatgataatgaatatgcttcctctgcgaatgatggaggtgatggcagctggaaatctcagaaaaagaaaagagagaaagaagatgatgaaactgac

SEQ ID NO: 86487 - DNA, 1186 bp, Zea Mays
gcgcggccgcggcggcgtggacggcgacgccggcgagtcgtcgatgagcccgggggtggtgaccacgcgcggcagccgccgccggagcgcgccaagcgccgcgaccgccggcgcctggtccgctgctccggttgccaggtcgaggaggttggagtaggagcgggacgccatggcaggccgcctggtcctcgcagggatccgattccgagctggcttggatcaaatctttgggggcttttgctacaagaagcacagtccttgcggcagaaatccaagattggcgtttggatcgacgcacgaactagcggagaaatggagcggatgctttggtccgctgtttcttgcaggatagggacaagctcgcagtgtttgtgagagaagtggcacacactgacacactggactcaacaagcagccacctgtgagtgaggggaaggagtcagagagataaagaggattttttgtgctttcaatacaaagggagggagagccttttcttctgctgcaaactgacgttgctgttcttgcctggtggacgtgggggagtacagctgagtggtgaaaaatttgacggctcagagactagcagtaaaaatccccttcaaagcgagcaatgaagcaaaggaactctgctggactgaagtaagaagctgataaatatcagacggaaagtgcaggagaaacgcgagaagaatctccgagccgcaatcaacccctcctcctatgctcttaagagctgctcatgttgcatgacagcatgaggaagaagtgggggtggacaggagaaatagctttatagcagctcaccctggcctctccggaggtcctcgtggaggggagatccttggccttggattaatcaaccaggcgaccgacggcaacaaacgagtcgcataggacaccacgacagcggggtgtgggggtgacagggacggcaacgatcaccccggttcggctctccctctccctctccttctgggagacggataagcgagaggagaaaaacaagaaacgggaggaaaataatatggaatttgctcggcgatccggaggcggccttgtttggttctggttaggtggccttgcgcttggatctttccgcagctctcaggggagaagaacgcaggcagcacaagtgcagtgccgctggaatcaactggggaggaaatttaccggcgtgtgtgcg

SEQ ID NO: 86488 - DNA, 1870 bp, Zea Mays
aactaatctaggaaaacttggaagcggacaggatcatcgccaaatcgaaggagattgaacgaagcagcccagccaaattcccctcgccgccccgtcccttctcgacatttcttgtcccgtcgtcgcctcaatctcgaagcctctccggcggagccgcctcatcatcgttccgaaggcctccaaccaaacatcctctagggtttccgcatcgtccgtcgcgatgggcttcacgaagcggtcgccccagcatcccgcctccccagccggcggcgaggtcggcgcccagacggcagggaaggtcacaccagtgccggcggcgccggagtcggcgcccgcggcggtggtgccgaggcctccggacgtggcgcccttcctgaccaaggtctacgacatggtctccgacccggccaccgacgcggtcatctcctggagcgccgccggcggcagtttcgtgatctgggactcgcacgctttcgagcgcgacctgctgccgcggcacttcaagcacaatcacttcaccagcttcatacgccagctcaacacctacggatttcataaagttgatccagatagatgggaatgggccaatgaaggctttgttaagggccaaaaacatcttttgaagaccatcaagagaaagaagaaatcctctcaggatgtacctagtgatctgcagtcggtgcctgtcaaaactgcacctggcactgagaatatcgagataggaaaatatggaggccttgaaaaggaggttgagacacttaagagggacaaggcccttctaatgcagcagcttgtagatctacggcagtaccagcaatcatctagcgctgaagtgcagaatttaattcaacgcctccgtgtgatggagcagaaccagcagcagatgatggcacttttggcaattgttgtccagaatccagacttcctgaaccagctcgtgcagcagcagcgcaggagtaactggtggaatgatgatggtaacaggaaaagaaggttccaagctctggaacatggtcctgtagatgaccaagagacttctggtggaggcgcacaaattattcaatatcgtcctcctgttcctgaaacttccaatcagccaataccagcaaatgaagctttctattcaacccctgcacaaccagcttcaagccctgcacttgagatgcccatggatgtagagatggcttcaaacaatgttaatacctttgattcaactggcaatgattttactgacacctctgctctatgtgaatgggatgacatggatatatttggtgatgaacttgagcacattcttcaacagccagagcaggactttcaagtggaccctcctttaacagttgaggattatggttatgatcatccacggttagagcaggactgtcagatggaagcacaacagaattgcaaaaatcctcaatatgttgcctgtgtcttgaagcaaagggaaagccatgcatctgatgtccattagtactgatcagtttgagctgatgtcataactgaagcatgagcggtggtcccccagaatgttgtccagtaacattagtggatagagatttgtgatgaacagaatcttgagactggcaggttagccaccattgggaacctgaagaccgtcgggattgctcagaattcagtatactaatactaatactaaaaaaaaaatatacagtaacacatgttgactatacatgatttcgttttccttactcgctcgaccaaaggcagccgtacaatgtttttacttttgtccaggtgggagcatctaggtctttaaatggtttcggtgattaatggtgatcctagattattatgatttgcagagactataacttaggttatgataacagtgattgattatgcgtac

SEQ ID NO: 86489 - DNA, 1861 bp, Zea Mays
aactaatctaggaaaacttggaagcggacaggatcatcgccaaatcgaaggagattgaacgaagcagcccagccaaattcccctcgccgccccgtcccttctcgacatttcttgtcccgtcgtcgcctcaatctcgaagcctctccggcggagccgcctcatcatcgttccgaaggcctccaaccaaacatcctctagggtttccgcatcgtccgtcgcgatgggcttcacgaagcggtcgccccagcatcccgcctccccagccggcggcgaggtcggcgcccagacggcagggaaggtcacaccagtgccggcggcgccggagtcggcgcccgcggcggtggtgccgaggcctccggacgtggcgcccttcctgaccaaggtctacgacatggtctccgacccggccaccgacgcggtcatctcctggagcgccgccggcggcagtttcgtgatctgggactcgcacgctttcgagcgcgacctgctgccgcggcacttcaagcacaatcacttcaccagcttcatacgccagctcaacacctacggatttcataaagttgatccagatagatgggaatgggccaatgaaggctttgttaagggccaaaaacatcttttgaagaccatcaagagaaagaagaaatcctctcaggatgtacctagtgatctgcagtcggtgcctgtcaaaactgcacctggcactgagaatatcgagataggaaaatatggaggccttgaaaaggaggttgagacacttaagagggacaaggcccttctaatgcagcagcttgtagatctacggcagtaccagcaatcatctagcgctgaagtgcagaatttaattcaacgcctccgtgtgatggagcagaaccagcagcagatgatggcacttttggcaattgttgtccagaatccagacttcctgaaccagctcgtgcagcagcagcgcaggagtaactggtggaatgatgatggtaacaggaaaagaaggttccaagctctggaacatggtcctgtagatgaccaagagacttctggtggaggcgcacaaattattcaatatcgtcctcctgttcctgaaacttccaatcagccaataccagcaaatgaagctttctattcaacccctgcacaaccagcttcaagccctgcacttgagatgcccatggatgtagagatggcttcaaacaatgttaatacctttgattcaactggcaatgattttactgacacctctgctctatgtgaatgggatgacatggatatatttggtgatgaacttgagcacattcttcaacagccagagcaggactttcaagtggaccctcctttaacagttgaggattatggttatgatcatccacggttagagcaggactgtcagatggaagcacaacagaattgcaaaaatcctcaatatgctgatgtcataactgaagcatgagcggtggtcccccagaatgttgtccagtaacattagtggatagagatttgtgatgaacagaatcttgagactggcaggttagccaccattgggaacctgaagaccgtcgggattgctcagaattcagtatactaatactaatactaaaaaaaaaatatacagtaacacatgttgactatacatgatttcgttttccttactcgctcgaccaaaggcagccgtacaatgtttttacttttgtccaggtgggagcatctaggtctttaaatggtttcggtgattaatggtgatcctagattattatgatttgcagagactataacttaggttatgataacagtgattgattatgcgtacatggattttgtctcttaaggttggtttggttatcagggatctatagggactagggag

SEQ ID NO: 86490 - DNA, 4793 bp, Zea Mays
aactaatctaggaaaacttggaagcggacaggatcatcgccaaatcgaaggagattgaacgaagcagcccagccaaattcccctcgccgccccgtcccttctcgacatttcttgtcccgtcgtcgcctcaatctcgaagcctctccggcggagccgcctcatcatcgttccgaaggcctccaaccaaacatcctctagggtttccgcatcgtccgtcgcgatgggcttcacgaagcggtcgccccagcatcccgcctccccagccggcggcgaggtcggcgcccagacggcagggaaggtcacaccagtgccggcggcgccggagtcggcgcccgcggcggtggtgccgaggcctccggacgtggcgcccttcctgaccaaggtctacgacatggtctccgacccggccaccgacgcggtcatctcctggagcgccgccggcggcagtttcgtgatctgggactcgcacgctttcgagcgcgacctgctgccgcggcacttcaagcacaatcacttcaccagcttcatacgccagctcaacacctacggatttcataaagttgatccagatagatgggaatgggccaatgaaggctttgttaagggccaaaaacatcttttgaagaccatcaagagaaagaagaaatcctctcaggatgtacctagtgatctgcagtcggtgcctgtcaaaactgcacctggcactgagaatatcgagataggaaaatatggaggccttgaaaaggaggttgagacacttaagagggacaaggcccttctaatgcagcagcttgtagatctacggcagtaccagcaatcatctagcgctgaagtgcagaatttaattcaacgcctccgtgtgatggagcagaaccagcagcagatgatggcacttttggcaattgttgtccagaatccagacttcctgaaccagctcgtgcagcagcagcgcaggagtaactggtggaatgatgatggtaacaggaaaagaaggttccaagctctggaacatggtcctgtagatgaccaagagacttctggtggaggcgcacaaattattcaatatcgtcctcctgttcctgaaacttccaatcagccaataccagcaaatgaagctttctattcaacccctgcacaaccagcttcaagccctgcacttgagatgcccatggatgtagagatggcttcaaacaatgttaatacctttgattcaactggcaatgattttactgacacctctgctctatgtgaatgggatgacatggatatatttggtgatgaacttgagcacattcttcaacagccagagcaggactttcaagtggaccctcctttaacagttgaggattatggttatgatcatccacggttagagcaggactgtcagatggaagcacaacagaattgcaaaaatcctcaatatgttgcctgtgtcttgaagcaaagggaaagccatgcatctgatgtccattagtactgatcagtttgagctgatgtcataactgaagcatgagcggtggtcccccagaatgttgtccagtaacattagtggatagagatttgtgatgaacagaatcttgagactggcaggttagccaccattgggaacctgaagaccgtcgggattgctcagaattcagtatactaatactaatactaaaaaaaaaatatacagtaacacatgttgactatacatgatttcgttttccttactcgctcgaccaaaggcagccgtacaatgtttttacttttgtccaggtgggagcatctaggtctttaaatggtttcggtgattaatggtgatcctagattattatgatttgcagagactataacttaggttatgataacagtgattgattatgcgtacatggattttgtctcttaaggttggtttggttatcagggatctatagggactagggagaaatcactttgctattcaaaattaaacatcctccatttgatcctcgtgattctttatcatcaaatcaatcctaagacttcttcggatacagtacagggacgctagcggtggggtggggtgggcatggcttttcccctatcgctcccgagtgtatggagcactgaagtgaagccctgctaaaatttaaaatgtttataatctctatctctactactcttatgtccttagtgtaggcgtgtacatctcctctgttctgccgtgcccgcaattacccgcgctcgtgactcctcgccgccgcagtcctcgccgccgtcctcgcgcccgcagtccccgccaaagctgcaacgcccgcagtccccgccgccgtgctcgtccccgctgtccccgaattcgccgcgccctcgcaaagctgctgtgcccgcagtccccgccgccgtgctcgtccccgctgtccccgaattcgccgcgcccccgcaaagctgttgtgcccgcagtccccgccgccgtgctcgtccccgctgtccccgaattcgccgcgcccgcgcaaagctgctgtgcccgcagtccccgccgccgtgctcgtccccgctgtccccgaattcgccgcgcccccgcaaagctgctgtgcccgcagtccccgccgcgccagcaacgcccgcccccaacagatcctggtgcgtcgcgaaccttctgccctccacctccgctccatggtgcgatgcaatctccgcacttggaaacgagcaatctccgcactcggcgccccccagtatctcacatggaaacccaaatccccacctcaatcagcattcatcgtcaagtcccattccatcgtcgctgtcaactcctattaaaacacacgaccactgcgagggatgtagacaaatctcccatcaaacttcgacgatcgttgtctgttcagcacgctcgttgtctgttcatcacgctcgttgtctgtgcagtgggcttcaacgccttcgccggtgagttcagttctctgccagattctgtgtttcaacatgcctcaatgtttaatatgttcatgggtatggcaatgttatcaatgttgcgtcaatggtacctgtgttgcgtgaatttctgcgttgcggctgtgttgcgtgaatttctgcgttgcgggtaccaatttttcaagttatttcatgcctgaactttggtgcgtgtactcttctgatgccattggtgtgtgtaaactttggtgcgtgtaaacttgaacagaaatactttggtgcgtgtactattctgatgccatgaatgtgtttcaacatgactgaatgtgttccatgggtttacatctgtcaaatgagaatatgatactgtttcatgggtttacatgtgtctctagatgtgctgcaactgttcatccaagtgtcggttgttatcttatctcaattttgttgttgaaactttccccagctacttatagttattcagacgaaaacttagatctttgttcctcactgtcattgcattgttcgtggtcctggtagcactacagaatttggttttgtttgatatgtatttttattgggctatcagcatcaattgtgaaactggtcgcagtggaccattatttctgttcttaagttatttagtttgttgtttcggctacattgatcatcgagtgtttactgaaattgtgtatgggggtttcattgtagtagtttgttgcttcggctagcgaggggtgtggaaaaaggaagggataaggcgcttggttgacccggaccggacggcaggacaccgtcgggagttcgctgcaacacatcgacggcttccgcatcttctcaggccaaggtaagctttcaaacaattttgttcctgcaactgttctttaatagcctgtgatatgttagtaaattgccatacccatggaacacattcagtcatgttgaaacactgattgatactttgtttcatgggtttacatttgtctctagatgttctgccatgaattaactccactacttgctcatatagtaacttgtgaacggacaaccatgttgatttcagtcagattgttcctgcaactgttctttaatagcctgtgatatgttagtaaattgccatacccatggaacatagcctgtgatatgttagtaaattgccatacccatggaacacattcagtcatgttgaaacactgattgatactttgtttcatgggtttacatttgtctctagatgttctgccatgaattaactccactacttgctcatatagtaacttgtgaacggacaaccatgttgatttcagtcagattgttattttcaggaattgtggaatttcatttagaaatacacttgaactatgagtacctgttcactatccactttggtttcattttttcgatcatgtttcagttgaattttcctaacaaacaatgttgttaatgtcgtgtatgcttgtgtgtattggtggtttgtattggggtataaagtttatatgcattctaccggtatatatcggttgatgctaatatttagataaaatattagtggggaggtatatatgagtcgaaggccttgtggccccatactcataaattataaggtttaatctataaatggtactacatgatgcagtgcacatcttcatctatatggggtctcaagactatagatccttgctctccctccttaattacatgatgcagagtagtagagatatacttgtacatacacaccagtacaccacaaacatgtcatcggacaaattaattacatgatgctgctgactgccaaagaccaaggaccaaacacggaaataccactgcaacagttggttcagagaacagtgtaaatataagatttcatctacctgtgcagcatgagcaccaagcacacc

SEQ ID NO: 86491 - DNA, 651 bp, Zea Mays
ctgccatttagctttggcaggaacatattccttgacacgagtaattaagctttaccttgttgtataactaaactgaaaaacgtataagtgattgagcattccttttaagtatatgggacttccttaaaagtagtgcatttacttgaaacattaagaagtgtaccaagttatttggcttcattttactcacctctctttatccctcatggcctctttatcatcagttacaatttgcagttagcaatgtggttcccgttactgatgtggtttcagtttttgcagatttgtgatgaacagaatcttgagactggcaggttagccaccattgggaacctgaagaccgtcgggattgctcagaattcagtatactaatactaatactaaaaaaaaaatatacagtaacacatgttgactatacatgatttcgttttccttactcgctcgaccaaaggcagccgtacaatgtttttacttttgtccaggtgggagcatctaggtctttaaatggtttcggtgattaatggtgatcctagattattatgatttgcagagactataacttaggttatgataacagtgattgattatgcgtacatggattttgtctcttaaggttggtttggttatcagggatctatagggactagggag

SEQ ID NO: 86492 - DNA, 286 bp, Zea Mays
gctcgtgactcctcgccgccgcagtcctcgccgccgtcctcgcgcccgcagtccccgccaaagctgcaacgcccgcagtccccgccgccgtgctcgtccccgctgtccccgaattcgccgcgccctcgcaaagctgctgtgcccgcagtccccgccgccgtgctcgtccccgctgtccccgaattcgccgcgcccccgcaaagctgttgtgcccgcagtccccgccgccgtgctcgtccccgctgtccccgaattcgccgcgcccgcgcaaagctgctgtgcccgc

SEQ ID NO: 86493 - DNA, 963 bp, Zea Mays
atggaatctctatttgtaggcttgtcttataacaagccaaaaaaatcggtggcaaccgcaatagttcgagaagactatatttgcacgcaaggtgatcttgctctcatcgattttatcaaggaaatcccttgtgaaccaagggtagaagtcgttcttattgatgatgcctttgttgaaaggaagtggatggagtgtttatttcagccgagcgcatatctaggtgacgaggttatagactgttacataaatttgataaaagctcaaaagcatctaaagtgccgatctggaggtcgcgttcacatagaaaatgctttccagttcaatttcctgaagcgagatggtgatcttgaaattaaaacagaggagctatatccaattaaagacatggcacacatatgtagcgctgaacgaagggtgttactttacctagaccatgacatggtgtttattccgataaacatccgagagacgcactggtatcttgctgtgatccatgcaagaaatatggagatacaagtgctcgattcacttggtacttcacaagaccgcaaagacctcactgactctattaaaggactgcaaagacaaatagatatgatatctcaacgtaaggagttaaaagaccacaggtggccagacctccaagttgcttcttggccgctcagagaaatagacatgggatatgcaaagcagacagatagctcttcatgtggcctctttcttttgaactatatcgaatactggacaggggatgaactgtctgacagttttacccaggatgacatgtcacactttaggaaaaaaatggctgctatattactatcttcagacctgaataagagaagggggtgtctgttatacaagaatgaaaaagaagttgactctggaagctcatctgatgttgagatattagaaaacccaacagattctaataagaggaaactactccacgtgcttgatgat

SEQ ID NO: 86494 - DNA, 229 bp, Zea Mays
gtgttcatttcgaatgtatttataaaggacacttctgttgtaggatcctaatgactgatattttgcaggttctcatgccatggaaattcaatggatgttacgcccttttcgtaatagatcatgttaaaaagcatgtgacttttatcgattttacaccgactcaagattggtgtaagcacatgccatacaagaggttcgcggaagcgattatcatggcctcaaaaaaata

SEQ ID NO: 86495 - DNA, 1440 bp, Zea Mays
tgtttttacttgtgcagcctcctgagaactggaacagtggtgttgggtttgtgtctaaggaaatgatccaatctcattgtccagcgcctgctgagtacattcaggtgaatcttgagtcttattttttttcagttcactatgaagatcgattgcgtattctctattcttgtatgtaacctgagatgtgtttacctatttcaaatcctgagatgtggtcctcctccgatgaacaaggccatggatgcacaccttgacgagctcaactacacaaaggagatgcagttccagttcacggatgcatatagccgagcatgcagctttcttaaaccacaaagacagttacatcagaagctgtatcagaagtggttcagagttctgtttctgtggcggtcgatgctgttgacttggtagatgacaagggagatagcgatgatgacatcgtcgatcaccatggggacgaggacaggatgactgatgtggagctgtggcagcaacttgaaagtgagttgtaccggaagagggagggagaagaagatgacatagccgaagagatggctgaaagtacaattgctgaggaggtgggtggcgtggctgaagatgtgctcagcgagacaaaggaagtgcataggttctaccctcctggaaaaatcatgcacatattattctccagcagtgaagaagcagttcgtggagaggagcctgatgatgatcatggacatcacttgtgctgttcgtgagatcatggacatcagttgtgctgcagttactgtgaatagaaagacatggtgtttgaatgggggtcagactttatttggacagaatgatgtatggatttatttggtgttcagcctgaggtgtttataaacatctaataaagttgctgtcggcacacatatttgtgaactgaagcaaaaatggaatcatgcagtgtaacgtttgcaatagactcttacagcctgattcgagttcatcctttacaactttacactggtcagaaataatgccattttttgtttatcatgtttcaacattaataatctacaggataatggcttagtgccaattgtggagccagagatccttcttgatggagaccatgggatcgaaagaactctcgaggtggcagagaaagtgtggtctgaggtgttcttctacttggcccagaacaatgttctgtttgagggtatcctgctgaagcccagcatggtcactcctggagccgaccacaaggagaaggcttctccagaagccatcgcaaagcacacgctaacaatgctcaagcggatcccttctggttgtgtccttcatgttgcacgagatgactaacctatagagggtggatagggattgggagacagatccttcatgttgcacgagaagcgtagaacaccccttctcactgtacaaactagatataataagaaaatcatcatggagatt

SEQ ID NO: 86496 - DNA, 657 bp, Zea Mays
atgggcgcagctgatgttgtacgcagagttgcaacaaaagggacatttgtggaagataatcgacaaactgaagcagtggctcaagcaatgaatggtacaattttgtctcgttgcacagatggttcaattattgtttgggatggaaatgggaatagactgcgagaatttcattaccatagttcttctgttcgatgcataaagacactcggagacagggtttgggtgagctatgcaagtggcactattgaagttgtcgatgtcgaagagaaagcttctcctgaagcactaaggtcatggttgggtggtgcattttttgatgttgggctggtagtggttggtttgcaagaggtcgagatgggtgctggagttcttggcatgacagctgcccaagaaagtgtagggcttgaaggcagtgccaatgggaagtggtggatagacagtattggcaaaacacttgatgaggggatatccttccatagagttggttcaaggcagttggcaggactacttattgctgcatgggcaacgaatgaccttgggccacatgttggtgatgttgatgctgctgcagtgccatgtggcttggggcgcgctattggcaacaaggtaccaggtatcatctgtttgatctgtgtactaccactatgcatcgcctag

SEQ ID NO: 86497 - DNA, 1277 bp, Zea Mays
gctcccagtacccgagtatcgaccgagccagataatatcgtaacatcgtctgtccgccaccggttacctctttctccaggtagcgcaccatcggaacggcgaggagcagacgggaacggggatgggaagcgctggggcgctgctctggcacacgccgcagcagctgcacggccgtggcatcctcttccgccagagccggcctctcctgcgccagcgcaacctgcctctaatatcgctagctgccccggcgctcgagcccgagcgccgccgccggcagtgcctccgctgcgctgccgtcgacggggacggcgccctccgggagtctgggccactgccacagaaggagtctccgtccagcggcatcggtgccgcactcgaggacccgcctccaggacctcctgtggagaatggttcctttggaggcccctcacaggaagaacagagtgctctatatacttttctttatccaagcaaagacttacttccagatgataaggagatgagtatatttgatcatctagaggagcttcgtgacaggattttcatctcagttttggctgttggggctgcgatattaggctgttttgctttttcaaaagatttggttatttttcttgaggcaccagtgactgctcagggtgttcggtttttgcagctctcgcctggggaatttttctttacaacattaaaggtttcaggttattgtggccttttacttggaagtcctatcattttgtatgagatcattgcatttgttatcccaggtttaacaagggacgagcggaaatttcttgggcctattgtgttgggttcttctgttctattctatctaggcattttcttctcctacacggttctcagccctgctgcgttgaacttctttgtgaattatgcagatggggcagtggaatcgttgtggtcaatagaccagtactttgaattcatacttgtgctgatgtttagcacagggttgtcctttcaggtccctgttatccagcttttgctgggacaacttggattggtttctagtgaccaaatgctttcgatctggagatatgttgttgttggtgctgttgttgctgctgctgtgcttacaccttcgacggacccgttgacacaaatgctcctggctggtcccttgcttggtttatacttgggtggtgcatggatggtcaagataactgggcgctaactgctttgtgcaaggtgatggtgctccggatagcaagagtcccagtgtaacctagtcttgtaaaaatgaattcactctgcttgct

SEQ ID NO: 86498 - DNA, 906 bp, Zea Mays
gatcccagtaccgctaaatttcctcagtgttgctagtctacagcaggcagattcaaagtgaatggtgttgcataggccttgtttggcacagctttagctccgaggtttacctcaaatcttgactttgtatgctaaatcatgaatcttgagactcacgtttgtctagaatagaaaggaaacagttcaacttcaaccaaacaattcaggtgtaacctacctccatctccacaaagtttctagggttagaaatacctagctccgggaaatcacatatttattgaaggtggagctccgcgcaactggcctatattaccattctcatgcaatttccatactataggtttcaggttattgtggccttttacttggaagtcctatcattttgtatgagatcattgcatttgttatcccaggtttaacaagggacgagcggaaatttcttgggcctattgtgttgggttcttctgttctattctatctaggcattttcttctcctacacggttctcagccctgctgcgttgaacttctttgtgaattatgcagatggggcagtggaatcgttgtggtcaatagaccagtactttgaattcatacttgtgctgatgtttagcacagggttgtcctttcaggtccctgttatccagcttttgctgggacaacttggattggtttctagtgaccaaatgctttcgatctggagatatgttgttgttggtgctgttgttgctgctgctgtgcttacaccttcgacggacccgttgacacaaatgctcctggctggtcccttgcttggtttatacttgggtggtgcatggatggtcaagataactgggcgctaactgctttgtgcaaggtgatggtgctccggatagcaagagtcccagtgtaacctagtcttgtaaaa

SEQ ID NO: 86499 - DNA, 123 bp, Zea Mays
cacaaagttaatttttccccaagttatcgagatcctagagaggagtgaaagggaaatgggtttaaaacatttcctataatcgattttggtgtttgacgaccatcacaaaccttatggactaac

SEQ ID NO: 86500 - DNA, 699 bp, Zea Mays
aggacttttggcaaggtttgaaccaccgtacccaaaagaggatactgtgacgttttctttccttgtgatcaacaggattatattatgccctttttgtgtctggtaactcatgtctagggtgatgcagggcttaatccaatctgtatttgaacttcacgatagttcttgtattgtcgtcacagttggcaaatacgtgacaccaaaccacaaggatatcaatgggaatggaatagaaccggattataatcatcttctcgatttcaatgaagctagagattacctttcacgatgcgaaattaaagaattaagctgacggacgtttgcggcagatttcaatgaagcattatattctgaaggttctctcacaggtcagacgacctaatatgatagaattgatatggaacaaagttgatgctccgcctgactactacacgaccctccatgtcgcgtgccgctgatacgataagcagcgtatcggcgagcgtcgatacaacctctacagcacagggcgagcatgttgctggtggcctctgcggcatggtgcaagaaatagagtacacgtggcgctcatctaagacatcgcaaatgactgattcctaatcgaacacaatatgtgaatagcttgtggtctgttcaaggcgcttagtcaaaatatacttctagctaaatcctttttaattgtcggtttcacgtcctgtc

SEQ ID NO: 86501 - DNA, 583 bp, Zea Mays
tcagataaaagtagatgtagctttcataggacttagttccagtaaagcaaaggttggcagtgcaccaaacaatagcgtttatacttcattcttatgggttggagaatcctatgcaacatgacaagccagatgacatgcagatgagaaggttctgcatcaatagaaaccagagaaaaatctttgcatcaagagagcaccgatgaaaagcctgatgatcagcgtgatgaaaggtggggagttccatagctggtttaagctggagctagcttctgaagtctggtcaggtatctgtatgtgttgctcttttttaatttatttcatgagaaaggattgttatttgttccttgaactgtacttggtcgtacttgtgaataaatattttagcatggctgttcgacttcttataatgtttgttcgacatcagttcatgatatttgagttattgtatttataataatattatatatttataccgtcaatataatattagtgttacgtgatattttatcatatgtatcatagtgatgtttatcgttccgtatctatattttatactaatctttaatttttgtgacaacgcacg

SEQ ID NO: 86502 - DNA, 2459 bp, Zea Mays
cgacccatattcactcctctgccctctcagatcccgaactaccaaacccccttctcgccggcggaggaaggcgggggcggagaaaagagatcacgatcgctaatccgtgacggcagcggtcgggatggcggcggcgctagctccgggggtgtcccggaagttgaagaaggtgctggagacgcgtacggataacccggatctgctggcctcgctgggcgcgctctccactttctacgtccagaacaccccgcaggcgcgccgcaatctcaaatcctccattgagcagcgtgcacttgccatcaatcgccacttcctcgacgcctcgctccccgcccacaaggcgctggatcgcgtcgagggggaggtgcacgcgctgaacgactcctggaagaagatcgaggaagcattgaacagttgtagtgcaagtactggggacatcatcagtacaacagagaggttgcaacaggaacttgaagttatcactcagaggcaagaaattgtgtcatgcttcctgcgggattaccaactttcaaatgaagagataaatgcacttcgggaagaggagatagatgacaaattcttcaaagcattgctgcatgttcaagaaatacactcaaactgcaaggtcctgctgcgaacacaccaccagcgtgctggtttggagcttatggatatgatgtctgtgtaccaagaaggggcttacgaaagattatgcaggtgggttcaagctgaatgtaagaaattaggtgatactgacaatcctgaagtaagtgagcttttgaaaatggctgtttgctgcctgaaggaaagacctgttctgttcaagtattgtgcagaggaggttgccaacatgaggcaccatgccttattcaggcggtttataagtgctcttactagaggtggacctggagggttcccaagaccaatagaagtgcatgcccatgatcctcttcgctatgtaggcgaaatgctgggttggctacatcaggccctggcatctgaaagagagcttatagttgtcttgcttgatcctgatgcaatgactgacagtggtccaacttttcgacgtcagtctggtagagatggtgattcttccaaaggagaacctgatgtaacttctgtgcttgatagaatatttgaaggagcatgtcggccatttaaagttcgagttgagcaagttttgcagtcacagccaagcctgatagtttctttcaaacttagcaataccttggaattctattgttacacgatatcagaactgctgggtgaagacactgcgctgtgcaatacaatatggtcacttagagatgcagctcagcagacattcttcaatatcctgaagagtcgtggagagaagttattgcgatatcctccactagttgcagttgatctctctcctccaccagctgtaagagaaggaatttctttgctgcttgagctcatagatacctacaatagcatgatggttcctgcctctggaaaaagaccaaactttgaccctgttatttctgcattattggatccaataattcaggtgtgtgagcaagctgcagaggcacagaagtcaaaaggatcacttgcgcggcgtggtagaacaagctctgatcctagtggaaatagcagggattctatatcagttgatgctattctgtctaagaatttatctacgtcgattctgagtgccgaatcttcatccaaagtctacctcatcaactgcttgtcagctattcaggagccattgatgggccaggaggtcgctacaagctatgtaaacaacctgcgctctatgattgaagcacatatttgtgtccttgtcgataaagaagttgactgcattcttaggaaatgtggactatcaaataagatgccgtacataaaggagtatggtagcaaggctgatgcaaggcctctggcagatattatcgagacgtcgccacaaatgcttatggaatgcttgaaggcattctatggtattgtgactggaacagaaggttccttgcctgaatttgagcaactgcaggttccaaggttacgttcagatgcctgcaatggtttggcaagagctctagcagaatcttatgagctcatttacagcgcagtcatggatccgaataacagttatcctgacccaaggtctttggttaagcactctcctgaacagataagaactatactggaagcctgaggtcttcgcacgatgccttatggtacatgttaagtagaggtctttcgtgcatgaaactttgtcatgtaaatttccgactacaagctgtgggttcaattgattacagaaatatggaagcggtgactctctgaactcatgtatcggtatctagtgtctcgttgtcctatattccttttttctttatgtatcaagttattgtatacttcatgatgtaatttgaggtacaacttaagtgcttaaccgactattatgataccaaagctactatgcaagc

SEQ ID NO: 86503 - DNA, 2533 bp, Zea Mays
aacaaagacaccagtcgcggcggcaagcgcacttgtccaaccgcgcctcggccaaaaccaaacccatcgccgaccgccttctcctcgctacgccgcggcggcggcagcctgccggtctttgacttaaggagagatgaggcgcgtcgctcagcggccagcgaagtgagtttccctttcctaggggagagagagagagagatcgatggtgcggggctcggcggcggcggcggcactgctgctcctgccgtggctgctgcatgctgcagccgcgggcaacgggagctgcgcgcggagctgcgggggcttgacggtgcagtacccgttcggcttctcccccggctgcgagatacggctcgggtgcgacccggcggacggcaccgcgtggctcgggaagacgcgcgagctgggcctgctcgtgtccaacgtcacggcgcgcgcgctcttcctcaccctgcgcccgaactgctcgcgccggctcaacgcctccgtcgaggcgctcttcaccaaggcgtacgcgcccggcagccagaacgggctcgtcgtgagctcgtgcagctccgcctcccaggccgaccacatccgtaactgcagcgtcccccctagcgcttacctcgacaactcgtcccagtgcggccgcgccgctgcggactccatccgctgccccgtgctgacacggccgaccagcgtccccgaccgtttcctcaacagaaccaggatgcaagcgctcgccgcggaatgcaccgggctggtgtcggcggtgagctacttggacgcgccggcgccggcgctgctgctagccacgatggagctggagtggtggatgctggggccgtgccgatgctcgagccacgctaactgcacccaggtcaccacgccggtcgcagggcaggaggcgttccggtgcgactgccccaagggctcggagggcgacggcttcgccgagggcgtcggttgccgggaaggtccaaaatgcaatccttcaaaatacctacaaggagattgtggcaagacgatccaaatcgtccttctcgtggcagggatcatgtttggcgccatggtgacgggcgtgacctgcctggcgtaccaactgctgaagcgccggtccgcgtccatccgtatgaagcgcagcacgaagcagttcctatccgaggcctcctgcacggtgcccctgtactcgtaccgcgagatcgaacgcgccaccggcggtttctccgaggaaaagcggctgggcacgggcgcctacggcaccgtgtacgaggggcggctgagcgacgaccgtctcgtggccgtgaagcggatcagaccgagcgacaatggcggcggggtggacagcgtcgtgaacgaggtgaagctcttgtcgtgcgtgtgccaccgcaacctggtccgcctcctcggctgctgcatcgagcaggggcagcagatcctggtgtacgagttcatgcccaacggcacgctggcgcagcacctgcagcgggagcggggccccgccgcgatgccgtggacggtccgcctccgcatcgccgccgagacggccaaggccgtcgcgtacctgcactcggaggtgcacccgcccatctaccaccgcgacatcaagtccagcaacatcctgctcgacttcgagtacaactccaaggtcgccgacttcgggctgtcgcggatgggcaaggcgtcgtcgccatcgtctgtgggcgacccctcgcacatctcgacggcgccgcagggcacgccgggctacgtcgacccgcagtaccaccagaacttccacctatccgacaggagcgacgtctacagcttcggcgtcgtgctcgtggagatcatcaccgccatgaaggccgtcgacttcaccagggtgcccagcgaggtcaacctggcgcagctcgccgtggacaggatcggcaggggccgcgtcgacgacatcgtcgatccctacctggatcctcacagggacgcctggacgctctcgtccatccataaggtggccgagctggcgttccggtgcctggcgttccacagcgagatgaggccgtccatgaccgaggtcgccgacgagctggagcagatacagcgcagcgggtgggcgccatcggctgacgacgccgcgttcttgtcgacgtcatcgtcgatctcctcgtccgtagcgtcgacgcgcgtcaccgacaggtcgtggggtgccgacagaagccggacggagaggggcagggtgaatgcattggtcgtgcaagagacggcggcgaagagtgcagtggagtctcctgtgtccgtgcaggagaggtggttcagcgatgggagctccccttcctccaacagcttgctgggcagtcgctccctgcattgaactgaaacatacaaattgctcgtccatgtatcagctggtcagattagagcccttagatatatatgcatttagaacgatgcatttgttgatctgttcttgcgcgtcgttcgttccctcttccctcccattagtctggaactatgtgtacatcatgtacagtatatgtaatttagccttggctaagagcaacttcaatag

SEQ ID NO: 86504 - DNA, 1994 bp, Zea Mays
acggccctctctctcccgcgcgccgggcttatttgtaccggccccgcccttgcgttacccaacaagcactcaacgtctcctccagtccttcgaaaaccctgaaaccttggtgaagccgagacgagcaatcatccaagcagctagtgcttagcatctatggcgacctccgttcgtggtttcagtagcgccctcagggatgtgccgggcagctacggccttccgctggtgggcgccgtccgcgaccgcctcgacttctactacttccagggccaggacaagtacttcgagtcccgcgtcgagcgctacggctccaccgtggtgcgcatgaacgtcccgccgggccccttcatggcgcgcgacccgcgggtggtggcggtcctggacgccaagagcttccccgtcctcttcgacatggacaaggtggagaagagggacctgttcacgggcacctacatgccctccacctccctcaccggcggccaccgcgtctgcgcctacctcgacccctccgagcccacccacgccaaggtgaagcagctgctcttctccctcctgctctcccgcaaggacgacgtcatccccgtcttccgctccaacttctcctcgctgctcgccaccgtcgagtcggacctcgccgagggcggcaaggccgagttcaacaagctcaacgacgtcacctccttcgacttcatcggcgaggcctacttcggcgtgcgcccctcggcgacggacctcggcaagggcgggcccaccaaggcggccaagtggctcatctggcagctccacccgctcctcacgctcggcctccccatggtcctcgaggagccgctgctccacacgttccacctcccgcccttcttcgtcaagggcgactacggggcgctgtacaagtacttctccacggtggcgaagcaggcgctggacaccgccgagggcctgggcctgtcgcgcgaggaggcctgccacaacctcctcttcgccaccaccttcaacagctacggcggcctcaaggtgctgttcccgggcatcctggccaacgtcgccagcgccggcgagaagctccacgagcggctggtggctgagattcgaggcgccgtggccgaggccggcggcaaggtcaccctcgcggcggtggagaagatggagctggccaagtcggtcgtgtgggagtcgctgcgcctggacccgcccgtcaagttccagtacggccacgccaagaaagacctgcaggtccagagccacgacgccgtgttccaggtgaagaagggcgagatgctgttcggctaccagccgtgcgccaccaaggacccccgcgtgttcggcgccacggccaaggagttcgtgcccggccggttcctcggcgaggagggcagcaagctgctgcagtacgtctactggtccaacggccgcgagaccgagaaccccaccgtcgacaacaagcagtgccccggcaagaactttgtggtgctcgttggcaggctcttcctcgtcgagctcttcctccgttacgacaccttcaccgccgacatcggcaaggacctgctcggcagcagtgtcgtcttcaccagcgtcaccaaagctacctccggtccgggcagcgagtgaaccacccggcgtgtcgtcattggctgcggatggatatatgtttggacgtgagtacgtgacagggtcccatttcttagtttcgtccctttaataagatactaggtaagtgctcttgtattgcaacttatgtataaatatgtattatattgtacgagaaaatgttttgtaatctatttgttagcttagccctacataaattttagttaggtgcatgtgcgttgcaacgacatataaaatatttgacaaaatgttagtacacaatgattacataaaaatgaacaccatatttattattgacatcaatatcacacaaattctttggtaacaatcaatacataactaaactaatacaaatcaaattatactactatacgaatatcataaaaata

SEQ ID NO: 86505 - DNA, 1161 bp, Zea Mays
ttcttacatatttctttgttacgaacaatgcattacaccatttctctaccaaaatctattaactagaacatgcaaacgatgaaaatgtggaatcatctgagacaacctaatcggacattactcacaatcattgcagtagctatggccacaatccatctcggaggcagccgagggtggcacatcatcataacaaacattgcaggtcacctccgccgaggaggttgggccggcattcctggtgtactgaagaggaataccagcctccgagaagagcctatccctgtccttctgatcaagaagctcgaaaatcctctccacgtcccagcggtagtggatgaggagcgtccgggcatggtgctccctcaaccctagcagctccatcaccttcctaagatcctctctctacaaacccacaaacgccccaacaaccaaatggagttgagaaaaaaaatgaaactaagcatcagtgtatcaggaatagcgtatagtgtggaaaccgaatgggggagagcccccgcagtcacctgcgccaccaaaagggattccttggtgatcacctgcaacaaacacaagcaaaggaatgcatcaagaaaaccaagagtggtctaacaacggagacagatgcccaggacaaaatcaggacagaacacgcacagatgaggcagaccaatggcagtcctcgaggtgctcgtcctcgagaacatggagaacagactcttctagggcatcgtccccctgatcgctcaggtagcaatcgtcgtcgtcttcctgctccaattccgacgaggacaccggagacgaagtatcctcagcgtcgcggcccatctgccgccgatccgatcagcctcgaaacgaaacggccggcgatagtacctctcgcacggaagaggggaacagataggcggattgggtcggtcaagtgcaagaaccggcgcgggcggggaaggcggggatagaggaatcgtggcgcgaaagcggtcgcatcgcgaagggagtcggagacggcggcggtgaagcttgcacgggaagcgaagacaaggggggaggcggcggcgcaagcgtagcaggtatggttgtggccggaaattgggaagtctggctgatgtcttttgcggcgtactagagagtgatggcaatggtaccgaataactgataggtttt

SEQ ID NO: 86506 - DNA, 1944 bp, Zea Mays
gagagcgaaatggaactccgccatttccgctgctgcgcttcgcggcttctcctcctcgttaccctcctcctcggcttccggcgggccggtgcccaggacagcacaagctacaccgtccccgcgcagttcgcctgtgacgtgtcgtcgccgtgcgacacgtacgtcgtgtaccggacgcagtcccctggctacctagacctcggcagcatctcggacctcttcggcacgagccaggcccggatcgccagcgccaacggtctcagctccgaggacggcgtgctgcagcctggccagccgctgctcgtgcccgtcaggtgcggctgcgcgggcgcctggtccttcgccaacgtcacgtaccccatccggcagggcgacaccttctacaacctcgccaaggcctcctacgagaacctcaccgagtaccacctcatccagaatctgaacccggggtcggaacccaccagtctacagatcggccaggaggtcacggtgccgctcctctgccggtgcccggctcgcgctgagcggagccgcggggtgcagagcctcatcacctacatgtggcaagcaggggacaccatgtcccaggtgagcaagctcatgaacgccaccgtggacgagatcgccgaggcgaacaacgtaaccgccaacacctccgcctccgcgtccttcgtggggcagccgatgctgatcccagttcgacagcggccgcggcttccggctccgctctacgctgctgctgcagccgacggcaagtcccggtcgcgacgtcgggctgccgtcataggcgccagcgtctcggggtccctcgtcgcgctcgccgccttgttcgtcgcgatcctggcgcgccggaggtaccgaaagaagccgtcgatgcgcctgggttcacggttcgccgtgaacaccaagctttcttggtccaggaaccaattcggtcatgacggcagcaattccttcgcccacgtgatgaaaggaggcaagctgctcaccggcgtttcgcagttcatcgacaagcccatcatcttcgtggaagaggaaatcatggaggccacgatgaaccttgacgagcggtgcaagatcggcagcacgtactacagggcgaagctcgacggggaggtgtttgcggtgaagccagcgaaaggtgacgtgtcggcggagctgaagatgatgcagatggtcaaccacgccaacctgatcaagctggcgggcatatccatcggcgctgacggggactacgcattcttggtgtacgagttcgccgagaagggctcgctcgacaagtggctgtacgagaagccaccgtccgcgctgccatcgtcgtcgtgcaccgtggcaactctctcgtggggtcagaggctgagcatcgcgctggacgtcgcgaacggcctactctacatgcacgagcacacgcagccgagcatggtgcacgacgacatccgcgcgcggaacatcctcctgacggcggatttcagggccaagatatctggcttctccctggccaagccagccatggtcgacgccgccgcgacgagctccgacgtgttcgccttcgggctgctgctcctggagctcctatccggcaggagggcgatggaggcgcgcatcggctcggagatcggcatgctgtggagggagatccgtggcgtgctggaaaccggcgacaagagggaggcgaagctgaggaagtggatggaccccgctctgggaagcgaataccacatggacgtggctcttagcctggccagcatggcgagggcctgcaccgaggaggacgcagcgcggcggccgaacatgaccgaggtcgtgttcagcctctccgtgctggcgcagccgttgtcagtggccgacgggttcgagaagctgtggcaacccagttcggaggacaacatccggattgccggctcggtggcagctcgataaaatgaaaatacaacttcgtttagc

SEQ ID NO: 86507 - DNA, 934 bp, Zea Mays
ccaccaccgatcgacacgaaacacccaggccccactccccaggcgcccagcaggtagcagccgcgccgccaaaagcgatcgcgcggcctcctccgtctccgtggctccgtccaaatccgctgggtcaagaggaggacgggtcgcgcggccccctcgccgagacccacgggccgacgcaaacccaggaaagaaacgaagcgagcggcaccaccggcgcgtcctcggctcctcgcgtgcgtgcttaccccggcgaatattcgaccacggaagccgcataacctccgtccatcccatccccgctcgcctctcctctcctcgccccgctctagacgatcgatggccgcgacggcggcggaggagatggagaggatggtggaggcggagtgggaggaggggaagcaggggatgaggaagaggaagcggtacgggctggtggagtaccgggcgctgccggcttacctgcgggacaacgagtacatccaccgccactaccgctgcgagtggccgctcccgcaggtgctgctctccgccttctccatccacaacgagaccctcaacgtctggacgcatcttataggatttttcatctttctcgctctgaccatatacacagcaacacaagttccaaatgcagtagatatccggagcttgcagcatttgccagatgtactgagaaaggctgatattcataagattcaggcagagcttgtgtcatgtcttccgtcgttacctcacctttcagatctacaaaagctgaaggatgagctgaagacctcttggaattctatggaggttcttccatctctgtcccgttggcatctcttggagttactcgcaaattgtctgccacacagatttacccatcccaatgaaacaagtttgtctgttcttgtaagtagtctacaactcgctgaattacttgattacattcttt

SEQ ID NO: 86508 - DNA, 1731 bp, Zea Mays
cccaggcgcccagcaggtagcagccgcgccgccaaaagcgatcgcgcggcctcctccgtctccgtggctccgtccaaatccgctgggtcaagaggaggacgggtcgcgcggccccctcgccgagacccacgggccgacgcaaacccaggaaagaaacgaagcgagcggcaccaccggcgcgtcctcggctcctcgcgtgcgtgcttaccccggcgaatattcgaccacggaagccgcataacctccgtccatcccatccccgctcgcctctcctctcctcgccccgctctagacgatcgatggccgcgacggcggcggaggagatggagaggatggtggaggcggagtgggaggaggggaagcaggggatgaggaagaggaagcggtacgggctggtggagtaccgggcgctgccggcttacctgcgggacaacgagtacatccaccgccactaccgctgcgagtggccgctcccgcaggtgctgctctccgccttctccatccacaacgagaccctcaacgtctggacgcatcttataggatttttcatctttctcgctctgaccatatacacagcaacacaagttccaaatgcagtagatatccggagcttgcagcatttgccagatgtactgagaaaggctgatattcataagattcaggcagagcttgtgtcatgtcttccgtcgttacctcacctttcagatctacaaaagctgaaggatgagctgaagacctcttggaattctatggaggttcttccatctctgtcccgttggcatctcttggagttactcgcaaattgtctgccacacagatttacccatcccaatgaaacaagtttgtctgttcttcaaagcatgaaggaggatctagcaagcctgattgcaccgcaactgatcagaccaattgcgcggtggccattctatgccttcttgggaggagccatgttctgcctcctggccagcagcacttgccaccttctctcctgccattctcgccgcctagcatacattatgcttcggcttgattacgcaggcatcgcagctctaatcgccacatccttctaccctccagtatactattctttcatgtgctaccccttcttttgcaacctgtacctcagtttcataaccatcctaggagtggcaactatcgcgttctctctacttccggtcttccaaaatccggagttcagaaccatcagagcatgcctcttctttggcatgggtgcatctggcgtgatacctgttcttcacaagctagtactcttctggcaccaaccggaggcattgcacacgaccggatacgaaattctgatggggctcttctacgggctgggagcattggtatatgcggcacgggtacctgagcgctggatgcctgggaagtttgacatcgccgggcacagccaccagctgttccacgtcttggttgttgccggagcctacacacactaccacgcagggcttgtgtacctcaagtggagagacctgcaaggctgctgaaaggtactgcatcgttgaggatgtggatagattgtagattccgtgaattcaggctgaaggtcatggtctgttgtaaattgtaacagtaatcatgaaacaattgctacaagtctaccaggtagtcgggcttccattaataatcaattgaagactagtatttatgctattactaaatgttcgtgtgactgatgcgatatttcattttcagtctcttttctgctaa

SEQ ID NO: 86509 - DNA, 1726 bp, Zea Mays
cccaggcgcccagcaggtagcagccgcgccgccaaaagcgatcgcgcggcctcctccgtctccgtggctccgtccaaatccgctgggtcaagaggaggacgggtcgcgcggccccctcgccgagacccacgggccgacgcaaacccaggaaagaaacgaagcgagcggcaccaccggcgcgtcctcggctcctcgcgtgcgtgcttaccccggcgaatattcgaccacggaagccgcataacctccgtccatcccatccccgctcgcctctcctctcctcgccccgctctagacgatcgatggccgcgacggcggcggaggagatggagaggatggtggaggcggagtgggaggaggggaagcaggggatgaggaagaggaagcggtacgggctggtggagtaccgggcgctgccggcttacctgcgggacaacgagtacatccaccgccactaccgctgcgagtggccgctcccgcaggtgctgctctccgccttctccatccacaacgagaccctcaacgtctggacgcatcttataggatttttcatctttctcgctctgaccatatacacagcaacacaagttccaaatgcagtagatatccggagcttgcagcatttgccagatgtactgagaaaggctgatattcataagattcaggcagagcttgtgtcatgtcttccgtcgttacctcacctttcagatctacaaaagctgaaggatgagctgaagacctcttggaattctatggaggttcttccatctctgtcccgttggcatctcttggagttactcgcaaattgtctgccacacagatttacccatcccaatgaaacaagtttgtctgttcttcatgaaggaggatctagcaagcctgattgcaccgcaactgatcagaccaattgcgcggtggccattctatgccttcttgggaggagccatgttctgcctcctggccagcagcacttgccaccttctctcctgccattctcgccgcctagcatacattatgcttcggcttgattacgcaggcatcgcagctctaatcgccacatccttctaccctccagtatactattctttcatgtgctaccccttcttttgcaacctgtacctcagtttcataaccatcctaggagtggcaactatcgcgttctctctacttccggtcttccaaaatccggagttcagaaccatcagagcatgcctcttctttggcatgggtgcatctggcgtgatacctgttcttcacaagctagtactcttctggcaccaaccggaggcattgcacacgaccggatacgaaattctgatggggctcttctacgggctgggagcattggtatatgcggcacgggtacctgagcgctggatgcctgggaagtttgacatcgccgggcacagccaccagctgttccacgtcttggttgttgccggagcctacacacactaccacgcagggcttgtgtacctcaagtggagagacctgcaaggctgctgaaaggtactgcatcgttgaggatgtggatagattgtagattccgtgaattcaggctgaaggtcatggtctgttgtaaattgtaacagtaatcatgaaacaattgctacaagtctaccaggtagtcgggcttccattaataatcaattgaagactagtatttatgctattactaaatgttcgtgtgactgatgcgatatttcattttcagtctcttttctgctaa

SEQ ID NO: 86510 - DNA, 2670 bp, Zea Mays
ctcaaacacacacaaaagaaaaaaatgccagcacaaataaaatactcccatctggatattcctgctctcccttcttctccagtccacccactatagcttggactagatctcaaattctcccacagtttcccactccccgtctcccactctcccccaccccccgcacccgccgtcttcccctccctcccccgtcagatactcagatcttccccatatctctgtgttgcatcactcgccgcaatccactcccaatcctaaacccgaaagctctcagctccgcctccctgttcgttcgtccgccttttgactcccccctagctagcagctgttgcggagcaaccccgcaattccaagaaaagcaactggtcaagaaagagtggaagaaaggaggatggtggtgatgatggcgttaagtcaccccatgattcgccccatcattccgtcgcctccagggcctgcgtgctgctaaaagggtctcgccgtccgtcgtggtggtggtgtgcgtgggcggggggagtcgtcgctgcgccgccacaatgccgcagtaccaggagctgccctgcggcgggcaggtgctcgacatcgacacggcgctcaaggatggcatcctcgggggcgcgctggagcccgaggatgccgcggcgggggacgccgggaagcagcctgtggagctgcgcaagatgatggacgagctggacgcggccggggacggcggcggcgacgaggcggtgccggcggtcttcatctgcccgatctccctcgagcccatggtggatccggtgacgctctgcacggggcagacgtacgagcgggccaacatctcgcggtggctcgccctgggccaccggacctgcccgaccacgatgcaggagctctgggatgacgcgctcacccccaacgccactctccgacagctcatcgccgcctggttctcccgccggtacacgaggtttaagaagcgctccgcggacttccacggccgcgccgccgatctcgtccacggcctccggggcacggcgatgcccaggagacaggccctcaagggccaggcccgcgtcgcggcgctgcgggagctgcgcgccctcgccaccgcccaccaatccgtcaccaaggccatcgccgaggccggcggcgtggtcctgctgacgtcgctgctcggccccttcacgtcccacgccgtggggaccgaggcggtcgccattcttgtcagcggggtgccgcttgacgctgacacgaaggccgcgctcatgcagccggcgaaggtgtcgctcgtggtcgacatgctcaacgagggcgcggcggacaccaagatcaactgtgtccgcctcatccgcatcctcatggatgagaggggtttccggccggagacggtggcgagcctgagcctcttggttggtgtcatgcgcctcatccgggacaagcggcatccagacggtgtggtcgcggggctcgagctgcttaattcgatctgtgcggtgcacaggccagcgaggagtatggttgttagcatcggtgcggtgccgcagctggtggaattgttgccggagctagcaacggagtgtgttgagccggccttggacatcttggatgccctgtctgcggttccagagggtaggacggctcttaaggattgtccgcggacgatacccaatgccgtccgcgtgctgatgagagtttcagaggcatgcactcgacgggcgctgtcgatgctgtggacggtgtgtcggatggcacctgaagagtgtgcacctgccgccgtcgaagctgggctggcggcaaagcttctacttgtcatccaaagtggctgtgcaccggagctgaagcagaaagcgtcggagctgcttaagctgtgccgcctcaactgcactgacaccctcttcatctccaagtgcaaactcacaaggacgattcagtgaggagatgcaagtggtgtgatttgattcgatgatgcgtggtttgtcgattgaccttgctgagttcagagttccaaggaaatggaatttgccaaattgacgaatggtaataatgagcatgtatagaaacctgcagatttagccctgtcatcttatccgaagagatcagggtggttgagcagatggcgagactggtggttaccataacaattccaggggagaaaagaagcaagcaatgcagcatgattactggcaagcaggcgggtgtacatgcaaattgatgtggatttgatcagctcaataaacacctgaggctgggtggtaagtacagccagttttgccattaggagtagctagcattaagcaaaaccagcaaattttagatttttggcaatgtgggtgtcccagggctgtagatgttgctccctcccttgtaattacacagtactgttgcttctacactggaatatacattgccattgcttcgagatttttttttttgaattgtcatctggatcgactactgccctagtcaaactgggaaagtgtgctctttccctgtagcccacgctaaaaagctcgatgctgcgttactcctgctaaagttgaggctctgtactgcttgagcagtgttctcatttctcaatgttgtttagctcctggagtttcagtatctgatttattagtgtaccaaattatctgattgcgtggggcttctgtttcagtattaccaccataactgcaatccgagcatctc

SEQ ID NO: 86511 - DNA, 1865 bp, Zea Mays
acgacgctactcgtcctcatccagtcacgaaaaatcggaatctctgaaaaatcctccgtaccatgaagctccggttgcgatctatgcaggcgcgcggcggctccgccgccgtggagacccaccgcgtggacctgccgcccacggccactctggccgacgtgaagaccctcctcgcgtcgaagctctctgcggcgcaacccgtccccgccgagtccgtccgcctctccctcaaccgtagcgaggagctcgtctcgccggaccctgccgctacgctcccgtccctcggcctcgcgtccggtgatctcgtatttttcaccctatcccccctcacggccctagcgccgccggctcaggccctgccacggaaccctagcccgagctctggcgctgcagcgtcgatcgctgaggctgccgaccgcgggaagggttcgaagcaatctggtactggagatttctcttcctcgtcactggcgcaggctgtggttgtgagccctagctttccggtcgcttccggtacgcgggatgtggtgatggaggaggaggccgtcgatgccacaaagggctggtcgagttttgtgcttagggatctcaagagggagatggacaacgtcggggccgcggagggaaccgccgcaggtcgcctggttgcggccttgcatgcagctctgcttgatgccggttttctcaccgctaaactgacgggctctcacctttcgctgcctcagggctggccgtcaggtgctttgaagccattgaccatcaagtatactataccagagctttcatcaatggtatctgtgactgaggaagggaaggtggtggtgctgaactactccttgatggccaatttcgtgatggtttatgggtatgttcctggggcacagtctgaggtttgccggttgtgcttggagttgccggggctggagcctctactttatctggatggcgatcagctgaatggagtgcatgagaagggagttcatgatctgtggagagtgctgaaggatgagatttgcctgccactgatgatatcattgtgccaactgaacggtctgcgcttgccgccttgcttgatggctttgcctgctgatctcaagactaaggtattggggtttttacctggggttgatcttgcaaaggttgagtgcacatgcaaggaaatgatgaatcttgcatcagatgatagtatctggaagaagcttgtatccaagtttgaaaattatggcgagggctctaggctggcaggcaagaatgcaaaggccatatttgtagaagcttggcaggccaataagagacggcagaagaggcccaatccaaccttttggaactatggctggggaaacagtccttatagccgcccacttaggctgccattgattggtggggactcggacagacttccttttattgggaatcatggttctgttgggcgccactttggaaatcaacgaaggaatatctcaccgaactgcattcttgatggtcaccgtcataacttcctttgaagccatgtcaatgagttttacttgtatgttaagagtgttttataaggacttcaatggtgcatatacggttagaccgccttgttcatatcgtcaagtcgcacacttatgcttgtgcacagcactcttatgatcttatcctaatatatccccttagtatcttagatcgtatctttactatctttttttggtaccaaatgtaatccagtgtcctagtaataaagtacccttgttctattctcaaacgaattatctagacacggtcattgtaatttggttgaatgtgtagatagatgtattcgtgtgtaatagctttaaacttcagggtgctgcttaaatttatttgcattaaatattcaatct

SEQ ID NO: 86512 - DNA, 1570 bp, Zea Mays
gcagctctcaccgctggtaacaagaaatcatatgctctattattggtactttatatgtactgtggcatgctctttgggaataggtctgtattcgggacaagtacaggggtgtgtgtgcaagtcagcaattacctaactttgtttaggcattgtacgtttgcactcgcaaatatgagaagaagaaaaaagagagatattagagttcttattggtgaccaatcactatatccacttgaacttgcattcagtatctgtgcaattatgctgaattgtggaatccatttcaagtaaatccttgaagagatctttatagtccttcagcaactaaatacattggcagacctggcaatgacaagctagaagattaccaggcattccccctcccccaaaatgattgcaacgacatcgcactgagtccaagtatcagagtaggatgatgtattcccctccgcgcaccgatcccgacagagaggaagagcagtgcttctcaatcggaagtaatctgcttacttcactagaccattaccataccatggattttgatgagcctgtcgtctccccaatgaccaatgcaggcatgcaagagggggttcagctctacagttctactggagatgctcaactaaatagaaatatgaacacaggcaagtgtttagaggatggcaaaaggaagggttctggagaggacagttcatcactacgttctctaggtgaaaccagtgcattgcagcgagaagtcagcatggagtgtgctgatgagaaggcgggtgatgctagagccaagagagaggactacgtgcatgtccgggcaaagcgcggccaagccaccaacagccacagccttgcagaaagatttcgaagggaaaagataaatgaaaggatgaagcttcttcaagaccttgtcccaggttgcaacaagattacaggcaaggccatgatgcttgatgagatcataaactatgtgcaatctctgcagcgacagattgagttcctttcgatgaagctctcagcgatcggccctgggctcaactgtgacctcgacctacaagatatcctctgcacacaagatgctagctctgcttttccaggatacaacctgcaaacgagcaatgtgcatattaatctgtacagagcatctgaagaaggtttctcacacaggaacaggatcatccctagtccagcaaatgttcacgtgacaagaaacgcccagctatctgcatttcctcagagaggagttatctggaacgaggagctttgcagcatcgcttcagatagaaatgctgattcaatgaaagtggagtgacattgtggcaactgacaagccggcagtttaatggtgatcaactctgaaagtcttgacaagttgggttgctactgaggtgccttttcaagttgcagtggtagcacgacttctcttgggatgagctagttaacttttggtatttgagaggaattctggtgtgtccacccatcctgtacagttattagaataactaatcaaaggagtactgtgaaattcttgcgatctggtggagaaaatagtggacaattttcgtctggaatttctgac

SEQ ID NO: 86513 - DNA, 1219 bp, Zea Mays
accggttagttgttccttgttgagtcttgcaaggaattgactgtgcccagctctcgatctactccaccctttaagtaaggcaacttcagttggcagacctggcaatgacaagctagaagattaccaggcattccccctcccccaaaatgattgcaacgacatcgcactgagtccaagtatcagagtaggatgatgtattcccctccgcgcaccgatcccgacagagaggaagagcagtgcttctcaatcggaagtaatctgcttacttcactagaccattaccataccatggattttgatgagcctgtcgtctccccaatgaccaatgcaggcatgcaagagggggttcagctctacagttctactggagatgctcaactaaatagaaatatgaacacaggcaagtgtttagaggatggcaaaaggaagggttctggagaggacagttcatcactacgttctctaggtgaaaccagtgcattgcagcgagaagtcagcatggagtgtgctgatgagaaggcgggtgatgctagagccaagagagaggactacgtgcatgtccgggcaaagcgcggccaagccaccaacagccacagccttgcagaaagatttcgaagggaaaagataaatgaaaggatgaagcttcttcaagaccttgtcccaggttgcaacaagattacaggcaaggccatgatgcttgatgagatcataaactatgtgcaatctctgcagcgacagattgagttcctttcgatgaagctctcagcgatcggccctgggctcaactgtgacctcgacctacaagatgaacaggatcatccctagtccagcaaatgttcacgtgacaagaaacgcccagctatctgcatttcctcagagaggagttatctggaacgaggagctttgcagcatcgcttcagatagaaatgctgattcaatgaaagtggagtgacattgtggcaactgacaagccggcagtttaatggtgatcaactctgaaagtcttgacaagttgggttgctactgaggtgccttttcaagttgcagtggtagcacgacttctcttgggatgagctagttaacttttggtatttgagaggaattctggtgtgtccacccatcctgtacagttattagaataactaatcaaaggagtactgtgaaattcttgcgatctggtggagaaaatagtggacaattttcgtctggaatttctgac

SEQ ID NO: 86514 - DNA, 1201 bp, Zea Mays
aatgacaagctagaagattaccaggcattccccctcccccaaaatgattgcaacgacatcgcactgagtccaagtatcagagtaggatgatgtattcccctccgcgcaccgatcccgacagagaggaagagcagtgcttctcaatcggaagcatgcaagagggggttcagctctacagttctactggagatgctcaactaaatagaaatatgaacacaggcaagtgtttagaggatggcaaaaggaagggttctggagaggacagttcatcactacgttctctaggtgaaaccagtgcattgcagcgagaagtcagcatggagtgtgctgatgagaaggcgggtgatgctagagccaagagagaggactacgtgcatgtccgggcaaagcgcggccaagccaccaacagccacagccttgcagaaagatttcgaagggaaaagataaatgaaaggatgaagcttcttcaagaccttgtcccaggttgcaacaagattacaggcaaggccatgatgcttgatgagatcataaactatgtgcaatctctgcagcgacagattgagttcctttcgatgaagctctcagcgatcggccctgggctcaactgtgacctcgacctacaagatatcctctgcacacaagatgctagctctgcttttccaggatacaacctgcaaacgagcaatgtgcatattaatctgtacagagcatctgaagaaggtttctcacacaggaacaggatcatccctagtccagcaaatgttcacgtgacaagaaacgcccagctatctgcatttcctcagagaggagttatctggaacgaggagctttgcagcatcgcttcagatagaaatgctggtagcctgattcaatgaaagtggagtgacattgtggcaactgacaagccggcagtttaatggtgatcaactctgaaagtcttgacaagttgggttgctactgaggtgccttttcaagttgcagtggtagcacgacttctcttgggatgagctagttaacttttggtatttgagaggaattctggtgtgtccacccatcctgtacagttattagaataactaatcaaaggagtactgtgaaattcttgcgatctggtggagaaaatagtggacaattttcgtctggaatttctgacacaactgagttagtgctttggtggggtgtggctccacctaattattta

SEQ ID NO: 86515 - DNA, 1519 bp, Zea Mays
tagaagattaccaggcattccccctcccccaaaatgattgcaacgacatcgcactgagtccaagtatcagagtaggatgatgtattcccctccgcgcaccgatcccgacagagaggaagagcagtgcttctcaatcggaagcatgcaagagggggttcagctctacagttctactggagatgctcaactaaatagaaatatgaacacaggcaagtgtttagaggatggcaaaaggaagggttctggagaggacagttcatcactacgttctctagtaaggaagctagaagcttccattgctttctctcatcgtatcacactccctctatttcatcctactgtacatgtaaatgtattactgcagggtgaaaccagtgcattgcagcgagaagtcagcatggagtgtgctgatgagaaggcgggtgatgctagagccaagagagaggactacgtgcatgtccgggcaaagcgcggccaagccaccaacagccacagccttgcagaaagatttcgaagggaaaagataaatgaaaggatgaagcttcttcaagaccttgtcccaggttgcaacaagattacaggcaaggccatgatgcttgatgagatcataaactatgtgcaatctctgcagcgacagattgagttcctttcgatgaagctctcagcgatcggccctgggctcaactgtgacctcgacctacaagatatcctctgcacacaagatgctagctctgcttttccaggatacaacctgcaaacgagcaatgtgcatattaatctgtacagagcatctgaagaaggtttctcacacaggaacaggatcatccctagtccagcaaatgttcacgtgacaagaaacgcccagctatctgcatttcctcaggttttcattcgacgcccttgaacagcttcaagtgctttcctatgtcgattatactagtttctgccatggcagagaggagttatctggaacgaggagctttgcagcatcgcttcagatagaaatgctggtagcctggtagcatagattttttcgtgtcttttaattttcacattcatcgttatgttttacacttctcctgcagctgtactcaattttgtgagatttttcaagtcccattttgacattgcagattcaatgaaagtggagtgacattgtggcaactgacaagccggcagtttaatggtgatcaactctgaaagtcttgacaagttgggttgctactgaggtgccttttcaagttgcagtggtagcacgacttctcttgggatgagctagttaacttttggtatttgagaggaattctggtgtgtccacccatcctgtacagttattagaataactaatcaaaggagtactgtgaaattcttgcgatctggtggagaaaatagtggacaattttcgtctggaatttctgacacaactgagttagtgctttggtggggtgtggctccacctaattatttagttgtaatagctggcagagctctatgactataactgcttgagattcgtgac

SEQ ID NO: 86516 - DNA, 1434 bp, Zea Mays
gataagagaaggtcaggcacaaacacgcggggacgaagcacacaacaaacctgcagatcccccatggcaggctccacctccctcgttccccttcccgtccccgcccctccatctcgccaccgcttccacacgtccacgtccgcatccccccgccacctgcgcccctcccctgctacacgcctccgcgctgcccggcgtcggcatcccgacgccgtcgttgtcgtcccagatgcccgcccctgggtcggcgatctatcgggcgccgccgcgtcctaccgggacggaagtgaggaggacgaagacgacgcagatgaagatgaggacgaagacgaggaccgcagcctggacctactggcccggttcctgcactccgtattcaggaaggcctcacgccgcgcgcgccgcgctgccaggtccgtgctgccgccttccgtccccgccgagctggtgaagttttcggtcaatggcgtgcttgtcctgacgttcttatggatcctgaagggtcttctcgaggtggtctgcacatttggaagcatggtgtttgcaagcatccttcttgttcgtggtatatggtctggggtgacatacatcagagaaaaccgttacagctatattcaccggatcgacaacgatgagaaccgatggagcagagtccagactgctggttaatattttgctttccttatctatgaacagacacactctgcgttgacaggctgtatagtacaaaaagaaaagatatggtcagcaagtgcaaactatgatgattgccattgctagacctcgcggctaaggctgtctctagcagtaagcctctctctagcagcgtgcgttatattaatcttctagaccccgtggttaaggctgcctctagcagcgttatcttttttacattctcttttatgcagttttctctaaaagattcatctcttctatcccgttcatctccaacgacgtttctaaatctcgtcctctctctctctctctctctctatatatatatatatatatatatatatatatatatatatatatatatatatatatatatatatatatatattagatgtatacttttttcttttaaatttttgtatatatatttgtcatactcttgaatgtttaatacatgttttagtttgtttaatctattcaaaggattacaattgatagagaagataatctattacgtttttccgagactgcactgcagctcatttgaaacacacatttccttgtagtaaaacaaacgcatcaacccctttgcctggtcatgccacgaaactcccacctctgggttctcttcgggatcgtgcctggggagatccgatccgagtcggccggtacgtcctcttctgatccgcaacaagctgtcgctagagatggcaatgggtacccgaaacccgatgggtttttaccctattagggtacggg

SEQ ID NO: 86517 - DNA, 868 bp, Zea Mays
cgaagcacacaacaaacctgcagatcccccatggcaggctccacctccctcgttccccttcccgtccccgcccctccatctcgccaccgcttccacacgtccacgtccgcatccccccgccacctgcgcccctcccctgctacacgcctccgcgctgcccggcgtcggcatcccgacgccgtcgttgtcgtcccagatgcccgcccctgggtcggcgatctatcgggcgccgccgcgtcctaccgggacggaagtgaggaggacgaagacgacgcagatgaagatgaggacgaagacgaggaccgcagcctggacctactggcccggttcctgcactccgtattcaggaaggcctcacgccgcgcgcgccgcgctgccaggtgaagttttcggtcaatggcgtgcttgtcctgacgttcttatggatcctgaagggtcttctcgaggtggtctgcacatttggaagcatggtgtttgcaagcatccttcttgttcgtggtatatggtctggggtgacatacatcagagaaaaccgttacagctatattcaccggatcgacaacgatgagaaccgatggagcagagtccagactgctggttaatattttgctttccttatctatgaacagacacactctgcgttgacaggctgtatagtacaaaaagaaaagatatggtcagcaagtgcaaactatgatgattgccattgctagacctcgcggctaaggctgtctctagcagtaagcctctctctagcagcgtgcgttatattaatcttctagaccccgtggttaaggctgcctctagcagcgttatcttttttacattctcttttatgcagttttctctaaaagattcatctcttcta

SEQ ID NO: 86518 - DNA, 552 bp, Zea Mays
gatccacggaagcaaagcgaagcgaagccgcctgccggattttgccggctcgctcgccgaccagatctgggatctccgcctccgtgaccacgactctgcggtgcgtatgccagtcaggattttttttgttcatcaagaaatcagcgtctgctctttttttttcagaaaacttaacggagcagtggccggcagaagcgtgaacacgacgactagacgagcggcttgtccgttgcctgttgccatcagcattcactcgtcctccgctccctgtcgttatcaattacccgaagctacgatatcgcccgcacacaacaggaaagccacgtggccgccccagatgaaaagcatatcgccgctgacgtggcggaaccagggtctcacgaccacgggggagactagtcgtggtcgtggccgacgccgccacgccgggccgggccgggccgtgggattacgccgtgcttgacgcataaaggcgtcgctgccaagtatttatgactcccaaactagtcctaagaaaccttggtgcgtctgggcctgcaaatggagtggatg

SEQ ID NO: 86519 - DNA, 868 bp, Zea Mays
aaaaaaaacccaaacctgcatacaattctgaagaaattcagaaaatccagctaagccaagttagtccgcccgccagctatgcggacatggttgcgagcggcctcaacctcctcctcctgacctcctcctcctcctccataaaatgcggaagaatctcgaagagtcccagacgcatcaaaccgccctcctctgtccctccctctcccgtctgccccctcgcatccccaaattaagccccgcgcgcaaggcagcaaacgcgccgcgcaccggaaggccccggggagctgcacgaggtggccccattgcggcatggctgctacggccgccgccgctggcgtcgagttcccgctcattggcgttgccgtggccacgctcatcgtgacggtccttgtcgcggccgtgatgcgccgccgccgccgtccctggcaccaggcgcctctggtggaggggaaacccgcaccagaggcaggctgcgcggtcagcgatggcgggacggacgtcatcatcgtcggcgccggggtagctggatctgcgctggcatacacgctcggaaaggtggtttcgcttgtctcgtcctcgttgttccttcgttggcatggttccactatgtggctaaaacctgagagtttttagattggaaaaaatcggcagtgtcgtattttatattgcgttctgcttgcttggcgtgaagaacaagggctcgtggtattctattgtgaacgggaacgcgatgtttatttttttattggcgcgagttgctagcagggatcgtaactttcttcattcatgatgtatagacccaagaacatcttcggtcctgttttgcatgcttttagttagttattactccctccgtcccactatataa

SEQ ID NO: 86520 - DNA, 1056 bp, Zea Mays
aaaaaaaacccaaacctgcatacaattctgaagaaattcagaaaatccagctaagccaagttagtccgcccgccagctatgcggacatggttgcgagcggcctcaacctcctcctcctgacctcctcctcctcctccataaaatgcggaagaatctcgaagagtcccagacgcatcaaaccgccctcctctgtccctccctctcccgtctgccccctcgcatccccaaattaagccccgcgcgcaaggcagcaaacgcgccgcgcaccggaaggccccggggagctgcacgaggtggccccattgcggcatggctgctacggccgccgccgctggcgtcgagttcccgctcattggcgttgccgtggccacgctcatcgtgacggtccttgtcgcggccgtgatgcgccgccgccgccgtccctggcaccaggcgcctctggtggaggggaaacccgcaccagaggcaggctgcgcggtcagcgatggcgggacggacgtcatcatcgtcggcgccggggtagctggatctgcgctggcatacacgctcggaaaggatggccgtcgggtgcatgtcatcgagagggatctgacagaacctgacagaattgtgggcgagctgttgcaacctgggggttacttgaaattaattgagctgggcctccaaggtaaatcccaatttcggttatcttattctattttcatgtcatttctaaagttattatacaagtttttgttctattcagattgtgtggaagaaattgatgcccaacgcgtgcttggttacgcattattcaaagatggaaggaacacaaagcttgcttatcccctggagaagttccattctgatgttgctggtaggagctttcacaatgggaggtttatacagaggatgcgtcaaaaagctgcgtctttgcccaagtaatatcagtaattcttatatatttttcttattttgctatatttggcttatttattgtcctgtattcttgcttgactttgattcttttgctaaggttaactgtaataatggtattttatgttactttactgcatt

SEQ ID NO: 86521 - DNA, 2179 bp, Zea Mays
aaaaaaaacccaaacctgcatacaattctgaagaaattcagaaaatccagctaagccaagttagtccgcccgccagctatgcggacatggttgcgagcggcctcaacctcctcctcctgacctcctcctcctcctccataaaatgcggaagaatctcgaagagtcccagacgcatcaaaccgccctcctctgtccctccctctcccgtctgccccctcgcatccccaaattaagccccgcgcgcaaggcagcaaacgcgccgcgcaccggaaggccccggggagctgcacgaggtggccccattgcggcatggctgctacggccgccgccgctggcgtcgagttcccgctcattggcgttgccgtggccacgctcatcgtgacggtccttgtcgcggccgtgatgcgccgccgccgccgtccctggcaccaggcgcctctggtggaggggaaacccgcaccagaggcaggctgcgcggtcagcgatggcgggacggacgtcatcatcgtcggcgccggggtagctggatctgcgctggcatacacgctcggaaaggtggatggccgtcgggtgcatgtcatcgagagggatctgacagaacctgacagaattgtgggcgagctgttgcaacctgggggttacttgaaattaattgagctgggcctccaagattgtgtggaagaaattgatgcccaacgcgtgcttggttacgcattattcaaagatggaaggaacacaaagcttgcttatcccctggagaagttccattctgatgttgctggtaggagctttcacaatgggaggtttatacagaggatgcgtcaaaaagctgcgtctttgcccaatgtccaattagagcaaggaactgttacctcacttcttgaagaaaatggtactgttaaaggtgttcaatacaaaaccaagtcaggtgaagaactaaaggcttatgcgcccttgacgattgtatgtgatggctgcttttcgaatctacgacgcgccctttgctctccaaaggttgatgtcccatcatgttttgttgggctggtattggagaactgccaacttccacatccaaaccatggccatgttatcttggccaatccttctccaatcttattttacccaattagcagcacagaggtgcgctgtttggttgatgtccctggtcagaaggtgccttccatagctaccggtgaaatggcaaactatctcaaaactgttgttgcaccccagattcctccagaaatctatgactctttcatagcagccattgataagggaagcatacggacaatgccaaacaggagcatgccagcggctccacatccgacccctggtgcacttctgatgggggatgcgttcaatatgagacaccctttaactggtggaggaatgactgttgcattatctgacatcgttgtcctgcgtaatctgctcaagcctctccgcaatcttcatgacgcatcttccctgtgcaagtaccttgaatcgttctatacactgcggaagccggttgcttccacaataaacacattggccggtgctctgtacaaggtcttcagtgcctcgcctgatcaagctaggaatgagatgcgccaggcttgttttgattacttgagcctcggaggcgtcttctcgaacgggcctatcgctttactctctggccttaaccctcggccactgagtttagttgcgcacttctttgctgttgctatctacggtgtcggccgcttgatgctccctcttccttcacctaaacgaatgtggattggagctagactgatttctggtgcatgcggcatcatcctccctatcatcaaagctgaaggcgtgagacagatgttcttccctgctacagtacccgcatattaccgggccgcacctacgggagaaaaggcatgaacagagaaccgattccgtgctgctggtccgaccatgaatgatctcatggcaactgatgtttcacggatgacatttttcctttgctagtggttagttattggttattgttagaccgtcgatggaatgaggaacctgtatagtgtttgtcctgggtactggtaaagttggaaaatgtgttgggtttgttctctacgcgtgtcgattgctgccaagttgtgcacgtagccacgtatgattctgttgagctagtgaaacgtccccttcttccacgctgatg

SEQ ID NO: 86522 - DNA, 2203 bp, Zea Mays
aaaaaaaacccaaacctgcatacaattctgaagaaattcagaaaatccagctaagccaagttagtccgcccgccagctatgcggacatggttgcgagcggcctcaacctcctcctcctgacctcctcctcctcctccataaaatgcggaagaatctcgaagagtcccagacgcatcaaaccgccctcctctgtccctccctctcccgtctgccccctcgcatccccaaattaagccccgcgcgcaaggcagcaaacgcgccgcgcaccggaaggccccggggagctgcacgaggtggccccattgcggcatggctgctacggccgccgccgctggcgtcgagttcccgctcattggcgttgccgtggccacgctcatcgtgacggtccttgtcgcggccgtgatgcgccgccgccgccgtccctggcaccaggcgcctctggtggaggggaaacccgcaccagaggcaggctgcgcggtcagcgatggcgggacggacgtcatcatcgtcggcgccggggtagctggatctgcgctggcatacacgctcggaaaggatggccgtcgggtgcatgtcatcgagagggatctgacagaacctgacagaattgtgggcgagctgttgcaacctgggggttacttgaaattaattgagctgggcctccaagattgtgtggaagaaattgatgcccaacgcgtgcttggttacgcattattcaaagatggaaggaacacaaagcttgcttatcccctggagaagttccattctgatgttgctggtaggagctttcacaatgggaggtttatacagaggatgcgtcaaaaagctgcgtctttgcccaatgtccaattagagcaaggaactgttacctcacttcttgaagaaaatggtactgttaaaggtgttcaatacaaaaccaagtcaggtgaagaactaaaggcttatgcgcccttgacgattgtatgtgatggctgcttttcgaatctacgacgcgccctttgctctccaaaggttgatgtcccatcatgttttgttgggctggtattggagaactgccaacttccacatccaaaccatggccatgttatcttggccaatccttctccaatcttattttacccaattagcagcacagaggtgcgctgtttggttgatgtccctggtcagaaggtgccttccatagctaccggtgaaatggcaaactatctcaaaactgttgttgcaccccagattcctccagaaatctatgactctttcatagcagccattgataagggaagcatacggacaatgccaaacaggagcatgccagcggctccacatccgacccctggtgcacttctgatgggggatgcgttcaatatgagacaccctttaactggtggaggaatgactgttgcattatctgacatcgttgtcctgcgtaatctgctcaagcctctccgcaatcttcatgacgcatcttccctgtgcaagtaccttgaatcgttctatacactgcggaagccggttgcttccacaataaacacattggccggtgctctgtacaaggtcttcagtgcctcgcctgatcaagctaggaatgagatgcgccaggcttgttttgattacttgagcctcggaggcgtcttctcgaacgggcctatcgctttactctctggccttaaccctcggccactgagtttagttgcgcacttctttgctgttgctatctacggtgtcggccgcttgatgctccctcttccttcacctaaacgaatgtggattggagctagactgatttctggtgcatgcggcatcatcctccctatcatcaaagctgaaggcgtgagacagatgttcttccctgctacagtacccgcatattaccgggccgcacctacgggagaaaaggcatgaacagagaaccgattccgtgctgctggtccgaccatgaatgatctcatggcaactgatgtttcacggatgacatttttcctttgctagtggttagttattggttattgttagaccgtcgatggaatgaggaacctgtatagtgtttgtcctgggtactggtaaagttggaaaatgtgttgggtttgttctctacgcgtgtcgattgctgccaagttgtgcacgtagccacgtatgattctgttgagctagtgaaacgtccccttcttccacgctgatgaaacttggttgctccctggctgagtac

SEQ ID NO: 86523 - DNA, 855 bp, Zea Mays
atgtacaacggcggcggcggcgccggaacgacgcccgccgccgcgccggcctgcgtcgcggacgacggcggcgcctgtgggtgtggggcgaacttgagcgcgcggagctcctgcagctcccgctgcagccgccggttctcctccgtcagcgactcgcagcagcgcttcagcagctcgcagtccacctccgtctgcttcagcttcgtccttgctcgcctgttttggaaccacacctccacctgccgtggcctcagcttcagttgcttcgccaacgcgactttctgcttcatatactgtacaatatatatgtgtgtggctgtagtaataatcagccatgtacgcagccagtgtcgactagtaattcatcgaggtgtagtactaggcaaggcaagtgcagccggagccgcagccgttttgtggtgctggttcagggtgctgtgctccttgaagcggtcctccaggagcgcggactgctccttggtcagcctcagcttcttccgcgtgctcccgtcgtcgtcgtcgtcctcggcgccggcgcaggcccgcggcaacgcggccgtagacgacgcccgctctccctcggcgtcatccacgcgctccctcttcacgcccgccactgacagcgacgacacgctgtgcgcggccccgcccccgccggacccggtcgcggtcgcttcgtccggcaagctcagcgtcagcgacggctccagcgggtgcggcgacggcagccgcacctccctgctcagccggcggctgataccaccgtggcgcgccgcaccagaggcgccgccgctgccgctgccgagggacaggcccagcgcgaggcctgcgtcgtccaggtgcacgtcctcctga

SEQ ID NO: 86524 - DNA, 1628 bp, Zea Mays
gccgtggcctcgcccacaaactaatcctacggcccacggaaccagtcagtcctctctccttccggcttccgctgctcttctttctttcctggcatcttggagacggcggcgagacgaggagaggactggaactggaccatggctgcctcttcggctctcaggctaatcctgggctcctcgtcggcgtcgcgtcgccagattctgtccgagatgggatacaagttcacgcttattgttgtttttttttgcgccctatcgtttgagatgtttgctttagtaatttcttctcccgcacctttcagttcattcattttcttttttctccgggggctttagagtgcggatatcgatgagaaagcgatcagaaaggagaacccagaggaactggtggtcgccttggctcatgcgaaagcagacgctattctggagaagatgcagaacaatgggatgatgaaagagattcttgattctcaagatactactctgatgataactgctgatcaggtatgcagccttcattttttctggcatgctttgcttgataatctttcatgagctgtgtacttatctacaatcaaaatgtatggatgtgtccagaaaccatcattcttgctgcatttgaatgacgtgaaatcgtggcattctaccatagtatttacagagctagtgcccgagtaattttttaggtgcagcactgcagctgtgggaacatgcttgtgtgctagactcttgaatatatgtttacttagccacttttgtagtttagtcaggatatttgtggagctaaaggatagtaatacctgtcaaccttggattagagagagccattagtccttaggagttggtagaatatatataggcacaactaatatgggccattatgggtcttaacaccccccttcaaacgtaaggtggaagcggaggatctgaagcattgagtttgaataagttgagacgatgttgttctcttgtttgtgcttttgtgaagaagtctgcaacttgcatttccgagggctcacggtcgttgctggacagcagaccgcctagcaaagaaaggactgcctcaccctcaattttgtcccctctgtgatcaagaggaagagacgctaaaccatttgtaagtctcctgcgttttctcacgggaagtctggtttcagattatgaaatctgtcgggttgcagcaccttgctcctaaccttgagagctcttcctttgaggattggtgggaaggagttgtcgcagttcctgctgatccagcatacaaggggctgcacaagggcttgaattctttgatcatacttggtgcttgggccatctggaatcaccacaaccgttgtgtatttaatggtgtgcagtctagttccagcatggtcatcaattgggtcaaggaggagtctcacatctggtgtagggttggagccagtgatttatctagcatccttatgctccagtgaaccagtcggtaatctttattttagagtctccatggtcacgggtctagatgtcttttgttgttatttttctacctataattcagtgtatgtgggtttgtgtggagttgtatgaggtttattttgcctcacctattcttcttaatataatgatacacagctctcctgcgttttcgg

SEQ ID NO: 86525 - DNA, 200 bp, Zea Mays
caaatatgttaggcaaaatttgctccttgccatgcaaaacaatgccaactggctggtgaacatcatgaaaacgaatgttttctgggcaacacggctcagtggatattttcttgtggacactacctcgaataaaatatggtgtccagaaagcgaagaatttttattctaaataaatatcactgctgcccattttggtgact

SEQ ID NO: 86526 - DNA, 2126 bp, Zea Mays
tatagctcgtactgccatgttgcggtaatagtaacgggaaagaaaaggaaagcgcgagctgttggaaaatggcagctcgtgctcgtcccgtcccggctggagtcgagtcgtatactatacctgtgctacctagctcttctctcttacatcatgtactgggcctggatggcacctgcaggtggccggcgaggctcgggcgatcggcagggtgtcggtgccgatggcggtcacgggcctggtcatgtactcacgggctctcatctccatgctcttcctgggccgcctgggcgagctggcgctggccggcggctcgctggcgcttggcttcgccaacatcaccggctactccgtgctctcggggctggcgctcggcatggagcccatctgcggccaggccttcggcgcgcgccgcggcaagctgctggcgctggcgctgcaccgcaccgtgctgctgctcctcgccgtggcgctgcccatctcgctgctgtgggtcacctccacggggcacgtgctcaagctgctggggcaggacgagggcgtggcggacgcggcgcagacgttcgccgcgtacgcgtcggccgacctcgcggttctggccgtcctgcacccgctgcgcgtctacctccggtcgcagaacctgacgctgcccatcacggcgtgctccctcttctccgtgctgctgcacgggcccatcaactacctcctcgtggtgcgcctccgcatgggcgtcgccggggtggcgctcgccgtggcgctcaccgacctcaacctgctcctcgcgctcctctgcttcctcgccatctcgggcgcgcacagggactcctgggtgggccccaccctcgactgcctctgcggctggccggagctgctccgcctggcggtccccaccgccaccgcggtctgcctcgagtggtggtggtacgagctcatgatcgtgctgtcgggcctcctggccaacccgcgcgccaccgtggcgtccatgggcatcctcatccaggccacgtcgctcgtctacgtgttcccgtcctccttgggccagggcgcgtccacgcgcgtcagccaccagctcggcgcgggccgacccgcgggggcgcgccgcgccgccggcgccgccctctccatcggcgtcggcgtgggcctggttgccgccaccttcatggtgtccgtgcgcagccactggggacgcatgttcacgtcggacgcggacatcctccgcctcacgggcgtggcgctccccatcgcgggtctctgcgagctcggcaactgcccgcagacggccggctgcggcgtcctccgcggcagcgcccgcccgggcagcggcgcgcgcatcaacctcgcctccttctacctggtgggcatgccggtgggcgtggcgctggcattcggcgcccgcctgggcttcgccggcctatggctcggcctcctggcggcgcaggccgcgtgcgccgtctggatggcgcgcgcggtggccgccaccgactgggacgtggaggtcggacgcgccaaggagctgaccaaagcgaccgccagcaacaaccacagcgagtgcaacagcagcagcagcacctccgcgtctagtgatataaccactgtgatcgccactagcaacagcgccgccgggtgcaagaacaacggctacgtgccaatcagcgagcgctgcagcaacgacagcgagctggagaaactggaggagggcctcatgagcagcgacgacatccctagtgccagcgtcagcgggagcgcgtctgctggtgacaccggtgccgtggttagggagaaccgcggcagctgctgcaatgacagtggcgctgctggtacggcggcgacgacggagggaaaggagcagaggaggggcggatcggagcggggcccgctcatcagtgtgtcggacggggagcacgatggcgacggccgtggaggtggcggccaggtctaattaagcgcgtgtgatgtgcgtccatcaatccatttattatcttttgctgttgacttagcttggatccgcctccatttaatctctccttgtttcctgaattaactggggcgatcgaggtttaattttgtgaaaaaaatagtactagagaccgggaaagaggattatattttgctatctacatagatagtaa

SEQ ID NO: 86527 - DNA, 1170 bp, Zea Mays
atggatgaactcaacaaatggcggcatttgcatccggaccctgaggacgagctagcatacatgtacaggcagcaagaagaagatcatgccgggatgcaacagcaacatcaccatttcgctgagcggctgcccgagcagcagcagtactacacaccaccaccaccagcagcagcgccgcctacgtcctctagccccttccttcctcgtcttcaccacacctccagtttcccgggctttggggacccggcagtaccacctcggctgccgttccggccggccaaggaagagccagggcagccgtcatcattgagcaatcgcatcctctccttcggcgggcagcctcctagcacgctcaacttctcaggaagcgattggacggaagccggcgttgaagcggtgcaacagatgccgccggagaggcggagccggatgcactggaacacgcaggagcatgtcatcgccgagcgcaagcggcgcgagaagatgcagcagcagttcgtgacgctggccaccatcgtccccgacctcaccaagatgggtttggctgggggggggatccacgctttaatcaaacatacgttctggggcatccctgccgggagcggcacggtcgctagtgcaaatgttattactaaaagtggaatttccccaaatgggtcgcatcagaaggcgggcaacccgatccgcgtcccagatgggtcggcacatgtcagaaattggtggtcaatcccaggcctgcggacgcttgctccgcggatcctcacacaacccgatcaagataagatctctttactagggagcaccattgagtacgtgaagcatctcgaggagaaggtgaaggccctggaggggcgaagggaaaggagaacgtatgagcccactgactttgagagcaaatgtcatatatcaactgatattgacgcctcatcctccagcgggagtgcctttggtgcgggtgggttcaacccgacggttgatgcaagcattcatggcgacaccgtcctattgaaaatatgctgcaaggagagaagaggagtgctagtgatgatcatctccgagattgagaatcagggcctcgccatcataaacactagtgttctaccattcacagactcgtgcctcaacatcaccatcactgcaaaggcaatgcattctctctctcatgtttaa

SEQ ID NO: 86528 - DNA, 587 bp, Zea Mays
aatactcaatcactagccaagcctatcatgtatcaatggacgatgatgcacatgtaactttgaaacatggacccaggtttgggacttggtggctcaaattataatagaacttacttattacagtatgagcaaactttatgtttaatatatgatattcactgacaagttttaacgacttgatgacttttcagacagataagatctctctactagggagcaccattgagtatgtgaagcatctcgaggagaaggtgaaggccctggaggggcgaagggaaaagagaacgtatgcgcccactgactttgagagcgagtgtcatatatcaactgatactgacgccttatgctccagcgggagtgcctttggtgcgggtgggttcaacccgacagttgatgcaagcgttcatggcgacaccgtcctattgaaaatatgctgcaaggagagaagaggagtgctagtgatgatcatctccgagcttgagaatcagggcctcgccatgataaacaccagtgttctaccgttcactgaatcgtgcctcaacatcaccatcactgcaaaggcaatgcattctctctctcaagtttaa

SEQ ID NO: 86529 - DNA, 3512 bp, Zea Mays
ccactccactcaccacaccatccatggcgatggcgccctccacggcggccgcatccacccttctccccgtcctcctcctcatcgccaccgccacccagtgcaccgcagccgattcattctcttctcaggacgctgccgccctcctcaacctctctgcggcggtagcagacccctcgggctacctctccacgcactggactccggacaccgcggtctgctcgtggccgcgcgtgtcctgcgacgccaccgacacacgagtcatctccctcgacctctccggcctcaatctatctggccccatccccgccgccgcgctctcctctttcccgtacctccagtcgctcaacctctccaacaacatactcaactccaccgccttccccgacgagatcatcgcgtcgctcaagagccttcgcgttctcgacctctacaacaacaacctcaccggttcgctgccggcagcgctccccaacctcaccgacctcgtccacgtccacctcggcggcaatttcttctccggcagcatcccgaggtcctacggccagtggagccgcatccggtacctggccctctccgggaacgagctcaccggcgagataccggaggagctcggcaacctgacgacattgagggagctgtacctcggctactacaacaacttcaccggcggtataccacccgagctcgggaggctgcgggcgctcgtccggctcgacatggctaactgcggcatctccgaggagatcccgccggaactggcgaacttgacgtcgctcgacactctgtttcttcagatcaacgctctgtctgggaggctcccgacggagataggcgcaatggggtcgctcaaatcgctcgacctgtcgaacaacttgttcgtcggggagatccccgcgagcttcgcgtcgctcaagaacctgaccctgctgaacctcttccggaatcgcctcgccggtgagattcccgagttcatcggcgacttgccgaacctcgaggttctgcagctgtgggagaacaacttcacaggcgggatacccacgaacctcggcgtggcggcgaccaggctgaggatcgttgacgtgagcacgaacaagctcaccggcgttctgccatccgagctgtgcgccggccagcggctggagacgttcatcgctctgggaaattcgctattcggcgacgttccggacgggctcgcggggtgcccgtcgctgacgaggattcggctgggagagaattttctcaacgggacgatacctgcaaagctgttcacgttgccgaacctgacgcaggtagagctgcacaacaatttgctctccggcgagctccggctggacggagggaaggtgtcttcttcgatcggagagctgagtctgttcaacaaccgactgaccggccaggtgcctaccgggatcggtggactcctgggattacagaagctgttgctcgccgggaacatgttgtccggcgagctcccgccggaggtcgggaagcttcagcagctctcgaaggcggacctttctgggaacctgctctccggagcggtacccccggcgatcggcagatgccgtctgctcaccttcctcgatatctcgagcaacaagctctccggcagcatcccgccggagctcggcagcctccgcatcctcaactacctcaacgtttcccacaacgcgctccaaggggagattccgcctgccatcgccggaatgcagagcctgacagccgtggacttctcgtacaacaacctctcgggcgaggtcccgtccaccggtcagtttggctacttcaacgccacttccttcgcaggcaacgctggcctctgcggggcgttcctctccccgtgccgctccgtgggcgtggcgacttcggccctgggctccctctcttcgacgtccaaactcctgctcgtgctcggcctcctcgcgctgtccgtcgtcttcgcgggcgcggccgtgctgaaggcgcggtcgctgaagcggtccgccgaggcgcgcgcgtggcggctgacggcgttccagcggctggacttcgccgtggacgacgtgctggactgcctcaaggaggagaacgtgatcggcaagggcgggtccgggatcgtgtacaagggcgcgatgccgggcggcgccgtggtggccgtgaagcggctgccggccatcgggcgcgcgggcgcggcgcacgacgactacgggttctcggcggagatacagacgctggggcgcatcaggcaccgccacatcgtgcggctgctcggcttcgcggccaaccgggagaccaacctgctggtgtacgagtacatgccgaacggcagcctcggcgaggtgctccacggcaagaagggcggccacctgcagtgggcgacgcggttcaagatcgccgtggaggcggccaagggcctctgctacctgcaccacgactgctcgccgccgatcctgcaccgcgacgtcaagtccaacaacatcctcctcgacgccgacttcgaggcccacgtcgcggacttcggcctcgccaagttcctccggggcaacgctggcggttcggagtgcatgtccgctatcgccggctcgtacggctacattgctcctgagtacgcctacacgctgaaggtggacgagaagagcgacgtgtacagcttcggcgtggtgctgctggagctcatcgccgggcgcaagcccgtcggggagttcggcgacggcgtggacatcgtgcactgggtgcggacggtgaccgggtcgagcaaggagggcgtgatgaagatcgccgacccacggctctcgacggtgcctctgtacgagctaacccacgtcttctacgtcgccatgctgtgcgtggcggagcagagcgtggagcggcccacgatgcgcgaggtcgtgcagatactggccgacatgcccggctcgacatccacgacgtccatagacgtgccccttgtcatcgagccgaaggaggaggacgggggcccggagaagaagcagcagcagcagcaggaagggccacacgactcgccgccgcagcaggatcttcttagtatctagaagcgcagttgcgagagttggtcgtactgatggtacttggtagcatccctgcctgccctgttctttgagtgaagcgttggaacgtggcgtgtgtgtagtgtaactgtgtatgcaggcggtgatttatatgcatgcttcctttaagtagattgccagtagtatttgcgtatggtgagctggtcggtccttaatgtctgtccccatgtacaaaaccagatcaagatgcttgggcttccggttgagtttacgccttaggtgctgtttgtttaccctcgacattatataatccagcttaaataaatcaagagttaaacaaacaacacagattatatattaggtggattatatagtctagatgtctagattatgataatttataagcatgtcattagatgcagatatggattagaattgctagtttgtttgtttgtttgttttcgagaaaaaagaagaatcgttcctttgaaaaaaaaaaactac

SEQ ID NO: 86530 - DNA, 2218 bp, Zea Mays
ccactccctcgccaccaccacgcaccaccacctctgctctgctgtgtgtgtgcctaacgggtcggaggcggggacggccccaccgccccgagctcccaaccgccgacagtctccggcggctccaacttcaatacctccctcctcggcatgccggttgccgtcgcgttggcggcggccgccgcgctcgtcgtcctgctcgtcctgtccgcggtggccgccgccgttttcttcgcgcgcacgcggggcgccaggccgccctcgctgtcgcgcgtcgagcacgcgccgtcgtccgcctccggctcctcccgcgccgcgtcgtccgcgcgcaaggagaaggtcggcgcggaccaggtcgccgagccgggcgccgcctcctctggcgtggccagctcttccgcggccgcgagctccctcgagtcgccggtgaagaggaaggcggaagcggtcagggtcggcggcggcggcggcggggccgccgcgggggtggagatggaggttgggtgggggaggtggtacgacctgacggagctggagatcgccacgggcgggttctgcccagcgaacgtggtcggggagggaggctacggcaccgtgtaccgcggcatccttgccggcggcgaggtcgtcgcggtcaaggacttgtttgatcacaagggccaggccgagaaggaattcaaggtggaggttgaagccatcggcaaagtgaggcacaagcaccttgtcggtctcatcgggtactgcgcagaaggtccaaaacggatgctcctttacgagttcgtcgaaaatggcaacttggagcagtggctgcacggcgacgtcggaccggtcagccctctgacctgggaaatacggatgaagatcgccgtcggaacggccaaaggcatagcgtacctgcacgaaggcctggagccgaaggtggtgcaccgcgacatcaagtcgagcaacatcctgctggacaagagatggaaccccaaggtgtcggacttcggcatggccaaggtgctggggcccgggtccagctacgtgacgacccgcgtgatgggcacgttcgggtacgtggcccccgagtacgcgtcgacgggcatgctgaacgagagcagcgacgtctacagcttcggcgtgctgctcatggagctcatctccgggcggagccccgtggactacaaccggccggccggcgaggtgaacctggtggagtggttcagggccatggtgggcgcccggcgcgtggaggacctggtggacccgcggatccccgcgccgccgccgcctccgcgggtgctcaaccgggtgctgctcgtctgcctccgatgcatcgacgccgacgcgcacaagcggccccggatggggcagatcgtgcacatgctcgagggtgacgagttccccttccgcacggagcaccgctcgccgcgggcgtctcaccggacgtcgacgggctcacggccgtcgcttctgtcggagaacgtcggtgccaccgacgactcggacaagtcgatggcgagatgaaggatccgagctgcctgcacaagcaactctgcaaacaagcaagcaaccctccactaacggatctggcgccgtcgtgcggcgtgcgaggagctggagcagaggggcttgggggctggactgactttttttcacccgatgcttccggatttgggcaccacccgaagctttcttcgaccggcgtgctccctccgccacatgatcggattgcttacgggacgacgggaaatcccggtgatgagatcaagtgtggaacaacatgtgatttaggggcgaaagggaagacgggaggggtattgtttggtttaggttctatatattttgtaccaacgattatgcacttagatatagatttcttttatatctatgtacctagtagaaatagtatatttctaaagttaaagaggtgttatagtttataatgaaggggacagcttcttattgcctagcaaaatagaagtctaagaggagatgatgcagataaaataatcgttacatgccaaaggagcccaatttctgacatagttaccctatttcgatctaattccctgacatagttaccctgaccaagatggatctgaccatgataaaactagttggcatccccaaacataattaccccgaccaggttggacccgacctcgaccatcccaagcaaaagtcttgatccaagttgtcctagtcggttggcctcgactttagtcacgccaagata

SEQ ID NO: 86531 - DNA, 1710 bp, Zea Mays
aaaagatgctatgctcgttacttgagcgcatactactcgtaattactgaatcggcgtgtgtaaaataaattaaccgccctagtacatagtgcaattatgttccctcgttcctgtctttctggcgtaaatgcctgaacgggtacaggggccaggccgagaaggaattcaaggtggaggttgaagccatcggcaaagtgaggcacaagcaccttgtcggtctcatcgggtactgcgcagaaggtccaaaacggatgctcctttacgagttcgtcgaaaatggcaacttggagcagtggctgcacggcgacgtcggaccggtcagccctctgacctgggaaatacggatgaagatcgccgtcggaacggccaaaggcatagcgtacctgcacgaaggcctggagccgaaggtggtgcaccgcgacatcaagtcgagcaacatcctgctggacaagagatggaaccccaaggtgtcggacttcggcatggccaaggtgctggggcccgggtccagctacgtgacgacccgcgtgatgggcacgttcgggtacgtggcccccgagtacgcgtcgacgggcatgctgaacgagagcagcgacgtctacagcttcggcgtgctgctcatggagctcatctccgggcggagccccgtggactacaaccggccggccggcgaggtgaacctggtggagtggttcagggccatggtgggcgcccggcgcgtggaggacctggtggacccgcggatccccgcgccgccgccgcctccgcgggtgctcaaccgggtgctgctcgtctgcctccgatgcatcgacgccgacgcgcacaagcggccccggatggggcagatcgtgcacatgctcgagggtgacgagttccccttccgcacggagcaccgctcgccgcgggcgtctcaccggacgtcgacgggctcacggccgtcgcttctgtcggagaacgtcggtgccaccgacgactcggacaagtcgatggcgagatgaaggatccgagctgcctgcacaagcaactctgcaaacaagcaagcaaccctccactaacggatctggcgccgtcgtgcggcgtgcgaggagctggagcagaggggcttgggggctggactgactttttttcacccgatgcttccggatttgggcaccacccgaagctttcttcgaccggcgtgctccctccgccacatgatcggattgcttacgggacgacgggaaatcccggtgatgagatcaagtgtggaacaacatgtgatttaggggcgaaagggaagacgggaggggtattgtttggtttaggttctatatattttgtaccaacgattatgcacttagatatagatttcttttatatctatgtacctagtagaaatagtatatttctaaagttaaagaggtgttatagtttataatgaaggggacagcttcttattgcctagcaaaatagaagtctaagaggagatgatgcagataaaataatcgttacatgccaaaggagcccaatttctgacatagttaccctatttcgatctaattccctgacatagttaccctgaccaagatggatctgaccatgataaaactagttggcatccccaaacataattaccccgaccaggttggacccgacctcgaccatcccaagcaaaagtcttgatccaagttgtcctagtcggttggcctcgactttagtcacgccaagata

SEQ ID NO: 86532 - DNA, 1034 bp, Zea Mays
gtagaattaggtcacacaaacaattttctacgcgccttggttaacagtactagttacaaatggcagcaatcagtggtcttcagaatgcaacaagactatctaataaccagtaaaaaatcgagttattgataattgacatataccttcgtagagcaaaatcgagttattgattgataatggatgtggtgaagcctccaaaaaaatttgcaaacaatggctgctcagaattaacaatccgacacgaatatacaaacaatagaacagcaagatcactgaacatcagtcgccagagactgcacatgtccaccgcagccatttaccatgacgaccaaataagggatttttacttctccacaaacatttctttatctacagtgtagatttaactacaagcataccaaaatctggaaagtcaaaacatctttaatttgaaaaggaggggaaaacatctggaaagtaaatacattttttgattttgagaagagggaaatttaaggaggcattaagaataaactcacccaaaggagaaagctcaaattaaggcctatgtttggaaccaagagctaatagttagccagctaacaaattgctaatagctagattaatccagttaacgagttaatgaactaattgttaaatagctgacaattgtgagtgtttaaaacctctatatctaattttagaggctaacgattagttctagaagaaccaaacaggaccagactatagcaaaaagtatcttatcctgcaaaataaagatgtagtcctccgtcccttcacacacgcatgcagtgcgcacgcaagacttcatgcaagcgccccctaaacacatgcgcgcaatgctgcattgctttgatcgcccggataaatgataatacacagctgaatgaacgccttatcatataaactaactacaataaaaatgactgcaaccatacgtctcgcattcgaagctacaacaaataatacacagctgaatctctctgtatgtacaatgtcttcacagacaagttcgcataaacagccgtaggaca

SEQ ID NO: 86533 - DNA, 354 bp, Zea Mays
tgttttaagtccaatgctcatgtcctttatcaactgccacatcaactatcaatcattatcaacaccagtactaacaaagttctcgtacgtcgctataattctcttttatgcttgagtataaaattttatcttttatttgaactcccaacacagaactttgtggacagtagcatgaggcctcaaaattttattagagaactggatcttacaaatttagcagaagactatccgaagttgagagaactcatacaaaggaaagatgaagttgttgctaagtcagcttcaccgccaatgtattacaagtgtgacctacgaaaacatgtttacaattatatttttgaatcaacatgattt

SEQ ID NO: 86534 - DNA, 2621 bp, Zea Mays
atgcctgccgcagcttccagagggatcagcgtcgaggtgttgtccaccaccgggacttcacccgacgaagtagaaggagaaactctgatctttttctgtgtcaccggattccagacggacttcagcgcctccgtcatctccaccacctccgcttcgatcccccagcctccacttctgcgaatcgctttgatagggccccaaacttctgatcaggcttggccgagatccccgcccggcgtgatccgcgagatccccgcacggcgtgatccgcgagatccctgccctgcgagatccatgcctgcctgctgggtgtgggggcggagcacgggcgtgaggtgcagggcgccatcgccgggcgtggggagatactccagcggcgaggccttgggcccgccgcagagctcctgcgtccagcgcggagaggccgtcgcgaatgggacccaccgcttgccgtcccagaagacgacccggccgtcggcgacgccacgcgtccggcccggcgtcgggcccagcacccgcgcgcatgccagcacgaacggctccatgtgctccagcggagcagcgtccgccgacagatccatggactcgaggtcgttcagatccacggcggccgcgtccggcacgtcggatctgagcgtcgcccccgtcgttgcagcgaggcgctcgagctcgccggagatgtcggagttgaagccgcggaccgctttccaccaatctccaatcgcggcgtgtgtggcgggcgtgctgcagacgcgcgacgcgagatccaggggacagcgcggaggcggttggagaggctggggcgaggatccaggggacgacgcagtgagtgggagaggagggcgacgcagtgagggggagaggaggaggtggcggcgtagtgaggggagaggaggaggtgattgcgtaggggcgcggcgagatttccggacgcaggggcgcggcgagatttccggacgcaggggcgcggaacaaaggcagaaccgtgcaccacaccgggtggacgtctacactactatcttatagagtagtatagactagacaaaaaaataaatgaaaataggcgaaatgcaattcacgtgtctttggctctgatatgcaactttggtatttacagcgtcgcagtcgttcatcggggtcaactacgggacgatcgcggacaacctgccgccgccggcgtcgacggccagcctcctcatgtcgacgtccatcgccaagctccgcctgtacgagccacagccggacctggtcgcggcgctcgcgggctccaacatctccatcctgctgggcatacccaacggcgccgtcccgaacctcgcgtcctccccggccgccgccgcgtcctgggccgccgccaacatccccaccacgcttcccgtctcctccatctccgtcggaaacgagctgctcaactccggcgaccccacgctcgcgccccagctcctccccgccatgcagaacctgctcgccgcgctcccggctggctcgaccaccaagatctccaccgtgcactccatggccgtgctgtcggcgtcggacccgccgtcctccggcgcgttccacccggacctcgccggcagcctggacccggtgctggacttcctgcaccagaacggcgcgccgttcatgatcaacccgtacccctacttcgcgtacgcctccgacacgcggccggagacgctggccttctgcctgttccagcccaacgcgggccgcgtcgacgccgtgtcagggctcacctacaccaacatgttcgacgcgcagctggacgctatccgcgcagcgctggacgccaaggggtacagcgacgtggagatcgtcatcgccgagaccgggtggccgtacaagggtgacgccgacgaggccggcgccacggtggacaacgccaaggcctacaacagcaacctcgtggcgcacctcaagtcccaggtcggcacgccgcggacgccaggcaagtcggtggacacgtacatcttcgcgctctacgacgaggacctcaaggggggcccggagtccgagcgctccttcgggctgtacaagactgacctgacggcgaactacgacgtcgggctcgcaaaagacaatggcacggcggccccgaccagcttgactccggttccggcacagggcacgccgcagccgagcaaagggacgatgccgacggggtactgcgagaccacgtccgccgtgcccggcaccacgcaaggccaacagttgccgcagagcagctcgtgctacattcccggcggagctgagtcgcggcacgccacatggcagcttgttttattgggtgttttgatgtgcttggtcaaggtagccggcatctagttacaacatctgtgtgcgacggaacgagtacagggttcgctctccacagttgtgcgtatggattcaccactgtaatagaattcacgaaagctgctaggcacgatcgaatgttgagccacacggttgcactgctttggcctccacagctccacttgcaactccttttatgaatgatagcacaaataaaatttccgaagccaaaagccgtcggacataatcactaagccattctatttcggccggtcgtaacgggacggaaataaggtatcgtaacgggtcaaaaataaggtcgg

SEQ ID NO: 86535 - DNA, 291 bp, Zea Mays
atgagatctgttgggctgcaacaccttgctcctggccatgagaattcttcttttgaggattggtgggaaggaatttcctcttctactgttggaccagcatacaaggggctgcgcatggatctgaattccctgatcattcttggagcttgggccatctagaatcaccgcaaccgctgtgttttcaatggtgtccagccttgtactaacttggtaatcaattgggtcaaagaggagtctcatctttggtgtagggctggagcccgtggattatctaacatcctagcgctccag

SEQ ID NO: 86536 - DNA, 1054 bp, Zea Mays
ctagtcccccgcacgggtgacagactgacaggtccgtccgcaaatctgcaacgttgcctcgtcacctctatcctccggtctctcaccgcctaacacggccgccatggccgccgcctccacctcccttccccttggcttctcctctcaccaccgcccaactcccagaatccggccgcagccccagtcccagtcgcaaccactgaaggcaaaaccccttaacccccttcgcttcagcctagccctcaccccggcgaccgcgaagccccgcctcgctgcgatgcccgacgatgtcgctgtcgccaacttcgtggagaaggactggtcgttcctcgagtccgcgggcgcaaacctccagcgcgctctcgcgtcgggggcgctctcgccggcgtcgcgggtgttggcattgacgcccacggcgtccttcgtgaggtcgctcctcgcgtcctcgccctgcgagctactggtggccgcgcatgagtcgatgtacgtgctggcaggggtcaaggaggcgcacgacgaggtgaggtgcttccacctcgagggtgggggcggcggcagaggcggcggcgtggtggaggccgtgccagagaggttcgacgacttcgatgttgtgttcgtgtgctacttccctggaatgggagtctccgcgggggcgctcctcaaatcgctggccaagaggtgctcaaaaggtgcaagagttgtcatgttcttagatcaaggcagacagaattttgagcaacaacggagagagcatcctgatgttgtaacttcggatttgcccagtatagccttcctggagaaggctgcatctgggaacaagtatgaaataacagagttcgttgacgagcctagcttttaccttgctgttttgcagtttcaaggatgatttgttccttttttgcaatatttgtgaagcaaattgtgactgtctgtaaatttgcaatatttgtgaagcaaattgtgactgtctgtaaattctgatggacgtagtttgtgggtggcttatgtcgtactagcctgtttggtttgctgtctaatttatcacactttaact

SEQ ID NO: 86537 - DNA, 267 bp, Zea Mays
atgtgcattttgctgtgccgtaccttccctgaaggccttctcaacctgttctttgaatatcacagcagcagcatccaaaagaaattctcttgccagttcagggctcttggcatgcttctgtggatgggcaccatcaccatcaaaatcatttccatccctgtccatgtcatcatcttcatcctcttcctcggcctcttcagcatgctcaaagaaacttctaatactttcaccctttgtcatagtcacaaagccatcaccaaccactag

SEQ ID NO: 86538 - DNA, 756 bp, Zea Mays
gcgggtttcgacggcatcgcgacggggactgcgcagattgacggcgaagcaagacacggagacgtcggggttgcacggatcgacgacgcggctgctctcgatgcggaggggatccggggctgctgctgcaggcttgctgcggcattatgtcgagcacgccgagggcgtgacgcaaaggagattcacgtggctgcgcgaactggcgtcgcggctgctgcgcgaggtacgccagggaggcagccatggaagtcctggacgcgacgcggccaaatcacagagtgtccggcgcagctggaaaaagcgatctgtggggagggtgctcggcgacctgtggcaggagtgctgagcgccacagaagtagaggggaggaaggggaaaaattgcaggggaaggcgccacggagagttcactgctcgagctcggaccagaggaggtccgcgccatggctggagcagaggggtctgctcagcctacagccaccatggctgggcgttagtcaagcctcgccacgctccggcgcgagctgggcacttccagagcccacggggagtttttctggctgcggacaagtgcacgggaactatggcctgcggcctggcgtccagggctggtgcttggagggaaggagctcgccgcggcaagagcagggaagggggcgcacacgtctgggtgcccagggagaagagcgccatggaggccgatgtggaggtcgaggcagggacctcaggatcgggcatgggagagagggcaccaagc

SEQ ID NO: 86539 - DNA, 1250 bp, Zea Mays
ccgatccacccacgacacacagagacagaggtcaggtcaccactactagctagctaggcagagccagcaataaacctcgctgcgcaatcgacagaggtttggaagacaatctctgcgcaaatggcgttcccgacggcgatggcagcagtggccgtagccctgtgcgcggcgttcgcgctcgcggcgctcggcggcgccgaggcgcagcagctcagcccggcgtactacgacgactcgtgcccgcacgtctacgacacggtgcggcgcgtgatccaggaggcgcgcgcctccgatccgcgcatcctcgccagcctccttcgtctccacttccacgactgcttcgtcaatggctgtgacgcgtcgctgctgctcgacgagaccccgacgatgcgcagcgagaaggaagccaaccccaacaagggctctgcgcgagggttccccgtggtggacgacatcaaggccgccctagagaacgcctgcccaggcgtcgtttcctgcgccgacgtcctcgccctggcagccgaggtctccgttgagctggcaggaggtccgtactggagggtgatgctgggccggacggacggcatggcggccaacttcgacggtgcccagaaccttccaaacccgacggaaccgctgaacgatctgaagcagaagttcgccgacctcggcctcgacgacaccgattttgtggccctccaaggggcacacacgatcggccgcgcccagtgcaggttcttccaggacaggctctacaacttcagcgacacggaacggtcggacccgacgctggataggtcctacctcgccgcgctccgggagagctgtccggcggcggtgagcgacaacacgtgcctgaacaacctggacccggccacgccggacacgttcgacaaccgctactacgccaacatcctcagcaaccgcggcctgctcaggtccgaccaggccatgctctccgcgccggaggagggcgcggtgtccaccgcgccgatcgtcgggcggtttgccaacagccaggtcgagttcttccaaagcttcgccacggccatggtcaagatggggaacatcgcgccaatgaccggggggctccgggaggtcaggagaaactgcagggtggtgaactgaagctgctggttctgttctctttgtagtttgttcatcgatgctcatccaacatgtaaattcatgatttttttcctacataattgttttgagttggtaatatgtaatgaagcaacgttttcttg

SEQ ID NO: 86540 - DNA, 823 bp, Zea Mays
ccaaacacaggcacacagccgtgtcctccggactctcggggtctcccgacgtcgactcgtcctcggtttccctccatgccctcaaggcctcaatctatcctcgggctgtccgctgtccccttcccgcgtcgaaaccctagctcgtcacctcgccgccgtgctgtccgctgtcctagtccgcggctccgcgccccatctctcttgccgtcgcatctgatgttcttctcccgcaacgcattccgcgacctggaccccatcgactcgccggcctccatggcgtcctcgaagaaggttgcgacccgtgacgagtgggagcggaagcttcgcgacgtcaagatacgcaaggaggacatgaaccgcctcgtcatgaacttcctcgtcactgagggcttcgtcgacgccgccgacaagttccgcatcgagtccggcacccagccggagattgacctagcgatcatcgcggatcgaatggaggttaagagagcagtacagtcgggtaatgttcaggaagcgatcgagaagatcaacgatcttaaccccacggttcgattctgtctatgttcctagcaaaattagttcgaataacggccgagacgtactttgttgtggaagatctccaagtaggttgtggttgctgggttgtacagatctggttttcatcctcctgtaagtctgaaatagatgtggtcaagtagagaagcactcagttctgcaatgtggttaacttggatgtactgtcaccacgtttgtctttgtcagcaatttagagccacaactagtttataatacaggaaggggatcctttcccaatctaatttgatga

SEQ ID NO: 86541 - DNA, 1220 bp, Zea Mays
ccaaacacaggcacacagccgtgtcctccggactctcggggtctcccgacgtcgactcgtcctcggtttccctccatgccctcaaggcctcaatctatcctcgggctgtccgctgtccccttcccgcgtcgaaaccctagctcgtcacctcgccgccgtgctgtccgctgtcctagtccgcggctccgcgccccatctctcttgccgtcgcatctgatgttcttctcccgcaacgcattccgcgacctggaccccatcgactcgccggcctccatggcgtcctcgaagaaggttgcgacccgtgacgagtgggagcggaagcttcgcgacgtcaagatacgcaaggaggacatgaaccgcctcgtcatgaacttcctcgtcactgagggcttcgtcgacgccgccgacaagttccgcatcgagtccggcacccagccggagattgacctagcgatcatcgcggatcgaatggaggttaagagagcagtacagtcgggtaatgttcaggaagcgatcgagaagatcaacgatcttaaccccacgattctggacatgaatccccaactatactttcatctccagcaacagaaactaatagagttgattcgcgagggaaaaacaaatgaagctttggagttcgctcaagaagaacttgcaccgagaggcgaagaaaatcaaacatttctcgaggagatagaaaaaactgtagcgctactgatttttaaaggtgtaaaaaattgcccttacagagaactattggatgtttctcaacgtttgaagactgcaagtgaagttaatgctgctattcttgcaagccaaagtcatgggaaagattcgaagcttccaagcttgttaaagatgttgaaatggacacaaaatcatctggacgaaagggcggcatatcctgcaatcaatgacttcaccactgctgtagtggaagatccatcaatatgaatctgctgcaaaaaggttgatgataactgagggtaggcaccaagcctgcctggtggctgcatgtggtttgccccggatctgtcaatagatcatcatctgcagcgattgagttcacccctttcaccagtgttgaagcaattaagctcaatgcaaggagttgacctgaaacgtcacctgtgttctactacctgtacatgatgtagaaagacatgtttgaaccccttttcagccagtgaaaatattggatttgatttttcatggatata

SEQ ID NO: 86542 - DNA, 878 bp, Zea Mays
acaccatctctctcgcttcgccccagagtccagagatgtctctctcagcagcttccatcctccatgcccttctcctcacccttctcctcggcgccacggcctccgtcacggctggcaacggccacgtgaacccgtcgatgtttaccaacggcaccgagacgtgctccagcgccgacgacacgacggagagatacatctgctacctctgcacgggccgcaacccgttcctgatcaggtactgccccatctactgggacgagtgccacctcgtcctcgtctgttacgacgaccaggcttccgactccattcccgcagtgcccgtgccgacgtcgctagggccggcggcgtcggccaaccccagtgagctgcacgaagacgaatgctacgtcatgaagctgtactggaacggtagctacgccatcgtcacccgcctcggctgcgcccggatcgccagatgcctcctctctcctgcggcgggggcgacatggctggcagcgacagccgacagggacgcccttggcaccaccaccgcagcgccggcgacgacggctgcgctccaggggagattaacgtcacgactcgcggatttgcagcggtgcagcacgcaggtcactacgccgtctctgcatggcgccgtcgtccggactcgtggctagcgctgtgttggcatggacgcatggtcgcgtacggcgtaccgcgctacatgtcgccatgcgcagtgcgagtgcgtgtcaggtcgcgcgcatgcggagtttgtgcggaccgggcgtttttccgtccaaatgactttcggacacttctaaagaagaaagatgagagattagctgtgttaatcggtagggagcttgctttgatcccgacgaaagaaaaatcagaaa

SEQ ID NO: 86543 - DNA, 1963 bp, Zea Mays
atctttatacgagttcctggcgaaaaaactcacaactacactagttgtggcgactcagtcacacacagacacacacgactacacgagccgccgcagccgccgagccgagctccaagcggaggagaataggagagaccaccgatccgccgtcggagatgagggaggaggcgctggagcggctgcgcggggtggtacgggacagcgccgggaagcacctctacacgtcggccatcttcctcgccgacaaggtggcggcggccacgggggaccctggcgacgtctacatgctcgcgcaggcactcttcctcggccgtcaattccgtcacgcgctccacctcctcaacaattctcgcctgctccgcgacctccggttcagattcctcgccgccaagtgcctcgaggagttgaaagagtggcatcagtgtttgttgatgcttggggatgcaaaagtggatgagcatggaaatgtccttgatcatgatgatgacagtgatatttattttgataaggacgcggaagatcatgagatcaatatcaaatcagctctatgtttcttacgtggtaaggcatatgaagcactggacaaccgtgatcttgctcgccaatggtacaaggcagctgttaaagccgatcctctgtgttatgaggctctcgaacgtcttgttgataattatatgttgacatgtgaggaagaatctgagttattatcctctctgcaatttggggaagaagatgggtggctatcatcattctactcgtgtttgatcacgaagcatgaaaaagaatatttagttgaagcaaaattcaagaaacttgaagaagaggcctgcaatattttgtcctcgagttctggtgaaacaatgaaaaacaacattgatgttttggtttgcaaagctgaatactaccaccagagtggagagtaccaaaagtgttttaaactcacatcctcgttacttgagagagaccctttccatctaaagtgcacattagttcatttggcaactgcaatggagcttggtcattccaatgatctttatcttttagcatgcaacttagtgaaggattatcctgaaaaagctctttcatggtttgctgtcggttgctattactactgtattaagaagtatgatcaagcgcgaagatacttcggcaaagctacaggtttagatgggacgtttcctcctgcttggattggtacaggcattgcctatgctgctcaagaggaaggtgaccaagcaatggctgcatttcggacggcagctcggttatttcctggatgtcatctgccaactttatacatgggcatgcaatatgtgcgaatgcacaatttcaaacttgcagagcagttcttcacacaagcaaaatccatctgcccatctgatccacttatttacaatgagttgggggttgttgcgtataatatgaaggagtaccgaaaagcagttcagttgtttgagttaacattggaccatacttcatcctctctgaatgaaatgtgggaaccaacattggtgaatcttgggcatgcacttcggaaactcaaggaatatcagaaagcagtatcatgttatgaaaaggcactcacttttccaaccaaaagtttgagtgcatttgctggtcttgcttatagttaccatcttatggataattttgaggctgccataaattattaccacaaggctctatggttgaaaccagacgaccagttttgcacagagatgctaacatatgctcttgagtccatctgtcaaagcactgctcgtagaaggcctagttgaggtttgctaatcgcaacatgctaggatattctttaccttacaagactagtagccaaattatatgtaaatttgttgttgtacaatatgtaattgctcaagttcatttcagccacttgaggctgatcgcattgtaaagccaaagttttcgatcttttaatttttatacaccccctccgttgtcatat

SEQ ID NO: 86544 - DNA, 1993 bp, Zea Mays
cgaggcatggcacaatccgttgctgaatcgatttgtttttccttcgaaacgatcctgaaccctaattcgaatgcggaactcaaatttcggtttccctcgcgtcccgcccacatcctccgcagccgccgcagccgccgagccgagctccaagcggaggagaataggagagaccaccgatccgccgtcggagatgagggaggaggcgctggagcggctgcgcggggtggtacgggacagcgccgggaagcacctctacacgtcggccatcttcctcgccgacaaggtggcggcggccacgggggaccctggcgacgtctacatgctcgcgcaggcactcttcctcggccgtcaattccgtcacgcgctccacctcctcaacaattctcgcctgctccgcgacctccggttcagattcctcgccgccaagtgcctcgaggagttgaaagagtggcatcagtgtttgttgatgcttggggatgcaaaagtggatgagcatggaaatgtccttgatcatgatgatgacagtgatatttattttgataaggacgcggaagatcatgagatcaatatcaaatcagctctatgtttcttacgtggtaaggcatatgaagcactggacaaccgtgatcttgctcgccaatggtacaaggcagctgttaaagccgatcctctgtgttatgaggctctcgaacgtcttgttgataattatatgttgacatgtgaggaagaatctgagttattatcctctctgcaatttggggaagaagatgggtggctatcatcattctactcgtgtttgatcacgaagcatgaaaaagaatatttagttgaagcaaaattcaagaaacttgaagaagaggcctgcaatattttgtcctcgagttctggtgaaacaatgaaaaacaacattgatgttttggtttgcaaagctgaatactaccaccagagtggagagtaccaaaagtgttttaaactcacatcctcgttacttgagagagaccctttccatctaaagtgcacattagttcatttggcaactgcaatggagcttggtcattccaatgatctttatcttttagcatgcaacttagtgaaggattatcctgaaaaagctctttcatggtttgctgtcggttgctattactactgtattaagaagtatgatcaagcgcgaagatacttcggcaaagctacaggtttagatgggacgtttcctcctgcttggattggtacaggcattgcctatgctgctcaagaggaaggtgaccaagcaatggctgcatttcggacggcagctcggttatttcctggatgtcatctgccaactttatacatgggcatgcaatatgtgcgaatgcacaatttcaaacttgcagagcagttcttcacacaagcaaaatccatctgcccatctgatccacttatttacaatgagttgggggttgttgcgtataatatgaaggagtaccgaaaagcagttcagttgtttgagttaacattggaccatacttcatcctctctgaatgaaatgtgggaaccaacattggtgaatcttgggcatgcacttcggaaactcaaggaatatcagaaagcagtatcatgttatgaaaaggcactcacttttccaaccaaaagtttgagtgcatttgctggtcttgcttatagttaccatcttatggataattttgaggctgccataaattattaccacaaggctctatggttgaaaccagacgaccagttttgcacagagatgctaacatatgctcttgagtccatctgtcaaagcactgctcgtagaaggcctagttgaggtttgctaatcgcaacatgctaggatattctttaccttacaagactagtagccaaattatatgtaaatttgttgttgtacaatatgtaattgctcaagttcatttcagccacttgaggctgatcgcattgtaaagccaaagttttcgatcttttaatttttatacaccccctccgttgt

SEQ ID NO: 86545 - DNA, 1802 bp, Zea Mays
cagtccttcagatctcccctcccttcctgtccttctctattatagcaagcaaagcgccactcgcaatcgcaacccaccaccctcaggtcaggcctcgctcagatctctccgccctcgtcccccctcacaccccaaaccctcggcccgcctctctcgtcaacgccgcccgacgagagcgatggcggcctcgccggccgcggccgcggcactcctcatcctcttcgccctcggggcggccggcggagtggcggccgacggctccgaccaccggtacaagatgtacgagcccgtcccgctctacgccaacaaggtcggccccttccacaatcccagtgagacatatcgttacttcgacctgcccttctgctctcctgagaaagtgaaggagaagagcgaggcccttggcgaggtcctcaatggggatcggctagttgatgcgccttacaagcttgatttccgttcggaagttgagtccaaggcggtttgctcaaagaagcttaccaaagaggatgtagtgaagttccggaatgcagtagcgaaggactactacttccagatgtactatgatgatctcccactgtggggcttcattggtaaagttgagaagggaggcaaggccgatccgagcgagtggaagtactacctgtacaggcacatcatcttcgatatcctgtacaacaacgaccgggtgattgaaatcaatgtgcacactgatcagagtgctttggttgacctgacggaggataaggagacaaatgtggatttcctgtactcagtcaagtggaaggagacaccaacaccatttgagaagaggatggagaagtactccagctcctccaacatgccgcaccacctggaggttcattggttctcaattataaactcttgtgttactgtcctcctcctcacagggttccttgcaacaatcctcatgcgagtattgaagaatgattttgtcaagtatgcccatgatgaggaagcagctgatgaccaggaagagtctggatggaagtatattcatggtgacgtcttccggttcccaaagaataagtcgctattttccgctgctcttggcacaggaactcaattatttgcactcacaacctttatatttcttcttgcacttgttggagtattctacccttacaaccgtggtgcactatttactgcattggttgtcatctatgcactcacttcaggaattgctggatacgttgctacctctttttattctcagctggaggggacaaactgggtgaggaacttgctattgacaggatgcctgttctgtggacctctcttactgacattttgcttcttgaacactgttgctattgcttatagtgcaacagcagcactgccctttggcactatctgtgtcattgtgctcatctggaccttggtcacgtttcctttgcttgttttgggtggtattgctggtaaaaacagcaaaagtgagttccaagctccttgccgtaccacaaaataccccagggagattcctccacttccctggtaccggagaaccattccacagatggctatggctgggttcttgcctttcagcgccatatacattgagctatactacatctttgctagtgtttggggccacaggatctacacaatctacagcattctgtttattgtcttcatcatcctccttattgtcaccgcgttcatcactgttgcactgacatacttccagcttgctgctgaagaccatgagtggtggtggaggtatgctgttttcctctaaatcttgcttttgaatgtatacttatgtaagtgtgctgacactt

SEQ ID NO: 86546 - DNA, 2608 bp, Zea Mays
cagtccttcagatctcccctcccttcctgtccttctctattatagcaagcaaagcgccactcgcaatcgcaacccaccaccctcaggtcaggcctcgctcagatctctccgccctcgtcccccctcacaccccaaaccctcggcccgcctctctcgtcaacgccgcccgacgagagcgatggcggcctcgccggccgcggccgcggcactcctcatcctcttcgccctcggggcggccggcggagtggcggccgacggctccgaccaccggtacaagatgtacgagcccgtcccgctctacgccaacaaggtcggccccttccacaatcccagtgagacatatcgttacttcgacctgcccttctgctctcctgagaaagtgaaggagaagagcgaggcccttggcgaggtcctcaatggggatcggctagttgatgcgccttacaagcttgatttccgttcggaagttgagtccaaggcggtttgctcaaagaagcttaccaaagaggatgtagtgaagttccggaatgcagtagcgaaggactactacttccagatgtactatgatgatctcccactgtggggcttcattggtaaagttgagaagggaggcaaggccgatccgagcgagtggaagtactacctgtacaggcacatcatcttcgatatcctgtacaacaacgaccgggtgattgaaatcaatgtgcacactgatcagagtgctttggttgacctgacggaggataaggagacaaatgtggatttcctgtactcagtcaagtggaaggagacaccaacaccatttgagaagaggatggagaagtactccagctcctccaacatgccgcaccacctggaggttcattggttctcaattataaactcttgtgttactgtcctcctcctcacagggttccttgcaacaatcctcatgcgagtattgaagaatgattttgtcaagtatgcccatgatgaggaagcagctgatgaccaggaagagtctggatggaagtatattcatggtgacgtcttccggttcccaaagaataagtcgctattttccgctgctcttggcacaggaactcaattatttgcactcacaacctttatatttcttcttgcacttgttggagtattctacccttacaaccgtggtgcactatttactgcattggttgtcatctatgcactcacttcaggaattgctggatacgttgctacctctttttattctcagctggaggggacaaactgggtgaggaacttgctattgacaggatgcctgttctgtggacctctcttactgacattttgcttcttgaacactgttgctattgcttatagtgcaacagcagcactgccctttggcactatctgtgtcattgtgctcatctggaccttggtcacgtttcctttgcttgttttgggtggtattgctggtaaaaacagcaaaagtgagttccaagctccttgccgtaccacaaaataccccagggagattcctccacttccctggtaccggagaaccattccacagatggctatggctgggttcttgcctttcagcgccatatacattgagctatactacatctttgctagtgtttggggccacaggatctacacaatctacagcattctgtttattgtcttcatcatcctccttattgtcaccgcgttcatcactgttgcactgacatacttccagcttgctgctgaagaccatgagtggtggtggaggtcattcctttgcggaggatcaactgggtttttcgtgtacggctactgcctgtactactactatgcgcgatccgacatgtctggcttcatgcagacatctttcttctttggctacatggcctgcatctgctatgcattcttcttgatgctcgggatggtgggcttccgcgccgccctgttctttgtccgccacatatacaaatcaatcaagtgtgaatgagctgttgctggggagacgaagagcagcagagttgtacccgtttttggtgccccaccgagaggtcccagatatagaaaaggttagctctcgcatgcgacaggagcagctagagattgccatgtttcagagtaggccaattatttataggaacaggtaatgaacctataaatttgttctgtttttgtgactgctgtgataaaaagaccgtctgttccttcgtcctatgtatcatctcctagtgacgtcagacagcactataactttgttggaaccgtgacatgcctgaatatctgtggaaaaagaaacccgtgttatgttgttatatatgttctctaaagcatagaataatagaagtgtagacctctagtgtggcaggttcatctgtacgtgtatcctcttcgttcttgttcactgcggagtgttggaatttatacatatccccagacttttggtactgttgtatttgcattacttccagcgatgctttcttaggattgtggacctattggttctttaaacgtggtggctgattcgcttccttcgactgagctcgcatcttcggtacgttgttttcttctgacctcgatggttcccaatttggtttcagcttacacgcgtcgaagacccgggtaactgtcaggaaaacga

SEQ ID NO: 86547 - DNA, 1223 bp, Zea Mays
ggaaaggaaaggaggtcgcgtcgcgtcgccgttgccgtcttgccgccaacgccagcccaacccaccaggtccccactgtatatatgagccgtgcccgcatgtgtgttaagcccagccaacacaagtcaagtcggagcccgcaggtgtcgacaccgcgcgccgggagccggaagaagggtggggggtgagctgtggaccatgagcgcgaccgggcgagccccgtgcggcctgccgcgcatcggcctgggcacggcggtgcagggcccgcggccggaccccgtccgcgccgcggtgctgcgcgccatccagctcggctaccgccacttcgacacggccgcgcactacgccaccgaggcgcccatcggggaggccgccgccgaggccgtgcgcacggggctcgtcgcctcccgcgaggacctcttcgtcacgtccaaggtctggtgcgccgacgcgcaccgggacagggtgctcccggccctccgccggacgctcagcaatctccagatggaatacgtggacctgtacatggtgcactggcccgtgaccatgaaggccgggaggttcacggcccccttcacgcccgaggacttcgagccgttcgacatgcgggccgtgtgggaggccatggaggagtgccaccgcctgggcctggccaaggccatcggcgtgtgcaacttctcctgcaagaagctcgagaccctgctctccttcgccaccatccctcccgtggtcaatcaggttgagatcaacccggtgtgcctgaggtgggtgtacgagcagggcgactgcctgatcgtgaagagcttcgacgaggggcggatgaaggagaacctggacatcgtggactgggagctgagcgaggaggagaggcagcgcatcagcaagatcccccagcggaagatcaaccagggccgtcgctacgtctccgagcacgggccctacaagtccttcgaggagctatgggacggcgagatatgatatgagtaaacgttacgtcggcgccccgctaggcggctgccttgcgtgacggagcaacgagctccccgtcgtgacagtgagcggctgctttgtgtggttttatgtcgtgccatctgtgcaacaaaaagtgatgcttagtgtcacagtatgtgtgaaataaattaaaaaggattttctggttacgccggtcaatgcgtgccactgccctgccaccagcccaccaccgcagggttggcagcgggacc

SEQ ID NO: 86548 - DNA, 1394 bp, Zea Mays
gttaagcccagccaacacaagtcaagtcggagcccgcaggtgtcgacaccgcgcgccgggagccggaagaagggtggggggtgagctgtggaccatgagcgcgaccgggcgagccccgtgcggcctgccgcgcatcggcctgggcacggcggtgcagggcccgcggccggaccccgtccgcgccgcggtgctgcgcgccatccagctcggctaccgccacttcgacacggccgcgcactacgccaccgaggcgcccatcggggaggccgccgccgaggccgtgcgcacggggctcgtcgcctcccgcgaggacctcttcgtcacgtccaaggtctggtgcgccgacgcgcaccgggacagggtgctcccggccctccgccggacgctcagcaatctccagatggaatacgtggacctgtacatggtgcactggcccgtgaccatgaaggccgggaggttcacggcccccttcacgcccgaggacttcgagccgttcgacatgcgggccgtgtgggaggccatggaggagtgccaccgcctgggcctggccaaggccatcggcgtgtgcaacttctcctgcaagaagctcgagaccctgctctccttcgccaccatccctcccgtggtcaatcaggttgagatcaacccggtgtggcagcagcggaagctgagggagttctgcagggcgaagggcatccagctatgcgcctactcgcccctgggcgccaagggcacgcactggggcagcgactcggtgatggactccggcgtcctgcacgagatcgccaagtccaagggcaagaccgtggcacaggtgtgcctgaggtgggtgtacgagcagggcgactgcctgatcgtgaagagcttcgacgaggggcggatgaaggagaacctggacatcgtggactgggagctgagcgaggaggagaggcagcgcatcagcaagatcccccagcggaagatcaaccagggccgtcgctacgtctccgagcacgggccctacaagtccttcgaggagctatgggacggcgagatatgatatgagtaaacgttacgtcggcgccccgctaggcggctgccttgcgtgacggagcaacgagctccccgtcgtgacagtgagcggctgctttgtgtggttttatgtcgtgccatctgtgcaacaaaaagtgatgcttagtgtcacagtatgtgtgaaataaattaaaaaggattttctggttacgccggtcaatgcgtgccactgccctgccaccagcccaccaccgcagggttggcagcgggaccatgacgccaccgggagatccgctcgccgcacgcacatcggcctgcgcttggcggtggccggagcccatccgcctcgcatctacacctatatacccagaaaaaaaataaaa

SEQ ID NO: 86549 - DNA, 555 bp, Zea Mays
atgcccaccaggtcgcccagcgcgtgggcggggtcgtggtggaggcagctcggctcggggcacacgaacacgcgcttccggggcgcgccgccgcctgcaccacctcctgtgccgctgctgttattagcgtcggcggcgccgccgccgccgccagcagcagcagcaggaggcggcggcgcccgcttcacgagccgccacggcaccttgtggcgccgccggtgcatctgcaggttctgctcgcgctggaacccctgcccgcagatctcgcacacgtacctgtccgactccagcagcgtccgcggcgacagcgccaccacctccgcatcggggtccggagtgccgggagggcgcctcttgcgcttggcgggggacggctgctgctcggtgaggcaggaggaggagggaggtggtggcggtggctgccgctgctgggacgcggaaggggacgacgaggaggtggaggaggagaccaacatttggtggtggctcttgaccagcagtgccatgagcttgcttcttttaagggagtcctggccaagcaagcaattaagctaa

SEQ ID NO: 86550 - DNA, 283 bp, Zea Mays
ctttcaggtgtgtggtcaaaggcactcttcgagttcgagccgccgtgctttcttcctgctactattggtggtaagtgcaaaaaaagagagggcaattggtatccgtgtagctggaaactgcagctcccatcgtcaggaacgaacagtccctgaactgcatggttgccgtcgcagctgctgctgctgctgtcttttccaaggaattttttttacgctgctccaaacagtgccgacattgtcatgccacggtcaccgcacgtcagtgtttcacacccatcgtcag

SEQ ID NO: 86551 - DNA, 2572 bp, Zea Mays
ctctcctcgtctcctacctcgcccaatcgcccgtttcacctccatccccttccgttgcccaattttactccgagtgagatccatatataaccaggcaaccaccgctgccggtctatctgcctctctcttcccctccctctctggaaccagggtggttgtcaagcggtgttggagttgggagtccttgccattggtacaagagcaagaagcaaggacagggaggggcgagaggaggaagaaagcgagggacactagaaaggtgcttgctttgtttccagttgcttcttctctctccctgggcgggagagaaagaagcaggagagatatgggcgagatggtcgtggccgggtatggcatggacaaggctctgcgggccagcgtcagcttcgacacgccatgcggcgcgctgctgcgcgagcttgagcaaatatggacagagattggggagcgtgaacaagataaagatcgcatgttccttgaactggaaacagagtgcatgcgtgtgtaccgtagaaaggttgatagtgccaatgctgagagagcccagctccgtcagtcactgatggccaaagaagcagagcttaaagctctagttgcttctatcggggaaaatggcccacgatttacggtggatgaaaagcacacatcgttgaaagatcaacttgctgcagtggcacctcttttggaagatcttagagtaaagaaacaagacagagtcaaacaaatctcaaatgtgcaatgtcaaatcgagaagataaaagcacaaatttctgatcacaattatcaggacagtgatggttccatcaaacaacttaacgatgaccatgacttatcgaccagaagaatttctgatcttcaaatgcaactgcgtaatctacagaaggagaagtccgatcgtcttcagaaggtttttatatatgtggatgaagtgcacagcctatgtgcagtgcttgggatggattttccaaagactgtaaaagaggtccacccgagtttgcatggatccaactctgaaaattcaacaaatattagtgatagcactcttgaaggtcttactcagactatcctgaagctcaaagcagaaaagaagacaagagttttaaagttgcaagagactgtagaaaaacttcacaagttatggaatctgatggagtcaactgagaaagagaggatacacttctctgaagtagctgctattcttggatctactgaggaagagatcaattctccaggcattctgtcattggagacaattcagaagactgaagaggaagtcgaaaagctaactgtacaaaaaactagtagaatgaaggagcttgttctcaagaaaaggttagaactagaaggcatctgtagaaatgcacacatggagcctgatatgagcacagcaccagagaagatcaccgcgctgattgattccggtttagtggatccttgcgaactcctttccagcattgaagtgcaaataacaaaagcaaatgaagagtccttaacgaggaaagatatcatggagagagtggataaatggctatcagcttgtgatgaagagacttggcttgaggaatataaccaagatgataataggtatagtgctggcaggggtgcccacttgaatcttaagcgtgcagagaaggcaaggataactgtccaaaagattccaactatgattgacagcttgatagccaaaacttttgcatgggaggatgaaagaaatgtgccatttttatatgatgggattcgtttggttgccattttggaagagcaaaaactcagaagggcacaaagggaggaagagaagagacgcagccgggatcagaggaagctgcacagtttattgcttaaggagaaggagttgattttcgggtccaaacctagtcctagaaagacaagcagcttcaataggaggaccagcaaccaccatccaaacgcaaatggcgctggattcatgactccggtgccacgccgagtttcagctggcagtgccaccccagagcttctgaccccacgctcgtattctggccggtacaacaactacttcaaggagaacaggcgcctgacagctgcaccactgaacttctcagttggttccaaggaggatagcatgtcatccttcgcatccatcagtggctcggaacctgattcgccattgtttttgcactaagtgttggttagggaggagacttcttggtgagaagggtggatagcctcaagatcggaccattgtgtgtgtgtgtgtgtggcagctgttaacattgctgattggtaacaacaggttgtgacaagtttagatgcgattgcttgtagatataatatctaacattcatggttctgctgtacttccaaatttaagttgtaagtcgtttggttaggaaggatgcaatgcccaagtgtgcaatgtatttgtttcgtgttaagtctgtatgttttgcatgtgaagaaagggtgatttttttttgtcaatgacgtagcagttcagccttcaaggttacagctacagcatcttgtcttgtactggtcgtttggatcacagctggcgtgtgctatatgggaatctaacacccatctttttgtc

SEQ ID NO: 86552 - DNA, 264 bp, Zea Mays
tccaagttaagtgtgcttggcatggagcaatttgggatgggtgaccgaccgggaaagttttctcgggtgcgcatgagtgaggacaaagtgcgcacaaaagacacgtgttggtctgtggggacaatatatgatcctagagagctgccaggagtaagtaccgccggtctagggattggacggggtgttacaagcttcccccgaagctcgctttaaacgtgatggccagcggaaagattcagagccagagaaaaaaatcagcagcag

SEQ ID NO: 86553 - DNA, 1609 bp, Zea Mays
gtctactcctcttcatcagaaatcgacgagtgatgtacgtaactgatccagccaccccggtcgagtgccacccactccacggcgccgaatcgcagataatgtagagtgcgccgcgccgtgacggcgtggatgagaaagcctccaaacctctctgtttcgggctctccgtccccggcgtccaacacccatactctccccaggttgtgtgccacacccacactcaactatatacgaaaaccgccggcgcctggcccctaggccctagtcacagacccttgttctttcttcgacgcgcccccgggcatggcgaaccgcagtgttgccatgggcttggccctcgcgttcgtggccatgaccgcgctctgttgcgcgccgggcgccgcggagttgccccggctggaccacccggccaggagcgacggatcgctgaagctgctcgtcgtcggggactggggacgcaaggggactcacaaccagtcccgggtcgccgaccagatgggaagggtcggggagaagctcgatatcgactttgttatatccaccggggacaacttctacaagaacggcctcaagggcgtgcgcgaccaggcatttgaagaatcgttcgtggatatctacacagctcaaagcttacagaagccatggtactcagttctaggaaatcatgattacaggggcaatgcgctcgcacagcttagcccagtcttgaggaagatcgacgaccgattcatttgcatgagatcgttcatcgttaacgcagaacttgtggacttcttctttgtcgacaccactccgttccaactggagtattggactcaccctggcaagcatcgttatgactggagaggggtggcgcctcgaggcaattacttagccaatttgctgaaggatctggatgtggctatgaagaaatcaactgcaaggtggaagattgtggttgggcatcacaccatgaggagtgtgagtgagcacagggacaccgaggagcttctggaattactacttccagtcctcaaggacaatggcgtcgacttctacatcaatggacacgatcactgtctggagcacattagcagcagagacagtccactccagtatttcacgagcggaggcggttccaaggcatggagaggagtcttccatccaaacaaggacaagctccgattcttctacgacgggcaagggttcatgtccctccagctgaaccaagaccaggctcactttatcttttacgacgttttcgggaacatactgtaccgatggagctcgagacatccccagtcttccacgtatctcgatgaggaataaattggattgattttgcgccattgatatgtacaaaacaccacctgccaactgtcatgtatgtgaaatgatgagtgttagacgcaaagaaggttatacaccagttagggttaaatcatctggttcagtggttcatgatggatccaagaatgcgacgattatatcatagacacgtagtgaagaacggaaagacttatgaacaaacctcaaagtctaaccaattatgcttaggcgacaaaaaaatgtctagtttccacgtaaactagccaatcaaccgtcgaagttctcaatcaaagggactatg

SEQ ID NO: 86554 - DNA, 1437 bp, Zea Mays
atcagaaatcgacgagtgatgtacgtaactgatccagccaccccggtcgagtgccacccactccacggcgccgaatcgcagataatgtagagtgcgccgcgccgtgacggcgtggatgagaaagcctccaaacctctctgtttcgggctctccgtccccggcgtccaacacccatactctccccaggttgtgtgccacacccacactcaactatatacgaaaaccgccggcgcctggcccctaggccctagtcacagacccttgttctttcttcgacgcgcccccgggcatggcgaaccgcagtgttgccatgggcttggccctcgcgttcgtggccatgaccgcgctctgttgcgcgccgggcgccgcggagttgccccggctggaccacccggccaggagcgacggatcgctgaagctgctcgtcgtcggggactggggacgcaaggggactcacaaccagtcccgggtcgccgaccagatgggaagggtcggggagaagctcgatatcgactttgttatatccaccggggacaacttctacaagaacggcctcaagggcgtgcgcgaccaggcatttgaagaatcgttcgtggatatctacacagctcaaagcttacagaagccatggtactcagctatcccttttcagttctaggaaatcatgattacaggggcaatgcgctcgcacagcttagcccagtcttgaggaagatcgacgaccgattcatttgcatgagatcgttcatcgttaacgcagaacttgtggacttcttctttgtcgacaccactccgttccaactggagtattggactcaccctggcaagcatcgttatgactggagaggggtggcgcctcgaggcaattacttagccaatttgctgaaggatctggatgtggctatgaagaaatcaactgcaaggtggaagattgtggttgggcatcacaccatgaggagtgtgagtgagcacagggacaccgaggagcttctggaattactacttccagtcctcaaggacaatggcgtcgacttctacatcaatggacacgatcactgtctggagcacattagcagcagagacagtccactccagtatttcacgagcggaggcggttccaaggcatggagaggagtcttccatccaaacaaggacaagctccgattcttctacgacgggcaagggttcatgtccctccagctgaaccaagaccaggctcactttatcttttacgacgttttcgggaacatactgtaccgatggagctcgagacatccccagtcttccacgtatctcgatgaggaataaattggattgattttgcgccattgatatgtacaaaacaccacctgccaactgtcatgtatgtgaaatgatgagtgttagacgcaaagaaggttatacaccagttagggttaaatcatctggttcagtggt

SEQ ID NO: 86555 - DNA, 1767 bp, Zea Mays
cccccgtcaatgcttgcaagacagaagacacctgacctgatctgaccaggcagatcgagtggcttgccgtcgcgtgcaaccgcaaccgccgctggtattatatagagacccctattacatatatcggccgctgtggcgcttgtcgtcgatcgttccatcgaccggcggccggccagcctagctcttggctcttgctccgatcggatcgagcgccggacaagtcaaggcagccgtacgtacgacgatggcgcagggcagccgcagcgctgccgtgcccgccgcagcgtccttcttcgcccttctcgccgtggcggccccgctgctcctgtgctgcgcgccggccgccgcggagctggccaggctggagcacccgcccaaggacggcggctcgctcagcctgctcgtcgtcggcgactggggccgaaagggcacgttcaaccagtccagggtcgcccatcagatgggcagggttggggagcagctcagcatcgacttcgtcatatccaccggcgacaacttctacgagaacggcctgacgggcacggatgacgaggcgttcgagcagtctttcaccgatatctacacggcgaagagcctgcagaagccgtggtacctggtgctgggaaaccatgactacaggggtgacgcgctcgcgcagctgagcccggtcctgcggaagatcgacagccggttcatttgcatcaaatcattcgtcgtcaacgcagaaatcgtggagttcttcttcgttgacaccaccccgtttcaactcaagtactggactcaccctaaggacgatcactacgactggagaggggtggcgcctcgggaaaactacataaacaatctgctcaaggatttggacggggccatgaagacatcgactgcggcgtggaaggttgccgtgggccaccataccatgaggagtgtcagtgatcatggtgacaccaaggagctactgcagctactgcttccagtcctccaggccaacggcgtcgatttctacatcaacgggcatgaccactgcctggaacacatcagcagcagagacagcccaatccagtacttcacaagcggaggcggttccaaggcatggagaggagtgcagaaccccaccgaagatgacctcaagttcttctacgacgggcaaggcttcatgtccctccagctagaccgtagccaagccaagttcaccttttacgatgtcgacgggaaggcgctgtacagttacacacggtcgagcctgatggaaacaggccaccacctccaagcctccggctacgtcaacgaggaatgaagcaggggcgagtcagcatgcagcgctggagaactgagatcgatgcagttcaagcgtacgtataaattctcgagtgcttgatgtggttcatctgtcaagggcaacaacagttaggtttatatgtgtgcccttgcatctctcgacatctgtcactgccgtccggtactatttggggtcatgccatcgattcgaaaacatgacatggtaggggcagccatgatgtagcaaaaaaaaaaatagtgcaaatattcattatcgaggagttaaaacattaattgtgtggacagcggccgagcataggaccaaaatcagcagggggcaatcaacagattatgtaaaaattacatggttcagtggtgcgacaataaagacacagtatatatatggaaatatatcgtatgcaatcaagcgatgtgctacaccctatcaaacttcttcgctgactgttgtccttatacctaaaacctagtacc

SEQ ID NO: 86556 - DNA, 825 bp, Zea Mays
gccgctgtggcgcttgtcgtcgatcgttccatcgaccggcggccggccagcctagctcttggctcttgctccgatcggatcgagcgccggacaagtcaaggcagccgtacgtacgacgatggcgcagggcagccgcagcgctgccgtgcccgccgcagcgtccttcttcgcccttctcgccgtggcggccccgctgctcctgtgctgcgcgccggccgccgcggagctggccaggctggagcacccgcccaaggacggcggctcgctcagcctgctcgtcgtcggcgactggggccgaaagggcacgttcaaccagtccagggtcgcccatcagatgggcagggttggggagcagctcagcatcgacttcgtcatatccaccggcgacaacttctacgagaacggcctgacgggcacggatgacgaggcgttcgagcagtctttcaccgatatctacacggcgaagagcctgcagaagccgtggtacctggtgctgggaaaccatgactacaggggtgacgcgctcgcgcagctgagcccggtcctgcggaagatcgacagccggttcatttgcatcaaatcattcgtcgtcaacgcaggttcaaagatcgcgcgtgtttttttcttcgatctggattaaggaacagattaggcatgcgaaagctgtaacgtattacatatcattgccatccttctactagaaatcgtggagttcttcttcgttgacaccaccccgtttcaactcaagtactggactcaccctaaggacgatcactacgactggagaggggtggcgcctcgggaaaactacataaacaatctgct

SEQ ID NO: 86557 - DNA, 1772 bp, Zea Mays
gctgtaacctgcaaaccgcgaagcagcaaaagccatcgattggccggcgcgcattccctagcttttctctttctaaaagattatatatagatctctagctagctgtatctgccactatctatatccccgaagagagctgtttgacaaaaaatctagctatttgctctatcatatatcatacgattttagccgctatctgccgttgcagtagtagcctaatttaactgactattagctgtttcaagagatagatccataatcacttggtttggccacagatttaaaacactaccaaaagtccaaaagaatacatatgttcctgctggtggtgccgtgtggtggtgcacacgtactgcacacacagcgcatgcactcggctgtaccaccacccaagcaaaagcgccgctgcttgctagctagtgctcggtgatgacagctgaacagcgactgctttcccatgtgtagatgggcagggttggggagcagctcagcatcgacttcgtcatatccaccggcgacaacttctacgagaacggcctgacgggcacggatgacgaggcgttcgagcagtctttcaccgatatctacacggcgaagagcctgcagaagccgtggtacctggtgctgggaaaccatgactacaggggtgacgcgctcgcgcagctgagcccggtcctgcggaagatcgacagccggttcatttgcatcaaatcattcgtcgtcaacgcagaaatcgtggagttcttcttcgttgacaccaccccgtttcaactcaagtactggactcaccctaaggacgatcactacgactggagaggggtggcgcctcgggaaaactacataaacaatctgctcaaggatttggacggggccatgaagacatcgactgcggcgtggaaggttgccgtgggccaccataccatgaggagtgtcagtgatcatggtgacaccaaggagctactgcagctactgcttccagtcctccaggccaacggcgtcgatttctacatcaacgggcatgaccactgcctggaacacatcagcagcagagacagcccaatccagtacttcacaagcggaggcggttccaaggcatggagaggagtgcagaaccccaccgaagatgacctcaagttcttctacgacgggcaaggcttcatgtccctccagctagaccgtagccaagccaagttcaccttttacgatgtcgacgggaaggcgctgtacagttacacacggtcgagcctgatggaaacaggccaccacctccaagcctccggctacgtcaacgaggaatgaagcaggggcgagtcagcatgcagcgctggagaactgagatcgatgcagttcaagcgtacgtataaattctcgagtgcttgatgtggttcatctgtcaagggcaacaacagttaggtttatatgtgtgcccttgcatctctcgacatctgtcactgccgtccggtactatttggggtcatgccatcgattcgaaaacatgacatggtaggggcagccatgatgtagcaaaaaaaaaaatagtgcaaatattcattatcgaggagttaaaacattaattgtgtggacagcggccgagcataggaccaaaatcagcagggggcaatcaacagattatgtaaaaattacatggttcagtggtgcgacaataaagacacagtatatatatggaaatatatcgtatgcaatcaagcgatgtgctacaccctatcaaacttcttcgctgactgttgtccttatacctaaaacctagtacc

SEQ ID NO: 86558 - DNA, 2681 bp, Zea Mays
gtctactactgccgctagccgcgcctgcttgctgcttccccctctctttttctctcgtctccattccagcatcgccaccaccagtccaccattccagcatcatcaccaccacccgagacaaaaaaataaaaaaaacccaacaacactgtaacgagaatatacggcaaaaccctagatctctctctcctctcggcattgctggctggggtgtgcggcggcccgcagtggtgagggacgcacggcgatggcctccgccgccgccgtcatcgcctcgccggcccccggcgccgccgcggccgagcccgccgcctggctcgtcgacgagcgcgacggcttcatcacctggctgcgcggcgagttcgccgccgccaacgccatcgtcgaccacctcatcttccacctccgctccatcagcgagccgggcgagtacgaccacgtcttctctctcgtccagcagcgccgccaccactggccgcacgtgatccacatgcagcagttcttccccgtcagcgacatcgccttcgcgctccagcaagccagctggcgccgccacgcgccgccggcccaggcgctcggggctggcgcgtcgccggccgcgctcccgccgccgcctcctcgccgcgcctcgttctcgcagtcccatcactcccaccagcaccatcgccacggcgcccactaccgccccgatccagcgcgcggcgccgccactgcggcgactggatccgagaaagatggacgtgaagttcataataacaaggaagggagggggctgaaagaagcggggaatgtcgtcgatactaaaagtttgcggttggattctcctataactgatgaaggtgaggaaaaatcaaagctgcaagctgtttctgaagaaagtagcaaaatggttgcaacccctgtagagtattcaaccaatgagatcattgatggcagcatggttaatactgttgaagggctcaaggtttatgaaggattactaaatgtaaccgaggcaaataagatcctttccttagtcaatgaaacaagagcctcttaccggcgaggggggcttgaagctagacagaaggttattattgctaaaagaccaatgaagggtcatggacgggaaattgttcagctgggtgttcctattattgatggccctcctgatgatgaaaatctaagagagacaagggtggaggcgattcctgggctgctgaatgatctgtttgatcgcttgtctcagcaggaaattatacccttcaagccagattattgtgtcattgacatcttcaatgagggagactattctcatcctcaccaatccccttcttggtatggtagacctctttgtaccctctgcttaacagattgtgatatggtgtttggccgttatatatcaggagaaaaaggcgatcatagaggtcctctgaagctctcgctcgcaactgggtcacttctactcatgcaagggagaagtattgactgtgcaaagcgagctattcctgctacacgcaagcagagagtcatactgaattttggaaagtccgtagcaagaaagcacatcccagctgaaagtgcctggtctactccattaacacctcctatgccctggggtcagtcatcaaggccagttaacggctcccgccatccccaaagtcctaaacactatgggtatgctccaatcagcggtgtacttccagcaccaccagttggagctcatcacgtcccaccgtctgatgggatgcagccactatttgtagcccctgctcctatttctgctgcagccatacctttcacgccaactgttcccttgcaaaatacatcagctgcttggatacaagaagttactccaaggcctgctccgccacgattccctggtcctggtacgggggtcttccttcctccgggatcaggccaccctctgcctcatcagatgatgccggcttctcatggccatggcgaacccaactctccacaaggttcatccgcttacctgcatagtaaggtcaatggcaaggagacatctaatggcaatctttctcctaagaactcgccgagaaagacatcttgcacagccgaggagaaaccagaatgcaatgggagcttaaatggtggtggcggctctgcggatgagaagtcaactgtaggtatggagcagcagaatggtgttcagaagaatgttgggagtagcaaggtccagccacatggacatgcaactgaatagagtgggacttatagtacatagacaacagaaaactgaagagacgaggagttgaattttgggccgtgaatttgcggtagtgcgcagagctcagcagaggtctttgctggcactctcttgtccctgacaagaatcatcgtgtcaagttctcgagacggaaaacatttgtcctaaactttgtagctgcactgttgcaaatctagattatcgacattgcctcgggttatcatctgctatcagagtcgtgggcagtgaaaaccatttctgatggtttatgttgcccaaatattatcgacctagtacatctgaaatgggaaaaaatgtggacgaaatttcttgcatcgaactctcttgtgatcgactggcctttgatgcatctgtagcagactacttatggtagactgttacttgctgatagatggttctgctacaggtgtttgctgtggatgtcaattataacctagactgtgaacttatc

SEQ ID NO: 86559 - DNA, 2688 bp, Zea Mays
cacgtcagttctcaccttccactccatttccgcccgtggcgacgtggcgtggtggtggtgggtgctttggcgtgcagaagtcaaccgagcgcagcgcccgccccctcccttccccgcccgccggccaacaacaacaaaaaaaagcaccgaaatccgccccgcgctcacccggaggccggatccagcgacgatgttcggcgactccgacggatccaaggacgccagcgccgccgcgcccgggtccaactccaacccgccggagccgcctttcccaaaccgggagctcacgctcagcagctacctctgcgacaaggcgccgccagccgcggcggcggggccatcctcgccgcccaaccccgaggcggctgccccggcagacgatgccgcggccagcgccaagctgtgcgtcgagcgggatttcctccacctctccgcgcccaagcgcggggatccgccaggcgacgactcctccgtggtcgggggtaagaagccccgcctagactcgctccagctctcgctctccctctccaccgacgcgcccgcgccgccgccggcctcgcagcagccgtcctcctccctgcctccgccgcagctcgcgtcactcctcccggtcgatggcgatctgcggggcgcgaccgcggccgcagccgccgcggtgcctgccacgcctgtcgcgccgccccccaggcggacctacagcgccaacacggggcgcacccggagcatcaactccgacgacatgtcctactcctactcggtgttctcgcacaacccgagctgctccctcacgcacaactccaccgacatctacgccgccggggagggcaccaacggctccgtccacagccggttcaacttccgccccatgggggacggcagcgtcgccttcgccccggcgcagctcaaggagggcacctcgtccttcttccccacggagctccccgcgaggatggcagccgcgctcagcgctggcgccagctttgacgccagccatggggggatgcactcgtcacggcctcataggatcctgcgggagatcgtgtcggaccctgtgccagccatggctcaggccctgcaggattttccgagtgaaaccctggaggtgctgcgggagacagtgcggggtatggttgatgctccggagaagagggatgagctgtcgagcctgcagcggaagctggagcgtcgctcggacctgactgccgaggtgttggggcgggcaaacaagacgcagctggagatcctggtggccatcaaaaccggcatggccacttttgtcactggtaagggccgagtctccagcagcgagcttgtggagatgtttctgatgacacggtgccgcaacctgaactgcaagagtgccgtccctgtggacgactgcgagtgcaagatttgctccaccaagaagggcttctgcagtgcgtgtatgtgcccggtgtgccagaagtttgattgtgctgcgaatacatgcagctgggttggatgtgatgtctgctcccattggtgccatgctgcgtgcgcgctagagaagaacttgataaggccaggtccgacattgaagggggcgatgggcacgaccgagatgcagttccagtgcctcggctgcaaccatgcttctgagatgtttgggtttgttaaggaggtgttcaattgctgtgctcagaactggagtgctgagacgcagattaaagagctagactttgttaggaagatatttgctgctagtgaggatttcgaggggaaggggctccatgccaaggcagaagaggtcctcagcatgcttgtaaagaaactcatttctcctcctgatgcgacgaacaccatgctacaattctttaaatatggtgtaacagactgttctgttactggtagcaagtcaaaaggaatactggcggctcagacgagtaaatctacagatatgcttcatcttcagaccccaaccatcactccgccaaaatccccgtttaacttcaagccgagcacctccattcttgattcacagatcgatgtgctcaaggccagcccaaaaccactccctatagaaccccatttcagctccagctcaaaggacgatgactcctccagccttgagaccatcgtgaagtgcaaggaagctgaggcgaaactgttccagaaactggccgatgatgccaggaaggaggtagacagctaccgtcagatcgtccgcaccaagacccagaaactagaggaggagtacgccacgaaggtggcaaagctgtgcttccaggagacggaggagaagaggaggaagaaagttgaagagctgaagacgctcgagaactcgcactacgactaccacaagatgaagctgcggatgcagaccgaaatccagggcttgctcgagcggatggaagccacaaagaagatgtgggtataggctcctgttaacaatttcatgttgctgctgcttaatgtttcgggtatagactccagctaacaactgcctgatgctgctgctgctgctgaatacctgagatttggtgttgttcgttaggagagtgtccattgttgtattttttttcaccatcttgtgttataatctaaatgctgttgtaacttgcaagtggatgcctagccttgcgcttgctgatataacttggcagcattcactcagttaatcacttcagggttgttccgagttcgaagtaccatttggccaaagaaaaa

SEQ ID NO: 86560 - DNA, 1181 bp, Zea Mays
ttgaataaagagagatatctcgagctcttgcacatccaactgctgtacaaaaattcttgcacgcacacgaaacaataggaagaatctggtcaagcaagagaccgccacggtctgatctgcatcagccatgggccgatcatcaatttaaagagaatgaaagcctgacggattaaccagtctagtcgacggatcagttcacacacacttcacagcctgagcgtcagatcgggctcctcccgggcatgcacggcgacgccgccagccgagttcaggacggcgctccccgccggcgcaggagcgacggcggtggctggtctgaagctcccgggccagccgaagctcatctccgcctcgtcggccacgaggaatggcatggggctcagcagcccccgcgcgggcctcagctcggcggcgtcctcgtgccgctgctgctgctccgggtgcgctgccatcgatgcgtgcgcctggatgccgatggggtacaggccggagccgtacagcggcagggacgccacgtcggcgtagtagccgtaggggcccgccgcgtcgagccgcagcgtgcgccgggccagcgtgcgctcccgccggtgcgcgttctggtgcccgcccagcgcctgcgagctgaagaacttgcgctggcagtagttgcacgtgaacacgcgcgacggctcgcgggcgaccgccgccgcgtcggccggcgtgccgccgctgttactgttgtcggtagtgctcgactcggcggcggcggcggcggcgacggtgagcgtgaggtcgaggcttaccaggccggaggagttggacgcctcctggctgctgatctcggacagctcgtcgcacggttcttggcacatctccttgctgttcatccctgactgatggcaacaatcttttcacccgtcacttgatttctctgctgtctcaccgtacctgcatgcagacaacacgccagctcattctagtaagcacttgtgtgtgaatgcctctaataagaataagatgccctgatccaaatatgtaatcacgactcttctgtgaacatggcaggttaggtaaggcaggaacaccgatgcatggatccatgatgaagatatgaaacatgctttgtgttcaagggtagagaaaagcaactttatgagatgtgttcatgcacaaaacttggaggggggatcccagtggtttaa

SEQ ID NO: 86561 - DNA, 679 bp, Zea Mays
gcgacgtcgaacgacgaggtggcgcacatgatggccaaggcggacacgaacgacgacgacgacttcgtcagcctggctgagttcgcgacgctaaacgctacaatggtcggcgagacggcgatcgggccgcctacgaggacctccggctgccaagccgtccgcgtcttcaacgccaacaacggcactatctccgccgccgagctcgtacgtgtcctctgcagcctcggcaagtccacgttcgttgtgcattgttgtcgcatgattgagggcgtcgaccagaacgttggcagcttcatcttcttcaaggagttcaagatcatgatggcgggggcggttgcttcgctaagatcgtgtaggttaggttcccccacccctttttcttgcgcccgtcaaatctgctactccacccattcccaacctaccatcctttcacagccgagcatacggcatgtgcagttttaggaaagtatatatagaagcaacgatcgaaaagatctagtttcccttgtctactaatgattgggaaccacgacggatattacttttgcaagattggagcctagaaagcagttgttgtgattcagtcagagctaacttctgttctaatctgcttcctgttctagttctagagatgtggatgcttttgagtctatgaatgaaagagcaaacagttggaacc

SEQ ID NO: 86562 - DNA, 698 bp, Zea Mays
tttcgcggcgacttggaccaggctcccctcctctcaaatttgggctggtatcctcacaaacggcccgttaaggccttcctctctcctttctttcccgttcgcccttggtccgcctcgcttcttctcgtgccgcctccccctgtttccacgagctggggttttagcggcgaaaagagggaaaagaaagccagcgagagagacggaaaggggaagatgagccggagcctggggatcccggtgaagttgctccatgaggcagcgggtcacgtggtgacggtggagctcaagaccggcgaagtgtaccgggggtcattggtcgagtgcgaggataactggaattgccagctcgagaacataaccttcactgccaaggatgggaaggtttcgcagctggagcacgtcttcatcagaggaagcagagtgagatttatgattatacctgatatgctcaagaacgctcccatgttcaagcgcttggaagcgaggattaggggcaaaggatcagctattggagttggtcgtggacgtgctgttgcaatgcgtgctcgctgtgaggaggtagattctaaatggcggcttttctcgtctggctgaggttgttgtctgatctcaggacgctgtctcgtagtaaaaactgtcctaatgtaaaattcaacggcttaaaggagtatgcaacctgtgattgaatgtaatgtatt

SEQ ID NO: 86563 - DNA, 901 bp, Zea Mays
tttcgcggcgacttggaccaggctcccctcctctcaaatttgggctggtatcctcacaaacggcccgttaaggccttcctctctcctttctttcccgttcgcccttggtccgcctcgcttcttctcgtgccgcctccccctgtttccacgagctggggttttagcggcgaaaagagggaaaagaaagccagcgagagagacggaaaggggaagatgagccggagcctggggatcccggtgaagttgctccatgaggcagcgggtcacgtggtgacggtggagctcaagaccggcgaagtgtaccgggggtcattggtcgagtgcgaggataactggaattgccagctcgagaacataaccttcactgccaaggatgggaaggtttcgcagctggagcacgtcttcatcagaggaagcagagtgagatttatgattatacctgatatgctcaagaacgctcccatgttcaagcgcttggaagcgaggattaggggcaaaggatcagctattggagttggtcgtggacgtgctgttgcaatgcgtgctcgggctgctgctggtcgtggtggtggtcctgttggacgaggtagcgcgcctcctgtgaggaggtagattctaaatggcggcttttctcgtctggctgaggttgttgtctgatctcaggacgctgtctcgtagtaaaaactgtcctaatgtaaaattcaacggcttaaaggagtatgcaacctgtgattgaatgtaatgtattgactgtatttggtagcttgcatacagtctttttccttgctctatttggaattttggatggctggatcgaagaagcaaggtgctagaggttctctgccctcgacatacaccctcagtggcgaatgcagcttaagggctagtttttggcagccta

SEQ ID NO: 86564 - DNA, 1153 bp, Zea Mays
ctatcgcatatgacaccatctagtacaggcaagaactcggagcttccagatgagccagctaatgtgcccccctctcagtttggcagccaaaagcaagctcatgttcctataactcaagcttttgaggatgatcagggaatgaattgtgtggcaatatctgcagtagagtgggcagatacccttacaaatatcagttttgggcacttactgacagaagcatctaaaggcactcatttggactgcggaggaactagtgtaaaaaatcctttgttttttgagaatccatgcagctatgactcgtttgatgctgctgttgcccttcatgcttctcgttatcaagcatcagagcagtcagcccatgctccccattcaaccatatggggagcagaagagacatgtgatgagttcatctttaatttgtcagcctccaggaagcaagaaggttcaaacactcttagcagctctcctgatactaacaatggagttcatccctcaaattctgaaggatttaaaggttttcttgaggacttggctggagaggctgatgctgataatcattataataatgatgatgccaaagacgaggagttttatgccaaatcaccacctcgaaatgatgaaactaatgagttgaaggatcaatctttagctgacatatattggcctgattcactcggaccactggacttggacataccgtctgtgagatacgaagccgatgacatacttataggggacagtcaaaatagttggaaccgtctaatggcaaatagcctcgacgcatttcgaaacctgtcattcttctcagataaaaatgactctattccatcgatcatgtagaactggggatgttagggcttccacgatttgttttggtaaggaaggaacctccaatctgccattcccggaagagggagctttatattgcccaagtgagctgtttgctgctgatacgggtatccaacagatgcggatttgatgcatatgagaggggctcgtgctgttgtaagataacataacggatgtgctaacctgtactccatgtaaatgtgttgcccttgtacataaagcacatacaagcacttgggtacaggtaaagcttcctggggccgagtataagataagtttgcctaatgaccatcaaatgattgtg

SEQ ID NO: 86565 - DNA, 1544 bp, Zea Mays
caacagtctcggcctctcctcccggcttcctcacacggcactccagccgctagccctcactcaaccagacaaccagtacaccaccgccaccaagcccgggccgaataactctgccgggcaaccgccgcccttcgccggcaaagaacgcccaccagatccaccccggcctgctatggagtccgcggtgaacccgaaggcgtacccgctggctgatgcgcagctgacgatgggtatcctcgatatcatccagcaggccgccaactacaagcagctcaagaagggagcgaacgaagcgacgaaaaccctgaatagggggatatcggagttcgttgtgatggcggcggacacggagcctctcgagatcctgctccacctccccttgttagccgaggataagaacgtcccatatgtatttgttccatcgaaacaagctcttggccgtgcttgtggtgtgacaagacccgtcattgcttgctcagtgaccagcaatgagggtagccagctgaaacaacagatacagggtctcaaggactcgattgagaagcttctcatctgatttacctaagatctttcagtgtgatgggcctcggcgacacatttttcagaggcttggactggtgatggtgtcttgtttacattacgctttccaaactatatttgaacactgctaagtcaatcatatttgaattgtgcttcactttatatttgtgattgtcatgtatcctcaagatgcctctgtatcgtggtggctggtttctgttctggatccgaccacatcattgtgatggctgattgctatgtttttgagtattggatcgttcccatcgattaacttctgtgatgacgaatcagcgcaaataaagtcacttatatgtgatcacgagcagcgcaaataaagttgtatgtgggggcataaataactgaactgaagaattggttcattagaacagccccagatcgcaggtaacaaaaacattctggttcctacactcggataacttggtagggaaccaaactggatacaaagcagcctggcctgggcggttgattgcttggctgtatacttttggtcctggcatagttcgccagttgcaaaatgctctgtagtgttcgttcggttagtctggattggattggagggcaggaaccattccagctacaatgtaatacaaatgtgtgaaccattctaaccctaaactattctaggcactggttccggagcaatcaagcggggccttcggcagcctaggaactactgttccaggccgagattcagtgcatccgggtgtgtcactctttccaggcagagaactgttccaggccgggatttaaaggcctgttcggcaggctaggattgaagaaggctgttttataaacacagaacatatttgaacaatctgacactgctgctttataaacgcagtgaataatcaaccaatctgacagtccatcattctttctaccataggatagcatgctgccgagacaatctggcagtcttgctaccaaaataagacaatcaagaaacatagaacaatcttgat

SEQ ID NO: 86566 - DNA, 859 bp, Zea Mays
caacagtctcggcctctcctcccggcttcctcacacggcactccagccgctagccctcactcaaccagacaaccagtacaccaccgccaccaagcccgggccgaataactctgccgggcaaccgccgcccttcgccggcaaagaacgcccaccagatccaccccggcctgctatggagtccgcggtgaacccgaaggcgtacccgctggctgatgcgcagctgacgatgggtatcctcgatatcatccagcaggccgccaactacaagcagctcaagaagggagcgaacgaagcgacgaaaaccctgaatagggggatatcggagttcgttgtgatggcggcggacacggagcctctcgagatcctgctccacctccccttgttagccgaggataagaacgtcccatatgtatttgttccatcgaaacaagctcttggccgtgcttgtggtgtgacaagacccgtcattgcttgctcagtgaccagcaatgagggtagccagctgaaacaacagatacagggtctcaaggactcgattgagaagcttctcatctgatttaccaaagacctttcagggtgatgggcctcagcgacacattttttcagaggcttggactggtgatggtgtcttgtttactagattttacgtctttccaaactatgtttgaacactgttaggtcgaccatacttgaattgtgcttatatatttgactgtcatgtattctgaagatgcatctgcattctggtgccttggtttatgttgagattctgaccatcattgtaacggttgattactatgagtttgagaattggatcgattggatggttgcaatttccatgtgaccaggacagataaaa

SEQ ID NO: 86567 - DNA, 1301 bp, Zea Mays
aagagcgcggcaacaccgcgcatatacatggaatgagaagggctcagctacagccaagcgaataaatatactgtgaattaaccctaacctaaccgaagcgtccgcctcccacacacgggactccggccgcgagaacccgcgactaagccaggacgcgggacgccacagccaccggcctcagcatccgcctaggacgaataacccttctaggctgccgccgccgccgtccttagctcatattgttgccggcgaagagcgccccagatccgcccctgctatggagtcggcggtgaacccgaaggcgtacccgctggctgatgcgcagctgacgataggtatcatcgatatcatccagcaggccgccaactacaagcagctcaagaagggagctaacgaagcgacgaagaccctgaacagggggatatcggagttcgtagtgatggcggcggacacggagccgctcgagatcctcctccacctccccttgctagctgaggataagaacgtgccatatgtatttgttccatcgaaacaagctcttggccgtgcttgtggtgtgacaaggcctgtcattgcttgctcagtgaccagcaatgagggtagccagctgaaacaacagatacagggtctcaaggtacttagggtgcgtttggttgcaatgacaggacgggatgagacgagacgattcctcaaatagggttgtttggttcagggtcaggggttgggacaggactatcccagtgttgtccccagttatccctcaaaattggagggacgagagagaacgccaggggacgtccctgtcctggctgtcccgcaaccaaacacacccttaatgtcctgtcttgtagtagttgttaatacttgatatgttgctatttttatatatgaatattatgattctgtaatatttatatgctgtttaatagtcagtcttatcatgttcttgtatgcatatctctgtggattaaacaaatttaatgaaattgcaggactcgattgagaagcttctcatctgatttaccaaagacctttcagggtgatgggcctcagcgacacattttttcagaggcttggactggtgatggtgtcttgtttactagattttacgtctttccaaactatgtttgaacactgttaggtcgaccatacttgaattgtgcttatatatttgactgtcatgtattctgaagatgcatctgcattctggtgccttggtttatgttgagattctgaccatcattgtaacggttgattactatgagtttgagaattggatcgattggatggttgcaatttcc

SEQ ID NO: 86568 - DNA, 964 bp, Zea Mays
aagagcgcggcaacaccgcgcatatacatggaatgagaagggctcagctacagccaagcgaataaatatactgtgaattaaccctaacctaaccgaagcgtccgcctcccacacacgggactccggccgcgagaacccgcgactaagccaggacgcgggacgccacagccaccggcctcagcatccgcctaggacgaataacccttctaggctgccgccgccgccgtccttagctcatattgttgccggcgaagagcgccccagatccgcccctgctatggagtcggcggtgaacccgaaggcgtacccgctggctgatgcgcagctgacgataggtatcatcgatatcatccagcaggccgccaactacaagcagctcaagaagggagctaacgaagcgacgaagaccctgaacagggggatatcggagttcgtagtgatggcggcggacacggagccgctcgagatcctcctccacctccccttgctagctgaggataagaacgtgccatatgtatttgttccatcgaaacaagctcttggccgtgcttgtggtgtgacaaggcctgtcattgcttgctcagtgaccagcaatgagggtagccagctgaaacaacagatacagggtctcaaggactcgattgagaagcttctcatctgatttaccaaagacctttcagggtgatgggcctcagcgacacattttttcagaggcttggactggtgatggtgtcttgtttactagattttacgtctttccaaactatgtttgaacactgttaggtcgaccatacttgaattgtgcttatatatttgactgtcatgtattctgaagatgcatctgcattctggtgccttggtttatgttgagattctgaccatcattgtaacggttgattactatgagtttgagaattggatcgattggatggttgcaatttccatgtgaccaggacagataaaa

SEQ ID NO: 86569 - DNA, 1850 bp, Zea Mays
agccttttagtttccttctcccaccgcggccccggaaaatttcccccttccccgtagcgaaaccctagccgccgcgccaaaaccaaatcccgccacgcccgaaaatttccggtggtttccttgccgcgaatcgatcgattccgagcgattcggttgatttgatcgatttcgggtgcttcgcgattgattaggccggcaaagccgccaatccttgtgatctctcgaaggggtagagcgcggtcgaccgtcggtcatgtcgaggtgcttcccctacccgccgcctgtgtacttgggaaacccagtggccgtggccgaggcggagtcgaccgctaagcttcagaaagaaagggaaagggctcacaagaagaaagataaaaggagtgacaagaaagctccccaactgggtgagacgtccaaacattcaaagcacaaccataagaagagaaagctcgaagatgtcagcacaggtgatcaggagcccaaaaaagtattcaaagaatcagctgagctattggagaagagtggactctcagaagagcatggagctccttgttttgtacagatgtttcgtgactctcctgagagctcgcaggacagcagcaagagaagaaaggctgtcctgcccagtcccagccaagctaagaatggtaacatcattcgcatcaagctaaaaagtaaccaagatccccaatcagttcttttggagaaaccaagggttctggagcaaccactggtccaacaaatgagttcggtttcatccctgtcgagcaaacaaaattcaatcaatcgtaaggtgaatgtgagatctacagctggccagcagtgggtcaatggtgactcccaagcagtacaaaaatctttggttacagaaaccctgtcaagggcaatgcagagaactgtcccccagcctgcagtgaaggtcacacgtcgggctgatccccagctatctgttaaggcgccggttggaagatctgacctacctccaaagttttcgggaagtgtgggcccttcacctgctagagtgaccggaagattttgtcctgcacctgttaagacgcaacagagaattgagcatccaccttccatggtgtcacagagagttgatcctcaggcgaaggtgtcacagaaggaaatgggatctgctgtttgcctgccacaagctccacatcctcctgttttgcagaaacccaaggacttgcctgttcctaaacagcgggagcctatcaactctttgccaaaagaagagccttgtttctctggaaggactgtggaagcagatcaagggaaggaagctaagctctcccgttcagatcggaagaaaatccacaaaactgagaagaaaaataagaagttcagagatctgtttgttacctggaatccgctattgatggagaatgaaggttcagatttgggtggtcaagactggctgttcagcagtacaagaagctctgatggtagcatggctcaacccacagtacctgatggtttagggccgattcatccgatggtgcagcagcagccttatttgcaacccagggcaacttttttgccggaccttcatatctatcagctgccttatgttgtaccgttttaagtctgttcgtagatgagaagtagatgagatgttgtgaaggagctgtgtggatgtgggatataatggttccctgccgcaattttccagctttgttagcaagattgtaatgtaatgttggttaattattttgctcatttatgtaagcagttgaactgcaaaatcttctttctaggcagttactgtaatacgacacgcaatatttgtttttatccataataatagccttgccacaatataaatggattaattgcagcaa

SEQ ID NO: 86570 - DNA, 1844 bp, Zea Mays
agccttttagtttccttctcccaccgcggccccggaaaatttcccccttccccgtagcgaaaccctagccgccgcgccaaaaccaaatcccgccacgcccgaaaatttccggtggtttccttgccgcgaatcgatcgattccgagcgattcggttgatttgatcgatttcgggtgcttcgcgattgattaggccggcaaagccgccaatccttgtgatctctcgaaggggtagagcgcggtcgaccgtcggtcatgtcgaggtgcttcccctacccgccgcctgtgtacttgggaaacccagtggccgtggccgaggcggagtcgaccgctaagaaagaaagggaaagggctcacaagaagaaagataaaaggagtgacaagaaagctccccaactgggtgagacgtccaaacattcaaagcacaaccataagaagagaaagctcgaagatgtcagcacaggtgatcaggagcccaaaaaagtattcaaagaatcagctgagctattggagaagagtggactctcagaagagcatggagctccttgttttgtacagatgtttcgtgactctcctgagagctcgcaggacagcagcaagagaagaaaggctgtcctgcccagtcccagccaagctaagaatggtaacatcattcgcatcaagctaaaaagtaaccaagatccccaatcagttcttttggagaaaccaagggttctggagcaaccactggtccaacaaatgagttcggtttcatccctgtcgagcaaacaaaattcaatcaatcgtaaggtgaatgtgagatctacagctggccagcagtgggtcaatggtgactcccaagcagtacaaaaatctttggttacagaaaccctgtcaagggcaatgcagagaactgtcccccagcctgcagtgaaggtcacacgtcgggctgatccccagctatctgttaaggcgccggttggaagatctgacctacctccaaagttttcgggaagtgtgggcccttcacctgctagagtgaccggaagattttgtcctgcacctgttaagacgcaacagagaattgagcatccaccttccatggtgtcacagagagttgatcctcaggcgaaggtgtcacagaaggaaatgggatctgctgtttgcctgccacaagctccacatcctcctgttttgcagaaacccaaggacttgcctgttcctaaacagcgggagcctatcaactctttgccaaaagaagagccttgtttctctggaaggactgtggaagcagatcaagggaaggaagctaagctctcccgttcagatcggaagaaaatccacaaaactgagaagaaaaataagaagttcagagatctgtttgttacctggaatccgctattgatggagaatgaaggttcagatttgggtggtcaagactggctgttcagcagtacaagaagctctgatggtagcatggctcaacccacagtacctgatggtttagggccgattcatccgatggtgcagcagcagccttatttgcaacccagggcaacttttttgccggaccttcatatctatcagctgccttatgttgtaccgttttaagtctgttcgtagatgagaagtagatgagatgttgtgaaggagctgtgtggatgtgggatataatggttccctgccgcaattttccagctttgttagcaagattgtaatgtaatgttggttaattattttgctcatttatgtaagcagttgaactgcaaaatcttctttctaggcagttactgtaatacgacacgcaatatttgtttttatccataataatagccttgccacaatataaatggattaattgcagcaa

SEQ ID NO: 86571 - DNA, 513 bp, Zea Mays
atgggagacgtgcacaagaggagcagtgagccggagaagccgacaacggcgaagtggaggtcctggggaggaagcatgcaggagtggacgtcgtggggactgaggaggggggagtcaattgcacgacctgcacggggggtggggacggtggaggccgcgcgaatgggggaggccaccagcgggagaggcgcgaccggtggggcggtggaggctgtccgccgatggaggatgcgaccgctctgccgcgtggtgaaggctggcaagcggcggaggcgctggaggccgcgggtgtgctggatattagggtttttcatttgccgtggaacatgggcctcatacaatttggcagatgggcctcatacgccgcatgtgtcttcgtcttcaaggagcatgcacgggacgatagacaaggttataccttgtcagagaccgggatcatgcacagagacgggcgatgagggccctacctgtcagagaccagacgggcagaacacaaaaagggggtacagctaa

SEQ ID NO: 86572 - DNA, 1263 bp, Zea Mays
acaccaagcattctaagagcacactacaactccgagactctgcaacaatgccttcgaagtgtttgagagagatttgggcgctttttgagtcgttactctatcattttgttgttgcactctcttctttgcatttgtgcgtgttgttgttgcgctgtgctcttgtgtgcgtactctactccctcccttactctaatttggattgtgatcgtcttgtgtaaggtatgagaggctccaaattgtggagattcctcacaaaatgatattcatgatataaggaagaactgtggtactcaagtttgatcttcggatcacttgagaggggttgagtgcaaccctcatccattgggatgcacgcttgaccgaaccacgggataaaaattgtcgtgtctctggtctctttactttactgcaatttgagtcttcgtttgaggttatacttcactttcatattgctcctagtttaattcacatctcaagagagcaatgaagtggagagtctttctttctctcctatactctcaaacttggttttatttcctctaattcatattatagaccaagtttgtgttgttttgagcgaaatttgtaggatcgcctattcaacccctcctctgggtgctctcacctgcacctcacccattcatctcccataagatgatattggtgatcgcgtgcttttccaaggcggtctccagcagatcttgtatatggtcgtgtaaaacatcggtttgcattgtagaatatattgttcacataattaagtttggaataggatatgtgatggaatgtaagatgagcaagctgctgaagaccgcctaaatattgggaaagatgttacaacaatactccaaaaacatcctcgatatatagaaccctcttattagatattaatatttttcctttcctttttctccaacggtcttccttctccaaccacgtactcctctgtcctttgtgtggtctcagtcgcataggaataggatagtcaggatcttgggcccgactctagtgtagcacggatatctggcgaccatcacagagcgagcattgacgaccaaccaagtctccctaaggtgtagatcaagcatcacattgtggctatggggacaacaaggtcatgaactggtgacgtcctcaatagcaagggccagccacgtcgggttgttgtgagtatctaggcctctaagtagtgttttggtaattaatgacaattatgtgtggactaactatttcttagagaaaataagaatgcaagttgatcca

SEQ ID NO: 86573 - DNA, 381 bp, Zea Mays
atgaagaatcggctgccgttggcgttgggtctgctgttagctcctgcactgcatagtgtgctaccttgggactccctgaactcgtcggcgaacttggtgcccagatggaggccctgcattgccggaaccgatggggtcgccgccttataccatgaagcccttgatgttgcggtggaacacagtgctgtcgtagtagccgctagcgcagagggccaagaagttctccgccgtgcggggcacctggttgcagaacacctcacacttaatgtcgcccaagttcatatgcagcattaccgactaccacacagccaccgtgaatcggggacttggcacgggatagggtatgataggatgcaggttgagcgaggggacgaatcatag

SEQ ID NO: 86574 - DNA, 2199 bp, Zea Mays
tcgatctctcgttcgacctcgtctctcttccccttctgctttgccttttccccttcctctctcccctgtcccccctccgtcccagccgagcgagaaagcgaaggggccaaaaaagccgcaccggcttccttcccccacccgaagagatggaactgttctacgaactgctcctcacggcggcggtcaccctcctcgctgccctcctgctcgccacgctcttcgcagccaatgattcccatcgccggaccgatcgcgccgcagccgcgatcgccgaggaggtggcggaggaggagaggatcatcgaggtcgacgaggtgatgcgtagcgaagggatggcggcggtggcgccgtcggaggcggatgggtgggttgaggcggagaaggcgccggcggtggtcgtcgcggaggtgaaggagccggagagcttgcccgaggaggagggggttcccgtgaaggctgttcgggaggtgcgccttgctgcggaagtggaggagggggaggacggtggtggcggcgtgaagcggcctgatttgacctccgcaactgttgtggcggcggtgggtgctgaagcgagccagctggtgtcgggcgctgaggttgtgcctaaggaggtttctggtgcggcagggttggaggaacgaaccgtgcaggatgttgtggtgaaccagtatgatctgggtgctgaggttgctcttgttcccgttgaagttctcgaagcaggaccggacaagcagggagtagaagttgttggagttgcgcaagtgcctcccttggaaacagaagctgctgaagtgaaacagcaccatctcgttgccgaagcggctcctgctgaagatgttcttgacgtgggattagtggacaagagtgtacgagctatcgaagtgaggcccaacgaattggattccgagactgttcttgaagagattcttgatgcggtattggaggaggaggagcaagtagagcatgaattgcctgctggggctgctccacaaccagttctcgatgtgccattggcagggaagggagagcttaaacatcatcagcccgttgaagaagctgccgaggtacacgaggatgtgcagtgcaagcaggaagctgagtgtgaggcccaaacagttgatcaacaacaagaactggttcctgaagaggagtcggtcgcaggaaaaaatgatgatgtgaatgttatccatgaatgtagcttcagtgatgaagtggttaccgaattgcctgtgggggaagtgacatcgcaagggctgccgaaggatgaccctgaggcagacatggagtttgaggagtgggaagggatcgagaggagtgaagtggagaagaggtttggtgcggctgcagcatttgctgctagtggggctggggcggctgccctgtcaaagctcgatagtgatgtgcagctgcagcttcaaggtctcctcaaggttgccattgacggtccctgttatgactcagcgcagccacttacactgagaccctcatctcgtgcaaaatggtctgcttggcagaagttagggaatatgaaccctgagattgctatggagaaatacatgaatcttttatcagaaacaattccagggtggatgatgaatgaaaccttgtgtatgcatgttgtactctaggacacagagaacactggcagtttacctgcggagactatcttaacaacgatggcttctacaagtgatcaacggagcaatcaagggaatgaagataattctagcataggtgaaggtcatccaataacttcccctaacccagagaaaggccagagctctgatatcccaactgaatgaaggcaacactgataaaacatttcttgcatcagtggttccagcccattgctgggagcattatcgatgcgttcgtcataaaattagatttgtacagttgtggcggttgtgctgtgatgatgttggttcgtgtatgtatatgactgtatatatatgtttgtgctaatactactgctgcggcctgtatatttggccagttgacgacttgtcaccggttgtggtcagtagtaaatgatgagtggtaactgtgtttgttaccacgtagtttggaacgaagaacttgagcggttcaggtaaaagacttgtcgcattacaaattgttgaacttatccgatgtagggttgcattgcatagttggactgctatgctttcgagagaaaaaaaaaaacttgtcacgctc

SEQ ID NO: 86575 - DNA, 2178 bp, Zea Mays
tcgatctctcgttcgacctcgtctctcttccccttctgctttgccttttccccttcctctctcccctgtcccccctccgtcccagccgagcgagaaagcgaaggggccaaaaaagccgcaccggcttccttcccccacccgaagagatggaactgttctacgaactgctcctcacggcggcggtcaccctcctcgctgccctcctgctcgccacgctcttcgcagccaatgattcccatcgccggaccgatcgcgccgcagccgcgatcgccgaggaggtggcggaggaggagaggatcatcgaggtcgacgaggtgatgcgtagcgaagggatggcggcggtggcgccgtcggaggcggatgggtgggttgaggcggagaaggcgccggcggtggtcgtcgcggaggtgaaggagccggagagcttgcccgaggaggagggggttcccgtgaaggctgttcgggaggtgcgccttgctgcggaagtggaggagggggaggacggtggtggcggcgtgaagcggcctgatttgacctccgcaactgttgtggcggcggtgggtgctgaagcgagccagctggtgtcgggcgctgaggttgtgcctaaggaggtttctggtgcggcagggttggaggaacgaaccgtgcaggatgttgtggtgaaccagtatgatctgggtgctgaggttgctcttgttcccgttgaagttctcgaagcaggaccggacaagcagggagtagaagttgttggagttgcgcaagtgcctcccttggaaacagaagctgctgaagtgaaacagcaccatctcgttgccgaagcggctcctgctgaagatgttcttgacgtgggattagtggacaagagtgtacgagctatcgaagtgaggcccaacgaattggattccgagactgttcttgaagagattcttgatgcggtattggaggaggaggagcaagtagagcatgaattgcctgctggggctgctccacaaccagttctcgatgtgccattggcagggaagggagagcttaaacatcatcagcccgttgaagaagctgccgaggtacacgaggatgtgcagtgcaagcaggaagctgagtgtgaggcccaaacagttgatcaacaacaagaactggttcctgaagaggagtcggtcgcaggaaaaaatgatgatgtgaatgttatccatgaatgtagcttcagtgatgaagtggttaccgaattgcctgtgggggaagtgacatcgcaagggctgccgaaggatgaccctgaggcagacatggagtttgaggagtgggaagggatcgagaggagtgaagtggagaagaggtttggtgcggctgcagcatttgctgctagtggggctggggcggctgccctgtcaaagctcgatagtgatgtgcagctgcagcttcaaggtctcctcaaggttgccattgacggtccctgttatgactcagcgcagccacttacactgagaccctcatctcgtgcaaaatggtctgcttggcagaagttagggaatatgaaccctgagattgctatggagaaatacatgaatcttttatcagaaacaattccagggtggatgatgaatgaaaccttggacacagagaacactggcagtttacctgcggagactatcttaacaacgatggcttctacaagtgatcaacggagcaatcaagggaatgaagataattctagcataggtgaaggtcatccaataacttcccctaacccagagaaaggccagagctctgatatcccaactgaatgaaggcaacactgataaaacatttcttgcatcagtggttccagcccattgctgggagcattatcgatgcgttcgtcataaaattagatttgtacagttgtggcggttgtgctgtgatgatgttggttcgtgtatgtatatgactgtatatatatgtttgtgctaatactactgctgcggcctgtatatttggccagttgacgacttgtcaccggttgtggtcagtagtaaatgatgagtggtaactgtgtttgttaccacgtagtttggaacgaagaacttgagcggttcaggtaaaagacttgtcgcattacaaattgttgaacttatccgatgtagggttgcattgcatagttggactgctatgctttcgagagaaaaaaaaaaacttgtcacgctc

SEQ ID NO: 86576 - DNA, 1219 bp, Zea Mays
aactaccgaagttatcccagaataatatatgtgctataaaatatggagtgatgttcagaagtattgaataaaaaattcaacatatctaactgacttacatgatgtaacatgacagatatcttgcgactatttctgctagactgatgtgtatctctgtatgttttggagctgtcaattttccactaactatatttttgtatgcccacaagtaaagctagagttaaccttgcaataattgtataatgaccatgtatatgtatttttgttcgcaacaattccaggtaatatagaagtatgaaatagagttaaggaaaaacatgagatatcctataagagagaaattgtcaatccttctattttggacatattttgtcagttatcaccataccaagtgatttaaagcataaaagaaatggtgaaatagtagacattgtagaaattatctgctagggttgatctgtgcctagatattctgtaaagatacgcacatagagtgctaatccacaataattactatcaatgatcatttattgttttctcaggtctgcttggcagaagttagggaatatgaaccctgagattgctatggagaaatacatgaatcttttatcagaaacaattccagggtggatgatgaatgaaaccttggacacagagaacactggcagtttacctgcggagactatcttaacaacgatggcttctacaagtgatcaacggagcaatcaagggaatgaagataattctagcataggtgaaggtcatccaataacttcccctaacccagagaaaggccagagctctgatatcccaactgaatgaaggcaacactgataaaacatttcttgcatcagtggttccagcccattgctgggagcattatcgatgcgttcgtcataaaattagatttgtacagttgtggcggttgtgctgtgatgatgttggttcgtgtatgtatatgactgtatatatatgtttgtgctaatactactgctgcggcctgtatatttggccagttgacgacttgtcaccggttgtggtcagtagtaaatgatgagtggtaactgtgtttgttaccacgtagtttggaacgaagaacttgagcggttcaggtaaaagacttgtcgcattacaaattgttgaacttatccgatgtagggttgcattgcatagttggactgctatgctttcgagagaaaaaaaaaaacttgtcacgctc

SEQ ID NO: 86577 - DNA, 130 bp, Zea Mays
tgggacttaaggttatctccatgtgagaacttaagattatctttttataaactatttattaatattggtaacttagttgcaattttcgatcgacactacaatatttttatgaatttaattgtattttaat

SEQ ID NO: 86578 - DNA, 813 bp, Zea Mays
gccaactgccatgtgaccaccggctatatatagcgatgcacagctccccttgctctgatcacgacccgcgtgtaggtgtagcactctccatcctcattgctaactgctcgattctcctccatacccttgtgcacgcacagccgacactgcagtgaggaacttgaacagaggaagaagcccggctgagcgctctctcgtctagctagctgcgctgcggcgatgaagatgcatcgcttcgctctgcgtggcctggggtttctcgtcctgtggatgctgcattgcggaagcgagctcgccgcggcggtgcctccaggggccagccggagccggcgctgtacaacggaggcattctcaagttcggcagcagcggcggagacccggacggataccgcacgacggagaccggcgtcttctccccggcgttcgtggtgtacaacctcaacaagaccaccatgtacaccttctcatgctgggtgaagctggaaggcgcgtactcggctctgatcaccgcgaggctggcgccggacaacaccggcgccaggtgcatcgccacggtcgttgccaggagcgactgctgggccttcgtcaagggcggattcgtcctggactggccgacgcagacctcggtcatcttctttcaggtacgcgcgcaagcacgcatcggatgcatgcgctggctgaattggcaaattgaggttttcattatatattgttcatgcgcgcgccctgcagaatgctgacaagacgcccatgaagatcaccgtggcgagcgggtcgctgcagccgttcaccacggaccagtgggcgatgcac

SEQ ID NO: 86579 - DNA, 2089 bp, Zea Mays
gccaactgccatgtgaccaccggctatatatagcgatgcacagctccccttgctctgatcacgacccgcgtgtaggtgtagcactctccatcctcattgctaactgctcgattctcctccatacccttgtgcacgcacagccgacactgcagtgaggaacttgaacagaggaagaagcccggctgagcgctctctcgtctagctagctgcgctgcggcgatgaagatgcatcgcttcgctctgcgtggcctggggtttctcgtcctgtggatgctgcattgcggaagcgagctcgccgcggcggtgcctccagtgcaggggccagccggagccggcgctgtacaacggaggcattctcaagttcggcagcagcggcggagacccggacggataccgcacgacggagaccggcgtcttctccccggcgttcgtggtgtacaacctcaacaagaccaccatgtacaccttctcatgctgggtgaagctggaaggcgcgtactcggctctgatcaccgcgaggctggcgccggacaacaccggcgccaggtgcatcgccacggtcgttgccaggagcgactgctgggccttcgtcaagggcggattcgtcctggactggccgacgcagacctcggtcatcttctttcagaatgctgacaagacgcccatgaagatcaccgtggcgagcgggtcgctgcagccgttcaccacggaccagtgggcgatgcaccagcaggataccatccggaagaggaggaagcgcgtggcgaccatccacgtggccgacccgcagggcgcccgcgtggtgggcgcgtccgtgtcggtgcagcagacggccaaggacttcccgatcggttcggcgatcgcgtccaccatccttgggaaccaggcgtaccagcagtggttcgtggaccggttcaacgcggcggtgttcgaggacgagctcaagtggtactcgacggagcccatgtcggggcagctgcgcttcgacgtgccggaccagatgctggcgttcgtgcggtcgcaccgcgtgatggtgcgcggccacaacatcttctgggagaaccaggacgcgacgccccggtgggtgaagaacctgacggcggacgacctccgcgccgccgtcaacacgcgcatccagagcctcatgacccgctaccgcggcgagttcgcgcactgggacgtgaacaacgagatgctgcactacaacttctacgagcagcggctggggcccaacgcgtccgcggagttcttcagcgtggcgcaggacgccgacccgctggccacgctcttcatgaacgagtacaacgtcatcgagacctgcgacgaccccttctccaccgtcgacacgtacgtgtccaagctcaaggacctccgctccgccggcgccatcctggaagggatcggcctggagggacacttctccaagcccaacatcccgctcatgagggccatactcgacaagctcgccaccctggggctgcccatctggttcaccgagatcgacatcagcaacaagttcgacgcgcagacgcaggccgcctacctggagcaggtgctgcgggaggcatactcgcacccggccgtcagcggagtcatgctgtggacggcgctgcaccccagcgggtgctaccagatgtgcctcacggactggaacctcagcaacctgcccacgggggacgtggtcgaccgcctgctcaacgagtggcggacgctgcaggcggccggccagaccgacgcgcacggcgcctacagcttcaccggctacctgggggagtacgtcctcactgtcagctacaacaacaggacgacgcaatccaccttctcgctgtcgccgggagacgagaccaggcacatcaacgttcagatgtgatgcgccaacattatatttagggctcctcggatcggactacttattactagctgatgtagtgattgttgtggaagaagattgcacagtcaatctatgtttcttacttgtcctgtgtcaaatttagtgtaagaactggcgtccttgacagctggtatgtaaaatagtatgaccaccactattactatatataacaagagacttcactccacattaatcttc

SEQ ID NO: 86580 - DNA, 2169 bp, Zea Mays
gccaactgccatgtgaccaccggctatatatagcgatgcacagctccccttgctctgatcacgacccgcgtgtaggtgtagcactctccatcctcattgctaactgctcgattctcctccatacccttgtgcacgcacagccgacactgcagtgaggaacttgaacagaggaagaagcccggctgagcgctctctcgtctagctagctgcgctgcggcgatgaagatgcatcgcttcgctctgcgtggcctggggtttctcgtcctgtggatgctgcattgcggaagcgagctcgccgcggcggtgcctccagatggctggtacgattactccgcctacaccgactgcaggggccagccggagccggcgctgtacaacggaggcattctcaagttcggcagcagcggcggagacccggacggataccgcacgacggagaccggcgtcttctccccggcgttcgtggtgtacaacctcaacaagaccaccatgtacaccttctcatgctgggtgaagctggaaggcgcgtactcggctctgatcaccgcgaggctggcgccggacaacaccggcgccaggtgcatcgccacggtcgttgccaggagcgactgctgggccttcgtcaagggcggattcgtcctggactggccgacgcagacctcggtcatcttctttcagaatgctgacaagacgcccatgaagatcaccgtggcgagcgggtcgctgcagccgttcaccacggaccagtgggcgatgcaccagcaggataccatccggaagaggaggaagcgcgtggcgaccatccacgtggccgacccgcagggcgcccgcgtggtgggcgcgtccgtgtcggtgcagcagacggccaaggacttcccgatcggttcggcgatcgcgtccaccatccttgggaaccaggcgtaccagcagtggttcgtggaccggttcaacgcggcggtgttcgaggacgagctcaagtggtactcgacggagcccatgtcggggcagctgcgcttcgacgtgccggaccagatgctggcgttcgtgcggtcgcaccgcgtgatggtgcgcggccacaacatcttctgggagaaccaggacgcgacgccccggtgggtgaagaacctgacggcggacgacctccgcgccgccgtcaacacgcgcatccagagcctcatgacccgctaccgcggcgagttcgcgcactgggacgtgaacaacgagatgctgcactacaacttctacgagcagcggctggggcccaacgcgtccgcggagttcttcagcgtggcgcaggacgccgacccgctggccacgctcttcatgaacgagtacaacgtcatcgagacctgcgacgaccccttctccaccgtcgacacgtacgtgtccaagctcaaggacctccgctccgccggcgccatcctggaagggatcggcctggagggacacttctccaagcccaacatcccgctcatgagggccatactcgacaagctcgccaccctggggctgcccatctggttcaccgagatcgacatcagcaacaagttcgacgcgcagacgcaggccgcctacctggagcaggtgctgcgggaggcatactcgcacccggccgtcagcggagtcatgctgtggacggcgctgcaccccagcgggtgctaccagatgtgcctcacggactggaacctcagcaacctgcccacgggggacgtggtcgaccgcctgctcaacgagtggcggacgctgcaggcggccggccagaccgacgcgcacggcgcctacagcttcaccggctacctgggggagtacgtcctcactgtcagctacaacaacaggacgacgcaatccaccttctcgctgtcgccgggagacgagaccaggcacatcaacgttcagatgtgatgcgccaacattatatttagggctcctcggatcggactacttattactagctgatgtagtgattgttgtggaagaagattgcacagtcaatctatgtttcttacttgtcctgtgtcaaatttagtgtaagaactggcgtccttgacagctggtatgtaaaatagtatgaccaccactattactatatataacaagagacttcactccacattaatcttcacaagacgcataaatgagaaggggcagggccgcagcccgcaggggatc

SEQ ID NO: 86581 - DNA, 1459 bp, Zea Mays
gtccgcctctcatccctcccgttgcggccgaccatcaccaacggaagtcggcagagtgagccaaggccctgtgtgtgtgtgtgtctgccacattacctacccagatcgaaatggcgcggtgcccagctgctcatgccgctctctgctcccttgctctgctcctcctgcttccagctgcgcgggcggcgacgttcaccatgaccaacaactgcggctacacggtgtggccggggctgctgtcgggcgccggcacggcgccgctgcccacgacggggttcgcgctggcgcacggcgcgtcggcggcggtggacgcgcccgcgggctggtcgggccgcgtgtgggcgcgcacgctctgcgccgcggacgccgccaccggcaggttctcctgcgccacgggcgactgcggctcgggagccgtccagtgcaacggcggcggcgccgccccgcccgccacgctggcggagttcacgctcggcggatccggcggcctggacttcttcgacgtcagccttgtggacggctacaacgtcccgatgctcatcgtccccgcgcagggcgcgggcggtggtggcagcagcagcagcagcaacgggtccgcgggcggctcgagcaagtgcatggccaccggctgcctcgtggatctcaacggcgcgtgcccagctgatctgagggtaatggctgcgtcggcgtcggcgtccgcgtccggcgccggaggggctgtggcgtgccgcagcgcgtgcgaggcgttcgggtcgccgcagtactgctgcagtggcgcctacggaaaccccaacacgtgccgcccgtcaacctactcgcagttcttcaagaacgcttgcccgcgcgcctacagctacgcctacgacgactctacctccaccttcacgtgcgccaccggcatcagctacgccatcacattctgcccgagcaccaccagcggcaagtactccggcgagaacccgcaggccgcgggcgtgcagcccacgaacggctcgatggtctacctcggcggcgagcaactcgccacctcggtcgccgccgcggcccgtgcgtcacagctcctcctagccgccgccgccctcgccgccgtcgcgctgctctgagcttcgttcccgacgtggccgtgtgaagtcggcggctcgagtctttgtcctctttccggcgtgacggggccagcgataaaagattcgacaaccagcagagaggctcagacgagacgagtgacgacggtgctgctacgactaaccgagagaaaaaaaacaatgaaatataggtagcttatggcgtagggtttaggataactggtagcatgagttttaacctttgcattcttctccacgcttcctcgatttgttgagccagccgaaagatgtattctatatttctatccatcgttgttcgccgtgatgctatagattacagcaatgatgattatttactctttaccagttgaacatag

SEQ ID NO: 86582 - DNA, 1251 bp, Zea Mays
cctctcatccctcccgttgcggccgaccatcaccaacggaagtcggcagagtgagccaaggccctgtgtgtgtgtgtgtctgccacattacctacccagatcgaaatggcgcggtgcccagctgctcatgccgctctctgctcccttgctctgctcctcctgcttccagctgcgcgggcggcgacgttcaccatgaccaacaactgcggctacacggtgtggccggggctgctgtcgggcgccgccccgcccgccacgctggcggagttcacgctcggcggatccggcggcctggacttcttcgacgtcagccttgtggacggctacaacgtcccgatgctcatcgtccccgcgcagggcgcgggcggtggtggcagcagcagcagcagcaacgggtccgcgggcggctcgagcaagtgcatggccaccggctgcctcgtggatctcaacggcgcgtgcccagctgatctgagggtaatggctgcgtcggcgtcggcgtccgcgtccggcgccggaggggctgtggcgtgccgcagcgcgtgcgaggcgttcgggtcgccgcagtactgctgcagtggcgcctacggaaaccccaacacgtgccgcccgtcaacctactcgcagttcttcaagaacgcttgcccgcgcgcctacagctacgcctacgacgactctacctccaccttcacgtgcgccaccggcatcagctacgccatcacattctgcccgagcaccaccagcggcaagtactccggcgagaacccgcaggccgcgggcgtgcagcccacgaacggctcgatggtctacctcggcggcgagcaactcgccacctcggtcgccgccgcggcccgtgcgtcacagctcctcctagccgccgccgccctcgccgccgtcgcgctgctctgagcttcgttcccgacgtggccgtgtgaagtcggcggctcgagtctttgtcctctttccggcgtgacggggccagcgataaaagattcgacaaccagcagagaggctcagacgagacgagtgacgacggtgctgctacgactaaccgagagaaaaaaaacaatgaaatataggtagcttatggcgtagggtttaggataactggtagcatgagttttaacctttgcattcttctccacgcttcctcgatttgttgagccagccgaaagatgtattctatatttctatccatcgttgttcgccgtgatgctatagattacagcaatgatgattatttactctttacca

SEQ ID NO: 86583 - DNA, 1849 bp, Zea Mays
cactctctggcctgctgtatatatccacctccctccggcctccatttcttctcgacttgaacacggccagcgtctcatcggctgggcgtggtctacactgcacgcacacttaccaccagccaccgcaagtgaatcactagccggaagacaggccaaccccactgctagtgctaggaatctaggagcgagaacgagagaccatgtcctcagaggccagcagcgtcgtcgtcgccgacgagaatggagcggcggagacggtcggcgtcgggcggtacgtggaaatggagaaggaccaagagtcgagcgcagccaagtcgcggctctccggcctgctctggcacggcggctccgcctacgacgcttggttcagctgcgcgtccaaccaggtggctcaggtgctcctgaccctgccctactcgttctcgcaactggggatgctgagcggcatactgttccagctcctgtacgggctgatgggcagctggacggcgtacctcatcagcgttctctacgtggagtaccgggccaggaaggagagggagaaggcggacttcaggaaccatgtcatccaggttctgagattttctgaaccgcgcgcgcgtgtgcacattttctagtcgagcgatgagtcaacgacttgtcctgacgaaccgcatctgcactgcgcctgcagtggttcgaggtgctggacgggctgctcgggaggcactggaggaacgtcggcctggccttcaactgcacgttcctgctcttcggctcggtcatccagctcatcgcatgcgcaagcaacatctactacatcaacgacaagctggacaagcggacgtggacgtacatcttcggcgcctgctgcgccacgacggtgttcatcccgtcgttccacaactaccggatctggtcgttcctgggcctcgtcatgaccacctacacggcgtggtacctcgccgtcgcgtccctcatccatggccaggttgatggcgtgaagcactccgggccgaccaagatggtgctctacttcaccggggccacaaacattctctacactttcggagggcacgctgttaccgtggagatcatgcacgcgatgtggcggccgcagaagttcaaggcgatctacctgatggcgacgctgtacgtgctgacgctgacgctgccgtcggcggccagcgtgtactgggcgttcggcgaccagctgctgacccgctccaacgcgctggcgctgctcccgcgcacggcgttccgcgacgccgccgtcgtgctcatgctcgcccaccagttcatcaccttcggcttcgcctgcacgccgctctacttcgtctgggagaagctcgtcggcctgcacgactgccgcagcctctgcaggcgcgccgccgcgcgcctccccgtcgtcgtccccatctggttcctcgccatcatcttccccttcttcgggcccatcaactccgccgtcggctccctcctcgtcagcttcaccgtctacatcatcccggcgctggcgcacatgatcacgttccggtccgcaacagcccgtgagaacgcgatggagccgccgccgcggctgctggggcgttggacgggcgcgtacatgatcaacgcgttcgtggtggcgtgggtgctggtggtcggcttcggcttcggcggctgggcgagcatgacaaacttcgtccgccagatcgacaccttcggcctcttcaccaagtgctaccagtgcccgccgccaccgcccctgccgttccccggcggcggcctcggcaacatcacgatgccattcaacggcgacgggctccctcctaccccggctccttcgccggcgcattacttcttccgccaccaccggcatcacagccac

SEQ ID NO: 86584 - DNA, 2073 bp, Zea Mays
cactctctggcctgctgtatatatccacctccctccggcctccatttcttctcgacttgaacacggccagcgtctcatcggctgggcgtggtctacactgcacgcacacttaccaccagccaccgcaagtgaatcactagccggaagacaggccaaccccactgctagtgctaggaatctaggagcgagaacgagagaccatgtcctcagaggccagcagcgtcgtcgtcgccgacgagaatggagcggcggagacggtcggcgtcgggcggtacgtggaaatggagaaggaccaagagtcgagcgcagccaagtcgcggctctccggcctgctctggcacggcggctccgcctacgacgcttggttcagctgcgcgtccaaccaggtggctcaggtgctcctgaccctgccctactcgttctcgcaactggggatgctgagcggcatactgttccagctcctgtacgggctgatgggcagctggacggcgtacctcatcagcgttctctacgtggagtaccgggccaggaaggagagggagaaggcggacttcaggaaccatgtcatccagtggttcgaggtgctggacgggctgctcgggaggcactggaggaacgtcggcctggccttcaactgcacgttcctgctcttcggctcggtcatccagctcatcgcatgcgcaagcaacatctactacatcaacgacaagctggacaagcggacgtggacgtacatcttcggcgcctgctgcgccacgacggtgttcatcccgtcgttccacaactaccggatctggtcgttcctgggcctcgtcatgaccacctacacggcgtggtacctcgccgtcgcgtccctcatccatggccaggttgatggcgtgaagcactccgggccgaccaagatggtgctctacttcaccggggccacaaacattctctacactttcggagggcacgctgttaccgtggagatcatgcacgcgatgtggcggccgcagaagttcaaggcgatctacctgatggcgacgctgtacgtgctgacgctgacgctgccgtcggcggccagcgtgtactgggcgttcggcgaccagctgctgacccgctccaacgcgctggcgctgctcccgcgcacggcgttccgcgacgccgccgtcgtgctcatgctcgcccaccagttcatcaccttcggcttcgcctgcacgccgctctacttcgtctgggagaagctcgtcggcctgcacgactgccgcagcctctgcaggcgcgccgccgcgcgcctccccgtcgtcgtccccatctggttcctcgccatcatcttccccttcttcgggcccatcaactccgccgtcggctccctcctcgtcagcttcaccgtctacatcatcccggcgctggcgcacatgatcacgttccggtccgcaacagcccgtgagaacgcgatggagccgccgccgcggctgctggggcgttggacgggcgcgtacatgatcaacgcgttcgtggtggcgtgggtgctggtggtcggcttcggcttcggcggctgggcgagcatgacaaacttcgtccgccagatcgacaccttcggcctcttcaccaagtgctaccagtgcccgccgccaccgcccctgccgttccccggcggcggcctcggcaacatcacgatgccattcaacggcgacgggctccctcctaccccggctccttcgccggcgcattacttcttccgccaccaccggcatcacagccaccaccgcgggctctgatgagagacgatgaaatgaacccggcttaccaccagtagtgcgtgcgtggcacactgctgctttagtttgagctgatcccttagttaagtctagcttaattagcacctgcatgcagcatcttcgttctctcctctagcttgctggtgtcgaacgcatgctttcccggtttcagtgactttagagaccctgcctgagcctgacacgaggggagtatcactgtatcagtactagcatgcagtctcttgtgttccgggctgtgtcctggcgtggagctcaaagaaggggaatccatttctacagccgcatagag

SEQ ID NO: 86585 - DNA, 1727 bp, Zea Mays
gacttgaacacggccagcgtctcatcggctgggcgtggtctacactgcacgcacacttaccaccagccaccgcaagtgaatcactagccggaagacaggccaaccccactgctagtgctaggaatctaggagcgagaacgagagaccatgtcctcagaggccagcagcgtcgtcgtcgccgacgagaatggagcggcggagacggtcggcgtcgggcggtacgtggaaatggagaaggaccaagagtcgagcgcagccaagtcgcggctctccggcctgctctggcacggcggctccgcctacgacgcttggttcagctgcgcgtccaaccaggtggctcaggtgctcctgaccctgccctactcgttctcgcaactggggatgctgagcggcatactgttccagctcctgtacgggctgatgggcagctggacggcgtacctcatcagcgttctctacgtggagtaccgggccaggaaggagagggagaaggcggacttcaggaaccatgtcatccagtggttcgaggtgctggacgggctgctcgggaggcactggaggaacgtcggcctggccttcaactgcacgttcctgctcttcggctcggtcatccagctcatcgcatgcgcaaggtaaggttgcttgcttgctcgctcgcatggttcgccggctaactgtgtgccgcgtaagcgtacatatatactaccaaacagcaacatctactacatcaacgacaagctggacaagcggacgtggacgtacatcttcggcgcctgctgcgccacgacggtgttcatcccgtcgttccacaactaccggatctggtcgttcctgggcctcgtcatgaccacctacacggcgtggtacctcgccgtcgcgtccctcatccatggccaggtacgcaagcgtagcgttgaagcataatatgcattctgtgggcctgtggcctgtggcctgtgggtgaccggccgagacgatgtgtgtgcttctgctgctctacttgttgcaggttgatggcgtgaagcactccgggccgaccaagatggtgctctacttcaccggggccacaaacattctctacactttcggagggcacgctgttaccgtgtaaggagacaaaacacctttctttcttttttatatatgcatggtccccggaacaaagaagaagaaataacgcatcacaactgggaccaacgaaagcattggctaccatacattttgcttgcttcgtctggccattccatacagtttttgctccttggcgccatacccgtgcacaaggtcttttccggccttcaatatatctcccgtcccgtcgtctccgtctcactctcacagggcacggcaggcctatctatctcctttgatgagtttgcttgtacagtcaaaggagccactccgactactggctagtaggagagcgtgcattgctgctttacgtctacagagctcctgcgcttttgcgcttgcaaccatggagccctgactcctgagccagcctggcctggtagatgccgatacgataccccctctgcagatgcacaagcaagcatgcatggcacggacgtccaagtctctgcgtgcacgaaaagagaaaacgcaaatcaaagcagtactagcaattaattgaaaggtgactggactgaacgaacagcatcaacagtaattagtaatggtttgcacgcatatatatatacacgcagggagatcatgcacgcgatgtg

SEQ ID NO: 86586 - DNA, 1903 bp, Zea Mays
gacttgaacacggccagcgtctcatcggctgggcgtggtctacactgcacgcacacttaccaccagccaccgcaagtgaatcactagccggaagacaggccaaccccactgctagtgctaggaatctaggagcgagaacgagagaccatgtcctcagaggccagcagcgtcgtcgtcgccgacgagaatggagcggcggagacggtcggcgtcgggcggtacgtggaaatggagaaggaccaagagtcgagcgcagccaagtcgcggctctccggcctgctctggcacggcggctccgcctacgacgcttggttcagctgcgcgtccaaccaggtggctcaggtgctcctgaccctgccctactcgttctcgcaactggggatgctgagcggcatactgttccagctcctgtacgggctgatgggcagctggacggcgtacctcatcagcgttctctacgtggagtaccgggccaggaaggagagggagaaggcggacttcaggaaccatgtcatccagtggttcgaggtgctggacgggctgctcgggaggcactggaggaacgtcggcctggccttcaactgcacgttcctgctcttcggctcggtcatccagctcatcgcatgcgcaaggtaaggttgcttgcttgctcgctcgcatggttcgccggctaactgtgtgccgcgtaagcgtacatatatactaccaaacagcaacatctactacatcaacgacaagctggacaagcggacgtggacgtacatcttcggcgcctgctgcgccacgacggtgttcatcccgtcgttccacaactaccggatctggtcgttcctgggcctcgtcatgaccacctacacggcgtggtacctcgccgtcgcgtccctcatccatggccaggtacgcaagcgtagcgttgaagcataatatgcattctgtgggcctgtggcctgtggcctgtgggtgaccggccgagacgatgtgtgtgcttctgctgctctacttgttgcaggttgatggcgtgaagcactccgggccgaccaagatggtgctctacttcaccggggccacaaacattctctacactttcggagggcacgctgttaccgtggagatcatgcacgcgatgtggcggccgcagaagttcaaggcgatctacctgatggcgacgctgtacgtgctgacgctgacgctgccgtcggcggccagcgtgtactgggcgttcggcgaccagctgctgacccgctccaacgcgctggcgctgctcccgcgcacggcgttccgcgacgccgccgtcgtgctcatgctcgcccaccagttcatcaccttcggcttcgcctgcacgccgctctacttcgtctgggagaagctcgtcggcctgcacgactgccgcagcctctgcaggcgcgccgccgcgcgcctccccgtcgtcgtccccatctggttcctcgccatcatcttccccttcttcgggcccatcaactccgccgtcggctccctcctcgtcagcttcaccgtctacatcatcccggcgctggcgcacatgatcacgttccggtccgcaacagcccgtgagaacgcgatggagccgccgccgcggctgctggggcgttggacgggcgcgtacatgatcaacgcgttcgtggtggcgtgggtgctggtggtcggcttcggcttcggcggctgggcgagcatgacaaacttcgtccgccagatcgacaccttcggcctcttcaccaagtgctaccagtgcccgccgccaccgcccctgccgttccccggcggcggcctcggcaacatcacgatgccattcaacggcgacgggctccctcctaccccggctccttcgccggcgcattacttcttccgccaccaccggcatcacagccaccaccgcgggctctga

SEQ ID NO: 86587 - DNA, 128 bp, Zea Mays
gccgcttcttccttatcatctccaatggcgcgcctccatctcccgcgcccggcccccaacgcctttctctcccggcgttctcctctctgccgagcggctctcctccacgtgcgcttctctcccccccc

SEQ ID NO: 86588 - DNA, 1107 bp, Zea Mays
tgtccggaagcttcaacgtctttccccatccttccacggcactcgtgacatgacctataaaaggagccgtcgatccacggtctccaaccaggaaagcaaagcgcttcgcaagcacaggcagtgatcggtaaccaaatccggacagtcttgagctctctcagtctcagcatttcagttcccagattcacatagccccagcccccaagtagcgaaatggcagctgctccgttcgcgattgccggccggctctcccccgttgcgcgcctcccggtccgcgcctggaggcccgcgcacgggtttgcgtcgtccgggagagcccgctcgctcgccgtggcgtccgcggcgcaggagaacagggacaacagtgtcgacgtacaggttagccagaacggcggcaacaggcagcagggcaacgccgtgcagcgccgcccgcgccgcgcgacagcgctcgacatctccccatccccgttcgggttagttgatccgatgtcgccgatgcggacgatgcggcagatgctggacacgatggacaggctgttcgacgacgccgtggggttccccatggggacacggaggtccccggcgaccaccggcgacgtacgcctgccgtgggacatcgtggaggacgagaaggaggtgaagatgcggatcgacatgccgggcctcgcgcgcgacgaggtgaaggtgatggtggaggacgacacgctggtcatccgaggggagcacaagaaggaggagggcgcggagggcggcagcggtggcgacggcgacgggtggtggaagcagcgcagcgtgagctcctacgacatgcggctggcgctgccggatgagtgcgacaagagcaaggtgcgggccgagctcaagaacggcgtgctcctcgtcaccgtgcccaagaccgaggtggagcgcaaggtcatcgacgtgcaggtccagtagacaaactgagctgtcacgacgggtctttgtgtagcactagcgtgggttgggctcttcgcgccgaccgtatcagtactcgtgacccaacgtgtggaataatgtgaataaataaacgcttcaattctgctattccaagaatctagctcaatatagctatgggaaaaattatta

SEQ ID NO: 86589 - DNA, 147 bp, Zea Mays
atgtcaaaggatcacaagccgacatatgatgcagagcgtcaaaggcatcaaagatggctacctcaacgacgtactgcctgtgacctaggctttgggggactgggacctgaaactacctcaaggctcgccatcgcctcttattgctaa

SEQ ID NO: 86590 - DNA, 325 bp, Zea Mays
cgagccggccaccaagcccagcacgacagcgcaccaggccccaggtcctagcccaacaaggcaactaccagactagtaaaaaacaaacccctaaaataaccagccatatgctatgccctgcccagacgacggtgacgaccatggattctcaggcgccaacaaactcagatggtgaccaagaaaggtgagaaaactccatttctctatttcttctatcggtcccaaagtacttatgtcttttctgatggatggatgaatggatcatggttcatggatgagtgcttgtcgatgtagtgatgtctgaaatctaaattgtttgtgctac

SEQ ID NO: 86591 - DNA, 4079 bp, Zea Mays
ccctagcctagcacacctctattcaaaactaaaatcaaaactaaaacacaatcacctccacaccactcatacagcagcagagccgcattgccaaaccgggccagccgcagtgcagcgcccccacaccgcgcacgcgccgcgccggggaggcgccaccacccgtccaccctacgcgctttcgcctggcgctagcgctcggtagtagtagcaggctagctgcgggaggaggcgagattccaaaggggaaaaggcgccgggagcaaaagcgtaggcgaggtgcggagggggaaaagcggcagtgggcagcggggaggagtccagtccaatccagccggatcacggccgacgcggaagcgcaggtgtgactggctggaaggcaagtgtgctcggcaagcgacgcacgccaccgacacctctcccgtggcgatcggagccgcgcgctagatccaacaccctcaccggaatcgcggcggattccggcgccggcggccccgctccggatctgcattccgcgcaggggcttctcctgactgcctcgcgccctcgtctctccaaatactctgcaagcaatggatcggcgcagctggccttggaagaagaaatcatctgatagatcatcaaatgcagatgcgttgcagaattctaatcatgctgaacaggaagataaagctccaaagtttgtgcaaatttcacctcaaacatattcacatcttactgagtcagaggaaaaagtaaaagttttagaagaaaatgtgaaggtcttgaatgaaaaactgtctgctgcacaatctgagatcacaactaaagatgctcttgtgaagcagcatgcaaaggttgctgaagaagcagtatcaggttgggagaaagctgaagcagaggcctccgcactgaaggttcagctagaaactgttacattgtctaagctagcagctgaagaaagaggtgctcatctggatggtgcattgaaagaatgcatgaagcaagtaaggactgttaaagaagaaggtgagcagaagctacatgatgtagtatttgcaaaaaccaaacagtgggagaagataaaggccgagttcgaagcaaaattacttgaatttgaacaggaactcataagggctggtgctgagaatgatgcactcacaagatcacttcaagaacgggcagaactattgatgaaaattgatgaggaaaaaggtcaagctgaagctgagatcgaaattttaaaaagcacaattcaatcaggtgaaagggagataaattcgctaaaatatgaattgcatgttgtctccaaagagcttgaaatccgcaatgaagaaaagaatatgagtgtgcgctcagctgatgtagcaactaaacagcaccaggaagatgtcaagaaaatatcaaaactcgaagctgaatgccaaagattacgcggccttgttcgaaagaagttacctggccctgctgcactagctcaaatgaaaatggaggtggagagcttgggtagagaatatggagaccacagagtacgaagatcccctgcaaagaattctagttttcatcggcctatgtctcctgttcctgattatgcaatggagaacatacatcacatgcagagagacaatgagtttctgactgctcgtttattaacaatggaagaagaaaccaagatgcttaaagaggcattggcaaagagaaacagtgagctgcaatcttcaagaagcatgtatgctaagacaacaggaaagctccgaagcttggaagttcaaatgttgactggaaacaaacataagagtccatcaactccaaacatggatattcactttgatggtgcatttagccaaaatggaagcaacccacctagcatgacttccatgtctgaagatggggtagatgatgaaggaagttgtacagaatcttggaccaatgctctggtatctgagccctgtcaattcaaaaaagagaaggcagccaagagcagcacgacagaaagctccaataggttggagctcatggatgacttcttagagatggagagattagcatgtctgtcttctgaagttaatggcaatggcagtactgttgacaagatgaaggtagacaatgttggggctacttttgctggctttactgaaagagatggtgttaaagatttgcagtcagcttcaccaatgtcagaaactccatctaataaacagtgtctgtctgagaaatctccgcttttgaatttccagtcaagaatatcttccttactggattctgaatcaccagagaataatgctggaaaggtacttgatagcatcagaaacattctaaaggatattgaagatgaggcagattcggtgaatgtaaatgggactcatccttcagatgggaccttaagttcagagagcaaatttgccatggatcaagatcttaagaatgccatattgaaaattctagactttgtgaagttacttgatcaagaaatctccaagtttcaaggccagtcacctgattatgatggactatgtgagaaaacacaacagttctctgcattagtcgataaagttctgtcaaacgttgatgttctaaatgatattgtcatagcactgtctgttatcttgtcagaaactagccagattaagttcacattgttgagagacaatagcaatgaagcagaaagtaataacttagattgtgttgataaagtgactctacttgaaaataaggtgcagcttgagccagtaaaagacaatgttcctggtatctgcccactgttgcctcattcatcttctgatcctgagtttgaggggcctgctgatgctagattcgatgttaagactgcagtgaaggtgtactcgccggaggaatatgaacaacttaaatctgagaaggcaaatttggagggagaactagcaaagtgcaacaaaataatagaagaaacaatggctaggttaagtgatatggagaaaaaactggaagacctgacatctaagttggctgacagtgagaaatcaaatagcttgaatgagacacagttgaagtgtatggctgaatcctacaagtcacttgaatcaaggaaaattgaattagaaaatgagatagaagcgttacggtccagaatagatgctctaacagctgaactctttgatgaaagacagagtcatcaggaggacttagttaaatacagagatctcgaggagaagatggaaaggtatgagatggagaggagttcaattcttgtggatgaggacccagacaacaagtcaaagcaggagagagagatagcggctgcagcagaaaagctggcagagtgccaggagaccatattgattcttggccgtcagctgcaagctatgcgtcctccagccgagtcgctaggctcttcacctaatcggcaacgcatggaggagtttctgaaggatgcggcaggaacaaccgcaggagaatatttccagaaaccttcaggccaacctgatacagaccaggatatgcttgggacaggaaatgtgtctccgatcagtgggtacaagacacacatgatcccttctgatgcggacgttagccctttcccttctccaaacacctccaagcgcccgaagcatcgatcgagatcctcttcgtcttcctcattcaccaaccaccagttgccagacaaacagaaccgaggattcagtcggttcttcgcgaagagcaaagagtgaaactattccggatcgcggtgttaggtttgttgatttttggcgccaattgggtgggatggtggtcatgaatttctgtagagctagtgagggatgcttgcttgtgcgttctctcaggtcaggtgattcctttgggttgctggaataatactcagcttgcagtcgagcgggttgtggcgagagtgtgtgggggaatatttaagttgtcagtctcttctgctagagcttttctgggtttctgtgtgctcgaaacctcactaaaacctcactgtacatgtgcttacttgcttgaaggagcttggctgttggtttgtgtttaatcctcttgtgaattagcccgtgtattgtgcttgtactggtttggtgtacaattaacctgcgcccatttcaagggtattgatgtcttccctcggttct

SEQ ID NO: 86592 - DNA, 1502 bp, Zea Mays
ccctagcctagcacacctctattcaaaactaaaatcaaaactaaaacacaatcacctccacaccactcatacagcagcagagccgcattgccaaaccgggccagccgcagtgcagcgcccccacaccgcgcacgcgccgcgccggggaggcgccaccacccgtccaccctacgcgctttcgcctggcgctagcgctcggtagtagtagcaggctagctgcgggaggaggcgagattccaaaggggaaaaggcgccgggagcaaaagcgtaggcgaggtgcggagggggaaaagcggcagtgggcagcggggaggagtccagtccaatccagccggatcacggccgacgcggaagcgcaggtgtgactggctggaaggcaagtgtgctcggcaagcgacgcacgccaccgacacctctcccgtggcgatcggagccgcgcgctagatccaacaccctcaccggaatcgcggcggattccggcgccggcggccccgctccggatctgcattccgcgcaggggcttctcctgactgcctcgcgccctcgtctctccaaatactctgcaagcaatggatcggcgcagctggccttggaagaagaaatcatctgatagatcatcaaatgcagatgcgttgcagaattctaatcatgctgaacaggagagagagatagcggctgcagcagaaaagctggcagagtgccaggagaccatattgattcttggccgtcagctgcaagctatgcgtcctccagccgagtcgctaggctcttcacctaatcggcaacgcatggaggagtttctgaaggatgcggcaggaacaaccgcaggagaatatttccagaaaccttcaggccaacctgatacagaccaggatatgcttgggacaggaaatgtgtctccgatcagtgggtacaagacacacatgatcccttctgatgcggacgttagccctttcccttctccaaacacctccaagcgcccgaagcatcgatcgagatcctcttcgtcttcctcattcaccaaccaccagttgccagacaaacagaaccgaggattcagtcggttcttcgcgaagagcaaagagtgaaactattccggatcgcggtgttaggtttgttgatttttggcgccaattgggtgggatggtggtcatgaatttctgtagagctagtgagggatgcttgcttgtgcgttctctcaggtcaggtgattcctttgggttgctggaataatactcagcttgcagtcgagcgggttgtggcgagagtgtgtgggggaatatttaagttgtcagtctcttctgctagagcttttctgggtttctgtgtgctcgaaacctcactaaaacctcactgtacatgtgcttacttgcttgaaggagcttggctgttggtttgtgtttaatcctcttgtgaattagcccgtgtattgtgcttgtactggtttggtgtacaattaacctgcgcccatttcaagggtattgatgtcttccctcggttct

SEQ ID NO: 86593 - DNA, 2428 bp, Zea Mays
gataaagctcgaggaagacgaccggcacacacgggcactgtgaatctgaggagggaaaatcacccaaaatcgagagcataattttttccccggagatgccgaagatcacctcgtcgccgtctcccaccatctccgccatgaatcccctcctcccgtcctcctttcccaaatcaccccacccgccggacccaaaccctagctccccgaatcctagcccctgcagctacctcctccacgccgacgccgacgacgaggcgctgattcaaatccctggtcagaaccctagcctggtgggtgcctccgcctccttcgcgctgctgccgtctatcgacccggctccacacgtctcgtcgcagttctacaccttcagcgccgcctcctacgggctcatgctacgctgcatccgcgcgggccgctccgcctcctccgacgaggtccgcggcgccacgtcgctctccgtgctcgcctcctggcgggcggtctggaaagatcgaaacgaggacacggcctacctcaccgcgtggaagcgcatccaggacaagctcgccgcgtcggccgacggcctgcaccttcacttcaagtccaacgccgcgcagcgcgtctcccacgtcggcatgtggagggacatagtctcggaggcgcatgccgaccctgaactgctacggcacctcgcgttcagggacaccgtcgaccgcatcaaacagtcgtggactgtgggggccaaattctacggtattccagaatcatttgtccgcgcatgtgttgctgcatgccctgtttgtaaagctgcgcctgctggccagccgtatttcactatctcatcacctggacatgggaagcggcggcgcaggtttgaatatactgagacattggatgtgccggctagagatgtagctcgtaggttacagcaattggctgctaagcacaaggttgttctttgtataaggcagaagtatattaggtataggcccttcatggctgaggtgaaagattatgcatgccaccgtgctggagagcccacttcaagtagtgggagtgctgcatcctcagccggtaatttagagggtaagaaggcgcgggtaaagcgagagccataccagtcgaagaggtgtggttgtgggttccgtattcgggcaattgtgccgatagctaattacaatgaaaaagacaagagttttgtgtacttggaggagggcactgcagtgttcaagctttacgctgtgcattcagggcatgagccagggccacttgatggcaatgcacgaattgttcacaggttggttggtcataagggaggtcttgagtttgatccagacatttatggtgtcagtggggaaggtgatcctaccttttcagcaaaggggtatgaatatgctgatattgatgattcgcaccaggcagtcttgcagcaagtacgggatctgagatcagaagttctcttgctagaagggaaggtggctaagatgcacccagaattgttagggtcactgtccaccgagttgtctgaggttttgcacaggattaggaagtttaatttggagggtaatgtctaccaacatgagacattgatggtaggcaatgaagaagtcaggggatgggggtcagcggatgtatctcaccagttagaccagcatgatcgagcattctgcaaggatgatgagatgcttgatgatgatactgactttggctcaagccttggacctattgtctcgtgggataggatggaagcagagtgcgaggatagaaagatgctcatgggtgatagcccaaagtgcgacaagtggatgcttaaggatgatgtgggtgaatttgatgcgaagagtattcttaactgtggggatgatgatggcgtgggagattccaaggtcatcaaaccattgatgcatgatgacaccatggtaactggcccaagtttggtaggtattcatgtagaaggattttatgccggaacaaaatggtatgattcacaaggtttggattccagtgttgatggaggggatagcagttttaggcatggcggaatcgtgtgaattgtgataacctgatacctggaaggtcctgtaaattatgtatactagatgtatttagctcacaccagtttaattaagtgtctgtaggtggagcttcagtcaaagtaacatgtctgccctgatatatacaggctgcattatcaaagcaacttttgttttaacttgcatatagtccctgtattggttatctgcttgcttcaatacattaaagctatgtttctgttggggtgtgccttagtattttgttgagttactctgtgggcatcatagttttgctaggcgctaggcggaatctaggcgatgacccttagcctagggactagtccagcctaggcttgcctaggcgatgctaggcgttttgccaacttatataatatatacatttatagataaaaaaa

SEQ ID NO: 86594 - DNA, 2306 bp, Zea Mays
ccgagacaaccccggccatccccacacccgcatcgcacacacagacacaggcacatacacaggcggagaggccaccagcccagaccagagcaaaaacccaccgttcccacacccagcgctcaatttgaaccaacgcgaacgcgacgctctcaagccccaacctaatctacgatctccctccgaccgaaacgaaatctccgcctcccctgcgcccctgccctgcgcccctgcataggaggaaagaaacgcacgcacgcacgccccccgcggcaaagggaaccgtcgccgcgttgcgagagtccgggaaactgaagcggagcagcggaggagaggccgaggccaggaggagagggtaccggcggccatggagcggtaccatccctcagaggtgtacgagctcttcgtgcgccacatgaacaccccgagggtggtggtggacaacggcgtgtgcgcgacggcgacgctggtgcaggtgcacagcgcgaggaagcacggcgtgctgctcgaggcggtggcggccctgtccgaccacggtgtctgcgtccgcaagggctacatctcctccgacgacggccgctggttcatggacgtgttccacgtgaccgacgccgcgggccgcaaggtggccgacgccgacgccgacgccctgctggcgcggctcgagtcctcgctctcggccgacgcattgccgcctcgcacgccgcccgccgctgcggctgggacgcccaccctgctcgagctcgtcggcgccgaccgcccgggcctcctctccgaggtcttcgccgtgctgcacgacctccgctgcgacatcgccgacgccagggcctggacgcacggcggccgcgtcgccgcgctcgtgttcgtgcgcgacgaggacacgggcgcgcccatcgacgacgcggcgcgggtccggcgcgtcgagtccaggctcaggcacgtcctccgcggcggcgcgctcggcgccaggatggtccgggcggacgccgcggccgtcaacatggaccggaggctccaccagctcctcaacgaggacggggaggccgagagccgcgccgaccaggccacggcggtcgccgtgcaggattggggggagagggggtactcggtgctcaccgtgagctgccgtgaccgccccaagctgctgttcgacgtcgtgtgcaccttgacggacttggattacgtggtgtaccacggcacgttcgatacggacggcgatcacgcccagcaggagttctacatcaggcggttggacgggcggccaattagctcggcggccgagaggcggcgcgtgatccaatgcttgcaagcggccatcgagaggcgcgcatccgagggcgtgaggctggagctgcgcatcaccgaccgccgcgggctgctcgcctacgtcacgcgcgtgttcagagagaacagcctctcggtgacgcacgccgagatcaccaccaggggcgacatggccatgaacgtgttccacgtcaccgacgtggccggccggcccgcggatcccaagaccatcgacgaggtgatccagaggatcggcacggagagcctccgggtggacgaggaacggtggccgcgcctgtgcttgacagagggtgacgcgggccgcggcggtgcggggatcttctcgctcggaagccttgtcaagaagaacctggccagccttggcctcataagatcctgctcgtgaggacgcacgcaaccaagtgggcacgtgctcgatggggtccttgtgtaaatatgggatggtgcatgggttagtttgtaaatggagtagggatttaatttgacgtttctaggtttagttgccacgtgtacatagtagcaagtggagatggaaggttttaagagttgctggtcggcaacagcctggagcttaaagggcctctttggtgggtcatgacataccatgtatccatatctagctttttattttacataaaaatagatggatggaagaattaagtataatacgagtcctatatgcctatacggttgtaactgaataattttgttgacctccgtccttggctcttgtggcatgcgctgcgaaagcgcgaaagttctgctccgagatctcgaggcattttttaaattaagcagagccggccagtgagaggttgtaaagaagcctcgtttccggcatcctgaatctcatatgggtcaataccctgattcggccctgaatcttaataacctgttagagttcatatctcatctactatttcatcatctattttaaacttttctctttaatcagtgtcaacttacagtttcatgtttcctattttaggcactctaccaaaaac

SEQ ID NO: 86595 - DNA, 653 bp, Zea Mays
cacggaaacggaatcatccattcgagtacaagtttctctgcggacacatggagtgtttccaaccgtttaccgacgcctcctcctcgctgtcagctcaaattaagaagaagaagaaaaaacatttgactttctgcagccacattgaaaactggtttcggcggtggaccaatgatccctgcagtgacacatgtgctcacgcagtcacgcctggctctgtcccctcgatgagaaaccgggaaaagatccacgcatgcagcggcgcgtaatactctggccggcgccacgctttcacgggagctttcgccgacctcctcctctcggttgtccggggcggggcctggcaggctgtggtttccttgtgaggtgtgacgacggaagggtcgacgccgacgtcgctagtttattaaccgggtctcatgcacgccgcccttggcggggcggcaagaaacgagaagagcccgtcccgcaaccaccgctgacctaccgcccaactgccgcgaatcggaccaaccagacctggcacgagacgtgcggtgcggtgcggtgcggatcgccattgctttcggggcagctgcagtttcggtagatcgacagggaggaaaatgaccgcccaaccttttcctaattcctatttccgccatctcgccgcgggc

SEQ ID NO: 86596 - DNA, 489 bp, Zea Mays
atggaagacttgaaattaccaaagatcatggaaacgctggcacaacctctgacaccggcagtagctgacggtggcaatcgaaaccagcccaagaactatgagcagacaggcggcgacggacgccgtgaccgtgatgcatgcgctgtttgctcgcggggggccggggttgtccgcctggcggctggcgtctgccacaggccacagccgatcggtggtggtggtcctcgtggccggaccagcaacctgagcaaggtctctgttgtctttgtggcgcgcatggaccggtctggagcgttgaattcctttaccatcccatgggacacccacccatcctttggatctgtacccagcgatggcgacggatcgaacgcactgcggactggacgaaccaagaatgcactgtgtaagagcatggtaactcggagctttgtcacccaccaactaggcaactacatcgatcccagctttcgtcggtcgacgttgcgttga

SEQ ID NO: 86597 - DNA, 2359 bp, Zea Mays
gctaagcccacgtttagccaaattgcaaatttttcgccggccggccgcctgcgccctaacacttacaccacacgagcccacggccgcacagatgaccggccgccggccacccacgctggcgaggatctagttcctgcgagactgacttcatcgaatcgatgaggcggcagacggcgggcgacatcccgcggcgttgagaagctgcggtccaccttctcggtcggtgggccgtcggcgtcggagtctcggacgtcggaccaccaacggcggcgtccgagagctggtcctggagtgtacttcgtgcaacaaccatcgcggcatcgcccgccgtatgcgcggcccgaagatgctgacatccatgctctcaaaatcaacagcctcgccgtctccggcacgcctctatcacctcctccccgtctcttccctccaaacgaccagcgatctccgtcctgcacccaatggcgcatctcctccacctccgcctcctgctcaaatccccgccttcctctccccgtgcccatctccgtacaaccatagcaattacgccaccatcctccgatcctgcgtcctctccagagccgttcggcccggtcggcagctccacgccaggctcctcgtgtcgggcactggcctcgatgcggtcctcgccaccaggcttgttgacctatacgcgtcttgcggccatgtgtctcttgcccgtcgtgtgttcgacgaaatgcccaaccaggggaacgtctttctgtggaacgtgctcatccgtgcctatgcacgcgacgggccatgcgaggcggcaatagaactgtaccgcgcgatgctggcatatggtagcatgaaaccagacaacttcacctatccgccggttctcaaggcgtgcgctgcactcctggacctgagcgctggccgggaggtgcacgatcgtgtcatgcgaacgaattgggccactgatgtttttgtatgtacaggcctcatcgacatgtacgccaagtgtggttgcatggacgaggcttgggcggtgtttaatgacaccacaatcagggatgctgcggtgtggaattcgatgattgcagcatgtgggcaaaatgggcgaccagcagaggcgctcactctgtgccgtaacatggcggctgaaggcattgcgccaacgatcgccactctggtgagtgcgatatcagctgcagctgttgcgtctgcgctgcctagagggagggagctgcatggatatggttggaggagagggtttggatcacaggacaagctgaagacttcccttctcgacatgtatgccaagagtggttgggttatggtggcgcatgttctctttgagcaacttttacacagggagcttatttcttggaatgccatgatctgcggatttgggatgcatggccatgctgatcatgcatttgagctgtttagcagaatgcggagtgaggctcaggtgatgcctgaccatattacttttgttggagtcctatctgcttgtaaccatggaggaatggtacaagaagcaaaagaagtatttgatctgatggtgactgtatattccatcaagccgacagtgcagcattacacctgccttgtagatgttcttggtcactctggtaggttcaaagaagcttctgatgttattaaaggaatgttggtgaagccagattcagggatatggggtgcactgctaaatggttgtaagattcacaaaaatgttgagctagctgaattagccctgcaaaaactgattgaattggagcctgaagatgctggtaactatgtgcttctatctaatatatatgctgaatctgggaaatgggaagaagctgcaagggtgaggaagctgatgaccaatagaggcttgaaaaagatcattgcttgtagctggatcgaattgaaagggaagttccatggttttcttgtgggtgatgcttctcatcctagatcagatgatatatatgaagagttggagcgattggaaggtctcatcagtcaaactggctatgtgcctgacaccacgccggttttccataatgtggaagatgatgaaaagaggaacatggtatggggccacagcgagaggttggccattgcatttggactcattagtacaccgcctaggacaaagttgcttgtgacaaagaatcttcgagtttgtgaggactgccatgttgtcatcaagctgatttcacagattgagcagcgtgaaattatcataagagatgttaaccgctatcaccactttgtaaatggtgaatgttcatgcaaagaccattggtaacttacacaagcaagagtattgttgtacactatctattccatggaaattaaaaatgtcagaatggtaatcttatgtgaaaaacaagactaa

SEQ ID NO: 86598 - DNA, 624 bp, Zea Mays
gcccgccatggcctccctcacctcaacctccacctcactccttttcccgcaagcctccacatccagaagccacgtccggcattgactggctctgctcccacgcgcgccttgaccacgtgctcgcccgcgacgacaaccgcatcgccgtcgcgcgtgcctcaagagggtccgctccacccgctctcaacaacccccgcccccatcgccgtgcgtctcggccaccctcgactttgagatctacgccgctctcaacaacccccactctcaacaaccatgctcccaaggaggttcccaataatctgctcgcccctccctttagcgcagagccgcgcgtccccaatccgatgctccggcaagcccgctccccgactgttcatctactccaccgtcacctcgcgtccgccctcgtcatgttggttttcgccgagggttaataccagctatctcgttctacaagctatggtcatgtggggaaatggtaagcgaatggaatttgttagggatgtaaggattcttcgaaggaactttgtgattgatctattaagttacgaggacaatttatgccgctatgccatccctgcaaacatacaacagagacttatcaatatctctacaaaggaatag

SEQ ID NO: 86599 - DNA, 1745 bp, Zea Mays
atctcgaccccgtgaagccgaaccccccaaaaaaacgacgtcaaacgcggacgagggagcactgcaactgcaagcgccccataggccgcagcgctatcgcgacgtcgccaccgcccaccggccaccaccacaaggcacacggggacgggcgcccgctccactaccactacctcccgtcagtcagatcccaatcaaaagaggagcatcgcagagctgtacgtatcacgcaggaggtagcgttccactcgcttcgcggtggccatggtctcgtctccttcccctcccttgcccaccggtgtaagtgtgcctccctccctccttcctcctgcctcctctcctctgttaccgcggttctgccgtggctgagtatacgagtcgttcactgcacaatggtgcgccgtcaggcctccgagccgaagcagcagcgaggcggcaccaaggcggcgccggagaaggccgacaagaagtacgcgcacgtcccaacaccgctccaccacggtcacggcggcgccagcaacaagacaacaccccgcggggccaaggacgccgccggaccggcggcgtacgtcgcggcggtgtccttctccgactgccgcttcaagcagcgcgccctcgcgccggcgtcgcccggcgccgtcatccgctcgctgttcgtctccctcacccgccgctccaccccgcgctcgtcgccgtcggccacgccggcctcggcaggcgccgacgcgggggacggcgagcagtggcgcctcgccgcggccgacctctcccgcaggctcgccgcggccacgcgcacgcgggacgaggcgctggaggagaccacgcgcctgaagcactccctcgccgagctggagcacaagctcgcgcgcctcgaggcgcgcgtgctcccgacccccgcggccgccttccccgtcgactccttcctccgcgccgtctcgaccgcccgcgccgccgtgcggaacctcgcgcgcgcgctgtccgcccacctccgcagcccctccagccccggcccgagcctcgagagcttcctcaaccgcgcgttccacgccgacttcgagctggacaccgacgccgacgcccacaccacggaccccgcgggccggtgccaggccaacctcgcggcgtaccacgccgtcgcggtgctcacgtgggaggaggtcctcctccacggcaccaagcactacagcgaggggctcagccgcttctgcgacgccaagatgagcgaggtggtgtcctcgctcggctgggcgcgcgcgcggccgtggcctgagccgctgctgcaggccttcttcctcgccgccaagggcgtgtggggcgtccgcctcctggcgcgctccgtccacccgccgctccccgttgtgcgcgccgagcgaggcgcgcgcttcgacccgcggttcatggaggacgccgcggccagccgggcggggacgctggaaccggccagcgtgaagatgatgatggcgccagggttccacgtctacctggccggcgcgggcgtggtgaaatgcagggtcgtctgcttctacaccagcagtaacgcccgcacagacggccacagagatggcgggagcagcgccaacggcagcgtggggttggggagtagctgtagtgacattaatgggagtgctacagatgtggttgatagctgtagagcagtgaagtagggtaaaatgttgcccttgcacaggtagaaagaacacggggattttacttgttcgctaaaaaaacatgatgatctgcgtttaggc

SEQ ID NO: 86600 - DNA, 1703 bp, Zea Mays
atctcgaccccgtgaagccgaaccccccaaaaaaacgacgtcaaacgcggacgagggagcactgcaactgcaagcgccccataggccgcagcgctatcgcgacgtcgccaccgcccaccggccaccaccacaaggcacacggggacgggcgcccgctccactaccactacctcccgtcagtcagatcccaatcaaaagaggagcatcgcagagctgtacgtatcacgcaggaggtagcgttccactcgcttcgcggtggccatggtctcgtctccttcccctcccttgcccaccggtgcctccgagccgaagcagcagcgaggcggcaccaaggcggcgccggagaaggccgacaagaagtacgcgcacgtcccaacaccgctccaccacggtcacggcggcgccagcaacaagacaacaccccgcggggccaaggacgccgccggaccggcggcgtacgtcgcggcggtgtccttctccgactgccgcttcaagcagcgcgccctcgcgccggcgtcgcccggcgccgtcatccgctcgctgttcgtctccctcacccgccgctccaccccgcgctcgtcgccgtcggccacgccggcctcggcaggcgccgacgcgggggacggcgagcagtggcgcctcgccgcggccgacctctcccgcaggctcgccgcggccacgcgcacgcgggacgaggcgctggaggagaccacgcgcctgaagcactccctcgccgagctggagcacaagctcgcgcgcctcgaggcgcgcgtgctcccgacccccgcggccgccttccccgtcgactccttcctccgcgccgtctcgaccgcccgcgccgccgtgcggaacctcgcgcgcgcgctgtccgcccacctccgcagcccctccagccccggcccgagcctcgagagcttcctcaaccgcgcgttccacgccgacttcgagctggacaccgacgccgacgcccacaccacggaccccgcgggccggtgccaggccaacctcgcggcgtaccacgccgtcgcggtgctcacgtgggaggaggtcctcctccacggcaccaagcactacagcgaggggctcagccgcttctgcgacgccaagatgagcgaggtggtgtcctcgctcggctgggcgcgcgcgcggccgtggcctgagccgctgctgcaggccttcttcctcgccgccaagggcgtgtggggcgtccgcctcctggcgcgctccgtccacccgccgctccccgttgtgcgcgccgagcgaggcgcgcgcttcgacccgcggttcatggaggacgccgcggccagccgggcggggacgctggaaccggccagcgtgaagatgatgatggcgccagggttccacgtctacctggccggcgcgggcgtggtgaaatgcagggtcgtctgcttctacaccagcagtaacgcccgcacagacggccacagagatggcgggagcagcgccaacggcagcgtggggttggggagtagctgtagtgacattaatgggagtgctacagatgtggttgatagctgtagagcagtgaagtagggtaaaatgttgcccttgcacaggtagaaagaacacggggattttacttgttcgctaaaaaaacatgatgatctgcgtttaggcatttactgcttctgcttgtgtgaatatgggtgaattattaatcacgaacagtttctgttaatttt

SEQ ID NO: 86601 - DNA, 1151 bp, Zea Mays
gattggttgctgttgcttcctgctttcgcttcgccttcacccgttcgccgtgcggccgagctctctagttccgccgctcgctagtcgccttcctcccaaatggcgaccgccatgcggggcagcagcctcctgcggttcggtttccgccatccttcctgcctcctgttccagtcccctcggtgtcctgccccgagcctgggtctgaacctggccgttggccgcaccgggcttatacgcctccgatgctcggcggccggggccggcgacgccggtggaaagaaggtgtcggctcggctggctctgacgcagcaggtgctgcggaacgccgaggagcgcgccgcgtcggcgggttcggaccctgcccccaagatcaccctggatcatgttactgttaattttgcaagaagtggtggtcctggtggtcagaatgttaacaaagttaacacaaaggttgacatgcgattcaatgttaaggaagctcactggcttggggagagaatcaaggaacggatattacaagcggagaagaataggataaataaagatggagagcttgttatatcttctacaaaaactagaacacagaagggcaatattgaagatgcattgcagaaaatacaggcaatcattgatgctgcatcatatgttcctccacccccaacagaagaccaaaagaaaaagattgaaaaaattgctgcagttgctgaaaggaagagacttcagaataagaaggtgctttcacagaagaaggaatttagacggaacagaactagctgggattgatgcaagcttgttctcggggtagcaaaagcattcggctgatccttacagcagtggtgtacagagaccgacgaaaaacaagggtcagacttgctgaaggcatcttggtgaagaagatatagctaagtttcgtaggcatctccagtttttgtttcgtctattagtagggatggattcggatcggatactcatggaaacagatccgaacgtcactatttaccatattttaatccgaatacgaatactatcggatacgaatacaaaacggatagttcgaattcggatttacattcgaatacttacttgatttggaacatagcatcataacaagtattaatttgttttatcgatggatttatagttgataaaaa

SEQ ID NO: 86602 - DNA, 1220 bp, Zea Mays
gattggttgctgttgcttcctgctttcgcttcgccttcacccgttcgccgtgcggccgagctctctagttccgccgctcgctagtcgccttcctcccaaatggcgaccgccatgcggggcagcagcctcctgcggttcggtttccgccatccttcctgcctcctgttccagtcccctcggtgtcctgccccgagcctgggtctgaacctggccgttggccgcaccgggcttatacgcctccgatgctcggcggccggggccggcgacgccggtggaaagaaggtgtcggctcggctggctctgacgcagcaggtgctgcggaacgccgaggagcgcgccgcgtcggcgggttcggaccctgcccccaagatcaccctggatcatgttactgttaattttgcaagaagtggtggtcctggtggtcagaatgttaacaaagttaacacaaaggttgacatgcgattcaatgttaaggaagctcactggcttggggagagaatcaaggaacggatattacaagcggagaagaataggataaataaagatggagagcttgttatatcttctacaaaaactagaacacagaagggcaatattgaagatgcattgcagaaaatacaggcaatcattgatgctgcatcatatgttcctccacccccaacagaagaccaaaagaaaaagattgaaaaaattgctgcagttgctgaaaggaagagacttcagaataagaaggtgctttcacagaagaaggaatttagacggaacagaactagctgggattgatgcaaggtatcttgcacagacccgtctttctgttttgtgccattccgcggtgggcattggcaatagtttagagggcttgttctcggggtagcaaaagcattcggctgatccttacagcagtggtgtacagagaccgacgaaaaacaagggtcagacttgctgaaggcatcttggtgaagaagatatagctaagtttcgtaggcatctccagtttttgtttcgtctattagtagggatggattcggatcggatactcatggaaacagatccgaacgtcactatttaccatattttaatccgaatacgaatactatcggatacgaatacaaaacggatagttcgaattcggatttacattcgaatacttacttgatttggaacatagcatcataacaagtattaatttgttttatcgatggatttatagttgataaaaa

SEQ ID NO: 86603 - DNA, 1672 bp, Zea Mays
ttcgtctatttgcggttctcggcgcaatacatttcccaacacagcgccgtacgcacagcacagtcacggtactccaccgctaaaaccttcggaaagaatccccaaatctcgcacacctcgaagccttcgaggcccgaaaccctagctcctcggcctccccgccgcttccacccatggctccaggactgcagcgcttcactgacattgcggacgacggcacgccccagctcgacgccgcgtccggcgaggagctggtccgtgtggaccgcaccgtggctgtcgcccttggcccccgctcgccggagtccccggggactctgttcgtcaccaccaggagggtgatttggctcagcgaagcggagaagggcaagggctacgcggtggacttcctcgccatctcgcttcacgctgtgtcgcgcgacctcgaggcgtacccctcgccctgtatctacactcagattgaggcagcagttggtacagaagaggaggctggggaatcaaatcctgaagcaaatgaactagagctatctagagtatctgaaatgaggctcatactagcggaccccggtcaacgtatcctcttgaattatgttgtttcattaaaagatttctttgttcaagcatgtgtgtatgccttgagcttgatgatggagttcaagtgagtgctgattcagactccatgacttgtgatctggaaaactgattcaaggcattactaattatgttatgcaaataattgtcatagataacccttgtgaatttatttgtaaaattaatgtcagcgaactactaaattttcttgtttctggagttcttaaaaaatatcctcaaccccttatttatcctaggggtatgctttaccgatttgaaacttgtcataaataagattattatatgcctacctttactttatttgattatttgaatcctaacaacctttttatactgttcgtggcattgcatgacttgtatccttgacagagcttcagtggatgcactttttgatgtcttctgtcattgtgctgaactgaatcctgaccctaatgctgagtgcaatggggagaatggctggatccgtggtgaagatatgtctaatggtgactggattcgtgatgatgtggacatggttgatgaaaatgtcccgcagtttttcaatgccaatccgataggtcaaaatggtggatatgaccttagtcgttcagtatttgagcttcaaatcaacgaccaacgttttgaggatgcagaggaggaacaggagagccatgaaaataatggacattagaaacagagacatgttcctcgagagcatcatgtgatttattttgttgtaaatcactaccgatgcagctcggtttgcctactgtttcatctacactttctcttcctttttccttgatgttataggattaacatcactgggtgactttctggaattgcatcgatggttccttttggtgagaaaaggtcttgctgctggtcaagaatgtaacttgtagagcatgatgttgaatcgtgtgaaattagttcagtacttttgatctaacaaatagaaggtcgaattgggaaaggagatatattatcttttcccttgtatatcatggcaccgttatgttacgtctgcttagaattaaattcagtttgggtgttgcagggacccgtctctctttcgtat

SEQ ID NO: 86604 - DNA, 1703 bp, Zea Mays
gtctatttgcggttctcggcgcaatacatttcccaacacagcgccgtacgcacagcacagtcacggtactccaccgctaaaaccttcggaaagaatccccaaatctcgcacacctcgaagccttcgaggcccgaaaccctagctcctcggcctccccgccgcttccacccatggctccaggactgcagcgcttcactgacattgcggacgacggcacgccccagctcgacgccgcgtccggcgaggagctggtccgtgtggaccgcaccgtggctgtcgcccttggcccccgctcgccggagtccccggggactctgttcgtcaccaccaggagggtgatttggctcagcgaagcggagaagggcaagggctacgcggtggacttcctcgccatctcgcttcacgctgtgtcgcgcgacctcgaggcgtacccctcgccctgtatctacactcagattgaggcagcagttggtacagaagaggaggctggggaatcaaatcctgaagcaaatgaactagagctatctagagtatctgaaatgaggctcatactagcggaccccggtcaactggatgcactttttgatgtcttctgtcattgtgctgaactgaatcctgaccctaatgctgagtgcaatggggagaatggctggatccgtggtgaagatatgtctaatggtgactggattcgtgatgatgtggacatggttgatggtaagtattgtgcttttcgtgttctacatttttacgctaatgtgatagcagcagcacttagatgtcttaccttgcatgcagaaaatgtcccgcagtttttcaatgccaatccgataggtcaaaatggtggatatgaccttagtcgttcagtatttgagcttcaaatcaacgaccaacgttttgaggatgcagaggaggaacaggagagccatgaaaataatggacattagaaacagagacatgttcctcgagagcatcatgtgatttattttgttgtaaatcactaccgatgcagctcggtttgcctactgtttcatctacactttctcttcctttttccttgatgttataggattaacatcactgggtgactttctggaattgcatcgatggttccttttggtgagaaaaggtcttgctgctggtcaagaatgtaacttgtagagcatgatgttgaatcgtgtgaaattagttcagtacttttgatctaacaaatagaaggtcgaattgggaaaggagatatattatcttttcccttgtatatcatggcaccgttatgttacgtctgcttagaattaaattcagtttgggtgttgcagggacccgtctctctttcgtatatcagggatagtagcaattgaagtacagcggcttcaggattggccatatggacaatggacacgagacgagtgtagagcgcgtggtgtccatcccgacggtgcaacagagaacgcaaagcaagtgttgctgtgtactttacaattgctgtgtattcgtataatatgtttgttaaggatgtctttaccagccattctatgattctatcctatcctctatcttatcccatattttaaacttaggccttatttgttttctaatactaaattttagtccttgtcatatcaaatatatgacaaatgttttggaagctagttagaatattaaatataatttaattacaaaattaattaaactgataagaactaaac

SEQ ID NO: 86605 - DNA, 1622 bp, Zea Mays
gtctatttgcggttctcggcgcaatacatttcccaacacagcgccgtacgcacagcacagtcacggtactccaccgctaaaaccttcggaaagaatccccaaatctcgcacacctcgaagccttcgaggcccgaaaccctagctcctcggcctccccgccgcttccacccatggctccaggactgcagcgcttcactgacattgcggacgacggcacgccccagctcgacgccgcgtccggcgaggagctggtccgtgtggaccgcaccgtggctgtcgcccttggcccccgctcgccggagtccccggggactctgttcgtcaccaccaggagggtgatttggctcagcgaagcggagaagggcaagggctacgcggtggacttcctcgccatctcgcttcacgctgtgtcgcgcgacctcgaggcgtacccctcgccctgtatctacactcagattgaggcagcagttggtacagaagaggaggctggggaatcaaatcctgaagcaaatgaactagagctatctagagtatctgaaatgaggctcatactagcggaccccggtcaactggatgcactttttgatgtcttctgtcattgtgctgaactgaatcctgaccctaatgctgagtgcaatggggagaatggctggatccgtggtgaagatatgtctaatggtgactggattcgtgatgatgtggacatggttgatgaaaatgtcccgcagtttttcaatgccaatccgataggtcaaaatggtggatatgaccttagtcgttcagtatttgagcttcaaatcaacgaccaacgttttgaggatgcagaggaggaacaggagagccatgaaaataatggacattagaaacagagacatgttcctcgagagcatcatgtgatttattttgttgtaaatcactaccgatgcagctcggtttgcctactgtttcatctacactttctcttcctttttccttgatgttataggattaacatcactgggtgactttctggaattgcatcgatggttccttttggtgagaaaaggtcttgctgctggtcaagaatgtaacttgtagagcatgatgttgaatcgtgtgaaattagttcagtacttttgatctaacaaatagaaggtcgaattgggaaaggagatatattatcttttcccttgtatatcatggcaccgttatgttacgtctgcttagaattaaattcagtttgggtgttgcagggacccgtctctctttcgtatatcagggatagtagcaattgaagtacagcggcttcaggattggccatatggacaatggacacgagacgagtgtagagcgcgtggtgtccatcccgacggtgcaacagagaacgcaaagcaagtgttgctgtgtactttacaattgctgtgtattcgtataatatgtttgttaaggatgtctttaccagccattctatgattctatcctatcctctatcttatcccatattttaaacttaggccttatttgttttctaatactaaattttagtccttgtcatatcaaatatatgacaaatgttttggaagctagttagaatattaaatataatttaattacaaaattaattaaactgataagaactaaac

SEQ ID NO: 86606 - DNA, 1695 bp, Zea Mays
gtctatttgcggttctcggcgcaatacatttcccaacacagcgccgtacgcacagcacagtcacggtactccaccgctaaaaccttcggaaagaatccccaaatctcgcacacctcgaagccttcgaggcccgaaaccctagctcctcggcctccccgccgcttccacccatggctccaggactgcagcgcttcactgacattgcggacgacggcacgccccagctcgacgccgcgtccggcgaggagctggtccgtgtggaccgcaccgtggctgtcgcccttggcccccgctcgccggagtccccggggactctgttcgtcaccaccaggagggtgatttggctcagcgaagcggagaagggcaagggctacgcggtggacttcctcgccatctcgcttcacgctgtgtcgcgcgacctcgaggcgtacccctcgccctgtatctacactcagattgaggcagcagttggtacagaagaggaggctggggaatcaaatcctgaagcaaatgaactagagctatctagagtatctgaaatgaggctcatactagcggaccccggtcaactggatgcactttttgatgtcttctgtcattgtgctgaactgaatcctgaccctaatgctggtaagccatggaactacagttgatacctaaaaaggttctgtctgcagatctatgtaatcttttgaaattatagagtgcaatggggagaatggctggatccgtggtgaagatatgtctaatggtgactggattcgtgatgatgtggacatggttgatgaaaatgtcccgcagtttttcaatgccaatccgataggtcaaaatggtggatatgaccttagtcgttcagtatttgagcttcaaatcaacgaccaacgttttgaggatgcagaggaggaacaggagagccatgaaaataatggacattagaaacagagacatgttcctcgagagcatcatgtgatttattttgttgtaaatcactaccgatgcagctcggtttgcctactgtttcatctacactttctcttcctttttccttgatgttataggattaacatcactgggtgactttctggaattgcatcgatggttccttttggtgagaaaaggtcttgctgctggtcaagaatgtaacttgtagagcatgatgttgaatcgtgtgaaattagttcagtacttttgatctaacaaatagaaggtcgaattgggaaaggagatatattatcttttcccttgtatatcatggcaccgttatgttacgtctgcttagaattaaattcagtttgggtgttgcagggacccgtctctctttcgtatatcagggatagtagcaattgaagtacagcggcttcaggattggccatatggacaatggacacgagacgagtgtagagcgcgtggtgtccatcccgacggtgcaacagagaacgcaaagcaagtgttgctgtgtactttacaattgctgtgtattcgtataatatgtttgttaaggatgtctttaccagccattctatgattctatcctatcctctatcttatcccatattttaaacttaggccttatttgttttctaatactaaattttagtccttgtcatatcaaatatatgacaaatgttttggaagctagttagaatattaaatataatttaattacaaaattaattaaactgataagaactaaac

SEQ ID NO: 86607 - DNA, 1545 bp, Zea Mays
gtctatttgcggttctcggcgcaatacatttcccaacacagcgccgtacgcacagcacagtcacggtactccaccgctaaaaccttcggaaagaatccccaaatctcgcacacctcgaagccttcgaggcccgaaaccctagctcctcggcctccccgccgcttccacccatggctccaggactgcagcgcttcactgacattgcggacgacggcacgccccagctcgacgccgcgtccggcgaggagctggtccgtgtggaccgcaccgtggctgtcgcccttggcccccgctcgccggagtccccggggactctgttcgtcaccaccaggagggtgatttggctcagcgaagcggagaagggcaagggctacgcggtggacttcctcgccatctcgcttcacgctgtgtcgcgcgacctcgaggcgtacccctcgccctgtatctacactcagattgaggcagcagttggtacagaagaggaggctggggaatcaaatcctgaagcaaatgaactagagctatctagagtatctgaaatgaggctcatactagcggaccccggtcaactggatgcactttttgatgtcttctgtcattgtgctgaactgaatcctgaccctaatgctgagtgcaatggggagaatggctggatccgtggtgaagatatgtctaatggtgactggattcgtgatgatgtggacatggttgatgcttcaaatcaacgaccaacgttttgaggatgcagaggaggaacaggagagccatgaaaataatggacattagaaacagagacatgttcctcgagagcatcatgtgatttattttgttgtaaatcactaccgatgcagctcggtttgcctactgtttcatctacactttctcttcctttttccttgatgttataggattaacatcactgggtgactttctggaattgcatcgatggttccttttggtgagaaaaggtcttgctgctggtcaagaatgtaacttgtagagcatgatgttgaatcgtgtgaaattagttcagtacttttgatctaacaaatagaaggtcgaattgggaaaggagatatattatcttttcccttgtatatcatggcaccgttatgttacgtctgcttagaattaaattcagtttgggtgttgcagggacccgtctctctttcgtatatcagggatagtagcaattgaagtacagcggcttcaggattggccatatggacaatggacacgagacgagtgtagagcgcgtggtgtccatcccgacggtgcaacagagaacgcaaagcaagtgttgctgtgtactttacaattgctgtgtattcgtataatatgtttgttaaggatgtctttaccagccattctatgattctatcctatcctctatcttatcccatattttaaacttaggccttatttgttttctaatactaaattttagtccttgtcatatcaaatatatgacaaatgttttggaagctagttagaatattaaatataatttaattacaaaattaattaaactgataagaactaaac

SEQ ID NO: 86608 - DNA, 1179 bp, Zea Mays
ccctttttattaatattgtataaacatatgattggaacaaatgcccatgtgagataagccttgtttagcctctgttgatactgggcgtcttctattaaagctgcacgctgaaaacaatcatgtaacacaaatacgagtgtttgtctgaatcgtatggatgttagaaattgttcccgtggatttattgtgatagtattaatcttgtttctggtctattttttgctgtggttaatcaattattgtttggaaaataatatgcactagcactatcttatcccgatgtattcatttctaattatggtaaaaaaaagactctgagttaacgttactcacattttttgcttgcagcttcaaatcaacgaccaacgttttgaggatgcagaggaggaacaggagagccatgaaaataatggacattagaaacagagacatgttcctcgagagcatcatgtgatttattttgttgtaaatcactaccgatgcagctcggtttgcctactgtttcatctacactttctcttcctttttccttgatgttataggattaacatcactgggtgactttctggaattgcatcgatggttccttttggtgagaaaaggtcttgctgctggtcaagaatgtaacttgtagagcatgatgttgaatcgtgtgaaattagttcagtacttttgatctaacaaatagaaggtcgaattgggaaaggagatatattatcttttcccttgtatatcatggcaccgttatgttacgtctgcttagaattaaattcagtttgggtgttgcagggacccgtctctctttcgtatatcagggatagtagcaattgaagtacagcggcttcaggattggccatatggacaatggacacgagacgagtgtagagcgcgtggtgtccatcccgacggtgcaacagagaacgcaaagcaagtgttgctgtgtactttacaattgctgtgtattcgtataatatgtttgttaaggatgtctttaccagccattctatgattctatcctatcctctatcttatcccatattttaaacttaggccttatttgttttctaatactaaattttagtccttgtcatatcaaatatatgacaaatgttttggaagctagttagaatattaaatataatttaattacaaaattaattaaactgataagaactaaac

SEQ ID NO: 86609 - DNA, 907 bp, Zea Mays
tgggccgacacatccacttctcatataaataacctcgaacccatactccggcgaaaacctatagcttgcagcgccacctacaccgagcagccaagcgaggaagcgaagacccatttccccgagcgcaagagtaccatggcggcggcggcagtttatggcggcctcaaggggaagcttggcgtcgaggatgcccccgagctgcagctgaatcgcatccgcatcaccctctcatccaagaacgtcaagaacctggagaaagtttgtgcggatttggtaaagggagccaaggataagcatctgagggttaaggggcctgtcaggatccctactaaggttctccacatcaccacccgcaaatccccttgcggtgaaggaacaaacacatgggaccggtttgagttccgcatccataagagggtgatcgacctgatcagctccccagacgtggtgaagcagatcacctctatcaccattgagccgggtgttgaggtcgaggtgaccgttgcagacgtgtaatgacgatctatatattcgtgttgcttttgtttttgtgctccccttgtgtgcctgtaagagagacatcgagttattgttagcttataatccttttgtagctgtatgtcttatctgtgggctgcgcaacttaaaattttggttcagtaatctagtttgtcagggcaactagttcgcttcagtcttctgtcaactattgtgatgaacctcgcttcgttcaattttttatgataaaccttgtatttagcacgtgaccgaattctattagcataaagtaaactgggtgtcgaccattatgtggtacctatgaggttcatgcagcagtttagtgctctacttgaagagtccatctctgtacgactctatacatacatgtagtcttttacttttacct

SEQ ID NO: 86610 - DNA, 2031 bp, Zea Mays
tgggccgacacatccacttctcatataaataacctcgaacccatactccggcgaaaacctatagcttgcagcgccacctacaccgagcagccaagcgaggaagcgaagacccatttccccgagcgcaagagtaccatggcggcggcggcagtttatggcggcctcaaggggaagcttggcgtcgaggatgcccccgagctgcagctgaatcgcatccgcatcaccctctcatccaagaacgtcaagaacctggagaaagtttgtgcggatttggtaaagggagccaaggataagcatctgagggttaaggggcctgtcaggatccctactaaggttctccacatcaccacccgcaaatccccttgcggtgaaggaacaaacacatgggaccggtttgagttccgcatccataagagggtgatcgacctgatcagctccccagacgtggtgaagcagatcacctctatcaccattgagccgggtgttgaggtcgagaagaaggtgcgggcgtcggcgcgcgtcaggcgctcccggggccactccgtccttgtcacgggcgccgcgggcttcgtcggctgccacgcggccgccgcgcttcgacgccgaggggacggcgtgctgggcctcgacaacttcaacaactactacgacacggccctcaagcgcggccgcgccgcactcctcgcccgctcgggggtttacgtcgttgacggcgacatcgccgacgccgagctcctcgccaagctgttcgacgtcgtgcccttcacacatgtcctccacctcgccgcgcaagccggcgtgcggcacgcactcgtggaccccatgtcttatgtgcgcgccaatgttgccggtctcgtggcgctgctcgaggcggcgcgctcagccaaccctcagcccgccatcgtctgggcgtcgtcgtcttcagtgtacgggctcaactcccatgtgcctttctccgagcatgacaggacggatcgaccagcctctctctatgcagccaccaagaaggccggcgaggagattgctcatgtctacaaccacatctatggtctgtcactcaccgccctcagattcttcactgtctatgggccatgggggcgtccggacatggcgtacttcttcttcaccagggacatccttgctggtcggccaattaccgtctatgagagtgccggtggaggttcacaccagactaccatttcccgggatttcacctacattgatgacattgtgaagggctgcgtagcggccttggatacagctggtcggagcacaggcagtggaggcaagaagcgaggtacggcaccgttcaggacttacaatttgggcaacacttcacctgtgcctgttacacagctagtggatttgcttgagaaactgctcaaagtgaaggctgtgaggaaagttgttaagatgccaaggaatggagatgtgccatacacgcatgctaatgtaagccttgcacaacgggagctcggttaccatccatccacagatctgcaaacaggcctcaagaagtttgtgcggtggtaccttgagtactaccatcctgagctggctgagaagcagaagctgcgtaccagtagcaatggcaagggttcacgtggtcgcaatggcagctcaattagcgcaagatgactgtgtatttagtgcctttatggcctctcctgacggcgtgtatcagaattctacctccattccttaattcatcatattgagaggctcattttgctcagcaaattgtgaaagtggaacagaagttaagaaatactcactaggtaaccatcataattcaaaagtctgatgcttctctttgctacctcgtagctgagcatttagtttctagttccattagttggatcttacaaagacactgtttcaaagatttttcatgtcatgggttttgggggatgacactctgttgcgtagactaccatagattcttttggtgacttcttccacggaagataactaagtatatcatgactttcttttgttcaattgaagtgacgatgatcagcaatttgtcta

SEQ ID NO: 86611 - DNA, 402 bp, Zea Mays
atgtcaatctacaaacaacatgctacaagattcggagcaatagagcgcttacaggaggaccctggagaggaacccgcccatcatcttctccggccactctgtgcgcgaccagatccgccaaagcgaacacaaatcaaaacaacatcaccgcaccagcacattcagaagagaaaccacagagaaccgaccataccgcaaagaaaccttgcaggagagggatctggccgggagacgaccggggcggtggatggacggaacagacggagcccgcccgtgaggagggagagaggaacagtcaggagctctggtttcccctctctctacgcaacccgtctcctccggcggctaaaaataccggtaatgcggtgccatggaatgcggagaggggagccggaaatgtga

SEQ ID NO: 86612 - DNA, 729 bp, Zea Mays
atgggagaggagagcataaatggtgcttccagcaaaagacagaagggttgcaagggcaaagtctcagaaaaagtgaatcctgatgataaactcaagcaacctacaatactggatgctttcaaaagagcaggagtaacagtcagtcaagcaacaaataaagcttcttcacaaccatcatcaagtggaatgatgtcaaaggatattgaacaagatgctactgatcctggtgaacttgggcttatagatttaatggcagcaccagttaaactagatttgcaaagatacaaattcagaactatccgtgcaacgtgcttgtctttgttgaactactcagagtgtcaaggttcatcttcttaccttcaaactgagctaccaacatatctatatcttctccatgatctgcataacaaattagataatctgaatccttcaatcaagccttttcttagtacttctaaagcaaaatatactcctactcattgccataagagtacacaagattttattgacaaaatccagccactattcttagttttaaggaagcatctggatggagcagtttcaatgatcaaagatgaatcagagagttgttcagatgactggagttcacattcatcttctgctggcaacccagacataccatatgtggttgtctccaagtcatcaattatgactgttgtatgcaaggagattcttgcctgctacaggaagacgagatctagaaactga

SEQ ID NO: 86613 - DNA, 5315 bp, Zea Mays
atggccggttcaagggatagctctgatatttctccaagcaacatcatagagccgacttgggaaaccttgccggctgacgagcagcttcagttcgaggagcacaaggagcggatgatccaggaggcgaaagcaaagttcctggccaacttcaaagtggacaggaacaacaaggtcgtccgacatcgggcgacggatccggcttcgctccaacccacgccagatatccccaatgtaagtaataccaacgagctacaatctcttagaaattatgtagaagagcagcgtgaacaaatgcagagcatcatagggggtatgcaaagcgatgttaagagactagtacgtgcattcgataagtctaacatcgcaaattttccttcacacgaggttgggttaggagataacgcgtgtaacacatcggctacaggttgtcacgaccagtcacaacccctttatgggatgccgatggacacataccctaagcaaccgcaaatcggcagcaaaccagccgatctgcacatgcccggaccgtccgcacgtgagcgcggaccgtccgggccagcaacagtcgggcctatttttaatgagttacccagatatacgcccgagccaccacacacggtacagaactcaaactacccagtcggacggcccgcatacaacgacggacggtccgcatataaccacggacggtccgggtacgtatccggacagtccgcgcatgagtattttgaggaggattattacatgaatcctcgcccgtcccagcaacacttcccatcacactatgcgatgcaccagcccattaattcaggatccaaagcccaggaaagctttccggtcccacctagaaggccggaaagaaacgatcaaacttatgacccatatagggcaaatgaaaatgcaccacgtaactcaaaccaatggggggaaagacaacatgctaatatccagccaaccccacctatgtttgaccagagagccggtggtcttgcaccggctgccattgatatagtaagggaagaaatagccggggcgttccgagataagctcggagtaagcatggtccctggggggcaatcatatcggaaaccttatgacagccgatttgatcatcacccatacccacagggaactagaatacccgaattcgcaaaattttcgggtgaccaagggaaaaacacgcgtgaacatataggccagttcttagcacaattgggagaattggccgacacagaggcatttcgcgtgcgcttattttcgttatctttaacaggaaccgcgtttgcatggtatgccactttacctcctaattccatttcatcatggggggatctagaacaaaaatttcatgatcattttttctccggtgactatgagttggatttggtagatttagtgtcattgcgacagacaaaagatgaatcggttaatgattacatccggagattccaagatacaagaaaccgatgctttcaaattcatttagcagaaaaacagttagtaggattagcctttaatggtctacgatattatttaaaagaaagattagaaggcatccaattctttacactagcacaattacaccagagagctttggcttgtgaaagccgaagcaaagaaactgctaaaacaattcgtcacaacgtacatgtagtagaatgcgaccaaagtagctcagaagacgaatcagcagaggtgtatgctgctgaaatggtttggccaaagcaggccaaatcttcggcttgtgcctccttacagccggttcaaaagaaacggcaagaggaggttaagtttacatttaatgttggtaagtgtgatagaatatttgatgaattactcaaaaatggcaacattaaaataaatcacactgttccatccgccgacgagctaaaacgtcgtgcatattgcaagtggcataactcactttctcatgccactaatgattgtaatgtattccgtcgacagattcaatcggccattaacgaaggacgattgaaatttcaggaaatgcaggtggacacggagccctttccaatgaacatgatcgactttgagggcaagaaagtcctgactcggccaaacacagccgatgaaggcaaaggcaaagaaatagtcatcggcgatgcaagaaaggccggtgagaatcataagacttcttgcagaaaagtggtagccgagaagactcctgatggaggggagaccttgaaggtgaccatcacagcctctggcactggggggcaaacacagacagggagacaggcgcaagaacccattctgcgcatcgcggacggtccgccatccagacgcggactgtccgacgcttctccggacggtccggcgaactccagcggacggtccggccgtgctcaggacccgcagcaaacacgtaccttcaaaccacgacgacccgagataggtacatggaaaacaaatacatttaaagcagctggtcggctgatcaagcctggcccgactttcgatcaattgttgtctaaatacgtgaaaaagaaggccggccccagtgaccggccaccaaagcgatcccgctcacccgttcatgagcaacgtcaggtcaggccgattggaccatctcaccaatcggaagaaatgaaaggtcctattgtacaattaagacctaacataccgacatggacccctccacctccttatacatctatgccatatccatacacatacttacctccaccatatgtcccaaatcaaatgtggggcatgccaccatatccatttgggatgccacagtaccccacctggggggcaccccaaacatccgtttttgataggttggcaccgccagtgcaagaccgattgagcgctgctgaatctggtcaccaggcacaggcccaacaagattgccggactactcgacctcctaggccgaccaatccggcaggggggcatatgcctgtagcaactcaaagaacaacaaaaaaggacatcatcaaaataggcactgcagatgttgtcatacagggagacaataaagggccgatgattttcggcgaatcggccaacacaacagaaaaggatacagctaccatcaaaacagctgatccaaaatactccatgcctcgatggtgcccagcgggattgacacgatcccaaaagagaaaattacagcgcctaagagcaaaggagagccaggagaaggaggcggaaaagacatttaatgacacacatccactatacccgccaccacaaaagaaatggagaccgaaggccgttgagaaaaaacaaacggccacaaaaatagaaagtcaatctgcaccaggcgcggaccgtccggcctctgcgcgcggaccgtccgccgttcaccaggaagtctctggacaacctgcaccaagcgcggaccgtccggcccccacacgcggaccgtccgccgttcaccaggaagcctccaacgacacgacaacatcaatggaagaggacgacctgctgggagaagacctggtcgactacgaggcttctccagaacgcccaggtatggatgtaaatattattacattttctgccgattgtactatcatcggcgacgatgaacttgttgttgcccagtttgattttggtcctaaagaagccgcctttactaaaccaaaggaatcggtaaatcatttaaagccgctcttcgtgcgcggtcacattgatgggataccgattgctaagatgttggtagatggaggggcggctgtaaatctaatgccttattcattatacagaaaattaggtaaacaagatgacgaacttgtcaagaccaacatgaccctcagcggtgttgggactgatagttcgatcaaagccaggggagtcacgtccgttgaattaaccatcgggactaagacccttgctgctgcattcttcgtcgctgatgtagaaggaaattacagtttaatcctaggcagagattggattcacgccaatcaatgtataccttctacattacatcaaatgctgatacaatgggtaggcgatgacatagaacaagtacatgctgatgtatcggcctgcatcgctgtggccgatgcccctgtactctggacttatgagactgctacatgtctcacaggagtagacttttctgattatcaattcataagtatagataagaaagttcggccgccaaggccggatggtctggtcttttcacaaaagagttcggactttaagaccgaacatctaccacagcgaaaagacagtattacggatgatccggtccacgagaccggaaagtccgccatcacacaaagatcatctgattcctctgtgggggacatgatagaggaattcagagatcttgataaactaggacaggggtttacatcggccgatcctttggaggagattgacataggagatggtaaaactccaaggccgacttttgtaaacaagaccctggagaccgatcctagagatgagatgatcggtctattgaaggaatattcagattgctttgcttggaattatactgaaatgcctggattaagccgagagatcgtagagcatcggctgcctattaaatctggtttcagacctttcaagcaaagagctagaacatttcgtccagatcttctcccacgcatcaaggacgaaatccaccggctgctagaagctgattttatcagaccttgcagatacgcagaatgggtctccaatattgtgccggtggagaagaaggagtcaggcttcattggtttatttgagtgggttgtcatgacatttggtctgaaaaatgctggtgctacttatcagagggctatgaatttgatcttccatgaattgttaggaaacactgtggaagtttacattgatgatattgtagtcaaatcggctgagtttagttctcatatagctgatttgcgcaaagcctttgataaaatgcgtcagtatggtttgaaaatgaacccacgtaaatgtgcttttggagtgtcggctgaaatagaccctgaccgaatcaagtctattcggaatgtgggacctccgacctgtaaggtcgaggtacaaaggtttctcggcaaggtgaattatttacgaaggtttatttctaacctagccgggaagattgatgcgttcacccctattcttcggcttaagaatgatgccgaattcgcttggggggcagaacaacaagaagcatttgatctcatcaaaaaatacttatcttcggctcccgtattaaaagcaccacgagcaggagtaccattccgattatacattgcagctgaggataaggtcattggggctgttctgacacaagaaaccgaggggaaggagcatgtggtgacatatctaagccgaag

SEQ ID NO: 86614 - DNA, 1194 bp, Zea Mays
atggctgcgcgacgcgagattggctccccttcccttgcacaccctgccctgagatcgcgcagacccgccaaatcgaggaatccgcgccccaaatcgaggaatccgcctccgctgtggaaggagatcgcctccggccctccgctgcgccccaactctcggtcggcatcatcgtccgcgttcgctgcgccctggctctcggtccttcacgcgcgcgcccttgacccccgccaccgcgcccccatccgccaccgcgccccaccccgcgcgatccctacccctagcccccgctcgacgcgccttcgtcaatcccgtctaggagcagctggcggccgacactactcgcttcgatcgacgtgcagtccttcaacgtcgatctgttgtacgagccgtgggaggtcctcgacgaagaccgtcgccccttcaccatgttcgcaccgctgctgccgccccttcaccatgttctggaacaggtgcctgtgcatgccggaccccgccgcaccactgctgccgcccaagaggatcaattcaggtgacctgtccaggtgcccgtgggacgagctggtctttgaggacgagtccgagaggggcagcaacgcgctgctcgcgcgggcgtggtcaccagggtggcagaacgccgacaaggcgctgacggccttcctcaacggcccgctgatggaccactccgtgaaccgcaagaaggccgacagcgccagcacgtcgctgctgtccccgtacctgcacttcggcgagctcagcgtccggaaggtcttccaccaggtccggatgaagcgcctcatgtggagcaacgacgacaaccacgccggcgaggagagctgcaccctgttcctctgctccatcggcctgcgggagtacttgaggtacctcaccttcaaccacccctatagccacgagaagcccctcctgtcgcacctcaggttcttcccctgggtcgtcaatgaggtgtacataattaaagtgctggaaaactcagactggatttacatcatgccttggggactgtacaaggctgtcacctacgtcaaggagaagtacagggatgaccggaatgcagcagaaattttcagagctaatggtgatataattggacttaaatcacactgtaatagtcagctcaaggtcattggtgatggtggtgatccaaatggccactatgacaaggatgatcatcaatga

SEQ ID NO: 86615 - DNA, 731 bp, Zea Mays
cgcgtaacccacatggtccacaaccccccggctgtctctacctccttcctcgctcacctcctcacgacgtgaggaatcgatcaggccaccgccgtacccgtcggagatccgctccgcccgcgcgatttcgatccgaaacacctcgtcggatcttcagggatctgactgaggggcagcgcgccggctgctgacacggcgggcacgcgcgcagccagccatggcgcgtggtggcggaggcggctgctgcccgccaatggatctgatgcgatcggaggcgatgcagctggtgcaggtcatcatacccgctgagtcagcgcacctcaccgtctcctacctcggagacctcggcctcctccagttcaaagacgtatggttgcttgcccctgctcgtcccttcgattacgggggtggggcgatccaacttgctccggagctgaatccctttcgatctaagatagtggtttggtgataagtaggacttcgtgatcggggcttcctgggagttagagagggtgtcctgtgggcattgcgattttggggaatttgcagctataacgtgcaattgtttgctgtttactgttcttcagcgttggaattgtggtataatggttcacattggtgtgattggttgtagttggagccatgaatttagcataggaatgtttttattgggaattatcttgcatatgcagaatttccagtagtcaatgaaaattacagttccagcaaaa

SEQ ID NO: 86616 - DNA, 3761 bp, Zea Mays
cgcgtaacccacatggtccacaaccccccggctgtctctacctccttcctcgctcacctcctcacgacgtgaggaatcgatcaggccaccgccgtacccgtcggagatccgctccgcccgcgcgatttcgatccgaaacacctcgtcggatcttcagggatctgactgaggggcagcgcgccggctgctgacacggcgggcacgcgcgcagccagccatggcgcgtggtggcggaggcggctgctgcccgccaatggatctgatgcgatcggaggcgatgcagctggtgcaggtcatcatacccgctgagtcagcgcacctcaccgtctcctacctcggagacctcggcctcctccagttcaaagaccttaatatagataagagcccgtttcaacggacatatgctgcccagattaaaaggtgtagtgaaatggctcgtaaattaaggttttttaaggagcagatgtcaaaagctgacataacagcctctcctacacaactaaatggaactcatatggattttgatgaattggagataaagcttggagaactggaagctgagctaactgaagttaatgcaaacaatgaaaaattacagaggacctataatgagctattagagtaccatactgttctccaaaaggctggtgaatttttctattcagctcaaagaactgctgcagcgcaacaaatggaaatggaggcaaatcaatctggtcaaacttcactggagagccctctgttggaacaggagatgacaactgatccatcaaaacaagtgaagcttggctcattgagtggacttgttccaaaggaaaaggcaatggcttttgaacggatcttattccgtgccacaaggggtaacattttccttaggcaagagcctgttgatgagccagtcactgatccagtttctagggagaaggtaacgaaaaatgcatttgtcatattctactctggagagagagcaaaaaccaaaattctgaagatatgtgatgcctttaatgcgaaccgttacccgtttccagaagatgttggcaaacaacttcatgctgttcaggaggtatctgggaagatctcagagttgaagacaacaattgacatgggtttagctcatcgtgacagtatactaaaaaatattgcttctgattttgaacagtggaaccatctggtcaaaaaggaaaaggcaatttatcacaccttgaacatgctaagtgttgatgttacgaagaaatgtttagttgctgagggctggagtccaatttttgcaagcattcagattcaagacgctcttcagcgtgctactcttgatagcaaatcccaagttggctcaatatttcaagttctcaacacaaaagaatctcctccaacatatttccagacaaataaatttacttcagcgttccaggaaattgttgatgcgtatggtgtagccaagtatcaagaagcaaatcctggagtattcaccattgtgactttccctttcttatttgctgtcatgtttggtgattggggccatggaatttgcttgttacttgcaacactctatcttataatccgggagaagaaactagcttcacagaaacttggagacataatggagatgatgtttggtgggcgttatgtaattatgatgatggcagttttttcaatctacacaggattaatatacaatgaatttttctctgttccatttgggcttttcggtaaatctgcctatgcatgccgtgattcttcttgcagtgatgctactaccgaaggacttcttaaagtaagagatgcatacccttttggtgtggaccctgtctggcatggtagccgcagtgagctaccgtttctcaactcactgaagatgaagatgtcgattcttcttggagttgcacaaatgaaccttgggattgtgattagttacttcaatgcaaaatttttcaggaacagtattaatgtgtggtaccagttcattccccagctgatcttcttgaacagcttatttggctacctgtccttgctcattattattaagtggtgcacggggtcgaaagcagatctataccacgttatgatctacatgttccttagcccaacagatgatcttagtgagaaccagttgtttagtggccagaagacagtgcagcttgttctacttctgcttgctttagtgtctgtaccttggatgttgattccaaaacctcttcttttgaagaaacaacatcagcaaaggcatcaaggtcaccagtacgctatgcttcagggcattgatgaatcagtgggagcagaattgggggaacatcatgaggacgcacatgaccacgaggagtttgagttcggtgaagtttttgttcaccaactgattcacacgatagaatttgttctgggtgcagtctcaaacaccgcttcataccttcgtctttgggctctgagtcttgcacactctgagttgtccactgtattctacgagaaagtactaatgacggcatatgggtttaacaatgttttcatccttattattggtgtcgtcatcttcatctttgccacgattggtgtcttgcttgttatggagaccctgagtgcattccttcacgcgctgaggcttcactgggtggagttccagaacaagttctatgaaggtgatggctacaagtttgccccattctccttcgcgctgattcgtgaggaggaagattgagcttgtctcaacatttgtatttattgtagccgataaaaaatctttggtggtctttgttcccagaccaaatcattttttcatctgttgtgtcggatgtggatcataaaccaccgtccctttgtttaaactgggacgaacagcatcatttttccttagctatgcagaggattcttgggttggttggcaacagatatggggtgatgtcacccttgtatgatgctaataagtagttgccgattgggcggtgtgttggatataaataagcactgtattgaaggttagacaatctccatcacgttcattgtcaataaaataaagagtgctatttacgctgctggtgttaatcatctcctggtctgttgttaaccattgtcagtgcttcatcttatcccattgatactctgaatcagctgtctcttataaccaaagcaaaagctaaaccagaatcacgttataaaagtagttaaacatgtcgagtctgtctgcttgtgggcaatctagtaacataggtagctgcagcctagtttcgtcagtcgtcaacgacgttgggaacgctgctggtgctgcgcctagagctgctgaaaggtcccgtgacagtccggccaacgaacttgccggccttgctgagtccgctaccgaacgcgccaatgccggagccgacggcgccgatgcccgtgccaaccatcccaacgccggagccggccgcgctgacacccgtgccggcaacggtgccggccgccgcgatgcccgtgccggccacgttggtgaccgtggacgccatgccgcttgccgcgtccgcggcgccgctgacggcccccgtctcgctcttcaccttccgccgctcatccacggtctgcttctccagctccagggcctcccgcgcctctgcgttggtgaactggtggtacgccaccttaatgctgagcacgcccctgtccttcttgtccttgaccttggtcgtgtccagcgacgacagcagctgcagtttcacctcctgcacggtttccatctccaggtcgctcaggggcagcttggcgatgccaagcctcttgtcttgcttcatcttgtcctcatc

SEQ ID NO: 86617 - DNA, 5732 bp, Zea Mays
gcccagatccagatccacgcggcgcggcgcgaccgcggctaccggatcccgccgcggaataatggcctccgcggttgcggcgccgccgccaaccccgccggagtccgacccgcgcctcgtcgagatcttctcccccttcctcgagaagctcataaaaaatgcctcgtggcgcaacaaggcgcactccaagctctcgcacaccgccaagtccatcctcgaccgcctccagaagcccccgccgccgcccgcagccgaggcgcaggcgccgtccacgccgacctcctccccctcgacgccgacctcctcttccgcacagcctggtccgttgcgcagcctgtcgctcgcggactcggagctgctcctcgcccctgtgatctcggcactcggctcgggcagcgccaagctcgccgaggccgcgctggagctccttcacaggctgatcgcacactcctacatccatggcgaggccgacccatctgctgatccctcagcacagctcgtcgcctcactcctggacgccgcctgcaatgcgcttggccttgatgacgagcacattgagctcctcctcctcaagacactcctctcggcggtcacctctacgtctgtacgcctccacggcgattgccttctacgtgccgtgcgcgcatgttatgatatgtacctcgggagccgtagtgccgtcaatcaagccactgccaaggcttcgcttgtgcagatgctggtgattgtgttccgccgaatggaagctgactcctcgaccgtgcctgtacaacccatagtcgtggctgatgtgattgagctacctgatgcaatttcgggctcctcgcccactgctgaccccaacgttgtacagggattcatttcgaagatcattggtgacttcgatggtgcactcacacctctggctcggacaacttcatcagcaggggcaggacccaccgttgcccatgatggtgcatttgagacaacggcagcggcagaggaaggggcaaacccagcggatttgcttgattcaacagataaggacatgcttgatgccaagtactgggagatcagcatgtacaaaacagctattgagggtcgtaaagatgagcttggtgtcgagggggcagtggttggcaccttggacgatgatgctgatgtgagaattgggaacaagttacggagggatgctttcttagttttccgggctttgtgtaagctttccatgaagacaccacccaaggatgcaccagcagatcccatagtaatgcggggaaagatccttgctcttgagcttctcaagatcttgcttgaaaatgctggggctgtgttccggaccagtgagaggtttctcggtgctatcaagcagtatctatgcctgtcacttttaaagaactgtgcctcatcccatatgattgtttttcagctatcttgttctatttttattagcttagtggcaagattcagaccaggattgaaggcagagattggtgtattctttcccatgatcatcttgagagtgttggaaaatattgctcaaccaaattatcaggcaaagatgattgttcttcgttttttggaaaagctctgtggtgattctcaaatcctagttgatattttccttaattatgattgtgatgtccactcatcaaacatatttgagaggatggtaaatggtctactaaagacagctcaaggacctcctgctggtgtccctaccacattggtaccacctcaggacaccacaatgaaaagtgaagcaatgaaatgcttagttgctattctgaggtccatgggagattggatgaataagcagctacgaattccagatcctgcttctcctaatgtagaatcagagaagaacgacaatgatgatggcaatgagcttccgcaggcagataacaatggagatgagtctagtgaagcatctgattcacattctgagttatcgaatggaatttcagaggcagcatcattggaacaacgtcgagcttacaagatagagcttcaggagggtatctatttgtttaatcggaagccgaagaaggggattgagttccttgttaatgcaagcaaggtgggggagacaccagaggagatagctgcgttcctaaaaagtgcttctggcttgaacaagactatgattggtgattatttaggtgaaagggaagatttatcgctgaaagtcatgcatgcatatgtggactcatttgattttcaaagactggagtttgatgaagcaattagagctttcctccaaggcttcaggttgcctggagaagctcagaagattgatcggattatggaaaagtttgcagagcgttactgcaaatgtaatccaaaggccttttccagtgcagatacagcttatgttctggcttattcagtcataatgcttaacactgatgcacataacccaatggtcaaaaataagatgtcaccagaagatttcattagaaacaatcgtggtatcgatgatgggaaggacctacctgaagaatttatgagatcattgtatgaaaggatttggaaaaaggagattaagatgaaagaagatgaatttgttccacagcagcaacaatcaacaagttctaacaaaattcttgggttggataacattcttaacattgttgtacgcaagcgaggttcatctatggagacaagtgatgacctcattaagcatatgcaggagcaatttaaagaaaaggcccgcatgtctgagtctgtattttatccagccacagatgtagttgttttgaagttcatggttgaggtttgctgggctcctatgcttgcagcattcagtgttccacttgaccagagtgatgatgaaattgttgtatcccagtgccttgaaggatttcgctctgcaatccatgttactgcagccatgtcaatgaagactcaaagagatgcatttatcacttcacttgccaagtttacatcacttcactctgctgctgatattaagcagaaaaatgttgaagccattaaggcaattctattaattgcagatgaagatggaaattacttgcaagaagcatgggagcatatattgacatgtgtttctcgttttgaaaatctacatcttgttggagagggagcacctccagatgccactttctttgcgctgcagcagccggaccttgataaatcaaaacaggctaagtcatcgattcttcctgttctgaaaaagaaggctcctaatgctacttcagcttctaaaagaggctcttatgatagcgctggtgtcggtggcaaagcttctggtgtggatcaaatgaataatgaggtgacaagcctcttggagcaagttgggatggctgaaatgaaccgtgtatttgtaagaagtcaaaaactcaacagcgagggtataattgattttgtgaaggctctctgtaaggtttcaatggaggaattacgttcggcttctgatccacgagtttttagtctgacaaagatagtcgagatagcgcattacaatatgaaccgcatcagacttgtttggtcaagtatatggcatgtcttgtctgatttttttgtcaccattggctgctcagaaaatctttcaatcgcaatatttgctatggactccttgcggcagttatctatgaagttcctggagcgtgaggagctcacaaactacaatttccaaaatgaatttatgaagccttttgttgttgtaatgaggaagagccgagctgttgagatcagagaacttatcattaggtgtgtctctcaaatggtattggcccgtgttagtcatgtgaagtcagggtggaagagtatgtttatggtctttgcgacagcgtcatatgatgatcacaaaaatattgtactattggcctttgaaattatagaaaagattttgcgggaatactttccatacattactgagactgagacaacgactttcaacgattgtgtgaattgtcttatcgcgtttactaacagcaggtttaacaaggatataagtcttaatgcaattggatttcttcgattctgcgcagcaaagttggccgaaggtgatattggatcctcaaggttgaaggacaatccttcaaacagtaatccaccctcgcctcatttgactaatgatggaaagcaggaatgcacagttcttgttgacaaggaagaccatatacacttttggtttcctttactagcgggactgtctgaacttacctttgacttaagaccagaaatcaggaaaagtgctttgcaagtgttatttgatacattaagaaaccatggccatcttttctctctgcctttatgggagaaggtgtttgattcagtgcttttccccatatttgattatgtacgtcatgctattgatccatctggtaatcctccacaaggacaaagcgtggaaaatgatcctgcagaacttgatcaagatgcttggttatacgagacatgcactttggcacttcagttggttgtagatctctttgttaagttctatgatacagtcaatcctcttctaaagaaggttctgctgctcttgacaagtttcataaagcgtccccatcagagtcttgctggtataggtattgctgcatttgttcgtttgatgagcagtgctggatctatgttcgtggatgaaaaatggctagaggttgtattgtcattgaaagaagctgccactgagacacttcctgatttcacttatgtttcatctggagcctacctggaaaatgtgccaacagaaaatggagtctctgctgacaatagagaggacgaatctgaaccagtagcggatgacaatgaagaatcctctagatcaaggaatctatactttacaattggtgatgccaaatgtcgagctgctgtacaactcctgttgattcaggctgtgatggaggtatataacatgtacagaggacagttatcagcacagaacacagtaatcctcttcgaagccttgcatactgttgccgcacatgctcacaaaataaacagtgatagtgatttgcgttccaagttgcaagagttgggctcgatgacacagatgcaggacccgccattgttacgccttgagaatgagtcgtaccagctgtgcctcagtatccttcagaacatatttctggacagctctcctgatcatggaagcacagaggtggtggagagtcaccttattggcttgtgcaaggaggtccttgaggtatacttgagcacagcaagaccttctcagccttccagtggcacacagccgctaggccattggcttatccctgttggttcatcgaagcgaagggaacttgcggcaagagcacctcttgttgtctcaaccctgcaagctatcagcggactaggtgactcagctttcgagaagaaccttcgccagttctttcctcttctcgctgggctcataagctgcgagcatggttctagtgaagtacaggtggccctgagtgatatgttcagcacttgggttggcccactcgttctccagtcttgctgatgctgaacatcatgttatacatagtagtatacatcccatcgtgttcctcctttcctccattatgttatgttaatcttttagtcgctgggagttcatattgttgtgctgaactgatcatgcagatcaatttttccttgacgttattttcttgttcgtatcgggaggagtgtatgtcactatagagaactgaattatgtacggtagtttagctaaaattgtgcccattctgttcctaatgtgctgatttctagatttttaggcatgttttgcatgcttttgctca

SEQ ID NO: 86618 - DNA, 2248 bp, Zea Mays
atgccctcgcggcagcctacgccgtcgccgggcccggccgccgccgtcgcggtctcggacccccgatcccgcgggccccgccaccgccgggccccgcccgccggccccgtcgccgcgtgggcgtcggccgcggcgctggtcttggtggctgccgtcgcgctgctgctgctgctgctgtggcggaggcgccgccgccggaagctcaccgtggcggccggcgcgcagcccgccgccgacctgcggaggttgtcgtaccagcagctgcgccgcgccacgggcggcttcgcggcggggagcaagctggggcagggcggcttcggcccggtcttccgcggcgcgctgcctcggtcggggcagcccgtcgccgtcaaggtcatggacgccgcgggctccctccagggcgagcgcgagttccacaacgagctctccctggcctcccacctcctcggctgcgccgccacggcccacggcggaggaggagggggagggccccccgcacccgacccgccccccatcctgctcccgttcgcctactccctctccacgcagccacgccgctgccggatgatgcttgtgtacgacctcatgcccaacggctcgctgcaggacgcgctgctcgggaagaggtgccccgacctggtgtccggctggccgcgccgcctctccgtcgcccgagacgtcgccaccgcgctccactaccttcattccgttgtgcagccgcccgtcatccacggggacgtcaagcccagcaatgtgttgctggatgcggatctccgcgcccgcctctcagatttcggactcgcacggatcaggtctgaagaggaggatgagttggggagcggtgccattggggccgacgcagacggtaacgccaatcccagcggtggatgtgacgaggatatgtcggtggccggcgagagcaccactgctgtcgtggttaatggggaagacaatgctgccaagtccccggaggatgatgaggcactcaccacggcgtctcctgctgcagaggctgtgtccacttccggatgtgacaagactagtgttggtagtggatgtaatgcccgaagctgcaatgggggaggtgcaggaggatcaggaactgggagtgactggtggtggcgtcaggacaatggtggtggtggtagtggcggcggcggcagtggcggcgttaaggactatgtgatggaatggattagatcggagatcaagaaggagcgaccgaagaatgactggattgcagggccatctgcagtaacccctgttgctccaacagagaggaagaagccaaagaggagggcacgggagtggtggcgcgaggagtatgcagaggagctcacgaagaagcaaaaacgaagggcacttgccaagtcaaaaagtgatgctggtgcgatgtctggtttgcaatggtgggagagggattgtgattttgaggagaagggccattcaaggtggacgatgatgaaaagctggagccggaggagcagcaatggcaatggcaatagcaattccagcatcagttggtgggtggacggtgtgagaaggagcagcagggattgggccagcggggaatttgtgcctaagagtggtggagcagtgagcagcacaccgagcatgcgtggcacagtctgctatgtggctcctgagtatggtggaggagggcctctatcagaaaaatgcgacatttacagctttggtgtgttgttgttggtccttatatctggacgacgcccactccaaatgacaacctcaccaatgtcagagtttgagaaagcgagcctcatttcgtgggcaaggcatcttgctcaagttggccgcttgcttgatcttgtagaccctgcactgcaggatgttgaccgagaccaagcgctgctatgcattactgttgcactcctttgcattcagaggtcaccagctcgccgcccatcaagtgcagaggtgcttgatatgcttgctggtgagggtgagccaccgcctcttccgatagagttctcaccatcacctcctggcggattccccttcaagtcacgaaggaaaggccggtgagtttagtttgttggttagatgaaaaggcagtgttagtattctatccttatgtttgtttcttcttgtactcaactcctaattttatctgtttaatttgttgatgtataaagatcttggtgggacaaaaaagtatccaattgggttcagatttgacaagaattgctgtgccccattaatcaattggataatcttagtttggtta

SEQ ID NO: 86619 - DNA, 537 bp, Zea Mays
gtgggagtgttagcccaatttatttcattatgatttgtaaaggtaaagtggatgtaaaactctctggtataattatgctctacaatgcagggaacagttcccctatggttaggatgcaacataagcataccgtatttgaaagatattaagagttcagtgaagtatcatttgaatgtgaccatcaaaggatacaaaaatttacagtggtgatcatgacatggttgtaccttatattggcacacaatcctggattagatcccttaatttctctattgtggatgactggagaccatggtatgttgatggacaagttggagggtaagtcattttttctcctgcatggtaagagtgcttaatactggacccaagtggaactcagacatgcaactttcaccctcaggggaaaatacataaatcagtctgacattacacatatatgttatgtccatatatacaatgttgtactcaactaacctcacatttgcaacggtgaagggcactggatgttcgtagtttcatctaaatttgcaattaggt

SEQ ID NO: 86620 - DNA, 1965 bp, Zea Mays
attcgcccgtccgttcattcctctcctccccgcctgtctcactctgcaactgcatgcacatggaactagcgccgccgccaatgggggacgtcgcccaccaccacgtccacgaccccgcgtccttctccccgctctcctccgacgccggcctctccccgcacttccctcccgcgctcgcggacggcggcgccggcgcgctggacctgtccttcacctccaccgcctccgcctccacgtcctccttcaccaccgcgaccacgttcagcgcgcggagctcgctgtcgctgccgtccttctcctcctccacctcgctctccccgcgcccgcactcctcctcggcgtccccgcactgggcgcacctcgccgcggcgcgcgccgccacgcccgacggcgtcctccgcctcgcgcacctgcacctcgtccgcgagctgggccacggccacctcgcgcgcgtcttcctctgccgcctcaagagctccccgcccgcgtccccgctcttcgcgctcaaggtcgtcgacctccgcgacgacgacccctcccgcgtctcccacgtcctcgccgagtcgcgcgtcctctcgtgtctcgaccaccccttcgtgcccacgctctacgcgcgcctcgacgccggccgctacgcctgcttcctcatggactactgctccggaggggacctgcacgcggtgctccgccgccggccgggcggccgcctgcccgtcgccgcggccaggttctacgccgcggaggtgctgctcgcgatcgagtacctccacgcgctcggcttcgtgtaccgcgacctcaagcccgagaacgtcctcctccggggcgacggccacgtcgtgctctccgacttcgacctcgcgctcccggcgtccgtggagcccgccgtccgcctacggcaggtgcggaagcagagccgccgcaggaggatcgccctcctcctgtcgtgcttctctggccccagcaatggcggcggcgaagacgaagaggagatcgacggcaaggagcggttcgagttcgtggccgagccgacggcggcgagctccaaggactgcgtgggcacgcacgagtacctcgcgccggagctcgtgagcgggagcggccacggcaacggcgtcgactggtgggccttcggcgtcttcctctacgagctcgtgtacggccgcacgcccttcaagggccacaccaaggaggccaccctcaagaacatcctctccaagcaggccacctaccctcagctggacggcgaggccgacgcctcgcagctgcgggacctcgtggggcggctgctggagcgcgacccgcgccgccgcatgggcgccacgcgcggcgccgccgagatcaagcggcacccgttcttctccggcgtggactgggcgctcatccggtgcgtggcgccaccggtggtgccggacagggacgccgcggcccccgtgggcggcggtgacaggaaggcggccaagctcgggagctggagcagcatgagcagcaaccgcggcagcaagaagcggaagagcagcagctttgggaggagatccacatccacctgcgaagaaaggcagggggtcttccgcaagctcatgagctggaatcaggagagccggtccagcaacaagatcaagacgacgacgagcaaagtaaaatgaacgaaacgaagtgttcttagcttcttggtgtgattattcggggttgtttgatggagggttttcgttcgtttagtgtccggccttagcttacttattactttttttttgttagtactctactagcagagtacatgcatagagtgggtcagtggtgtggctgtggcgtggatcagattattgatttggtcgagctgtacaaatagcgaggcgatgcatgtcactgagctgatcagttgacaaggtggtttggaccatgttcaggcatggagaaacttcatcccttgtttagtactagtataaaagaaaaagtttagcttctttt

SEQ ID NO: 86621 - DNA, 267 bp, Zea Mays
atggcgttgcgcccgcatcctgccccgcattccccgagcgcgaggcgcgacgtcgagctggaggagcggctggcgcgcatccgtggcgagatctctcatccggctaaacatctaaatgacactgtgattgtttcacagttcaaaattttctgcaagtctgactttgaaaggatcttcaaggaagtcttcgaggacctgtcagacaagaacacggggatcctggacatcaactcccgccacgtcgctaccctcatggtttacaagtga

SEQ ID NO: 86622 - DNA, 90 bp, Zea Mays
tgcatcatccggtgaggttgcgttttactacttgtttattgttgccacgaacgagttcgcactcttctcctctcttcctgttcaaccttc

SEQ ID NO: 86623 - DNA, 660 bp, Zea Mays
atgggtgggcgggcagtggatgggggggctgctccacgcccactggtcttgtgcctcgggcgcccgcgtcctggtctgttggactggagctcctgcctggcattcgtcgctcgcttcctgctcctcaactcagtcttggctacggggacacattctcgccggcgccgttcccgacattcatggcctcgtgtttgtgcccctaggcttcggtggctgctggagccgaccttatggcgttgttgccttttggtgtgccagcaaactagatcgtggcagatgcaacatgtggactttgtttgtgtctatgggctagttcgcgactctgtcttcgtaggacgctcatggccgtttgatattatccaagagttggtggtatgccggtatgagcatggaaagaaggtggacgcaaggctggtgatctttgactttgcgtggcgtgcctggcgtgggcgcgacgagttcggctacggctcccgcgtcgcctacttcatctctggcacctgcgacgacgacctcaccaagctgctcgaggagtacgacgaggctaccaaggaccgcctccagtcgctcaagatccggtatcccttctatgtatcccttctaaattctaaaagtaacaagcagcagaagaagatccggtatccagtcgctcaagaataa

SEQ ID NO: 86624 - DNA, 1044 bp, Zea Mays
atgtcaactatcaaggggtgctccatttccgtcacgagcgctggcatctggtacgacagcccaaatgagcagccactgaggaggtccaacgatgacatggacatgggaacactctccgtagctcccaaacaatttcacacccgtgtaccgccagcgcgagctcacagtcatagacgggatctcgccggtgtcaccattcccgggttcgctgccggcttcatcaaagggtcggattcaaccatctccatgagccgcggccacatcctagtgctgccgaagaaccacgacccgtcgccgctgggacagggcaccaccgtcacagacgcggaccccagccagccatggcgcaaccagggcagcacaaggctgggcttcctgaacccgaggtccctgtcgatggcgaacggaagcagcccggacatgatgagcgcaaggctcccgagccccagattcaccgtctctatccacttgccgtcgtccctgaatgccgccttccgctcctccatccagtctactagctcctggaaccgcgccgccgtcgtgacccctgcgatggtcgcgtgcaccatgcccgccacctcggggagcggcacgcgaggatgtcgggggcggccatggcgcggtggaggaggatgtcgcagggggtccatgatctcatcgcggtgtgtgcggagggcgtggtggggatgcgcgacgcgagatctggtggcggtcgtgggatggagaggctatcgcgaccgagatttccggaggcagaacacagccgcatgtggacgccgcgcagaaattggagaccgccctgccaccgccatcatcggccccaacctcacgaacgaacacggcgcagggagcagagatcggctacgtgaaatgtggaggccgtggagcacaggggagcgcgagattggggggattatggcggctgcgggatgctatcgcgaccgagattctggaggtggcggccgcgggatggagaggctatcgcgaccgagatttccgaaggcagaacacagccgaatgtggacgcctacaatgagtgcttaa

SEQ ID NO: 86625 - DNA, 2367 bp, Zea Mays
ggagaaaggagacgacgacgagtcgacgacccgctcgctttgctcaggcattctcttcgcctcccccgtctttaagctccctccctttatctatcccttccttcgcctatcttcgtctctctccgactctccctcgcccgcgcacctttccgcgccgcctccttcctttcctcgcgtgctctggcgcgcgcaaggatcaaaaggcgccggccactagaggcgagtgagtcgcatgtaaacgaccaccagctgctgtgatctcaaaagggagcgagagacaaaggagaggcgagcaggtcgtggcggcagcaatcgttgcgaatccgcgcgggattctgtcctctgcaccactgcttcccgctttcctgcccggcggaagtggtataattctccaacgcggttgactgtattgcctctcgctctcggtgggtgggggcatggacgaggcagaggagatgcaggtggagaggctgcacgaggaggccgatgcggggggagccgacacggacaagctcagctacgagatattctccatcctcgagagcaagttcctgttcggctataccgacccgcaccagctctggctgcccaagccggcggcggaactgccggcgcaggcgtccgcggcggcgccgggtaaggcggcgcagcgcgggaaggtctgcgtgctctgcgtggacggcggcgggggcggcctgcgggcgctgctgccaggccgcgcgctggcgcacctggaggccgcgctgcgccgcgcgtcgggggaccccgacgcccgcgtcgccgactacttcgacctcgcggcgggcaccggcgccggcggcgtgttcgccgcgatgctcttctccacgcactcgcgcggcgcgccgctgttccacgccgacgacacgtggcggctcgtcgcggaccacgcgccgcgcatgttccgcaggcccgcggcctcctcgtccacgtccctcttctgccgcggcaagaagcggcccctggccgcgccaacggcggcgctggaggcggcaatgaaggcggcgttcggccaggagctcaccctgcgggacaccatcaagcccgtgctcatctcttgctacgacctcaagacgtccgcgccgctggtgttctcgcgcgccgacgcactggagaacgggagctacgacttccgcctctgcgaggtcgggcgcgccgcgtggtccgaggccggacgcttcgagcccgccgaggtggcgtcggtggacggcgccacgtcctgcgccgctgtagacggcggccccaccatgggcagcccggcggccgccgccatcacgcacgtgctccacaacaagcacgagttcccgttcgtgcgcggggtcgaggacctcctcgtgctctccatcggcggctgctctggcggaggctctggcgccgctggcgaggcggaactccggcgcatgcgtcggtggggtcccaaggagtgggcacgccccatcgcccgtattgcggccgacggcgccgccgaccttgtcgaccacgccgtggcgcgcgccttcggccaatgccgcgcatccaactacctgcgcatccaggcgaagcgggagagcatgccgccgtgcggtccggacggggagtacgacccgaccccaggcaacgtgcgcgcgctgctcgcggcggcggacgagatgctcaagcagcggaacgtggagtcggtgctgttcgaggggaggcgagtcggggagcagacgaacgcggagaagctggactggttcgcggcagagctcgtcgccgagcaccgcagcagagcctcccggatcgcacccaccgttgcgttcaagcaggcgccgcagaagccgtaggcgctggactgagctggtggccgtaagaccgtggcgttaagggcatgtaggcctctctttcttcttgcttgggctggcggctggaattcctgctgcatatttttgacgcggcagcatggcatatcaatatggcattgctcccgggaagcatttgccgctgtgaaatcgtttcaagggaggatggaatatgaaaggaacgaacgttgccgatataaaaattctaatcttcagttcagcttaggagatatattagttttttcttgatgcagtttttttttgctgtcctttatgcaatctagtttcgttattaggtgtttggacttcagtgtcggtagagcttttgcttaaagatgtcggagatacaatggaaacgcctgaaaacttctgccatgcaattacgtacgcagatacaactccaatcagtctgcattgtttactgaagttttaaactgtagatgaacagtgtgtgcgaatgataccttatcccccttgtcagaatacccccatccttgattcttgatgttgggatatgttttgtacttgtagg

SEQ ID NO: 86626 - DNA, 225 bp, Zea Mays
tacctggatgacattggtgacttgtttcacttcccagccaactattgtggaaataaacaccaagataatgatggggatttggttcaggagacctttgcatgccttaagcaagcttgttgacttctcatcagcaaagagaaagaggataatatattcaaaacctgtaaaaacacagcagaaggccatgaatggcctgtaccgataatataatttcagaaatcaata

SEQ ID NO: 86627 - DNA, 550 bp, Zea Mays
cagggcataacagagaaggcatgtaatcaaggtgaaatagtcattttttgtacaaatttatgagacaaccttctcttcccctggtttcctggaggaagtcaaccagaaatgaggaatcctcctcgctacgcttcttaaggtagccatggcacacgcatgcatggtgtatatatggtacacactcttcttggcatcttggtctcccacctccagataggcagatacagcagaggtcggcaaagccatgccagaaccttacatacgtaaaggtaaagtaccagttacattccccattgctcaaatgagagaacaaacctttagggaaggcctgaaggtccgcaaacgagagccatataatgtttcagaactgactttgatcatggctacacctcttcctgctgcggatccagtgctgggagcggtggcgattggggcatctgttgctgatcttcagatttgttgttcactttgatctcgaggagacgctcaacaggctgcctgcagatggggcaccgagtggtttggtacctcaggaccttggcgcactcac

SEQ ID NO: 86628 - DNA, 500 bp, Zea Mays
aatttggtttagacatggatgttagatggaattcaacttatcttatgctaaaacatctattgccatataagtctgtgttttctgtgttcattaatacacactatggctatcctctactgaatgaacaacattggtatgtagctgaaaaggttttggagttccttgagttgttttatgaatcaactgttgtcttgtctggtgtttattatcccaccagtcctttggtaatccatcacatacttgaatttgctagccatttgcatgaacatgaacatgatactaatctaagtgatgttgttgttccaatgaaagctaagttcatgaagtactggaagtctataccaatgttatattcctttgcatttgttctagaccctagagctaaaatgaggggtttgtataatgttcttgaactgctttctcaatctaacaattataattacagtacttattttgctgatgttaagactgagttgtataagctatatgccaagtatgaa

SEQ ID NO: 86629 - DNA, 2067 bp, Zea Mays
atgggggcgggttcgaagaggcggtccaccggggctcacaaccctagcctcgagtccgacggggaggatgcgcggcaggtcaaggaggagcttgccgacgacctcaacggataccctgcggaggaggaggaagacgaagaggtggtcgtggaggacgatgaagtggtcatcccctctgacgacgaggaggacggtggcagcggggacatcgtcttcgtccccaacacgctggaggaggccctcgtgccgcgggtgggcgtggtgttcgactctgtggacgaggctttcgcgctatacaaggtccacgcctaccacacggggtttcatgccgtgcgccgcacttgccacaactgcgaggggctccgctaccgctccaccttcacctgcatgtacaacggcaaatctgggacgggcgctgccccctctgacgtcccaggtacccgctacccactccgcagcaaacgggggttggctgccaaggagaagaagtctcgccgtggcactgccgagaagactggatgtaagacgatgttgatcatccgggacaagcgtgtggatggaaggtggaaggtggaatccgtcggcttggagcataaccatccttgtactccagatatggtgagattcttaaaggcctacaggaagatgcctgagtcagcaaagaagaaggccaatattacagatgagatggatgaaatggtggagaagtcgctgagcgagattgctgagacaaggaagttcccgacacgacccaagaggagtgctagcgttggggctgctgttggtagccagaggtttagtaggttggagagttttgtgccgcttttcggggaggatgacctcaattcactcaagaagttcattgaaaagatgcaacacaggaaaccaaactttatccacagctgggatcttgatcgggaaaatcttgtgaagaatttcttttggactgattctagagcccaggcgcaataccgctattttggcgacgtcattacacttgacatgatgtatttacaacactcatgcgccagcctcccattagccacactccttggggtgaataaccatggtcaccttgtgcttcttggttgtagtctcctgtctggtgacagcaaggagaactatgtttggttgttgaagaggtggttgagctgtatgaatggcaaacccccagaggcaatcacgaccggctattcagatgtcatttcagaggctgtggctgaggtgtttccaaatgcaaggcatcgattttgcttttggcacatcttgaagaagctacttgaaaatgtggttcgcacacatgagaaagaggcaatttcctcaagcttcaaggaggttgtatatgatagcgtcactcttactgacttcgaaaaagagtggggggccatggtcgaccagtacaatctcaaagacaatgagtggttctctgctttgtacagttgtcggaagcagtgggcacctgggtatatcaatcattcattctgggctggcacctctgctatcaggaaggctgaaaaaactgatccatattttgatagtgttgtgagtaaaaccacccttccagttttccttgagcaatacgaggctactctgaaagagaagctggaaagagaaacatatgccgatttgcggccatactattctagactcactttgttgtcgggattgccctttgaggagcaacttgtggagctctacacagtaaccatgtttcaaacgttccaagatgagattaagcaattgatgcatgttacttgtaaagaggtagacagaagtgggaactcaattacttacattgtcaatgtcattgacatcggagcaagagaacctgagctgaaggagtttgtgttgtcagccttgaaggaagcaaaggacagactaattaggcctgatcacagcaagcaaggtgatcaacaggttgatgtaaatatgactgtgactggtcaggtgcctgcagatacaagagttgataagaacatggcgtcacacacctcagctctgattcagggggatagaagggttgatgcggacatagcgccaaatgtgcccagcattagtccatggtga

SEQ ID NO: 86630 - DNA, 913 bp, Zea Mays
atggaggaccgtgattggatgtacacgggccgcgttcgacgtattgatgtcaccccagaatggattaggaagaccgatgctttcgtggaacgggcatatggcgaatctgctaaaggagctagcctagtcccttgtccgtgtatcatatgtgactaccggaagataagaccagaagaaggtcatggtagaacatatttggaagaatggatttacgccggactatactctgtggatcttccatggtgaagcgcatcgcacgagagaagatgtggtgagacaacgcgtcgaggattacgatgctgatgccggggtaggagacatgttgaacgactatcacgaggcacagttcgccgaaggacgtacggaggacgagccagaggcgaccgcaaagacattctacgacatgtttgacgcggcacagaaaccccttcacggcaagacaaaggtttctcaactggatgccattgggcgtataatggcgttcaagtcgcagtatagcatgagtcgagacgcattcgatggtttgttgacagttattggcagcctgcttccggaggatcacgttctgccaaagagcatgtacgaggcacagaaactccattatacgcgagcaaggagcacgagcgcgagcccagccatacgacctcggcaggacacctcacagcatcgtatccagcaactccagactcagctagatgatgagaggaggcaacgtgaggagctagagaagaggatggcggagatgttcgcgtacatgcagagccttggcgccgcacagggtcatgctccaccacctccgttgttccctgcagctgaccctacagagttcactactcctggtcaatcggcggcgtcgaacaaccctcatgcttcgtccagcccttcgccgaaccagtccagatgcccacctcgt

SEQ ID NO: 86631 - DNA, 231 bp, Zea Mays
atggccacctggagggttggcccttcttcagtagggaaagcaaggataaatcctagcagcccgaatttcttcttccgatgcttccctgctgattccgaggcgctgatatggatccttcacatggattctgggaaagacatgggtagcaaatactcacaaattgaagaatcagccatgtccccaaacgatgcagttgccagtggtgtgatattgggatttctgggtgcataa

SEQ ID NO: 86632 - DNA, 2884 bp, Zea Mays
gtccgctttctttaatcaatcctccgcgccccacaaccccaagcaactcccactaatcgtcccctttccttccctttcccggcgggggcaacaatggtcggtgacggcgatcggtttgctgcatcggcggttcctgcggcgccgtgcaggtttctcggtcacctgtgagctcgatttgaccgcccccacctggcgtcgtgctggttccgttctgggtattcttggcgctggtctgggctctggggcgatcgggacacacctccgctctgcttatcgagggtcgaggcacccgacgatcttctccggaaaagcgccctactcttcataccatcaggtagggccatatctgaacaacttctgagtacagtgagtgtcctgataaacagatatgtaactatgatgctgtttttgtgatttggacttgcattatttttctgaaagttcctgaaagatatgtttagaaaatgtgcatagttctgtgacggtggatggtggattggtggtcatggaagggacagtaatcagaatagctagtgagtcaaaacgaggcaatgagcaaacagactctttgacagaggtgcctagagctattgggactttagtaacacataatcgtgaagtagaaaacttaattgtacttgaagatgacacggaattaacaccttatgaaggaatggagtttgagtctgaagatgctgcaagggatttctacagcacatatgcaagaagtgcaggttttcggattcggatcagcaggtatactcgctcccgacgtgataattcagttatttctcgtcgaattgtgtgttcaaaagagggatttcatgaaacccgtgcttgtgatggcctccatcctgaacaaaaacaacaagaacgggcaggtactagagttggttgcaaggcaatgatattaattaaaaagtttagtcctggcaagtgggtggtaaccaaattcataaagaaccataatcatggaccagttccaccaagaaaacttgattccagactagtagaccaggactgtgatccaatggagaagccacattctattgaggtggaccctgttgaggagccatttgagggcatggaatttgaatcggaagaagctgcaaaattgttctatgtaaactatgcaaggctaaatggttttcgtgcacgtattagtagatattgtcgttcaaggcgtgataattcaattatttctcgccagattgtgtgttctaaggaaggcttccgtgaagttcggaccaagaaagtgttgacagatgaaggaaaaacaaagcgcccaagaatgataactagagttggttgcaaagctatgattgtagtgaaaaagatgaactctggaaagtggatggtttcgaaatttgagaaggagcataatcattcgctgtcatattctaaaatggtccctagtacctcaaacattacttctggagaaattgtcgatttagctgcaaagggtgcacatcctagtgaagtaaaaaatgaaggatacagtgcaggaacccaatgtaatcctgcagattccctcactatactttataacaacttatgccaggaggccataaaatttgcaaaagaaggttcagtcacagaagaaatttaccatgtggcagtttctgccttaaaagaggctgcagaaaaggttgctgaagtcaaaaggagtcgtccaacattgtcacattgtggtttcgttagagaaagcaaacatgatgtcttacaggagaaaagtatgagtgctttgcaatgttcaaatcaggttgaactgacaagaacatctcctgggtccaggcctcttcaagattctgcatcaaatcttctgctgataccaaccgacattttgactgattcaaggttatatagcggtgtcgatactgctcctctaacaggaggtttccccacaaatgagagtgaaagtacacatgcatcagaaagttcttttatgcattttaagaacacaaagaaaacctcttcagaaaaatctcagaacacttgttttaatcaactcatccatggaaaggagcaaggtatccatggatcttctaaagataccatggttgctattcctgcgatacctcttgcactgtgcatgcctgtgacgcagagcttacctggatcttctacagaaggaccatatagattgttggctgcacctattgaagcagttccaatttcatactgccctgcagaacccataagacagacacaaaaaggtatttgtgctttaggtccatttggaggtgttctgtctgaactgaagaaccaaggaacagtccccaaatctatagttcatgctacagctcttgcttgtggtgctcgtgctgttcctcttgaagatgcagcttcgcttattagtgccattgaatccaaaatcagatctggaggggccataatagcgaaacttccttcaaacaacctagcacctctagttcctccagccattgctatgtcatcttctagtgaagatgacgaggagcatgaccacagtgagccctcgcaatgatcgatgtcgatcgcaacgttaatcatcagagctccaacgcgatgaagcttcagagggagctatcggagttcgaaactgaagctggcaactgacctggtctgaagacgaaagaaaatgatcatactgattgctaacatacgcgaagtgaaggactgaagttgttctaaagatcaaagcttccctgaaaggtggcagatctattctatgatttgagacattttttaaaagattggattaggattgtagtcacttgtttctgttgagtttatattgtaatcagattaactcaagttaatacctccagtggagaattgtagaaaggagtaaccatgctatgtacatgtcttctgcataaaagaaaggcgatagagtttaaaa

SEQ ID NO: 86633 - DNA, 1075 bp, Zea Mays
atggcgattgatgctggcaagaagctactggccgaggggatttgcaaaaccttgtgggggtggcttgtgttgaaaacagatctctctcttgaatttcaggcttggaccccaaacaacaagatcgtgtcaccgcttagcagactcgctagcttcagacagaccgaaaaccgtctctccgtcgatagccgtgcgctcatgtacccgcgcgtgaactcagacgcgctgccggccctgggcagccttgagatggggcacgccgcccacgctgttgcgtatccgccgctgccgccggtggaggtcattcccgtgaccgtgatccagcagcggcacggggagcgggcgctggacccggacaggagcagctgcgaggaccatgaccccagcgcgctggtggtggcggccacgctgatcacgacgctcgccttcctgctcggctccagcgtccccggcgggtactggccgcaggacacaccgtcgagggacggcggcaagctgtaccgcgccggggaccccatcatgcgcgacctgcaccggccgaggtactgggtgttcagagtggcgagctggttcggggtcgcgagctcgatggtgctcacgctgagcctgctgctgaggatggccgcgacctcgcgccacgtgcggtggtcgttcgtggtggcctacgctagcctgctcctcaccttcgcggcgtcgcagaccaagacgcacctgtcgctggacatcatcctctgcctcctcgttctctttgtctcctggctcatcaccagcgtccgcgaggagaaccgcgcgtgcatcatgaaggtgctctgctgcagcagccgggacaactgagcaaaacatatttccagcaccagcaccgttcattcctctgtcttaacttttgcttgttcataggtgatgcgttacttgcttaattaactggttttttctcagctagtagccacgagaaagtcacaaagatattttacgtgcaagcagtgttatgtactctatctgtccttgctattgctgtgagagaaattggcatggctatgtaaatctaagaaaataagagtttgtagatattatttggatc

SEQ ID NO: 86634 - DNA, 98 bp, Zea Mays
attttgcttatgtcttatcctgttcccaagtgtttatgtgactaagtgtttatgtgactcaacaattttatacatgttcatgtatactttctttacat

SEQ ID NO: 86635 - DNA, 2274 bp, Zea Mays
aaggcgcggtgaaccagatcaagccatgctgcgtacatgcttcctcttcctcatcacgcttggccgcctcgtggccgccctgaacgagacggcgctgttcaccttcaacggcttctccggcgcgaacctctccctcgacggcatggccacagtcacgccggacggcctactcatgctcaccaacggcaccaccgcgctgaaggggcacgccttccacccgactccgctgcgcttccacggcgcgaacgggcgcaccgtggcgtccttctccacggccttcgtgttcggcatcatcgggcagtaccccgacgtgagcagccagggcatggccttcgtcgtgtccgcgagcagggacttctccacggcgctgccgggccacttcctgggcctggtcaacgccgccgacaacggcaacgccggcaaccacctcctggccgtcgagctcgacaccgtcctcaacgcggagtttcgggacatcgacgacaaccacgtcggggtcgacgtcaacagcctcacctcggtgcgagcggcctccgccggctactacgacgaccagaccggctcgttcaggaacctgagcctgatcagccgcaaggccatgcaggtgtgggtggagtacgacggccgggccatggagctcgacgtgaccatggctcctgtcgagatgcccaagccgaagaaacccctcctgtccgccgtcgtcaacctctcggaggtggtcacggaccccgcgtacgttggcttctcctcggcgacggggataatcttctcgcaccactacgtgctgggctggagcttcaagttgaacggcggcgaggccccggcgctgaacgtgtcgatgctaccagctctgccgcgcacgacgaccggcaacaagacacgactaaaggtcctcgaggtcgttctgccaatcgcgtccgtggtgttcgctctcgcactggccacggcggtcgtcgccgccgccaaacggcgagccaagttcgccgagctgcgcgaggactgggaggccggcttcgggtcgcatcgctttgcgtacaaggacctgttctacgcgacgggcggcttcaaggacaggaacttgctcgggagaggagggttcgggagggtgtacatgggcgtgctcccgaaatccaaggcgcgggttgcggtcaagcgggtttcgcatgaatccagacaggggataaaggagtttgtcgcggagatcgtgagccttggccgcctccgccatcggagcgtcgtgcagctgctcggctactgccggcggagaggtgagctcctcttggtctacgactacatgccgaacggcagcctcgacaggtatctgcacgaccacgacaaacccgccttggattgggaccaaaggttcaagataatcaaagacgtagcgtcaggcctgctgtatctccacgaagactgggagaaggtcgtcgtccaccgggacatcaaggccaggccagcaatgtgctcctcgacgcggagatgagtggccggctgggcgacttcgggctctcaaggatgtacgaccatggcacggatccgagcaccacccatgtggtcggcacgatcgggtacctagccccggagctcgggcacagagccaaggcggcaccagccactgacgtgttcgcgttcggcgtgttccttctcgaggtcacgtgcgggaggccgcccgtcggggaggacgacgctcaagggagccaggccgtgcttgtagactgggtgcttcaccactggcgcaacggctccatcacggaagcagctgatccgaggctcggaaatgactatgcagacggcgaggtccagctggtgctcaagcttggcctgcactgctcgcatcctctggcggtctggccagcgcgaggcctagcatgcggcgggttgtccagtgccttgacagcgacgtgatctccccggagaacaatgaggtgatgcacgtgaatttcagctatggtgtgtcggctctgatgaaggaccaagagcatgcgctggatgccgtggcgtgtgagttgtcttcagcgtcaagcgctggtattatgtctagcactatgtcggaaggaagataacggcatatgtaaggttgtgtttctgtacttctgtggctaagtataaaatgtcccacatcttttgttgttgtgttatatgagagcttgaattcccataactaatctgataaacaaaattgtgagtgacaataaactgaaattgtcacctaatatgcatggtaaactaggcatattatatgaaatatttacgtcaaaatcctgtggaatttga

SEQ ID NO: 86636 - DNA, 1695 bp, Zea Mays
atggttagcgtcaggcccatctccatccttctactctttctcctccgcaaaatcgagctggtttcatctgccagcgccgagcagttcgcgtacgaaggtttcactggcgcaaatctcacacttgacggcgctgccgccgtcactccaagcggcctgcttgctctaaccaacgacaagcacaccaaaggccacgcgttctttccggctcctctccgcttcttccatgggccagcgagcagcgccgccctccggtcattctcagccactttcgtgttcgccatcgtctccgagcacgcccagctgagcgaccacggcctcgccttcgtgctcgcgcccagcagcaacctctcggacgccacgggagcgcaggccatgcagctgtgggtggactacggcggccaggccatggagctcaacgtcaccttgtctcctctggacgttgagaagcccagggaccctctgctgtcgaccaccatcaacctttcaaagatagtgaacagtacagcatacatcgggttctcgtcggcgacaggtctctccatagcgtaccattacgtacttggctggagcttcagtttgaatggagctgcacctgccctcaactcgtctaacctacctgcgctgccaagactacctcaccagaagcgctccctatctgaaactttggtgatagtgctgccgtttgccacggctggtttcatcatcgcattgatcattgctgtgttcatggttatgcgaagatggtcgaggtatgctgagctccatgaagattgggaggtcgagtttgggccgcaccggttctcttacaaggatctcttccatgctactaaagggtttgggagcagacaattgcttgggataggaggatttggaagagtgtacagaggggtccttctggaatctaacttggagattgcagtgaagagggtgtcgcatgattctaagcaaggaatgaaagagttcatcgcggaaattgttagcatggggaggcttcgacacaagaacctggtgcagctacttggatattgccgtcgcaaaggcgaacttctgttggtctatgactacatgccaaatggtagcctcgataagcatttgtatgaccagagcagacctgttctaagttggaacacacggttccacatcgtcaagggcatcgcatctggtgactttggccttgcaaagatgtacagccatggtaccaacccaaggaccacaaatgtcgttggcaccatggggtatctctcccctgagctgctccgcacagggaaagcatcaacaggaagcgatgtttttgcatttgggatgtttctattggaggtgacctgtggacgaaggccactagagcatgaccaggtcgtgctgctagactgggtgttcgagcactggaacaaaggagcgattcttgatgtagtggatgcacggttgagtggtcagtacagtgcagaagaggcgagcttggttctgaagctggggctcctatgcttgcagccaatgcctaatgcacggcctggcatgcggcaagtattgcagtacctcgatggtgcactgacagtcccggagatggcaataatgaacctggactatggcaccatgatgtttctgcaaagcgagggcttcgactcatatgccatgttggatgcgtcatcacttgcgacaagcattggtcctggatctgacctctcaggaggacgatga

SEQ ID NO: 86637 - DNA, 550 bp, Zea Mays
gtgacaagagcgaattcgctaaaactatagagaccaactcgcaggctcgcagccggcctctccgcctccggctctcccctcctcgagcgctttcggcaccgtagttcggtacgatggcagcggcggccccgacgagggcagaggtgctgtcgcttttccggtccttactccgcacggcgaagcagttctcggactacaacatccgcgagtacacacgccgacgcgccgcggacgccttccgcgaaaacagcgccctctccgacgcgccgtccgccgccgccttgtttgcggtggggaagcagcagctagaggttgcgaagcgacaagcggtgatttactcaatctacgcccccaaggccaagagcgtgatggagttgaaggtgcagtgatggacgaggtgctgcgcccttttcttcctcatcgttttcctttccgaattcgtttcttttctgtgacgatgaaactataaactgttgcattatcacgtttgctggatgattgtcatgatatagcttcttactgtgcaataaattactaaattttattgcta

SEQ ID NO: 86638 - DNA, 2080 bp, Zea Mays
acccccacttaaccaagaaaacggaatcaaagaaaacctgtccctgaaacgacgacgcaacatcgttacgtctacaagcctgtgcctgtcccatcgatcgatcaaccatggagattgcattggcagccaagaagaagaaccgtgcccgtcgccacctcgccgttcttctcctgctcctcgcctgcgcctgcgccggcattgcgcccgcgagcggcgccggcgggaggtgggacctccagcagcgcagcatcggggtgtcggcgatgcacatgcagctcctgcacaacgaccgcgtcatcatcttcgaccgcaccgacttcggccactccaacctctccctccccgacggacgctgccgcgtcaacccgcgggagcgcgtgctccctcagggggactgcaccgcgcactccgtcgagtacgacgtcgccgccaacgcgttccgcccgctcttcgtcttcaccgacacctggtgctcctcgggcaccgtcgcgcccgacggcacgctcgtccagaccggcggctggaacgacgggttccgcaacgcgcgcaccatgcccgcgtgcagcgacggcgacgagagctgcgactggtccgagacgcaggacgcgctctcggccaaccggtggtacgccaccaaccagatcctccccgacggccgcgcgttcatcatcggcggccggaggcagttcagctacgagttctacccaaaggcgggcccttcggatacgtccgtcatcccgatgccatttctggtgcagacgagggaccccgaggagaacaacctttatccgttcgtgcacctcaacatagacggcaaccttttcatcttctccaacaaccgcgccgtcctcttggactacagcagcaacaagatcgtgcggacgtaccccgtgctgggcgacggcgacccgcggaactaccccagctcgggctcctcggtgctgctcccgctgaagcccaaccccaccgaggccgaggtgctggtctgcggcggcgcgccagcgggctcctacaactccaccaagcagcagcagggcggcaccgccggcgctttcgtcccggcgctgacgacgtgcgggcggatcaagatcaccgacgccgcgccggcgtgggtcatcgagacaatgccgtcgccgcgggtgatgggcgacatggtccttctgcccaacggcgcggaggtggccatcatcaacggcgccgcggacggcaccgccgggtgggagtccgccaagaccccggcgtacgcgcccgtcgtctaccgcccggaccactcgccgggggaccggttcgaggagcagaacgcggcgggcgtcgcgcggctgtaccactcctcggcggtgctcctccgggacggccgcctgctggtgggcggcagcaacccgcacacctactacaacttcagcaacgtgcagttccccaccgacctcagcctggaggccttctcgccggagtacctcgacgcgtccaacgacatgctgcggccgaggatcctcgacccgtcccccaccggcgcgcccgcgagcgtgggctacggggcgacgatggcgatccggttcttggtcccggcattggcgcggagaaggcgtggcggccgcgccggcggcctcggtgacgtgtcggtgacgatggtggcgccgtccttcacgacgcactcgttcgcgatgaaccagcggctgctgttccttgacgtgaccaagaacgtggcggtgcgcggccgagccggcgcgttcagcgcgtcggtgacgatgccggcgacagcggtgctggcgccaccggggtactacatgctgttcgtggtgaacgggcacatccccagcgaggggatctgggtcaaaatacaggcacagtgagagcgtgcgacggggaaggggttatacatttcattcattttgtttcgttcttgccattgatactcccctcttcttagttcttgttactactctacaggtgtacgtaaaaagacaaagacccttgtataaaagaggtgtaaatccatggtaccgttgacagtcactgactgtgactggacactgtgttgctgtctctcgttgacgtgactcgtgagatgagattggaaaga

SEQ ID NO: 86639 - DNA, 1963 bp, Zea Mays
cggaatcaaagaaaacctgtccctgaaacgacgacgcaacatcgttacgtctacaagcctgtgcctgtcccatcgatcgatcaaccatggagattgcattggcagccaagaagaagaaccgtgcccgtcgccacctcgccgttcttctcctgctcctcgcctgcgcctgcgccggcattgcgcccgcgagcggcgccggcgggaggtgggacctccagcagcgcagcatcggggtgtcggcgatgcacatgcagctcctgcacaacgaccgcgtcatcatcttcgaccgcaccgacttcggccactccaacctctccctccccgacggacgctgccgcgtcaacccgcgggagcgcgtgctccctcagggggactgcaccgcgcactccgtcgagtacgacgtcgccgccaacgcgttccgcaacgcgcgcaccatgcccgcgtgcagcgacggcgacgagagctgcgactggtccgagacgcaggacgcgctctcggccaaccggtggtacgccaccaaccagatcctccccgacggccgcgcgttcatcatcggcggccggaggcagttcagctacgagttctacccaaaggcgggcccttcggatacgtccgtcatcccgatgccatttctggtgcagacgagggaccccgaggagaacaacctttatccgttcgtgcacctcaacatagacggcaaccttttcatcttctccaacaaccgcgccgtcctcttggactacagcagcaacaagatcgtgcggacgtaccccgtgctgggcgacggcgacccgcggaactaccccagctcgggctcctcggtgctgctcccgctgaagcccaaccccaccgaggccgaggtgctggtctgcggcggcgcgccagcgggctcctacaactccaccaagcagcagcagggcggcaccgccggcgctttcgtcccggcgctgacgacgtgcgggcggatcaagatcaccgacgccgcgccggcgtgggtcatcgagacaatgccgtcgccgcgggtgatgggcgacatggtccttctgcccaacggcgcggaggtggccatcatcaacggcgccgcggacggcaccgccgggtgggagtccgccaagaccccggcgtacgcgcccgtcgtctaccgcccggaccactcgccgggggaccggttcgaggagcagaacgcggcgggcgtcgcgcggctgtaccactcctcggcggtgctcctccgggacggccgcctgctggtgggcggcagcaacccgcacacctactacaacttcagcaacgtgcagttccccaccgacctcagcctggaggccttctcgccggagtacctcgacgcgtccaacgacatgctgcggccgaggatcctcgacccgtcccccaccggcgcgcccgcgagcgtgggctacggggcgacgatggcgatccggttcttggtcccggcattggcgcggagaaggcgtggcggccgcgccggcggcctcggtgacgtgtcggtgacgatggtggcgccgtccttcacgacgcactcgttcgcgatgaaccagcggctgctgttccttgacgtgaccaagaacgtggcggtgcgcggccgagccggcgcgttcagcgcgtcggtgacgatgccggcgacagcggtgctggcgccaccggggtactacatgctgttcgtggtgaacgggcacatccccagcgaggggatctgggtcaaaatacaggcacagtgagagcgtgcgacggggaaggggttatacatttcattcattttgtttcgttcttgccattgatactcccctcttcttagttcttgttactactctacaggtgtacgtaaaaagacaaagacccttgtataaaagaggtgtaaatccatggtaccgttgacagtcactgactgtgactggacactgtgttgctgtctctcgttgacgtgactcgtgagatgagattggaaaga

SEQ ID NO: 86640 - DNA, 88 bp, Zea Mays
acgacacatactgacatactggtgtaggacatttgctgaaacatgcttgcgtactactcctacgacacaacgaactgaatcaaactga

SEQ ID NO: 86641 - DNA, 971 bp, Zea Mays
aatgactcctcttttagcggcgagagactgagagcttggctcaacgcgtcctcggcttctgtggaaggccattccatgcgctccgtgtagccagccattcggtacaaccaactaccctagaagtaacttttcttttcttttttgctctcgagatggatccggttggccccttcctcgtcgcctctataagaagcatccccacacgttctctccacccatcactgcagctcaaacacaaagcagcatcacactgactccactgctctgcctccataataagcacagaagcgccccaataatcagcagcgcaggagcgagcgatcgctatggctcagggaagaggcagtgcgacgcgggggcttgccctcggcagcctactcgccgccgctttcctcctcctcctcggcgtcgccgacgcggccacccacagggtcgactggtccttcaacgcggacagctggtccaagggcaagagcttccgtgccggcgacgtcctcgagttcaactacgacccctccgtgcacaacgtggtggccgtggacgccggcggctacaacggctgccggccctccggcacgtcgtacggctccgggagcgaccgcatcacgctcggccccggcaccagctacttcatctgcagcctcaacgggcactgcgggatggggatgaagatggtcgtcaacgccagctgagcacgacgcttatatgttagtactgcaaaaatatatgggctagtggtggtccgatagatcgtgcaagaactcaatcgtgtggcatactcgtaccgtgtgttcgatggacacggttcatgtgttgtgtatgcatgcgactgctggtaggtcaggcatgatgtacgtgtggctgatggcgtgttagtaaagcgtcctgcagctttgttgttactttgttcgatcgaagcagcggcttcttttgtttgttcatcaataacatctttcattaaatttttttta

SEQ ID NO: 86642 - DNA, 2693 bp, Zea Mays
caagtcccaactcctactccctgccgtgcaacgggggtgagatcttgtgttctcgtaggctatgccttccccgatggctcgcgtcctgcaccgccgtctcctcctcctcgccgccgtctccttcgccgtggtcgcttctctccttcgcccagctgctgcagtgcgcccgtttgttttggttctctccggtgaggacttcctcaaggattcggccgcgcacccgtccctcccctctgccgactccaccgacgacgacgggtgggacgacttcgccgacgattcaccagccgccgacccgctcctctccccgtcctcctgggtccctcttcttgacccagcaagccctcccctttctggcgatgagacggactcgtcggccgacgcgctcttcgtcgcgggcgcccgcgcgatgctctccgcagcgtccgatggggacgacgcggcgttcgccacggctgccgcgcagatcgaggccgcggcagaggcggggcacccgggcgcgcagtccgcgctcgcgttcctcaccggcgccgggatgacgcgcccggcatcccgatcgctcgcattcctgttgcacaagttcgccgccgacgcgggagatcttcagtcaaagatggccctcgcgtactcctacttccgccaggagatgtatgaagaagctgttatactatacgctgaacttgcagaagctgccctaactagctccttgatatcaaaggagccaccagtgattgaaccaatccgtcttcacagtgggactgaagaaaataaagaggccttgaggaagtcccgaggcgaggacgatgaagattttcaaatcacagagtaccaggcacagcgaggcaatgctgctaacatgtacaaattagggcttctgtattactatggactacgtgggctccgccgtgattatggaaaagcttttcattggttttctaaggctgttgagaaaggagagacacgagcattggaacttctgggtgagatctatgctagaggtgctggagtggaaaggaactatactgaagcatacaagtggttggcacttgctgcaaagcagcaacattactcagcttacaatggattgggttatctatatgttaaaggctatggggtggagaagaaaaacctgacaaaagcaaaggaactttttgaacttgcagccgagaataaggaagctgggggacattataaccttggtgtgttgtatcttaagggtattggtgtgaagagggatgtaattagagcatgcaatctcttgcttcatgcagttaatgctgggcaaccaaaagctatttatcaggtggcgaaactgttccagaaaggcattggtcttaagaggaacctccatatggcaacaatgttgtacaagtctgttgctgagaggggaccctggagttcattgtccagatgggctttggaatcttatttgaaaggcgatgtagggaaagcattgctcttgtattccagaatggccgatcttggatatgaggttgcacagagcaatgctgcctggattcttgataggtatggtgatcaaagtatttgcatgggagaatctagtttttgtacagatatggaaagacatcttcgtgcgcatgctttgtggtggcaagcatccgagcagggtaatgagcatgctgcattgttgattggcgatgcctactactatggtcggggcgtagcaagggactatgaacgtgcagcagaggcatatatgcatgctcggtcacagtctaatgctcaggctatttttaaccttgggtacatgcatgagcatggtcatggacttccccttgatttgcacttagcaaaaagatattatgatcaagccgttgaggtggattcagcagctaagctccctgtcatgcttgcactaacaagtttgtggctaaggaagaactacgcagacagttttttggttcgctttatcgattcacttccagaaatatatcctgttgttaacaaatgggtggaagatgttctcctggatgaagggaatgccacaattttgactctctttgcttgccttgtaactgtcctctacttgcgagagcgtcaaaggcgtcaagtggcagcagccaacccccaacaacctgatgatgtggtcatgtaaatgtctgttttcatgacatgtgcagccctgttgcttgagggaattggagatgtaaaacggtagctccttcacatgactcatgtacactaaattgagtaggggacatgaaaacctgtggaaactcagacaatgtttcctgcctggtgaatattcacctttccaagacttgggagctatgcttgtaaaggacaacatttcttggaaactggctgcttagaaatattgtttagaaatatcacagatgtttaaaagtagacttttccccccttgtgcatttgcacggccatcgaatttcgacaagcacacactgatagcatatctggaagaggcaactttgcaattggtagtttaggggtcagattaactttccatcagcatttaaacacactgcatagttttcgctggatgttttaattgaaaatgggcggtgcaaaactgcatattgggagaatcaagtttgcaatagtatccatcagcgttggaagtttaaacacattgttttcagtagtctgaaaaagaatcttgtagcgcagggtgttgaatgacggcgacagtcgcgcgcgcggagcagccgttg

SEQ ID NO: 86643 - DNA, 1698 bp, Zea Mays
aatgctcattaacttaggaacttacaatctttttgttgttgcaggcaaaggaactttttgaacttgcagccgagaataaggaagctgggggacattataaccttggtgtgttgtatcttaagggtattggtgtgaagagggatgtaattagagcatgcaatctcttgcttcatgcagttaatgctgggcaaccaaaagctatttatcaggtggcgaaactgttccagaaaggcattggtcttaagaggaacctccatatggcaacaatgttgtacaagtctgttgctgagaggggaccctggagttcattgtccagatgggctttggaatcttatttgaaaggcgatgtagggaaagcattgctcttgtattccagaatggccgatcttggatatgaggttgcacagagcaatgctgcctggattcttgataggtatggtgatcaaagtatttgcatgggagaatctagtttttgtacagatatggaaagacatcttcgtgcgcatgctttgtggtggcaagcatccgagcagggtaatgagcatgctgcattgttgattggcgatgcctactactatggtcggggcgtagcaagggactatgaacgtgcagcagaggcatatatgcatgctcggtcacagtctaatgctcaggctatttttaaccttgggtacatgcatgagcatggtcatggacttccccttgatttgcacttagcaaaaagatattatgatcaagccgttgaggtggattcagcagctaagctccctgtcatgcttgcactaacaagtttgtggctaaggaagaactacgcagacagttttttgattggaagaactttgatctcagattttaaacagtcaaaatgtgaatctgtgattccaaagacacgacacagcacaaatatatattaattttaaattttggttcgctttatcgattcacttccagaaatatatcctgttgttaacaaatgggtggaagatgttctcctggatgaagggaatgccacaattttgactctctttgcttgccttgtaactgtcctctacttgcgagagcgtcaaaggcgtcaagtggcagcagccaacccccaacaacctgatgatgtggtcatgtaaatgtctgttttcatgacatgtgcagccctgttgcttgagggaattggagatgtaaaacggtagctccttcacatgactcatgtacactaaattgagtaggggacatgaaaacctgtggaaactcagacaatgtttcctgcctggtgaatattcacctttccaagacttgggagctatgcttgtaaaggacaacatttcttggaaactggctgcttagaaatattgtttagaaatatcacagatgtttaaaagtagacttttccccccttgtgcatttgcacggccatcgaatttcgacaagcacacactgatagcatatctggaagaggcaactttgcaattggtagtttaggggtcagattaactttccatcagcatttaaacacactgcatagttttcgctggatgttttaattgaaaatgggcggtgcaaaactgcatattgggagaatcaagtttgcaatagtatccatcagcgttggaagtttaaacacattgttttcagtagtctgaaaaagaatcttgtagcgcagggtgttgaatgacggcgacagtcgcgcgcgcggagcagccgttg

SEQ ID NO: 86644 - DNA, 1599 bp, Zea Mays
aatgctcattaacttaggaacttacaatctttttgttgttgcaggcaaaggaactttttgaacttgcagccgagaataaggaagctgggggacattataaccttggtgtgttgtatcttaagggtattggtgtgaagagggatgtaattagagcatgcaatctcttgcttcatgcagttaatgctgggcaaccaaaagctatttatcaggtggcgaaactgttccagaaaggcattggtcttaagaggaacctccatatggcaacaatgttgtacaagtctgttgctgagaggggaccctggagttcattgtccagatgggctttggaatcttatttgaaaggcgatgtagggaaagcattgctcttgtattccagaatggccgatcttggatatgaggttgcacagagcaatgctgcctggattcttgataggtatggtgatcaaagtatttgcatgggagaatctagtttttgtacagatatggaaagacatcttcgtgcgcatgctttgtggtggcaagcatccgagcagggtaatgagcatgctgcattgttgattggcgatgcctactactatggtcggggcgtagcaagggactatgaacgtgcagcagaggcatatatgcatgctcggtcacagtctaatgctcaggctatttttaaccttgggtacatgcatgagcatggtcatggacttccccttgatttgcacttagcaaaaagatattatgatcaagccgttgaggtggattcagcagctaagctccctgtcatgcttgcactaacaagtttgtggctaaggaagaactacgcagacagttttttggttcgctttatcgattcacttccagaaatatatcctgttgttaacaaatgggtggaagatgttctcctggatgaagggaatgccacaattttgactctctttgcttgccttgtaactgtcctctacttgcgagagcgtcaaaggcgtcaagtggcagcagccaacccccaacaacctgatgatgtggtcatgtaaatgtctgttttcatgacatgtgcagccctgttgcttgagggaattggagatgtaaaacggtagctccttcacatgactcatgtacactaaattgagtaggggacatgaaaacctgtggaaactcagacaatgtttcctgcctggtgaatattcacctttccaagacttgggagctatgcttgtaaaggacaacatttcttggaaactggctgcttagaaatattgtttagaaatatcacagatgtttaaaagtagacttttccccccttgtgcatttgcacggccatcgaatttcgacaagcacacactgatagcatatctggaagaggcaactttgcaattggtagtttaggggtcagattaactttccatcagcatttaaacacactgcatagttttcgctggatgttttaattgaaaatgggcggtgcaaaactgcatattgggagaatcaagtttgcaatagtatccatcagcgttggaagtttaaacacattgttttcagtagtctgaaaaagaatcttgtagcgcagggtgttgaatgacggcgacagtcgcgcgcgcggagcagccgttg

SEQ ID NO: 86645 - DNA, 2326 bp, Zea Mays
cctgggctaaaacatctcacacgtcgccgactcgcgtcaagaaccagcagccacactacaacgccaccacatagttcccagttcccaccattgtttgcacttggcaacatgcctaagaagggtcacatggggacccctaagcaggcttacgctaccgacggcggcaagggtgacgtcgccgctggcagcacggtgacggcgagcgccatcgcgtcctcctacgacgaccagatccgcccgctcctcgacgcggtggaccggctgcgccacctcaaggtgacgcaggagggcatccagctgcccaccatcgtcgtcgtcggggaccagtccagcggcaagtccagcgtcctcgagtccctcgccggcatcagccttccgcgcggccagggcatctgcacgcgcgtgccactcgtcatgcgcctgcaggacgacccctctgcggactcgcccaaacttcagctcgagtacagcaacggccgcgtggtgaccaccaccgaggccgacgtcgcggacgccatcaacgccgccaccgcggagatagccgggagcggcaagggtatctccgatgcgcctatcacgctcgttgtgcgcaagcgcggcgtgcccgacctcacgctcgtcgacctccccggcatcacgcgcgttcccgtccatggccagccggaggacatctacgaccaggttgcaaagatcatcaaggagtacatcgccccgaaggagagcatcatcctgaacgtgctctcggccacggtggacttcccaacgtgcgagtctatccgcatgtcgcagcaggtggaccgctccggcgagcgcacgcttgccgtggtcaccaaagtcgacaaaaaccccgagggactgcttgagaaggtcaccatggacgacgtgaacatcggcctcggctacgtctgcgtccgcaaccgcatcggcgacgagacttatgaccaagcgcgcgtcgaggaggaacggctctttaaataccatcctttgctgtcgaagatcgacaaggacatggtcggcatcccagtccttgctaataggctcatgcagatacagtccaccatcattgccaagtgcctcccggacatcgtgaagcagatcaacgaccgcctcagccgcagcagcgccgagctggaccagatgccgcaggacttgaacaacgtcgctgatgctgtcagggtcttcttccacatagtgaagcaggtctgtaactcacttgaaaagttgctggtgaggggcgactttgctgagtaccctgatgcgcgtgagtttcatggcacggcgcgcattgccgacatgctgtctggatatgcaaaggaactccccgcgcagtgcccgataaacaggaacgaaccgtttctgatggaggaggtgcgtatactggaggagactaagggcataaatctacctaacttcctcccaagaacagcgtttcttgtcctgctgaagaagaaggtgcagattatagatgtgatccctcaggagcttgccaacaaagtctgggactacgtggaggacctggtgatgaaggttttgctgaagcactccgaaaattttccgcagatgcagtcgccctgccgccgtgccgtgcagaccctgatggacaaggcgcggctgcgctcggcacatcacgtgaaggagctgattgccatggagctggtggcagattacaccgccaacccagactacatgaagacctggaccgagataatggaagggtacgagatgttcatggaggccgtggaggacaagtcgaagccgacaagaatcaccctgaaaggctttggcgaggtggacgtgtcgcatcttagggtctatgctgactttgcagggaaggcgttcgacctgagggcgcgtcttacggcatactggaagagcatagtgctgaggcaggttgatggccttgcattgcacgtccttctcagcgtcaagctgctggttgagaaagaccttgaggaggagctcggcaacgagctgctgagcaacaagttagctggggtggagaagatgctcgcgccgtcgccgggcactggaacaaagcgtgagcgcctgaagaagagcatcgtcctccttcgtcaatcgaaggaggtcgtggcaaacataatggataggattagcgcggctggtgacatctaggcatgtcatggtgtgctctgcgtgacattgacttttgggttgcgttcccagccgtatggactttgttaaggtttacatgctatgtttctgttttaatgcatgttactatcgtttagattgttatgttttatctcatcactgttcatggtggctacctatggttaacggtggcttgttcgcgccttggcgaccc

SEQ ID NO: 86646 - DNA, 823 bp, Zea Mays
cgcttccacgccaattaaacgtagtactacgttgtatacgttggagcacgccgcaaccttattcccctagccagcagcagctgctagctagctcctctcctccaatcggatcgacggtcgatgggtggtcacggcgaccaccaccgccgccgccgccaggaagtcgaagtgctcgtccacgacgacgacgaggatctcgagcaccagtccagggcctgcggtggcggtgccactagcggagtagtggtggagcaaggagcaggagatggcggcggtcaggcggcgagcagtagcctgggaagcgtgagtgcagcgaccatggcgccgccgcagatcttctgctggccgccacagcaccaccacaacagcagcaacgacgtcggcggaggccagcagcccccgttcttcccgcctctgccgccgctccccccgacaccgccgcccttcttcgccgacttgtacgcgcggcgcgcgctccagctcgcgtacgatcaccaccatccaggcggcggcccgtccacgtcgtcggacccactcggcctctacatggcgggcggcggctccgggatgatgatgatgcccccgcccttcgcgtcgtcgttgccgttcggggactttggccggatgaccgcgcaggagatcatggacgccaaggcgctggccgcgtccaggagccacagcgaggccgagcgcaggcgccgcgagcgcatcaacgcgcacctcgcgcgcctccgcagcctcctgcccaacacaaccaaggtactaatactaataataatcgacgacattacacacgcgcggatcgagtgatctattactacgt

SEQ ID NO: 86647 - DNA, 1401 bp, Zea Mays
caaacacgcgcgacctcgtgtcagtctcggacatgaacagtgccagcaaagataaacaaaagactgcccatctcgagagatcctccgtccgggttaccgcccaagcaacagtcgccccccaaggatccgagcacctgatcctctgcagaacctgcatcccaaataggagtatactgtacagtactcctcgtgctgtactgttactagttcttttagtgcaccacaaactgtacagcttagtcagtgtagtagtaggcgcatgcgtttgaccccaggtaggtaggcgcgatagcagaacatgtaggtacaaaagaatcggaagcatgcatacccacggcacgcatggcctcctttcggccggcatctgcatgcgtacaccgcatactaattctcctctcatcatcattctggcaaccacgtgctgcgtggtctttctttctgtttagctagcgttagttgctttccttgcgatttactcataccggatcgatcatatgcgtgcgcgtgtcacgtcacgtacatgcatgctgcagacagacaaggcgtcgctgctggcggaggtgatccagcacgtgaaggagctgaagcggcagacgtcggagatcacggaggaggaggcgtgcccgctccccaccgagtccgacgagctcaccgtcgacgcgggcagcgacgaggacggccgcctcgtcgtgcgcgcgtcgctctgctgcgacgaccgcgccgacctgctgccggacctcgtccgcgcgctcaaggcgctccgcctgcgcgcgctcaaggccgagatcaccaccctcggcggccgcgtcaagaacgtgctcctcatcaccgccgacgacgacagcagcgcccatgacggccagcgggaggaggaggaggaggaggcgcccatgtcgccgcagcgcacggtcgcgtccatccaggaggccctgcgcgccgtcatggagcgcacggcgtcggcggccgccgaggagtcgggagcggccgcggcatccacagggggcgccgccgggctcaagcggcagcgcatgacgagcctctcggccatcctagagaacaggtccatctagaagctaacacatatatccaccacaccacttgatgagatgtgcaaaaacgaaacgaaacgaaacgacagtagaaacaaacaccgtaaacctccccaatctctcatagttgatcatagtactcatgcatgcaatgccgcaactagctagctagctacgtatggataatgcatgcttgccggttgccagcaaccacggctattattttttttaaaaatattttcgtttatttatctatagtgtcttcctttcttattatgtattgatatcaatcggtactgtgtctctgcacgcatgggatatcctcatcaatccaatacatgtaagctgctgt

SEQ ID NO: 86648 - DNA, 891 bp, Zea Mays
atgtcgttgtttgttgaatgtgagtatcgtgaatatgaatgtgataaatgtgaatttgatcgaatgtggacaatttttttgagcttatatcatggatgcagtgtggaagaaggtccctatggaaatgccaagttcattgacatacgatatgtgcccgtgctattcgttggtagatcctccttgagtgatgtgtttacaaaggctaaacaaaagctaggttaccatgaagatgatgacattgcggttaacggagtgcttaacattggtcatccaccaaatgtcataagacaactcatcccaattcattctcaactggattgggagaattatgttacttcgactatgaagactcagttgcaactcatggaggttgtggtgcggcgggttgtagtagaccgtccccctgaagactatgatcgtgatgtggatgacgtgccaactgtgcctgatgctcaatctggccccactttgatcccagccaggagatggctacagacatattctcctacgtgtatccctttggtacagaccaattgcgcgaaactaactataaacatttatacaactttcatggtcaaggagaattgtgggttcactcgttgggtagatcctcgtccgattttttcgcatgcggaatacgtatcctacctacagaataggatatttgatctagagagggaagtaagcaacataaatgaggaggaaggcggagacaacaacaatggaggtggttcacaggtgcaagtatgctcagatctatattgttgttgcctttgtcacaacaagaatgttggtcctccaccttctccaccgcagccacagcagacaacaacaatgagaggatactgtggagaagggttcacacaatttggaatgtgggagcactactag

SEQ ID NO: 86649 - DNA, 897 bp, Zea Mays
ccggaaagagaccaaatatttcgcgctctgcccagccagcctatccactccagctccacttcttccccgcacaccacagtcacacgcgcagtgctagacgacgaacaccagagggcaggcagatgatgatggcgtccgttctcgccgtctcccggtggtcgtcgctgcttctccccctcctcctcctcctcctcctcctcctggtggcgacggcgtcgcaggccctcaacgtcggcgacctgctcgggacagcagcgccttcggggagccagggctgtagccggacgtgcgagtcgtcgttctgcatagtcccgccgctgctgaggtacggcaagtactgcgggatcctgtacagcggctgcccaggcgagaagccctgcgacgcgctcgacgcctgctgcatggtccacgaccactgcgtcgacacccacaacaatgactacctgaacacgcggtgcaacgagaacctgctgagctgcctcgacggggtgagcccggcggggccgacgttcccggggaacgagtgcgacgtcggccagacggcgtccgtcatacgtggggtcatcgagtcggcggtgctcgcgggcaagatccttcacaagcgcgacgacggccagtagccggcgtcctggcagtggcaggacaggagcgggccgacctgagtcagtgaggctagctcgcggttggtacagacagtataaagccgcttgtgctggatttcaaggttatgaacggccggaccacctgttggagttcgtttacgtattaggtttagttcatttactttaaaataaaatttagaataaatgtcaaagattcgtcatgaatctgaattcgtcttgtgcaacaaatttaaaactcaatccattaaactcaagtcagattttgtttttttaa

SEQ ID NO: 86650 - DNA, 877 bp, Zea Mays
ccggaaagagaccaaatatttcgcgctctgcccagccagcctatccactccagctccacttcttccccgcacaccacagtcacacgcgcagtgctagacgacgaacaccagagggcaggcagatgatgatggcgtccgttctcgccgtctcccggtggtcgtcgctgcttctccccctcctcctcctcctcctcctcctcctggtggcgacggcgtcgcaggccctcaacgtcggcgacctgctcgggacagcagcgccttcggggagccagggctgtagccggacgtgcgagtcgtcgttctgcatagatgactacctgaacacgcggtgcaacgagaacctgctgagctgcctcgacggggtgagcccggcggggccgacgttcccggggaacgagtgcgacgtcggccagacggcgtccgtcatacgtggggtcatcgagtcggcggtgctcgcgggcaagatccttcacaagcgcgacgacggccagtagccggcgtcctggcagtggcaggacaggagcgggccgacctgagtcagtgaggctagctcgcggttggtacagacagtataaagccgcttgtgctggatttcaaggttatgaacggccggaccacctgttggagttcgtttacgtattaggtttagttcatttactttaaaataaaatttagaataaatgtcaaagattcgtcatgaatctgaattcgtcttgtgcaacaaatttaaaactcaatccattaaactcaagtcagattttgtttttttaatctttttatgtgtggttatcctgaatataatctccctatataatagagttccctttaaatgtcaatgagaaacaatcaatctactgtaggttgaggttttagacaa

SEQ ID NO: 86651 - DNA, 106 bp, Zea Mays
ctggaacaccaattggcaaaggcagcgggtcgaaggcagttctggtcaaaggaccattcctaaatttcgataagatctataagaatcacaaatatattagactcac

SEQ ID NO: 86652 - DNA, 351 bp, Zea Mays
atggctggggcagggcgagctcagcgatggcgccctggcaagaggaggatcgggagctctgcactatgggagatggtggtcggcactggcgttcaggagcagcagcagcggcatttccggcgttggggactagggcgccaggggagggagcacggtgtgcttgcagcggacgtggggtgggcgcggcggctgaatattcgagagagaaggacgcgtggagataaacaagaattccacatcggtggatacgagaggaagccaacacctgtgattgagcgagcagagacaaatcgatggcctggagaaaatcgagtagaagctatgtacgaagggataagaagagaagtctag

SEQ ID NO: 86653 - DNA, 1182 bp, Zea Mays
gactctatcccgttcccttccgtccctcgtcacgctcacgaagcacgctgtcgtcttgcggctctcgcccgtcgccccccgagccccgaaaccaaagccgagccgagagcccgagccccgccccgacctcatcttctcctcgtcggtttcacccctccaccacctccatggggtcgtcggaggccgacgaggaccagctcctcaagagcttcctcgcggaggtcagcgaggccgagcgggacaacgaagtgctgaggatacttggttgcttcaagttaaaccccttcgagcatcttaagttgtcttttgattcatcaccagatgaggtgaaaaagcaatataggaagttgtcattgctggtccatcctgataaatgcaagcatcctcaggcacaagaagcttttgcagctctggcgaaagcacaacagctcctgcttgatccacaggaaagaggctacattcttgaccaagttactgctgcaaaagaagaattgagggcaaaacggaaaaaggagctgaagaaagacagtgcgtccaagataaaatctcttgtagatgagggaaaatatgaagagcagtttgaacgatcggatggatttcagcagcaattaataattaaagtacgtgaaattttgaccgacaaagaatggcgtaggagaaaaatgcaaatgaggatatcagaggaagaaggaagacttaagaaggatgaggaggaaacaaaagagatgtggaagaggaagagagagcatgaagagaagtgggaggagaccagagacaagcgggtctccagctggagggatttcatgaagacaggaaagaaggttagaatgtgtatatggcaagtagtatcttcctatgcatgatatatttttttaactgaaactccttcctctgcagggacggaaaggtgaaatcaagcccccaaaactgaagactgaagatccgaacaaatcttatgtgcaaaggccagtaaagcgaaactgagtggaatgtcagcaatcaaagaacatccggtagcggcctttcatctcaccagattagagctgcaacccttcaatgttgtacttgtcctgaatgtggtaaggttcaattacgcccgctgggaaacagaacggaacagagcagattttacccgtattgctagctagagtgatttggtttgatgtactcatcatccgtctg

SEQ ID NO: 86654 - DNA, 1195 bp, Zea Mays
gactctatcccgttcccttccgtccctcgtcacgctcacgaagcacgctgtcgtcttgcggctctcgcccgtcgccccccgagccccgaaaccaaagccgagccgagagcccgagccccgccccgacctcatcttctcctcgtcggtttcacccctccaccacctccatggggtcgtcggaggccgacgaggaccagctcctcaagagcttcctcgcggaggtcagcgaggccgagcgggacaacgaagtgctgaggatacttggttgcttcaagttaaaccccttcgagcatcttaagttgtcttttgattcatcaccagatgaggtgaaaaagcaatataggaagttgtcattgctggtccatcctgataaatgcaagcatcctcaggcacaagaagcttttgcagctctggcgaaagcacaacagctcctgcttgatccacaggaaagaggctacattcttgaccaagttactgctgcaaaagaagaattgagggcaaaacggaaaaaggagctgaagaaagacagtgcgtccaagataaaatctcttgtagatgagggaaaatatgaagagcagtttgaacgatcggatggatttcagcagcaattaataattaaagtacgtgaaattttgaccgacaaagaatggcgtaggagaaaaatgcaaatgaggatatcagaggaagaaggaagacttaagaaggatgaggaggaaacaaaagagatgtggaagaggaagagagagcatgaagagaagtgggaggagaccagagacaagcgggtctccagctggagggatttcatgaagacaggaaagaagggacggaaaggtgaaatcaagcccccaaaactgaagactgaagatccgaacaaatcttatgtgcaaaggccagtaaagcgaaactgagtggaatgtcagcaatcaaagaacatccggtagcggcctttcatctcaccagattagagctgcaacccttcaatgttgtacttgtcctgaatgtggtaaggttcaattacgcccgctgggaaacagaacggaacagagcagattttacccgtattgctagctagagtgatttggtttgatgtactcatcatccgtctgaagattttactgggaaaaaaagtacaaacttttccgttggaaaagaacctaatgaagtgaatgttgacaggccgtctctttactgcttc

SEQ ID NO: 86655 - DNA, 2535 bp, Zea Mays
aagtctagtagtactagcagtagattaccaccgctcgcctcgtcgactcctcgtccccgcaccgccggcctgacatcgcgtcgcgtgccaaagccgacgcgcacaaaagcaacgaaagcgaaagcaaagcggccaccaccggcctccccggcagcccggctccccctcgctgtcctccctccacccatcacaattcacaccgaagcccgagcgggagcggccattttctctcgtctcgtcttctcgtcccctaaaatgagaaacctagtactgctgctatagaagtcaagtcactcgactcgcccgcgtgcccaaccaatcacacggccgcgctcgagacgagaggcgcccacggaaacggagcctcctatgccaccgggcgccgcggctgtcgccgccacctcgcaacaggccgactgctgcggacacgggcccgggcccgggcccagctggcgcggtggcggcggctgcgatgtccccggcggcgcgtcctgcagctacctgccgctgcgcaagcggctgtccgttgacggcaagttcccggcgccgcggatatgcatctgggagtgcgacggcgaggccggggacatcacctgcgatatcgtcgccgctccgatccgccgcagctgcagcgcgagggcaatgccgccgccgccggcggcctcgctcttccgccggatgatgaccccgccgccctcgcggcccaggccgccgcagagggaggtggaggatgctgtggcggctaggaggcccggggagaccatctccaagggccaccggagctacggtctcatgcttaacctgcagcttggcgtaagctattcggtggggaagtcatcggcgctgccgttcaggaagctctcgtcatcagacttcgacccgcgggagaaggtgtggacgcggttcccgccagaggggtccaagctcacgccgccgcatcactccgtggatttccggtggaaggactactgccccgcagtattcaggcacctgaggaagctgttcggggtggatcctgcggactacatgctcgccatctgcgggagcgacacgcttcgcgagctggcgtcaccaggcaagagtgggagctgcttcttcgttacacaggacgatagattcatgattaaaaccgtgaagaaggcagaaatgaaggtcctaattaggatgctgaggagttactatgaacatgtttgtcggtacaagtccactttgttgacaaggttctatggcacacattgcatcaagcaagctggatgtcccaaggtccggttcattataatgggcaatttttgctgctcggagtataagatccatagacgttttgatttgaaaggctcatcacatggtcgtactattgataaggcggaagagaagatcgatgaagcaactactctaaaggacctggaccttgattatgcattccacctacagagattttggtatgacgagctgatgaggcaaattcagatggactgcacattcttagagacacaaggaattatggactacagcttgttgctaggagttcactttcgtgatgatttctcaatgtctaaaataggtgtatctcagtttattggtttgccaaaatccacaggcaaaagaaaatcatttgaaggtggaggcgatgtttgtgagctttgctttacggaatctggatgcaaggacagagatttcattgttgactctcggaaaccactggtccagttaggcaagaacatgcctgcccaggcagagcggaggtcgaagagagtcctggataagtttctcctaaacgaaagacacttgtttataaccacatcaagtggcggattccaggatgtctatctcttctttggaataattgacattctacaagactacgacataaccaagaagctcgagcatgcatacaagtcctttcaggtcaaccctggttgcatttctgccgtagacccaaagttgtactcgagaagattccaagagttcagtcgcagagtgttcatcagagaacattaaagaacaatttgtccagcgggtgactgctccactggcattttacatcatgggatccattggtgaagtcctggggtatgatggtttcaccgatcccgagcgtgccctggaacagtggaaaggatggtcggtttacccgacgcatagttttctgaataattggcgtcgagggaggaggagcactgccgacacgcatgctaatgctgaaaggatgcgagctaaaactgtagagctttgccttttcaaggacttgtaaaatgtaagtgccggctccatgattgcggagcacatacccaaaccttgctgtttgtttattcttcttccgcactcgcatcttccaagaatctcaagtgattttagcttcttgggatgcttgatgaatactaccagtatgaatgatcttggccaaatggggaccagacattgtacatgcacatactgtcgtgtagtgtgtacactagtagatggatatcttgtcagagtttaaaaggattttggatgcattactgcattcagtaagtgtcactagcatcttgcttt

SEQ ID NO: 86656 - DNA, 261 bp, Zea Mays
gtgttactggataagggcgtgcatcaggtgagtgcgaaggggagtagctacaatatctggaagatgggcactctggacgagaccgatgtatctctgtccctgtttgggggggcacacacgttccttactccagagctattgtgggttcagtgctcactttgttcaatggcaatgttcgcatggacaacggggttctctatgagtgttgcttttattggcaagatgttgaagatcgggggttgtagcaaactttggtcttaa

SEQ ID NO: 86657 - DNA, 1217 bp, Zea Mays
ctagaaaaacaaagaaaaagcgaaggcaaaatatgaaagagaaaaaaccgcaattccggttgccttcgactcaactcctcgctctggtagcccgactcccctaaacccattgtgtgcccgccgtcgacgcagcctccgtcctcccccgcatccgaatcacgcacgccacgtcccacccctgtcatggccacctccagcgacggcggcggcgaccagcggcgcctcctctccatccccaaggaaggcgagcgcatcatcgcgcccacgcgccgccccgacggcacgctccgcaaggccatccgcatccgcgccggttacgtgccccaggaggaggtcgccatctaccagtccaagggcgccctaatgaggaagtcagggcccgacgtgccgccggggtacgacccggcgctagtggccgacgccaaacccaagacgaaggcggccaaacggaacgagcgacggaaggagaaacggcagcagcaggccagtttggcaaatgataaaggaaagagtatgaacatagagggaactgatgctggagaaaccgacaaggtcctttcttccaaaacggataagcagaaggattcggtggaaagtgtaacaaagcagatgagtggcattgctatttctgagtcacatgcaatgccgtccacaaatactataaacaattcgcaaccagaatcatctgctccagacatagacaagaagattcgagcactgaaaaagaagatacgcttagctgaagcacaagtacaaggtgaccctgaaaaattgaaatctgaaacgctggaaaagattaaaaagattgatggatggtgtatggaactgaagcttttggaggacagcagagctcctgcggcctagacaaaatcgacttcggctctgatgtagtagaatagacagtagagccatcgcgaccacaccagggtgctgagctaaattccaaggtgcactgaatcaccctaggcttttccattacctgtgttggttactggaaaaccagtccggtagatgcgggtttgcgcagaacgatggagtgtttttccctgcacatttgatgtctcatgttcgccaccaagtttcaaggtttgtaccacaagatccatttatcagaaagaccacacagtgagataattcaaacgattattgtgacagtgtggttaaactttagtatactatgataattctgggaatctcttaagactgaatcagaattt

SEQ ID NO: 86658 - DNA, 1214 bp, Zea Mays
ctagaaaaacaaagaaaaagcgaaggcaaaatatgaaagagaaaaaaccgcaattccggttgccttcgactcaactcctcgctctggtagcccgactcccctaaacccattgtgtgcccgccgtcgacgcagcctccgtcctcccccgcatccgaatcacgcacgccacgtcccacccctgtcatggccacctccagcgacggcggcggcgaccagcggcgcctcctctccatccccaaggaaggcgagcgcatcatcgcgcccacgcgccgccccgacggcacgctccgcaaggccatccgcatccgcgccggttacgtgccccaggaggaggtcgccatctaccagtccaagggcgccctaatgaggaagtcagggcccgacgtgccgccggggtacgacccggcgctagtggccgacgccaaacccaagacgaaggcggccaaacggaacgagcgacggaaggagaaacggcagcaggccagtttggcaaatgataaaggaaagagtatgaacatagagggaactgatgctggagaaaccgacaaggtcctttcttccaaaacggataagcagaaggattcggtggaaagtgtaacaaagcagatgagtggcattgctatttctgagtcacatgcaatgccgtccacaaatactataaacaattcgcaaccagaatcatctgctccagacatagacaagaagattcgagcactgaaaaagaagatacgcttagctgaagcacaagtacaaggtgaccctgaaaaattgaaatctgaaacgctggaaaagattaaaaagattgatggatggtgtatggaactgaagcttttggaggacagcagagctcctgcggcctagacaaaatcgacttcggctctgatgtagtagaatagacagtagagccatcgcgaccacaccagggtgctgagctaaattccaaggtgcactgaatcaccctaggcttttccattacctgtgttggttactggaaaaccagtccggtagatgcgggtttgcgcagaacgatggagtgtttttccctgcacatttgatgtctcatgttcgccaccaagtttcaaggtttgtaccacaagatccatttatcagaaagaccacacagtgagataattcaaacgattattgtgacagtgtggttaaactttagtatactatgataattctgggaatctcttaagactgaatcagaattt

SEQ ID NO: 86659 - DNA, 384 bp, Zea Mays
atggagaatgataggactgaggagcactcagttgaggaggacagggatgatgataggactgtggaggacccagttgaggaggagtcatcaaggatagaagaggagtgtcataatgttgcagccattagcactaacgttgaaccttcaccttcgcaggtagctgtcctgcctgcaggtcagttacagttcctcaaaaaactgtccaaggaaatctccggtattcttccaacccctgtgatggctctggaggcccagccacctgcgcctacccctcgtcatagtcgccgcattgcaggggcgggggttgaatttgacaagcatgatctaaacttaaagagccaagaaaaaagtaatgaaggccctggaggtgattggggtcactga

SEQ ID NO: 86660 - DNA, 1635 bp, Zea Mays
tccttggaagttgttgtctttaaggatgatggttgtgagatttgagcaactgctaagggctggtggcagctctccagacatgttgttattgtctaagtgaagctcctccagcctcttgagctgcccaatagaattcgggatcttgccatttagtccattccaaccaagatcaaggatgaccaaatttctgagttttcctatacactcaggatcaagtgttccttgcaaatggttgttagggaaagagaggtgctctagtgaggtaacgttgaagatctcagatggaagggtcccattgagttggttctggccagccttaagcactttcaaaccagagcaattaccaagctctgagggtattctaccaatgaactggttgtagctaaggtcaaggaccacaaagaatggtttgtcaacacaaattgtgctcggaatttccccagcaaagctattattgctcatattgagagcagccagattcttcatgccctccaatgtggtggatggaaaatatcctgtgaggaagttactcgagatgttcattaccttcatcgcgctgttaggcgtggattgcagctgatggaattctccactgagcttgttgaagctgacatcaaggacagtaatgctgctggagagcaacagtttcgatgggagtccaccggagagcaagttgccagataggttgagcttcaacaggccgttgagattgccaagtgagggtgatatgtgcccctcaaggcccatagcagccagtgaaatgtctatgacagttctatctccattgcaaatgacaagatactgatatactcaaagcaggttcgttatttggttttattgattctgttttcagttgttgtaactcatttgagcttcaaattttatttctacaacttggttccaggttgggtacactccagattatctcttcctcctccagaccatcttgcgtacagatccacaggcgattgattgtttgaacataattggtcatttgtaagacacattcgattgtggcttcattaaccttatgagtccttttctcactgtctataataccagggagctgtgaactttgctcttatgatgtcacaaatggagggaggctgcccagtagattataatacaataactgatcttttccttcagagaaatatgatatgggaggcaacaacgtttctgttggatgttctgaaaccaaacttgccagagcatgcttttattcaaaccaaggttttggagataaacttagtgacttacccgaatgttgttgatgccattcttgctaatggtatgttcagtcattatgatcgccctcgtattgctcagctgtgtgaaaaggctgggttgtacttgcgagccctccagcattactcagagttgcctgatatcaagcgtgccattgtaaatacccatgtcattgaaccacagacacttgttgagttctttggcacattgtcaagagagtgggctttggaatgcatgaaagaccttctactggttaatctaaggggaaatcttcagattgttgtgcaggccgtgaaagaatactctgagcagctaggggttgatgcttgcatcaaattatttgagcaattcaaatcttatgagggcctttactttttcttgggatcc

SEQ ID NO: 86661 - DNA, 732 bp, Zea Mays
gaacggcagttcatatatatgatggtgaagaacccaagcagcaatggcgttctcacggcggcggccgccttttccgacagcaaggccatgcgggagagcggcaaggcggcggcggcgaggccgtacaagggggtgcggatgcggagctgggggtcgtgggtgtcggagatcagggcgcccaaccagaagcgccggatctggctcggctcctacgccactcccgaggccgcggcgcgcgcctacgacgccgcgctgctgtgcctcaagggctccgacgccgtcctcaacttcccttcctcgtccgcgtcctcgactcaccggcgtgctgatgacagcagcggcggccgcccggacgacgacgacccgggtgccagcggcggcatgtcgccgaggtccatccagcgcgccgcggccgcggctgccgcggcgttcggcgacgccgccggcatcggcgccagcgcgacgacgacgccgacgcctgcctcgctgtcgacgcagggcagcaccgatcacgcccaccaggagcacgcgacggcatcatcgtctgccgcggacgacagcacaggctcgccgcccggcggggaggagctgtggacggacctggaggcattcgcctcgcccaagtcgatggatctgatagacaccggcgccgcgccgttcccgtcgtcggcgtgggaggagcccgaggacgacggcgagctgatgaggctgtggagtttctgctaggcctcg

SEQ ID NO: 86662 - DNA, 1850 bp, Zea Mays
aaaaatagcccggctatgccaaaatcacccccggcacgctcttctctacgcgcccctaccgtcccggcggcggccagcgctgggctcttttgccgtgccccgcggcactgcccccacgccatccgcacacacccactggaaaaacagcagccgcgcgttacggcgttagcggccaagccactttacgccagtggccgccggcaagcgcggtcaggtcgggactcgacggagagagctctcagcttctcccgacctaagtaagctaggtggacaacgcctgcaggctgcggcaccaacgcggccttcgccgcgaccccctccccatctccctcctccctaccatgcgcgagggcgaggcccacgcccacgccctcccgtcgaaaacccagctactcccgtgcctcaaagatgacgagccgcgacaaggtggggtgctcctcgatcccgctgcccctcgaccgtgtccttgccgcgctggtcgccagcacccagcaactcgggagggggtgggaggcggccttccgcgtccgatgcgggaaggcagctggagcggcggtcggggaggcggaggggaaaggagaggttatagagatgcacacgccgctgttctacgctacctgcgccctcggcggcgttctcagcaccggcctcactcacctcgctgtaacgccgctcgacctcgtcaagtgcaacatgcaggtggatcctagcaagtacagggacattacatctgcctttggtgtcatgctccatgagcaaggaccccgtggcttgttcaggggatggatggccacactggttgggtacagctgccagggggcctgcaagtttgggttctacgagttcttcaagaagtgctactctgacatttctggtcccgagaacgttgaaaggttgaggactttgatctaccttgcagcttccgcgtccgctgaggtgattgcggatgtagctctctgccccatggaggctgtcaaaattcgggtccagacacaaccgggatttgctcgctgcctggtcgatgggcttccgaagattgtccaatctgaaggtgcctttgggctttacaaaggtctacttcctctttggggccgccaagttccctacactatgatgaaatttgcttgctttgaaactattgttgagatggtctacaagcatgctgttccgaaaccgaaagaccaatgcagtaagccactacaactagcagtgagctttgcagggggatacattgctggagtattctgcgcggctatatctcatcctgcagacaacctcgtatctttcctgaacaatgcaaatggagccaccgtggcagatgctgtaagaactcttggaatatggggtcttttcacacgcggccttcctcttcgtataattatggttggtactctcacaggagcgcaatgggcagcctatgacgcgtttaaagtgtttgttggactgccaacatctggcggagtggttcgtagctgtgctgctgtgcctcctattcgcgccaagagggtgcaccgagaagacgtgctaaaccaacggagagtagacgtaccgcattgagaagatgtgctgaaccaacaaagcagaataggaaatgtgttgcgatttcactgagttttgtaggagttcgaaaccagttgtttaagttttagctggtagagcaaaagagcattcactttcaaggggcttttattggaacctcttgaacaacagacattgtaatgataaacagctttagaaatgcgccatgcctggtgtagcagtacaccagcaccccgtctctactagtcagagtcaaattttgcttgtgtgaccgaccattctattcaacacacgtgattatggttatgcag

SEQ ID NO: 86663 - DNA, 1006 bp, Zea Mays
ttctctctcacatctcgtactgccgcatcgtcccacacgtccctccgtccatggtctcaccggcgttcccctcccccgctccccccattccccccgcattccgtccgtggtctcatgggacaagacggtgaggctttacgacgctgacgccaacgtgctcaagagggagttcatgcaccctggggccatcctcgactgctgcttccacgacgactcctcaggctttagcgccggagccgaccacaccattcggaggttggtattaagctcgtccaaggaagatgttttggggcggcatgatggtccagttcgttgtgtggaatactcttatgctgcagatacttttatttctatggatttgcttttggatttcttttctagcgtttctttttcttctgcaagaatactggaaagggaccgctacttaaaaatggatgcttccatgaattccatccaacattacttttcagtatgagtgacacgttggggtcagatttgaacatgattattgcaagtcaagacatcgtcatataattattccaatatcaagtatgatgcaaaatcaagggatgggaactccatctgttcaacaatcagagagctcagggtcagaaccatacaggttcagaacattgactggtttgtttgatgcaactgaacaagtgcatcactttgagtatagtggagtgtgcatgctggcagctgatgaacctgcatgtgtggaacaggctctttcacaggactgctggaaaagagctatggaggttgaactgaagttaattcaagaaaatcagacctgggagattgctgatctgccaagggatcactaaggctataggactcaaatgggttttcaaagtaaagagggatccaacattagtgcgaacaattgtattttagtttagatttagagtacacttatgtatgagttgtttgacaatgcttatttatgagacattaaaatgtacttatttatattatattaattataatgttgttcaatata

SEQ ID NO: 86664 - DNA, 875 bp, Zea Mays
agctgcaccactaatccactatacagcaccaagtttgagggctcgatgctggttgaccttgaccttgtgctcgtcaaccgagtcccgactgcatcgatctgacggcctttctacgcgcaacgacgaagcttcgcgaatcccctccttccttcggcctcaccttcttattctccgccgaacaagtcttagacgcctaatccgtagtttacatcccgaagggcggcaagggtgatccaggccgaccatggcttacgtcgagagaggtgttgtgaaagacaagcggactatatggcgactgagcataatctcagacttctttcgggctattgtcaacttcatcagaatcttctttgacacactgttctcagtggacaaaactgacagctacaagaaagggtatggtgctggtaagaagtgggatggtggacctggtggtggtggtgggcggggcccatatggaggtggaggtggtggatttggcggcggaggtggaggtggtaggggtcctcgcactctatctgacatccaatccaatgaccacagttctctccctgcttgtggatcctgctgcggctaatgagcgcacagccgttctgcctgatgactgcttaacagatgaatacacatgcttcaatatgttctgaagaacatcatagctatcaatatgtatttcactgtcagacgattgtattatatataattagtgtgtcgtttattaacagttaatttacctgtaacttgactctggcatgattcacatggcacattcatggtttatcttttgtgtactgctgtccggttgcataatctctatttatttattaaggtttacttgttaaggcagcaagggtagtttgtcttcctttggttctgtc

SEQ ID NO: 86665 - DNA, 1493 bp, Zea Mays
aataagttatgttctgtattcctaattatcattttgccatttgccacccccaactcccgagggcccatttcgccgtctttcactccatcaccccctctcccccagtcccccgtccctttcccctcagccatctccttccccctcacctcgccatggcgttcttctctcaccaccatctccagcagccacacccgcagcaggcaccgcccccgaatcagcagcagccggtgcttccttccttcaggaacgcgctaccggtgcctgtggatggccagatcccagcgcccctcaccttcttcaacccgccgcctgccttcccggagcagcccgcgcagacaacgctggtggatgcggtggggctgacggcagctgctgggcttgggtggaggcagccgagggagcaggaactgcttggagaaaactcccagatgtcgtccatcgattttctgcagacgggctcggcggtatcgacggggctggcgctgtctctggaggaccggcgccacggcggcggcggggctgggaactcctccggcgattcaccgctgctcctgctgcccatgctggacgatgacatttcacgcgaggtccagcggcttgacgctgatatggaccgcttcattaaagctcagagtgaacggctgaggcaatctatactggagaaagttcaggcaaagcaatttgaggcactggcctcagttgaggacaagatattcagaaaaatacgggataaagaggcggaagtggaaaccatcaacaaaaggaactctgaactagaggaccagattaagcatttgggagtggaagttggtgcttggcagcaaagggccaagtacaatgagagcctgatcaatgcactcaagtacaacttggaacaagtatgtgctcaccagagcaaggacttcaaggaaggctgcggtgatagcgaggtagatgacacggcgtcctgtccctatggtggtgctgtcaatttgcaactgatgccaaaggagaacagacaaccgaagaatttaacggcttgcagggtctgtaaatcaagtgaggcatgcatgctcttgctgccgtgtcggcatctttgtctatgcaaggagtgcgagagcaagctgagcatctgccccctgtgccagtcctccaagatacttggcatggagatatattatgcatagaatataatttatgtatcacattagtatcgtacgagatactgctatgttaatacgtcaatctattgccgaagttcagaacctatgtaccactattgacttgccactggatcaaaaaaagactgccgtttatggtagatttaacgcagcaaatttctttgcgaagcttattgttggtttgtgcccctagtagacttggcagagtttgtcttgtgcgactgattgttaccgtctatgtatttccattagcagaccctttcaggcagtgtttggaactcaggaaatttcaccagtgctgtgttttcgctgctaaattgaattgatttatgt

SEQ ID NO: 86666 - DNA, 3174 bp, Zea Mays
gcgggggcggacggcggagcgccctatccatgtgaacctaacgaacgctgcgagccaggcttgccaacgcggtgccactgccacccctcgtgcggtcgtgcccacccatccaccgtcatcattagcatcgtctcctctcgttagcagtcgcaagtagccagcagtccagcacacgactccgccgccccttccgctccgtcctcccctcctctccgctctccatcctggccgggcccacccggcattcttgaactcccccttcccgcatcaaatcccctacccgtgccgtcgctgcgcccgcgctgcgtgcccgaattttcgccgtaatccggctggtttttcccgtgcgcagcgggccgtaatggcgctgtccgcgtccgcggcgtcggccggccgggggtcgcgggcggagaaggtgaggaggatcttcgagcgcttcgacaccaacggggacggcgggctagaccggaacgagatggccgccctcgtcgtcgccgtcaacccgcgggtcaagttcagcgaggaccagatctccgccatcctggacgaggtgttccacacctacggcgaattcatcctccccgacggcaggggcctctccctactagggctgcttcgcacctacgatgacggcgccggggacgtcgaccgcgactttctcgcgctctccctacccgccgtcgactccgacgcctcctccccggacatcgccgcaggggacgctgccgcccactcctccccgccctccggggctgccgccgccgcatcgctgctcgacgaccacgccaagccgctcggcgccggcggcgctgcgccgtcggtcagctcccgcgccgccgtcgccgcgccggcttgggcgacctcgcccaaccacggcatcgccttcgactcctcctggggactcctcgacgacctggagatactcgtcaagcgcctccgctcaaagcagctgcggaagggctccatcgacggcgccggcaacaacaacttcgactccttctccgaggccgggtggtccagggagatctccggcgcggcggattccgcatccaccgccgctccgtgggacgagacgagccgcgactacctcaccttcgtcaaggaactcgccgtgctccgcacgcgcgccgacgcctcccgctcgcgcgaggaggcattcgacaaccacatggtcatcggccgggcgctttctgagcaccgcctcttccgagacgccctagccagcttccgccgcgcctgtgagctgcagcccactgacgtccgtccccacttccgcgcggggaactgcctgtacgccctcggtcgccatgcagaagccaaggaggagtacctcctcgcccttgaggccgcggaggctggcggctcacagtccgcggacattctcccgcagatccatgtcaaccttggtattgccatggaggccgaggggatggtacttggtgcctgtgagcattaccgagaagctgccatactgtgtccatctcatgccagggcactcaagctcctggggagcgctctctttggcgttggggagtaccgagctgctgagaaggcactggaggaggccatcttcttgaaggaagactatgctgatgcgcactgtgaccttgggtccgctctgcatgcagtaggggaggatgaccgtgccatccaggagtttcagacagcaattgatcttaaacctggccatgttgatgccttatataatcttggtggattgaacatggacgcaggtcgttttgtacgggctgcggagatgtatactcgtgtgctgagcatccgaccaaaccattggcgtgcacagctaaacaaggcagtggctttgcttgggcagggtgagtctgaggaggccaagaaggcactcaaggatgcgtttaagatgacacaaagggtggaagtgtatgatgctatctcacatttgaagacattgcaaaagaagaagccaaagccttccaaaggaaaagatgacggtcaaggggagcaggcttatgttgttgtggaggcatccaagttcaagagggttgggaggaagactaccttgcggcaggatttggccaatgctctagatataagggcctttgagaggatgacaaaactaggtcactgcgatgtggagcttcttagaaaagagatgaatgagactgatgtccctatatcttactcgggcaccggcatccctgagaagtcaatacgcaaagcagctcttgaggttattctccgcaggctcctctcttttctcaagccagatacctttcagggtgctattaaggcaatcaacgaaagaattctctctgtccttgatgcttctggctctggtcgtgttgatctgggcatgttcttcgccaccattgctccaatctgttctggccctgtggatatgcgcaagcgtatcgtctttgatgcactcctttggcgtcctgctagcgaaggcagcaatggccagataaggaggagtgatgcgttaacctacattaagcttcttcgagctgtttatatacccacgcatggggctagtgacatgctcgaaatgcatggggagtctgaccctaccatggtatcatacacggaattcttagagatgttcaatgacccagattggggatttgggatcctgagcactctggtgaagcttgaggagagtgatcacatacgtcacggtcgccacacatgctccatctgcctgtaccctatcattggttcacggtttaaggaaacaaaacactccttcagcctgtgcaaccggtgctacagtgaagggaaggttccgtcagcgttcaagttggaggagtacaggttcaaagaatacggtaacgaatccgaggccctcattgataagtgcatgtgcttcaatttgcattctaagaagctggaagctgatgcttgatcattcaaactttgatctcgagtgctcaagcatgaatctgtgtatttacctaggtgcaaagatgtctagttagctctcccactcccttgtaaacaaagttgctgccattcagggtttctctagatgtgtcccggttactaatatatgaccgtaatgtgttagctgttgttttaagtgtacgggaacgagtaaatgtgaattccatacactctgtcgccccagtccaattcagccttgttgaaccttgcatatttttgtgtgagcaaaaacaattttgggagtctctttaa

SEQ ID NO: 86667 - DNA, 724 bp, Zea Mays
gggccgctcgtactgcatgacgttggtgtcggggttccagtagtagaggtagccggtgatgccatcgacgaggccgcgccacggcttgggcagcgacgggtcttccgacgcgtaccccgggactgcgcgcccgaacgagccactaccgctcgacatcgggtccggtcaggcctaggcaacccgcggtggtgcccacaacgtgatgcggaggtggcgtcccggcgtcgcggggcagacgcgtcccggcagcacggaggtgacgcaacctgccggcgtggaggtggaggcggcggcggcgaacccagagcgacgaggcctccggcgtggaagtgtcctggcggggggtgctgcgtgcgagggatcgcgcttcagcgctggagggtcggttgtacgcgcgctggttgaggtgtggcggtgagcgacggcgtagatgtggcagacgcgcggcggagatgtggtggcggctgcgcgttgcgggcgagcagcgcagaacagacgcagtggaagggcgatgggaaaaaatttggctccgaattctagacgttatgatagttagatcagtgagggattggagaagggtatcgatgggcaggaacgtcggccgagggcctctgcccacggccgagtaagaggaaggtttctcaggcccccggccaagtaagaggagggtttttcccttctaattcttgcctactttatttctcatccattgatgacataaata

SEQ ID NO: 86668 - DNA, 1965 bp, Zea Mays
cgtggacttccacctggtggtggtgggtggctgcgtactgcgggccgctgccgatcgagtaaaaaaaaaacgccgggcatcggccgcctcctacccccaaccccctccaccctgtcctcggacaggcggcgtcggtgcgccggcggtgccagcgcggaggcggaacacccagacagcccggaccttcagctgtctgcttctgcgtctggcttgcgggagcgatcccgtcttctgtcgaccagtcgtggactcaaactagagctggcttcgccatagacttctggaggaggcaacgggattgggaattggaacatggggagttcggtcggctgcttgggaggcggctccaagtcgaggcaagatcagaatggtcaggtcgtcgcgggttcgtctccccgttcaggtcatgaattatcaagacctggaaataatgtacatgtattctccctaaacgagttgaagactgccacacgaaactttcacatgttgaattgcattggccgtggggggttcggagcagtgtataaggtgaggcccaggacttgtttatgcatttttgtttaaaatctgtgttttatttgttgactctactctaaatgcatgtttcaaggaactttgcaaatactgtactgtagtcaatgactaacaaaggctgttcctcacttagggaaacctgaaaaatggcactccaattgcaattaaaaaacttgcagctgagtcaaaacaaggaattagtgaattcttgacagagattaatgtcatatcaaatgttaggcacccaaaccttatcaagctgattggttgctgtgttgaagggagtaacagactattggtgtacgaatatgcagagaataatagtttggcgaatgctttgcttggaccaaagaacaaatgtatcccattggactggcagaaaagagttgctatatgtattggaactgcttctggccttgcttttcttcatgaggaagcacaaccacggattgtccaccgtgatatcaaggctagcaacattttacttgataagaagctgctgccgaaaattggagattttggattggcgaaactctttcctgatactgtcactcacattagcacgcgtgttgcaggaacaatgggttatttggcaccagagtatgccttgttgggacaattgaccaagaaagcagacatatatagttttggggtgcttcttcttgaaatgataagtggtgaaagcagcagcaagtcgacttggggacctaatatgcatgttctcgtggaatggacatggaagctgcgggaagaaggaaggctcttggaaattgttgatccagaactggaaaagtacccagaggagcaaatgcttcgtttcattaaagtggcactgctgtgtacgcaagccacgtcccagcagaggccgtccatgaagcaggtcgttaatatgctatctaaccaaacagaaattgatctgcaaaatgtagctccaccaggtgtgctgaaagaacctcggcagcgtaccggtggctttgggggtttgatagcagacacgtcctcaagccaaagcactaaaggcaacccagctgaatcatacagcacacagaccaacatgaacagctctcagtttagcacaactgatgtatcaccacggtgacgttgtcgactattgtttgacgtcttcagaggtgtctcgcgcctcccacaaggtttattgtgctgagcccggacaaaatcgcttgatatggaaggcctgatccattttcatcctgttttagagctacgtaggatgcgaaggccgctgtgaattgctgatgtacaggaattgtagctcatctgtttttcttttctgcggaggatgatttgcagttaaatttgacattttttttatgttctccattaaagcctgttgtaggtatacattgcaagagtacaagacatgtattcgaaatttcaaaaattcatgaagactactgtagctttccttca

SEQ ID NO: 86669 - DNA, 1870 bp, Zea Mays
cgtggacttccacctggtggtggtgggtggctgcgtactgcgggccgctgccgatcgagtaaaaaaaaaacgccgggcatcggccgcctcctacccccaaccccctccaccctgtcctcggacaggcggcgtcggtgcgccggcggtgccagcgcggaggcggaacacccagacagcccggaccttcagctgtctgcttctgcgtctggcttgcgggagcgatcccgtcttctgtcgaccagtcgtggactcaaactagagctggcttcgccatagacttctggaggaggcaacgggattgggaattggaacatggggagttcggtcggctgcttgggaggcggctccaagtcgaggcaagatcagaatggtcaggtcgtcgcgggttcgtctccccgttcaggtcatgaattatcaagacctggaaataatgtacatgtattctccctaaacgagttgaagactgccacacgaaactttcacatgttgaattgcattggccgtggggggttcggagcagtgtataagggaaacctgaaaaatggcactccaattgcaattaaaaaacttgcagctgagtcaaaacaaggaattagtgaattcttgacagagattaatgtcatatcaaatgttaggcacccaaaccttatcaagctgattggttgctgtgttgaagggagtaacagactattggtgtacgaatatgcagagaataatagtttggcgaatgctttgcttggaccaaagaacaaatgtatcccattggactggcagaaaagagttgctatatgtattggaactgcttctggccttgcttttcttcatgaggaagcacaaccacggattgtccaccgtgatatcaaggctagcaacattttacttgataagaagctgctgccgaaaattggagattttggattggcgaaactctttcctgatactgtcactcacattagcacgcgtgttgcaggaacaatgggttatttggcaccagagtatgccttgttgggacaattgaccaagaaagcagacatatatagttttggggtgcttcttcttgaaatgataagtggtgaaagcagcagcaagtcgacttggggacctaatatgcatgttctcgtggaatggacatggaagctgcgggaagaaggaaggctcttggaaattgttgatccagaactggaaaagtacccagaggagcaaatgcttcgtttcattaaagtggcactgctgtgtacgcaagccacgtcccagcagaggccgtccatgaagcaggtcgttaatatgctatctaaccaaacagaaattgatctgcaaaatgtagctccaccaggtgtgctgaaagaacctcggcagcgtaccggtggctttgggggtttgatagcagacacgtcctcaagccaaagcactaaaggcaacccagctgaatcatacagcacacagaccaacatgaacagctctcagtttagcacaactgatgtatcaccacggtgacgttgtcgactattgtttgacgtcttcagaggtgtctcgcgcctcccacaaggtttattgtgctgagcccggacaaaatcgcttgatatggaaggcctgatccattttcatcctgttttagagctacgtaggatgcgaaggccgctgtgaattgctgatgtacaggaattgtagctcatctgtttttcttttctgcggaggatgatttgcagttaaatttgacattttttttatgttctccattaaagcctgttgtaggtatacattgcaagagtacaagacatgtattcgaaatttcaaaaattcatgaagactactgtagctttccttcatgctttcaacaacccgtgaaactcttcatgagttagaaaaaaaa

SEQ ID NO: 86670 - DNA, 877 bp, Zea Mays
tttttatttattatttgcatagtacacgggcgaattttggtccacatgtaattagcgaacttaataattagtattaatacgttagtataaatacggtacgattttatgttttttagaaatacaaattctcattcttctagtacacgacacgagtggcttgcacgacacgactggcttctaccggaagccacgaccgtctggcttccttcacacacctagggcacctataaataaggtaccctggggacatgctccactcatctacacactcacctcttctatatcatccgccattccataagaagtccgtagtacgtactcgtagtttaggtcgtcatggagtcattgaaaagccttgtgttgtcctcgtcatccgacgattccgacgatgagatcgatactttgttgcttgcccaacatgttgagcacattgtactaggagacacgagcacgcggcgtaggcgctcctcattgcctcgccgagttatccatagggaccacgctgctggagaaaatctcatcaaacatcactacttcggacctaatcctgtgtatccatcacatgtctttcgtcgaaggtttcggatgcatcgtcctttgttcctacgtatccttcgtgccgttcagcgagaagacgaatacttcactattcgttgtgatgcagcaggtttagcagggcttggtccattgcaaaaagtttgtgctgcattgcgtatccttgcgtacgggttaccaaccgatgcggtagatgagtacatacagattggacagactaccgctagggactgccttatccgtttttgtcgcgcaatcatctcttcctttagcgaacgataccttcgtatccctaaccacgacgacattgctcgcatactac

SEQ ID NO: 86671 - DNA, 1875 bp, Zea Mays
tcgacggccgtgtcccgcttgatttcgatcggcagctggagagaatcggttcgattccccgtctgccgcagtgcctcctttcctttcctttggcttaggctcggctcgttccttcgctcgtcgtattttttctccaccacttccttcatttttttttctttctccctccctacacggccactaccagtccaccacaaaccacgtccccgccgtcgtcgtcgcgcttcccctacgcgcgccccgtcgcgtctcggtgctgctgttgggtgcgcccgcgcgttgccgtgaagggtgaagctgcttccgcgcgccgccgccgccacctgccccgcgtgggttgcaagtcaagcagcaggctgggacggggccggagccggagggggcgggcgaagcgggataagggcggccgcggcacgcgcgtgagcggcacaaccgaagcaggctgcgtttagttggactgcggccggggatcgctcgcgtcgcgtcggaggaggatgtctcagacaggggaggcgcaggtgccgctgttgcagactcaggaggcggacgccgagtggagctccaagccgcgccgcattgctctcttcgtcgagccgtcgccctttgcttacatttccggttacaagaaccggtttcagaacttcatcaagcatctacgagagatgggcgatgaggtactggtggtgactacacacaagggagcccctgaggagttccatggagcaaaggtcattggctcgtggagctttccatgtcctctgtaccaaaatgttccactctcgctggcattgagccccagaatattttctgaggtgaataaattcaagccggacataatccatgccacctcacctggaattatggttctcggcgctctggctatatcaaagatgatatcagttccaatggtgatgtcttatcacacacatcttccagcgtacataccgaggtacaatttaaattggttacttgagcccacgtggagttttataagatgcctccacagatcagcagatcttactctagttccttcggtagctattgctgaagacttcgaaaccgctaaagtagtaccagcaaacagaatacggctttggaataagggtgtagattctgaaagctttcatactaaatatcggaggcatgaaatgcgtgtcagattgagtggtggtgaaccagaaaagccattggtaatacatgtgggtcgttttggacgtgaaaaaaatttggattttctgaaaagggttatggagaggctcccaggagcaaggattgcctttgttggagacgggccatacaggtccgagttggaaaaaatgttcacgggcatgcctgcagtttttaccggaatgctccaaggtgaggagctctcacaagcgtacgccagtggagatgtatttgcaatgccttcagaatccgagaccctcgggcaagtagtgctggagtccatggcttctggagtcccagtcgttgctgctcgtgctggagggatacctgatataatacccaaggacaaggaggggaaaccattggaatggctgccagagaagagatggagaagtgtgactggaggacagcctcgaagaaaatccgcaacgagcactacagcaccgcgatatcgtactggcggaagaagatgggcaagactaaccagacctccttgtttcaggattcttctgtcgctgccctctccaactagttgctgttaataactaaagaatttgtacattgtacccaaacagcttgcgagttttgtgtggctagctgcattcaaatgtccacagtctgactgactacggcttgtattcgattcatgtacatttagacagcacttaagattgccgatctgctaactcagaaggtttggcacaaatg

SEQ ID NO: 86672 - DNA, 1978 bp, Zea Mays
tcgacggccgtgtcccgcttgatttcgatcggcagctggagagaatcggttcgattccccgtctgccgcagtgcctcctttcctttcctttggcttaggctcggctcgttccttcgctcgtcgtattttttctccaccacttccttcatttttttttctttctccctccctacacggccactaccagtccaccacaaaccacgtccccgccgtcgtcgtcgcgcttcccctacgcgcgccccgtcgcgtctcggtgctgctgttgggtgcgcccgcgcgttgccgtgaagggtgaagctgcttccgcgcgccgccgccgccacctgccccgcgtgggttgcaagtcaagcagcaggctgggacggggccggagccggagggggcgggcgaagcgggataagggcggccgcggcacgcgcgtgagcggcacaaccgaagcaggctgcgtttagttggactgcggccggggatcgctcgcgtcgcgtcggaggaggatgtctcagacaggggaggcgcaggtgccgctgttgcagactcaggaggcggacgccgagtggagctccaagccgcgccgcattgctctcttcgtcgagccgtcgccctttgcttacatttccggttacaagaaccggtttcagaacttcatcaagcatctacgagagatgggcgatgaggtactggtggtgactacacacaagggagcccctgaggagttccatggagcaaaggtcattggctcgtggagctttccatgtcctctgtaccaaaatgttccactctcgctggcattgagccccagaatattttctgaggtgaataaattcaagccggacataatccatgccacctcacctggaattatggttctcggcgctctggctatatcaaagatgatatcagttccaatggtgatgtcttatcacacacatcttccagcgtacataccgaggtacaatttaaattggttacttgagcccacgtggagttttataagatgcctccacagatcagcagatcttactctagttccttcggtagctattgctgaagacttcgaaaccgctaaagtagtaccagcaaacagaatacggctttggaataagggtgtagattctgaaagctttcatactaaatatcggaggcatgaaatgcgtgtcagattgagtggtggtgaaccagaaaagccattggtaatacatgtgggtcgttttggacgtgaaaaaaatttggattttctgaaaagggttatggagaggctcccaggagcaaggattgcctttgttggagacgggccatacaggtccgagttggaaaaaatgttcacgggcatgcctgcagtttttaccggaatgctccaaggtgaggagctctcacaagcgtacgccagtggagatgtatttgcaatgccttcagaatccgagaccctcgggcaagtagtgctggagtccatggcttctggagtcccagtcgttgctgctcgtgctggagggatacctgatataatacccaaggacaaggagggtaagacaagctttctgtttacacccggagatctcgatgagtgtgtgaggaagatagagcagctcctcagttcaaaagatctcagggaaaccattggaatggctgccagagaagagatggagaagtgtgactggaggacagcctcgaagaaaatccgcaacgagcactacagcaccgcgatatcgtactggcggaagaagatgggcaagactaaccagacctccttgtttcaggattcttctgtcgctgccctctccaactagttgctgttaataactaaagaatttgtacattgtacccaaacagcttgcgagttttgtgtggctagctgcattcaaatgtccacagtctgactgactacggcttgtattcgattcatgtacatttagacagcacttaagattgccgatctgctaactcagaaggtttggcacaaatgctccgataattttgacgt

SEQ ID NO: 86673 - DNA, 1069 bp, Zea Mays
acaacgcccaactactaacaatttcaacaagcaactcaatcagtccctctctggaaatcgatagtcaccaggggcaatttggaactaaagaggatatgcatgggccaaatttcatctaaaggaagcaataagcaccgcgcgcaaatagaacataatcatgaagtcaaggggatacagataatggtagaaattagaaagagataggatccacctgcataaggttgttgagagcatggaggagacagaattgcagcctctgcctctcatgatacaccttgccgctgccgctttcccccgcgccagatcctgcctcaccttgctttgcttccgatttggctcccggttccatgcctcgatgctcgatggggctgggtcgctgccacgcagggacaaaacctgaaaccccacaggttacgcgccgtcgcgccccactccgcgtctccgctgcccggctggccgttttatcggcggcgccgccgttgcagcgatattaggctgtccactcatgaatttttatattatattttattctagtcagcaaatcctctactctacctcacaatcttcaacattaatatttgttggcggccttcggcttccgaaggtcctcaaaaacatgatttaacaatgttttccaagtgaaatgtgtgagcaggtatcttcggaattggattacgagtatataagattaaggccaagacgaagcttgagtgggacggaaggtgattgtgacgaaggaaaagatcattacgaagctatgcacagaagagctttgacataacggcggaaagggaaaccgacttaaagatgaaaaaccagattagacctcgaagaattactatagagttatttataaacgtaaagggcattaatgtaatcttgcatgggctgcgacccgcgcctataaatagatgaacagtactcccgtactgttcacgctgactcgacatttgcttttggcgccatacttgtattttcactccttcaagccgaaggtacatttgtaatttaatattgtttgtacaaataagataaatggaaatagattaataataatgttcacaaaaga

SEQ ID NO: 86674 - DNA, 1654 bp, Zea Mays
gacttgagttcaccggtactatttatgtaccgtacataaagtaaagtttaacgaaaagaaaagcacgggagacgggacgggaccgctgggcgcgccgggccgcgccgagccgagcgagtcgtccactctccactccgcccgccacgcccacgccccgtcctcgcttccgtctcccacaatccaaggacaccgagcagcaggcggcggaagcaacccgctgtgggggcggcgtggagtccagttttgctcggctcgtcgctgggatccgccggccggcgaagcggggaagggaagaggagcggagattggagagtacaagcaggggaagatgtcagacgcgctgatcaacggcctcgccggcgccggcggcgggatcatcgcccagctccttacctacccgctccagaccgtgaacgcgcggcaacagacggagcgcgacccctccaagccggcgttcaaggacggcgccgctcgccagttgtatctggttgtgaagaacgaggggtgggagcgcctgtatggcgggcttatgccctctctcgtcggcaccgctgcctcccagggtgtctactactacttctaccaaatattccggaacagggccgaggcaagggcccttgagcgatccaggagagggcttggcgatgggtctgtcggcatgctccagtctctcactgtcgctgccctgtctggctgtgtcaatgtactgctcacaaacccgatttgggttgttgttacacgaatgcaaactcacagaaaggcaaacaaacagcaaagacctcagggtttgaattgtgctcttgataagccccttgaagctgctacagctgaaaacgctccatacaaaacgattgatgtttttcaggaactctacaaagaatctggagttcttggcttctggaaaggggtaattccggctcttatcatggttagcaatcccgcaattcagttcatgctatatgagactcttctgaagaaattgaagaagagacgagcctctaattttaagggagctgatggattgactgctcttgaaatttttcttcttggtgctgttgcgaaacttggtgcaaccgtcgttacgtatccccttctagttgttaaggcaagacttcaggcaaagcacatgattaacgatgacaagaggcatcgctacaaaggtacacttgatgcgttcacaaagatggtacgatatgagggtctgtcagggatgtacaaaggaatgggcacaaaaattgtgcaaagtgtttttgcttctgctttgctttttatgattaaggaggagctggtgaagggtgctcgactattggtaactggtaacactagtctggttaagaaactaccatcaaagtcatcaagatgaactacgggcatcgcaagcgttagtatatcatcctaaaaagccatttattatccgcataaaccgtaaacaaggtcgacaagctatagagctcgcctctgctttggatatgtcaactgtaggttacacaatagccagtatgattcacgtagggaccaaagactatgttggatagatatttgtatcattcatgtagaatgtatcgtggaagatcgaaacagaagaaaataaataagtatgataatttgaacttcggccatctgctctaaacttctgatttcctgacttgctttt

SEQ ID NO: 86675 - DNA, 1446 bp, Zea Mays
gacttgagttcaccggtactatttatgtaccgtacataaagtaaagtttaacgaaaagaaaagcacgggagacgggacgggaccgctgggcgcgccgggccgcgccgagccgagcgagtcgtccactctccactccgcccgccacgcccacgccccgtcctcgcttccgtctcccacaatccaaggacaccgagcagcaggcggcggaagcaacccgctgtgggggcggcgtggagtccagttttgctcggctcgtcgctgggatccgccggccggcgaagcggggaagggaagaggagcggagattggagagtacaagcaggggaagatgtcagacgcgctgatcaacggcctcgccggcgccggcggcgggatcatcgcccagctccttacctacccgctccagaccgtgaacgcgcggcaacagacggagcgcgacccctccaagccggcgttcaaggacggcgccgctcgccagttgtatctggttgtgaagaacgaggggtgggagcgcctgtatggcgggcttatgccctctctcgtcggcaccgctgcctcccagggtgtctactactacttctaccaaatattccggaacagggccgaggcaagggcccttgagcgatccaggagagggcttggcgatgggtctgtcggcatgctccagtctctcactgtcgctgccctgtctggctgtgtcaatgtactgctcacaaacccgatttgggttgttgttacacgaatgcaaactcacagaaaggcaaacaaacagcaaagacctcagggtttgaattgtgctcttgataagccccttgaagctgctacagctgaaaacgctccatacaaaacgattgatgtttttcaggaactctacaaagaatctggagttcttggcttctggaaaggggtaattccggctcttatcatggttagcaatcccgcaattcagttcatgctatatgagactcttctgaagaaattgaagaagagacgagcctctaattttaagggagctgatggattgactgctcttgaaatttttcttcttggtgctgttgcgaaacttggtgcaaccgtcgttacgtatccccttctagttgttaaggcaagacttcaggcaaagcacatgattaacgatgacaagaggcatcgctacaaagatgcaactgaagagggcgaggcagacagcagctcctaggcgggaagtgtagatttgttgtttcgcatttgttatgttaccctcaggtgaggatggtggggaattctttcctaacggggagaccttttgtctgcttttattgtaagttgattatgttctcttactgaagcagtatactagatttccaaacctcacataagagcatgttttcaaatacatcatccgttgtcgaccactgcatataaagtgttctttcatctacgctgcaatggtgaagaacagcggac

SEQ ID NO: 86676 - DNA, 1319 bp, Zea Mays
gagtggccgaaccgaacgggtggataacaaagggatagagaagcggcagctgcagaggcagagcgtcagagccatcgtcctcgcctcaccccgtagtcccgtacctagcgcagcgaagccggcacaatgccagccgccgccgtagtctcccctctcctcctctcgctctcctcgtcctcctcccccttcctctcttcctcatccacctcctttttcccaccctcctccgctgccgtcactccacacgccgccgtcaggacgagggcggctgtctccgtcctccgcgcgctgcgcgccgaggcggccaccctccccgtgctctcattcaccggagagaaggtcggggaggtaaccctcgacctcaaatccgcgccaccctccaccgcgcgcgctgtcgtgcaccgcgctatcatcaccgaccgccagaacgcgcgccgaggcacggcctccacgctcacccgcggcgaggtcagaggcggagggaggaagccctatcagcagaagaagacggggaaggcgcggcgggggtcgcagcgtaccccgcttcgtcccggcggtggcgtcgtgttcggccccaagccccgcgactggtccatcaagatcaaccgcaaggagaagcgccttgccatctccactgccatcgtgagcgccgccaaggacgccttcgttgtcgaggagttcgaggaggccttcgcgtcggggcccaagaccagggatttcgtggccgctttgcagcggtgggggcttgacccgaagcagaaagccatgttctttgccacggacttcgacgacaatgtgcggctcagcggcaggaacattggttccctcaaaatgctcacacccaggacgctgaacctgtacgacatactcgacgcacgcaagctcttctttactcctgctgctgtagactacctcaactccaggtacggagccagtgtttccgatgactactatactgatgacgaggatgatggcgaggaggaactggtcgagcaagaagcagaagaaggcaccacagcagatgctgctccagatgcaactgaagagggcgaggcagacagcagctcctaggcgggaagtgtagatttgttgtttcgcatttgttatgttaccctcaggtgaggatggtggggaattctttcctaacggggagaccttttgtctgcttttattgtaagttgattatgttctcttactgaagcagtatactagatttccaaacctcacataagagcatgttttcaaatacatcatccgttgtcgaccactgcatataaagtgttctttcatctacgctgcaatggtgaagaacagcggac

SEQ ID NO: 86677 - DNA, 2401 bp, Zea Mays
gaaaaggttccaccgtctctaccttgccccgaccggaactggaacccctaaaaatttccctttcgtacctttccccttcctcctcccgtccaccacaccccggctccaccccgtgcaaatccgctggccgcagcaagagaggtcgaggagggaaacagatcgggtggcggcaaccggtagccggttccgctggcacgatgggcggcgaggccgagggcggggagcggcggctggggcgggtcctgagctttgggatcccggacacggcgctggggctagtgatggggtacgtggaggacccttgggaccgcgacgccatctcgctggtgtgccgccactggtgccgcgtcgacgcgctcagccgcaagcacgtcacggtggccatggcctactccacaacacccgagcgcctgttcggccgcttcccgtgcctcgagtcactcaagctcaaagcaaagccccgcgcggccatgttcaacctcatctccgacgactggggcgggtctgcgtcgccgtggattcgacagctctcggccactttccactccctcaagaagctccacctgcgcaggatgatagtatccaatgacgacatcaacacgctcgtccgcgccaaagcccatatgctcgtgtcgctgaagctcgaccgctgctcaggcttctccacgccctccatcgcactcatcgcccgctcttgcaggaaactggaaacacttttcctggaagaaagcatgattgatgagaaagaaaatgatgaatggatccgtgagcttgctacgagcaattctgttcttgagacactgaatttctttcagacagatctcagggcatccccagagtatcttacccttcttgtgcgcaactgtcaaaggctgaaaaccttgaagattagcgagtgtttcatgcctgatctggttagtttgttccgaactgcacaaacactacaagaattcgctggtggttcctttgaagatcagggtcaacctgtggcaggtagaaattatgagaactactattttcctcctttactgcaccgcttgagtttgctctacatgggaacaaatgagatgcagatactgtttccatatgctgctgcacttaagaagttagaccttcagtttacattcctttccacagaggatcactgtcagatagttcagcgctgccccaatctggaaaccttagaggtgagggatgtcataggggatcgtgggctacaagttgttgcagagacctgcaagaaattgcagaggctcagagtagagagaggagatgatgatcaaggaggtcttgaggatgaacaaggtaggatttcacaggttggggtgatggctatagcccaaggctgccctgagttgacatactgggcaatatatgtatcggacattacaaatgcagctctagaggcggttggtacatgcagcagaaatcttaatgatttccgccttgtccttcttgatagagaagcacatataactgagttgccactggacaatggggttcgtgctttgcttagaggttgcaccaaactcaggaggtttgcattttatgtgagacctggggtcctatctgatgttggtcttggctatgttggagaatttagcaagagcattcgatatatgttgcttggcaatgttggtgaatctgataatggaattatacaattatcaaaaggctgcccaagcttgcaaaaactggagctgaggggttgtttgtttagtgagcatgctttagctatggctgcactagagctcaagtcactgaggtatctgtgggtgcaaggattcaggtcatctccaaccggaactgatcttatggcaatggtacgccccttctggaacattgagtatattcttccagaccaagatgaaccttgcccagagtataagaaacagattctggcatactactcccttgctggaaggaggacagattgccctccatcggtaactccactttacccagcagtttgagcgtagatacttgctttttgctagactgaatctcatggtactaagctccattgctcccacaatctgtgaaatcgatggttcctgttgatggggacatgcagacgttccattgcacataaccccagagctaagctttaagcaggacgacagctcggagctgaggctagctgagaacaatcgtgaatacctgaaggcagcactttgtggatcagattggcctagctgtccagtatggaaatgtaaactttgccattttgaatagttttggagaaacaattttgtaataatttacccctgtttagtgtacattattgattttcgtttatatgatgatgttgtattgctttatttaacatttaagtcaattagttaatctacagtctgacttgctgtgattcgatgaatttatggattttccttgctgctcg

SEQ ID NO: 86678 - DNA, 1229 bp, Zea Mays
cctgttttataaattgcaaactgcattgatgttctctctctttttctgttgggaaaacaggtgagggatgtcataggggatcgtgggctacaagttgttgcagagacctgcaagaaattgcagaggctcagagtagagagaggagatgatgatcaaggaggtcttgaggatgaacaaggtaggatttcacaggttggggtgatggctatagcccaaggctgccctgagttgacatactgggcaatatatgtatcggacattacaaatgcagctctagaggcggttggtacatgcagcagaaatcttaatgatttccgccttgtccttcttgatagagaagcacatataactgagttgccactggacaatggggttcgtgctttgcttagaggttgcaccaaactcaggaggtttgcattttatgtgagacctggggtcctatctgatgttggtcttggctatgttggagaatttagcaagagcattcgatatatgttgcttggcaatgttggtgaatctgataatggaattatacaattatcaaaaggctgcccaagcttgcaaaaactggagctgaggggttgtttgtttagtgagcatgctttagctatggctgcactagagctcaagtcactgaggtatctgtgggtgcaaggattcaggtcatctccaaccggaactgatcttatggcaatggtacgccccttctggaacattgagtatattcttccagaccaagatgaaccttgcccagagtataagaaacagattctggcatactactcccttgctggaaggaggacagattgccctccatcggtaactccactttacccagcagtttgagcgtagatacttgctttttgctagactgaatctcatggtactaagctccattgctcccacaatctgtgaaatcgatggttcctgttgatggggacatgcagacgttccattgcacataaccccagagctaagctttaagcaggacgacagctcggagctgaggctagctgagaacaatcgtgaatacctgaaggcagcactttgtggatcagattggcctagctgtccagtatggaaatgtaaactttgccattttgaatagttttggagaaacaattttgtaataatttacccctgtttagtgtacattattgattttcgtttatatgatgatgttgtattgctttatttaacatttaagtcaattagttaatctacagtct

SEQ ID NO: 86679 - DNA, 4161 bp, Zea Mays
cgtgcgacccgacccgacccgaaaagtcccactaggctagacagacaagcctgctcgccggagatctcccgctcgcgcggcgcggcccctcgctccgcgaccatggcctccgggcaggactcgtcgggcaccacgctgatggatctcatcacctcggatccttcggccacgtcgactgccggggcatcgtcgcagcagcagtcctcctcgggcgtcggcagcgccggtggctcccttttggggaagcccgtggctccggcggcggatcgcaagtcgaagaaggggacgctgatgcagatccagaacgagacaatatccgctgccaaggcgcttaaccccgtcaaggtcctgccccagcgcaacaggaagaagaagcccgtctcctacgcacagctggcccggagcatccacgagctcgccgcgacgtgcgaccagaaaagttcccagaggcagctcgtaaatagtgtgttccccaagcttgctgtgtacaattctgtggatccttcggtggctccatctcttctcatgctccatcagcaatgtgaggacagaaatgttctgcgctatgtatactactatctggcccgtatactgtcagataatggttcccagggtttaagtgctgctggtggcatacccacgcccaattgggacgctcttgcagacattgatgccgtcgggggagtgacacgagcagatgttgtaccgagaatagttgatcaactttcagcggaatcctcgagtgatgatgttgagtttcatgcacggagacttgctgctctgaaggcccttacctcctgttccactagcagttctgagatgatggaaaagctaaatgaaattgtgtttggcatcttggaaaaggtagcagatactaaacaaaaacggaaaaagggtatttttactaagcaaggtggtgataaggagtctatcatacgtggtaatttgcaatatgcttctctaagtgcactgagaaggtttccacttgatcccggtaaccaagcattcctccaccgagctgtgcaagggattgaattttccgacccagttgcagtcagacatgcattgtcaataatatctgaaattgctgcgaaagatccatactctgtcgcaatggcattgggcaaaagtgcacaacccggtggagctcttcaggacattcttcatttgcatgatgtccttgccagggtttaccttgcaaagttgtgtcattcgatatctagagcacgtgtattggaccagaggcctgacataaagtcacagtacagttccctcctttatcaacttcttctggatcccagtgacagggtctgctttgaggccataaattgtgtgttgggaaaagtcgacaacacagaaagcacggaggacagagctggtggatggattcagttaactagagaaattctcaaattgccagaggccccttctgtagcatcaaagggtgttctggcaaaatctagtgaaaaatcttcaaaagcaaggcgccctcagcctctcatcaaacttgtaatgagaagattggagagctcattccgtagcttctctcgtccggttcttcatgctgctgcaagagtagttcaggaaatgggcaaaagtagagcagctgcttttgctttaggtgcatatgatgagggtgccagtcttgatgttggatctcttgattctgattttgagaatccaatggctgaaggtacccgaaagcaaaatccgctatccaatggtcatggtggaacggacacaatagcaggattattagcatcactgatggaagttgtgcggacaacagtagcatgcgagtgtgtatatgttcgagcaatggtcatcaaagctttgatatggatgcaaaatccacatgaatcttttgaagagctaaaatctatcattgcatgcgagttgtctgacccagcctggccttcctcgctcctgaatgatgtcctactaaccttacatgctaggttcaaggcaacccctgatatggctgtgactctgcttgagattgcaagaatttttgccactaaagttcctggaaagattgatgctgatgttctacagttgttatggaagacatgccttgtaggagcaggaccagatgggaaacatacagccttggaagctgtaactatagttcttgatctgccaccacctcagcctggttcaatgtctggactcacttctgttgatatggtatctgcctctgatccaaaatctgcaatggcactccaaagattagttcaagctgctgtttggtttctaggagaaaatgctaattatgctgcatctgagtatgcctgggagtctgcaacaccacccggtactgcattaatgatgctagatgctgataaaatggttgctgctgcaagttcccgtaatcctacacttgctagcgctctgacaaggcttcaaaggtgtgcatttagtggaagctgggagatccgcattgctgctgtacaagccctaactaccattgcaataaggtctggtgaaccttatagactgcagatatatgaatttcttcatgctttggctcttggaggtgtgcagtcaaacttttcagaattgcagctaagtaatggggaaaatcaaggtgccagtggtactggtcttggatctttaataagcccaatgcttaaggtcctagatgaaatgtatagaggccaagatgatcttgccagagatattcgccagcatgataacagcaaacaggaatggagtgatgaggaactcaagaaactttatgaaacccatgagaggcttcttgattttgtttccttattctgttttgttccaagggctaaatacttgccccttggtcctaccagtgccaagctaattgagatctaccgcaaccgtcataacataagtgcttctggtggtctaagtgatcctgctgttgccactggaatatctgatctcatgtatgagtccaaagaagtacataaagagaccaatactgtccagtctggtattgatcccgatctggcaatggcctgggcagcaggtttggaagacgatgtttgggcaaacaacgctccagctgtggataaagtaaaggacttccttgccggtgctggaactgatgctcctgatgtggatgatgaggaatacatgaactcgaggccatcagtcggatatgatgatatgtgggctaagacaattcttgaaacttacgatgcagaggaagatgatggtaggtactctggtggatcctctcctgaatcaactggttctgttgaaacctccatatcgtcccattttggaggcatgaactatccatcactgttcagttcaaaaccgtcaagtcatggggcctcacaacaaacgatacgtgaagaaccaccctcatattcgacgtcagtactacagaggaaggaatcatttgaaaacccccttggagggggtggaggacgaagtttcggatcccacgaggatgaagataagagttctggtaaccctcagtctgggaaagctttgtatgacttcacagcaggcggtgatgatgagctgagtttaaactctggagaagaagtggagattgaatacgaggtcgatggttggtattatgtgaagaaaaggaggcctggaagggatggaaagatggcaggtctggttcctgttctgtatgtgagttcatgataacagccgtgtgtatcgtttcccacacttgtggaagctgtttggagttcatgggcttaacaaaaaggcacactggaatgctcccgagagatcttcgcataaactcgtgcccgtcgtataggcacgtggccttgtggaagcaggtcatatccagtcatcttggggttcgtatgatgctgcagtgctgttcctgggaaagatttacgtgttgatttgtctggacccacaccactagtcattcaattgattgttttttgttgctaaggtggagactcttcagaggttaaaccgttcatctgtgccattttgctgccgtctgtgttcaagaaggcaatttcgtcgtctccagttcgtgttgtgcgatatatattctagtaaaattgtagaggcatcatttccccggcatatattattttggtcgtgtatggtgtgattctggtggtaaaatagtgtcattaatgttgtgtatatttgtttccgggtggattacagagtatataactataagggggtgtttggtttaag

SEQ ID NO: 86680 - DNA, 4260 bp, Zea Mays
atggcctccgggcaggactcgtcgggcaccacgctgatggatctcatcacctcggatccttcggccacgtcgactgccggggcatcgtcgcagcagcagtcctcctcgggcgtcggcagcgccggtggctcccttttggggaagcccgtggctccggcggcggatcgcaagtcgaagaaggggacgctgatgcagatccagaacgagacaatatccgctgccaaggcgcttaaccccgtcaaggtcctgccccagcgcaacaggaagaagaagaaaagttcccagaggcagctcgtaaatagtgtgttccccaagcttgctgtgtacaattctgtggatccttcggtggctccatctcttctcatgctccatcagcaatgtgaggacagaaatgttctgcgctatgtatactactatctggcccgtatactgtcagataatggttcccagggtttaagtgctgctggtggcatacccacgcccaattgggacgctcttgcagacattgatgccgtcgggggagtgacacgagcagatgttgtaccgagaatagttgatcaactttcagcggaatcctcgagtgatgatgttgagtttcatgcacggagacttgctgctctgaaggcccttacctcctgttccactagcagttctgagatgatggaaaagctaaatgaaattgtgtttggcatcttggaaaaggtagcagatactaaacaaaaacggaaaaagggtatttttactaagcaaggtggtgataaggagtctatcatacgtggtaatttgcaatatgcttctctaagtgcactgagaaggtttccacttgatcccggtaaccaagcattcctccaccgagctgtgcaagggattgaattttccgacccagttgcagtcagacatgcattgtcaataatatctgaaattgctgcgaaagatccatactctgtcgcaatggcattgggcaaaagtgcacaacccggtggagctcttcaggacattcttcatttgcatgatgtccttgccagggtttaccttgcaaagttgtgtcattcgatatctagagcacgtgtattggaccagaggcctgacataaagtcacagtacagttccctcctttatcaacttcttctggatcccagtgacagggtctgctttgaggccataaattgtgtgttgggaaaagtcgacaacacagaaagcacggaggacagagctggtggatggattcagttaactagagaaattctcaaattgccagaggccccttctgtagcatcaaagggtgttctggcaaaatctagtgaaaaatcttcaaaagcaaggcgccctcagcctctcatcaaacttgtaatgagaagattggagagctcattccgtagcttctctcgtccggttcttcatgctgctgcaagagtagttcaggaaatgggcaaaagtagagcagctgcttttgctttaggtgcatatgatgagggtgccagtcttgatgttggatctcttgattctgattttgagaatccaatggctgaaggtacccgaaagcaaaatccgctatccaatggtcatggtggaacggacacaatagcaggattattagcatcactgatggaagttgtgcggacaacagtagcatgcgagtgtgtatatgttcgagcaatggtcatcaaagctttgatatggatgcaaaatccacatgaatcttttgaagagctaaaatctatcattgcatgcgagttgtctgacccagcctggccttcctcgctcctgaatgatgtcctactaaccttacatgctaggttcaaggcaacccctgatatggctgtgactctgcttgagattgcaagaatttttgccactaaagttcctggaaagattgatgctgatgttctacagttgttatggaagacatgccttgtaggagcaggaccagatgggaaacatacagccttggaagctgtaactatagttcttgatctgccaccacctcagcctggttcaatgtctggactcacttctgttgatatggtatctgcctctgatccaaaatctgcaatggcactccaaagattagttcaagctgctgtttggtttctaggagaaaatgctaattatgctgcatctgagtatgcctgggagtctgcaacaccacccggtactgcattaatgatgctagatgctgataaaatggttgctgctgcaagttcccgtaatcctacacttgctagcgctctgacaaggcttcaaaggtgtgcatttagtggaagctgggagatccgcattgctgctgtacaagccctaactaccattgcaataaggtctggtgaaccttatagactgcagatatatgaatttcttcatgctttggctcttggaggtgtgcagtcaaacttttcagaattgcagctaagtaatggggaaaatcaaggtgccagtggtactggtcttggatctttaataagcccaatgcttaaggtcctagatgaaatgtatagaggccaagatgatcttgccagagatattcgccagcatgataacagcaaacaggaatggagtgatgaggaactcaagaaactttatgaaacccatgagaggcttcttgattttgtttccttattctgttttgttccaagggctaaatacttgccccttggtcctaccagtgccaagctaattgagatctaccgcaaccgtcataacataagtgcttctggtggtctaagtgatcctgctgttgccactggaatatctgatctcatgtatgagtccaaagaagtacataaagagaccaatactgtccagtctggtattgatcccgatctggcaatggcctgggcagcaggtttggaagacgatgtttgggcaaacaacgctccagctgtggataaagtaaaggacttccttgccggtgctggaactgatgctcctgatgtggatgatgaggaatacatgaactcgaggccatcagtcggatatgatgatatgtgggctaagacaattcttgaaacttacgatgcagaggaagatgatggtaggtactctggtggatcctctcctgaatcaactggttctgttgaaacctccatatcgtcccattttggaggcatgaactatccatcactgttcagttcaaaaccgtcaagtcatggggcctcacaacaaacgatacgtgaagaaccaccctcatattcgacgtcagtactacagaggaaggaatcatttgaaaacccccttggagggggtggaggacgaagtttcggatcccacgaggatgaagataagagttctggtaaccctcagtctgggaaagctttgtatgacttcacagcaggcggtgatgatgagctgagtttaaactctggagaagaagtggagattgaatacgaggtcgatggttggtattatgtgaagaaaaggaggcctggaagggatggaaagatggcaggtctggttcctgttctgtatgtgagttcatgataacagccgtgtgtatcgtttcccacacttgtggaagctgtttggagttcatgggcttaacaaaaaggcacactggaatgctcccgagagatcttcgcataaactcgtgcccgtcgtataggcacgtggccttgtggaagcaggtcatatccagtcatcttggggttcgtatgatgctgcagtgctgttcctgggaaagatttacgtgttgatttgtctggacccacaccactagtcattcaattgattgttttttgttgctaaggtggagactcttcagaggttaaaccgttcatctgtgccattttgctgccgtctgtgttcaagaaggcaatttcgtcgtctccagttcgtgttgtgcgatatatattctagtaaaattgtagaggcatcatttccccggcatatattattttggtcgtgtatggtgtgattctggtggtaaaatagtgtcattaatgttgtgtatatttgtttccgggtggattacagagtatataactataagggggtgtttggtttaagaaatcactacatccaaattgaggtggtgcatcatgtgttcattcctcaaatttggtaggatgaccctattcctcatattagtactaactaactaattatgacgaatgaggtggtgatgatcaacttattccatttcacaaaccaaacaaaaatagtgaggagtgagaagatgatggactagttcattcctcaaaccaaacatcctataaagccgtagttttgtttaggatcatcaggctaaagcttggtaccgaagtccgg

SEQ ID NO: 86681 - DNA, 408 bp, Zea Mays
atggggaggagcggcggcgagaccgcggggaagcggcagcagttcgggagcatggaggagttctggggcttctacctgagccagcactccaagccgggcacgcggcggtggcacttcctcggcacgctggcctcgctcgcctgcgcggtgctcgcggccgccactggccgcgccgcggtcctcctcgcgggccccattctcgggtacggcatggcgtggtacagccacttcttcttggagggcaaccgccccgccacgttcggtcaccccgtgtggtccttcctctgcgacctccgcatgttcctgctcatcctcaccggccgtatcgacgccgagctcgcacgcctccgcgtccggccgacggccgagtccaccgacgccgcggcggcctctgcgcaccatgactga

SEQ ID NO: 86682 - DNA, 984 bp, Zea Mays
ggaggatagatggctcatggctgccatcgtctaggctcaacatccgaaagacgggccatggtcggtttccttcctcaccccagcggcggacatctatccgaaaataggccgcacctcgtccgctttgctccttgttcatccttcacctgctgatggcggcagcggcgcggccatccaacgccactcttctcgcgcgcctccgggacggcacggccaagttcgagctgctggatgactctgcgtttgcgcttgcgcacgcgcccccggcctggccccgacttcactgctttgccaggattgccccctcgttgaggggtgggtggtcggcagcgttgaacaaggtggagcattacggggttcagagggttaccggcgatggccggtgcatgtttcgagcgctggctaaaggaatggcaaaaaacaaggggattcctttggccccaagggaggaggtagaagatgcagatgatttacggatggcagtgaaagaaattatatgtgacagcgagactgggcggcaggagtacgaagaagcagttatagcaattactgtggagcaatcattgaaacgctactgccaaaggataaggaggcctgatttctggggtggagagtcagaattcctggttttgtctagactgtgtcggcagccaataattatttatattccagagcgtgagtaccatggtcggggtaatggtttcattcctatagctgaatatggtttggaattcaccaaaaatacaaagcagtggaagaaaaagacaccagtaagactattatacagtggaaggaaccattatgatttgcttgtgtgacatagttgcagagcaatgtatttttctagtgcccgtcgtcataccatggttgtattattttttgtttttatacctgtgcttgtgccccttttttgagccaccaatggaattgattcagttatccaaatatcagtttcgaaatatatatatttctcgtttgcatgct

SEQ ID NO: 86683 - DNA, 875 bp, Zea Mays
ctctcctcatgtaggcggtatccatccattttccgattctcacgcataattttaactcctggtcatggtagccactcttctcgcgcgcctccgggacggcacggccaagttcgagctgctggatgactctgcgtttgcgcttgcgcacgcgcccccggcctggccccgacttcactgctttgccaggattgccccctcgttgaggggtgggtggtcggcagcgttgaacaaggtggagcattacggggttcagagggttaccggcgatggccggtgcatgtttcgagcgctggctaaaggaatggcaaaaaacaaggggattcctttggccccaagggaggaggtagaagatgcagatgatttacggatggcagtgaaagaaattatatgtgacagcgagactgggcggcaggagtacgaagaagcagttatagcaattactgtggagcaatcattgaaacgctactgccaaaggataaggaggcctgatttctggggtggagagtcagaattcctggttttgtctagactgtgtcggcagccaataattatttatattccagagcgtgagtaccatggtcggggtaatggtttcattcctatagctgaatatggtttggaattcaccaaaaatacaaagcagtggaagaaaaagacaccagtaagactattatacagtggaaggaaccattatgatttgcttgtgtgacatagttgcagagcaatgtatttttctagtgcccgtcgtcataccatggttgtattattttttgtttttatacctgtgcttgtgccccttttttgagccaccaatggaattgattcagttatccaaatatcagtttcgaaatatatatatttctcgtttgcatgct

SEQ ID NO: 86684 - DNA, 1291 bp, Zea Mays
gtgcctccatcttccgattcccatcccccgtcgtcgcttgtttggtgctgtcttttcctttccgccgcggcaaaagtgaggagcgcgcgggcgagttgggggagacgaacccgtcataactccctcgcttaatcgcgtctcgtgctcctgcctcctgcgtatataaacgcggcaatcgggacgcccggggaggcgttcgttctccttctccatcccacgcgcgcgcaggccaaggccggatcggcggcctctcagatctcgccggccgccgtgagacagagaccgaagggggggttgaccggtgctcgggaggaagatgtttagcgggacgcagcagaagtgcaaggtgtgcaccaagacggtgtacccgatggaccagctctccaccgacggcgtcgtcttccaccgctcctgcttcaagtgccagcactgcaagtctaccctctcactgagcaactattcctcgttcgaaggagtgccgtactgcaagacccatttcgagcagctgttcaaggagaccgggagttacaacaagagcttccaatcacagtcacctgcaaagattactccggaaaagttggcccctgagctgaccagatcaccaagcaaagctgcaaggatgttttcaggaacacaagacaagtgtgcgacttgtggtaaaactgcgtatcctcttgagaagtatttgctatggaacatctcagggtcaatcaccatgggttccaatggctttcacaactgaacaaatactcgtccccttctagtcatgttacccaggtaacagtcgaagagaagtcctaccataagtcatgcttcaaatgctcccacgggggctgcgcgattacaccttccaactatgcagccttggagggcatcctctactgcaaacaccatttctcccaacttttcaaggagaagggaagctacaaccacttgatcaagtgcgcgtccgtcaagcgcgctgctgaagcacagccagaacaaccggcctctgattcctcctcctgaccacgccatttaaacagtgggggtttggaggcgagagagttgggaagcctcctgtttctacttaaaaccgcgtgatgtatgttattccatctatgccccgaggatactagactactactctattttggtatcctctgctgtgctagctggatcatatcagcgaaccatggaattgctgtcattttcaatgaaactgttgtgcatcaagtagtgaaatcttcactgaaatcgggtatcttgcctttattgatcaatatattatctatgttgttttgttgtcttt

SEQ ID NO: 86685 - DNA, 697 bp, Zea Mays
gtgcctccatcttccgattcccatcccccgtcgtcgcttgtttggtgctgtcttttcctttccgccgcggcaaaagtgaggagcgcgcgggcgagttgggggagacgaacccgtcataactccctcgcttaatcgcgtctcgtgctcctgcctcctgcgtatataaacgcggcaatcgggacgcccggggaggcgttcgttctccttctccatcccacgcgcgcgcaggccaaggccggatcggcggcctctcagatctcgccggccgccgtgagacagagaccgaagggggggttgaccggtgctcgggaggaagatgtttagcgggacgcagcagaagtgcaaggtgtgcaccaagacggtgtacccgatggaccagctctccaccgacggcgtcgtcttccaccgctcctgcttcaagtgccagcactgcaagtctaccctctcactgagcaactattcctcgttcgaaggagtgccgtactgcaagacccatttcgagcagctgttcaaggagaccgggagttacaacaagagcttccaatcacagtcacctgcaaagattactccggaaaagttggcccctgagctgaccagatcaccaagcaaagctgcaaggatgttttcaggaacacaagacaagtgtgcgacttgtggtaaaactgcgtatcctcttgagaaggtaacagtcgaagag

SEQ ID NO: 86686 - DNA, 669 bp, Zea Mays
atgcggtttcagggtttgaacgttactaattatgcttctcttgtcatgatggggtactatgggaagtcaatcaaagatctggccctcgctcgcatccctgctgtcagcctggagagtttgcagatcgaggaatgcagcaaggttactcttacgggcattcttgctttcttcctcaactgtagcccaaagttcaagtccctctctctgtccaagtgcatcgagatcaaggacatatgctccgcatctgcacagcttccagtatgcaaatcgcttcggtccctggccatcaaggattgctcaggcttcaccgacaccagccttcctatggtgggcatgttctgccctcagctggagaacatcaatttgagtggccttagtgcagtcaccgacaatggcttccttccactaatgaagagctcggacagtgggctggtcgacattgatttgaacagctgcgagaatctcacggtcacggacgcggctgtttctgccttggttaaggaccatgacgcttcccttgccacctcattgaccatgatgcaagcctgttcgccatctgtgagagttgcagccagctcatcgagctcaacctttcgaactgcatggtcaatgactacaatggcgcggtcttggaagcgacgaagcagctcaggctgtgtggctgtatga

SEQ ID NO: 86687 - DNA, 115 bp, Zea Mays
gcactgcagaagcagcgccaattgctgccttcccctcaggatggcctgagaggattgtcaatattgcaagggcctcatctaccatcccactttcagtctccatgagcagttctgg

SEQ ID NO: 86688 - DNA, 666 bp, Zea Mays
ttgcctgtttcttccccccttcgtgctccgtctcgcgccgacccatctgggctgggacacgcagcgacaattcactcgtcggtccagggaccccctggggtcgaaacgccgacactcccgcgcttcctccacgctcccttccatacagcgggcccgatccgattcggcttccgtctcactcatctcacctggcctccgcggagagatctagcggtggaggcgatgccactgggcgacggcgcggaggcgacggacttcgtgctgccggacgagctcctggcggcgttgccgcaggacccctacgagcagctggatctggcacgccacatcaccgcgctggcggtatccgggcgggtgtccggcctggagcgggaggcagggcgcctacgggcggagggtgcggggaaggaccgcgagaacgccgagctccgggagcgagtgaacgagattattgggaggtctgtcctggcgcacggaccttatgggaagctagaggatatagagttcatgaaaaagaaacttgagggccttgataagccaatgaagaggagcaatgataagctgctcaaaattgagcatgaattatgtgagagggtgcggcatcaattacttcaattcttctgcataactatgggtcttttagcagccttactaaaatatgattga

SEQ ID NO: 86689 - DNA, 477 bp, Zea Mays
atgtcgctgatccgccgcagcaacgtgttcgatcccttctccctcgacctctgggacccctttgagggcttccccttcggctccggcaacagcagcagtctcttcccctcgttcccgcggaccagctcggagaccgcggccttcgctggcgcgcggatcgactggaaggagactccagaggcgcacgtgttcaaggccgacgtaccggggctgaagaaggaggaggtcaaggtggaggtcgaggacggcaacgtccttcagatcagcggcgagcgcaacaaggagcaggaggagaagacggacacctggcaccgcgtggagcggagcagcgggaggttcctgcgcaggttccgactgcccgagaacgccaagacggagcagatcacggccgccatggagaacggcgtgcttacagtcactgtgccgaaggaggacgccaagaagcctgaagtgaagtccattcagatctccggctag

SEQ ID NO: 86690 - DNA, 245 bp, Zea Mays
cacatgcacaatggagtagttagattcaacacttatgacacaagttttttcttcaccgttggactattattgtcgcatatgttgccaccgcgaaccaccgctcctctataggttatgtcaatcgacctttcctcttttgtcttcgacatcatccaagactaacaaagttagattcaaatcaaactagatgtccagactggcaaagttagatttaaaatcaaactactatctacatataagcaact

SEQ ID NO: 86691 - DNA, 1054 bp, Zea Mays
agcattctccacgctccaatacagcggcgtcgtgtctatccgggtctatccgcgaacacgtgagaactctccagaaactgctttctcctccacttcatctctctcgctttccctctataaaaagaccccttctaggaattgagggagacagcaagcaccaagcagcgatccgaagctcaatcaattcactcaaacctcttccccaaatcttcgattagattctcgttgacaagaagactagaaccgaacctgaccatgtcgctgatccgccgcagcaacgtgttcgatcccttctccctcgacctctgggacccctttgagggcttccccttcggctccggcagcagcagcagtctcttcccctcgttcccgcggaccagctcggagaccgcggccttcgctggcgcgcggatcgactggaaggagactccagaggcgcacgtgttcaaggccgacgtaccggggctgaagaaggaggaggtcaaggtggaggtcgaggacggcaacgtccttcagatcagcggcgaacgcaacaaggagcaggaggagaagacggacacctggcaccgcgtggagcggagcagcgggaggttcctgcgcaggttccgactgcccgagaacgctaagacggagcagatcacggccgccatggagaacggcgtgcttacagtcactgtgccgaaggaggacgccaagaagcctgaagtgaagtccattcagatctccggctagacctcggtctgcggtcgtcgtacctgcgtggtttgaggaacggcagttcgcctcggtcgttctgtgaaataaaattgggttacaagaattatggcgtttgtcaatatggtcgtaatgtcgtaggatggtggaatgtggtcacaaactttgcgtatgttgggtctactggtggtgtctgaatctatgtatggatgtcatgagtttgtctactagagtcccagttcctgtggtgttcgtatgatgtatatcatgggttaactctatctaaaatttcttcattatggtatttttaagaaataaattcttcattatggtatttttt

SEQ ID NO: 86692 - DNA, 1763 bp, Zea Mays
cccgcgcccgcgcggaatcggacgagccacggtctaccagcacagcgctatacaccgccggccttcttggcttccttctaccgattccgtgtgctgttcgctgtcgcctattgcgcttgcgcctacttggtaactacagcgtcggccgccatcccccgcagcagccgttttctagctgcttcccgctggttcgcggccgccgtcctgggcgtctgagcgaggggtaaccctgcccttttgttcctgggctattcctcagctcgcgccgctgtcgcctcaccccccaatccaatcctccgcgatcgatcggcgggcgcggatggaggcgctgaagaagcaggccagcaagctccgcgagcacgtcgccaagcagcagcaggcggtcctcaagcagttcagtacgcggtatagtcaagatccttctcttgttgatgaagcggagcttgagtgccaccagaatctccaaaggctttacagtactacaagagcagctaagcatttccagcggaatattgtacgaggggtggaaggtttcattgcagttagcaccaaacagatggagattgtgaaaaaactagccggggattgttgtaaatatggagacgacaatcagcattttggttttgctcttgcaagggcgtctgaggagttcggtaaatctcataaacaaatagagaaagagcgggaggatcttcttaaaattcttggagagcagatttttgagcctctccgagaaatgataatgagtgctcctcttgaagatgctcgattgctaacttaccgttatcaacggatcagacaggacatggagtctcagatagctgatgtgatgagaaagcaacttaaatccaaggaaagtagtggtaacacagataactctgtgaaactgcaacatgcagaatcgaaattatcagatcttcgaactacactggcagcgttaggaagagaagcaactgcagctatggaggctgtagaggctcagcaacagcaagttacgtacgaacgtctccttgcaatggttgatgctgagaggacatatcatcaaaatgctgctgatattctgaataaactccatgatgagatgctctatgcaaagcatcataatgagtcagcaaaccactacgatgaacagtcttcagagcctgaatcagatgcaggcccagcacaagtgcactcacgtagcacatctgaagatccagtattgactaaacctagcgaatccacagggaacagtcaggaggtgcaatttctgggggaggttattcatccattcgatgctcaggctgatggtgagctcagtctcgcggtgggtgaatacgttgtggtccgccaggtggctgcaaatggttggtctgaaggtgaatgcaagggaaaggctggctggttcccatctgcctacgtagagcagagggacagagccccggcaagcaaggtgatagagcctggacttctgactacctgatccatcccgtagttatggctgctgacttgctgtcatggtcctttttttttctacattattgtacatgacatgccccatgagtgattagcgtatggcagaaccttcaccttttctgtgcagattattgttcttctagccttttcgttggtcggtaactgtatgtaaaatgtagttctgtctgttaggatttccttccggtattataacattgtacagagctattggtgatgagatgctgtcagcttgccctttcttttcggacagtgtgcttcctgacagatttatgctaactaatggtttc

SEQ ID NO: 86693 - DNA, 1195 bp, Zea Mays
ctcattatatagagaggtcttacttggcccctaagcaagcgactacttaaccctaatggcctaaggcccaattagggctgacaatgggctataaattttgcactataaaatttaaggatcgaatcgggttaggatcggactctatttttattcatttttgaactataatttatttagggccttgacattttgtgaagaaccatttggatcacgatccattaccacccctaggcccaataggcccttgactctaccattaacactagaagttttgaactttttgaacaaagaatcaacattctcttgctgacgttattagttccaactttgtgtttcaaattcctgaattctcagacaaacagttccagtattgccatttgctgctgtgttttgcaaatctgcattattttcttgcatgaagagttagatggctttagtctatgcttacaggttgatgctgagaggacatatcatcaaaatgctgctgatattctgaataaactccatgatgagatgctctatgcaaagcatcataatgagtcagcaaaccactacgatgaacagtcttcagagcctgaatcagatgcaggcccagcacaagtgcactcacgtagcacatctgaagatccagtattgactaaacctagcgaatccacagggaacagtcaggaggtgcaatttctgggggaggttattcatccattcgatgctcaggctgatggtgagctcagtctcgcggtgggtgaatacgttgtggtccgccaggtggctgcaaatggttggtctgaaggtgaatgcaagggaaaggctggctggttcccatctgcctacgtagagcagagggacagagccccggcaagcaaggtgatagagcctggacttctgactacctgatccatcccgtagttatggctgctgacttgctgtcatggtcctttttttttctacattattgtacatgacatgccccatgagtgattagcgtatggcagaaccttcaccttttctgtgcagattattgttcttctagccttttcgttggtcggtaactgtatgtaaaatgtagttctgtctgttaggatttccttccggtattataacattgtacagagctattggtgatgagatgctgtcagcttgccctttcttttcggacagtgtgcttcctgacagatttatgctaactaatggtttc

SEQ ID NO: 86694 - DNA, 2461 bp, Zea Mays
cgttcctcctcgcccaccaccaccgcacgccggacaaaaccgctctcctcgccacattcgcagcccccctcgctcgcgcacacgccacaccacaccaccagtacactgctctacgccacagtacagcagcatccagcgggcggctggctgcctaatctttccagctctttcgtcccctcgccacgccgcccaccgctgccgcatcatccgcccgttgcccgccgtcgtcgcctggcccgcggattccgcccccattcgccgtcgcagcgcgccgagccccgtcccagatcgccgcggcgcttcctgccgccgtcggcgcggcgcagggttgaaatctatttgaccactcagttataaccatttctggtctgaagatgcttcgtcaatgacatctggaaactgtaatagtatgcgctgatcttctatgcttcaccacctgactatcaatgggctctttcctgtggaaacagcccagctacctcttcattttgataattctccaccttgttgctcatgaggcaagaacgctgagttcagatggtgaagcacttcttgccttcaagaaggcagttacaaattcagatggagtctttctaaattggcgtgagcaagatgcagacccctgcaattggaagggtgttagatgtgatagtcatagcaagagagtgattgatctgattcttgcataccacagattagttgggcccataccacccgaaattggaaagttaaatcagttgcaaaccttgtcactgcaggggaacagtttgtatggttcactccctcctgaactggggaattgtaccaagctgcaacaattgtatctacaaggaaactatttaagtggatacatcccttcagaatttggcgatctggtggaactcgaggcattggacttgtccagtaatacattgagtggatctgttccacattctcttgataagttgtccaaacttacattattcaatgtttccatgaacttcctgacaggagccataccatcttctggttcacttgtcaatttcaatgagacatcctttgttggcaaccttggtttatgtgggaagcagataaacttggtgtgcaaagatgcacttcaatcatcatcaaatggtctgcagtcaccttcaccagatgacatgattaataaaaggaatgggaagaattcgaccagacttgttataagtgcagtggcaacagtgggagctctcctattggtggctttaatgtgtttctggggttgctttctttacaaaaattttggaaaaaaagatatgcgtggtttcagagtggagctctgtggaggctcttctgtcgtgatgttccatggggacctcccttactcctcaaaagacatcctcaagaagctagagactatagatgaagaaaatatcattggagcaggaggcttcggaactgtttataaacttgcaatggatgatggcaatgtctttgctttgaaaaggatagtgaaaacaaatgaagggctagatcggttctttgatagagaacttgagatattgggaagtgttaaacatcgctatttggtcaatctccgtggttattgcaactccccttcatcaaaacttttgatatatgattatcttcaaggtggaagcctggatgaagtgcttcatgaaaaatctgaacagttggattgggatgcacgtattaacattatacttggagctgcaaaaggcttgtcttacttgcatcatgactgttcgcctcgaataatacatcgtgatattaagtctagcaacatcttgcttgatggcagtttcgaggcccgtgtatcagactttggacttgcaaagcttttagaggatgaagaatcacatattactacaatagttgcaggaacatttggctaccttgcaccagagtatatgcaatttggcagagccaccgagaagactgatgtctacagttttggggttttggtactcgaaatactcagtggaaagcggcctactgatgcatccttcattgagaagggactaaacattgttggatggttaaattttcttgctagtgagaaccgggagagggaaattgtcgacctgaactgtgaaggagtgcagactgagaccttagatgccctgctctctcttgccaagcaatgtgttagctcctcgccagaggagaggccgacaatgcacagggtggtacatatgctggagtcggatgtaattacaccgtgccctagcgacttctatgattcagagtagtctcctggacaagccacgctgctgctagtttcccgtgggggcgcattcctttattctttgcgtatattgtgtaaatgcattgccgcggtgtttggtctccaatcggctggctcaacgggtgacttttttttgcgtctgtatacctatgtatgtatctgtcatggtacaagttggctatatgctgatttaataataagagagaacttactagtagactattgtatgtttaa

SEQ ID NO: 86695 - DNA, 951 bp, Zea Mays
agaaacccacagacaggccctcccgtcgcttgctataaattgagccccccgcgtcgacgctcgccatcacaagccagaacagccaagaacagagatacccgagtcgccgaagcaaccactcacaatcccaatctcccgcgtcactcaaaacccgaagtaacaaccgtcgtcggtccgaccaacaatgtcgctgattcgccgtggaaacgcattcgaccccttctccctcgacctctgggaccccttcgagggcttcttccccttcggctccggcggcgtccgcagcctcgttccctcgttgccgcgcaccagctcggagaccgcggcatttgccggcgcgcggatcgactggaaggagacccccgaagcgcacgtgttcaaggcggacgtgccggggctgaggaaggaggaggtcaaggtggaggtcgaggacggcaacgtcctgcagatcagcggcgagcgcaacaaggagcacgaggagaagaacgacaggtggcaccgggtggagcgcagcagcggcaagttccttcgcaggttcagactgccggacaacgccaaggcagaccagatcaaggcgtccatggagaacggcgtgctcaccgtcaccgtgcccaaggaggaggccaagaaggccgacgtcaagaacgtccagatcaccggctaggaaggaagcacgcgtgcgctgtggagtttgaaacacaactgttcaagcatgggtgtcctactacgcgtcttatgtaattttgtgtagtgattatccgttatgtactcccgttgtgtgcagtgatttctgttatgtggtctgggtgtccggcgtgccaccgttgcgtggagccatcaagtatctataatgcgtttataaatgaaaacctaatacaatctgttctgtactacaattgtatcccgtgtttgtttgcagtaccagaaaactctgtttgccctctcgtcgta

SEQ ID NO: 86696 - DNA, 1727 bp, Zea Mays
agtactgggagtgggagggggaggcacaggcaccataacgcgcgcttcagttccggaggcctcaccgcctcacgcaggcacgcacatcacacaacgccagcgagaaagagctctcgtccgcaccacggcgcaaccaacggggagaagaggaaggcagtgagctgtcccgcgcgtgcgcgccccgcctcccgcccgcccgtctgatgaggaagctctgcccgaacctcgagcgcgacgacgcgctggacacggtgctggaggtgcccatccccgaggagatgttctccggcggcggcggctcccgcggctccaccaggttcggctgcaccaacgtcaaggcttggatgcggtcgcacgccgccgaccggtccggcgcgggcgagccgtgctccatgacccgcggggagctgcagctcatgctgggcgtcatcggcgcgccgctcatcccgctgcccgtctaccacgccaaccagtcgccctgctccgtcctctgcgagcagctcaaggccgatcccatcgagtcgtcctccgccaagtacatcgtgcagcagtacatagcggcgtcgggcggggagtgggcgctgaacaaggttaagagcatgtacgcgatgggcaaggtgcggatgacggccgcggagctcaacagcagcgacgccgacggccacggcggaagcaccggaaacgggcaccaccgcggcgggaagaagggcagcaagggaggtggcgtggcgccagacgccgtggcaccagtcgcacgcatcccgcggtcccccgcgcccgctccgccgttcgctccagggcctcgatccgcagctgaccgcgagcctgttcgcggactcggtgtgcatcggcgagcggagcatcgacggcgaggactgcttcgtgctcaaggtggaggcggaggcgtccagcctgcgcgcgcgcaacagcagcagcgtcgagatcatccggcacacggtgtggggctacttcagccagcgcacgggcctgctggtgcagctggaggactcgcacctgctgcagatcaggtccagcggcggcggcgccggagggagcgtcttctgggagaccaccatggagtcccgcctcggcgactaccgcgccgtcgacggcgtcaacatcgcccacgccggccgcaccgccgtctcgctcgtcaggttcggcgactgccaggacggcaacaccaggacgcgcatggaggaggagtggaacatcgaggaggtggacttcaacatctggggcctctccatggactgcttcctgccgcccagcgacctcagggagggcaaggagagccaggacgtcgccgtcgtcaaggccgacgcgcgcccgccgccgctgaggataccggcggtcaccgtgcgcgtcgggccctcgcaggtggctgccgtcaacatggacgactcggactcgctcgtcgcgaggtcatgactactcgtcacgtaccgtacgtacgtacgtacgtacttgcagtgctgagtgaagagcatgtatttgtacgtgacacttgtgttactataagatcatacatgtcgcaagatctgtaaatatattggaggttgagatcttcttttccccgcttcgagaggtgtgtgtttacctcagctagaattgaggccagaaatagtgcgatcgataatccgagctacatattccgcgtagctgtgttgtaaattctaatgaactagtaatacctgtaactctgaaagagcatcccagttctgtcc

SEQ ID NO: 86697 - DNA, 1840 bp, Zea Mays
agtactgggagtgggagggggaggcacaggcaccataacgcgcgcttcagttccggaggcctcaccgcctcacgcaggcacgcacatcacacaacgccagcgagaaagagctctcgtccgcaccacggcgcaaccaacggggagaagaggaaggcagtgagctgtcccgcgcgtgcgcgccccgcctcccgcccgcccgtctgatgaggaagctctgcccgaacctcgagcgcgacgacgcgctggacacggtgctggaggtgcccatccccgaggagatgttctccggcggcggcggctcccgcggctccaccaggttcggctgcaccaacgtcaaggcttggatgcggtcgcacgccgccgaccggtccggcgcgggcgagccgtgctccatgacccgcggggagctgcagctcatgctgggcgtcatcggcgcgccgctcatcccgctgcccgtctaccacgccaaccagtcgccctgctccgtcctctgcgagcagctcaaggccgatcccatcgagtcgtcctccgccaagtacatcgtgcagcagtacatagcggcgtcgggcggggagtgggcgctgaacaaggttaagagcatgtacgcgatgggcaaggtgcggatgacggccgcggagctcaacagcagcgacgccgacggccacggcggaagcaccggaaacgggcaccaccgcggcgggaagaagggcagcaagggagggggcggcggcggcgagatcggcgggttcgtgctgtggcagaagaagccggagctgtggtgcctggagctcgtcgtgtccggctgcaagatcagcgccggcagcgacggcaaggtggcgtggcgccagacgccgtggcaccagtcgcacgcatcccgcggtcccccgcgcccgctccgccgttcgctccagggcctcgatccgcagctgaccgcgagcctgttcgcggactcggtgtgcatcggcgagcggagcatcgacggcgaggactgcttcgtgctcaaggtggaggcggaggcgtccagcctgcgcgcgcgcaacagcagcagcgtcgagatcatccggcacacggtgtggggctacttcagccagcgcacgggcctgctggtgcagctggaggactcgcacctgctgcagatcaggtccagcggcggcggcgccggagggagcgtcttctgggagaccaccatggagtcccgcctcggcgactaccgcgccgtcgacggcgtcaacatcgcccacgccggccgcaccgccgtctcgctcgtcaggttcggcgactgccaggacggcaacaccaggacgcgcatggaggaggagtggaacatcgaggaggtggacttcaacatctggggcctctccatggactgcttcctgccgcccagcgacctcagggagggcaaggagagccaggacgtcgccgtcgtcaaggccgacgcgcgcccgccgccgctgaggataccggcggtcaccgtgcgcgtcgggccctcgcaggtggctgccgtcaacatggacgactcggactcgctcgtcgcgaggtcatgactactcgtcacgtaccgtacgtacgtacgtacgtacttgcagtgctgagtgaagagcatgtatttgtacgtgacacttgtgttactataagatcatacatgtcgcaagatctgtaaatatattggaggttgagatcttcttttccccgcttcgagaggtgtgtgtttacctcagctagaattgaggccagaaatagtgcgatcgataatccgagctacatattccgcgtagctgtgttgtaaattctaatgaactagtaatacctgtaactctgaaagagcatcccagttctgtcc

SEQ ID NO: 86698 - DNA, 1023 bp, Zea Mays
cacacatgtcacgagttttcttttttcttttactacctcgatcgaatggaccgcaacggcacgctgacttcacatggcattaattgacatgcagggcctcgatccgcagctgaccgcgagcctgttcgcggactcggtgtgcatcggcgagcggagcatcgacggcgaggactgcttcgtgctcaaggtggaggcggaggcgtccagcctgcgcgcgcgcaacagcagcagcgtcgagatcatccggcacacggtgtggggctacttcagccagcgcacgggcctgctggtgcagctggaggactcgcacctgctgcagatcaggtccagcggcggcggcgccggagggagcgtcttctgggagaccaccatggagtcccgcctcggcgactaccgcgccgtcgacggcgtcaacatcgcccacgccggccgcaccgccgtctcgctcgtcaggttcggcgactgccaggacggcaacaccaggacgcgcatggaggaggagtggaacatcgaggaggtggacttcaacatctggggcctctccatggactgcttcctgccgcccagcgacctcagggagggcaaggagagccaggacgtcgccgtcgtcaaggccgacgcgcgcccgccgccgctgaggataccggcggtcaccgtgcgcgtcgggccctcgcaggtggctgccgtcaacatggacgactcggactcgctcgtcgcgaggtcatgactactcgtcacgtaccgtacgtacgtacgtacgtacttgcagtgctgagtgaagagcatgtatttgtacgtgacacttgtgttactataagatcatacatgtcgcaagatctgtaaatatattggaggttgagatcttcttttccccgcttcgagaggtgtgtgtttacctcagctagaattgaggccagaaatagtgcgatcgataatccgagctacatattccgcgtagctgtgttgtaaattctaatgaactagtaatacctgtaactctgaaagagcatcccagttctgtcc

SEQ ID NO: 86699 - DNA, 1929 bp, Zea Mays
aaagtccactaactgaaaaactgaaacagcccaggcgagacgcgagagtttatctagctgtctggttccctttgcccaatctctctcctccgtccctccgccggttcgcccccttcgcccttcccgacgcgccgcccgaaaccctagctccaccgatctatctctctccagcccaggcagggggaggagatggcggcggcgccagcggcgggagggcagggaggcgggggtatggacgccgcgctcctcgacgacatcatacgccgcctgctcgaggtgcggaccgcgcgccccgggaagcaggtgcagctctccgagtcggagatccgccagctctgcaccgtctcccgcgagatcttcctcaaccaacccaaccttctcgagctcgaggcgcccatcaagatctgcggtgacatccatggtcaatacagtgatcttctaaggctttttgaatatggaggctttcctcctgaagccaattatctattcttaggtgattatgttgatcgaggcaaacaaagtttggagactatatgccttcttcttgcttacaaaatcaagtaccctgagaacttttttcttctgaggggcaatcatgaatgcgcctcaataaacagaatatatggattctatgatgaatgcaagcgtcgatttaatgtgcggctatggaaggtcttcacagaatgttttaacactctacctgtggctgctcttatcgatgataaaatattatgtatgcacggtggactctctcctgatctagcacacttggatgagataaagaacttgcagcgtccaactgatgtaccagatcaaggtctactgtgtgacttgctttggtcagatccaggaaaagatgctcaagggtggggcatgaatgatagaggggtctcatatacctttggtgctgacaaggtttcagaattcttgcaaaagcatgatcttgatcttatctgtcgtgctcaccaggttgtcgaggatgggtatgaattttttgctgacagacagcttgtcaccatattctcggcccccaattattgtggtgaatttgataatgctggtgcaatgatgagtgtcgatgaaactttgatgtgctcattccaaattctgaaacctgctgagagaaaaaacaaatttatggggtccaacaaaatgtgatagtgaaagccattttgcttccagcagctctagcctgttaaggttctcctgtggatgcatcgagacaacagcatgctggcgccaagtttgagggcagcattgggctactatcagagaaaccaaataatcccatacctaactgttcatctggaagttactcatcatgacaagtgcctgaaatttttcctctttcctgttaccttgtgtcagaacattatgtagctgtagatatattgattatggaaggatgaagttgccaaattgacctgaggagattcctttctccagccaggaaaaattctgaacatcaaggagtttctgtttgcaagtttcactatttaaaagcagttatgttgcttgtgcggaggtaagtactggaccgaggtactattatcagtttcatggatatggactgttgtgatagtttcgatagaggtgtcaaacatcaattagggtgaagtggtgagcaacatttcaaggaggtgctgatgcttgctgacaacctatgaaaaggcgtttctgtagctgactacttggtttgtccgtcagacaattctagacgtgaattttgatctgttggctagattagctgccaagtaggtatttcgtatctctagatttatgggattcacattcactcattcttgttgctattcacttgcctttgttatgttgctacatgggtgccaaacgcggtctgcaaagcagtcgtttcggtttgtttggtaatgcattttgcgcacaaccctctgggcatggttttgttttgcc

SEQ ID NO: 86700 - DNA, 2146 bp, Zea Mays
aaagtccactaactgaaaaactgaaacagcccaggcgagacgcgagagtttatctagctgtctggttccctttgcccaatctctctcctccgtccctccgccggttcgcccccttcgcccttcccgacgcgccgcccgaaaccctagctccaccgatctatctctctccagcccaggcagggggaggagatggcggcggcgccagcggcgggagggcagggaggcgggggtatggacgccgcgctcctcgacgacatcatacgccgcctgctcgaggtgcggaccgcgcgccccgggaagcaggtgcagctctccgagtcggagatccgccagctctgcaccgtctcccgcgagatcttcctcaaccaacccaaccttctcgagctcgaggcgcccatcaagatctgcgtaatatatgcagtggcggagcccggcgaaattcaaaggctggacaccgttggttggaggcgaggggcggcggcgcggcacctaggtctggggatgcggatgatcgcagctggctcacatcccctctccattgaccatgctcagagtcgcagacaggcgcctctcccccatgaccctcacatcccctctccatcgaccatggtcagagttgcagacaggtgacatccatggtcaatacagtgatcttctaaggctttttgaatatggaggctttcctcctgaagccaattatctattcttaggtgattatgttgatcgaggcaaacaaagtttggagactatatgccttcttcttgcttacaaaatcaagtaccctgagaacttttttcttctgaggggcaatcatgaatgcgcctcaataaacagaatatatggattctatgatgaatgcaagcgtcgatttaatgtgcggctatggaaggtcttcacagaatgttttaacactctacctgtggctgctcttatcgatgataaaatattatgtatgcacggtggactctctcctgatctagcacacttggatgagataaagaacttgcagcgtccaactgatgtaccagatcaaggtctactgtgtgacttgctttggtcagatccaggaaaagatgctcaagggtggggcatgaatgatagaggggtctcatatacctttggtgctgacaaggtttcagaattcttgcaaaagcatgatcttgatcttatctgtcgtgctcaccaggttgtcgaggatgggtatgaattttttgctgacagacagcttgtcaccatattctcggcccccaattattgtggtgaatttgataatgctggtgcaatgatgagtgtcgatgaaactttgatgtgctcattccaaattctgaaacctgctgagagaaaaaacaaatttatggggtccaacaaaatgtgatagtgaaagccattttgcttccagcagctctagcctgttaaggttctcctgtggatgcatcgagacaacagcatgctggcgccaagtttgagggcagcattgggctactatcagagaaaccaaataatcccatacctaactgttcatctggaagttactcatcatgacaagtgcctgaaatttttcctctttcctgttaccttgtgtcagaacattatgtagctgtagatatattgattatggaaggatgaagttgccaaattgacctgaggagattcctttctccagccaggaaaaattctgaacatcaaggagtttctgtttgcaagtttcactatttaaaagcagttatgttgcttgtgcggaggtaagtactggaccgaggtactattatcagtttcatggatatggactgttgtgatagtttcgatagaggtgtcaaacatcaattagggtgaagtggtgagcaacatttcaaggaggtgctgatgcttgctgacaacctatgaaaaggcgtttctgtagctgactacttggtttgtccgtcagacaattctagacgtgaattttgatctgttggctagattagctgccaagtaggtatttcgtatctctagatttatgggattcacattcactcattcttgttgctattcacttgcctttgttatgttgctacatgggtgccaaacgcggtctgcaaagcagtcgtttcggtttgtttggtaatgcattttgcgcacaaccctctgggcatggttttgttttgcc

SEQ ID NO: 86701 - DNA, 881 bp, Zea Mays
tttgtacttctgtataaacaacatattttaagtcagttagttgattagtaacttgtttattgcattgctgtgccccaagctccgccactgatactatgacttatgaaatggtttttatcttcattttagctcatgacactaatgttgtgtaggttctcctgtggatgcatcgagacaacagcatgctggcgccaagtttgagggcagcattgggctactatcagagaaaccaaataatcccatacctaactgttcatctggaagttactcatcatgacaagtgcctgaaatttttcctctttcctgttaccttgtgtcagaacattatgtagctgtagatatattgattatggaaggatgaagttgccaaattgacctgaggagattcctttctccagccaggaaaaattctgaacatcaaggagtttctgtttgcaagtttcactatttaaaagcagttatgttgcttgtgcggaggtaagtactggaccgaggtactattatcagtttcatggatatggactgttgtgatagtttcgatagaggtgtcaaacatcaattagggtgaagtggtgagcaacatttcaaggaggtgctgatgcttgctgacaacctatgaaaaggcgtttctgtagctgactacttggtttgtccgtcagacaattctagacgtgaattttgatctgttggctagattagctgccaagtaggtatttcgtatctctagatttatgggattcacattcactcattcttgttgctattcacttgcctttgttatgttgctacatgggtgccaaacgcggtctgcaaagcagtcgtttcggtttgtttggtaatgcattttgcgcacaaccctctgggcatggttttgttttgcc

SEQ ID NO: 86702 - DNA, 1500 bp, Zea Mays
atgggatgcgatgcgatgcaatgcaatgcaatgcaagggccccttgtgatttggatttggcgccccagatttactcccggatcacatgacgatctcgggcttgaggatgctggatttgatctccttgtgcgggagcacgacgccgccgttgctgtagatctcgtcgcagacgtggacgtcctcgccgaggatggtcatgttctcgacgcgcgcccacttgccgacggtggagtgccagccgatgatgctgctggagacgcaggcgtgctgcttgacgcgcgcggcgcgcatgacggtgcagcgggacaggcgcaccccggcctccaccacgcagcctggcccgaccgcgacgtcgggcccgatgaggcagccgtccccgatgaccgcggtctcgtgcaccagcacgttgcccaggacgtgcgcgcccgacgcgagcctggcgggcgccttcttccgcagcgagtccaggtacaggcgcaggcccgtgatgtagtccctcggctgcccgatgtccatccagaaacccgggagaaccatggcgaagagggccccgtccgccgcgacgcgcgggaacacctccttctcgatggacgtcggcttcagctcgatgcggccgagcacggacgggttgagcaggtagatgccggcgttgatcttgttgcccacgaacgccttgggcttctccacgaaccgctccaccttgccggtgccctcctccatgaccaccacgccgtacttggacggctcgtcgaccttggtcaccatgatcgtggcctcgccgccgtgggccctgtggaactcaatgagctcggcgaacgggtactcgctgatcacgtcgctgttgagcacgaagaaagggtcgccggatccgtcggcgagcttgtcgcgggccagggccagcgggcctgcggtcccgaggggctccgtctcctgcgagcaggtgatcttgatgccaagcttgctctcgaagtccttgagaaagttgagcatgacctgcggctggtaattgatggccaggacaacctctgtaacaccaacttccttcagagcctcgatctggtgcaggatcatgggcttgttgccgaaatccacgagcggcttgggcacgctgagcgtgagcgggcgcaggcgggtgccgaagcctccgacgagaatgagggccttcatggctgcagcagcagtcctcctcccaactcagctcccacacccagcgcaccttctctctgcaagaagcgcggtgcacgcaccttgaatccttggcgcgacgggcggccgttccttccgagacgacgagagacgggggagggaggtggtttgtcgacggcgcccaggacctcggcggcgagagctgcagcgaggaagaagacaaggaggaggaaaaggcgtcggctgcgactgcgagcgactcaggacgcggctgccgacgaacgacgccgcggctttataccgcttcctcctcctcctccgtctccccttgagcactactacggttggggttga

SEQ ID NO: 86703 - DNA, 96 bp, Zea Mays
gcggatgtgattttgtctcctacggttcctgatcaattcaaatggactccctcggcctctggttcttactcttccaagtcggcttatgacccttta

SEQ ID NO: 86704 - DNA, 1161 bp, Zea Mays
cgtcttgatagacatattgggcccattttgcattctgatcctgaagagaaaacggggctaaatagagatcacaagttcaagtggatgaggagcacttttgatccagatataaaatgtgactacatcaacaataatttagcagagtgtttcaacaactgggtcaaagatcgcaaagacctgccagtagttcaactagcagacaaaattacagagcttattatggtcttttgggagaaaaggaggagaattggtggcaaactatgtggaactatcttgccagctatagtacatcaattgaatataaggtctagaggacttggtcatttaaaagttgtaaatgctggaaatggtcatgctgaggtttttgataatagccccaaacaagacagacatattgttgatctaggagcgaaggagtgctcatgtctggagtggcagcacactgggacaccttgtgaccatgccatagttgtcatcactagttttagaattgaaaggatcgaaaactatgtgcatgattattattcagtacaaaagtttagagaagcataccgtagagtcatctatcctataagggatcgttcacagtggcctcagtttgatatggaccctgttgtaaaaggacctttagcaaaacaaggtgttggcaggcaaaggaaattacgaatcaaaggttgtctagaaggtgggagtaaatctaagacaaccactaaagaaggtggtaggcaaatgaaaagaggtcctatacgatgcaaaaaatgtggagagcttggtcacagacaaacaagttataagtgcccactaaatggtaccaagaaaagaaataggaaacagaggagccgcaagtatgcgggtgcaaatgaaccttcacagaccgacattcagtcacagaaatctatatatgatagtagccttgttcttgtgtcagttagtggcatccaatcttcaagtgtgccaagtggagaaggtggaccatcaactgttttagaaacacaacaagaaacgccaagtggagaaggtggaccatcaactgtattagaaacacaagctgcagctccaagtggaccttttttattagaaggtgggcatggcactggtcctagaatgcttaaaaagaagctcgcaccaaaaaaaaggaaggcatgggtaccggatatgtaa

SEQ ID NO: 86705 - DNA, 1927 bp, Zea Mays
cgatcgtgcggcgcgccggcgggatatagtagctcgaggcgagagagagagagagagagagcagcgctagccttccgttcccattcgcgcgcggccgccacgattccgccgttcccgcagaacggtgctcggaaggggcgcaccgccagcagcctctgatcatccttcgcggggaaggaacggccgggggtctcgagcccctgccggccatttcgccccgcctcgcgggattcccgccaagccgttggtgtagcgcgtggaaggcggcgatctcgggcagggccggatgctgcacaaatggaaggccgcggatggcggcgggtgtgccggcgtcgcgggcggcgtcgaccagcgccggcggtgcgtggcggcgtcgctgtccacgctgatagcggctacgctggcgttccttgcctacgtcgccttcttccccgacggcggcgcgcacgggctgtaccggctgtggacgtgccaggactgcgcgggcgatctgggcgagtttcccggcgacgaggcggccgcggctgacggcccttcggccgcgcgcgcggcccgctcgccgacgacgctgtcgcacgtcgcgttcggcatcggcgcgtcggcgcggacgtgggaccagcgccgcgggtacgcggagctgtggtggcgccccggccagatgcgcgggcacgtctggctcgaggagcagcccgcgagcccgtggcccgcggcgacgtgcccgccgtaccgcgtctcggcggacgcgtcccggttcggggaccgcgcgccggcgtcgcggatggcccggatcgtggtggactcgttcctggccgtcgcgggggagctcgggaacggcacggcccgcgaggaggcgcggtggttcgtgatgggcgacgacgacaccgtcttcttcccggacaacctggtggcggtgctgagcaagtacgaccacgaggagatgtactacgtcggggcgccgtcggagagcgtggagcaggacgtgatgcactcgtacggcacggccttcggcggcggcggcttcgcggtcagctacccggccgcggccgcgctcgccacggcgatcgacggctgcctggaccggtacaggtacttcttcggcagcgatgagcgcgtgaaggcctgcctcagcgagctcggcgtgccgctcacccgcgagcccgggttccaccaggtggacatccggggcgacgcgtacgggatgttggcggcccacccggtggcgccgctggtgtcgctgcaccacctggaccacgtggcgcccataagcccgcagggcaagacggcgctggacgcggtccggccgctggtgggcgcgtcccgcttcgacccggcgcgggcgctgcagcagagcttctgctaccagcgcgggccgggctacgtatggtccgtgtcgatctcgtggggctacacggtgcaggtgtacccgtgggccgtggccccgcacgagctggaggtgccgctgcagacgttccggacctggcggagctgggccgacgggccgttcgtgttcaacacgcggccgctgagcccgcacgacgcgtgcgcccgccccgccatgttcttcctcggccgggtccggaacgggacggcgcgcaccaccgtgacggagtacgccaggcgcgccggcccgtcgaaggagtgcgacaaggctagcttccgtgcggcgtccacggtgcacacggtcagggtcatcgcccccaggatgagcgagagtgactggaggcgggtaagtgccgcagcggcatcgatccgtctcgaccgcctttctgaaattctgacgcttcagcagagccgtgcttacacgttggaactggatgtgtttcaggcaccgcggcggcagtgctgcaagacgaagcggacgaggtggggctccgtgctggaggtgcggatacggcgttgcggcagaggagagctcacgtcgccgtag

SEQ ID NO: 86706 - DNA, 2034 bp, Zea Mays
cgatcgtgcggcgcgccggcgggatatagtagctcgaggcgagagagagagagagagagagcagcgctagccttccgttcccattcgcgcgcggccgccacgattccgccgttcccgcagaacggtgctcggaaggggcgcaccgccagcagcctctgatcatccttcgcggggaaggaacggccgggggtctcgagcccctgccggccatttcgccccgcctcgcgggattcccgccaagccgttggtgtagcgcgtggaaggcggcgatctcgggcagggccggatgctgcacaaatggaaggccgcggatggcggcgggtgtgccggcgtcgcgggcggcgtcgaccagcgccggcggtgcgtggcggcgtcgctgtccacgctgatagcggctacgctggcgttccttgcctacgtcgccttcttccccgacggcggcgcgcacgggctgtaccggctgtggacgtgccaggactgcgcgggcgatctgggcgagtttcccggcgacgaggcggccgcggctgacggcccttcggccgcgcgcgcggcccgctcgccgacgacgctgtcgcacgtcgcgttcggcatcggcgcgtcggcgcggacgtgggaccagcgccgcgggtacgcggagctgtggtggcgccccggccagatgcgcgggcacgtctggctcgaggagcagcccgcgagcccgtggcccgcggcgacgtgcccgccgtaccgcgtctcggcggacgcgtcccggttcggggaccgcgcgccggcgtcgcggatggcccggatcgtggtggactcgttcctggccgtcgcgggggagctcgggaacggcacggcccgcgaggaggcgcggtggttcgtgatgggcgacgacgacaccgtcttcttcccggacaacctggtggcggtgctgagcaagtacgaccacgaggagatgtactacgtcggggcgccgtcggagagcgtggagcaggacgtgatgcactcgtacggcacggccttcggcggcggcggcttcgcggtcagctacccggccgcggccgcgctcgccacggcgatcgacggctgcctggaccggtacaggtacttcttcggcagcgatgagcgcgtgaaggcctgcctcagcgagctcggcgtgccgctcacccgcgagcccgggttccaccaggtggacatccggggcgacgcgtacgggatgttggcggcccacccggtggcgccgctggtgtcgctgcaccacctggaccacgtggcgcccataagcccgcagggcaagacggcgctggacgcggtccggccgctggtgggcgcgtcccgcttcgacccggcgcgggcgctgcagcagagcttctgctaccagcgcgggccgggctacgtatggtccgtgtcgatctcgtggggctacacggtgcaggtgtacccgtgggccgtggccccgcacgagctggaggtgccgctgcagacgttccggacctggcggagctgggccgacgggccgttcgtgttcaacacgcggccgctgagcccgcacgacgcgtgcgcccgccccgccatgttcttcctcggccgggtccggaacgggacggcgcgcaccaccgtgacggagtacgccaggcgcgccggcccgtcgaaggagtgcgacaaggctagcttccgtgcggcgtccacggtgcacacggtcagggtcatcgcccccaggatgagcgagagtgactggaggcgggcaccgcggcggcagtgctgcaagacgaagcggacgaggtggggctccgtgctggaggtgcggatacggcgttgcggcagaggagagctcacgtcgccgtagaatagaaacaaccggtccgttttcgctgtgatttatccacggaaggccaacgaaaacagcagtagatatttgagtggagagtatctgccttctagcgacaacagatttgtccacgctgtgtataaaaaagctttacctacgcgactgatgagatatacaggtcacgtacacatacagtagcatatccgaaagtcacgttttgaaaa

SEQ ID NO: 86707 - DNA, 1499 bp, Zea Mays
ccactgaccgtaccctgtatatatgtctcggatcgggttggagctgaggccccccctgcctattagagttggagtccgaggtgtgctgtgcatcctccgtatgcaggtaatcgcccgcccaagaaggtttctgagcggaaaggaataggaaagtcccgacgagaagtgcactctatctttttatatagggactagggagagaggctggctcggtagctcagagacatcctccagctgattttctcgccgcgccgtgttcaatacggctacgaaaatagtagggctggcaaaccggtggccggccggcagcgcggcggccgaggagatggggagcctcgacggcggccactcgctgcagcagggccgccaccacggctacgcccactcccactcccacgtcggcgcgggtcccgacagcagcaacaacaacaacgacgaggacgacgcgtcgcccccgccgcctgccggggcgggaggaggtcctcgccggccgcgcgggaggcccccggggtccaagaacaagccgaagccgcccgtggtggtgacgcgggagagccccaacgcgatgcgctcccacgtgctggagatcgccagcggcgccgacatcgtcgacgccatcgcgggcttctcccgccgccgccagcgcggcgtctccgtcctcagcggcacgggcgcggtcaccaacgtcacgctgcgggagcccgcgggggcaggcggggcagcggccgtcgcgctgcgcggccgcttcgagatactgtccatgtccggggctttcctcccggcgccggcgccgccgggggccacggggctcaccgtgtacctggcgggggggcaggggcaggtggtgggcgggagcgtcatgggggagctcatcgcttcgggccccgtcatggtgatcgccgccacgttcggcaacgccacctacgagaggctgccgctggaccaggcagacgccgaggagggcgccgtgctgtccggctcgtccgagggcgccaccgcgcagcagctggagcagcagcagagcagcgggggtcccgtcgtgccgccgtccatgtacgccgtcccgcagacgccgccgcacccgcacgacatgttcgggcagtgggggcacgcggctgtgacgcgcccaccgccgacgtcgttctagctagcgctagatgcacatgcaccagctgcgacctgcaccggccgcccgcccgccgtataccctctccacctttctagttagatttccacttcttcactagctactactatagctactactctagttgttacgttagctctaccatggcatgcatgtgtgatcgttttcccatttcttctagctctcttccatctggagcgtgtggaatcaatgtacaattcctatttgcgaataccggaatccatcaatgtttacttaattgcctgacaatctatatgcagttagcattgcattaacgaggtaagcgaatcagtttcacaagttaaatcttcaaacttttcatcaaaagaaa

SEQ ID NO: 86708 - DNA, 599 bp, Zea Mays
aacaaagacaacttagcgaatgccaatatataagttaaagagaaacagttggcgtccatagagtgatgtaaaatgtaaatacatagaaacttgttaaacagataacatggaacttgtacaaaaaaacagctggattcagcacaactttgtcattcagactcagttccaaattctggttagaacaccacccagcgagttaacgtgacatcacaccagaaatttccagcgcctgatgaaattttactacataaactgaatttagataacaataaacagcaatctggaaaagactaaccacagctaaccaaagcaactcgacattttctccacacaacccaagataaaaggtcagtaggtcacagcaccacaaaattacttagatatgcaagtctatgcgaaacctagtataaacgtgcgtgtcagtaggatgctacatcccaaacatcatagtgaaggaaacaagtgtgcatcacacctatacccaacaccaagaatgaaattggtcttaatcctgaacatcagtgacccagacagaatgagcaaataaaagcatgattcctctaccccttaaagctccagtcggcagtgatgggctgatg

SEQ ID NO: 86709 - DNA, 1410 bp, Zea Mays
atggaggcactatggaagcaggcctctaggctcaagaaccaggtcgctcgccaggatcttcctgctgctatgggaaagagaggggtgaagcttggcaaggcatcctatcaagagcttatagggaaacttctttaccattacactggaatgagaaccacacttacactagagagcttgtcgaacgcacctggacgtcggctgagtgcaaggtgcagggtcagctccgagggcaaggcaccatggctcgctgcaccgctaaacgtagcagcaatattatcttgcaataattggatgttgtttttggctgagttagaagccccgtccaggtcggctcaggctgcttatgtttcagatgtatggccagaacgtgcagttccaaattgcagtctgatgaagcatttgttactcgcctttagattgttgataagcatgttggataggagagtacctccaaatcatagaagaccagttcatacagaagaaacatatagaagcctaccaagttgtcaaattgtcgatgtcgcttgttcttctcacatcaaccctcctatacccctccaccatggagggtcagcagtgaggcatgttcccctatctcagaacaatgatggtgagttcctagagtatgctttctcattcatgcttaatgttcaactaaactgttccaaatggcaagcattgatccttttgctactatatgttcggaatgagagggcaaggagattagcactataccgagcttttgggcatatcatttccaatgctccagtaccagcagttataactgaagcacaccagattttactcgtgatggttgatagcttagctaaattaagtatggatgttggggataaggatctagtgtacagtttgttacttgtcttctctggaatgttgatggatgaaaaagaaacacaacaaggaatatttgatgctgtattgaaaggtgtcattgattttgattctgatccgtggcctgtcatatctgatagtgcaaaagatcttataagacgaatgctgaatcctcgctctgccgagcgcttaacagcacatgaagttctatgccatccatggattcgtgaccatggagtagctcctgaccgtccactggatccaactgtcttatctcgcattaagcaattctctgcaatgaataagttgaagaaaatggctttgcgagtaatagcagagagcctattagaagaggaaattgcggggttgaaggaaatgttccagaccatggacactgacaacagtggcgcaattacctacgatgaactaaaacaaggattgagaaaatatggttccacactgaaggacactgagattcgtgatcttatggatgcacttcaaacaacctggatcctgaagctatacattaagaatcatatatgtgacctctgtcaataa

SEQ ID NO: 86710 - DNA, 3154 bp, Zea Mays
ggactgcagcagctaaaccctcaacagaaagctcgaaatctggggtgcgaaggataggagagaggagacccctccccctccccctgcccctcctcgtcctcggaccttcccccctcgtcgacacctaccctcaccgcatccgcggtcgcaatggcgctagcctcccaaggcatcaccctgcgttccccgccagcggggtccgggggccacagcgggaggcggtcctcttccgtgcccgccgccgcggccccgcgcggctgggggcagccccacgcggggcaagccttatccatctcgcccgccaggtacgaaccagccgctcgtccaccatggcgaggctccctcgctgccgccatacgtgccgctgcctcggccggtgcgcaccacggcagcgacccggtccctgccgagcccagaatcgagctccccgcgatatttaccgtcttctccgaggccgctaagaccggcgctgccttcttcatcgcctcgtcgagcgcggccttcctcctcggctcgtttggggggttcggaggcggcgctgggggtctcttcggcggcggtggtggagggggtggatggggcgcggggggtggtggtgccggtggcggagggggtggagacttctggtcctggctgttctccgccggtgcggcgaacgcggacgacaagtcatcgggggattgggacgcgcacgggctccccgtcaacatgacggtgccgctcacgaagctgagcgggctgaagaggtacaagctgtctgagctcaagttctttgaccgggcagctgccggcggtggcgcctacacggggccagaggattccttcttcgaaatggtcacactgcagcctggtggcgtgtacaccaagtcgcagctgttgaaggagcttgaaacactcgtttcctgtggcatgttcgagcgggttgatctggaggtgaagcccaagccagataacacaattgggctcacagtctcctttgtggagagtgtgtggagtgctgcaaagcagttcaagtgcatcaatgtggggcttatgtcacagtcagggcaggttgacttcgaccaggacatgacagagagggagaaaatggattacctccgcaagcaggaacgcgattaccagcagcgtgtaaggggtgccaagccctgcatcttgccagaaaatgtacgtggagaggtgctgggaatgatgaagaagcaggagaaggtgagcgccaggatgctgcagaagatcagggaccatgtccagaaatggtaccacaacgagggtttcgtatgcgcacaggttgttaactttggaaaccttaacaccaatgaggttgtctgtgaggtggttgagggtgacatcaccaaggtggagtaccagttccaggataagcttggaaatattgttgagggaaatacccagcttcagatcatagaccgtgagctgccccaacagcttcgacctggccacatctttaacattggagcagggaaacaggctctgaagaatataaattcacttgctttgttttcaaatatagaagttaatccacgtcctgatgagacaaaggaagggggcatagtagttgaaattaagcttaaggaactggaacccaagtcagctgaagtaagcacagaatggagtattgtacctgggcgtgaaggccggccaactttggcatccatacaacctggaggaactgtgtcatttgagcaccggaacatctatggtctaaatagatctattgttggttctgtcacttccagcaacctgctgaaccctcaggatgatctttcattcaagcttgagtatgttcatccttatttggatggtgtggatgatcgtagtaaaaaccgtacatttaaaactagctgcttcaacaccaggaagttgagtcctgtctttgttgctggtcccaacatggatgaggctccacctgtttggatcgatagagttggatttaaagccaacataactgagagcttcacacggcaaagcaaattcacatatggcctcgtggttgaagagattacaacacgtgatgaaactaatactatctgtacccatggttcacgagcaatgcctagcggcggtttgagcatggacggacctcccacaacactcagtggtactggagttgaccggatggcattccttcaggctaatataacccgtgacaatactgagtttgtgaatggtgcaattgttggagacagatacattttccagctagaccaaggtcttggcatcgggagcaaaaacccattcttcaaccgtcatcaactgactctgaccaagttcatcaatttaaataagcaagagaaaggtgctggcaagccactaccagctgttttggttcttcatagtcattatgctggttgtgtgggtgatttgccaagctatgatgcatttgcacttggagggccttactctgttaggggctttagtaatggtgaactgggcgcttctaggaatattcttgagcttgctactgagttgcgtgtccctataagaaacacccacgtgtatgcatttgctgaacatgggactgaccttggaagttccaaggacgtgaaaggaaaccctacggagtttttcaggcgcgtaggtcatggatcttcatatggcgttggcgtcaagcttgggttggtaaggggagagtacatcgtagatcacaatgctggtactgggaccgtttttttcagatttggtgagagattttgagtatgctgcctcccgttaccgtggaaggcaggcttctgaggtactttgtttagcgatgtttgtggtctgataggactcaaacggcattggagctctgctgaaataatgaagctattttctgaggaagagtgatagctagtgtgagattaaattttcttcatgtaggatgtaagatctgttctttcagagctgggagctcataaatagatgaatgttcagaaacgttgtcccaatttttaccgtcagttgtgtttgtgcttctgacaaattgtccatttcgttttgcccggaaccttttgtcaattgcttatctacagttttgtttcattttcagattgtgtaaacttcctgttgatgatgcccttgtgttggatctgaatgctgtccttattcggcggctattgttgactagcttcaaattcagaaatagtaattagttagaaaa

SEQ ID NO: 86711 - DNA, 1015 bp, Zea Mays
gtttatttgtttacaaacctctattgtatctttgccatgttaaatacataaactggaaaatttccttgattgcagctagaccaaggtcttggcatcgggagcaaaaacccattcttcaaccgtcatcaactgactctgaccaagttcatcaatttaaataagcaagagaaaggtgctggcaagccactaccagctgttttggttcttcatagtcattatgctggttgtgtgggtgatttgccaagctatgatgcatttgcacttggagggccttactctgttaggggctttagtaatggtgaactgggcgcttctaggaatattcttgagcttgctactgagttgcgtgtccctataagaaacacccacgtgtatgcatttgctgaacatgggactgaccttggaagttccaaggacgtgaaaggaaaccctacggagtttttcaggcgcgtaggtcatggatcttcatatggcgttggcgtcaagcttgggttggtaaggggagagtacatcgtagatcacaatgctggtactgggaccgtttttttcagatttggtgagagattttgagtatgctgcctcccgttaccgtggaaggcaggcttctgaggtactttgtttagcgatgtttgtggtctgataggactcaaacggcattggagctctgctgaaataatgaagctattttctgaggaagagtgatagctagtgtgagattaaattttcttcatgtaggatgtaagatctgttctttcagagctgggagctcataaatagatgaatgttcagaaacgttgtcccaatttttaccgtcagttgtgtttgtgcttctgacaaattgtccatttcgttttgcccggaaccttttgtcaattgcttatctacagttttgtttcattttcagattgtgtaaacttcctgttgatgatgcccttgtgttggatctgaatgctgtccttattcggcggctattgttgactagcttcaaattcagaaatagtaattagttagaaaa

SEQ ID NO: 86712 - DNA, 1404 bp, Zea Mays
atgtgcgcacgcacgacaaccaccagctcatggatgaagcagctgatgaacgcttcccggcaaggccgccacggccgcgtcctccaccttctcttcacccacctacgacgcggcgacaggggcgtggtagagctgcaccgcgcggccgtccccacggcactccgcgcctgcgcgcgcctcggaaacgcctcttccggccgcctaatccacgcgctcgtcctcacccggttcccgtccctcgcctccgacgccgtcgccgccaccgcgcttctcgacatgtacgccaaatgtggccttgtcgcgagtgcccagagggtgttcgacgaaatgccgagtagggatgacctcgtcgcctggaacgcgctggtcgcatgctacgcgcgccacgccctcccggagcgcgcactggtgctggctatcaaaatgcggggccagtgcctgtgccccgacctggtgacatggaacgccgtcgtctccggttttgcactggccggcgacgaccaaatggccacaaaattggtcggcgccatggaggtggacgggttccagccggacgtggtcacttggacatcgcttgtatccggctcggtgctgaacttccagtatgccagggcgcgcgtgctgttccggagaatgatgaccactgccaaccctgtcctgccgagctcggccacgattgccagcatcctgcctgcgttcgccaatgttgctgacgtgaagcgtggcaaggaagtccacgcctacgccgtggtgaccggcgtcgaacaggagctcaatgtgagcagtgctctagtagatatgtacacgaagagcgggtttgtggtcgaagcccgcaggctgtttgacaagatgtcggaaagaagcacggtgacatggaattccatgatcttcgggctggcgaattccggtcactgccaagaagccatcggtctcttcaaccggatgctgtgcgacggagcaaggccggatcacctgacgttcaccgccgctctgacggtttgcagctacgccggcatggtggagctcgggaagggcctgtaccgcgccatgcaggaagaacacggcatcgagccgaggctggagcattgtgcatgcatggtgcatttgcttggccgagccggctggctcgccgaggcttatgatttcatcaaagccatgcccctggggcctgactgcttcgtttggggggcgttgctgggggcatgccggagccatggcgacatcaagcttgccgagctggctgcgtcccacctgctaaccgtcgagccggccaatgcagcaagttgcctcctactctcggactcgctggcaagtgtaggcagacaagatgatgttatgaagatgaagaggctggcaaagagacggcgcatgaagaagctgcatggctgcagctggttagagtga

SEQ ID NO: 86713 - DNA, 77 bp, Zea Mays
accaaaaccacgataaatgtaaacctgacgcctttccctgctcaagtcaaaactgtctcccttccatccacgcggca

SEQ ID NO: 86714 - DNA, 1347 bp, Zea Mays
acaattcccctcccctgtcgtcgtctcccctcacccgaagccccgattcgaaaccggcggcgttcgatttggggatttcggcgtctcgctccccggaatttcttggatctgagtctgtccgccgtcttcgatttgcggctgcagtgagcctgcgagttttccggctctgatttggtcggggtcttcgatttcggggatggcgtcgtctccggtgtcctactggtgctacagctgcagccgcttcgtgagggtatctccgtccaccgtcgtctgcccggagtgcgatggcggcttcctggagcagtttacgcagccgccgccgcgcggcggcggcgggagcggccggcgcgggacgatgaacccggtcatcgtgctccgcggcggatcgctttccgggttcgagctctactacgacgacggcgcgggcgaagggctgcggccgctgcccggtgacgtccagcacctcctcatggggtccggtttccaccgcctgctcgaccagttctcgcggctggaggcggcggctccgcgtccgccggcgtcaaaggctgcggtggagtccatgccgtcggtgacggtggccggaggtggtgctcactgtgccgtgtgccaggaggcctttgagcccggcgccgccggccgggagatgccgtgcaagcacgtctaccaccaggactgcatccttccctggctctcgctccgcaattcctgccccgtctgccgccaagagcttccggccgcagccaccccagatgcggaggcggatgctggcctcaccatatggcgacttccacgcggtggattcgccgtagggaggttcgccggagggcctagagagcagctcccggtcgtctacactgagctggacggcggcttcagtaacggagttgggccaaggcgtgtgacgtggccagagggagatggccaagtggatggcggtgaaggtcggattcgccgcctacttaggaatctatttggctgttttggtcatggcagctggccagctagttcatcgcagtcccgtagtggctgagcacagttttccttggtaacaagttttcaattgatagcactgaagaactagggctagtgtaagaatggaacccagattataatttcttggggcttttgatgtaaatgaaggcctagcattcccccttcctttgtctcatctaagaattattaagagatgtctatgagcaaacatcttggagcgagctttgcaaccaaattaggctaaacacaagtgcaagccttcaagaaaggagtatgaatggatgttttggggaaataaatctttttcaatattttaggtagagagattgagagaacaattgttgtatttgc

SEQ ID NO: 86715 - DNA, 1680 bp, Zea Mays
gagatgtgacacaatgcaacgtgatttagtagggaagaggaggacccggaccggagccagtcagcggtgagagtagaaacggagagtgtctgcatgccatggagatggagccgatcctcctcctctgcctctctcttcttgcccacggggcggagccggcgtgcagagaggccaggttcacggggacagttctcccgctgatgagggtgcagcagctggtgctgccgcctactacacattcaccgccgccgaacaggctacggttccgccacgacgtcagcctgaccgtgccggtggccgtgggcgcgccgccacagaacgtcacgatggtgctcgacaccggcagcgagctctcctggctgcgctgcaacgggagccgcgtgccgtccacgccgccgccacaggctccggcagcgttcaacggctcggcttcgtccacgtacgccgccgcccactgctcgtcgccggagtgccagtggcgcggccgcgacctccccgtcccgccgttctgcgccgggccgccgtccaactcctgccgcgtctccctctcctacgccgacgcctcgtccgccgacggcatcctggctgccgacacgttcctcctcggcggggcgccgcccgtgcgcgcgctcttcggctgcgtcacctcctactcgtccgccactgccaccaactcctcggactcggaggcggcgacgggcctcctcggcatgaaccggggcagcctgtccttcgtgacgcagactgccaccctccgcttcgcctactgcattgccccaggggacgggcccggcctcctcgtcctcggcggcgacggcgccgccctggcgccgcagctaaactacacgccgctgatacagatctcgcggcctctgccgtacttcgaccgggtggcctactccgtgcagctggagggcatccgcgtgggcgccgcgctgctccccatccccaagtccgtgctcgcgccggaccacacgggcgcgggccagaccatggtggactccggcacgcagttcacgttcctcctcgctgacgcctacgcgccgctcaagggcgagttcctgaaccagaccagcgcgctcctggccccgctcggcgagtccgacttcgtgttccagggcgcgttcgacgcctgcttccgcgcatcggaggcgcgggtggccgcggcgagccagatgctcccggaggtgggcctcgtcctccgcggcgcggaggtggcggtcggcggggagaagctcctgtacagggtgcctggcgagcgtcgcggtgagggcggcgccgaggcggtgtggtgcctgacgttcgggaactcggatatggcgggcatgtcggcgtacgtgatcggccaccaccaccagcagaacgtctgggtggagtacgaccttcagaatggccgcgttggctttgcacccgcgcgctgcgacctcgccaccgccacccagcgcctccgcgcccgagcataggtttgacgcgcgcgtcatggcgtttgtgctcgactgctcgttgtgggtctaccattcatggcacacagcagcagggcacgaaatcgttgacagagatcaggtactagagattagagaagtagagatggtctctccgatcacctgctgctgtggtcaactttgtattacgcgatcaggtatacaagacactgacaagctgatattattattattattg

SEQ ID NO: 86716 - DNA, 1479 bp, Zea Mays
cactttatttaaaattagttagaagtaactttagaaataaaagttagtcaaaatatgacaatttaaacagcgcccttcgtcctaccggccaccgtggcgctcgcactcgaaaccgctgaacggcagaaaacccaggcctttctagcttctgctatcctgctgctgcccctctttcccccaatctgcaggctgcaggcgctgctcctttcgccctccgctagcgagcgaatcgctggctcgaccccgcggcgggaggtatcccgccttcgatctggttcactggccaattcgttgcttcgtggggctttggagtttggagccaatcttgccccttaaagtgtcggtggcagcgttttgtgatcatcatgagctttgtgttccgagggagcaggaccgacatcgaggccggtggcttcccagggttcgctcccgagcgccgcgccatgcgaattcatgcagggagcaggccggtgaatagcaattccttggcttttcttctaactgttcttgttttgttcatggtactgaactcgcaccagatctctcccaatcttctgctttggcttgtcttgggagtcttcctaatggccacgagcctcagaatgtatgccacgtgccagcagcttgctcatgctgcagctgccaacagttttctcggccacactgagctgcgtgtgcatgtaccgccgtccattacccttgctacgagaggccggttacagagccttagacttcaactggctcttcttgatcgtgaatttgacgatttagattatgacactctgagagcattggatgctgacaatagcccacatgctccatctatgagtgaagaagaaataaattctcttcctgtcttcaaatataaagttcaggcacaacagaggcatccccctgcccgaaaaagtgatgggccatctcagctatcggtttcttcaactgggtccggcaatgaggaaaagcaggatggtttaaaagcagatggaaccagcaaaccttcagaggatgaactaacatgtagtgtttgcttagagcaagtcacggtgggtgatctgttgagaagcctaccatgcttgcatcagtttcacgtaaactgcatcgacccatggctgcgccaacagggtacatgcccaatctgcaagcaccaggtgagcgatgggtggcatgctacaggcaacggtgaagaggatgcttcttacatggtgtgagtagctgactaggagtaggccatagctaactaccagtagctgctaactgaatccgtggaacatagttttcgaggtgacgggttggactgatctagggatgtgatctaatccctttctatcctaacaaaaccgcgtgtggaaacagttgtccagtacggttcttttacaggtaacgctcatttcaatcattctctgtaacggggcgtttggatcccttcattttagaggaattggaattcactcaataaagtaacttatttagtttggaatt

SEQ ID NO: 86717 - DNA, 1479 bp, Zea Mays
cactttatttaaaattagttagaagtaactttagaaataaaagttagtcaaaatatgacaatttaaacagcgcccttcgtcctaccggccaccgtggcgctcgcactcgaaaccgctgaacggcagaaaacccaggcctttctagcttctgctatcctgctgctgcccctctttcccccaatctgcaggctgcaggcgctgctcctttcgccctccgctagcgagcgaatcgctggctcgaccccgcggcgggaggtatcccgccttcgatctggttcactggccaattcgttgcttcgtggggctttggagtttggagccaatcttgccccttaaagtgtcggtggcagcgttttgtgatcatcatgagctttgtgttccgagggagcaggaccgacatcgaggccggtggcttcccagggttcgctcccgagcgccgcgccatgcgaattcatgcagggagcaggccggtgaatagcaattccttggcttttcttctaactgttcttgttttgttcatggtactgaactcgcaccagatctctcccaatcttctgctttggcttgtcttgggagtcttcctaatggccacgagcctcagaatgtatgccacgtgccagcagcttgctcatgctgcagctgccaacagttttctcggccacactgagctgcgtgtgcatgtaccgccgtccattacccttgctacgagaggccggttacagagccttagacttcaactggctcttcttgatcgtgaatttgacgatttagattatgacactctgagagcattggatgctgacaatagcccacatgctccatctatgagtgaagaagaaataaattctcttcctgtcttcaaatataaagttcaggcacaacagaggcatccccctgcccgaaaaagtgatgggccatctcagctatcggtttcttcaactgggtccggcaatgaggtaaagcaggatggtttaaaagcagatggaaccagcaaaccttcagaggatgaactaacatgtagtgtttgcttagagcaagtcacggtgggtgatctgttgagaagcctaccatgcttgcatcagtttcacgtaaactgcatcgacccatggctgcgccaacagggtacatgcccaatctgcaagcaccaggtgagcgatgggtggcatgctacaggcaacggtgaagaggatgcttcttacatggtgtgagtagctgactaggagtaggccatagctaactaccagtagctgctaactgaatccgtggaacatagttttcgaggtgacgggttggactgatctagggatgtgatctaatccctttctatcctaacaaaaccgcgtgtggaaacagttgtccagtacggttcttttacaggtaacgctcatttcaatcattctctgtaacggggcgtttggatcccttcattttagaggaattggaattcactcaataaagtaacttatttagtttggaatt

SEQ ID NO: 86718 - DNA, 1616 bp, Zea Mays
cactttatttaaaattagttagaagtaactttagaaataaaagttagtcaaaatatgacaatttaaacagcgcccttcgtcctaccggccaccgtggcgctcgcactcgaaaccgctgaacggcagaaaacccaggcctttctagcttctgctatcctgctgctgcccctctttcccccaatctgcaggctgcaggcgctgctcctttcgccctccgctagcgagcgaatcgctggctcgaccccgcggcgggaggtatcccgccttcgatctggttcactggccaattcgttgcttcgtggggctttggagtttggagccaatcttgccccttaaagtgtcggtggcagcgttttgtgatcatcatgagctttgtgttccgagggagcaggaccgacatcgaggccggtggcttcccagggttcgctcccgagcgccgcgccatgcgaattcatgcagggagcaggccggtgaatagcaattccttggcttttcttctaactgttcttgttttgttcatggtactgaactcgcaccagatctctcccaatcttctggtaagttttcgtgctcagtggtcagtgcgaggtgtccacgagtcaattgaagttggtttcttattcgtacaaagcatgcaactcttgaacagtttaataactacatatttgtcggatgatcctttcttctctcttagctttggcttgtcttgggagtcttcctaatggccacgagcctcagaatgtatgccacgtgccagcagcttgctcatgctgcagctgccaacagttttctcggccacactgagctgcgtgtgcatgtaccgccgtccattacccttgctacgagaggccggttacagagccttagacttcaactggctcttcttgatcgtgaatttgacgatttagattatgacactctgagagcattggatgctgacaatagcccacatgctccatctatgagtgaagaagaaataaattctcttcctgtcttcaaatataaagttcaggcacaacagaggcatccccctgcccgaaaaagtgatgggccatctcagctatcggtttcttcaactgggtccggcaatgaggaaaagcaggatggtttaaaagcagatggaaccagcaaaccttcagaggatgaactaacatgtagtgtttgcttagagcaagtcacggtgggtgatctgttgagaagcctaccatgcttgcatcagtttcacgtaaactgcatcgacccatggctgcgccaacagggtacatgcccaatctgcaagcaccaggtgagcgatgggtggcatgctacaggcaacggtgaagaggatgcttcttacatggtgtgagtagctgactaggagtaggccatagctaactaccagtagctgctaactgaatccgtggaacatagttttcgaggtgacgggttggactgatctagggatgtgatctaatccctttctatcctaacaaaaccgcgtgtggaaacagttgtccagtacggttcttttacaggtaacgctcatttcaatcattctctgtaacggggcgtttggatcccttcattttagaggaattggaattcactcaataaagtaacttatttagtttggaatt

SEQ ID NO: 86719 - DNA, 1221 bp, Zea Mays
acggtttgttacagttccaacagcatggaaaaagtctacgccatcagcagtcctagtaagaaaagaaaatcacagtatgagctgagtgatccaaagttgctaccacttaaatgcaagtttcgcaaacggttatattgccaggatgatgagtctgcaaccacagaaagtttaggatatgatggtattttcatgaacaagacctctgggacggacatggtcagcatacctgaagaattggactcttgtgagaacactataagcctgttttgtggatgcattgaagttgactcaaaaaatggaattcaggaacaatctttgagaaaaatgtttgagatccggacatctgcatccagtagctcgagcaacaatttttcatcagaggcttttagttcttcccatagcagcggcacgagagacactgacagctgggctatggacgatatagagcgtcatcatccatatgtgatgctgaaaccgcataatgacgaccttgaaaggatattcaacgtgcttgaacagtatgatgacctaatggaggacgaactaatggctggcgatgtttttggttctgctgctcaggtcatggatgaaaagctttactcgaatagcgttgacgattttcagattttgccaacaggtcagactggctatcacggtgagaagaagctaaccatcgatcaagaatttgagcagtattttgcgaacctcatgctgtaggatcgagtggataattttgtgacagaaatggcgttgcgacatccaaacatggtttgcttgctgagcaaagtggcgaaccttggctaccattggagctatcgttctatggtgctgtttggtaacataaatggtaatgataataattcacacctgagtaccaacgacccgagtaccaacggtaacaagtttaaataggtcgatattagttcttagtgtggtatctgattacgattggatttaaacaaacataatttaatgtttatcggttacttattacattacaaatatgtgaaccaaacggcacatatttgtacaccgagtcctatcacttaatgtatatacgtgtgaaatgtgtatcttttccagcttgtccatcaaatgttggcatcatgatgtatgttaacgtgtgcagataagaacatgtctatgcaatatagtaatagtgcattccttctatgttctagtgtttctgaatacactggtaaggatacggaagcgatcgtt

SEQ ID NO: 86720 - DNA, 2225 bp, Zea Mays
gggctgccacaacccacaaggaggccagggaccaatcacagacagtcatcttctcccgttcacgtaacgtgcactagggtttatggtttagggcgaccgccgccgtcctacgtccagcggccaggttttcttctggccctctgcgctgactacaacccaccacctccgggttaggttttggatttggagacatggcggaagtggtggacaagctcaaggactacgatatcaagaaggagggagaagcagagatcctcctgcacaagaagaactccgtcttctttaatcccgtgcaggttcacaacagagacatgtccattgctgttttaaggacctttgttgccaagcgtaaggaagaacatgaagcgctggtggacaagaggaatacatcacataaaaaaaataaacaaagtgaaacatccagtcaaaatggagaggatgcgtcaactggccagcaagatgaaatggatgttgtttgtgaaaaggagctgaataaagctgaagatcaaattgatgatctgtcgaaagaagcaacagaaccttcttggaaagtaaccagagagcttaagccaccacttgttcttgaggctttggctgctactgggttgcggtctctccggtatgcccgtgaagttgagggcttaggaaaggtagttgctctggacaatgataaagcttctattgaagattgcaaacgaaacataaagttcaatggtgcttccgctactagtaaggtggaagcttacttggttgatgctcgaattcacatgctgacgcatccaaaagaatttgatgtggttgatcttgacccttatggatcaccatctatatttctcgactcagctgtacaggctgttgctgatggtggtctattgatgtgcactgccactgatttggcagttctttgtggtaccaatggagaagtttgttacgcgaagtatggttcattcccaaccaagggcaagtattgccatgaaatggctttgagaattctccttgccagtattgagagccatgctaatcggtacaagcgatatattgtgcctgttctctctgttttcatggatttttatatccgtgtttttgttcgagtattcacttctgcaagtgaaataaagaatacacctcttaaactttcttacatatatcagtgtgttggctgtgattctttccatcttcaatgtcttgcaaggactgttcagaagaagaataatggtgtgaagcatgcacctgctattggacctgttgttcctcaggagtgcagtgactgtggaaagaaatttaatgtaggtggaccaatatggtcagctcctattcatgaccaagactgggtactttctactttgacaggtgttaagtcaatgaaggatagataccctgcatatgataaaataacttcagttctaaatactatgtcagaggagttacatgacgttccattgtttttcagtctccataacatagcaggcactgttaagtgcacatctccatctttggttatgtttcggtctgcagttctaaatgcagggtatcggatctcaagcacccatgttaacccacttgggattaaatctgatgccccttgggatgttatttgggacatcatgcggtgctgggtgaagaatcatcctattaaggaacagccacgtgactcacctggcacggtgatcctttcaaaatcgccaaagctagaagcaaatttttcaagagcagttgctgccctcagcaaggctcagacaaataagattaaacgattccttccaaaccccgaacggcactggggtccgaaggtcagagcagggcggaagatcacgagcaaacatgtctctctgttgggccctgacgctatcaagggtgctgtgaacggtggtgactgccagaaagaaggaaacggtgctgagccagatagtacagcctcagaacccgaggggatcaaagacgttgaggatgagccctcaaacaaacgccaaaaaaccagcgacggcgaaccagcaagcgaaccttgatttgtttgtcaatctttcgcgtctccattgtgttgtgcctgtgcttttcttgtttgtaggtggtcgatggttatttataccacctgttggattttgaacgaacaaattgtggcaggtttttattaaacttttgttgcatgtgtgatgctcctcctagtcacagagggaaaagacctattaaagcataatatatagtatagctttctgcaatgtcgagac

SEQ ID NO: 86721 - DNA, 676 bp, Zea Mays
ctttggtcagttggtcttctctctcggatcgcggttggggggttgcggaatgggagcaaaggcggaggagtgtgaggtgccgccgctggctgcgaacgcggaggaggcagcttccaccaatcagtgcaccctcatcttcaaaggctggtcagtacacaccctctctagtctctactcagcttccctaatctgtattcgttggcacgattcgcctgccaagtttaggctcgttcctgtcactacgaagagaccccccgcgcgcgctccatcgctgccttgccaccgccggagctgtccgtcggagttccgcgctaccgtgaagatggcggcggcgaggctttctccagcagcctccccttcccatccaccccctcctacgttcccactttccggccgccctcaaccccgatttgcttgccattagttgtaattggtcgtttaggaatgtagaggattctcctctcttgttcttcttatgcatgcagtgattaggcaagaggttaaggtagaatgagtgctcgggcgtgattcctttcatcctgtgatatatctttaagaaatggggaatcggcaagctggccttgcacagttgcagtagatttatagttaggcctagcgataagctatgagggtcaaccaaaatgattcgcacctctgcataatattctggttttgc

SEQ ID NO: 86722 - DNA, 77 bp, Zea Mays
aaattagcgattttgtgaaagaacctgtggaaatcttgtgtcctagcaaatgttatatttatatgactcaattcatg

SEQ ID NO: 86723 - DNA, 822 bp, Zea Mays
ggtggcagcttgctgtgtctcgaggtttcggccagacgctgtgctgggggctcttgggcgaaagtctcggcgacggtgacgcccatgggcgtcgcttcccctgttgagggcatcgcatccccaacgctatcttccttgggtgaaagcctggtccatcgcggacaggcgacggtggcgtcacagtgacgtcactcccttcctgaaggcgtcgcttctgaagttcgtctcggccacggctttgccttcggctgttgcttcgcttctcggcgcctggtatgcgggtggaggtggggttttgcaacgtgaagtcggagctgctatgtcaggtgatgtggctcgacaacgataacatgaggcgaacctcccttcttcgtggtccagaatgttttgaaggtcgggcaaaaaccggaggcagggtggagggtcaagattggaagtcggagctgctctgtgccttgagcccggcaacgatgacctgttgagacctttcgcttcgggctgtctgtctgcttttcgtttggtttgtctgtcggctgctttgggaagtcggagttgctggatgctctacatccttgcttgacaacgatgactcttagcagttttatgtgctctcgtgtgggttgtcgctgcctgtgtttgtttggacactctgtgtcggcggtgagtgtggtgtcgtgttgatgtcccaatccaaccggcgagttaagttgtatggtgtcggcgtgttgatgtcccaatccaaccgcctgttgtttgttgtttagtccgatccgaaccacttctttattaatataattggcaactctcctgtctgattcgttt

SEQ ID NO: 86724 - DNA, 673 bp, Zea Mays
cctcctctcctccccctccgcctcctgctctctctcgcctctggttggcagagctctcttgaagcctcgagactcgtctcgccgctgctccctcagctctgccgctgcgtgcctccgttagctgttgcattgcagcgcagccccgcgagccttgagctgctaggtatgctcgcgttcttggccgctggaaatgtgggtcagttcagagctctgatgaactctgcgccgaggatgggaaaaaggacgggattgcttattagatttgaaaatcgaaatagtgatttagtttttcagggttctagaaagaatgataaaattttgagggggcgtaaataatgacatgaccgaatcggaatttggcttggaattaattatcgggagaagtgttcggactgcctgctaatctcgattcctctctgcagctcgcccttcaccacagtcctcagacatggagttcgaagaccgctgccacaaggtccaggagcccaagttcgactgcctgctcttcggtaagccgctgctctgcttcctgcgaaaatgtcgcggcccgttgctgtcatatttttgttccgtcctgctgtttcctcctccctctgctctgcctcctcaccgaatgcaagggtttttctgatcggttctcgcctacagacctcgacgacaccctgtatccgct

SEQ ID NO: 86725 - DNA, 863 bp, Zea Mays
cctcctctcctccccctccgcctcctgctctctctcgcctctggttggcagagctctcttgaagcctcgagactcgtctcgccgctgctccctcagctctgccgctgcgtgcctccgttagctgttgcattgcagcgcagccccgcgagccttgagctgctagctcgcccttcaccacagtcctcagacatggagttcgaagaccgctgccacaaggtccaggagcccaagttcgactgcctgctcttcgacctcgacgacaccctgtatccgctgagcgccgggatcgcaggccatgtcaagaagaacattgaagattacatggttgagaagctgggtattgacgagaccaagatcgagaacctgggcaatctgctgtacaagaactacggcaccacgatggctggactcagggccatcggctacagcttcgattacgatgagtaccacgccttcgtccatggaaggctgccgtacgacaacatcaagcctgaccccattctcaagcacattctcaagaacctgcgcatccgcaaactcatattcaccaacggtgacatggtccacgccgtgagagccctcaagaggctgggcctggaggactgcttcgaggggatcatctgcttcgagaccctgaacccgccctgcccgccgcagggagaccaggagcccgagatcttcgacatcgccggccacttcgcccgctccggcaccgccgacgagctgcccaagacccccgtcctgtgcaagcctaacgtggacgccatggaggaggcgctcaggatcgccaacgtcaacccgcacaaggcggtgagtttccgagctctggcacccaacacaatttccattcctgttcctgacgt

SEQ ID NO: 86726 - DNA, 1560 bp, Zea Mays
cctcctctcctccccctccgcctcctgctctctctcgcctctggttggcagagctctcttgaagcctcgagactcgtctcgccgctgctccctcagctctgccgctgcgtgcctccgttagctgttgcattgcagcgcagccccgcgagccttgagctgctagctcgcccttcaccacagtcctcagacatggagttcgaagaccgctgccacaaggtccaggagcccaagttcgactgcctgctcttcggtaagccgctgctctgcttcctgcgaaaatgtcgcggcccgttgctgtcatatttttgttccgtcctgctgtttcctcctccctctgctctgcctcctcaccgaatgcaagggtttttctgatcggttctcgcctacagacctcgacgacaccctgtatccgctgagcgccgggatcgcaggccatgtcaagaagaacattgaagattacatggttgagaagctgggtattgacgagaccaagatcgagaacctgggcaatctgctgtacaagaactacggcaccacgatggctggactcagggccatcggctacagcttcgattacgatgagtaccacgccttcgtccatggaaggctgccgtacgacaacatcaagcctgaccccattctcaagcacattctcaagaacctgcgcatccgcaaactcatattcaccaacggtgacatggtccacgccgtgagagccctcaagaggctgggcctggaggactgcttcgaggggatcatctgcttcgagaccctgaacccgccctgcccgccgcagggagaccaggagcccgagatcttcgacatcgccggccacttcgcccgctccggcaccgccgacgagctgcccaagacccccgtcctgtgcaagcctaacgtggacgccatggaggaggcgctcaggatcgccaacgtcaacccgcacaaggcgatcttcttcgacgacagcgtacgcaacatccaggccgggaagcagattggcctccacacggtgctggtgggcaaatcgcagcgggtgaaaggcgcggaccacgcgctggagagcatccacaacatcagggaagcgctgccggagctgtgggaggaggccgagaaggcggaggacgtgctctaccccgaacgcgttgcgatggagacctcggtcaccgcgtaaaacccctgaatgcctccggtgcaccgtcagccgaactttctcgacatctccaggaccgcatcaacgatcacatgtcactcgctccccgagccagggccggtgatgatctcgcgctggaactgaatccaccagcaatggccgggccgaggatcgatttccgacagcaggaagggtgcagcatgtaaagggggaacagatgagatcatgtttgtttgggttggtcccccgttgtatatgtagttatgtatcagccagtcctttgtttgtaaattaccagtatttagaagtaataagaaaatgggggtttacgtgtacgtttcctgtgctctgtcatctgaagcaataaaactggttagcaagaccggaagagcgacatatttgtttctctg

SEQ ID NO: 86727 - DNA, 1421 bp, Zea Mays
cctcctctcctccccctccgcctcctgctctctctcgcctctggttggcagagctctcttgaagcctcgagactcgtctcgccgctgctccctcagctctgccgctgcgtgcctccgttagctgttgcattgcagcgcagccccgcgagccttgagctgctagctcgcccttcaccacagtcctcagacatggagttcgaagaccgctgccacaaggtccaggagcccaagttcgactgcctgctcttcgacctcgacgacaccctgtatccgctgagcgccgggatcgcaggccatgtcaagaagaacattgaagattacatggttgagaagctgggtattgacgagaccaagatcgagaacctgggcaatctgctgtacaagaactacggcaccacgatggctggactcagggccatcggctacagcttcgattacgatgagtaccacgccttcgtccatggaaggctgccgtacgacaacatcaagcctgaccccattctcaagcacattctcaagaacctgcgcatccgcaaactcatattcaccaacggtgacatggtccacgccgtgagagccctcaagaggctgggcctggaggactgcttcgaggggatcatctgcttcgagaccctgaacccgccctgcccgccgcagggagaccaggagcccgagatcttcgacatcgccggccacttcgcccgctccggcaccgccgacgagctgcccaagacccccgtcctgtgcaagcctaacgtggacgccatggaggaggcgctcaggatcgccaacgtcaacccgcacaaggcgatcttcttcgacgacagcgtacgcaacatccaggccgggaagcagattggcctccacacggtgctggtgggcaaatcgcagcgggtgaaaggcgcggaccacgcgctggagagcatccacaacatcagggaagcgctgccggagctgtgggaggaggccgagaaggcggaggacgtgctctaccccgaacgcgttgcgatggagacctcggtcaccgcgtaaaacccctgaatgcctccggtgcaccgtcagccgaactttctcgacatctccaggaccgcatcaacgatcacatgtcactcgctccccgagccagggccggtgatgatctcgcgctggaactgaatccaccagcaatggccgggccgaggatcgatttccgacagcaggaagggtgcagcatgtaaagggggaacagatgagatcatgtttgtttgggttggtcccccgttgtatatgtagttatgtatcagccagtcctttgtttgtaaattaccagtatttagaagtaataagaaaatgggggtttacgtgtacgtttcctgtgctctgtcatctgaagcaataaaactggttagcaagaccggaagagcgacatatttgtttctctg

SEQ ID NO: 86728 - DNA, 814 bp, Zea Mays
ctgtaaaaggtaatcaagcacggatggttagatatgtctttgtatcgcggcactatatcattaagggctccatttcgcggcaggaaacctcgtcatttccctgtaccgacaacctagtatgaaatttacacgggacagagattcaacctctttggaagacaggttcgtgcggatatcagcccatcccaaggcaaatttctgcgtggaaacgcatccggcctctggacgtcgggcgactttccacttctcgagcatgtcgcgtctcctctcgcctctcgctcagagtcgctcgagcacgccgccgccccgcttccgctcgcctgagcacgctgccactagagtcgcccgacgttgccgtctccgtcgactgccgttgctcgagcacgcccccgctcctctcgcctggaggctggagtcgcctgagcacgtcgccttctctggcctagagtctccgagcatgttgtcgcctcagtcactccgcctcctcaggtgaggggttagccagcgctgctcgcatcttcatgccctttctactttctgcttgtccttgctcagtttctcatagatctagggaagaaaaggtgcgggcagaagtagtttcttgtagatgtaaattggtggtagctagcctgtcgttctggatcttgggaagaaaaggtggtgtctgctattattgtttgttgttactgtcgagcgacatatattcttagttctggttttagcactccgtccgatccagaaatattgtgttttatttccttcctctcttgttcatgttccaaatttcctagcttgtctctctctgtgtggtatt

SEQ ID NO: 86729 - DNA, 447 bp, Zea Mays
atgtcgcgcattggagagccgagccgtgtcgtggataccggacctataatagcatcatgcacaaaggcgtatcatgcattcacattcccgcaagagctctcaaggtcctttggactctttagtgcataccgtttttattggaaagatcttggcggtgaacatccagaggacaagcctaatttgtcaatatcattatttccatatggtgacaaacaacctccgggtactgtcatgtgcggttattatgtatgcgaatggtgtcgtgtcaccttccattacatggtcaatcgtgaggatgttcctaaatccaagatcaatgctaaatggttagaaagagatttggtttccgtcggcgtggctaaggttgtaaaagacttgctttactttatgcgttgtgaagttcttcatcaacaagggctattctacaatacaaatcaaaatttgtaa

SEQ ID NO: 86730 - DNA, 1934 bp, Zea Mays
gattggaatctctgggcgactcgacctgaacaaccccgcccgccgtcctgcccttgtgctctagtcctcccgcgaccgttccaaattcttcctcgcgttcgtattccacgcggcgacgtcgccatcgccatcgcggccgccgctccgcccctcttccttcgcatatacgtaggtaggcgcctccccaaaccctaagcctttatctcccacgcgcgcggctcgctctgctgcgccgcggctcgctcgaccccgcagatcgccggcgatgggatccaaggaccaggacggaggggctgcatcctcgggaggcggcttcttctcgtcgttcgccgccggcatgcgcagctggggcaccgccgtgcataaatccgtcaacgggctgcttggttatgaaggccttgaagttattaaccccgatggaggcacagatgatgctgaagaagaagctttgaaggggagatggaagcaggaggaccgtgatagctactggaagatgatgcacaaatacataggatcagatgttacatcacttgtgacacttccagtcataatttttgagccaatgacaatgcttcagaaaatggccgagttgatggaatactgtgaattgttagacaaagcagatgaatgtgaggatccatacatgtgtatggtttatgcttctacatgggctgtttctgtgtactttgcatatcaacgcacatggaagccttttaatccgatccttggagagacttatgagatggttaaccaccagggcattacatttcttgctgagcaggtaagccatcatcccccaatgggtgttgctcactgcgagaatgaacattttacttacgatatcacgtctaagttgaagaccaagtttttgggaaattcagtggaaatttacccagttggaaggactcgagtgacactaaaaaaatctggtgtcgtgttggatttggtgccaccactaacaaaggttaacaacctgatatttgggcgcacttgggttgattctcctggagagatggtcatgacgaacctgacaactggagacaaagttgtgctatatttccagccatgcggctggtttggggctggccgttacgaggtggatgggtatgtgtacagtgcagcggaagaacccaaaatcatgattacagggaagtggaacaagtccctgagttgccaaccatgtgaccaagaaggcgatcctcttccaggcacggagctgaaggagatctggagagttgctcctgccccacagggcgacaagtatcagtacacacacttcgcacacaaaataaacagcttcgacacggcacctaagaagctgttggcatctgattcacggctgaggcctgatagatatgccctcgagaagggtgacatgtctaagtccggggcagagaagagcaggctcgaggaacaacagagagctgagaaacgaactcgagaggccaagggcgagcaatttactcctagatggttcaacctgacagatgtggtctcccctacaccgtggggtgacctggaaatttatgaatacaacggcaaatacacagagcaccgggctgccatagaccgctccgatgtcaccgacgagacagatgtcacttcagtcaagttcagcccatggcaatatggtagctcatcttcccaatgattctccgtggccagaagccgccatgcctacgcgcattgtgtaaaacacttccaggcctggctttgctggtttgttgtgccatcagcggtttccttgcccttgtagtattgtggccttcccccttttttcccttaaatgctacagttattcaggaagtggtgtagtccgtgtactgtcgcaagtctagcgagattgcagagttttgttgaaccgttgtgctgttgtatttatgcgagataactgataaccgaaggtaacgaacgacacagatacggatggaatc

SEQ ID NO: 86731 - DNA, 610 bp, Zea Mays
gattatatattggaatttcgaatggcctgtttgcctgccttcagttttgacaccacccccgagtttctgcaaactttcaggctcgaggaacaacagagagctgagaaacgaactcgagaggccaagggcgagcaatttactcctagatggttcaacctgacagatgtggtctcccctacaccgtggggtgacctggaaatttatgaatacaacggcaaatacacagagcaccgggctgccatagaccgctccgatgtcaccgacgagacagatgtcacttcagtcaagttcagcccatggcaatatggtagctcatcttcccaatgattctccgtggccagaagccgccatgcctacgcgcattgtgtaaaacacttccaggcctggctttgctggtttgttgtgccatcagcggtttccttgcccttgtagtattgtggccttcccccttttttcccttaaatgctacagttattcaggaagtggtgtagtccgtgtactgtcgcaagtctagcgagattgcagagttttgttgaaccgttgtgctgttgtatttatgcgagataactgataaccgaaggtaacgaacgacacagatacggatggaatc

SEQ ID NO: 86732 - DNA, 3205 bp, Zea Mays
aacccacaccaccgcaccacgcacctccaccaccagaagaaaaaaccaaggcggagggcggagaggagagcaaggagggtgaagggggaaaagggtaataaaaataaaagaggagaggagaagcaagacgaggaggaagagggagcacccagaggtaggggagggggaataattccgcaggggctgagggatctcggcgagtccggccgcggagcagcgcagcgaggcggcgatccgagggcgatcggaggcgggcgggcgtagacgccggcgagatttgtgttggtgacaagccatgaacagcgcaaccaccagttgttaagtaaccctcctgtaaacttgaagcaaccgaagcggagagcagaaatggtgttccaaaagaggtcctcgtcagagttggaggcgtccggtggaggccaagtcgcggagatgccgcgcgttcccaagtctgcgaggggcaagagatcggtcaggaagaaggaggcccagaacccgccccagatgtcagcattcgaccttctcgcgacggtggcagggaagctgcttgatgagggggtgggctcgctggggaacatgagcgctggtgccccagctttgactgcatgcgcgaaggatgtccgtgtgaagaaggagcagtgtgacgaggaaatgaagcagttcaagcatgaggtgacagatcaggatagctgcaatgagagtgcaattctcccgcacattgtgttccagcgggcggtgaataatgctcggaatgaggatcctaaggcgaagtctgaggcccaggacaaggaatcctccatgatcagctgtaccaaggctgaactgggttgtaattttggtgtgattgcagataggtggtcgcctgaatccgtggaatcaggagccttcacaggagatgcagtggcgagcctgatgccacctgccccagcaggatttcataagaatgcacccgaaatgtataatttgcttgattcaatggatgtggatgtcaagcctcctcctttggtcagctctgacagcaccggcgagatgccattgtatggcgataaagttcaccgctcaacctccttaccaagggtctcgaagggagtggggttttttgctgtagatagagatgatgacgacgataagtcctctgggtgcactcatcccagcaccaccactaacaaggatttcaggtccaattgtacagctgagtatagtagggtaaggaagttgctcaccagtaagtacaggaaagttgctccagcgagggtttacaaatctgatctttcctatagtgatgttgatcggaagccttctttccggaacaaaaaaatgcattatacacgacagaggacacaaaggagtacattcaagcgtaggaagctctttgatcgccattcagttctagcatctgaatttggtaccgcacatggaaagggaaacacgaagaaggttaccggaagagactcccatgctgtgtctttggaagcaaacaaggggactagttcaacgccattccagaaatctcgtgggtcaaatgattgccatgtgaaacttaaaattaagtcttttaaggtgcctgaacttcttgttgaaatcccagaaagtgcaactgttggctcactaaagaaaactgttctcgaggcagtgactgcgattctcggaggtggtctacgtgttggtgttcttcaccatggaaagaaagttagagatgataataaaacgttgattcaggctggtattggtcaggaggatatgctggacaaccttggcttttcacttgaacccaactgtacacaaaacccacaagtccaagctcctgaagatatcagtttcctggaaaccattgatactgctgaacccctcgcaaggattgcacctgctgactcgtcttctaagcatggtgaagttgacctatcacaggagtttgcattaaccccattagcaatgaactaccagggcagtgatcatgattctgtgcactcccctgggggcgtctcatcgcccgataaagtctccacaaactcgcgagctttagttccagttccagctgcagatcccaatgcaggagctatagttccagcgaataagtctaagaggtcaccagagcaggggcaacgcagaatcaggcgcccgttctctgttgctgaagtagaagcacttgtgctcgcagtcgaaaagcttggaaccggaaggtggcgagatgttaaacttcgcgcgtttgacaatgcgaagcaccgtacctatgttgatcttaaggacaaatggaagacgctggtgcacaccgcgagcatctcgccgcagcagcggcgtggcgagccggtgcctcaggagctgctcgaccgggtcctggcggcccaggcctactggtcccagcagcaagccaagctccagcctaagacgcccccgctgctggctgaggctcgcttgctcacctaataaattcgatgatcctggctgatggcctcctccgaggccgttgcagcctttgtataaagtcagtaagtcagtcagtcccttcacaggaggtttaaggaagatatattaggaaaaaaaagaatacacatataaggtacaagaagcattgaccgatttgttgtaatatctactcaccaacagatattctttaagccaggattctctctccttgtgaatttaaccaaaggaaagggtatttctttggcaaattgtacatgttgatggtggaagaagaagatgatccatgaactgagatctggggtgccattgctcacaatttttgcagttgtgactgagaaattgaaggtcctgcttgaccaagctcggctccggctccggcttttggattctcctgcgaagaagttgttgcctcctcgcagaagctgagagccgaacagtgtatttggtttgaattgcagcctatagtataatttgattcacccgtacagacggccacaaaaagccgtaaagggagggtagcttcttttgttgagtctaggcttgcgagctgggccaaagcggcaccgaaagaaagcttcagattcttttgttcaattaaattcattcttttgttagtggacagtgacggaaggataggacattaggagggatggatctttggttctcttttccttttttttcttctattaaattagttgtactatgttatgtcaccaatcttgtagttaccctcaaatttgtaattgatgaaattaagaaattggaaggaaatgctttcgtacca

SEQ ID NO: 86733 - DNA, 115 bp, Zea Mays
cctatgacgtgtctatgtcgttttcttggctcgtagtgtcagcccagtctagcatattttttattttaaacttattagtgtatatatatttatactacctaaccttttatgtaat

SEQ ID NO: 86734 - DNA, 1446 bp, Zea Mays
aacgcaaacggctcatcccattcccatcacatgattcccaactcagcgccgcatcgcgtcaccgcaatctcgcagtcaccccccaaattcccatgtactcctcttgctcccgataatggcttgatttctcagtccgcactcgtcactgaggctgggcgctgacgccttccccgtttttgcagctccgcgaccgctagccgtgaggatgagcctcctccgcaaccgccgccggcttacaacatcatcccgatccacgacgtggtgatgcaaggggagcacccgtcgctacggttcccggaggtgcgcgcggccgtggaggcgctggcgcacgcggcggacctgccgccgccgccgctcgcccgcggctgggacgccttccgtgccgacctcttcgactggctcggcgccacctgcggcttccagctcgacaacgtccgcaaccagcgggagcacctcgtgctcctcctcgccaacgcgcagctccgcgcaggcggcaccctccccaccgaccaccccgccgacgtgctgcaccactccatcgcgcgggacatccggaggaagctcctcaagaactacaagacctggtgctcctacctcggcaagaggccgcacgtccatgtgcccagcggcggacgccgtgtcgctcagggggtcggccctgacacacgccgcgacctactgtacaccgccctctacctcctcatctggggcgaggcggccaatttgaggttcatgccggagtgcctctgctacatcttccactacatgggcactcgatctcaaccatgtcatcgaccagtcgattgatatcgagactgggcgaccatcagttcctgcggtgcacggtgtggatgctttccttgacaaggttgtgaagccgatatatgacgtgctcgaggctgaggtgaagttcagccggaatgggaccaagccacactcggcctggaggaactatgatgatgtgaatgagtacttctggagccgcagagttttcaggcggctccagtggcccctgtcaccagcgaggagcttctttataaagccaggaaaccccgggcgtattggcaagactggttttgttgagcagaggtcgttctggaatgtgtaccgcagctttgatcgggtattggtgatgctcattctgttctttcaagcagcaatgatcgttgcatgggatggccacactccgtggtttagcctactctaccgtgacatccagatccgggtgctgtctgtgttcatcacctgggctgcgctgcgcattgtacaggcagtgcttgatgcaggcacacaatacagcctcgtgaggacggatactatatttctcgcagtacggatggtgctcaaggtgcttgttgctgttgggtggactatatcacattcattgtgctctatgttcgaatgtggaatcagaggtggcatgaccgcaggtggtctttttctgcc

SEQ ID NO: 86735 - DNA, 104 bp, Zea Mays
gttattaaggggcagtgtactaaatccattttacatcttgtcatctacacgcgaaatccattttttctattgatgcacctagataccaagctcacctattttgg

SEQ ID NO: 86736 - DNA, 1419 bp, Zea Mays
atcctttcacccttcagcccgcgtgccctctgtttctctcccggttcttcccctctcttgcgacgacagggttgggtaacgccgctcgccgccgccgccgccatacgcaggtgccgaggccttcgtcgatctcttagccgtcgacaagcacccaagagatgcaggatagaatgagacggcaggggcaatatggtgaagcggatattaactctatggttgctgcccagttgcatcactaccaggcacagcaaagggtacagaaacaccctgagaatagctacactggaagagatcctgcacaagcttctgcggagcatcagtacactccccctaaagcaagacagagtcaatgggatcgaggtggaccaaatgcgccaagccaggttccatcatatgcatataacgaagcccaaggtgctggaggtgcgcaatccttttatgatgggcagagatctgatacaaaggttggtctagaaaagcagcccagcaaggagtctagggagcaacctcgtactgaacgaactgaaacaagatacgagaattataatcttcctcggacattcgaaggtcttgaacaaagtttccatgaagacattattttgctatccaaggaactacaggaggcagaggatgctgaaaattctagacacatggagagattgaaggatataaatacacagtaccaggagaaactattagcacttagagctcggcaagcgaactatagagatgagttcctgcgcaaggaatctctagcacgccagcagcaataccagcacgccagcatgagccattacgctagcaattccacggctggggagcagcatggttataacccaacggcagcaggcacgcctcctgttgctgctggaggtgcttatggtgaggctcatcggggttatgcttctggccagtatgaatcatttagcgatcgtccagattatccagagttccatgatgggggcagaggtcgtggtcgtagttctgagcagcgtgctcaataccctggtggtcgtgcttataattccggtggccggcgattctagatatgctttgaactttgaaggacgatctatcactctgtcaagcgagctcatatcacctgatgtcagtgtgctgtaccgtgctatactcgaccgagaaacctaagcgctcataaaacttgttctacaattcaggtgcatcgaactactttatggttttgctagagttcattctggttataattgtagaggaacgaaacgatgagagaacactgacttttccgtttctctgcattcatgtaatatgatctcggaagcaataacatttcatcttctatagcttcgagcatcagagagatggtcaaatgacactgatttgcattacatgtgattgtgaaacatttgcttttgaaaatgccaataaaaagaagcatat

SEQ ID NO: 86737 - DNA, 2385 bp, Zea Mays
tgggtaccccaagcaagagcgccaccattcactcgaaggtgggcctgcccctcgtcgcatcgctcgactccaactatagtcaactcccataaacaaacgatcttctcctttaccctccctttcccaaaaggtcaactcttccatcccctccactcgccgatccccaaaatccaaagcccaaggaaacaaaatgggcaatggcatcaccaagaacccatgcttctccggtgactcgtacgccgccgccgtcgcgtctgacccgctcccggacgacagccatggtcactccttcacctacgtgccatcgggcgccgccttcgaccagccccagacgtctgccgcgacgtcgtcggagtcgtcgttcttctctctgtccggcgccgccatcagcgccaatccggcgacgtcggcgtcgatgccgtcgttccgcctttttaacgagctgacgtggccgccgtcgaccgcgtgcaccttcgagagctcgcggtccttctctgccattcctctccaggcggcgccgcctagactttccatgtccgggccggtccagttcacgtccggccggttctccgagacatccggctccacgtccacgatctccggcacgccctcagaccgcccattcatgtcagggccgctcgaccactccttgtccatctcctcgtcgtccgcggggctcctccatccgagcgtttctcagctcatcgctgagcgccgcgccgcgcgctcccgactccgggatgagcgatccctgctacggttcttcgtcaggaccgcctccaaactctggctcgggtcgccgcgctatggccgccggccacaggaacctgctgatccgataaagttctccttcagcgatggggactaccgctcgccgccgaacagcaatgtggagtgggctcagggcatggccggcgaggaccgcttccacgtcgcggtgtccgaggagcacggctgggtgttcgtcggaatttacgacgggttcaacggccccgacgcgaccgattacctcttcgccaacctctacgtcgccgtgcacaacgagctcaaaggcttgctctgggacggcatccaagcaggcgacagcgccaggtgcggtgagcaagaagcgggcgcaggcaatgccgaacgcctctgtattgctcaggccgacggggacggcgcggaggctaagcgcagacggacggaagtgcccatgccaggcaacagcgccacgccagtgcaccgcgacgtcctgagggcgctggcgcgggcactgaagaagacggaggaggcgttcttcgcggcggcggaggaacgcgcggccgagagcccggagctggggctgatggggtcctgcgtgctggtgatggtgatgaagggcacggacgtttacgtgatgaacgtcggggacagccgcgccgtgctggcgcggaggccggagcccgacctgaagaacgtcctcggcaaggcgtcgcaggacctgcagcagttcaaggtggagatcatgcgcgagctggaggcgcacgacatggacggcctgcaggccgtgcagctcaccccagagcacagcaccgcggtccaggaggaggtgacgaggatcaaaggccagcatctgaatgatcggaacgcgatagtcaatggtcgggtcaaggggaagatcaacgtcaccagagcgttcggggtcgcctacctgaagcagcccaagtggaacagcaggcttctggaagccttcaagatcaactacgtcggcactgacccgtacgtgacctgcgcgccgtcgctgtgccaccaccgcatcggctcgcaggacaagttcctggtgctgtcctccgacgggctctaccagttcttcaccaacaaggaggtggtggaccaggtggaggcgttcaccgccgcggagcccgacggcgaccccgcgcagcacctcgtcggggagctcgtcaaccgcgccgcgaggaaggccggcatggagacgcgccagctgctggacatcccgcgcggcgcgaggaggcactaccacgacgacgtctccatcatcgtcatctcgttcgaggggcggatctggaggtcgtctgtctaggtgtgtcgtgtctgagtctgacgtggttttcagaggtccaaggcgtcctcgtaggtcagatgaggaggagagatggaatgaggaggcgatggtcgacagtctcaagggcgagggcacggcgctgccatgagctgccttcagtgtccggctatcgtttttggtttaccttataccatatactagagccatgttcgttcttgccgaaactgttgtacatagttccgcaagacgaactctaatagcaaagaaaagaagaaaagaaaatgcagtattagtatgtaattaggggtttcgcatcaaaagaagaagtggttagtatctgc

SEQ ID NO: 86738 - DNA, 2382 bp, Zea Mays
tgggtaccccaagcaagagcgccaccattcactcgaaggtgggcctgcccctcgtcgcatcgctcgactccaactatagtcaactcccataaacaaacgatcttctcctttaccctccctttcccaaaaggtcaactcttccatcccctccactcgccgatccccaaaatccaaagcccaaggaaacaaaatgggcaatggcatcaccaagaacccatgcttctccggtgactcgtacgccgccgccgtcgcgtctgacccgctcccggacgacagccatggtcactccttcacctacgtgccatcgggcgccgccttcgaccagccccagacgtctgccgcgacgtcgtcggagtcgtcgttcttctctctgtccggcgccgccatcagcgccaatccggcgacgtcggcgtcgatgccgtcgttccgcctttttaacgagctgacgtggccgccgtcgaccgcgtgcaccttcgagagctcgcggtccttctctgccattcctctccaggcggcgccgcctagactttccatgtccgggccggtccagttcacgtccggccggttctccgagacatccggctccacgtccacgatctccggcacgccctcagaccgcccattcatgtcagggccgctcgaccactccttgtccatctcctcgtcgtccgcggggctcctccatccgagcgtttctcagctcatcgctgagcgccgcgccgcgcgctcccgactccgggatgagcgatccctgctacggttcttcgtcaggaccgcctccaaactctggctcgggtcgccgcgctatggccgccggccacaggaacctgctgatccgataaagttctccttcagcgatggggactaccgctcgccgccgaacagcaatgtggagtgggctcagggcatggccggcgaggaccgcttccacgtcgcggtgtccgaggagcacggctgggtgttcgtcggaatttacgacgggttcaacggccccgacgcgaccgattacctcttcgccaacctctacgtcgccgtgcacaacgagctcaaaggcttgctctgggacggcatccaagcaggcgacagcgccaggtgcggtgagcaagaagcgggcgcaggcaatgccgaacgcctctgtattgctcaggccgacggggacggcgcggaggctaagcgcagacggacggaagtgcccatgccaggcaacagcgccacgccagtgcaccgcgacgtcctgagggcgctggcgcgggcactgaagaagacggaggaggcgttcttcgcggcggcggaggaacgcgcggccgagagcccggagctggggctgatggggtcctgcgtgctggtgatggtgatgaagggcacggacgtttacgtgatgaacgtcggggacagccgcgccgtgctggcgcggaggccggagcccgacctgaagaacgtcctcggcaaggcgtcgcaggacctgcagcagttcaaggtggagatcatgcgcgagctggaggcgcacgacatggacggcctgcaggccgtgcagctcaccccagagcacagcaccgcggtccaggaggaggtgacgaggatcaaaggccagcatctgaatgatcggaacgcgatagtcaatggtcgggtcaaggggaagatcaacgtcaccagagcgttcggggtcgcctacctgaagcagcccaagtggaacagcaggcttctggaagccttcaagatcaactacgtcggcactgacccgtacgtgacctgcgcgccgtcgctgtgccaccaccgcatcggctcgcaggacaagttcctggtgctgtcctccgacgggctctaccagttcttcaccaacaaggaggtggtggaccaggtggaggcgttcaccgccgcggagcccgacggcgaccccgcgcagcacctcgtcggggagctcgtcaaccgcgccgcgaggaaggcatggagacgcgccagctgctggacatcccgcgcggcgcgaggaggcactaccacgacgacgtctccatcatcgtcatctcgttcgaggggcggatctggaggtcgtctgtctaggtgtgtcgtgtctgagtctgacgtggttttcagaggtccaaggcgtcctcgtaggtcagatgaggaggagagatggaatgaggaggcgatggtcgacagtctcaagggcgagggcacggcgctgccatgagctgccttcagtgtccggctatcgtttttggtttaccttataccatatactagagccatgttcgttcttgccgaaactgttgtacatagttccgcaagacgaactctaatagcaaagaaaagaagaaaagaaaatgcagtattagtatgtaattaggggtttcgcatcaaaagaagaagtggttagtatctgca

SEQ ID NO: 86739 - DNA, 1657 bp, Zea Mays
gtgggggcgggcgcgcgcgcgcggtggatccgcgggagcgcgcgcgggatccgcgggaggttggggatagcggggcagtctacacgtgactcttaataattaggtctaaatgtgatttaaaaaaaagacaaataaaaaaattcggacgacctacgcacacgctcagacaggtttacgcgctgacaagctgcccttccgcgaactacacgttcgacgaaatgccgccgcgagagtcgagacctcttcatcgtcaactgagattcgcctagcatcttctcggattccttccccaactttcgtccccatcagcggacctactcgagatcgacgagactcgtcggagcccggttcctaggcgtcccagcgcccgactggatctcctggctcgggccgccttgatggtccctggggtcggtccggggtggagttcgaggcgatgagcaggcttgcgtcggggctccagcgcttgcggaggtcgtcgtcgcagtgggaggtgctgtggtcggcgctcgcgtcatgcggcctagtgcttttctcgcagctcgccgtggcgatggttccccgtctcttccctttcctctccctcctcgcgatgctccccatcgcggggttggtgttcatcgcggctatcgtgctcggccgcctgtggaggaggttcatcggggtggcggcgtcggccccgctcttcgtgctcttcaacatcctcctattgtggggcgtttacgtattcgtaatccggagagaaacttcttctctgctggacatgctaataaatgcagagtgtgcacttcttctgtggggattctacaggattttatctggtgatcctggtattgttgcttgtgattcttcatatttggaagaagctggctgcaaggattttgtggaagctatatactcgagtgagaaactcccaatgctctcaagggtcaggcagtgtacctggtgcaaagcaaacattaggggctatgaccatcattgtcctgcatttggtacttgcataggacagaaaaatcatcgtctatttatggcccttttgacaggatttgttgttgctgaatcaacatatacgatgtgctcaacaaaatatattaccagatgcatcagttcagggactataagatcggagaatcctgtatctttaaacatagtaatcagtacaacgctcttctctatcctccaggtcctctggcagattgtattcttgatgtggcacatatattgcatctgcttcaacatcaagacagatgagtggattaactggaagaaatatcctgaattccagatgaaggaacaacctcgatcagattctgaagtcaaatttgtgaacccatatgacaagggcatgctgtgtaacataagagaatttctaaagccggaatgatagatagccaattttgagtacgaagacctggaactagaaagatgggaagtctgaagtgcgttataactggatggaagcttgtttccttgttggctatagattttcaggaatctattctgatgttgtagccgtttagttgagattccagatttatgacagcgaatctggttcagtaaactgaaccaaacacactctgaggatcattgaactccctgtagtttaatgtgcaagtaacattcttttgtaaggttactttcacttatggaattcata

SEQ ID NO: 86740 - DNA, 1804 bp, Zea Mays
gtgggggcgggcgcgcgcgcgcggtggatccgcgggagcgcgcgcgggatccgcgggaggttggggatagcggggcagtctacacgtgactcttaataattaggtctaaatgtgatttaaaaaaaagacaaataaaaaaattcggacgacctacgcacacgctcagacaggtttacgcgctgacaagctgcccttccgcgaactacacgttcgacgaaatgccgccgcgagagtcgagacctcttcatcgtcaactgagattcgcctagcatcttctcggattccttccccaactttcgtccccatcagcggacctactcgagatcgacgagactcgtcggagcccggttcctaggcgtcccagcgcccgactggatctcctggctcgggccgccttgatggtccctggggtcggtccggggtggagttcgaggcgatgagcaggcttgcgtcggggctccagcgcttgcggaggtcgtcgtcgcagtgggaggtgctgtggtcggcgctcgcgtcatgcggcctagtgcttttctcgcagctcgccgtggcgatggttccccgtctcttccctttcctctccctcctcgcgatgctccccatcgcgggtcggtgctctctggttgctcgcttcctttttggttctctgcacagctgcactgcacccgattgcgggagtttctattttttaagcgccagagcgattctgatcttccttcgactgcgtgttgcatagggttggtgttcatcgcggctatcgtgctcggccgcctgtggaggaggttcatcggggtggcggcgtcggccccgctcttcgtgctcttcaacatcctcctattgtggggcgtttacgtattcgtaatccggagagaaacttcttctctgctggacatgctaataaatgcagagtgtgcacttcttctgtggggattctacaggattttatctggtgatcctggtattgttgcttgtgattcttcatatttggaagaagctggctgcaaggattttgtggaagctatatactcgagtgagaaactcccaatgctctcaagggtcaggcagtgtacctggtgcaaagcaaacattaggggctatgaccatcattgtcctgcatttggtacttgcataggacagaaaaatcatcgtctatttatggcccttttgacaggatttgttgttgctgaatcaacatatacgatgtgctcaacaaaatatattaccagatgcatcagttcagggactataagatcggagaatcctgtatctttaaacatagtaatcagtacaacgctcttctctatcctccaggtcctctggcagattgtattcttgatgtggcacatatattgcatctgcttcaacatcaagacagatgagtggattaactggaagaaatatcctgaattccagatgaaggaacaacctcgatcagattctgaagtcaaatttgtgaacccatatgacaagggcatgctgtgtaacataagagaatttctaaagccggaatgatagatagccaattttgagtacgaagacctggaactagaaagatgggaagtctgaagtgcgttataactggatggaagcttgtttccttgttggctatagattttcaggaatctattctgatgttgtagccgtttagttgagattccagatttatgacagcgaatctggttcagtaaactgaaccaaacacactctgaggatcattgaactccctgtagtttaatgtgcaagtaacattcttttgtaaggttactttcacttatggaattcatatcgtggtcctgcatttttc

SEQ ID NO: 86741 - DNA, 1774 bp, Zea Mays
gtgggggcgggcgcgcgcgcgcggtggatccgcgggagcgcgcgcgggatccgcgggaggttggggatagcggggcagtctacacgtgactcttaataattaggtctaaatgtgatttaaaaaaaagacaaataaaaaaattcggacgacctacgcacacgctcagacaggtttacgcgctgacaagctgcccttccgcgaactacacgttcgacgaaatgccgccgcgagagtcgagacctcttcatcgtcaactgagattcgcctagcatcttctcggattccttccccaactttcgtccccatcagcggacctactcgagatcgacgagactcgtcggagcccggttcctaggcgtcccagcgcccgactggatctcctggctcgggccgccttgatggtccctggggtcggtccggggtggagttcgaggcgatgagcaggcttgcgtcggggctccagcgcttgcggaggtcgtcgtcgcagtgggaggtgctgtggtcggcgctcgcgtcatgcggcctagtgcttttctcgcagctcgccgtggcgatggttccccgtctcttccctttcctctccctcctcgcgatgctccccatcgcggggttggtgttcatcgcggctatcgtgctcggccgcctgtggaggaggttcatcggggtggcggcgtcggccccgctcttcgtgctcttcaacatcctcctattgtggggcgtttacgtattcgtaatccggagagaaacttcttctctgctggacatgctaataaatgcagagtgtgcacttcttctgtggggattctacaggattttatctggtgatcctggtattgttgcttgtgattcttcatatttggaagaagctggctgcaaggattttgtggaagctatatactcgagtgagaaactcccaatgctctcaagggtcaggcagtgtacctggtgcaaagcaaacattaggggctatgaccatcattgtcctgcatttggtacttgcataggacagaaaaatcatcgtctatttatggcccttttgacaggatttgttgttgctgaatcaacatatacgatgtgctcaacaaaatatattaccagatgcatcagttcagggactataagatcggagaatcctgtatctttaaacatagtaatcagtacaacgctcttctctatcctccaggtcctctggcagattgtattcttgatgtggcacatatattgcatctgcttcaacatcaagacagatgagtgggtaatttcaaatttcccatgctttggagtcttcgttcatcaattgcaggtcgtcttctcgttagctgtttcttgtagctaaaaggtgagattttccagattaactggaagaaatatcctgaattccagatgaaggaacaacctcgatcagattctgaagtcaaatttgtgaacccatatgacaagggcatgctgtgtaacataagagaatttctaaagccggaatgatagatagccaattttgagtacgaagacctggaactagaaagatgggaagtctgaagtgcgttataactggatggaagcttgtttccttgttggctatagattttcaggaatctattctgatgttgtagccgtttagttgagattccagatttatgacagcgaatctggttcagtaaactgaaccaaacacactctgaggatcattgaactccctgtagtttaatgtgcaagtaacattcttttgtaaggttactttcacttatggaattcatatcgtggtcctgcatttttc

SEQ ID NO: 86742 - DNA, 1388 bp, Zea Mays
ttcatcgtcaactgagattcgcctagcatcttctcggattccttccccaactttcgtccccatcagcggacctactcgagatcgacgagactcgtcggagcccggttcctaggcgtcccagcgcccgactggatctcctggctcgggccgccttgatggtccctggggtcggtccggggtggagttcgaggcgatgagcaggcttgcgtcggggctccagcgcttgcggaggtcgtcgtcgcagtgggaggtgctgtggtcggcgctcgcgtcatgcggcctagtgcttttctcgcagctcgccgtggcgatggttccccggttggtgttcatcgcggctatcgtgctcggccgcctgtggaggaggttcatcggggtggcggcgtcggccccgctcttcgtgctcttcaacatcctcctattgtggggcgtttacgtattcgtaatccggagagaaacttcttctctgctggacatgctaataaatgcagagtgtgcacttcttctgtggggattctacaggattttatctggtgatcctggtattgttgcttgtgattcttcatatttggaagaagctggctgcaaggattttgtggaagctatatactcgagtgagaaactcccaatgctctcaagggtcaggcagtgtacctggtgcaaagcaaacattaggggctatgaccatcattgtcctgcatttggtacttgcataggacagaaaaatcatcgtctatttatggcccttttgacaggatttgttgttgctgaatcaacatatacgatgtgctcaacaaaatatattaccagatgcatcagttcagggactataagatcggagaatcctgtatctttaaacatagtaatcagtacaacgctcttctctatcctccaggtcctctggcagattgtattcttgatgtggcacatatattgcatctgcttcaacatcaagacagatgagtggattaactggaagaaatatcctgaattccagatgaaggaacaacctcgatcagattctgaagtcaaatttgtgaacccatatgacaagggcatgctgtgtaacataagagaatttctaaagccggaatgatagatagccaattttgagtacgaagacctggaactagaaagatgggaagtctgaagtgcgttataactggatggaagcttgtttccttgttggctatagattttcaggaatctattctgatgttgtagccgtttagttgagattccagatttatgacagcgaatctggttcagtaaactgaaccaaacacactctgaggatcattgaactccctgtagtttaatgtgcaagtaacattcttttgtaaggttactttcacttatggaattcatatcgtggtcctgcatttttc

SEQ ID NO: 86743 - DNA, 979 bp, Zea Mays
agcttccttccaccccccatatttcttgaacacgcaggagaagctgaccttaggaaataagctaattgttaagtaaatgtgttcaaccatactcattattttttcctcttctaggactatttagatgttttagcatagtagctattcattctttttctcaaacacaacgctttttactgcatatgcatagtgagtgcatttgtatgtctttagtactttcaatggtaatatatttaaatcaggtcaaccatgatatagtggaaagcaattatattaagctatgttctgggccttttgagttggtcttccatgtttctgagaaacttacaacttcccttttgttttatttttccatcaaactgtacccttggtttctgatatctgtaagaatgaccgcaagatgcttactgagtgtactcatttactttccagaatcctgtatctttaaacatagtaatcagtacaacgctcttctctatcctccaggtcctctggcagattgtattcttgatgtggcacatatattgcatctgcttcaacatcaagacagatgagtggattaactggaagaaatatcctgaattccagatgaaggaacaacctcgatcagattctgaagtcaaatttgtgaacccatatgacaagggcatgctgtgtaacataagagaatttctaaagccggaatgatagatagccaattttgagtacgaagacctggaactagaaagatgggaagtctgaagtgcgttataactggatggaagcttgtttccttgttggctatagattttcaggaatctattctgatgttgtagccgtttagttgagattccagatttatgacagcgaatctggttcagtaaactgaaccaaacacactctgaggatcattgaactccctgtagtttaatgtgcaagtaacattcttttgtaaggttactttcacttatggaattcatatcgtggtcctgcatttttc

SEQ ID NO: 86744 - DNA, 108 bp, Zea Mays
ctcagtcatcacttagcacacaacctttcgactctttctaccttttacaacagtttatctatagtttactcaaaaacattattttatactgttctgcattgttcaaat

SEQ ID NO: 86745 - DNA, 551 bp, Zea Mays
caaagcacaattaagcttcttacctgggtatgagcaatgacacggataacagaagcatatttcttcatcttctcaagctgcagctgaatttccttcttgccagcatcattttcatatttgagagcatactttgtgaaagccttcttcttgctcttgcaccagttcttgtagaaccttctcctcacttcttcgctaagatgttgggcccaaacagagttgagtgtgcggaggccacgaggagtcttcacatatgccacgagcccaacaatgacaagaggaggggtttcaatgatggtaacagcctcacaagtttccttcttatggagttctgtagaaatcaagtaggcagagcagttacgataatggagtgaaatgcttaattgattaataaaaaagaagggggtggacatactggatcctggcttctcaacctcacggacaatgtgagtcatgccagccttgtagccaaggaaggcagtgagatggcaaggcttcttggcgtcatccctagggaatgacttcactgcaaaaaaagaaaaattactatcaga

SEQ ID NO: 86746 - DNA, 2709 bp, Zea Mays
atggatgacgaatctaagtctgctcctaaatcggatgtgaacaccgacgctggcgcggaagccgcggcggccgccgctccgctgccgccctcgagctcagaaacggcggagacggaggcaagggttgaggcggcggatggggagagccaggtggttgagcggttggtcgagcttgtgagcgagatcgcggccatctcggacttcaggaactcgtaccggcgtcagttctgcaacctgtcgcggcggatccggctcctcgtgcccatgctggaggaggccaaggaagcgcccacgccacttacggtggcatcggaggccgcgctacggcggctcagggaggcgctccacgccgccagggatctgctccagctcggcagcagcggcagcaagatcttcctggttcttgatagagagaaaataatgaagactttccaggatgtcactgcaagacttgaacaagccttagctggtatctcgtttgatgaacttaatatatctgatgaagtaagagagcaggttgaattggtgcatactcagttcaaaagagctaaggaacggtcagattcatctgatgatgatctttttaatgagctgatgtctctatgtaattcaagcagcagtgatagtgttgacccagatactcttcgaaggttatctgagaagttgcagcttgtcacaatatatgacctcaatcatgaatctctgaccttgcatgagatggctagtggcggtgatcctggtgcagttgttgaaaagatgtcaatgctcctcaaaaggattaaggattttgtgcagacagaagaccctgagatgggtgcccaagcaagtacagcaaccatttctacaaaagacaattcagcatgtcctgttattcccgatgatttccgttgcccaatatcactggatttaatgaaagatccagttattgttgccactgggcagacttatgagcgggggtacatagagatgtggctggaggctggccatgatacctgtccgaagacacaacagaagcttgccaataaatccctgaccccaaattatgtcttacgtagtctcataactcaatggtgcgaggcaaatggtattgagcctccaaaacgccctgctcaacttagggatgcaccactgtcatgtagtgctgctgagcatagcaatgttcttgagcttcttcagaaattgtcttcccaaaaccttgaagatcaacgtggctctgctggtatgcttcgtcaacttgccaagcgcagtgctgaaaatcgtgcttgtattggagatgctggtgctattcctattcttgttagtctgctatcaaccactgatgttagcacccaggaacatgtggttactgctctcttgaatctttccatctacgaagagaacaaggcaagaataatatcttctggagctgttcctggaattgtgcatgtgttaaagaggggcagcatggaggctcgggagaattcagctgccacacttttcagcctatctattgtagatgagaacaaggtgactattgggtgttcaggggcaattcctgcacttgtgcagctattgagtaatggaagccaacggggtaaaaaggatgcggcaacagcactatttaacttgtgtatttaccagggcaacaaggggaaagctgtaagagctggattggtacctatactactagaactgctcatggagactgaaagtgggatggtagatgaggcccttgcaatattggcaatcctctcaggccatcctgaggggaagacagctatcggcgctgcttctgcaatacctgtacttgttggagttatcagaaatggatctccaaggaacaaggaaaatgctgctgctgttatggtgcatctatgcagtggtgagcagcagcaacagcatcttgctgaagcacaggagcagggcatcgtgtctttgctggaggagctagcagaaagtggcacggacagaggaaagaggaaagctgtgcagctgctcgaacgaatgaatcggttcctaaagcagcagagtcaagccgaagccgaagcagaggccatggcacaggctcatgcacaagcacaagcacaagcacaagcacaagcacaagcgcagcctcagatcctggttcaagctcaagcacatgcagatatgcaagctgaacgatcactacttcccacatcatctgacatttcggatagatgaggtttttgatcagcagcttgttttgtctagtaactggcttgttttttttaagctcaggctgtcaggtggaagattgcctgcaactgttattgtggaggtttctggtttctgttgaacactgcaaattaggaggtctgggcagcgtgatttaggtccatgagcatgttgacaggtgggttctgagtcagtttttaacctgcgtgtgttcgtaaaatgtaccggtgattgaaggtagtaagtatatcctcgagttttaggaggtatcgttgaacttgtacccggtacgagcccagtacaggactaattctggcgccctaggctaagtgcctgacaaagttgcaggaaagctttagttcagaaaaatgtttgttcatcgagtccggtgcagttggttcagctgtcttctgtgagttgtttgcgttgaaaaaaagcggttggttcagctgtcttgtgtgggttgtttgttgtgaaaaaactgccgcaagctgtatgctgtgaaaagttaaaaatcgtttggcttaagctgct

SEQ ID NO: 86747 - DNA, 414 bp, Zea Mays
atggaggcggtgggcatcggcctggcgctgcaggcgcgggcggcgggcttcggctctagctggcgctggggtggtctacagatctgtaagcagtgcagatgcgagatcaatcaaccttcgttaaattcagtagatgggattgtgatcccgtacaagtctacaagcagccttcctttcccagctttctgctcggtgacatctgccaccttccagacacagtacctcagcctgagtgttaacggactcgagcaagaagatgctatccttcagcagggtcatgcatttttggtctggtatacttttgtcctcactgccaatttcgccatgtcctatgagcctgatgacatctcaggcgcgtttcgcttcatgttatgcctaagaactgcaaaattaattgagaaattgatggcatag

SEQ ID NO: 86748 - DNA, 2628 bp, Zea Mays
ttcgtagctgctctgttccggtcaaactcggcggcctccgaaatgggatcgaacccaacacggcaacacgccgaagcaacgcatgaaccaccagtcaccggcgacgcgggagggaaagtctccatttcgagaaccttcctgtacactctagaatccccaccctcacgaatggatccaagttccccacgacgtgcccgtgtcgacggccgtgacgtgccggaacattctagaacccctcccggccacacaaacctttaaatccagtcccacatcgtctccttcctcctcgtccacccattcctcgttcttccttaattcctcatttcctccacgtacgcgtgcatactctgcgagtccaggaggtattttcccccttcttcacgatactctcgacgagagcgtctccatggccggaaaaggagacgggccggcgatcggcatcgacctcggtacgacctactcgtgcgtcggggtgtggcagcatgaccgagtcgagatcatcgccaacgaccagggcaaccgtacaacgccgtcttatgtcgcgttcaccgattcggagaggctcgtcggcgacgccgccaagaaccaggtcgccatgaaccccatcaacaccgtcttcgacgcgaagcggctcatcggccggcgcttctctgacgcgtcggtgcagagtgacgccaagctatggcctttcaaggtgatcccgggctccggcgacaagcccatgatcggggtgcagttcaggggcgaggagaaacagttctcggccgaggagatcagctccatgatcctgaacaagatgaaggagacggccgaggcttacctcggcaccaccatcaagaacgctgtcgtcaccgtcccggcctacttcaacgactcccagcgccaggccaccaaggacgccggcgtcatctccggcctcaacgtcatgcgcatcatcaacgagcccaccgccgcggccatcgcatacgggctcgacaagaagtcgagcagcgacggcgagaagaacgtcctcatcttcgacctcggcggcggtacctttgacgtctcgctcctcaccatcgaggagggcatctttgaggtcaaggccaccgccggcgatacccacctgggaggcgaggacttcgacaaccggctcgtgaaccacttcgtccaggagttcaagaggaagaacaagaaggacatcactggcaaccccagggcgctccggcggctgaggaccgcctgcgagagggctaagaggacgctctcctccaccgcccaaaccaccatcgagatcgactcgctctatgagggcatcgacttctacacgaccatcacccgtgcccggttcgaggagctcaacatggacctcttccgcaagtgcatggagcccgtggagaagtgcctccgcgacgccaagatggacaagagcagcgtgcacgacgtcgttctcgtgggcggctccactcgcatcccccgcgtgcagcagctgctccaggacttcttcaacggcaaggagctgtgcaagagcatcaacccagacgaggctgtcgcgtacggcgcggccgtccaggccgccatcctcactggcgagggcaacgagaaggttcaggatctgctcctgctcgacgtctcgccgctctcgctcggcctggagacggccggaggcgtcatgactgtgctcatccccaggaacaccaccatcccgacaaagaaggagcaggtcttctccacttactccgacaaccagcccggcgtgctcatccaggtgtacgaaggtgagagggccaggaccaaagacaacaatctgctcggcaagttcgagctctctggcatccctccggcgcccaggggcgtcccccagatcaccgtgtgtttcgacatggacgcgaacggcatcctcaacgtgtcagctgaggacaagacaaccggccagaagaataagatcacgatcaccaacgataagggccggctaagtaaggaggagatcgagaagatggtgcaggaggcagagaagtacaaggccgaggacgaggaacaccagaagaaggtgaacgccaagaacacgctcgagaactacgcctacaatatgcgcaacaccatcagagacgacaagatcgcctccaagctaccggaggacgacaagaaaaagatcgatgacgccgtcgagggggccatcaattggctcgacaacaaccagctcgccgaggttgatgagtttgaggacaagatgaaggagctggagggcatctgcaaccccatcatcgcgaagatgtatcagggcgccgctggtcctgacatggccggtggcatggatcaggatgcttcgccggctggtggcagcggtgctggacccaagatcgaagaagtcgactaaatgaggaaattctgatatatgtattttttgcttaaataattgcgtcaattacaaagtggatcttattattatttttatgcagtttttttggccatacacagggccccaagttcatgtttaagttcatttttgctagtacgctggatataaacagtgattagccctgcatgtattggcggtattatatcttcgaaagctattttagatggctaaaaccctttattaacctatatgcaatacaatgaataactaggatttcagaaaaaaaaaaa

SEQ ID NO: 86749 - DNA, 2389 bp, Zea Mays
tcttcacgatactctcgacgagagcgtctccatggccggaaaaggagacgggccggcgatcggcatcgacctcggtacgacctactcgtgcgtcggggtgtggcagcatgaccgagtcgagatcatcgccaacgaccagggcaaccgtacaacgccgtcttatgtcgcgttcaccgattcggagaggctcgtcggcgacgccgccaagaaccaggtcgccatgaaccccatcaacaccgtcttcggtaagccgatcatcaccaatcttttgttacgtgcgctgtttatctgtttgttcgatccattaatacacggggtttgggtgtgggtgtgggactaatacgctgtgtggtttgttgatccgtttgcgcgcatttgcagacgcgaagcggctcatcggccggcgcttctctgacgcgtcggtgcagagtgacgccaagctatggcctttcaaggtgatcccgggctccggcgacaagcccatgatcggggtgcagttcaggggcgaggagaaacagttctcggccgaggagatcagctccatgatcctgaacaagatgaaggagacggccgaggcttacctcggcaccaccatcaagaacgctgtcgtcaccgtcccggcctacttcaacgactcccagcgccaggccaccaaggacgccggcgtcatctccggcctcaacgtcatgcgcatcatcaacgagcccaccgccgcggccatcgcatacgggctcgacaagaagtcgagcagcgacggcgagaagaacgtcctcatcttcgacctcggcggcggtacctttgacgtctcgctcctcaccatcgaggagggcatctttgaggtcaaggccaccgccggcgatacccacctgggaggcgaggacttcgacaaccggctcgtgaaccacttcgtccaggagttcaagaggaagaacaagaaggacatcactggcaaccccagggcgctccggcggctgaggaccgcctgcgagagggctaagaggacgctctcctccaccgcccaaaccaccatcgagatcgactcgctctatgagggcatcgacttctacacgaccatcacccgtgcccggttcgaggagctcaacatggacctcttccgcaagtgcatggagcccgtggagaagtgcctccgcgacgccaagatggacaagagcagcgtgcacgacgtcgttctcgtgggcggctccactcgcatcccccgcgtgcagcagctgctccaggacttcttcaacggcaaggagctgtgcaagagcatcaacccagacgaggctgtcgcgtacggcgcggccgtccaggccgccatcctcactggcgagggcaacgagaaggttcaggatctgctcctgctcgacgtctcgccgctctcgctcggcctggagacggccggaggcgtcatgactgtgctcatccccaggaacaccaccatcccgacaaagaaggagcaggtcttctccacttactccgacaaccagcccggcgtgctcatccaggtgtacgaaggtgagagggccaggaccaaagacaacaatctgctcggcaagttcgagctctctggcatccctccggcgcccaggggcgtcccccagatcaccgtgtgtttcgacatggacgcgaacggcatcctcaacgtgtcagctgaggacaagacaaccggccagaagaataagatcacgatcaccaacgataagggccggctaagtaaggaggagatcgagaagatggtgcaggaggcagagaagtacaaggccgaggacgaggaacaccagaagaaggtgaacgccaagaacacgctcgagaactacgcctacaatatgcgcaacaccatcagagacgacaagatcgcctccaagctaccggaggacgacaagaaaaagatcgatgacgccgtcgagggggccatcaattggctcgacaacaaccagctcgccgaggttgatgagtttgaggacaagatgaaggagctggagggcatctgcaaccccatcatcgcgaagatgtatcagggcgccgctggtcctgacatggccggtggcatggatcaggatgcttcgccggctggtggcagcggtgctggacccaagatcgaagaagtcgactaaatgaggaaattctgatatatgtattttttgcttaaataattgcgtcaattacaaagtggatcttattattatttttatgcagtttttttggccatacacagggccccaagttcatgtttaagttcatttttgctagtacgctggatataaacagtgattagccctgcatgtattggcggtattatatcttcgaaagctattttagatggctaaaaccctttattaacctatatgcaatacaatgaataactaggatttcagaaaaaaaaaaa

SEQ ID NO: 86750 - DNA, 109 bp, Zea Mays
gtcgttggctgttgcagcgaggtccgggccttcgtgggatttttcatactctacagtcgtatgattgattctacatattgaagaaaaaacagggccttcgctatggtac

SEQ ID NO: 86751 - DNA, 860 bp, Zea Mays
gagagtgaaggtaagacccgtctaaggtgtcatctagctggtttgtcaggagatgacaagtcatgcctgaaagtaccaaagcgtgtgaggggggtaattttgaatgactatgcaagagggaaaaaaggagggcagattataaagagcataaactctttgtggataaggcaattatagatttagcatatagtgatgctagaagagaacaaatacctagggatgaagctggacagatggcgtgggcactaagggaatcattgttggatcaaaagacatctagcaatagcccacctgtaggcagaagtagcactgggacaagcaataccaccccaccattagctacaggctctcgtagtcagagtaggatgtataggtactatcggagtccaagtgtgactcagaacatatgtgatatagatttgcaatgcagtaagatgtcaacacaacctaggatagacattatgctacatgggggtgccaaagagagacttggtaaaacttaggcaaaatggttccatgccaatgatattcctggaagcaaagcagactgtccatattttatagcagcagtaaaactatctcagcagcttggggaaggagtgcctgttccaaggggaagagatatagatgggtcattactaaatatgaactatgaggacctacaaactcgcatggaccgataaaaggaagattgaggttgctttagggtcactattatgtgtgattcatggacagggccaaccatgatgtgcattattaattttatgatttgttgcaatggtcgcatgttttttcataaaaccgtggatgcaactggtcaaatacaaaatgcagaatttatttatgattgcattaaggaa

SEQ ID NO: 86752 - DNA, 2673 bp, Zea Mays
gtcttccccctttccacctccccccaccccgctgtgctcatccatcgaccgcgacgagcccccgcccgccgattcgactacgtttattttttttatttcatttgatttgattgcaaagcaccgcagcagcaggaggaggggaagggagggatcgttggaccgtcgttcggctggatggtggaggcggttcgtcgatttgagggcaccgggtttcttggacctgcgtaggtaaaaaacaccagccccatttccctctcggccggcggatggacgcgagggaggtgtgaagcctggtcgctaactgatgctcgtggagagattcggaggagaggagcgcgccgtgcggaggcggtggaggaggaagcgccgacgatttggacagcgcagcgacggaaggggagcagcaggcggacgaggagcgagccgccaggaggacgacggccgccgccgccgccgccgccatgggcgagtcgctgctcaccgcgctctccatggacaccgccacagcccaccacccgcaccagggcccctccaccttcctctccatggacaccgcctcccacgacgacttcgacctcttcctccagccacaggggcccttccgccgctgcctacatgccgcggcggtcgccccccctgacatcaaccttcccctagccgccgacccgtctccgccacctctggcgtcgctcgacgccaacgttgacatgctagatgtcggcctcggcggctcgcagcactacgactcggattcgcccgctgccgctgggccagtctcggccccggcagcagcagcgaccaccatggtcgccgtgtcccacaccaagggctccggttccagtgctgcgcgcaagtgtgtcaagaggaatgttagcatctggggagcgtggttcttcttcacccactacttcaagccagtcatgtctgcggacaaggctggcaaagcgaaggcagccaccaccaccggcgggaacggcaatagcgccacactggacgctttcctggtgcagcacgacatggagaacatctacatgtgggtgtttaaggagcgtccggagaatgccctggggaagatgcagctgaggagcttcatgaatgggcactcacgccttggggagccacagttcccattcagcgcagacaaagggtttgtgcgctcacaccggatgcagcgcaagcactaccgtggcctctctaacccacagtgtcttcatgggatcgaaatcgtgagggcgccaaatttggcgggtgtacctgaggctgatttaaagaggtggatgcagctcactgggagggacgccaatttctcggtcccaactgaggcgagtgattttgagtcctggaggaatctgccgagcacagactttgagctcgagaggccagcaaccgcggctcctgcaaagagcagttcacatggacaccacaagaagttgctgaacggttctggccttaacctctcgacgcaaccatccaatcacagttctggggatggcatggagatcacagccacctgtaacaagcgcaggaaggattcctcaccgaccgcaatggaagaggactgcagcaattcgaattcggacaaggcccaagacatggatgtgatccacaccttcgagccatcatggatgaatgacttctcaggtgtgatgcgccatgcttctggaccagtaaccgctgcaaaaacaatatacgaggacagcaagggctacttgatcatcgttagcctgcctttcgctgattttcagaaggtgaaggtttcatggaagaacactcttacaaatgggatcgttaaggtatcatgcactagcgttggtcggatgccactcctgaaaaggcatgatcggactttcaggttggcggatcctgctcctgagcattgcccgccgggagagtttgtccgggagatcccactccctacccgaatccctgaagacgccactctggaagcgtactgcgatgaaacagggacagggctggagattattgtcccgaagttccgcgttggccctgaagaacacgaagtgcatgtgtccatgaggccaccctcgtcctggtgccaatgaaacctgtttccaagcttgcggggggagacacacatacggtgtggaggtttgccgtaaggctaaggctactgcacaacaaatgcagctcagttttgctaattttgatgggaaacagtccttgattgattgaagcattctggtagttggccgccgcagcgtttggaacattttaggaaatatgctacgggtcgcaaggaacatgcttgcattacttagttcttgtatggggatacacctagtgtgttacatttcgtttccgttgtgtcgaaagactggttgtctgctcgatgtgctgcaatccgtgcatcgcccacccgtcacgagcaacaatctgtttgtgttgtacacagaatggcaactggatgtataggggcatttatagtcattttccatagattgaggtttgctttgtgggcatcgtgtaaaattcgtctcagattgatggaaactaggaagaaaaagaagatggcagtgtctttaggatttggcgaagttgtaatggggattaggcggtgctgtagcattctgtctagtttccaggaatttgtagaagacaaatgtaaatctgttgttccgtcatcaatatagaaaagtggtctgtgtctaccag

SEQ ID NO: 86753 - DNA, 2869 bp, Zea Mays
gtcttccccctttccacctccccccaccccgctgtgctcatccatcgaccgcgacgagcccccgcccgccgattcgactacgtttattttttttatttcatttgatttgattgcaaagcaccgcagcagcaggaggaggggaagggagggatcgttggaccgtcgttcggctggatggtggaggcggttcgtcgatttgagggcaccgggtttcttggacctgcgtaaaaaacaccagccccatttccctctcggccggcggatggacgcgagggaggtgtgaagcctggtcgctaactgatgctcgtggagagattcggaggagaggagcgcgccgtgcggaggcggtggaggaggaagcgccgacgatttggacagcgcagcgacggaaggggagcagcaggcggacgaggagcgagccgccaggaggacgacggccgccgccgccgccgccgccatgggcgagtcgctgctcaccgcgctctccatggacaccgccacagcccaccacccgcaccagggcccctccaccttcctctccatggacaccgcctcccacgacgacttcgacctcttcctccagccacaggggcccttccgccgctgcctacatgccgcggcggtcgccccccctgacatcaaccttcccctagccgccgacccgtctccgccacctctggcgtcgctcgacgccaacgttgacatgctagatgtcggcctcggcggctcgcagcactacgactcggattcgcccgctgccgctgggccagtctcggccccggcagcagcagcgaccaccatggtcgccgtgtcccacaccaagggctccggttccagtgctgcgcgcaagtgtgtcaagaggaatgttagcatctggggagcgtggttcttcttcacccactacttcaagccagtcatgtctgcggacaaggctggcaaagcgaaggcagccaccaccaccggcgggaacggcaatagcgccacactggacgctttcctggtgcagcacgacatggagaacatctacatgtgggtgtttaaggagcgtccggagaatgccctggggaagatgcagctgaggagcttcatgaatgggcactcacgccttggggagccacagttcccattcagcgcagacaaagggtttgtgcgctcacaccggatgcagcgcaagcactaccgtggcctctctaacccacagtgtcttcatgggatcgaaatcgtgagggcgccaaatttggcgggtgtacctgaggctgatttaaagaggtggatgcagctcactgggagggacgccaatttctcggtcccaactgaggcgagtgattttgagtcctggaggaatctgccgagcacagactttgagctcgagaggccagcaaccgcggctcctgcaaagagcagttcacatggacaccacaagaagttgctgaacggttctggccttaacctctcgacgcaaccatccaatcacagttctggggatggcatggagatcacagccacctgtaacaagcgcaggaaggattcctcaccgaccgcaatggaagaggactgcagcaattcgaattcggacaaggcccaagacatggatgtgatccacaccttcgagccatcatggatgaatgacttctcaggtgtgatgcgccatgcttctggaccagtaaccgctgcaaaaacaatatacgaggacagcaagggctacttgatcatcgttagcctgcctttcgctgattttcagaaggtgaaggtttcatggaagaacactcttacaaatgggatcgttaaggtatcatgcactagcgttggtcggatgccactcctgaaaaggcatgatcggactttcaggttggcggatcctgctcctgagcattgcccgccgggagagtttgtccgggagatcccactccctacccgaatccctgaagacgccactctggaagcgtactgcgatgaaacagggacagggctggagattattgtcccgaagttccgcgttggccctgaagaacacgaagtgcatgtgtccatgaggccaccctcgtcctggtgccaatgaaacctgtttccaagcttgcggggggagacacacatacggtgtggaggtttgccgtaaggctaaggctactgcacaacaaatgcagctcagttttgctaattttgatgggaaacagtccttgattgattgaagcattctggtagttggccgccgcagcgtttggaacattttaggaaatatgctacgggtcgcaaggaacatgcttgcattacttaggtgctgtttggttcacatatttgtaacgtaatgggtaacggataacattaaatcatgtttgttttagtccaaccgtaatcagataccacactaaaatttgataccagcctattcaaatttgttaccgccagtaatcgagctgaaaccattaccattaccatttgcgttacattttttgaaccaaacagcaccttagttcttgtatggggatacacctagtgtgttacatttcgtttccgttgtgtcgaaagactggttgtctgctcgatgtgctgcaatccgtgcatcgcccacccgtcacgagcaacaatctgtttgtgttgtacacagaatggcaactggatgtataggggcatttatagtcattttccatagattgaggtttgctttgtgggcatcgtgtaaaattcgtctcagattgatggaaactaggaagaaaaagaagatggcagtgtctttaggatttggcgaagttgtaatggggattaggcggtgctgtagcattctgtctagtttccaggaatttgtagaagacaaatgtaaatctgttgttccgtcatcaatatagaaaagtggtctgtgtctaccagcaaa

SEQ ID NO: 86754 - DNA, 2907 bp, Zea Mays
cgctgtgctcatccatcgaccgcgacgagcccccgcccgccgattcgactacgtttattttttttatttcatttgatttgattgcaaagcaccgcagcagcaggaggaggggaagggagggatcgttggaccgtcgttcggctggatggtggaggcggttcgtcgatttgagggcaccgggtttcttggacctgcgtaggtaaaaaacaccagccccatttccctctcggccggcggatggacgcgagggaggtgtgaagcctggtcgctaactgatgctcgtggagagattcggaggagaggagcgcgccgtgcggaggcggtggaggaggaagcgccgacgatttggacagcgcagcgacggaaggggagcagcaggcggacgaggagcgagccgccaggaggacgacggccgccgccgccgccgccgccatgggcgagtcgctgctcaccgcgctctccatggacaccgccacagcccaccacccgcaccagggcccctccaccttcctctccatggacaccgcctcccacgacgacttcgacctcttcctccagccacaggggcccttccgccgctgcctacatgccgcggcggtcgccccccctgacatcaaccttcccctagccgccgacccgtctccgccacctctggcgtcgctcgacgccaacgttgacatgctagatgtcggcctcggcggctcgcagcactacgactcggattcgcccgctgccgctgggccagtctcggccccggcagcagcagcgaccaccatggtcgccgtgtcccacaccaagggctccggttccagtgctgcgcgcaagtgtgtcaagaggaatgttagcatctggggagcgtggttcttcttcacccactacttcaagccagtcatgtctgcggacaaggctggcaaagcgaaggcagccaccaccaccggcgggaacggcaatagcgccacactggacgctttcctggtgcagcacgacatggagaacatctacatgtgggtgtttaaggagcgtccggagaatgccctggggaagatgcagctgaggagcttcatgaatgggcactcacgccttggggagccacagttcccattcagcgcagacaaagggtttgtgcgctcacaccggatgcagcgcaagcactaccgtggcctctctaacccacagtgtcttcatgggatcgaaatcgtgagggcgccaaatttggcgggtgtacctgaggctgatttaaagaggtggatgcagctcactgggagggacgccaatttctcggtcccaactgaggcgagtgattttgagtcctggaggaatctgccgagcacagactttgagctcgagaggccagcaaccgcggctcctgcaaagagcagttcacatggacaccacaagaagttgctgaacggttctggccttaacctctcgacgcaaccatccaatcacagttctggggatggcatggagatcacagccacctgtaacaagcgcaggaaggattcctcaccgaccgcaatggaagaggactgcagcaattcgaattcggacaaggcccaagacatggatgtgatccacaccttcgagccatcatggatgaatgacttctcaggtgtgatgcgccatgcttctggaccagtaaccgctgcaaaaacaatatacgaggacagcaagggctacttgatcatcgttagcctgcctttcgctgattttcagaaggtgaaggtttcatggaagaacactcttacaaatgggatcgttaaggtatcatgcactagcgttggtcggatgccactcctgaaaaggcatgatcggactttcaggttggcggatcctgctcctgagcattgcccgccgggagagtttgtccgggagatcccactccctacccgaatccctgaagacgccactctggaagcgtactgcgatgaaacagggacagggctggagattattgtcccgaagttccgcgttggccctgaagaacacgaagtgcatgtgtccatgaggccaccctcgtcctggtgccaatgaaacctgtttccaagcttgcggggggagacacacatacggtgtggaggtttgccgtaaggctaaggctactgcacaacaaatgcagctcagttttgctaattttgatgggaaacagtccttgattgattgaagcattctggtagttggccgccgcagcgtttggaacattttaggaaatatgctacgggtcgcaaggaacatgcttgcattacttaggtgctgtttggttcacatatttgtaacgtaatgggtaacggataacattaaatcatgtttgttttagtccaaccgtaatcagataccacactaaaatttgataccagcctattcaaatttgttaccgccagtaatcgagctgaaaccattaccattaccatttgcgttacattttttgaaccaaacagcaccttagttcttgtatggggatacacctagtgtgttacatttcgtttccgttgtgtcgaaagactggttgtctgctcgatgtgctgcaatccgtgcatcgcccacccgtcacgagcaacaatctgtttgtgttgtacacagaatggcaactggatgtataggggcatttatagtcattttccatagattgaggtttgctttgtgggcatcgtgtaaaattcgtctcagattgatggaaactaggaagaaaaagaagatggcagtgtctttaggatttggcgaagttgtaatggggattaggcggtgctgtagcattctgtctagtttccaggaatttgtagaagacaaatgtaaatctgttgttccgtcatcaatatagaaaagtggtctgtgtctaccagcaaatgccttgtgtacgatcttaaccatccagcacgttttgtgccgtactttaatgaggcagagccc

SEQ ID NO: 86755 - DNA, 3085 bp, Zea Mays
acgtttcagcatccagtagctagagctgcaggctgcagccgtcagccgcacccgaggccgagagcccagagccgagaggcgagttgggcggctgtgctggccggccatggcgaagccaggcggcagcgatgagtcgtgggagtacagtctgcgcaagtatctcctgctgctggccacgctggtggccacggtgacgtacggtgcggggttcaaccccccaggcggcgtctggcagactgccgaccccgccgtcgaccgcatcgccggcgaccccatcatccgcgacacgaactacgcccgctacctgtccttcttctacagcaacgccaccgccttcgcctcgtcgctcgtggtcatcgtcctcgtcctcatcctgtccgtgctgcacgacaacgggggaatcaccatgctcgcgccgctgctcggcgtcctccgggccgtcatggtgctggacctgctcagcctcatgggcgcctacgcggcggggacgttccgggacacgctcacggcggtctactccctggtgctgtcggccggcgtcgtcgcctacctcgtggcccacctggccctggcctcgagggcgccggcggccgaggacaagagggggcagagcgcgccggagcggctccgcaaggtgctcatgctcctcgccacgttcgccgcgagcgtcacgtacgtcgccggcctcagcgcgccgggcggcttctgggaccactccgaggacggccaccgcccgggcgacgcgatcctcaagggagggccccacgacgcgcgcctcaaggccttcttcgtctgcaacaccacggcgttcgtcgcgtccctgctcatcctcgtcatgctcctggagaagaagctctgcttcagccagaaggtgcgctcctacgagatctacggcttcatcgccgtcacgctcatcagcctcctgggggcgtatgctgccggcagcagccgccagatcgacacgaccatctatgtgagcgctcttgttggtgctgttgccgtgtgcattctcatccaagtggttttcgttttgctcttccaagcaaattcgaccgaggggcaacaaacacgaactcaaggtcccctaacaaataatggcaatggcagtgatgagcgtcagcagactcaaggtccgcaaacaagcatggacagtaatgacagggatgagcagcagcaacaaacccacggtctgcaaactagtgatgacaatgtcagtgaccaccaccagcagcagcaacaaactcagagtcctcaaactagcaatggcaatggcaatgccagcgatgagcatgagaagcaacaaaatccagcgctggagaaggctcgctctcttgtcctgctgctcgctactctcgcagcggcaatcacctaccaagcgggcctgaacccgccgggtggcctctggcagagcaacggccgcctctacaagatcggtgatccgatcctcttgaccacgaaccccagacggtacaaggcattctactactgcaactccgtcgccttcgtcgcctccttggtcgccgttatgctggttaggaagaagacactgcaccaccacaacgcgctggaggccgccatggtactggacctgttcggcctcatcggcgcttacgccgccgggagctgccgggacgtcagcacgtccatctacgccatggcccttgcaggcgccgtgctggtctacgtggtcatccatgtcgtcttcttgacgctggacgaaaaggacggcagcagcgcgagaaggaatgatgacgcttccttcgaggagagagagaaaaaggaggcgggcctggtggagaagaggcgcaaacgactgctcctattcgccatcttggccgcgaccatcacctaccaagccgggctgacaccgccgggcggctttctggtccaggacgataaccgtaccggccgccatgccggcgacgcggtcctgctcaacaactacccgcgccgttacacggctttcttctactgcaactcggtgagcttcatgctgtccatcgccctcatcatcctcctcgtgaaccccaacctgtaccgccctgccattcggagcaatgcgctgtctgtctgcacggcggccgggttgattggaatcatgggcggctacgcggccggctgcacgcagcatctgaagacatccatctatatcttcgtgttggcggccgtggttctgtccactgtggtctttctggctgcggtgttccttgtgatccatctgagaaaaaaaagacgataatgctaacagcaccaacagagcagcagcaagagaggcacctggggaagaacaagaagccaatgctggtgctggggtgccaaatgccatggggggcgagcaaagaggtccccaaggagccaaagctcgccgaaaagaaaagagggcacacgccaagcgcaagtatctgatgctgcttggaatcctcgtggcgagcgtgacctaccaggccgggctggcgccgccgggcggggcgtggcagtccaacgacggcacccacaccgcgggcgaccctgtgatgcacgactaccggagggcccggtaccttgccttcttctacagcaactccacctccttcgtggcgtccgtggtcgtcgtcgtgcttctgctgccggagtcgctgcacaagaagtggtggtggctcggggtcatgaacgcgacgatcgtgctggacctgctgggcctcttgatcgcctatgccgccgggtccagcaggacgtggaagacttctgtggttgtttccgctctcgttctcgctgtgctcgcctatttcgccatacatgtgctgctgtcaagctgcgtcaggagagggaagaagacagcccccgactctccgtctccgccccaggaccaggagaacagagaggaaaacgaagcggcaacgaaagaggtcgagctccagggtccagcttgctgaaactggagtgtacagtgcggagctgaatgtgtgtgcagtccagtacttgtagatttttttttcacgaccgtgttgtcgcattttttttttttgtcaagaggtgtagtgtttttgttgatccacgtagcgggcgggaacgattgatgtgcaatcaagtgttagatgtaagtgta

SEQ ID NO: 86756 - DNA, 1781 bp, Zea Mays
gtggagaagtatctttggatcgggagtcaaggtacaagcaactagtagtttccgactggatgtgtcgaccctgtcgatggaggatatcaccggccgactgaaagcggccgagcatgctgatgatgcctcaccaccgtcgacggggggtaagctgtacctaacggaggagcagtgggaggctcggtggaaggagaagcaccgaaatgacgccggcgcgtcgaagtccggtaaccacaggcgacgtctacgtcgaggcgcgacaagcaactggcgagcgaaccggtgctgggaaaggccgcgaccagtgccggagctgcggcaaaactggccactgggccagagattgcccgtctaagtccaacaaggggaaggcctatgtcgcgcaggccgaagaggaggaggggactctgctcctcgcacgggtctcctccgtccagctccgcccgctctgcggtggagaccgcatcgtcggcagaatccccggcgctggaggcttctcgggctcagatccacccacaggagaccccggtcggggcattggaggcgccgccgggacaactgttgcagctagcggtcccgtccctggtggaggaggcgccgacagatcatcccccgaagcaggtggcctggcccctgctggagaaggcggcgccggatccaccacctctaaccctagccccagcgctggaggagtcgcccagtgctgtggaggggccagtgaccctgctgccagcgctggagaagccacgcgccgcgacggagcagcagcacgtacatctggtggatgacagaaggagatgttgatgaccacgcaggagatggttggattcacggaacacaaggaattggttggattcagtgacagtgaccacgcaggagatgttgacgacagaaggagcacaagcgggttgttcttcttcttggccaataatcctatcacttggcagtccattaagcaaaaggtgctagctctctcatcctgtgaggcgagtacatagctgcagcagtaggtgcatgtggaacagtctggccagtacgactactgaggcctagtgtaggtattctagtaatgagtcgtattagagtgaattgagatatattgaaggagtatttgatatattgaggatttacacactctccaatctctccaaagcactctaaactcaaagtactcaaactagatctgaaggatgtgatgggaggagagcccgaaccatcggtcctcaaagtggacaataagtcagcaatcgaccttagcaaaaaccctgtccaccatgatcgaactaaacacattgacacacgatttcattatatcagagaatgtgtggacaggaggaaaattatccttaagcagattacaactcaagatcagctcacggatatattgacaaagccgctggatcgtgtgaagttctagctcctccgtgatcgcattggcgtcgtcaacataaaggatgagctctaggattaggggggtttgttgtctgtaatcctgatgtctatccgttgggacttagctcctgtcagttaggacttagctatatttttctttgaattcgttggcctgaataaccggccagttagttgtggctgaacgagtctagtgcctgtcgtaggccagttcatgcggggcgagtccgagtcttaggagagtgcgcgagtgcttgtaggacgtgggatggcacggcgagtaaacgcaacatgaagtgcatgtaaacgagtcgagtctgtttattaattcagagcaatacgacagaaaaggttgtccgttacacagcacc

SEQ ID NO: 86757 - DNA, 957 bp, Zea Mays
acttacactgcataagctcttaacacatacagttgcacatctttattgctagctaacgcaaggctactttaccctacgttaaggcacacaagtcacttcaggctaattaaggacgcacgacgatcttggtgttcttcgtcatgtcggtggtggcgaggccgccgccctttccggcgagcgggaagtagaaggggtagatctcgtagcgcaccctgcagctgctgtagttgatctggcagccctgctgcgcgccgcagtagtcgccgaacctggacagcgccgtggacaggcactgcgcgcaggtcagcggcgcgaggtcccgcgtgcactgcgccagcccgtagatggacacgaacggcgtgtactgctccttgtcccgcccgagccccgcgctgcccgccgccgacgcctgcgccgtcgccttgcccatcaccttccccaccgccttctcgaacgccttcgggttgtccatggcctgcacgttcaccaggatcacgcccgcgtccgtgtccgcctgcccgaagaagttggcgttctcgtaccgcatgaagcagtagtcgtacctgcatgcatatgtatgtatgcaagctcgatgcttagcattagcagttgcatacttgcatgcatgtgtctacataattgcatacgtatctatacagccatgcagtgttgagcataccatatcctcgcgtcggaactgtagctgcaggtgctggggagctgcttggcggcgtcggcaaggcaggacgcgcagtcgctggcggagacgtcgccgcggcattgcgcgaggccgtagatgatgctgttgttgcccttgccggcggtggacgtggcgtagcccccggtggaggaggccgaggcgacgaggtcggcgaggacggagttgatgttggccacggccttgctgctgccagcgtagctgcttcctgagcagtagctgccgatggagtccgcggc

SEQ ID NO: 86758 - DNA, 456 bp, Zea Mays
atgtggtgtgcccataccgaggtgccctccgcgcttccccttctccaacaccaacaacagtctaaggctcccagcgtgaagagtccagggcatgctttagagttggtcactgcggctagccttagtccttgtccacgtgggttgccagctacgcaggaccagctgtcccgcgcccgctccagtccaccgacggtggccgagcagagagtaagcagggccgacaaatcgatgggaccacaaccaaacagcaactgcttcgcacgccgatgcgttcgtgggagacgtcaaacctgcacaagaactggccgcgatgagccagccgatacttgcgggcaccgcagtgacgacaggtctggccttgggacctccccaggtcaagctatgcgagtcaacagtgaaacacatggcatggatgggctaccgcttgagaagtgcaagatcgtatctcgtgtctaa

SEQ ID NO: 86759 - DNA, 1561 bp, Zea Mays
tcgtcctccttgcgtacctaacgcatgcctaatcgcgggagtaaacaaacatcgctcggtgacagtggggcggggcggggcgggcgcgtcccgggcgcgctgcgctgtcgccatcgatcgcacgcggcacccgttggaatctcgcgcgcgggggggcaccagcacctttgcttccattggaagcgcaaatgtctgctccgcctcgtcgcccctgcacggattactggtttcttatatggaaaaagtggaggaattaattgtggagtcgggtggtgagatctgattttagattggttgattagcccggttggtagaagcagtcggtggtggtggtggtggtgcactgcttctacctcccctgcatctctgctcgggtgtgtgtgaagcgcgggctctatataagtacgactcagatctgagacgatgccacctcgtccgccccagtctagtccgattcaaacccgcccgttccccgtgtccgagccacgcaagcgcgctccacgcgatggcgcagaaggagaccaatggcagcaacggcgagcacatctccacccgcccgccgccgaccccgtcgcccctccgcttctccaagttcttccaggctaacctgcggatcctggtcactggtggggcgggcttcatcggctcgcacctcgtggacaggctcatggagaacgagaaacacgaggtcattgttgctgataactttttcactggttcaaaagataacctgaagaagtggatcggacacccaagatttgagctcatccgccatgatgtcaccgagccacttcttgtggaggttgaccagatctatcaccttgcttgccctgcttcaccaatcttctacaagcacaatcctgttaagaccatcaagacaaatgttattggtaccctgaacatgctgggccttgcaaagagagttggagctaggattttgttgacatcaacatctgaagtttatggtgatccgcttgagcatcctcaaaccgaggcctactggggcaatgttaacccaattggagtcaggagctgttatgatgagggtaagcgtgtagcagagacgctgatgttcgactatcacaggcagcatggcattgaaatccgaattgccaggattttcaacacctatggaccaaggatgaacattgacgatggccgtgttgttagcaacttcattgctcaggctgtgcgtggcgaaccccttactgtccagaagccaggaacacagactaggagcttctgctatgtcgccgatatggttgatggtcttattagactgatgaatggaaacaacactgggccgattaacttggggaacccaggtgaattcaccatgctggaacttgctgagaatgtgaaggagttgattaacccagatataacagtgacgatgaccgagaacactcctgatgatccccgccagaggaagccggacatcaccaaggcaaaggaagttctagggtgggagcccaagatcgtcctgaaggacggcttggtgctcatggaggatgatttccgggagcgcctggccgtgcccaagaaaaccaaggcctaaact

SEQ ID NO: 86760 - DNA, 2234 bp, Zea Mays
tcgtcctccttgcgtacctaacgcatgcctaatcgcgggagtaaacaaacatcgctcggtgacagtggggcggggcggggcgggcgcgtcccgggcgcgctgcgctgtcgccatcgatcgcacgcggcacccgttggaatctcgcgcgcgggggggcaccagcacctttgcttccattggaagcgcaaatgtctgctccgcctcgtcgcccctgcacggattactggtttcttatatggaaaaagtggaggaattaattgtggagtcgggtggtgagatctgattttagattggttgattagcccggttggtagaagcagtcggtggtggtggtggtggtgcactgcttctacctcccctgcatctctgctcgggtgtgtgtgaagcgcgggctctatataagtacgactcagatctgagacgatgccacctcgtccgccccagtctagtccgattcaaacccgcccgttccccgtgtccgagccacgcaagccgagctcaatccccagaggccagagccagctgctcggcgctccacgcgatggcgcagaaggagaccaatggcagcaacggcgagcacatctccacccgcccgccgccgaccccgtcgcccctccgcttctccaagttcttccaggctaacctgcggatcctggtcactggtggggcgggcttcatcggctcgcacctcgtggacaggctcatggagaacgagaaacacgaggtcattgttgctgataactttttcactggttcaaaagataacctgaagaagtggatcggacacccaagatttgagctcatccgccatgatgtcaccgagccacttcttgtggaggttgaccagatctatcaccttgcttgccctgcttcaccaatcttctacaagcacaatcctgttaagaccatcaagacaaatgttattggtaccctgaacatgctgggccttgcaaagagagttggagctaggattttgttgacatcaacatctgaagtttatggtgatccgcttgagcatcctcaaaccgaggcctactggggcaatgttaacccaattggagtcaggagctgttatgatgagggtaagcgtgtagcagagacgctgatgttcgactatcacaggcagcatggcattgaaatccgaattgccaggattttcaacacctatggaccaaggatgaacattgacgatggccgtgttgttagcaacttcattgctcaggctgtgcgtggcgaaccccttactgtccagaagccaggaacacagactaggagcttctgctatgtcgccgatatggttgatggtcttattagactgatgaatggaaacaacactgggccgattaacttggggaacccaggtgaattcaccatgctggaacttgctgagaatgtgaaggagttgattaacccagatataacagtgacgatgaccgagaacactcctgatgatccccgccagaggaagccggacatcaccaaggcaaaggaagttctagggtgggagcccaagatcgtcctgaaggacggcttggtgctcatggaggatgatttccgggagcgcctggccgtgcccaagaaaaccaaggcctaaactgccctgcggtgggcgaagaatatccacgggggagcatactcatagttggcttgtcattattcgtggccacatttcattacggaatttgagttccaataaacggaatataccttcgtcgatcaccttgaaggattgtatcattagaattttcatacagggctggccttttgagtctctgcctacgcacgcagatgttgtggttcttgtgtttgtagcctatatgtactccctgagtcgattatagaaatgtttattccattttgagttttttgttccttccttttgctttgccgtctaagactgagatgacgccagctgcgctgcagatttgtgattgtaatggactggccatggcaaggtgtcgttgtctctctcaaattctgtaaaatggagtactactataaaccacagtctagtctggtttcggaggcttttccaacgagcgagaagctacagaatcacaatctagtctggttcggcgcttttccaacaagaagagctttgtttcggtgcttctccaacgagatgccacgagcagcagaagagcttccgggaaagtgcaggcgtagaaacacacagaacagaaccttctttacctcgatcgacaaaaacgcctccgtccatgacatgtgggccc

SEQ ID NO: 86761 - DNA, 2607 bp, Zea Mays
agcccgggcaccgcgtccgcgactccgcgtctccgcctgcaactgcaaagagtatagaaggcacgcggcgaagcggccaggagttcctcctcgccccgcgttgagttgccagcacggcccctccctctcgttctcctcgactcctccccgtcgcggcagccagccagcaggcatcgtgatcgtctgccctggttcccgccctcgctccatcccccggcacccccgcacgggacgcgcgtgtggacgttcttcgcctccgcgacaggcttgcgccccggctcggctcgggtctgcctccactgcggccttcctggatctcggccgccgctcctccatattataacatatcacagaactatcagacaaggatggcgacttacgagcccaagaacattctcatcaccggtgctgctggttttattgcatcgcatgtcaccaactgtctggttaggaactacccgcactacaagattgttgtcctcgacaagctcgattactgctccagcctaaagaacctcaacccctcacgggcttcaccaaatttgaagtttgtcaagggtgacattgcaagtgctgatctggtgaaccaccttctggtcacagagtcgattgacaccatcatgcactttgctgctcagactcatgtagataattcatttggcaattcatttgagttcacaaaaaacaatatatatggtacccacgtccttcttgaggcttgcaaggtcactggccagatcaggaggtttattcatgtcagtactgatgaggtctatggagaaactgatgaagatgctgtggttggtaatcatgaggcctcacagctgcttccaacaaatccgtattcagctacaaaagctggggctgaaatgcttgtgatggcatatggaagatcttatggtcttcctgtgataaccactcggggcaacaacgtgtatgggccaaatcagttccctgagaaacttattcccaaattcattcttttggccatgagaggtctgcctcttccaattcatggagatggttccaatgtcaggagctacctatattgtgaggatgtggctgaagcttttgaggttgttcttcacaaaggggaggttggacatgtgtataatattggtactgtgaaggagaggagggtgattgatgtggccaaagacatttgcaggctctttggcttggatactgagaaagtaatcaggtttgttgagaacaggcccttcaatgaccagaggtacttcttggatgatcagaagcttaagagactgggatgggcagagcgcacaccatgggaagagggcttgaagaagacaatcgagtggtacaccaccaatcctgattactggggagatgtcactggtgctttgctccctcacccaaggatgttgatgattcctggagttgaaaggcataactggactgaggatatcaaatctctgacttcttcaccagctgaagctagcacaacagctcctgcaaccagtgccaaaaggaccactgctgcccctcaaaagcctttgtacaagttcttaatctatggcaggactggatggattggtggcctccttgggaagatttgtgacaagcaagggataccatatgaatatgggaaaggacgcttggaggagcgctctcagctgttggaggacattagaaatgtgaagccaactcaagtttttaatgctgccggagtcactgggagaccaaatgttgattggtgtgagacccataaacaggacaccatccgcaccaatgttgtaggcatattgaatcttgctgatgtctgtcgcgagcaaggtctgctaatgattaattatgctacaggttgtatatttgagtatgatgccaagcacccggaaaggtctggtattggctttaaagaggaagacacacccaactttacgggttccttttattccaaaacaaaagcaatggtggaagagctgttgaaggagtatgataatgtctgtactcttagggtcaggatgcctatatcatcagatctaaacaatcctcgtaacttcatcacaaagatagctcgttacgacaaggtggtgaacattcccaacagcatgacaattttggatgagcttctgcccatctccattgagatggcaaaacgggactgcaggggcatatggaacttcaccaaccctggcgttgtcagccacaatgagattctggagatgtacaagaaatacatcaatcctgattttaagtggaccaacttcacactcgaagagcaatccaaggtcatagtcgcacctagaagcaacaatgagatggatgcgtcgaaattgaaggccgagttctctcaactgatgtccatcaaggattctttgatcaaatatgtctttgagcctaacaggaaggttccagctaattgaggatttaggataagaagggcatcgaggtattagttactattaaacattaaattagctataatgtttgtcaatttttttatgcatcgtattttaacagaacacgtagatgtccttatgttctatatagtggatgatgtgttgagatgtggttatggacaacacaataagtcgttctgttgtgcattttaattatttgttgcaatgtgctttcttttctttc

SEQ ID NO: 86762 - DNA, 2605 bp, Zea Mays
agcccgggcaccgcgtccgcgactccgcgtctccgcctgcaactgcaaagagtatagaaggcacgcggcgaagcggccaggagttcctcctcgccccgcgttgagttgccagcacggcccctccctctcgttctcctcgactcctccccgtcgcggcagccagccagcaggcatcgtgatcgtctgccctggttcccgccctcgctccatcccccggcacccccgcacgggacgcgcgtgtggacgttcttcgcctccgcgacaggcttgcgccccggctcggctcgggtctgcctccactgcggccttcctggatctcggccgccgctcctccatattataacatatcacagaactatcagacaaggatggcgacttacgagcccaagaacattctcatcaccggtgctgctggttttattgcatcgcatgtcaccaactgtctggttaggaactacccgcactacaagattgttgtcctcgacaagctcgattactgctccagcctaaagaacctcaacccctcacgggcttcaccaaatttgaagtttgtcaagggtgacattgcaagtgctgatctggtgaaccaccttctggtcacagagtcgattgacaccatcatgcactttgctgctcagactcatgtagataattcatttggcaattcatttgagttcacaaaaaacaatatatatggtacccacgtccttcttgaggcttgcaaggtcactggccagatcaggaggtttattcatgtcagtactgatgaggtctatggagaaactgatgaagatgctgtggttggtaatcatgaggcctcacagctgcttccaacaaatccgtattcagctacaaaagctggggctgaaatgcttgtgatggcatatggaagatcttatggtcttcctgtgataaccactcggggcaacaacgtgtatgggccaaatcagttccctgagaaacttattcccaaattcattcttttggccatgagaggtctgcctcttccaattcatggagatggttccaatgtcaggagctacctatattgtgaggatgtggctgaagcttttgaggttgttcttcacaaaggggaggttggacatgtgtataatattggtactgtgaaggagaggagggtgattgatgtggccaaagacatttgcaggctctttggcttggatactgagaaagtaatcaggtttgttgagaacaggcccttcaatgaccagaggtacttcttggatgatcagaagcttaagagactgggatgggcagagcgcacaccatgggaagagggcttgaagaagacaatcgagtggtacaccaccaatcctgattactggggagatgtcactggtgctttgctccctcacccaaggatgttgatgattcctggagttgaaaggcataactggactgaggatatcaaatctctgacttcttcaccagctgaagctagcacaacagctcctgcaaccagtgccaaaaggaccactgctgcccctcaaaagcctttgtacaagttcttaatctatggcaggactggatggattggtggcctccttgggaagatttgtgacaagcaagggataccatatgaatatgggaaaggacgcttggaggagcgctctcagctgttggaggacattagaaatgtgaagccaactcaagtttttaatgctgccggagtcactgggagaccaaatgttgattggtgtgagacccataaacaggacaccatccgcaccaatgttgtaggcatattgaatcttgctgatgtctgtcgcgagcaaggtctgctaatgattaattatgctacaggttgtatatttgagtatgatgccaagcacccggaaaggtctggtattggctttaaagaggaagacacacccaactttacgggttccttttattccaaaacaaaagcaatggtggaagagctgttgaaggagtatgataatgtctgtactcttagggtcaggatgcctatatcatcagatctaaacaatcctcgtaacttcatcacaaagatagctcgttacgacaaggtggtgaacattcccaacagcatgacaattttggatgagcttctgcccatctccattgagatggcaaaacgggactgcaggggcatatggaacttcaccaaccctggcgttgtcagccacaatgagattctggagatgtacaagaaatacatcaatcctgattttaagtggaccaacttcacactcgaagagcaatccaaggtcatagtcgcacctagaagcaacaatgagatggatgcgtcgaaattgaaggccgagttctctcaactgatgtccatcaaggattctttgatcaaatatgtctttgagcctaacaggaaggttccagctaattgaggatttaggataagaagggcatcgagcaggttgctggattgttgttggggatattgttcatccagatcccactgaagatagccagcgcccagcgtagccacatgttcaatcatcatccccgtcgttgatatggttctcagttgctgaattgtttgcttaaggcatgtttgtttgagtcctaccatttggaattttgtctcaaaatctgggttttgact

SEQ ID NO: 86763 - DNA, 2604 bp, Zea Mays
agcccgggcaccgcgtccgcgactccgcgtctccgcctgcaactgcaaagagtatagaaggcacgcggcgaagcggccaggagttcctcctcgccccgcgttgagttgccagcacggcccctccctctcgttctcctcgactcctccccgtcgcggcagccagccagcaggcatcgtgatcgtctgccctggttcccgccctcgctccatcccccggcacccccgcacgggacgcgcgtgtggacgttcttcgcctccgcgacaggcttgcgccccggctcggctcgggtctgcctccactgcggccttcctggatctcggccgccgctcctccatattataacatatcacagaactatcagacaaggatggcgacttacgagcccaagaacattctcatcaccggtgctgctggttttattgcatcgcatgtcaccaactgtctggttaggaactacccgcactacaagattgttgtcctcgacaagctcgattactgctccagcctaaagaacctcaacccctcacgggcttcaccaaatttgaagtttgtcaagggtgacattgcaagtgctgatctggtgaaccaccttctggtcacagagtcgattgacaccatcatgcactttgctgctcagactcatgtagataattcatttggcaattcatttgagttcacaaaaaacaatatatatggtacccacgtccttcttgaggcttgcaaggtcactggccagatcaggaggtttattcatgtcagtactgatgaggtctatggagaaactgatgaagatgctgtggttggtaatcatgaggcctcacagctgcttccaacaaatccgtattcagctacaaaagctggggctgaaatgcttgtgatggcatatggaagatcttatggtcttcctgtgataaccactcggggcaacaacgtgtatgggccaaatcagttccctgagaaacttattcccaaattcattcttttggccatgagaggtctgcctcttccaattcatggagatggttccaatgtcaggagctacctatattgtgaggatgtggctgaagcttttgaggttgttcttcacaaaggggaggttggacatgtgtataatattggtactgtgaaggagaggagggtgattgatgtggccaaagacatttgcaggctctttggcttggatactgagaaagtaatcaggtttgttgagaacaggcccttcaatgaccagaggtacttcttggatgatcagaagcttaagagactgggatgggcagagcgcacaccatgggaagagggcttgaagaagacaatcgagtggtacaccaccaatcctgattactggggagatgtcactggtgctttgctccctcacccaaggatgttgatgattcctggagttgaaaggcataactggactgaggatatcaaatctctgacttcttcaccagctgaagctagcacaacagctcctgcaaccagtgccaaaaggaccactgctgcccctcaaaagcctttgtacaagttcttaatctatggcaggactggatggattggtggcctccttgggaagatttgtgacaagcaagggataccatatgaatatgggaaaggacgcttggaggagcgctctcagctgttggaggacattagaaatgtgaagccaactcaagtttttaatgctgccggagtcactgggagaccaaatgttgattggtgtgagacccataaacaggacaccatccgcaccaatgttgtaggcatattgaatcttgctgatgtctgtcgcgagcaaggtctgctaatgattaattatgctacaggttgtatatttgagtatgatgccaagcacccggaaaggtctggtattggctttaaagaggaagacacacccaactttacgggttccttttattccaaaacaaaagcaatggtggaagagctgttgaaggagtatgataatgtctgtactcttagggtcaggatgcctatatcatcagatctaaacaatcctcgtaacttcatcacaaagatagctcgttacgacaaggtggtgaacattcccaacagcatgacaattttggatgagcttctgcccatctccattgagatggcaaaacgggactgcaggggcatatggaacttcaccaaccctggcgttgtcagccacaatgagattctggagatgtacaagaaatacatcaatcctgattttaagtggaccaacttcacactcgaagagcaatccaaggtcatagtcgcacctagaagcaacaatgagatggatgcgtcgaaattgaaggccgagttctctcaactgatgtccatcaaggattctttgatcaaatatgtctttgagcctaacaggaaggttccagctaattgaggatttaggataagaagggcatcgaggttgctggattgttgttggggatattgttcatccagatcccactgaagatagccagcgcccagcgtagccacatgttcaatcatcatccccgtcgttgatatggttctcagttgctgaattgtttgcttaaggcatgtttgtttgagtcctaccatttggaattttgtctcaaaatctgggttttgacttt

SEQ ID NO: 86764 - DNA, 603 bp, Zea Mays
atggcatcggtgtcgctcgcgctcctcccagccacatcggcgcatcgtacaagaagagcaagctggcgagaccacgatagggccctagaacgttgggaggaggccgacgcggtgcgcagttggttatctgccatcgtggagcgtaatcgcgccctgcgacgccgaagaggctccacatccttctgcctcccccgcggtggcttggtcggcaccgctggctccaccaaagagcgtcgtggccgtcgcgaagaagccaacgtgttctgtgcgcttggagtcggagcaaaaatggaggaaccagcggttgatccgggcatcacgttcttctgcctcgccacaaggccaagcaaaagaggtggaatagggaatgatgatatggcggatttctccaaggtgcgaagaatattcttcttctactttctattgttatttggaactattgttaccacttttgtttgcgattactgctttgcccgagaattgcattcgcaggcaatgtacatgcatgttgtttccccttttactgaaaactatatttttatgtatggatgggtgcgcgatatggaatttaagcttatacctattttagatctgatcgactag

SEQ ID NO: 86765 - DNA, 574 bp, Zea Mays
cttaacattgtttcttgggtcaagcaatgaataaactactacccactaaaatggtggatctactttcttgggacactttggctacaatccgtaacaataagagatcatcagtcccaaaactagcgagttgcagttgacttcaactgcttctacatggtgatgctcgctcaccttgcatttggatttacagcccgctaaattgagctggtacctgtttttctcacccgattgatagcttgtagagggtgttgtctttttgccttattttttaatatgttttacttgtgtagatcaagaaagctaaaaccatatgtgaatatttagttgcatatgagagcatagacctagcgacttcaaagtaatggaaatttaaattaaaagaattatggattagataaaaagaaagacataagtgacaaggtcactatgaaccaatcacttgtatgtggcatctgttcaattggaacaaataagctttactattacttgctcaaggctcatgggacacaactttttaccatcaattgtggctgaaggatgtggcccttctcattttgcggataccaaagattgt

SEQ ID NO: 86766 - DNA, 1013 bp, Zea Mays
atcaacctaaagtcctaaagaggcaagccagagaaagtatgtagccgaacctccgcccgcccgcgacccaaaagccgaaagcccgaaaccagaggcgggtagggttctagctgcaggcgacggccatggccgcctccgccgccgccccggcgctgcttcgacgcctcttctgcagctctattccagcctcctcctccgtactgcgcgctaccttttgctcctccgccggcttcggctcgtcttctccgtcctccatattcggcgacgccaccgaggtcgccaacgtgccaccgctcaccacgcccaacctcttcgtcagtggcctttcaaggttaacgacagatgagaagctccagggtgcatttgctcctttcgggaggctccttgaagcaaaagtggtgacggatagagtttctgggaggtcaaagggtttcggtttcgtgagatatgccaccatagaagaggccgagagagcgcggcaggagatgaacgccaagttcctggatggatgggtcatcttcgttgaccctgccaagccaaggcagccaaagcccgctcctcagcaggacactggttcatcgcatgctggcttcacgacgaacaagactgtaggatggtgcggctaggctcattgatctgtcgcgatatttcacggcacaaaacttggattgcaggggtggatctaggggtgttagtcacccggataaaatttataaattctttagaaaaacacagttaaagttcaagaaaatttgtatcatgtagcaaacctgaccttgctacccgataatatttttggttagattcgccatttattggatggtgggcagccgaaccgagagttcactttggcatggcatggccgggcaatgcagatagctgggacacagctctgctatgtttggcctcgttgtttttttttcattcggagatagcgcatgatgaccgaaacgttactaactgcaaacttcgtgcccatagtaaacgaccaggcataaaaatggatcataatg

SEQ ID NO: 86767 - DNA, 1451 bp, Zea Mays
atcaacctaaagtcctaaagaggcaagccagagaaagtatgtagccgaacctccgcccgcccgcgacccaaaagccgaaagcccgaaaccagaggcgggtagggttctagctgcaggcgacggccatggccgcctccgccgccgccccggcgctgcttcgacgcctcttctgcagctctattccagcctcctcctccgtactgcgcgctaccttttgctcctccgccggcttcggctcgtcttctccgtcctccatattcggcgacgccaccgaggtcgccaacgtgccaccgctcaccacgcccaacctcttcgtcagtggtaacgtctctccgcttcgccccgtcccaccaaactcgtcgcactaatacaaaacaggtgtgtgcgtgaatttaaagctgcgggcacttggataccttaatgctatgtttgtgagcaatccatttggggaactagggataaccagtaagctttatcgatgaagcacagcatttaaacctgttacagactcctagtttgcatcccatcctgcagctcttgtgccgtcaaatcctattgcacctgtgcgttttgcttgattttctttttaccagtgcataaaaatggccgtgttccatgtccatcggttgtagtttgccgctatgctcagtaataaacacttctctcagtaagaagcagctcccagttcattttcacctgtaggttttccataaaaataaactgctttgagggtcctgatttacattaacttgggcgcaggcctttcaaggttaacgacagatgagaagctccagggtgcatttgctcctttcgggaggctccttgaagcaaaagtggtgacggatagagtttctgggaggtcaaagggtttcggtttcgtgagatatgccaccatagaagaggccgagagagcgcggcaggagatgaacgccaagttcctggatggatgggtcatcttcgttgaccctgccaagccaaggcagccaaagcccgctcctcagcaggacactggttcatcgcatgctggcttcacgacgaacaagactgtaggatggtgcggctaggctcattgatctgtcgcgatatttcacggcacaaaacttggattgcaggggtggatctaggggtgttagtcacccggataaaatttataaattctttagaaaaacacagttaaagttcaagaaaatttgtatcatgtagcaaacctgaccttgctacccgataatatttttggttagattcgccatttattggatggtgggcagccgaaccgagagttcactttggcatggcatggccgggcaatgcagatagctgggacacagctctgctatgtttggcctcgttgtttttttttcattcggagatagcgcatgatgaccgaaacgttactaactgcaaacttcgtgcccatagtaaacgaccaggcataaaaatggatcataatg

SEQ ID NO: 86768 - DNA, 1070 bp, Zea Mays
atcaacctaaagtcctaaagaggcaagccagagaaagtatgtagccgaacctccgcccgcccgcgacccaaaagccgaaagcccgaaaccagaggcgggtagggttctagctgcaggcgacggccatggccgcctccgccgccgccccggcgctgcttcgacgcctcttctgcagctctattccagcctcctcctccgtactgcgcgctaccttttgctcctccgccggcttcggctcgtcttctccgtcctccatattcggcgacgccaccgaggtcgccaacgtgccaccgctcaccacgcccaacctcttcgtcagtggtaacgtctctccgcttcgccccgtcccaccaaactcgtcgcactaatacaaaacaggcctttcaaggttaacgacagatgagaagctccagggtgcatttgctcctttcgggaggctccttgaagcaaaagtggtgacggatagagtttctgggaggtcaaagggtttcggtttcgtgagatatgccaccatagaagaggccgagagagcgcggcaggagatgaacgccaagttcctggatggatgggtcatcttcgttgaccctgccaagccaaggcagccaaagcccgctcctcagcaggacactggttcatcgcatgctggcttcacgacgaacaagactgtaggatggtgcggctaggctcattgatctgtcgcgatatttcacggcacaaaacttggattgcaggggtggatctaggggtgttagtcacccggataaaatttataaattctttagaaaaacacagttaaagttcaagaaaatttgtatcatgtagcaaacctgaccttgctacccgataatatttttggttagattcgccatttattggatggtgggcagccgaaccgagagttcactttggcatggcatggccgggcaatgcagatagctgggacacagctctgctatgtttggcctcgttgtttttttttcattcggagatagcgcatgatgaccgaaacgttactaactgcaaacttcgtgcccatagtaaacgaccaggcataaaaatggatcataatg

SEQ ID NO: 86769 - DNA, 648 bp, Zea Mays
atggaagggcgccagggattgcctccgcggcagcccccaccattctcgcccctgttcgctctccgccatcctcgcccacacccgccatccacagaggcgacaccatgcccccgctcctctcccctccgcgccatcctcgcccgcgcctgctcgcacaccccaccatccttgccctcctacgtgcaggtcctcggcgccccttcccctgcccctgtcgtccccgcatatttggatccgaggatcgctcagattgccttgcctcaccagggccccaccgcggcggtcagggagcatggtgggtgggagagacgggtaggagtggaggaggaggtgaagctcaacatcgacaacatgttcgcgacgctcgagtccctcaagaagaagggcaacaagggcaggctgttcaagatagacgaggttgcacagttgtttgaggaggcaagggaggttctggagcaggagtgtggcgcttctcatcctaatactcttggtgtgtacaacaaccttgctgcaatctatgatgccatgggaagatacattgagaaacagagtctgaaagctacatttgcttctgcactagctgatccaacagtagacctaaatatgcaaatgtgtggtaataagcgaataaagttgcagctaatataa

SEQ ID NO: 86770 - DNA, 1248 bp, Zea Mays
cagcatcatatcttcctccctcgcctattccccttccccgcgtgccgcgtcaaacaaatctaggcttccaagcgagcgaaagccttcctccgccagccgatctaccaacatcctctccgccgattggaggcacctgcgaagatgccgcagcggcactcaaagaacaacaacgacctcgccttcttcacgtacgaggagaagcggaagctcgggtacggcacgcagcgggagcgcctggggaaggactccatcaagcccttcgacgcctgctgcctctgcctcaagccgctcatcgacccgctctgctgccccaagggccataccttctgcaaggagtgcatccttgagtgcctcctcgcccagaagaaggacatcaagcgtaagctagcagctcacgaggcccagaagaagcaagagaaggaagaggaggaggaaaagctaattctgcagaaggctaaggagttggatgcctttgatcagcagaatcatggggctgttccccagtaccatgatcgcagtggttcccaaggcaagaatgggtttcatggagcgaacagtgtgaaggtcacttcttttgaagaggaagccctccgtaacatgaaggcattctggcttccttcagctactcctgaagctacggtcaaggtagatgcaccctccgccgacactgtctgccctgaggggcaggagaagctcaagttgaaatcgctcttccctatctcatttatggaggaaactgctgatccgaagaggaagaaggcaatggaaaagagctatatgtgccctagttgcaaatccactctcacaaatacaatgtccctcgtggcggtcagcgcctgtggccacgtcttctgcaagaagtgctctgacaagtttctagtaaaggataaagtttgcttagagtgcagcaaatcattcaaggagaggaatctggttccattagagaaaggaggaactgggtttgcggcacatgatgaacgcttggaggcaagggatttcaagcatttgggcagcggttctgggttaggactagtgaagcctgcaccaaaagcttactagccttgaatacttgtagccgcttttatatatcgtttatcatggtgtcatgaaattatgtataacctggaaattttgttttgtggcatcaaaatcgctctattcaggacagttctccagtctttaacgatttatctgatatgcatgtttcttttcattctggcaaatttgttaagctggagctgttgtact

SEQ ID NO: 86771 - DNA, 5083 bp, Zea Mays
acatcgcgggctccctactccgctttccccaatccacgcccttccgaagagcggcgaatccgccccagaacctcgcgatttccctcaaaccagttctcggatcagagcgtcgtgggtgtcgccgggggcatggcgcagacgccgaaccccagtaggaggtcgtgggtcggcccggcgccgatgccattcctcacgccgcggccggagcggcggcaccttgagatgcggtgggcggacggagtgtcccaaagcgctgctcgccgtagcggcgtcggcgccgttgccagggatggatgcgagagggatcaggaggtgaacgttcaggtcatgctgcggtgcaggccactcagtgaggaggagcagagagtgaatgcgcagagcgctatctcttgtaatgaatcaaagagggaggtcacagttctgcacagcctcttcaagcaagcagacaagacatttaccttcgacaaggtatttggaccacaatctcagcaaaggtcgatatataaccatgccgttgcaccattagtgactgaagtccttgaaggctataactgcactgtcttcgtgtttgggcagactggaaccggaaagacatataccatggagggagagatgagacagaaggttagtgaactaccggatactgccggtgtcattcctagagcagtgtgccatatctttgaaatacttacagcacggaaggctgattatagcatgaaggtaaccttcttagagctgtataatgaagatataacagacctattgtctttagaggaccaaagcagattccctgaaggtagacaaaaaaggcctataactcttatggaagatggcaaaggcggtgcggtaataagaggtcttgaagagattgttgtctatagtcctagcgacatatacagccttttggaacatgggtcagctaggagacgcactgctgacactgcactaaataagcaaagcagccgatcacatgctgttttttctataaacatccaagtcaaagaaacaacagtaggaaatgaggaactcattaagtatgggaggttaaaccttgtagacttggcaggatcagaaaatattgctcgatcaggggcaagagagggtagagcaagagaaactggagaaatgaataagagcctactaactctgggacgtgtcatcaatgcacttgtggagcattcagttcatgtgccatacagggatagtaagctcaccagactgctaagagaatcattaggaggcaaagccaaaacatgcatcatagcaacggtgtctccatctgcccattccctggaagaaacgctggtcacacttgattatgctgctcgtgctaaaagcataagaaacaagccagaggcaaataaaaaaacatgcaaaactgttgtgctcaaggagctctaccaagaaatggaaagaatgaaacaagatgtcaaagctgcaagggaaaagaatggaatctacatctctcacgaaaggtttgcccaagacgaaacaaaaagaaagacaatgaaggaaaaaatagaacatttggagctcagtcttgaaaagcagaacaaagaagttcaaaaattcaaagccttgtacctagcagaacaggaatgccactgggactttgaaagtcagaacaacgatttgaaggtaaatcttgaaagcttgaagggcaagttcatagatcttgaagaagctcattgcagagctcacatgtccctgagggagaaggacttcattatatcaaatttacttcattctgagcacttaattattgaacgtgcaaaggatatgcggaacaccttggagaatgcaaccgaagatatcagtgtacttctgaataaacaagaaaggcaatcaaaaactgaagctgaaaacaaaaggttgctatctggttttcgggctgaattggatcgtagtcttggagttctgcatgctacagtcgttggatcagtatgtgaacagagtaaaattttggagtctataaatgaacaaacaaagttgtactttttagccagaaatgagtttctagaagtgatgttttcagaagctgaacaagttctaaatgatgttctgaaatctacttcagatctcaaggaactattagccttttctgcagaactacaaaacactggattgagaaggaatcttgcttctgttcaagcaatgtcaaagcaatcaattgatttctttgaagatataaggatacatgtgtctcagctcatgacacttatggagcagaatcaaatggaaaggtcctccaagcttgttaaatttgagaatgagtttaaggaaacttgtgttaaagacgagcaagctgctctgaataagattgctgcaattttatcagagttgaccgccaagaaaactacaatggtttcatcatatatgggacagcttaatgagaggtatagtgaagatcagaagaacctgaaactggagatatccaacctacaacaggtttcagataatggcaaaaatgagtctgtggcttgtgttggagtgatagagagtcagttccaggaggatatgtcatcacatactaaatcaaatgatcaaatggaaggcatcttaaaacaatactcggagaaaggtagtcattttgtatcttactggtcacatatacaatcatctttgcatgatcttgttaagagctcaatcatggagactgacgattttattgaggaaagcagaaacaaaaatgaaaatatattccaggaagggcttctgttttcttcacagaatgatgcagagtttcatggcattacatctgacgtgctgactgtttcaaagaattccctcttactggatcatgaaacttgcaagatggtagagactaacactaccattttctcggatcatctggaactgctgaatgaaaagcacagcgaaggcgtggaatctacaagaaacatgatgagtgattgtcttgaaaaggattacatggctaatagtccggttcgaaaccatccacgggaactactgaccagtgcaaacagcttggaatcaattgacaaactaagagcttctctgccagatctggtggcaaagttcaggctcgagaacaagttgaatgaaatggataaggggaagcaatactcggatcaaaggacacgtgtacatggtaagttcaaaaccataataagtgctattgagcgcagagttctggaggagcaacttggctgggccagactggagcggcaaaagatcctcgctttgtctgcggaggctgacgatgcaatctggcatctggccacgctcgcacggaggaggatgcaagaaagggacgaggccaggaaccaggcgaggatgctgctcgcggacctccaggcaaggaacgcccggatgaaggcggcggttcccggagcatcgtgctccagagtcgcgcggcctgacgcgttcgccgccaccggctacgagcacatccaggcccaggcccaggcccaggcccaggcactcgctcctgccgcgttcgggccgcgggggcagcgtgcccgtgcgggaactggctactactgcgttgcgtcgtccagcggcttcggccacaggagcatcgactcgtctctggacacctgcgccgttcagccgtcgctgcttggcttcgcttcctcgagctcgagccaggagcatttcgaccctgacatgttcttggtggacgtcgcagaatcgccgcaggatgtcgttccggttccggccaccgcagactcaagccaggggagaagctccggctccggctccggcacttatggtcatagtttggcgagcaaaaggccttgcagtgaaaggaagtaataaatcatcagctcaagctgcagcacgtcctgccacgggccatggccatgctgcctaaatcctaggccggaaaaatcaaccaattagttaagaaaggaaactaacaaacaactatcaattagttaaaaaagggaactaattggaaaaaaacaaataaacctagctgcattatgcaacaggcttactagcattgaataattgtggccgttgttgtatatcgcttatcatggtgtcatgaaattatgtaacctggaaattttgtttttttggcataaaaatcactgtattcagaacaccagtgctctgtccaagacaaagaagcaagagtgctgaaatgagaggataatgagcatgctgacttggctgccttggcttccacccacacactcgataggggaaaagcgagcccttccacggttccaccacccactcgatagtggaaaagtgagctcgagcgtgtccagcagctatggataactgacgatgggggtaacaagcttcacagaactctccctcgagctcagcgctaccctgaacaactgaagccgaaatggcgagcctgcagaacctggtctgctccgtatccaaacaactggctgtgccaaattgcgcggcgactaccaaactgaacagggctcctccctcagctgtggcggcgagctcgatccaaggatctttggacgacaccaaggtcacgaagagacggctagctttgcttggtgctggagcgttagccactggcctactgaggacaagctctgctgcgttcgctgaagaggtgccgaagaattacaagtcgtacgtggacgcgaaagacgggtactcgtacctttatccagctgaatggagggatttcgacttcttgggtcatgattctgcgttcaaagaccgcaacctggcccttcagtgtgttcgtgtggggttcattcctaccgagaaaacagacatccgcgacctaggaccgatggatgaggccatcttcaacctggtaaacaacgtctacgctgccccgaaccaaataccgtcgatttacgacatgcaagagcgcaccgtggacggcaagaactactggacgtttgagtacgatctggaggctccgggctacagcgtttctgcgtttgcgacggtcgccattggaaacgttcggcttaccgcctcactgatcatgagctggacttcccgcggatggcgctttctgcagaacacgttgatggacgtgccctgctccttcgacatatagatcctgttcgtgcggtcctttgtttcttttttttcttttctcttttttctccacaaccttgcg

SEQ ID NO: 86772 - DNA, 5098 bp, Zea Mays
acatcgcgggctccctactccgctttccccaatccacgcccttccgaagagcggcgaatccgccccagaacctcgcgatttccctcaaaccagttctcggatcagagcgtcgtgggtgtcgccgggggcatggcgcagacgccgaaccccagtaggaggtcgtgggtcggcccggcgccgatgccattcctcacgccgcggccggagcggcggcaccttgagatgcggtgggcggacggagtgtcccaaagcgctgctcgccgtagcggcgtcggcgccgttgccagggatggatgcgagagggatcaggaggtgaacgttcaggtcatgctgcggtgcaggccactcagtgaggaggagcagagagtgaatgcgcagagcgctatctcttgtaatgaatcaaagagggaggtcacagttctgcacagcctcttcaagcaagcagacaagacatttaccttcgacaaggtatttggaccacaatctcagcaaaggtcgatatataaccatgccgttgcaccattagtgactgaagtccttgaaggctataactgcactgtcttcgtgtttgggcagactggaaccggaaagacatataccatggagggagagatgagacagaaggttagtgaactaccggatactgccggtgtcattcctagagcagtgtgccatatctttgaaatacttacagcacggaaggctgattatagcatgaaggtaaccttcttagagctgtataatgaagatataacagacctattgtctttagaggaccaaagcagattccctgaaggtagacaaaaaaggcctataactcttatggaagatggcaaaggcggtgcggtaataagaggtcttgaagagattgttgtctatagtcctagcgacatatacagccttttggaacatgggtcagctaggagacgcactgctgacactgcactaaataagcaaagcagccgatcacatgctgttttttctataaacatccaagtcaaagaaacaacagtaggaaatgaggaactcattaagtatgggaggttaaaccttgtagacttggcaggatcagaaaatattgctcgatcaggggcaagagagggtagagcaagagaaactggagaaatgaataagagcctactaactctgggacgtgtcatcaatgcacttgtggagcattcagttcatgtgccatacagggatagtaagctcaccagactgctaagagaatcattaggaggcaaagccaaaacatgcatcatagcaacggtgtctccatctgcccattccctggaagaaacgctggtcacacttgattatgctgctcgtgctaaaagcataagaaacaagccagaggcaaataaaaaaacatgcaaaactgttgtgctcaaggagctctaccaagaaatggaaagaatgaaacaagatgtcaaagctgcaagggaaaagaatggaatctacatctctcacgaaaggtttgcccaagacgaaacaaaaagaaagacaatgaaggaaaaaatagaacatttggagctcagtcttgaaaagcagaacaaagtaaatcttgaaagcttgaagggcaagttcatagatcttgaagaagctcattgcagagctcacatgtccctgagggagaaggacttcattatatcaaatttacttcattctgagcacttaattattgaacgtgcaaaggatatgcggaacaccttggagaatgcaaccgaagatatcagtgtacttctgaataaacaagaaaggcaatcaaaaactgaagctgaaaacaaaaggttgctatctggttttcgggctgaattggatcgtagtcttggagttctgcatgctacagtcgttggatcagtatgtgaacagagtaaaattttggagtctataaatgaacaaacaaagttgtactttttagccagaaatgagtttctagaagtgatgttttcagaagctgaacaagttctaaatgatgttctgaaatctacttcagatctcaaggaactattagccttttctgcagaactacaaaacactggattgagaaggaatcttgcttctgttcaagcaatgtcaaagcaatcaattgatttctttgaagatataaggatacatgtgtctcagctcatgacacttatggagcagaatcaaatggaaaggtcctccaagcttgttaaatttgagaatgagtttaaggaaacttgtgttaaagacgagcaagctgctctgaataagattgctgcaattttatcagagttgaccgccaagaaaactacaatggtttcatcatatatgggacagcttaatgagaggtatagtgaagatcagaagaacctgaaactggagatatccaacctacaacaggtttcagataatggcaaaaatgagtctgtggcttgtgttggagtgatagagagtcagttccaggaggatatgtcatcacatactaaatcaaatgatcaaatggaaggcatcttaaaacaatactcggagaaaggtagtcattttgtatcttactggtcacatatacaatcatctttgcatgatcttgttaagagctcaatcatggagactgacgattttattgaggaaagcagaaacaaaaatgaaaatatattccaggaagggcttctgttttcttcacagaatgatgcagagtttcatggcattacatctgacgtgctgactgtttcaaagaattccctcttactggatcatgaaacttgcaagatggtagagactaacactaccattttctcggatcatctggaactgctgaatgaaaagcacagcgaaggcgtggaatctacaagaaacatgatgagtgattgtcttgaaaaggattacatggctaatagtccggttcgaaaccatccacgggaactactgaccagtgcaaacagcttggaatcaattgacaaactaagagcttctctgccagatctggtggcaaagttcaggctcgagaacaagttgaatgaaatggataaggggaagcaatactcggatcaaaggacacgtgtacatggtaagttcaaaaccataataagtgctattgagcgcagagttctggaggagcaacttggctgggccagactggagcggcaaaagatcctcgctttgtctgcggaggctgacgatgcaatctggcatctggccacgctcgcacggaggaggatgcaagaaagggacgaggccaggaaccaggcgaggatgctgctcgcggacctccaggcaaggaacgcccggatgaaggcggcggttcccggagcatcgtgctccagagtcgcgcggcctgacgcgttcgccgccaccggctacgagcacatccaggcccaggcccaggcccaggcccaggcactcgctcctgccgcgttcgggccgcgggggcagcgtgcccgtgcgggaactggctactactgcgttgcgtcgtccagcggcttcggccacaggagcatcgactcgtctctggacacctgcgccgttcagccgtcgctgcttggcttcgcttcctcgagctcgagccaggagcatttcgaccctgacatgttcttggtggacgtcgcagaatcgccgcaggatgtcgttccggttccggccaccgcagactcaagccaggggagaagctccggctccggctccggcacttatggtcatagtttggcgagcaaaaggccttgcagtgaaaggaagtaataaatcatcagctcaagctgcagcacgtcctgccacgggccatggccatgctgcctaaatcctaggccggaaaaatcaaccaattagttaagaaaggaaactaacaaacaactatcaattagttaaaaaagggaactaattggaaaaaaacaaataaacctagctgcattatgcaacaggcttactagcattgaataattgtggccgttgttgtatatcgcttatcatggtgtcatgaaattatgtaacctggaaattttgtttttttggcataaaaatcactgtattcagaacaccagtgctctgtccaagacaaagaagcaagagtgctgaaatgagaggataatgagcatgctgacttggctgccttggcttccacccacacactcgataggggaaaagcgagcccttccacggttccaccacccactcgatagtggaaaagtgagctcgagcgtgtccagcagctatggataactgacgatgggggtaacaagcttcacagaactctccctcgagctcagcgctaccctgaacaactgaagccgaaatggcgagcctgcagaacctggtctgctccgtatccaaacaactggctgtgccaaattgcgcggcgactaccaaactgaacagggctcctccctcagctgtggcggcgagctcgatccaaggatctttggacgacaccagtaacccccccttttgttgttgttgttgttttttttccgttcatgcatctagtggtcgacagaatcctggttcataacatctctccgcttgtatagaggtcacgaagagacggctagctttgcttggtgctggagcgttagccactggcctactgaggacaagctctgctgcgttcgctgaagaggtgccgaagaattacaagtcgtacgtggacgcgaaagacgggtactcgtacctttatccagctgaatggagggatttcgacttcttgggtcatgattctgcgttcaaagaccgcaacctggcccttcagtgtgttcgtgtggggttcattcctaccgagaaaacagacatccgcgacctaggaccgatggatgaggccatcttcaacctggtaaacaacgtctacgctgccccgaaccaaataccgtcgatttacgacatgcaagagcgcaccgtggacggcaagaactactggacgtttgagtacgatctggaggctccgggctacagcgtttctgcgtttgcgacggtcgccattggaaacgttcggcttaccgcctcactgatcatgagctggacttcccgcggatggcgctttctgcagaacacgttgatggacgtgccctgctccttcgacatatagatcctgttcgtgcggtcctttgtttcttttttttcttttctcttttttctccacaaccttgcg

SEQ ID NO: 86773 - DNA, 399 bp, Zea Mays
atggcttcagggtcttctaggggcaagggtgcgggaaatgagagacgaaaggatggagggaagttacctccattgtgtttcgatggccctcttggtctagatttttttgaagaggtggtttttaactttccagttcaaagtaaaaaagatttcaacaaagagaataggatatttgatctagagagggaagtaagcaacagaaatgacgaggaagaaacagacaacaacaatggtggtgcttcacaggtgcaagtatgcccagatccatattgttgccacccttgtcacaacaaggatgttggtcctccaacgtctccaccgcacccacagcagacaacaacaatgggaggatactatggagaagggtccacacaatttggaatgtgggagcactactag

SEQ ID NO: 86774 - DNA, 1168 bp, Zea Mays
tcatgtttgtcatctggagccatagaacagggttcatcatgagtcatcaacttaccttcgccgacagtgaattcagcagtaagcgccgtcagaccagaaaagagattttcttgtcccgcatggagcagattctgccatggcaaaacatggtggaagtcatcgagccgttttaccccaaggctggtaatggccggcgaccttatccgctggaaaccatgctacgcattcactgcatgcagcattggtacaacctgagcgatggcgcgatggaagatgctctgtacgaaatcgcctccatgcgtctgtttgcccggttatccctggatagcgccttgccggaccgcaccaccatcatgaatttccgccacctgctggagcagcatcaactggcccgccaattgttcaagaccatcaatcgctggctggccgaagcaggcgtcatgatgactcaaggcaccttggtcgatgccaccatcattgaggcacccagctcgaccaagaacaaagagcagcaacgcgatccggagatgcatcagaccaagaaaggcaatcagtggcactttggcatgaaggcccacattggtgtcgatgccaagagtggcctgacccacagcctggtcaccaccgcggccaacgagcatgacctcaatcagctgggtaatctgctgcatggagaggagcaatttgtctcagccgatgccggctaccaaggggcgccacagcgcgaggagctggccgaggtggatgtggactggctgatcgccgagcgccccggcaaggtaagaaccttgaaacagcatccacgcaagaacaaaacggccatcaacatcgaatacatgaaagccagcatccgggccagggtggagcacccatttcgcatcatcaagcgacagttcggcttcgtgaaagccagatacaaggggttgctgaaaaacgataaccaactggcgatgttattcacgctggccaacctgtttcgggcggaccaaatgatacgtcagtgggagagatctcactaaaaactggggataacgccttaaatggcgaagaaacggtctaaataggctgattcaaggcatttacgggagaaaaaatcggctcaaacatgaagaaatgaaatgactgagtcagccgagaagaatttccccgcttattcgcaccttcccta

SEQ ID NO: 86775 - DNA, 906 bp, Zea Mays
cccgggtcgactctgcagtctgcacggcgccttatcatcacacacggaaccagattgcgggcagccatagacgaagagagaaagaaaggtcaacagggcactgcttgcctgctgcgtagtgactagtgtgcctcaaccaaaaggatccatggctcccggagacgactctaaccccgccgcctcctatatccacacggtgcagcacctgatagagaggtgcatgacgttcgggatgagcatggaggagtgcatggaggcgctggctaagcgcgccgacgtcctgcccgtcgtcacctccacagtgtggaaggagctggagaaggagaacaaggagttcttcgacaagtaccaggagtggatatcggagaagcgaagcgcaggcacctcctagcgcggtggcactgaactagctgctggctttgcttagattagccatgatgtgtattgtttggttattcttggattcgttacttaggcattgtttagttattcttggattcgttacttaggctttctctagtgctaaaatctagggagtgtttggtttatagggactaatgtttagtcccttcattttattctattttagtctataaattgccaaatatagaaactaaaatagagttctaatttctatatttggtaattttggaactaaaatagaataaaatgtagggactaaaaattagtcactagaaaccaaacacccccttagtatctaataaaatttagcatatgctaaactttagcgcttgctgtcccttggtgtccacgaggagcatgcaactaatggtaagaaagagataaagcggtattcaatgtaaaatggggttgaagactacttttggcacagtttagcatctttgatggagctaaattgctaatagatactatatataacgggcc

SEQ ID NO: 86776 - DNA, 1243 bp, Zea Mays
atacgcgttgcccgcccatctctctctctctctctcttcctgcgcccacacgcacgtttccactccgaccgggccagagccccgccgggcagtttccgttcgctgttgcgatccacctcctgcctgcacatcccctcccccgagttcgagccggagggccgaagagtagatctgcggcggcggccagaggatggccgtcaactgggagctgcggggctgctgcgaccacgaccagaggatcttcatcgccgccgtcggcgtctccaccgtcgtcatcctcctcctctggaggacgttcctgctcacgccgttcaagctcatcaccgtcttcctccacgagaccagccacgcgcttgcctgcaagctcacttgcggcgatgtagaaggcatgcaggtccatgcgaatgagggtggcgttactcaaacccggggtggcatatattggataatcttgcccgctggatatctgggttcatcattttggggaatggtcttcatacttgcatccacaaatctcctcactacaagaattgcagcgggttgtttcatacttgcattgtttattgttctttttgttgcagaaaatgtaagacttgtttgaattgtgcagtggtttcttcgctggctctgccttggattcattgtgttcattgctgttgtttgggtcatacaagaatttacatctttccatgttctgaaatatgtgatcttattcataggtgtgatgaacagcttattttcagtttacgatatttatgatgacttgatatcccgaagagttaacacaagtgatgctgaaaagtttgctgaaatctgcccttgcccctgcaatggttttgcatggggtgttatatggggattcatctcgtttatctttctctgcgcttcaatataccttggactggtcatattgtcttgagggttcgccattttgatctgacaatcgactctggttggctttttcgaagcttcgttgctcgaggttttggttcaagcttacaaggttctggtggttgtacagtatacatgtgcagggtaaacatgtacatccattataagttaatttggtggggattattcatgggattcttcgattttagtggttctatagagtaccattttacttaccattaccagttgcatttatggtctgtagcctcttcaatttatgtacctgtatatcatatattgctcatttatccatttcaaaacgtattcagagatgcaatattgtgcatcttaa

SEQ ID NO: 86777 - DNA, 1332 bp, Zea Mays
atacgcgttgcccgcccatctctctctctctctctcttcctgcgcccacacgcacgtttccactccgaccgggccagagccccgccgggcagtttccgttcgctgttgcgatccacctcctgcctgcacatcccctcccccgagttcgagccggagggccgaagagtagatctgcggcggcggccagaggatggccgtcaactgggagctgcggggctgctgcgaccacgaccagaggatcttcatcgccgccgtcggcgtctccaccgtcgtcatcctcctcctctggaggacgttcctgctcacgccgttcaagctcatcaccgtcttcctccacgagaccagccacgcgcttgcctgcaagctcacttgcggcgatgtagaaggcatgcaggtccatgcgaatgagggtggcgttactcaaacccggggtggcatatattggataatcttgcccgctggatatctgggttcatcattttggggaatggtcttcatacttgcatccacaaatctcctcactacaagaattgcagcgggttgtttcatacttgcattgtttattgttctttttgttgcagaaaatgtaagttcagtatttttatttatttatttcgcaacttgtgacttcatttgatttttccactcgtgcatactgtaatcatgatcatttaggtaagacttgtttgaattgtgcagtggtttcttcgctggctctgccttggattcattgtgttcattgctgttgtttgggtcatacaagaatttacatctttccatgttctgaaatatgtgatcttattcataggtgtgatgaacagcttattttcagtttacgatatttatgatgacttgatatcccgaagagttaacacaagtgatgctgaaaagtttgctgaaatctgcccttgcccctgcaatggttttgcatggggtgttatatggggattcatctcgtttatctttctctgcgcttcaatataccttggactggtcatattgtcttgagggttcgccattttgatctgacaatcgactctggttggctttttcgaagcttcgttgctcgaggttttggttcaagcttacaaggttctggtggttgtacagtatacatgtgcagggtaaacatgtacatccattataagttaatttggtggggattattcatgggattcttcgattttagtggttctatagagtaccattttacttaccattaccagttgcatttatggtctgtagcctcttcaatttatgtacctgtatatcatatattgctcatttatccatttcaaaacgtattcagagatgcaatattgtgcatcttaa

SEQ ID NO: 86778 - DNA, 1414 bp, Zea Mays
atacgcgttgcccgcccatctctctctctctctctcttcctgcgcccacacgcacgtttccactccgaccgggccagagccccgccgggcagtttccgttcgctgttgcgatccacctcctgcctgcacatcccctcccccgagttcgagccggagggccgaagagtagatctgcggcggcggccagaggatggccgtcaactgggagctgcggggctgctgcgaccacgaccagaggatcttcatcgccgccgtcggcgtctccaccgtcgtcatcctcctcctctggaggacgttcctgctcacgccgttcaagctcatcaccgtcttcctccacgagaccagccacgcgcttgcctgcaagctcacttgcggcgatgtagaaggcatgcaggtccatgcgaatgagggtggcgttactcaaacccggggtggcatatattggataatcttgcccgctggatatctgggttcatcattttggggaatggtcttcatacttgcatccacaaatctcctcactacaagaattgcagcgggttgtttcatacttgcattgtttattgttctttttgttgcagaaaatgtaagttcagtatttttatttatttatttcgcaacttgtgacttcatttgatttttccactcgtgcatactgtaatcatgatcatttaggtaagacttgtttgaattgtgcagtggtttcttcgctggctctgccttggtatgcatcaacatgacttagtctccatttaagcccttactctgcagcatgccagtacaccacttacgatgtcgttatccaggattcattgtgttcattgctgttgtttgggtcatacaagaatttacatctttccatgttctgaaatatgtgatcttattcataggtgtgatgaacagcttattttcagtttacgatatttatgatgacttgatatcccgaagagttaacacaagtgatgctgaaaagtttgctgaaatctgcccttgcccctgcaatggttttgcatggggtgttatatggggattcatctcgtttatctttctctgcgcttcaatataccttggactggtcatattgtcttgagggttcgccattttgatctgacaatcgactctggttggctttttcgaagcttcgttgctcgaggttttggttcaagcttacaaggttctggtggttgtacagtatacatgtgcagggtaaacatgtacatccattataagttaatttggtggggattattcatgggattcttcgattttagtggttctatagagtaccattttacttaccattaccagttgcatttatggtctgtagcctcttcaatttatgtacctgtatatcatatattgctcatttatccatttcaaaacgtattcagagatgcaatattgtgcatcttaa

SEQ ID NO: 86779 - DNA, 1219 bp, Zea Mays
atacgcgttgcccgcccatctctctctctctctctcttcctgcgcccacacgcacgtttccactccgaccgggccagagccccgccgggcagtttccgttcgctgttgcgatccacctcctgcctgcacatcccctcccccgagttcgagccggagggccgaagagtagatctgcggcggcggccagaggatggccgtcaactgggagctgcggggctgctgcgaccacgaccagaggatcttcatcgccgccgtcggcgtctccaccgtcgtcatcctcctcctctggaggacgttcctgctcacgccgttcaagctcatcaccgtcttcctccacgagaccagccacgcgcttgcctgcaagctcacttgcggcgatgtagaaggcatgcaggtccatgcgaatgagggtggcgttactcaaacccggggtggcatatattggataatcttgcccgctggatatctgggttcatcattttggggaatggtcttcatacttgcatccacaaatctcctcactacaagaattgcagcgggttgtttcatacttgcattgtttattgttctttttgttgcagaaaattggtttcttcgctggctctgccttggattcattgtgttcattgctgttgtttgggtcatacaagaatttacatctttccatgttctgaaatatgtgatcttattcataggtgtgatgaacagcttattttcagtttacgatatttatgatgacttgatatcccgaagagttaacacaagtgatgctgaaaagtttgctgaaatctgcccttgcccctgcaatggttttgcatggggtgttatatggggattcatctcgtttatctttctctgcgcttcaatataccttggactggtcatattgtcttgagggttcgccattttgatctgacaatcgactctggttggctttttcgaagcttcgttgctcgaggttttggttcaagcttacaaggttctggtggttgtacagtatacatgtgcagggtaaacatgtacatccattataagttaatttggtggggattattcatgggattcttcgattttagtggttctatagagtaccattttacttaccattaccagttgcatttatggtctgtagcctcttcaatttatgtacctgtatatcatatattgctcatttatccatttcaaaacgtattcagagatgcaatattgtgcatcttaa

SEQ ID NO: 86780 - DNA, 3173 bp, Zea Mays
cacacatacacataatacactgcagagaggaccgcgacgcgagcccaccccaggccgacaccgagcgcgagccctccagtccgtggtgctcttcgcgctccgccttcctcctcttccaccccgtcgcttccgtgccatccgcggttcggctccccacctcccattctcgccgccccatgcctccggctcgcccgtagccgcccgacgacgaccgctatggccgccgattccggcaaagggatggctgacctggagatagggctggcgtcgccgggctcggagcgggcgccgtcgccggcgtcgagcgcgggcgcctacggggagcggcccgaccagtcgccgccgcgggttgccaagcgcccaggcctcgtcatgtccttctccgggaagcggctggaccagtcgccggccgggtcgccgtcgccgtcgccgtcgtcgtcgcgcccggtgctggtcatgtcccactccagcaaccgcctcgaccagtcgcccgcgcgcccggtgctcgtcatgtcccggtccagcaaccggctggaccagtcctcaccggcgtcgtcgccggcggccgtgaagggccccgcgctggtcatgtcaggctccagcaatcgtctcgacagctcgcacccgtcgccgtcgccgacggcagcggccgccgctgcgcccttgctggtgctctccaactccggcaagcggatggaccaggccgggcggaagaagtacgtcaagcaggtgacgggccgccacaacgacacggagctccacctcgccgcgcagcgcggggacctcgaggccgtacgccagatcatcgccgagattgacgcgcagatgaccggcaccggcgaggagttcgacagcgacgtcgccgagatccgcgccgcgatagtgaacgaagccaacgagatggaggcgaccgcgctgctcatcgccgcggagaaggggtttcttgacatcgtcgtcgagctgctcaagcactccgacaaggacagcctcaccaggaagaacaagtccggattcgatgctctgcacgtcgctgcaaaggagggccacagagatatcgtgaaggtacttctggaccatgatccatcccttgggaaaacgtttggccaatcgaatgtgactcctctcataactgcggcgatcagaggccacatcgaggtggtgaacctactgctggagcgagtttctgggttggtcgagttatcaaaagcgaacggaaagaatgccctgcacttcgctgcccggcaggggcatgtggaaatcgtggaggctttgctacatgccgatacccagcttgctcggaggactgacaagaaaggccagaccgctctacacatggcagtaaaaggaactagccctgaagtcgttcaagcgcttgtgaacgccgatccggccatagtcatgctgcctgacagaaacggcaacctagctttgcacgttgcaaccagaaagaaaagatcagagattgtaaatgtgcttctgctccttccggatatgaacgtgaatgcgttgaccagggatcggaagaccgcgttcgacatagccgagggccttcccctgtcagaggagtctcaagaaatcaaggagtgcctgtcccgtgccggtgcggtcagagcaaacgatctgaaccagcctcgggacgagctgaggaaaacagtgacagagataaagaaggacgtgcatacccagctggagcaggcgaggaaaaccaacaagaacgtgtacggcatcgccaaggagctgaggaagctccacagggaaggcatcaacaacgcgacgaactcggtgaccgtcgtggcggtgctgttcgcgacggtggcgttcgcggcgatcttcacggtgcccggcggcaacgccaacgacggcgtggcggtggccgtgcacgcgacggccttcaaggtgttcttcatcttcaacgccgtcgcgctgttcacgtcgctggcggtggtggtggtccagataacgctggtccggggcgagaccaaggcggagcggcgggtggtggagatcatcaacaagctcatgtggctggcgtcggtgtgcacgacggtcgcgttcatctcgtcgtcctacatcgtggtggggcgccacttcaggtgggcggcgctcctggtgaccctgatcggcggggtgatcatggccggcgtgctcggcaccatgacgtactacgtggtgaagtccaagcgcacgcgcaagatcaggaagaaggtgaagtcgacgaggaggagcggctccagctcgtggcagcacaactcggagttctcggactcggagatcgaccgtatctacgccatatgaagccggcgcagtgcagctggttcctccagacagacagacccttttggcagcggcacgaaaaggtagacatggatcacgacccttgagatgctagtgggggctggttgactttgtacattccaataagctgggtgtaaaaactgccattccctttgttcgtgaatcggcgggaggcgacggttgtatactgctacagatagatttctcatcagattatatagtatggagtatactattattgtcgttgttatatatatgcagcatgtgctgtgctccttgtgcatgtccttcgtcgaactcatgagccgttcgttactcacagagacgcatccatggagaagagacagcacgtgagagcgagaggtgagaaaaaaattgccccttctgatattccgttgcttggtgctctctctctctctctgtaggacaggacaccctggggctggactgcacttggaatttggacgcatgatggagacgggaaaatgaggaagaggcatctggccaagtagattagggagatgggagcttggcgtctggctgaaaaccccatgtgtggaacttgagagtcgtcaggggatctagaaggaaactgacaccagagaggaggtgtacgtacgcatgacaccaaagcgtgaaagccgtgtgagctgaaggcactgatggcagactcagctggcttgtctactctcagtcaacgtttattgtacatgattggtctattggaaggtttttgctatcaacataattaagcaggacaaaagcctcaggtcgaataagatgataggtaggtaaaacaccacgctgtgcctgtagcaggtggtggctgcaagtttgttaccgataatggtactctctacgtactctcgctttcgttc

SEQ ID NO: 86781 - DNA, 2484 bp, Zea Mays
aggccgacaccgagcgcgagccctccagtccgtggtgctcttcgcgctccgccttcctcctcttccaccccgtcgcttccgtgccatccgcggttcggctccccacctcccattctcgccgccccatgcctccggctcgcccgtagccgcccgacgacgaccgctatggccgccgattccggcaaagggatggctgacctggagatagggctggcgtcgccgggctcggagcgggcgccgtcgccggcgtcgagcgcgggcgcctacggggagcggcccgaccagtcgccgccgcgggttgccaagcgcccaggcctcgtcatgtccttctccgggaagcggctggaccagtcgccggccgggtcgccgtcgccgtcgccgtcgtcgtcgcgcccggtgctggtcatgtcccactccagcaaccgcctcgaccagtcgcccgcgcgcccggtgctcgtcatgtcccggtccagcaaccggctggaccagtcctcaccggcgtcgtcgccggcggccgtgaagggccccgcgctggtcatgtcaggctccagcaatcgtctcgacagctcgcacccgtcgccgtcgccgacggcagcggccgccgctgcgcccttgctggtgctctccaactccggcaagcggatggaccaggccgggcggaagaagtacgtcaagcaggtgacgggccgccacaacgacacggagctccacctcgccgcgcagcgcggggacctcgaggccgtacgccagatcatcgccgagattgacgcgcagatgaccggcaccggcgaggagttcgacagcgacgtcgccgagatccgcgccgcgatagtgaacgaagccaacgagatggaggcgaccgcgctgctcatcgccgcggagaaggggtttcttgacatcgtcgtcgagctgctcaagcactccgacaaggacagcctcaccaggaagaacaagtccggattcgatgctctgcacgtcgctgcaaaggagggccacagaggtacttctggaccatgatccatcccttgggaaaacgtttggccaatcgaatgtgactcctctcataactgcggcgatcagaggccacatcgaggtggtgaacctactgctggagcgagtttctgggttggtcgagttatcaaaagcgaacggaaagaatgccctgcacttcgctgcccggcaggggcatgtggaaatcgtggaggctttgctacatgccgatacccagcttgctcggaggactgacaagaaaggccagaccgctctacacatggcagtaaaaggaactagccctgaagtcgttcaagcgcttgtgaacgccgatccggccatagtcatgctgcctgacagaaacggcaacctagctttgcacgttgcaaccagaaagaaaagatcagagattgtaaatgtgcttctgctccttccggatatgaacgtgaatgcgttgaccagggatcggaagaccgcgttcgacatagccgagggccttcccctgtcagaggagtctcaagaaatcaaggagtgcctgtcccgtgccggtgcggtcagagcaaacgatctgaaccagcctcgggacgagctgaggaaaacagtgacagagataaagaaggacgtgcatacccagctggagcaggcgaggaaaaccaacaagaacgtgtacggcatcgccaaggagctgaggaagctccacagggaaggcatcaacaacgcgacgaactcggtgaccgtcgtggcggtgctgttcgcgacggtggcgttcgcggcgatcttcacggtgcccggcggcaacgccaacgacggcgtggcggtggccgtgcacgcgacggccttcaaggtgttcttcatcttcaacgccgtcgcgctgttcacgtcgctggcggtggtggtggtccagataacgctggtccggggcgagaccaaggcggagcggcgggtggtggagatcatcaacaagctcatgtggctggcgtcggtgtgcacgacggtcgcgttcatctcgtcgtcctacatcgtggtggggcgccacttcaggtgggcggcgctcctggtgaccctgatcggcggggtgatcatggccggcgtgctcggcaccatgacgtactacgtggtgaagtccaagcgcacgcgcaagatcaggaagaaggtgaagtcgacgaggaggagcggctccagctcgtggcagcacaactcggagttctcggactcggagatcgaccgtatctacgccatatgaagccggcgcagtgcagctggttcctccagacagacagacccttttggcagcggcacgaaaaggtagacatggatcacgacccttgagatgctagtgggggctggttgactttgtacattccaataagctgggtgtaaaaactgccattccctttgttcgtgaatcggcgggaggcgacggttgtatactgctacagatagatttctcatcagattatatagtatggagtatactattattgtcgttgttat

SEQ ID NO: 86782 - DNA, 2495 bp, Zea Mays
aggccgacaccgagcgcgagccctccagtccgtggtgctcttcgcgctccgccttcctcctcttccaccccgtcgcttccgtgccatccgcggttcggctccccacctcccattctcgccgccccatgcctccggctcgcccgtagccgcccgacgacgaccgctatggccgccgattccggcaaagggatggctgacctggagatagggctggcgtcgccgggctcggagcgggcgccgtcgccggcgtcgagcgcgggcgcctacggggagcggcccgaccagtcgccgccgcgggttgccaagcgcccaggcctcgtcatgtccttctccgggaagcggctggaccagtcgccggccgggtcgccgtcgccgtcgccgtcgtcgtcgcgcccggtgctggtcatgtcccactccagcaaccgcctcgaccagtcgcccgcgcgcccggtgctcgtcatgtcccggtccagcaaccggctggaccagtcctcaccggcgtcgtcgccggcggccgtgaagggccccgcgctggtcatgtcaggctccagcaatcgtctcgacagctcgcacccgtcgccgtcgccgacggcagcggccgccgctgcgcccttgctggtgctctccaactccggcaagcggatggaccaggccgggcggaagaagtacgtcaagcaggtgacgggccgccacaacgacacggagctccacctcgccgcgcagcgcggggacctcgaggccgtacgccagatcatcgccgagattgacgcgcagatgaccggcaccggcgaggagttcgacagcgacgtcgccgagatccgcgccgcgatagtgaacgaagccaacgagatggaggcgaccgcgctgctcatcgccgcggagaaggggtttcttgacatcgtcgtcgagctgctcaagcactccgacaaggacagcctcaccaggaagaacaagtccggattcgatgctctgcacgtcgctgcaaaggagggccacagagatatcgtgaaggtacttctggaccatgatccatcccttgggaaaacgtttggccaatcgaatgtgactcctctcataactgcggcgatcagaggccacatcgaggtggtgaacctactgctggagcgagtttctgggttggtcgagttatcaaaagcgaacggaaagaatgccctgcacttcgctgcccggcaggggcatgtggaaatcgtggaggctttgctacatgccgatacccagcttgctcggaggactgacaagaaaggccagaccgctctacacatggcagtaaaaggaactagccctgaagtcgttcaagcgcttgtgaacgccgatccggccatagtcatgctgcctgacagaaacggcaacctagctttgcacgttgcaaccagaaagaaaagatcagagattgtaaatgtgcttctgctccttccggatatgaacgtgaatgcgttgaccagggatcggaagaccgcgttcgacatagccgagggccttcccctgtcagaggagtctcaagaaatcaaggagtgcctgtcccgtgccggtgcggtcagagcaaacgatctgaaccagcctcgggacgagctgaggaaaacagtgacagagataaagaaggacgtgcatacccagctggagcaggcgaggaaaaccaacaagaacgtgtacggcatcgccaaggagctgaggaagctccacagggaaggcatcaacaacgcgacgaactcggtgaccgtcgtggcggtgctgttcgcgacggtggcgttcgcggcgatcttcacggtgcccggcggcaacgccaacgacggcgtggcggtggccgtgcacgcgacggccttcaaggtgttcttcatcttcaacgccgtcgcgctgttcacgtcgctggcggtggtggtggtccagataacgctggtccggggcgagaccaaggcggagcggcgggtggtggagatcatcaacaagctcatgtggctggcgtcggtgtgcacgacggtcgcgttcatctcgtcgtcctacatcgtggtggggcgccacttcaggtgggcggcgctcctggtgaccctgatcggcggggtgatcatggccggcgtgctcggcaccatgacgtactacgtggtgaagtccaagcgcacgcgcaagatcaggaagaaggtgaagtcgacgaggaggagcggctccagctcgtggcagcacaactcggagttctcggactcggagatcgaccgtatctacgccatatgaagccggcgcagtgcagctggttcctccagacagacagacccttttggcagcggcacgaaaaggtagacatggatcacgacccttgagatgctagtgggggctggttgactttgtacattccaataagctgggtgtaaaaactgccattccctttgttcgtgaatcggcgggaggcgacggttgtatactgctacagatagatttctcatcagattatatagtatggagtatactattattgtcgttgttat

SEQ ID NO: 86783 - DNA, 2267 bp, Zea Mays
caacttgcgatttatttagcggcggcgatcggccagcccggccccttgtcttcttcctcgcatcatccgcctctgccccctgcggattagtaggggccccatgcctcacatgcacgccgggagcgcgctggaggatgcgccgcagagctcgtcacgccgccattgctgcgacgccgtgcccccgagtttgatttgatggaagcgaagacgaaccaaaccagcggcgaggacaggccgcagccggcgatggactcgccgagggcggcgcaggcggcgacgcgccgcaagaagatgacgaagcagctgacggggaagcgcgacgacacggcgatgcacgcggcggcgcgcgccgggcagctcgagtccatgcggcagatgatgtccggcaaggacgccgaggagctcggggcgctgctgtccaggcagaaccaggccggggagacgccgctgttcgtggccgccgagtacgggtacgtggccctggtggccgagatgatcaagtaccacgacgtcgccaccgccggcatcaaggcccgcagcggctacgacgcgctccacatcgccgccaagcaaggggatgtagacgtcgtgagggagctgctgcgggcgctgccgcagctgtcgatgacggtggactcctccaacacgacggcgctgaacacggcggcgacgcaggggcacatggacgtggtgaggctcctgctggaggtggacgggagcctggcgctgatcgcgcgcagcaacggcaagacggcgctgcactcggcggcgcggaacggccacgtggaggtggtgcgcgcgctgctggaggcggagcccagcatcgcgctgcgcacggacaagaagggccagaccgcgctgcacatggccgccaagggcaccaggctggacctcgtcgacgcgctcctggccgccgagccggcgctgctcaaccagacggacagcaagggcaacaccgcgctgcacatcgcggcgcgcaaggcgcggcacgagatcatcaggcggctggtcacgatgcccgacacggacgtcagggcgatcaaccggtcccgcgagaccccgctggacacggcggagaagatgggcaacacggacgcggcggaactcctggctgagcacggcgtgcagtcggcgcgcgccattagcccctgcggcggcggcggcggcggcaacaagcaggcgcgcgagctgaagcagcaggtgagcgacatcaagcacgaggtgcactcgcagctggagcagacgcggcagacgcgcgtgcgcatgcagggcatcgccaagcgcatcaacaagctgcacgaggaagggctcaacaacgccatcaactccacgacggtggtggccgtgctgatcgccacggtggcgttcgccgccatcttcacggtgcccggggagtacgtgcaggacccgggcagcctggcgcccgggcacgatctgggcgaggccaacatctcccaccagacggccttcatcatcttcttcgtcttcgactcggtgtcgctcttcatctcgctggccgtggtggtggtgcagacgtcggtcgtggtcatcgagcgcaaggccaagaagcagatgatggcggtgatcaacaagctcatgtgggtggcctgcgtgctcatcagcgtatccttcctggcgctctcgttcgtcgttgtgggccgcaccgagcgctggctggccgtgtccgtcaccatcatgggcgccaccatcctggtcaccaccatcggcaccatgctctactgggtgatcgcgcaccgcatcgaggccaagcggattcgcacaatcaagcgcaacacgctcacccactcccgctccttctcctgctccggcatgtcggagggcgagtgggtcgacgaggatttcaagaggatgtacgcaatctgacgacccacgctacctgcatgtgtttgagatcatctcgtgcaatggccatcgcgttattgtcaacttgccgtgcttcggaccgggctaacattcttcttccgtcactccttagtggcgattgaagtattgtccaaccgaataaacctacctgtgcgccgcctgcgagagagaagtaataagttttgtcttcatagaaaacgaaacaaaagaaaagtgagttttgtcttaatagaaaatgaaaagctagacttactaaaaactcctgcactccgtattacttttagcttgtcgatcaagccgtgcttccgcaacgtctagagtcttaaaaactatttaaaaaatacaagtactcaatcttttcataaatatatgacaccatttaa

SEQ ID NO: 86784 - DNA, 2161 bp, Zea Mays
gcctcacatgcacgccgggagcgcgctggaggatgcgccgcagagctcgtcacgccgccattgctgcgacgccgtgcccccgagtttgatttgatggaagcgaagacgaaccaaaccagcggcgaggacaggccgcagccggcgatggactcgccgagggcggcgcaggcggcgacgcgccgcaagaagatgacgaagcagctgacggggaagcgcgacgacacggcgatgcacgcggcggcgcgcgccgggcagctcgagtccatgcggcagatgatgtccggcaaggacgccgaggagctcggggcgctgctgtccaggcagaaccaggccggggagacgccgctgttcgtggccgccgagtacgggtacgtggccctggtggccgagatgatcaagtaccacgacgtcgccaccgccggcatcaaggcccgcagcggctacgacgcgctccacatcgccgccaagcaaggggatacgtcgtgagggagctgctgcgggcgctgccgcagctgtcgatgacggtggactcctccaacacgacggcgctgaacacggcggcgacgcaggggcacatggacgtggtgaggctcctgctggaggtggacgggagcctggcgctgatcgcgcgcagcaacggcaagacggcgctgcactcggcggcgcggaacggccacgtggaggtggtgcgcgcgctgctggaggcggagcccagcatcgcgctgcgcacggacaagaagggccagaccgcgctgcacatggccgccaagggcaccaggctggacctcgtcgacgcgctcctggccgccgagccggcgctgctcaaccagacggacagcaagggcaacaccgcgctgcacatcgcggcgcgcaaggcgcggcacgagatcatcaggcggctggtcacgatgcccgacacggacgtcagggcgatcaaccggtcccgcgagaccccgctggacacggcggagaagatgggcaacacggacgcggcggaactcctggctgagcacggcgtgcagtcggcgcgcgccattagcccctgcggcggcggcggcggcggcaacaagcaggcgcgcgagctgaagcagcaggtgagcgacatcaagcacgaggtgcactcgcagctggagcagacgcggcagacgcgcgtgcgcatgcagggcatcgccaagcgcatcaacaagctgcacgaggaagggctcaacaacgccatcaactccacgacggtggtggccgtgctgatcgccacggtggcgttcgccgccatcttcacggtgcccggggagtacgtgcaggacccgggcagcctggcgcccgggcacgatctgggcgaggccaacatctcccaccagacggccttcatcatcttcttcgtcttcgactcggtgtcgctcttcatctcgctggccgtggtggtggtgcagacgtcggtcgtggtcatcgagcgcaaggccaagaagcagatgatggcggtgatcaacaagctcatgtgggtggcctgcgtgctcatcagcgtatccttcctggcgctctcgttcgtcgttgtgggccgcaccgagcgctggctggccgtgtccgtcaccatcatgggcgccaccatcctggtcaccaccatcggcaccatgctctactgggtgatcgcgcaccgcatcgaggccaagcggattcgcacaatcaagcgcaacacgctcacccactcccgctccttctcctgctccggcatgtcggagggcgagtgggtcgacgaggatttcaagaggatgtacgcaatctgacgacccacgctacctgcatgtgtttgagatcatctcgtgcaatggccatcgcgttattgtcaacttgccgtgcttcggaccgggctaacattcttcttccgtcactccttagtggcgattgaagtattgtccaaccgaataaacctacctgtgcgccgcctgcgagagagaagtaataagttttgtcttcatagaaaacgaaacaaaagaaaagtgagttttgtcttaatagaaaatgaaaagctagacttactaaaaactcctgcactccgtattacttttagcttgtcgatcaagccgtgcttccgcaacgtctagagtcttaaaaactatttaaaaaatacaagtactcaatcttttcataaatatatgacaccatttaa

SEQ ID NO: 86785 - DNA, 1125 bp, Zea Mays
gctcgtctccaactccggcgtcctgattttttttatcaccgctcaagggtcatcgtctttatctccctagcgcgtctcctatttttcctgctgcgtgctctctctgccgagcgtggtctctgcagcttgctgctccagcccatccccttcctggcgctcgccctcgctccctgctggccagtgcccagctccctccatctctcctgcgtacgcctttctctgtttgctgctcgccccagctcctagctatggcgtctggccgagagagcctctctcatctcctccctgcttcctctgccgaccgaaactccctactcgaaatttcgctcacagagctcccttcccccagcgtcgcttgccgtcctggtgcaagctcctgctgcagcgcccaactggcttcctgcatcgcgcttggtcctgcccatctcgccgtgcgcggatctcgtccatgtcgccgctgtcgagttccctgcatcgctccggggattttgtcgcggcatccctttccatagcttgcccctgcgtctcctcgtcgtagagctcccaagccgccgccgtcgaagctcctctgcgcgctttgctttttgtgcgcgcatgctcgccgtctctattcgggccatccgcacaattttctctgctctcttgccgtggtcgacgcgtgcctgcgtgcagcttgccaagttcggcctcgacaaaaactctggacgctcggaccccgcctcgaccaagtcttctattcctgtcgtcgtaaattgttatcgttcgccttcgcgccgtgcagcagcacgtcccttatcgtgctcatggttaatactgtcattcctgctgtccctcacttccattgtgttcgattaaatatcggaccaagaatccacgatgtcgctcatcctcgcgaaatcctcacgctcaccatcccctattcgatctcgtcgtcaagcttcgccatcagccttagctcgtcagtcacgttcgccagatattcgatcgaggatttaagctgaaggctgtcgtcgttcaggcaaaactaccaaatcgagttgtgatgtggtgagccgattcactatttttactatcggttttatgatttacaaaaatgcttagctctgctcagatcttttggatata

SEQ ID NO: 86786 - DNA, 3119 bp, Zea Mays
caccaacctcgagccgcttttgactgctccagtatggagctataagaatggctactagcagtgtgatcctcagagtccaagccaacgccgatcgagagcccgcatatctatatctcgctcgccgcggcaggcagagaggtggggtgccggccggcggcgaggagaaggtggaggagcacgtacgtgagttgggcgcggcgatgtcgcggttcgtcgacaagctgccattctttgaccggaggtcgtcgctgatggaggaggccggggacattccgcggagcggcctcctgcacatgcaccaccaccagccgcaccacagcggcctgctcatgcagccgcagccgtcgccgccggcgaagcagtcgtcgttcacgctcgcgcagctgctgaagcgcgtcaacgaggcgcgcagcgacgcctcgtcgcccacgtcctcgcccacgcactcgcactacaccatcgagctgggcggctccgtgccggggtccaccggcagcgacctgagcgagcgcataggcggcggcggcggcgacgggccgctcctgccgttcgtgctcaagttcacggacctcacgtacagcgtcaagcagcggaagaggggaccgtgcctgccggtgctgccgttccgccgcggggccggggagccggccgagcccgaggtgtcccggatgaaaacgctgctggacaacatctccggcgaggcaagggagggcgagatcatggcggtgctcggcgccagcggctccggcaagagcacgctcatcgacgcgctcgccaaccgcatcgtcaaggagagcctccgcggctccgtcacgctcaacggcgagtcgctcgacagcaacctgctcaaggtcatctccgcgtacgtcatgcaggacgacctcctgtacccgatgctcaccgtggaggagacgctcatgttcgccgccgagttccgcttgccccgctctctgccaaccaaggagaagaagaagcgcgtgcaggcgctcatcgaccagctgggcctgcgcaacgcggccaacaccatcatcggcgacgagggccaccgtggcgtgtccggcggggagcgccgccgggtgtccatcggcgtggacatcatccacgacccaatcgtcctgttccttgacgagcccacctccgggctcgactccaccagcgcgttcatggtggtcaaggtgctgcagcgcatcgcgcagagcggcagcgtggtggtcatgtccatccaccagccgagctaccgcatcctcggcctcctcgaccgcctcctgttcctctcccgcggccagacggtgtactacggcccgccaggcgcgctgccgtccttcttcaacgacttcggcaagcccatccctggcaacgagaacccgacggagttcgcgctcgacctcatcagggagctggagaccatgccggacggggccacggacctcgtggagcacaacaagaaatggcagatgcgcacggcccccaaggcgaagcaccacgacgggcacggcgagaagccgtcgctgtccctgaaggaggccatcagcgccagcatctcccgcgggaagctcgtgtccggcgcgaccgacggatccgtgtcggtgcactcggccggggagtcggcgcccgcagccgcggtgtccaagttcgcgaacccgttctgggtggagatgggcgtgctcacccggcgcgcgttcctcaacacgaagcgcacgccggagatcttcatcatccgcctagcggccgtgatggtgacggggttcatcctggcgaccatcttctggcgcctggacgactcccccaagggagtccaggagcgcctgggcttcttcgccatcgccatgtccaccatgttctacacctgctccgactcgctgcccgtgttcctcaacgagcgctacatcttcctcagggagacggcctacaacgcgtaccggaggtcctcgtacgtgctctcccacaccatcgtcggcttcccgtcgctgatcgtgctctccttcgcgttcgcgctcacgacgttcttcgccgtgggcctggccggcggcgccgacgggttcttcttcttcgtggccatcgtgctggcctccttctgggcggggtccgggttcgcgacgttcctctccggcgtggtgacgaacgtgatgctgggcttccccgtggtggtgtcgacgctggcctacttcctcctgttcagcggcttcttcatcaaccgggaccgcatcccgcgctactggctctggttccactacctgtcgctggtgaagtatccgtacgaggcagtgatgcagaacgagttcagcgacccgacgcggtgcttcgtgcggggcgtgcagatgttcgacaacacgccgctggcggtgctgccggcggtgctcaaggtgcgggtgctgcgcgccatgagccagtcgctgggcgtggacatcggcacggccacgtgcatcacgacggggccggacttcctggcgcagcaggccgtgacggacctcaccaagtgggactgcctctggatcaccgtcgcctgggggttcctcttccgcatcctcttctacatttcgctgctgctcgggagcagaaacaagaggaggtgagcggttcctcgtcctgctggtgcgatcggtatgcacggggctggttgtatgttgctccctctgcctttattttcttcctcgatcgagctttttatcgcgtgtaaatttgcttgtaagctgtaagttttcgtggcaagtcaaactgtaacacagacaatatttgtacgatggttctctgttattgttctcgcggaaggtgtttcaaatttgcatgagaatctgccgatctgattttgttcgggggtgatcgtgaacatggcaggtctatatatagcactaaaaatagctgatggacgtcgaaaggcaaaggcgtgtgatcttagagcatctcagtgagatggttttggaatttggatcggagcttcatagattttaagggcgtgttggcatgactttaaagcaaaactcttagtacaagttagtcagagtctgtcaaacagcataactctagagttcaaactttatagagttatagagatgaagtacaagtatctcttttaccgctccgaaatttaaaaaaataatccagatatggagtttgaagtt

SEQ ID NO: 86787 - DNA, 123 bp, Zea Mays
ctaaatgttactatctccattcacggttttatgacatcgttgactttttttcgaaagctctgatttctttaaaatatttattcaaaaatatgaaattttaagtcaaacacaaactacattaaa

SEQ ID NO: 86788 - DNA, 816 bp, Zea Mays
tgttcccgtgaagcggcgtgccgcgaccgaccgcaaagggcaggtccacgaaggtaaagggcaaaggaaagagcagcagcgttgcagcgacgagcacaaaaagaaaaaggaaattcctctcaacatcaccagaccacgacctccctgccgagctccctccctctccgttggtgatggcatctcagagctccaagaccgcggacaccgccgcgcctccgccggaggttgcagccaccggagaggcggctccgggcgcggcttcttcaacaccggcacaaaaccctaacgctgctgcaaccgcagtggccggggccacggatctagagaagaagatgcgccgcgcggagcggtttgggatgccagtactgatgtcagaggaggaaaagcgcagcagtcgcgccgagaggtaagtgttttgtggatcccctttcctagggcttagaggatttgtcctaacaaatcctaagttcatgttgagaagtgttcttttcaagcacaatatgtaggtaatctcctaacaatatagatgtagtgcaatactgcagcatgcatgtcttggtcattgggtgtgttgaattgcaacactgtaggcttttaggtaaagtacatagaaaagatctagtcccgtgggtgatgttgcagcaattctgtgctctgcattatttgatgaggtgtccaattgttgcttctcttcatagagatgccagtgcatttcaggacctaagcagttaggtccttgcatgaatgatgttttattgtttaagtgtttcatgcagtttataactaagtcacttgattgttgatacctttgagcct

SEQ ID NO: 86789 - DNA, 1095 bp, Zea Mays
tgttcccgtgaagcggcgtgccgcgaccgaccgcaaagggcaggtccacgaaggtaaagggcaaaggaaagagcagcagcgttgcagcgacgagcacaaaaagaaaaaggaaattcctctcaacatcaccagaccacgacctccctgccgagctccctccctctccgttggtgatggcatctcagagctccaagaccgcggacaccgccgcgcctccgccggaggttgcagccaccggagaggcggctccgggcgcggcttcttcaacaccggcacaaaaccctaacgctgctgcaaccgcagtggccggggccacggatctagagaagaagatgcgccgcgcggagcggtttgggatgccagtactgatgtcagaggaggaaaagcgcagcagtcgcgccgagagatttgggactggctcttcaagtgtaaaggaggaagagaagaagaagtccagggctgagaggtttggccttgcctcgccctcttcttcagatgaggaagctaagaaaaaggcccgtttggaacgatttggtcagagcgcaaatgtcgacaaggcggaagaagaaaaaagaaaggcccgagctgcccgatttgcagaagcgtctggtggatcagcagctcgggaaaacggcaaagacagctcgaagccggacgcagccgctgttaccggcacagcttgatttgagcactctgccttggacgaggttcgttaggcaatgctgttaccctcccagaacgacgttttccttaccatgacccgctgctgcagtttccctaacatgaaaagaatcgacttggtctcctgcaggtctcagaaatattatctcctaggagactttggtgaagccatagcttttgtacaccactaaccgcatggacgggggcgtcctgtgtttcccagtcatgttcagtgatgtttaccgcgtatgactttattagttgctgggcacactggcagtgtagctagatttgctgtctggtttgtggatggtcatgtaccttcggttgccctctatttggtgacgatgatttcgtttccatgtacccccagttggactactttataactgttagaagacacaaggtcgccct

SEQ ID NO: 86790 - DNA, 1021 bp, Zea Mays
agggcaaaggaaagagcagcagcgttgcagcgacgagcacaaaaagaaaaaggaaattcctctcaacatcaccagaccacgacctccctgccgagctccctccctctccgttggtgatggcatctcagagctccaagaccgcggacaccgccgcgcctccgccggaggttgcagccaccggagaggcggctccgggcgcggcttcttcaacaccggcacaaaaccctaacgctgctgcaaccgcagtggccggggccacggatctagagaagaagatgcgccgcgcggagcggtttgggatgccagtactgatgtcagaggaggaaaagcgcagcagtcgcgccgagagatttgggactggctcttcaagtgtaaaggaggaagagaagaagaagtccagggctgagaggtttggccttgcctcgccctcttcttcagatgaggaagctaagaaaaaggcccgtttggaacgatttggtcagagcgcaaatgtcgacaaggcggaagaagaaaaaagaaaggcccgagctgcccgatttgcagaagcgtctggtggatcagcagctcgggaaaacggcaaagacagctcgaagccggacgcagccgctgttaccggcacagcttgatttgagcactctgccttggacgaggtctcagaaatattatctcctaggagactttggtgaagccatagcttttgtacaccactaaccgcatggacgggggcgtcctgtgtttcccagtcatgttcagtgatgtttaccgcgtatgactttattagttgctgggcacactggcagtgtagctagatttgctgtctggtttgtggatggtcatgtaccttcggttgccctctatttggtgacgatgatttcgtttccatgtacccccagttggactactttataactgttagaagacacaaggtcgccctcgtgtttgtaccccgtgtttttgttgctagaatgctacgcgacagggtgtttaaacccataatcacggagcattgcataacagataa

SEQ ID NO: 86791 - DNA, 105 bp, Zea Mays
cttctctgtcaagtctattacatatttatatggcatcccagataggccggcccaacaccatcactcacacaagtccaacacagcccacacgatttacaaaaaaaa

SEQ ID NO: 86792 - DNA, 3371 bp, Zea Mays
ccaattagtttccaggtcaaaaccaggcgattactttccagagtccagacccattcaaagctctccgccgtcctccttgctcctactcgggctacgacgctgcgccggtaggcacgaggcgttcgacgagtctctgcgctccgaccggccaccacggcgcgtgccgggagccgcgcggcggcggccatgggcgccgcggccttggacttcgagtacaagagggacgcttatggtttcgcggtgcggccacagcatctgcagcgtttccgcgagtacgccaagatttacaaggaagaggaggaggagagggcgcacagatggagagacttcttggacaggttggctgatgcagcgaatgtgcccactacacccagcgtttcaccatatgcatctaccggggatcctgcgtcaggtgcaggacaggcacaagagaatagcggcatcggaatacattgtgatgatgaagaggagggatctgagaatgcagaacataacaacaacttggaaagcccaaaggaatccgatgccagtgctgaatcacgagaagcaaatggtaaatcagaagatctgaaagatgtaactaacttggacaaactgcaagagaagactggtagcagcagctctacagaagcaatcaaagccttagagggcttgatggaaacaaatggggactttgaagaactaaaagatttgaatggaagctcagaagaattggaagaagagaataatggcaacatggaaaagctggtagagctcttcttggataaggggttgttggatgaactgaagcccataaaagttgagtcccagcggcgggtacgtgcagcacttagcatcattgacaaaatgatgagctctcgggtagtgaagggtggtaatggtgcaaatggtattcatggaaacgatggagcacagcttacttctattgaagaggaaggaaggactgcagaagcgagtgatgacggagatccagctgaggttgagtcttgtgttgcagagaaggtggaacttggacaggagacaactcatgattctacaggtactgctttggatggaggcaatgatgggtcctattttccttggagggaggagcttgagagcttggttcgtggaggtgtaccaatggctcttagaggagagatatggcaagcatttgtgggtgttggtgctcgaaggattcctgggtactacaacaaattgcttgatgacaggactgagacattggatgaaaaggatcttgtggacccagtggtcaacgaacagggaagtgcacccagaaaagttacccagcctgagaaatggaaaggacagatagagaaggatttgccacgaacatttccaggacaccctgcattagatgaggatgggaggaatgctttgaggcggttgttaaccgcatatgcaaggcataatccatcagttgggtactgccaggccatgaacttttttgctgggctatttttgttattcatgcctgaagaaaatgcattttgggccttagtaggggttattgatgattattttgatggatactacactgaagaaatgattgaatctcaggttgaccaactcgtccttgaggaggttgtacgagaaaggttccctaaattggccaaacatatggaattcttgggagttcaagtgggatggataactggaccatggtttctttcaattttcatcaatatgcttccatgggaaagtgtacttcgcatttgggatgtcatcctttttgaaggaaatcgcataatgttgttcaggacgacacttgctttgctggatttatatgggcctgcactagtgaccacaaaagatgccggagatgcaattacactactgcagtctcttgctggatctacatttgacagcagccagcttgtattgacagcttgtatgggttttcaatcagttagagaaatgggattgcaagagttaaggaaaaagtacaggcctgaaattttaactgcaatggaggaaagatcgaaagaccgtggctcctggaaagataagaaggggttagcaaccaaactttatagctttaaacatgatccttcatatgtgtgctcaccagttaagtccaaggaagggctagatggttcaaaggtgaatggagagactgggccagcaaatcttgagacctaccttagtactagttctatactggataatgatttggatcagggtgttgatcttcaagatcaggtgtcatggctaaaggttgaactatgcaagctgctcgaggagaaaagatcagctgatctcaggagtgaggaattggaaactgctttgatggagatggtcgagcatgacaacagacgtatgttgagtgcaaaggttgagaagcttgaaacagaggcatatgaactgcgcaaagctttttcagacaagcaagagcaagagcaagtaatgcttcagatcttgttaagaatggagcaagaacagaaagtggcagaagatgcccgcatagccgctgagcgagatgctgctgaacaaaaacacgctgctcacttgctccaggagaagtatgaagcagcaatgacagcactttcacaaatggagaagagagctgtaatggcagaaacaatgctggaagctacaaagcaataccaggttgggcaggttaaagccaaccaatctttcacttcaagttcacctcgtgcagaccatgttcctgcgaagataaatcaagaaccaaaccaaactgcacctatcaggagaatcggcctgctttctaggggacttggatggcttgacaagggcaagggaaggcagaattccaatgaaacatctggagcctaaactcatctaaagtccaggatgaagtcatagctcccaacaagatctggattgttcattaacgcttggattgcttgatcaccgtaagagtgttgaaatcagcatcgatacatgttttctcgggaagattcagctggtatattccatgaagttttgcaggaagtgtatcttgtatcatattgagttcaattgtcagataaagttttgttggtaggtcagaaaggcttctgcaagtcatcggtgtaaattttcttttattagttccattaagattgtcaatagttagtgttccaaataggagaaagaaaagaacgacttactacacacaagaaaaatttctgttagattagttacagtatcatggagttgttctggagaagagcatgttttttttatctcttcagaaatgtcaaaaccaccgaagagattctctctctgtatttttgtctgatacgtgtggctcatacattcttcagtcacagttgacatgtttgatgtaaggcaattattgtcacgaggattctgattacgaatacaacagcagaaactccactatagggaggcgttttggaaag

SEQ ID NO: 86793 - DNA, 3388 bp, Zea Mays
gcgctgccccctttttctccaattcaattcctcttcgtcgcctcgcgcatgggcattcctcgtgcgccgcggcagcgcagttaacgccagcgcgcgtggcttcacccggtcttgccacgacccgttgcaatcctgattcccttcctctccagaattcctcctcccatgtgcgtggatctcggggcccgtgcgggctagggtttatggctttggtcaatccatggcgtgcggtggcgaggtcgcgctgtcgcttcttctttaatgcgcgctgatccccatggacgccgagtccccacgggacgcttatggtttcgcggtgcggccacagcatctgcagcgtttccgcgagtacgccaagatttacaaggaagaggaggaggagagggcgcacagatggagagacttcttggacaggttggctgatgcagcgaatgtgcccactacacccagcgtttcaccatatgcatctaccggggatcctgcgtcaggtgcaggacaggcacaagagaatagcggcatcggaatacattgtgatgatgaagaggagggatctgagaatgcagaacataacaacaacttggaaagcccaaaggaatccgatgccagtgctgaatcacgagaagcaaatggtaaatcagaagatctgaaagatgtaactaacttggacaaactgcaagagaagactggtagcagcagctctacagaagcaatcaaagccttagagggcttgatggaaacaaatggggactttgaagaactaaaagatttgaatggaagctcagaagaattggaagaagagaataatggcaacatggaaaagctggtagagctcttcttggataaggggttgttggatgaactgaagcccataaaagttgagtcccagcggcgggtacgtgcagcacttagcatcattgacaaaatgatgagctctcgggtagtgaagggtggtaatggtgcaaatggtattcatggaaacgatggagcacagcttacttctattgaagaggaaggaaggactgcagaagcgagtgatgacggagatccagctgaggttgagtcttgtgttgcagagaaggtggaacttggacaggagacaactcatgattctacaggtactgctttggatggaggcaatgatgggtcctattttccttggagggaggagcttgagagcttggttcgtggaggtgtaccaatggctcttagaggagagatatggcaagcatttgtgggtgttggtgctcgaaggattcctgggtactacaacaaattgcttgatgacaggactgagacattggatgaaaaggatcttgtggacccagtggtcaacgaacagggaagtgcacccagaaaagttacccagcctgagaaatggaaaggacagatagagaaggatttgccacgaacatttccaggacaccctgcattagatgaggatgggaggaatgctttgaggcggttgttaaccgcatatgcaaggcataatccatcagttgggtactgccaggccatgaacttttttgctgggctatttttgttattcatgcctgaagaaaatgcattttgggccttagtaggggttattgatgattattttgatggatactacactgaagaaatgattgaatctcaggttgaccaactcgtccttgaggaggttgtacgagaaaggttccctaaattggccaaacatatggaattcttgggagttcaagtgggatggataactggaccatggtttctttcaattttcatcaatatgcttccatgggaaagtgtacttcgcatttgggatgtcatcctttttgaaggaaatcgcataatgttgttcaggacgacacttgctttgctggatttatatgggcctgcactagtgaccacaaaagatgccggagatgcaattacactactgcagtctcttgctggatctacatttgacagcagccagcttgtattgacagcttgtatgggttttcaatcagttagagaaatgggattgcaagagttaaggaaaaagtacaggcctgaaattttaactgcaatggaggaaagatcgaaagaccgtggctcctggaaagataagaaggggttagcaaccaaactttatagctttaaacatgatccttcatatgtgtgctcaccagttaagtccaaggaagggctagatggttcaaaggtgaatggagagactgggccagcaaatcttgagacctaccttagtactagttctatactggataatgatttggatcagggtgttgatcttcaagatcaggtgtcatggctaaaggttgaactatgcaagctgctcgaggagaaaagatcagctgatctcaggagtgaggaattggaaactgctttgatggagatggtcgagcatgacaacagacgtatgttgagtgcaaaggttgagaagcttgaaacagaggcatatgaactgcgcaaagctttttcagacaagcaagagcaagagcaagtaatgcttcagatcttgttaagaatggagcaagaacagaaagtggcagaagatgcccgcatagccgctgagcgagatgctgctgaacaaaaacacgctgctcacttgctccaggagaagtatgaagcagcaatgacagcactttcacaaatggagaagagagctgtaatggcagaaacaatgctggaagctacaaagcaataccaggttgggcaggttaaagccaaccaatctttcacttcaagttcacctcgtgcagaccatgttcctgcgaagataaatcaagaaccaaaccaaactgcacctatcaggagaatcggcctgctttctaggggacttggatggcttgacaagggcaagcagggaaggcagaattccaatgaaacatctggagcctaaactcatctaaagtccaggatgaagtcatagctcccaacaagatctggattgttcattaacgcttggattgcttgatcaccgtaagagtgttgaaatcagcatcgatacatgttttctcgggaagattcagctggtatattccatgaagttttgcaggaagtgtatcttgtatcatattgagttcaattgtcagataaagttttgttggtaggtcagaaaggcttctgcaagtcatcggtgtaaattttcttttattagttccattaagattgtcaatagttagtgttccaaataggagaaagaaaagaacgacttactacacacaagaaaaatttctgttagattagttacagtatcatggagttgttctggagaagagcatgttttttttatctcttcagaaatgtcaaaaccaccgaagagattctctctctgtatttttgtctgatacgtgtggctcatacattcttcagtcacagttgacatgtttgatgtaaggcaattattgtc

SEQ ID NO: 86794 - DNA, 1510 bp, Zea Mays
atggggagtgaggaattggaaactgctttgatggagatggtcgagcatgacaacagacgtatgttgagtgcaaaggttgagaagcttgaaacagaggcatatgaactgcgcaaagctttttcagacaagcaagagcaagagcaaatcttgttaagaatggagcaagaacagaaagtggcagaagatgcccgcatagccgctgagcgagatgctgctgaacaaaaacacgctgctcacttgctccaggagaagtatgaagcagcaatgacagcactttcacaaatggagaagagagctgtaatggcagaaacaatgctggaagctacaaagcaataccaggttgggcaggttaaagccaaccaatctttcacttcaagttcacctcgtgcagaccatgttcctgcgaagataaatcaagaaccaaaccaaactgcacctatcaggagaatcggcctgctttctaggggacttggatggcttgacaagggcaaggccctacgcccctacatgccattatcagagaccttgtttcttactagctttaattttacttctaaaatatctgatgtgcttggacataatgtgtgatgtgtccctgctcaaccatgatatctttttatagaatattatgctgttcatctttataccacgtttgcatggacatcatatatatgtatatacatatatgtatgtatatatacgtacgtatatatacgtatatttacgcatatatatatatatatatatatagacacacacacacacacacacacatatacatatatatacacacacagacgtatatacgtatgcatatatataaagaatggcctcattgatctagaaaggttttataaagttgaggtgcagtgggttcactatacttgaattgcttttagcagggaaggcagaattccaatgaaacatctggagcctaaactcatctaaagtccaggatgaagtcatagctcccaacaagatctggattgttcattaacgcttggattgcttgatcaccgtaagagtgttgaaatcagcatcgatacatgttttctcgggaagattcagctggtatattccatgaagttttgcaggaagtgtatcttgtatcatattgagttcaattgtcagataaagttttgttggtaggtcagaaaggcttctgcaagtcatcggtgtaaattttcttttattagttccattaagattgtcaatagttagtgttccaaataggagaaagaaaagaacgacttactacacacaagaaaaatttctgttagattagttacagtatcatggagttgttctggagaagagcatgttttttttatctcttcagaaatgtcaaaaccaccgaagagattctctctctgtatttttgtctgatacgtgtggctcatacattcttcagtcacagttgacatgtttgatgtaaggcaattattgtcacgaggattctgattacgaatacaacagcagaaactccactatagggaggcgttttggaaag

SEQ ID NO: 86795 - DNA, 1276 bp, Zea Mays
gtggcgagtggcgacagccgcataaccgcatcctggccgccgagagcccacgtaattaccccgactgcccgagctcgccggctcgctgccactaaccagccaagagtaatccagcgcccaccgcatggccgcgcgcgcacctctcatcatgccgcgcgccgcctccagcgccggcccggtcccggctgcggcgacgaccgtggccaggcgccagtccgcgcagtgtctccacgcgaggggggctgtcggcggcctcttcttcgaccagaggacagcgcggccggtccaccacctcctccctggcgccaagttcggagcgattgggagcaccgcggaggccgcgccgtcggaggggctcgcgcagaagctgcagggggtcgatgtgttcgatctgagcggcaagacggtgcccatcgttgatctgtggaaggaaaggaaggcagtggttgcgtttgcccggcatttcgggtgcgtgctgtgccgaaagagggcggaccttctcgccgcgaaacaggatgacatgcaagctgctggagttgctcttgttttaattggaccaggtagtgttgaacaggcaaaggcattttgtgagcaaaccaaattcaaaggagaagtgtatgctgaccctactcactcatcgtatgacgctcttgaatttgcattcgggttgttctccacctttacgcccgcggctggcctcaagataatacagttgtacagggaaggatacaggcaggactgggaattgtcattcgagaagaacaccaggacaaaaggcggatggtatcaaggggggttaattgttgcaggtccaggtatcgataacatcctgtacatccacaaggacaaagaagccggagatgatcctgacatgcaggatgtgttgagagcttgctgttcctagaaaatcagtgtgccccacgaccacacagtcactctatatctcgttgtaaaagtcaggttgtaatcagccctcaatcttcagcgatcctgttcaggatgcatgggctctcttttttcgtaacatacgacgcacggggaaccttacgtttatgttttggtagcaagggggaaaggattgtaagggctagaatccccttgctatttaattctgagtaacaagaggattttagcccctcaaattccttttatttttcttgctcccaaacaagctcgtgcgtgtacataacatatgtatggttctgtatagaaatcgatgaagttctgagtatctgctaggaataatatataggacgtacgagactcgttgttgttg

SEQ ID NO: 86796 - DNA, 2770 bp, Zea Mays
cccacgcatgattgtgcatgcttggcccgatagacccgtgggcctggtcatgtcgtgccttggcatgagcccaggtcgtatcgtgccgagcatgactagtttgctcatctatagttttgtgtcattgcggccttgagcccataagctattcggcccattagcttagcccagccgagacgccgcgcgcggcacagccctcctccggtactcggtcagtcggtcctccacactcctcaccagtcaccaccagaccaaatcgcagccgcgctcgagctaagccccgccgccgacgccgtcatctgcgccccagaaccccgtatttccctccgccgccttccgatctctcgctcctccccatgtcggagaaaaagcgccgcgccggtgcgagcgcggccggcgccgcatccagctccaagaagccgcgtgcttcctcggccgcgtcgtacgccgagtccctccgctcgaagctccgccccgacgcctccatcctggccaccctccgctccctcgcttctgcctccgcttccaaatccaaggccgccgccaggtccctcgcggaccacgacccgtgcgcggaccccgcctcctcgtacatcgtggtggccgaccaggactccacctccgtcacctcccgcatcaaccgcctcgtccttgccgccgcgcgcagcatcctctccggccggggcttctccttcgcggtgccctcgcgcgccgcctccaaccaggtctacctcccggacctcgaccgcatcgtgctcgtccgccgcgagtccgcgcgccccttcgccaacgtcgccaccgcgcgcaaggccaccatcacggcgcgagtcctctccctcgtccacgccgtcctcggcaggggcatccacgtcaccaagcgtgacctcttctacaccgacgtcaagctcttcggcgaccagacccagtctgacgccgtcctcgacgacgtctcctgcatgctcggatgcaccaggtcctcgctccacgtcgtcgcctccgagaagggcgtcgtcgtcggccgcctcgtcttcgccgacgacggggaccggatcgactgcacgcgcatgggcgtcggcggcaaggccattccgcccaacgtcgacagggtctcgggcatcgagagcgacgcgctcttcatcctcctggtggagaaggacgctgcattcatgcgactcgccgaggacaggttctacaaccgcttcccctgcatcattctgacggccaaggggcagccagatgtcgccacccggctgttcctgcggaggctcaaggttgagctgaagctgccagtgctcgcgctggtggattccgatccatacgggctcaagatcttgtcggtgtacatgtgtggttccaagaacatgtcgtatgacagtgccaatctgacgacgccggacatcaagtggctcggtgtccggccgagcgacctggacaagtacagagtgccggagcagtgccgtctccccatgaccgatcacgatatcaaggtggggaaagagctgctcgaggaggacttcgtgaagcagaatgagggctgggtgaaggagctggagacgatgcttcgcaccaagcaaaaggctgagatacaggccctcagttccttcgggttccagtacctcactgaggtctacctgcctcttaagttgcaggagcaggattggatttgagaactctccaatgctagatatcagtaatttccctagccaagataatgccctcctccgctcagtattttcaaggaccaaattggcatgaatgaagacttcgctatctagttaatcacatgtatttttgaacaccagctgttgtattatttatttctgctggagaactgttctgtggaaaacattgctgccagatatgtgctggaatttgatacataacacaggtgatttaaattggttcggcctcttatctggtcgaactttggttgttctgtgtcctatatttctgtagggcttattagttccgtgtttgacatggaaatgggataacccggattgaatgaaaatgtactggaaattgatatatagcagtatgaaaatccatgcatgatgtctttagaaacatgacaattaaattcaattaccctgttttcatatgtacacccaatcctagaataactgtaccaatttattgtatagtaaatggaccaaaaggctattgtaagaaaatgtcacactgcaatccttgcggctttcttcttcaaccaatggttcagtgagttaatagggatttttatcattccctgtggtctcctagtgaattctttggatatttgctctaaattacctctagattttgttggtgctttggattttgatgaaacaggagggcggcttccaggttcaatcaaaactaatttcaacttcagctcttgcctgcacgacatcaactgcactagtttcagtaattattgcctgcacgatgtcaactgcagtagtttcagcttcagctcttgatgtcttctcatgatccgtgatgataatacgaagtggcagctcaacatgacctaggaggtattgctctttgatcttccgaagaacagatagaacaattcgagcttcaacctgcagaatacatggtattatggattacggtaagcacaaaaaacatagtgatggtttctgtaaatatcgctattcaaaatcagtcattatgttcatgtagcagatcatctgcatatcatatagcttgaattagttggatgtcatttattaccttttggaaggccacaaacatcgacaatttggttctgatcagcatcttt

SEQ ID NO: 86797 - DNA, 1180 bp, Zea Mays
ccctccgccgccttccgatctctcgctcctccccatgtcggagaaaaagcgccgcgccggtgcgagcgcggccggcgccgcatccagctccaagaagccgcgtgcttcctcggccgcgtcgtacgccgagtccctccgctcgaagctccgccccgacgcctccatcctggccaccctccgctccctcgcttctgcctccgcttccaaatccaaggccgccgccaggtccctcgcggaccacgacccgtgcgcggaccccgcctcgtcttcgccgacgacggggaccggatcgactgcacgcgcatgggcgtcggcggcaaggccattccgcccaacgtcgacagggtctcgggcatcgagagcgacgcgctcttcatcctcctggtggagaaggacgctgcattcatgcgactcgccgaggacaggttctacaaccgcttcccctgcatcattctgacggccaaggggcagccagatgtcgccacccggctgttcctgcggaggctcaaggttgagctgaagctgccagtgctcgcgctggtggattccgatccatacgggctcaagatcttgtcggtgtacatgtgtggttccaagaacatgtcgtatgacagtgccaatctgacgacgccggacatcaagtggctcggtgtccggccgagcgacctggacaagtacagagtgccggagcagtgccgtctccccatgaccgatcacgatatcaaggtggggaaagagctgctcgaggaggacttcgtgaagcagaatgagggctgggtgaaggagctggagacgatgcttcgcaccaagcaaaaggctgagatacaggccctcagttccttcgggttccagtacctcactgaggtctacctgcctcttaagttgcaggagcaggattggatttgagaactctccaatgctagatatcagtaatttccctagccaagataatgccctcctccgctcagtattttcaaggaccaaattggcatgaatgaagacttcgctatctagttaatcacatgtatttttgaacaccagctgttgtattatttatttctgctggagaactgttctgtggaaaacattgctgccagatatgtgctggaatttgatacataacacaggtgatttaaattggttcggcctcttatctggtcgaactttggttgttctgtgt

SEQ ID NO: 86798 - DNA, 1455 bp, Zea Mays
atccagctcatggtatctgtccgactcaccaaatgttcagatcaaacatagagaaatatcaaatatcgggagccactaaatcctactagttaaagaatggttttacagagtgttgacatgctccgccaaattttaccagacctccacagcttcccaccttcccatttggaaaacaacgaactgcagtttccctgcactggcgttacccaaggcgtgacggatggtttctctcgtacagcgagagccacacacacactgcgacctcctaggcagtgagtgcagacgtgcagtatgactcctctcgctccttccattcacgcaagcgcaagtgcgcaacttgctgctctcgctgtctcagattccctgctacgccgcctcctccgcggctccgccaccagtctcccctgcaaccgggaatccgggataagaggaagagaaaccgcgcggcaaaaggaaaggagtacaggagcgagaaaagaatctctgaccggagtcctgccaggctgatagattcctggcagccatggatatactgctaggttctgggagattcttggcgcgacggactcccctcatgctcgtccctcgctgctctcgaggctcccgggacagaagcggcagcgacaaaggtgaaacctctgctgactgggacaaggcatgggctaagttcaagaagaaagggaagaggaccctcttttctgatttctcaccagacaagtatgtgacctggaacccacggcgcagcgagtatccgttgtcagaagaggttgatccaatcaagagaactgaaagatctaacttgatgctttggacgagtccccagttcacgttggtgggggcgattatcatcgtcttgacattactaatctacacactagtcgttcctcccaagtaactgcacaagtgacagctaggaggtgagttgtaaatcaatattatttcaaatgggaagtctggattgtacaatttttacgtgcattacaccaactacagtagtattgcctccattgcaacctagttgtatattaagttactcttcattccatcgaagaaatatttgggggccaggtacaataatatgttggtcggtattcaataaatcataatacatgctgatgctcctgatttaacttttgcgcacgttctaacttctcagcgactgcaatgtctggtcatcgaatattagctgtattaatcagtgaacggtagtttgtagtgttgggactatttgggcaagtggacatgtgcaaagtatcaaattgggagctgatatgtacacacgaggatcatgtttcttgtaacagacaaatccaagtcaaaagagacagatcattgtcttcatacaataataagccctaggcagacaggaatcttgcttagatgtaaagctgtgtaactaaccttgtttcctaggccctaaataattggctcatgtctcttgtgccggaggcatca

SEQ ID NO: 86799 - DNA, 615 bp, Zea Mays
atcccactcgcgccatcacccgacgcaaagaccactctcagccagcctcaaggcgcgcgcaacgccgctcctgcgcttgcgtgggtcgtcggcatggacaagcaggatgagaggaagaagccccacgggaaaacagaccccaagaggggcgacatcatgaagcggatcataaaggacctcaccggcggcggcaacgacggcggcggcggtgccagtgacggtggtggtaacagcggctccggctccacccccgctggcgccgactgacgcacatggcgcgtgcgtacccagttacgacggcaggggcgagcggtgagcccccgtgaatccgtgatggtttgtgtagttgttgctttctcgaatctggttatctggcaaggctagctgccggctgcgtatcgtacgttagtgtagggggcggtcagcgttcggatggcgggatgggtggtgtgcaatttaagactgtgctgtgtaacacttgtgctcaataattgtggatgatcaaatcgatggggccgcacgcccgcacctatttgcgtctctctcctctttgctgaatctctcctcgttgtcgttactattcacgtggtaattattatattttttttttgtctc

SEQ ID NO: 86800 - DNA, 1354 bp, Zea Mays
caaatttatatcctttctccccgtacgatcgttcagattgacggccatgatgcaccctacgagaagcttccctttctccttgtccttgcaaccctccgccctttcggttgtcgcaatataaacttgccggggagcgtggcgaccatttgcccccagcagatcttgtgaccctccctcagccgcgtcgcgtcgcatcctacgatccaaagctctctctggtcgcaggtcgcagccatggcgaagaactacccgaccgtgagcgccgagtacagcgaggctgtggacaaggccaggcgcaagctccgagccctcatcgccgagaagagctgcgccccgctcatgctccgcctcgcgtggcactccgcggggacgttcgacgtgtcgtcgaggaccggcggtccattcggcacgatgaagcatcagtcggaattggctcacggcgctaacgcggggctggacatcgcggtgcggctgctcgagcccatcaaggaggagttcccaatcctctcttacgccgatttctaccagctcgcgggagttgtggccgtggaggtcaccggtgggcctgagattcccttccaccccggtagggaggacaagcctcagcccccacctgagggccgccttcctgatgccactaagggttctgaccacctgaggcaagtttttggcaagcagatgggcttgagcgatcaggacattgttgccctctctggtggccacaccttgggaaggtgccacaaagagcggtctggtttcgagggggcctggactacaaaccctttggtctttgacaactcttacttcaaggaacttctgagtggtgataaggagggccttcttcagctcccaagtgacaaagccctgctgagtgaccctgtcttccgccctcttgtcgagaaatatgctgcggatgagaaggctttctttgatgactacaaagaggcccacctcaagctctccgaactggggtttgctgatgcttaaatagaccctatcctggagtgatacattctgctgcatgtggtcttttgcatctggagtcaatgtgaacaagcagattgtcgtattgtctttctcgtaataaatttgtcaatgttgagcccttaggcttgaattgtgggaccctttgttcgttttcctagactctgatgctgtatgcaactgaaacgagtaaatctatgatcttaaggctgcagtatgttcttgtgttactgtgcgtttatctagtttccgttggttcggttcacagcttgtgtggtttaataggttgtgcttgtgctgcgtgactggtcgtgcaacttgagtccgagtcttccatagttccaattttctcttggcggctaacacactt

SEQ ID NO: 86801 - DNA, 1233 bp, Zea Mays
agattgacggccatgatgcaccctacgagaagcttccctttctccttgtccttgcaaccctccgccctttcggttgtcgcaatataaacttgccggggagcgtggcgaccatttgcccccagcagatcttgtgaccctccctcagccgcgtcgcgtcgcatcctacgatccaaagctctctctggtcgcaggtcgcagccatggcgaagaactacccgaccgtgagcgccgagtacagcgaggctgtggacaaggccaggcgcaagctccgagccctcatcgccgagaagagctgcgccccgctcatgctccgcctcgcgtggcactccgcggggacgttcgacgtgtcgtcgaggaccggcggtccattcggcacgatgaagcatcagtcggaattggctcacggcgctaacgcggggctggacatcgcggtgcggctgctcgagcccatcaaggaggagttcccaatcctctcttacgccgatttctaccagcccccacctgagggccgccttcctgatgccactaagggttctgaccacctgaggcaagtttttggcaagcagatgggcttgagcgatcaggacattgttgccctctctggtggccacaccttgggaaggtgccacaaagagcggtctggtttcgagggggcctggactacaaaccctttggtctttgacaactcttacttcaaggaacttctgagtggtgataaggagggccttcttcagctcccaagtgacaaagccctgctgagtgaccctgtcttccgccctcttgtcgagaaatatgctgcggatgagaaggctttctttgatgactacaaagaggcccacctcaagctctccgaactggggtttgctgatgcttaaatagaccctatcctggagtgatacattctgctgcatgtggtcttttgcatctggagtcaatgtgaacaagcagattgtcgtattgtctttctcgtaataaatttgtcaatgttgagcccttaggcttgaattgtgggaccctttgttcgttttcctagactctgatgctgtatgcaactgaaacgagtaaatctatgatcttaaggctgcagtatgttcttgtgttactgtgcgtttatctagtttccgttggttcggttcacagcttgtgtggtttaataggttgtgcttgtgctgcgtgactggtcgtgcaacttgagtccgagtcttccatagttccaattttctcttggcggct

SEQ ID NO: 86802 - DNA, 594 bp, Zea Mays
atggccgctttcgacgccgttccccgcctctccgctcaccagtacaaccaactccatctcgccgccgtcgaccgctcctccttccacagccccccccccccccccgccgcgcgccgtatcttcgcccacatgctccaggccgcagcgccgccctccgaggcccccatgatgcaaatctcccccgtccccatcttcgctgcatttcaggtcaaaacaacatcgccgaggaagtatttcgtccggccgaacgcgagcatcgtccagccatgggattcttgcacaataacgattaccctgcaggcacagaaagattacccaccagacatgcaatgcaaggataaattcttgattcagagcacgaaggtggccaccggtaccgagatggatgagatccccctgatacgttcaacaaggaaggctgataaggtaatcgaggaaatgaagctcaaggttgtctacacattacctagctacggaggttcaaatgactctagcgtatcatttttaggaagccggagcttcaaagcagcgtctgacgatctgatgatgctgaagaatgcaagccttgaagagcatttccccaagaatatctga

SEQ ID NO: 86803 - DNA, 116 bp, Zea Mays
gatgatatgtgttaagtctagtgcaatttgtttggtgaatttagtggaggttatgagtgcaagggtgatttggttgggtggggttttcaaagtttaaattggtggtttatatagtg

SEQ ID NO: 86804 - DNA, 2112 bp, Zea Mays
ctgggctagacagaccggctcatgttggcaaaatattctgggccgtatcatgttggcaaaaatatactgactccggtccgcaactccggatgtgtcggcgaccaggcaaagctccgtgtcctctcgtctcgtgtgactgacgaccaggtgggagggccataaggcctttagcgcggcggcggcaatggcgcccacggcctgcctccggacccccttcttccccgcccgtgcccgatccaccaacgccaccccgttctcgccacaccgccgcttttctctcaaatgcagcgcctccaacggtgacaactccaaccccaactccatctccatctctcccacctcgccgcctcggctaacggtgtcggacggcgtcgagtctgtggacgttaacgggttgcgtcgcccgccagcgcccgcctccgtccccgccgcccgcgatccccactggctgcctcgtccgctcacaagtgcggacgtcatggaggtggacgggaaggggctcaaggttgcttaccagggttgtgctggagcgtacagcgaagcagcagcaaagaaggcgtacccgaattgtgagactgtgccctgtgagcacttcgacactgcatttcaggctgttcaaaactgggtagctgatagggccgtactgccacttgagaattcattgggaggtagcatacataggaattatgatcttttgcttcggcatagtttgcacattgtaggagaagttcgccttgcggttcgccattgcttattagccaatcctggcgtgaagattgaaaacctgaaaagtgctatgagtcatccccaggctcttgcgcaatgtgagcacacattaacatcactaggaattgagcatagagaagctgttgacgacactgctggtgcagcaaagattgttgcagaacatatgctccaggacactggtgctattgctagttcgttggcggctaaactgtatggattggatgttcttgctgagaatattcaggatgacaaagataatgtcacccgttttatgatgctagctcgagaacccatcatacctcgcactgataaaccatttaagacaagcatagtcttttcactagaagaaggacctggacagctctttaaggcacttgctgtatttgcactgagggacatcaacctcacaaagattgaaagtcgtccacacaaggaaaggcctcttcgggtatctgatgactgttcctcactcttaaagaactttgattaccttttttatgttgaccttgaagcatcaatggctgatccaaagactcagaatgctcttggaaatctgaaggagtttgcaacatttttaagagttcttggaagctatcctacagatgtgaatgaaccttagattgaaagtactgcagattacatactggagaaaataccagaaaataatagatatggaaaggtgtattgcatgattagcaggaataggcaaaatggttagagttggtttcctgagcaagttaaaatgaggaactctattaaggtgatgctaacttttagtcttttacagagtaaaaggatctactctagaccagtagggaccggtgcattcgaggctcacatttggttgtgatattgagaggaaagtctgatgttttgctggtgatttttctgatgatttaagtcttctccaatctcctatggataccaaagggttgaatattcggaaatacttcaatgtacaaggtttatatgtttcatgttggagaatctgtgtcatggtagcatgcaggttgctaaagcacagttacagtgaaataatgggacaatgtctaagaacaccgccctttttttgtgacaatataataagaactgaataactgatgtttccatgtctgggcgattgggccggcgttcctcaaaaatcatatttgctgtcattacgcgctccatgcacatacatctggcggtggtcacgttggccaagcatcgccaaactttccttctgtagaaggaagtcatttggcgcttcttatttttttctattgatggaacggattttggtgctccttgattgccttgatcagtgccaggtcaaattcggcagttcaagtttcgagcaggttagtcggtttggttcaggttcct

SEQ ID NO: 86805 - DNA, 1971 bp, Zea Mays
ctgggctagacagaccggctcatgttggcaaaatattctgggccgtatcatgttggcaaaaatatactgactccggtccgcaactccggatgtgtcggcgaccaggcaaagctccgtgtcctctcgtctcgtgtgactgacgaccaggtgggagggccataaggcctttagcgcggcggcggcaatggcgcccacggcctgcctccggacccccttcttccccgcccgtgcccgatccaccaacgccaccccgttctcgccacaccgccgcttttctctcaaatgcagcgcctccaacggtgacaactccaaccccaactccatctccatctctcccacctcgccgcctcggctaacggtgtcggacggcgtcgagtctgtggacgttaacgggttgcgtcgcccgccagcgcccgcctccgtccccgccgcccgcgatccccactggctgcctcgtccgctcacaagtgcggacgtcatggaggtggacgggaaggggctcaaggttgcttaccagggttgtgctggagcgtacagcgaagcagcagcaaagaaggcgtacccgaattgtgagactgtgccctgtgagcacttcgacactgcatttcaggctgttcaaaactgggtagctgatagggccgtactgccacttgagaattcattgggaggtagcatacataggaattatgatcttttgcttcggcatagtttgcacattgtaggagaagttcgccttgcggttcgccattgcttattagccaatcctggcgtgaagattgaaaacctgaaaagtgctatgagtcatccccaggctcttgcgcaatgtgagcacacattaacatcactaggaattgagcatagagaagctgttgacgacactgctggtgcagcaaagattgttgcagaacatatgctccaggacactggtgctattgctagttcgttggcggctaaactgtatggattggatgttcttgctgagaatattcaggatgacaaagataatgtcacccgttttatgatgctagctcgagaacccatcatacctcgcactgataaaccatttaagacaagcatagtcttttcactagaagaaggacctggacagctctttaaggcacttgctgtatttgcactgagggacatcaacctcacaaagattgaaagtcgtccacacaaggaaaggcctcttcgggtatctgatgactgttcctcactcttaaagaactttgattaccttttttatgttgaccttgaagcatcaatggctgatccaaagactcagaatgctcttggaaatctgaaggagtttgcaacatttttaagagttcttggaagctatcctacagatgtgaatgaaccttagattgaaagtactgcagattacatactgagtaaaaggatctactctagaccagtagggaccggtgcattcgaggctcacatttggttgtgatattgagaggaaagtctgatgttttgctggtgatttttctgatgatttaagtcttctccaatctcctatggataccaaagggttgaatattcggaaatacttcaatgtacaaggtttatatgtttcatgttggagaatctgtgtcatggtagcatgcaggttgctaaagcacagttacagtgaaataatgggacaatgtctaagaacaccgccctttttttgtgacaatataataagaactgaataactgatgtttccatgtctgggcgattgggccggcgttcctcaaaaatcatatttgctgtcattacgcgctccatgcacatacatctggcggtggtcacgttggccaagcatcgccaaactttccttctgtagaaggaagtcatttggcgcttcttatttttttctattgatggaacggattttggtgctccttgattgccttgatcagtgccaggtcaaattcggcagttcaagtttcgagcaggttagtcggtttggttcaggttcct

SEQ ID NO: 86806 - DNA, 2002 bp, Zea Mays
ctgactccggtccgcaactccggatgtgtcggcgaccaggcaaagctccgtgtcctctcgtctcgtgtgactgacgaccaggtgggagggccataaggcctttagcgcggcggcggcaatggcgcccacggcctgcctccggacccccttcttccccgcccgtgcccgatccaccaacgccaccccgttctcgccacaccgccgcttttctctcaaatgcagcgcctccaacggtgacaactccaaccccaactccatctccatctctcccacctcgccgcctcggctaacggtgtcggacggcgtcgagtctgtggacgttaacgggttgcgtcgcccgccagcgcccgcctccgtccccgccgcccgcgatccccactggctgcctcgtccgctcacaagtgcggacgtcatggaggtggacgggaaggggctcaaggttgcttaccagggttgtgctggagcgtacagcgaagcagcagcaaagaaggcgtacccgaattgtgagactgtgccctgtgagcacttcgacactgcatttcaggctgttcaaaactgggtagctgatagggccgtactgccacttgagaattcattgggaggtagcatacataggaattatgatcttttgcttcggcatagtttgcacattgtaggagaagttcgccttgcggttcgccattgcttattagccaatcctggcgtgaagattgaaaacctgaaaagtgctatgagtcatccccaggctcttgcgcaatgtgagcacacattaacatcactaggaattgagcatagagaagctgttgacgacactgctggtgcagcaaagattgttgcagaacatatgctccaggacactggtgctattgctagttcgttggcggctaaactgtatggattggatgttcttgctgagaatattcaggatgacaaagataatgtcacccgttttatgatgctagctcgagaacccatcatacctcgcactgataaaccatttaagacaagcatagtcttttcactagaagaaggacctggacagctctttaaggcacttgctgtatttgcactgagggacatcaacctcacaaagattgaaagtcgtccacacaaggaaaggcctcttcgggtatctgatgactgttcctcactcttaaagaactttgattaccttttttatgttgaccttgaagcatcaatggctgatccaaagactcagaatgctcttggaaatctgaaggagtttgcaacatttttaagagttcttggaagctatcctacagatgtgaatgaaccttagattgaaagtactgcagattacatactggattagcaggaataggcaaaatggttagagttggtttcctgagcaagttaaaatgaggaactctattaaggtgatgctaacttttagtcttttacagagtaaaaggatctactctagaccagtagggaccggtgcattcgaggctcacatttggttgtgatattgagaggaaagtctgatgttttgctggtgatttttctgatgatttaagtcttctccaatctcctatggataccaaagggttgaatattcggaaatacttcaatgtacaaggtttatatgtttcatgttggagaatctgtgtcatggtagcatgcaggttgctaaagcacagttacagtgaaataatgggacaatgtctaagaacaccgccctttttttgtgacaatataataagaactgaataactgatgtttccatgtctgggcgattgggccggcgttcctcaaaaatcatatttgctgtcattacgcgctccatgcacatacatctggcggtggtcacgttggccaagcatcgccaaactttccttctgtagaaggaagtcatttggcgcttcttatttttttctattgatggaacggattttggtgctccttgattgccttgatcagtgccaggtcaaattcggcagttcaagtttcgagcaggttagtcggtttggttcaggttcct

SEQ ID NO: 86807 - DNA, 3160 bp, Zea Mays
actccggtccgcaactccggatgtgtcggcgaccaggcaaagctccgtgtcctctcgtctcgtgtgactgacgaccaggtgggagggccataaggcctttagcgcggcggcggcaatggcgcccacggcctgcctccggacccccttcttccccgcccgtgcccgatccaccaacgccaccccgttctcgccacaccgccgcttttctctcaaatgcagcgcctccaacggtgacaactccaaccccaactccatctccatctctcccacctcgccgcctcggctaacggtgtcggacggcgtcgagtctgtggacgttaacgggttgcgtcgcccgccagcgcccgcctccgtccccgccgcccgcgatccccactggctgcctcgtccgctcacaagtgcggacgtcatggaggtggacgggaaggggctcaaggttgcttaccagggttgtgctggagcgtacagcgaagcagcagcaaagaaggcgtacccgaattgtgagactgtgccctgtgagcacttcgacactgcatttcaggctgttcaaaactgggtagctgatagggccgtactgccacttgagaattcattgggaggtagcatacataggaattatgatcttttgcttcggcatagtttgcacattgtaggagaagttcgccttgcggttcgccattgcttattagccaatcctggcgtgaagattgaaaacctgaaaagtgctatgagtcatccccaggctcttgcgcaatgtgagcacacattaacatcactaggaattgagcatagagaagctgttgacgacactgctggtgcagcaaagattgttgcagaacatatgctccaggacactggtgctattgctagttcgttggcggctaaactgtatggattggatgttcttgctgagaatattcaggatgacaaagataatgtcacccgttttatgatgctagctcgagaacccatcatacctcgcactgataaaccatttaagacaagcatagtcttttcactagaagaaggacctggacagctctttaaggcacttgctgtatttgcactgagggacatcaacctcacaaagattgaaagtcgtccacacaaggaaaggcctcttcgggtatctgatgactgttcctcactcttaaagaactttgattaccttttttatgttgaccttgaagcatcaatggctgatccaaagactcagaatgctcttggaaatctgaaggagtttgcaacatttttaagagttcttggaagctatcctacagatgtgaatgaaccttagattgaaagtactgcagattacatactggtgagtaatgaataacattgtctactttttgtgctttgttactatagtatggtgaacgaaagaacattcttttattttcagtttcaacgacataatatgttggagttgggcaagtcacttgagtgacatgcttcttttataaaatgtaatgcatggtttgacttggtgcaccttaaaacgaatggggagactactactagacatttgtgggtgaatatccgttccttagtttgcttgggttgagtagatgtagaacaactttttggtatatgatcagaagtattctaatcagcaaaaaaacacacattaaaaaggagaattgttccacataattcaattcttccaaccaacaaaaacattgttctgttagattggacgcactaaccagttcaacccaaaagtttaagctgatgggagaaggtagtcaatccacttatacatttcaacaccccactcacgtgcagacagagagaaaagtgcaaacgtggaaataaatgggtgaaggcataaataaagcctctgtcatgattcgaactcgagacctctagctccgataccatgttagagtggatgcactaactagttcaacccaaaagcttaaactgataaaagaagataaccaatccacttatacacttcaacatgtttcacattgaaaaggtactgttctagaattaaattattctgaactataaaattgttaggcattgaaaagaaatttgttccagactttcaggcataaaatcaaattgtttttttctcgaaagcgcaggagaactacgcaataatgtattaaagaagaggtacatatacaagaacaaactaggggcccctacggcagccaataacaggcatacagaaacccatccatgactaaaaaactaacaagaactaccacaatgctagctaactagaagggaggcccggaatgggggcggtaagcaaagacaacttctttgcaccagccatctcccaaaggtcaacctccaacccaactcttctaataccatcagtaatactggggctcttgttgtaaaaaacacaaccattgtgctgcttccataaggtccaaactcccaggattactagagaattgaggccatcccttgcgattccagagaccttagtacataacattctccaccattcaaggaaggcactatcctcggattgggggcaagaagctgaaggttcacttgatgaagtagtttgaaccaaaattctcgagcaaaaacacatccaatcaacatatgatccaaggtttcttgatcctgatcacataatggacatctctccggatggtccgtgccttttttctgtagcctatctgatgttcaaaccttcctgtgtgcgaccagccacataaaaaacttagtttttggaggagcccaagttttccatattctatgaaaaggctcaaactcagaagatccaataaaggaaccccctatatgcttcctttgaggagaactttccgtttgcagctaggcgataaaaatgcttgtcttcaacttgaggtcttagaacaattgagtcaactaaatcccacaagatgagaaactcattgataattccaacagaaagagctccctgaatgccagaaagccagctctgattagagatagcatccaccactgttctcttgttaactcttttcttaggaatgatcccaaataatcgaggggctaagtctacaattctgtgacccaatagccacctatcggtccagaaaaaaaatcaaattgttctaacccacaaaaagttgttccatgcaaaagataaattgttctaggacattaaattgaattattctaatcaacaaccaaaaaaatcaaa

SEQ ID NO: 86808 - DNA, 1508 bp, Zea Mays
atgacggccaagggcggcgccacgccgtcccccggcggcgcgggcccccgcggcggggaacggccgcctcttcaccgtcgggctggtcaccgcctggtactcctccaacatcggcgtgctcctgctcaacaagtacctcctcagcaactacggcttcaagtaccccatcttcctcaccatgtgccacatgtccgcctgcgccctgctctcctacgccgccatcgcctggctgcgcgtcgtgcccatgcagctcgtgcgctcccgcgtccagctcgccaagatcgccgcgctcagcctcgtcttctgcggctccgtcgtctccggcaacgtctcgctgcgctacctccccgtctccttcaaccaggcggtcggcgccaccacgcctttcttcaccgccgtcttcgcctacatcatgaccgtcaagcgcgagtcctgggtcacctacctcaccctcgtgcccgtcgtcaccggagtcatcatcgccagcggcggcgagcctagctttcatctgtttggattcatcatgtgcataggagcaactgcagcaagggcgttgaagacagtattgcaaggaattcttctgtcttccgatggggagaagcttaattctatgaatctgttgttgtacatggctccaatcgctgttatcttcttgcttcctgcaactatctttatggaggataatgttgtcggcgttacaattgagcttgcaaagaaggatttcacgattgtttggttgcttttgttcaattcttgcttgtcgtattttgtcaatttgaccaatttcttggtgaccaagcatactagtgcactgactctacaggttctcggaaatgcaaagggtgcggtggcagttgtcgtctcgattatgatattcaggaatcccgtgtccataacaggaatgctcggttatactctcacagtttttggcgtcattctttacagtgaatcgaaaaagcgcagcaacaagccatgaataccctaggagacagtaaatatgggaaatcatttctttgtcctgtcagtgcctagagctaatatatgatgagaaatcacatcggtggcgaccacaacaaatcctatgccatactgcctcagcaattggacatcaaggatagaagtccaataactaccttggcatatgggaggcattttgttttatggcgttgatggatagaatataaatatttttttgtgtgtgttagagaactatggctcacactgccagcattggttgatacgtttagctcttgggaaattgcctcttgtattcatcttctgctgctgcagtttccattttgttttgttgtgaagaccacctataccacactttgatccaggttccgggacctaattaatatattgtgacactgaattgatgctcagttagcggacttttggtgacacaatgttgtcccatcatgactgccaatgtaaagtctacatgactacatagctacattgttggttcagatttgcatgcaactgcccagctgttttgactgtga

SEQ ID NO: 86809 - DNA, 1925 bp, Zea Mays
tcgactagcagattctaccatttaaaaatcccacaaaatccccaacccctcctatctcctagtgcattccaccgctcaccatggccgccgccgccatcgaagcagctggtcgccggaagggtagctgcttcttggaagtcggccgccgcgagatcggctcttcattcccccgcgtctcttcccgccgaatcagcggctccgagcatatagtgtcgtctatgtctcagtatggaaaattgcatggtcatgaaggctgtgttaataccgtaagcttcaaccctgctggagacctccttgtgtctggttcagacgacacaaacatcatactatgggactggctttctaaaactaaaaagcttgtttacccttctggtcaccaagataatgtcttccatgctcgtgtgatgccgtttactgatgacagcaccatcgtaactgttgctgctgatggccaggtacgagtaggacgactaaaggagggcggtgaagtcacaactaaactagttggggagcacgattcacgggtgcataagatggctattgaaccaggaaacccttacatattttacagttgtggagaggatggcttggtacaacattttgacttaagaagcgattcagcaacaaagcttttcacctgctgttctttcttgaatgacagacgccgtgtaaaactgaatagcattgtcattgacccacagaatccttactatttttcaattggtggttccgacgagtatgcacgtttgtatgacatgaggaaattccagttggatggttcaagaaacacaaaccagcctgtagataccttctgccctaagcaccttattaagggtgcgagtgcgagggtccacatcaccagtattgcatattcctatgcaagggagatacttgtatcctacaatgatgagcttatctatttgttccaacacaatataggtcttggtccaaatcctgtgtcggcagagccagagtttttcaacatgcttgatcagccacaagcatacagagggcacaggaattttcgaactgttaagggagtcagtttctttggacaacatgatgaatatgttgtgagtggatcagattgcgggaatgtattcatatggaggaagaagggaggtgaattgatcaggatgatgaatggtgacaaaagtgtagttaactgcattgaaccccacccgcatttcccatttatggctactagtgggattgataacactgttaagctttggactcctgcagctaaaaaattgattatgccgctgcctaaaaatgcaaagcaaataatagccgctaatgaacttgagaggacagttcatatttctcaagcaacagcgacactttcatctgatgtcatgatgcatgtgttgaggttgttacgtaggagagattctgaaatgaatatcgagaatgagccggctagtgcagatttggccagtgatgacgatgaggctttcgactttggatttgacgatgcggaaaggaacgaaagggaaaactctgatcccagagaatgcaacatgacatagctaaaacaactggggattttttttttgcagcctgggcctggccctgcctctatgttggagtaaactgaataggtcttagatttcagttctacatagtaaggtgtgctgaatgggcctgaccgcctgatacacatgggaggactatacaggtcgtgattattaatggagaaactaaacgggtagagccacatcctaccactcggttattctgctctagttttaacgcatgttcaatcttctcgattgccgtatacctagcctagtaaaataagttgtgcaccccagcctgtgtgattatgaactgtaaacctgaatttttagttatcatcaggcaatatgtacataggttttccgtagtgtggaaatgttgagaagtttgttgtttcatctgtc

SEQ ID NO: 86810 - DNA, 449 bp, Zea Mays
gataattcgtgccgatatgccatccctgcaaacatacaacagagacttatcgatatcgctaaaaaggattagctgattagtgtacggttgtcgacacatttatctgtaattaaaaattctaaattaactttttagaaataatttgtgtgacaatgataatgttttccacacggattttgcatattatagtgatgtttgtcgttccgtatcaatgttttatacaaatgttttacttctgtcgcaacgcacgggaacatacatgtaacaatataacacacatatgtacataagttattgtgttattatacggttccgttgcaacgcacgggcactcacctaataaaagatagaaatagaatgcaggaagcagtgaaataatactatttgcacgagctagcttgctagttttagggggttaaagacaaaccacagatggctgccttcattgt

SEQ ID NO: 86811 - DNA, 1453 bp, Zea Mays
ggtcgggaagtgttagcattagtgcgtcactaaactcgcacgccacctaatgatttacatttgctgctgcgtctgggatatataaaggaaaaaaagcgtgacaccaacccgacaccggctcccctcgctggctctcctccgcagctccgctcccctgctcgccacctcccgcccattttaaaccaccaccactaccaaactttgcttgcctccccagtccccaccaccgcttggctgccgcttgctgctgcggtcgtctagctaagctagcttacatagccagcttcgacacgtcgcgacgcagattaagcggcacgaggccagcctccgggagctggtggtggagctaggcaggcggcgttgtgcttgctggcttctgtgatggggtcgtccacggatcacgccgccggtgcccgtggcaagaagcaggggtcgcagctgtggaagaaggcgctgctgcattcctccctctgcttcgtgatgggcttcttcaccggcttcgcgccgtcgtccgtgtccgactggacgtccgcggcggcggcggcggggggccgggtgggcagcagccacgtggtccgggcgctgccggcgggcggcgccggggccgtgaaccggagcctgctggcgcacgacgcggggggcggcggcctgccgcgcgacccggcgtccccgcgcccgctcctggtggtcgtcacgacgacggagtcgacgcccgcggcgaccggcgagcgcgccgccgcgctgacgcgggcggcgcacgcgctgcgtctggtggcgccgccgctgctgtgggtggtggtggaggccgccccggacgcgccggccacggcgcggctgctgcgcgccacggggctcatgtaccgccacctgacctacaaggacaacttcacctccgccgacgccgccgcgggcagggagcggcaccaccagcgcaacgtggcgctcggacacatcgagcaccaccgcctcgccggcgtcgtcctcttcgcgggcctcggcgacgtgttcgacctccgcttcttcgacgagctcaggggaatcaggtaccagccagccatcatcattgcttgcttcacggcgcgtacgacgtgtattgttgccagagcaaaactctcatcttcattacataaatagttaaaacaaaacgacggaaaatgtttaatgcgccgatctttcttggtgcgagcaagagctagttaagctaagcgcggcacgtcgacgccatcacgccatgcgcgtgcccaaagcacacacttgtcatcgctcgctagctgccagcgcgcgactttgtcaggctgtacagagagagcaacagctcacgcacagcacggcaccgccgcctggtgaccttaatcagcggtgagaactgagaacccggggcatcaggcatgtgatgcgaggaggtcgccctacccatcccggcgtccgccattcaagggccctttaccctttg

SEQ ID NO: 86812 - DNA, 1778 bp, Zea Mays
accggctcccctcgctggctctcctccgcagctccgctcccctgctcgccacctcccgcccattttaaaccaccaccactaccaaactttgcttgcctccccagtccccaccaccgcttggctgccgcttgctgctgcggtcgtctagctaagctagcttacatagccagcttcgacacgtcgcgacgcagattaagcggcacgaggccagcctccgggagctggtggtggagctaggcaggcggcgttgtgcttgctggcttctgtgatggggtcgtccacggatcacgccgccggtgcccgtggcaagaagcaggggtcgcagctgtggaagaaggcgctgctgcattcctccctctgcttcgtgatgggcttcttcaccggcttcgcgccgtcgtccgtgtccgactggacgtccgcggcggcggcggcggggggccgggtgggcagcagccacgtggtccgggcgctgccggcgggcggcgccggggccgtgaaccggagcctgctggcgcacgacgcggggggcggcggcctgccgcgcgacccggcgtccccgcgcccgctcctggtggtcgtcacgacgacggagtcgacgcccgcggcgaccggcgagcgcgccgccgcgctgacgcgggcggcgcacgcgctgcgtctggtggcgccgccgctgctgtgggtggtggtggaggccgccccggacgcgccggccacggcgcggctgctgcgcgccacggggctcatgtaccgccacctgacctacaaggacaacttcacctccgccgacgccgccgcgggcagggagcggcaccaccagcgcaacgtggcgctcggacacatcgagcaccaccgcctcgccggcgtcgtcctcttcgcgggcctcggcgacgtgttcgacctccgcttcttcgacgagctcaggggaatcagcgcgttcggcgcgtggccggtggcgacgatgcggcgcggcgagaggaaggtggtcgtccggggccccgcgtgcagctcggccgcggtcaccggctggttctcccaggacttgggcggcagcggcaccgcggccgcctccgcatccacggcgaggcctggtgagctggacgtccacggcttcgccttcaacagctccgtgctctgggaccccgagcgctggggccgctacccaacctccgagcccgacaagtcccaggactccatgaagttcgtccagcaagtggtcctggaagattttagcaaggtgaagggcatcccttccgactgctcagaggtcatggtatggcacgtcgatacggctgcgccgtctttgcagaacaagaagagaagatagagagctcaactctagaacagaacggggacgagctggatggaggacggctgagtgtgttcgttgtacatgcatgtctacgccgtcaagaatcaagatgctggttgccccctgctcggtacctgcaaagaaggaaaatttttgagtttctcaccggaggatggatcagcctctgaacaccacccccccccccccttctccatcatgatgtacaattttccactgttcttttctttttttttctaaaagaagttgtgatatatgtatatttttttcttttctagagggtttaggtgaatacatacataatacccccttgaagtgcctctcaacaaggatgtaatggaaagaaaggcaagctaaagaccagcttaacaatgatggtacacatgagaatgttctcttctgttcagaagttatttccaatacaagatatccagttcgtagcaaagataga

SEQ ID NO: 86813 - DNA, 556 bp, Zea Mays
gcctgttacaatgcttttgcatgtggacacattcctttttcgtttggttttctgcttcatttgacagtattctctactgacaccaacgtgaaactggatgcacccatgctactgcaggacctagggatgtggaatcgctgaagaacttcgtgttgaatgaagctgagaaagcaggcgaggcaaagcttgaagctgattgaggcaggggagtttcagcaagcatgtggcgagtggcgtagacaaggaacaatgctttgcaacattgtcttctatcctgtcatttacaaagccagtttacaggaaagaaatgaccttatgagctcgtatcagagtattcctcttccaaagtaactccgaatcagttcatagaagctgtactccattccatagtttttatcacattgacaaactctccgaatcagttaatagaagctgtactccattccacacattgacaaactgaagtaacgattggaacgcaaccatacaaaggcctgtttatgtcacttgcgcagttgcgcgtcttgcaacgatacatatagacctgttcatgtta

SEQ ID NO: 86814 - DNA, 2301 bp, Zea Mays
cccgtggacactagtggggaagaaagcaaccacggaaccaccgaagagacccaccggaaactcctacagccctaagcacacagcgtagcgggacccacaagtcagccaaacgtctcaagctcgccatttcgcctccgtttccaactcccagtgccggtcttccactcctcccttcttcgcctcccaatttccaaacctctctcttgggactgggagcacgtacacgcggaggaaaagcgatcggcgccgcggcggcaagatgactgcggcggcgacgatgacgtggcacgaggacctggccactctcgtgggggacacggacgttcacctcaccggcgccggggggcacgcgccggcgccggcggatgttacgccggcgggggccgggtggtacggggaggaggaagaggtgagggcggaggaggggtgggcgcagcaggcgaaggggttcgcggagtcgacggcggagatgctgcgggagctgggccgtgggctgtgggacgtcgccgcgcagagcctcgccggcgccgaggacagcgagctcgggcggcggctgcggaagcgggcggcggccacgggggagcgcctcagcttcatgaacgagtaccttcccgaggagcgcgacccagtgaggtgttggctcatcgtcgccgcagtctcattcgtcacgctcctagttttaggtgctgggaatggcaatgaaactccagtagagcttccaaagaaacttaccatctgtcccccaagtgctgatagaatccaacttcctgatggacgacatctggcttatgaagaacaaggagtctcagctaacagagcaagattttcactgattgctcctcattcttttctttcatcaaggctaacaggaattcctggaattagtgcatctcttctagaagaatttggagtacgacttgtgacctatgatcttcctggttttggtgaaagtgatccacacataggccggaatctcaattcttctgcactggacatgctctatctggctaatgctctcaatattccagagaagttctgggttgtgggctattctggaggtggcatgcatgcctggagtgctcttcattacattcctgatcgaattgctggtgcagcaatgttcgcacctatggcaaatccatatgactccaagatgacgaaagatgagaggagtaaaacatgggatagctggtcaacgaaacggaaactgatgcacattttagctcggaggtttccgtcactgctaccgttcttttatcgccaaaccttcctttctggaaagcaaggacagctggagagttggttgtcactgtcattagggaagaaggacaaaactttactggaaggtcctgtgttcaatgcattctgggaaaggaatgttgcagaggctgtgcgccagggagatgcaaggccatttgtagaggaagctgtgctgcaagtatctgactggggtttcagcttatctgacatccaaatgcagaagaaagaggctgggggattttttgagctcatcaagtctctgttcaatcaggccgaaagagagtgggtgggatttctgggcccaatacatatatggcaggggatggacgaccgagtggtctcgccggcagtggccgaatttgtgcggcgggtggttccaggagccacggtccacaagcttcttgacgaaggtcacttctcatacttctgcttctgcgacgagtgccacaggcagatattctccaccctcttcggcattccccagggccctatcaaccctgcaccgccgcagccaggcgaggtggtttcagagctcaccgaggaaacaacagtgccagacaatgccacagatgaggaacaaggaaaatcaggcctgccctgattcaagatcggtttcaggacccacaagtatagatacgagaccttactgctactaaaacacaatacctcaaatagacgggcttttcttcgctgcccatgggagcagcctgtgaatcgagctgctcctcttgcggaagtcgtgaaggcaaagcattggatggaggaggttgtgccgtctcagttcgatgtacaaaaatgctcatcacaaattcgcacggcacctgctcggtgcgcttttagtatagtcggtattacaattcgattaacctgttatgactcagctatattataggcttctttttgcacattatggttgaattgcgcccgcagctgaatttttgttcctttactagctatggcatgatccaacatcccgatccagcttaaggccagtaatgtattcgcctcttgcatgatgtaaaaaagttcgtctcttgctgc

SEQ ID NO: 86815 - DNA, 784 bp, Zea Mays
aacctacaaacgtatattcttaaataccttccccggcgcgatggccgcggccgcggcagaaacacagatgggcgacggggctccgccgccaggggctctatactccttcggaacgccgtggccggagctcaatcaaggcctcacctacaccgacacgttccgttgcgctgatgcggacgccgctaccaccttgattgagttctactctactaaccacaagagctcggcgccattgccagggtggatcaagaggattcgtaatgggcagataaccgttgatggtgaagttgtcactgatccagatatgactctggtggatgggtctaagttggtatatcatcgttttccttggcaggagccatttgcgccgtatttgctggaagtgctctacgaggatgatgacatggttgcccttaataagccttctggcttgcaagttctgcctaaaggactgtttcagcagcgaactgttttagcacagcttcaattgaaagactggaagatggcctcatcttgccggttcaagagaaaagatgtgcagtcacatccagtacctgttcatcgtttagggaggggaacatcaggcctcctgctttgtgccaagacaaaagttgccaaagttcgacttgcatcttattttgctgaaggtgctataaatgctgcaaagaaaagggataaatcagagttcagtgaagagcgaaaaatttcaaaattttatcgagccttagtgactggcatacttgatgatgatgaggtactatctcttatttgatacagtgttctg

SEQ ID NO: 86816 - DNA, 771 bp, Zea Mays
aacctacaaacgtatattcttaaataccttccccggcgcgatggccgcggccgcggcagaaacacagatgggcgacggggctccgccgccaggggctctatactccttcggaacgccgtggccggagctcaatcaaggcctcacctacaccgacacgttccgttgcgctgatgcggacgccgctaccaccttgattgagttctactctactaaccacaagagctcggcgccattgccagggtggatcaagaggattcgtaatgggcagataaccgttgatggtgaagttgtcactgatccagatatgactctgggatgggtctaagttggtatatcatcgttttccttggcaggagccatttgcgccgtatttgctggaagtgctctacgaggatgatgacatggttgcccttaataagccttctggcttgcaagttctgcctaaaggactgtttcagcagcgaactgttttagcacagcttcaattgaaagactggaagatggcctcatcttgccggttcaagagaaaagatgtgcagtcacatccagtacctgttcatcgtttagggaggggaacatcaggcctcctgctttgtgccaagacaaaagttgccaaagttcgacttgcatcttattttgctgaaggtgctataaatgctgcaaagaaaagagttcagtgaagagcgaaaaatttcaaaattttatcgagccttagtgactggcatacttgatgatgatgaggtactatctcttatttgatacagtgttctg

SEQ ID NO: 86817 - DNA, 935 bp, Zea Mays
aacctacaaacgtatattcttaaataccttccccggcgcgatggccgcggccgcggcagaaacacagatgggcgacggggctccgccgccaggggctctatactccttcggaacgccgtggccggagctcaatcaaggcctcacctacaccgacacgttccgttgcgctgatgcggacgccgctaccaccttgattgagttctactctactaaccacaagagctcggcgccattgccagggtggatcaagaggattcgtaatgggcagataaccgttgatggtgaagttgtcactgatccagatatgactctggtgtaatttttttcctctcagcaagcttattattgttatattcttcccaatctccaattgcattcgattgtttcctttggttctgtatttattttttaaagaagttcataaaccttaataatatgacaggtacctaagctaactcttttgcagggatgggtctaagttggtatatcatcgttttccttggcaggagccatttgcgccgtatttgctggaagtgctctacgaggatgatgacatggttgcccttaataagccttctggcttgcaagttctgcctaaaggactgtttcagcagcgaactgttttagcacagcttcaattgaaagactggaagatggcctcatcttgccggttcaagagaaaagatgtgcagtcacatccagtacctgttcatcgtttagggaggggaacatcaggcctcctgctttgtgccaagacaaaagttgccaaagttcgacttgcatcttattttgctgaaggtgctataaatgctgcaaagaaaagggataaatcagagttcagtgaagagcgaaaaatttcaaaattttatcgagccttagtgactggcatacttgatgatgatgaggtactatctcttatttgatacagtgttctg

SEQ ID NO: 86818 - DNA, 408 bp, Zea Mays
tgctgtaagaaaggagaagttcttatcatttttttagaagatattttttcaagtattcacattatggatgcaagtcgaactttggcaatgatttatagggataaatcagagttcagtgaagagcgaaaaatttcaaaattttatcgagccttagtgactggcatacttgatgatgatgaggttgttgttacgcaacctatagggttagttcattatcctggagttgcagagggactttatgcagcatgttcctcaggaaagccagcaatgagcaaagtatgtgttcttgagagacttgcacaccaaaatcacacactggtccaggttgaaattcattcaggacgacctcaccaaataaggatacaccttgcatacattgggcacccacttgtaggtaagtccctcgct

SEQ ID NO: 86819 - DNA, 2606 bp, Zea Mays
ctggcacagatagttcttttgcatctgatgggggttatgagagacctttgcaacctgttcctggagactgtgggtatcacctgcatgcacattggctggttctttgccacccaacaaccaataagatggtaaaaattaccgctcctcttccacaaattctacagacacgggaggaacgccgcgctgcagctgagcaaaccggtggttgaacatgtagaatcttgaaaatgtatatttcttgaagttagcaagcagcaggttctcacagacgttagagttagacactcagacctctgctcctctgtcaactgtacaacggcgagctatggttccgcttgatgcagcgccgtctcatgtgacgtttaggccaggctaccgagatggagaaataacattaggtatttaaaaataaatagagtactagctaatgagctcacacaaatcttgttcagtctattcgaagcgcaattcgctgaaaaaatgtttcttcgctcacacaaatatgatttggtttgaaatggagggaggtgataattgtagaagaagatttccaatgaattcatttgcgtgcaatggacttggcgttacgcataactcccaaacattcctccccccaaaacctcccgaacaaagaggattcgaggggaattaaaggagggcgcggcggtggcgagcaccttccgctcagcgaggtagctgcacctgcaccggcgagctagccgcggcctctatgctcgcggggatctgaactagccgccgctgccccatcgcggcgatgactgcggcgccctctcctcatatcccattcccaacacaacactcattttctccattcccacgtaaaagatagaaaggcgagcatcgcagtgcacacgcgcaatggaaggctcgccggtggcgcgcctcccggaggctaattctctccccgacggcttcgtccccgacagcgagagctcagacacggacgcggctcctccctcctccgcgcccatagttgacgatgcaatcgactccgatagtcccgacgccaccaaccccggtggtgaggaaaccctaagtgatccctcccttcccgcgtccaccgccgaagatgcctcctcagccgccgctgctgaagcattggacacactttgtctggacgttgttgcggatccggagcgcgctctaggggagcacggacccaccactgctgcaagaggtgaaggatccttgaaggaaaatcgtgcatcagagcaagtgggcgctccaagtgatcaaaaggtggtcaaggggagcggtgagccaaaacgcaaggtcatcaagcatagcaagcttgagaaggacaaagagttatttcaactagcccagcaataccacaaagtggttgcagaaagggatcaagccattgcagtcaaagatagactagaatctctttgtagggaatttcagcgtcaaaacaaaatgctaaaggaagagtgccaaagggtatcgacagagggacagaacatgcgtacggaattgtctgaaaaatttgatcatgccataaagggtgtcagtgccaaacttgaggagcagagagttgagcgcatttctcagctagaagagaacaatacgttgagaagtaaactgaaagaccttgctgatcaatataacattactcagcagaaatatgctcaccaattgaaagagaaaatgctggaacttgaacttgctgatctgagacttcaacaacatcaagagaaggctgctcaggaacatacacaaatgcagttgtatgctgaacaagtttctcagcttatgactactgagaagaacctgcggttgcaactagcttctgacggggaaagatttcagcactttcaggatgccttgtcaaaaagcaatgaagtctttgaaacttacaagcaggagatggaaaagatgatttcagtgataaagaatcttaagaaggagaacgaatttctgaagggaaaatgtgagaactcagatattgctattgtgaagctcattgaagagcgtgagctaacaaagaagcaaatagagaaattgaaaaatcaaagggagaagctcgaatccctgtgtcgaacactacaggcagaaaggaaacaaggcccctccgccagtattccagatgccccttctagccaagaagtgtcagcgacaagtcaagaatcttaacattccagttgccccttctagccaagatgtgtcagcaacaagtcaagaatcttggcagttgtgcttgtcaatataccgttggtgccagctacagcttgcggagatttctgaagcctgacattcagctgtcaacctaccgtccgtctcaggccttttgatattgtggctagagcctagtggtgcattcctactcggtgttgttaccaagcatataagctctcggctgattccatctcttgtttttgtttgagacaaagcctgctgcattggagataattagatttttgccaatcataatattgtcttcttgttataattaccactgtgtctatgaattgtgggtctagctgggtctatgaaatgtgagtctgatgacaattttacaaacttgtttcttgctgatggtaaatatcagaatctctcgctgcattgtgagtgtgttaattatt

SEQ ID NO: 86820 - DNA, 2597 bp, Zea Mays
ctggcacagatagttcttttgcatctgatgggggttatgagagacctttgcaacctgttcctggagactgtgggtatcacctgcatgcacattggctggttctttgccacccaacaaccaataagatggtaaaaattaccgctcctcttccacaaattctacagacacgggaggaacgccgcgctgcagctgagcaaaccggtggttgaacatgtagaatcttgaaaatgtatatttcttgaagttagcaagcagcaggttctcacagacgttagagttagacactcagacctctgctcctctgtcaactgtacaacggcgagctatggttccgcttgatgcagcgccgtctcatgtgacgtttaggccaggctaccgagatggagaaataacattaggtatttaaaaataaatagagtactagctaatgagctcacacaaatcttgttcagtctattcgaagcgcaattcgctgaaaaaatgtttcttcgctcacacaaatatgatttggtttgaaatggagggaggtgataattgtagaagaagatttccaatgaattcatttgcgtgcaatggacttggcgttacgcataactcccaaacattcctccccccaaaacctcccgaacaaagaggattcgaggggaattaaaggagggcgcggcggtggcgagcaccttccgctcagcgaggtagctgcacctgcaccggcgagctagccgcggcctctatgctcgcggggatctgaactagccgccgctgccccatcgcggcgatgactgcggcgccctctcctcatatcccattcccaacacaacactcattttctccattcccacgtaaaagatagaaaggcgagcatcgcagtgcacacgcgcaatggaaggctcgccggtggcgcgcctcccggaggctaattctctccccgacggcttcgtccccgacagcgagagctcagacacggacgcggctcctccctcctccgcgcccatagttgacgatgcaatcgactccgatagtcccgacgccaccaaccccggtggtgaggaaaccctaagtgatccctcccttcccgcgtccaccgccgaagatgcctcctcagccgccgctgctgaagcattggacacactttgtctggacgttgttgcggatccggagcgcgctctaggggagcacggacccaccactgctgcaagaggtgaaggatccttgaaggaaaatcgtgcatcagagcaagtgggcgctccaagtgatcaaaaggggagcggtgagccaaaacgcaaggtcatcaagcatagcaagcttgagaaggacaaagagttatttcaactagcccagcaataccacaaagtggttgcagaaagggatcaagccattgcagtcaaagatagactagaatctctttgtagggaatttcagcgtcaaaacaaaatgctaaaggaagagtgccaaagggtatcgacagagggacagaacatgcgtacggaattgtctgaaaaatttgatcatgccataaagggtgtcagtgccaaacttgaggagcagagagttgagcgcatttctcagctagaagagaacaatacgttgagaagtaaactgaaagaccttgctgatcaatataacattactcagcagaaatatgctcaccaattgaaagagaaaatgctggaacttgaacttgctgatctgagacttcaacaacatcaagagaaggctgctcaggaacatacacaaatgcagttgtatgctgaacaagtttctcagcttatgactactgagaagaacctgcggttgcaactagcttctgacggggaaagatttcagcactttcaggatgccttgtcaaaaagcaatgaagtctttgaaacttacaagcaggagatggaaaagatgatttcagtgataaagaatcttaagaaggagaacgaatttctgaagggaaaatgtgagaactcagatattgctattgtgaagctcattgaagagcgtgagctaacaaagaagcaaatagagaaattgaaaaatcaaagggagaagctcgaatccctgtgtcgaacactacaggcagaaaggaaacaaggcccctccgccagtattccagatgccccttctagccaagaagtgtcagcgacaagtcaagaatcttaacattccagttgccccttctagccaagatgtgtcagcaacaagtcaagaatcttggcagttgtgcttgtcaatataccgttggtgccagctacagcttgcggagatttctgaagcctgacattcagctgtcaacctaccgtccgtctcaggccttttgatattgtggctagagcctagtggtgcattcctactcggtgttgttaccaagcatataagctctcggctgattccatctcttgtttttgtttgagacaaagcctgctgcattggagataattagatttttgccaatcataatattgtcttcttgttataattaccactgtgtctatgaattgtgggtctagctgggtctatgaaatgtgagtctgatgacaattttacaaacttgtttcttgctgatggtaaatatcagaatctctcgctgcattgtgagtgtgttaattatt

SEQ ID NO: 86821 - DNA, 2165 bp, Zea Mays
gcggccgggcgagcgagctgccacgtcagcgcgacggtgatcttcccccggtaacgccgcctcctcgcccaacccggcctagggcggacgattaaaattaacctaacaccgggttaaagcctccgcgctccgccccccggaatcggaccaaagccgggcatacgcccccaagtccaaaagccctctccgccccgctctcccactcgtaggtgttctccccgtctccgcccgcactcgctcgtccgcgcgcaggaaggttgacctgtcgagggccggcgaacccggtaagtaagagtgaaaatggatggaagtagtaaagggagtgggcattctgaagcattaaggaactacaacctgggaagaactttaggtatcggtacatttggaaaagtgaagattgcagagcataagcttactggacatagggttgctataaagatcatcaactgccgccaaatgagaaatatggaaatggaagagaaagcaaagagagaattcaagatattgaagttgttcattcacccccatatcattcggctttatgaggtcatatacacacctacagatatatatgttgtgatggaatattgtaagtatggcgagttatttgattacattgttgagaaaggcagattacaggaagatgaagctcgtcgaatcttccagcagatcatatctggcgtcgaatactgccatagaaacatggttgtccaccgtgacctaaagccggaaaacttgttacttgattcaaagtataatgtaaaacttgcggattttggtctgagcaatgtcatgcatgatggccattttctgaagactagctgtgggagtccgaactatgctgctccagaggtaatatctggtaaactatatgctggacctgaggtcgatgtatggagttgtggggtgattctttatgctcttctttgtggaactcttccatttgatgatgagaatattcccaatctgttcaaaaaaattaagggaggtatctacacacttccaagtcatttgtctgctttggccagggatttgatcccacgaatgcttgttgttgagcctatgaagagaatcacaattagggaaattcgggagcatcaatggttccagattcgccttccacgttacttggcagtgcctccaccagatacgacacaacaagccaaaatgattgatgaagatacacttcgagatgttgttaatatgggatttaacaagaaccatgtgtgtgaatcactgtgcagcagacttcaaaatgaggcaactgttgcatattatttactattggacaatcggtttagagcaactagtggctatcttggggcagattatcaagaatcaatggacaggaatttaaatcagctggcgtcatctgaatcatctagttctggtacgaggaattatgttccaggaagcagtgatcctcatagcagtggtttgcggccatattatcctgttgaaagaaaatgggcgcttggacttcagtctcgggcccaccctcgtgaaataatggttgaggtcttaaaagcacttcaagaattaaacgtcagatggaagaagaatgggcactacaacgtgaaatgcagatggtgcccagggtttcctgaagttaatgacacgttagatgccagcaacagctttcttggtgactctaccatcatggataatgatgatgctaatgggaggctacctactgtgatcaagtttgaattccagctttacaagacgaaggacgacaagtacctcttagatatgcagagagttactggacctcagctgctcttccttgacttctgtgcggccttccttaccaagcttagggttctatagtggtctaccatgtgcaaattttcactgtggtgatgaataaccgaaagcatgtaaataggaaccttgttctcgtcttttggacaacgaacatgtttgagtgactggtcttgtgttgagcgcgtaaaggtcatgtatacttaggttagtactattttcgttcttaaatatttgtcgtctgctagtgatagttcatttttgaactaaaacgttacgaataaaaaaagagtatattactgtctgcatggacatggctgtttcagtaggccgtggcaccgcagatggcgatgctcactgcaacctattatgaaaaaaaatgcaagattcaacttttgttc

SEQ ID NO: 86822 - DNA, 2156 bp, Zea Mays
gcggccgggcgagcgagctgccacgtcagcgcgacggtgatcttcccccggtaacgccgcctcctcgcccaacccggcctagggcggacgattaaaattaacctaacaccgggttaaagcctccgcgctccgccccccggaatcggaccaaagccgggcatacgcccccaagtccaaaagccctctccgccccgctctcccactcgtaggtgttctccccgtctccgcccgcactcgctcgtccgcgcgcaggaaggttgacctgtcgagggccggcgaacccgagtgaaaatggatggaagtagtaaagggagtgggcattctgaagcattaaggaactacaacctgggaagaactttaggtatcggtacatttggaaaagtgaagattgcagagcataagcttactggacatagggttgctataaagatcatcaactgccgccaaatgagaaatatggaaatggaagagaaagcaaagagagaattcaagatattgaagttgttcattcacccccatatcattcggctttatgaggtcatatacacacctacagatatatatgttgtgatggaatattgtaagtatggcgagttatttgattacattgttgagaaaggcagattacaggaagatgaagctcgtcgaatcttccagcagatcatatctggcgtcgaatactgccatagaaacatggttgtccaccgtgacctaaagccggaaaacttgttacttgattcaaagtataatgtaaaacttgcggattttggtctgagcaatgtcatgcatgatggccattttctgaagactagctgtgggagtccgaactatgctgctccagaggtaatatctggtaaactatatgctggacctgaggtcgatgtatggagttgtggggtgattctttatgctcttctttgtggaactcttccatttgatgatgagaatattcccaatctgttcaaaaaaattaagggaggtatctacacacttccaagtcatttgtctgctttggccagggatttgatcccacgaatgcttgttgttgagcctatgaagagaatcacaattagggaaattcgggagcatcaatggttccagattcgccttccacgttacttggcagtgcctccaccagatacgacacaacaagccaaaatgattgatgaagatacacttcgagatgttgttaatatgggatttaacaagaaccatgtgtgtgaatcactgtgcagcagacttcaaaatgaggcaactgttgcatattatttactattggacaatcggtttagagcaactagtggctatcttggggcagattatcaagaatcaatggacaggaatttaaatcagctggcgtcatctgaatcatctagttctggtacgaggaattatgttccaggaagcagtgatcctcatagcagtggtttgcggccatattatcctgttgaaagaaaatgggcgcttggacttcagtctcgggcccaccctcgtgaaataatggttgaggtcttaaaagcacttcaagaattaaacgtcagatggaagaagaatgggcactacaacgtgaaatgcagatggtgcccagggtttcctgaagttaatgacacgttagatgccagcaacagctttcttggtgactctaccatcatggataatgatgatgctaatgggaggctacctactgtgatcaagtttgaattccagctttacaagacgaaggacgacaagtacctcttagatatgcagagagttactggacctcagctgctcttccttgacttctgtgcggccttccttaccaagcttagggttctatagtggtctaccatgtgcaaattttcactgtggtgatgaataaccgaaagcatgtaaataggaaccttgttctcgtcttttggacaacgaacatgtttgagtgactggtcttgtgttgagcgcgtaaaggtcatgtatacttaggttagtactattttcgttcttaaatatttgtcgtctgctagtgatagttcatttttgaactaaaacgttacgaataaaaaaagagtatattactgtctgcatggacatggctgtttcagtaggccgtggcaccgcagatggcgatgctcactgcaacctattatgaaaaaaaatgcaagattcaacttttgttc

SEQ ID NO: 86823 - DNA, 1879 bp, Zea Mays
taccgggtaatgaatcctgttaaaaataaagtatactgcactaattcttatacaacgaacataatatctgcttttattaatggcagagtgaaaatggatggaagtagtaaagggagtgggcattctgaagcattaaggaactacaacctgggaagaactttaggtatcggtacatttggaaaagtgaagattgcagagcataagcttactggacatagggttgctataaagatcatcaactgccgccaaatgagaaatatggaaatggaagagaaagcaaagagagaattcaagatattgaagttgttcattcacccccatatcattcggctttatgaggtcatatacacacctacagatatatatgttgtgatggaatattgtaagtatggcgagttatttgattacattgttgagaaaggcagattacaggaagatgaagctcgtcgaatcttccagcagatcatatctggcgtcgaatactgccatagaaacatggttgtccaccgtgacctaaagccggaaaacttgttacttgattcaaagtataatgtaaaacttgcggattttggtctgagcaatgtcatgcatgatggccattttctgaagactagctgtgggagtccgaactatgctgctccagaggtaatatctggtaaactatatgctggacctgaggtcgatgtatggagttgtggggtgattctttatgctcttctttgtggaactcttccatttgatgatgagaatattcccaatctgttcaaaaaaattaagggaggtatctacacacttccaagtcatttgtctgctttggccagggatttgatcccacgaatgcttgttgttgagcctatgaagagaatcacaattagggaaattcgggagcatcaatggttccagattcgccttccacgttacttggcagtgcctccaccagatacgacacaacaagccaaaatgattgatgaagatacacttcgagatgttgttaatatgggatttaacaagaaccatgtgtgtgaatcactgtgcagcagacttcaaaatgaggcaactgttgcatattatttactattggacaatcggtttagagcaactagtggctatcttggggcagattatcaagaatcaatggacaggaatttaaatcagctggcgtcatctgaatcatctagttctggtacgaggaattatgttccaggaagcagtgatcctcatagcagtggtttgcggccatattatcctgttgaaagaaaatgggcgcttggacttcagtctcgggcccaccctcgtgaaataatggttgaggtcttaaaagcacttcaagaattaaacgtcagatggaagaagaatgggcactacaacgtgaaatgcagatggtgcccagggtttcctgaagttaatgacacgttagatgccagcaacagctttcttggtgactctaccatcatggataatgatgatgctaatgggaggctacctactgtgatcaagtttgaattccagctttacaagacgaaggacgacaagtacctcttagatatgcagagagttactggacctcagctgctcttccttgacttctgtgcggccttccttaccaagcttagggttctatagtggtctaccatgtgcaaattttcactgtggtgatgaataaccgaaagcatgtaaataggaaccttgttctcgtcttttggacaacgaacatgtttgagtgactggtcttgtgttgagcgcgtaaagttcatttttgaactaaaacgttacgaataaaaaaagagtatattactgtctgcatggacatggctgtttcagtaggccgtggcaccgcagatggcgatgctcactgcaacctattatgaaaaaaaatgca

SEQ ID NO: 86824 - DNA, 1176 bp, Zea Mays
gatacacagttgacagactcacaggtacatgaattactgttaaggcaacatcatattcgtgtactattagaaagttgccccgatgaagctgacatcgatccactggttcatacaaataaaacgaaacagactaaaacacctacaaccccagtgggtgaacatggtgacgttggcaagaacatgccgaccaacacaaacgtcactcctcaagcaacaccacatacggaatcttgctcgctgatatttgatgcgatgtcgcaaataaagtctcccggcggcgtccaacaggcggcagaaacagatctccctgacagtggtccatgctttgatcagactccatctgaacatgtttctgttgaaaccgatccagctacaaacactcctcaggttgaccaggtttcacttgattcggagatgcaaactgtgttagctctacgcgaatatttatgtggtacacaatctgacaccagcatgaccataatagattatggtgaatattgttcgacatgttctgatatatatgaatcttttgccgatgggaagtgtctcgacaatgtgttcatgcagtgcttcatccagtgtgttgatgatgatgccaaaaattagcagccttccatgagttcgaacagattaattattgatgttaatgttgggtcactactcaactttgaggaacaggaacgacacagtcagaaccctcaaccttttgatgaatctgtactgaaaacacttctagacaatgcattgcccgagacagatcatggttcccatgattctaatccatatggggcaacacttggtggtactacatcaaaggactatcattttgccgaattggacttaggtggcagaaagttaccatgggctaaggttattatgagtagattaaacaaagccatacaacatgcatggcccaggacatgctttcccaaatttggcaacttcacaattgacttgtgcccaaattgtcctaacatggcagtaggatccaatgattgtgggttttatgttatgggatacattctcttttatgactgcgtcgaaggatctctgcggtcagacatagaagcaggcaacactagtgagatacagtctcttgcgctgcattatatcacattccatccgaagaacaaagcattatcgctgcttgaagacatcaaaagattcaaggtctaa

SEQ ID NO: 86825 - DNA, 414 bp, Zea Mays
atgagcggttctctcgtcctcggtggcaccggaggcggcgagggcatgcagtatgtgcccttggtgaagagcgctgcgggtgacaagctgtcgtacgacatgtactactacctggcgttgaggggcatgacagtgggcgggaacgcggtgcggctctcgaccacacatgaaattgctaagttaaatatctcacgtactgaatatttgtgttgcagtcaaccaactgataaaccattcaggactaaacacatgaggcgtcttgaatttgtcatctggttcaaggctggatatatgtcaagatgcctcccaaatggttcaatttatgtgtgcaacctacctcctagaactgatgaaactacattggctgaatattttggcaccatagggttgctaaaggcgcttgcagtgttgtaa

SEQ ID NO: 86826 - DNA, 1386 bp, Zea Mays
aaacaaaagccgaaaaccgcagtacgctgtacgcagctgtccctcgcagttgggcgcaccggtctactcctcgatcggcaaggccgcaactacctagatctcgaaccctcgccgccgcttctttcccgatcgccgcggccatggcgaaggagttccccgtgccgccggtggtcttcacgccgtccacaccgacgcaccgccggtaccctccccagggcgtgggggcctcccctccgcccgcgttcgcgccgccccgcccctccacctcatccgccgccaacccgctccccttcatgtcgttcgatgtatcagctgccgcggcctcctcctcctccgcgccacccctcttcgcggggcctatcggtgtcgccggttccggctcgtccttcgaggacgagccgccgctcctcgaggagctcggtatcaacacgcgccagatctggcggaagacgatctccatcctccacccgctccgctccgccgacccctccctccacgccgacgccgacctgtcgggcccgttcctcttcctcctttcctttggactattccagctcctcgcggggaagttccactttgggatcgtgctcggctgggtcaccgtggcgtctctcttcctctacttcgtcttctccatgctctcgggcggccgccgcggggacctcgatctgtacagatgcgttagcctcgtcggctactgcatgctgcccatggtcatcttctcggctgtctccctcttcctgccgcgcgggggcgggctcatatttggagtagggatggcgttcgtgatatggtccgccagggtctgcaccaggctgctagcagagcttgcatccagtggagacgagcacagggggctcatcgcttatgcgtgctggctcgtctacatgctcttctcgttgcttgtcatcttctgataccatttatggtctggaaggtatggtcggacaactatactagaccttgcaaatatttaatttgatcattgttgttatatgcactcgtggttgcactatagcaatagtttcctgtgtaaacctctaaggtattcattttacctctgatttaggtgttatacataattattgtgttgtgaggagaaatggaaaatatatataaatttatttgatcgtataccaattaacaaacatttggccactacaatcttgatttaacaagatttgagtctggtggttactttttgttcttttcctttgaaacctcatagaatatcaacttgatggatgtttgctgtgttgacctcatctggatttaacttgactaccccatgatattgttctggtttctgccattattgtaagttgtaactgaaatgtggttatgagtatgcactacccagttaaatacatgattgtaattcattca

SEQ ID NO: 86827 - DNA, 1501 bp, Zea Mays
aaacaaaagccgaaaaccgcagtacgctgtacgcagctgtccctcgcagttgggcgcaccggtctactcctcgatcggcaaggccgcaactacctagatctcgaaccctcgccgccgcttctttcccgatcgccgcggccatggcgaaggagttccccgtgccgccggtggtcttcacgccgtccacaccgacgcaccgccggtaccctccccagggcgtgggggcctcccctccgcccgcgttcgcgccgccccgcccctccacctcatccgccgccaacccgctccccttcatgtcgttcgatgtatcagctgccgcggcctcctcctcctccgcgccacccctcttcgcggggcctatcggtgtcgccggttccggctcgtccttcgaggacgagccgccgctcctcgaggagctcggtatcaacacgcgccagatctggcggaagacgatctccatcctccacccgctccgctccgccgacccctccctccacgccgacgccgacctgtcgggcccgttcctcttcctcctttcctttggactattccagctcctcgcggggaagttccactttgggatcgtgctcggctgggtcaccgtggcgtctctcttcctctacttcgtcttctccatgctctcgggcggccgccgcggggacctcgatctgtacagatgcgttagcctcgtcggctactgcatgctgcccatggtcatcttctcggctgtctccctcttcctgccgcgcgggggcgggctcatatttggagtagggatggcgttcgtgatatggtccgccagggtctgcaccaggctgctagcagagcttgcatccagtggagacgagcacagggggctcatcgcttatgcgtgctggctcgtctacatgctcttctcgttgcttgtcatcttctgataccatttatggtctggaagattatgtgcctaatttgtttaggggatgctgtggacagtggactgccttttaccagtcacggagtgtttttgttgtgttgtcacagaactacatacgatctggccagttgatctcttagttccattgggcatggttggtgttcggtaaaaagaaaaggaaatcaaggtccagaaacagcaaatgtgcagtaattaggttttaccgaagtattggtggaaatctaattactttctaaaggtcgtggtatgtgcaaatctgtttattatgattacttaccacgactttattttaggatcatcgtggtagtttcttttcttttaatgcattttggcagagataattgttctatctttaggtatcatgttagatacttaatcatcataaatcaaagggacgttagttttctttttatttgttacaagttgtgaccctcgcaatgaatttatcttctggggtaacaatatatgttatttacaatttgtgcctttgtgtgattacgcataaccattttatggttaatatatgtgaatgtgaaaaggccagcattatttttttaaaggaaa

SEQ ID NO: 86828 - DNA, 711 bp, Zea Mays
agcagcgttgcagcgccccgagctcctcctccgcatgccgccatggtcggggtcagtctcatccgacaacgccatgacttccacttcgctctgtggcgagcagcccctgcaccatccatgctcgtcgtgtgttcgtgagttcacgcgcaagtctctgcgtggtggtcgtgtcgctgcaagcttgtgccacgcacccgggcattgtgtcgcaccaaatagcagcagcaacacaccctcaagcctcgcattgaacctgctcgacgaaaagcgcagcaagctgcgtgtcgttcgtccctgcagcaacaccattcttcacttcgcgtcatacatcgcatagccttcatcgctgcgcattgtccgcattgacgcagcagcccttccgttcattctccactcccctcgttgcgtgtcatcaatctcgtgcttgctgcgcagcccatcctcgtcgtcaaaacccttgctagatgttgccgctgcgcctcgcgcgacgcatgattcggtgaaacacctaaaaccgtggaggcacgcgcgacacgagtcggccaggttgttcgcattgagtggttcacgatttgttttatttacatatttggtcgatgatgtgcatgtgtttatatgtgtgtgaaaatatatttgtatgaatggacgtgtgtagaaaagaaaacgaagtagaaagaaactcggatgtttttatatttgataggaaaaata

SEQ ID NO: 86829 - DNA, 714 bp, Zea Mays
agcagcgttgcagcgccccgagctcctcctccgcatgccgccatggtcggggtcagtctcatccgacaacgccatgacttccacttcgctctgtggcgagcagcccctgcaccatccatgctcgtcgtgtgttcgtgagttcacgcgcaagtctctgcgtggtggtcgtgtcgctgcaagcttgtgccacgcacccgggcattgtgtcgcaccaaatagcagcagcaacacaccctcaagcctcgcattgaacctgctcgacgaaaagcgcagcaagctgcgtgtcgttcgtccctgcagcaacaccattcttcacttcgcgtcatacatcgcatagccttcatcgctgcgcattgtccgcattgacgcagcagcccttccgttcattctccactcccctcgtcgcgtgtcatcaatctcgtgcttgctgcgcagcccatcctcgtcgtcgtcaaaacccttgctagatgttgccgctgcgcctcgcgcgacgcatgattcggtgaaacacctaaaaccgtggaggcacgcgcgacacgagtcggctaggttgttcgcattgagtggttcacgatttgttttatttacatatttggtcgatgatgtgcatgtgtttatatgtgtgtgaaaatatatttgtatgaatggacgtgtgtagaaaagaaaacgaagtagaaagaaactcggatgtttttatatttgataggaaaaata

SEQ ID NO: 86830 - DNA, 210 bp, Zea Mays
tcggtggaaatatgcgtcggactacccggcagcgcagactctgcggcaaaggtcagtgcgccatcgtccggggcgatacgatacgccaggacgcgaaactcagggcgaacaccaacatagagataacgtttgtccggtcatgccagattgggaatgtgcatctggcacatcgacagttagtgtcagatctagaatgcaatttgaatttag

SEQ ID NO: 86831 - DNA, 356 bp, Zea Mays
agtagtaattaattttggatcacttcatgagatgtgctctcccgacatgaggaaaaggaggaaagacccattcattttttattcatcaattagaaaaaagtagaagaagcaactaaacaccatacatgttcatatatcaaacccatatattgtctaatagctacacctgtggtcaacaagatgttattaatcaattacgagacttcctatggatacgtgatgtgtcaatactaatacgccattctttttcctaaaaacaatgatatatggatatgctattttgtaaacattagtaaagatttgtaaatagtttatattggctaattattgataatagttgtcttcggatattctgc

SEQ ID NO: 86832 - DNA, 1092 bp, Zea Mays
caaaccgcgccccctgtcctcgccctcgacggcgctgccctttgtgatggtgcccttccttccccagctcccccaaatgctgccaagtcccccaccaacgccgcccttccttccccggcagcccgcccccactagctccgcgctccgcgtgccccaccagccacgctagctgccgccgggatactcaccacctccgcgcccccaccaaaccgaaaggcgagatccgccgccagttccacgctccgcgcgtcaagagcagccatcacagtgatgccgcgcgagggagaggaaggaaggccgcgtgagtcgccgcagggaaagctgccaggcatcaccgtaaggtgagatccggttgcgcgtgagggagaggaaggaaggccgcgtgagtcgccgccgagaaagccacagggaaagccgccagtgtgagtcgccgccgggaaagccgccagtgtatgatggttcggtcatccagatgtgggtggcgtacaacgttgtcactcatttcctcctgcactgtaccgactgcaaggcgcaagctcactggcgtgttcgacctcctgaagattatgctatacaaggtgtgcgcaaatggctcatcggcgcttcccgattgggagatggaggccagcatcatggagttctacgctgttgcatcttctaagtggcatcaccgagctggacgacaggaaacagagaaaattgtgcctgaaaaaatttaggagcagggatgagcatttatcagaagtggacacaaagagggagcttgagtgtgggctctgcatgcggtgctttgagtattggctttgtacagtcttttttttgtttgctgacgccttcctaggaaaggggatcttctgcgacgatagcgatgaagacgaagacagtgaccagggcaatgaaaagcaggagacacatttccataccattgttaactgcatcacagagtctctgaagacacaaattattggtagaacttatgatgaagtcgcaatatgtctctttaacactttattagttattgtcaatgctaaccatttcacttattaagtgataattttgcacatatattagtattactcaagacgatattat

SEQ ID NO: 86833 - DNA, 1825 bp, Zea Mays
ccatgcccccgcctcagcccccgtcaaccacgcaaggactccagcgtgaaagtcgggcccgtcgccggccttgcatcgtcgcgacacactccgtgcctcccttccatcatcgctcgatcgcggtttcgtcgcactccttccttcgatggcactcctttccatcctcgattcctcctgccccagcaccggccagcctcatcaggtcattcctcctcgctgtgccccctccaccgtattcaaccacctcttcctcggcaccaaacgtagacgcctcctccgcgatgccctcagaccgcccgtcctcgcccaacatctccttgccgcatatgcccgcagcggctgcctcgcatcccgcccgcacgccacctccttgcacccgcgcatggatgccactgcacgcctactatggaagggggacgcctactattgaagctcccatccacgatcccattccaaatccagcttcaaatttgccccaatctgcagtcaaccttccacccaacatcttccccttatatattgttgtctctgctataaaagacttgacagaggcgaggcctccaaaccactaccactctccaccgattcactggagtcgcgagacgttggaggccctgagacgttcaagcctcatctgcagtctcctccaaagaggtgagtctcacttaatgtttggtaccttctgttttttgggaatgtgggttcattttggatgcttccggggcagtggtaaacactttgctctgtatatattcttgcatctctttaatgtaggtccacaaatgatttgagagctgtaggtctacaaatgataatgcaacaaattctgattcatgcatttctttactgtgtggaggccatttaattacgcctatttgatttgagagctcgagtagacaagatcatgtaggctctgaaatctatcttctggaggaccaaggccattaaagtacagtcacagagcccttcttcttcgctctgccacccacaccgtggcacctcgccgagctccgcatcgaaactgcgttgttgccttctccgtgctctgcgttgaagacatgcagcgcaagcgtcgctgcctcatcccggcctcctctagacgcaagacgacaagaggatgctgctcgagctgtccccttggatcccacgccgaacgccctgtcacctccgtcgacaacatcaagctcctgtccctcccccacctcactgcaatagattcttcggttgtggaacttagggagagttttgagtcgtggtggtgtataaagcagtcgtcaagcacaagctcctccaaagtaccatcaggatcctacagtagaagagttagccaaaacactcgattgttggccatcaatgaattattatatcacgggttgtaaatatgttcttatgccatgaaaattcaacgaatgtcacgcccttttcgtaatagatcatgttaaaagcatgtgacttttatcgactttacaccgactcaagattggtgtaaacacatgccatacaagaggtttgcggaagctattatcatggcctcaaagaaatataagattgcttacaacaagaaacgttctggatgggcggaggatatctttaagtgggaacatacaattcagactggtgttccaattgacttaagagggtattttcttcgtaccttctcagcagtttaatttttttatgataatcattgtataaaacatagttggccaaacattattctataggtttaataccagctacctcgttctacaagttatgaccatgtgggggaatgacagacgaatgaaatttgttggggtgagtgtagtacgttcgttttatgttc

SEQ ID NO: 86834 - DNA, 2110 bp, Zea Mays
ccatgcccccgcctcagcccccgtcaaccacgcaaggactccagcgtgaaagtcgggcccgtcgccggccttgcatcgtcgcgacacactccgtgcctcccttccatcatcgctcgatcgcggtttcgtcgcactccttccttcgatggcactcctttccatcctcgattcctcctgccccagcaccggccagcctcatcaggtcattcctcctcgctgtgccccctccaccgtattcaaccacctcttcctcggcaccaaacgtagacgcctcctccgcgatgccctcagaccgcccgtcctcgcccaacatctccttgccgcatatgcccgcagcggctgcctcgcatcccgcccgcacgccacctccttgcacccgcgcatggatgccactgcacgcctactatggaagggggacgcctactattgaagctcccatccacgatcccattccaaatccagcttcaaatttgccccaatctgcagtcaaccttccacccaacatcttccccttatatattgttgtctctgctataaaagacttgacagaggcgaggcctccaaaccactaccactctccaccgattcactggagtcgcgagacgttggaggccctgagacgttcaagcctcatctgcagtctcctccaaagaggtgagtctcacttaatgtttggtaccttctgttttttgggaatgtgggttcattttggatgcttccggggcagtggtaaacactttgctctgtatatattcttgcatctctttaatgtaggtccacaaatgatttgagagctgtaggtctacaaatgataatgcaacaaattctgattcatgcatttctttactgtgtggaggccatttaattacgcctatttgatttgagagctcgagtagacaagatcatgtaggctctgaaatctatcttctggaggaccaaggccattaaagtacagggttctttcagcagcaatggcctcactatttcttctaaattaccaagattctcggacatgtacactctcacgatagcaagtgtagacccacagtttatcgtagcaaacaagccaatccatttcactaagagcgtgacaaagtgtcacagagcccttcttcttcgctctgccacccacaccgtggcacctcgccgagctccgcatcgaaactgcgttgttgccttctccgtgctctgcgttgaagacatgcagcgcaagcgtcgctgcctcatcccggcctcctctagacgcaagacgacaagaggatgctgctcgagctgtccccttggatcccacgccgaacgccctgtcacctccgtcgacaacatcaagctcctgtccctcccccacctcactgcaatagattcttcggttgtggaacttagggagagttttgagtcgtggtggtgtataaagcagtcgtcaagcacaagctcctccaaagtaccatcaggatcctacagtagaagagttagccaaaacactcgattgttggccatcaatgaattattatatcacgggttgtaaatatgttcttatgccatgaaaattcaacgaatgtcacgcccttttcgtaatagatcatgttaaaagcatgtgacttttatcgactttacaccgactcaagattggtgtaaacacatgccatacaagaggtttgcggaagctattatcatggcctcaaagaaatataagattgcttacaacaagaaacgttctggatgggcggaggatatctttaagtgggaacatacaattcagactggtgttccaattgacttaagagggtttaataccagctacctcgttctacaagttatgaccatgtgggggaatgacagacgaatgaaatttgttgggaatgcaaatattcttcgaaggaactttgtgattgatctgttaagttatgaggacaattcgtgccgatatgccatccctgcaaacatacaacagagacttatcgatatcgctaaaaaggattagctgattagtgtacggttgtcgacacatttgtctgtaattaaaaattctaaattatctttttagaaataatttgtgtgatattgataatgaaaaacacggattttgcatattatatagtgatgtttgtcgttc

SEQ ID NO: 86835 - DNA, 1668 bp, Zea Mays
atgcagcagcggcgcaagtcggtgttcgcgtccgcgccgttcgcgatgaagcaggcggcgctgggagccggcgtggcggcgcgcaagaacggcgcgccgctgtcgctggccgcggtggtgttcgcgctcttcgtcttcgcgacgttcctctacaacgaggacatcaagtccatcaccgacttccagttcagctccggcgccatccgcgccaagtcccccgacctgcacctcctgcaggaggccgaggccgcggcgcacgccgccgtgaacaccctggccaagcgcggggaggaggtgatcgtgcgcgtcctcgaggtcgaggcgccgcccgtcgtcaacactagcagcgtgctggcggccgccgcgaaggccagcgccaaggccaacgcggtggacgtggggcaggagaaggagcgggacgtgacgctcccgacggtgacggggggccgaggcggggccgacgaggcccagcggcgcgctgacgaggaggtcgctgagaaggccgcgtcggcgaaggcggcggcggccaccgccgcgctgcgcggcgtggtgagcgtgccgcagacgtgcgacctgtaccggggcagctgggtgtacgacgaggtgagcgcgccggtgtacaaggagggcgagtgcgagttcctgacggagcaggtgacctgcatgcgcaacgggcggcgcgacgactcgtaccagaagtggcggtggcagccggcgggctgcgacctgccgcggttcgacgcgcggctgctgctggagcggctgcggaacaagcggctgatgttcgtgggggactcgctgaaccggaaccagtgggagtcgatggtgtgcctggtgcagtcggtgatccccgacagggggcagaagacgctgacaaagttcgtcaacggcgggtccagcaacgtgttctacgcgcacgagtacaacgcgacggtggagttctactgggcgcccttcctggtggagtccaactccgacaaccccaaggtgcacagcgtccccgaccgggtcatccagtggcacgccatcgccaagcacgcgcgcaactggatcggcgtcgactacctcgtcttcaacacgtacatctggtggctcaacacgctcgacatcaaagtcctgaagcaggggtcgtccttcgatgaccagggctccaccgagtacgtggaggtggaccggcccgtggcgtacaaggaggtgctgacgacgtgggcgaaatgggtggaccgcaacatcgaccccaacaggacgaccgtcttcttcatgggcatgtctcccaaccacatcacgcctgaggcttggggcaacaagggcgggatcaagtgcgccatggagacgctgccgatcgcgagcaaccgcagcgcggcgctggacgtgggcacggactggcgcctctacgcgggggcgcgggaggtgctgcccacgctgcgccgggtgcccgtccacttcgtcgacatcaccgcgctgtcggagctgcgcaaggacgcgcacacctcggtgcacacgctgcgccaggggaagctgctcaccccggagcagcaggccgaccccaagacctacgccgactgcatccactggtgcctcccgggcctgcccgacacctggaaccagttcctctacgcccgcatcgcatccagcccatggcccaacgacgcccaggcccagcagtag

SEQ ID NO: 86836 - DNA, 2289 bp, Zea Mays
gcgtgctgctggcccgtccccacgtatataactcccctttcaaacggccatttttccgcagaccactccaaagcaaccgagaccaagaccaccagcaggactcgcgaggagagcgcgcccgcccggaaagaaaaaaaaaccctagccccgcccgggcctccgcctcgcgatgtcttgcacggtggccatcccgagctcgccagtcttctcgccctcacgccgcccactctcctgcaaggccgcctccgcctcaccggagcccaccgtccccgcctctaccgcggcgcccgcgcccgccgccgccgccggctcgccgctccgccccttcgcgctccgcgcgctgctgcgggaggaggtctccccgtctccgccgccccagccgacctccgccgcagcggtggctttggtaccgagcggggccgcgctgaagcggcggcgaccgacgccgcttgtcgtgccggcgtccggcgccgcggcagctgctgctgcggcggcggcggtggccgctgtggaggcggatccgaggaacgaggtggaggaggaaggggaggagttcgcagcgtactgccggaggggaaagggaaggagaagggtggaaatggaggaccggcatgtggccaaggtcgctctcggcggggacccccaagtggcactgtttggtgtgttcgatggccacggcgggaaaaacgcggcagagttcgccgcggagaacatgcccaagtttatggccgaggagttgacgaaggtaaacggcggagagatcgaaggagcggtgaagaggggttacctcaagacggacgaggagttcctcaagagggacgagagcgggggcgcgtgctgcgtcacagccgtcctccaaaagggtggactggtcgtctccaacgctggagactgccgtgcggtgctcagccgagcagggaaggcagaggcgctcacctctgaccaccgggcgtccagggaggacgagaaggaaaggattgagaatttgggtggatttgtggtgaattaccgtggaacatggcgagtccagggctccctggcagtgtctaggggcattggggatggacacctaaagcagtgggttgtggctgacccagacaccacgacgctcctggttgaccagcagtgcgagttcttgatacttgcttctgatggcctctgggataagatcgacaatcaggaggcggtagaccttgcacgacctctctgcatcaacaatgacaagacctctcgcatggctgcctgcaggatgctcaccgagacatcgatttccaggggctcgactgatgatatcagtgtcgtgatcgtgcagttgcagaaattttcaagctcgtaacctagttggagaagctggaacaaaactctagccagtagcactaacagactggtgataggtagacatgatatgttacttcgctggcgaaagttttcatgagtcagcgctatttggaggggattttaacattcattctttggtgtagagccattcgtcttattattacatcatttaattcattcttggtaagtactgaaataaggggtgatatctcgcttcatgatattttttcactgttagggctagttttggaacactgttttcctaagcgattcggtgaattgcctctgtatattatattcatagattaaaacttaccgtgccttttgaatttattgtcgattctagcaaaaagaaagaatactagtagctttgcgccataccttgatcttaatatctgtatgttggacactccattttttgtagtactttagacatctaaactagttcagacttaatttaagactaggtaagtacccgtgcgttgcaacggaaaaaaatagtgtaacaataacatatatatgactatatgttgtgttgttaattaaaattaagttgcatatggactttgtagtgacaattggttgtaaccttgaaggctaaaaattgatgttgttcttgatcctaaccacgctccagacttgcttgccaggttcatttgtaagttcaaaattatagaccaaaattaggtgaaaagaccagctgaatggaaattttcttttcccagtaaactgcatatttgccttcgcctaactatccattgttttaatctctatataagaacagtcatgcgaagtttgtctattaaaaaaaatccatcgctataataacaatacctttttttgctgctttagcattattatccatcaatccttcaattcagtgttgtattttgatgcctgagggtagaaagaacgatcttcgttgcacccagtagtcttgattgaaagaaa

SEQ ID NO: 86837 - DNA, 1167 bp, Zea Mays
atgtcttgcacggtggccatcccgagctcgccagtcttctcgccctcacgccgcccactctcctgcaaggccgcctccgcctcaccggagcccaccgtccccgcctctaccgcggcgcccgcgcccgccgccgccgccggctcgccgctccgccccttcgcgctccgcgcgctgctgcgggaggaggtctccccgtctccgccgccccagccgacctccgccgcagcggtggctttggtaccgagcggggccgcgctgaagcggcggcgaccgacgccgcttgtcgtgccggcgtccggcgccgcggcagctgctgctgcggcggcggcggtggccgctgtggaggcggatccgaggaacgaggtggaggaggaaggggaggagttcgcagcgtactgccggaggggaaagggaaggagaagggtggaaatggaggaccggcatgtggccaaggtcgctctcggcggggacccccaagtggcactgtttggtgtgttcgatggccacggcgggaaaaacgcggcagagttcgccgcggagaacatgcccaagtttatggccgaggagttgacgaaggtaaacggcggagagatcgaaggagcggtgaagaggggttacctcaagacggacgaggagttcctcaagagggacgagagcgggggcgcgtgctgcgtcacagccgtcctccaaaagggtggactggtcgtctccaacgctggagactgccgtgcggtgctcagccgagcagggaaggcagaggcgctcacctctgaccaccgggcgtccagggaggacgagaaggaaaggattgagaatttgggtggatttgtggtgaattaccgtggaacatggcgagtccagggctccctggcagtgtctaggggcattggggatggacacctaaagcagtgggttgtggctgacccagacaccacgacgctcctggttgaccagcagtgcgagttcttgatacttgcttctgatggcctctgggataagatcgacaatcaggaggcggtagaccttgcacgacctctctgcatcaacaatgacaagacctctcgcatggctgcctgcaggatgctcaccgagacatcgatttccaggggctcgactgatgatatcagtgtcgtgatcgtgcagttgcagaaattttcaagctcgtaa

SEQ ID NO: 86838 - DNA, 1452 bp, Zea Mays
acaacgcacatgcggaagcggagacgctgacgcacctctgagcctggcggcgatttttctatataaccagcgccgctaattccgggtgcttcgctgtagagatgcggtaaaagcgaaagaagaatccgatccgcttctccacgccgaacccggtaaggccgccgccgcttctcgaatggcctcaacctcctcctcctcgcctcagccgccgccggcggcggcggcagcgtcgcccggggcagcttcctcgcccgaggatcgccgcgcaggtggaggccgcggcggcccgcccccggtcccgccctatgtcaaggcggcggcggggtccctgggcggcgtcatggaggcgtgctgcctgcagccgatcgacgtcgtcaagacgcggctgcagctcgaccgcacgggggcctaccggggcatcgcgcactgcggcgccaccgtggcccgcgccgagggcgtgcgcgcgctctggaaggggctcacgcccttcgccacgcacctcacgctcaagtacgcgctgcggctcggctcaaacgccgtgctgcagtctgcgttcaaggaccccaccacgggcaaggtctccgcgcacggccgcctcgcctccggctttggcgccggcgtcatcgaggcgctcctcattgttacccccttcgaggtggtaaagattagattgcaacagcaaaaagggctaagcccagacttgcttagatacaaaggtcccatacactgcgcaagaactatagttcgagaggaaggcctctttggtctttggtctggagcactaccaaccgtcatgcgcaacggcacaaaccaagcggcaatgttctcagccaagaacacgtttgatattgttctgtggaagaagcatgaaggggacgggaaggtgctcctgccgtggcagtcaatggtctctgggttccttgcaggaacagcaggccctgtctgcaccggacccttcgatgtcgtgaagactaggctgatggctcaagggagaactggggacgccaagtacaaaggcatggtccatgcgatacgaacaatatatgccgaagaggggctgcgagccctgtggaaaggcttgcttccccggctcatgaggatcccacctggacaggctataatgtgggctgtagctgatcaggtgatgggcctctatgagcgaactcatctgcagccagttcatatttgaccattctattgcagtgctggtgctgcactgaatttttttttgttggttctcaatcggtggttagacgtggaagtcgtcgattatggatattcgtttgttcattgcttagagttgggtattgatggaagcaatggaagactcttgtactactattttgttgtcaataatcatgaaaccctccaccttttggactggggatatctcggttgtggtgactattatggttgttagactgcagtagcatcaatttgtatgattgaata

SEQ ID NO: 86839 - DNA, 1473 bp, Zea Mays
atggagtggctgcgcgggaaatgcatcggcaagggcgcattcggcacggtgcacctcgccgtggacacggccacgggccgcgccttcgcggtgaagtcggtggactcgaagagcgcgccggcggcagccatggcgtgcctggagagcgagataaggatcctgaggcggctgagctcgccccacgtggtggcgtacctcggcgacgacggcgcgacggcgacgacgaggaacctgcacatggagctggtgcccggcggcagcgccacggaggcggcgcgcgggggcctcgcggagcgcggcgcgcgcggcgtcctgcggagtgtggccgccgcgctgcggtacctgcacgaggaggccggcgtcgtgcacggggacgtcaagggccggaacgtgctcctcggctgccgcgacggcgacgcggcccagtgctgcggagcgaagctcgccgacttcggcgcggcgaggctggtctccgacgccgcggcgccgcgcgggccgcgcgggacgcccgcgtggatggcccccgaggtggcgcgcggcggcgcggccacgccggcgtcggacgtctgggccctgggctgcaccgcgctcgagctgctcacggggagccggccgtggtcggagctcggcggcgccgccgccgacgtcggcgagctgctgctcctcgtcgggttcggcggccagcgccccgcgatccccgcgtggctgccggacgcgtgccgcgactttctcgacaagtgcctccgccgcgacgccggccagcggtggagctgcgcgcagctgctgcgccacccattcctttccgcggacgccggcgagacgtggccgtcgccgtcgccgcgcgcggtcctcgactgggccccgtcggattcggactccgagtccatgtccagcgcggaggccgagagcatgcacgaggtcatggcgcgcgccaaggggcggctagccgaattggcctcaaacgggccgcgtactagctgggactgggactgggatgtagtggagtgggggtccggacccaccagggcagccgacacctgggccccacctcccagttacgaggcgcaaagaaatggcgacgcaagtgcgcccgtacccagcaccgccgccttctccggcggccgtgatcgtgacgtcctcgtcctcggcagcggcagcggcagcgggctcccctgtggccatggccgtcctggttatcacagtcactgctgtcggtataaatgcgggtttgggagggtaggcaggcctctgctggccgccgttggccgttgtacctgcgctagtaccatgtactgttgttccctttgtccactcaattcaatcaaaatttatgccacatcaagcagccaacgagctttgcatgcccttctgtttgcgttctttcttgatcttgtgaccgaccatgatcggttgactaaactagcgtttctttcctcagaaatgtcatttgctcggtactcccaggctgactga

SEQ ID NO: 86840 - DNA, 261 bp, Zea Mays
atgtggatgttcaggatagacatgagggaagagactatgctaaaaaggacaatagagtctaaatcaaacactgttgtggaggttctccggcgcatccatggcaatagggagaaaaatcaagtgaatgaggatggacaactgcaacaaatactggaaatgaaagatgaaaaactttgtttgcaaagagaaatcctagaaatcaagaagcaaacacgacgaagttctagagctgaggaaacaaggaacagagttaagagctaa

SEQ ID NO: 86841 - DNA, 1158 bp, Zea Mays
tcgccacagcttccgattagtggacagcctcatcctcaagacgaaagctatcttcactggcctcgagcacaaaatgctgtggccgagcgaatgagaggaagatggctgctaccagcctcagctcctcgttgcccagggccactgcaaaactaacaggagtgccaagatcttcgtcgtactacacccagctgatcttttgctcgaggcatcctttccagaaggcggcggcagctgcagctttccagaagctcccacccgagctcctccggctaagctacccggcgaggaataataagcatgcaagaaccagctggcggcgggccacggacaacgaccaagcggcgccggccgcggcacaaggaactaccagcacccctcctctcccaggctctcccgttccgagcgccgagagatccccggtgacgcccggcaacggccagccgcagcagccggtcgccgacgccaacggcagcgcgccgagcgagccgccgaagcgggcgccgctgacggcgcgggagcggctgcgggcggcgcgcgtgctggggaagtacgcagagccgtcggtgaaagggtcttcgtcgaaaccggccaaaccggagttcgggagcggtgtgctggacgcgctgcgcgaggcggacgcgaagaaggccgggggcgggggcgggggcgggcggcgtgggtcgcgcctacccgaggcgccgggcaacctgttcgacgacagcaagcgcgggatgcccaaggacgggtggacgttcgagctgccgttcggggtggacgtcttcctcgtcctcgtctccttcacgctcatcaccaccatcatgttcggcaccgccttcctcgtgtggaagctcggcgccatacacttcaacgagtactagcctttagactgtctctacttgattggaggataaagggcgattatgcagtgctagacgagagaattgtgtgtattcgtaatgtactgtattgaccacagacactggtctgccgaagattttcgagaaaacatagaaatgtgtgattgcacgaaacaggtgtcatgttatatagaactaataaatgtggttatgaaatcttacaacaatgtggctgtagtttagtggtaagaattctacgttgtggccgtagagacctgggctcgaatcccagcagccacac

SEQ ID NO: 86842 - DNA, 2552 bp, Zea Mays
cctttgcgcatcggcatcggacaccaggtttcttccgttttgctagatggattctgacgcgggcggctccagctccgctccaccacctccgtcggcagccataggtgcaggcgcgggcgcggagacgaagggggatgagcgcggccgcaagcaggtgatggtggtactggtgggcccaccgggcagcggcaagtccacgtttgcagatgccgtggttggcggctccaccgccggccgccactgggttcgcgtctgccaggatacaatagggaacggcaaagctgggacaaaaatacagtgcttgaaggctgcatcagatgctttgaaggagggcaagagtgttcttgtcgaccgctgcaacttggaacgtgagcagcgtgctgattttgtgaagctgggaggcacattgcgcgcagatgtgcacgctgtctccctggatctacctgcaaaggtctgtatctcacgtgcagtgagccgaaagggccatgaaggaaatctgcagggtgggaaggctgcccttgttgtgaaccgcatgctgcagaagaaggagacacccttgctcacagaaggtttcagtcggatcatgtgctgtaatgatgatggcgacattaaaaaagcagttgacttgtataatggtttagggccttcagatagtcttccatcaggagtttttggtcagaagagcaaaagacccgtacaagttggtataatgaagtttctaaagaaaactgatgcttctgttgttgagacatctagcggacctaagcaggcattgacagaaataaagccagcgcagcaaaatcctttgccaaaacaggaaaatgttgaagctggttttgcctgttccatggaagttgagaagggattaaatgacaagatggaaaatgaagagcatgctaaaggaagtgattattgtgatgttggttcccgtactctggcatttccatctatttctacagctgacttccaatttgatcttgacagagcatctgatattatagtggacacagctgctaatttcttgcagaagtttgataatataagactagttcttgtagacctgagtgagaaatcaagaattttgtcattggtcaaacagaaggctgctaagaagagcatcgactccaacagatttttcacatacgtgggagatatcactcagttgcacacaaaaggaggtcttcagtgcagcgtgattggtaatgctgccaattggaggctaaaacctggaggtggaggggttaatacagcaatatatagtgctgctggagaatctttacaacatgctactaaaaaatgtgctgatgcactgaggccaggaacctctgtagttgttccacttccatcaacttctcctctgcatcaacgggaaggtgtgacgcatgtcatacatgtgctcgggccaaatatgaatccaatgcgaccagactgtcttaagaatgactataccagagggtctaagattcttcgtgaagcatacacttcactttttgagaattttgcatctattgtgcagagctacatgggaaagcagaacaatgagtctggagcagaaaagtcagcgtctggaaggatatcgcccaatgacacaaaaatgaagcgagaggacaaccatgaatctgaaaggatgaaaaaacataagttgtttcaacccatcatgactgcaaagcgacagcatgagtgtacaaaggttaatgctccaaattgccatgataatgccatgacttcatctgctgctcctagccaaactagacaagtagacaacaaaaggaatgatgtggttaccagtaagacttggggatcctgggctcagtctctttacgaacttgccatgaacccagaaaaatacaagaactcagattctattctagagacatcagatgaatatgttgttctgaaagatctctatccaaaggccaaaaggcatgttttggtgatagctagaatggatggtcttgactctctagcagatgtcaagaaagaacacttgcctttgttgaggaggatgcattcagctggggtgaagtgggcacataagttcctagaggaagatgcggctttggaattcagacttggataccattcggttccatcaatgcgacaattgcatcttcacatcattagccaggatttcaactctgcaagcttgaaaaataagaaacattggaactccttcaccacatcatttttccgtgattctgttgatgtgattgaggagattgaacaaaatggatcaacaaccaccagcagtgatgaaaaggtactcgctatggaactccggtgccacaggtgcaggagcgctcatccaaacatcccgaaactgaaatcccacatcgccatctgtaaatctcccttcccttcacatcttcttcagaaaaacaggctgttgttgtcctcgacgatgcatatggaccgcacgtagatgctagaactcgatgatcagttgtccttgcacgcacattttgcatgtcgtgcttgcctaaggatagtgttgatcgattttttttttacctaatgcggactagtggaaacttgccttgcttttcagagac

SEQ ID NO: 86843 - DNA, 760 bp, Zea Mays
tagttcgttcagaagttgtagtctcggatgggcgtttggcggttgctcaatatctgtcgttgctcccttgacatgggtgtcgtcgttgctctcttcgagctaagcattggcgggtacgctgttcataagcaaggtgaacccctttcaagtttcaaataaatcgatcctcccttttctcccgtctggatctggccgcgggctggcatgacgattgacgacgatgctgttgccggaggatatgacgatacttgttgaactctggcggcgacccaaccaccgcgtcgacgggcgacaggccgacagttctttgctcacgttggtcatggtggacgacgcggggctctgttccgcggcgttcttcgcgcactgaggagttggccgtggcggattcggcgacggagcgccaatcctgtttgtgggtccaaccgctaagacgtgtaacacatgcctgcttctgaaggtctggtccgaaagacagctgtccaagcagcatgctgggttcatttcctgctgccgatttcggtctccatcgatcgattccttactccgaggtggtgtctacaaattgttggagattcttccatgcagtagatggaaaaccaacccagttttttttcttttcttttctttttagtcttcacgacattttcgtcgagctttcgcaggatttgtaatctaatcaccttcttctcccgggacaaagagaagggacctgataagatgttcagggaattaaacgtgcaaagcttttaatctaaca

SEQ ID NO: 86844 - DNA, 216 bp, Zea Mays
atgcgttcacgttattcggttgagcccccaccgtgctacagcttactatcactactggcactccgaggcttggagcctgcgggacttctactgaggatttggtggccgggagttggcggcagaaaccctagagccccattccagcagctctttgctggtgtcgtccttgtgcgcgatcacctcgatgaagcacaggcagtccttcttctcccctag

SEQ ID NO: 86845 - DNA, 1526 bp, Zea Mays
catatatgaggaaccagtagcaccatactgtaacctcatcttctctgatgagaaagagatgatgagagagggtgatgcacgtgttacgcttctaagaagcaagctccatggcctggtcgaaaggaaccgagatctggaagaggaaaacaagcaattgagacaccaagtgagccaattaaaaggtcagatctcctctctcgaaggccaggaaactaataagaggatgctgtggaagaagctggagaattctgcaaccggcatcagctactccaaggaaaagcagtttgtccagagcaacgatggtgctaaggaagccgtagatctcaacagctcattgtctcacagcaggcagcaattctccagtgtaaaccaagtgagatcaagggcgccaagggttccaaatcaacctcccaatccgacaagcacccaaccaaaggcaactgtgagaaaggaaggatgcatggcccctcctcctcctcctcctcctctaccttccaagttgcagaggagcacaaaggcgatacaaagggtaccagaggtagtcgagttgtaccggtcgctagtgcggcgtgaaggcaaaaataatgcaaagtctggatccgtaggaattccagcagcaacgaacagcagagagatgatcggggagattgagaacagatcagcttatgttttagctattaaatcagacgtagaaaatcaaggcaacttcgtgaacttcctcgcaagtgaagttcaaaacgcagcatacaaaaagatagctgacgttgaagagtttgtgaagtggcttgatggggaattgtcataccttgtggatgaaagagcagtgctaaaacaattccccaactggcccgagaagaaagcagatgccttgagagaagcagcattcaactaccgcgatctgaagaacatagagtcggaagcatcatccttccatgatgacaggagagtggccacacctatggctctcaagcgcatgcaggcattgcaggacaaaattgaacaaggtattcataacactgagcgagtaagggacagtgcaagcggaagatataaggaccttaagataccatgggaatggatgctcgactctggagtcataagccaactaaagatggcttccttgaagcttgcaaaagagtacatgaaccgcattgtgaagacactgaagtcagatccatttgcgaatgaggaggagctgcttctgcaaggtgtccgctttgccttccgcatacatcagcttgctggtggctttgacgaaggatgcagaaaggcatttcaggaactaaatactaatgcaagcaagtcagagtgatccgagttcacgtgggttcaaataaaagtcgagatcacacatagataaatatgacacacatagattatcaagttttgccgaggttggctccaagggtctccaccaagacttgatgatggtgctgcatcttctaaagtttaatttatttggcatcaggtgctgatctcttggatacaagttgaggctctgaaaaatttctaaacgaatcgtacat

SEQ ID NO: 86846 - DNA, 2522 bp, Zea Mays
ccggcaccttccaaagttccaacttccaagtcacgagaaaggtttcgcttcgaaactcaaccggagatggcgagctctggcggaatctccgaccagctcttcgtctccgtcaagttagagagcccgcacctcgcggagctcgacctcgccccccacctcttcggctcccaccctgtggctggctcgtgggacccctgcaaggccctgcctttggagcgggcggccaccgccgtgtgggagttcagctgcgtcgtgccttcgcagcacgaatcgctggatttcaagtttgttttgaagcgaaaaggtgataatcctcaatacattattgaggagggacctaaccgaccattgggttgccagagaaatgaatttgagatggggaatgcgttgtttaaactcaacgaagggaaggaggtacttgagtgcaaggttcaggttgagacagaaatgttatccccaattgacttggcggctagttggagagctcatcaggagtattttcagccttcaagggtgcgggggactcacgatgtcactatcaaccctgggttagaaggcagggccaagaatggcttcgcttctggtttggagcttgatttagacaagtatgtagttccaacaccaaacatgggctcaggtgttgtttatgcagctagtttgactgaaaatccacgctcattattgcaaactgggagttcctcaaacaatgataccacaaaggacattttgcacaactcaactaaaggcgattcatccttgaatcactatgttaacactatgaagagcacaattggagggcatgcatcgtcactggaagaacaaagggcaatgtttgttgatagaggggttggctcaccaaattttgcaagaccaacaatggaaaccttttcgatgagcaactttaagttggattctgaatcaaagggtatgccagcagcagaaggggctgttgcagcagctgctgtagctgatcagatgtatggaccaaaagaggaccgcaagttggccatcgtattggttgggctaccagctcgaggtaagacctttacagcagctaaacttacaagatatctccgatggttaggtcatgaaacaaaacacttcaatgttggaaagtaccgccggctcaagcatggaactaatcagactgctgatttctttcgtggagataacagggagggtgtggaggcacgtaacgaggtggctgcattagcaatggaagatatgctatcttggatgcaggagggtggtcaggttggtattttcgatgccacaaacagcacaagaatacggaggaacatgctgatgaaaatggctgaaggaaaatgtaagatcatctttttggaaacattatgtaatgaccaagatgttcttgagagaaatatacgattgaaagttcaacaaagtcctgattatgcagagcaaacagattttgaagctggtgtacaagatttcaaagagcgattgacctattatgaaaaggtctatgaaccggtggaagaaggttcttacataaaaatgattgacatggttagtgggaaggggggccaactaaagattaatgacataagtggttacttgcctggacggatcgttttcttcttggttaactgtcatctgacacctcgtcctatcctgctaacaagacatggtgaaagtatggataatgtcagaggaagaatcggtggagactcttctttgagtgaggccggtgagctttattcaaggaagcttgcgagctttgtggagaagcgactgaaatccgagcggactgcctctatatggactagcacactccagagaacaatattaacagcacatccgatcattggttttccaaagatacaatggcgtgctcttgatgagatcaatgctggggtctgtgatgggatgacatacgatgaaataaagaaaagtaaacctgaagaatatgaatcacgaagaaaagacaagctgaggtatcgttatccgagaggagaatcctatcttgacgtcattcaaagactagaacctgtgataattgaacttgaacgacagcgtgctccagttgtagtcatagctcaccaggctgtgttgagagcactttatgcatactttgcggacaaaccgcttgaggaagtcccaaatattgagatacctctacatacaataattgagatacaaatgggtgttgctggtgttcaagagaaacggtacaaactcatggatgcaatccatcccacagcggggttgtaagaaataataaatggagctcgccttctaaaagcaatggtagcacaaataaattttgtgatgatatacgtatcacaacattaatcaattataagctatagttcgaggtggaatgtcacaccactaggtttagctcatagatgatttgccatttgacttacaagttttggctggttgtgtagtgtgtactcttaattcatgagttctgaacatgtttaattcagatccgagttctgagcaagtttattcaggccaaagctcgcgccaaagacagtttttccagtaacgaa

SEQ ID NO: 86847 - DNA, 2007 bp, Zea Mays
ccggcaccttccaaagttccaacttccaagtcacgagaaaggtttcgcttcgaaactcaaccggagatggcgagctctggcggaatctccgaccagctcttcgtctccgtcaagttagagagcccgcacctcgcggagctcgacctcgccccccacctcttcggctcccaccctgtggctggctcgtgggacccctgcaaggccctgcctttggagcgggcggccaccgccgtgtgggagttcagctgcgtcgtgccttcgcagcacgagcacaattggagggcatgcatcgtcactggaagaacaaagggcaatgtttgttgatagaggggttggctcaccaaattttgcaagaccaacaatggaaaccttttcgatgagcaactttaagttggattctgaatcaaagggtatgccagcagcagaaggggctgttgcagcagctgctgtagctgatcagatgtatggaccaaaagaggaccgcaagttggccatcgtattggttgggctaccagctcgaggtaagacctttacagcagctaaacttacaagatatctccgatggttaggtcatgaaacaaaacacttcaatgttggaaagtaccgccggctcaagcatggaactaatcagactgctgatttctttcgtggagataacagggagggtgtggaggcacgtaacgaggtggctgcattagcaatggaagatatgctatcttggatgcaggagggtggtcaggttggtattttcgatgccacaaacagcacaagaatacggaggaacatgctgatgaaaatggctgaaggaaaatgtaagatcatctttttggaaacattatgtaatgaccaagatgttcttgagagaaatatacgattgaaagttcaacaaagtcctgattatgcagagcaaacagattttgaagctggtgtacaagatttcaaagagcgattgacctattatgaaaaggtctatgaaccggtggaagaaggttcttacataaaaatgattgacatggttagtgggaaggggggccaactaaagattaatgacataagtggttacttgcctggacggatcgttttcttcttggttaactgtcatctgacacctcgtcctatcctgctaacaagacatggtgaaagtatggataatgtcagaggaagaatcggtggagactcttctttgagtgaggccggtgagctttattcaaggaagcttgcgagctttgtggagaagcgactgaaatccgagcggactgcctctatatggactagcacactccagagaacaatattaacagcacatccgatcattggttttccaaagatacaatggcgtgctcttgatgagatcaatgctggggtctgtgatgggatgacatacgatgaaataaagaaaagtaaacctgaagaatatgaatcacgaagaaaagacaagctgaggtatcgttatccgagaggagaatcctatcttgacgtcattcaaagactagaacctgtgataattgaacttgaacgacagcgtgctccagttgtagtcatagctcaccaggctgtgttgagagcactttatgcatactttgcggacaaaccgcttgaggaagtcccaaatattgagatacctctacatacaataattgagatacaaatgggtgttgctggtgttcaagagaaacggtacaaactcatggatgcaatccatcccacagcggggttgtaagaaataataaatggagctcgccttctaaaagcaatggtagcacaaataaattttgtgatgatatacgtatcacaacattaatcaattataagctatagttcgaggtggaatgtcacaccactaggtttagctcatagatgatttgccatttgacttacaagttttggctggttgtgtagtgtgtactcttaattcatgagttctgaacatgtttaattcagatccgagttctgagcaagtttattcaggccaaagctcgcgccaaagacagtttttccagtaacgaa

SEQ ID NO: 86848 - DNA, 630 bp, Zea Mays
actgtcagataagctcgtatgaggatgccttatgttgtgcccagggaaagaagcattgattatcgcttctggaatggatttcactcatatttctatctctctgtgccctacaatgcaaagcatgacatagtgctttgagtgaagtatgttgattgggagcacattgatagcaagtcagataaagtattgaagaacattgtgaatgcctgcaagagatttggcctctatgacatcatgggattccagcacaattggaacattgagattatgtatcagttctcagctacctactactgtgagacatcctgtgatgtgatgcattgaatgactgaaggaaggcactataggctggactatgtcacctttgctcgtctgttgggttttggctctgatgataggagcttcagtgagattcatgatgagagaaacctgacagaccatgaaattgctcttatgtatgcggacccctctactgctgatggtctgtcgagagggctcaagtcattcttttatggggtgtttggtttaaggaatgagatagtccatcatcttctcacttctcatttttttgtctggtttgtggaatggagtgagttaatctatcaccacctcattcctcatagttagttg

SEQ ID NO: 86849 - DNA, 1634 bp, Zea Mays
ccgccagcgcggatgtcgtcgtcgcgccgccgcccgcccccgccgccgccggcgtggacgcccgagccgtggagcgacggggagacgtccgcgctgctcgacgcatggggcccgcgccacctccgcgcgtgcggcggcgcgctccgccccgccgactggcgggcctgcgccgacgccgtcacctcccgccgcgccgcggccggccgggccccgcgcaccgtcgaccagtgcaagaaccgcctggattatctcaagaagcgcctcagggccgagcgctccaggcccaagggggccccgccgacgccgccgccggtctcggggtggctcacccgcctccgcgcgctgctgcacctcgccccctccgctcctcccgggttcgcgcaccgtcttggcgccaaaacgcccaaggtggaggaggaggaggaggtgttggacgagaagccgagcggcggggctcctctgccccgctactggccgccggtgccgaagcggccgaggacggcggtgtcgctgtcgccgttgaccgccgcctccggggaccaccctggaggcggtgggaggaattgcacggaagtggcggcggctctggataggcttgccgggacgtacgagcgggtggaggccgccaagcagagggaggccacgcggctggaggagcggcgcctggaggcgatgcgtgatctcgagatcgagcgcatgcggctcctcgtcgacgtcgccgtcaccgcctccgtcgttgtcgatggcgccgccgcgaccgccacaaccgccaccggcgacttctagttggtgaggtatggtttttgctctgggtaaacgcgtgcttgcgctagcagggaccaggtcacgaaatgattattgcgggattcacgttcgataatggttggttcatgttggaattgtgaggcagcgcggctagaaatttccacttcactatgagaatatcagctaacacatgatcactcgatttggctagacattcttaatttctagaatgggcatcgaattggttgctcatatcgtttggtatgtagtagtgtaggaatgctgatctttctgatgaaactactcattatgcaagcttacccctgctgaaatctcctgtctcacctctagcaaacagagacgattcaaatttccataagcgactgttattgttcagaaatggagtgataatctgctttgaatgcatgagaagttaatcacgtgtgactgttcgattttccagaagatacaactccgtgacagttttgttgtctttgttctcttttgcagagggacttggataactggctggccaaggtagccaattccagcctatatgtttttttcttcaaagagacgatcgcatcatggagatagaggtcacttgatgtgatgttcttctacaaagttaaatcggtttaggttacaggaaaagcttagccagatgtaggatagcacatggtgagatttttttagttctttgattgcaggtctgcagcaactgaaaaggggggagaatagcctgaaaagtatcttcgttaatgtttagctatcctttggtaactagtgctgtaatccctcttgatttacagctgttcggctgctcagttgagagacattctgatcatccagtacatatgataccttgg

SEQ ID NO: 86850 - DNA, 3221 bp, Zea Mays
atgaccaataacttcctcacgacgataaagagcctgaagctgatcgagggttgcaaagccgcacaattatacgccttaagctccgttggggcagcctccacgtccggctcgggggatgccggagggagcagcaacggcaagccccagcctcctccgccgccaaagaccatctcgatgcggtccggatcgctgtactacccgcacgcggcgccgtccacgtcgggcgccttcgtgcccgagccgcacctgccgtgcggcctcccggtggccgacgccctcgagccggccctggacgcgtgcctgcgccccgtcgaccacgtcggcgtgctcgccgcgtcgtaccggcgggtctcggccgccacggcggggggcgacgacgacctctgcgacgcgtacctggagcagcacgcgctgttccagtcgatcggcgacgcgaggctgatccggcgggcgctgcgggccgcgcgcgtccacgcggacaacccgcaccggcgcgccgtgctcgccgcgtggctccggtacgagcgccgcgaggacgagctcgacccggcgccgccgccgctcgcgccctgcaccgcgacgacgccgctgctcgagtgcccccgcgccgctgtcttcgccagcgtgtcccactcccacagcgtggacccggtctgcccgtgccgccgcccaccgcttcctccagtcacccctccaccgcaccgcctgaggcgcaacacgtcgggcgccgcctccgagatgagcgaggaggaggagccggagaccaatgacctgtggttcatcatcggcgaggaggaggtagcgtgcgagcggtcgtgcatcgcggcgctctcaaagccgctcaacaccctcctctacggcgggttcgccgaggcgcaccgcgaccggatcgacttctcccgcgacggcatcacgccgcgcggcatgcgcgcggtctccgcctacagccgccacggccgcgtggacgacttcccgcccgacgtcatctcccagctcctcgcattcgccaacaagttctgctgcgagggcctgaaggcagcttgcgacaaccagctcgcggccatggtgcggggtctcgacgacgcccggtccctcatcgacatcggcctcgaggaggcctcccacctcctcgtcgcctcctgcctccaggcgttcctgcgggagctccccaagtcgctcacgtgcccggacatcgcgcgcctgctctgcagcccagaggggcgagagcgccttgacatctccggtaacgcgtccttcgcgctctaccacttcctctcttacgtcgccatggagcaggacatgaggtcgaacaccacggtgatgctgctggagaggctgaatgaattcgcggagcagccatggcagaagcagctggcactgcaccagctcgggtgcgtgatgctccagcgcggcgagttcgaggaagcgcaggagtggttcgaggccgccgtcggcgagggccatgtgtactcggtcgccggagaggcacgtgccaagtacaagcgcgggcacaagtacgccgcgtacaagctaatgaacagtattctcggcgagtacgacgaacccgccgggtggatgtaccaagagcgctccctgtactgtgtcggcaaggagaagttggctgatctgcaggcggcgacggagctggaccctacgatgacattcccgtacaaatatcgtgcgtgcgcgctgctggaggaggacaatgctgcgtccgcgatcgcagagatcagcagggtcgtcggtttcaagatggcgaccgattgccttgagctccgggcgtggttctaccttgcgcttgagcagtgcgagctggctgtgcaggacgtgagggcgatattgacgttggatccaacctacatgatgttccacgggagaatgcacggggagcagctgattgagctcctccgaggacaggtgcagcagtgggatatggcggattgctggatgcagctgtacggtcggtggtcggcggtggatgacatcggctctctggcggttgtccagcagatgctctccagggaacccggaaacagcagcttgcggtttcgacagtcacttctccttctaaggctaaactgtcagaaagctgccatgcgcagtttgcgatatgctcggaacagcacgctccatgagcatgagaggctcgtatacgaagggtggattctgtatgacagtgggcatcgcgacgaagcgttagccaaggccgagcagtcgatcggactccagagatcattcgaagccttcttcctcaaggcgtacgccttaggagattctagccttgacacggaatcctcgctctccgtggtccagcttctggaacatgccaacagctgtgcttccgacaaccttcgcaaggggcaggcatacaacaacatggggagcatctacgtggactgtgacatgctggacgaggctgccgagtgctacggcatcgcgctgaacataaagcacacacgggcgcatcagggcctagctcgagtccactacttgaaaaacaggaaaaaggttgcgtttgaggagatgacgaagctcgtggagattgccagcaactgcgcgtcggcgtatgaaaagcggtcggaatacggtgagcgcgaagctgcgaggagcgacctgaacatggcgacgcttcttgatcctaccaggacttatccttacagatacagagcagctgtactgatggacgagggcaaggaggaggaggcgatcgcggagctgtcaggagccatagctttcaagccggacctccagctgctgcacctccgcgcggcgttcttcgactccatgggcgagcgcgagagcgccctgcgggactgcgaggccgcgctctgcctggacccgacccacggcgacacattggagctgtacagcaaagcctccaccaccaaggccgaaccccagagctaggcagccagccggccggccggccggcaggccgccgctctcctcgtcgtcgattcagctgcggtttttgcgaggcaggatgatgagacgatctcttctctactctcatggggtggaagctgcagatcagtgaggcaggagcaccggaacatgcacatatctcttctaagagtatatacaagagccttagttctgttactgttagagttggacatggggaggcagcaccgcaggagattgagtgcgtgttgccttaagggtagactgcgcaggtgaggtgacaaagagcatgcactgcactgcactgcaccacatat

SEQ ID NO: 86851 - DNA, 930 bp, Zea Mays
agattttgccattttggagaaagcgaagattcaacataggccacctgtcaccgactcaccggtccccaccatcgtcccttcgtctccttcctcgtctgggtgtggccgtctcgcttcgccccttcctctctccttcggttctcctccagatctctaagaccaggagcccggtgaatccacctcgcccgcagcgatgtcggcgagcagcacccccgtagacgcctcgggggagccgatcccgacttcgtcggtgctgatggcggcgtcgaagcacatcgcggtccggtgccgcccggagaacgttgccttcctcaactgcaagaagaaggaccctaaacccgagaagtgcctcgagaagggccgccaggtcacacgctgcgtcctcagcctgttgaaagaacttcaccaaaagtgtcccaaggaaatggatgaatatgctggttgcatgtattactacaccaacgaattcgacttctgccgtaaggagcagcaagcttttgaggaagcctgccccatttccgagtagatcttgagagttttacttgcagtggtcttcgcaaataagggaaaaaaggcagaaaaacagcgttcatgatatcccatgtttgttgtcctcatggaatttgtactggtgaatgaatagcacagcctggagctattcaccccatttgccgcccctcaggattttagagcaggcgaatgctctaaaatggtgatgatggtgttttctctttatggttcacaaattacatttggcggactcgctgttatttctgtctgtcccgagtgtgttaacccgctaatctgatcttctgctctggacttccacaaggctatggcacaactacaatgtactcctacatcatatcgtctcaaatctgaatagtctgtactctgtacagactacagaaaaaaaacattcattgcctt

SEQ ID NO: 86852 - DNA, 1394 bp, Zea Mays
ctgctctccacctgacctgctttcgttttcgtatatgtgccagcagtccagcagcaccaacttgtccacactcgacactgtgttgattgagaccttagctctagcggtttcgtttccggatggaggattcggtgggcgcggatgagaggagggagcagagcgagacgatgccgcacaaaaaggcgcgccaagaagtagcggaggccggtggtgttggcggcggcggcggcggcaagccagctgaggagggcgggttcctgagcgctgtggcgtccaagatcggcgcaacgatgtccggggccaatggcgggagcggcggcgaggtcggtgcggccatggcgtccgacggcgaggagggaaagagggacggtgacggcgagccaggtgaggagggcgggttcctgagcgccgtggcgtccaagatcggcgcggcgatgtccggcgctaacggtggcagcggcggcggtggcaatgcggccgcggcgtctggcggcgaggacaaggaggcggacggttttaccggcggcgtaatcttccggaagctgctgcacagctcgccccctgcgccgccgcatgtgtcaggagcaatggaaacagaggaggaggtgaaagatcaggatgtggcaggtggcgagcaagccgggattctgagcgccatggccaccaagatcgccatggccatgcctggtgcaaacggtgacgacagccatggcggcagcggggacgacgctaagtcgagcaatggcgaagcggcccgtggcggcagtaacggtggagagaagcaggggagtgaatccaacggtggcgggatacttagcgctgtggcttccaggatcggcgtggccgtgtccggcgccaacggggaccgcagcggcagcgctgaggatggtgccaagacgagcgctggcgacgctggtcacggtagcaagggcgaggagaaggggcgtggtgtgaacggtggtagattagtcgagcagatcatttccaatctgccctcagatgatcaggcgcctgatgccgatgaagcttccttgctcatcgccattatcgaagattagctccatgttccgaaggctctctaggtcgtcctcagcgccatgatcaaatcatcagctgagccggagactgaaaacaataaagaaaagcaagcagctggtcatagtaaacatcatgtagcgaggcttagcagattgggtttttttttccgttagaatcagtccacatgtccttgacacgggctagatttgttctaggattatttttccagtagtaagccatgtgtccatggacagtccactgcgcgacgtctaatgtaacaacatcatcaaggttcttttgactatcccataagaaaccattccttgagacaaccgatattgtgagttgataaccat

SEQ ID NO: 86853 - DNA, 651 bp, Zea Mays
atggccaaaaagcgttcaaattcacaacacccatttcaagtatgccgatcaaagaacttttcaattgccactgagaacgcagcaaaccccacacatccaaagcatgtagctttagggccaccttttacagctaaagctcctccagtgacacagccagctaccgctgtattggtagtgtcatgctttgcccgaaccttctctatggtacattcagctgctgagaaaatcagacccatgactgcaaaggttttggcattacttatacttctactacccatctgctttgctgtgtatactatttgttgccttgctgtcatttgctctgccattatcggattttccaaagctccaaagaatagtcccataagcacaccaagaccgcctcccatgacgccactgacgacgctgcgaacggcgcagttgttccagatgtcctgccccttgatctcctccaccgtcggcatccggatcggttccacggccgccgcctggctcgtcgactcgcccccggtgccggcatctgccgccgatggatcaggagaagccatcactctctatctagtgcccttacactctcctctagatgacagagatagcagccgcaggcagcgagaggacggttctggaagttcgagaggcgggctgggttga

SEQ ID NO: 86854 - DNA, 1985 bp, Zea Mays
ctcctcccagtttcctcccgtctccctcacagaaacgactcgcggttcctcgttgcactctcccttgagaaaaaacctttgaaggaggtttcgatcgtgaaaccgcccaggtcccgctccgcaagtgcatggcagtgagctttctgccaatgaggtgtcggacctgtgcatcggcaagccggccgtgaggtcgctccagtggcggagggggtgagcgaggcgatgacgaagggaatagggcggaggcatgggcgtgtggaggtgaggagcccagcgacttgctgagcagggggctagggcgtgactggagcgaggcagggggcacgcacgggcggtggtggcggccgagcgcgggctaggcgattgcgaggctagcgagcgatgtagacgcgcggcatcagggggcggttgtcacggcgggggaggggcgcagactgtggcagtggggcatggagaccaggtcgaagggcaggggcacgtcgtaggtgtggacgccttcgttcctatcttaaggagtagtataaatatagatatagatatagattgagaccacagcggagcgtggccgtccgattcgttccttctgccaagcacaacacagaccatcgtctgcccgcccaactgcacccgccgccgtcgcctcccaaaacccaaccaaaccctagattcgccgccctcagctccggtcagaccctcccccttcgaagatgccgaacctcgagtgccggatgtatgagcagcggttcccggaggtggatgccgcggtgatgatccaggtgaagcacatcgctgacatgggcgcgtacgtctccctgctcgagtacaacaacatcgagggcatgatcctcttctccgagctctcccgccgtcgtatccgctccatctcctccctcatcaaggttggtcgccaggagcccgccatcgtgctccgtgtcgaccgcgacaagggctacatcgacctttcaaagcgccgcgtctccgaggaggaggcgcacgcatgcgaggacaggtacaacaagtccaagctcgtgcactccatcatgcgccacgtcgccgagacgctcgaggtcgacctcgagccgctctaccagcggattggctggccgctctaccgcaagtacggtcacgccttcgaggccttcaagctcatcgttgcggaccctgacgctatcctcgacgtactcacctatgaggaaaaggaggtcggcccagatggccaggaggtggctaaggtggtgcctgctgtcacccctgaggttaaggattcactggtgaagaacataaggaggaggatgacaccgcagccactcaagatccgtgctgatatagagatgaagtgcttccagtttgatggagtgctccatattaagcaagctatgaagaaagctgaagctgcgggcaatgataattgtcctgtgaagattaaactagttgctcctccactttatgttctgaccacacagacccttgacaaggaccaagggatttcagttctcactgatgcagtcaaggcttgtacagcagagattgaaaaatacaaaggaaagttagtagtgaaggaaccaccaagagctgttagcgagcgggaagacaagctattcctcgaccagattgattccctaatggaacaaaacgcagaggtcgatggtgacgtggacagtgaagaggaggaagatacaggaatgggcaacgttgatcttacaaattctggcgtcactgcttactaaggcaacactggttgatttgaatgagatttgctgtatagcaccagctatgatctaaatcgttctgttttgaagcagtttctttttgttatgttttgatggttgaaatctcgttgaattcacagaaacttacctgaggtgttactgttttgggctcagccagtgttggggtagcttttacttagggatgaaaacggccggaaacggtatttattcggtaatcagttttttagttgtttttctttgattgcgaataaatag

SEQ ID NO: 86855 - DNA, 1992 bp, Zea Mays
ctcctcccagtttcctcccgtctccctcacagaaacgactcgcggttcctcgttgcactctcccttgagaaaaaacctttgaaggaggtttcgatcgtgaaaccgcccaggtcccgctccgcaagtgcatggcagtgagctttctgccaatgaggtgtcggacctgtgcatcggcaagccggccgtgaggtcgctccagtggcggagggggtgagcgaggcgatgacgaagggaatagggcggaggcatgggcgtgtggaggtgaggagcccagcgacttgctgagcagggggctagggcgtgactggagcgaggcagggggcacgcacgggcggtggtggcggccgagcgcgggctaggcgattgcgaggctagcgagcgatgtagacgcgcggcatcagggggcggttgtcacggcgggggaggggcgcagactgtggcagtggggcatggagaccaggtcgaagggcaggggcacgtcgtaggtgtggacgccttcgttcctatcttaaggagtagtataaatatagatatagatatagattgagaccacagcggagcgtggccgtccgattcgttccttctgccaagcacaacacagaccatcgtctgcccgcccaactgcacccgccgccgtcgcctcccaaaacccaaccaaaccctagattcgccgccctcagctccggtcagaccctcccccttcgaagatgccgaacctcgagtgccggatgtatgagcagcggttcccggaggtggatgccgcggtgatgatccaggtgaagcacatcgctgacatgggcgcgtacgtctccctgctcgagtacaacaacatcgagggcatgatcctcttctccgagctctcccgccgtcgtatccgctccatctcctccctcatcaaggttggtcgccaggagcccgccatcgtgctccgtgtcgaccgcgacaagggctacatcgacctttcaaagcgccgcgtctccgaggaggaggcgcacgcatgcgaggacaggtacaacaagtccaagctcgtgcactccatcatgcgccacgtcgccgagacgctcgaggtcgacctcgagccgctctaccagcggattggctggccgctctaccgcaagtacggtcacgccttcgaggccttcaagctcatcgttgcggaccctgacgctatcctcgacgtactcacctatgaggaaaaggaggtcggcccagatggccaggaggtggctaaggtggtgcctgctgtcacccctgaggttaaggattcactggtgaagaacataaggaggaggatgacaccgcagccactcaagatccgtgctgatatagagatgaagtgcttccagtttgatggagtgctccatattaagcaagctatgaagaaagctgaagctgcgggcaatgataattgtcctgtgaagattaaactagttgctcctccactttatgttctgaccacacagacccttgacaaggaccaagggatttcagttctcactgatgcagtcaaggcttgtacagcagagattgaaaaatacaaaggaaagttagtagtgaaggaaccaccaagagctgttagcgagcgggaagacaagctattcctcgaccagattgattccctaatggaacaaaacgcagaggtcgatggtgacgtggacagtgaagaggaggaagatacaggaatgggcaacgttgatcttacaaattctggcgtcactgcttactaaggcaacactggttgatttgaatgagatttgctgtatagcaccagctatgatctaaatcgttctgttttgaagcagtttctttttgttatgttttgatggttgaaatctcgttgaattcacagaaacttacctgaggtgttactgttttgggctcagccagtgttggggtagcttttacttgtgtcaagaagcaccgaatttttcctgggagtgaaaacatatcccgttgttatacagtgagtattcccttcgtcgtatagccaat

SEQ ID NO: 86856 - DNA, 1393 bp, Zea Mays
cgagtgccgatgcggaagcggaacaaacgcccaaatggtttcccaactcctacagtccaactccaacagtccaactccaggcgcgcgcaagcggacggaggcatcgaggctttccttttcgccgcagcggtcgtctactcgtctcccggccacaagcagaaaagctgacacgctcccgctcatcctcggttgcgctgccgctgcgaatgccgcctccgggaccccgcctgccgctgcttctccttatcctcctcctccttggggccgcctgcagctgcggcctcacagtcacaggtgcgggggaaggcggctcctgcgagttctccgtcgcgcgcggcagcgagctctacagcttcgacctcgcggcgccgacgccggcgcaccgccacggcgtgctcagcgaggacgggttttacaaggtggctgtgaatgattccatactctggttccagctttgtgatgaaatgctattcaactttgacccacctatgtgccttaattgtgaggattgtggtggtcctttgaggtgtggaactcagtgcagtgcacttgtgtcaaataatattggagggtatgatgtctgcacaaccattggaggattatctaaatcccatatatctctagttgatgagggtaatcctcggaagggtatcattgttaagatgttctcatcaaagtgttctatatctgtttccgttatttgcgattcaaatgcaatccaagtaccagacaaattcgtcctatctggtctttgtgattatgctacaacacttgaacacccttctggttgtccaaggtctgtttctgcttctggaagtggctggggatggctaagcactctgttcataacgccattccgaacctggaattttggattggtttgccccaacgaattaagactgtctttgttcctgcaacaagaagtcatgtaagttatagcagagatggtctaggcacagatgcccctgtataccattgagaaggtgaacattcaagaaacttcagacatacagttaagcacatgtatggactggacatcgggatgaaactttgttcttgccaagatacaggtatgcaagtgggacttaaattgtgaaagggatggagtatttgaatgccatgcaacaagagttctggtgaaattattgtaattttgaacatgtaccatcatcaacataaaatgtgacagaggttgctgtacagttccggaatcttcatgttcatcccgtgagctaattttcccaaatgctgcagcacaaatctacactgtttagagggttgatagcatgtttttcttgaatcacaacatgttattatgcaaatgactggctggatttggaaccatgaaacaaactagtttgacatgctttgttatgaagttatcttagcttgc

SEQ ID NO: 86857 - DNA, 861 bp, Zea Mays
caacagtccaactccaggcgcgcgcaagcggacggaggcatcgaggctttccttttcgccgcagcggtcgtctactcgtctcccggccacaagcagaaaagctgacacgctcccgctcatcctcggttgcgctgccgctgcgaatgccgcctccgggaccccgcctgccgctgcttctccttatcctcctcctccttggggccgcctgcagctgcggcctcacagtcacaggtgcgggggaaggcggctcctgcgagttctccgtcgcgcgcggcagcgagctctacagcttcgacctcgcggcgccgacgccggcgcaccgccacggcgtgctcagcgaggacgggttttacaaggtggctgtgaatgattccatactctggttccagctttgtgatgaaatgctattcaactttgacccacctatgtgccttaattgtgaggattgtggtggtcctttgaggtgtggaactcagtgcagtgcacttgtgtcaaataatattggagggtatgatgtctgcacaaccattggaggattatctaaatcccatatatctctagttgaatagatgagggtaatcctcggaagggtatcattgttaagatgttctcatcaaagtgttctatatctgtttccgttatttgcgattcaaatgcaatccaagtaccagacaaattcgtcctatctggtctttgtgattatgctacaacacttgaacacccttctggttgtccaaggtctgtttctgcttctggaagtggctggggatggctaagcactctgttcataacgtatgttattttgagctgtatacaatcatgtgaatctggaacttgttatatcagacaactgatctgcag

SEQ ID NO: 86858 - DNA, 1398 bp, Zea Mays
ctccaggcgcgcgcaagcggacggaggcatcgaggctttccttttcgccgcagcggtcgtctactcgtctcccggccacaagcagaaaagctgacacgctcccgctcatcctcggttgcgctgccgctgcgaatgccgcctccgggaccccgcctgccgctgcttctccttatcctcctcctccttggggccgcctgcagctgcggcctcacagtcacaggtgcgggggaaggcggctcctgcgagttctccgtcgcgcgcggcagcgagctctacagcttcgacctcgcggcgccgacgccggcgcaccgccacggcgtgctcagcgaggacgggttttacaaggtggctgtgaatgattccatactctggttccagctttgtgatgaaatgctattcaactttgacccacctatgtgccttaattgtgaggattgtggtggtcctttgaggtgtggaactcagtgcagtgcacttgtgtcaaataatattggagggtatgatgtctgcacaaccattggaggattatctaaatcccatatatctctagttgatgagggtaatcctcggaagggtatcattgttaagatgttctcatcaaagtgttctatatctgtttccgttatttgcgattcaaatgcaatccaagtaccagacaaattcgtcctatctggtctttgtgattatgctacaacacttgaacacccttctggttgtccaaggtctgtttctgcttctggaagtggctggggatggctaagcactctgttcataacaattctgtgccttcttggagggtacattttgattggagcagtttacagatattatttccttggcattcattctgtagaggccattccgaacctggaattttggattggtttgccccaacgaattaagactgtctttgttcctgcaacaagaagtcatgtaagttatagcagagatggtctaggcacagatgcccctgtataccattgagaaggtgaacattcaagaaacttcagacatacagttaagcacatgtatggactggacatcgggatgaaactttgttcttgccaagatacaggtatgcaagtgggacttaaattgtgaaagggatggagtatttgaatgccatgcaacaagagttctggtgaaattattgtaattttgaacatgtaccatcatcaacataaaatgtgacagaggttgctgtacagttccggaatcttcatgttcatcccgtgagctaattttcccaaatgctgcagcacaaatctacactgtttagagggttgatagcatgtttttcttgaatcacaacatgttattatgcaaatgactggctggatttggaaccatgaaacaaactagtttgacatgctttgttatgaagttatcttagcttgc

SEQ ID NO: 86859 - DNA, 1404 bp, Zea Mays
gaggcatcgaggctttccttttcgccgcagcggtcgtctactcgtctcccggccacaagcagaaaagctgacacgctcccgctcatcctcggttgcgctgccgctgcgaatgccgcctccgggaccccgcctgccgctgcttctccttatcctcctcctccttggggccgcctgcagctgcggcctcacagtcacaggtgcgggggaaggcggctcctgcgagttctccgtcgcgcgcggcagcgagctctacagcttcgacctcgcggcgccgacgccggcgcaccgccacggcgtgctcagcgaggacgggttttacaaggtggctgtgaatgattccatactctggttccagctttgtgatgaaatgctattcaactttgacccacctatgtgccttaattgtgaggattgtggtggtcctttgaggtgtggaactcagtgcagtgcacttgtgtcaaataatattggagggtatgatgtctgcacaaccattggaggattatctaaatcccatatatctctagttgatgagggtaatcctcggaagggtatcattgttaagatgttctcatcaaagtgttctatatctgtttccgttatttgcgattcaaatgcaatccaagtaccagacaaattcgtcctatctggtctttgtgattatgtgggtacaaagaatttgcaatgttgcagttttctacacagcagattgtttccttaagacattaacataattgtatctcacaggctacaacacttgaacacccttctggttgtccaagaattctgtgccttcttggagggtacattttgattggagcagtttacagatattatttccttggcattcattctgtagaggccattccgaacctggaattttggattggtttgccccaacgaattaagactgtctttgttcctgcaacaagaagtcatgtaagttatagcagagatggtctaggcacagatgcccctgtataccattgagaaggtgaacattcaagaaacttcagacatacagttaagcacatgtatggactggacatcgggatgaaactttgttcttgccaagatacaggtatgcaagtgggacttaaattgtgaaagggatggagtatttgaatgccatgcaacaagagttctggtgaaattattgtaattttgaacatgtaccatcatcaacataaaatgtgacagaggttgctgtacagttccggaatcttcatgttcatcccgtgagctaattttcccaaatgctgcagcacaaatctacactgtttagagggttgatagcatgtttttcttgaatcacaacatgttattatgcaaatgactggctggatttggaaccatgaaacaaactagtttgacatgctttgttatgaagttatcttagcttgc

SEQ ID NO: 86860 - DNA, 2038 bp, Zea Mays
cggccacaagcagaaaagctgacacgctcccgctcatcctcggttgcgctgccgctgcgaatgccgcctccgggaccccgcctgccgctgcttctccttatcctcctcctccttggggccgcctgcagctgcggcctcacagtcacaggtgcgggggaaggcggctcctgcgagttctccgtcgcgcgcggcagcgagctctacagcttcgacctcgcggcgccgacgccggcgcaccgccacggcgtgctcagcgaggacgggttttacaaggtggctgtgaatgattccatactctggttccagctttgtgatgaaatgctattcaactttgacccacctatgtgccttaattgtgaggattgtggtggtcctttgaggtgtggaactcagtgcagtgcacttgtgtcaaataatattggagggtatgatgtctgcacaaccattggaggattatctaaatcccatatatctctagttgatgagggtaatcctcggaagggtatcattgttaagatgttctcatcaaagtgttctatatctgtttccgttatttgcgattcaaatgcaatccaagtaccagacaaattcgtcctatctggtctttgtgattatgctacaacacttgaacacccttctggttgtccaaggtctgtttctgcttctggaagtggctggggatggctaagcactctgttcataacaattctgtgccttcttggagggtacattttgattggagcagtttacagatattatttccttggcattcattctgtagaggccattccgaacctggaattttggattggtttgccccaacgaattaagactgtctttgttcctgcaacaagaagtcatgtaagttatagcagagatggtctaggcacagatgcccctgtataccattgagaaggtgaacattcaagaaacttcagacatacagttaagcacatgtatggactggacatcgggatgaaactttgttcttgccaagatacaggtattgtcaatgagtcagtatcttatcccttgtgttagttttgggctgtatctggttgaaatttcactggaaagcaaaagtgagcaagtgattgcagttacaatcaacagtttaatatattacatgtaatcaggttacttttctttctcttacttttttttggatgaccgaattagtttctggtcaacaattatttcgcatcaactgaaaagtgctgtttaatagcatcattgcatatgattatacagatgcaatgatcacagctcattgttttgaagtaatcattttgtctcaaacttacataatgtgtccatcagtctgaagtctgaactaaaaccagtttcttttcagaaatatacctaggtatgattcttgtacataaatattatatcaccatgcgagtaatagtcaatcaattgtggtgaactatttatctggtttcctttccagaactgcacctaggaggcatagtaataaatgtaatcacactttagggctagtttgaaaacttaaatcccctccgggattcccggggattgagcgggaaattagctcattttctcactcaatcaccgggaatcccgtagaggatttaactttccaaattagcccttaatcatgctttccataatctaccgatctatctaaatagttacaagtatgatagaattctgtaatatattgcattattactcatcattttgcttcctaggtatgcaagtgggacttaaattgtgaaagggatggagtatttgaatgccatgcaacaagagttctggtgaaattattgtaattttgaacatgtaccatcatcaacataaaatgtgacagaggttgctgtacagttccggaatcttcatgttcatcccgtgagctaattttcccaaatgctgcagcacaaatctacactgtttagagggttgatagcatgtttttcttgaatcacaacatgttattatgcaaatgactggctggatttggaaccatgaaacaaactagtttgacatgctttgttatgaagttatcttagcttgc

SEQ ID NO: 86861 - DNA, 1601 bp, Zea Mays
gagaaaaactcggggaagaaactgcgaaaggaggccagaaggatgcagcgagttcggtttgaccaccagctcctcttcctccccgtcccctcctcctgaatggcgacatcctccttcccatcaaatctctcctctccatttgcatctcctcctcgtgcgccccgtgactccatcaaatcgcctcgccccgtgccccctgctcaaaaccctagccctgccgcagccgtcctccatggctgcggatttccgcacccctgaccgcctcctgcccgccgcaactgaggagccgacgaccccgcagggccaccctcccaatccggtgctcagcacccccaccgtccccgacgccacccacgatggcctccgcttctggcagtacatgctcgccggctccgtcgccggcgtcgtcgagcacacggcgatgttccccgtcgataccctcaagacccacatgcaggccagcacgccgccctgccgcccgacgctatctctgagggcggccttgcgtaacgccgtggccggcgagggcggcgccctcgccctctaccggggactccccgccatggcgttcggtgcgggccccgcccacgccgtctacttctccgtctacgagttcgccaagtcggccctcaccgaccgtctcggccccaacaaccccgccgcgcacgctgcctccggggtcgtcgcgaccgtagccagcgacgcggtcttgacgcctatggacaccgtcaagcagcggctgcagctcaccagcagcccctacacgggcgtagggcactgcatccgcaccgtgctgcgcgacgaggggcctagcgccttcttcgtttcctaccggacaaccgtggtcatgaacgcaccctacacggccgtccactttgccacctacgaggcggccaagcggatgctcggggacatggccgccgaggaggagtcccttgccgtacacgccactgctggggccgcagcaggggcacttgccgctgcggtcaccactcccctcgatgttgtgaagacgcagctacagtgccagggtgtgtgcggctgtgaacgcttctcaagcagctcaataggagacgtgtttagaacaatcataaagcgagatgggtattctgggctcatgaggggatggaagccaagaatgctgttccatgcacctgcagctgcaatatgttggtctacatacgaggcctcaaagtcatttttccaaaggttcaatgaggaaaggcggaaatagtctgggggcattacttttagacccatgtatttttttcttgaagtcaatgtacttctttctatacggaagcatactcgctcagctgaatgagaagacgcagctccaggatgcgtttgttggtgatccttgtgcccaagagctgccagcggttgactgagatctgtctaacgaagatctgtctgtgccactgtgttccttttcagataattcgatgtatttatttttcccagcctcggggtgaggaaataacactagaatatttctttttccagtttgatcagtcagcaagcttatctgtactgttgtatggcctcctgctctgtgccagatttttttatataattcaaaggctttggtttcgttgcaa

SEQ ID NO: 86862 - DNA, 1662 bp, Zea Mays
ggcttagcgagggcgaggtggatggtgggtggtggtgccaggcggtggcaggaggggtttgcttcacaagcgtacgacccgtcgcacgctaactgtcccttataagaactaagcggactagtttcatgttttgtcagtttttggttataacttataagaattaagagaaatcaatgtcaaagcagtaggcataattgtttgacgatatagagatgatatatcacatgccaatagcggcctgcaatttttttgctgaaaatcatattgaaaaatcctataaatcactaactaaacacatcaaccactttgtagtttaaacttcgggccttgaagtatgtttgactaacctttctatcacatatagagtttgtacttaatgtgattgcagtttccactgattgcgttgcgttctctgtctagtctactcctttgtttgtttgtgccctggtgaaatatgttgtttggttgtcatatcatctgcagtacgtgtctgaagaatataaatgttatgattgtctggctatgtttaagctaaacattcttgctaaataccacatgttgtccttgactttgtgtttctcttttgcgagtttccatgatcaacatcgattccgccagcttaaacatgatataagaaaaaggaaacaaatggatacacatgaaaggtctacattggttcctccagcttaaacatgatataagaaaaaggaaacaaatgtatagttgtatacacttgaaaggaacatgaaaaccacctgggaaggcttttcctgtaacatgtagaccagcatggtgaccttgcttgaatattgtatactagaattagtgtttcctattctatgggaagctatcaagtgcaaatgcaccatgaagggaaccataaaaactttctcagtttgggtgcaaatcaatatgaaaagatcccagtggttcccttgaagcctttgatcgtgtcaccaccgttctgtttgttttttgagttttacagtggatggtttgtacaaggtttatttttttaatctccttgaatgtaaatgctatcgacctgctttcagtttcatgaagatagtaacactcattttgctgatcagggtgtgtgcggctgtgaacgcttctcaagcagctcaataggagacgtgtttagaacaatcataaagcgagatgggtattctgggctcatgaggggatggaagccaagaatgctgttccatgcacctgcagctgcaatatgttggtctacatacgaggcctcaaagtcatttttccaaaggttcaatgaggaaaggcggaaatagtctgggggcattacttttagacccatgtatttttttcttgaagtcaatgtacttctttctatacggaagcatactcgctcagctgaatgagaagacgcagctccaggatgcgtttgttggtgatccttgtgcccaagagctgccagcggttgactgagatctgtctaacgaagatctgtctgtgccactgtgttccttttcagataattcgatgtatttatttttcccagcctcggggtgaggaaataacactagaatatttctttttccagtttgatcagtcagcaagcttatctgtactgttgtatggcctcctgctctgtgccagatttttttatataattcaaaggctttggtttcgttgcaa

SEQ ID NO: 86863 - DNA, 1092 bp, Zea Mays
cggggctagggttttaacgaagcatataagagctcccacccgtgcagacaaccacacctcctcgaaaccctagcgccggcgcctccacttcgttttcctcactctctcctccagctcagggtccggcggcgaagggaaggcaagatgtacaccgcgaggaagaagatccagaaggagaagggccttgagccctccgagttcgaggactccgttgcccaggctttctttgatctggagaacgggaaccaggagctcaagagcgacctcaaggacctgtacatcaacaatgctatccagatggatgttaccgggagcaggaaggctgttgtcatccacgtcccataccgcctgcgcaaggccttcaggaagatccatgtcagactcgtcagggagctggagaagaaattcagcggcaaggatgtggtaattgttgctacaaggaggattgtgaggccacccaagaagggttcagctgttctgcgccctcgcaccaggactctgactgctgttcacgatggcatcttggaggatgttgtctacccagctgagattgtggggaagcgtgtcagataccgtctggatggttccaagattatcaagattttcttggacccaaaggagaggaacaacactgaatacaagctggagacctgcactgcggtctaccgcaggctgtgtgggaaagatgtggtctttgagtaccctatgaccgaaaatgcataaatatgatgccctctggatatctccactctatttcgttgattctgaatgttatgttgggtctccctatgtacttcaaaaacatagttttgatgctaaagttgcctagcaatttggtacggggaagtggcagtggacgtgaacaatgttaagttttgagcatttaaattaaacctttgccctgataacgttgctgagttatttaatttcttgctttgttcgcggcttgtcagtctgttaaactgtttattttatttggcatagcctgaaggagtgaaatcaacagttgtcgtagttctaactgttttttttcttgctatgtcatataatacagtatgtttcaataaaatctcttaagaagagtcgatgtcc

SEQ ID NO: 86864 - DNA, 1145 bp, Zea Mays
gtgcagacaaccacacctcctcgaaaccctagcgccggcgcctccacttcgttttcctcactctctcctccagctcaggtatccaactaccctcctccgactccaccatcgatctgccctcgcgttctatggttatcatctccccttgcgctggttgctgatccgtgctctgcttatcgaatctcctccttggccgcagggtccggcggcgaagggaaggcaagatgtacaccgcgaggaagaagatccagaaggagaagggccttgagccctccgagttcgaggactccgttgcccaggctttctttgatctggagaacgggaaccaggagctcaagagcgacctcaaggacctgtacatcaacaatgctatccagatggatgttaccgggagcaggaaggctgttgtcatccacgtcccataccgcctgcgcaaggccttcaggaagatccatgtcagactcgtcagggagctggagaagaaattcagcggcaaggatgtggtaattgttgctacaaggaggattgtgaggccacccaagaagggttcagctgttctgcgccctcgcaccaggactctgactgctgttcacgatggcatcttggaggatgttgtctacccagctgagattgtggggaagcgtgtcagataccgtctggatggttccaagattatcaagattttcttggacccaaaggagaggaacaacactgaatacaagctggagacctgcactgcggtctaccgcaggctgtgtgggaaagatgtggtctttgagtaccctatgaccgaaaatgcataaatatgatgccctctggatatctccactctatttcgttgattctgaatgttatgttgggtctccctatgtacttcaaaaacatagttttgatgctaaagttgcctagcaatttggtacggggaagtggcagtggacgtgaacaatgttaagttttgagcatttaaattaaacctttgccctgataacgttgctgagttatttaatttcttgctttgttcgcggcttgtcagtctgttaaactgtttattttatttggcatagcctgaaggagtgaaatcaacagttgtcgtagttctaactgttttttttcttgctatgtcatataatacagtatgtttcaat

SEQ ID NO: 86865 - DNA, 89 bp, Zea Mays
atggcccgcgtgtatgttggcaacttggattcacgggtgacttctggggaactcgaagatgagtttcgtgtgtttggagttctgcgaag

SEQ ID NO: 86866 - DNA, 325 bp, Zea Mays
tgtttgggttgcacgtaaaccacctggctgtgcatttattgattttgacgacaggagggatgcggaggatgctattagcgatctagatggtaagaatggatggagagttgaactatctcgtaattccagtggtcgtggtggtcgtgatcggtatggtggatctgagtcgaagtgctatgaatgtggtgagactggacactttgcacgtgaatgtcgcctgcgcattgcctctggaggtctaggcagtggaagacggcgcagtcgcagcaggagcaggagccgcagcggcagccctagataccgcaggagcaggagccgcagccgc

SEQ ID NO: 86867 - DNA, 2872 bp, Zea Mays
gaaaccaagaaaagctcctagtcctaggttggagcggttgcgttgtgctagctacactagattctagctagagagctagtagctacttgcattaggctactagccggccatgggttgctgccgcaccggcgtccactgcggtgctggaccgagaagaaaccaactgcggcgatgttggggtggtgggggctcgctcgtgctgctattgctgctggtggcggtggcggtgccggcgcgagggcagcggtcggacggcgtggtgatcgcgcaggcggacctgcaggggctgcaggccatccgccaggcgctggtggacccgcgcgggttcctggccggctggaacggcacgggcctcgacgcctgctccggcggctggacggggatcaagtgcgcgcggggcaaggtcgtggccatccagctccctttcaagggccttgccggcgcgctctccgacaaggtcggccagctcgccgcgctccggaggctcagcttccacgacaacatcatcggcggccaggtgcccgccgcgctcggcttcctccgggagctccgcggcgtctacctccacaacaaccgcttcgccggtgccgtgcctccggcgctcggcgcctgcgcgctcctgcagacgctcgacctcagcggcaactctctctcggggagtatcccttccgccctggccaatgccactcgcctctatagggtcaacctcgcgtacaacaacctctccggtgtcgtgccggccagcctcacttccctcccgttcctcgaatcccttcagctcaacaacaacaatctcagcggcgtaattccgctcaccgttggcagtctcagattgctccacgatctttctctcgctagcaatttgatcggtggaagcatcccggatgggattggcaacgccacaaagctcagaaaccttgatctctctgacaaccttttaggtggtagcctccctgagtcactctgcaacctcactttgttagtggagctcgatctcgacgggaacgacattggtggacacatcccggcatgctttgacgggttcaggaatctgaccaagctgtccatgaggaggaatgtcctcgacggcgaaatcccggcgactgtcgggaacctctcggcactgtcactgttcgacgtgtctgagaacaacctcaccggagaaattccgacctccttgagtggccttgtcaatctcggttctttcaatgtgtcctacaacaatctctcgggacctgtgcctgcagctctctccaacaagttcaattctagctcgttcgttggaaaccttcagctctgtggcttcaatggctctgccatttgcacttctgtttcatctccgctcgtggcgccgtcccctccactgcctttgtcagagcggcgaacccggaagctcaacaaaaaggagctcatctttgcggtagctggcatcctcctgctcttctttctactgttctgctgcgtcttcatcttctggaggaaagacaagaaggaaagctcgccccccaagaagggcgccaaggacgtgaccaccaagactgtcgggaaggccggcactggcacaggcaaaggcaccgacaccggcggggacggcggcggcaagctggtgcacttcgacgggccgctctcgttcacagcggacgatctgctgtgcgcgaccgcggagatcctcgggaagagcacgtacgggacggtgtacaaggcaaccatggaggacggcagctacgtcgcggtgaagcggctccgggagaagatcgccaagagccagaaggagttcgagccggaggtgaacgcactcggcaagctccggcaccccaacctcctcgcgctcagggcctattacttgggacccaaaggcgagaagcttctggtgttcgactacatgcccaaaggcaaccttgcttctttcctccatgctcgtgcaccggacagcagcccggtggactggccgacgaggatgaacatcgcgatgggccttgcgcggggattgcaccacctacacaccgacgccaacatggtgcacggcaacatcaccagcaacaacatcctcctggacgaggggaacgacgccaagatcgccgactgcggcctgtcgcgcctcatgagcgcggcagccaactccagcgtgatcgccgccgcgggcgcgctcggctaccgcgcgcccgagctctccaagctgaagaaggccaacaccaaaaccgacatctacagcctcggggtggtcatgctcgagctcctgaccggcaagtcgcccggggacacgaccaacggcctcgacctgccgcagtgggtggcctcggtcgtcgaggaggagtggaccaacgaggtgttcgacctggagctcatgaaggacgcggccgcgggctcagacaccggcgaggagctggtgaagacgctgaaactggcactgcactgcgtcgacccttcgccaccagcgaggcccgaggcgcagcaggtgctgaggcagctcgagcagatcaagccctcgatcgctgtctctgccgcttcgtccttcgccggcgagccgagccatactaccgcgaccgccaccagtgtcacggacgagacgaaatctacagttacagagtagtcggcctcttgcagactggaacttacagctctcagttactttacttacttcaggttcttaataagtagacttcagagtctatatgtttttcagtctgtacagtacaggtgtagggggtaggagaattttggttgccatgtcattctttaattcctgaattcgtttgtacctgccagaagcactccatgttatcagaagatgatctggaagtgctggcttctgattaagtttcagtttaacatttggctcttccaaaacaaaatccttttgagagaaatgtcc

SEQ ID NO: 86868 - DNA, 2267 bp, Zea Mays
actgcactaccctcgctccctctcgggtctcgggcggcccatcgatgctacctctatatatcgttccgtcctcgcacttggtcaccaccaccagagcagcaactagcaagccagccagccagccagccattgccgaccggagcgatggctaccatggcgaggtcaggtgccgtgaagctctgctgctgcacctccgctcttcttctgctctgctgcttcctcctcccaggcgccctcgccgaggagcgcttctacgagttcgtcgtccgggggacgccagtgaagaggctgtgcaagacccaggagatcatcacggtgaacgggcagttcccggggccgacgatcgaggtgtacagcggcgacacgctggcggtcagggccgtgaacctggccaggtacaacgtgaccctccactggcacggcctccggcagctgcggaacgggtgggcggacgggccggagttcgtgacgcagtgccccatccgccccggcggcagctacacgtaccgcttcaccgtcgaggggcaggagggcacgctgtggtggcacgcgcacagctcctggctccgcgccaccgtgcacggcgcgctcatcatccaccccaggaggggcgtcccctaccctttccccaagccacacaccgaggcccccgtcatcctagcggagtggtggaggagggaccccatcgccgtgctccgccagtccatgatcaccggcgcgccacccaacgtctccgacgccctcctcatcaacggccagccgggagacttgctcccgtgctccagccaagagacgagcatcatcccggtggtcgccggcgagacgagcctgctgcgcatcatcaacgcggccatgaacaccgagctcttcgtcagcctcgccggccacaggatgaccgtggtcgccgcggacgccatgtacaccaagcccttcgagaccgacgtcgtcctcctcggccccggccagaccaccgacgtcctcgtcactgcccacgcagccccgggacgatactacctcgccgcgcgcgcctacgcttcggcccagggcgttcccttcgacaacaccaccgccaccgccatcttccagtacaagaacgcccccggctgccccaccacctccggggcaggggctggagccggtgccggtgccggcaccttcagcggcccagtaggccggtcctctaggtcctccggctacctcggccgcgcagggccgcagccgatgctcccgttcctgccggcgttcaacgacacgaacacggcgaccgccttctcgaacaggctccggagcccagtgccggtgaaggtgcccggcccggtgacccaggaggtgttcaccaccgtggggttcgggctcttcaactgccgccccggcccgttctgccagggccccaacaacacccggttcggcgcgagcatgaacaacgtgtcgttccagctccccgacaccgtctccctgctgcaggcgcactaccaccacatccccggcgtgttcaccgacgacttcccggcgctcccgcccgtgttcttcgacttcacctcgcagaacgtcccgcgcgcgctgtggcagcccgtcaagggcacccgcctgtaccgcgtcaggtacggcgccgtggtgcagatcgtgttccaggacacgggcatcttcgccgccgaggagcaccccatgcacatccacggctaccacttctacgtgctggccacggggttcggcaactacgacccgcgccgcgacgccgccaggttcaacctggtggacccgcccagccgcaacaccatcggagtgcccgtcggcggctgggccgtcgtgcgcttcgtggccgacaaccccggggtgtggctcgtgcactgccacatcgacgcgcacctcacgggagggctcgccatggctctgctggtggaggacggcgagtccgagctcgaggccaccgtggcgccgccgctcgacttgcccatctgcgtgctgtagagatttttcagtttgttgctggcgtgcgtcactacgtggagttacagggaggctgtgtcctgtgtgcatcgttctgtgtgtttgcatcggtagttgggcatttgcattcttggatttccatttgaatttgcaaaggaaaaggggaagtaaagtagtatatgactgaatacggatcacgctcatcggctttatttccgcaatgggctttcttgagactactatgtgacctgggccttccaaattagagtcagaggcctatttgagtgtttactactttcaatatacatgaaaattgggct

SEQ ID NO: 86869 - DNA, 567 bp, Zea Mays
cagcaaggggcaggcaggaagagcagagttgtcacttatcaccaacgaactgcatagcctagaaacttgaggggatagatgggcaacagcctgcggtgctgcctggcctgcgtgctcccctgcggctccttcgacgtgatccggatcgtccacctcagcggccacatcgaggagtacgcccgcccggtcaccgccggcgaggtcaccgcggcgcaccctaaccacgtcctgagccggccgtgctcccagggcggagcgcggcggatcctgatcgtcgccccggactcggagctcaagcgagggtgcttctacttcctcgtcccggcctcgtcggtgccggagaagaagaggaggccgcagccgcagcagaaaaaggcgcggccgcagaagacgccgccgccgagcgctgctgttgctaaggaggccaaggacaatggcgacaggtacctggcggaggtgctgtcggagggcaaggccagcctcaagcgccgtcggagcagccgctccacggtgtggcggccacaccttcaccccatcctggaagaggctgctagtgactcgtgatag

SEQ ID NO: 86870 - DNA, 627 bp, Zea Mays
atggcgatggtcaccattgacaacgccgccgccaccatagccgccgcagagaagccgcaggacgccgagaagccggactacgccccctataacggcacttccagcgccgcagatggcggcacgggcgccggcgtccgcggcggcggcggtggcggccgcgtcgtggactcggtggtggcgcggtggcggcgggaggacatgctcgacaagagccccctcgcgctgcatggcgcggccgccgtcttcgccttagtcgctctcgtttatagatgtccaaacagtgcgggccgcccgtttgcgcatgacaggccaacagcagcaatcatggtaatgtggtgcccagagcccagtataagggagattggagtggttggaccaaacttcgaaatgagctcgaagttgggagtagttgcatacttgctgatgtccgcgctgtcggctgccgtccccatcactaaccgcatgagatctgcagttgtcaataactttacagacgcaaccgctgcagcaatcagcatggccttctttgcatttgtagctcttgccttgtcagcagtggtttctggttacaagctctccaaacaaacatacatgtgaatcatcgttctagaagtaaaacccattagg

SEQ ID NO: 86871 - DNA, 1764 bp, Zea Mays
atactgaaatttggaacagagcaactcagcgagtataagctaacctgatcgttttcctcatttcaccttccaccctcccccactttctcctcaccgagtcacaaagccaaaccctaattcacggccgccggagatgggacaaggttctcccggcgggatgggcaagcagcccggcctcccgggcgaccgcaagcagggagacggcaagaaagagaagaaatatgaaccacccgctgccccttcccgtgtcggccggaagcagaagcggcagaagggctccgaggcggcggcgcggctccccgccgtggcgccgctctcaaagtgccgccttcgcctactcaagctcgaacgcgtcaaggactaccttctcatggaagaggagttcgttgccagccaggagcgcctgcgccccagcgaggataagacggaggaggaccgatccaaggtcgacgacctccgcggcactcccatgaacgtcggatcgctggaggagatcatcgacgagagccatgccatcgtctcctcgtccgtcggtcccgagtactacgtcgggatactttccttcgttgataaggaccagctcgagcctggatgtgccattctgatgcacaacaaggttctgtcagtggttggtattttgcaagacgaagttgatcctatggtttctgtgatgaaagttgaaaaggcacctttggagtcttatgctgacattggtggcttggatgctcaaattcaagaaatcaaagaagcagttgaacttcccttaacacatcctgagctatatgaggacattgggatcaggcctccgaagggagttatactatatggggaacctggaacagggaaaactctactcgcaaaggctgttgccaattctacttcagcaacgttcttgcgtgttgttgggagtgaattgatccaaaagtaccttggtgatggtcccaagcttgttagagaattgttcagggtggctgatgatctttctccttcaattgtctttattgatgagattgatgctgttgggacaaagaggtatgatgctcattctggtggtgagcgtgagattcagagaaccatgttggagttgttaaatcagctggatggttttgattcaagaggagatgttaaagttattctagcaacaaatcgtattgaaagtcttgatccagccttgcttcgcccaggtcgaattgacagaaagattgaattccctttacctgatgtcaagactaggcggcgcatcttccagatacacacatcgaaaatgacactggctgatgatgtaaacctagaagagtttattatgtcaaaagatgagttttcaggtgctgacatcaaggccatttgtactgaagctggcttgcttgctttgagagagcggcggatgaaggtaacgcatgcagacttcaagaaggccaaagaaaaggttatgttcaagaagaaagaaggcgtgccggagggcctatatatgtgagactcatcagcagcgctattagtctttgtgagagaactggcgtttgtaatctgcttaaatggtccgaaaatgtttgcttacagcatttattttggttggaaacacacaactcaaacaaacagttatcctattatgagtacttggatatatgaaatggcagcatcgagtcaagatgaggttgaatgttggttgtctgtgcaggcgtggacatgtatgacaagcatcctaggtttcaatcctaggttaatatgataattttatttttttatataaattgaagtctattaatg

SEQ ID NO: 86872 - DNA, 98 bp, Zea Mays
tggaattggaataatcgaacaagtccttaatgcgatccttcattcggttccacttagatcccattcatattgtagtcttcatcaaacaccaatcaaat

SEQ ID NO: 86873 - DNA, 722 bp, Zea Mays
taatcaagacagcttatatatatcatagggtgcaataccgtaattgacaagagcaaaagccgagtgaacatagagactgaggaccaaacctgatttaaaagtgttaagagtttaacttcgaaatcaagcgagtgctttccaaaaacacatgactggaaagtgggtaccgtggctcgatttctaaaggcggagcggaaagatcttaggtctagtttggatactctagtattgagctcaatctacatgtattgaggtagattagggtgtaacttaaactaatttacaccacaatccacctcagcacacgtggatttgggatcaatactagagtaccgaaacaaagccggtacagagtcccctagggttctcattttttggcataggatatagccatggggttctccggggtgatcttgaagccttggagagcctgcatcgcgaccatggactggccgtcgtcctcgaactccacaaaagcgatgcctggtttagcttcgatcatccgtacttcccggaagccagggtactgctggaacaggatctggagcatcatgctcgtggtctggtctggcagattctggatgaagaggatgttgttcggaggcgcaggtggctcctgtgaagccttgcccagacgagacgcttgatagccctttccattgctttgggcagcagcagcattgaggccagcttgttgtgcctcttctgttcgtcgttttttc

SEQ ID NO: 86874 - DNA, 610 bp, Zea Mays
taatcaagacagcttatatatatcatagggtgcaataccgtaattgacaagagcaaaagccgagtgaacatagagactgaggaccaaacctgatttaaaagtgttaagagtttaacttcgaaatcaagcgagtgctttccaaaaacacatgactggaaagtgggtaccgtggctcgatttctaaaggcggagcggaaagatcttaggtctagtttggatactctaggttctcattttttggcataggatatagccatggggttctccggggtgatcttgaagccttggagagcctgcatcgcgaccatggactggccgtcgtcctcgaactccacaaaagcgatgcctggtttagcttcgatcatccgtacttcccggaagccagggtactgctggaacaggatctggagcatcatgctcgtggtctggtctggcagattctggatgaagaggatgttgttcggaggcgcaggtggctcctgtgaagccttgcccagacgagacgcttgatagccctttccattgctttgggcagcagcagcattgaggccagcttgttgtgcctcttctgttcgtcgttttttctcagcagctaaaacagaaacaagag

SEQ ID NO: 86875 - DNA, 174 bp, Zea Mays
atgtggcgactagcgtggggcgctgctgcgctggggtcctgcctcctgggtctggcggctgggatgagcgcctgggcggccgggatgggagctcgggaagggaaggccggaagggagttagggaatttaggtgtaatcggatcgggagatctaacagagatgacaagaaggtaa

SEQ ID NO: 86876 - DNA, 1330 bp, Zea Mays
gctcggtccagcccacgcccgctccccccccgcgctataagtagcggcccggtccgccgagtcgagccgtccacagcagagtagagtagcacacgcactcgcctcttgtgtctttctttgtgagctgtggtgtggtggtcgagacacacacagcagcagcaacaacaacatacatacatgcacgctagcctcgcctcctacgccgcggcagctatgccggcgctggacctccgccccgagatagcgcacgcgcaccagcccgtcatgtcgccctctcaccacggctgggacggcaatggcgccacagccgtgcccacaccgatgcccaagaggctggacgggaaggtggccattgtgacgggcggcgcgcgcgggatcggcgaggccatcgtgcggctgttcgccaagcacggggcccgggtggtgatcgcggacatcgacgacgccgcgggggaggcgctggcgtcggcgctgggcccgcaggtcagcttcgtgcgctgcgacgtgtccgtggaggacgacgtccggcgcgccgtggactgggcgctgtcgcgccacggcggccgcctcgacgtctactgcaacaacgccggggtgctgggccgccagacgcgcgccgccaggagcatcctgtccttcgacgcggccgagttcgaccgcgtgctccgcgtcaacgcgctgggcgccgcgctcgggatgaagcacgcggcgcgcgccatggcgccgcgccgcgcggggagcatcgtctccgtcgccagcgtcgcggccgtgctgggcggcctcggcccgcacgcctacaccgcctccaagcacgccatcgtcgggctcaccaagaacgccgcctgcgagctgggcgcgcacggggtccgggtcaactgcgtctcgcccttcggcgtcgccacgcccatgctcatcaacgcctggcgccagggccacgacgacgccaccgccgacgccgaccgagacctcgacctcgacctcgacgtcaccgtgcccagcgaccaggaggtggagaagatggaggaggtggtcaggggcctggccacgctcaagggccccacgctcaggcccagggacatcgccgaggcggtgctcttcctggccagcgacgaggccaggtatatatcgggccacaaccttgtcgtggacggcggcgtcaccacatccaggaacctcatcggcttgtgaatcaatgtcaatccgttccaaatatcccattcccatggctaggctaattagagaaggagagagagaaaactgctattagttgtacttgaagtgatcgattttcatttggttgattgattcatcaacaaaagtgttccagcaa

SEQ ID NO: 86877 - DNA, 480 bp, Zea Mays
atggcgagtctgatccgttgtctgttcaggcggtcgacactcggctatcaaacaaaggcgcgtacactcgtatggagagttccagccaaggacaactcgacggcgacggccgactcccgcgcgatggctgctggcgaccaacggaggcggcatctatcctcggcggagactgccgggtcacagaagttcaaacatagcacaaattccaagacaccaaagaccatacaagagcccaccaagaacgctagggcttcagcgcagcctcctggcctccctctcggactcgagcagggtgaggatgtcaccctcgcgaacgggccccttgacattcctcatgatgagccggttctggtcatccaaaaacttcactctgacctgggtcacctgacccctggagccggtcctgcccatcaccttcaccacaacagcaagcttcacctgggtgtccatgctgcattaatagaaagcatttgtcagtaa

SEQ ID NO: 86878 - DNA, 97 bp, Zea Mays
ctctcgcttcacgcgtggacggaagccgacgagctctcagtcacgcaaggcgagctggggcggcggcggcgctaggacagaacactggatgaggaag

SEQ ID NO: 86879 - DNA, 1760 bp, Zea Mays
ctcattcatcagtggaggcagcggtggcctcatggggtggtacgtggccgacctctccatggcagcagcggcttcgaccatctccagtcccagcgagctcgtcaccccgccggcgtcctccgcgtcgtcgagcttaggcgggcacgacatgctccgtgtgtacgtcgtggttgacgcctcgcgcgggagcggcaaaagcacggggcggccctccccgttgcgcgcgcccaggatggccacgaatcggtcgtcctccacgtcgtagaagttggcggtccgcacctcctgcgccagcgcgcaggtccagcagaacagccacttggcgcagtcgcccacggccgcgctgccgcaccaccaccaggagcggccgcccgggagcttgtagcgcttccgcatctgggaccgccagaagccgccgtacaggaagccgcagaagcccaggagcacgcccacggccaccaccgtgtcgcggatttcgtcgtcgtggatgttgagcgccgtcacgctgaagatgaggaacggcgccacgaatagcaggatgaaggtgaaggcatgcacgtacatgttgccgaacccgaggcgctccatgttccagccgaagacacagaaggtgcacgtcgccgacagcgcgcacaccgtcccgtcgtcgcagcagtcgaacagcccgccgctccactccgggctgctcaccaccacgcggcggttgtatatcgtgatctctacgccgtcgttctcggtacggctggtgtggtggtcctgctgcgccgcatcggccggcgccgccgacgacgactcggtgtcgggctccttccgtccaagcgggctgtacgcggtgtagaggccagcgacgacggggcagcccgtgccgaggccgtagccgatgttgagcgcccagtccgggcggtccttgcgcgtgtagctccagaacagggcgcagcagtagtactgggcgaagcaggtgacgtgcagcaaggccacgacgaggagcatgtgcgcccggtcgtgcgggcgcgcggcgccgtccttgcagtacaccttcctgatctcctcgcggtcgccgtcggggcgccaccggaggagcagcaccaggtggtggaagatcttggggtgctggtacaggcacatgatggtgaagagcgcgttgaggatctggttgatcacctccgtccacttcttgcgccgctcgtcgtcggggatggcggcgtcgagcatgccggtcatgagcatgaggagcagcagcagcccggcccccacgaacgccagccagatgatcatcgcgaagttctcgggcttcctgcaccagctcaccgcgtaggtccacagcttgcgccacttgatcttgcgcacgaacggcacgcggaaccgcctccgcgggccgcggcgcccgccgtcgtccgagccgtcgtctgccgactcctggtggccgtggctcctccggcggaggcggccgacgaaggtggagcgcaaaaaccagtccttggacgggtgggcgcggaggaagtccagaaaccgccgcttgcgccggctctcgctgagcgcgccccgctccacggacgggatgtagatatcgatggggatgaagtccatcagcctggctgtcgtccccgacggcgtgccaggctcgccgacaacctcgacgatctcgtgcccgtcgaagctgccattcgagtccggaggcatctcgactctgtgtcgaactcctctgccagacagtagcagcagtacgtgcttcgagatttcagaacatgatgtcgtatgcg

SEQ ID NO: 86880 - DNA, 1769 bp, Zea Mays
aaaaactcacatcgttccctacaccctactccctccgtcagccagcgaagttccttcagtcactcaacaccttacgtccctagccatcctccgccgcctccgtctctgcttccctagagccgtcgcgatggcagcagcccctgccggtgcccctgcaatcaccgcatcctcctcctttgtttcttcgtctccgttctgtctcaaggcatcgatgaccagccagcgccgacccgcggggagagtctccatcgtcatccgctgcgtcagtagcccgccggccgtcgacacatctttcaagactaatgtcccgcgcaatgctaatatggccaaactccaagcaggatatttgtttcctgagattgccaggagaagagccgctcatttgctgaagtttccagatgccaaaattataagccttggaataggcgacactaccgagcccattccaaatgtcataacaaatgccatggcagagagagcacatgccttgtcaacaattgatggctacagcggttatggagctgagcaaggtgaaaagaaactcagagcagcaattgctgcaacctactatgcggaccttggtattgaagattcagacatatttgtctctgatggtgccaaatgtgacatatctcgcttgcaggtcctttttggatctaatgtgacaattgcggtccaagatccatcataccctgcatatgttgattcaagtgttatcatggggcaaactgatttatatcagcaagacgttcagaagtatggaaacattgagtacatgagatgcggtccagaaaatggattttttcctgatctgtcaactgtccctaggacagatattattttcttttgttcacccaacaatcctactggtgctgctgcatctcgggaccaactaaccaaattagtaaaatttgcaaaggacaacgggtccatcatagtctatgattctgcttatgcaatgtacatatcagatgacagcccaaagtctatctttgaaattcctggagcaaaggaggttgctattgagacagcctcattctcgaaatacgctgggttcacaggtgtccgtctaggttggactgttgtccccaaggagctccttttctcggatggacatccagttgctaaagatttcaatcgcatagtttgcacttgcttcaatggtgcatcaaacattgcgcaagctggtggtttagcctgcctctctccagacggtctaaaggctatgcaagatgttgttggcttctacaaggagaacactgaaataatcgttgagacatttacatcactcggattcaacgtgtatggcgccaagaacgctccatacgtatgggtgcacttccctggccgcaattcgtgggatgtgttcgctgagatcctggagaaggccaatgtggtcactactcctggcactggatttggaccgggtggcgaaggctttgtgagggtcagcgcgttcgggcacagagagaacatcattgaagccgcaaggaggttaaagcagctgtataagtgagcaccgatgcagcttctgtgccctcctagacagatgtatcaataagaacacatcagggcaccaaaaatcgcttggtgaagctgccagaagatgttagattttgaacttttttttttaattctcgtgcggtgtctacattcaaaccatttcgaactctagacaatgcttgttgtaatcctgagacccttcattcactggtgaagttgtgattgtcttgtctgtgttcatttttgtgtcctgctgttgctgtttc

SEQ ID NO: 86881 - DNA, 98 bp, Zea Mays
ctgtagcgatgttgttcacagatgcctagttctgctgggatccaatccaacagaaggcagcatgacaggcaagctattgcccggtgaagagaagacca

SEQ ID NO: 86882 - DNA, 168 bp, Zea Mays
agcatgccataatgttccgttttattaaaatcaaatctttcgccgatgaaccatcgtcggaaatgttcacatgcatgcgagcaccttctgagtgagactaagcgaacaaaaatagcttaccaaggatccttttagagatgaaaaaacaacaaagcctttcaacggcac

SEQ ID NO: 86883 - DNA, 573 bp, Zea Mays
gccgtccctgtctcatcccgccgtcgtcgcccccatccccacagtcgcccgtgctccgcccggtccaccagggcgcctcgccctgggggacggtctccgaccaaccagtcgcctgaccgtacatcggtcggttcagcttcagcgccgaaaaagcatagcgcttcctcatgaggccggcgtcgtaacttctcgtcgtcaacgtgcaaggattttctccgcaagtttgtggacagcgagcttctaacgtcaagcctagaggactggttctctggtcacagcgaagattgtggtttcaggaagccaggtttcgacgttcctttcgagcttacagagttacaaaatttcgattacgctctggagggcgttacttttcagcagctagtaaggatgccaagcgctctgtacgcgtcgacgtcggatgtttttgaggccagcgcgtatcttgctctggaggatttccttcacacaggcattaaaggactgtggcaaactttctggggtcctgatgaagcgatgtcgttctcggttgcctgtgtacacagcacgagctccagattttatcctgctgagaag

SEQ ID NO: 86884 - DNA, 2225 bp, Zea Mays
acagccatagtctctaccgcatccttccacaaaaccctttcttccttccgccgccgccgcgaccggctaaacccttcatttcgccgcagcgacgaccacccgccgcgggccaactatggcgcccgttgcggctcccatacgcgacctgcttacctctttcagccccggcgcggacttcctcgcgctctcttctggggacggccgcatcaaggtatgggacgccgtgcggggccggctgcagaccgagtttgctgacatccctgcagtggaggcggtcgcggtcgctgagtcgaagcgcggccacctcgccctcgattacacctgcatgaagtgggtacaactttccagtaagaagaagaggaaggctgggagctcattgattgtgcttggtacaggcagtggagatgtgcttgcacttgatgttgccgcgggacattggaagtggaaggtcagcgattgccaccctgggggtgtgacagctgtagaatactcgaaacatgggcggaatgtgtacacggcaggtgctgatggcatggtctgtaggattgatgcctctaatggggctgttgttggaaaatttaaatcttcttcaaaggcaatatctgcattagctgtgtcatcagatggaaatatgttggcaacagcagctggccagttgaggacctttgacacttccagcaacaaaaaaattaaaaaattctctggacatccagttgctgtgaggagcatggtctttagcaatgatagccaatatgttttgtcatctggagttggtgaacgctatattgccatttggaagctgggcagtggtaaaacccagagctcaaactgtattctgtcgatggagcacccagcaatgtttgtggactgtaaatgttcagacaaaggagaaatacacattctggctatttctgagattggtgtctgctatttctggtctgcaaatgttgtggatgacctgcgtaataagaagcccaccaagatcatattatctgagtcatctgtgtcaacaactcatcaagcattatcgatatttgctgcaaaacttcaaggagtggatgggcctaattctgcccatgtcctactggcttatgggtctgtagtgaaaccatcttttgataaacttttggtttgttatggtacagatattagtttgggcatttctcaagatggagttctcttgccaaatactcaaaccaccatggcaaagaaaggccaatctgtgaaaaagcatgaaactgtcattgctctagaccgagccaatgctgaagatgccatccttcctcttccaaaactccatacacaggaaaagaaaaggaaacatggtgtaacaaaacccagtggcgatgttgagcctgagattcatagtgacctcaccactacaagatctattcataaaagagttcctgtgcaaagaattgaagatgacagcacatgcatcgaggatatgatgagggagtgtggcatcattgaaactagagtagatgagagcatgaagggccatgctggtataccctttaacattttgtcttgtctctttggtgatggcagcataaaagtcgatgccaatttacccagtaagaagattcgaggtcatctaagatcattaaaacctggagatgcttgcaaacttcttgataaattagtatctgcatggaaaacgagatctggtagcacggaacttgtattgcgttggatatactgcctgttagtcattcatggccgttttatctgctccgaggaatcgattaacaacctggagaagatgtgtgcagaaagatacacagttactgaagatttgctgaagctttctgggcggcttcggttaataacagcacaggtcgacaaggctgctagtaacatgtctgagccgacatcaggggagatgcaggatgctgctttccagtctgacgaagaggaggaagatgaagatgttgatgaaacagtattcggtcaagattcagattcgtcacaaaatagcggcaccgacgacgatgcaaagtagactcactgctggtattcatcattatggtgattgtattgtttttaattaaattgccaagcttgatttttgtcaaggcgacgttggaaggttgcacagaattttgacagtgtctctggtttcattttgaaagcactcgaagttgtctcctcctttacccctttttccttatatacgacggcaattggttaaagttacatacccgaaggttgtccttgcacat

SEQ ID NO: 86885 - DNA, 916 bp, Zea Mays
aagccctcagtctgccactctcatggcaacgcaagcagaagctacaatcctaaaaccatctgcttcagccttcagctagccccaagtttagtcggccgatcgatcactgaagtagtaatggcctccgccaacagctggaccctcgagatcgcgtcgccggtggccccgcagcgcctgttccgcgccgccgtgatggactggcacaccctggcgcccaaggtcgcctcccacgtcgtcgccagcgcgcagcccgtggagggcgacggcggcgttggcagcgtcaggcagttcaacttcacctcagtcatgccgttcagcttcatgaaggagcgtctcgagttcctcgacgcggacaagtgcgagtgcaagaacacgctcatcgagggcggcggcatcggcgtcgccatcgaaacggcgacgtcgcacatcaaggtggagcccgcggccggcggcgggagtgtggtgaaggtcgagtccacgtacaagctgctgccgggcgtggaggtgaaggacgagatcgccaaggccaaggagtccgtcaccgccatcttcaagggtgccgaggcctacctcgtcgccaaccccgacgcctacaactaaaccattggactgggatgagcttcatttcccttccgtcttgtttggatatagaagggtattgtgtacggagattgggttttctctccccttttttttgttttcatacaaaataaaataaagctgctctaaagcagcgtgcggtttttggactcgagatggtatgagtatatgtacgtgctgtccttgtgtgattatgtataccgtcatggttttctttgtgggaagaaaaaggacattctgttttagaatcctatgcaggtttgactgagaataaggaattttgcttgctctcttcgttataaaaataattattcct

SEQ ID NO: 86886 - DNA, 1011 bp, Zea Mays
aagccctcagtctgccactctcatggcaacgcaagcagaagctacaatcctaaaaccatctgcttcagccttcagctagccccaagtttagtcggccgatcgatcactgaagtagtaatggcctccgccaacagctggaccctcgagatcgcgtcgccggtggctccgcagcgcctgttccgcgccgccgtgatggactggcacaccctggcgcccaaggtcgcctcccacgtcgtcgccagcgcgcagcccgtggagggcgacggcggcgttggcagcgtcaggcagttcaacttcacctcagtcatgccgttcagcttcatgaaggagaggctcgagttcctggacgcggacaagtgcgagtgcaagaacacgctcatcgagggcggcggcatcggcgtcgccatcgaaacggcgacgtcgcacatcaaggtggagcccgcggccggcggcgggagcgtggtgaaggtcgaatccacttacaagctgctgccgggcgtggaggtgaaggacgagatcgccaaggccaaggagtccgtcaccgccatcttcaagggtgccgaggcctacctcgtcgccaaccccgacgcctacaactaaaccattggactgggatgagcttcatttcccttccgtcttgtttggatatacaagggtattgtgtacggagattgggttttctttccccttcttttttgttttcatacaaaataaaataaagctgctctaaagcagcgtgcggtttttggactcgagatggtatgattatatatatgtacgtgctgtccttgtgttgtataccgtcatggttttctgtgtgggaagaaaaagggcattctgttttagaatcctatgtaggtttgactgaataaggaattttacttgctctcttcgttataaaaataattattcctatattattcgtgcttattaaaaaaagtttttaaagtttaactatatttatagaagatattagcaatgtttgtatctttaaataatttattatgatcg

SEQ ID NO: 86887 - DNA, 800 bp, Zea Mays
caacatcctatttaaatcccttgttgccgctcgtttcagccagcaacacaagtaacagcagcccgatcttgcatcagctagctaactaagcaagtaagctaagctagccctaggcaacgagccgagccgtcaagctcatcgcagaccacgagccatggcctccaccaacagctggactgttgagatcgcctcgcctgtcgccgcgccgcgcctcttccgcgccgccgtgatggactggcacaccctggcccccaaggtcacctcccacgtcgtcgccagcgcccaccccgtggagggcgagggcggcgtcggcagcgtcaggcagttcaacttcacctcagccatgccgttcggcttcgtgaaggagaggctcgagttcctggacgtggacaagtgcgagtgcaagtccacgctcgtcgagggcggcggcatcggcgtggccatcgagaccgcggcgtcgcacgtcaaggtggagtccgcggcgggcggcggctgcgtggtgaaggtggactcgacgtacaagctgttgcccggcgtggaggtgcaggacgagatcactaaagccaaggagtcggtcaccaacatcttcaaggctgccgaggcctacctcgtcgccaacccggaagcctacaactagaccatgcatgcgatcggtcgatcgggaacggatttcttccttgccttttgtgttttctacggctaaaataaaacttgtctaaggtgtgtacgaacgtcggagagcgccgagcagagtatgcatgcaattgacaagtcccaaatgtgtgtgggtgtgttttgta

SEQ ID NO: 86888 - DNA, 110 bp, Zea Mays
ttttttttaaaatttttaaacttcaaacgaccaaaagcgcataccaatcataaagaaacacgtgacaacagacgttcgataccgatcgattctaaccagtaacgaccagg

SEQ ID NO: 86889 - DNA, 7094 bp, Zea Mays
cttgcaggctatccatgatttttgcctacaaaaggtgattgaaaaggggggaggatggaaggggagggacaccacggagttgttttggcatgcagcatctgtgggttcctcttcgctgtccttagccctttcagcttttgggttttatgggctgtgaattggaggccatggaggttatacagttggatatatgcaaggaaatggccaacatatgttcaaggacctcaattgagcacactttgcagccttttgactctttgtgcatggcttgttgtcatttcccctatagcagttctgctcgtgtggggaagcgtccttattgctcttatggaaaggaatataattggtttagctgttataatggcgggtgttgctttgctcctgtcattctactctataatgctctggtggagaacacaatggcaaagctcccaggctgttgcttaccttctcctcctggcagtatgcctgctatgtgcctacgatttttgtgctatttatgtgacagctggtgctagtgcttccgagcttaattctccatcagggttcttcttcggggtgtctgtaatatcattggccatcaatatgctttttatatgtaaaatactgtttaatgtaagtggatttgatgttgatgaatatgtgcggaggtcatacaaatttgcctattctgactgtgttgaagtggctcctgtttcatgctctcctgagccaccggatcctagtgaattatacatgacaaaatccagcagggtcaagcatttagggcttctgtacattagctctctgcttgtgcttgttggttattccatcttgtacggtcttacgtcaaaagaagctcgttggttgggtgctttaacttcagttgcagttgttatccttgactggaatctgggcttatgttcatttagatttgagcttcttaaaagtaggatgatagtgttatttgtggctggaacatcaagggctttccttgtatcctttggagtgcattactggtaccttggccattgcatcagctatgcttttgtagcatctgtgcttttatctgctgctgtttcttcctggctttctatttcaaacccctcagttgcaaggatagacgctctaagaagtacggtaataaagctacgagagggatttcgaagaaaaggacaaaatagttcttcaaattcatcagaaggctgtggctctagtgtgaagcgtagtagcggtagtgttgaagctggtcaaaatggtaatgcaatggattctatgtacagaagcaactcacaaagcgatggtgtcaattggagcagtattccttttgatcgatcaaacagttgtcaagaaggccggagctccgacaagaacatagatagtgcacgtgcaagcttagctcatcggagtaattcatgcttatctgccgtccaagactctgaaaccgctgttgtttcagtagataggcatggagatcccattacttcacttgtttgttctagcagtggtttggaaagtcatggctgtgagcctagtggatcagccaccacctcaggtaatcaacagctattggatttgaacctggcagcgatatttcaggacagattaaatgatccaaggatttcatctatgctaaaaaagaatggtggacttggagatgtagaactggctaatcttcttcaggataaaggactagatccaaatttttcgtacatgctgaaagacaaagttatggatccacgtattttagctttgctacagaggagcagcttggatgcagatagagagcatcaagatgacgtagatgtcacagctactgattcagatagattggataccactattgcaaatcagatttctctgtcagaagaactaaggagaagtggtctagaaaaatggttgaacatttcaaggctaatattccatcatttagctggatctccaatacgtgcttttattgttttcacagtaatgtttataatagagactgctactgtggctatctatcggccagagaccatcaaggtgataaatgcaacacatgaacagtttgaatttggtttctcgatactgcttctgtcaccagttgtctgctccattatggcattcatttggtctctgcgtgctgaagaaatgttgatgacatccaagccccagaagtatggtttcattgcatggctactgagcacatgtgttggtttgtttctctctttcttaagcaaatcatctgttatattgggcctgtctctcacggtaccacttatggtggcttgcctctcatttgctgttcccatatggatacgcaatggttacagtttctggattcctggaagggagtttgcaaatcgtgaaaatgttagtcaagctccaggagagaaagagcgggctctctttgttatcaccattgctgttttcactgcatcaattattggccttggtgcaatagtgtcagcaaagcctttagacgctctaggctataaaggatgggatgctgataagaacagctcctattctccctatgcaacatcaatgtatcttggatgggcattgtcttcaacaattgctgtgattaccacagggttgatacctattgttgcttggtttgcaacataccggttttcaccttcatcagctatatgtgttggcctctttgcaactgttcttgtgtctttttgcggtgcatcctactggggagtggtaaattcacgagaggatggtgttcctctaaaggctgatttccttgcagcattacttcccttgctttgcattccagcatttttctcactgttcactgggctttacaaatggaaggatgatgattggaagatttctcgtggtgtttacctttttgttggcatgggaatgttgctgttgtttggtgcagttgcagctgttattgtcacaatcaggccctggactgttggagttgcttgcctcgtagccattctgttccttgtatttgttattggggtcatccactactggacatctaacaacttctatctaacgaggactcagatgttgcttgtttgttccattgcttttctcttagccttggctgccttcctgatgggtttatttcacggaaagccttttgttggagcatctataggttatttctcatttatatttcttctcactggaagggctttgactgtccttctatcaccgccaatcgtagtgtattcgccaagagtattgcctgtatacgtttatgatgctcatgcagactctgctaaaaatgttagctatgcctttcttattctgtatgggattgcattagcaactgaagtttggggtgttattgctagtctaataatgaatccaccatttgttggggctggcgtttctgctactactcttgtaattgctttcagttttgctgtttctcgaccatgcctgactcttaagatgatggaggatgcagttcattttctcagcaaggatacagttgtgcaagcgatgtcacggtctgctaataaaactagaaatgctatatctgggacttactcagcacctcagaggtccgcaagttctgctgctcttttggttggagatcctgctcttacattggacagggctgggaactttgtgcttcctagggctgatgttatgaaactgagagatcgtttgagaaatgaagaaattgctgcaggatctttcttatgtggagtaaaagattgtttactaatttgcccccagtccctgtcaaacatagattatcggaggaatatgtgtgcccatgcacgtattttggctttggaagaagcaattgatacagaatgggtgtatatgtgggacaaatttggtggttatttacttctgttgcttggattgactgccaaagctgaacaaatacaggatgaagttcgtctaagactctttttggatagcataggcctttccgatttgagtgccaaagaaattaagaaatggatgcctgaagatcggaggcaatttgagcttattcaagaaagctacataagggaaaaagaaatggaagaggaggctttgatgcaaagacgagaggaagaagggaagggaagagaaaggaggagggcattgctagagagagaggagcgaaaatggaaggagctcgaaatatcattgctttcttccattccaaatactggaagcagggatgctgcagctatggcagcagctgtcagagctgttggaggtgattctgccctggaagattcttttgcaagagatagggtctcttcaatagccaatcacatacgaaaggcacaattggctcggcgagcagaacagactggtattccaggcactatatgcatactcgatgatgaaccgaggagtactggtcgtcattgtggagaacttgacttgtgcctctgtcaaagtcaaaaggttactttgtctattgctgtcatggttcagcctgtatctggcccagtgtgtctttttggaagtgaattccaaaaggtttgttgggaaatcttagtggcaggatcagaacagggtatggaagctggacaagttggtcttcgattagtaactaagggtgaaaggatgactactgttgctaaagagtggaatattggtgcgtctagtattgcagatggcaggtggcatcttgtcactgtaactttagatgccgacctaggtgaagcaacttctttcattgatggagtttatgatggatatcagaatgggttgccgttgccaacagataacggtatttgggaacctggaactgatatttgggttggtgctaggccacccatggacttagatgcctttggtaggtcagatagcgaaggttctgactcaaagatgcagatcatggatgcttttctatggggaagatgtctcagtgaagatgaggttactgttttacatactgccatgtctcctgctgagtatggattttttgaccttgcacccggcgatgcttggcatggaagttattctgcaagggtggatgactgggaaagcgaagaagcttatgagctttatgatcaaggggatgtcgaatgggatggacagtactcaagtggtaggaaacgtccggtacatgatgctgtagctattgaccttgactcctttgctaggagaccaagaaaaccaaggtttgagacacgtgatgaagtcaaccagcgtatgctttctgttgaaagggctgtcagggatgctcttatcgcgaaaggagagagaaacttcactgatcaagagttccctccagaggatcgttctttatttgtagatccgatgaatccacctctgaaactgcaggttgtttctgagtggatgaggccttctgacatagcaaaggatatatctatcagttgtcagccttgcttgttttcgggttctgtgaattcctcagatgtgtgtcagggtcggttgggagactgttggttcctaagtgcagtcgcagttttaactgagatgtctcggatatcagaagttataatcactcccgagtacaatgatgaagggatttatacagtcagattctgtattcagggtgagtgggtggccgtggttgttgatgattggattccttgcgagtctccggggaaaccagcatttgctactagtagaaagcaaaacgagctttgggtatccattcttgagaaggcttatgcaaaacttcatggctcttatgaggcattggaaggtgggcttgttcaagatgctctagtcgatctcacaggaggagctggtgaagagattgatatgcgaagtcctcaagcccaacttgatcttgctagtggaagattgtggtcgcagttgttgcatttcaaacaagaaggttttcttcttggtgctggaagtccttctggatctgatgctcacatctcatcaagtggcattgttcagggacatgcgtactcaattttgcaggtaagagaagttgatggccacaaactcatccaaatcagaaatccatgggcaaatgaagttgaatggaatggaccatggtcagactcgtcaccagagtggacggaacggatgaagcataagctcatgcatgttccacagtcgaagaatggggtattctggatgtcttggcaagattttcagattcactttcggtcaatatatgtttgtcgtgtttatccacctgagatgcgttactctgtccatgggcaatggcgtggctacaatgcaggtggttgccaagattatgactcgtggcaccaaaatccacagtatcgacttagagtaacaggacgtgatgcactataccctgttcacgtttttattacccttactcagggtgttggtttctctagaaagacgaatggttttcggaactaccaatctagccatgattcttcaatgttttacattggaatgaggatactcaagacacagggctgccgtgctgcttacaatatctacatgcatgaaagcgctggtggaacagattacgttaactcgagggagatatcatgcgaactggtcttggatccttatcccaaagggtacacaattgtgccaactaccatccaccctggggaggaagcaccttttgttttgtcagttttttcaaaagcatcaatcagactagaggctgtttagttcaagattgagatcccatgtgtttgatggtagctgcgtctgctgggcacccgtgcacgcaggatccagctgtgggttctcgggaactagataatgggtataggaattgcctcctggacaacttcaatcaatcttgctgcatgcaagtacctaagttcggttgcttgttgcagatctgacaaacggcaatgcttcttgtgctgaagggaaaggagagaaggcatgatccatggttctttggtagctgcgcaaagtgcagggtgagaggcttggttcaatgtttgtagatagccgtggtaactgacctggtagcccatcctatgtataggtgtcccgtttaccctgtaaatgctatagagttaggttaggtagcctgtcgttcctgttaacgcatagggctcttatgcagctgtgaaatgtcttgttagcaagctgcagttttgctgatttgagcgtggagtagtcggccatagctgttcccattggtttgccctgtatgtaatcggaatctgatgtcattcaatgaacctattttttgggtgccatgcgaagctgtctaa

SEQ ID NO: 86890 - DNA, 1739 bp, Zea Mays
gcttacgttgtggagactagagaggttttatgaactatcttatactaatatgattttctctgtattttaaaaaactcttctctgagttatagttcttatgttttatattttcccaagggtgagtgggtggccgtggttgttgatgattggattccttgcgagtctccggggaaaccagcatttgctactagtagaaagcaaaacgagctttgggtatccattcttgagaaggcttatgcaaaacttcatggctcttatgaggcattggaaggtgggcttgttcaagatgctctagtcgatctcacaggaggagctggtgaagagattgatatgcgaagtcctcaagcccaacttgatcttgctagtggaagattgtggtcgcagttgttgcatttcaaacaagaaggttttcttcttggtgctggaagtccttctggatctgatgctcacatctcatcaagtggcattgttcagggacatgcgtactcaattttgcaggtaagagaagttgatggccacaaactcatccaaatcagaaatccatgggcaaatgaagttgaatggaatggaccatggtcagactcgtcaccagagtggacggaacggatgaagcataagctcatgcatgttccacagtcgaagaatggggtattctggatgtcttggcaagattttcagattcactttcggtcaatatatgtttgtcgtgtttatccacctgagatgcgttactctgtccatgggcaatggcgtggctacaatgcaggtggttgccaagattatgactcgtggcaccaaaatccacagtatcgacttagagtaacaggacgtgatgcactataccctgttcacgtttttattacccttactcagggtgttggtttctctagaaagacgaatggttttcggaactaccaatctagccatgattcttcaatgttttacattggaatgaggatactcaagacacagggctgccgtgctgcttacaatatctacatgcatgaaagcgctggtggaacagattacgttaactcgagggagatatcatgcgaactggtcttggatccttatcccaaagggtacacaattgtgccaactaccatccaccctggggaggaagcaccttttgttttgtcagttttttcaaaagcatcaatcagactagaggctgtttagttcaagattgagatcccatgtgtttgatggtagctgcgtctgctgggcacccgtgcacgcaggatccagctgtgggttctcgggaactagataatgggtataggaattgcctcctggacaacttcaatcaatcttgctgcatgcaagtacctaagttcggttgcttgttgcagatctgacaaacggcaatgcttcttgtgctgaagggaaaggagagaaggcatgatccatggttctttggtagctgcgcaaagtgcagggtgagaggcttggttcaatgtttgtagatagccgtggtaactgacctggtagcccatcctatgtataggtgtcccgtttaccctgtaaatgctatagagttaggttaggtagcctgtcgttcctgttaacgcatagggctcttatgcagctgtgaaatgtcttgttagcaagctgcagttttgctgatttgagcgtggagtagtcggccatagctgttcccattggtttgccctgtatgtaatcggaatctgatgtcattcaatgaacctattttttgggtgccatgcgaagctgtctaa

SEQ ID NO: 86891 - DNA, 1780 bp, Zea Mays
taatttgagaaaaatatgacttcttccattttgttattattaataacttattgccagtttcggggcaatccaagttttaaacagtgctcacattagttaattttgtactgcatttttttatcgaatataaaaaaagtagtagtcaaaatagcataaaccaaccaataaactaaaccatggtacgtacatgttagtgccacgtcatatcgacaacgcagcctgccgatcatatatcatcttccttagatgtcagtgtatcctgcccgattgctgctgcggcagcagccccgggatgaatggcacgccgagctgtgggagccagtgctggccctggatgaagctctcgacggtgtacttctgcagcgcgtgctggtaggtgatgttcttgatacccctccacttgacgcgtctggtcatgttggcgccgggcccgtggttttccacctcggcgtagtagcaggtgctgaggccgaagtcgccgagccacggcagccagccctgcgggtcgatgaacccgccgatctccgactggatgtagagcgtgcgcgagtgctccttccacgggcggcccaggaaggtcctgaaccggccgacgctcttctcgaactccgggtgcggcgcgacggtgcagttgtggatgacggtgccgcccaccgaccgcctctccttgcggccctgcgccgtgacgatgttctgctggttgtccatgcacttgcgcacctggatgaggcagttctggaacaccacctgcgcgttgccgaagatgaagtcgatggtgcccgtgatgacgcagtcgcggtagtactggcggctcgtgtgcgtgtacagcgtgtcctggtacccgtcgaaccggcactcgtagaacgccgacatgtcgctctgcacccgcagcgccaccgcctggtggttcttggctcccgccgtgttcttcacgccgatcccgcgcatcaggaacccgttcccgatcgcctccatcgtggccgtgtccttggtggtgatgttcatcatgaagctcttgtggcccgtgatcaccgtcttggtggcgccgtcgccgaccatcaccaggttcgtcacgttccgggccacggacacgtactccctgtacttgccggccttcacgtacatgacgtacgtggtggcgctcttcagcggcaccttggccagcgccgcgttgatggtcctgaagtcgccgctgccgtccttggccaccgtcaccttgaagatggccttggccagctccgtggggctggtggcgttcccggccgccgcctccagcgccttctcgcacgtctccctgtagtccacgggctggcagaaggacttgatggacttcaccgacgtggacatctcgccctcctcggccctcccgccatcgccgctgcctttgaaggaaacgacgcagatggtggccaccaccgccacgaccaggacggtcgatgcgccgatgacggcgcctttcatcgcagggtacgcacggcctagatgtccaatttgcgcaagctcacacacgcatacggcatacaacacacaaacacagtatatgtagtctgagtgcaatgtggtaggtatttagtgcccccaatcacaccaatagaaaagtcgacactctatgttttggtgtgaattggagtaccgagcaagagcatcgagacgaatttttatactgcgctataggcagcgtcaaaactgggacatggcgaagagggacggttgtgcattggcgttggagccgaagtaaagggagagccaagcaacgacgacggacggcggtcactggtgt

SEQ ID NO: 86892 - DNA, 2586 bp, Zea Mays
aagaacgcacaaaatagcctgatgaggtaaaactggccggtgactcggcggcctcgtccgctgtgtgcctgcatagcagcctactagcaggccagggcagcagtggcgcttgcctgctcccccgcaacccgctccgctcccctctcttcgtcttcgtcaaggtctagtctagagagaaaaaagggcgagaggcggagagagataaaccccgatacccggaatcgccgtgcaaaatcaaacaaagccagagcggcagatacaataagccgcagctgcagcaagcggcaagccgcatcacagcaggcgccaccgtcacgccaccgcgcagccgagaggggacggacgaaagggggaaatcgcctgcctgcctgccgcggtgggttggcgggggtgcctgcacgggcacggcgtctgtgagttctccttgtttccgccccaagcctggcctgacgtcatcgcgcgcctgcacggcgtcttggtggtgtggtcgaagcagcagaggccgccgccgcgcgggagaagccggcgcgaggaagcggtggccgggccgggggagcgcgatgctgtgggtggcgcgcctgtccggcttcttatccgccgccatggtgatggtggtgctgtcgccgtcgctccagtccttcccgcccgccgaggccatccgctcgtcgcagttcgacggcagcgtccgcttcccgggccagatcgcggggggcgccaggggggtcgccttccgccgcgccccgtcgttccgcaatgccgccgattgcggcgccggcgcgggcaacggcaccgccgccaatgtctgcgacccttcgctcgtccacacggcgattacgctcgacgaggagtacctgaggggctccgtcgccgcggtccactcggtggtgcagcacgccaggtgccccgagagcgtcttcttccacttcctcgtgtccgacccgagcctcggggacctcgtccgcgcggtcttcccgcagctccggttcaaggtctactacttcgaccccgggcgcgtccgcgggctcatctccacgtcggtgcggcaggcgctggagcagccgctcaactatgcgcgcaactacctggccgacctcctcgagccctgcgtgcgccgcgtcatctacctcgactccgacctcgtcctcgtcgatgacgtcgccaagctctggcgcaccgacctcggcggtcgcaccgtcggtgctcccgagtactgccacgccaactttaccaagtacttcaccagccggttctggtcggaccagcggttcgccgggacgttcgtggggcggcggccgtgctacttcaacacaggtgtcatggtgcttgacctcgagcggtggcggcgagcgggctacacgcagcgcatcgagcgctggatggagatacagaagtcgccgccggggcgcatctacgagctggggtcgctgccgcccttcctgctggtgttcgcggggcacgtggcgccgatcgagcaccggtggaaccagcatggcctcggcggcgacaatgtcctgggcagctgccgcgacctacacccgggacccgtcagcctgctgcattggtccgggtccggcaagccatgggcgcgtctgggcgcggggcggccgtgcccgctcgatgcgctctgggcacccttcgacctgtacggccccgccggcgccggcggcgaggagtcccggtaaccataacacccgaaaaaaaagagagaaagattcttttccttctttggcccaccccgtacaaattctgagcttctttctaaatttcactccataaattactctacattaccatttaaagagtgatttacataaaaaatcgttctctgtattcattttactctagagcagttttcctaaatctatattctatcgattgaaaaggatacagagagtcgctctgttttcttggtctccattacctgttcaaaacctatatgtttttcatctttttttttctctccgagcaattggtttggattaaatgttttgtcttagattgttcatgtttgttcttatagtgatccctttatgctcgttctgttacttattaaaccatttgtatcctactctacagagctgcaggattgcagactcatcaccataaatagaaggaacagagaaatagactttgcagtctgcagcatttgaccctccctctcaccctgtgggctctgccgttcggtgtctgcccatacccactcttgccatcaaacccgcaatccaccacccatccatctcaatgacgagtcagccagtccaatgcagcagctgcacaaccggccctttaaaatgctctgtccctggtctcgacgaatggtaccgcctctccatcatggaccggttccttgtgccaccaacggccgagtcaccgtcagtcgctcacagtcacagacatgagtaacttggaatcctcatctttgtggtcgtgcacgaactgactgacactaccaacctttcgctcgcgcttaagcacttgctagagataaagcaagaggggttgctgttaaccaagctcgcggggattaaaggaagccggcggaaatggccggtgtggtgtggggtgcaaggactcggtggctgcaag

SEQ ID NO: 86893 - DNA, 2740 bp, Zea Mays
aagaacgcacaaaatagcctgatgaggtaaaactggccggtgactcggcggcctcgtccgctgtgtgcctgcatagcagcctactagcaggccagggcagcagtggcgcttgcctgctcccccgcaacccgctccgctcccctctcttcgtcttcgtcaaggtctagtctagagagaaaaaagggcgagaggcggagagagataaaccccgatacccggaatcgccgtgcaaaatcaaacaaagccagagcggcagatacaataagccgcagctgcagcaagcggcaagccgcatcacagcaggcgccaccgtcacgccaccgcgcagccgagaggggacggacgaaagggggaaatcgcctgcctgcctgccgcggtgggttggtgggtgccgcctccgcatcctgctgctctgttccccagcccacccccatttacctcgcatggaatcctgctctcttcttctccactccacgcgccgatccgccacctgccaggagagcgcggcgcgatccagttgaggaggtacacacaggaggcgggggtgcctgcacgggcacggcgtctgtgagttctccttgtttccgccccaagcctggcctgacgtcatcgcgcgcctgcacggcgtcttggtggtgtggtcgaagcagcagaggccgccgccgcgcgggagaagccggcgcgaggaagcggtggccgggccgggggagcgcgatgctgtgggtggcgcgcctgtccggcttcttatccgccgccatggtgatggtggtgctgtcgccgtcgctccagtccttcccgcccgccgaggccatccgctcgtcgcagttcgacggcagcgtccgcttcccgggccagatcgcggggggcgccaggggggtcgccttccgccgcgccccgtcgttccgcaatgccgccgattgcggcgccggcgcgggcaacggcaccgccgccaatgtctgcgacccttcgctcgtccacacggcgattacgctcgacgaggagtacctgaggggctccgtcgccgcggtccactcggtggtgcagcacgccaggtgccccgagagcgtcttcttccacttcctcgtgtccgacccgagcctcggggacctcgtccgcgcggtcttcccgcagctccggttcaaggtctactacttcgaccccgggcgcgtccgcgggctcatctccacgtcggtgcggcaggcgctggagcagccgctcaactatgcgcgcaactacctggccgacctcctcgagccctgcgtgcgccgcgtcatctacctcgactccgacctcgtcctcgtcgatgacgtcgccaagctctggcgcaccgacctcggcggtcgcaccgtcggtgctcccgagtactgccacgccaactttaccaagtacttcaccagccggttctggtcggaccagcggttcgccgggacgttcgtggggcggcggccgtgctacttcaacacaggtgtcatggtgcttgacctcgagcggtggcggcgagcgggctacacgcagcgcatcgagcgctggatggagatacagaagtcgccgccggggcgcatctacgagctggggtcgctgccgcccttcctgctggtgttcgcggggcacgtggcgccgatcgagcaccggtggaaccagcatggcctcggcggcgacaatgtcctgggcagctgccgcgacctacacccgggacccgtcagcctgctgcattggtccgggtccggcaagccatgggcgcgtctgggcgcggggcggccgtgcccgctcgatgcgctctgggcacccttcgacctgtacggccccgccggcgccggcggcgaggagtcccggtaaccataacacccgaaaaaaaagagagaaagattcttttccttctttggcccaccccgtacaaattctgagcttctttctaaatttcactccataaattactctacattaccatttaaagagtgatttacataaaaaatcgttctctgtattcattttactctagagcagttttcctaaatctatattctatcgattgaaaaggatacagagagtcgctctgttttcttggtctccattacctgttcaaaacctatatgtttttcatctttttttttctctccgagcaattggtttggattaaatgttttgtcttagattgttcatgtttgttcttatagtgatccctttatgctcgttctgttacttattaaaccatttgtatcctactctacagagctgcaggattgcagactcatcaccataaatagaaggaacagagaaatagactttgcagtctgcagcatttgaccctccctctcaccctgtgggctctgccgttcggtgtctgcccatacccactcttgccatcaaacccgcaatccaccacccatccatctcaatgacgagtcagccagtccaatgcagcagctgcacaaccggccctttaaaatgctctgtccctggtctcgacgaatggtaccgcctctccatcatggaccggttccttgtgccaccaacggccgagtcaccgtcagtcgctcacagtcacagacatgagtaacttggaatcctcatctttgtggtcgtgcacgaactgactgacactaccaacctttcgctcgcgcttaagcacttgctagagataaagcaagaggggttgctgttaaccaagctcgcggggattaaaggaagccggcggaaatggccggtgtggtgtggggtgcaaggactcggtggctgcaag

SEQ ID NO: 86894 - DNA, 1383 bp, Zea Mays
ggcgccaccgtcacgccaccgcgcagccgagaggggacggacgaaagggggaaatcgcctgcctgcctgccgcggtgggttggcgggggtgcctgcacgggcacggcgtctgtgagttctccttgtttccgccccaagcctggcctgacgtcatcgcgcgcctgcacggcgtcttggtggtgtggtcgaagcagcagaggccgccgccgcgcgggagaagccggcgcgaggaagcggtggccgggccgggggagcgcgatgctgtgggtggcgcgcctgtccggcttcttatccgccgccatggtgatggtggtgctgtcgccgtcgctccagtccttcccgcccgccgaggccatccgctcgtcgcagttcgacggcagcgtccgcttcccgggccagatcgcggggggcgccaggggggtcgccttccgccgcgccccgtcgttccgcaatgccgccgattgcggcgccggcgcgggcaacggcaccgccgccaatgtctgcgacccttcgctcgtccacacggcgattacgctcgacgaggagtacctgaggggctccgtcgccgcggtccactcggtggtgcagcacgccaggtgccccgagagcgtcttcttccacttcctcgtgtccgacccgagcctcggggacctcgtccgcgcggtcttcccgcagctccggttcaaggtctactacttcgaccccgggcgcgtccgcgggctcatctccacgtcggtgcggcaggcgctggagcagccgctcaactatgcgcgcaactacctggccgacctcctcgagccctgcgtgcgccgcgtcatctacctcgactccgacctcgtcctcgtcgatgacgtcgccaagctctggcgcaccgacctcggcggtcgcaccgtcggtgctcccgagtactgccacgccaactttaccaagtacttcaccagccggttctggtcggaccagcggttcgccgggacgttcgtggggcggcggccgtgctacttcaacacaggtgtcatggtgcttgacctcgagcggtggcggcgagcgggctacacgcagcgcatcgagcgctggatggagatacagaagtcgccgccggggcgcatctacgagctggggtcgctgccgcccttcctgctggtgttcgcggggcacgtggcgccgatcgagcaccggtggaaccagcatggcctcggcggcgacaatgtcctgggcagctgccgcgacctacacccgggacccgtcagcctgctgcattggtccgggtccggcaagccatgggcgcgtctgggcgcggggcggccgtgcccgctcgatgcgctctgggcacccttcgacctgtacggccccgccggcgccggcggcgaggagtcccggtaacca

SEQ ID NO: 86895 - DNA, 2159 bp, Zea Mays
ttcccctcaccttcggaccttcctcccctcctccgacccttttcacgcgcgacgccttctgcgcccccgccgcccaagactcgtcaccaacccgcagcgagcctcctccactgacgccccctatcttcccctcgctgcagctctctcgttgaagagctgcatccccagtcagtgctcagcccgccgaaggatcggtctccttggcggcctccccgcggtgctcctccccgccctcctctctcttttcctcgctgcagccacggatcttggtggcagggacgccacatcatttcccagaattcaaacggcgcggaagagcacatacgctcgttccttgttcttactcccgttcatccgtttctcccccatctctctctcatttgtttccttcgacgacgaataggcgagtgcagccgcccttctccaggttttcacctgcgacgagcatccaccaattgatcttctggctggaaattcacgttgacggtggcgagtagggcttctaccatcggtagcctcatctcaaggagcaaaattcttccatgatccctttaaaccggaggacaagcctgcccagggctgggatggactactttgatgcaaggcggaagcctcataatgttggtaaaatcattgcagccctggtcctcacaacactctgtatatttgttctgaagcaatctcctggttttggtggcaatagtgtgttttctcgccatgaacatggggttacccacgtcttagtaacaggaggagctggttatattggttcacatgctgctttaaggctcttaaaggataactatcgagttactatcgtggataatctatctagaggaaacatgggagcagtaaaggttctgcagggcttatttccgcagcctgggagactacaattcatctttgctgatctggggaaccagaaatctgtatcctcatttatgcttctaaagctgctttgcttgtgccttttctgcttatggagagttacatccaaagtcttcttttcacttaactggctgccaggtcaacaagatatttgctgaaaatgcatttgatgctgtgatgcactttgcagctgttgcttatgtgggagagagcacattggaaccccttaggtactatcacaatattacatcgaacacactactgattttggaggctatggcatctcatggagtccaaacccttatttactccagtacatgtgctacctacggagaaccagataagatgcctattacagaagccacacctcagttccctatcaatccatatggaaaagctaagaaaatggcagaggatatcataatagatttctcaaactcaaagggagctgacatggctgtcatgattttaagatatttcaatgttattggatctgaccctgagggaagattaggtgaggctcctaggccagaacttcgagagcatggtcggatatctggggcttgctttgatgcagcattaggagtcattccaggattaaaggttaaaggaacagattatcccacagctgatggaacctgcataagagattatattgatgtcacagatttagttgatgctcatgtgaaagcactcaacaaggcagagcctagaaaagtcggcatttacaatgttggaacaggaagaggtcgctcagttaatgagtttgttgatgcctgcaagaaggcaactggggtcaacatcaaaattgagtacctcaacagaaggccaggagattatgcagaagtatacagcgacccaacaaagataaacaaggagctcaactggacagctcattataccgatctcaaagagagcctatcagtcgcatggaggtggcaaaagtcgcatccgcgtggctacgggccaaactaaatatagcctgctgatctataattcacttaatcgtcaatacatattagttctttagttagagatacaagatcttgctgcgatactcctcaaaatcagtccttcgtattcttctttctctcgtcctttttatttcaaaagtttgcatttttggctagcagaaacatgaatggtgatttggatgaaaaaaaggacctgtgatgacaatttcattgtttctgacacattgttggtaaaaaaaatgtaaattgcttcagccaatgagctgcaagattgattgaattgagttaagaaaaaaa

SEQ ID NO: 86896 - DNA, 2141 bp, Zea Mays
ttcccctcaccttcggaccttcctcccctcctccgacccttttcacgcgcgacgccttctgcgcccccgccgcccaagactcgtcaccaacccgcagcgagcctcctccactgacgccccctatcttcccctcgctgcagctctctcgttgaagagctgcatccccagtcagtgctcagcccgccgaaggatcggtctccttggcggcctccccgcggtgctcctccccgccctcctctctcttttcctcgctgcagccacggatcttggtggcagggacgccacatcatttcccagaattcaaacggcgcggaagagcacatacgctcgttccttgttcttactcccgttcatccgtttctcccccatctctctctcatttgtttccttcgacgacgaataggcgagtgcagccgcccttctccaggttttcacctgcgacgagcatccaccaagtacgcccgcctccttctgccccccttcctgctgtgcgaagccgagcaccccggactctaatttgatcttctggctggaaattcacgttgacggtggcgagtagggcttctaccatcggtagcctcatctcaaggagcaaaattcttccatgatccctttaaaccggaggacaagcctgcccagggctgggatggactactttgatgcaaggcggaagcctcataatgttggtaaaatcattgcagccctggtcctcacaacactctgtatatttgttctgaagcaatctcctggttttggtggcaatagtgtgttttctcgccatgaacatggggttacccacgtcttagtaacaggaggagctggttatattggttcacatgctgctttaaggctcttaaaggataactatcgagttactatcgtggataatctatctagaggaaacatgggagcagtaaaggttctgcagggcttatttccgcagcctgggagactacaattcatctttgctgatctggggaaccagaaatctgtcaacaagatatttgctgaaaatgcatttgatgctgtgatgcactttgcagctgttgcttatgtgggagagagcacattggaaccccttaggtactatcacaatattacatcgaacacactactgattttggaggctatggcatctcatggagtccaaacccttatttactccagtacatgtgctacctacggagaaccagataagatgcctattacagaagccacacctcagttccctatcaatccatatggaaaagctaagaaaatggcagaggatatcataatagatttctcaaactcaaagggagctgacatggctgtcatgattttaagatatttcaatgttattggatctgaccctgagggaagattaggtgaggctcctaggccagaacttcgagagcatggtcggatatctggggcttgctttgatgcagcattaggagtcattccaggattaaaggttaaaggaacagattatcccacagctgatggaacctgcataagagattatattgatgtcacagatttagttgatgctcatgtgaaagcactcaacaaggcagagcctagaaaagtcggcatttacaatgttggaacaggaagaggtcgctcagttaatgagtttgttgatgcctgcaagaaggcaactggggtcaacatcaaaattgagtacctcaacagaaggccaggagattatgcagaagtatacagcgacccaacaaagataaacaaggagctcaactggacagctcattataccgatctcaaagagagcctatcagtcgcatggaggtggcaaaagtcgcatccgcgtggctacgggccaaactaaatatagcctgctgatctataattcacttaatcgtcaatacatattagttctttagttagagatacaagatcttgctgcgatactcctcaaaatcagtccttcgtattcttctttctctcgtcctttttatttcaaaagtttgcatttttggctagcagaaacatgaatggtgatttggatgaaaaaaaggacctgtgatgacaatttcattgtttctgacacattgttggtaaaaaaaatgtaaattgcttcagccaatgagctgcaagattgattgaattgagttaagaaaaaaacttgtgttgcgatcctt

SEQ ID NO: 86897 - DNA, 1929 bp, Zea Mays
cctcctccgacccttttcacgcgcgacgccttctgcgcccccgccgcccaagactcgtcaccaacccgcagcgagcctcctccactgacgccccctatcttcccctcgctgcagctctctcgttgaagagctgcatccccagtcagtgctcagcccgccgaaggatcggtctccttggcggcctccccgcggcgagtgcagccgcccttctccaggttttcacctgcgacgagcatccaccaagtacgcccgcctccttctgccccccttcctgctgtgcgaagccgagcaccccggactctaatttgatcttctggctggaaattcacgttgacggtggcgagtagggcttctaccatcggtagcctcatctcaaggagcaaaattcttccatgatccctttaaaccggaggacaagcctgcccagggctgggatggactactttgatgcaaggcggaagcctcataatgttggtaaaatcattgcagccctggtcctcacaacactctgtatatttgttctgaagcaatctcctggttttggtggcaatagtgtgttttctcgccatgaacatggggttacccacgtcttagtaacaggaggagctggttatattggttcacatgctgctttaaggctcttaaaggataactatcgagttactatcgtggataatctatctagaggaaacatgggagcagtaaaggttctgcagggcttatttccgcagcctgggagactacaattcatctttgctgatctggggaaccagaaatctgtcaacaagatatttgctgaaaatgcatttgatgctgtgatgcactttgcagctgttgcttatgtgggagagagcacattggaaccccttaggtactatcacaatattacatcgaacacactactgattttggaggctatggcatctcatggagtccaaacccttatttactccagtacatgtgctacctacggagaaccagataagatgcctattacagaagccacacctcagttccctatcaatccatatggaaaagctaagaaaatggcagaggatatcataatagatttctcaaactcaaagggagctgacatggctgtcatgattttaagatatttcaatgttattggatctgaccctgagggaagattaggtgaggctcctaggccagaacttcgagagcatggtcggatatctggggcttgctttgatgcagcattaggagtcattccaggattaaaggttaaaggaacagattatcccacagctgatggaacctgcataagagattatattgatgtcacagatttagttgatgctcatgtgaaagcactcaacaaggcagagcctagaaaagtcggcatttacaatgttggaacaggaagaggtcgctcagttaatgagtttgttgatgcctgcaagaaggcaactggggtcaacatcaaaattgagtacctcaacagaaggccaggagattatgcagaagtatacagcgacccaacaaagataaacaaggagctcaactggacagctcattataccgatctcaaagagagcctatcagtcgcatggaggtggcaaaagtcgcatccgcgtggctacgggccaaactaaatatagcctgctgatctataattcacttaatcgtcaatacatattagttctttagttagagatacaagatcttgctgcgatactcctcaaaatcagtccttcgtattcttctttctctcgtcctttttatttcaaaagtttgcatttttggctagcagaaacatgaatggtgatttggatgaaaaaaaggacctgtgatgacaatttcattgtttctgacacattgttggtaaaaaaaatgtaaattgcttcagccaatgagctgcaagattgattgaattgagttaagaaaaaaacttgtgttgcgatcctt

SEQ ID NO: 86898 - DNA, 2485 bp, Zea Mays
atagatagacagcagagggagagacgacaggcgtagctagcaccagcactcaagctactacgcacgcacgccgccgctcccccagttcaaacccaccaccccttcccccttcatcttcctttcccagctgtgcacgcgctttccgatcgcttcatctacctcgccaccgcgcttccgcccagccccagtcaccagtccaccgcgcccgcgcccccgatccagcgatatggctggctccgtagctccccacgctgtggtcctcggtcttctcctgctcgcggggctcgcggcggcgcagagggcgacgacgccggctgcggcggcccccgcgcccgaccccggctgcaacggcatccagctgacctacaacttcgtggaccgcaccaagatccggcccttcgtcagcgacaagaacaagcagccctacgccttccgcgccaacgtcaccgtgctcaactccggcacccgcccgctcaagtcctgggcggcactcgtcacattcggctacggcgagatcctcgtcggcgtcgacggcgccgtgctcacgggcggcggcgacctgccgtacaacaccacggaggacgccggcaacgccacctcgttctccgggtacccgcatacagacctcctcacgcccatcgccaccgccggggacctgtcgcagatccaggcctccgtcggcatcgtcggcacgctcttcgccgggcccggcccgttcgtgccgctccccaccgcgctgtcgctggacgacccggcctacgcgtgcccggcggcgaccaacgtcactgctcgggtgctgtccacgtgctgcgtcctcacgccggaggccgaggccaacgccactgccatcgacgccaacaccaccgacccgaccaaggatttcctgccgcgcggcaccggcgacctcgtcatcacctacgatgtgctccaggcctacccctccagctaccttgcgctcgtcacgctcgagaacaacgccaagctcggccgcctcgacaactggcggctgtcgtgggagtggcggcgtggggagttcatctactcaatgaaaggagctcacccatcagaggtggacacctcgggctgtatctgtggggcgcctgggcagtactaccagagccttgatttttcgcaggtgctcaattgtgaccgcaagccggtgatccttgacctgcccctgtcccggtacaacgacactcagattgggaagattgacaattgctgcaggaatgggacaatcttgcccaagtccatggacgaggcacagtcgaaatctgcgttccagatgcaagttttcaagatgccaccagacctgaaccggactaagctgttcccccctgctaatttcaagatcgtgggtgcatcatcgctgaacccggactatgcctgtggccagccggtgcctgtcagcccaaccgcgttcccagacccgagcgggcttgactcgacgacgcttgctgtggcaacatggcaggtggtgtgcaacattaccacgacaaagggggccaagcccaagtgttgtgtgaccttctcggcgtactacaacgactcagtgatcccctgcagcacctgcgcttgtgggtgccctgcaaacaggcgagggccaacgtgcagcaccaccgcacaatccatgctgctgccaccggaggcgctgcttgtgccattcgacaaccggtcacagaaggcgttggcgtgggctgagctgaagcattacaatgtgccccggccgatgccttgcggtgacttttgtggcgtgagcatcaattggcatgtctcaacggactacaacaagggctggagcgctcgggtgacattgttcaactgggaggatgtcgacatggccaattggtttgctgccatcgtcatggacaaggcgtatgacggctttgagaaggcttactcgttcaacggcaccgcagtgggcaagaacacgatctttatgcagggtctggaggggcttaattacctggtgaagcagaccaacatgagtgggtccgactaccttgttcctggcaagcaacagtcagtcctctcattcaccaagaagctgaccccggggttaaatgttgttgctggagatggcttcccaacaaaggtcttcttcaatggcgacgaatgcgctatgccacagagaattccgatcagcactggattcagcacccgtctcagcagtggccttgctctggttccgttccttgttgcttcggctttcctattgctccagcaatgatccacgggactccaattctttgattctttcaggtggtttggtcgatgccatttgtaagaaagcctcttttttttgtttctgtgattgctttagtagattctacttagctgctgtatgttagtcagatgaagcagcagctgtgaaacagtatgaatacttggatagtgagagaaaaagtgaggaagcatttgttgcgggtttgcaacattggttcctcgttctaatggcatttacgaattgtctcatgttctgtct

SEQ ID NO: 86899 - DNA, 2375 bp, Zea Mays
ccagcactcaagctactacgcacgcacgccgccgctcccccagttcaaacccaccaccccttcccccttcatcttcctttcccagctgtgcacgcgctttccgatcgcttcatctacctcgccaccgcgcttccgcccagccccagtcaccagtccaccgcgcccgcgcccccgatccagcgatatggctggctccgtagctccccacgctgtggtcctcggtcttctcctgctcgcggggctcgcggcggcgcagagggcgacgacgccggctgcggcggcccccgcgcccgaccccggctgcaacggcatccagctgacctacaacttcgtggaccgcaccaagatccggcccttcgtcagcgacaagaacaagcagccctacgccttccgcgccaacgtcaccgtgctcaactccggcacccgcccgctcaagtcctgggcggcactcgtcacattcggctacggcgagatcctcgtcggcgtcgacggcgccgtgctcacgggcggcggcgacctgccgtacaacaccacggaggacgccggcaacgccacctcgttctccgggtacccgcatacagacctcctcacgcccatcgccaccgccggggacctgtcgcagatccaggcctccgtcggcatcgtcggcacgctcttcgccgggcccggcccgttcgtgccgctccccaccgcgctgtcgctggacgacccggcctacgcgtgcccggcggcgaccaacgtcactgctcgggtgctgtccacgtgctgcgtcctcacgccggaggccgaggccaacgccactgccatcgacgccaacaccaccgacccgaccaaggatttcctgccgcgcggcaccggcgacctcgtcatcacctacgatgtgctccaggcctacccctccagctaccttgcgctcgtcacgctcgagaacaacgccaagctcggccgcctcgacaactggcggctgtcgtgggagtggcggcgtggggagttcatctactcaatgaaaggagctcacccatcagaggtggacacctcgggctgtatctgtggggcgcctgggcagtactaccagagccttgatttttcgcaggaatgggacaatcttgcccaagtccatggacgaggcacagtcgaaatctgcgttccagatgcaagttttcaagatgccaccagacctgaaccggactaagctgttcccccctgctaatttcaagatcgtgggtgcatcatcgctgaacccggactatgcctgtggccagccggtgcctgtcagcccaaccgcgttcccagacccgagcgggcttgactcgacgacgcttgctgtggcaacatggcaggtggtgtgcaacattaccacgacaaagggggccaagcccaagtgttgtgtgaccttctcggcgtactacaacgactcagtgatcccctgcagcacctgcgcttgtgggtgccctgcaaacaggcgagggccaacgtgcagcaccaccgcacaatccatgctgctgccaccggaggcgctgcttgtgccattcgacaaccggtcacagaaggcgttggcgtgggctgagctgaagcattacaatgtgccccggccgatgccttgcggtgacttttgtggcgtgagcatcaattggcatgtctcaacggactacaacaagggctggagcgctcgggtgacattgttcaactgggaggatgtcgacatggccaattggtttgctgccatcgtcatggacaaggcgtatgacggctttgagaaggcttactcgttcaacggcaccgcagtgggcaagaacacgatctttatgcagggtctggaggggcttaattacctggtgaagcagaccaacatgagtgggtccgactaccttgttcctggcaagcaacagtcagtcctctcattcaccaagaagctgaccccggggttaaatgttgttgctggagatggcttcccaacaaaggtcttcttcaatggcgacgaatgcgctatgccacagagaattccgatcagcactggattcagcacccgtctcagcagtggccttgctctggttccgttccttgttgcttcggctttcctattgctccagcaatgatccacgggactccaattctttgattctttcaggtggtttggtcgatgccatttgtaagaaagcctcttttttttgtttctgtgattgctttagtagattctacttagctgctgtatgttagtcagatgaagcagcagctgtgaaacagtatgaatacttggatagtgagagaaaaagtgaggaagcatttgttgcgggtttgcaacattggttcctcgttctaatggcatttacgaattgtctcatgttctgtctgtcatacagaatttactctgtgaa

SEQ ID NO: 86900 - DNA, 1291 bp, Zea Mays
gcacgtgccacttgcagaaacaggaaaccagtagaccacgcccgcggtgcggtgcggtggatccgccaacaacgggcgcccgccccgccccccgcccggtctccggttcccgaacccccactcctcctccctctccgctcgccactcccgtcgctcctctcctccacgcctccctcgctcgctcgccccctcgtccggtcgtccctccctcgctcgtcttggcatccccgcaaggaatgtcccttccgtagcgtcccttgcttcttccccaccccatcctgtattagtgcgttctctgccgctttattttccggtttctttgggctctttcgccgccttggatcttggttgcctcatccggttcataggtaccttctttaacctttgctgggactccattgatgcactctttggttgtttttcggtggagcatttcgtcgaacacaggggcggagggcccagtatggtccagaaatcaaagtaaaaaaaagccctagtgtcttcgcatcgcgctcccgcacacagaccgaccagccgcagcccgtggcgcacctgcctgcgcccgccgcctccgtcatccactcaacctcgcccctcggccactgccgcgcggcgcccgcccgcctgccgcaccggccgaatcatccgacggcccttaagctgaggcggtgtggcctaagtagcagcgcggcggtcgccccgtgtctcgtccacttcggccccgacaggctgtccacggtggcgcgaactgcccctcgccggttcggccccgcccgcccgtagcagctcaccagagaactagcctctcgtcggccttccccaggtctgcgcgtggcgcggcgccgcagcaaagctccacgcgtgcgtgtccgccacccgccgtctcgcccgggccgccgtcgttgctcgtcggtgaacgacgtctcactgttaagtttctgatacttcaaaaggcttcagggtatcagtatcactgctgttctgaatttccaaagtgaaagcgcgcgcattaacttgggaatcaattctcatactataaacaattttctgtcgtaagaataatatcttgatggttagctatcctttaaggtatgttgtaattcctctatgaagaatagactttagaacgtttgattctatttatattgaaccaactatagcttccttctagatttcaggaaaccattatcttgtgccaaacaatacttgactttatataggatagaattgttgtttatgatgatacttagataactgctgtacttggtattcagtgtgtactatttttgtt

SEQ ID NO: 86901 - DNA, 2194 bp, Zea Mays
gcacgtgccacttgcagaaacaggaaaccagtagaccacgcccgcggtgcggtgcggtggatccgccaacaacgggcgcccgccccgccccccgcccggtctccggttcccgaacccccactcctcctccctctccgctcgccactcccgtcgctcctctcctccacgcctccctcgctcgctcgccccctcgtccggtcgtccctccctcgctcgtcttggcatccccgcaaggaatgtcccttccgtagcgtcccttgcttcttccccaccccatcctgtattagtgcgttctctgccgctttattttccggtttctttgggctctttcgccgccttggatcttggttgcctcatccggttcataggtgcagtaaggagctcgcacctgaaagaagcaatgaatctttttagctggttggtcagttcaggccttgtgcctgattgcttctcattctccttagttctgtcagcatgtgctcgagctggtgctcgctgatatggagtgtgggcgcatcacctgatgactcgactggcagtggaaatgaatcattcttgagctcaacacttgttgacatgtatgccaaatgtggaaggattgatgtgggaactgagatattcaaagtcaagagaaaccatattcctgtctggaataaaatgattaatggcttggcatcacatgttcttggatccgacatagtggttttgttccacaagatgaaaagtgaagatctggttcctgatggggttatgtttgttgcactcttgacagcatgcagtcactgtggcatggttgaataggctcgccaatacttcagatcaattactccagagtattctatcacgccagaggttgagcactatggtgtattggtggatatgtcattgcgagctgggttgctggatgaggcatacaagttggtaatgtcgatgaatgtagcctgatgttgtgatatggagggcattgcttagcacctgttgcatatattgccaaacagaattaggtttggtcactattgagcatgaggcatgccatggcagtgtggtttacgcccttctttcaaacaggtactcatcagcaaatagatggaatgattcagaggaagtatggaaacagaagaaacaaaaggaaattaggaagagcaaagacttgagctgggttgagttaggggggagcagccatgaatttaagctggtggtagatctcatcctgacactgaggatatatacctagtgctgcgtggattacgtaaaaagagctaaggttgaaggttatgctccattgactgatccagtaacaaaagatgtctcagaggaggaaagagaagaaaaccttaccttccatagtgacaagctagcagtggcttatatagtatcctgaagattggtccagggacagcaataatgctttccaagaatttgcagatttgcagtgattgtcatgaatggattaagatagtctcaaaggtactttgtcgtgttattattttgagggatagaattcgatttcaccagtttgaaagcggatgctgctcctgcaaggattactggtagcccttttcctgagcaatacagatgcgatccagctaatactaaacgagcagttccaagggaatacaactgatctaattactttttccatccagagatttcgatgctggttctgctgcagtgctgctgcatagcaatgaaaaaaatgtaatttctatgagaatgaaacatttggacatttggttactactttagctctttggcacatcacagggaaccaaggaaagaagggctagatgacagacacatgcatgtgtattgtacactctgaagtaatgcaaatgattagtgagaaagatcaaaatctctaagttgggtttgtgcatgcttatttaaacgacgttaaaacgacgtttaaacgtcgtttaaactataaaacgctgacaggaagtgaaacgacaaaacgttttacgattcgtcgtaaaacgtcgtttaaacgtcgcgttttgacgtttaaacgcggtatagagtgaaacgccgtgtttcgggcgtttaatgcgtctgctgctagaaattggcccagcccaattagaaactcccgcccaggccgcactttcaccagcccaattagtaactcgcgttctcaccagccgccgcactctagggcgcgctccagcctccaggccgccgctgctccaaccct

SEQ ID NO: 86902 - DNA, 2378 bp, Zea Mays
ccgccaacaacgggcgcccgccccgccccccgcccggtctccggttcccgaacccccactcctcctccctctccgctcgccactcccgtcgctcctctcctccacgcctccctcgctcgctcgccccctcgtccggtcgtccctccctcgctcgtcttggcatccccgcaaggaatgtcccttccgtagcgtcccttgcttcttccccaccccatcctgtattagtgcgttctctgccgctttattttccggtttctttgggctctttcgccgccttggatcttggttgcctcatccggttcataggtaccttctttaacctttgctgggactccattgatgcactctttggttgtttttcggtggagcatttcgtcgaacacaggggcggagggcccagtatggtccagaaatcaaagtaaaaaaaagccctagtgtcttcgcatcgcgctcccgcacacagaccgaccagccgcagcccgtggcgcacctgcctgcgcccgccgcctccgtcatccactcaacctcgcccctcggccactgccgcgcggcgcccgcccgcctgccgcaccggccgaatcatccgacggcccttaagctgaggcggtgtggcctaagtagcagcgcggcggtcgccccgtgtctcgtccacttcggccccgacaggctgtccacggtggcgcgaactgcccctcgccggttcggccccgcccgcccgtagcagctcaccagagaactagcctctcgtcggccttccccaggtctgcgcgtggcgcggcgccgcagcaaagctccacgcgtgcgtgtccgccacccgccgtctcgcccgggccgccgtcgttgctcgtcggtgaacgacgtctcactgggtatcagtatcactgctgttctgaatttccaaagtgaaagcgcgcgcattaacttgggaatcaattctcatactataaacaattttctgtcgtaagaataatatcttgatggttagctatcctttaaggattagcattgaagggttatccaatattcagtgaaaactagctactgaagaataggagtagcaatacctttgatgccccataaccccattcattagtttctgcaatgtctttgtcttctatttgctgtgcgaagttccatctactaaggaactctataggagacacttgcagtgtcagatggcttaaataccatagcagattgatatatgaaactttcctctcaagcagaatacatcaaagtaggcctcctagtacaacagtgctagcaagaagcacaagaaaaggaagtaagcagtcatttagcaatggccgccatttgcacagtaaatcggttgaatcatcaattgaagtgttcaagcagtcagagcttgagcagcttaaatcacttcattgctacaatgttgaggaagagttttctgaagtcaagaccgaatggcctgcaactatccttgtttttgatattgaaactactggcttctcacgtcgtgatgacagaattattgagtttgctgtccgtgatcttatggggggaaagaatagcacttttcagacactcataaatcctgagaaagatgtgaaaaatacatatgttcatggtattaacaacagtatgctctgcaggcctgatgttccaagatttggagagattattcccattctgctacaatatgtgtggagtcgtcaaatggacggtaaaccagttctctgggttgctcataatgggcgttcctttgacgtaccctttctcatgtttgagtttcgacggtgtaaagtagaaatgcctggtgattggctctttgtggatactcttcctatcgcaaaacaattggtcgattctaatgggtcaaaactcagttctgtgtcattgaagttcctgagggaacgctacaaaatcccactcacagggagcgcgcatcgtgccatgcaggatgtgacaaccctctcttacgtgcttcagaaattgacctttgagctgaaactaactgttcctcagctgctcgagaagtctttccgagcatcggatcttccagctaatcgtcctgcaaagtgactgtatctgcctcacctgaatatcgcctgaagcactaaattattatcaccgccgttttcgaatatttgtcgtctgcaagtttatttttgaactaaaacacgacaaaaaaagagggagtacattgttgttgtattattacagagatgttatttggagatcccagctctgatttcttctatgttctttctaacaacctaataaagccagcctgattgccactgatacatcagtagcacagtaatccgtattactgatactctgacattgtaggcttgtatacattactaaatcatcaattcaacatatatttacttgactgcgaacttatg

SEQ ID NO: 86903 - DNA, 1687 bp, Zea Mays
ccgccaacaacgggcgcccgccccgccccccgcccggtctccggttcccgaacccccactcctcctccctctccgctcgccactcccgtcgctcctctcctccacgcctccctcgctcgctcgccccctcgtccggtcgtccctccctcgctcgtcttggcatccccgcaaggaatgtcccttccgtagcgtcccttgcttcttccccaccccatcctgtattagtgcgttctctgccgctttattttccggtttctttgggctctttcgccgccttggatcttggttgcctcatccggttcataggattagcattgaagggttatccaatattcagtgaaaactagctactgaagaataggagtagcaatacctttgatgccccataaccccattcattagtttctgcaatgtctttgtcttctatttgctgtgcgaagttccatctactaaggaactctataggagacacttgcagtgtcagatggcttaaataccatagcagattgatatatgaaactttcctctcaagcagaatacatcaaagtaggcctcctagtacaacagtgctagcaagaagcacaagaaaaggaagtaagcagtcatttagcaatggccgccatttgcacagtaaatcggttgaatcatcaattgaagtgttcaagcagtcagagcttgagcagcttaaatcacttcattgctacaatgttgaggaagagttttctgaagtcaagaccgaatggcctgcaactatccttgtttttgatattgaaactactggcttctcacgtcgtgatgacagaattattgagtttgctgtccgtgatcttatggggggaaagaatagcacttttcagacactcataaatcctgagaaagatgtgaaaaatacatatgttcatggtattaacaacagtatgctctgcaggcctgatgttccaagatttggagagattattcccattctgctacaatatgtgtggagtcgtcaaatggacggtaaaccagttctctgggttgctcataatgggcgttcctttgacgtaccctttctcatgtttgagtttcgacggtgtaaagtagaaatgcctggtgattggctctttgtggatactcttcctatcgcaaaacaattggtcgattctaatgggtcaaaactcagttctgtgtcattgaagttcctgagggaacgctacaaaatcccactcacagggagcgcgcatcgtgccatgcaggatgtgacaaccctctcttacgtgcttcagaaattgacctttgagctgaaactaactgttcctcagctgctcgagaagtctttccgagcatcggatcttccagctaatcgtcctgcaaagtgactgtatctgcctcacctgaatatcgcctgaagcactaaattattatcaccgccgttttcgaatatttgtcgtctgcaagtttatttttgaactaaaacacgacaaaaaaagagggagtacattgttgttgtattattacagagatgttatttggagatcccagctctgatttcttctatgttctttctaacaacctaataaagccagcctgattgccactgatacatcagtagcacagtaatccgtattactgatactctgacattgtaggcttgtatacattactaaatcatcaattcaacatatatttacttgactgcgaacttatg

SEQ ID NO: 86904 - DNA, 824 bp, Zea Mays
cccgccccgccccccgcccggtctccggttcccgaacccccactcctcctccctctccgctcgccactcccgtcgctcctctcctccacgcctccctcgctcgctcgccccctcgtccggtcgtccctccctcgctcgtcttggcatccccgcaaggaatgtcccttccgtagcgtcccttgcttcttccccaccccatcctgtattagtgcgttctctgccgctttattttccggtttctttgggctctttcgccgccttggatcttggttgcctcatccggttcataggtgcagtaaggagctcgcacctgaaagaagcaatgaatctttttagctggttggtcagttcaggccttgtgcctgattgcttctcattctccttagttctgtcagcatgtgctcgagctggtgctcgctgatatggagtgtgggcgcatcacctgatgactcgactggcagtggaaatgaatcattcttgagctcaacacttgttgacatgtatgccaaatgtggaaggattgatgtgggaactgagatattcaaagtcaagagaaaccatattcctgtctggaataaaatgattaatggcttggcatcacatgttcttggatccgacatagtggttttgttccacaagatgaaaagtgaagatctggttcctgatggggttatgtttgttgcactcttgacagcatgcagtcactgtggcatggttgaataggctcgccaatacttcagatcaattactccagagtattctatcacgccagaggttgagcactatggtgtattggtggatatgtcattgcgagctgggttgct

SEQ ID NO: 86905 - DNA, 2099 bp, Zea Mays
cgaacccccactcctcctccctctccgctcgccactcccgtcgctcctctcctccacgcctccctcgctcgctcgccccctcgtccggtcgtccctccctcgctcgtcttggcatccccgcaaggaatgtcccttccgtagcgtcccttgcttcttccccaccccatcctgtattagtgcgttctctgccgctttattttccggtttctttgggctctttcgccgccttggatcttggttgcctcatccggttcataggtaccttctttaacctttgctgggactccattgatgcactctttggttgtttttcggtggagcatttcgtcgaacacaggggcggagggcccagtatggtccagaaatcaaagtaaaaaaaagccctagtgtcttcgcatcgcgctcccgcacacagaccgaccagccgcagcccgtggcgcacctgcctgcgcccgccgcctccgtcatccactcaacctcgcccctcggccactgccgcgcggcgcccgcccgcctgccgcaccggccgaatcatccgccgtctcgcccgggccgccgtcgttgctcgtcggtgaacgacgtctcactgggtatcagtatcactgctgttctgaatttccaaagtgaaagcgcgcgcattaacttgggaatcaattctcatactataaacaattttctgtcgtaagaataatatcttgatggttagctatcctttaaggattagcattgaagggttatccaatattcagtgaaaactagctactgaagaataggagtagcaatacctttgatgccccataaccccattcattagtttctgcaatgtctttgtcttctatttgctgtgcgaagttccatctactaaggaactctataggagacacttgcagtgtcagatggcttaaataccatagcagattgatatatgaaactttcctctcaagcagaatacatcaaagtaggcctcctagtacaacagtgctagcaagaagcacaagaaaaggaagtaagcagtcatttagcaatggccgccatttgcacagtaaatcggttgaatcatcaattgaagtgttcaagcagtcagagcttgagcagcttaaatcacttcattgctacaatgttgaggaagagttttctgaagtcaagaccgaatggcctgcaactatccttgtttttgatattgaaactactggcttctcacgtcgtgatgacagaattattgagtttgctgtccgtgatcttatggggggaaagaatagcacttttcagacactcataaatcctgagaaagatgtgaaaaatacatatgttcatggtattaacaacagtatgctctgcaggcctgatgttccaagatttggagagattattcccattctgctacaatatgtgtggagtcgtcaaatggacggtaaaccagttctctgggttgctcataatgggcgttcctttgacgtaccctttctcatgtttgagtttcgacggtgtaaagtagaaatgcctggtgattggctctttgtggatactcttcctatcgcaaaacaattggtcgattctaatgggtcaaaactcagttctgtgtcattgaagttcctgagggaacgctacaaaatcccactcacagggagcgcgcatcgtgccatgcaggatgtgacaaccctctcttacgtgcttcagaaattgacctttgagctgaaactaactgttcctcagctgctcgagaagtctttccgagcatcggatcttccagctaatcgtcctgcaaagtgactgtatctgcctcacctgaatatcgcctgaagcactaaattattatcaccgccgttttcgaatatttgtcgtctgcaagtttatttttgaactaaaacacgacaaaaaaagagggagtacattgttgttgtattattacagagatgttatttggagatcccagctctgatttcttctatgttctttctaacaacctaataaagccagcctgattgccactgatacatcagtagcacagtaatccgtattactgatactctgacattgtaggcttgtatacattactaaatcatcaattcaacatatatttacttgactgcgaacttatg

SEQ ID NO: 86906 - DNA, 2750 bp, Zea Mays
cgcacagccagcccagccgtccatggccacgaccaccaccggtcgtctgcttcctcgaagcttctccaatccagccacgcaccatggcggcccgcctcccgatgcgcccccgccgctgcccaatctatccccgaccccctcccgcacgggcacggtcatgcccattcggacacagctagctgatcgatgatagccccgcgcctccgtccgcccccgctttgccgctttccggccggccgcctgacaaaatcccgcgccctttctacaggcgtacgtcgtcggcactgaaagagaggaggagccgaggaggaggacggaaaagccgaaagccattctggtgcgggtgaggcgcgcgcgcgcgcgggcgggcgggcaggcaggtggcgccggccgctttacgtttacggtcttttgccggccgggagcgtgtccgtgacgagaccctcctcacctctggaagaagcttccacgctgcttcctctgctttcctgcacccccgcgctatttatagccgccgcggtcactgccactgccagcggttttaagctaacggtgcaagcagcaagccgtcccaggtgaattcgagtcagtgaaccgagtggtctccactctccagtgagtgagcgccgcgccgtgttggctcgcacgtggccacccatggacctgaagcgggcgctggacgtggaggaggaggtggtggacggcgacgaagaggagctcgccggctgctgccccgacgccaagcgccgccggacgtccgtcaatagctcgatgcaggaggccattggcgcgcagtacatgcagaggcatctgcccaagctggaaccgtttcttcgcagagtcgtgcaggaggaggtgcataatgttcttgtccgacacatcgattccgcgcacaggctcccgcttcaactgaagacaagcagcaaacggtacaggctgcagttccagggaaacctgccgcagacgcttttcacaggcaacagggtggaggccgagaacaggcacccgctgcggctagtcctgaccgacgcggccaccagccagacggtcagctccgggcccttgtcctcggcgaaggtggagctcctcgtcctcgacggcgacttcaacgccgacgagcggctggagcacaccgagagggagttcggcgagagcgtggtgttcgagagggaaggcaagaggccgctcctgtccggcgaggtggtcgtcgtgctcgacaggggcaccgcctccgtccgtgacatctccttcacggacaactccagctggatacggagccggaggttcaggcttggcgcgaggatgtcaagggctagttcgattgaagaacgggtgcaggaagctgtgagcaacccgttcctggtgaaggatcaccgtggagaagtgtacaagaagcaccatccacctgcattagccgacgacgtgtggcgcctggagaagatcgggaaagacggcgtgttccacaagaagctggctgacttcggaatccacactgtccaagacttcctcaggaacctggtgatggatcagtacggactgcgcagcttgcttggcagcggcatgtcgaacaagatgtgggaatccacggtggagcacgcccgggagtgcgtgctggacgacaggctctactcctactgcagcgggcacgggatcgtgctcctgttcaactgcgtctacgaagtcgtcggcgtggtcgtcgggagccactgcttcaccttggccgctctaactcccacgcagaaggcgttggtggcgaagctgcagcaggacgcgtacaagttcccggaccgcatagccgagttcaaggtgcagtcgcagagctccacggagcagcaggcacccgccgcggtcatccaggccccgcccgcgccggcgcctgtgcccgcgacgcagatgctcggtctcccgcacggtgtcgtccagccttgtgcagcaggctcgcacgatagcctgctgctgagcccgcagctactccagcaccagcagcagccgctcagcgaggcccagctggaggacgtgctacagtcggccagcgccgccgagccgtggttccctccgtttggggcggcgggcgggttcgacgcgcgggacccgttcgacgtgcagttcagcgggtcgcagccgtgcgggctgctgctctccagcaccggcgccaggttgtgacttgtgagagaggccgacgtacggccagcatttcatcaagacgcgtctcgccgcgccggagctggacacgctatcttctctacgtggcccattgcgtcgcgcggaacgagcggacccgggcgacgaccggcggcggcgtttcggttggatgccgaggcgagtcctgcaggctgcagcagccagtggagcatgcatgggcctgctaacagtcgcaggtggttgctgtttacctgaggaagtgaggatgcctggaagacaggcaaatcagatgcagagaagatataagacctagcagcgcagttggtaggatcagataatgtcatctttttgtcattttgggatggtaacacgagttatgaatagtgagaagatcacagtgcagttggtacttggtagggcgttcgacccgttcaccatagtcccttactcccttcccatgtctgtaaaagcatataagggctagtttatgaacactatttttcaaaggaatttttattttatcaagggataataaactaaattttcttgagaaaatgaaaatcactcggaaaaaagaggtttctaaactagccctaaaagggtgcttt

SEQ ID NO: 86907 - DNA, 2747 bp, Zea Mays
cgcacagccagcccagccgtccatggccacgaccaccaccggtcgtctgcttcctcgaagcttctccaatccagccacgcaccatggcggcccgcctcccgatgcgcccccgccgctgcccaatctatccccgaccccctcccgcacgggcacggtcatgcccattcggacacagctagctgatcgatgatagccccgcgcctccgtccgcccccgctttgccgctttccggccggccgcctgacaaaatcccgcgccctttctacaggcgtacgtcgtcggcactgaaagagaggaggagccgaggaggaggacggaaaagccgaaagccattctggtgcgggtgaggcgcgcgcgcgcgcgggcgggcgggcaggcaggtggcgccggccgctttacgtttacggtcttttgccggccgggagcgtgtccgtgacgagaccctcctcacctctggaagaagcttccacgctgcttcctctgctttcctgcacccccgcgctatttatagccgccgcggtcactgccactgccagcggttttaagctaacggtgcaagcagcaagccgtcccaggtgaattcgagtcagtgaaccgagtggtctccactctccagtgagtgagcgccgcgccgtgttggctcgcacgtggccacccatggacctgaagcgggcgctggacgtggaggaggaggtggtggacggcgacgaagaggagctcgccggctgctgccccgacgccaagcgccgccggacgtccgtcaactcgatgcaggaggccattggcgcgcagtacatgcagaggcatctgcccaagctggaaccgtttcttcgcagagtcgtgcaggaggaggtgcataatgttcttgtccgacacatcgattccgcgcacaggctcccgcttcaactgaagacaagcagcaaacggtacaggctgcagttccagggaaacctgccgcagacgcttttcacaggcaacagggtggaggccgagaacaggcacccgctgcggctagtcctgaccgacgcggccaccagccagacggtcagctccgggcccttgtcctcggcgaaggtggagctcctcgtcctcgacggcgacttcaacgccgacgagcggctggagcacaccgagagggagttcggcgagagcgtggtgttcgagagggaaggcaagaggccgctcctgtccggcgaggtggtcgtcgtgctcgacaggggcaccgcctccgtccgtgacatctccttcacggacaactccagctggatacggagccggaggttcaggcttggcgcgaggatgtcaagggctagttcgattgaagaacgggtgcaggaagctgtgagcaacccgttcctggtgaaggatcaccgtggagaagtgtacaagaagcaccatccacctgcattagccgacgacgtgtggcgcctggagaagatcgggaaagacggcgtgttccacaagaagctggctgacttcggaatccacactgtccaagacttcctcaggaacctggtgatggatcagtacggactgcgcagcttgcttggcagcggcatgtcgaacaagatgtgggaatccacggtggagcacgcccgggagtgcgtgctggacgacaggctctactcctactgcagcgggcacgggatcgtgctcctgttcaactgcgtctacgaagtcgtcggcgtggtcgtcgggagccactgcttcaccttggccgctctaactcccacgcagaaggcgttggtggcgaagctgcagcaggacgcgtacaagttcccggaccgcatagccgagttcaaggtgcagtcgcagagctccacggagcagcaggcacccgccgcggtcatccaggccccgcccgcgccggcgcctgtgcccgcgacgcagatgctcggtctcccgcacggtgtcgtccagccttgtgcagcaggctcgcacgatagcctgctgctgagcccgcagctactccagcaccagcagcagccgctcagcgaggcccagctggaggacgtgctacagtcggccagcgccgccgagccgtggttccctccgtttggggcggcgggcgggttcgacgcgcgggacccgttcgacgtgcagttcagcgggtcgcagccgtgcgggctgctgctctccagcaccggcgccaggttgtgacttgtgagagaggccgacgtacggccagcatttcatcaagacgcgtctcgccgcgccggagctggacacgctatcttctctacgtggcccattgcgtcgcgcggaacgagcggacccgggcgacgaccggcggcggcgtttcggttggatgccgaggcgagtcctgcaggctgcagcagccagtggagcatgcatgggcctgctaacagtcgcaggtggttgctgtttacctgaggaagtgaggatgcctggaagacaggcaaatcagatgcagagaagatataagacctagcagcgcagttggtaggatcagataatgtcatctttttgtcattttgggatggtaacacgagttatgaatagtgagaagatcacagtgcagttggtacttggtagggcgttcgacccgttcaccatagtcccttactcccttcccatgtctgtaaaagcatataagggctagtttatgaacactatttttcaaaggaatttttattttatcaagggataataaactaaattttcttgagaaaatgaaaatcactcggaaaaaagaggtttctaaactagccctaaaagggtgcttt

SEQ ID NO: 86908 - DNA, 1103 bp, Zea Mays
ctctcgacccgaaccaggacgaaatccccaatccccagacgttgatacgagtatacgaggccgcatcaagcacgcaatcgccgtcagctcggtctacggccccgtaccggtattccaccgcttgcacgccaacgcgaacgccggccgccatggcctcctctgagtctcccaataccgcgcctgcggccgcggccgtcgcttcccaaccggcccgcgatttcctcgcccacctcgaggcctatctcgcccgccgcgacggcgtcgacaagctcctcaagatttcccgctacgccacgcgcctcgcgctcgccgccgggcccccgctgccccccggcgcctccgcccgcctcaagtccttcgagtccagcgtcggcctcagccgcaaggctttccgtctcggcaagttcgtgcagtccctcaacgccctcctcgcccacccgcaccctcccccgtccctcgcgctactcgcctacggcggtgagggcgtctactacttcgtcgagcagttcgtctggatcgccaaggccgggctcctgcctgcgcaccttcttccgcgcctccagcgtctcagcgcctgggctgagctgctgggctacgtcggttccattttaattaagctggaggaggtggctaagatcgaatcttcgataaagaagcggctcgtgaaggactgtgataaggagagcgaggcggtgaagactatgcagggtaaactgctgctgaagcggatgtcagtggtgcaggacgtggcggatgccgtcatggctctgggagacgtcaccgatggcaagggtttgctcgggagctccacgctgatggcagcagctggactgctctcggcgttgatcagcacgcataagaattggaattcttgttgaagcctggaggtacatgttatagatagcacatcatataatgaaataaagctctgattatagcgataactaagagtttcctctggaaatatggatgctcctaaaactgataccaggtcctctggggaatgaatgaagtttattcttattcatttggttggaccaaggaatcttgtgttttttcagccatcttgatcattcaataatttttttgttcttaaaagtata

SEQ ID NO: 86909 - DNA, 686 bp, Zea Mays
tttctccctcggacctcggtccctccacgaacgccacgccgggagtctcccacgcagtccaccccgcgtcgtctggcctcgcgatggccgccgccgactacggccgcgcgtacctcccctacgcggccgccgcccccgccggcgagtacgatcgcccctgccgcaacgaggtcgtgccctacggcgatcgccgcctcgacaccgtcgtcaagccgccagccgggtcgccggcgccgccgctgccggtatccaccaggagcggcgggagaggggtggggtcagcgtggtgtttcagcgacccggagatgaggaggcggcggcgggtggcgagctacaaggcctactcggtggagggcaaggtcaaggcatcgttccgcagggggttccgctggatcaaggccaagtgctccgagctcatccatggctgaacctgggatatcggtgaaattctgttccgttgtcatggtggaaattgcagctacaatgcgtgaggggtggtcgctgggtgtatttcgctcccaaaatgtggaagagaaattgtatgattgttggcccctggttataggaaaagaactcgatggagctctgctcaggtcacttgtcgctgcctgctaagtgctaactacccctaattttgttcgaaaacatttgaagaattgaatctcggaaaaggaaatttcttcgca

SEQ ID NO: 86910 - DNA, 700 bp, Zea Mays
aacagttagcaatcctgttgatccagttccggcgcactgtttcttatgtcacatccagcaactctgaaggatcttttcaatctctagttcgtgtcctagtctctcctctccactggtgctggcattgctgttaggagacctctggatttggggttatattttggtgggaaaccctaaatgtggatcaattgtttttttcctgtagcactatgaaggtcaagattcttcagtggcatgcagtggcttcttggacgtgggatgcacaggatgagacatgtggcatatgcaggatggcttttgatggctgctgtcctgactgtaagttccctggtgatgattgcccactcatttggggtgtctgcaaccatgcttatcatcttcactgcatactgaagtgggtcaattctcaaacatccacacccctttgccccatgtgccgtagagagtggcagtttaagggctaaggtactatggacatctagaactgcaccaagcgactctcagttctcagagaagactgatgtttttctggtacttctgtgatgctttattttaactactacatattgttttccgtacttagtataaatcctgatgtcagcgcctgatcctgtgtatgcttccaagcttgtagtggaacaaatgaaattattgcttttcttagggctgatttcctaatcttatcccatattggtttgtt

SEQ ID NO: 86911 - DNA, 1097 bp, Zea Mays
atgccacgcccaatcatgtgcctgctgcctccagcagtccagtccagcttaacgcgggcggcgcgagcagctgctaaacgcgttcgcttcctcctcccgcgcccgcgccgctgcaaaccggagcgcgcaagcaacgccagccagccgggcagcccccacagctcctatatatattctccctctccccctgctcgactcatctcgaactccgaaacaaagcaatcacccgagcaaagcagtgcggagagacgatccagcggcatttcgcattcgacgaacgaagcgccgccatctgatccgacacgcagcgcaatggcggcgggactgaagaggccgtcgttcgggacgcgggcgtggcggctgctgcggctggcggtgctgtgggcgcggaagggcggcgcggcgcacagcctgcgcctgcgcctgctccgcacgctccgccgccacggccacggcctcgccggcctgggcggcgcgcgcggcgaccggctccgctgcggcgagcgcgagtactccatcgacgagacgccggcgttccggttccgcaccccgtccgcgcgcgtgctccgcctcatcccctgcatcgcgccggccgtgccggacacgccgggcctctacggcgacgaccgctacttcttcagcgccgccgccgccgcgtgggagacgggcgagggcgccgggtgctgctacggcgacgtcgacgatgatgaggaggaggacgacgaagagccgagctgctgcggcgatggcgagatgctgctggagcgcgtggtggcggaggcctgccgcgcgagctcggccggacggtcggtggcagcggacagcggcgaggacgccggggtggacgtcaaggcggacgagttcatcgccaggttctacgcgcagatgaagctgcagcgccagatctcgtggctacagtacaacgagatgatggagaggagcatcagctagatttatttcttcgttcattcttgcttactactagtactaccagcgattgagcttgagctctgtacatttgctctaaaatttcttttgttgctcccaaaaattattattactacaatacatatacatgatacaattttttttcttca

SEQ ID NO: 86912 - DNA, 498 bp, Zea Mays
atggagcaccccttgatagttgacatggcggcgtgtgccatggacgagctcatctggctcgcccaggccggcaagcaaatctgggtcaagggaatgcccggtgacgcgagggatttctcagctcagacgcctaccggtctgtttatttcctacaaatgctccccaaaagttccaattgattcttctgcctttgccaagttccccagaatccccaggttgatgctgcccctgcccatcgattggatcttgttcgatttctctgttctgcaaatcctgtgtgcatccgctccagataagttacaagaggtccttaaaagagtgaagagcgcaataatacctggaatctacagtgacctttgtggggattctgttctagcaaaagtgggcccatcttggacatacaaattagatgatcaacatgtgaaggagaagacacatagcatgaatttaaacatgaattcaaccgatgatagtgataacttgtctggtgactcgtga

SEQ ID NO: 86913 - DNA, 3114 bp, Zea Mays
cagcataaatgtccggcctttagcggcgtccccgatccgatgctcccggccgcctccgcccctcctctccgccgcctccgcttcgtccgcgctgcgcggctgcctcgagctcgagaccgcgtcggctgtataggtgattttctcttccttttggggggatgctgcggagcgaacgctgaggagcgacgacgagttttgattcaggtgtagagggtttctagaatcgatggggtcggagaagggtggagcgaaggttattggcggcggcgggatcttcaacctatttgattggaagcgaaagtcgcgcaagaagctgttctccaactcgcccgaggggtccaagcttgttaagaggagcgaagaaaccttgctatcagggcgtctccacttgggtgatgatgatgaaggaattggtgtatcaagcttcaaggggagcagcgactacagctgtgcgtcttcagtgaccgatgaggaagtgcgtgagatgaaggcgccaggtgtggtggccaggctcatgggcttggacgccatgcccacctcgggcgttccagaaccgtactgcacacctttccgagacacaagattgttcagggacagccacagcctcaagaggagccctgagtactcaatgaatgaccagttcagtcatgttcctcaaagagtcgatggctatatcaggaagccattggatctccgagcaccaaagatgccaagcagcccgattgaaaggttccagatggaagcattgccaccaaggtccgcaaagcacctacccatgtctcaccatagattgttgtcccccatcaagaatccaggtttcagttcagcgaggaatgctgcccagatcatggaggaagcagccaagattcttcagccaagggcacaagccagctctagggagaaaatctgctcttttagcccggcacggattcctttgagagtttcggagccaagggagagcattcctccttctcagagaactgtgcctctgaagccgcaatcatccaggaccgctcctgagctgccagatgtgaggttctctagagcgcaacagatgaaccgaagctggaatagcgaggaagatattgtcatattcagaccttcaattgattcttatgagatcaataatccgagttgttcgaaaaacaagggaaagtctatttctttggcagtccaggcaaagaacaatgtccagaagagggaaggtgtaactggttctgggaggaattcaggagtacaaaaagagcatgatgagcaaagagcaaaccaaccatttaggactcagtctaatctccagagaaagaagccatcgtcgtctggcacttcttcccctgtccttcggcaaaataatcagaaacagaattcgttggtgaccagaggcaaggtgccagcaaacaagaccgtctcaacacaacaaggcagaaaactaatggcaggagattcctcttctgggaagatcaagagtggaagcaaggtatctaaagttggtggcagaaaagacattgtggaaagcataagtggtgatagagaaggatcgtcatcaaacaacaaggacttcccacagaagaaacggttgatagagaggaactccacaaacgagaagggtacatttgttcctgaaaaaccagtgggtaaacttaagaagcaggttcaacctaatgttgttatggatgagcacattaagtggaacaaggaaagtaaggatactacagatgtcgtgtcatttactttcacctcacccttggtcaaaccgtcggcaggactgtccagactggtgggtaagtgggatacaagaagcaaccttgatatggatgcaggatgtgataaagatgattcagataacaaggttgaaggtctgtcatcagtggggctgaactttgtaaatggtgatgcattgagccttctcctagaaaagaagctgaaggagctaacatcaaaaattgatccatcaatcacctttacgagaggtgacacatttgtgcctgctacttttaccttggaggaaccaccaacctcttcatgcagcaattggggctcggaaagtggagtatttgactgtagcccttctgaagtcaaaccttctcaatatgattactgcccttcagcaaaaggccaaattttccgaggcagtaaaataaaggtggaagaacaagaatgcagcagcataagtaatgcaaggaaggaacatgaaaatgaagagctaagtcccctatctgtgcttgaaccaacctctctaagtgagagttgctggtcttccgagtgttcaggcagcagcggtgggggtaagagttattcatcaatttttgatgttaagaatgccaaagggaatttcttgattgacccagcatcagttgatatcgaggcaaagacaacaacagactcagcctcttccgcatccgtagatacatcagatatttcagatgtcacccaatgttctaaaacatcaagacacacagagctggactacattgcagacgtgttaagcagtgtcaacttgacaacagatgaactgggaccactctttgtcgatcaggatagaccagctttggactcgtccctcttccagaaattggagaacatgcatgtgtacaacaaacaagggaaagagcccttttgccgtggagggtacaggcggctgttgttcgactgcgtaaatgagtgcctggagacaaggcgcacggcctacttccgggcaggatatgcagcatggagcaagggagcagcagcgctgatccggggcgttgaggcccaagtctgcagtgagatcaccagctggaagagcatgggagactggacggaggatgagcttgtcgacaaggacatgagcagcgggctgggcacatgggtcgacttcctggtggaggagttcgaggctggtgtggaggtggagaaccacgtactgggctcgctgcttgacgaggtcgtcgccgacatggtcgtgggacgccacggcaggagtgtaaatttgtagtttgagatgaatcgtgtggttgttggtctgtaattttgctgttacatatcccctatttattctgtcaccccagacatgttgttcagaacagtgataaatgttgtttacccaatgagatagatagttttcacttttcagctcga

SEQ ID NO: 86914 - DNA, 1474 bp, Zea Mays
ccccagcctccccttcccagttcccaccacttcaccataaccaggtcaacccggcgcaaggagcacgaacaggaaccgtccagcggagcaaaggcacccgcagccgcaggccatggacgatgacatcgacagctcctgctccaccccgttcgccagcgcgccgtccagcccgggacgtccccaggccctcggcggcggtggcggctacttcttcagcgcgccggccagccccatccaccacctcctcctctcgacctcgtgctccgcctccgcgacccccagctccggtgttcgtgggtgcgggggcgacgcggagttcgagttcggtgggcctggcgggcccatgatctccgccgacgagctcttccacaacggccagatccggccgctcaccctgcccccactcccggatctcgaccccggaagcgacgacaacgagggccgcgcgccgacgcgcggccgcgacctcacgccccggagcgcgtccgtgcaccggcgcgcgcggtccatgtccccgctccgcagcgcgtcaccgcggctcaagctgatcaatgcgctcgtcgttccggcgccggatctcggccccggccccgacgcgacgggaacgcacggggaggcagccccgccggtaaccgcctcgtcccgctcgtcctcgtcctcctccacgtcctcctcgtcctcgtcgggcacgtcgtcagcgcgcgggtcccggcgctgggtgttcatcagggacatgctcctccaccgcagcaagagcgagcctggcagcggcgcccacgcgcacgacgtccccggggcgcccgccgctaacaagcccgaacgagcctggcccttctcctccccgtcctgggtaaccagggacaggctcgccgcgaggctccgcccctctcgcgcgccgccagcgacggagaacgcttgcggtctcggtggcgaggatggccggccgcgggggcagggtaggggccggggccggggcaggcggcgacgttccactacggtggcggcggcgcacgagaggctctacgcggcgccgaaccgtgcgcaggcggaggagatgcggcggcgcacgttccttccctaccggcagggcctcctgggttgcctgggcttcagctcccgcggctacggcgcgcttcacgggctcaccaaaaccctcaaccccgtattctctcggtgaaaagtcatcgtcaaaaggaaaccagagatcgggccaggagcttgatttgccacctgttcgtcctgttcatgtctgcgagcatttttttttatcttcgttgtttgtgcgcgttctgtatatatagcagtgtcagtgtcgagttcggatcggaaggtagtttgccgatggtcacgtcaagcagaacatctgagagagaagcaatgcaatcgatgaatatggcgcgaaaacagtcgctggcgccttttctgtgtgcgtggtagtgtgtgtgtgccaagtataaaagcgtgtgatgttgca

SEQ ID NO: 86915 - DNA, 518 bp, Zea Mays
acgatcgctaaagtgaccgatgatatcggccgtcgtcagaccttcaacaccgcaattgcggcgattatggagctgatgaacaaactggcgaaagcaccaaccgatggcgagcaggatcgcgctctgatgcaggaagcactgctggccgttgtccgtatgcttaacccgttcaccccgcacatctgcttcacgctgtggcaggaactgaaaggcgaaggcgatatcgacaacgcgccgtggccggttgctgacgaaaaagcgatggtggaagactccacgctggtcgtggtgcaggttaacggtaaagtccgtgccaaaatcaccgttccggtggacgcaacggaagaacaggttcgcgaacgtgctggccaggaacatctggtagcaaaatatcttgatggcgttactgtacgtaaagtgatttacgtaccaggtaaactcctcaatctggtcgttggctaagcgcgggaggaagcgtgcgatatctggcaacattgttgttatctctggcggtgtta

SEQ ID NO: 86916 - DNA, 1328 bp, Zea Mays
cacagcacacacactggaaagtgcaagctgtagtgagacctgcgcgactgccagcgtgtatccgcgcggcaaggagcgtagcgcgcggtcgtcggcccgcacggccaccaactcccttggacgcacgcgcgcgcgcgaccagctgctaaccgtgcgcaagtagtagtgcgacttcgccgccggccgggatcgctagctcgatcgatcggcgggaccacatacgactccggtgtggccagcggcggccgggccggggaacgcacgtgctgcgagcgagcgagggcagacgctagctgttgccgggagctagccggcgcgcgatggggagggcgccgtgctgcgagaaggtggggctcaagcgagggaggtggacggcggaagaggaccagttacttgccaactacattgcggagcacggcgaggggtcctggaggtcgctgcccaagaatgcaggcctgctccggtgcggcaagagctgccggctccggtggatcaactaccttcgggcggacgtcaagagggggaacatctccaaggaggaagaagacatcatcatcaagctccacgccaccctcggcaacaggtggtccctgatcgccagccacctccccggccgaacagacaacgagatcaagaactactggaactcgcacctcagccggcagatccacacgtaccgccggaaatacaccgccgggcctgacgacaccgccatcgccatcgacatgagcaagctgcagagcgccgacaggcggcgcggcggcaggaccccgggccggccgccgaaggctagcgccagcaggaccaagcaggcggacgccgatcagcccggcggcgaggcgaaaggcccggccgcggcggcgtcgagcccgcggcacagcgacgtggtgaacccgggcccgaaccagcccaacagcagcagcggcagcacgggcacggccgaggaggaggggcccagcagcgaggacgcgagcgggccgtgggtgctggagccgatagagctcggggacctagtctggggggaggccgacagcgagatggacgccctgatgcctatcgggcccggcggccacgactcggctgccctcgaagggcttggcgcggtcggctgcgaggcccaggtggacgacctgttcgacatggactgggatggcttcgcggcccatctgtggggcgggccggagcaggacgagcacagcgcgcagctgcggcaggccgccgagccgctggaagttgctgctgctgctgctgctgcgacggcggcccgcaccccggacgatcgcgagctggaggcgttcgagacttggctcctgtccgactcgttctga

SEQ ID NO: 86917 - DNA, 268 bp, Zea Mays
atggggagggcgccgtgctgcgagaaggtggggctcaagcgagggaggtggacggcggaagaggaccagttacttgccaactacattgcggagcacggcgaggggtcctggaggtcgctgcccaagaatgcaggcctgctccggtgcggcaagagctgccggctccggtggatcaactaccttcgggcggacgtcaagagggggaacatctccaaaggaggaagaagacatcatcatcaagctccacgccaccctcggcaacaggtaa

SEQ ID NO: 86918 - DNA, 591 bp, Zea Mays
gcgtagtccatggccatgatgatgtgtctccagcttgagaaggccgaggtccaaatggagctccaccagttccactgagttttgcttaagtcttctggatggcacactcctgtcgtaccacaaatcagaaccaatgcgtcaataggcaccgtagttgataataatatctgccacccaacagaatttgatttcttcctgtgcatccatgctggggccaagggaacaagccgtcctacgcattaccatgtgctacgagatgacaacaagttcaccgcagatgctctgcagtctctaacatataacttgtgctacattttcagtgcgcagatcatccagggcggacctataagatgtcaagtgtgtacgccccaacaacccacagatgcggctcgacgctctccatcgtctggtataccaggataggcttcaagagaggctaagaaagtctaagtgtttaggacttgaagaggctgcaaagaacaaaggttttgaccttggtaacgaacaaggagcggctcgttcatctcctgaaggggattacggtcggaatagagaagtgccaagcgacaccactatctcaggtactattaa

SEQ ID NO: 86919 - DNA, 952 bp, Zea Mays
gaaagattagtttcatttccctccgaaacagagatccgcatttgatttttctctcgccctctcctgacctagtgacttctcgagatttcccattccggtgccgcgcgcgcagctcgagcaagaacaatccccaatctccaatcccaaatcctaacgattccacacccgtctcccctctgcatcccgctgtttcactgcccgctatggcctcacctgccacggacaacgacatcggcgacgagcacctgttcgacggcgtccgcttcatgctggtcggattcaacacctatgacgcgtcccagtaccggtcggagatggtgcggcgcggcggcaccgacgccgggccgtcgggcaacgggtgcacacacgtggtcgtgtggaaccgcatctacgatgacccgacgtgcgtggccgagcgggcgcaagggaagaaggtcgtcagcgggctgtgggtggaggacagcttggatcgcggggtgcttgctgatgccgataggtcttttccaggttttgtattggccgatgagacatttgaagggaataccgggtgctcaatcgttgcttatatgcttgacgggttaccaaaaacgctatcgcgaagacatgatgaaaatggtttctttgatgggagcacggttctcaaaacctttgatagcaaatgcagtcactcaccttgtttgttataaattcgaaggtgagaagtatgaggttgcaaaaaaggtgaacatcaaacttgttaatcaccagtggttggaagactgcttaaaggcatggaaaattctcccagtcagtgattatagcaaaagtagttgggagctagaattaatggatacacatgccattgactctgaacatgaagcagaagcatcagaaccaaggtcattgaacaataggcccagtgtcaggtgcgcttttcaactgaaaaaaaatacgatgaaacttttaccaagcc

SEQ ID NO: 86920 - DNA, 3231 bp, Zea Mays
tattcagttaaccatatggtatcacctcagagggctgaagaaagcacactgagaggttactccaatctttctacattagaaacaagacagcaaaaggttattcaacctgctgatgttcagagcattgcaggcaatgaaaatcctaagcgtgaggatggactagatggtgcatgtgctcagaaaaggaagagcttggtctccccagctagcataaatttgcaaacggaagatttggcgtcagaaactggtcctttagattctccatttgtgagtagagtgagtgatgcatctgaaaggataataaatctagttgaagctaatgctgttaatttgggaaaggaacgctctagcttttctacaagcagacaagcaagatctaggaagacttctctcaagcatggtggtcccatcaatggaatcaaactttctgaatattcttcaagtgataagaatgtaaaatctttacagaaaggaaggatgtcattcaaagcaatgacagaaagtaaatgtgccatgagttcttcagccactgttcaagatggaaaaacaagtgcaggtttcccgtttcaggataaggatggggaaagtacacacagtagtggtaatgcagcaaatcaagattgcttgaatgagataggaaatgccttcacaaaggatccggcacatgacaaatctgtgcacagttcaaataattcacaagttgtgccctcttatagaaatgccagcagtaggatagaagatccagtcaaagttaatggtaatgaaatggcagtggcatcaaattctgaacttgagaaggtggtgtctgatgccactgtgaaagaaagcacaaaacaatttcaagacacttcaaggaatgtccaggctgaaacgagttattcaaagaaagcaccaactactataagaaggaatgcaggtgtcaagaggcaccggagcgctgatatcgaggctgaagggtcagttatcaacagtgctaagaaagttgttcctgaatcctggcctgccaaagggtcagttatcaacagtgctaagaaagttgttcctgaatcctggcctgccaaagtgattcatggtgagcatgctgacccagcctctaaaaatggctacagcacatcatgtgcagctgaactcaaaacaaatcgtccaaagaaagcattgatctgtagagtgacaaatactgttgcaaagaggacacggggtgcttgcgccaagaaagatgatgcacgggtaagttctagtttggagttcagtaaagtgacgtctcaagaaaattttgagataatctctcccaaaaaacttgacactgcaaatgctgatgaacaacgaagaaattcacctaagaaaatacagaacaccagagtaaggaatagagccacgaagaggtcatggaaatctgacaccaacatgagcaatgatacagtaatggacaaagctgagacagtggctgctggtgcattgtctgatgacttgcttcccacagacaatgttgaagactggcctaaaaagctttccagtcatggaagtgttagtgactgtgaaacactttctccaaaaaccatatcaaaggccagaattaggaatgcagcttccaacaggaaaataagaactgtagaccacaagtccggcgacaagtttggcaaaattggtagtgccgttaagtctgaaacaaaagctttttcatcaaacagaaccgaagggatttcatgcaatatcagcaaagtaattgctgatccagactccgagaagtccaacaaggatgtggtaagagaggtgtcggggctgttttgccaagattcttgcacgatagacaagcaaggatcatacaattctaagttgagaagcagcacaaggaacaaagctccgactccagatcatgaaaaggagaacagactaggctctagtgatctcaactctaaaccaaacagaactggcagtctgcgttccaaatctgatgcaaaatcgatcaagaaaaacacgcgtgtgctcagtaagcaccaaaggggaaatagaagtgaaccttgcaccttgatcacgagcaaacctgcattgtttatcttaagtggaaatagtgagcagagaaggggttatcgctcgatacttagacggctgaaggggcgagtttgtagggattcacatcactggtcataccaagcaacgcatttcatcgctccagaccctctgaggagaaccgagaagttctttgcagcggctgcagctggcaggtggatactgaagagagagtacttgaccgcgtgcattgaggccggcaagttcgtggacgaagaaccgtttgaatggttcggcacaggcttcaacgatggacgaacaatcagtttcgacgctcccaggaaatggcgaaacataaggcagcagatgggccatggcgccttctacggaatgcagatcgttgcctacggacagttcatattaccaactctggacacagtaaagcgtgcagtaaaggccggcgatggcgccgttttagcaacatcgccgccatacacccggttcctagactctggagtcgacttcgccgtggtatcagagagcatatcacgaacagacgcgtgggtccaggaattcatcagccacggcattccctgtgtcagcgccgattacctggtcgagtacgtgtgcaagccgggccagcccctggaccggcacgttctcttcgagacgaactgcgtggccagcaagtccctggagaaactcacgaagaagcaggtagagatggcaacggcggagaagtcggaaccgtcggaagacgacgatccggaggacctgagctgctcggcgtgcggccgcagggaccggggagacgtgatgctgatctgcggcgacgaggccggcgaggccggctgcgggatcggcatgcacatcgactgctgcgaccctcccctggacgccgtccccgacgacgactggatgtgccccaggtgcgccgtgccggagcccgagaccgagacgaagcatgctagaggcaccgaacgcaggggcagagggtccaggcgaaggtgatctttctgtacgctgtgtggtggtctttccatggtgtgtggattacacgcgcttacttaattgaacaaaaataaatgtactacacgaatagttggaggcattgtatgtttttagaaagaaaaaccttgtagaatgccgcacgcttctgctgtccgttctcgctacctccagcagcttactcccaatatgtacacgatctgttggccctaagat

SEQ ID NO: 86921 - DNA, 891 bp, Zea Mays
atggcgcacggcctcggccgggaggccagcgtccagcgcggccatggcagccgcgcggcgccggagcaggagcttcacgtgcgccaggagctgggacacagcctccgactccgtcgccgggattatgaacgcccaaccggagctggatgtcttgccggacgggacgcagggagccgcggcggtcgcggaggacgacgacgacgacgagaagctgtcgtccgaccagcacacgctctcgcggcggaacgccgccgaagcgaggcggcggccggtctgcagcagcaccatagcgtcctcgatgaggccgaggtggaagcaagcttggccgaggaccaagtacctccactgggtatcggtgttcgggttcttggagaggccggcaaggacgcggcgcttgagctcggagatgtcgaagcagcggaaggagcggacggggcgggcgtcaggttccgcgtcgtcggagcggtggcggtcgggcgagaggagcttggcgcgggagatcgtgccgagatcaccggagccagtggacaagagggacgccgacgaggacgaggaggtgtcctcgccagagcacgacttgccgcagctggggatgtaatcgcggagcatctccgcgacctccctgtagcgacgcagcgcgaggagcgcgcgcgcccgcagctccagggcggcctccatccgcggcgacagctccagcgccgcgtcgaccaggccgagcgccgccaccgcgtcaccgccgccacactctggcgccgccgcaagaatcttcctcgcctcacgcaggtacttgtcggtcacctggcgaaaacggaaccgggaaacatcagattttccgcagcgaaggcaacattcttccctctaaacagagccggattgaccactctgggatga

SEQ ID NO: 86922 - DNA, 2064 bp, Zea Mays
atggacctcctcgacgcgaggcaccgccacacgccggattcgagctcctccccacatgccgcctccgacatgggtctcccgctcgccggggctgcctaccagccctacgtctctgagctcctctccttctccatcgagcgcctccacaaggagccggagcttctgagggtcgacgcggagcgagtgcggcggcagatgcaggaggtggcggtggagaactacggcgccttcatcgccgcctccgaggcgctctccttcgtccgcgcgcagctcgagagcttcgatggccacctcgaggccatggcactgaaccaactatgcagtcattttgaagcctatagagatatgcccaaaataacagagctgagagagaaattcaagaacatcaagaaaaatcccttagttgaattatttgtctcccgcggagtgatgatgggtaatttgtatctggtctatactgcccagctggtagttatctcattgcataaatttatgagtgcaagcattagcagctctattgagtggagctccattgtcctcctcgtatggattatgtccactcagttaggatatactcttgcaggaagtagacctagcagcctatccaattacagctacaagagccctatactgaagaaggctaggatggagagtgggtgtttctttagtagcttgaacttggttacagctgtagcaaatctgatgggcaccaagtttgacttcttggcctactcgtcgacgctcaagcatttggtacttggtcaggtctacttattatacggttctttcttgttcaagtatccttgtcttcatggtggcaacatgattattctggtcaccatggaaaactatactctttacatatttggatacggacagacaagcagagaaacaccagttggtcaagatgttagctggtttccagctcgtgcgcaggagttttgtagtgtgggtgatgatgcttgtcttattctgtgggatgctcgaactggcactgccccagctgttaaggttgagaaagctcatagtggagatgttcattgtgttgattggaatccccttgatgttaactatatcttaactgggtatgatggcattaaggctcaattcagcataatcgttgaaacaaatttgatctcgaccagttccttatacgttcaagtaatgaatgtttcaattgatatttcaggtctgccgataactctgtccgaatgtgggatcgtcggaatctgggttcaggaggagctggttctccaattcacaaatttgaaggccataaagctgttgttctttgtgttcagacatgtcaggataatatttttgctgttattttctctttatgtggatgtggctgctttctatgctgtttttttttacctttttttggccataattctctcttttagatttcagtggtcacctgacagagcatctgtttttggaagttctgcagaagatggtttcttaaacgtgtgggatcatgagaaggtggggaagaagaaaaattctaatgtcccagccgggcttttctttcagcatgctggtcatagccacatgaaaggatcatggctttggatcttcctcacggtggacatctttctcatggttaccaggtcatttgcctttgcagcgtgggcgcacactagctgttcgccgaaactcctgtggagctttcaagtctgtcattcccttggaggaggcactggatctggaatgggcatgcttctcatttcaaagatcggagaggagtaccctgatcggatgatgctgacattttctgtctttccctcgcccgaggtgtcagacactgttgttgagccatacaatacaaccatgtctgtccatcggctggttgagaacgctgatgaatgcatggttcttgacaacgaagcactttatgacatttgcttccgaactctgaagctgacgacccctagctcctctgccatgttccgtggcaagatgagcactaaggaggttgatgagcaaatgattaatgtccagaacaagaactcgtcctactttgtggagtggatacccaacaacgtcaagtccagcttatga

SEQ ID NO: 86923 - DNA, 1073 bp, Zea Mays
accgcactccgcacggacacgtgctggcaaagcatgcgtacgtgtcctctccagttcttccccaggaggccaaggacccagtagaacgccgatctgttgtatacggagttacggactggcgccgccgcttagtcaccacccaccaaacttcacggcttcggctatcttcaagagacaagagtggagggcgaagagcagagctgggggggagatgaacagcggcgtggacacgcaggcgcgggcgctcgcggacgaggtgcgcggtagtttagagacgaagaactggatgctggacctcggtcacccgctcctgaaccgcgtcgccgagagcttcgccaaggccgcggggatcggcgcagtgcaggcggtcgccagggaatcgtacttcatggcgactgaaggcgagggaggatctgtgtccggcgcgaccggcgcaaggaaacgctcgttcccggagctcaatgggacgaacagtagcagcatcaagtcggcagaggccatggtgaaaagcgtgagcaaagagtcgttacagtgggggctcgcggctggggtgcactccggcctcacctacggcctcgcgggggtgcgcgggacgcacgactggaggaacagcgccgtggctggcgccatcacgggcgccgcggtcgcgctcacgtcggagcacgcgtcgcacgagcaggtcgtgcagtgcgccatcaccggcgccgcgctctccacggccgccaacgtgctctccggcatattctgagccgccggccgtgccgtgccgctcgatttccgaggattggctgatagttctgtcacccaatcgttcgggtaccgtcgctcttacgcttcagtacgataacttgggagcgttgcattcatgcattcacttgcattgtcattacaacttatgccctactttactgttagccgtataacggttttactataatttacacgctgcttagtcatatctcctggtgggccgcgtaatcaccggggcattctattgactttcaacatgatgatggggaaattatctgtgacatacccctataaacttttaacatgatgggcaaattatctgt

SEQ ID NO: 86924 - DNA, 633 bp, Zea Mays
tttctctttttcttggctacacaagctaacaacaagtgagcaactattttataataggtatgattagatatacaagagcatacaagagcaacaaatactcactagcataagtatatgaacaagtaaatacaagctagtgaggaaagttgcaaaccaacagggagatgatgacacttgacacaatgattttttcccgtggtgtcgatgacttgccagtcacccctagtccacgttgaggtagattcaaagcacccaaccgctcctctatcaagtctccacttgatctcttgagccgaattggtcaatgaatcctcaaacctcgattccactagagttgcttttcaccgctccggtgaggcaagcacaacgcctctcacaatcaccaccgcggcctcttcacaatctccgttgaagagctcacggggaaccaccaccaagccgtctaggaggcggcaatctccaagagtaacaagccaacgacctcacttgatgatatccctagtgcctcaaagatcaacaacttgatgcaatgcactagatggctctcaaactcactagaatgcaatcccaaccaatatgagtgagagagagggagaggaaaggctccaatatgctttccaaatggcctccttc

SEQ ID NO: 86925 - DNA, 917 bp, Zea Mays
gctccgtggtgccatactgccatgtcgctcacggaggtcagcctccacttctgctacctccactccctctccatcgtgctcctatacttcctctacgtgatctcctgatcgcctcggccgcctcccgccaagctccgatcgaacaaggctttggtttgattcgatcagagccgaagcactagtattaattactcgatgcttgctcctcttcgttcttccatgatcttgtcgtcccgttcttctcccggccctctcctgctttgctgctaagtctcatacgtgcctctcctagcgcgtactcccacacccgatcgatcattcgactaggagcagtgcgcggcagtgttcgaggaagcaggtaagtgtttcccttctcaggtagtgggatggttccactggctggcgcccagggagcgcgccgcgccgcggtggtcatcacggaggaggagcggcggcgcaaccgcatgacctccaacaggctgtcggcgcgcaagtcccgcatgaagcggcagcggcacgtggacgacctggccgcggaggcggagcgcctgcggcgcgagaacgaggcgatgcgcgctggcgtcggcgacgccgtgctgcggagccgcgcgctcgagcaggagaaccgggtgctcgccgcgcacgcgcgccagctgtgcgccgcgctcctgctgcgcaactcccagctcagcctgctcggcgacgtcgccggcgtaccgctcgacgtgccgggcgtgcccgaccatctcgtgcagctctacggcggcgtgcaggtgccagtcatgccgctctcgccgtcagtcatgccgctctcgccgtcgccgccgccgcccctgcatctgcaattgccgctggagatccagctgatgttgctccagcccgacgtcatggacgccgtcggtatgctcgagctctga

SEQ ID NO: 86926 - DNA, 1283 bp, Zea Mays
ggcggcagcgaagagaacggtgcgaccatttctcttctcttctcttccctggacttgtctctctctttattcctccctcacttccggccttccccttttcctccggtcgacgcgagggagcgggaggttggcctctaggcagggtggcgggcgaagatgttggacatacagaagcggcgcgtgcggctgctgctcttcatcacggccgtcctcgcgctcagcatcaccgctgagaagttcagggaacttgttggaaaggaggctgcatcaaagagtggtcaattcacattcatgaactgctttgacatgggctctggcagccttgcgtgcactgcaaaggagggtgtcaagttgtacgtcaacaacatccgaagtgcacacttggaaatggtgcggcaacgagccatggagaaagctttagctgatgctgtgacggaaggcctaacacctagtgaagcagccaaacaagctcagaagattagtgcaaaagcgactaaacttgctgctcgtcaagccaaaaggatattgggaccaataatttcttgtggttgggacttcttcgaagcaatgtactttggtggaagcatgacggaaggttttctccggggcactggcaccttgtttggaacttatatgggtggtttccatggtgaggagcgctttgggaagctgggatatcttgcaggaagccatctaggaagctggggtggaggaagaattggattgatgatttatgatatcataagcggcctgaaatttatgttccagtctatccaacctgagtatgaatcatcttcatatgctgaagatggtccagaatacgcagaaagttacacaaaccaagaggactcaacatactatgaaacatcagaggaaaagcaggaagaatcaaaatggtttggtttgttctgaaactgcgaaccgaattgttctgtcttgtacttaggggcgaagctaggtagtagctggagtgttgcaccccctgaaaatgtgaaaacagtgctttccactgaaatttcaccatatatgtatccacaaggcaagtgtactcactaatttgctctagcttcgccacagttatactggagcaggggaacagttagctgttttattatacctttctgaatgtttagcttcattttgtatgcttacataggttaggtatgattcttctctgtaattcttgttttggctactgtgtacataaaacatatggatcaactctggagattgggcaggcagaatgcaccataaataacagcaacagtgaacacttacggaaa

SEQ ID NO: 86927 - DNA, 3097 bp, Zea Mays
ccatgcaggtctttcatctggggatatgggctaccgccttcctccaaaagaaatacaggacattgttgatgcaccaccacttcctgtcttgtcattctctccaaacaaagataaaattctgtttctgaagcgtcgagcactgccaccactatcagacattgcaaagcctgaggagaagcttgctggtctaaggattgatggaaattctaatactaggagccgaatgtctttctacactggaataagtatccataagctgttagacgatgggactttgggcccagagaaagaggtgcatggatatccagtaggtgcaaggattaattttgtcacctggtcacaagacggccgtcatatatccttcagtattcgagtcgatgaggaagacagcaaaagtggaaagctgagagtgtggattgctgatgtggagtctggagaagcaaggccactttttaaatcgcctgaaatatacctaaatgctatttttgacagctttgtatgggttaatgattgtacactgctagtctgcactattcctgcgacacgtggagatccaccacataagccatcagttccatctggcccgaaaattcaatctaatgagtcaaagaatgtagtccaagcgagaactttccaagatcttctgaaagatgaatatgatgcaaaactatttgattactatgcaacctcacagcttgtgttggcctctttggatggaacagtgaagccaattggccctccagctatatatacatctgttgatccatcaccggatgataaatacataatgctttcttctatccaccgcccatattcctacattgtaccttgtgggaggtttccaaagaaagttgagttgtggactgtagatggaaagtttattagggaactttgtgatttgcccctggctgaggacattccaattacgatgagcagtgtacgcaagggtaagcgctcaattaattggaggccagacaaaccttcgatgctgtactgggtggagacacaagatggtggagatgcaaaagtagaagtctcccctcgtgacatagtttacatggaaaatgctgagcctataaatggtgaacacccagagattctgcataaacttgaccttcgctatgctggcacctcttggtgtgatgaatctcttgctttagtgtatgaatcttggtttaaaactcggaaaatcagaacatgggtgctctctcctgataaaaaagatgtcagcccacgcgttttattcgaccggtcttcagaagatgtatactctgaccctggctcaccaatgatgcgaagaactgtgatgggaacatatgtcatcgcaaagatcaagaaagaagacggaaatatttatgtcttgttgaatgggatgggtgccacaccagaaggaaatattccattcctcgatttgtttgatataaatactgggagtaaagagcgtatatgggagagcgacagggaaaagtactatgaaactgttgttgcactgatgtcagacaaaactgacggggaactgctccttgatcagttaaagatacttacgtcgaaagaatcaaaaacagaaaacacacaatattacttgcagacttggccagaaaagaatcaagttaagataacaaatttcccccacccatatcctcagcttgcttcattgtataaggaaatgataagataccagcgaaaggatggagttcaacttacagcaaacttatacctgcccccagggtatgattcatcaaaagatggacctttgccatgtctagtttggtcctaccctggtgaatttaaaagcaaagatgctgctggtcaagttcgtggttcccctaatgaatttccagggattggtgctacatctcctcttctttggttagctagagggtttgtgattctgtctggtccgacaatcccaattatcggtgaaggcgatgaagaggccaatgacagatatgtggaacaactagtaacgagtgcagaggctgcagttgaggaagttgtcaaaagaggggtggctcaccctgataaaattgctgtcggtggtcattcatatggtgcattcatgacagctaatctgctggctcacgctcctcatcttttctgctgtggaatcgctcgctctggagcttacaacaggactctaactccatttggttttcagaacgaggatagaacactctgggaggcaacaaacacatatgtcgagatgagccctttcatgtctgcaaacaaaatcaagaaaccaattttacttatccatggagagcaggacaacaattctgggacattgacaatgcagtcagaccgattcttcaatgccttgaaaggtcatggtgcactgtctcgtttggtaatacttccttttgagagccatgggtactctgccagggagagtatcatgcacgtcctctgggagaccgataggtggttgcagaactactgtgtaaatggtactagcaaggttgactcagtgtcagaggctgacagtaaaaacaaaacattgtcagctagtggtggcagtgcagcccgtgaaggtctaaaccctgaggaactctcatcattaccaagatcgcttctgtgatcaacttcagttggtgttcatgaaacattccctggacagcaagcctaaagggaaaaaatagtgtatcgttgcacttctaccttaaccgactaccagggatgccttgattggcctcatatttgtttcgattgctgcaggtgatcatgttactggcatgcaggagccccctacccccccccccccccccacccccaccccacaaatataagaaaggcctagtctctggtggccactgcactcagatatatttgggtcaatttgtattctattggtaatggccaatggaagtcattcttgcgattaatatcatgtacagaaatatagccttttgcagttttgatcccaactcttgcacttggcagcgaactgatacgttggttttctttgacagcaatctaaaataaaataataactaatgagattatcatatgctccaatgtctcgcatcgtcacattttacctgttaccattatttactgcagctgttgtactgacattcgttgcccatttgagaggcgc

SEQ ID NO: 86928 - DNA, 833 bp, Zea Mays
cgaccacaaccctaaccctatccctttcgacggttccacttgcaccctaccccaaccccatccatcgtaacccgccgccgccgcgatagatgccaatcctgccgccgcatccaaccccgcccgacgtggacgccagagaggtgcacgactgccgcaactcgtggcactcagtgtggtggtcgtccaagctcgtcctctagctcagcctcaacgccttcagcttcctcgtgccgtcgccgctcgcctagatctacgatgcaatggtgagtggctctgtgaggaggcacacaagctcacattgacggcagcaagaacggtgtcgcctccttggtggcagccaccgcgtccacgacgacgacggatgctggcgtcgcctgcttcgacctgttgcctctcgtcgtcctctcccctggctgtatttgccccgtccccggtatatccgccgccgccgagcaggccgagctctgaagcactgtcgtccgcggccatcaccaccccacccagggtgggctgaacaagttccatggccagcatgcgctcagggagcgagcgaggaagctcgaccagggcatcctgattataaggtttctttcttctgaaacattgctttgttttcttgtttgatcatacacaaggatgttatgttagttatgtagaccagtggacgatccaggattcaatacctgactacctgtggaaccaagcacattagttttaaatgaattaacacaaatattacatgattagcatatatataattgtgtattctgtgaaccccctaggctttacatggatccactgcgacctctctgtgtatgtccatgtgtttgttt

SEQ ID NO: 86929 - DNA, 799 bp, Zea Mays
cgaccacaaccctaaccctatccctttcgacggttccacttgcaccctaccccaaccccatccatcgtaacccgccgccgccgcgatagatgccaatcctgccgccgcatccaaccccgcccgacgtggacgccagagaggtgcacgactgccgcaactcgtggcactcagtgtggtggtcgtccaagctcgtcctctagctcagcctcaacgccttcagcttcctcgtgccgtcgccgctcgcctagatctacgatgcaatggtgagtggctctgtgaggaggcacacaagctcacattgacggcagcaagaacggtgtcgcctccttggtggcagccaccgcgtccacgacgacgacggatgctggcgtcgcctgcttcgacctgttgcctctcgtcgtcctctcccctggctgtatttgccccgtccccggtatatccgccgccgccgagcaggccgagctctgaagcactgtcgtccgcggccatcaccaccccacccagggtgggctgaacaagttccatggccagcatgcgctcagggagcgagcgaggaagctcgaccagggcatcctgattataagaatgcatatggtctgcaaatggagaatttgctattgctcaatgaagtggcggcatgctccaaaatcctagtgagacctctgcacctttggtcagatcccaggcctaggatgtccatgttgtgtgtatgtaccaacagctaaaatgtaaacacgacattatcatagttgagtacatgaataattatctattatatcttattgcaaaatttgaaaca

SEQ ID NO: 86930 - DNA, 933 bp, Zea Mays
cgaccacaaccctaaccctatccctttcgacggttccacttgcaccctaccccaaccccatccatcgtaacccgccgccgccgcgatagatgccaatcctgccgccgcatccaaccccgcccgacgtggacgccagagaggtgcacgactgccgcaactcgtggcactcagtgtggtggtcgtccaagctcgtcctctagctcagcctcaacgccttcagcttcctcgtgccgtcgccgctcgcctagatctacgatgcaatggtgagtggctctgtgaggaggcacacaagctcacattgacggcagcaagaacggtgtcgcctccttggtggcagccaccgcgtccacgacgacgacggatgctggcgtcgcctgcttcgacctgttgcctctcgtcgtcctctcccctggctgtatttgccccgtccccggtatatccgccgccgccgagcaggccgagctctgaagcactgtcgtccgcggccatcaccaccccacccaggaggtgaggaaaggggcaggaagcatgcatacccgatcgacggcctcttcgttttggtgtattaattatttgttgtggtagctaattcgttctgccgatgctgatgtttgtgcttgaccagggtgggctgaacaagttccatggccagcatgcgctcagggagcgagcgaggaagctcgaccagggcatcctgattataagaatgcatatggtctgcaaatggagaatttgctattgctcaatgaagtggcggcatgctccaaaatcctagtgagacctctgcacctttggtcagatcccaggcctaggatgtccatgttgtgtgtatgtaccaacagctaaaatgtaaacacgacattatcatagttgagtacatgaataattatctattatatcttattgcaaaatttgaaacagttcttctgtaga

SEQ ID NO: 86931 - DNA, 2452 bp, Zea Mays
aatgtacacatcagaacgaggcatgaaactggccttggccgtggacgcgtgaagcgcgccatgcgcgtccgacgtggacgtaatgagctactacttcagagccacatgtgtccacgcttcatcagaaagaaaacacctgcacacgtcaactggagctgccatcagtttagtttacatgctgcatcgtctgaaggccagatcagtgatgagcgaaacattctatatataccctcagtccctgttccagttctcgtcaagctagcagcacgagttgtcgaacacttgcctgctcttgagctcaagctatcatcagctgcgtcttgtgcacagcaacagcttcccaaccgcgcgcaactgtaccagcgaaactaccaactgccatatggaggcccagaacgtggaggttgctgccctggtgaagaagatcgcggacctccacgccgacatcaccaagctgccgtcgctgagcccgtcccccgacgtcaacgcgctattcaccagcctcgtcatggcctgcgtcccgccgagcactgtcgacgtgaccaagctcagcccggactcccagaggatgcgggaggagctcattcgcctctgctccgacgccgagggccacctcgaggcgcactacgccgacatgctggccgccttcgacaacccgctcgaccatctcggccgcttcccatactttagcaactacatcaacctgagcaagctagagtacgacctcctggtccgctacatcccgggtctcgcgccttcccgcgtcgccttcgtcgggtcaggccccttgccgttcagctcgctcgtgctcgccgcccgccacctgcccaacacgacattcgacaactacgaccggtgcgccgccgccaacgaccgtgcgcggaagctggtccgcgcggacaaggacctgaacgcgcgcatgtccttccacacggtggacgtagccaacctgacagatgacctcggcaagtacgacgtcgtcttccttgccgcgctcgtcggcatggcggccgaggacaaggccaaggtggtcgcgcaccttggcaggcacatggcggacggagcggctctcgtcgtgcggagcgcgcacggggctcgcgggttcctatacccgatcgtggatcccgaggacatccgtcgtggcgggtttgacgttctgacggtgtaccacccggacgatgaggtgatcaactctgtcatcatcgcgcgtaagatcgacgcccatacaaacacggaggtttctgctctggtgcagaagataactggcctccacgccgctatcaacaagctgccatcgctgagcccatcccccgacgtcgacgcgctgttcaccgagctcgtcatggcctgcgtcccaccgagccccgtcgacgtgaccaagctcggcacggacgcgcagaggatgcgggaggagctcatccgcctctgctgcgacgccgagggccacctcgaggcgcactatgccgacatgctcgccgccttcgacaacccgcttgaccatctcggtcgcttcccttacttcaacaactacgtcaacctgagcaagttggagtacgacctcctggtccgctatgtcacgggcatcgcaccttccagaatcgccttcgtcgggtccgaccccctgccgttcagctcgctcgtgctcgcctcccgccacctgccgaacgtgatgttcgacaactacgaccggtgcgccgctgccaacgaccgtgcacgaaagctggtccgcgcggacgagggcctgcgcaagcaaatgttcttccacaccgccgacgtcgccaacctcacggacgagctccgcaagtacgacgtggtcttcctggccgcgctcgtcggcatggcggccgaggacaaggccaaggtggttgcgcaccttggcagacacatggtggatggagcggctctcgtcgtgcggagcgcccacggggctcgagggttcctgtacccgatcgtcgatcctgaggacatccgtcgcggtggcttcgacgtgcttgccgtgtaccacccggacgacgaagtcattaactccgtcatcgtcgcgcgcaagatcaacgcccacgtgaaggggcttcaggatggacacgcgcatgcgcgcggtgcggtgccgatagtgagcccgccatgcaagtgctgcaagatggtggcgaacacgctccaccaaaagagggaggagatggcaacggcgtaggtgtccatctgatgcatggaacttttgaggacccgcgccacgtggtaacaataattacgaatcgctgtttcaatctctcgtgtaactgttgttgtcatgccttgtgtgtaagtttttaataatgacgtgattttcctatgtgatgatatatgcaagttttgccaccactttttatgtgcctcatgtgacagacatcgacgagaacagtgtgcacaatgcacctaaaagaatactactttaggaagggtcaatctaataatttat

SEQ ID NO: 86932 - DNA, 273 bp, Zea Mays
ctgaggttggggcgacgaggcactccgcccacgcgttctgcggcacggcagtgggaggcgtgttccggcgacaaattcctcaatgcccgaccaccatccacctcgatgtccatagctccccactttggtgccctccagggaacaattctgcgcgcacaccgagggcccgacgccgctagtcgtaattataccgtagcggccgcttctctaagctctctctctctctctctgcttcagctatggcaccagggtgacatgcgcatggctctaagg

SEQ ID NO: 86933 - DNA, 1501 bp, Zea Mays
tctcactcagcttctcgcccgtaaaccaaattcgtttcatttggtcaacaaacaaggaagcccttagccctcccaccgtgtccatctccactcgccagtctcagcccgccggccaccccccacatctcgccatgtgcggtgggtgccgccgccgccaatgtggccccgacgggacgcccgacggcggccgccggggctgcggaaccgtgatcgccgtgctggccctggcggccgccgcggcggtcgcgttcctggagagcgcggccggcgggatctcctacgcgggggacgggtggctgcacgagtgcgccaagtgggacgccgagggcggcaggttcctggcgtccaccttcttcggcggcggcgtggcggaggtgcgcgccggcgagggcgaggccgaggagcgggtggtcgtggccgaccccgtcgcggccggccgggtcgcgctggggctcgcggtcgacgcgcccaggcggcgcctgctcctggtctacgccgaccggccgccgcgcctcggctacgccgcgctgggcgcctacgacctcggatcgtggcgccgtctcttcctcacgcgcctcgacgtgccaggcgagtctacatttcccgacgacgtcgccgccgacgaggaaggcaacgcctacgtgaccgacgccaagggaagcaagatctggaaggtcgggccggacggcgcgctgctcggcgtcatcaagaacgccacgttcgtgcagcggccgggcctgcgccacaacctcgtcggcctcaatggcattgtctaccaccctaacggctacctcctcgtcgtccacacctccggcggtgacttcttcaaggtcgacccgaagacagagaccgtgcgcgtcgtcaaggtgcgggggtcgctgaggcgaggggacggccttgagctgctctccccgacgaggctggttgtcgccggcctgccgaaccggctggtggagagctccgacgactgggagacggcgagtgtcaccgggcagtacgtcgggccggtccaccggatcgggtcgtcggctacggtgaaggacggggacgtgtacgtcaaccatattgtcgggttcgggctcggcaggaagaagacgcacgtccttgcaagggcggtgttctcgccgttggcagtgacgagttgacgggccggcgcctccgcgcgcgctccgtcgtgggatcaacagttgctttttgctaagcggcagttcatacttatggactagaactaataattagttgctaaaattagttgagatatttaaacaatctaggtaataattcaactactagctacttttcgcaaattagctatttgttaggtaactaattcgactaacaattttagtcaattaattattagatctagttcattcaaacaccccatagatgctcgtagtacttttgttcctacacttgacacgttgcccaaagatacaagattgtattgtttggtacatgcatggcggaggacccaataaaataccaatagtaaaataaa

SEQ ID NO: 86934 - DNA, 1408 bp, Zea Mays
gttcggctgtgggccagtggctgtcgccactcgctacctcacgcgcttccgctacctctcgttgtgtctcgtcctctctctcttctattccattcccaacttggctgcccaacccttgcgtcggtagacggcggccgcggcgaggatagagggttccctgaggaggcagtgatggagaccatggctaagtacaaccgaagcaacccggcagtgaagcggatcctgcaggaggttaaggagatgcagtccaacccctcacccgacttcatggccctccccctcgaggaagacatcttcgagtggcaatttgctatccttggcccgagagacagcgagtttgagggtggaatctatcatggcaggatccagcttccctcggattatccattcaagccgccgtccttcatgctactcacgccaagtggacgctttgagattcagaagaagatttgtttgagcatatccaattatcaccctgagcactggcagccatcatggagtgtgcgcacagcgttggtggccttgattgcattcatgccaaccaaccctggtggggcattgggctcattggattacaaaaaggaagatagacgggcacttggtataaaatcacgtgaagcaccgccaaaatttgggtccccagaacgacaaaaactaattgatgaggtaagtaatttctagtccaacctcaggctcaaaaaatgtttaccatttctgtatcttttgacaatggactgtttcaaccacagatccatgagcaaatgctcagtaaggctcctcctgtcccccaaacgctaccaaatgtgccaaacgaggagtctaacgaattacccgcatctgacccttctggcgagcatgcagacaaggtagatgaaggtgacaacacatctggttctgtatcagactcgtctagtggccttcctgtgcctgaatctgaatcgggggttacagaaaacactggtgaaacctcagcagttgaggttgccaaccatcatgtgcctgaagcaagccacagagagaacattccaagagttagttcgtctcaccagaatcctgctgttgcgatccagaagccaaatcatgacaggctgttgaccttggccgcatttgggctgactcttgctattatggcacttgtgatcaagaaattcttaaaaatcaatggcttgggcggtttcattgagggcaagttctgagtagggattgtgcataagttggatgtaagagatgactcattcctcatactaatatgctataagctatataaccccgtaagatttgtaaatgactgtttagttattatagatgaaatcaaaatggtgcggtactattaataccccattgtatctagtacacctgatggaaagtgccgagttttgaggcttctgatctgatgtatatgtttgct

SEQ ID NO: 86935 - DNA, 1329 bp, Zea Mays
gttcggctgtgggccagtggctgtcgccactcgctacctcacgcgcttccgctacctctcgttgtgtctcgtcctctctctcttctattccattcccaacttggctgcccaacccttgcgtcggtagacggcggccgcggcgaggatagagggttccctgaggaggcagtgatggagaccatggctaagtacaaccgaagcaacccggcagtgaagcggatcctgcaggaggttaaggagatgcagtccaacccctcacccgacttcatggccctccccctcgaggaagacatcttcgagtggcaatttgctatccttggcccgagagacagcgagtttgagggtggaatctatcatggcaggatccagcttccctcggattatccattcaagccgccgtccttcatgctactcacgccaagtggacgctttgagattcagaagaagatttgtttgagcatatccaattatcaccctgagcactggcagccatcatggagtgtgcgcacagcgttggtggccttgattgcattcatgccaaccaaccctggtggggcattgggctcattggattacaaaaaggaagatagacgggcacttggtataaaatcacgtgaagcaccgccaaaatttgggtccccagaacgacaaaaactaattgatgagatccatgagcaaatgctcagtaaggctcctcctgtcccccaaacgctaccaaatgtgccaaacgaggagtctaacgaattacccgcatctgacccttctggcgagcatgcagacaaggtagatgaaggtgacaacacatctggttctgtatcagactcgtctagtggccttcctgtgcctgaatctgaatcgggggttacagaaaacactggtgaaacctcagcagttgaggttgccaaccatcatgtgcctgaagcaagccacagagagaacattccaagagttagttcgtctcaccagaatcctgctgttgcgatccagaagccaaatcatgacaggctgttgaccttggccgcatttgggctgactcttgctattatggcacttgtgatcaagaaattcttaaaaatcaatggcttgggcggtttcattgagggcaagttctgagtagggattgtgcataagttggatgtaagagatgactcattcctcatactaatatgctataagctatataaccccgtaagatttgtaaatgactgtttagttattatagatgaaatcaaaatggtgcggtactattaataccccattgtatctagtacacctgatggaaagtgccgagttttgaggcttctgatctgatgtatatgtttgctacaa

SEQ ID NO: 86936 - DNA, 2975 bp, Zea Mays
gcaagccgagcggcgccaattctgcgctgccatcgtcttcctccgtcacacccggctcgcaaaccctagctcgccccggccccacctccggccccgttcgtcggtgctatgtcgaagcggccgaagctcgagggtttcagcatcccgcggcccacctcctacaacttcgagcgctcgcagtccgtgcagcggctctaccgtccgaccgatgacccagacctcgacgacatcgccttctccgacgacgccccctcagatgcccaagccagcaccgcggtagaaggaaaggccgagaatgaggaggagatggacccgctcgacgccttcatggccgagatccaggaggagatccgtgcgccgcccccgccgcccaagcccgaggcgcttcgccgcacggattccgacgatgacgaggatgaccccgtcgagagcttcctgcgggccaagaaggacgctggcctcacgctggccgccgacgtcatgcgcgctggttacgactccgatgaggaggtctacgccgctgccaaggccgtcgacgccggcatgatggaatacgactctgatgacaaccccatagtcatcgacaagaagaaaatagagcccataccagcactcgatcactcgaccattgagtatgacgccttcacaaaagatttctacgaggagaagccatcgatttcaggtatgagtgaccaagaggtaacagattatatgaaaagtttgtcaattcgtgtttctggttttgatgtgccgaggccaataaaaaactttgaggattgtgggtttcatgtacctctaatgaatgctattgccaaacaagcttatgaaaaaccaactacaattcagtgccaggctttacctattgtactttcagggagagatatcattggtattgcaaaaactggctctggtaaaactgcagcttttgtgctccctatgattgttcatattatggatcagcctgagcttgagaaagaagaaggtccaataggagtcatttgtgctccaacaagagaattggcacatcagatatatctcgaagctaagaagtttgcaaagccttacaaccttcgagttgctgctatatatggtggtgtttccaaatttgaccagtttaaagaactgaaagcaggttgtgaaatagtcattgcaactccagggagattaatagacttgctgaagatgaaggcattgaagatgttcagggcaacttatctggttcttgatgaagctgatcgaatgttcgatcttggatttgagccacaaatacgatccattgttggtcaaattagaccagatcgacaaactttacttttttctgcaacaatgccatacaaagtagagcgtttggcaagagaaatattaactgatcctattagagttacagttggtcaagttggcggtgctaatgaagacattaaacaagttgttaatgtactcccttctgatgttgagaaaatgccttggcttttggggaaattgcctggaatgattgatgatggagatgttcttgtatttgcatctaaaaaggctagagtggacgagatagagaaagagttgaatcagagaggattcagaattgctgcgcttcatggcgacaaggatcaagcttctcgtatggagaccctgcagaagttcaaatctgggacatttcatgttctggttgcaactgatgttgctgcacgaggtcttgacatcaaatcgattaaaacagttgtcaactttgatattgcaaaagagatggatatgcatattcaccgaattggaagaactggtcgtgctggcgataaagatggcactgcatatactctgattacacagaaggaggcacattttgctggtgaactggttcacagtttgattgctgctggccaggatgtacccaatgaactcatggatctggctatgaaggatggaagattcagagcaaaacgagactccaggaaaggtgggaagaaaggtggcaaaggaaaaggtggtgttggcggtgctgggcgcgggcgcggtgtgcgtggagttgattttggcctcggcataggttacaatgccgaatctggttcacaagtgcctgctgcaagatctgctgctgtaaattctctgaagacagggatgttgcaacgatttaagagcagctttgtctctggatcttcaaatacaccaagcagcagtgcaccttcctttgtaagaccagcactccgtggctttgtgtctggcggcaccattggaggagacacacggcctgcacaggcagcccccactttcatccctgcatcccggcctgcacagcctgcccccgcggtccctgcatcccagcctgcaggaaataacaacgaaaatgggaacccgaatccagaaagttcacgggatcagttcagggagagaaaacgaccatcaggttgggatcgctagtccctgctaactggtatgcccaattgtgattccttccccgctttgttatattgatgtagtctcttgggagacatcctataaaaaagcactgtagattacatgatgtcaggtaagtgttgttttagttagtttggcctttattctttatccttcaactactgttgtatctggccgttgtttcacatttttcatcagagcaaaatttaccatttgtattcgaagttggcaccgaggcctcctttggttcatagaaaaaacagaggaaaaacttagttcatgcttttagttcatagaaatggagtatgtgaatagtgtatgaagttttccagtgtagcactagtgtttgatgggatcctgagagatagggaaggccagagttgacatgaaaatgaagacatccagatagttgacatgaaaatgaagttctccagaggcatcatggatcctggtaagagaagtaggaaaagttgacgttgacatgagaagatgcaatataagcagacttgaaaagatgaaatatacaaaacattcttcaaagtcactatgtgacatctctatatgtgatt

SEQ ID NO: 86937 - DNA, 702 bp, Zea Mays
agttcccgccgtgcccacggctccacacgaattcacccgagcacctgacgcccacgagggccagacgattgcggtctcgcggaggcgcaccgtatcagttcatcacgcaagggaggagggctcacgcgctggtccgctgcccgctggtgatcagcgatgccgatgctcccggctgccgagcggccgcggctgacgctcgaggactacatcgtcttcttcaccacccgcagcggcggaggcctcaacctccaccacctcaaccacatcatctacatgcacgggttcgccaggctccaccgcgcgcccaagccggcgatggtggacgcgctccggtcggtggagctcatgcgcccgcgccgctccaccgtccccttcaacgccaccgcgccgccgccgggcgccgccccggtcgcgcccgccgtgctctcgcttgacgaggtcacgcgcgacatcgaggacatcggctggcgcgagtgccccgtcggctccctcctctccgtccgcgccgggatgcggtcgcccgccgccgaagcggccgaaacccccatccccctgccgatcctggccagggcctcctcgtccctgccgcccgctgcggccaagaggaagcgttcccggacgggcaaagcggaggccgcgatgcggaggcgcgtgctggagctgctcacgctcccgtccgtcgagacggttacctcggcctag

SEQ ID NO: 86938 - DNA, 4147 bp, Zea Mays
atggcgtcgggcagccgcgccacgcccacgcgctccccctcctccgcgcggcccgaggcgccgcgtcacgcgcaccaccaccaccactcccagtcgtcgggcgggagcacgtcccgcgcgggcgggggagccgcggccacggagtcggtctccaaggccgtcgcccagtacaccctagacgcgcgcctacacgcggtgttcgagcaatcgggcgcgtcgggccgcagcttcgactactcccaatcgctgcgcgcgccgcccacgccgtcctccgagcagcagatcgccgcctacctctcccgcatccagcgcggcggccacatccagcccttcggctgcacgctcgccgtcgccgacgactcctccttccgcctcctcgccttctccgagaactcccccgacctgctcgacctgtcgcctcaccactccgttccctcgctggactcctctgcgccgccccacgtttccctgggtgccgacgcgcgcctcctcttctccccctcgtccgcggtcctcctagagcgcgccttcgccgcgcgcgagatctcgctgctcaacccgatatggatccactccagggtctcctccaagccgttctacgccatcctccaccgcatcgacgtcggcgtcgtcatcgacctcgagcccgcccgcaccgaggaccccgctctctccatcgccggtgcagtccagtcccagaaactggcggtccgcgccatctcccgcctccaggcgctacccggcggggacgtcaagcttctctgcgacacagtcgtggagcatgttcgcgagctcacgggttatgaccgtgtcatggtgtacaggttccatgaagacgagcacggggaagttgtcgccgagagccggcgcgacaaccttgagccttacctcggattgcattatcccgccacagatatcccccaggcgtcgcgcttcctgttccggcagaaccgcgtgcgaatgattgccgattgccatgccaccccggtgagagttattcaagatcctgggctgtcgcagcctctgtgtttggtaggctccacgctacgcgctccacacgggtgtcatgcacagtacatggcgaacatggggtcaattgcgtcgcttgttatggcagtcatcattagcagtggcggtgacgatgagcaaacaggtcggggtggcatctcgtcggcaatgaagttgtgggggttagtggtgtgccaccatacatcaccacggtgtatcccttttccattgaggtatgcttgcgagtttctcatgcaggcatttgggttgcagctcaacatggagttgcagcttgcgcaccagctgtcagagaagcacattctgcgaactcagacgctattgtgtgacatgctactacgagattcaccaactggcatcgtcacgcagagccccagcatcatggaccttgtgaagtgcgacggggctgcactgtattatcatgggaaatactatccattgggtgtcactcccactgagtctcagattaaggatatcatcgagtggttgacggtgtttcatggggactcaacagggctcagcacagatagcctggctgatgcaggctaccttggtgctgctgcactaggggaggctgtgtgtggaatggcggtggcttatattacaccgagtgattacttgttttggtttcggtcacacacagctaaagagatcaaatggggtggcgcaaagcatcaccctgaggataaggatgatggtcagaggatgcacccacggtcgtcattcaaggcatttcttgaagtggttaaaagcagaagcctgccatgggagaatgcagaaatggacgcaatacattccttgcagctcatattgcgtgactccttcagggatgctgcagagggcaccaacaactcaaaagccattgtcaatggacaagttcagcttcgggagctagaattgcgggggataaatgagcttagttccgtagcaagagagatggttcggttgatagagacagcaacagtacccatatttgcagtagatactgatgggtgtataaatggttggaatgcaaagattgctgagttgacagggctttcagttgaggaggcaatgggcaaatctctggtaaatgatcttatcttcaaggaatctgaggcgacagttgaaaaactactctcacgagctttaagaggtgaggaagacaaaaatgtggagataaagttgaagacatttgggtcagagcaatataagggaccaatatttgttgttgtcaatgcttgttctagtagagattacacacaaaatattgtaggtgtctgttttgttggacaagatgtcacaggacaaaaggtggtcatggataaatttgttaacatacaaggggactacaaagctattgtacacaatcctaatcctctgataccaccaatttttgcatcagatgagaacacttcttgttcagaatggaatacagccatggaaaaacttacaggatggtcgagaggtgaagttgttggtaagtttcttattggagaggtgtttggaaattgttgtcgactcaagggcccagatgcattgacaaaattcatggttattattcacaacgctataggaggacaggattatgagaagttccctttttcattttttgacaagaatggaaagtatgtgcaggccttattgaccgccaatacaaggagcaaaatggatggtaaatccattggagccttttgtttcctgcagattgcaagcactgaaatacagcaagcctttgagattcagagacaacaagaaaagaagtgttacgcaaggatgaaagaattggcctatatttgccaggagataaagaatcctcttagtggcatccgatttaccaactctctgttgcagatgactgatttaaatgatgaccagaggcagttccttgaaactagctctgcttgtgagaaacagatgtccaagattgttaaggacgccagtctccaaagtatcgaggacggctctttggtgcttgagcaaagtgagttttctcttggagacgttatgaatgctgttgtcagccaagcaatgttattgttgagagagagggatttacaacttattcgggacatccctgatgaaatcaaggatgcgtcagcgtatggtgatcaatgtagaattcaacaagttttggctgacttcttgctaagcatggtgcggtctgctccatccgagaatggttgggtagaaatacaagtcagaccaaatgtaaaacagaattctgatggaacaaatacagaacttttcatattcaggtttgcctgccctggtgagggcctccctgctgacgtcgtccaggatatgttcagcaattcccaatggtcaacacaagaaggcgtaggactaagcacatgcaggaagatcctcaaattgatgggtggcgaggtccaatacatcagagagtcagagcggagtttcttcctcatcgtcctcgagcagccccaacctcgtccagcagctggtagagaaatcgtctgatatgttaagatccgtgctgaccccacctaactttctcggccgattacataacttagccccctgataagagggtgcctaatttacgagaagcctggaaacaaatcaaagctgccatggcaattcaatgactgaagtgttgttgatgaggctgttttcagtgcaccgctatccatggccatgctgtggtttcaagaccagagttggcggatagttacgtacacaggcggcaaatgtgtctcttagccgctgtttaagtgcaccgctgtaagtttgggtgtccatgtccatgctgtggtttcaagatcagagtccatggcggatagttatgtacacaagcgacaaacgtggttcttagcttaggttcatgaccagttccacgtagtacatatagcttatatgtatatatacaatctattttttactatgcataaggagttgtttcagcttacacggttgtatgttatagtcctttctaggtctactacatcctaatctagatctggttcctctggaatgttggcaccaccgctctgtattttgcggcgaaggtttgagtttggcctacctcggtttatttcattctcagaccttaatgtaaaagctttgacagttgacactgggtgtgtcctttgtagagaaagaaaaccttttcttttaaaaa

SEQ ID NO: 86939 - DNA, 2625 bp, Zea Mays
accatgtagaagggagagaattgttgtattgataggagatgaggtacatatatatatagggactcaaccttaaccctaatgggccgacagcccaacgttggtgacggcccacacacacagtctaacagtgtggactacttctcttgctcagtcgatatctaaaactgtgtaagatcagcaacatttgccaacatatactgtagctttatgttgcaaatatgaaggcactccatattgttgtacttcaaaagatgcattggtgttttagaaggctcagcatattctactgtagcactgtgcttaaagactcctacgggtttggaaacctctttttatttgaaaggaagtaccataccatcataatgtacagtgactggcatgcgtctggcttattatatacatcgttatggttgtaattatctaatggttgataatatgtctactaaaccaggaccaagccagaatttgatggtttccacagttctgagtagaatttggtgtcttcgttttttcaaggatagcatgaatattacacaagtacattgaataactactatatatattgaataaattatgttaaaaaagccaacttctgtaagaaaaacactgcatagtgaggggttttctgcttaccaaatacagcatactgattactaccaggactgtgaacctttgtgctttaaatgctatatcattctaaagggaatagcctaagtccaagcagctttggctaacatgcctctgcctgtagttttctatgaggagcttcataaattatttggagatgctgtatttcatttgcttgcatgggaactcaaatcacttgtggttgatttttatacacttgatcaggtctatctgtcttatacactcgttgtatctttgatggagtggctcctagcctttccttcatcctagtgcagattgatgatgaaagaagatcatgggaattagctggagcgaggggtctctcctacttggcagcacctcttcttgaggccccccccctcctttgatctttagtgggtttgtttgagtgttgtctgtatggatccttttatttatgcgtgttttggcctccatagggaggtctttctgtaccccaggtcttctttagaccttctacttcttaatatattctaaagcgcagttctcctgcgcttccgagaaaaaaaaagtgtctaaaggcatgttcaacagaatagttgcttctcatttggctaagtctaaacacaaacttactaagccatcacttggaatagctacttacacaatcttattgtattactgtcacattatttgcttgacctaatttgatttaggctgagtgcttagacagtagcattttatcacttttttgtaacctaagacataagtttgaatgcttctgttatttccacaattgattaactgaaaatttcttgatttgtctctctttatgtaacagctctttggtgcttgagcaaagtgagttttctcttggagacgttatgaatgctgttgtcagccaagcaatgttattgttgagagagagggatttacaacttattcgggacatccctgatgaaatcaaggatgcgtcagcgtatggtgatcaatgtagaattcaacaagttttggctgacttcttgctaagcatggtgcggtctgctccatccgagaatggttgggtagaaatacaagtcagaccaaatgtaaaacagaattctgatggaacaaatacagaacttttcatattcaggtttgcctgccctggtgagggcctccctgctgacgtcgtccaggatatgttcagcaattcccaatggtcaacacaagaaggcgtaggactaagcacatgcaggaagatcctcaaattgatgggtggcgaggtccaatacatcagagagtcagagcggagtttcttcctcatcgtcctcgagcagccccaacctcgtccagcagctggtagagaaatcgtctgatatgttaagatccgtgctgaccccacctaactttctcggccgattacataacttagccccctgataagagggtgcctaatttacgagaagcctggaaacaaatcaaagctgccatggcaattcaatgactgaagtgttgttgatgaggctgttttcagtgcaccgctatccatggccatgctgtggtttcaagaccagagttggcggatagttacgtacacaggcggcaaatgtgtctcttagccgctgtttaagtgcaccgctgtaagtttgggtgtccatgtccatgctgtggtttcaagatcagagtccatggcggatagttatgtacacaagcgacaaacgtggttcttagcttaggttcatgaccagttccacgtagtacatatagcttatatgtatatatacaatctattttttactatgcataaggagttgtttcagcttacacggttgtatgttatagtcctttctaggtctactacatcctaatctagatctggttcctctggaatgttggcaccaccgctctgtattttgcggcgaaggtttgagtttggcctacctcggtttatttcattctcagaccttaatgtaaaagctttgacagttgacactgggtgtgtcctttgtagagaaagaaaaccttttcttttaaaaa

SEQ ID NO: 86940 - DNA, 1367 bp, Zea Mays
tttttatacacttgatcaggtctatctgtcttatacactcgttgtatctttgatggagtggctcctagcctttccttcatcctagtgcagattgatgatgaaagaagatcatgggaattagctggagcgaggggtctctcctacttggcagcacctcttcttgaggccccccccctcctttgatctttactctttggtgcttgagcaaagtgagttttctcttggagacgttatgaatgctgttgtcagccaagcaatgttattgttgagagagagggatttacaacttattcgggacatccctgatgaaatcaaggatgcgtcagcgtatggtgatcaatgtagaattcaacaagttttggctgacttcttgctaagcatggtgcggtctgctccatccgagaatggttgggtagaaatacaagtcagaccaaatgtaaaacagaattctgatggaacaaatacagaacttttcatattcaggtttgcctgccctggtgagggcctccctgctgacgtcgtccaggatatgttcagcaattcccaatggtcaacacaagaaggcgtaggactaagcacatgcaggaagatcctcaaattgatgggtggcgaggtccaatacatcagagagtcagagcggagtttcttcctcatcgtcctcgagcagccccaacctcgtccagcagctggtagagaaatcgtctgatatgttaagatccgtgctgaccccacctaactttctcggccgattacataacttagccccctgataagagggtgcctaatttacgagaagcctggaaacaaatcaaagctgccatggcaattcaatgactgaagtgttgttgatgaggctgttttcagtgcaccgctatccatggccatgctgtggtttcaagaccagagttggcggatagttacgtacacaggcggcaaatgtgtctcttagccgctgtttaagtgcaccgctgtaagtttgggtgtccatgtccatgctgtggtttcaagatcagagtccatggcggatagttatgtacacaagcgacaaacgtggttcttagcttaggttcatgaccagttccacgtagtacatatagcttatatgtatatatacaatctattttttactatgcataaggagttgtttcagcttacacggttgtatgttatagtcctttctaggtctactacatcctaatctagatctggttcctctggaatgttggcaccaccgctctgtattttgcggcgaaggtttgagtttggcctacctcggtttatttcattctcagaccttaatgtaaaagctttgacagttgacactgggtgtgtcctttgtagagaaagaaaaccttttcttttaaaaa

SEQ ID NO: 86941 - DNA, 91 bp, Zea Mays
atctaaattcatatgaacatgatagattgcttggaactgttgtttttcctatgcaaactaagttccttaagtactggagggatattccact

SEQ ID NO: 86942 - DNA, 126 bp, Zea Mays
gtcgacgccaatccatctgagacatagcaacattttgatgatggttgcatgcgaataaagaagtttccagatgtttgtgagagaaaacaagaacctgcattcttcggcgacgcgagttttgtcctg

SEQ ID NO: 86943 - DNA, 313 bp, Zea Mays
ggacgggacggacggaacggcaatgcgcaaaggcgccgcctccgcgcgcggctccgggagcaccacgccggcacagcgaaacctcctctccgcgcgaccgaactcagatctcgccgccgccgagcttcagaaggacggctccgagctccagggggggggctgctttccgccgccgcgacgcacatccgaccgctgccaccgccggagggggagaactactgaactaggaccgcggagcacctccaccgctgctactgacggacactgcttccttctcgtgcctgcaaccgtggccccggcccactctgtgcag

SEQ ID NO: 86944 - DNA, 759 bp, Zea Mays
atggagaagcttctgtttttccgccgccgccgcaaggaaggaacggaatcggtgccagagttgcaacgcatgcacgcacaagtagcatccgcgggcatcccgagagccaaggctttccctccatcgaattttcagcgccgaatccagcgatacagagaggaggaggcgccaaacagcacaggaaggaaggaaagggaggagaaagcgaggaggaggcgtagctcaccggcggcagcggggctgggggagacgaggaggcccggacggatgcggcggccgcgcgcgggaagggagagggatgaggggcggcggcggcggcggcggcggcggcgtctggtgaatggtgttggtggtgtgcggctatgcgcagggaggggggagatgggaatcgagcacgcgagggttgtcgccgcccgatccagcagccatggtgacgcccctctgcccacccctgccgctacgagaacatttaggttgtcggtcgcacggttccccgtgcaacgtgtcccttctcctccgtcactgcccgactccctcgcgtggacagcgtcgcacaacacaggagagcgggctgctgcttcgttccgggtcaaggtgagcctccctctccctgatctgacacgaagtgttgagcgtctcgtgggcgtgctcgtcgtcgtggaggtcgagccagcactcgagcggctgtccggaggcgacgcgcgcggcggtaacagatccagcctaggtcaaggttgtggtccatatccggtcgcttag

SEQ ID NO: 86945 - DNA, 1384 bp, Zea Mays
ataatgttgaacagtcccaatgcttgtctcacacgctcagatccacaagatactaccccagaaccgctacaccaaaccgagacgctaacccaaacggacaaacccaatcagaccgaatgggcaccgcatcaccggactccggcgaccttatcgaggtggggccggcgaggccgggatctccggtagccgtggtgaccatcaaccggccttcggcgctcaacgcgctgacgaagcccatgatgatctccatggcggctgcgttccggcggctgggtgccgacgacgccgtggcagcggtggtgctcgcgggccgcggtcgcgcgttctgctccggggtggacctgacggcggcggcggaggtgttcaagggcgatgtgaaggacgtcgccacggaccccgtcgtgcagatggagctctgccggaagcccatcgtcggcgccatcgccgggttcgccgtcactgccgggttcgagatcgccctcgcctgcgacatcctcgtcgctggacgctccaccaagttcttggacacccacgccaagtttgggatatttccttcctggggtctttcacagaagctttctcgcatcattgggccgaatagagcaagggaagtgtcactaacttgcatgcctgttactgctgaaatggcagagaggtgggggcttgttaaccacgtcgtggatgataatgaggtgctgagtaaggcgatagaggttgctgaggctattgtgaggaacaaccgcaacttagttgtattgtacaaatcggttataaatgatggatttaagctggatttggagcatgctcaagcacttgagaaggaaagaggtcacaactattacaatggaatgacaaaggaacagttcacgaatatgcagaaattcatccagggccggagttctaagaaaacaccatcaaagctgtaggttgctggtgacattttctgtggtccgtgtacgatgtacagctactgaaagcgtgttcagtagtctgaaaaataaagatgtcggtgtggcaatatatacagttaccgtcttctcatacttttacgtaagtttatgtttatttaccgtctgattggttggttgcatcgtctcgtcctagatcactgtgtgcattgactttatttgaatatttgtttggttgcctgtatatctggagcatgagttccacgagtggatgcaaaataaatcattttgagaccctttgattgcatccactcatatgccaaaaatactcgtttccggtcagcctggatcgggcgagcgtgggtgcgctcgtccagctaaccaatcagccggtaactgatcaatgatcgcgaccttgcaaacacgtgtgtagttagctaccaacatgtattgctttctcttttctgatgctaaaa

SEQ ID NO: 86946 - DNA, 1032 bp, Zea Mays
gagacgctaacccaaacggacaaacccaatcagaccgaatgggcaccgcatcaccggactccggcgaccttatcgaggtggggccggcgaggccgggttcgccgtcactgccgggttcgagatcgccctcgcctgcgacatcctcgtcgctggacgctccaccaagttcttggacacccacgccaagtttgggatatttccttcctggggtctttcacagaagctttctcgcatcattgggccgaatagagcaagggaagtgtcactaacttgcatgcctgttactgctgaaatggcagagaggtgggggcttgttaaccacgtcgtggatgataatgaggtgctgagtaaggcgatagaggttgctgaggctattgtgaggaacaaccgcaacttagttgtattgtacaaatcggttataaatgatggatttaagctggatttggagcatgctcaagcacttgagaaggaaagaggtcacaactattacaatggaatgacaaaggaacagttcacgaatatgcagaaattcatccagggccggagttctaagaaaacaccatcaaagctgtaggttgctggtgacattttctgtggtccgtgtacgatgtacagctactgaaagcgtgttcagtagtctgaaaaataaagatgtcggtgtggcaatatatacagttaccgtcttctcatacttttacgtaagtttatgtttatttaccgtctgattggttggttgcatcgtctcgtcctagatcactgtgtgcattgactttatttgaatatttgtttggttgcctgtatatctggagcatgagttccacgagtggatgcaaaataaatcattttgagaccctttgattgcatccactcatatgccaaaaatactcgtttccggtcagcctggatcgggcgagcgtgggtgcgctcgtccagctaaccaatcagccggtaactgatcaatgatcgcgaccttgcaaacacgtgtgtagttagctaccaacatgtattgctttctcttttctgatgctaaaa

SEQ ID NO: 86947 - DNA, 2971 bp, Zea Mays
ttgagtttcttaaactccacaccacctaagtcaacacatcaccaatctcaaagcaacgggcacgctgaggagggcgtcagggcgagacaacccgctcgccgtggaccgtggtgccgccgcgcgcccgctgccctgctcccctccaccttccgcgcccttgcactgctgcctccagtatactgcgtcggcgaagcttccagaattccttgcctagggtttctccgggcagccttcgatggggcctcccttcttccttctcttcctcgtcctcacggccgctgcggtcgtgtcctcggccccccggcgggaggcgttccgccgggacccagggcacccgcactggcaccatggcgctttccacgatgtcgaggacagtgtccgcgccgacgtccgccgcatgctccacacccgagcagaggttccatttcaagtgcctcttgaggttaatgttgttcttattggtttcaatggtgatggagggtatagatactctttggatgggcacaagctcgaagaattcctaaaaatgggtttcccacttcacaggccctcttgctttgagacaggggagccaattgatatcgagcatcatattatgtacaatgttatatcggctggacaaccggagctgatatctctcgagaagtcactgaaggaggccatgcaacctgcaggaattgcaagagatagtgaatatggcagggaattgcctctatttgaagtagaagcgactgcagtggaatcgatatttcagaggctatactcattcatttttgacatggagcctggttatcctgcaaatgacatggataggcctgttcctgttgcgatatttattgttaattttgataaggttagaatggatcctcgaaacaaagaagttaatctcgatagtttaatgtatggtacaattggtggactaacagaacaagaactaaaaaaacaagaagcagaatacatttaccgttaccgttacaatggtggtggggcaactcaagtttggctaagttctggaagatttgttgtaatagatctttcagcgggcccttgtacatatgggaaaatagaaactgaagaaggcagtgtcagctataggtcaatgccacggctgtcacaaataatcttcccaagaggacttgctgccccaagtgctagttcaacgcaagatattttcattgggcagctcggaggtgcaattgcaactaccattgagcatgtgatagctcctgatataagatttgaaactgttgacatggcagtgaggttgcttgtacctattattgtgctacagaaccacaataggtacaacattcttcaagaaggccataactatagtatagatgttcaagctatagaaagggaggttaaaaagatggtccaccctggtcaggaggtaataataatttctggttcgcatgcgctgcaccagcatgaaaagttagctgttgcagtttccaaagcaacacgtagccattctcttcatgaaacaaagagtgatggccggtttcatgtccgtaccaaaacttacttggatggagcaatacttaaagaggaaatggagcggtctgctgatgtgctgtctgctggtctattagaagttgcaaatccttctctctcaagtagattcttcctaaagcagcattggactgatggagaagatgatgtaaaagactctattaagcacaggcccttgtgggaatcttacatgcccaaaaataataaaggaaggagaggaactggaaagaagaaacatggaagtctgtacagaacttatgggaccagagtgatcccagtttttgtattatcactggccggtgtcgatgctgaacttctcatggaagaggagagtcttgtttggacaagtaaagatgttgttattgtgcttgagcataacaatgaaaagattcctctaagctatgtgtcagaaacgactaggcagtttgctcttccatctatcgcacagcgccacatcttggctggtctggcatcagcagttggcggtctgagtgcaccatatgaaagagcatcacgtattcatgaaagacatgtagtgaactggctgtgggctgcaggctgtcatccgtttggaccattctcgaactcctcacagatcagtcaaattcttcaggatgtagcactgagaactacaatttatgctcaagtcgatgctgctcttcgcaaaataagagacacatcagagtttgtccaatcttttgcatcagagcatcttaagacgccattaggagaacttgtgaaaggtaataaaaacaagtccaccactgagttatgggtagagaaattctataagaaggtaaccaatctaccggagccttttccccatgatcttgttgagaagttagaagaatacctggataaacttgaagggcaactcgtggacttgtcttccttattgtatgaccaccggctggtcgatgcatatcaaaacagtaccgatatcctgcaaagcactatttttacacaacagtatgtggaacgtgttctagctaacgagagagacaagatgaaatgctgtagcattgaatatagtcatccaaagcagtcatcccaggcttttgtctatggagggatccttctggctggatttcttgtgtattcactggttattttcttctcttcacctgttcgctaattttatgtccagatgcagaaagtcttggatgctttatggtaggctaggtttgtctggggctgtcaatcttcatgagggaatggcctgaactgtcttggatacagaagggctttggcacagttttagtgctctatttctcgacacacaagcaatcagacggctgatatatatgtaactgattcttgtctgcgataaactatagtcgatttcacagaagagctggtgcatgctatgaaaatatgaaatactttcatcccattttgcaacttgttactgcagaactgcacataacaccactgacagaaacccccgtttgttaat

SEQ ID NO: 86948 - DNA, 1287 bp, Zea Mays
tttgcaggaaggtatatcttgatcttgtgcactgccgcaggagcatgatacaagaacatgcctatgcttattgctgatgcagcaaagtctaaactacaaaggtctgaagtacatctggtctattgatatacatctccaataaacaaatctttttgataatttaatttaatcattgaccacaacgatatcattaaggaggccaagtttgtacaaatgagcttgcagacaatatgaagattcataaattatgtttgaccgataagacatcagttagcacaaaaaatgtagacatcaatgacgcagcctgcgacggtggcatcaggctgcccggatgatgaaccaccggccacgtcttcctcgtgtgatttaaaacgccagaggagaagggagcactaaaaaccacaaggaagagaaagacagcggcaagaacttgctgttcgaggtgttctacaagaatggatacagcataaaccattcccctccacgatcacctcggtttagagtgaaataaaagacaaaattggtgccatatgggattataggaaggtcggtaagcggatagcccattgaatagagggcaagccgaccagtttttcttcctcgttaatttggctacagccgagtcggcaaattcaagacgagggtaactgaaccccaatcttggtacaatgcagccttctgtataatagtcatcagagcaacgatttgtttgactaataactatacggtgtatgtcagacaatgctttctaggcaagtgcatctccgtcaaaacacagcgaaatccactgctcggagcccagtgcatttcatcatccaaatccagaactaggcaaaacatctagggtataataaaatagaaaaaggggtaagaatatgcgatcgcgtatgaggccctcaggaatcatgcttttgatattcatcaaggaagaaaatctcaggtctcaaagattgtgccatcacggggctcacagaacaaccggatcgagcgcaagaaacaagattaaggcaagaataaacgaaacgggaatcttggagaatgttattcgctgcgcctcacggtgtacagtaggcgaagcgactcaagatctccacagatgtcgcccctctggaaaattcgagccccggagaaaaaaaatctgagggatcgactcatctaggggctcgagtgtcgttggattactcgtgacggaatcaagcaacaatacatcgcataacactaggaacgaaacgagcggggaaaccgtagatgatgattcttcgttacctgttgcggcgctgcagtggt

SEQ ID NO: 86949 - DNA, 1888 bp, Zea Mays
cgcgagccactgcacccatccactcgtacgccgcggtgcgccgcagcccgcagcccgcagcccgcagcccgcagcccgcgactccaggcatccacaaaaaaccatctcccccgcggccccggcaccgcacgctcccgacccggcgagtcccactcccacctaagctgagcggccatggcgcggcacctcgcgccttcgtctggaagcctccaccgtctcctcgcgtcctgccactacccgcccacctcccaggcgccgcctccccgtccgctcctcctcccgaagacccgatcggcggctatgcagctcccgcgacgcgggcggcgcgacgtcgtcgccgctgcagctgcctccgcaccgtccccctcttctccgggtaccgaggtggcagtctggggtaaggtctccgccgtgctcttcgatatggatggcgttctctgcaacagcgaggagccctcgcgacaggccggcgtcgacgtcttcgctgagatgggagtcgaggtcgccgtggatgactttgtccccttcatgggcactggtgaggccaatttccttggaggtgtcgcaagagctaaaggagtgaaagatttcaatcctgaaagtgccaagaagagattttttgagatatatcttgacaagtacgcaaagccaaattctggcatcggattccctggggctctggagctcatcttggagtgcaaaaattctggtcttaaggttgccgttgcatccagtgccgacaggattaaggtggatgccaatctggctgctgctggtttgtccgtgtttctatttgatgctattgtttctgctgatgcgtttgaaaaattgaagcccgctccggatatattcctggcagcatcaaagagcttaggtgtcgacacaaatgagtgcattgtgatagaagacgcgcttgctggtgttcaagctgctaatgctgcagaaatgagatgtatcgctgtgacaactactctagaggaaatagcgttacgacaaggcagtccctcgttcatacgaaagaatattggagacatttcaattaacgacattttgtatggtggttctaatgctcgccacaatgaaggggcaggaagtactgagaatagtagttcggtagggaatgctttgtctgagagtctaaacggagcaactgctgctggacattctgacacaaaaggttttccaatctcaaaaaataaagggctgttgggttctcgacgcgaaatattgagatatggaagtctgggaatagccttgtcctgcctttttgttgcagtcagaaattggaaggcaatgcagttcgcatctcccaaaggcctactgaattttctcatgggtggaaatagttcagtttttgccagaaatgaaggtaagaaatccagatgcaggaggatttttacaggtttcattgttgcaatccaatcgagtgtcagttaattctaaaggatccgttcagatggaattttgatgttatttctaacaataaaatcacgatcctaaaacaatgtcgctcttcaatatatcaggtacacagtgcacctaggcatcaccatcctgtcttgcacctcttgcaccaatggtacctggccacccacttcgggctgccactttttaaacacagcacaatgctgttgggtaattggaaattccatcaggcataatgcatgttgatggtgccattgttggctttaggctgggcctgcaaagtaaccgtagtgacaaattctttttagcatgcctagagagattgaaacctagctaggaaacatttggatctgaagctattttgaagattggtctccagttgttatgtgtgtcttgcaggagaatctctgtcatcaagagttcaacaaataaagaagtatctagctgagtttgaatctgggtg

SEQ ID NO: 86950 - DNA, 1842 bp, Zea Mays
cgcgagccactgcacccatccactcgtacgccgcggtgcgccgcagcccgcagcccgcagcccgcagcccgcagcccgcgactccaggcatccacaaaaaaccatctcccccgcggccccggcaccgcacgctcccgacccggcgagtcccactcccacctaagctgagcggccatggcgcggcacctcgcgccttcgtctggaagcctccaccgtctcctcgcgtcctgccactacccgcccacctcccaggcgccgcctccccgtccgctcctcctcccgaagacccgatcggcggctatgcagctcccgcgacgcgggcggcgcgacgtcgtcgccgctgcagctgcctccgcaccgtccccctcttctccgggtaccgaggtggcagtctggggtaaggtctccgccgtgctcttcgatatggatggcgttctctgcaacagcgaggagccctcgcgacaggccggcgtcgacgtcttcgctgagatgggagtcgaggtcgccgtggatgactttgtccccttcatgggcactggtgaggccaatttccttggaggtgtcgcaagagctaaaggagtgaaagatttcaatcctgaaagtgccaagaagagattttttgagatatatcttgacaagtacgcaaagccaaattctggcatcggattccctggggctctggagctcatcttggagtgcaaaaattctggtcttaaggttgccgttgcatccagtgccgacaggattaaggtggatgccaatctggctgctgctggtttgtccgtgtttctatttgatgctattgtttctgctgatgcgtttgaaaaattgaagcccgctccggatatattcctggcagcatcaaagagcttaggtgtcgacacaaatgagtgcattgtgatagaagacgcgcttgctggtgttcaagctgctaatgctgcagaaatgagatgtatcgctgtgacaactactctagaggaaatagcgttacgacaaggcagtccctcgttcatacgaaagaatattggagacatttcaattaacgacattttgtatggtggttctaatgctcgccacaatgaaggggcaggaagtactgagaatagtagttcggtagggaatgctttgtctgagagtctaaacggagcaactgctgctggacattctgacacaaaaggttttccaatctcaaaaaataaagggctgttgggttctcgacgcgaaatattgagatatggaagtctgggaatagccttgtcctgcctttttgttgcagtcagaaattggaaggcaatgcagttcgcatctcccaaaggcctactgaattttctcatgggtggaaatagttcagtttttgccagaaatgaaggagaatctctgtcatcaagagttcaacaaataaagaagtatctagctgagtttgaatctgggggttctgccacatatgttcctgagtttccaagaaagcttgactggttgaatacagccccacttcagtttggaagagtaatttagaactcatcttaggttattatcgtagctgcaactttgctacagtattaattgcatgccctttgttctggatttaaactagaagatcttgcatgcatctctatcaccctattctatggggcagccagattgtaattaacatgatccaaaagtttcagtcttctagcatctgcaaagaaatttcagttactgttggtgcttttgtggtccggaagctccattcttgatgttaaacttctgatgcatatacatttttcatgaatatatacatgtaaatctactgatgatcccttctaaaacatcatattccctactgttcctgcatgcaaa

SEQ ID NO: 86951 - DNA, 1853 bp, Zea Mays
cgcgagccactgcacccatccactcgtacgccgcggtgcgccgcagcccgcagcccgcagcccgcagcccgcagcccgcgactccaggcatccacaaaaaaccatctcccccgcggccccggcaccgcacgctcccgacccggcgagtcccactcccacctaagctgagcggccatggcgcggcacctcgcgccttcgtctggaagcctccaccgtctcctcgcgtcctgccactacccgcccacctcccaggcgccgcctccccgtccgctcctcctcccgaagacccgatcggcggctatgcagctcccgcgacgcgggcggcgcgacgtcgtcgccgctgcagctgcctccgcaccgtccccctcttctccgggtaccgaggtggcagtctggggtaaggtctccgccgtgctcttcgatatggatggcgttctctgcaacagcgaggagccctcgcgacaggccggcgtcgacgtcttcgctgagatgggagtcgaggtcgccgtggatgactttgtccccttcatgggcactggtgaggccaatttccttggaggtgtcgcaagagctaaaggagtgaaagatttcaatcctgaaagtgccaagaagagattttttgagatatatcttgacaagtacgcaaagccaaattctggcatcggattccctggggctctggagctcatcttggagtgcaaaaattctggtcttaaggttgccgttgcatccagtgccgacaggattaaggtggatgccaatctggctgctgctggtttgtccgtgtttctatttgatgctattgtttctgctgatgcgtttgaaaaattgaagcccgctccggatatattcctggcagcatcaaagagcttaggtgtcgacacaaatgagtgcattgtgatagaagacgcgcttgctggtgttcaagctgctaatgctgcagaaatgagatgtatcgctgtgacaactactctagaggaaatagcgttacgacaaggcagtccctcgttcatacgaaagaatattggagacatttcaattaacgacattttgtatggtggttctaatgctcgccacaatgaaggggcaggaagtactgagaatagtagttcggtagggaatgctttgtctgagagtctaaacggagcaactgctgctggacattctgacacaaaaggttttccaatctcaaaaaataaaggaaatcctgcaggctgttgggttctcgacgcgaaatattgagatatggaagtctgggaatagccttgtcctgcctttttgttgcagtcagaaattggaaggcaatgcagttcgcatctcccaaaggcctactgaattttctcatgggtggaaatagttcagtttttgccagaaatgaaggagaatctctgtcatcaagagttcaacaaataaagaagtatctagctgagtttgaatctgggggttctgccacatatgttcctgagtttccaagaaagcttgactggttgaatacagccccacttcagtttggaagagtaatttagaactcatcttaggttattatcgtagctgcaactttgctacagtattaattgcatgccctttgttctggatttaaactagaagatcttgcatgcatctctatcaccctattctatggggcagccagattgtaattaacatgatccaaaagtttcagtcttctagcatctgcaaagaaatttcagttactgttggtgcttttgtggtccggaagctccattcttgatgttaaacttctgatgcatatacatttttcatgaatatatacatgtaaatctactgatgatcccttctaaaacatcatattccctactgttcctgcatgcaaa

SEQ ID NO: 86952 - DNA, 1862 bp, Zea Mays
cgcgagccactgcacccatccactcgtacgccgcggtgcgccgcagcccgcagcccgcagcccgcagcccgcagcccgcgactccaggcatccacaaaaaaccatctcccccgcggccccggcaccgcacgctcccgacccggcgagtcccactcccacctaagctgagcggccatggcgcggcacctcgcgccttcgtctggaagcctccaccgtctcctcgcgtcctgccactacccgcccacctcccaggcgccgcctccccgtccgctcctcctcccgaagacccgatcggcggctatgcagctcccgcgacgcgggcggcgcgacgtcgtcgccgctgcagctgcctccgcaccgtccccctcttctccgggtaccgaggtggcagtctggggtaaggtctccgccgtgctcttcgatatggatggcgttctctgcaacagcgaggagccctcgcgacaggccggcgtcgacgtcttcgctgagatgggagtcgaggtcgccgtggatgactttgtccccttcatgggcactggtgaggccaatttccttggaggtgtcgcaagagctaaaggagtgaaagatttcaatcctgaaagtgccaagaagagattttttgagatatatcttgacaagtacgcaaagccaaattctggcatcggattccctggggctctggagctcatcttggagtgcaaaaattctggtcttaaggttgccgttgcatccagtgccgacaggattaaggtggatgccaatctggctgctgctggtttgtccgtgtttctatttgatgctattgtttctgctgatgcgtttgaaaaattgaagcccgctccggatatattcctggcagcatcaaagagcttaggtgtcgacacaaatgagtgcattgtgatagaagacgcgcttgctggtgttcaagctgctaatgctgcagaaatgagatgtatcgctgtgacaactactctagaggaaatagcgttacgacaaggcagtccctcgttcatacgaaagaatattggagacatttcaattaacgacattttgtatggtggttctaatgctcgccacaatgaaggggcaggaagtactgagaatagtagttcggtagggaatgctttgtctgagagtctaaacggagcaactgctgctggacattctgacacaaaaggttttccaatctcaaaaaataaagggctgttgggttctcgacgcgaaatattgagatatggaagtctgggaatagccttgtcctgcctttttgttgcagtcagaaattggaaggcaatgcagttcgcatctcccaaaggcctactgaattttctcatgggtggaaatagttcagtttttgccagaaatgaagttgttatgtgtgtcttgcaggagaatctctgtcatcaagagttcaacaaataaagaagtatctagctgagtttgaatctgggggttctgccacatatgttcctgagtttccaagaaagcttgactggttgaatacagccccacttcagtttggaagagtaatttagaactcatcttaggttattatcgtagctgcaactttgctacagtattaattgcatgccctttgttctggatttaaactagaagatcttgcatgcatctctatcaccctattctatggggcagccagattgtaattaacatgatccaaaagtttcagtcttctagcatctgcaaagaaatttcagttactgttggtgcttttgtggtccggaagctccattcttgatgttaaacttctgatgcatatacatttttcatgaatatatacatgtaaatctactgatgatcccttctaaaacatcatattccctactgttcctgcatgcaaa

SEQ ID NO: 86953 - DNA, 105 bp, Zea Mays
cggtgccggtaggacacgatcccctctctttgcttgctggacaataagaccatatccaacagttcacccatatggttacctaaaatactgtttcatactgttttt

SEQ ID NO: 86954 - DNA, 3415 bp, Zea Mays
atgaccaggcgtccttgtgggctgtggctgtacaccttgtccatggtggacgagagttccgccaggatcctgtcgacggcagccttgaagcggagagcggacgcgagcggcgctcacactcagagtcacagtcaccaacaaactgccagcgcaccaccaacaaaccctaattattccattccccaccggcgaccgcatctagcggtccagtgtagcccaagcggcagccggcaggcgcccagcagcagcattgcaggttgcagcaaagcgagcgagagtgagacagagctcacaagcctaacaccctctctccttcacctcccacatgcgctgatgcgccgcaagaagcacttggaccggggtggcggcggacgcggcggtggcacggagctcttcatctgcttcacctcccggccctccgccgcctccgccgctcctgtcgccggcggcagcgcgcagtcttccctccgcccctccagctcctccaagctcctcagccccggccgcggtagtgccagcgcaagcggagctgagacagtgccggccccccctctgcacccctcactcagccgccgcctccgcaacagcggcagcctcaagggcggccagtccccaatgttcccgtccgggtccaccggcggtggccgccgcagccggggtggattcgaacctgccgagccgtcctctcccaaggtcacctgcatcggccaagtccgcgtcaagggcggtaagcgcaagcccaagcacacctcagccgccactctgcactcctgctccagacgcggcggagtcgggagcgcagaggtcagctttcgccgcgccggcgacgaccgggacggaccccagagcaagaaccagggctgggtgtaccagatcccggtcaacatctgcgaggcactcaagacatttggctcctgcggtggccgctcgctctgctcgccgtctcggcatggcggagccggcgagcggggcgcactccccaccgatgcaaactgtggcaagaagcggcggcagggcgctcctgctgggggtagctggctgtgcggtgctgccgtggcgaggtgccttctggcgatccaggaggaggacgacgacgaggtcggcaacggcaagggagctgcagttgtgccggcagaagagatgaggacatcggaagtggggctcgtcatggaagggtgggatgtcgaggaggagaaggctgtgatgatgggggatgtggaggtggagaagaaagatgagatcttggtagtggggaaggaagaagaggggagagtaagtgtctgcatccccccgaggaatgcactgctgctaatgcgctgccggtcagacccagttcgcatggctgctcttgccacccgcttctgggggtctccagctgcagctaccgtggagcaggtggacaatgaggtggctgggtgcctcaacgacaatgaggaagaagaagaaaaggaagaggaggctgaggctgagccactggagtgcaaagatggagctcgctgttcagctgtttctgtcaaagacttgaaatgtgaagagtgtggttctgatgaaaatgatggcgctgaagcaggggagataaatcaagaaaaggcagaagctgaagagagttctaaatgtggagatctagtggaagaaaaggagggtgcatcatgcagagtaggggtggaggaagcacaaattgttcggaaagatgccgagttggaggttcctttgggagaagttacagagatggaaaaccaagggccggacatggtggagttggtggtcagtgaggaagaagttccaggacatgagaaagttgacgaagagatgatggggaggagatcaatcaacagctattctccctcggcaactctgaaagaggaccgcaccaaattgcgacggttgagtagcaggatgtgtgttagcactagtagcagggcctcatcatccagtgatagggttggcaggcgacacagcttctcagctgagatggaggcacggcggtctagcttctcgagcttgaaggattcaaggagagctagtttctccattgatagagatggccggaggtggagcttctcaattgaacaggagcatcttgttgcgcagcctaaggtgctgatggcatccagaaaggggaagaagacgtcttctgaggcagagtcagaaaaggattgtgatgttgttgctccaaacagtgcagaggaaggtcaagaatcctatgacgatggaaaggaagaagacactactgagaatgtagcggaagaaggaaaaacaaagtctgcggaagcgaaccaggaagtagagaaagtagaaactagagcagaagagtgtgaaggtgggacagtaccagtgatacataggaggaagaagagtggtgagttaccagattgcctcctgttgatgatgtatgagccgaagctctccatggaggtctccaaggagacatgggtctgcagcaccgatttcgtccattggaagtcttaccagggcaagaataaccgcaatcactggcaacagaaggcttctgctgctggaacagtggagactaaggaaaaggagaatgctgaaggcaccaccattgcgaatgatgtacaagagagcaaagatccatcaacggtgaactcagctgtgcccatgccatgtccagttgtccagaagacaccaccactcaaaccagctaccacagaacagaagctgaagctggagttgccgccagttaccaatgcggcagcctatgctccatttgttctgaaaaggtgcaagtcagagccgatgcgatcatcggcgcgtttggcacccgatgcttgcttctggaaggaccgccatcggccgctgaatgcggctggagttgggttctgatccgtgccagacagctgctggaatgtgacatttagttaggtagtgagtgagtttgcgagcctgttgtgtaatagtagcgagtggttctttgactgtgctttgtgctgttatgtgatgtgtggacaccaccaaataatggcatgctgttaagttactatatgggagaggttctttgatcctgctttgtgctgttatgtgatgcttaccatctagacacatgcatccacatgacggagccccagaatcttgtccaatatctggctctggataacatctgtttaaatatgcttaaattggtaaattattgctggtggttgctaatgccacagcttacccgatccacttcccttcacagtgtttgtccaactatgttatatgcatagctgaaggaggtaaagatgtgtaatatttaatggagttgtgccatgcttaagcttggtatttgatatatttcaaccaccctgcagctttcacttggtaatttcagcagtataacatgcaagttgcaaaactgaaggggctgagtttcctgaaactgtagttcccagtaaattgcacataaactaaaaaa

SEQ ID NO: 86955 - DNA, 714 bp, Zea Mays
atgttgcaaataaaaaagttagatcccgtcacaagaaaagttacaactattgctggaacggggagtgcaggatacagggatggtccaggcttgacagctcaactttctgaaccagcaggacttgttgaagttggagatggaaggcttcttgtagcagatacaaacaacaacacaatcagatatataactcttagtgacaaaggtgctgaggtgaagacactagagttgatcggagtacaaccgccatcaccaaaaccgaaggtgttgaaacgcctaagacggcgattatcggcagatacagatgttattaatgtcgatggtggttcttcaaaggaaggattcttgtctcttgcagttacagtacctgatggttaccatttctccaaggaagcccgcagtaaatttgatgtggaaacagagccgcctaatgcagttgagattgaaccagcgaacggttttctaaactcggaagggctggcatcactgaagttcagaaggatatcatcatccttgtcaatgggaaggataaactgcaaggtttactactgtaaagaagatgaagtttgtctctaccaatcgattgcttttgatgtcaaattccgtgaagaggcggaaccgaacccagcacaaattacgctatcctatactgtttcgccaagagataattcaggtagcacacaactactggctgctagaaagaatgccaaggtgtag

SEQ ID NO: 86956 - DNA, 1313 bp, Zea Mays
ctgccacattttacatcccaccaccagcctccttcccctttccgttccccgaagcgagagcgaagccagcgcccatcttcttcttcctcctccttgttgttggatcgcagctccttcgtcgtagcgtccgatacgccaggtttcctttcgcgagcaacaatctttggcaatggcgtccacgtcgagctcgacgccagcgccggttgaggtggacgagaggggccggaagcggaagcgtgcggccggggcggaccccgcggcgccggcgcagccgtccaagtggcggacgcggcgcgagcacgagatctactcgtccaagctcctggaggcgatccgcctcgtgcgcgcggggcccccctccgccgccgccgccggcacggcggcggccccgccgcgcagcagggccgtgcgcgaggcggccgaccgcgcgctcgccgtcgcggcgcgcgggcgcacgcactggagccgcgccatcctcgcgtcccgccgccgccgcctccaggccgcgcaccgcgcgcgcctccgcgcccccgcgtccccgcccgcgcgacacggtgccccctcggcctcggcggcgaagggcgccgccacgccgcctctggagaggaaggccaaggtgctgggccggctggtgcccggctgccggaagctgtcgttcccgacactgctcgccgagaccacggactacatcgcggcgctccagatgcaggtccgcgccatgacggccctcgccgaggcgctgtccgccgtctccgccacctcctcctccggcgccggctcctcctcgccgccgtgatcgaagccgaagcctcaacattcgtgcattcgttgtaaatttttccctctcttttctccccccacgaatttttcctcgggattagttaacctctagctttctctctctctcccctctagttttccttgtcgtcttgtttctcccagttcggtgagtggttagtgtgacgatgaagaagaagatgatgatggcgtcccagtgattaacccgtgcggtaatgtgatagaagaagtcgtaggctgtctccgctcctcccttcctccctagctcaggattcttttgtagcttgggtttattctcatctgcttcgatcgctcttcgatgaatgcatcttgaaatgttcattcagatcacaccatcatgtatgatgtatctttcatgtgcttcttgctgaacgtcctgtagtgtacctctggctgctgctgctgctgctgcaagcagattaaccgttgttcatggcttgcttgtatcatctcataaccataattactgatctgtacttcagagaaacctgaaa

SEQ ID NO: 86957 - DNA, 753 bp, Zea Mays
ccatgttctcgcgatcatcatatctcccctatccgatccatcatccatccattccatggtgtaaacagcaaagattgcgcctatatatgcgcgcgcactcattgcctttgcccgggtggtgacgcgacgtgcctctagcttgttccgtcgtcgtcgtcgaagaagagcgctctccccctctgcctcgacgaccaccagctcccttccggccgccgctgtcgatcggcaggtggtggacgacgatcgagaggatgagaggagataggagtaaggccacacggccgctggcgccgccaccaccggcgatcggcgagagggacatggtggaggaccctagactgctgaagcaggtgagggagcttcggaggctggtgccagcgtgccgtgagccatgcgggctcggcgagctgttccaggacacggcgacctacatcgaggacttgcaggcgcaggtccaggtcatgcggatgctgctcgacaagctctccgatgaatgacgagttcgcgcgcgcgcgcctgcgcttatacgcgatcgagatgaagtctgctcttcgatcatgtgtccatgcatgatttaggatttgtccgtcgacaggaacatatactagtaccagtatatataaattataaaacaatttattcatacgaattgtttgatcaatttcttgcttcaaaaattatgttcattcaagatttatgggatatgttgtttcatttatccgtacttgtgttccaacatgaaattcttgcttc

SEQ ID NO: 86958 - DNA, 805 bp, Zea Mays
agtccagcccacataaccacaccaactctccccaatccagcagccctcgagtctggtcccccacccctcagcgcgacgaaggtaagatgttcctgcggaggatcctgaccggcgggggcggcctggcggccctgagggcggcgcgcgccgtgaaggagacgacggggatcgtgggccttgaggtggtgcctaacgcgcgagaggttctggtagggctctacgagcgcacgctcaaagagatcaaggccgtccccgaagacgagggttaccgcaaggccgttgaatccttcaccggtcaccgcctccagatctgccaggaggaggaggactggaagcgcatcgaggaccgaatcggatgcgggcaggtcgaggagctcatcgaggaggccgaggacgagctcaagctcatcgctaaaatgattggtatgttattctaatcatttttatggttttctgatcacccccgttgttaggtcaattgatgtgtaagtttatgtaataggtggcttcactgatttggggacattgataatacaatagacctaataggttagctcttctagaacaaatcctatagtttgatactttgataattgttggtggtagatttttttttgcagtcgttgtaattgtagatagatggaagactcgcgtgaggttaccttattatccctagaactctccttaatatttctcatttaatctgtgactctagcaaaatgagggtaagcttttgtggactggtcagtgatcagcacttgaaaatactactggtgactggagtgtttaattcttgtgtgcttct

SEQ ID NO: 86959 - DNA, 916 bp, Zea Mays
agtccagcccacataaccacaccaactctccccaatccagcagccctcgagtctggtcccccacccctcagcgcgacgaaggtaagatgttcctgcggaggatcctgaccggcgggggcggcctggcggccctgagggcggcgcgcgccgtgaaggagacgacggggatcgtgggccttgaggtggtgcctaacgcgcgagaggttctggtagggctctacgagcgcacgctcaaagagatcaaggccgtccccgaagacgagggttaccgcaaggccgttgaatccttcaccggtcaccgcctccagatctgccaggaggaggaggactggaagcgcatcgaggaccgaatcggatgcgggcaggtcgaggagctcatcgaggaggccgaggacgagctcaagctcatcgctaaaatgattgaatgggatccatggggtgttcccgatgactacgaatgtgaggtgattgaagacgacaccccaattcctaagcatgttcctcagcaccggcctgttgctcttcctgaggagttcttcaaggcactagatgctgtcaaatctgatcctgctcttcaaggcgatgctcctcctcaagtgaaggcgtaaggatggctgttcctggctaacgtcatttcacattttgccgcggtgggtagggactggtttcttgtgtcatttgccagcaatgcgcttgctctgagcagaataaatttctggtgagtaccatcaaagtgtgaatttgaacttagtgattcggcacagtaaacttgttgcccatgaaatactcgatgccctgaacatcgtttgttttgacgttataatcgatgttgacgaaatatttgatgctagctggagttcattgtctggtgctggcttgtgaatcaggccgtggtgcaacggccgtgagagccgtg

SEQ ID NO: 86960 - DNA, 886 bp, Zea Mays
cattagcaagaatgcaaatcaagctggtaattatgttcatatattatatgctttgccatgtacatgtagctgcagagtttctatcagtgcgataatcgaacagactttttagtttcagaaattatgttgagagtgcatgggtttgaggataccttcaacttattacttgcaagttatttttactattacgctgggtggccaacacttacaccggtttacttctcatctattcatttcgattatcaacatgtgtcatgttataatgcggtgctgcttgtctgcaaactgacgtcctaggctttcaattccagcatatatatctgcgtgtatttgatagctgatgcaaagctttcagtttgttttaatgtgattctgtgtctgagtgaatggcagaatgggatccatggggtgttcccgatgactacgaatgtgaggtgattgaagacgacaccccaattcctaagcatgttcctcagcaccggcctgttgctcttcctgaggagttcttcaaggcactagatgctgtcaaatctgatcctgctcttcaaggcgatgctcctcctcaagtgaaggcgtaaggatggctgttcctggctaacgtcatttcacattttgccgcggtgggtagggactggtttcttgtgtcatttgccagcaatgcgcttgctctgagcagaataaatttctggtgagtaccatcaaagtgtgaatttgaacttagtgattcggcacagtaaacttgttgcccatgaaatactcgatgccctgaacatcgtttgttttgacgttataatcgatgttgacgaaatatttgatgctagctggagttcattgtctggtgctggcttgtgaatcaggccgtggtgcaacggccgtgagagccgtg

SEQ ID NO: 86961 - DNA, 1957 bp, Zea Mays
cgtcatcaagcacgcccgcccgcagctcgcatcgtctaccctgcgcggctgcgcctagggtttaaccactcacagcagccgccgtgactctcgaaccatgtcagcgccgccgtcgctcaagcccccagcaacctccgcagcggcctatccgcgggcgtccgccgccccgagagccaccgggattcgcggcgcctgtgctcttccaactcggcgcctccaatgctcagcctccgccgccgtcgccggagcttccactgagatggctgatgccccgctggactgggctggaaggtcgctggaggagttgcgcagcttgccggaccacgacacgttctgcctgatggcgctctcgccgctggacgggcggtacgaccgcttcgttaaagagctgatgcctttcttcagcgagttcggcctaatcagataccgcgttctcatcgagatcaagtggttattgaaactttctcaaattcctgagatcactgaggtgcctcagttcagcaaggaagcccaagccttcttgattgctattattgagaatttttgcattgatgatgcaaaagaaataaagaaaatcgagaaagtaaccaaccatgatgtgaaagccgtcgagtactttctgaagcaaaggtgcagctccaatccagagattgctaaggtgtcggagttcttccattttggctgtacctctgaagatatcaacaatttgtcacatgcattggctctgaaagagggggtaaatagagttatgttccctgccatgattgacatatgcacagcattatgttccttggcgacacaaaattcaggctaccctatgttggctcgaactcatgggcagccagcatcaccaacaactgtgggaaaggagatggcaaacttcgcggccagattatctgatataggaaagagtttctcagaggtgaagatactagggaaatttgctggcgctgttggcaattacaatgctgatgtggttgcatatcctgaagttgactggcctaaggtggcagaagagtttgttaggtccttgggtttgcagcttaatccctatgttactcagatcgagcctcatgattacatatcaaagctcttcaatctattcacccagttcaacaatgtgttgactgattttgatagagacatgtggtcctatatatcattaggctacttcaagcagataccaaaggctggtgaagttggttcttccaccatgcctcataaaatcaaccccattgattttgaaaatagtgatggtaatttatgtctggcgaattctgtattatctggtataagcatgaaactgccaatatcccggatgcagcgtgacctgacagactcaactgttttgagaaacttgggtatgggattgggtcattctctattggcttacaaggccaccatacgtggaatcagcaaggttcaggtgaatgaagcgcgtttagctgaagacttggagcaaacttgggaggtccttgctgagccaatacagacagtgatgcgaagatatggaatacctgaaccttatgagaagctgaaggaacttacgagaggccaagctgtcaccaaggacagcatgcagcaattcattgatggtctagacataccgggggaggttcgagcaaaactttcgaagctaacccctcattcttatactgggctagcggaggatttggcaagatacatcgagaagtgggttgatcttgaatctggatttcaaatcaagtgaccttcctttttaaaaggataatcttctccacatttttttctttttgacaacgacggagaaaaaaaataacagacgggtgcgtcgtggcctctaattgtcgaccaagatgatttacgtggttctcattaatgatatttttggcacatgtaaaatgcgcctcaaggaattatgctaactgtatgttggaggtaatttaacgagctaaaaaagttgcttgctgggtttctt

SEQ ID NO: 86962 - DNA, 2698 bp, Zea Mays
gccccagaaacaaagctagggtttgcctcccaaccctcctcccgttctcccgcctcctcctgtgaaccgcgcgagccaaggaccgcccgtcgtctctcgccgccatggggacggagcggaagcggaaggtgagcctgttcgacgtggtcgacgagacgtccgtctccgccaagctgcgcgccgcctccaacggtgccgccgccaccgcgactgggggcaacccgtctgtcaaccggtggaacgggcggccctacacggcacggtacttcgatatcctcgagaagcgccgtacgctccccgtgtggcagcagaaggaggagttcctccgctccctccgcgacaaccagaccctcatcctcgtcggcgaaactggaagcgggaagacaactcagatcccccaatttgttcttgagacggaaggcttgggtaaccgttccatggttgcctgcactcagcctcggagggtcgcagcaatgtcagtctccaggcgtgtggcggaggagatggatgttactattggggaagaagtgggttatagcattcgatttgaggattgcagcagccacaaaactgttctcaagtattctgatctaatcctgttctgttgaacactattgcttcctatcagatatttgacagatggtatgcttctgagagaagcaatggcagacccacttttagagaagtacaaggtgattgttcttgatgaggctcatgagaggactttagcaacagatgttctgtttgggcttctgaaggaagttctaaaaaatagaccagatttgaagcttgttgttatgagtgctaccctcgaagcagagaaattccagggttacttcaatggtgcacccttgatgaaggtgcctgggagacttcatccagttgagatattttacacccaagaaccagagagggactacctagaggctgctatcaggacggttatgcaaatacatatgtgtgaacctgctggtgatatccttgtattccttacaggagaagaggagattgaggatgcatgccggaaaatcaacaaggaaactaataatatgggagatcaggttggcccagttaaagtcgtgcctttgtactccacactgcccccagccatgcagcagaagatttttgaacctgctcctgccccattgaaggaaggaggtcctcctggaaggaaaattgttgtgtccaccaacattgctgaaacatccttaactatagatggcatagtttatgtgatagacccggggttttccaaacagaaagtttacaacccaagaataagggtggaatcccttctggtgtcacccatttctaaggcaagtgctcatcagagagctggtcgtgctggacgaacacaacccgggaagtgttttaggctatacacggagaagagttttaatgaggatttgcaaccacagacatacccagaaattcttcggtcgaacctggcaaatacagttcttaccttgaagaaacttggaattgatgatttagtgcattttgactttatggatcctccagcaccagaaactctaatgagggccttagaagttttgaactatttgggtgcactagatgatgaaggtaatctgacacagttaggtgagatgatgagcgagtttcccctggatccacaaatgtcgaagatgctcgtcatcagtccaaaatacaactgttcgaatgaaatcttatcagtatctgccatgctgtcagcacccaattgcttcctccggcctagggatgctcaaaaggctgctgatgaggcgaaggctcgatttggccacattgacggggaccatctgacgcttctgaatgtataccatgcatacaaacaaaacaatgaagatccccagtggtgttacgagaactttgtcaattcaagagcacttaagtctgcagacaatgtcagacaacagcttgttcgcatcatgactagattcaacctcaagatgtgcagcacggatttcaatagccgtgagtactatgtcaatatcaggaaagccatgcttgcggggtatttcatgcaggtcgctcacctggaacgaactggacattacctgactgtaaaagataaccaggtcgtccatcttcatccctccaattgtatggaccataaaccagagtgggtcatctataatgaatatgtcttgaccaccaggaatttcattcgcacagtcaccgatatccgtggggactggctaattgatattgcgccacattactatgatctgagcaatttcccgtcatgtgaggccaagcgtgttcttgagaggctgtataacaagcgagagagggaaagagctgcaaatagaggctgaggttgatacttccacaaacctggtgctctgtaattccaccgcaggtctatccagagcccgtatacgagctttggttatcacagatagctgtcccatttgtcttaggcaaatgcgttagcatgatgtctcctacacaccctaatatctattgtctcatcagcatgatcattatgtacacaacctcgagaaattctttagcatctcaattagttgtgattcagattaattgtgtgacagtctgtttttgtatgcatcagacgtttatgttttgtgtttctatgtggttaattggttaccctttggaatgaaaatccactgaatttggtttattagcttacctggggctaagcctacgtcctgttgcaggaggaagttgttaa

SEQ ID NO: 86963 - DNA, 2645 bp, Zea Mays
agaaacaaagctagggtttgcctcccaaccctcctcccgttctcccgcctcctcctgtgaaccgcgcgagccaaggaccgcccgtcgtctctcgccgccatggggacggagcggaagcggaaggtgagcctgttcgacgtggtcgacgagacgtccgtctccgccaagctgcgcgccgcctccaacggtgccgccgccaccgcgactgggggcaacccgtctgtcaaccggtggaacgggcggccctacacggcacggtacttcgatatcctcgagaagcgccgtacgctccccgtgtggcagcagaaggaggagttcctccgctccctccgcgacaaccagaccctcatcctcgtcggcgaaactggaagcgggaagacaactcagatcccccaatttgttcttgagacggaaggcttgggtaaccgttccatggttgcctgcactcagcctcggagggtcgcagcaatgtcagtctccaggcgtgtggcggaggagatggatgttactattggggaagaagtgggttatagcattcgatttgaggattgcagcagccacaaaactgttctcaaatatttgacagatggtatgcttctgagagaagcaatggcagacccacttttagagaagtacaaggtgattgttcttgatgaggctcatgagaggactttagcaacagatgttctgtttgggcttctgaaggaagttctaaaaaatagaccagatttgaagcttgttgttatgagtgctaccctcgaagcagagaaattccagggttacttcaatggtgcacccttgatgaaggtgcctgggagacttcatccagttgagatattttacacccaagaaccagagagggactacctagaggctgctatcaggacggttatgcaaatacatatgtgtgaacctgctggtgatatccttgtattccttacaggagaagaggagattgaggatgcatgccggaaaatcaacaaggaaactaataatatgggagatcaggttggcccagttaaagtcgtgcctttgtactccacactgcccccagccatgcagcagaagatttttgaacctgctcctgccccattgaaggaaggaggtcctcctggaaggaaaattgttgtgtccaccaacattgctgaaacatccttaactatagatggcatagtttatgtgatagacccggggttttccaaacagaaagtttacaacccaagaataagggtggaatcccttctggtgtcacccatttctaaggcaagtgctcatcagagagctggtcgtgctggacgaacacaacccgggaagtgttttaggctatacacggagaagagttttaatgaggatttgcaaccacagacatacccagaaattcttcggtcgaacctggcaaatacagttcttaccttgaagaaacttggaattgatgatttagtgcattttgactttatggatcctccagcaccagaaactctaatgagggccttagaagttttgaactatttgggtgcactagatgatgaaggtaatctgacacagttaggtgagatgatgagcgagtttcccctggatccacaaatgtcgaagatgctcgtcatcagtccaaaatacaactgttcgaatgaaatcttatcagtatctgccatgctgtcagcacccaattgcttcctccggcctagggatgctcaaaaggctgctgatgaggcgaaggctcgatttggccacattgacggggaccatctgacgcttctgaatgtataccatgcatacaaacaaaacaatgaagatccccagtggtgttacgagaactttgtcaattcaagagcacttaagtctgcagacaatgtcagacaacagcttgttcgcatcatgactagattcaacctcaagatgtgcagcacggatttcaatagccgtgagtactatgtcaatatcaggaaagccatgcttgcggggtatttcatgcaggtcgctcacctggaacgaactggacattacctgactgtaaaagataaccaggtcgtccatcttcatccctccaattgtatggaccataaaccagagtgggtcatctataatgaatatgtcttgaccaccaggaatttcattcgcacagtcaccgatatccgtggggactggctaattgatattgcgccacattactatgatctgagcaatttcccgtcatgtgaggccaagcgtgttcttgagaggctgtataacaagcgagagagggaaagagctgcaaatagaggctgaggttgatacttccacaaacctggtgctctgtaattccaccgcaggtctatccagagcccgtatacgagctttggttatcacagatagctgtcccatttgtcttaggcaaatgcgttagcatgatgtctcctacacaccctaatatctattgtctcatcagcatgatcattatgtacacaacctcgagaaattctttagcatctcaattagttgtgattcagattaattgtgtgacagtctgtttttgtatgcatcagacgtttatgttttgtgtttctatgtggttaattggttaccctttggaatgaaaatccactgaatttggtttattagcttacctggggctaagcctacgtcctgttgcaggaggaagttgttaa

SEQ ID NO: 86964 - DNA, 2280 bp, Zea Mays
cctcccaaccctcctcccgttctcccgcctcctcctgtgaaccgcgcgagccaaggaccgcccgtcgtctctcgccgccatggggacggagcggaagcggaaggtgagcctgttcgacgtggtcgacgagacgtccgtctccgccaagctgcgcgccgcctccaacggtgccgccgccaccgcgactgggggcaacccgtctgtcaaccggtggaacgggcggccctacacggcacggtacttcgatatcctcgagaagcgccgtacgctccccgtgtggcagcagaaggaggagttcctccgctccctccgcgacaaccagaccctcatcctcgtcggcgaaactggaagcgggaagacaactcagatcccccaatttgttcttgagacggaaggcttgggtaaccgttccatggttgcctgcactcagcctcggagggtcgcagcaatgtcagtctccaggcgtgtggcggaggagatggatgttactattggggaagaagtgggttatagcattcgatttgaggattgcagcagccacaaaactgttctcaagtattctgatctaatcctgttctgttgaacactattgcttcctatcagatatttgacagatggtatgcttctgagagaagcaatggcagacccacttttagagaagtacaaggtgattgttcttgatgaggctcatgagaggactttagcaacagatgttctgtttgggcttctgaaggaagttctaaaaaatagaccagatttgaagcttgttgttatgagtgctaccctcgaagcagagaaattccagggttacttcaatggtgcacccttgatgaaggtgcctgggagacttcatccagttgagatattttacacccaagaaccagagagggactacctagaggctgctatcaggacggttatgcaaatacatatgtgtgaacctgctggtgatatccttgtattccttacaggagaagaggagattgaggatgcatgccggaaaatcaacaaggaaactaataatatgggagatcaggttggcccagttaaagtcgtgcctttgtactccacactgcccccagccatgcagcagaagatttttgaacctgctcctgccccattgaaggaaggaggtcctcctggaaggaaaattgttgtgtccaccaacattgctgaaacatccttaactatagatggcatagtttatgtgatagacccggggttttccaaacagaaagtttacaacccaagaataagggtggaatcccttctggtgtcacccatttctaaggcaagtgctcatcagagagctggtcgtgctggacgaacacaacccgggaagtgttttaggctatacacggagaagagttttaatgaggatttgcaaccacagacatacccagaaattcttcggtcgaacctggcaaatacagttcttaccttgaagaaacttggaattgatgatttagtgcattttgactttatggatcctccagcaccagaaactctaatgagggccttagaagttttgaactatttgggtgcactagatgatgaaggtaatctgacacagttaggtgagatgatgagcgagtttcccctggatccacaaatgtcgaagatgctcgtcatcagtccaaaatacaactgttcgaatgaaatcttatcagtatctgccatgctgtcagcacccaattgcttcctccggcctagggatgctcaaaaggctgctgatgaggcgaaggctcgatttggccacattgacggggaccatctgacgcttctgaatgtataccatgcatacaaacaaaacaatgaagatccccagtggtgttacgagaactttgtcaattcaagagcacttaagtctgcagacaatgtcagacaacagcttgttcgcatcatgactagattcaacctcaagatgtgcagcacggatttcaatagccgtgagtactatgtcaatatcaggaaagccatgcttgcggggtatttcatgcaggtcgctcacctggaacgaactggacattacctgactgtaaaagataaccaggtttctattttccatattcaaagaatcttaagttttcttggttagggcgtggtattgaagtcttttaactcatccttactaggtcgtccatcttcatccctccaattgtatggaccataaaccagagtgggtcatctataatgaatatgtcttgaccaccaggaatttcattcgcacagtcaccgatatccgtggggactggtgagttactactatctgaacaaagc

SEQ ID NO: 86965 - DNA, 1141 bp, Zea Mays
atgtatatttcacgagaaaaacaagaacacaccttgacggcagcaaaagcacaaacgcgcacgctcatacgcaaaccacacaacccatggaagcgtcccttgccgccgccgccgtcggcttgttccctccaccgcgaatccgcatccgaatcaccaaatcgagtcccctcccacgccatcggtgcctccaatccggaccctccaagatctggacctccggttcgcgggcatgcctggtcgcggcctccgcgtccacaccgccggcgccgggaggcggcctctactcggcggcgacgtacgagctgaccccggaaaacgtcgaccgcgtcctggacgacgtccggccgtacctcatctctgacgggggcaacgtcaccgtcgttgccgtcgaggacggtgtcatctccctcaagctcgaaggagcttgcggcagctgccccagctcgacgacgacgatgaatatgggcatcgagcgtgtgctcaaggagaagttcggcgacgctttcaaggaaatccgtcaggtgttcgacggggaccagccggcggcggagacaacggccgaggcggtgaaccggcacctggacatactgcggccagcgatcgcgaactacggcgggagcgtggatgtgttggccgtcgatggcgaggactgcctggtgaggtacgacgggccggaatccatcggcagcggtatcaaggcggccatcaaggagaaattcccggacatcaccagtgtggtgtttaccctgtaaaacaccgactggggctatgcatattcggggcagtccacagcaaatgaacatgctgatcgaacttcatacttgtaatttgcaaagatttttgtgttgtgggcgggcgtctcatccttgcatttgcgatggtgcggtaattgcacatctactcagtgcggatgtttcccttcccgtcacctgaattcagttgattaggaatttcgtttcatctcgatctggcaatgatattgtgcagttgaggtcgtgtaataataatctctactctcaagagtttctttcgacctgatatttccaaaattctcttccatgttcaagttgtatatctaggaggactcggaagagacaatttgttcatgttcgaggagaatacctgaacttcgacgttttgt

SEQ ID NO: 86966 - DNA, 1218 bp, Zea Mays
atgtatatttcacgagaaaaacaagaacacaccttgacggcagcaaaagcacaaacgcgcacgctcatacgcaaaccacacaacccatggaagcgtcccttgccgccgccgccgtcggcttgttccctccaccgcgaatccgcatccgaatcaccaaatcgagtcccctcccacgccatcggtgcctccaatccggaccctccaagatctggacctccggttcgcgggcatgcctggtcgcggcctccgcgtccacaccgccggcgccgggaggcggcctctactcggcggcgacgtacgagctgaccccggaaaacgtcgaccgcgtcctggacgacgtccggccgtacctcatctctgacgggggcaacgtcaccgtcgttgccgtcgaggacggtgtcatctccctcaagctcgaaggtaaataagccttttggatttcgatcggtaggagcgaaatcttgcactagtccatttccatggtttgcaacttgtaggagcttgcggcagctgccccagctcgacgacgacgatgaatatgggcatcgagcgtgtgctcaaggagaagttcggcgacgctttcaaggaaatccgtcaggtgttcgacggggaccagccggcggcggagacaacggccgaggcggtgaaccggcacctggacatactgcggccagcgatcgcgaactacggcgggagcgtggatgtgttggccgtcgatggcgaggactgcctggtgaggtacgacgggccggaatccatcggcagcggtatcaaggcggccatcaaggagaaattcccggacatcaccagtgtggtgtttaccctgtaaaacaccgactggggctatgcatattcggggcagtccacagcaaatgaacatgctgatcgaacttcatacttgtaatttgcaaagatttttgtgttgtgggcgggcgtctcatccttgcatttgcgatggtgcggtaattgcacatctactcagtgcggatgtttcccttcccgtcacctgaattcagttgattaggaatttcgtttcatctcgatctggcaatgatattgtgcagttgaggtcgtgtaataataatctctactctcaagagtttctttcgacctgatatttccaaaattctcttccatgttcaagttgtatatctaggaggactcggaagagacaatttgttcatgttcgaggagaatacctgaacttcgacgttttgt

SEQ ID NO: 86967 - DNA, 1331 bp, Zea Mays
atgtatatttcacgagaaaaacaagaacacaccttgacggcagcaaaagcacaaacgcgcacgctcatacgcaaaccacacaacccatggaagcgtcccttgccgccgccgccgtcggcttgttccctccaccgcgaatccgcatccgaatcaccaaatcgagtcccctcccacgccatcggtgcctccaatccggaccctccaagatctggacctccggttcgcgggcatgcctggtcgcggcctccgcgtccacaccgccggcgccgggaggcggcctctactcggcggcgacgtacgagctgaccccggaaaacgtcgaccgcgtcctggacgacgtccggccgtacctcatctctgacgggggcaacgtcaccgtcgttgccgtcgaggacggtgtcatctccctcaagctcgaaggtaaataagccttttggatttcgatcggtaggagcgaaatcttgcactagtccatttccatggtttgcaacttgtaggagcttgcggcagctgccccagctcgacgacgacgatgaatatgggcatcgagcgtgtgctcaaggagaagttcggcgacgctttcaaggaaatccgtcaggtgttcgacggggaccagccggcggcggagacaacggccgaggtcagtgaacggactccaccaccgtagacatagcaccgtcgcagtacactggtggtagtctaagcaatactatcactgattggcaagcggatccttttgtgctgctgcaggcggtgaaccggcacctggacatactgcggccagcgatcgcgaactacggcgggagcgtggatgtgttggccgtcgatggcgaggactgcctggtgaggtacgacgggccggaatccatcggcagcggtatcaaggcggccatcaaggagaaattcccggacatcaccagtgtggtgtttaccctgtaaaacaccgactggggctatgcatattcggggcagtccacagcaaatgaacatgctgatcgaacttcatacttgtaatttgcaaagatttttgtgttgtgggcgggcgtctcatccttgcatttgcgatggtgcggtaattgcacatctactcagtgcggatgtttcccttcccgtcacctgaattcagttgattaggaatttcgtttcatctcgatctggcaatgatattgtgcagttgaggtcgtgtaataataatctctactctcaagagtttctttcgacctgatatttccaaaattctcttccatgttcaagttgtatatctaggaggactcggaagagacaatttgttcatgttcgaggagaatacctgaacttcgacgttttgtacg

SEQ ID NO: 86968 - DNA, 1534 bp, Zea Mays
gcagtactaggcaatggcatcccaaagtaatcagaaacagcaagcatcactgcatcatcatccctgctcccggctcgtggaacgggacgggagggcgcgaccacacaatcgtgaaattcaaattctacgtgcgagtgtcaacgtgactaagacggagatcatgttggggggtttgagtacattccccatgttcttctacatctatggcggcggccaaagccaacagcctccaaatccatccttctcaagatgagatctcagctgcagtaccaagtacacagctgacaaactccattgctagtcacacgctcagtactagtagagctactagaccaaggccagctatagcgcatcgatctgttgaaaagcctggagagatcaaatccccctttaactccccccaaaagatctcctgaccccaaatctcgacgatctgctgcagcttctgcatacacacactgccgcgcgcccctgagcctgctcctgctctcttccttctctctctccctccgacccctgcggccctgccccccgggccccggtcctcctttggcctttttattcaccccagcaccccatacaaagttaacaaacacacacacaaaggcgaccagtactggagttgggagaagctgaggcgtttttcgtgccgctggctgaccggccggctggtggcttacatagccagctagtgtgtgctctactttcttgcggtctctcttcctcgtcctgagcttgacaggctactttctactagcatcttctgtgtgcgccgctgatgtttgacgccactttctcgcagtgtaatctcgcacaaagctagcttggagccgaataatggaagccacgatgaagctctgcaacgttgcgacggtgaggagctctgtcaccggcaagccccgcgagcaggaggaagtgtcctctcggcatgaagaccagagagagcctgcagttattatgccaccgggagcatcggttcacgtggttcatgtctagtattagcatggtgttatcctgattgagcttttttttgattgagcttttttttaatttaaggtttctattcttcttcgtatctctatatcgtcggatcttcttgaccttgcaagaccttttcttgaccttgtaagacccaactctaccgtctttctttccttcaactcaatcttaacagtcttccacctctctttttatccttgcttcttctctagctctatcccttctgagctgtgggttcaactatatgtttacatgtttagatattagattatccctggattaattattctatgatataattaagtttggtgtgagtaaataggtggcttggtccttttcatatatgtgatgtaatgctgtgaactcattctcaaacaagcatattttgttttgatggtagagtgccatcgatgagacgcacagaagcatgttcctgttgggccatgatgctcaggcaatgtgaagtaggcgcctacctgtaagctagctacttcgtatgtatcccatcaatggaataagttggctatgtgaaaca

SEQ ID NO: 86969 - DNA, 936 bp, Zea Mays
tctcttccttctctctctccctccgacccctgcggccctgccccccgggccccggtcctcctttggcctttttattcaccccagcaccccatacaaagttaacaaacacacacacaaaggcgaccagtactggagttgggagaagctgaggcgtttttcgtgccgctggctgaccggccggctggtggcttacatagccagctatgtaatctcgcacaaagctagcttggagccgaataatggaagccacgatgaagctctgcaacgttgcgacggtgaggagctctgtcaccggcaagccccgcgagcaggaggaagtgtcctctcggcatgaagaccagagagagcctgcagttattatgccaccgggagcatcggttcacgtggttcatgtctagtattagcatggtgttatcctgattgagcttttttttgattgagcttttttttaatttaaggtttctattcttcttcgtatctctatatcgtcggatcttcttgaccttgcaagaccttttcttgaccttgtaagacccaactctaccgtctttctttccttcaactcaatcttaacagtcttccacctctctttttatccttgcttcttctctagctctatcccttctgagctgtgggttcaactatatgtttacatgtttagatattagattatccctggattaattattctatgatataattaagtttggtgtgagtaaataggtggcttggtccttttcatatatgtgatgtaatgctgtgaactcattctcaaacaagcatattttgttttgatggtagagtgccatcgatgagacgcacagaagcatgttcctgttgggccatgatgctcaggcaatgtgaagtaggcgcctacctgtaagctagctacttcgtatgtatcccatcaatggaataagttggctatgtgaaaca

SEQ ID NO: 86970 - DNA, 958 bp, Zea Mays
tctcttccttctctctctccctccgacccctgcggccctgccccccgggccccggtcctcctttggcctttttattcaccccagcaccccatacaaagttaacaaacacacacacaaaggcgaccagtactggagttgggagaagctgaggcgtttttcgtgccgctggctgaccggccggctggtggcttacatagccagctagtgtgtgctctactttcttgcgtgtaatctcgcacaaagctagcttggagccgaataatggaagccacgatgaagctctgcaacgttgcgacggtgaggagctctgtcaccggcaagccccgcgagcaggaggaagtgtcctctcggcatgaagaccagagagagcctgcagttattatgccaccgggagcatcggttcacgtggttcatgtctagtattagcatggtgttatcctgattgagcttttttttgattgagcttttttttaatttaaggtttctattcttcttcgtatctctatatcgtcggatcttcttgaccttgcaagaccttttcttgaccttgtaagacccaactctaccgtctttctttccttcaactcaatcttaacagtcttccacctctctttttatccttgcttcttctctagctctatcccttctgagctgtgggttcaactatatgtttacatgtttagatattagattatccctggattaattattctatgatataattaagtttggtgtgagtaaataggtggcttggtccttttcatatatgtgatgtaatgctgtgaactcattctcaaacaagcatattttgttttgatggtagagtgccatcgatgagacgcacagaagcatgttcctgttgggccatgatgctcaggcaatgtgaagtaggcgcctacctgtaagctagctacttcgtatgtatcccatcaatggaataagttggctatgtgaaaca

SEQ ID NO: 86971 - DNA, 618 bp, Zea Mays
tctcttccttctctctctccctccgacccctgcggccctgccccccgggccccggtcctcctttggcctttttattcaccccagcaccccatacaaagttaacaaacacacacacaaaggcgaccagtactggagttgggagaagctgaggcgtttttcgtgccgctggctgaccggccggctggtggcttacatagccagctagtgtgtgctctactttcttgcgtgtaatctcgcacaaagctagcttggagccgaataatggaagccacgatgaagctctgcaacgttgcgacggtgaggagctctgtcaccggcaagccccgcgagcaggaggaagtgtcctctcggcatgaagaccagagagagcctgcagttattatgccaccgggagcatcggttcacgtggtttctattcttcttcgtatctctatatcgtcggatcttcttgaccttgcaagaccttttcttgaccttagtgccatcgatgagacgcacagaagcatgttcctgttgggccatgatgctcaggcaatgtgaagtaggcgcctacctgtaagctagctacttcgtatgtatcccatcaatggaataagttggctatgtgaaacattttgg

SEQ ID NO: 86972 - DNA, 225 bp, Zea Mays
gttaaatacatctagcacatttttgtcaagcatgacagtacgacatgaaacgttatcatagagctatctctaattgtttgctctatcgtgagccaacacctagtctaacctcatttttataccataatatacctggtagccaaatccattgtattatgacacataacctatctataaaccttcaaacactgaattatgctacatagcatttgcattgaatatgtt

SEQ ID NO: 86973 - DNA, 1499 bp, Zea Mays
gatcccacccccctcccttcccccgtcgccaccgcgcgcacctccgggcgccgcccccgcacctccctctcccacacgtcgtgatcgcccccgaagcggagacccctgctttgacggcgctgaggccctcctgctcttcctcgccaccgcctcgacgtcgcgcctaagcacctcggcagccaccacacgtgcctcgccctgccacggcgctgcagccagagccaggcgctcctgcacggaattcaggggatggaggccactggtgcacgtgccactcaccaccaccaagatggacgctggggagatggaggatgtgcaggcccccgcggccgtccaggttgtcaaaccagttgattccttcagcagcaagggacattgaagacacccagatcatactaccgacagaaaaaataattacggatgaagcaaggttcttgtgtcaattctctaggcggtgaactctggtgcaaattcgtacatttgctatggctgtgcttcaaattgctaacaatatttgttatttcagtaaaccagaaatacttcaagacgtgcccaaggaaacaaaaaaaaggaaggtgtcgtcaatgctgttgaggcgcttcttaatcaagagaactattcaaaatccacccatatgcctgataacatgcaacaaccagagactcaaaattgtcataagaaataagactacatgtttttgctatgcatttgatgcctatagatctgaagctgccgaaaaaggacttgtaggattgggaaggacagtctttttacttttgccaggcatgtgaagacaacctatgagatggggttaactgatattttgcagaaactcaaaaggctatgaattgcagttctggccatttttttgctatggtgaaaagatttcagtcgttttctcagatgtctttctcaagaatgggccaaggttgcggtgacttggtcttgacacttttagtaaggaagctgcagaatgctcttacttctcttgacaattttccagttataatgagccaccacttcaagctaaggagcagtattgccgatatctacaaggcactcaacaattactccatgtatccgattagacctcgtgttgctattataatgggatctcagtctaatcttcctatgatgaaagttgctgagagggtttcaaaagagttcaacatacattgtgaggtttgatatctgaaatctctgctcacgtgccaagtcaaacttgagaagagggatgtagtcttcgaagaaaatttgtgatcgatctcttaagttacaagaacaatttgtaccgatatatcatcctgcaaacatacaacgaagacttatcaatatcgctaaaaataattaaattagtgtacggttgtcgactatcattaaaaaatttatattgacactttagaaataatttgtccgatattgataatgtttgttcgacatcagttcgatctatttggatcgacgtatttataataatattacatatttatatcgtcaat

SEQ ID NO: 86974 - DNA, 1615 bp, Zea Mays
gatcccacccccctcccttcccccgtcgccaccgcgcgcacctccgggcgccgcccccgcacctccctctcccacacgtcgtgatcgcccccgaagcggagacccctgctttgacggcgctgaggccctcctgctcttcctcgccaccgcctcgacgtcgcgcctaagcacctcggcagccaccacacgtgcctcgccctgccacggcgctgcagccagagccaggcgctcctgcacggaattcaggggatggaggccactggtgcacgtgccactcaccaccaccaagatggacgctggggagatggaggatgtgcaggcccccgcggccgtccaggttgtcaaaccagttgattccttcagcagcaagggacattgaagacacccagatcatactaccgacagaaaaaataattacggatgaagcaaggttcttgtgtcaattctctaggcggtgaactctggtgcaaattcgtacatttgctatggctgtgcttcaaattgctaacaatatttgttatttcagtaaaccagaaatacttcaagacgtgcccaaggaaacaaaaaaaaggaaggtgtcgtcaatgctgttgaggcgcttcttaatcaagagaactattcaaaatccacccatatgcctgataacatgcaacaaccagagactcaaaattgtcataagaaataagactacatgtttttgctatgcatttgatgcctatagatctgaagctgccgaaaaaggacttgtaggattgggaaggacagtctttttacttttgccaggcatgtgaagacaacctatgagatggggttaactgatattttgcagaaactcaaaaggctatgaattgcagttctggccatttttttgctatggtgaaaagatttcagtcgttttctcagatgtctttctcaagaatgggccaaggttgcggtgacttggtcttgacacttttagtaaggaagctgcagaatgctcttacttctcttgacaattttccagttataatgagccaccacttcaagctaaggagcagtattgccgatatctacaaggcactcaacaattactccatgtatccgattagacctcgtgttgctattataatgggatctcagtctaatcttcctatgatgaaagttgctgagagggtttcaaaagagttcaacatacattgtgaggtttgatatctgaaatctctgctcacgtgccaagtcaaacttgagaagagggtaacgttgttaatgcctgattttttcagcaaactattgtttctgcacactgtactacagagtggatgatgtagtcttcgaagaaaatttgtgatcgatctcttaagttacaagaacaatttgtaccgatatatcatcctgcaaacatacaacgaagacttatcaatatcgctaaaaataattaaattagtgtacggttgtcgactatcattaaaaaatttatattgacactttagaaataatttgtccgatattgataatgtttgttcgacatcagttcgatctatttggatcgacgtatttataataatattacatatttatatcgtcaatataatattagtgttacattgctattttatcaaaggattttgcatatcat

SEQ ID NO: 86975 - DNA, 1720 bp, Zea Mays
gatcccacccccctcccttcccccgtcgccaccgcgcgcacctccgggcgccgcccccgcacctccctctcccacacgtcgtgatcgcccccgaagcggagacccctgctttgacggcgctgaggccctcctgctcttcctcgccaccgcctcgacgtcgcgcctaagcacctcggcagccaccacacgtgcctcgccctgccacggcgctgcagccagagccaggcgctcctgcacggaattcaggggatggaggccactggtgcacgtgccactcaccaccaccaagatggacgctggggagatggaggatgtgcaggcccccgcggccgtccaggttgtcaaaccagttgattccttcagcagcaagggacattgaagacacccagatcatactaccgacagaaaaaataattacggatgaagcaaggttcttgtgtcaattctctaggcggtgaactctggtgcaaattcgtacatttgctatggctgtgcttcaaattgctaacaatatttgttatttcagtaaaccagaaatacttcaagacgtgcccaaggaaacaaaaaaaaggaaggtgtcgtcaatgctgttgaggcgcttcttaatcaagagaactattcaaaatccacccatatgcctgataacatgcaacaaccagagactcaaaattgtcataagaaataagactacatgtttttgctatgcatttgatgcctatagatctgaagctgccgaaaaaggacttgtaggattgggaaggacagtctttttacttttgccaggcatgtgaagacaacctatgagatggggttaactgatattttgcagaaactcaaaaggctatgaattgcagttctggccatttttttgctatggtgaaaagatttcagtcgttttctcagatgtctttctcaagaatgggccaaggttgcggtgacttggtcttgacacttttagtaaggaagctgcagaatgctcttacttctcttgacaattttccagttataatgagccaccacttcaagctaaggagcagtattgccgatatctacaaggcactcaacaattactccatgtatccgattagacctcgtgttgctattataatgggatctcagtctaatcttcctatgatgaaagttgctgagagggtttcaaaagagttcaacatacattgtgaggtttgatatctgaaatctctgctcacgtgccaagtcaaacttgagaagagggtaacgttgttaatgcctgattttttcagcaaactattgtttctgcacactgtactacagagtggatgtatgattttgcaaactattgtttctgcacattgtccagttacataataaaaaatgacattctcttatatctttgtgtgcaggatgtagtcttcgaagaaaatttgtgatcgatctcttaagttacaagaacaatttgtaccgatatatcatcctgcaaacatacaacgaagacttatcaatatcgctaaaaataattaaattagtgtacggttgtcgactatcattaaaaaatttatattgacactttagaaataatttgtccgatattgataatgtttgttcgacatcagttcgatctatttggatcgacgtatttataataatattacatatttatatcgtcaatataatattagtgttacattgctattttatcaaaggattttgcatatcataataatatttgttgttctgtatc

SEQ ID NO: 86976 - DNA, 329 bp, Zea Mays
aatttattttatttatttaagacggagtcttgctctgttgcacaggctggagtgcagtggcacaatctcggctcactgcaagctcgacctcctgggttcatgccattctcctgcctcagcctcccaagtagctgggactacaggcacccgccaccatacctggctaattttttgtgttttttagtagagacggagtttcaccatgttagccaggatggtcttgatctcctgaccaaatgatccgcccgcctgggcctcgcaaagtgctgggatttcaggcttgagccaccgtgcccagccgatttttttcttttctaaagtagaggttc

SEQ ID NO: 86977 - DNA, 2607 bp, Zea Mays
cgtcggcaaagggccgacttcctgtgctcgttcctgtcatacctcgccaccatgcgcctcccgcccgtccgcttcctgccgtcgagctcaacgccggcggtagtggacgcgaacgcgcgcatcgctcggctggcacgcacggggaacatggagggcgcccgcgccacgttcgaggccatgccgctccgcaccaccgcctcctacaacgccctcctcgccggctacttccgcaatcacctccccgacgccgcgctccgcgtcttccaccgtatgcccacgcgggacctcgcctcctacaacgcgctcatctctggtctctccctgcgccgtcacaccctccccgatgccgccgcggcgctcgccaccatcccctacccgccctcggtcgtctccttcacatccctcctgcgtgggtatgtgcgccacggcctcctggctgacgccatacagctgttccgccaaatgcctgagcgtaaccacatatcgtacacggtgctgctcggtggcttcctcgacgccggccgtgttgacgaggctcgcaagttgtttgacgaaatgcccgcaaaggatgttgttgcgtggactgccatgctgtctgggtactgccaggttggccgggttgatgaggcgcgcactctatttgatgaaatgccaaagaggaatgttgtgtcgtggacagctatggtctctggctacgctcagaatgggcaggtgaaccttgcccggaagctgttcgaggtgatgcctgagcgaaatgaggtgtcgtggactgcaatgctatttgggtatatacaggctggccgcatagaggatgctgaggagctgtttaatgcaatgccagatcacccattggctgcctgcaatgggatgattgttgggtttgggcagcaggggatggtggatgctgccaagtcagtctttgacaggatgtgtgagagagatgatggaacatggagtgcaatcatcaaagcatatgaacagaatgaattcttgatggaggcactgtctacctttcgtgagatgttgcacattggaatccgtccaaactacccatcagtcatcagcatcctcaccgtatgcgcagcactggctgttcttgattatgggagggaagtgcatggtgcaatgctgaggcgctcctttgatatggacatctatgccgtgtcagcattaatcacaatgtacatcaaatgtggcaatttggataaggccaaaagggtctttcacatgtttgagcccaaagacgttgtgatgtggaactctatgatcactggttatgctcaacatgggttgggagaggaagcactccacatattcgatgacatgaggttggctgggatggtgcctgatggaattacatatattggggcccttacagcatgcagctacacaggaaaagttaaagaaggcagggatatttttaattctatgcgtacaaaatctggcatcaaacctggattagagcattatgcttgtatggttgatttgcttggtcgagctggacttgtggatgaagcactgtatttgataaagaccatgccagttgaaccagatgctgtcatctggggagctctaatgggagcctgtaggatgcacaagaatgctgagattgctgagatttctgctaagaagcttttagagctagagcctggaaatgctggaccatatgtcttgctctctcacatttatacatcctctggaagatgggaagatgcttctaatatgcggaaattcattagctcaagacatttgaacaaatcactcggctgtagttggatagaatacgacaagagggtgcatctcttcaaatcgggtgatgttttagcacatcaagagcatgctagtatccttaaaatgctggagaagttagatgggttgttgatggaatctggatactcagctgatggaagttttgtgcttcatgatatagatgatgagcaaaaaacgcatagcctacggtatcacagtgagaggcaggctgtggcatatggactattgaaaatcccagaagaattgcccatccgtgtcatgaaaaatctcagagtctgtgggactattggtgaggtgaatgctgtagtaaattccttgcttcatatcatctctttgatgagcctttcatttgaaaaaggcctcaatagcttgtttagtaatatcttaatctattataggagacacatggaggattatatttccgctgaagatgaggttgccactggcaagattagacaattacttgcggggatcaagtatggaagttcacttacatttcttagccaagaaggccagaaaggttcacaaggatcacacgctggcacgggcgacgcaaagcctcgtcaaccgccccgtgaatctgcaagtatgacaaccgcgggcacgtattgctctagaacgctaccacaccagctcccagcgaagtggttgaggcatttcatcgagctaccaaccaaggaatacaaacaataccacaggcgctcgtggcgagtactcgccagggtgaagtgtaagttcgccaacgaggaccacgacggtgtcggagctgcggacgccgatacggcgagcctgggcgctgctcgcttccttggttctgcggtactcgatgactattga

SEQ ID NO: 86978 - DNA, 696 bp, Zea Mays
aagataacatctcgggaaatcatactgagagatgcaaatcgattccatcatttcaaagacgggttttgctcatgcagggactattggtgaggtgaatgctgtagtaaattccttgcttcatatcatctctttgatgagcctttcatttggagacacatggaggattatatttccgctgaagatgaggtacatccaggatcagcacatggtcaactgcaaatcctgttgtaacacagagcctctaatttcaacatgaacaatttatcttttgagttgatacattctggcgaagaaagctatgagatactagtacctggtatgatgcttggaatcatagatgtgaaatattgactggcagcattcatcttttcatcttaaagcacctcaccaagtttggcgaatagtcacagttcacaaaaagatggagaattgggtacactagtgtgccatctgccatgggatctgaacaactgcatattgtgcttttttgtgcaggttgccactggcaagattagacaattacttgcggggatcaagtatggaagttcacttacatttcttgtaacataactctactgccagcagtggaccaaggtaaagcagctactaccttttttcttcaaaatgttaccgtgttcatttgtatctgtggacatcaatttttaacgacagtatttacaaatccataattattcc

SEQ ID NO: 86979 - DNA, 315 bp, Zea Mays
atggaggccgcctcggatccgctcgtgtccctccgaccctccccctcgatgctggcggctcagaccgtggagaccatggaggcagagcgaatggtggcggcgcagaccgtggaggtcaccttggaccgtagagaccgcgacggggaaacgtgtccggccttaggcatccaggaatatttccccgcgtggatgggccgggtgggggagcgttggcccggtgagttgtcttccaaacgagacgagaaatttccccggagcccaatctccacgtgggctgtatccacgggaaaaggccgaattcccctcgggaaatag

SEQ ID NO: 86980 - DNA, 1132 bp, Zea Mays
gcacgggccgggccaatccaccgccgcaggccgcagcagcactgaatctgctctcatctcagacagcaacaaaaagttgccacctcccctggaaaagggaaaaaagaaacaatctttgcggcgccagcgggcgcgcgcagcctatataaagctagcgcgggtaaatcccctcactccacaagtccagagacccggccagctgctttagtttgattccaattccaaccaacaaccatcagcagacagcagcttattaatttgattcggacatcgatcggttcatgctagctctgcggacggccgcgcgcacgtacgtacgtacgttcaacggatagctagctagctagctagctgagagaccatggacagcaagctgggcgtgcagcacgggcaccgccaccaccacagccacaacggcgtctccaagccgccggtcgcaaggaggaggcagagcggcggcggcggcggcaagggggtcaaggtggtgtacatctccagccccatgaagctcaccgccagcgccgaggagttccgggccatcgtgcaggagctcaccggccgcgactccaacgtcgccgaccacgacctcgacggcggcggcgcctaccacgtgggcgcgccgtcgtcgtcctcgtcctcgtcgtcttcctactcctccctcggacgcgtctccccggccgtggcggaggcggcggccgccgcagcggcgggagcccgcgctcggtcgtcgccggcgaccaacgccgggggggcgtcgccggtggtcgagtacgccgccgcgatggcccagccgccgccgttccagttccagggcatgtacgaccaccagattgccgggagcttgctttacggcctggacaactggtaggaacatatcgtatgctggacgggattagtttgtcttcggctgcgatttgattgtttcacatgcgacgcctatgaggaggacacatgtcgaccacgtcgtgtatattatatctgtagcgtgtattcacatactacggtttttgtatgtgcgtgcatggttcttcttctttaggctgcaccatccatcatcttgtacttgatatgaacagtgtgttaatagtggctagatgtatctatcagtacatgtttttgccccgttctctgt

SEQ ID NO: 86981 - DNA, 216 bp, Zea Mays
tttgacttcatgtgacttattttagaaactagagctcccaaactttcttttatttggtctctgtatggtgcaattatgtcattttataatatctgttcgttcagttagtcgttgtgaactctcttctaatcgctcacttcattggctatgttgtaccaagacatattgcatggagtaaacaataacatcagttagccaaataaaaaaaattataca

SEQ ID NO: 86982 - DNA, 1718 bp, Zea Mays
atacgagccccgcagcccccgtccccgtccccgtcctcctcctcttcttcccccttcctagcggcacggcaccaggcccgccctggtggcatctccgtaatttcgcgcctcttcgccgccaaggggtggggccgtgggggtggcaagaggaagaggtatgggcaacgccagcggccgcgaggaggacgctgcagctgttgacggcgacggcgccgacgtggaggacggcggaggggactcgtcggtccgctcgtcggagcgcgcctttccgccgtacggcagcgtaggagccaaccacgtgcggcgcgcgtgctcggtgggtgtcgtaggtggcggtggaggcgccggatcgccacccgggagtcctggccactcgctctcgccgcggatgttcgtgccccagacccctgtacctccactgcaaagggctgctgatgtaactccagtgttcaaccagatattgatgaatgatcaagaagaagaatatgatggcccccctcaaaaggaaattccttctttaattgtctggacccttggaggaaagaatgtatatgttgaaggatcatgggataactggaaatcaagaaaagccatgcaaaaatctgggaaagatcactctcttttgctggtactcccgtcaggagtttaccgatacagatttgttgtagatggagaaaggagatgccttcctgaccttccctgtgaaactgatgcaatgggcaatgcggttaaccttcttgatgttaatgattttgtcccagaaagtgttgagagcgtggtagaatttgagccaccgctttctccagactctagctacagtttccaggcacctgaggacaaggacttcgccaaggagccacctgctcttccagctcaactccatctcggcgtccttaactcacagaactcggaagaaagctgcgcgcggccgcagcacatagtcctcaatcacctcttcatagagaagggctggggcgcccaccccctggtggctctcggcctaacccacaggttcgagtccaaatatgtaaccctcgtcctgtacaaacccatcgaacgatagcaatagcccgcgcatgaagagcggaagttcaatgcttgacaactcactgcgggagcagcgatgaacagcgccgaggttgtacatgcttgtgaaagtggttgaggttcaggagtattttttttccgtgccctgcttgcagaacctctggtagtctggttgttagctgtacatgctgcgctatcatgatgttggccttctggtttgtttacagagagacaaggcgtccttacaatttttacatgtccgcttgtcgtcgtcgttcctctcccatcccatggcagattggcaggaatgaaatgtgttgaaatccacatgaatgttaggtgccggagatagatcaagggattcctagatttttatttgttttttgactggtcaagaagatgttgttgttatgtactaaactcaagaaatttttacaaatgagatactagtgttctcaggcccggagccatttttttttacaatgcccttatgcaacgcattcatggagtgagatttgccaaattctgcagaactctgcactattttttcttgaaagcgtctagacatttaggtagtagagtttctgtgattaatgacatcataaaattattatgattattgtgttttacaaaaaaaaaatataaactagatcatggcaatagaaaataaa

SEQ ID NO: 86983 - DNA, 1395 bp, Zea Mays
gatccaaacagagcctaagtgtatggtatgagcattgtcagtatatattgattaggcctgttactcctcctgtattgcagacccctgtacctccactgcaaagggctgctgatgtaactccagtgttcaaccagatattgatgaatgatcaagaagaagaatatgatggcccccctcaaaaggaaattccttctttaattgtctggacccttggaggaaagaatgtatatgttgaaggatcatgggataactggaaatcaagaaaagccatgcaaaaatctgggaaagatcactctcttttgctggtactcccgtcaggagtttaccgatacagatttgttgtagatggagaaaggagatgccttcctgaccttccctgtgaaactgatgcaatgggcaatgcggttaaccttcttgatgttaatgattttgtcccagaaagtgttgagagcgtggtagaatttgagccaccgctttctccagactctagctacagtttccaggcacctgaggacaaggacttcgccaaggagccacctgctcttccagctcaactccatctcggcgtccttaactcacagaactcggaagaaagctgcgcgcggccgcagcacatagtcctcaatcacctcttcatagagaagggctggggcgcccaccccctggtggctctcggcctaacccacaggttcgagtccaaatatgtaaccctcgtcctgtacaaacccatcgaacgatagcaatagcccgcgcatgaagagcggaagttcaatgcttgacaactcactgcgggagcagcgatgaacagcgccgaggttgtacatgcttgtgaaagtggttgaggttcaggagtattttttttccgtgccctgcttgcagaacctctggtagtctggttgttagctgtacatgctgcgctatcatgatgttggccttctggtttgtttacagagagacaaggcgtccttacaatttttacatgtccgcttgtcgtcgtcgttcctctcccatcccatggcagattggcaggaatgaaatgtgttgaaatccacatgaatgttaggtgccggagatagatcaagggattcctagatttttatttgttttttgactggtcaagaagatgttgttgttatgtactaaactcaagaaatttttacaaatgagatactagtgttctcaggcccggagccatttttttttacaatgcccttatgcaacgcattcatggagtgagatttgccaaattctgcagaactctgcactattttttcttgaaagcgtctagacatttaggtagtagagtttctgtgattaatgacatcataaaattattatgattattgtgttttacaaaaaaaaaatataaactagatcatggcaatagaaaataaa

SEQ ID NO: 86984 - DNA, 2186 bp, Zea Mays
aacatcgacactgaccagataattaatccaaagtttcccaacgacatgattgcggccattattccttaatctccatacagtactggacagtatgtgtagtacactacgctccacaagcgctttaattaacaaacaccttattaatacacatcagccagaaggcagcagcagtagtacaggaaggcacgcggctagcggccaccgcagcgcgcgcagcggagtgtgcagttcaactcggatactgccccaccccaccaccaccagtccacagcttttgtcgcctcccctagcaaagctcgcacgagatgaaaccctgagctgcccttgccatcgccgcggggagggccggagcgacaggggcgatgccgtcattatattgcgccctccacgcgcgcctccaattataatgccgcggcacgcccccacacgccgtgcttcgctgctcccgctcggctgaacaaacggctcagggaacacagaggctatgcagccaccgcagccgcagccggagcccgccgccaaccggcgggcaccctccacgtgctcccccgcacagaggcggagcggtggcattgggtgcatggccggcctcctccgcctcatctcgccgtaccaccggagccaccaccggaagcgcctcaccgccaagaacgcgccagcagcgcgggcctcccaagcaccgccacccccgccgtcctcgtcgtcgcccagaaagaaggcggcggcccagcagccttcagcttcgcccgcggcttctccgacgaagccgacggtgcagcagctgatgacgaccgctgttcggcggcggcgctcctgcgacgcgccgcggagcccgacgatcgcgccggagcaccggcgctccagctgcgacagcccccgggcgccgccgccggccatcatcgcccgcctcatgggcctggaggagtccgcgccgtcctcgcccgccgcgacgctgctgcggccagtcgtcccgagtcgtccgcctccgccgccgccggcggcggcgccggagacagccgcggagaagcggcggaagctgctgggcgcgctggagaagtgcgacgaggacctcaagacgcttcgccggatcatcgcggccgtccgcgccgcggagatgcgcgcggcctccgcgtccgaggtctgcccggctgcagcgaagacgacggcgcatgcgggcaagggcgccacggggacgttcgcccgcgacaacgaacacgtcgaacagtcgccgtcgccgtccccatcgccgccgacgcagcagcagcagcaccccagcccggactcggtgctggacgccatcagctccccgaggttcccatgcaggaagcggccgtctccatgcacggatctcgatgtgggtggcaaggggggcgcttgcggtgccgtcggatcgaagatcgtgaagccctcccgaacccttgttttctccggtacgtacgcacgtacgtagcatacatgtcgctgtcacgactcacgatatgcgccaaagtcacatgatctgccgtatgtcttctccttgaccaatcagcaatggggtatgtgccacgtaacttcaatcgtgcgcttccgtacgtgcaggcgactactgcaagatcaaaccaggcggtgagctgccgctgcacgccgtccattactacccggtgccgctggcggtgggcatgccgaggtcggccggggcggagagctggcggcaccaccggcggcggtgggagcaggaggccgcggcggcggggcgggtgatcagccgcgcgatggcggagagcgtcggggaggcaataatgtgggtgcggcagcagcaggcaggcgcgggcgacgacgagcgcggcagggtcgcggccgcgctggagcgtgccatcgtgcaggacctggtgggcgacctcgttgccgagatgatgcagcagcagcaggcgcaggccgggcacggggccggcggcggcgggtgcaggaagagactgtgcttctgatgctgtgaattcggcatgtgctttttttttcttcttccttgttttttgtttcttttgtcgcgtggcgtcgcatcgcatgtgcttgaatttggcaggtcaaggtctctgagctgtgaggaattaataactggctctgctgctgtggctgcgccatagatgtcagtagtcgcgggtacagctcgcctgggtagctacccccacctgactgacgatcgtggtagt

SEQ ID NO: 86985 - DNA, 2149 bp, Zea Mays
aacatcgacactgaccagataattaatccaaagtttcccaacgacatgattgcggccattattccttaatctccatacagtactggacagtatgtgtagtacactacgctccacaagcgctttaattaacaaacaccttattaatacacatcagccagaaggcagcagcagtagtacaggaaggcacgcggctagcggccaccgcagcgcgcgcagcggagtgtgcagttcaactcggatactgccccaccccaccaccaccagtccacagcttttgtcgcctcccctagcaaagctcgcacgagatgaaaccctgagctgcccttgccatcgccgcggggagggccggagcgacaggggcgatgccgtcattatattgcgccctccacgcgcgcctccaattataatgccgcggcacgcccccacacgccgtgcttcgctgctcccgctcggctgaacaaacggctcagggaacacagaggctatgcagccaccgcagccgcagccggagcccgccgccaaccggcgggcaccctccacgtgctcccccgcacagaggcggagcggtggcattgggtgcatggccggcctcctccgcctcatctcgccgtaccaccggagccaccaccggaagcgcctcaccgccaagaacgcgccagcagcgcgggcctcccaagcaccgccacccccgccgtcctcgtcgtcgcccagaaagaaggcggcggcccagcagccttcagcttcgcccgcggcttctccgacgaagccgacggtgcagcagctgatgacgaccgctgttcggcggcggcgctcctgcgacgcgccgcggagcccgacgatcgcgccggagcaccggcgctccagctgcgacagcccccgggcgccgccgccggccatcatcgcccgcctcatgggcctggaggagtccgcgccgtcctcgcccgccgcgacgctgctgcggccagtcgtcccgagtcgtccgcctccgccgccgccggcggcggcgccggagacagccgcggagaagcggcggaagctgctgggcgcgctggagaagtgcgacgaggacctcaagacgcttcgccggatcatcgcggccgtccgcgccgcggagatgcgcgcggcctccgcgtccgaggtctgcccggctgcagcgaagacgacggcgcatgcgggcaagggcgccacggggacgttcgcccgcgacaacgaacacgtcgaacagtcgccgtcgccgtccccatcgccgccgacgcagcagcagcagcaccccagcccggactcggtgctggacgccatcagctccccgaggttcccatgcaggaagcggccgtctccatgcacggatctcgatgtgggtggcaaggggggcgcttgcggtgccgtcggatcgaagatcgtgaagccctcccgaacccttgttttctccggcgactactgcaagatcaaaccaggcggtgagctgccgctgcacgccgtccattactacccggtgccgctggcggtgggcatgccgaggtcggccggggcggagagctggcggcaccaccggcggcggtgggagcaggaggccgcggcggcggggcgggtgatcagccgcgcgatggcggagagcgtcggggaggcaataatgtgggtgcggcagcagcaggcaggcgcgggcgacgacgagcgcggcagggtcgcggccgcgctggagcgtgccatcgtgcaggacctggtgggcgacctcgttgccgagatgatgcagcagcagcaggcgcaggccgggcacggggccggcggcggcgggtgcaggaagagactgtgcttctgatgctgtgaattcggcatgtgctttttttttcttcttccttgttttttgtttcttttgtcgcgtggcgtcgcatcgcatgtgcttgaatttggcaggtcaaggtctctgagctgtgaggaattaataactggctctgctgctgtggctgcgccatagatgtcagtagtcgcgggtacagctcgcctgggtagctacccccacctgactgacgatcgtggtagtattaaaagaacggattcgccgcggcgtcagttgtaggtggagtaataacaatcaatatgaaagtgatgagaagcaactgccaagtacgctggcgggctcacttggattcaa

SEQ ID NO: 86986 - DNA, 2222 bp, Zea Mays
aacatcgacactgaccagataattaatccaaagtttcccaacgacatgattgcggccattattccttaatctccatacagtactggacagtatgtgtagtacactacgctccacaagcgctttaattaacaaacaccttattaatacacatcagccagaaggcagcagcagtagtacaggaaggcacgcggctagcggccaccgcagcgcgcgcagcggagtgtgcagttcaactcggatactgccccaccccaccaccaccagtccacagcttttgtcgcctcccctagcaaagctcgcacgagatgaaaccctgagctgcccttgccatcgccgcggggagggccggagcgacaggggcgatgccgtcattatattgcgccctccacgcgcgcctccaattataatgccgcggcacgcccccacacgccgtgcttcgctgctcccgctcggctgaacaaacggctcagggaacacagaggctatgcagccaccgcagccgcagccggagcccgccgccaaccggcgggcaccctccacgtgctcccccgcacagaggcggagcggtggcattgggtgcatggccggcctcctccgcctcatctcgccgtaccaccggagccaccaccggaagcgcctcaccgccaagaacgcgccagcagcgcgggcctcccaagcaccgccacccccgccgtcctcgtcgtcgcccagaaagaaggcggcggcccagcagccttcagcttcgcccgcggcttctccgacgaagccgacggtgcagcagctgatgacgaccgctgttcggcggcggcgctcctgcgacgcgccgcggagcccgacgatcgcgccggagcaccggcgctccagctgcgacagcccccgggcgccgccgccggccatcatcgcccgcctcatgggcctggaggagtccgcgccgtcctcgcccgccgcgacgctgctgcggccagtcgtcccgagtcgtccgcctccgccgccgccggcggcggcgccggagacagccgcggagaagcggcggaagctgctgggcgcgctggagaagtgcgacgaggacctcaagacgcttcgccggatcatcgcggccgtccgcgccgcggagatgcgcgcggcctccgcgtccgaggtctgcccggctgcagcgaagacgacggcgcatgcgggcaagggcgccacggggacgttcgcccgcgacaacgaacacgtcgaacagtcgccgtcgccgtccccatcgccgccgacgcagcagcagcagcaccccagcccggactcggtgctggacgccatcagctccccgaggttcccatgcaggaagcggccgtctccatgcacggatctcgatgtgggtggcaaggggggcgcttgcggtgccgtcggatcgaagatcgtgaagccctcccgaacccttgttttctccggtacgtacgcacgtacgtagcatacatgtcgctgtcacgactcacgatatgcgccaaagtcacatgatctgccgcgactactgcaagatcaaaccaggcggtgagctgccgctgcacgccgtccattactacccggtgccgctggcggtgggcatgccgaggtcggccggggcggagagctggcggcaccaccggcggcggtgggagcaggaggccgcggcggcggggcgggtgatcagccgcgcgatggcggagagcgtcggggaggcaataatgtgggtgcggcagcagcaggcaggcgcgggcgacgacgagcgcggcagggtcgcggccgcgctggagcgtgccatcgtgcaggacctggtgggcgacctcgttgccgagatgatgcagcagcagcaggcgcaggccgggcacggggccggcggcggcgggtgcaggaagagactgtgcttctgatgctgtgaattcggcatgtgctttttttttcttcttccttgttttttgtttcttttgtcgcgtggcgtcgcatcgcatgtgcttgaatttggcaggtcaaggtctctgagctgtgaggaattaataactggctctgctgctgtggctgcgccatagatgtcagtagtcgcgggtacagctcgcctgggtagctacccccacctgactgacgatcgtggtagtattaaaagaacggattcgccgcggcgtcagttgtaggtggagtaataacaatcaatatgaaagtgatgagaagcaactgccaagtacgctggcgggctcacttggattcaa

SEQ ID NO: 86987 - DNA, 701 bp, Zea Mays
gggccatctcgcacactggcatcccctgtcagtccagcctgggccaaggggcaccacgccaccaccacagccggcaagggcagttcggggaattcgcggggaagggagggcgtggacggcggaacggagcggacgggccgccggccgcacgcgcatataaaaatcccggtaaaattccccccccacccccgacgcgacgcctcaaatcgctccctgcctctggtcacctcgcttccgctcccggctcccctccggccacccagacatcgtccgttcgctcgccaagagacaggaccggagaccatggcggaccagctcaccgacgaccagatcgccgagttcaaggaggccttcagcctcttcgacaaggacggcgacgaatctcttagcgagcggtagtaaagcgtggttgccacctgctgcttgtcaggagtttggaagtgcaggggagggcagtttggaagtcctggctgcttgtgtggcgccggcctgtgctgcctttgcactgtccaggttgcctatggcgcaacattggttgaggttctacactgacattttagaggcttggagcatacttaaagattaggcctcttctatataaataaaattttactaatatacgcatacctttttatcagcaaaaaggagcatgatatcaaaaatgtatcaattattcatataatatcttaaaagtttcttgt

SEQ ID NO: 86988 - DNA, 1160 bp, Zea Mays
gggccatctcgcacactggcatcccctgtcagtccagcctgggccaaggggcaccacgccaccaccacagccggcaagggcagttcggggaattcgcggggaagggagggcgtggacggcggaacggagcggacgggccgccggccgcacgcgcatataaaaatcccggtaaaattccccccccacccccgacgcgacgcctcaaatcgctccctgcctctggtcacctcgcttccgctcccggctcccctccggccacccagacatcgtccgttcgctcgccaagagacaggaccggagaccatggcggaccagctcaccgacgaccagatcgccgagttcaaggaggccttcagcctcttcgacaaggacggcgacggttgcatcacaaccaaggagctcggaactgtcatgcgatcactgggtcagaacccaaccgaggctgagctccaggacatgatcaacgaggtcgatgcggacggcaacggcaccatcgacttcccggagttcctcaacctcatggcccgcaagatgaaggacaccgactccgaggaggagctcaaggaggcgttcagggtgttcgacaaggaccagaacggcttcatctctgcggcggagctccgccacgtgatgaccaacctcggcgagaagctgaccgacgaggaggtcgatgagatgatccgcgaggccgacgtcgatggtgatggccagatcaactacgaggagttcgtcaaggtcatgatggccaagtgagtaaagcctgcggtaacggtatagtaccccgcgggaattgaaggaggaaaccaaaccgtgcatcgcatattagaaaggcaatgcaggtcttgtttccttcgttttccccatgaagaaaccgtactagctgtagctgctgaacgtttgagtccccctgctgccacccttatctccatttgtgtcatcgaaactccgtgcttcccctgctgtgtgaatctgtacggctttgcgtgttctggacactgattgcagttggatccagtttgtagttctatttgttcatcgaatctgcccagactcctttggtaccattcaacaggctgctgctttctgtttatcccgtggttgtgatgttcctttggtgccttgtgttttcaagaaaacgtcatgttgtagaaggaccattc

SEQ ID NO: 86989 - DNA, 777 bp, Zea Mays
gggccatctcgcacactggcatcccctgtcagtccagcctgggccaaggggcaccacgccaccaccacagccggcaagggcagttcggggaattcgcggggaagggagggcgtggacggcggaacggagcggacgggccgccggccgcacgcgcatataaaaatcccggtaaaattccccccccacccccgacgcgacgcctcaaatcgctccctgcctctggtcacctcgcttccgctcccggctcccctccggccacccagacatcgtccgttcgctcgccaagagacaggaccggagaccatggcggaccagctcaccgacgaccagatcgccgagttcaaggaggccttcagcctcttcgacaaggacggcgacggttgcatcacaaccaaggagctcggaactgtcatgcgatcactgggtcagaacccaaccgaggctgagctccaggacatgatcaacgaggtcgatgcggacggcaacggcaccatcgacttcccggagttcctcaacctcatggcccgcaagatgaaggacaccgactccgaggaggagctcaaggaggcgttcagggtgttcgacaaggaccagaacggcttcatctctgcggcggagctccgccacgtgatgaccaacctcggcgagaagctgaccgacgaggaggtcgatgagatgatccgcgaggccgacgtcgatggtgatggccagatcaactacgaggagttcgtcaaggtcatgatggccaatagacaccacgcctcggccggccgtcat

SEQ ID NO: 86990 - DNA, 113 bp, Zea Mays
actgataggacattgttttttgaacctagaacatttttcttaggaagatataacattgttttccaatctcagaagattgcccgcatttgattaaaaataatattatatctttg

SEQ ID NO: 86991 - DNA, 853 bp, Zea Mays
ccagtcattggcgccaccgccactgcagcgcgcaagcacgcacgcacatttcaattcatccaaaaaaaaagtgagttccccatcatcttcatccatcccgtcggagccacacgttgattagagcggcagttgaagcgcctagctgcacaaacagtctgcacaatgcctgtttgttccatttggtatagcatgccgcacccgttgctcgcggcagtaagtgctgccgtctattcgtccttcatctcaccgccgcggcgtgtcccagcttctctgggacgacggcgtcctgccggcgtcgccgtccggtgcgcgccgaacggcggtggcgtgcccgcagcgggcgacacgaaagcgaagctcaaggtgggctccccgatcatcatcgtcgaggcgcctgtgatgctcaagaccgccgcgtcggtgccgtcgctccggcacaacagcggtcaggtcaagcccggcgacgtcggaaggatcatggcgcggaagcccaaggacgtctgggtcgtgcggctcgccgtcggctcgtacctgctggatggcaagtttttcagtcccttggattctgacaacggagatgatggtgagccccaggcccaggatgaatgagtgatcaatgccttaacggtatgattgaatcgcatgtttactcacatgtcgtgcagacatgtccatgcttatatgcatgattgcaatttgcaatgtaaggtccatgatgtgtaacttctgccgacagcgagtgattactatctgtcttattatcaacttatcatagaggggaaacacagcttcaatattctaattttgagtacaacctcactttttgcacaatcaaatagagattgttatcctc

SEQ ID NO: 86992 - DNA, 320 bp, Zea Mays
ttttctctttctttcttgatgcacaagtcttgaacttggtatctttgcatctgaagtctcacccatgtcgaagctagtggcttcaactcgcacaacttcatagaaaattacaaacatgctcacaaagtttacacacatgttttacaaatgatatagggatattgatgatttttctctttctttcttgttgcataagttttaaacttgatatctttgcatccaaagtctcacccgtaccgaagctaacggcttcgattcacaccttcgccgttcgcacactttgtcgaagcttagtgtccctaccgaatgttagcttcgtt

SEQ ID NO: 86993 - DNA, 686 bp, Zea Mays
gatgttattcttttatttgcaaaaaaacatactagcctcgctaacaagacatatggatgttttcagaaggttgacccagaaacgccacatataaaggaggccaccatgtcagatgtatcaccaactaaagtaaccaaacacaacaatggggatctgctatatatgaaggaattatatcatgcgcttcccatggattatgtgacaatagccaaacttcaatgaaagctagatggggaagccaaccaatatacagtccaaaagttgattgataagatggtgcaagatggatatgtgaaaaattcaactaactaaagattgggtaattgattgaatctgtacacagatggtaacatatcatgtacatataagattaccgtatcattatcagtgcctaaccaatcattgtaccattataaccctataaataagttaaaatactgttacattaataaattatgcaggctattgacaccaatacagagcatgctgagcctaagcacaaataccttctgagagtccacgaagtgggagatggctccacaatggactgcctccactaaattggatctgatcttactcgtactcgagagctaccagagctacaacagaatgtgtccatgcagagcgggcaagaagatttcgcagtggataaggattcaagcaggactctaacaagtgtgcgtgag

SEQ ID NO: 86994 - DNA, 1500 bp, Zea Mays
tgcaagcgtggctgtctcctaaaccgggtgcctctcttcctcaagctagccacttctctctcgatcctctccaagtcgaagcaccgaatctactgcccctcccacctctcacacgtacgtagtgtgtgtgtgtgcgcgctactactcgatcgtgtgtcgcgcgcacacacaaccatccaagaaccaaagattccaatctgaaccaacgttcttcttcacctaaccagctagcagttcgatcgatcgatggaggggggcagcaacagcccggacgggcagtcgtcgggcggcagccccgaggagcggggaagcggcggtagcggaggccggggcaccggggagccggcgcggtcgcggtggacgccgaagccggagcagatactgatcctcgagtccatcttcaacagcggcatggtcaacccgcccaaggatgaaaccgtccgcatccgcaagctgctcgagcgcttcggcgccgtcggggacgccaacgtcttctactggttccagaaccgccgctcccgctcgcgccgccgccagcgccagatgcaggccgccgcagcggcggcggcggcggcggcggcatcctccgcgtccaacaacagctctcccgcggctagcgcaaccgtcggccttccttctggcgctctacaatatcctttggccatgggcgggaccgccgcctgccagtatgagcagcaggcgagctcctcctcgtcgtcgggaagcactggcggctcctctcttgggctgttcgcgctcggagccgccggggtgcccggcaccggcggcggtgggtacttccaggcgtcgtgtggcgcttcgtcgccgctggcgacagggctgatgggggacgtggacagcagtggcggcagcgacgatctcttcgccatctcccgccagatggggttcgcggcggcgagcaccgtcgcctcggcctctgtggcaccgagctccaacgcacaccaccagcagtattactcatgcgaatcacctgcagcgacgatcacggtgttcatcaatggagtcccaatggaggttcccaggggcccaatagacttgcgagccatgttcggccaggacgtgatgctcgtccattccaccggggtcatcctcccagtcaacgactacggaattctaacgcagaccttgcagttgggtgaaagctatttcttggtagcaaggccaacttaaaactgccgcaagtagctagattgtagcgcagtctacggccggtctctagctactcgatattcatcggttcagatgggatgcagctcacgaatcacgatcaaccaagatgggtcatttgcatgcaactgatatatatctgtccatcatccatatatataatcgagaagaaaagttagctagcaccaagaaaatatacatatattgcacctcaagaaagtaactatatatataatatttatgcccttaaaacataagacagcgtatgtgggcggttcagtttttcgattggattatatgaattacaatgga

SEQ ID NO: 86995 - DNA, 192 bp, Zea Mays
ttgctacggtttttctttgttcatatctaaaggagcattgctacggtttttctttgttaatatacaaagaaacattgttcaatctaaatccgaacgaatgtagaaaaatctagttcctagaccaaataagtagcacaaacatcaactttcaaatccgaatgaacatattggtgatgtgcccgtacattgtca

SEQ ID NO: 86996 - DNA, 1012 bp, Zea Mays
atatcaaaccgacaaattggttggagcaaatgttgtttagcttttgtgaggaaagaggcggcggcggcggcggtgattgtttagcaggagaagatccccttctgcactcatcgaacggccgccgccacctagatcagttgggagtgtctcctgtgccttttctagcacagattgtaggtacttcccttgtgcttcaatgcggagttgcaaatgtctttgtacctgttgaaaggcgtcgtttatgtgtaaggtttaagtggctagctggtgatccatttccttcaagtggtttgtccattgccatggtgcaaccaatcactgaagagcagaaagggcattcagtattaagcttaattggaggccgataactgctagagtctggttttataaggaagacaagtgaggagagaatttcgaatcgttagaacaaacactcaagcctggaccaatcctggcagcaactgaaaagagggaaacggaaagtgggtagacgaatccgatgggctgtgcatctgtatggagtcctctgagtttggctactatctgttctacataaggcgcagaaagttggggcttaaaaatgacggcgagcgcgcacgcgatcccgcgggaagggaataaggaaaagcgatgttgacaaagctggatgggaatcctgcgcttttttggaggcgaagatgagaaggaatatatcgcctgtgtcgacctcgccggcctgcttcttctgttccgtggcttggttgtgctcccgctggatcgtgccagccgccagcaggatgatgagcacgtgtgaaccctggcgtgggtatgttgttgtttgctctgggagtgttttgctcagtagtcgttctttgtttatttgtacaaactcgtccatttgtgtcggttgcagaaatacgaaaacacttcaaatggtacgaattggaatttggaaagtacagagtatagaccgctggataagctgtttttattgtttggcgtaatgaactggtgatccatatgttcgccttaa

SEQ ID NO: 86997 - DNA, 1578 bp, Zea Mays
ggacgaggagttcccgtatctttgcgagaacagcccgcccaatggccatgagaaccaacgcctcttccagccgccgcttaccccgtcgtcgccgcgcgcgttgccactggactcagcacctgagcctctgccaccgtcaattgccccgccgccggctcctccgtgggcacctggtgcctgcacacggggcaggagctgtgcatctccagccacggcaggatgcactggtcgtggaaccggtgcttgcacggcatctcgcgctccgcgccgccaccggcgacctcgtccaggcacatggggcaggtggttgtgtttcttgtggaacggcccaactggttggtaacttggtatccagtccattgtgcatcacaacaaggaccaaataaaggcataggttagtccgtgggctaccactaccaggcctaccgatagggccatctctttgacccatctcaatatgggctacgcccaagaatcctctcatctcagggaaaaagaaggcaggactggcaagaaggaaacagaggtccgcgagcaaacgccttcaagcccatctcggtagccggagaacgagcagcagcggaggcgatggcgtccccggatcccggccacacgccggcgcaaggcgaggaatctgcctccccctcctcgtggcctccccgaaagctccagagtttcacaccagggctgtggtcacaatacaaagcttatgaggatgcagttgtggagaacattaaaggaactattgcggatgctctggttcttgtgagagagcatcaggcggaggcaattggatgtgccactgttgcaggattcattctgttcagaggccctcgaagatttttataccgcaatacctttggccgtttaaagactgagaaggatttactgaatgatgccgagcaaagtatgatggagtaccaaacatctattcagaacttgaagaaagaatcaaaatacactcttgacaaagtagctatcggtgaaagcgatgtgcagcgtgggcgaactgatctgagatctactgggaagcagatacaatctcttataggttccatttacaaagcagaatctacagctgcaggtctgatggatagactaagaaccattccaaccaggcaatctctcgagctgcgagcagaggtggcttccatggcctccgatttgaagaaccagaggtgtgccttgcaggaaaggatcaacaaaatatctgaatatggtgtccgtgtctgaactgctgcaccgtctgtacatttcccctcatagagcctcttttggtcctcccgtacaataaactgtgaatccaccgtgaggtgcgcgttttggttagacaggttccgattctaaccatattttctgtcagcattttgaatgctaggacagacatggtaactcatcacaaccataaattgttcctatcactttaacgttgagcattgctcgtttctgggaagcagatgggctgatggctactatcttatatatgcgattgcaaggaaaaactttgttccaccttgggtgctgtgcttcctgtatacaattctgctattccgtttcggaagaaaaaaaaaacaaata

SEQ ID NO: 86998 - DNA, 562 bp, Zea Mays
taattagagatgtcaatggggacccgatacccgccaacccatggggaattcccctattagggtacgggtatgggacaaaaattgtccccatgagtatggatatgggacaaaatctccacccattgggtaaacgggtatgggtttgggaagcaataatccgaacccgattacccatgggtatttcatatatgtacatctgtcgtgtttgtatgaatgagttgaggtcgagccgaccaccaagcccagcacgacagtgcaccaggccccaggtcctagcccaacaaggcaactagcagatcatggttcatgaatgagtgcttgccgatgtagtgatgtctgaaatctagattgtttgtgctacatgttagtacctagttatcccttaattggggatggggacccattggggacccgaaacccgaatgggtatgggtatgggatgagttttgtacccatgatgggtatgaggatgggtatggggatggatcaaacatgacggggatgggtatgagatgctataacccggtggggaattccccattgacatctctaaccgtaatcg

SEQ ID NO: 86999 - DNA, 1714 bp, Zea Mays
cacagacggacagacccaaaggccaaaggtccagagcgctcgacctaggcgagtgggtgactgcttcaaccacgagcgcagcgcggcggcgacgccatctcccacggatgtagcttcgtctccttcccgttcgctgtcgtcgacgccatcatccacgggcacagcgcgacgccgctccataccgagtctgtgggcctgacaccaggggagtcgccctccagccctcgcccggctgcccctgcctatgcccctcggctccgaccaccgagttttggccaagtcgccaatcgctcagccattcagccatgtaagcatgcgagagattaagcttcctttcatcacctgcttctttaatttatggcatctcgagtagtctggtaaattggcatttatgcctaatctgcttgcgtcggacgcctgatacctctgttgtatgatttacccaaacttctatgttgtctgctttaattagtgctttcaattctagcgttcttttctcgatctgtagttctgttcttttttggacgagctcgaatcttgcattatatataggagtaagtatggaataaagctaggtgccacacattttgtttgttgcttataagaaatgcttaatcatgtttctaagtgcatctgtttagcctctcattgggtatatgcatttctttattttacttactagagcattaagatttctgcgtagcttttatgcagtctagcatctaactagttcatctatgtaatcaatatgtagttattatacaatttggcaagttctgatagatggcttatagttatatattgcatacgatgttgcttatggcatgcattttaatacctatattgtatcaatagcggtgaatgagtattttgaatgcccctccgcttcctagcctttttgtatgtttatccttgttaattgaattgttaactttgtttagttttcttttaaacatagatggatttaggggtatgtgagggttcaagtactaatatcacctcggattaccattcggtgcaaatgtcaaccagaacgacaaaggtttgggagtattttcaacaggagttagttgaggttgatggagtgatgaaggctatttgcaaatactgtgggacgaagctgacaaggaaaaggaattcatgcacaaatagccttagaaaccatgttgcggatacatgtcctaaaattctagttgaggaccgcaagcgattcattgctacaatgagaaaaaagccaggagaaggttcatttgtgtttgaccctcgaaagactcatgagtgcatggttaagtggtgcatcagtgccgaggtcgcattcaacaagtttgatgatccgttctttgccccgtggatggagtcattgcaaccatcgtttagcggtgttgggccttagacaatgagaaatgattgtattaccatattcaagatgatgtggcaagagctaaggaatgagctacagagtcttaactctcagatttgcttgacatctgatctttagacctcaaatcagaagttgggttatctttgcttgacaacccactacattgatgcaaactttatcttgaaaaaagaagactattgcattcaaagttgtaaaatatcaccctctcgcatacaagcttttaatgagattgctgagaggtctggatttccttcaaaggctggattaattcttgatgttccaaattgttgcaattcgacacacaacatgatt

SEQ ID NO: 87000 - DNA, 1460 bp, Zea Mays
cacagacggacagacccaaaggccaaaggtccagagcgctcgacctaggcgagtgggtgactgcttcaaccacgagcgcagcgcggcggcgacgccatctcccacggatgtagcttcgtctccttcccgttcgctgtcgtcgacgccatcatccacgggcacagcgcgacgccgctccataccgagtctgtgggcctgacaccaggggagtcgccctccagccctcgcccggctgcccctgcctatgcccctcggctccgaccaccgagttttggccaagtcgccaatcgctcagccattcagccatatggatttaggggtatgtgagggttcaagtactaatatcacctcggattaccattcggtgcaaatgtcaaccagaacgacaaaggtttgggagtattttcaacaggagttagttgaggttgatggagtgatgaaggctatttgcaaatactgtgggacgaagctgacaaggaaaaggaattcatgcacaaatagccttagaaaccatgttgcggatacatgtcctaaaattctagttgaggaccgcaagcgattcattgctacaatgagaaaaaagccaggagaaggttcatttgtgtttgaccctcgaaagactcatgagtgcatggttaagtggtgcatcagtgccgaggtcgcattcaacaagtttgatgatccgttctttgccccgtggatggagtcattgcaaccatcgtttagcggtgttgggccttagacaatgagaaatgattgtattaccatattcaagatgatgtggcaagagctaaggaatgagctacagagtcttaactctcagatttgcttgacatctgatctttagacctcaaatcagaagttgggttatctttgcttgacaacccactacattgatgcaaactttatcttgaaaaaagaagactattgcattcaaagttgtaaaatatcaccctctcgcatacaagcttttaatgagattgctgagaggtctggatttccttcaaaggctggattaattcttgatgttccaaattgttgcaattcgacacacaacatgattatggaggccattgagtacaaagttgtcttgaagagatatgctgaggaacaacttgagccttcaccagatgatgaagagtggacaaattctgaggcgattggagagtttcttgggggcatttgaggaagctacaaaagtattctcaacacatagaagtccaacatctcatttgtttttgcataatgtgttatgtattgtatccatcaagctctaagaaataaaaattggcaaatcaattgtgtgcttgaggatctagcactagcgatgtatccaggtgttggtgctcactggagtaatggagtcgaatgcttttggcgcgcttttttcctattgcgaattgtgttgttttactgtttgtgaggtcgttaagattgcaatgcgatgtggttttgatgct

SEQ ID NO: 87001 - DNA, 530 bp, Zea Mays
atctaagcgaaggcgaggcagaacaatgaaagtacacacaaagctggtcgtcagacacaatggcatattcttgcgccttgtggactgctgcttccgtggtcgctttccttgtcatccgcgtagcagaggcgaggtacggcggccctgggcagtggaggggcaggtgcccctggcgacctcagcacccgcaaacgcgaggtcacggcggccctcgcgcaaatctctcacgagaccacaggcgggtgggcgacggcgccggatggccagtacgcgtggtgcctgtgctacaaggaggagatcaggccggcgagcaactactgcgacgcgacggacgagcagtggccgtgctacccgggcaagtcctaccacggtcggggcttcaactacgggccggcgagccaggcgctgggcttcgacggcctgcgcaacccggagctggtggccaactgctcccagaccgcgttccggacggcgctttggttctagatcgaagacccgtggaatctggaagaatgaagatgcttacctaa

SEQ ID NO: 87002 - DNA, 471 bp, Zea Mays
atggcatattcttgcgccttgtggactgctgcttccgtggtcgctttccttgtcatccgcgtagcagaggcgaggtacggcggccctgggcagtggaggggcaggtgcccctggcgacctcagcacccgcaaacgcgaggtcacggcggccctcgcgcaaatctctcacgagaccacaggcgggtgggcgacggcgccggatggccagtacgcgtggtgcctgtgctacaaggaggagatcaggccggcgagcaactactgcgacgcgacggacgagcagtggccgtgctacccgggcaagtcctaccacggtcggggcttcaactacgggccggcgagccaggcgctgggcttcgacggcctgcgcaacccggagctggtggccaactgctcccagaccgcgttccggacggcgctttggttctagatcgaagacccgtggaatctggaagaatgaagatgcttacctaa

SEQ ID NO: 87003 - DNA, 1101 bp, Zea Mays
cgcgtaatcgtaccagacagagcccgcggaccgcggttcccgtgggcgatgacgcccttcgcttatccctcccgcctccgcagcaccgtcccttccagaaacacagaggagacctcgtcgctcacgctgtccagctgctatataaacgggcacgtccccggccattcggcgccacgattgcagagccagagcgagacgcgactgcttttctgcttcatccacattggtagctagctagcttacacgttcacgcatcgctttccgggccgtctccggtggtttagctcagcagagcggggaaggaagaagatgacctccgtgagcgcgaggcccgttggcgtggggtactgcttcggcggggcgaggtgccagccacggtcgcgggtgcgggtttcggccgcggcctcggcagtggccgcgcccgcgcccgcgatggcggcgacgatgtacgagctgctcgccgtcgaggagacggcggggcccgacgagatcaaggcggcgtaccggcgcgccgcgcggcggtggcacccggacgcgtgccccggcggcgccgaccgcttcatggcggcgcgggaggcctacgaggtgctgtccgaccccgagcgcaggcgcggctacgacatccagctccgctgcggcgcccacttcggcgacgccgggtaccgcgcggcacgccgcgccgggttcgccgactgggaggcgcagctgaccgggctgcagtggcgcgcggcggggcggcgcgggcgcgccggcggggagacttggggcagcaggatgcgccaggcggccgcgcagccgtccttgtagcggcgtcgccggtggctggcctttgatagttcatacttcgtagtactagtgtactaccctaccttcccctttcctcttcgacaatcgaatggcccgagaagctgtaattgcgctgttctgcagcgttttctcttgccaacacgtcatcctcgtcgcactgttcggagtgcagacgagcttgaagtctagaagcagtagacattttccccccctttgaagtgtagtactgtcaacttttagttcccactcggttacatacggttcgaatcctatctcagcattgttttgcaacta

SEQ ID NO: 87004 - DNA, 906 bp, Zea Mays
atgaacatatttattttgtgtctttcctttccaaatagggaatgcctcctagaatttagggaagctgtgtcaaccctgatatttgctgccatttggtatcctgatttacctaaactttgtgacctaaggcacatattcgcagagagatatggaaattttgttgagcattttgttggccaggaggtctttgcaaaaaagacagtaaagttctctgtgttggacgcgatggggctctcatccaaacctctccacagaggggtgaaacatgacatctcttgtctgtctcaagattcgtatggtccatacattgctgcgtcatgtatggataacattttgagacatgacttcaagttcttgaaggtagagaacttgggaaatcaattggttcaacaaaaaggaaagcccaagatagaagtgtatgaaaaggacaggaagaagggtgctggggctttaacaactcatgctagggcggtcggacttgggtacaaatctgtagcacactttctaattgccaagcataataacaaacaagtgcccactgatatagtgcgagagccagagcagcacgcctttgcacagattgttagcttcttagtggatttgtgggaagatggtggctcagatgatggatatgtacttgttaagcaggaggatgttgttgatgagatgacttcatttatggctgcatgcttggtgtcaattaaaaagaccaaggacctgccccctgatcaacttcaaaaagcgcttaggaagacgttttcagctgaaaagaagaaaagtaaaatccggaaggcattggatggaactaaagtcatttataatgttgcttcatggggcgccactgctgttggcagcataaagcttgagaccatttgtttagtctatgcagatgagttcgactgctaa

SEQ ID NO: 87005 - DNA, 1132 bp, Zea Mays
tgtacagtgttctccatatgaacaagggtctcataaaggtttacactagcatcaagataagagtcttttttcgtcaaggtcactgagtggccatctggggttctcacttcatatataccttagtatatagataatgtcgtaacgcatgagcacttagctattattaataatttgtgagccgttgcaacgcacgggtacctatctattatgatggcgaggacaactccattgccgctaagagtcaaatcaagtttgagacatgacttcaagttcttgaaggtagagaacttgggaaatcaattggttcaacaaaaaggaaagcccaagatagaagtgtatgaaaaggacaggaagaagggtgctggggctttaacaactcatgctagggttcagtaatgttcttccaatactactagcatatgttcaaagtcaccaagctcctgacaagccagttctgtggattacccataatgcaaaaagttttgatgtccctttccttaaccaagagtttgacagaagttcagcccaggttcctgaagatcatttggctatttgtcgatagtctttgttcagtgaaaaagtcgaagaaaacaaaaggaggatgttgttgatgagatgacttcatttatggctgcatgcttggtgtcaattaaaaagaccaaggacctgccccctgatcaacttcaaaaagcgcttaggaagacgttttcagctgaaaagaagaaaagtaaaatccggaaggcattggatggaactaaagtcatttataatgttgcttcatggggcgccactgctgttggggtctacaataatcgagcattacatacggtcgcaactacaacgttttagacttcctgccgtgtgatatccaagttcctttgaatattgtgtcaacaactaaggcatgttagaattgcttgcgtgtgtgctttttcattgttcagcagcataaagcttgagaccatttgtttagtctatgcagatgagttcgactgctaattagcagcgcctcccagtcaaaagcagcatgtgtattgtataactgtaaatattgccttgatttgaacaaacttgttttttgtgctagaactttatttcacgaacttcatatgatagaccctactgtagagta

SEQ ID NO: 87006 - DNA, 86 bp, Zea Mays
cagggtgtgagggttaagaacaagtcagtggatggctggcgggcgcacgaattggaccagaatgcgtcagcgtttgattttgcgtc

SEQ ID NO: 87007 - DNA, 317 bp, Zea Mays
atgaggatgctgaactccagcacaaccggcgttgagctggacccctccgccggcgcgggcgcaccgcccgccgacgccgcttccgacgcgttcagcaccgacgaccctgagtcgctcgcctccatctccaccggcggtggcacctcggtcacgttcagatccagctgcatctcctgctcctgctcccctcccctccaagattacaactcgcaaacggcagcccgccattgatccccagtcgcaactgggctgctagctacctggcgaactggtggtgtactggtgtctacttcaagaagaaccagaggaggaagagg

SEQ ID NO: 87008 - DNA, 699 bp, Zea Mays
cttactttaaggacaaaggttatgatgaggttgtattcaaggccatggggagggctatcaataagattgtcatggctgtggaattgatcaagaggaggattgttgacctccatcagaataccaccactggatctactgatattactgatatgtgggagccattggaggaaggcctacttccgcttgagacaacaagacatgtctctatgatcactataactctttcaaagaaggagatggacacatcatctatcggatatcaatctcctttgcctgctgatgaagtgaagcctttggttaaatatgataatgatgaagatgcacactcacctggtggccgtggaaggggtcgtggtggtcgaggccgtgggcggggcaggggcagaggtggacgtggaaatgggttcaatgagtatgctgatgctggttgggaagacgatcacgcccctgcatatatgggcaatggatatgcccgtggaagaggtcgcagttttaggggccgtggtaggagaggcggctacaataaccagcctgaataccaataggtcggaggttattacgaggaggcacctgttcatgctccagctttaggtgggtaacctcataggacacaaatgaagtgtacaaaatattttcaaacaaaattacatgtcaacaaaattaagcaaggcctgaagataatctgaagagctttgtaca

SEQ ID NO: 87009 - DNA, 877 bp, Zea Mays
aagattttgaaaacctgcggaacaaattaataaacgaaccagtagaagccaaacgaaatctttgtatttcatacacttagcttttcccctcctttttcaaaaaaaaaaaccctctcccccaactccacctgcttcgttcgcttcccttcatccccactccaccaaaccctcgcgtcgctgggactgggagcagagtagagcacagcggagcagattagcagaaggtgtcgagtggaagcaaatggccaatgagtggccgcggtggtggtagcatcctcctcgccttttctccccgtctcccgcgttctggttgttgcagcgagcgggagcgggaggacacgtgctacccccgtcgcttctcgggcacgcctccctcactcggatctgggccgcgcgcgcgagatcctgagctccgggttggagagctcccgtgctccagctcaggtgacgtcgatggagcccgcggtggctacagcgggtgaagggcagcggttcaagcggattccgcggcaggcgtggtcggggaacctcgaactgggtcctctggtagggctcgttagctccctgctcgtccgtgcttgtggcccgtggtggctgatatgatggtgccggtgtgattttattgggttatttggggattgctgtgccgttgcgtagtcaatgtagtgttgagggaagcctgaggtgtttgaaatgtggtagaatggtgttcggatctcaatgtcatgctgcttggtggttagggttcaggggtttctaaatgcgttaatgctttggtgagagctcaggagtgtaaactgatgccactgacacttagtggtgcagtgccacgagtatcacattgttgaggtcaaacctgcattgtgttgcacaagaa

SEQ ID NO: 87010 - DNA, 2022 bp, Zea Mays
aagattttgaaaacctgcggaacaaattaataaacgaaccagtagaagccaaacgaaatctttgtatttcatacacttagcttttcccctcctttttcaaaaaaaaaaaccctctcccccaactccacctgcttcgttcgcttcccttcatccccactccaccaaaccctcgcgtcgctgggactgggagcagagtagagcacagcggagcagattagcagaaggtgtcgagtggaagcaaatggccaatgagtggccgcggtggtggtagcatcctcctcgccttttctccccgtctcccgcgttctggttgttgcagcgagcgggagcgggaggacacgtgctacccccgtcgcttctcgggcacgcctccctcactcggatctgggccgcgcgcgcgagatcctgagctccgggttggagagctcccgtgctccagctcaggtgacgtcgatggagcccgcggtggctacagcgggtgaagggcagcggttcaagcggattccgcggcaggcgtggtcggggaacctcgaactgggtcctctgcttaatgaaagcttagatcactggccacatctaaatgagctggtacagtgctacaaggctgattttgtgaaggatgactgcaaatatggacactatgagagtgttgcatcaccgtctttccaaaatcaaatttttgagggacctgatactgacatagaaacagaattgcagctttgcaatgcaaggcattccaagtctgaggatgctactgaagatgatacaccaagcacctcagggaggcaaatatatgaaactgaatcatctggttcgtcttcaaaagtgcactgtagtttgtcaccattgccagcatatgaggctgcatttgattgggagaatgagaggtctttgatatttggccaaagggtgccagaaagtatacctgcaataagcaacagtggcttgaagataactgtcaaggtactatctttgtcattccaagctggattagtcgaacctttcagtggaacgatttgcttgtataacagagatagaagagagaggctgtcagaggacttctatttccatatgcttccaacagatatgcaggttgaccagggttccttggatcgtcgaggtgttttttcattggacgcaccttctccatcggtctgccttttgattcaattggaaaaggctgctactgaagaagggggagtaacaccttctgtttattctcgtaaagagcctgtgcacttagctgagaaagagaagcaaaagctgcaagtatggtctcgaatcatgccttataaagagtcatttgcatgggccatgattcctctgtttgaaagtaaccgtgcgggtggtcttagtgatgctgcttctcctagcagtcctctagcaccgagtttatcaggatcaagttctcaagatagtattgtggaccctatttcgaagcttgctttagatggaaaagtcaaccattactcaagtggaagctcagttattgtagagatatcaaacctaaacaaagtgaaggaaagctatatagaggactccctccaagacccaaaacggaaagtacataaaccagtgaaaggtgttttgagattagaagtggaaaaacttcatgatgaccataatgatgtggataacgcttctgaaggtggaagcatggccaatgatttgaatgatgctggtgacatcaataatggcagaagcaacagaagtagctttgatgggattcacagttctgtgaattctattgccattgccaaaaaagatgctcatcacaatggacacacttctaatgctgagaatgttgacaattttcaagcttttgactttcgggtgctgacccgaagtgagccattttcgcaactttttcattgcctctatgtgtacccattgactgttagcttgagccgcaaaagaaacctctttgttagagtggaactgagaaaggacgattctgacatcaggaagcctccattagaggtgatcattggatattctgtacttccactgtcgacacatatt

SEQ ID NO: 87011 - DNA, 751 bp, Zea Mays
gttactttcagatgtgtccttgccgattttgagagagctcgttccacattacctgcaggaaagtggaaaggagagaatggactatctggaagatgggaaaactgttttcaggttacgtttaaggctctgctcttcattgttcccaattaatgaaaggataagggacttttttgttgagtatgatcgccatactctacatacaagtcccccatggggttctgagcttcttgaggttgctgcatttcgagccatggttaacattttaacccgtgtgcagcaggagtcatcagatggggctgaaagaaatagattccttattaactatgttgattttgctttcgatgacttcggtgatcggcaagcccctgtgtatcctggtctgactactgtttggggaagtcttgctcggagtaaggcgaaaggtgaagatgtcccaccactgcaattgaaagaaggtgtcttcaggtgcatcatgcagctctttgattgccttctaactgaggttcatgagcgttgtaaaaagggtttaagcttggcaaaacgcttgaacagcacacttgctttcttttgctatgatcttttatcaattattgagcctcgccaagtttttgagctggtttcgttgtacatggacaagtttgcaggagtttgtcaatcagtccttcatgactgcaaattgacattcctgcagataatatgcgaccatgatctattcgttgagatgcctgggcgggatccttctgataggtag

SEQ ID NO: 87012 - DNA, 3118 bp, Zea Mays
agaaactatctctcgtcagttctcatccaagagatctttctgaccttagaccatgatgatttatctcaacgagcgaaggctgctcggattttggttgtccttatatgcaaacatgaatttgatgcacgctatcaaaaaagcgaagacaaattgtacattgctcagctgtattttcctcttatagggcagatccttgatgagatgcctgttttctataatctgaatgccattgaaaagcgtgaagtgctagttgtcattttgcaaattgtgaggaacttggatgatgcaactcttatcaaagcatggcaacaaagcattgctagaaccagattgttcttcaagcttcttgaagaatgtataatccatttcgagcacaacaaaacaggagacaacatgctacttggtgctagttctcggagcccagatgtcgagcatcctgcatccccaaagtactctgaacgattgtccccatcggtcaacacatatttgtcggaggcttcgaggcatgaaataaggcctcagggaacaccagaaaatggatacatgtggaacagggttagccctcaattaagttcccctaatcagccctattcattgagagaagcacttgctcaagcacaatcttcaagaatcgggtcaaccgccagggcattgagagagtctctacatccagtgctgagacaaaaaatggaactttgggaagaaaatctcagtactgccgtgagcctcgaagtgttgggaataactgagaagttttcagttgctgcaggcgctcgaagcatcactactgattacgcgaagctagattgtgtaacatcaatcttaatgggtcttttatctaggaaccaatccttggctttttggaaggctttccttcctgtggtctacaatatatttaatgttcatggtgcaacactaatggcaagggagaatgaccgcttcttgaagcaaattgcttttcatcttttgcggcttgctgttttccgaaacgattcgattagaaaaagagctgttgttgggctgcagattcttgttaggaactcattcaactatttcaaaaacactacaaggttaagggtcatgttgacaattactttgtccgagttgatgtccgacgtgcaagtaactcaaatgaaattcgatggttctcttgaagaaagtggtgaagctcggcgccttaggaaatcactggaggaaatggctgatgtgagaagcaaggatctgttaaaagattgtggcctccctgttactgcattggaggcggcccctgaaggctcctctgataataggtggtcttgggtagaggtgaaacatttgtctaaatgtctagtccaggcccttgatgctggtctggaacacgccctcctgggttctgtagtgactgtagacaggtatgcagctgccgagggtttctataaactagctatggcctatgcacccgttccagatcttcacattatgtggttgcttcatctgtgtgatgcacaccaggagatgcaatcatgggctgaagcagcacaatgtgcagttgctgtagctggcgtgatcatgcaggcacttgttggaaggaatgatgctgtgtggagcaaggagcatgttgcttcgctgcgcaagatttgccctattgtcaacactgatgtgagtgcagaagcatctgcagctgaagtcgagggatatggtgcatccaaattaacagtggactcagcggtcaaatatcttcaactagccaataaacttttcacacaagctgaactctaccatttttgtgcaagcattcaggaactcataattcctgtgtataaaagcagaagggcttatggacagctggccaaatgccacacatcgctcacaaacatctatgagtcaattcttgaacaggaggctagccctataccattcattgatgccacatactaccgagttggtttctatggtgagcgttttggcaagctcaataaaaaggagtatgtatttagagaaccacgggatgtacgtcttggtgatattatggagaagcttagtcatatatatgaggctaaaatagatggaagtcacactttacacataattccagactctagacaagtcaacgctgatgagttgcagcctggcttctgctatttacagatcactgctgttgatcctgtgatggaggatgaggacttgggtagcaggagggaaagaatattttctttatctactggtactgttcgtgcacgtgtttttgaccgttttcttttcgatacaccattcacaaaaaatggaaaaacacaaggtggtctagaagaccagtggaagaggcgcacagtgctccaaacagagggttcctttcccgctttggtgaaccgtctgccagttatcaaatctgaatctctggagttctctcctgtcgagaatgcgattggaatgatcgaaacaaggacagctgcattgagaaatgagctagaagaaccacggagttctgaaggtgatcaactcccaaggcttcagagcttgcaaaggatactccaaggaagtgtggctgtgcaggtcaacagtggggtattaagtgtgtgcactgcattcttatctggtgagccagcgactaggctcagatcccaagaactgcagcagctcatcgctgcattgcttgaattcatggctgtctgcaagcgtgcaatccgtgtgcatttcagattgataggggaagaagaccaggaattccacacccaacttgtcaatgggttccagtcactcaccgctgagctatctcactatatccctgctatactctccgagctatgatagaactgtagcaagccagaaattaggtagcatgtgaatggttgttcattcattcagttgcaggttcccaccaaatgtccatatttccattagctttggttgtatagttctaggaaccggaaattaactagtcttcgaagttctgtaccgtattgcagaaccgattcctgattttggagtgtaaagtctgtataatacctagtgttatctgttatgcaccagttatatgctgagttccttcttttttgcagtttgctactatgtcacaactagcggacattttgcacttgtattgtgatacatagtgcatatatatatatatatatatatatat

SEQ ID NO: 87013 - DNA, 677 bp, Zea Mays
gtccctctctcgaccctttcttctccctgtgttgcttgccagccgagccgacgcagccacgactgctcgtctctctgccaccgcgcgcagtcccgcctgcttctgcgccgttgtgctcagcctcacccacgtctgatccgtttcctccatgtcgcggctgtttctccttacgaccaatgcagccgccatcaatggttgaaaacggaagcttcaatgcgttcaatcggccgccacgacttaattctcccctccgtgattctctccttctcccagctataaagcgtgcttgccagtcctcatttccaaagccccaacactcaatctctgctctcctccttgcacacgcttgcacagcctctatcatcgtgttctgtacgccgcgagctctgctccccctgctcactgcccacacacaacaatcgtgctgccactcacggtcgttagcttgttcgagctctgcttccgtgcacagcgcgaagacgagacctattgccccttgtcggagctccgcccttcgctgctggtgctccttcctctgcttccctgcagcgccgtccgccgtcgccgatctcgacgccgttcttcccctctcctgttcgacattgctgcgagaagctgattgtgtggtagaggatccgaattcatgtgaggacgatccgcaggatacttttgagcaa

SEQ ID NO: 87014 - DNA, 401 bp, Zea Mays
atggtgcgcgtggccatcgcgggggtcacgacggcggtgcggttccaggagctggtggactggatggaggagcagaaggcggcgttcagggacggcagcaagtggacggagatagtgaacctggggctcgggagccccgcgctcatcatgtctgggctgcttctgttcgccatcgacggggacctcgggttcgggtcttcgggaagcccagcctcgtgctgccctgggtgcgccacgaccggctggggtccatgtccgtgacggtggtgccctgccctagtggcgacgggtcgtggttcttcggcggcaccaggatgtggtcgcggctcatggaggtggtcgaatctgaccctttgatgaagccgacagtgaacctgggaatggcgacagcggcgggatcc

SEQ ID NO: 87015 - DNA, 1428 bp, Zea Mays
ttgtcatctgaactcgaatatatatccttcatgtacgttaaccccactggttttgctgaactaagaaaaagagttgaagacttgtacaaggcccatgaacaagaattggaagatgcaaatagaattttaaggcaaaagattgctgaggatcagtttctcgatcatgttagtgttgaaacagaagtgcgctcagtttacaaagagctctacagcatttacaaaactacactcaaatccaagagttcaataaatgaggtgaatcaggttgctcagctgaggatcatcataaaatcaaaatcctgcaatggtgttgggccattgtgcactgcacaacagatctgctatcatgttcttggccttgttcatggcatatggacacccgttcctcaagctgtgaaagattacattgcaactccaaaacctaatggctaccaaagtctacacacaacagcgataccatttcttaatgagagtatgtttcatttggaagttcagtggaagaggagtggtttctggacctgttcagcctggaatatcaagtggaagaaatgccaaggggaaagtaatctgcttgaacaacacaggctttgctctgagggtactatacattatctaatccaatcatactgatgcctttaaagctaacagtactactttaaatagtgtaccacagtaggtttgagaaaaaaattaatagcataccatctttcatagattggttggctcaatgcaatctgcgagtggcaagaagagtttgttggtaatatgagttctagggaatttgttgatactatcacccggatcttctaggaagtcgtgtctttagtcccttgagctcagtggctctgacattggtggtggctatgagctttatgttgatgaagccaagccaagaggcgacgaccagcgtggtggtggtagatctggtggccgttctggtgggagatttggtgaccgttctggtggccggcgtggtggtggtagatttggtgaaagatctgggggcaaggatggtggcggcagattcgatggccgacgcggtggtagggatggcagccgtggacgcggtggccgtggctttgttaacaagcagagcgctggcactcccagtgtaggaaagaagaccacttttggtgatgattgatgatgaacgcggaggatgcggcaaaaggaggaatgatctgctgatccaatgaaactgagtttttttggtcttatgttgtggtaccataactgaaatttggtatttttctctactatttattgtagtggtatctggatttcccttgtgttgcctatgttgcaatacgccattttgattctttttttactttgttgtccctggagccttgagggtatatataatatcagtgatacgatgatattttgacacacagattttatatatcatagtgacttttatcgttc

SEQ ID NO: 87016 - DNA, 249 bp, Zea Mays
atgtatgccactccacagtcacccacgaccaaggcgactgctgctgccgctggactcgccgactttgtctcgaccaccctcacccgcgttcagcaggacgacgtcgacgcccgccgagccaaggagaaggccagtgccactgccatggagcgccagcaagcctacgacgcagcccttgcccgtgtcgccaaggcaaaggaggaggcatggccgctgccaacgctcacgacgccgcaatggcgcgcgtag

SEQ ID NO: 87017 - DNA, 2762 bp, Zea Mays
agcccaagaaaccaacccccgacgcgcgcgagacggcgagagagggagagataggtgtgcggcagtaatatagtgggtttgctctttgattggccgcggctaagcaccaaaccttggggaaatggagctgctcagtggtgcagtggcgcagcgggagcttggggaagcggaagcttgcgagcagccagagcactagccattacccagcgctaccatacactgacatatctatcgatctgatcgggctgctgctgagtgcagtgtgtgtacaaaaggccctgaaggcggtaagaccgagctgcacctgcactagaggtgaaggggtgtgagggagaagaaaagcgagtagcccgtgagctgctgcggtgcgagggagcccagggtttcgtctcgtctggccctcttctcttggcgcggccatggacgcctacgaggccaccaaggtggtgttctcccggatccaagccctagacccggaccacgccgccaagatcatgggcctcctcctcatccaggaccatggcgagaaggagatgatccgcctcgccttcggccccgagtctctgctccacgctgtcatggccaaggcgcgcaaggacctcggcctgctcctcccggcctcgccgacctccgttgcggccgccggccacgcgccgttcctgcagctcccacgccagaactccgggcgcgcgggcgcgccgtcgccgctctcggtgtcctcgccgtcgtcatggagccacgcgcccgtgttctccaggagcaacagcacgagtaatggcaccgcggaggaggcggcgggggctggggaggagctgcccagtcccgtgaacggcggcgcggcgccgttctttcctcgtcaggccggcgacgcgctcctggacgacttgcagctgcaggagcagctcgcgttcctcaacgagggcggcgggaacccggcccaccagctcctggggttcgacggcggggagtgccggagccccggtcccggtgatgccgatgggatgttcgcgttcggcctcgggtggcacaacgggggcccagcgcaccgtaggagttcgtcagtcaacgagctctgccttggcggcggcggcggcggcggcgatggtttcggttggaagccctgcctctactacgcgcgcgggttctgcaagaacggcggcagctgcaggttcgtccacggcggcctctccgacgacgctgctgcgctcgctggcgccaagatggaggcagccgccgatcagcagcagcagtgccaggacttcctcatccgctccaagggccagcgcctcggccccgccgccttcccctactcccccaccggctccctcccaggctcgccctccgccgctagcaagtgcctcagcttcctgctgcagcaacagcagcagcagcacgacagagccgcggcggccgcgtctctgatgctgggcggcggcgacgaggcgcacaagttcatggcccggccgcgcctggaccgtgccgacttcgctagcatgatgaaccccggctcgcgccagatttatctgaccttcccggccgacagcacgttccgcgaggaggacgtctccaactatttcagcatctacggtccagttcacgacgtgcgcatcccctaccagcagaagcgcatgttcgggttcgtcaccttcgtctacccagagacggtgaagctcatcctggccaagggcaacccgcacttcatctgcgacgcacgcgtgctcgtcaagccgtataaggagaagggcaaggtccccgacaagtacaggaagcagcagcaaggggacttctccggctgcacgacgcccactggcgggctggacgcccgagatccctttgatctgcaccaactcggcgcgaggatgctgcaacattcgaacagcgccaacgagctgctgttgcgccggaagctggaggagcagcagcaggctgccgaactgcagcacgccattgagctccagagccgccgcctcatgggtctccagctgctcgacctcaaggctcgcgcagctgcgacagcatcggcactgccaacaccaattgccaatgccttcgcgtccagccatcctttgagcaccatggcagtcgagtcgccactagagtctggagagcagctcaagctgagcagtgggtttgctctggatgggaagctcaacggtggcgacaaggaagaatctgcttgcgaggcgagccctgacgccgctgatagcgaccaaagtggagagcacaacttgccggacagcccatttgcgtcccctaccaagtctgccgcgctcgtgcacgacagtttcgccgccacggagcctgagaacaccgcgtcctgtgttgggagcaagatcgacggcggcagtaaccatctccgcccccctgcgctggaaatcccttcgcccagctcctacttcttccccatgcgcaggctgtcctccgatcacggagccatggggatgtaaagttcagcattggaagcgagtgataccccagcctaatcatagtaagcactaacgtccctctttattccgactaggctgcttctcaaataacagccttttttttgttttgctttactaatcgtcctgccctttctctctaatttccccccttctcctttcgctgcttgcttgtggctgtgacaggaatactagaagccaaggaaaagtgatgttggatatataggagaaaaaaaagagagttgagtgtcagcatagtgttagctcccactttcttttgttcttttagtccctacctttttagtggatagttctact

SEQ ID NO: 87018 - DNA, 1397 bp, Zea Mays
gcacctgcactagaggtgaaggggtgtgagggagaagaaaagcgagtagcccgtgagctgctgcggtgcgagggagcccagggtttcgtctcgcccggccgcgcctggaccgtgccgacttcgctagcatgatgaaccccggctcgcgccagatttatctgaccttcccggccgacagcacgttccgcgaggaggacgtctccaactatttcagcatctacggtccagttcacgacgtgcgcatcccctaccagcagaagcgcatgttcgggttcgtcaccttcgtctacccagagacggtgaagctcatcctggccaagggcaacccgcacttcatctgcgacgcacgcgtgctcgtcaagccgtataaggagaagggcaaggtccccgacaagtacaggaagcagcagcaaggggacttctccggctgcacgacgcccactggcgggctggacgcccgagatccctttgatctgcaccaactcggcgcgaggatgctgcaacattcgaacagcgccaacgagctgctgttgcgccggaagctggaggagcagcagcaggctgccgaactgcagcacgccattgagctccagagccgccgcctcatgggtctccagctgctcgacctcaaggctcgcgcagctgcgacagcatcggcactgccaacaccaattgccaatgccttcgcgtccagccatcctttgagcaccatggcagtcgagtcgccactagagtctggagagcagctcaagctgagcagtgggtttgctctggatgggaagctcaacggtggcgacaaggaagaatctgcttgcgaggcgagccctgacgccgctgatagcgaccaaagtggagagcacaacttgccggacagcccatttgcgtcccctaccaagtctgccgcgctcgtgcacgacagtttcgccgccacggagcctgagaacaccgcgtcctgtgttgggagcaagatcgacggcggcagtaaccatctccgcccccctgcgctggaaatcccttcgcccagctcctacttcttccccatgcgcaggctgtcctccgatcacggagccatggggatgtaaagttcagcattggaagcgagtgataccccagcctaatcatagtaagcactaacgtccctctttattccgactaggctgcttctcaaataacagccttttttttgttttgctttactaatcgtcctgccctttctctctaatttccccccttctcctttcgctgcttgcttgtggctgtgacaggaatactagaagccaaggaaaagtgatgttggatatataggagaaaaaaaagagagttgagtgtcagcatagtgttagctcccactttcttttgttcttttagtccctacctttttagtggatagttctact

SEQ ID NO: 87019 - DNA, 2075 bp, Zea Mays
ggtgaaggggtgtgagggagaagaaaagcgagtagcccgtgagctgctgcggtgcgagggagcccagggtttcgtctcgtctggccctcttctcttggcgcggccatggacgcctacgaggccaccaaggtggtgttctcccggatccaagccctagacccggaccacgccgccaagatcatgggcctcctcctcatccaggaccgtgccgacttcgctagcatgatgaaccccggctcgcgccagatttatctgaccttcccggccgacagcacgttccgcgaggaggacgtctccaactatttcagcatctacggtccagttcacgacgtgcgcatcccctaccagcagaagcgcatgttcgggttcgtcaccttcgtctacccagagacggtgaagctcatcctggccaagggcaacccgcacttcatctgcgacgcacgcgtgctcgtcaagccgtataaggagaagggcaaggtccccgacaagtacaggaagcagcagcaaggggacttctccggctgcacgacgcccactggcgggctggacgcccgagatccctttgatctgcaccaactcggcgcgaggatgctgcaacattcgaacagcgccaacgagctgctgttgcgccggaagctggaggagcagcagcaggctgccgaactgcagcacgccattgagctccagagccgccgcctcatgggtctccagctgctcgacctcaaggctcgcgcagctgcgacagcatcggcactgccaacaccaattgccaatgccttcgcgtccagccatcctttgagcaccatggcagtcgagtcgccactagagtctggagagcagctcaagctgagcagtgggtttgctctggatgggaagctcaacggtggcgacaaggaagaatctgcttgcgaggcgagccctgacgccgctgatagcgaccaaagtggagagcacaacttgccggacagcccatttgcgtcccctaccaagtctgccgcgctcgtgcacgacagtttcgccgccacggagcctgagaacaccgcgtcctgtgttgggagcaagatcgacggcggcagtaaccatctccgcccccctgcgctggaaatcccttcgcccagctcctacttcttccccatgcgcaggctgtcctccgatcacggagccatggggatgtaaagttcagcattggaagcgagtgataccccagcctaatcatagaatactagaagccaaggaaaagtgatgttggatatataggagaaaaaaaagagagttgagtgtcagcatagtgttagctcccactttcttttgttcttttagtccctacctttttagtggatagttctactaaaccacaagaggagaagatgccattagccttgattaagaaaacggcggcatatgcaatattatcgccagatataagtatatatatattatatatacaaataatcccctagtttctagtatatatatagtatctgtacttagtatttaacagtagcaggtaacgtcagcccaaagatttttactgtgacaaggtcctacaactacagccacctccactaggtttaccaaatgtgaggttaatccacagttctggtaccagccacagcgacagccacaggtcacatgtaataccagtacagctacagcctgacgcggacatttgtatgctagggcggcccagtgacaggaaaaagagcacatggccatggcagttgtctgtaagctatttttactgctactgctgcaagatcccaagctgggtcctcctatggatagagagaaagagacgtgtgtgcgtgtgttttgcttgtggccttgtatggctttgacacctactgcaaaatactactgttatatgattatatgttattgttgtgcctttgttcccatctgtttgagtggatcctagtgtagttgacacccctacagaaagaatggaagcaaagtgagtgctttgcccctccatttatctcccaccttttcagaatcggaaccgggtattggtatagctgttgttgtgagatggctgtcaggacattgactaatgattgttgctaatctattga

SEQ ID NO: 87020 - DNA, 1265 bp, Zea Mays
gatgctccaatctttgcttccgtagaaccccgtttggttggctgacttgaccatcgcgcttcttgttggcaatgcggtgcagcatctacggtccagttcacgacgtgcgcatcccctaccagcagaagcgcatgttcgggttcgtcaccttcgtctacccagagacggtgaagctcatcctggccaagggcaacccgcacttcatctgcgacgcacgcgtgctcgtcaagccgtataaggagaagggcaaggtccccgacaagtacaggaagcagcagcaaggggacttctccggctgcacgacgcccactggcgggctggacgcccgagatccctttgatctgcaccaactcggcgcgaggatgctgcaacattcgaacagcgccaacgagctgctgttgcgccggaagctggaggagcagcagcaggctgccgaactgcagcacgccattgagctccagagccgccgcctcatgggtctccagctgctcgacctcaaggctcgcgcagctgcgacagcatcggcactgccaacaccaattgccaatgccttcgcgtccagccatcctttgagcaccatggcagtcgagtcgccactagagtctggagagcagctcaagctgagcagtgggtttgctctggatgggaagctcaacggtggcgacaaggaagaatctgcttgcgaggcgagccctgacgccgctgatagcgaccaaagtggagagcacaacttgccggacagcccatttgcgtcccctaccaagtctgccgcgctcgtgcacgacagtttcgccgccacggagcctgagaacaccgcgtcctgtgttgggagcaagatcgacggcggcagtaaccatctccgcccccctgcgctggaaatcccttcgcccagctcctacttcttccccatgcgcaggctgtcctccgatcacggagccatggggatgtaaagttcagcattggaagcgagtgataccccagcctaatcatagtaagcactaacgtccctctttattccgactaggctgcttctcaaataacagccttttttttgttttgctttactaatcgtcctgccctttctctctaatttccccccttctcctttcgctgcttgcttgtggctgtgacaggaatactagaagccaaggaaaagtgatgttggatatataggagaaaaaaaagagagttgagtgtcagcatagtgttagctcccactttcttttgttcttttagtccctacctttttagtggatagttctact

SEQ ID NO: 87021 - DNA, 696 bp, Zea Mays
cggtttccaagccatacggtggccaacaccaacgggagtcgaagtacagagagagagagcgggtgccgctgtgagttcttccatcgcgccgccggtgaaaaccgtctgcgccggtgttcgggtcctccgtgagtggccgtgaaggagcgccagggtccggggaggccatctgtgccctcgggtggggtgagtggttccaaaactaggggaattcctcgtcgacgcacatttcacacctcgcagtcgccattcaccgtggcctgctcgtcccaccgacctccgtccgcggtatgtgctccattcgagttcgccatcatcccctctaggtctagcaccggtcaattttagatctgggggcgtccgagcgttggattgcgtgtccaccgacgatgctccgtcgtgttactgagtggcgccgccgcagcgctgtgtcgggtggggaaagcaccgcgggcatcgttgatcggctaatggagggctcagattagacatcgcacatccgttcggttgggatcaattcgggcggttggattgggatcgggtgatcctgggttcccgtgggattttaaaatctggaccacaggatcgtgatccaagcgcacatttgtgatcggaattggaacaggaataaaaaatgtggggtctgtaacacagatgagcctattcaacatttgtttatagaatgccatttatgga

SEQ ID NO: 87022 - DNA, 1800 bp, Zea Mays
gcaggatcgtttcaattcaactgagatggcaaaacttctgctcggggaaaaacagctaagaacagtcgggcggtcgggccaggcggcgtgtgagcgtgtccgagatccacaggacgcaggacgctgccgatggcgaagccgaggaaaacccgcacctcggctccagatccgcccgtagccgccgttcggcttccgtggcacacaccggcgccggcggtccccacggccgttctgatctcgctcgctgccctcctcatccgcgtgctggtttccgtgggcccctactccggtcagggtgcggcgcctaagttcggcgactatgaggcgcagcggcactggatggagctcacactccatctcacgcccgccgactggtaccgcaacacctccgacaatgaccttgcctactggggcctggactacccgcccctctccgcctaccagagcctcctccacggccgcatcatcaacacctcactccccgaggccgtcgctctccgctcctcccgtggctacgaatctatggaatcgaagttgctgatgcggtggacggtgctgtcatcggatctgttggtgttcttcccatctgctttgtggtttgtgtgggcgtacatgaaacttggagtcggtattagtggagaggagagacgggaggggtggatgtggctgctagccttggtcctgatcagtccttgcttggtattgatcgatcatggccattttcagtataattgcattagccttggacttacgctcggagcaattgctggtgttttgtcgaagaatgagcttgttggtgcatctctcttcactctcgcaatcaatcacaaacagatgagcctgtactttgcaccagctttttttagccatcttctggggaagtgcctcaaacagaaatatcctattgtcgaagtaacaaaacttgctttcgtggtcttgggaacttttgctcttgtctggtggccatttttgcattcttatgaggctgtccaacaggttctctctcgattagctccatttgagagaggcatatatgaggattatgttgcaaacttctggtgtagtacttcagttattatcaagtggaagaaattgttcgcgataaagccattgaaacttatgagtctatctgctaccatactggctttcttgccttcattcgttcagcaagtcaagtctccaagtaatcttggcttcctttattctctgatgaacaactctttctctttctacctattctcataccaagttcatgagaaatcaattttgcttcctcttttacctgcaagtcttttagcactggaagaacctcggatgtacggatggttcgtgtactttgcccttttctcaatgtacccacttatctgccgtgatcagcttcttctacaatacatagctgttcttagcctattctttctgatatactactcacctggcggaagctacggaaagagatcaaacatttcatgcaaggcaaagttagttcttagcttgccatttttatgctcacttctacttcacattacctacctgcaaatagagcctcccaagaggtatcccttcctctttgatgcactgataatgttcgtctgtttttcacaatttgtcatcttagctgtgtacaccaactataagcaatggatgttggactcaaattctagatccataggtgtgaagaaggatctgtgattgaaaattttgactgctaattttacagagaaatccactgtccctttgtaaccttgtgtgtattcccttttaacattatttattgaatgaaatgcggtgcaaattcagaca

SEQ ID NO: 87023 - DNA, 282 bp, Zea Mays
atggtgccatggaaactgcaaccggacagaatcaaggtggtgagctgcttcaggttcccgatggtcggagtgagcacgccgccgagttcgttgttgaatgacaggtccatggattgcaggtcactgagctggcctatgtcagcagctagacttccttggatgcccatggtggaaagttttatggagatcactttgtcgccgccgcacgtcacgccctcccacggcgactctccgcagggatcgtcggactggccccaggacggcggcgcgttctgccactga

SEQ ID NO: 87024 - DNA, 354 bp, Zea Mays
atggagacggtgatgccgaaggcagagaaggtgaagggcgagatctgcaccacgggtaatgaaattgcaatgaaaaagccaaatgacaaacgaattaggtctgcagttcatacaatttgggtgaaaataagggtgaaagaaaagctcgatgtcgtgggacacgagaaccggttcctgtcctctgagtcccggcgcctcgaggtcctcgtgtcccaggctcgcgaggaggtcgccgtcgccgagcaagtcgccgccaccaatgagagcgaggccgccacgctccgcgccgaggtcgagcgtctccagggcctcctagccgcagagaataccagaaacttcaggacgagtccttga

SEQ ID NO: 87025 - DNA, 2093 bp, Zea Mays
aggggaaaccgctgtagacagtcccgggcaactggtgggtgtcgtcctcctctttgcgcagcaggttctcgcctccccctccccgcagcttctctctctctctcccccccccccccccccccccccccccccccctccccgccccatcgtcggctaaaggcgatcgtcccacccagaatttcccccctcccccgcaccccccgcaaacatcctagcagccctatcatcgcgccggtcccggcggcctgccggcctcctcgcaccctcccagagtaatggattaatgcattaagcaaggtaatgaaatgtaccaaaagtgacttatggaaaagaaacagagcttgttcactgctctgaatgaggaactttaatctgatgcagtctcaaaagagcagagttttgggagcaatgtcatcctctttgcctattctgccaaatcctttgaaagggagcttctcaaggcctcataacccccagcatattcctatgttgaggcagctgcctgatgactctatgcccttgtgtattgacacacatcagtctgctagtttgcacccaagagctggtgttatcggggtaccatattcaggctacactgctagtccacttgattctgtgtctaaccttgatagccagacaatggctgcaccctttatttctcagtcatccaattttgaagctctccagtctctatctaataataccccagaaacacacactaaggcagcctggttcacatcttctatggatgtttcaccactcaacacagataatattgctgcttctgatgttaatcaaatccagagtatacgtcctgctatgacatctgatgagagtgctacacaaaacgattggtgggcagatataatgaatgatgattggaaagatattcttgacgcaacagctactgattcccactcaaaagccatgattcaaatttccaactcagctacatcactacctgcagtaaatcagtcagcttcatctcatagtagggagatttgtcctgttgctagtcctcccaatagcagcaatgcttcagttgccaaacaacggatgagatggaccccagaactccatgaatgttttgtagatgctgtaaatcagcttggcggtagcgaaaaagctactcctaagggtgtgctaaagcttatgaaagttgatggtttgactatatatcatgtcaaaagccacctgcagaagtaccgcacagcccgctataaaccagacctgtcagaaggtacatcggaaaaaaggacagccactgaagagctggtcctggacctgaaaacgagcatggatcttactgaagcactgcgccttcagatggaagtccagaaacggcttcatgaacagcttgagattcagcgaaaattgcagttgcggattgaagagcaaggaaagtatctgcagatgatgtttgaaaagcagagtcaatcgagcacggagaaagtccaggatccatcctcaagggatacaacagctaaaccgtcatctaatcagagccagtctacaaacaaggattgtggtgcaaccatggacccaaatggaacaggaggcatcgtacggactgcagaactgggagaacgttcgtctgaattaggtgtaaaacagaaactcgtagagatcgaagaatctggtaccgaagtagccacaggcgacagatctaagatctcccaagagaagcggcgcaaactgcaagatagttaacatatcggttgcactattcagacatagctgttcaaaccgtttgcttggtgaaaaattggtaatctgtgtgtcgaattcgactattgatccgtgagtccattggtgagttgtaccgctcttcagttagccatatatatttataaaggatccaaaggaggaccaaaggagaacttcctggcagccgtctttataacattagcaataagagctatccccgaagttatggggtaaaataaggtcttgaaatttagctttgtttctgaattcctccttttcttttgtttgggttgaagtggtcaccgagtcgatgtagatgaccacatgaatgaatttatcggaagcaagctagtgctgttccctattggcatagaaaccaaatattg

SEQ ID NO: 87026 - DNA, 2175 bp, Zea Mays
aggggaaaccgctgtagacagtcccgggcaactggtgggtgtcgtcctcctctttgcgcagcaggttctcgcctccccctccccgcagcttctctctctctctcccccccccccccccccccccccccccccccctccccgccccatcgtcggctaaaggcgatcgtcccacccagaatttcccccctcccccgcaccccccgcaaacatcctagcagccctatcatcgcgccggtcccggcggcctgccggcctcctcgcaccctcccagagtaatggattaatgcattaagcaaggtaatgaaatgtaccaaaagtgacttatggaaaagaaacagagcttgttcactgctctgaatgaggaactttaatctgatgcagtctcaaaagagcagagttttgggagcaatgtcatcctctttgcctattctgccaaatcctttgaaagggagcttctcaaggcctcataacccccagcatattcctatgttgaggcagctgcctgatgactctatgcccttgtgtattgacacacatcagtctgctagtttgcacccaagagctggtgttatcggggtaccatattcaggctacactgctagtccacttgattctgtgtctaaccttgatagccagacaatggctgcaccctttatttctcagtcatccaattttgaagctctccagtctctatctaataataccccagaaacacacactaaggcagcctggttcacatcttctatggatgtttcaccactcaacacagataatattgctgcttctgatgttaatcaaatccagagtatacgtcctgctatgacatctgatgagagtgctacacaaaacgattggtgggcagatataatgaatgatgattggaaagatattcttgacgcaacagctactgattcccactcaaaagccatgattcaaatttccaactcagctacatcactacctgcagtaaatcagtcagcttcatctcatagtagggagatttgtcctgttgctagtcctcccaatagcagcaatgcttcagttgccaaacaacggatgagatggaccccagaactccatgaatgttttgtagatgctgtaaatcagcttggcggtagcgaaaaagctactcctaagggtgtgctaaagcttatgaaagttgatggtttgactatatatcatgtcaaaagccacctgcaggtttgctgtttagctttctaagtagtattcttgcccaaaggaggccttttcattttcttatttgaactcgtttgtgttgcagaagtaccgcacagcccgctataaaccagacctgtcagaaggtacatcggaaaaaaggacagccactgaagagctggtcctggacctgaaaacgagcatggatcttactgaagcactgcgccttcagatggaagtccagaaacggcttcatgaacagcttgagattcagcgaaaattgcagttgcggattgaagagcaaggaaagtatctgcagatgatgtttgaaaagcagagtcaatcgagcacggagaaagtccaggatccatcctcaagggatacaacagctaaaccgtcatctaatcagagccagtctacaaacaaggattgtggtgcaaccatggacccaaatggaacaggaggcatcgtacggactgcagaactgggagaacgttcgtctgaattaggtgtaaaacagaaactcgtagagatcgaagaatctggtaccgaagtagccacaggcgacagatctaagatctcccaagagaagcggcgcaaactgcaagatagttaacatatcggttgcactattcagacatagctgttcaaaccgtttgcttggtgaaaaattggtaatctgtgtgtcgaattcgactattgatccgtgagtccattggtgagttgtaccgctcttcagttagccatatatatttataaaggatccaaaggaggaccaaaggagaacttcctggcagccgtctttataacattagcaataagagctatccccgaagttatggggtaaaataaggtcttgaaatttagctttgtttctgaattcctccttttcttttgtttgggttgaagtggtcaccgagtcgatgtagatgaccacatgaatgaatttatcggaagcaagctagtgctgttccctattggcatagaaaccaaatattg

SEQ ID NO: 87027 - DNA, 728 bp, Zea Mays
atggagaagaggaaggcgcgctggcgagctggggaatcgcgggggcgccctgagcttgcgctcgcgcgcggtcccggcagacagcgcccggagcttgaatgggtgccggcattgaggagcagtggctggagcagaagagaaggtgctcaaggagaggagccacggacggacatggaagggagcagagagttgtgctcgagctctgcgttttctggacaaaggggacagagttcccatgcgccagcacttggggaaaatggcggccaggtggggctgccgagggggaagaccgagctcgcagggggaaatgcggcaggggcgcgcgccggccatggggacctcctgctcggcaaatcccgcgcatgagcagagagagtcgcggcgcgctgctgaggacgagctgctgctcctacggcatgggacacaggaagaaggccagcgtcgagctcctggccatgggaggcgctgctccttgcttggggaagaagggcgccgccgagggaggtgaagccaagggtaaggggttgcgcgcccatggaggagaggaggagctgctgctcgcctgcacttggagactccctgctgctggcgaggtgcgcctgggaggcggccatgggaggagcccttgcaggactggccgatatctccaccaacgacgagaacttcggccaccaatgcagccagggcagaggcgagctcggtctccagcctgggcgtcaaccgcttga

SEQ ID NO: 87028 - DNA, 91 bp, Zea Mays
attaatcatatttactgattataggaaaagaaaattggttttcttcaatatgagatgctcttacattgcaaacgaacacgtaatattggat

SEQ ID NO: 87029 - DNA, 2486 bp, Zea Mays
acctcgattcgcgccgagagccttccagagcaaagaagccggccaccaacaaaacccgacccgacgacgacgagcaagtagctgccagaacccagcacagctctacccaccaattctgattctggaagacagacagtagtcgatcgcatcgcatcgcatggcgacgaggccggcagcggaggagaagccgtgggagctggcggcgcacccgcggctgcccaagggcaggacggtggccgtggtggtgctggacggctggggcgaggcggcgcccgaccccttcaactgcatccacgtcgccgacacgcccacgctcgacgccctcaagaaggtacgttacgttacgtacacggcctggcgttcgctgaactctgcgctcacgtgcggcaggcagctccggagagatggaggctcatcaaggcgcacgggacggcggtggggctgccgacggacgacgacatggggaacagcgaggtcggccacaatgcgctcggagcgggacagatatacgcgcaggggtaactagattatacctcgacttcgactagctagctaccactctgctcccttgttagacacgtatcatatacgccatctgaaagccaaaccgaagcagaattaaaaagcatggcaaaaaagaatcactcgtattattagtgaatgaattgccaatggtcagccggtcacaacatgcagcgcgaaactggtcgatctggcgctgggttccgggaagatatacgagggcgaaggtttcaagtacatccagcagtccttccaggacggcactctgcacctcatcggcctgctcagcgacggaggcgtgcactccaggttcgaccagctgcaggtcggtcgttgaacgctgcatgccatcgctcgtactcgcaacagatttctgacggtcggtcgaggcagctgaccggccggtactgtgtgtcgcgtgtttcttcttcttctctgtcttggctcgtacgacgtgcagctgctgctccaaggtgctagcgagcgcggggcgaagaggatacgtgtgcacgtcctcacggatgggcgggacgtggcggacggcagcagcgtcaggttcgtggagatgcttgaggaggacctcgctaggcttcgggagaagggcgtcgatgcgagaatagcgtctggcggtggcaggatgtatgtgacgatggaccgttacgagaacgactggcaggtcgtgaagcgaggctgggacgcgcacgtcctgggcgaagccccgcacaggttcaggagcgcgctcgaggccctgaggaagctgagggaggaggaccccaagaaggccagcgaccagtacctgccccccttcgtcgtagtcgacgggagcggggagccggtcggcccggtgcgggacggagacgccgtggtgacgttcaacttcagggccgaccggatggtgatgctcgccaaggcgctggagtacgagggcttcgacaggttcgaccgcgtcaggttccccaggacgcggtacgccggcatgctccagtacgacggcgagctcaagctcccgcgccactacctcgttgctcccccggagatccagaggacgtccggcgagtacttggcgcgcaacggcgtccgcacctacgcttgcagcgagacggtcaagtttgggcacgtcacttttttctggaacgggaatcggtctggttacttcgaccagaacctggaaaaatacgaggagattcccagcgatgccggcatccccttcaatgtccagccgaagatgaaggccttggaaatcgcgcagaaggcgagggacgccatcctgagccaaaaattcgatcaggtaagggtcaacattgcaaacggagatatggttggccatacaggagacatggaggcaaccattgttgggtgcaaggcagctgatgaggctgttaaggtacatgtacatggactagtgcgtcaagctttgcgttgcgatcacctctctatcttcccgagggtttttcctagctaccgattgatccagtctgtatcttgtagatcatcctcgacgccgttgagcaagtgggcggcgttttcgtggtgactgccgaccacggcaacgccgaggacatggcgaaaagagacaagtctggagaaccactccgggacaaggacggcaaggtgcagaccctgacttcgcacacgctgaatccggtcccaatcgcgataggaggccccgggcttgcgcctggcgtcaggttccgtacagacctcgcaagtgccggcctcgccaatgttgcggcgacggtcatgaaccttcatgggtttcaggcacccgatcactatgagccaacgctgatccaagtcgtcgacgagtgatttccgctttgctggttgctgcgttgcagttttcagacattatctgaactaactcctaccacagttgtccggcatgtaatcgtactcaaactagactacctgggcaattacctgtgccaattaccgtgtcgaatgttcaaaaatgttttcgttaa

SEQ ID NO: 87030 - DNA, 1344 bp, Zea Mays
atcacaggttcaacaatattcaacattaaatggcaatatcatgccttcaaatcacacaaaacatagcattgattctacccgtgccctaatagagtttttacccatcgggagcaaattcattttatatgagacataaatctggacccacatgtcatatattagcgggttccctatcgggtagcgggtatggggcaacagagaacatacccacgcccaccatacccgatgggcataacaaatgacccaataaaatacccatgggtatcaaaatccgacatacccgtgccctaatagggtttttacctatcgggtttcgggtacccattgccatccctaatctcagcccgcccgcccgccccactctggagataaggctctccgcctccgcctcgcagcctcccttctatcctctccggcacgagccgtccagttcagttcacctcggtccgggaccgcgactacaccgacggcggcgcgtccgagcccagccgacgccgagccaatggtgactccagcgacattctccctccgccccagcgcgccccccgcgccgcctcgtgccgggctgccccgcgctcgggcctgtttcgcgcccgccatccgcacctccccttccgtcgccttttcctaccagcctcggcgcttcagtggcatccgccgcgccgtggccgtcgactccgagcagggctcccccgagtctccagagcaggagaagaagcccaagacgtactacttcctggtggcaaacgccaagttcatgctggacgaggaggagcatttccaggagcaactcgccgagaagctgcgcaactacgccgagcgcgacaaggagcaggacttctggctcgtcgtggagcccaagttcctcgacaggttccccaacatcaccaagcgcctcaagcgccccgccgtcgcgcttgtctccaccgacggcaactggatcacattcatgaagttaaggctagacagggtcttacaagaccagttcgacgcagaatcagttgaagaggcattggcttctaaccctgttgagttgaaatttgagaagcctgagaaatggacagctccgtaccctaaatatgggtttggatggtgggaacccttcttgcctccaaagttcagcaatggtacggcatagagataagcagcaatccctatgaggcatgtaagattactcccctgtaagtgatgaatgtaattttaattttgatgatgaggatgtagtacttgaggttgtaccagtacagttagttgaattagttgcacagtttttgtaataccaaataatcagctgttttattttatttgagaaagtcgcggttctgttatgactgatggcatatt

SEQ ID NO: 87031 - DNA, 269 bp, Zea Mays
gcccgtgcgttgctacggttttcatatatcacatattacatgaatgaagattaaacacaaacatatacatatattcgaacaccatgtaaaaaatattaatacatgcaccaaaaaacactacaaattatcgaagcttatcaaacataacatggagactcacatgaaagatcaacaaatcaagccaaataagcataagtcctcattaaccacaaatttaatccaaaacttgatttgacgaatcatactaatagcaaaaaactcaaacaaag

SEQ ID NO: 87032 - DNA, 791 bp, Zea Mays
aacaatggattgttttggtttccacttgatcggtggaggtgggctcgcttataccatcctgattgcattgggcagggaactggcccgagtcggacattagcgaacctgatgccgtgacgcgtagaaccaaccccaccgtgaagaaacctttacaggctgtacgtagggccgtgccgtcgcccctccttccttcgtcgatctctctctcggcgacgactgggcgaccgctgcctcctgttgccctggtctccattgggccctttgccagattttctttcgcctctccgccggcgacgaacaccaccaccaggaatgggcttgtggacgttgctggagggttttttgcttcttgcaaatgcgttggctatattgaatgaagaccgctttctcgctccaaggggatggagcatgtctgaagtatcaggaaatgggcaaacgaagtcgttgaagggccagatcgtggggctaatctatgctacacaatttctgaggatgcccttaatagcactcaatgttctgatcattgttgtgaaactggtgtctggctgaggctcattatctagttttcactgttgtgttggattgatatctgttccagcatgatgtaaaagttagtaatactcaaagctgctggaaatatgttcattttttactctaatgtgaatttctgttatttcttctggtaaattaattctggtcagaaaatggctctaaacatttatactatcaaagcattgtgcaatggtgttatcaatttattcgaaatatttcttatgtagtttgtgaggaca

SEQ ID NO: 87033 - DNA, 799 bp, Zea Mays
ccactgacatgctcttgaactgagcactgaataattgatcagttatttctcagtgtgaaccatgtattttactttgaaattttatggatatcacctcaattacaatgtcaagcatggtttatggatatcacctcaattacaatgtcaagcatggaacatgtgccgtgtggaagccacactctctgtatcagtatatcttcctgcctagtcacctgtatatttcagggcactgtttccttttgctatattgttatgtcttggtggcttgcggaggtaataatgtgtaagaaggaacattaactgagctgtgatctgcaggaatgggcttgtggacgttgctggagggttttttgcttcttgcaaatgcgttggctatattgaatgaagaccgctttctcgctccaaggggatggagcatgtctgaagtatcaggaaatgggcaaacgaagtcgttgaagggccagatcgtggggctaatctatgctacacaatttctgaggatgcccttaatagcactcaatgttctgatcattgttgtgaaactggtgtctggctgaggctcattatctagttttcactgttgtgttggattgatatctgttccagcatgatgtaaaagttagtaatactcaaagctgctggaaatatgttcattttttactctaatgtgaatttctgttatttcttctggtaaattaattctggtcagaaaatggctctaaacatttatactatcaaagcattgtgcaatggtgttatcaatttattcgaaatatttcttatgtagtttgtgaggaca

SEQ ID NO: 87034 - DNA, 677 bp, Zea Mays
tcagctagcacatttggcttggacacagcctgctggagttctctgatcttcataaagatttcctttcctttgatgtagctgcttccaaagcacgttctagagatcacatctgcagaaatcgaccatcagatccaccatgccctgtgtatgagtaaaagttattgacatgtcaaaatgcatggttgccgcttgctgttgtcaaacttctaaactctaatttattgatcaatgcccacggaagaactccggggcgatgattttcctctggtgcagccaggcctcgccgttggacttgaggatgcccccgccgaagaggggctcgtgcgttgccttgaggtaggagctcttgccgaggtccagcgacacgcagaggttgatgtcccggaccacgtcgggccggctcacgtgaaggaatacgacgttccccatggagtaagtgaatatgggacctgcattatatttcagtgaaactggacaagtcagctgaggctcgttgtataggcctgatctactacggtcactgtccggttgatgagcgaactgtcacggcgtactgtaggttaacagagaccgggtatgggtccatctccggtcaagtgggcgtggacagggttcagtcgacgagtcatggtcatggttgataagttttccctacccctcatgattaattgtttact

SEQ ID NO: 87035 - DNA, 651 bp, Zea Mays
gcaaaaaaaagatttccttgcagcatatgtcagcgcaaccacagcatttcgtcgagcggctggcgtacctgcgcgaacacggagctgtagaacacgggcggccgacggggaggtggctccgcttccgccggagcatcctgccgagtatccgcgcatgcctcctcgcccgcccgccgcggggagcgccatgctgtttgttggcctcggatccccttaatcgcggagcatcgacgtcgatgagagatccgcgagcggtcgcggaggatgaaggtgcgcgccgcgggatggaaggtgagcgccgcggggatcgcggctgcgggatgagtggctgtgcggaggatggaaggcggaggatgaaggtgcgcgctgcgggatggaaggtgagcgccgcggggatcgcggctgcgggatgagtggctgcgcggaggatggaaggtgagcgtcggcggctgcgggatgcgggggaggttcggccgcgggcgtgagcagagcggcagaacgtgcaccacgcgattgtggacgcctacagtattcacataatagtagtagagatttataattttgtacaaaggcggtttatctcctctataaatagatgaacaatatcttgtataaaatattttttttggcaacaaactcttatttgtctaa

SEQ ID NO: 87036 - DNA, 416 bp, Zea Mays
aattctccacggccagagggagtccaactccgcctccagcactcacgcttcgtctgctgaccctacccatcgcggccgccgccggctcgccgctgctgccaggcgctatgcggccttgctcccgcatactcgcggcgcgtcacttcgtccgcagcttccggttcgatccctcccaaactacctcccccgctgccggatttcgtcggctgaccggagccaacaggccgttcgtgccgaaacctctctttggcattctcctcggaggcttcagatcgaactgtggcgtactgcctgggaaaggggtccccttgggcagcctcggcagcttcctgccggactctgcctaccagctgcacggcgcgcggcttcaacgagatacggtaatctgttcttattgtcgcagtttttttttggat

SEQ ID NO: 87037 - DNA, 81 bp, Zea Mays
atggatgtaaaaagacatatgaaagtatagatgttatggttggccaccactataggcgccaaccgcaggtcacaggcggcc

SEQ ID NO: 87038 - DNA, 480 bp, Zea Mays
atgcagagaggtaatgcattctccacatccgccaatgctgtgacagttaagaagccagttggtgacaaggtccagaaagatgcatcaaaaaaggatattgatgaggagattgctgattctcagatattgaaaaaccttgggaagtacttattgttgaatgacagccctgacttccgctttagggttgccttgtcgttggtcctgttagttggtgcaaaggttataaatgttcaagtgcctttcttgtttaagctagctatcgactggcttgcagcccttggtggtgctgaagcttccctggcatcattcactgaaactaatgccaccctattggctctatttgcaagcccagcagctgttctgataggatatggaatcgcacgatcaggagtatcagcctgtacagaactgcgaaacgctgtattttctaaagtgactttgagagcaatccgttcagtatccagaaagctgtccagataa

SEQ ID NO: 87039 - DNA, 295 bp, Zea Mays
aagggttggagacccatatttatagccctagaggctgcactaccacacccttctcacacactacacaacaggattgtcctctagatgctaaagagactacagaggacagtcaaaagcgactgttgtcctctagatgctaaagagactacagaggacagtcaaaaagcgactgctgtcctctagatgctaaagagactacagaggacagtcaagctgtcctctagatgctaaaggactacagaggacagtcaaaagcgactgctgtcctctagatgctcaagacttattccatcat

SEQ ID NO: 87040 - DNA, 1895 bp, Zea Mays
agccggcaaactggtgctataaatcgcgtaattgatcgaggaagccgtgcaataaattacatcctcacagtcatggtgtttaatgtcgtgcccacgatactagagattggtatggtgtcaagcatacttgcctacaaatttggttcaacttttgcttggatcacttcagtttcagttgctacttatattgctttcactttggctgtcacacagtggcggactaagttcaggatggccatgaataaagctgataatgcttctagtacggtggcagttgactctcttctcaattatgagactgtgaaatacttcaacaatgaacaatttgaagttgagaagtacgacaaatatttaaggaattatgaggatgctgcattgaagacccaaagtagtcttgcctacctgaactttggccaaaatgttatctttagctcagctttatctacagcaatggttttgagctcatatggaataatgagtggtgctctgactgtgggtgatttggtcatggttaatgggcttttattccagctttcattacctctgaacttccttgggagtgtgtatcgagaatctagacaaagcctcattgacatgaagtcaatgtttcagttgcttgaggaaaaacctgcaataaaggatgagcctcatgcacaacctttgcagttcaagggagggtgcattgaattcgagaatgttcattttgggtatgtaccagaaaggaagattcttgatggtgccactttcaccgtacctgcaggaaagagtgtggccattgttggaactagcggaagcgggaaatcaactattcttagacttcttttcagattctttgattcgacttcaggatctatacgaattgacgggcaagatatccgaggagtgacactggggagccttcgaaaatgtctaggtgtggtacctcaggacacagtactttttaatgacacgattaagcataatatacagtatgggcggttatcagcaaaagatgaggaggtctttgatgctgcccgacgtgctgctattcatgatacaattatgaacttcccagacaagtatgacaccgtagtaggagaacgaggattgaagttaagcggcggggagaaacaacgagtgtcaatagcccgtgtattcttgaaggagccttccattctgttatgtgatgaagcaactagtgctcttgacagcactactgaagcatcaattttgaattctctgaaatccttatcttccgatcgaacatcaatctttattgctcatcgactcacaactgcaatgcagtgtgatcagataattgttttggaggatgggaaggtagtagaacaaggaccacatgattttcttctgtcacagggtgggcgatacgcagaattgtggtatcagcagaacagcactgacgccatggattctgctgcagctagcgtagaggtttgattgaccatgtttaccttttccttctgcaaggggaaaagaagggaaaacacaatcataaccgtgagagagagggatggagccaacttgtctgccttgtaattagaggtaggttttttggttcgggggggaggggggggggggggggggcataaacgtacagttccattttcaagatagccgggaggattttccccccttttgagattgtatagacgatccctgcatgttatgataaccgtaacgtttctgtagcataagggataaagcccagtaagggcctgtttgtttcgcatggaataaagggtagaataaatctggcttggattcctttaataattactataatttttggagatttagaattaattctggtctgttccagtagaaacgaacgggccctaaatattcagttgcctcaggcgtactaccgtttcaatataaatgctcccatgattgct

SEQ ID NO: 87041 - DNA, 801 bp, Zea Mays
gagaagccttgcgcttccaggttggccgccgtgcacgagcccagcgtctcctcgtccctcccggagaggaggaagaccttgaagcccttgtccagcagcgtcgtgaacagcccgagcaccggatgtatccccgggcacgcctccctgctcgcccaagcccggaacgccagcgggtcgtacgcactggaagagacgagacgcccagaaccacaggtgaggaacaacatggagagaggagagctatatagctagcagtggtggatcgatcgaggtcgcagccatgccgacatgcggacgcgtacccgaactgcttggcctcgtagtagagcaggttggagaggcaggtatcgtcgatgtcgaagacccaggcgtcgaggccgtcggcgtcggcggccaccccgtcggcgtaggcgcgcgcctgctctgccacgccggccacgtcccgctggtactggccccgggtcatgtacccgctgacgtacccgacgcactgcgggggcaccgtgcgccacccgcgggcgttgttggcctccaccatgacgcgccagctgaggcacccggcgtcgtcggacgcctggcccggccagagacactgcctcgcgacgacggcggcggcgctgaggaacaggtgcggcagcagggcgaggagcgcgagccgccgccacggggcgatgcggaccgtcagcatgtctatcgatcgatcaggttttaattcacagacgtacccgcgcccactgcaagcattgttcgtaaactggcagtgagacacaaggctagatatatattacatgcttgcttgcc

SEQ ID NO: 87042 - DNA, 2326 bp, Zea Mays
atggtgagtctctctcagcagcagcactcagcacacagagtccgcctacgccgcggctccggcgcccgcatccgtctcaggagtcccttctccccgcgggtggagacatcttgatcgtttctgagattaaactgatgatgctgatgctcgtttagttatcttggtttggagatatatcagatatgggtgatcggaatcatggacgctctctccctctactgctctatctacatcttttgctgccaatacttccgtttgctatggcagatatagcctccgagaagcaagcactctttgcttttgcctctgcagtctaccatggcaacaagctgaattggagccaaaatatcccagtgtgctcatggcatggtgtgacatgctcactggatcgatcatgtatattggcccttagggtgccaggtgctggtttgattggtaccattcctgctgatactcttggcaggcttgtgtccctccaagttttaagcatgaggtctaaccgtttgagtggaagccttccgtacgatgttgtctcacttccttatttacaagccatatttgttcagcacaacgaattgtcaggagacttgcctccatttctctctccaaaccttaatacccttgatctctcttacaactcctttacaggacaaatcccatcaggtttgcagaatcttaccaaattgtctgtcttgaatttagcagaaaattccctgtccgggccgattccggatctcaaacttcctagcctaagacagctaaatctgagcaacaatgaactgaatggttcgattcctccctttttccaaatcttctcaaatagttccttcctagggaactctggattgtgtggaccgccgctaactgaatgttcttttctatcttcaccaacaccgtcgcaagtgccttcaccaccaaaattaccaaatcatgagaagaaggctggcaatggcttggtaatcgtggctgttgctgggagctttgtcatatttctgctagctgctgtgatgttcactatgtgcatttcaaagaggaaggagaagaaagacgaagcgggttacaacggtaaggttactgatggtggaagggttgagaagcgcaaagaggatctcagcagcggcgtccaaatggcgcataagaacaagttagttttcttggagggatgcagttacaactttgacttggaggacttgctgagagcttctgctgaagttctcgggaaagggagctatggaactgcctacaaggctatactcgaggatggctctactgtggtagtcaagaggctaaaggatgtcgtggcagggaagaaagaatttgagcagcagatggagctcatagggagggtaggtaaacatgcaaacatcgcgcctattcgtgcttactactactcgaaggatgagaagcttgttgtttatgagtatattggtagaggcagcttctcagctctgttgcatggtatcaagggcgtgtgtgagaagaccccattagattggaacacaaggatgaagattatactcggaacagcacgcggcctcgagcacatccattcagaaggcggctccaggctcgcacacggcaacatcaagtcaaccaacgttctgctcgacggagaccacaacccttacgtctcagactacgggctgagctcgttgacgagccttccgatcaccacttcccgagctgtcgctggctaccgagctcaggagaccttcgaatcgaggaagttcacccacaagtccgacgtgtacggtttcggcgtcctcctcatggagacgctgacgggcaaggccccgcttcagtcacagggtcaggacgacgccgtcgacctaccgaggtgggtgcattcggtggtccgcgaggagtggaccgctgaggtgtttgacgtccagctgatgaagtatcccaacatagaagacgagctggtccagatgctccgtatcgccatggcgtgcacggcgtggtctcccgaccggcgtccgacgatggcgcaggtggttaggatggtggaggagctccggcactctgcttccgggagtcgcgctctctccgttggcagtcccaaggaatccagtcctctgtcagcctgaattgtggttctgattcagaattcgtgtatccatgacatcgatgatcgatggtatcctgcatgtggttcacggtgcacacgttgtctgcctcgtcagatacttcgtactgctgtaactttggttcaatggaatgcttaagaaacaaggtcggaataggcgaatagctattttcgtctttcacctattgattttgtccttgcatacaaaaaaaagaatagacagaaaacagaaaagaa

SEQ ID NO: 87043 - DNA, 159 bp, Zea Mays
atgatcggagcgtcagaaaatggaacctcatctatctcatcggctgctcccggttgccctgggacatcctcatggatctgtatctcatccaatggaacaggaacgatttcttcgattgttcttggtccatcaaatcggtgttcattgacatcaacatga

SEQ ID NO: 87044 - DNA, 110 bp, Zea Mays
attacatgttatactactttaatgacgttggttacttagtagtattagtagaaagccaaagacatgacattattcattttgtttccctaatatataattgcacttgctaa

SEQ ID NO: 87045 - DNA, 2357 bp, Zea Mays
ataagaatcagaagaaaaggacccgagcctagggttcggtctgcctcccacagccgccgctacgctttggctgcatcactcgctcctcttcggagcctccctttcgccggcggcgtaggaagagatggcagagcgtttgacccgtatcgccatcgtcagcgaggacaagtgcaagcccaagaagtgccgccaggagtgcaagaagagctgccccgtcgtcaagactgggaagctttgcattgaagtaacttcggcatcaaaactagctttcatttctgaggagctgtgcatcggttgtggtatctgtgtaaagaaatgtccatttgatgccattgaaatcatcaaccttccaaaagacttggaaaaggataccactcaccgatatgggcctaataccttcaagttgcacaggttgcctgtcccaaggcctggtcaggttttgggccttgttggaacaaacgggattggaaagtcgacagctcttaaagtgttggctggcaagctgaaacctaacttggggcgcttcaaaaacccacctgattggcaggaaattcttacatactttcgtgggtctgaacttcagaactacttcacacgcatattggaagataacctgaaggcaatcatcaaacctcagtatgttgaccacattccaaaagctgttcaagggaatgtaggacaagtacttgaacagaaggacgagagggatatgaaatctgaactgtgtgttgatcttgaattaaaccaagttattgaccgaaatgtaggagatctttctggtggtgagcttcagagatttgcaatagcagttgttgctgtgcaaaatgcagaaatctatatgttcgatgagccatcaagctaccttgatgtgaagcagaggctaaaagctgcacaagtcgttaggtccttgcttaggcctaacagctatgtcatcgttgtggaacatgatttgagtgtcttggattacttgtccgacttcatttgctgtttatatggcaagccaggtgcttatggtgtggttaccttgccattctctgtccgagagggtatcaatattttcttggctggatttgttccaacagaaaatcttcggttccgagatgaatctcttacatttaagattgcagagactcaagaaaatgctgaggagattgagacgtatcagcggtataagtaccctactatgagcaaaacacagggaaatttcaagcttactgttgttgagggtgaatttactgattcccagattgttgttatgcttggtgaaaacgggacagggaaaactacattcatcagaatgctggctgggttgttgaagccagacacggtggaaggaactgatattgaaattcctgaattcaatgtgtcgtacaagccccaaaagattagcccgaaattccagaataccgtgaggcatttgctgcatcagaaaattcgggattcctatatgcatccgcagtttgtgtctgatgtgatgaaaccactgcaaattgaacaactcatggaccaagaggttgttaatttatcaggtggagagctccaaagagttgctatatgcctctgccttggaaagcctgcagatatctatctgattgatgaaccaagtgcttatcttgattcggagcagcgtattgttgcctcaaaagttatcaagagattcattcttcacgcgaagaaaactgcatttattgttgagcatgatttcatcatggcaacatacttggctgacaaggtcattgtttatgaggggcgaccttctattgactgtactgccaacgcaccacagtctttagtatctgggatgaataaattcttatcgcatctcgacatcacttttagaagagacccaaccaactataggccacgtataaacaagttggaatcgacaaaggacagggaacagaagtcagccgggtcctactactacctcgatgactaatgaggaagtgcagattcttcttggagagccatatgtcgcataatctttccagagcgtggaaaggagaagctactttgaagctaccactgcatcatggcatgtgacttgttgaataattggttgcaggagtagagtgcgccggttataacttataaagcagagcatgccgtgttgatactgagttttttgttggcttgacctatatgaagagaaggatcggtgttaaaatgagatttgcgagggggaactaatttctgtttttaagcaatactgtactgtcgttttgctatcaagtatatttgaccctcgattatatagattacattgaagtttttgggcaacaatgtgaaatcttgtgataaatctctgtgcttattggttatctgattgtaactcgtcctttgtaaactttgtttga

SEQ ID NO: 87046 - DNA, 2344 bp, Zea Mays
ataagaatcagaagaaaaggacccgagcctagggttcggtctgcctcccacagccgccgctacgctttggctgcatcactcgctcctcttcggagcctccctttcgccggcggcgtaggaagagatggcagagcgtttgacccgtatcgccatcgtcagcgaggacaagtgcaagcccaagaagtgccgccaggagtgcaagaagagctgccccgtcgtcaagactgaaatgtccatttgatgccattgaaatcatcaaccttccaaaagacttggaaaaggataccactcaccgatatgggcctaataccttcaagttgcacagcttgcccctttcggggcattactgatctagccacctacaggttgcctgtcccaaggcctggtcaggttttgggccttgttggaacaaacgggattggaaagtcgacagctcttaaagtgttggctggcaagctgaaacctaacttggggcgcttcaaaaacccacctgattggcaggaaattcttacatactttcgtgggtctgaacttcagaactacttcacacgcatattggaagataacctgaaggcaatcatcaaacctcagtatgttgaccacattccaaaagctgttcaagggaatgtaggacaagtacttgaacagaaggacgagagggatatgaaatctgaactgtgtgttgatcttgaattaaaccaagttattgaccgaaatgtaggagatctttctggtggtgagcttcagagatttgcaatagcagttgttgctgtgcaaaatgcagaaatctatatgttcgatgagccatcaagctaccttgatgtgaagcagaggctaaaagctgcacaagtcgttaggtccttgcttaggcctaacagctatgtcatcgttgtggaacatgatttgagtgtcttggattacttgtccgacttcatttgctgtttatatggcaagccaggtgcttatggtgtggttaccttgccattctctgtccgagagggtatcaatattttcttggctggatttgttccaacagaaaatcttcggttccgagatgaatctcttacatttaagattgcagagactcaagaaaatgctgaggagattgagacgtatcagcggtataagtaccctactatgagcaaaacacagggaaatttcaagcttactgttgttgagggtgaatttactgattcccagattgttgttatgcttggtgaaaacgggacagggaaaactacattcatcagaatgctggctgggttgttgaagccagacacggtggaaggaactgatattgaaattcctgaattcaatgtgtcgtacaagccccaaaagattagcccgaaattccagaataccgtgaggcatttgctgcatcagaaaattcgggattcctatatgcatccgcagtttgtgtctgatgtgatgaaaccactgcaaattgaacaactcatggaccaagaggttgttaatttatcaggtggagagctccaaagagttgctatatgcctctgccttggaaagcctgcagatatctatctgattgatgaaccaagtgcttatcttgattcggagcagcgtattgttgcctcaaaagttatcaagagattcattcttcacgcgaagaaaactgcatttattgttgagcatgatttcatcatggcaacatacttggctgacaaggtcattgtttatgaggggcgaccttctattgactgtactgccaacgcaccacagtctttagtatctgggatgaataaattcttatcgcatctcgacatcacttttagaagagacccaaccaactataggccacgtataaacaagttggaatcgacaaaggacagggaacagaagtcagccgggtcctactactacctcgatgactaatgaggaagtgcagattcttcttggagagccatatgtcgcataatctttccagagcgtggaaaggagaagctactttgaagctaccactgcatcatggcatgtgacttgttgaataattggttgcaggagtagagtgcgccggttataacttataaagcagagcatgccgtgttgatactgagttttttgttggcttgacctatatgaagagaaggatcggtgttaaaatgagatttgcgagggggaactaatttctgtttttaagcaatactgtactgtcgttttgctatcaagtatatttgaccctcgattatatagattacattgaagtttttgggcaacaatgtgaaatcttgtgataaatctctgtgcttattggttatctgattgtaactcgtcctttgtaaactttgtttgaatgagcaagtgaactgattgtcgatagtttgtt

SEQ ID NO: 87047 - DNA, 2302 bp, Zea Mays
ccgagcctagggttcggtctgcctcccacagccgccgctacgctttggctgcatcactcgctcctcttcggagcctccctttcgccggcggcgtaggaagagatggcagagcgtttgacccgtatcgccatcgtcagcgaggacaagtgcaagcccaagaagtgccgccaggagtgcaagaagagctgccccgtcgtcaagactgggaagctttgcattgaagtaacttcggcatcaaaactagctttcatttctgaggagctgtgcatcggttgtggtatctgtgtaaagaaatgtccatttgatgccattgaaatcatcaaccttccaaaagacttggaaaaggataccactcaccgatatgggcctaataccttcaagttgcacaggttgcctgtcccaaggcctggtcaggttttgggccttgttggaacaaacgggattggaaagtcgacagctcttaaagtgttggctggcaagctgaaacctaacttggggcgcttcaaaaacccacctgattggcaggaaattcttacatactttcgtgggtctgaacttcagaactacttcacacgcatattggaagataacctgaaggcaatcatcaaacctcagtatgttgaccacattccaaaagctgttcaagggaatgtaggacaagtacttgaacagaaggacgagagggatatgaaatctgaactgtgtgttgatcttgaattaaaccaagttattgaccgaaatgtaggagatctttctggtggtgagcttcagagatttgcaatagcagttgttgctgtgcaaaatgcagaaatctatatgttcgatgagccatcaagctaccttgatgtgaagcagaggctaaaagctgcacaagtcgttaggtccttgcttaggcctaacagctatgtcatcgttgtggaacatgatttgagtgtcttggattacttgtccgacttcatttgctgtttatatggcaagccaggtgcttatggtgtggttaccttgccattctctgtccgagagggtatcaatattttcttggctggatttgttccaacagaaaatcttcggttccgagatgaatctcttacatttaagattgcagagactcaagaaaatgctgaggagattgagacgtatcagcggtataagtaccctactatgagcaaaacacagggaaatttcaagcttactgttgttgagggtgaatttactgattcccagattgttgttatgcttggtgaaaacgggacagggaaaactacattcatcagaatgctggctgggttgttgaagccagacacggtggaaggaactgatattgaaattcctgaattcaatgtgtcgtacaagccccaaaagattagcccgaaattccagaataccgtgaggcatttgctgcatcagaaaattcgggattcctatatgcatccgcagtttgtgtctgatgtgatgaaaccactgcaaattgaacaactcatggaccaagaggttgttaatttatcaggtggagagctccaaagagttgctatatgcctctgccttggaaagcctgcagatatctatctgattgatgaaccaagtgcttatcttgattcggagcagcgtattgttgcctcaaaagttatcaagagattcattcttcacgcgaagaaaactgcatttattgttgagcatgatttcatcatggcaacatacttggctgacaaggtcattgtttatgaggggcgaccttctattgactgtactgccaacgcaccacagtctttagtatctgggatgaataaattcttatcgcatctcgacatcacttttagaagagacccaaccaactataggccacgtataaacaagttggaatcgacaaaggacagggaacagaagtcagccgggtcctactactacctcgatgactaatgaggaagtgcaggttgtcatatatctgtattcttcttggagagccatatgtcgcataatctttccagagcgtggaaaggagaagctactttgaagctaccactgcatcatggcatgtgacttgttgaataattggttgcaggagtagagtgcgccggttataacttataaagcagagcatgccgtgttgatactgagttttttgttggcttgacctatatgaagagaaggatcggtgttaaaatgagatttgcgagggggaactaatttctgtttttaagcaatactgtactgtcgttttgctatcaagtatatttgaccctcgattatatagattacattgaagtttttgggcaacaatgtgaaatcttgtgataaatctctg

SEQ ID NO: 87048 - DNA, 4309 bp, Zea Mays
cgcctccctaaacccttgccagtctccctcccggcagcggcggcaaggcctaccgccgcaaaccctcttcctcagccgctgcgtacaaaagaagttagcttctttttaagtaggaggcgggagccctaggtagccccatggctccggcggacggcggcggcgagcagccgcacaaggcgcaccgccaacacaagtccggcgccaaggcgcggaagaagaagggcaagggcaagggcgacgccggcgatgacgcaggggggcagcagaagaaccccaaggcttttgcatttcagtcagcagccaaggcgaaacgtctacaagctcgatcagctgagattgaacaacggcgtcttcatgtgccaattatggaccgttccatcggtgaacctcctccttttgttgttgtagttcaaggacctccacaggttgggaagtcactgttgataaaatgtctggtaaagcactacaccaagcaaaacttgcccgaagttcgtggccccatcactgttgtatcaggtaaaagtaggagggtacagttcgtagagtgtccaaatgatatcaatggaatgattgatgctgctaaaatagccgatctcgctttattgcttattgatggaagctatggatttgaaatggatacatttgagtttcttaatatcatgcaagtccatggattccccaaggtgatgggagtgctcacacaccttgataaatttaaagacgtgaaaaaactccggaaaactaagcagcgccttaaacatcgattctgggctgagataaaagagggagcaaaattattctacttgtctggtctgattcatggaaaatacacgaaaagagaagttcataatcttgcaagattcatctctgtaatcaaacctatccaattgagttggcgcatggctcatccttatttgttagttgatagatttgaggatgtcacccctacagaaagtgtgcggttgaacagaaagtgtgacagaacaataacattgtatggttatctccgtggctgtaatatgaaaagagggaccaaggtgcatatcacaggggctggtgatttcagcttgtcaggggtgacgggtttaggtgatccttgccctttgccatcatctgcaaagaaaagaggattgcgtgacaaggaaaaactgttctatgcaccaatgtctggtcttggggatttgctttatgacaaggatgctgtttatattaatatcaatgatcatcttgttcagttttcaaaaagtgatgaaaatgatgcacccaaaaagcaagggaaaggtaaagatgtgggtgtggccctggtaaaaacacttcaaaacccaagatactcccttgatgaaaagttggagcaaagttttataaatttctttggtgggcgtcctgctgctcaatccaaagacagtgatgctcaaggcaatgtcatctctgcaagccaggataatcagagtgacacaaacattttgcagcaagtagatgatggtaacaatagcaatgcagtcaccatggagagcaatgaacattctgaaggctctagtgatagcgaaggggataatgatgatatccagctgagggatcgtgatgttgacttgagggaagaagtagaggtttgcaatggaagattgaggcgaagagctgtatctgctaattttcgagatgactttgatgatgagggtactgatgaagatgcaaatgatgatgaggattctggtgatgaccagttatctggagattctgcatcatcagcagatgatagtggagaagctagtgatccagaggatgaacttgagaacacttcaaaatggaaagaatcccttcttgcaagaacaatgtcccgacggagtgataatttgatgcaacttgtctatggactaccttcaacaaagctaggcagtgttgcagaagaaaatgatgatagtgaagccaacagctcagatgatgaatttttcagaccaaaaggacaaaagcagcaagcaaagaatgaatcaccgagctttggtgatattgatggtgaggattgctccaagtttttcaaagcagagttaaaagattggtctaatgaagatctcatcaaaagcatccgtgatcgttttgtgactggaaattggtcaaaagctactttgagaggacaggatacagatgatcgtggtgaggatgatgaggaaatgtatggagattttgaagatcttgaaactggtgaggtacatatggcccagacagatgaaaatgtggaagcgaaagatgacccagaagttgaagaaagaagacttaagaagcttgcacaaagagcgaaatttgatgcacaatatccttaatatatgacttacatatgatggttctgagttatctgacgatgaagttgatgatgttaagaagaaatccagacgagaacagtccaatgaagggggctattttgacaagctaaaggaggaaatggaactacgcaagcaaatgaatatatctgagctcaatgaccttgatgaagagactcgagtagacattgaaggattcaggactggtacttatgtcaggttagaagtacatggtgtgccatttgagcttgttgagcattttgatccttgccaccccattcttgttggggggattggccttggtgaggagaacacaggattcatgcaggctagtttgaagcgccataggtggcacaggaaagttctgaagacaaaggatccaatcatagtttcaattggttggaggcgatttcaaacaacccctgtgtatgcaatagaggatcggaatggtcgacaccgcatgctgaagtatacacctgagcatatgcattgctttgctatgttttggggaccacttgctccaccgaagagtggtgtattagcagtccagaatctttccaacaatcaggtgccatttaggataactgcaacaggatgggttcaagaattcaacaatactgccagaattgtgaagaagataaagctcacaggcacaccatgcaagatatttaagaagactgcactaatcaagggaatgttcacatccgatttagaggttgctaggtttgaaggtgctgccattcggactgtaagtggaatccgaggacaggttaaaaaggcagcaaagattgagccaggagatatgttgaagagaaaaggggaaaatacagaaggaatcgcaagatgtacatttgaggacagaattcttatgagtgacattgttttcctgcgtgcctgggtcaacgttgaagttcctacgtactctaaccctgtgaccactgctctgcaacctagagagcagacctggcaaggcatgagaacaactgctgagttgcggaaggcacacaatatccctaccccacacaacaaggattcagtttacaagcctatcgagcggaaaccacgcaagttcaatcccgtcgagatccccgcaaagctgcaacagttacttccctttaaatctaagcctaaggacacagcgaagcagaagaaagcaccagttgaaaacagggtgcctgtaatcatgcagcctagtgagaagaagacacacgcagctatacaacagctaaggctgataaaacacgagaaggcaaagaagaagaaaattaaggaacaacagaagaaaaaagcatacgaggcagagaaagccaagaccgagctactgacgaagaagcgccagagggaagagaggcgtgtgagataccgggaagaagataagcagaagaaacgtgcacgcagatgaggcgaggaacggggtatgtgcaccaggaactcagcagcaaccgggcatgctctcttgtgcagaacatatgccaaaatcttagttcatatacggagagctataaaaggtgcagtaccacccatctgggcgaagaagcatgtcaagtcataaccagggcgcggagatgagcaagttaggttgcttgtttaagttatgtatcggttgccctaacgcggaatattgtctgagtgtttggcaaacgcatgtggactcccaagtaaatttggagtcataattttggagtgtatactacctcaggtaccgaatgttaggcaaacgcatgtggtctttagctcccaagcaagtttggtttctatggatcaatttttagtccatctattttagtttctaaattactaaacacatgagctaaaaaaatatctctattttagttcctttgtttaatttagagattaaaatggaggtactaaaaattagtctatagaaaccaaacacctcttaatatgcttttgagccctgttctgtgagcctgtttcgtttgattttaatgtctctattgcttttattgtctctatatattgtagctgtagttgtt

SEQ ID NO: 87049 - DNA, 3368 bp, Zea Mays
aatccggagtcttctccctcccctaacgcccctcctctccttccccacctgcgtgctgccgctgctgacaccttctcctccccacaaatctcgcctctgccgccgactctggctgcgaatccaccgcagatcggcgcgggggctccgcttgatgcccgatctgtgagagcggctcgccaccatgagggccgtgctgctgctggcgctgctcctgtctgcttgcgccgcggcggcggcgcaaggggccaactccacggcgttcgtgccgcgggacgacatccgcctggactgcggcgccaaggggcagggtaacgacactgacggccgggtgtggaccggggacgcgggctccaagtacgccccgccggacaacctcgcctcggtggcctccgcctccggccaggatccctcggtcccgcaggtgccgtacctcaccgcgcgggtctcggcctcgcctttcacctactccttcccgcttggcccgggccgcaagttcctcaggctccacttctacccggccaactacaccgaccgcgacgccgccgacggcctcttctccgtctccgtcgccgccccggggggcaacctcacgctcctctccaacttcagcgcctaccagacggctgccgcgatcacctactcgtacctcattcgggagttctccgtcaacgtctcgtccccgacgctcgacctcaccttcaccccggagaaggcccaccccaacgcctacgcgttcgtcaacggcatcgaggtcgtgtcctcccccgacctcttcgacatctccactcccaacatgcttgccggcgacggcaacctccagccgttcccgatcgatgctggcactgcgatgcagaccatgtaccggctcaacgtcggaggccaggcgatttcgccctccaaggacacgggcggttaccggtcctgggacgacgactcatcgtacatctttggtgctagcttcggggtcagctacccgaaggatagcaaggtcaccatcacatatccaagcaatgtgccggagtatgtggcgccagaggatgtctacggcacggcgcgatccatggggccagataagaatgtgaacatgaactacaatctcacatggatgttggaggtggatgctggattcatgtaccttatcaggatgcatttctgtgagatccagtaccccatcacaaagatcaatcagcgggtcttcaatatttacattaacaaccagactgcagtcaagggtgctgatgtgaatgcctgggcggccgtaagtggtgctaccacccttattggcactccggtgtatcaggactatgtagtgagcacaacgggtttaggggccatggatttatgggtagctctccatcccaatcccgactcgaagccacaaatatatgatgctatcctcaatgggatggaggtgttcaagctacagcttaccaatggcagccttgcagggctgaatcctgtgccaagtgttgccccggtgcctgatgggacaactaagaagaagtcaagtgttgggcctattgtcggtggagtggttggaggtttggtggttcttgcacttggctattgctgctttgtgatctgcaagcgcaggaggaatgccgggaaggatgcaggcatgagtgatgggcattctggttggctgcccctgtctctttatggcaattcacacacttccagttcggccaagtcacacactactggtagctatgcttcatctttgccatccaacctgtgccgccatttctcttttgctgagatcaaggccgcaacgaacaactttgatgagtcccttattcttggtgtgggtggatttggtaaagtttatcgtggtgaggttgatgggggaacaactaaggtggctatcaagcgtggcaaccccttgtctgagcagggtgtgcatgagttccagactgagattgaaatgctgtccaagctccgccaccgccatctggtgtcactgattgggtactgcgaggagaagaatgaaatgatcctggtctacgattacatggcccatggtactctccgtgagcacctgtacaagacccagaagccacctcttacctggaggcagcgtttggatatctgtattggtgcagctcgtgggcttcactaccttcacactggtgcaaagcacaccatcatccaccgtgatgtgaagacaacaaacatcctgctggatgagaaatgggttgccaaggtttcagattttggtctgtccaagactggcccatctatggaccatactcatgtgagcacagttgtcaaaggcagttttggttaccttgatcccgaatacttccgcaggcagcagctcacagagaaatccgatgtctactcatttggtgttgtgctgtttgaggtcctctgcgcacggcctgccttgaaccctactcttccaaaagaagaagtcagcttggcggagtgggcgttgcactgccagaagaagggcatccttgaccagattgtcgacccctacctgaagggaaagatagccccacagtgcttcaagaagttcgccgagacagccgagaagtgtgtttctgatcagggaatcgaccgcccttcgatgggtgatgtgctctggaacctggagttcgcccttcagatgcaggaaggcgcagaagagagcggaagccttggctgcgggatgtcagacgagggcgccccattgatggtcgggaagaaggacccgaacgacccatcgatcgagtcaagcaccaccaccacaaccaccacttctataagcatgggcgaccaaagcgtcgcgagtatagactcggatgggctgacgcctagcgccgtcttctcgcagatcatgaaccccaaggggcggtgaggtaaagctggccccattcgttaccttgcaggcgtaatttattcattcagaataaatttttttcttcaatgttctctcaagttaaggcttaagaaccagaagtgtgaggattgtttcgtactagatattctgccttgccttgtactacttccttctccgagtattgtaatgactatacaatctgttggcttgtattgtaccgctgctattgacccagccagtattttactgcacgagaaagtggtgtgcacgaactattcttatggggtggttgtgtgacgtgttcttttaggaaggagtctcacctctgaatccgacatctacacttgacaatcagttttcagtctgaatggatacaagaactggtagaccgtcgtctggttattagcagaactgagattgtgtcggttttgtcccttcagacaaattccaattgccaaacaatccatttcacattggattgtaggcgcagggcggctcacgagagctcttgaggtgttattacagaataattgtttgggtgtgt

SEQ ID NO: 87050 - DNA, 1414 bp, Zea Mays
gatcgcaacgaatattggtagcggctcccccagctctggaccttctcaaacccttccccgtgggccgtggccgccgtctgcctgtctccttccactcgccactccgatttccctcggtcagacgccgaagccgaaccctgactccaattctctcgtgcgagtgacatctaggtttccagacgccttcggtgagtacagggaaggaagtcgccatggctgacgacgaacaggcggagaagaaggaggaggtccccgagcttgctccttttgacccaaccaagaaaaagaagaagaagaaggtggtaatacaagagccatcagatgaggtggataacttggcagagaagacagagagcttgactgtaaccgagtctagtgagccaagctttgcgggcatgaaaaagaagaagaagaaacatgtggaacttgattcttctcttaccgagaccggagatgttgatgacacaggagacgatcaagttagagaggatgaagaaggagaagggattgtgctcgctggtgccgctgccaccagatacccttgggaaggaactgacagagattataagtatgaagagctgcttggcagagtattcaacattttgcgtgagaacaacccggatcttgctggtgatagaagaagaactgttatgaggccccctcaagtcctcagggaaggaacaaagaagacagtttttgtgaacttcatggacttgtgcaaaacaatgcataggcaaccagaacatgtgatgatgttcttgcttgctgagatgggaacaagtggatccctggatgggcaacaaaggttggttatcaaaggaagatttgcaccaaaaaatttcgaagcgatacttaggagatatatcaatgaatatgtcatatgcaatggttgcaagagtccggataccattctttctaaagagaacaggttgttcttcctccgatgcgagcagtgtggttcatcgaggtctgttgctcccatcaaggctggattcgttgcccaagtgggccgtcgtaaggctggatcttaagctacctactacttgcctgaaatcgcttcccgatgaagacaatgcaaactagtttgctggtccacaaaaatcattgttgcactttcccttgtgcctacacagttcactggatttctgctgttcgctatacttggattggtgctgtgaatttatttcgtgtgatgagaggatttgtgtttgcggctcacttgtgtttactacgtttgttttgctcgtgattttgctgtggaaggcactgtcgggagcttcccgagttaggacgagtaacaagaaaacgtgttgcttccattcagataaaaagcaaggctgcagcattctgaactgttcctcagcttcttttccctgcacttatttgggtataaaaagctaagaagatgtgattt

SEQ ID NO: 87051 - DNA, 207 bp, Zea Mays
ccaatttcatttttcaatagggttagatgatctagttcttaatattattagtttacttaactgacagattccgcaacaaatctcttgattcggaattagggactcatgttccgtctgatgaatcgattttctttttttttacacttctatatctcactctatcttgaatatattttgttaattttaaatgctcatatgacgaaatgc

SEQ ID NO: 87052 - DNA, 871 bp, Zea Mays
aaaccaaaagctatctcgctggtcactgtcctcgcttttgctccctgttccgccgagctcacgccagtagagatgagggccacgtcgtcccccgtggctggcgccgtcctcgccgccccttcctccgccgccgccgtagtcgtaaagcctctgcctcgtggcgcagcgaatggcggcagcacgggcaggcgcgaagtgcttgccgggaccgggctgggcgcggcgctgctgctagcgctggggcccgtgtgcggcgcggcgcgtgcggcggacgaggaatacgtgagcgagacgaaggaggtgatcgggaaggtgcggtcgacgatcaacctggacaagtcggacccgagcgtggcggacgcggtggcggagctccgggagctgtccaactcgtgggtggccaagtaccggcgggagaagtcgctgctggggcggccgtcgttccgggagatgtactcggcgctcaacgccgtgtcgggccattacatcagcttcggccccacggcgcccatcccggccaagcgccgcgcgcgcatcctcgaggagatggacaccgccgagaaggcactcctccgcggcaggtaggccaaatcccagcgaagcccggccatggcgatcgccgtcgccgtggtggcaggaacgcagctctcagcgacaacgctaccattttgtaactactgcggtgtagtatatatatatgcatgcattcgtacgtgatgcgagctgtgttttcggtccgatgggagcgcgtcctgtgactgtgactggagtaaaaatttaccgagcttctgagagtatcacattgtgtatcgatcttgcaagacttctgaatcagctatgcatggatgggactgggagttgtccatcggtt

SEQ ID NO: 87053 - DNA, 192 bp, Zea Mays
atgttcgtccagcactcgtcaaagttcgcaatgcaggtcttgccagcaacattcggccggaagcttggctcgatctgccgggcctccagcctcttccagtttacagacttgaaccacttgtggttcttgatttcgtcactgccgcctggtccgcttcccagccgtctgccagcttctttgtgcaataactga

SEQ ID NO: 87054 - DNA, 181 bp, Zea Mays
taagaaaggttttctctaaaaacatagatcacaaattagagctaatcctcaccttatgcttccattctcatcttaacccatctcaagagaaaagcaccttacccaagaagatatcgagaagcttacccttgaagcctggaataagctacagaagaaacctatccagccgctcagtcaaaag

SEQ ID NO: 87055 - DNA, 577 bp, Zea Mays
cgttcgttcatagttcatatccatcgttcatcgttcgttcatacgaactattcaccatcactatttaccgttactatttaccgttacttttaccgttactttttaccgttactattcaccgttactttttatcgttactttttaccgttactttttaccgttactatttatcgttactttttaccgttactattttccgttactatttaccgttactatttaccgttactttttaccgttactatttaacgttactttttaccgttactattcatcgatcatccgatcaccccaaatttcaactactcatccatcatgttgtccagtccacctaagaccagccagacccatattccagttatacaaactccggtgactgtgattttccttccagtgggaacttcccatctggtcacccatcctaggtttctccaagttgagcacgcttaacttgagatttcttcgaaccaggcttccaaactcagattccaataattctcgtttctaaattcttatcgaattattccctatccaaccatgtcatcccataagcatggttcataatccagaaaactcc

SEQ ID NO: 87056 - DNA, 686 bp, Zea Mays
atcatatgtgacataatttatattttcaacccactctaacctacatcatgatgaatacataaagtatatttacatagactaactcattagccgactatggaaattactaagtatgttttacgctttatttaatttaccacaactaacacactactttatgacgaagtgctttagcaaacaattaatacatccgcgaccaatctctacgacgcacaaaagaactattgcagccacatttatatccgatataacaacaaaataacacatcggctcaccatatcaaacctcagtcgtggttgctgcacatgtggcgtgaagacgaacgcgccgtcgcgcacgggagaccgaaacgacgtcggagggcgtggctcgctgcggcgattcgtcgagcacgcaagcgcgaggcaaagcaccatgccgccactgggcgttgctgggtgaggcttgctgcaggaatttggacggcgcttaggcaggggcaacgacggcgctgtggagtggagggtcgagcgggctggggctactgcaggggtgctggacatgggggaaaaacagcagtgaagttcgatgacgatgcaaggcgaagagcggtgctgctgcagcgcgcagcttgctgcgcaggtcggcgatggagctcgctgcgcgatgagggagcgaggtagtagcagggacgtccgacagcaacg

SEQ ID NO: 87057 - DNA, 1825 bp, Zea Mays
gcagctcatgcacgccggcacgaggccaagtcatcgacacgagtacggcaccctggcccaccccacaagccacacatcgccgatccaacgcccgcccgcatcgcgacgaacactgtcagcttccgatccgcgtgttgtcgtccaaagactgcatccctcccccctctccagtctccacccagaacacaagcaggcagcagccgatcggactcggctagtttcgccggccgcctccaactggtcctccgctgggcgcgagggctctttctctaggcccgtagatctgcgctgctgcgccctcgttgtcgtgaaaatcactatccgtctcttggatcgagcgatcctcccattcgcggcttcgccccacacgagtcgttccaaggagccgaaatttccagcccgcccggcaggggcaggcggtacggggattcgggctctgccctgcttttatcagcaactccactggccgctgaggttctgtaggagggcggtgcaccggtggggccaggggagcatgatgagggggcacacgtggctggcgcttctggtcgtggtggtgctcgcgttggcggacgcggcggcggggaggttcgtggtggagaagaacagcatccaggtgacgtcccccgacgagctcaagggcaagtacgagtgcgccatcggcaacttcggggtgccgcagtacgggggcaccctgcacggattggtcgagtacccaaagtccaaccggaaggcgtgccagagcttcgacatctcgttcaagcccaagcaggccgggggacgacccaccttcgtcctcgtcgaccgcggagaatgcttcttcacaaccaaggcatggaatgcacaaaacgctggagctgctgccgttcttgttgtggatgacaagtcggaacctctaatcacaatggacaacccagaagaaggcaaagagcacctagaaaacatcactattccctcagtgcttataacaaagaaattgggggaaagccttaagaaatccgcggaaaatggcgatatgcttagcgttcttctagactggagagaatcccttccccatccggatgagcgtgtagagtatgagttctggacaaacagtaatgatgaatgtggtcctaaatgtgatatgcaaatggacttcgtgaagagctttagaggaactgcacaaatccttgagaaaaagggttacactcagtttactcctcattatatcacatggtattgtccagaagcttttgtcgatagcaagcaatgcaaatcacagtgcatcaatcatgggagatattgtgcaccagacccagagcaggattttagtcaagggtatgatggaagaaatgttgtggttcaaaatctacatcaaatttgtgtattcaagattgctaatgaaactggaaagccatggctgtggtgggattatgtgcatgatttcgcacttaggtgcccaatgaaggataagaaatacaatcatgactgtgccagcgatgttatcaagtcacttggattggacatcgagaaaataaacaagtgtgttggcgaccctgaagccaatgaggaaaacgtaattttaaaggcagaacaagatgcccaaattggtcatggtaaaaggggagatgtcacaatactaccaacccttgtcatcaacaacaggcaatacagaggtaagctggacaaagttgctgtcctgaaagcgatttgttcaggattcgaggagacaactgagcctgctgtttgtttgagcgaagaggttcaaacaaatgagtgtttggagaacaatgggggttgctggctggacaaagctaataatgttactgcatgcaaggtacaattt

SEQ ID NO: 87058 - DNA, 1141 bp, Zea Mays
gcagctcatgcacgccggcacgaggccaagtcatcgacacgagtacggcaccctggcccaccccacaagccacacatcgccgatccaacgcccgcccgcatcgcgacgaacactgtcagcttccgatccgcgtgttgtcgtccaaagactgcatccctcccccctctccagtctccacccagaacacaagcaggcagcagccgatcggactcggctagtttcgccggccgcctccaactggtcctccgctgggcgcgagggctctttctctaggcccgtagatctgcgctgctgcgccctcgttgtcgtgaaaatcactatccgtctcttggatcgagcgatcctcccattcgcggcttcgccccacacgagtcgttccaaggagccgaaatttccagcccgcccggcaggggcaggcggtacggggattcgggctctgccctgcttttatcagcaactccactggccgctgaggttctgtaggagggcggtgcaccggtggggccaggggagcatgatgagggggcacacgtggctggcgcttctggtcgtggtggtgctcgcgttggcggacgcggcggcggggaggttcgtggtggagaagaacagcatccaggtgacgtcccccgacgagctcaagggcaagtacgagtgcgccatcggcaacttcggggtgccgcagtacgggggcaccctgcacggattggtcgagtacccaaagtccaaccggaaggcgtgccagagcttcgacatctcgttcaagcccaagcaggccgggggacgacccaccttcgtcctcgtcgaccgcggaggattggacatcgagaaaataaacaagtgtgttggcgaccctgaagccaatgaggaaaacgtaattttaaaggcagaacaagatgcccaaattggtcatggtaaaaggggagatgtcacaatactaccaacccttgtcatcaacaacaggcaatacagaggtaagctggacaaagttgctgtcctgaaagcgatttgttcaggattcgaggagacaactgagcctgctgtttgtttgagcgaagaggttcaaacaaatgagtgtttggagaacaatgggggttgctggctggacaaagctaataatgttactgcatgcaaggtacaattt

SEQ ID NO: 87059 - DNA, 1028 bp, Zea Mays
gctgagcaggcacccgacgactcccacggtcccaccccccgcgcgcggaggcgttgcttccaggtcgtccaaagactgcatccctcccccctctccagtctccacccagaacacaagcaggcagcagccgatcggactcggctagtttcgccggccgcctccaactggtcctccgctgggcgcgagggctctttctctaggcccgtagatctgcgctgctgcgccctcgttgtcgtgaaaatcactatccgtctcttggatcgagcgatcctcccattcgcggcttcgccccacacgagtcgttccaaggagccgaaatttccagcccgcccggcaggggcaggcggtacggggattcgggctctgccctgcttttatcagcaactccactggccgctgaggttctgtaggagggcggtgcaccggtggggccaggggagcatgatgagggggcacacgtggctggcgcttctggtcgtggtggtgctcgcgttggcggacgcggcggcggggaggttcgtggtggagaagaacagcatccaggtgacgtcccccgacgagctcaagggcaagtacgagtgcgccatcggcaacttcggggtgccgcagtacgggggcaccctgcacggattggtcgagtacccaaagtccaaccggaaggcgtgccagagcttcgacatctcgttcaagcccaagcaggccgggggacgacccaccttcgtcctcgtcgaccgcggaggtgaccttgagtctctctgtattgggcattggcctttgttttgttgggtttgtttcttccattcagttgcgcgcgctggttatttttggaaacctttttttttgggacaagaaacctattttttggttgtccacctgttctctggaaattgcttgctcgaattagtgagggtagtcttttatcgtgattcgttcggtctagctctacctcctagcattaattagaatccagttactagatatgatatttgattcattctttaatgtaagaataaagaattgaattaaaa

SEQ ID NO: 87060 - DNA, 3806 bp, Zea Mays
ttccactcctcgctctttctccctcgcagcggtccagcctcagcccactctccgttgctccctgcctccctcggtccctcccggctcccactctcgcccctcctcccctctccctgcctgcattcttcaatgaagttttccggcgagtcggcaccggcggcagcgacgtagacgggtgcatcctggctcggcagtactacgcaggaaggaagagagagaaccatttgaagcttcgaggtcgtcacgcacagatttaagtgagcccaaacccgcggagtctcatccgttcatcccaccggttcgttcgtcttcctgcatcagccctgagcgtttaattgcgccgccgcctccttgtccttcgcccaagtctcgccgagcaatgcggcctctcgcgctgctcgttctcgcccacctcgccgccctcgcggcggcggcggaggccaagggcggcgtggcgggggcggggctgggcgacgacgtgctggggctgatcgtgttcaaggccgacgtgtcggaccccgacggccgcctcgcgacgtggagcgaggacgacgagcggccctgcgcctgggacggcgtcacctgcgacgcgcgcaccggccgcgtctccgcgctctccctcgccggcttcggcctctccggcaagctcggccggggcctcctccgcctcgaggcgctccagtcgctctccctcgcccgcaacaacctctccggcgacgtccccgccgacctcgcccgcctcccggcgctccagacgctggacctcagcgccaacgcattcgccggcgccgtcccggaggggctcttcggccggtgccgctccctccgcgacgtctcgctcgccaacaacgccttctccggcggcatcccgcgggacgtcgccgcgtgcgccacgctcgcgtcgctcaacctctcctccaaccgcctggacggcgcgctgcccagcgacatttggtccctcaacgcgctgcgcacgctggacatctcgggcaatgccgtcaccggcgacctcccgatcggtgtcagcaggatgtttaaccttcgggagcttaatctgcgaggcaaccgtctcactggtagcctcccggacgacattggggactgcccgctgctcaggtcagtggatcttgggtccaactcgctgtccggcaacttacctgagtccctgaggaggctctccacctgcacataccttgatttgagctcaaatgagttcactgggagtgtcccgacatggtttggagaaatgacaagcctggaaatgctggatttgtcggggaacaggttgtctggcgagatccctgggtctattggtgagttgatgtcactgagggagctgaggttgtcagggaatgggttcaccggagccttacctgaatcaattggtggatgcaagagcctgatgcatgttgatgtcagctggaattctcttacgggtgcactgcctacctgggttctcagttccagtgtgcaatgggtgtcggtgtcgcagaacacattgagcggggacctaaaagtgcctgcaaatgcttcttcagtgcttcaaggagtggacttgtcaaacaatgccttctctggagttataccatcggaaatctcgaagctgcagaacttgcagtcattgaacatgtcatggaactcaatgtatggaagtattccggccagcattttggagatgaagtcactggaggttcttgattttactgccaaccggctaaatgggtgcattccagcttcaaaaggaggggagtcattgaaggagttgaggctggggaagaacttcctgactggcaacatcccagctcagattggcaattgctctgccctcgcatcactggatctttctcataacagtttaacaggagtgattccggaagcactatctaaccttaccaatctcgagattgtggatctttctcagaacaagcttactggtgttctaccaaagcagctttctaatctcccccacctcttgcaattcaatgtttcacataaccagctctctggggatctccctcccggtagcttctttgacaccatccccctatcttgtgtgtcggataatcctggcctttgtggcgcgaagctcaattcatcttgtcctggtgtgctaccaaaaccaatcgtgctgaacccaaacacttcttccgatccaatatcaccaaccgagcttgtgcctgatggtggtcgccatcataagaaaaccatactcagcatctcggcccttgttgcaattggtgctgctgttctaattgctgttggtgtcattaccatcactgttcttaaccttcgagtgcgtgcccctggatctcattctggtgctgtcctggaactctcagatggatatctcagccagtcgccaacaaccgacatgaacgcagggaagcttgtcatgtttggaggaggaaatccggagttcagtgccagcacccatgctcttctgaacaaggattgcgagcttgggcgtggtggttttggcactgtctacaagaccactcttcgagatggacaacctgttgccatcaagaagctcactgtgtcaagcttggttaaatctcaagttgaatttgagagagaagtgaagatgctgggtaagctacgccatcgcaacctagttgcgctaaagggatattactggacgccgtcgcttcagcttctcatttatgagtttgtctccgggggcaacctgcacaaacaattgcatgagtcatccaccacaaactgcctgccatggaaggagaggtttgacatagtcctcggtatagcgagaagccttgctcatctccacaggcatgatattatccactacaatctgaaatcaagcaacatcctgctcgacggatcaggcgaggcaaaggtaggagattatgggctagcgaagctgcttccaatgctggaccgctacgtcttaagtagcaaggtgcagagcgcgcttggatacatggctccagagtttgcgtgcaggaccgtgaagatcacggagaaatgcgatgtgtacgggttcggcgtccttatcctcgagatcctgacagggaggacgcccgtggagtacatggaggacgacgtggtcgtgctctgcgatgtggtgagggcggctctggacgaaggcaaggtggaagagtgcgtcgacgagaggctctgcggcaagtttccgctggaggaggccgttccgatcatgaagctgggtctggtctgcacttcccaggttccgtctaacaggccagacatgggtgaggtggtgaacatactggagctgatcagatgcccccaggacagcccggagactgaactgggttaacctcctctactacctacactggatcccggactgtttgttggtttcacttttgagatccttctttgcttggtaactgaccggacgatgaaaggtgaagcaagcgagttctactctatccagtgtgccgtcgccgaagtgtctagctagtcttctgatggttagggagttattatggaacgcctacagtagtttggtcgcctcccggggtgttgatgtgtttgacttagatcctcaccagtaaggccaagatgtatggtgtggatcctctcacatcaatcctggtggcctgtaatttcaatttattttttttagctatgcaatgtggtgcaacttgccctttttctagaccatgttatgaaagcttgccacattttggatccttgctgtctaaccacccatttaattaacttggaaatgtgtaccactaaaccgagtactgctgggcggtactcaccatggcaagtgccagtaccagccagtcaagagagtgttgtgtttatatttgtct

SEQ ID NO: 87061 - DNA, 2135 bp, Zea Mays
tcgatcgagagccactagttctctcgctttccgaaccccatccactcggctcgccgcccgcacacgcccattccattccactttccaccatggcttccctctgcgtccaccatacctcgctaccactctccccgccccaccaggtcaccgtccccgaaccctctcgcgcgctgcccccatcctcgcgcctccccgccctgccgtcctcctccaaccatgtcagcgccctccctcgacccgcggcggcggcttcctccgccttcgcgtgccactgcaaagcaccggtgcgggaccacgacgctgagctcctccgcgctctacggtccaacggcaacggcaccctccacggggacacagcaccgccgcaagtcctcgactcgcgctccgacggaccgggcggcggcgacggcagcaagaggtcgcgtttctgcgcccgtgattgcgcgaagcggatcatggagctgcccgtggaggagcgggtgaaggtgctcgacctcctgccgcgcgacgacgcggcgctcaccgtctccgattacaacgacatcctctcggcgctggctcgcgcgggggaccacgccacggccgtcgcgctgttccgcgccatgcccgtcgcccccgacgcacactccttcgccaccgccgtgcagtgcctctgccgacagggcgcgcccgacgaggccaagctcgcgctcgacgagatggtggcgcgcgggttccgccccagcgttgccacgttctcagccgttgtggggtgcctctgcaagcgcggacgcgtcaccaaggccatggaggtgttggacgccatgtgcggcctcgggtgcgagcctaccatccgcacgtacaacagcctcgtcggcgggctctgctacgtcggccggctggaggaggcgctcgaactcctcaagaagctcaaggactcgcccctgacgcctgacatctacaccttcaccatcgtgctcgacgggttctgtaaggtcgggcggacggaggaggccacggccatcttccacgatgcgatcgggatgggcctctcgccgacgacattcacgtacaacgcgctcctgaacggccactgcaaggagggaaacccgctcaaagcgttcgcgctgctcatggagatgtgcggcaacaacgacgccgcctgcctgccagacaagaccagcttcgggatcgtgctgacggcgctgctccgcgccggcgagacctcagcggcgtggcagacgtacaagcggatggagcgcgctgggttcgaggtggacgggcgcgcgctggacacgctggctcggggcctgtgccggcggtgcgcgacggacgcctcggccctcggcgacgcggaggaggtgttcgccaaggtggtggcttcgggccacgagccggtgtcctacacgtactgcctgatggcgcaggcgctggcgcgcggcggcgaggtggacgcggccgtggcgctcctggaggacatggtgcgcaagggatacgcgctgcggaagcgcgcctacacggacgtggtgcgcgcgctctgtgaccgtggcagggcccgcgacgcgctgcaggtgcttgtgcttgtgatgatcgtgagggacttcgtgccgggacggaacgcgttcgaagcgctcctgggagagctgagccggcaggggcggtgggctgacgccatggccgtgtacgccgccgctgtgaagcgaggcgtggtggtctcgtggaagcacctcggcagagaggcgcactcaccggaggagcccattcggctgggcgtccctgtcccgcagtgaccgtttgtctggggctctgggcgcggccgggatcaccatctttctgagcccattcggcttgcgttctgtttccgatgctgtagacggaaaattctgccagtttggaccgcttgcagatggcactgaggaacaagcgtagctgatggttcaggtattcgcgttgtcgctaattttcgtgacactcaccgcaaatgtaccgaaattatgtaaatcatttctgcttctacgtaaatcatctctgcttctattatccggccgggagcattggcgtccagcttacgagttacggatgataatcctgatttcatagctgtaaacgcacaaagcacttttatttatagacggcgccacgaaaaaaaaaaccaa

SEQ ID NO: 87062 - DNA, 1024 bp, Zea Mays
actccactcctaaatccaaagcaaatccgaaagcaccacgaaacacggcggcagcagcctgcgtgcctgcctgcctatccaccccatcctccagcctccgcctccgacacccgcgcgcgccctcgcgcggacaaagccgtgagcggcagagccgagggaggcggggctgcgccggcctcgcaatgcagcagccggggcctgccgatctgccgggctgggccttcccgccacgggcgggaccggcgcctgccgccgcgcgcggggcgcaccaccgccgggccagatctgaggttgccttccgcctgccggacgacctcggcctcggcggcggcgccggccccgatggcgacgccttcgacgagatcggctcggaggacgacctcttctccaccttcatggacatcgagaagatctccacctccgggccctccgaccgcgccgccgagaactcgtctccgccgcgccccaagcaccgccacagcagctccgtcgatggctcgggcttcttcttctcacccggcgccggcggtggcgcggggaaggatgccgccgcgtcgctggctgaggtcttggaggccaagaagtccatgactcccgagcaactggccgagctcgccgccatcgaccccaagcgcgccaagaggtaccgcctcctcgatcgcggcaatccatccacttctttagttacggaggtggcgaggaattgactaaggcgtcgaggacaatcatgtgctcatgctttatgatgggaatggctggagattaataaggtgtttggtttgaggaataagctatctagaataagttgatccatcatcactttattagtcagttagcattaacatgaaaaataatgtcgtcccaccaaattaaatttgaggaatggacttatgacgcaccaacccatcttggatggagtgaacacatccttaaggtgtttggtttaggaatgaggtggtctatttcttctcacttctcacttttttatttggttcgtggaataaaatgggttgatccatcacca

SEQ ID NO: 87063 - DNA, 1650 bp, Zea Mays
actccactcctaaatccaaagcaaatccgaaagcaccacgaaacacggcggcagcagcctgcgtgcctgcctgcctatccaccccatcctccagcctccgcctccgacacccgcgcgcgccctcgcgcggacaaagccgtgagcggcagagccgagggaggcggggctgcgccggcctcgcaatgcagcagccggggcctgccgatctgccgggctgggccttcccgccacgggcgggaccggcgcctgccgccgcgcgcggggcgcaccaccgccgggccagatctgaggttgccttccgcctgccggacgacctcggcctcggcggcggcgccggccccgatggcgacgccttcgacgagatcggctcggaggacgacctcttctccaccttcatggacatcgagaagatctccacctccgggccctccgaccgcgccgccgagaactcgtctccgccgcgccccaagcaccgccacagcagctccgtcgatggctcgggcttcttcttctcacccggcgccggcggtggcgcggggaaggatgccgccgcgtcgctggctgaggtcttggaggccaagaagtccatgactcccgagcaactggccgagctcgccgccatcgaccccaagcgcgccaagagaattctagctaacagacaatcagcagctagatcaaaagaaagaaaggctcgttatatgacagaccttgagcggaaggtccaaactcttcagactgaagccaccaccctgtcagctcaacttacactatttcagagggacacgaccggactttctacagaaaatgcagagcttaagataaggttacaggccatggagcaacaagctcaactccgtgatgctctgaatgatgcactaaagcaggagttggagaggcttaaacatgctactggtgagatgaccaattccagcgaggcatataacatgagattccaacatgttccatacaactcttccttcttcccgctttcccagcaaaatgcatccccacaccttggtagcacccagctgccactgccgttccacccaccccatcccaacgtgccaaaccaccagatggtgtcccaccgaaacactctcccggacataatgcagcaagagtctctcggacggctgcagggtttggacattgggaaggggccactggttgtgaagttagagagcagctcgatctctgcaagtgaaagcagcagcaccttctaacgaggcctacaagtgaaaacccaccgtttcagtaggttccattgttcatagtagcctgacatccttgtgctgcttcctgctctgtaagcccatttgttatttaattcattcaattagttgaaattatacgctgtcgcactggctgatcaatcatgttgtagaatggtccatgaacccttcaattctgtttgttttgggttcgtttcctgtttctgtgactggtatcatcagggcatttgggttttggagtgaaattctctggtggtactttgttgttgttttagctatgttgcttcatggatcctctctttggaacacacatatgtattctcgtgcaatttgttgaggccctgtacattgtgtgctggcaagctatgcgtacaccctaatttatgaaatgttatcgcattgagggattttaatcacc

SEQ ID NO: 87064 - DNA, 499 bp, Zea Mays
aacatgccagggcaaaacgcggacccgtgctgtgcgttccacccaatgtcgcgtgcggccactagatttttcctgacgcggtgtctgctcccacttcccctcctctcccccaggtggcggcagcggcggcggggtagcatttgtgctacgagggcttttgcaatggcggcttcggggttcggcggcggcgaggcgttccggctctcggccgcgccgggggccggcttactgaagctgcacaagggcgacatcaccctctggtccgtcgactgcgccaccgacgccatcgttaatgctgctaatgagcgaatgttaggtggcggaggtgttgatggagctatacatcaagctgctggaccagagctagtgcaagcatgccggaaagttccagaggtcaaaccaggagtccgttgtcctactggagaagctaggattactccgttagtacttcgtacctatctattcactttgattgtttcataagtcggaatgttcaaac

SEQ ID NO: 87065 - DNA, 814 bp, Zea Mays
aacatgccagggcaaaacgcggacccgtgctgtgcgttccacccaatgtcgcgtgcggccactagatttttcctgacgcggtgtctgctcccacttcccctcctctcccccaggtggcggcagcggcggcggggtagcatttgtgctacgagggcttttgcaatggcggcttcggggttcggcggcggcgaggcgttccggctctcggccgcgccgggggccggcttactgaagctgcacaagggcgacatcaccctctggtccgtcgactgcgccaccgacgccatcgttaatgctgctaatgagcgaatgttaggtggcggaggtgttgatggagctatacatcaagctgctggaccagagctagtgcaagcatgccggaaagttccagaggtcaaaccaggagtccgttgtcctactggagaagctaggattactcctgcttttgagcttcctgcctctcgggtgattcacactgttggccctatatatgatttggacaagcatcctgaggtgtcattaaagaaggcctatgaaaatagcttgaagcttgctaaggataatggcattcagtacatcgcattccctgctatatcttgtggtgtttatcggtatgttccaagttttagtttttgctcacgtacctttggtgcaatcacttggtatggattatttgtgcaggtgcattttgttctgttctcggacgacctttacaatatatggcgcgagactgcccagcagttgctatcacagtttgagaaatgaatggtccataggcagtttgctagcactagcagttgcccagcagtcgttg

SEQ ID NO: 87066 - DNA, 1164 bp, Zea Mays
aacatgccagggcaaaacgcggacccgtgctgtgcgttccacccaatgtcgcgtgcggccactagatttttcctgacgcggtgtctgctcccacttcccctcctctcccccaggtggcggcagcggcggcggggtagcatttgtgctacgagggcttttgcaatggcggcttcggggttcggcggcggcgaggcgttccggctctcggccgcgccgggggccggcttactgaagctgcacaagggcgacatcaccctctggtccgtcgactgcgccaccgacgccatcgttaatgctgctaatgagcgaatgttaggtggcggaggtgttgatggagctatacatcaagctgctggaccagagctagtgcaagcatgccggaaagttccagaggtcaaaccaggagtccgttgtcctactggagaagctaggattactcctgcttttgagcttcctgcctctcgggtgattcacactgttggccctatatatgatttggacaagcatcctgaggtgtcattaaagaaggcctatgaaaatagcttgaagcttgctaaggataatggcattcagtacatcgcattccctgctatatcttgtggtgtttatcgttatcctcccaaggaagcatcaaaaatagctgtttctaccgcacaaaaattttcagaggatatcaaagaggtgcattttgttctgttctcggacgacctttacaatatatggcgcgagactgcccagcagttgctatcacagtttgagaaatgaatggtccataggcagtttgctagcactagcagttgcccagcagtcgttgtctagtgttgagatgtgagcgccataggcagtttgcctggtgtaataaaaatgggtgtatcagacaacgtttaaatcttgatgaaaccgtgtattgcacctgtggtataatgctgaatgagtaaagtttggcgataccgagcagttgcaatactacctatcagcatgcctccggtatttgttgtgcaatgcaggtactgtgaccagtccaacggttcctgtcatgcacacccattgtaatgtttaggatgatgttgcttgagactccttcaggtttcgcaaccttggatgttgctgcgcgatcgcttctttatcctgaggggtcgggatatgggcatggttaactaatcc

SEQ ID NO: 87067 - DNA, 301 bp, Zea Mays
cccatttcggggtttaatttgtagtgtaacttgacttggatcttgtacagttatcctcccaaggaagcatcaaaaatagctgtttctaccgcacaaaaattttcagaggatatcaaagagttgctatcacagtttgagaaatgaatggtccataggcagtttgctagcactagcagttgcccagcagtcgttgtctagtgttgagatgtgagcgccataggcagtttgcctggtgtaataaaaatgggtgtatcagacaacgtttaaatcttgatgaaaccgtgtattgcacctgtggtat

SEQ ID NO: 87068 - DNA, 3523 bp, Zea Mays
cctcactcccgttccgtttcgtttccccagttccgcatggccgccgcgaggtagcggcgcaggcgctcaccggggatggcggccggagggaggggcaagctggcgccggcggaagtggcgcccgcggcgtttccctcgcggggcttggcggtggcgggggccgcggcgggcgaggtggtgcggcgcgtgaggcccacggaggcctccgagcgccgccgcgcggaggtcgtcgactacgcgcggaggctcgtcggctcagcgctcggatgcgaggtttttgcatttggatcagttccactaaagacttaccttcctgatggggatattgatctaactgtccttggaaatacatcttatgatagtactttggttaatgatgttttctgcattcttgagtctgaggagcagaatagtgatgctgaatttgtagtgaaggacttggaacgaattgatgccgaggtcaggctcattaaatgcactattggaaatattatagttgatatctcattcaaccaaactggtgggatctgcgcactctgcttccttgagctggttgatcggaaagttggaaaaaaccatctatttaaaaggagcatcatattgatcaaggcatggtgctattatgaaagccgcctactaggagctcatcatggacttatatcaacctatgcactggaagtacttatcctttatgtattcaatctattccacaaatctctccacagccctgtggaggttctttataggtttctggaatattttagcaagtttgactgggacaactattgcataagtttaaatggccctgttgctttgtcgtctttgccaaacttaattgttgaagctacagttacacataccagtgacttattgtttgacaaagaattcctcaagagctccatggataaagcaactgtacctccaaaaaattccgattcatgctatccgaggtttcgtcctaaacatctaaacatagttgatccactgaaggagtacaacaatcttggcagaagtgtcaacagagctagctttaatcgcattcgaacagctttcttatatggtgctcgaaagcttggtcatattgtcacgttaccatcagaagttattcctgatgaaatttatgagtttttcaaaaacactttgggaaggaatgaactaggggcaagaccagatattgacagcaattatgcttttcattcttcctttggtactgctgagactattttggaagatatatcaagtatgaagatttccgatggtgaagatgagaacataacctgtcatctttcaaagagcttgggtgataaaaacttatacgttggaatgaatggacatacacatttgagtaattattttccaggagtccgtaacactgcattaagtactggtttaagtacaagagcatcccattttgttcataatgcaccaaaactacattcatcgttttgccatgataacagtcacggtgacagtgaaaaatgttacttgaaccatggaatggagcaggtatctcactacactgctaaagccttctgtatagatgataagacaacaatacagtcacaagtttttgtgagcaacccatcactattgagcacctctgctgctgtcactgcttcagaacttgccaccaaacagaaaaaatggagtactgcctatgtggagaaacaacatttttctccctcaccatcaagcttgccagatctttcaggggatctggattcacaatttagatgtttgcgtcaagttcagtaccacctcgaatacttgtttgatgggtttttgcagtcagttcagggagcatcttctgctgataagtttcacaaggacccctttcacatttctgcttgcagtatcttgttggacagagatacaggatcgccaaggttgcagttgctttcacctgctcgaagcaatggaagggatccatctcccgtttcttgtagtcagagcacagaatgtgtctctcagcattcacagaatggaagcccatgggatatggcttctcaacggagtgtctctgtgccctctggaatcgatattccaccaaatggagtctcaccgtgttcttcttgtgctgattctgaggtttcttctgtttcatggtttcatggctctggggatagcgctatgatgcatggaagtggaaaagacacatactttacaagaaagagctgttatactcgctgggagcgattggcatcttcaagaaagaatgggaaaatactgccaaatcaatcagtgaaatataaaagcaaccagaagtcagctccaggagcaagatttgtgtctcacaaggagcaggccgcaatagacagtagaaccaaagaaataacaatcgatcaagctttgaagatacatgaatacattgaatcagacatgaaaattgttgaaaaactcagttgtcataatcaaaaggaagtccgtcatgacaatgaagcaagacaattaccaaataacaaccaggatgtttgcttgaataagaactttttgcaaaaccgatatcatgtggagtctacacgagctcccagagcaacacatcagattcctaaatatcaaccgtttaaaattcaaaatactacagagtgtgatagagctagcctaagtaagaacatgcccagaaagcacagctgtggcacttggaaagagtatgagatacttgaccggccaacaaagcagagaccaatttgtggcccattgaagctagaaaacagacatgtctgggattgcacaaagaagatatcagctggaaaccagaagtgtaataatcataaggattacctatctttcgtaagaggtgcagtgccacgcagccacgcagcaagcactccaaatggtttagaaaaggaggcggctaattcaaataaatccgctgacaacggaagtcccgtaaggccaatcttgccagagttattgctttcttgtcatgacatcaatagccaagagaggtccccatcatctagtgctcatcaatcatacttccctgctgcaaatgatcgaccactggagactatagagtttggatctttgggaccttttgcactgcctttatcctcattgaagtcaaatggaactactaacacagaagctacaagtaaggtgtttacagatgcctctccatttgtgttacagaggtccagggccgccgcaactgaaaacagaccaccaggactttgcaaagtgggagacgaggacgaatttccacctcttagagctgggatccggtgagaacttacgtgtaggtcttacggatacaactgatcatagagttagcaaaaggagctgaccagttgagctttgtgcagagtttttttgggcgcctcatagaaatgaggattattgcagtggcatagtacagcctaccgtgtaaaatgtcgtcggccccttatcaatctctctctttttcccgtagttgtcactagagttacaccgaacaaggtttatacagctaatgttcactagtataacttagcaaggagaaagatcagatacaaaaaaaaacggagtacttacgtttacctta

SEQ ID NO: 87069 - DNA, 3444 bp, Zea Mays
cctcactcccgttccgtttcgtttccccagttccgcatggccgccgcgaggtagcggcgcaggcgctcaccggggatggcggccggagggaggggcaagctggcgccggcggaagtggcgcccgcggcgtttccctcgcggggcttggcggtggcgggggccgcggcgggcgaggtggtgcggcgcgtgaggcccacggaggcctccgagcgccgccgcgcggaggtcgtcgactacgcgcggaggctcgtcggctcagcgctcggatgcgaggtttttgcatttggatcagttccactaaagacttaccttcctgatggggatattgatctaactgtccttggaaatacatcttatgatagtactttggttaatgatgttttctgcattcttgagtctgaggagcagaatagtgatgctgaatttgtagtgaaggacttggaacgaattgatgccgaggtcaggctcattaaatgcactattggaaatattatagttgatatctcattcaaccaaactggtgggatctgcgcactctgcttccttgagctggttgatcggaaagttggaaaaaaccatctatttaaaaggagcatcatattgatcaaggcatggtgctattatgaaagccgcctactaggagctcatcatggacttatatcaacctatgcactggaagtacttatcctttatgtattcaatctattccacaaatctctccacagccctgtggaggttctttataggtttctggaatattttagcaagtttgactgggacaactattgcataagtttaaatggccctgttgctttgtcgtctttgccaaacttaattgttgaagctacagttacacataccagtgacttattgtttgacaaagaattcctcaagagctccatggataaagcaactgtacctccaaaaaattccgattcatgctatccgaggtttcgtcctaaacatctaaacatagttgatccactgaaggagtacaacaatcttggcagaagtgtcaacagagctagctttaatcgcattcgaacagctttcttatatggtgctcgaaagcttggtcatattgtcacgttaccatcagaagttattcctgatgaaatttatgagtttttcaaaaacactttgggaaggaatgaactaggggcaagaccagatattgacagcaattatgcttttcattcttcctttggtactgctgagactattttggaagatatatcaagtatgaagatttccgatggtgaagatgagaacataacctgtcatctttcaaagagcttgggtgataaaaacttatacgttggaatgaatggacatacacatttgagtaattattttccaggagtccgtaacactgcattaagtactggtttaagtacaagagcatcccattttgttcataatgcaccaaaactacattcatcgttttgccatgataacagtcacggtgacagtgaaaaatgttacttgaaccatggaatggagcaggtatctcactacactgctaaagccttctgtatagatgataagacaacaatacagtcacaagtttttgtgagcaacccatcactattgagcacctctgctgctgtcactgcttcagaacttgccaccaaacagaaaaaatggagtactgcctatgtggagaaacaacatttttctccctcaccatcaagcttgccagatctttcaggggatctggattcacaatttagatgtttgcgtcaagttcagtaccacctcgaatacttgtttgatgggtttttgcagtcagttcagggagcatcttctgctgataagtttcacaaggacccctttcacatttctgcttgcagtatcttgttggacagagatacaggatcgccaaggttgcagttgctttcacctgctcgaagcaatggaagggatccatctcccgtttcttgtagtcagagcacagaatgtgtctctcagcattcacagaatggaagcccatgggatatggcttctcaacggagtgtctctgtgccctctggaatcgatattccaccaaatggagtctcaccgtgttcttcttgtgctgattctgaggtttcttctgtttcatggtttcatggctctggggatagcgctatgatgcatggaagtggaaaagacacatactttacaagaaagagctgttatactcgctgggagcgattggcatcttcaagaaagaatgggaaaatactgccaaatcaatcagtgaaatataaaagcaaccagaagtcagctccaggagcaagatttgtgtctcacaaggagcaggccgcaatagacagtagaaccaaagaaataacaatcgatcaagctttgaagatacatgaatacattgaatcagacatgaaaattgttgaaaaactcagttgtcataatcaaaaggaagtccgtcatgacaatgaagcaagacaattaccaaataacaaccaggatgtttgcttgaataagaactttttgcaaaaccgatatcatgtggagtctacacgagctcccagagcaacacatcagattcctaaatatcaaccgtttaaaattcaaaatactacagagtgtgatagagctagcctaagtaagaacatgcccagaaagcacagctgtggcacttggaaagagtatgagatacttgaccggccaacaaagcagagaccaatttgtggcccattgaagctagaaaacagacatgtctgggattgcacaaagaagatatcagctggaaaccagaagtgtaataatcataaggattacctatctttcgtaagaggtgcagtgccacgcagccacgcagcaagcactccaaatggtttagaaaaggaggcggctaattcaaataaatccgctgacaacggaagtcccgtaaggccaatcttgccagagttattgctttcttgtcatgacatcaatagccaagagaggtccccatcatctagtgctcatcaatcatacttccctgctgcaaatgatcgaccactggagactatagagtttggatctttgggaccttttgcactgcctttatcctcattgaagtcaaatggaactactaacacagaagctacaagtaaggtgtttacagatgcctctccatttgtgttacagaggtccagggccgccgcaactgaaaacagaccaccaggactttgcaaagtgggagacgaggacgaatttccacctcttagagctgggatccgagtttttttgggcgcctcatagaaatgaggattattgcagtggcatagtacagcctaccgtgtaaaatgtcgtcggccccttatcaatctctctctttttcccgtagttgtcactagagttacaccgaacaaggtttatacagctaatgttcactagtataacttagcaaggagaaagatcagatacaaaaaaaaacggagtacttacgtttaccttatc

SEQ ID NO: 87070 - DNA, 439 bp, Zea Mays
atggccgcgtccagaagagcggcggcggctatgctgtgcctggccgtggcggttgccgcggtcctggcggcggagaagagcggggcggaagcggaacggccgggatgcttctgcgactgcatgaagaaccggtgcatgaccctcggcgcgagcgcggcggacaagttcgactgcgcggccgcctgcaccgagggctgcgcgcagatcggtcagccgggccagcccagggccgacgacttctgcggtttctgagccgcacgctctctcgggctttgcagattatagcaggccggcgtaggctcgatctatccggtgaccggacggcccagttggatgccgccacgaccacggtccacgacattcatgcatcgtatgtgcatgcatgtcccatagcaagagtctaaataaagctggttgttattatttcgtgttactccta

SEQ ID NO: 87071 - DNA, 3030 bp, Zea Mays
tgctctgctcacccctggcggccgggcccgttctttggaattattggtcgccattgttgtatttgtatgggcggccaactgttggagatagactgacgggcatgctacagtgttggtggcgttcgcagcagtcttgtccgatcatcaatggataccaccaacccagtagtagctgtgacttgcgacgagtgatggagcgtagcgcggctggagtggacgtacgcccggcttctcgtcttcgtccggggcgagccgagtccccctccctggctccctcctccttgccgcggcaccctgcatcgcgacgtccgcgaggagacttggcaggcgcggcaatccgcgtgttcttggggagctgctcgtttggtacgcgttgatgctgctaaaaaagtagattcttcactgctcggggatttggaacaaaggccgtggttcgaagctggtgtgttcgttcaattgtgcggaaagaaaggccagtgttatgtgtgaagtagtgaaggctagcaggtaggctggctctcgcctcgccgagcgatggatctcgagttcggtaggggcctgaggtccccaaagagagactcgtggaagaccaccttgctgctggcgtaccagagcctgggggtggtctacggcgacctcagcatctctccgctgtacgtgtacaagagcaccttcgccgaggacatccagcattcggagacgaacgaggagatcttcggcgtgctctccttcgtcttctggacgctcaccctcatccctctcgtcaagtatgtctccgttgtcctgcgagctgacgacaatggcgagggaggaacgtttgccctctactctctgatttgcaggcacgccaatgtgagcctcctcccgaaccggcagatcgccgatgaggagctttccacctacaagctggaatgccctcctgaaatcaccgacaagtcccgcatcaaggtgtggcttgagcggcacaggaagctgcgcgtcgctctgctggtcatggttatgatcgggacatgcatggttatcggggacggtgttctcacgccagctatatccgtgttctcggcagtttcaggcctggagttctcgctgtccaaggatcaccgtgaatatgctgtcattccaataacctgtgtcatattagcattcctatttgccctccagcactatggtacgcaccgggttggatttctgttcgccccgatagttctagcctggctgttctgcatgagtgctcttggcctttataatatcatccactggaatcctcagatctaccaagctctaaatccgtcttacatgttcaagttcttaaaaaagactagaaaatatggatggatgtcacttggtggaatcttgctctgcatgacaggatcagaagcaatgtttgcagatcttggacatttctcatacagtgcaatccagcttgctttcacttgtctagtttaccccgcactgattttggcatacatgggtcaagctgcttacttatcaaaacatcatgacttttactctagctcacaagttggattttacatcgcagttccagataagatcagatggccagtgcttatattggcaattttggcttcggtggtcggaagccaagcaatcatcagcggaacattctcaatcatcaaccagagcctgtccctgagctgcttccctcgagtgaaagttgtacacacatctgagaaaattcatggccaaatatacatccccgagatcaattggttgcttatgatcctctgcattgctgtgaccgttgggtttagagatacaaaacacatgggaaatgcatctggtttggctgtgatcacagtgatgctggtgaccacgttcctgacatccttggtcatcgttctctgctggcacaggccaccgctgctggcgttggctttcctcctgttctttggatccatcgaggcgctttacttctccgcgtccctgatcaagttcctggaaggcgcgtggctccccatcctcctggcgctcatcctgatggccgtcatgctcatctggcactacacgaccatcaagaagtacgagttcgacctgcacaacaaggtgaccctggagtggctcctcgccctcggggacaggctgggcatggtccgcgtccccggcatcggcctcgtgtacacagacctgacgtcgggcgtcccggccaacttctcccggttcgtgaccaacctcccggcgttccaccaggtgctggtgttcgtgtgcgtcaagtcggtgccagtgccgtacgtattcccggcggagcggtacctcatcgggcgtgtcggcccgccgggccaccgctcgtaccggtgcatcgtgcgctacggctaccgcgacgtgcaccaggacgtggactcgttcgagacggagctcgtggagaccctggccacgttcataacgctggacgcctcgtaccgctgcagcgaggccagcgagcgggagctggagctggatcccggggagcaggagcggcggctgaccgtgatcgcgagcaacccgctgcggcgccgcgccagctacgacctccaggacagcgtgcagcattcggcagcgtccaccgtggaggtgcgcgccacggccgccgacagccttagccccagggacgcggagatcagctcggcggcggggccgaagcaggtgcggttcttcatcgacagccacgtggtgagcccggaggccgcggagaacaagcaggttgcggatgagctggaggcgctggcggcggcccgggaggccggcactgcgttcatcctggggcactcgcacgtgcagtgcaagcccgggtcgtcggtgctcaagcggttggcggtggacgtcgggtacaacttcctgcggcgcaactgccgcggcccggacgtcgcgctgcgcgtgccgccggcgtcactgctggaggtcggcatggtgtacgtgctttgattgaggctgagacgatgcgactttttcttatgaacatctgatatagtaatcacgactgttgtcagttttcccagtaacataatgaggccgttctgtatagcttagcttgtt

SEQ ID NO: 87072 - DNA, 3027 bp, Zea Mays
tgctctgctcacccctggcggccgggcccgttctttggaattattggtcgccattgttgtatttgtatgggcggccaactgttggagatagactgacgggcatgctacagtgttggtggcgttcgcagcagtcttgtccgatcatcaatggataccaccaacccagtagtagctgtgacttgcgacgagtgatggagcgtagcgcggctggagtggacgtacgcccggcttctcgtcttcgtccggggcgagccgagtccccctccctggctccctcctccttgccgcggcaccctgcatcgcgacgtccgcgaggagacttggcaggcgcggcaatccgcgtgttcttggggagctgctcgtttggtacgcgttgatgctgctaaaaaagattcttcactgctcggggatttggaacaaaggccgtggttcgaagctggtgtgttcgttcaattgtgcggaaagaaaggccagtgttatgtgtgaagtagtgaaggctagcaggtaggctggctctcgcctcgccgagcgatggatctcgagttcggtaggggcctgaggtccccaaagagagactcgtggaagaccaccttgctgctggcgtaccagagcctgggggtggtctacggcgacctcagcatctctccgctgtacgtgtacaagagcaccttcgccgaggacatccagcattcggagacgaacgaggagatcttcggcgtgctctccttcgtcttctggacgctcaccctcatccctctcgtcaagtatgtctccgttgtcctgcgagctgacgacaatggcgagggaggaacgtttgccctctactctctgatttgcaggcacgccaatgtgagcctcctcccgaaccggcagatcgccgatgaggagctttccacctacaagctggaatgccctcctgaaatcaccgacaagtcccgcatcaaggtgtggcttgagcggcacaggaagctgcgcgtcgctctgctggtcatggttatgatcgggacatgcatggttatcggggacggtgttctcacgccagctatatccgtgttctcggcagtttcaggcctggagttctcgctgtccaaggatcaccgtgaatatgctgtcattccaataacctgtgtcatattagcattcctatttgccctccagcactatggtacgcaccgggttggatttctgttcgccccgatagttctagcctggctgttctgcatgagtgctcttggcctttataatatcatccactggaatcctcagatctaccaagctctaaatccgtcttacatgttcaagttcttaaaaaagactagaaaatatggatggatgtcacttggtggaatcttgctctgcatgacaggatcagaagcaatgtttgcagatcttggacatttctcatacagtgcaatccagcttgctttcacttgtctagtttaccccgcactgattttggcatacatgggtcaagctgcttacttatcaaaacatcatgacttttactctagctcacaagttggattttacatcgcagttccagataagatcagatggccagtgcttatattggcaattttggcttcggtggtcggaagccaagcaatcatcagcggaacattctcaatcatcaaccagagcctgtccctgagctgcttccctcgagtgaaagttgtacacacatctgagaaaattcatggccaaatatacatccccgagatcaattggttgcttatgatcctctgcattgctgtgaccgttgggtttagagatacaaaacacatgggaaatgcatctggtttggctgtgatcacagtgatgctggtgaccacgttcctgacatccttggtcatcgttctctgctggcacaggccaccgctgctggcgttggctttcctcctgttctttggatccatcgaggcgctttacttctccgcgtccctgatcaagttcctggaaggcgcgtggctccccatcctcctggcgctcatcctgatggccgtcatgctcatctggcactacacgaccatcaagaagtacgagttcgacctgcacaacaaggtgaccctggagtggctcctcgccctcggggacaggctgggcatggtccgcgtccccggcatcggcctcgtgtacacagacctgacgtcgggcgtcccggccaacttctcccggttcgtgaccaacctcccggcgttccaccaggtgctggtgttcgtgtgcgtcaagtcggtgccagtgccgtacgtattcccggcggagcggtacctcatcgggcgtgtcggcccgccgggccaccgctcgtaccggtgcatcgtgcgctacggctaccgcgacgtgcaccaggacgtggactcgttcgagacggagctcgtggagaccctggccacgttcataacgctggacgcctcgtaccgctgcagcgaggccagcgagcgggagctggagctggatcccggggagcaggagcggcggctgaccgtgatcgcgagcaacccgctgcggcgccgcgccagctacgacctccaggacagcgtgcagcattcggcagcgtccaccgtggaggtgcgcgccacggccgccgacagccttagccccagggacgcggagatcagctcggcggcggggccgaagcaggtgcggttcttcatcgacagccacgtggtgagcccggaggccgcggagaacaagcaggttgcggatgagctggaggcgctggcggcggcccgggaggccggcactgcgttcatcctggggcactcgcacgtgcagtgcaagcccgggtcgtcggtgctcaagcggttggcggtggacgtcgggtacaacttcctgcggcgcaactgccgcggcccggacgtcgcgctgcgcgtgccgccggcgtcactgctggaggtcggcatggtgtacgtgctttgattgaggctgagacgatgcgactttttcttatgaacatctgatatagtaatcacgactgttgtcagttttcccagtaacataatgaggccgttctgtatagcttagcttgtt

SEQ ID NO: 87073 - DNA, 2848 bp, Zea Mays
tgctctgctcacccctggcggccgggcccgttctttggaattattggtcgccattgttgtatttgtatgggcggccaactgttggagatagactgacgggcatgctacagtgttggtggcgttcgcagcagtcttgtccgatcatcaatggataccaccaacccagtagtagctgtgacttgcgacgagtgatggagcgtagcgcggctggagtggacgtacgcccggcttctcgtcttcgtccggggcgagccgagtccccctccctggctccctcctccttgccgcggcaccctgcatcgcgacgtccgcgaggagacttggcaggcgcggcaatccgcgtgttcttggggagctgctcgtttggtacgcgttgatgctgctaaaaaagagagactcgtggaagaccaccttgctgctggcgtaccagagcctgggggtggtctacggcgacctcagcatctctccgctgtacgtgtacaagagcaccttcgccgaggacatccagcattcggagacgaacgaggagatcttcggcgtgctctccttcgtcttctggacgctcaccctcatccctctcgtcaagtatgtctccgttgtcctgcgagctgacgacaatggcgagggaggaacgtttgccctctactctctgatttgcaggcacgccaatgtgagcctcctcccgaaccggcagatcgccgatgaggagctttccacctacaagctggaatgccctcctgaaatcaccgacaagtcccgcatcaaggtgtggcttgagcggcacaggaagctgcgcgtcgctctgctggtcatggttatgatcgggacatgcatggttatcggggacggtgttctcacgccagctatatccgtgttctcggcagtttcaggcctggagttctcgctgtccaaggatcaccgtgaatatgctgtcattccaataacctgtgtcatattagcattcctatttgccctccagcactatggtacgcaccgggttggatttctgttcgccccgatagttctagcctggctgttctgcatgagtgctcttggcctttataatatcatccactggaatcctcagatctaccaagctctaaatccgtcttacatgttcaagttcttaaaaaagactagaaaatatggatggatgtcacttggtggaatcttgctctgcatgacaggatcagaagcaatgtttgcagatcttggacatttctcatacagtgcaatccagcttgctttcacttgtctagtttaccccgcactgattttggcatacatgggtcaagctgcttacttatcaaaacatcatgacttttactctagctcacaagttggattttacatcgcagttccagataagatcagatggccagtgcttatattggcaattttggcttcggtggtcggaagccaagcaatcatcagcggaacattctcaatcatcaaccagagcctgtccctgagctgcttccctcgagtgaaagttgtacacacatctgagaaaattcatggccaaatatacatccccgagatcaattggttgcttatgatcctctgcattgctgtgaccgttgggtttagagatacaaaacacatgggaaatgcatctggtttggctgtgatcacagtgatgctggtgaccacgttcctgacatccttggtcatcgttctctgctggcacaggccaccgctgctggcgttggctttcctcctgttctttggatccatcgaggcgctttacttctccgcgtccctgatcaagttcctggaaggcgcgtggctccccatcctcctggcgctcatcctgatggccgtcatgctcatctggcactacacgaccatcaagaagtacgagttcgacctgcacaacaaggtgaccctggagtggctcctcgccctcggggacaggctgggcatggtccgcgtccccggcatcggcctcgtgtacacagacctgacgtcgggcgtcccggccaacttctcccggttcgtgaccaacctcccggcgttccaccaggtgctggtgttcgtgtgcgtcaagtcggtgccagtgccgtacgtattcccggcggagcggtacctcatcgggcgtgtcggcccgccgggccaccgctcgtaccggtgcatcgtgcgctacggctaccgcgacgtgcaccaggacgtggactcgttcgagacggagctcgtggagaccctggccacgttcataacgctggacgcctcgtaccgctgcagcgaggccagcgagcgggagctggagctggatcccggggagcaggagcggcggctgaccgtgatcgcgagcaacccgctgcggcgccgcgccagctacgacctccaggacagcgtgcagcattcggcagcgtccaccgtggaggtgcgcgccacggccgccgacagccttagccccagggacgcggagatcagctcggcggcggggccgaagcaggtgcggttcttcatcgacagccacgtggtgagcccggaggccgcggagaacaagcaggttgcggatgagctggaggcgctggcggcggcccgggaggccggcactgcgttcatcctggggcactcgcacgtgcagtgcaagcccgggtcgtcggtgctcaagcggttggcggtggacgtcgggtacaacttcctgcggcgcaactgccgcggcccggacgtcgcgctgcgcgtgccgccggcgtcactgctggaggtcggcatggtgtacgtgctttgattgaggctgagacgatgcgactttttcttatgaacatctgatatagtaatcacgactgttgtcagttttcccagtaacataatgaggccgttctgtatagcttagcttgtt

SEQ ID NO: 87074 - DNA, 2790 bp, Zea Mays
cccgtcgtcctcgccagatgaccaccagagccaccgctcaatttcttgctttgctccatttaaacacttatatatattaaaaaaacgctagttgtggtctctgtgccacagtccagtccggagaagaggagaggagcctcgctctcgcaagtagattcttcactgctcggggatttggaacaaaggccgtggttcgaagctggtgtgttcgttcaattgtgcggaaagaaaggccagtgttatgtgtgaagtagtgaaggctagcaggtaggctggctctcgcctcgccgagcgatggatctcgagttcggtaggggcctgaggtccccaaagagagactcgtggaagaccaccttgctgctggcgtaccagagcctgggggtggtctacggcgacctcagcatctctccgctgtacgtgtacaagagcaccttcgccgaggacatccagcattcggagacgaacgaggagatcttcggcgtgctctccttcgtcttctggacgctcaccctcatccctctcgtcaagtatgtctccgttgtcctgcgagctgacgacaatggcgagggaggaacgtttgccctctactctctgatttgcaggcacgccaatgtgagcctcctcccgaaccggcagatcgccgatgaggagctttccacctacaagctggaatgccctcctgaaatcaccgacaagtcccgcatcaaggtgtggcttgagcggcacaggaagctgcgcgtcgctctgctggtcatggttatgatcgggacatgcatggttatcggggacggtgttctcacgccagctatatccgtgttctcggcagtttcaggcctggagttctcgctgtccaaggatcaccgtgaatatgctgtcattccaataacctgtgtcatattagcattcctatttgccctccagcactatggtacgcaccgggttggatttctgttcgccccgatagttctagcctggctgttctgcatgagtgctcttggcctttataatatcatccactggaatcctcagatctaccaagctctaaatccgtcttacatgttcaagttcttaaaaaagactagaaaatatggatggatgtcacttggtggaatcttgctctgcatgacaggatcagaagcaatgtttgcagatcttggacatttctcatacagtgcaatccagcttgctttcacttgtctagtttaccccgcactgattttggcatacatgggtcaagctgcttacttatcaaaacatcatgacttttactctagctcacaagttggattttacatcgcagttccagataagatcagatggccagtgcttatattggcaattttggcttcggtggtcggaagccaagcaatcatcagcggaacattctcaatcatcaaccagagcctgtccctgagctgcttccctcgagtgaaagttgtacacacatctgagaaaattcatggccaaatatacatccccgagatcaattggttgcttatgatcctctgcattgctgtgaccgttgggtttagagatacaaaacacatgggaaatgcatctggtttggctgtgatcacagtgatgctggtgaccacgttcctgacatccttggtcatcgttctctgctggcacaggccaccgctgctggcgttggctttcctcctgttctttggatccatcgaggcgctttacttctccgcgtccctgatcaagttcctggaaggcgcgtggctccccatcctcctggcgctcatcctgatggccgtcatgctcatctggcactacacgaccatcaagaagtacgagttcgacctgcacaacaaggtgaccctggagtggctcctcgccctcggggacaggctgggcatggtccgcgtccccggcatcggcctcgtgtacacagacctgacgtcgggcgtcccggccaacttctcccggttcgtgaccaacctcccggcgttccaccaggtgctggtgttcgtgtgcgtcaagtcggtgccagtgccgtacgtattcccggcggagcggtacctcatcgggcgtgtcggcccgccgggccaccgctcgtaccggtgcatcgtgcgctacggctaccgcgacgtgcaccaggacgtggactcgttcgagacggagctcgtggagaccctggccacgttcataacgctggacgcctcgtaccgctgcagcgaggccagcgagcgggagctggagctggatcccggggagcaggagcggcggctgaccgtgatcgcgagcaacccgctgcggcgccgcgccagctacgacctccaggacagcgtgcagcattcggcagcgtccaccgtggaggtgcgcgccacggccgccgacagccttagccccagggacgcggagatcagctcggcggcggggccgaagcaggtgcggttcttcatcgacagccacgtggtgagcccggaggccgcggagaacaagcaggttgcggatgagctggaggcgctggcggcggcccgggaggccggcactgcgttcatcctggggcactcgcacgtgcagtgcaagcccgggtcgtcggtgctcaagcggttggcggtggacgtcgggtacaacttcctgcggcgcaactgccgcggcccggacgtcgcgctgcgcgtgccgccggcgtcactgctggaggtcggcatggtgtacgtgctttgattgaggctgagacgatgcgactttttcttatgaacatctgatatagtaatcacgactgttgtcagttttcccagtaacataatgaggccgttctgtatagcttagcttgtt

SEQ ID NO: 87075 - DNA, 2787 bp, Zea Mays
cccgtcgtcctcgccagatgaccaccagagccaccgctcaatttcttgctttgctccatttaaacacttatatatattaaaaaaacgctagttgtggtctctgtgccacagtccagtccggagaagaggagaggagcctcgctctcgcaagattcttcactgctcggggatttggaacaaaggccgtggttcgaagctggtgtgttcgttcaattgtgcggaaagaaaggccagtgttatgtgtgaagtagtgaaggctagcaggtaggctggctctcgcctcgccgagcgatggatctcgagttcggtaggggcctgaggtccccaaagagagactcgtggaagaccaccttgctgctggcgtaccagagcctgggggtggtctacggcgacctcagcatctctccgctgtacgtgtacaagagcaccttcgccgaggacatccagcattcggagacgaacgaggagatcttcggcgtgctctccttcgtcttctggacgctcaccctcatccctctcgtcaagtatgtctccgttgtcctgcgagctgacgacaatggcgagggaggaacgtttgccctctactctctgatttgcaggcacgccaatgtgagcctcctcccgaaccggcagatcgccgatgaggagctttccacctacaagctggaatgccctcctgaaatcaccgacaagtcccgcatcaaggtgtggcttgagcggcacaggaagctgcgcgtcgctctgctggtcatggttatgatcgggacatgcatggttatcggggacggtgttctcacgccagctatatccgtgttctcggcagtttcaggcctggagttctcgctgtccaaggatcaccgtgaatatgctgtcattccaataacctgtgtcatattagcattcctatttgccctccagcactatggtacgcaccgggttggatttctgttcgccccgatagttctagcctggctgttctgcatgagtgctcttggcctttataatatcatccactggaatcctcagatctaccaagctctaaatccgtcttacatgttcaagttcttaaaaaagactagaaaatatggatggatgtcacttggtggaatcttgctctgcatgacaggatcagaagcaatgtttgcagatcttggacatttctcatacagtgcaatccagcttgctttcacttgtctagtttaccccgcactgattttggcatacatgggtcaagctgcttacttatcaaaacatcatgacttttactctagctcacaagttggattttacatcgcagttccagataagatcagatggccagtgcttatattggcaattttggcttcggtggtcggaagccaagcaatcatcagcggaacattctcaatcatcaaccagagcctgtccctgagctgcttccctcgagtgaaagttgtacacacatctgagaaaattcatggccaaatatacatccccgagatcaattggttgcttatgatcctctgcattgctgtgaccgttgggtttagagatacaaaacacatgggaaatgcatctggtttggctgtgatcacagtgatgctggtgaccacgttcctgacatccttggtcatcgttctctgctggcacaggccaccgctgctggcgttggctttcctcctgttctttggatccatcgaggcgctttacttctccgcgtccctgatcaagttcctggaaggcgcgtggctccccatcctcctggcgctcatcctgatggccgtcatgctcatctggcactacacgaccatcaagaagtacgagttcgacctgcacaacaaggtgaccctggagtggctcctcgccctcggggacaggctgggcatggtccgcgtccccggcatcggcctcgtgtacacagacctgacgtcgggcgtcccggccaacttctcccggttcgtgaccaacctcccggcgttccaccaggtgctggtgttcgtgtgcgtcaagtcggtgccagtgccgtacgtattcccggcggagcggtacctcatcgggcgtgtcggcccgccgggccaccgctcgtaccggtgcatcgtgcgctacggctaccgcgacgtgcaccaggacgtggactcgttcgagacggagctcgtggagaccctggccacgttcataacgctggacgcctcgtaccgctgcagcgaggccagcgagcgggagctggagctggatcccggggagcaggagcggcggctgaccgtgatcgcgagcaacccgctgcggcgccgcgccagctacgacctccaggacagcgtgcagcattcggcagcgtccaccgtggaggtgcgcgccacggccgccgacagccttagccccagggacgcggagatcagctcggcggcggggccgaagcaggtgcggttcttcatcgacagccacgtggtgagcccggaggccgcggagaacaagcaggttgcggatgagctggaggcgctggcggcggcccgggaggccggcactgcgttcatcctggggcactcgcacgtgcagtgcaagcccgggtcgtcggtgctcaagcggttggcggtggacgtcgggtacaacttcctgcggcgcaactgccgcggcccggacgtcgcgctgcgcgtgccgccggcgtcactgctggaggtcggcatggtgtacgtgctttgattgaggctgagacgatgcgactttttcttatgaacatctgatatagtaatcacgactgttgtcagttttcccagtaacataatgaggccgttctgtatagcttagcttgtt

SEQ ID NO: 87076 - DNA, 3227 bp, Zea Mays
cgattgcatcgacaccacaccttgcttgaatctgcacatcaccttccgtggatataaacgagatgtcaatttcgatgtgaccgagggagatgtgtttgtgtgtgtgtgtgtttttcttttcattttggttcttggccggctcttcatcgcccttttccacttggtttttgttggctctgttgtgtttgtgcttccctttcctcgcgaccgcgactcggatcggatctctctcctgtgtagagccatgctgtgctgtgctggtagtagcagcagcagtagcaatgagtagtccagtccacagctccaagaacacgtggccgtcctttccttgcctctccctatcggtattcggtaacgcagggggagggcgccaccggctttaaccatggcctgtcgcttttgcctcgtctggtcggctggtccctctgctctatcccatcccccttgagcaggctgttgagcaagctgaactcatacgaacctcgatttcttccgtccggcgtttttttttctctcagtttctgaggtatttctccccctttctttcttccctccctcccagtagattcttcactgctcggggatttggaacaaaggccgtggttcgaagctggtgtgttcgttcaattgtgcggaaagaaaggccagtgttatgtgtgaagtagtgaaggctagcaggtaggctggctctcgcctcgccgagcgatggatctcgagttcggtaggggcctgaggtccccaaaggccgtctggggttcttcttcttgcagagagactcgtggaagaccaccttgctgctggcgtaccagagcctgggggtggtctacggcgacctcagcatctctccgctgtacgtgtacaagagcaccttcgccgaggacatccagcattcggagacgaacgaggagatcttcggcgtgctctccttcgtcttctggacgctcaccctcatccctctcgtcaagtatgtctccgttgtcctgcgagctgacgacaatggcgagggaggaacgtttgccctctactctctgatttgcaggcacgccaatgtgagcctcctcccgaaccggcagatcgccgatgaggagctttccacctacaagctggaatgccctcctgaaatcaccgacaagtcccgcatcaaggtgtggcttgagcggcacaggaagctgcgcgtcgctctgctggtcatggttatgatcgggacatgcatggttatcggggacggtgttctcacgccagctatatccgtgttctcggcagtttcaggcctggagttctcgctgtccaaggatcaccgtgaatatgctgtcattccaataacctgtgtcatattagcattcctatttgccctccagcactatggtacgcaccgggttggatttctgttcgccccgatagttctagcctggctgttctgcatgagtgctcttggcctttataatatcatccactggaatcctcagatctaccaagctctaaatccgtcttacatgttcaagttcttaaaaaagactagaaaatatggatggatgtcacttggtggaatcttgctctgcatgacaggatcagaagcaatgtttgcagatcttggacatttctcatacagtgcaatccagcttgctttcacttgtctagtttaccccgcactgattttggcatacatgggtcaagctgcttacttatcaaaacatcatgacttttactctagctcacaagttggattttacatcgcagttccagataagatcagatggccagtgcttatattggcaattttggcttcggtggtcggaagccaagcaatcatcagcggaacattctcaatcatcaaccagagcctgtccctgagctgcttccctcgagtgaaagttgtacacacatctgagaaaattcatggccaaatatacatccccgagatcaattggttgcttatgatcctctgcattgctgtgaccgttgggtttagagatacaaaacacatgggaaatgcatctggtttggctgtgatcacagtgatgctggtgaccacgttcctgacatccttggtcatcgttctctgctggcacaggccaccgctgctggcgttggctttcctcctgttctttggatccatcgaggcgctttacttctccgcgtccctgatcaagttcctggaaggcgcgtggctccccatcctcctggcgctcatcctgatggccgtcatgctcatctggcactacacgaccatcaagaagtacgagttcgacctgcacaacaaggtgaccctggagtggctcctcgccctcggggacaggctgggcatggtccgcgtccccggcatcggcctcgtgtacacagacctgacgtcgggcgtcccggccaacttctcccggttcgtgaccaacctcccggcgttccaccaggtgctggtgttcgtgtgcgtcaagtcggtgccagtgccgtacgtattcccggcggagcggtacctcatcgggcgtgtcggcccgccgggccaccgctcgtaccggtgcatcgtgcgctacggctaccgcgacgtgcaccaggacgtggactcgttcgagacggagctcgtggagaccctggccacgttcataacgctggacgcctcgtaccgctgcagcgaggccagcgagcgggagctggagctggatcccggggagcaggagcggcggctgaccgtgatcgcgagcaacccgctgcggcgccgcgccagctacgacctccaggacagcgtgcagcattcggcagcgtccaccgtggaggtgcgcgccacggccgccgacagccttagccccagggacgcggagatcagctcggcggcggggccgaagcaggtgcggttcttcatcgacagccacgtggtgagcccggaggccgcggagaacaagcaggttgcggatgagctggaggcgctggcggcggcccgggaggccggcactgcgttcatcctggggcactcgcacgtgcagtgcaagcccgggtcgtcggtgctcaagcggttggcggtggacgtcgggtacaacttcctgcggcgcaactgccgcggcccggacgtcgcgctgcgcgtgccgccggcgtcactgctggaggtcggcatggtgtacgtgctttgattgaggctgagacgatgcgactttttcttatgaacatctgatatagtaatcacgactgttgtcagttttcccagtaacataatgaggccgttctgtatagcttagcttgtt

SEQ ID NO: 87077 - DNA, 3201 bp, Zea Mays
cgattgcatcgacaccacaccttgcttgaatctgcacatcaccttccgtggatataaacgagatgtcaatttcgatgtgaccgagggagatgtgtttgtgtgtgtgtgtgtttttcttttcattttggttcttggccggctcttcatcgcccttttccacttggtttttgttggctctgttgtgtttgtgcttccctttcctcgcgaccgcgactcggatcggatctctctcctgtgtagagccatgctgtgctgtgctggtagtagcagcagcagtagcaatgagtagtccagtccacagctccaagaacacgtggccgtcctttccttgcctctccctatcggtattcggtaacgcagggggagggcgccaccggctttaaccatggcctgtcgcttttgcctcgtctggtcggctggtccctctgctctatcccatcccccttgagcaggctgttgagcaagctgaactcatacgaacctcgatttcttccgtccggcgtttttttttctctcagtttctgaggtatttctccccctttctttcttccctccctcccagtagattcttcactgctcggggatttggaacaaaggccgtggttcgaagctggtgtgttcgttcaattgtgcggaaagaaaggccagtgttatgtgtgaagtagtgaaggctagcaggtaggctggctctcgcctcgccgagcgatggatctcgagttcggtaggggcctgaggtccccaaagagagactcgtggaagaccaccttgctgctggcgtaccagagcctgggggtggtctacggcgacctcagcatctctccgctgtacgtgtacaagagcaccttcgccgaggacatccagcattcggagacgaacgaggagatcttcggcgtgctctccttcgtcttctggacgctcaccctcatccctctcgtcaagtatgtctccgttgtcctgcgagctgacgacaatggcgagggaggaacgtttgccctctactctctgatttgcaggcacgccaatgtgagcctcctcccgaaccggcagatcgccgatgaggagctttccacctacaagctggaatgccctcctgaaatcaccgacaagtcccgcatcaaggtgtggcttgagcggcacaggaagctgcgcgtcgctctgctggtcatggttatgatcgggacatgcatggttatcggggacggtgttctcacgccagctatatccgtgttctcggcagtttcaggcctggagttctcgctgtccaaggatcaccgtgaatatgctgtcattccaataacctgtgtcatattagcattcctatttgccctccagcactatggtacgcaccgggttggatttctgttcgccccgatagttctagcctggctgttctgcatgagtgctcttggcctttataatatcatccactggaatcctcagatctaccaagctctaaatccgtcttacatgttcaagttcttaaaaaagactagaaaatatggatggatgtcacttggtggaatcttgctctgcatgacaggatcagaagcaatgtttgcagatcttggacatttctcatacagtgcaatccagcttgctttcacttgtctagtttaccccgcactgattttggcatacatgggtcaagctgcttacttatcaaaacatcatgacttttactctagctcacaagttggattttacatcgcagttccagataagatcagatggccagtgcttatattggcaattttggcttcggtggtcggaagccaagcaatcatcagcggaacattctcaatcatcaaccagagcctgtccctgagctgcttccctcgagtgaaagttgtacacacatctgagaaaattcatggccaaatatacatccccgagatcaattggttgcttatgatcctctgcattgctgtgaccgttgggtttagagatacaaaacacatgggaaatgcatctggtttggctgtgatcacagtgatgctggtgaccacgttcctgacatccttggtcatcgttctctgctggcacaggccaccgctgctggcgttggctttcctcctgttctttggatccatcgaggcgctttacttctccgcgtccctgatcaagttcctggaaggcgcgtggctccccatcctcctggcgctcatcctgatggccgtcatgctcatctggcactacacgaccatcaagaagtacgagttcgacctgcacaacaaggtgaccctggagtggctcctcgccctcggggacaggctgggcatggtccgcgtccccggcatcggcctcgtgtacacagacctgacgtcgggcgtcccggccaacttctcccggttcgtgaccaacctcccggcgttccaccaggtgctggtgttcgtgtgcgtcaagtcggtgccagtgccgtacgtattcccggcggagcggtacctcatcgggcgtgtcggcccgccgggccaccgctcgtaccggtgcatcgtgcgctacggctaccgcgacgtgcaccaggacgtggactcgttcgagacggagctcgtggagaccctggccacgttcataacgctggacgcctcgtaccgctgcagcgaggccagcgagcgggagctggagctggatcccggggagcaggagcggcggctgaccgtgatcgcgagcaacccgctgcggcgccgcgccagctacgacctccaggacagcgtgcagcattcggcagcgtccaccgtggaggtgcgcgccacggccgccgacagccttagccccagggacgcggagatcagctcggcggcggggccgaagcaggtgcggttcttcatcgacagccacgtggtgagcccggaggccgcggagaacaagcaggttgcggatgagctggaggcgctggcggcggcccgggaggccggcactgcgttcatcctggggcactcgcacgtgcagtgcaagcccgggtcgtcggtgctcaagcggttggcggtggacgtcgggtacaacttcctgcggcgcaactgccgcggcccggacgtcgcgctgcgcgtgccgccggcgtcactgctggaggtcggcatggtgtacgtgctttgattgaggctgagacgatgcgactttttcttatgaacatctgatatagtaatcacgactgttgtcagttttcccagtaacataatgaggccgttctgtatagcttagcttgtt

SEQ ID NO: 87078 - DNA, 2807 bp, Zea Mays
aagctgaactcatacgaacctcgatttcttccgtccggcgtttttttttctctcagtttctgaggtatttctccccctttctttcttccctccctcccagtagattcttcactgctcggggatttggaacaaaggccgtggttcgaagctggtgtgttcgttcaattgtgcggaaagaaaggccagtgttatgtgtgaagtagtgaaggctagcaggtaggctggctctcgcctcgccgagcgatggatctcgagttcggtaggggcctgaggtccccaaagagagactcgtggaagaccaccttgctgctggcgtaccagagcctgggggtggtctacggcgacctcagcatctctccgctgtacgtgtacaagagcaccttcgccgaggacatccagcattcggagacgaacgaggagatcttcggcgtgctctccttcgtcttctggacgctcaccctcatccctctcgtcaagaggaacgtttgccctctactctctgatttgcaggcacgccaatgtgagcctcctcccgaaccggcagatcgccgatgaggagctttccacctacaagctggaatgccctcctgaaatcaccgacaagtcccgcatcaaggtgtggcttgagcggcacaggaagctgcgcgtcgctctgctggtcatggttatgatcgggacatgcatggttatcggggacggtgttctcacgccagctatatccgtgttctcggcagtttcaggcctggagttctcgctgtccaaggatcaccgtgaatatgctgtcattccaataacctgtgtcatattagcattcctatttgccctccagcactatggtacgcaccgggttggatttctgttcgccccgatagttctagcctggctgttctgcatgagtgctcttggcctttataatatcatccactggaatcctcagatctaccaagctctaaatccgtcttacatgttcaagttcttaaaaaagactagaaaatatggatggatgtcacttggtggaatcttgctctgcatgacaggatcagaagcaatgtttgcagatcttggacatttctcatacagtgcaatccagcttgctttcacttgtctagtttaccccgcactgattttggcatacatgggtcaagctgcttacttatcaaaacatcatgacttttactctagctcacaagttggattttacatcgcagttccagataagatcagatggccagtgcttatattggcaattttggcttcggtggtcggaagccaagcaatcatcagcggaacattctcaatcatcaaccagagcctgtccctgagctgcttccctcgagtgaaagttgtacacacatctgagaaaattcatggccaaatatacatccccgagatcaattggttgcttatgatcctctgcattgctgtgaccgttgggtttagagatacaaaacacatgggaaatgcatctggtttggctgtgatcacagtgatgctggtgaccacgttcctgacatccttggtcatcgttctctgctggcacaggccaccgctgctggcgttggctttcctcctgttctttggatccatcgaggcgctttacttctccgcgtccctgatcaagttcctggaaggcgcgtggctccccatcctcctggcgctcatcctgatggccgtcatgctcatctggcactacacgaccatcaagaagtacgagttcgacctgcacaacaaggtgaccctggagtggctcctcgccctcggggacaggctgggcatggtccgcgtccccggcatcggcctcgtgtacacagacctgacgtcgggcgtcccggccaacttctcccggttcgtgaccaacctcccggcgttccaccaggtgctggtgttcgtgtgcgtcaagtcggtgccagtgccgtacgtattcccggcggagcggtacctcatcgggcgtgtcggcccgccgggccaccgctcgtaccggtgcatcgtgcgctacggctaccgcgacgtgcaccaggacgtggactcgttcgagacggagctcgtggagaccctggccacgttcataacgctggacgcctcgtaccgctgcagcgaggccagcgagcgggagctggagctggatcccggggagcaggagcggcggctgaccgtgatcgcgagcaacccgctgcggcgccgcgccagctacgacctccaggacagcgtgcagcattcggcagcgtccaccgtggaggtgcgcgccacggccgccgacagccttagccccagggacgcggagatcagctcggcggcggggccgaagcaggtgcggttcttcatcgacagccacgtggtgagcccggaggccgcggagaacaagcaggttgcggatgagctggaggcgctggcggcggcccgggaggccggcactgcgttcatcctggggcactcgcacgtgcagtgcaagcccgggtcgtcggtgctcaagcggttggcggtggacgtcgggtacaacttcctgcggcgcaactgccgcggcccggacgtcgcgctgcgcgtgccgccggcgtcactgctggaggtcggcatggtgtacgtgctttgattgaggctgagacgatgcgactttttcttatgaacatctgatatagtaatcacgactgttgtcagttttcccagtaacataatgaggccgttctgtatagcttagcttgttcgtacttctacagctgcaatatatagagtcaaaatactgtagaattagtaggagtcggtaacgaactctgtgtgcacgtctgtgcgtgagcgtgtgcgtttcaggccca

SEQ ID NO: 87079 - DNA, 1741 bp, Zea Mays
atctcatctcagatcgtctctcatccaacctgatcccattcacatccccttccgattctccgtcgcctgagcggctgagccaacttgccaagccaagcaagccaagtcgtcgcctccccgacccaacgccgcgacccccttgcccgtccgcgaccgctgcagcacctcggatcccgccccaatggcaacagcgtgtccgccgctctcgctgccgtccacctccctcttccgcggcaggtccgcccgcgccgggcccagacgcaggcagctcacggccgtccgctgcagcgccgtcggagaggcggtagtggaggaggcctcgcccaggacggcggaagagccgctgctggtgagcgcaatcagagggaggaaggtcgagaggccacccgtctggctcatgaggcaggccgggaggtacatgaagagctaccaattgctctgcgagcggtatccttcgttccgtgaaagatcagaaaatgtcgacctagttgttgagatctctttgcaaccatggaaggttttcaagcctgatggagtcatcttgttctcggacatccttactccacttcctgggatgaacataccttttgacattgtgaagggaaaaggtccagtgatctatgatccattgagaacggcagcagctgtgaatgaagtcagagaatttgttcctgaggagtgggtcccttatgtggggcaggctctgaatattttgagacaagaggttaagaatgaagctgctgtactaggttttgttggagctccgtttaccttggcatcttattgtgtggaaggaggttcatcaaagaactttacattgattaagaaaatggccttctcagaaccagcgattctacacaatttgctacagaagttcacaacatcaatggctaactatattaaataccaagcggacaatggggcgcaggctgtccaaattttcgattcatgggctactgaactcagcccggctgattttgaggagtttagcctgccttatctaaagcagatagtggatagtgttagggaaacacatcctaacttgcctctgatactctacgcaagtggatctgggggcttgctggagaggcttcctttgacaggtgttgatgttgtcagcttggactggacggtcgatatggcagagggcaggaaaagattgggatctaacacagcagtccaagggaacgtggaccctggtgttctttttggatccaaagagtttataagcaggcggatttacgacactgtgcagaaggctggcaatgttggacatgtattgaaccttggccatggcatcaaggttggaactccggaggaaaatgttgctcacttcttcgaggtcgcaaaagggatcagatactaaagaaccttgcatggttctttcctttctccaaatcggcagaagttgtagagtcggcggtcgaggatagatgcagaaagccatgtgcagtatagagtgcctgaaaacatttttgtgactgattctgtctgtcgcatttcaagttccggtttcagtgtaatattgtaagcagatttgagtggaggcgtaatgaagtgcctaattgtttatagcactatagttctgtacaaccagtagccttgtctatgagactacgaagcagaaatactgatcatgtgttgacatgatagaaatgtttcagtcttaccccatcgagggtgtttgttcttgtattctctcagaatactggttacaaacattttctttgcatgatatcag

SEQ ID NO: 87080 - DNA, 2100 bp, Zea Mays
gagctcagtcagtgcctcctcgcctataaacaaggggccggggtctctctcctacggcgtgcgcatgctttggcttggcaaacccgattggatcttcagagaaatcgccatcccctctccctcttctcgtgcccatcgctcctctacccattcttacttgaatcttttctgacgaggaaatctgacttcgggagcggctcctccgcgttgcctggatcgcccgggatcagtattttgcttccagtcagaggtccaaaatatcaaagggatgcagaaagatgtggttgcatgatggagtaccttgcctggaaattggcaggatacacaaacatagttgtactttacttgatctcgatgacattggactgcaaatatatgcacaacaattgcctcatgcacacacacataatggggccgcgagttgtagctcaaccatcgtctctggtttctttctaggtggagatggttaaaattgctggtcacttataattaccagcatcttatacgtcattgttgttcatcgccaacttattcaagtttgaaagtagaacactgagaagatggctgagaaagagaatattctaatgcagagatatgagatgggaaagttacttggaaaagggagttttgccaaagtttaccatgctcgcaatgttaagacttcagaaagcgttgctatcaaggtgattgacaaagataagatcaagaagtgtggtcttatggatcaaataattcaagagatttcggtgatgaagttggtaaaacatccaaacattgtccaattgtatgaggttatggctaccaaaaccaagatatattttgtgatagagtatgtcaagggaggagagttgttcaaaaaggttcaacgtggaaggttaaaagaagatgttgctcgtacatatttccaacaattgatcagtgctgttgacttctgccatactagacaagtttatcatagagatctaaagcccgaaaatcttcttcttgacggaagtcacaacttaaagatttcagactttggtttgagtgcacttccaaactgcaagagaaaagatgggttactccacacaatttgtgggactcctgcatatgttgctccagaagtaattagtcaaaaaggatatgatggtgcaaaagctgacatatgggcttgtggagtgatcctctatgtgttgttggcgggctatcttcctttccaagacaagaacatgatggacatgtataagaaaatttgcaaagcagaactcaaatggccaagttggttttcttcagatgttcgaaagcttctgcggcgcatccttcatccaaaccctaatagacgaatatctattgaagaaataaggactcatccttggtttagaattggtcttgatgcaagattgtttgattctacaacgagagattatgtgcctagtgacatggatttggctttgaattccttaaatagcaatatggtcgagtgtaattcagcggcagagaaactgactattttgaatgcttttgatatcatctccctgtctaacgggtttgatctctctggtatatttgagaactcaaacaaggagtctaaatttatgtctaccaacacagctatgacaattatcacaaagctaatggaagttgcaaagagcctggatctgaaggttataacaaaaactggtggattgttgaatatggaagctgccaaatcaggaataaaaggtgtgatgtctataaatgctgagatatttcaaatcacaccaaattatcatctcgtggagatcaagaaaatcaatggtgacatccttgagtatcataactttatgaaccaaagcatgagaccggcactagaagatattgtgtgggcatggcatggtgaacaacctgacgagaagtagactcatcaactttagataatcatcaacctacaaccttagatattgtggcagctttaatgctattagaaagtgtatcaggcattcaggccaaaaaaatgtcatgggacttaataatattacttatatgttgtttttattctcacgttcatgcagtggaatgttctttctgttgaccaatactactggaacatggtttctatctcaagggaatattttcataatc

SEQ ID NO: 87081 - DNA, 112 bp, Zea Mays
ttgacgatcacgtcgtttactactacaagaacatcagttaagctcagaaataatctaaatacaactggggctctaaacttacctttgcttcgccgggagctattctagcaac

SEQ ID NO: 87082 - DNA, 1707 bp, Zea Mays
tgcaattaacggaccttctacgtgggccactcttcctcacatcgcctccctcgacgatggccgccgccaccgccgccgccgccacggcgtcggcttcgtgtcttctccggaggtctatatcctctgcattcctcgcgaagcgcgcggtccctagcattccgcgtacaactctctgctattcctcctccgcatccgccagactcaaaccaacgccgtccctgtctccgcctgtcacgtccgccaacgatggaggcggcgggatgaggtgggagtcagcgcgcaagaagagggtggtgctccgcatcggctacgtcggcactgattaccgagggcttcaaaagcagcaagagcttggcgtggattcgaccattgagtcagtcctggaatctgccatcttcaagtccgggggtattctcgagagtaattatggaaaactgcaaaagattgggtgggagaggagtagccgaactgataaaggggtacactcattggctacaatgatttcccttaagatggaaatccctgatagagcatgggaggatgatcctgatggtattgctcttgccagcttcattaactcaaatttgccggacaatgtgagggtttttagtatattgcctgcacaaaggagttttgatgtaaggagggagtgcttatatcgtgagtacttctatcttcttcctgctgaaattattggaattaaagatgactatagctctgaagaaatgcaagagcacttgtcagaattcaacaaaatactgaaaggttttgagggaaaccatccattccataattacactgcacgtgccaagtataggaaggttctcgcgggaagacacagaagggccaaaggagcaagctcggcgttgaagtccatgtcctctgacactggcatggcagaaagctcttctgaagaaagcacttctccagatcacgatgaggacttgaatatttcatcaatctttgactctggtataccagaagacactcgtgtgaatggtattctgaagctttctgaggatcggctgcagattcaagctaggtggctgcatgagcctgacgaaagcgatagattaaacgcttcacatttcagagatatcattacctgttcctgtggagacttgcaaacttcatcagggattcagttcgttgagttgaccatatgcggggtatctttcatgctacatcagatccggaaaatggttggaaccgccgtgacggtgaagcgtggactactaccaagagacatcatagagctgtccctcgcgaagttctccagaatcgttctaccaatagccccttcagaggtcctggtcctcaaggacaacagtttctgcacgaagagcaagggagggaggatcgttcgccccgggatccagtccatgaacaagtcggaagcaaccaggaagggggtcgaggagttctacagggcagcgctcctgccagaagtagcgaagttcctggacccctctctgccgccgtggaaggagtggctggagaacctggacaggttctcgggcataccgggttcgcagctggacgaagtcagggaggcgtatcgagcgtggagggatgattacgaccgagcgaagatggctagaaactaggagtgctggcagtgtcgcaaggtggatgaactacctagcagtgaacaatgatgatttatatatactagttcgcttgatgtttatatattgagattcatac

SEQ ID NO: 87083 - DNA, 1761 bp, Zea Mays
ctacgtgggccactcttcctcacatcgcctccctcgacgatggccgccgccaccgccgccgccgccacggcgtcggcttcgtgtcttctccggaggtctatatcctctgcattcctcgcgaagcgcgcggtccctagcattccgcgtacaactctctgctattcctcctccgcatccgccagactcaaaccaacgccgtccctgtctccgcctgtcacgtccgccaacgatggaggcggcgggatgaggtgggagtcagcgcgcaagaagagggtggtgctccgcatcggctacgtcggcactgattaccgagggcttcaaaagcagcaagagcttggcgtggattcgaccattgagtcagtcctggaatctgccatcttcaagtccgggggtattctcgagagtaattatggaaaactgcaaaagattgggtgggagaggagtagccgaactgataaaggggtaggctttaaccatttaaccactcagattttatgaagaatacatttttcagctaacaaaggcttttatgcatgcttagaatggactaattgcaggtacactcattggctacaatgatttcccttaagatggaaatccctgatagagcatgggaggatgatcctgatggtattgctcttgccagcttcattaactcaaatttgccggacaatgtgagggtttttagtatattgcctgcacaaaggagttttgatgtaaggagggagtgcttatatcgtgagtacttctatcttcttcctgctgaaattattggaattaaagatgactatagctctgaagaaatgcaagagcacttgtcagaattcaacaaaatactgaaaggttttgagggaaaccatccattccataattacactgcacgtgccaagtataggaaggttctcgcgggaagacacagaagggccaaaggagcaagctcggcgttgaagtccatgtcctctgacactggcatggcagaaagctcttctgaagaaagcacttctccagatcacgatgaggacttgaatatttcatcaatctttgactctggtataccagaagacactcgtgtgaatggtattctgaagctttctgaggatcggctgcagattcaagctaggtggctgcatgagcctgacgaaagcgatagattaaacgcttcacatttcagagatatcattacctgttcctgtggagacttgcaaacttcatcagggattcagttcgttgagttgaccatatgcggggtatctttcatgctacatcagatccggaaaatggttggaaccgccgtgacggtgaagcgtggactactaccaagagacatcatagagctgtccctcgcgaagttctccagaatcgttctaccaatagccccttcagaggtcctggtcctcaaggacaacagtttctgcacgaagagcaagggagggaggatcgttcgccccgggatccagtccatgaacaagtcggaagcaaccaggaagggggtcgaggagttctacagggcagcgctcctgccagaagtagcgaagttcctggacccctctctgccgccgtggaaggagtggctggagaacctggacaggttctcgggcataccgggttcgcagctggacgaagtcagggaggcgtatcgagcgtggagggatgattacgaccgagcgaagatggctagaaactaggagtgctggcagtgtcgcaaggtggatgaactacctagcagtgaacaatgatgatttatatatactagttcgcttg

SEQ ID NO: 87084 - DNA, 1261 bp, Zea Mays
tgcatgatcatcatcgtcgtcgttgtcgtcgtcattcttacatcatgcatgcgtgcgtgcgtgcaggcatgatcgatcttattatcacgcatgcatcatagacatatatactaaatatgtaaatcacggcgtgccctccggccaatactattacacaggaaacggtggcgctgctacgaacgaattcaccggaccatcagcagctaggagcagcggctctgtttcatctttgccaccgatagatagatagatagatagaggaaacagagaagagtaaaaaaaatcgaattaaagatcgagagggggagctagctgagaaacggagctactgctactaccatacacagagagggcgccggccggtcgacgatcgatcgagtacatgcgcggttgtccagccagagctactgctactaccatacacatagagggcgccggccggtcgacgatcgatcgagtacatgcgcggttgtccaggcagccatgcaccagcagcagggacgacatcgaccgatgcaagtagcagaaggcgtgtgtgcttacgcgcgctcagcctctagctatagctagctactactcctcgtcgtcgtgctcgctaccgccctcggagcagctcctgacggcctgcaggacggcctgcttcacgacgtgctcgtccacgttgtccgccacgttctgcatatatatacaccgattgttattaactgatcacgattttggactgtgctctctctactagtgcagtgtagcatcgacgacgataattaattttacctctccgcccacggcctcgaggcggaaggagtcggcgcaggacgcggtggcctggagcacgctgagccccagctcgtcgaaggcctccagcacggcgacgagcagccccgggcagctcttgtcggagaacacgttcaccaggaacgacgacccctgcactcctagggcttccacggtcacctgcagatataatatataacccggccccgcgtcctgcgcgcacgcaatctcctggttcagcctcaccaccttctgcttcagctccttgatgtacgccgacgcgtccatgattatcgacgtgttgctcagctcgtgggagtgagtgatggagcggaggatcttcagcttctcctgaagagcagccgccttcttgcgctccctcgacatcatctccttctctccgagtccgagtctatgtctctctctctctttctctctcactccacaaaccaaaccacaggcgacggcgtactgtgtgacaggttgc

SEQ ID NO: 87085 - DNA, 1811 bp, Zea Mays
atcacgcacggccacacctgccctccattccatccagcacctagaaaaaactaatcgcaattagttgacgcataatattttgagggaggagaaggggggaattgactagttgaccaatcgcgagtggcgatgatgatgcagttgggggccaggagtttggtgaggaggttctcccgtctcgccgcggcgggggccccggccgagacgacgtcggctggcgtgccgcgaatgccggcgttcgaccacgtcccgctgccctacgacgggccgagcgccgccgacatcgcccgcaagcgcgccgagtacctcagcccgtccctcttccacttctactccaagcctctgaacatcgtggagggcaagaggcagtacttgtacgacgagcacggccggcgctacctggacgcgttcgccggcatcgccaccgtgtgctgcggccactgccaccccgacgtcgtggacgcgatcaccaggcaggccaagcgcctgcagcactccaccgtgctctacctcaaccacgtcatcgccgatttcgccgaggcgctggcatccaagctgcccggcgacctcaaggtcgtcttcttcaccaactccggcacggaggcgaacgagctggccatcctgatggcgcggctgtacaccggctcccacgacatcatctccctccgcaactcgtaccacggcaacgcggccgggaccatgggagccaccgcgcagaagaactggaagttcaacgtcatccagagtggcgtgcaccacgcggtgaacccggacccctacagaggcgccttcggctccgacgccgagaagtacgtgcgggacgtgcaggagatcatcgagttcggcaccaccggccaggtcgccggcttcatatccgaggccatccagggcgtgggcggaatcgtggaggtgtcgccgggctacctgccgctggcgtacgacaaggtccggaaggccggcgggctctgcatcgccgacgaggtccaggcgggtttcgcccgcgtcggcagccacttctggggcttcgagacccacggcgtcgtccccgacatagtgaccatggcaaagggcatcggcaacggcatcccgctgggcgccgtggtgacgacgccggaggtcgcgcaggtgctgacccggcgctgctacttcaacacgttcggcggcaacccgctgtgcaccgccggcgggctcgccgtcctcgaggtgctcgagaaggagaggctccaggagaacgccttcgtcgtcggctcctacctcaaggaccgcctccgcggtctccaggagaagcacgagatcatcggcgacgtgaggggaacgggtttcatgctcggcatcgagctggtcaccgatcggcagctcaagacgccggcgaaagatgagatctgccacgccatggaacacatgaaagatatgggcgtcttggtcggcaaaggcgggttctatgggaacgtcttcaggatcactccccctctatgcttcaccaaggaagatgctgatttcttcgtcgaggtgatggacattgcgctgtcgaagctctgagctgtggccgtcaggcggaggggcggtgtgtctgtctgtatatataatcctcgcccgagtttagcagctgcgtcggagttgtactatctcactcaagagaatggcgaaaaaaccttggcagtttgtgactcaaggggaaaaaactaaaccatgcagacgaatttggcttatcgcaacgctagcttttaattcagctttcgtctggagatgacgtgccttgtaacgtgccagagataatgactggggactggggttcattttaccttacttat

SEQ ID NO: 87086 - DNA, 2028 bp, Zea Mays
atcacgcacggccacacctgccctccattccatccagcacctagaaaaaactaatcgcaattagttgacgcataatattttgagggaggagaaggggggaattgactagttgaccaatcgcgagtggcgatgatgatgcagttgggggccaggagtttggtgaggaggttctcccgtctcgccgcggcgggggccccggccgagacgacgtcggctggcgtgccgcgaatgccggcgttcgaccacgtcccgctgccctacgacgggccgagcgccgccgacatcgcccgcaagcgcgccgagtacctcagcccgtccctcttccacttctactccaagcctctgaacatcgtggagggcaagaggcagtacttgtacgacgagcacggccggcgctacctggacgcgttcgccggcatcgccaccgtgtgctgcggccactgccaccccgacgtcgtggacgcgatcaccaggcaggccaagcgcctgcagcactccaccgtgctctacctcaaccacgtcatcgccgatttcgccgaggcgctggcatccaagctgcccggcgacctcaaggtcgtcttcttcaccaactccggcacggaggcgaacgagctggccatcctgatggcgcggctgtacaccggctcccacgacatcatctccctccgcaactcgtaccacggcaacgcggccgggaccatgggagccaccgcgcagaagaactggaagttcaacgtcatccagagtggcgtgcaccacgcggtgaacccggacccctacagaggcgccttcggctccgacgccgagaagtacgtgcgggacgtgcaggagatcatcgagttcggcaccaccggccaggtcgccggcttcatatccgaggccatccaggtacactttataacactactgatgcggcagctggttctgttcctctcgcggcgccgcgacgtactgggctgggcgtcgtcatgacgtggtggaatggaatcgcactgcgcagggcgtgggcggaatcgtggaggtgtcgccgggctacctgccgctggcgtacgacaaggtccggaaggccggcgggctctgcatcgccgacgaggtccaggcgggtttcgcccgcgtcggcagccacttctggggcttcgagacccacggcgtcgtccccgacatagtgaccatggcaaagggcatcggcaacggcatcccgctgggcgccgtggtgacgacgccggaggtcgcgcaggtgctgacccggcgctgctacttcaacacgttcggcggcaacccgctgtgcaccgccggcgggctcgccgtcctcgaggtgctcgagaaggagaggctccaggagaacgccttcgtcgtcggctcctacctcaaggaccgcctccgcggtctccaggagaagcacgagatcatcggcgacgtgaggggaacgggtttcatgctcggcatcgagctggtcaccgatcggcagctcaagacgccggcgaaagatgagatctgccacgccatggaacacatgaaagatatgggcgtcttggtcggcaaaggcgggttctatgggaacgtcttcaggatcactccccctctatgcttcaccaaggaagatgctgatttcttcgtcgaggtgatggacattgcgctgtcgaagctctgagctgtggccgtcaggcggaggggcggtgtgtctgtctgtatatataatcctcgcccgagtttagcagctgcgtcggagttgtactatctcactcaagagaatggcgaaaaaaccttggcagtttgtgactcaaggggaaaaaactaaaccatgcagacgaatttggcttatcgcaacgctagcttttaattcagctttcgtctggagatgacgtgccttgtaacgtgccagagataatgactggggactggggttcattttaccttacttatataaaaacagattttatatgatccttgtaagcgagttgatctaaactcatatggacgtgatgagttatgaatctggtttatatatgaggtacagaacatcaaggg

SEQ ID NO: 87087 - DNA, 2099 bp, Zea Mays
tccctggttccctgcctcctctgtatactaactctcctctctcccagagtcccggtcagctcgactgctccagttcttcccatttcccagccgccgcggcgccacgcagacctagcagagaaacacccacccgagatggcgatggctctgcgccgccttgcgggcgtgtccggatcgccgtcggcctcctctgccgcggccacggtgctactccggtcggcgctgacccgcccgatctccaccggcttccgcgaggagcgcgacaccttcggtcccatccaagtccccaacgacaagctgtggggcgcgcagacgcagagatcgctgcagaactttgacattggcggggagcgtgagaggatgcccgttcccatcatccgtgcctttggcgtgctaaaaaagtgcgccgctaaggtgaatatggactatggccttgatccaacaatagggaaggccataatacaggcagctgaggaggtcgcagagggaaagttggatgatcacttcccacttgttatctggcaaactggcagtggcacacaaagcaacatgaatgccaatgaggtaattgcaaatagggcatctgagatccttggacacaagcgcggtgagaagtttgtgcacccaaatgaccatgtgaataggtcacaatcttcaaatgatacatttcccactgtaatgcatatagcgacggccgttgagatacattcgaggtttatcccaagtttgcaacagttgcatgattcacttcattcgaaaactattgagtttaaagacataattaaaattggacgtacacatacccaagatgccaccccattgactcttggccaagaattcagtggctacactacacaggtcaaatatggaattgaccgcattaattgtacattacctcggatgtaccagcttgctcaaggtggaactgcagttggaactggcttgaacaccaagaaaggatttgatgccaaaatagctgctgcagtggctgaggaaacaaacctaccctttgtgacagcagagaacaagtttgaagctttggcagcacatgacgcttttgttgagagcagtggtgccgtaaatacaatttctgcatctcttatgaagatagcaaacgacatacgtttgctaggaagtggtcctcggtgtggtcttggtgaactaatcctaccagaaaatgagcctgggagcagcattatgcctgggaaagttaatccaacccagtgtgaggctctgacaatggtttgtgcacaggttatgggtaatcatgttggtgttacaattggtggtgccaatgggcattttgaactgaatgtttttaagccaatgatcgcagccggattacttcgatcattgaggttgttaggggatgcatccgtgtcctttgagaaaaattgtgtcaggggaattcaagcaaaccacaagagaatttcacaacttttgcatgagtctctgatgttagtgacatctttgaaccctaaaattggctatgacaatgctgcagctgttgctaagaaagcccacaaagaaggaaccacgttgaaggaagctgcattagaccttggagtattaacggagcaagaattccatgagcttgtcgtcccggagaaaatgattggtccttctgattgataaccccatgttcactatgtttctttgaagcattcaggttgccacatccgcgagttctggtggccctgtgtttccaagttaatgattctagcgcacccataaataaagcaaataatttttcatatggtcattaggtcctcaccgtaccgcactagagaaatgatttttgcatggcggatggtatctgagaaaacagttgtattcttgttcaaatagggagcagtgcactttgattcatgaggcgccttccattatcttggcatcagtcaaccttttcttgccaagtagctagtgctatgtaacaagtgacatggcaaccatgtatagaaattatttgcatgggtttgtgttcttgccaggtagctaatgttatgtaataagtgacaaggaaacaatgtcatgaattatttgcattgggttttgacgagtgaaatagaaatatacgccctgttttagttttcttttta

SEQ ID NO: 87088 - DNA, 501 bp, Zea Mays
gggctccggcaatccgtcatggctgccgccagctccgtccacggcttcaccgtcaaggacgcaagcggcgaagacgtgcacctgagcaccttcaagggcaaggttctcctcatcgtcaacgtcgcatcacagtgtggcctgaccaactccaactacacggagctcgcccagctacacgagatgtacaaggaccagggtgagtcactaatttcgagatccttgcgtgttgcgttcccgtgcaaccagttcggcgggcaggagcccggcacgagcgaggagatcgcccagctcgtctgcgctcgcttcaaggccaagtacccgattcttcacaaggtcgatgtgaacggcgaggacgctgcgcccatctacaagtttctgaagtccagcaagaccggccccatgggcgaagacatcaagtggaacttcgccaagttcttggtggacagacaggggcatgtcgccgagcggtatgctccgaccacctacccactcagcatccag

SEQ ID NO: 87089 - DNA, 495 bp, Zea Mays
atggacaccgatagcggtggcattgcgccggcgccgcacgggcgggtctccagccgcgcctcgtcagcgctggcggccctcagcgtcctcgtcgtgctgctctacctcgtgtggcgcttcatctggcagtgcaggaagcacggaaccagaagcaacgccaccggcggagccacctcgtccgctcggccgctgtcttgcccgcctcgggacgcggcggcggcctacggaccgcctcgcgcaacgacggcatcgccgctctcgctctcggtgtcggtgcccgtggccacggcacgcagcggcgcggacggcaaggtcgagtgcgcggtgtgccttgcggagcccggggacggcgaggccgctacgcggctcgtgctgggctgcggtcacgggttccacgcggagtgcatccaggcgtggttccgagtgagcacgacgtgcccgctctgccgcgccgccgcaccgcagagtgttccacggtacgacatcagcgtgtga

SEQ ID NO: 87090 - DNA, 752 bp, Zea Mays
ccaaggcgacagcaacctcgatcgtagctacagccagcagagccgcggcgcagcgtagactgctcggctgatccgctatataaaacgggatcgaacccccacacgcatctcccagcaggtggctgtctctgtggctctcgatcgccttggtatatcctcctccgaccgggctccggcaatccgccatggctgccgccagctccgtccacggcttcaccgtcaaggacgcaagcggcgaagacgtgcacctgagcaccttcaagggcaaggttctcctcatcgtcaacgtcgcatcacagtgtggcctgaccaactccaactacacggagcttgcccagctacacgagatgtacaaggaccaggatttcgagatccttgcgttcccgtgcaaccagttcggcgggcaggagcccggcacgagcgaggagatcgtccagctcgtctgcgctcgcttcaaggccaagtacccgattcttcacaaggtcgatgtgaacggcgaggacgctgcgcccatctacaagtttctgaaatccagcaagaccggccccatgggcgaagacatcaagtggaacttcgccaagttcttggtggacagacaggggcatgtcgccgagcggtatgctccgaccacctacccactcagcatccagaaggacatcaagaagctgctcggcgggagctattgaattgaatatccggagacaatagatagatgcatgcactgccacttgaaacgcctgaaataagcttgc

SEQ ID NO: 87091 - DNA, 1191 bp, Zea Mays
atggtcgagagcttcctattgcggcgccttcccatcgcctcctacgcccagccgcaaccgcagccggcggcagcgcccggcttcgacttcctcagtgaggtctacggcgccgcctcgttcgccgggcccaatgctggtgactatggcggcgagatggggttccttgacatcgtcgagcccaaggcagcatcagcgacactggtggacggcgccacgggcctcggggcctgcaaggtggagcccggcctggcgaagagcggcggcacgttcggtgctggcgctggtgccgcgccgccggcggccttggcgtccaagaagaagagggtcgaggggatgctgtccaagaacctgatggtcgagcaccgccgccgcaagcgcctcaacgaccgcctccatgctacggtacgtcatgcccaagatcagcaaggaccgcgaaaggcgatgcctttcagcagcatgatccaggagatgaagggcaagatcggcgccatctcgttgcgcggcgtgctacggttccggctggggggccacgccggggccgggcgagcgccggcagccgagccggacgaggcgtcgcgggagggctgctgggcgcagttgcctttcgagcttctacgtatggtgctggtcagggtcgaggaccaggagccacggtggccggcccgcagcgccatcgtgcctggcccaagggatgcccctctcaaatgtttcatcaggagggaccgggctgctcagtcgtattctctgtgccttggagtcactgatgggttagctgatgatgggaaatttctacttgctgcacgcaaatgtcgtaggcccgcatgcactgaatacctaatctcgcttgatgcgaagaacacatcggctggttcctacattggcaagctaagatcaaacttcttgagaacaaagtttaccgtctatgatgctcatccaccttgtgccagagctgcggtttcaaagggttatattccaggacctgccggagaggatcaagctgctgcaggaagagatcgggcagtagcaggaggaggcgccgggcatgctcagcgttttccgggacctcaaccccgacgagatggtggccaggaacaccccaagtccgacgtggtgcggaaggagggcggcgacacccgggtggagatctactgtgccgcgtgcacttcaacggtgatggctcgtgggatgtga

SEQ ID NO: 87092 - DNA, 2200 bp, Zea Mays
ttcccgaagtggacagatactcagataccccaacggaggggaaaggaaaaaaatcaaacgagaaggaagccaccgctccccaatcgcctgcttgccttcccatcctcctcgtagatctccggcaccgggcaccatgagctcctactccggcgaccgctcctcctcctcctccttgcgccccaccaacacctccttcgactcctacaagttcgacttcggcatcaactcctcccgctcctccggctctcgccccctccgcgaccagcggccgggcgcggctaccaaccctccaacgaggcccgccaccggcgccacgtggatgcaccagcccgccagcgccaagccgtcgtggacccaccagccttcccccgccgcggcgtcggcgcccaccatggcggggcctggatccgggccaacctccatggtcggcgacatctttggccggagctggtcctccgccgcgccctcctctgggttcggcatccctcaggccaacaaccccggcctcttcagcgatctcctcggctccgcgctcggctcctcccgctcccagtccaacgcgccgctcagatccgccgccgcgccacaggcatccaggccagccggtgagaagcccaatgtcaacgctagcagctctcccttctcgatgggcggcatggcgggcgcgctcccgaaaactacgggagcaccgatgggctccggtggatacggcgttggtggccggccgatgaaacccgtgggcatggccgcgacggctgctgcgcagccgatggggcagcagagggatccatttggctcaatagacccctttgccgcaaagcctgggtccatgaacgcggtgaagcaggccaattcggtcaagccggatcagggatttggagctttccagggtgtgaattccagtgtcgctgctggatttgggagcttccagagtactgatgctggatctggtggtttccaaagcgctggcacgaccacaccttctaactttacaccaccgccagcaccagcttcaatgcctactcctgtgtctgcagcagttaactcaagcatggatcctctggataatctttttgcttcaaccacaagtgcaccgactgcagctgccgctagtaatggtgacagtggcggtgacatgtttggtgagatggatggttgggtcgatgtggaggcagagtttgctggtggtgatagtggtggcacaaccacagagctggatggcctgccaccgccaccatccggattgacaatatcagctgccaaggccaaagggatggatagctacaagggagggcagtatgctgatgctatcaagtggttgtcatgggctgttgttctaattgagaaatcagggaaagatgctgacattgttgaggtgttgtcttcaagagcttcttcatataaggaggttggtgagtacaagaaggccatcactgactgctcgaaggtgctggatcaagataaggataatgtctcagtgctagtgcagcgtgctctcctttatgaaagcacagagaaatataggcttggtgccgaggacctgcgtttggttctgaagattgatcctacaaataggcttgccaggagtacaattcaccgcctgaacaagttggctgactagtgatgtctttctagcgccctgatgtaatattgtactaccactgtactgcatccttctcacatgagatattgagatctgtgagttatttgaactctttagtctttattactatacttgtggctttgggggaatagtttgcaattgtgttgttataaagtatgaaatacgaatttacatacaatatattttttatttgtataatctacatcatgtatcaaattatcttgaaagctattactctgcggcatgtattctgtaccattttgctagaattcccatggttttgatgggaatcatcaggcatgcaatgtttaaacaacataaggtattgatacaaccttaagattgaaagtattatgatattggcttttgcattgcaacatggtgaaactttggacttgtctagtagaatgatcattagtagttactagtgtcatttgaacatttcctgtctgcttgtcacacttgtttatgctgagtggagtttatattctggtggtttgcaccttgaatcttcagctatctcattccaagatgcaattgcacatctacccatgaatcatcttagtaattttacct

SEQ ID NO: 87093 - DNA, 387 bp, Zea Mays
cggcaaagcccgccttctctctcggtctcgacgcgacccgccgctccctgcggctgcgcgcccaattcacgccccactggaggcggcggcgagcgcacgagtgcctcagcgccgccgatgaggctgcgccgcgccatgcagacctcgccgcccaccgtgtccgcgtcgtctctagagtgcgtgagctcgtgcagggccgcctcgtggaaggggggcggaaggccctacgaatgcagcgtactcttgtgcgcgtggaacgcgccgcgcgcgctcacgggcgcgctcgccagcaccgcgcagtgctcgtcgtgcggccacgccgaggccggaggcggctggaggaggcgcgggcggtcgcgtcggagtaacaactcggtgcgtttccac

SEQ ID NO: 87094 - DNA, 255 bp, Zea Mays
atgggggtcgccatggagggagcagcgcagggggcagtgcattgcaggaggctggcggtgggaggcaccgacgggaaggtgggcgccgatgtaaagcactgggcgcgtggcagcacaggtcgagggcaggttggcggggaagacgccagggagcagagggggctcaacgacggcaacaggcagggcggcggtgctgatgcgagcacgacaggatccggtggcactggcggcgtggactcaccggttccaaagtaa

SEQ ID NO: 87095 - DNA, 3885 bp, Zea Mays
agacacatctttagtatagccccagatggaaaatattcagcgaaggcagcttacaagggtctcttcctgggatcctgtacatttggacactataagcgggtttggaaaaattgggctccatcaaaatgtcgtttcttcctctggctggtggcccataacaggtgctggactgctgacagattagcaaaaagggggctcaatcatcctagcagctgtccactgtgtgatcaagaacctgaaactattaaccacctgctggtctcatgtgtgtttgcaaggattttctggtataatctgctcagaaagttcgggttggataacttggctccccagccgggcctgacttccttcctggaatggtgggagatagcttctgaaacagttcagggaatggtcaagaaaggtctgagttcgctgatctctttgggggcctgaacgatctggaatcaccgcaacagatgcgtgtttgatggacagactcccagtctcccctctatccttcggcaggctgatgatgagagaagactttgggaattagctggggccaagggtctctccttcttggcagcttctttgacaaatggctgaaccctactgtttctattttagtagttttttgagtctggcattcttagactctttcacttatgtgcggtactggcctccttaccgcgcatcaccctggatgaggacatcaatagagggaaatttggttatgatccatcgcgtgcctactctacaagttttgtcagatcttggtctactattgttgaccgaacatggagatcttactgctattcatcatctgattctttcatctctccagagactttgtgggaggatctcaaaccagctgtttcatatcttcaacctgaagagttaaaatttgtgcatgatgctttgaagttggcatatgaagcacacagtggacaaaaacggcgaagtggagaaccattcattattcatcctgttgaagttgctcgtattcttggagagcatgaacttgactgggaatccatcgctgctggtttattgcatgacactgttgaagatacgaatgtggttacttttgaaagaatagaaaatgagtttgggccaactgtgcgacgtattgttgaaggggagacaaaggtgtctaagttggggaaacttcagtgtaaaagtgagggtagcacaaaacaagatattaaagcagaagacctaaggcagatgtttcttgccatgacagaagaggttcgtgtgattattgtcaaactggcagacaggttgcataacatgcgcactctcacacatatgcctcagcacaagcagtatgccatcgccgtggagacactgcaggtctttgcccctttagcaaaactccttgggatgtaccggataaagtctgagctggaatatctatccttcatgtacgttaaccccactggttttgctgaactaaggaaaagagttgaagacttgtacaagtcccatgaacaagaattggaagaggcaaatagaattttaaggcaaaagattgctgaggatgagtttctcgatcttgttagtgttgaaaccgaagtgcgttcagtttacaaagagctctacagcatttacaaaactacactcaaatccaagagttcaataaatgaggtgaatcaggttgctcagctgagaatcatcataaaaccaaaatcttgcaatggtgttggcccattgtgcactgcacaacagatctgctatcatgttcttggccttgttcatggcatatggacacccattcctcaagctgtggaagattacattgcaactccaaaacctaatgggtaccaaagtctacacacaacagtgataccatttcttaacgagagtatgttccatttggaagttcagataagaacagaagatatggatttaatagcagaaagaggcattgctgcacattacagtggaagaagggtggcttctggacctgttggccttggaatatcaagtggaagaaatgccaaggggaaagtaatctgcttgaacaacacagactttgctctgaggattggttggctcaatgcaatccgcgagtggcaagaagagtttgttggtaatatgagttctagggaatttgttgatactatcacccgagatcttctaggaagccgtgtctttgtgtttactcctaaaggcgagattaaaaacctgcctaagggagccacggtggttgattatgcttatctgattcatactgaaatcggcaacaaaatgattgcagcaaaggtgaatggcaatctggtttcaccaattcatgtacttgcaaatgctgaagtggtggagattataacttatgataaattatctagtaagtatgcattccagcgtcaccagcagtggctacagcacgcaaaaactcgcagtgctagacacaaaattatgagattcttaagggagcaagctgctctttctgctgctgaaattactgctgacgcagttaatagttttgttgctgatcttgaagatgaaagtgatagtgagctttcacttccaagcaccaagaaagaagatagtaaattcaactgggagaagatattaagttctgataaattattctttgtcaacaaaagtagtgatggctttttacctgttaataatgtctatccaaaggtcaatgggaagcaaaacaaaactgttaaggatttgggcatcaaaatcaatggtcattctacaattcgaggtgatagcttcagtgagttaatgcaccctagcaattccacctgcaaggaagttttccctggtttggatgactggaaatctggtaaaatttctggttggcataatacggaaggcaactctgtccaatggctttgcatagcctgtgttgatcgaaaagggatgatggcggaggttacatctgctcttacagcttgtggaattactgtatgttcctgtgtggcagaagtcagtaaaaggaggggaatgggtgctatgctgttccattttgagggaagctatgagaacgtggtcagtgcttgtttgagtgttgacatgatttttggtgttcttggttggtctgtggggtgtagctggtgtccattgggtgctcttgagtgctaatgggtatcaagagacgtatactgcagtagttcaccactaatactatcttcctccaagatgatgataatgttggaagcaccaagacatcggtggctcaaaattttgttggtcagatccttaaaatctgggaacatagagcttgtccatattcctcattttggaaacgttcgtccgttccggagacgtgggaacaatctcgtcccccatctcatccttgtagtgttaaaatcctttttaagcacgttcccgttcctcaacctcatcgatccagaaacttggttgctaaggtcagatcatgattggacaggtgagcgagtggaatcctttacttctctgtcaaatcagaaagtgagggtgagcaaagtagaactagatatatatggttcattctgaaagtgagtgtacatagcagagtgagtagggttgggctatggctaacaaatcgtacatatgatcatgtaaaacactgttttgcattgcgaattacactgtttacattgtgtagtttgaaataagagatagagatgaataagctgccgactatggagagtcagtgcatgctgggattgattggattatacagaaggccttgtaaaagattgttaagggcggttcttctcactttgtggttcgcatatactagtttgcttaaatgtgcagctagaattttgacctggacgctaattccaaattttgtctgtgtttagtttcctacctctgcatgtaaatgttattgtatagcttcagttttgcgagtcaaaatttgagcatacttaactggcagatgcacgcttctggatt

SEQ ID NO: 87096 - DNA, 1434 bp, Zea Mays
gaggcgtgcgtgcgctcgtgtttcccagaaacgatacagcagcactagccaatgcaaacacctttttccctgcgcttatatatagcgctctccagtcctagtgtccgcgtcctcgtaatctctcctgcgtccatcctctcctcgcggcgggggaagaatggccgacccgagcttcctcgtcgggatcgtagggaacgtaatctccatcctcgtcttcgcgtcgccgatagcgacgttccggcgcatcgtgaggagcaggagcacggaggacttcaggtggctgccgtacgtcaccaccctgctcagcaccagcctctggaccttctacggcctcctcaagcccggcggcctcctcgtcgtcaccgtcaacggcgccggcgccgcgctcgaggccgcctacgtcgcgctctacctcgtctacgcgccaagggagaccaaggcgaagatggccaaggtggtggtggccgtgaacgtcgccttccttgccgcggtcgtcgcggtggcgctgctggcgctgcacggcggcgcccgcctgttcgcggtgggcctgctgtgcgccgcgctcacggtcgggatgtacgcggcaccgctcggcgcgatgcggacggtggtgaagacccggagcgtggagtacatgcccttctccctctccttcttcctcttcctcaacggcggcgtctggagcatctactccctgctcgtcaaggactacttcatcggggtccccaacgccatcggcctcgtcctgggcacggcgcagctgctgctgtacctggcgtaccggaaggcgccggcgagcaaggacgacgacgaggaggcggccgctgctgcgtcgggggacgacggcgacgacgaggaggaggaggaagggctgacgcacctgatggggcagcaggtggagatggcgcagcgcggccgcctgcgcctgcacaaggggcagagcctgcccaagccgccgccgggcgggccgctgtcgtcgccgcgccacgggttcgggagcatcatcaagtccctgtccgccacccccgtcgagctgcactccgtcctgtaccagcacgcccggttccagcccgtcaagaaggacgacgacgacgtggaggccaacgactgactgatatgatgcattaattgatgctgctattgttcgaccgacgtggtagcggtacagaggcgcccttttagtattcaggccagggtagcgttccaatggacagggtttgagtgtgttcttcacatatttgcaggttcgaaacccagatgaattaatatgtttgagttagatcgataggtgaaaatttgtccaccaactgcgtttgtttttctctctccgaattgcacaaggcagtgaaggcacacacataaatcttacgtacacctataatcataatgttgttaaattctaaaatatttgcttttataaaaaacaataaacaa

SEQ ID NO: 87097 - DNA, 75 bp, Zea Mays
gaacccttagctccagttcttctatatgtgttcttaagatttgctgatcaggacaaaagttcaacacttggtgag

SEQ ID NO: 87098 - DNA, 105 bp, Zea Mays
catgctcttttgactttttttacagtgcaccaggaaggaacaatcttctcaacttgctttccatatttagccattaggggcagagtgagataccatttggttctc

SEQ ID NO: 87099 - DNA, 2961 bp, Zea Mays
atgccgaaaaaggtcgccatgcggcgaggtaagcccgcccccgaccaagggaagaggcggcgccacgggccgcggctgtccaaggtgatgcttcgggagctcgacgcgatggggcctggccctgcccgcggctccgatggtgaggaggacgggtccgacgcggttgccgaggacgtgtacgagtacgaggaaggggtgcccgaggaggaggccggcaagaacggccgctatgacaccgtcgccaagtacgagtacaacttcgacagcgacgcctccgatgcggatgaggatgtgccttcggaggaaggcgaggatatggacgaagatgacaatgacgacggtgatgatgaggagaagcagataagaatacttcaggagacgaccggaatgcccagagaagccttcgatggaaagaagaggaaacagccatcggagctgcacctgcagcatggcgatggagatggtcctgtcacaattcatgatctcttggacaatgtccaggggaaacctggttatagcaagatccgtaagaggctgcagcagcaggagaaaaaaccgatggtcgtgctagccccacttccaaaagtagagagggacaagatcgagcgcagcgtgacgtttcagaaatccaagaatgagctaacaaagtgggaaggaatcgtgaagagtaacagggaagctcctgtactatactttgaaaatgataccaacttgggtgtgaacactgttgcggcaattgctagcgaatttaaaccaaggactgagtttgagaagaagattgctgagattacgcaaagcactgaaataatagaagcacacaagaacgatggtgccaaaatcctggaacttaacaagattgatgcagaagatgtgagagaacaccaaaaccgtcttgctaagatgcgcagccttctattccgtcatgaaatgaaagcaaagcgtatgaagaagatcaagtccaggacatatcatcggatgttgaagaaggacaaattgaaggcagcatcagcagatttcgaggcagatcctgaagctgtcacagatcatgctaggaaacaagaatttaaacgggcagaggaaaggatgacattaaagcacaagaatacatcacaatgggcaaagcgcatcctcaagcgtggattgtctgttcaagatgaaggcacccgagctgccattgcagcacagctccaacaaaatactcttctgactagaaaaatgaattccatgaaggatgattctagtagtgaagaaagttcagatgatgatgacgacgagagtgactcagaagcaaaaatcttaaacagagggaaagaaaagattcttaaagctcttgaagaagacaatgagataccgaattctggagttttttcgttgcctttcatggagcgtgctatgaaaaagcgcgaggaagcaacttatgaggaagcacgacaggctcttgaagaatacgatgattccttgaagaaattagaggacaataacactgaacaaaacgaagacaaagttaaggtgtcaggtaaaagaacgtttgggcctaccaaaaatacgcacgaagagttagtgaagaggaaaaaattacaagatactgaaaacagcagtgatagcgagtatgattctgagccagcccagcctttgagcaataatgaagtaactatgaaacatgatgatacccaatttgggagtgcactactggatgatgaaccacagaatgatatatacagaaactttactgatatcataaaaaatcctggtcctaagacaactttcgaagttggaatgttagctggtgattcatggaagaaaggtagccattctggtatcttgcggtcaagagcgacaaaggaaaggaccacagcaatgccaatgacattaccaataaatccaaaataccggttccttctattgtagacccacagcctaagcaacaggatcacaattccgattcagattctgaggaagagatggttgaaggcaacttgaccatccctgacagaaaggagagctatgaacttccatcgcaagctgatctcatacgtcaggcttttgctggtgatgatgttgaagctgaatttgagaaagacaaaatggatgttttaaatgaggagaatcctgaacctgaaaagcctgctcttgttcctggctggggccagtggacagacatccaacagaaaaaaggacttccctcatggatgataaaagaacatgaagttgctaaaagaaatagagaagaagccttgaagaggaggaaagactcgaagcttaagcatgtcattatttctgaacatgtagataagaagactgaaaagtatttggtaaggaaactgcctttcccttacacttcgaaagatgtgtatgagcagagcattcgaatgcctattgggcctgatttcaacccagcgatatcagtttctgctctcaatcgacctgcgattgttaagaagcctggtgttatcattaaaccaatacaatacgaggaggttaatccccatgagaagctcgatgaaccaaaacgtgtcattcagagagcaaccccaaaccggaatgcaaagaaagcctttgccaaacaaggaaaaagcgtaacttcacaaaagagaaagtgacgagacagtcatcttctcgtcaatggcttcatttggacaaaggagagctcatccgaattttgttgcccccgccgaatttgcacatgcatggctccaggtgtgtgcagtgattcttccctttatgaaagttcccgcttcggcgcatgacccatgggcaaaaggtttcacaccactggtttatgagagcagagaaattttggtacaagtagttctgtatttgttatttattgcattcgccacgcatcgtccaaatgagacggatgctatatttcagttctgatgatggccactggttaactagagtcacctgtcttgtatggatccccacttttcagacgccggtaaatttgtatgatttgcg

SEQ ID NO: 87100 - DNA, 759 bp, Zea Mays
attataattcttgaacaatcatatttcactgagatgtctctttagttcttttagaatgcttgattggtaaataatcttactggttttcactccgcagactgaaaagtatttggtaaggaaactgcctttcccttacacttcgaaagatgtgtatgagcagagcattcgaatgcctattgggcctgatttcaacccagcgatatcagtttctgctctcaatcgacctgcgattgttaagaagcctggtgttatcattaaaccaatacaatacgaggaggttaatccccatgagaagctcgatgaaccaaaacgtgtcattcagagagcaaccccaaaccggaatgcaaagaaagcctttgccaaacaaggaaaaagcgtaacttcacaaaagagaaagtgacgagacagtcatcttctcgtcaatggcttcatttggacaaaggagagctcatccgaattttgttgcccccgccgaatttgcacatgcatggctccaggtgtgtgcagtgattcttccctttatgaaagttcccgcttcggcgcatgacccatgggcaaaaggtttcacaccactggtttatgagagcagagaaattttggtacaagtagttctgtatttgttatttattgcattcgccacgcatcgtccaaatgagacggatgctatatttcagttctgatgatggccactggttaactagagtcacctgtcttgtatggatccccacttttcagacgccggtaaatttgtatgatttg

SEQ ID NO: 87101 - DNA, 1928 bp, Zea Mays
cgaatggttggtgggggtccaaaaattctccaccaccttcccccgccttcctccgagtcgacccacccgcacctctcctcccccggcatctcactcctcatccgcagttccacaccaccaaatccctacctcctcagtcctcacccattcattcgtccatcccacctaccatggccaccgcctccggcactgacgccggtgcccagccgcgcgacgaccccagcctcctccccttcgcgtccttctcgctcggcctctccatccgcgcgccggccacccccacactcgcctccgtcccctccaccctccacctccccactcaaatctctacactcgccgtctgcctccacccctccgccgcgcagccctcctcccgccgcaccacccgcctcaattccgccacctcctccgtcatcgccccgctgccctcctcaacgcccggcctctcccgctccttcccttcgggcgcgcccgccgcagcagggcgccgccgcacgctcgtctggttccgcgccgacctccgcctccacgaccatgagccgtttcacgccgcagcgggggcgtcgtcctccctcctccccgttttcgtcttcgatccgcgggacttcggcaagtccccctcggggttcgaccggacgggcccgtaccgcgccaacttcctgctcgattcggtcgccgacctgcgccggagcctccgcgcccgcggtggggacctggtggtgcgcgtgggtaggcccgaagtggtcattcccgagctcgcgcgggcggcgggcgcggaggccgtgtacgctcacggggaggtatcgcgggacgaggtccgcgccgaggagagggtgcaaaaggctgtggagaaggagggtatcaacgtgaagtacttctggggtagcacgctataccacgtggaagaccttcccttccgcctcgaggacatgccgtccaactatggcggcttcagggaggccgtgaaggggttggaggtcagaaaggtgctggaggctcccgaggaggtcaagtgcgtgcccatgaagaatgtgctcgagcccggtgacatccccacgcttgctgagctcgggctcactgcgccaccagccatgtcacaggactcaaaacctgctgttggctctactctcattggtggtgagacagaagctctggagaggttgaagaagtttgctgcagaatgctctatgcagccaaacaaagtagacaaaagcaatacccaagatagcatatatggtgctaatttctcttgcaaaatttctccatggcttgctacaggttgcctctctccacggttcatgtatgaggagttgaagaagcatgctactaaagcaattccttttgggtcaacacccaagaataatgatggcacatctgatgctggaacaaattggttaatgtttgagttgctgtggagagatttcttcaggttcatcacaaagaagtacagctctgtacagaagacatctgaagttgccactggctgcactcccgccccagcgcttgcatgaacttacttagacaagctgattgccagctgcttttttggggtgataaacttatgtgcattttcaatggagtcttttttttgccgccaataatgttggtagtcaaagtgaacgccgaatgcgcattcctgcgttttggtttggtcgatgtatttaatgctgtcgacatccctccaaatgactgttgaatgcaaatgatactgtgagcaacctatcatctgctgtgtaaatgtgttctgtcgacgttcctccaaatgacacttcgatgcaatgatattgtgagcaacctgtaagctgttatgtaaatgtgatagttagatgcatatcatgcatgtgacctgctattgttctatatatcatattattgttctatatatcatatgaatagactttatttaaataaaacacaaaaatgtatgt

SEQ ID NO: 87102 - DNA, 1907 bp, Zea Mays
ctgtctcgacttcgcgactgcaacagcagagtcctagctatctccggccacatttgtttataggcatggcaacatatacgatttatccacgtgcccacggataaaaaaaacctattaaacatggatccgggtataagttcctatatgtggatacgaatacggtatccgcaaatatttatggaacgagtataacaaagtagtatttatacccgaatatcccgattacccgctaacctgacatgtgggtcgctagggtttggaaagagtctcccaatcccactcatccggttcgcacacggcacactacagaccccgcccccaacctcggtctttcccagtcccagccgccaccgtgcgtctgtgcaagtggccttcggcggtgcgcagagcagagctggtgacgtggcccgtggtgcgcgtttccctgcagcctcgaggtctgcacgccgccggcctccctctcagcgccacgcgccgccggcctccgttgctcactaccggacttcgcacacgcccggcggcggccgaccatcctcggaggtgcagttacgcgcgccgtaggaaggtttttcttccatcatttgtgtgttcgttcaactgagccgccatgcgccagccacggtccgggccggggaagaggcggggccgcggtccgcgcatccctgcggcgacgcttcagaagcagaaaacggcgttggcgaacgtcgaccagatcaccggcgccaagattccgaagagcttcgtattctcccgcggtaaactcccctccacgcttcgccatcttcagcaggacctccgcaaggtcatgctcccctacactgctctcaatctcaaggagaagaaacgaaataacctcaaggattttgtcaatgttgccggcccgatgggtgtgacacatttcttaatcctctcaaaccctcaaagcctgccacatttgcgctttgccaaatcaccgcagggcccaacattcacatttcagatagaggagtactcacttgcggcggacattgcaaactctcagaagcgcccaaggtgcccaccagggatattcaaaaactcaccactggttgtacttggtgggttgacaggtctcggcaaccctttcaggagtttggtcgaatacttccaacatatgttcccttccgttgacccaaccactgtcaagctggcaacatgccaaaggattctgttgttaaaacatgataaagagaaggatgttattgaattccggcattactccatcaagctccagcctgttggggtcagtcgcaggattagaaagctcatgcaaaacaatcaagtgcctgatctaggagaatttgaagatgttagtgagtttgtgaaaaaagctgggtatggatcagaaagtgaagcagacgatgaagcagcaatggtaagcttgccaagtgacattgacaaattaaaccgggcatccagaaaaagcgctgtcagactccaggagattggaccaaggatgactatgcgcctagttaaagttgaagctgggctatgttcaggagatgtcttatacccatggcctgtggaaaaggaagtggtgggaaagaaaggaacagaaactggggaagtagaagggcaagaagacgattctgaggccacagatgagtccgaggatgagatggtgtaggatttcagatgttttggacaggcagacgcaggtgttttgacagtcctggatgtttcatgctgaaaccaacgggccctgtgcccaataacgtggtgcattcatgccaattttgtcactgaaggtgcattgcattcgttgtaacgaagtgtaacattgttttgccgatggttacctcttttgtgttatgacaagtttggaggatagtttttggttcgcagtctaagatttctcattcttgtcggggtttcagagggatggacat

SEQ ID NO: 87103 - DNA, 1856 bp, Zea Mays
ctgtctcgacttcgcgactgcaacagcagagtcctagctatctccggccacatttgtttataggcatggcaacatatacgatttatccacgtgcccacggataaaaaaaacctattaaacatggatccgggtataagttcctatatgtggatacgaatacggtatccgcaaatatttatggaacgagtataacaaagtagtatttatacccgaatatcccgattacccgctaacctgacatgtgggtcgctagggtttggaaagagtctcccaatcccactcatccggttcgcacacggcacactacagaccccgcccccaacctcggtctttcccagtcccagccgccaccgtgcgtctgtgcaagtggccttcggcggtgcgcagagcagagctggtgacgtggcccgtggtgcgcgtttccctgcagcctcgaggtctgcacgccgccggcctccctctcagcgccacgcgccgccggcctccgttgctcactaccggacttcgcacacgcccggcggcggccgaccatcctcggaggtgcagttacgcgcgccgtaggaagccacggtccgggccggggaagaggcggggccgcggtccgcgcatccctgcggcgacgcttcagaagcagaaaacggcgttggcgaacgtcgaccagatcaccggcgccaagattccgaagagcttcgtattctcccgcggtaaactcccctccacgcttcgccatcttcagcaggacctccgcaaggtcatgctcccctacactgctctcaatctcaaggagaagaaacgaaataacctcaaggattttgtcaatgttgccggcccgatgggtgtgacacatttcttaatcctctcaaaccctcaaagcctgccacatttgcgctttgccaaatcaccgcagggcccaacattcacatttcagatagaggagtactcacttgcggcggacattgcaaactctcagaagcgcccaaggtgcccaccagggatattcaaaaactcaccactggttgtacttggtgggttgacaggtctcggcaaccctttcaggagtttggtcgaatacttccaacatatgttcccttccgttgacccaaccactgtcaagctggcaacatgccaaaggattctgttgttaaaacatgataaagagaaggatgttattgaattccggcattactccatcaagctccagcctgttggggtcagtcgcaggattagaaagctcatgcaaaacaatcaagtgcctgatctaggagaatttgaagatgttagtgagtttgtgaaaaaagctgggtatggatcagaaagtgaagcagacgatgaagcagcaatggtaagcttgccaagtgacattgacaaattaaaccgggcatccagaaaaagcgctgtcagactccaggagattggaccaaggatgactatgcgcctagttaaagttgaagctgggctatgttcaggagatgtcttatacccatggcctgtggaaaaggaagtggtgggaaagaaaggaacagaaactggggaagtagaagggcaagaagacgattctgaggccacagatgagtccgaggatgagatggtgtaggatttcagatgttttggacaggcagacgcaggtgttttgacagtcctggatgtttcatgctgaaaccaacgggccctgtgcccaataacgtggtgcattcatgccaattttgtcactgaaggtgcattgcattcgttgtaacgaagtgtaacattgttttgccgatggttacctcttttgtgttatgacaagtttggaggatagtttttggttcgcagtctaagatttctcattcttgtcggggtttcagagggatggacat

SEQ ID NO: 87104 - DNA, 1477 bp, Zea Mays
gcgtctgtgcaagtggccttcggcggtgcgcagagcagagctggtgacgtggcccgtggtgcgcgtttccctgcagcctcgaggtctgcacgccgccggcctccctctcagcgccacgcgccgccggcctccgttgctcactaccggacttcgcacacgcccggcggcggccgaccatcctcggagccacggtccgggccggggaagaggcggggccgcggtccgcgcatccctgcggcgacgcttcagaagcagaaaacggcgttggcgaacgtcgaccagatcaccggcgccaagattccgaagagcttcgtattctcccgcggtaaactcccctccacgcttcgccatcttcagcaggacctccgcaaggtcatgctcccctacactgctctcaatctcaaggagaagaaacgaaataacctcaaggattttgtcaatgttgccggcccgatgggtgtgacacatttcttaatcctctcaaaccctcaaagcctgccacatttgcgctttgccaaatcaccgcagggcccaacattcacatttcagatagaggagtactcacttgcggcggacattgcaaactctcagaagcgcccaaggtgcccaccagggatattcaaaaactcaccactggttgtacttggtgggttgacaggtctcggcaaccctttcaggagtttggtcgaatacttccaacatatgttcccttccgttgacccaaccactgtcaagctggcaacatgccaaaggattctgttgttaaaacatgataaagagaaggatgttattgaattccggcattactccatcaagctccagcctgttggggtcagtcgcaggattagaaagctcatgcaaaacaatcaagtgcctgatctaggagaatttgaagatgttagtgagtttgtgaaaaaagctgggtatggatcagaaagtgaagcagacgatgaagcagcaatggtaagcttgccaagtgacattgacaaattaaaccgggcatccagaaaaagcgctgtcagactccaggagattggaccaaggatgactatgcgcctagttaaagttgaagctgggctatgttcaggagatgtcttatacccatggcctgtggaaaaggaagtggtgggaaagaaaggaacagaaactggggaagtagaagggcaagaagacgattctgaggccacagatgagtccgaggatgagatggtgtaggatttcagatgttttggacaggcagacgcaggtgttttgacagtcctggatgtttcatgctgaaaccaacgggccctgtgcccaataacgtggtgcattcatgccaattttgtcactgaaggtgcattgcattcgttgtaacgaagtgtaacattgttttgccgatggttacctcttttgtgttatgacaagtttggaggatagtttttggttcgcagtctaagatttctcattcttgtcggggtttcagagggatggacat

SEQ ID NO: 87105 - DNA, 1411 bp, Zea Mays
gatttgttttgatttctgagccttctcttgtgtcgttctgtgttgggttgcggacgcgtcctcaactaggtttttcttccatcatttgtgtgttcgttcaactgagccgccatgcgccagccacggtccgggccggggaagaggcggggccgcggtccgcgcatccctgcggcgacgcttcagaagcagaaaacggcgttggcgaacgtcgaccagatcaccggcgccaagattccgaagagcttcgtattctcccgcggtaaactcccctccacgcttcgccatcttcagcaggacctccgcaaggtcatgctcccctacactgctctcaatctcaaggagaagaaacgaaataacctcaaggattttgtcaatgttgccggcccgatgggtgtgacacatttcttaatcctctcaaaccctcaaagcctgccacatttgcgctttgccaaatcaccgcagggcccaacattcacatttcagatagaggagtactcacttgcggcggacattgcaaactctcagaagcgcccaaggtgcccaccagggatattcaaaaactcaccactggttgtacttggtgggttgacaggtctcggcaaccctttcaggagtttggtcgaatacttccaacatatgttcccttccgttgacccaaccactgtcaagctggcaacatgccaaaggattctgttgttaaaacatgataaagagaaggatgttattgaattccggcattactccatcaagctccagcctgttggggtcagtcgcaggattagaaagctcatgcaaaacaatcaagtgcctgatctaggagaatttgaagatgttagtgagtttgtgaaaaaagctgggtatggatcagaaagtgaagcagacgatgaagcagcaatggtaagcttgccaagtgacattgacaaattaaaccgggcatccagaaaaagcgctgtcagactccaggagattggaccaaggatgactatgcgcctagttaaagttgaagctgggctatgttcaggagatgtcttatacccatggcctgtggaaaaggaagtggtgggaaagaaaggaacagaaactggggaagtagaagggcaagaagacgattctgaggccacagatgagtccgaggatgagatggtgtaggatttcagatgttttggacaggcagacgcaggtgttttgacagtcctggatgtttcatgctgaaaccaacgggccctgtgcccaataacgtggtgcattcatgccaattttgtcactgaaggtgcattgcattcgttgtaacgaagtgtaacattgttttgccgatggttacctcttttgtgttatgacaagtttggaggatagtttttggttcgcagtctaagatttctcattcttgtcggggtttcagagggatggacat

SEQ ID NO: 87106 - DNA, 1094 bp, Zea Mays
aagtatatggtcaacatgatttagttataataatcattccattcagtggatacaaattaacatgcaaaatttatatttagattagacatgaaaaaatattagaaataccaaagtaggatcatgtcagtgtatgagctagaaactacgaagtaatcacatggctaactatgtacacttgagcatacctttacgggccagaaaactaagtggaaagactaggcattggacttcagatagtggattttatgttttagagaaataagtaaagatcttttgacttgagtcagcaagtgtctcatgtttcacctgaaatgctctctggctgtgcatgtcctaaaaactattaatgattttaacttttacctttcaatttttcatttactagtttgctgtccacagattattttggtccaggttgttacttttatagattcaataactgttatccaaatattatgacctgatgtgttttctgaaaaggcaatgtgccaatgtatattgttgttcattgaattttgtgtacacatttgccagagctgggtatggatcagaaagtgaagcagacgatgaagcagcaatggtaagcttgccaagtgacattgacaaattaaaccgggcatccagaaaaagcgctgtcagactccaggagattggaccaaggatgactatgcgcctagttaaagttgaagctgggctatgttcaggagatgtcttatacccatggcctgtggaaaaggaagtggtgggaaagaaaggaacagaaactggggaagtagaagggcaagaagacgattctgaggccacagatgagtccgaggatgagatggtgtaggatttcagatgttttggacaggcagacgcaggtgttttgacagtcctggatgtttcatgctgaaaccaacgggccctgtgcccaataacgtggtgcattcatgccaattttgtcactgaaggtgcattgcattcgttgtaacgaagtgtaacattgttttgccgatggttacctcttttgtgttatgacaagtttggaggatagtttttggttcgcagtctaagatttctcattcttgtcggggtttcagagggatggacat

SEQ ID NO: 87107 - DNA, 757 bp, Zea Mays
aaactaatatcttcttcacttcccatcccattcattcatcactcaccagtcaccaccactgccgcgaccgagagagtcagagagagcaggcggcggcaatggctggcgctggggacgagtactactacggcgggccgggccagcgcggcgcgccccacggcctgctgctggcggtggtggtgggcctcgtggtggcgggcccgctgttcctgggcggcggcggcgaggcgctgacggaagccgtggcggagctgctgagcccggtggggctcctcctcctccccgtgtgcctgctgttcctcatccgcctcctctcgtccgaccgcggcgccgcggcgctcgccgacgccttcgccttcggcgggtcccccgacgccgtccaccgcgtgggagggtccccggtcggcgtcgcgttcttgctcctcctcatcctcgcgctgctctactaccgatcctcgctcttcggcggcgacggcggcgacgacgagtaggataggagagctggcggttgcgatctctggctgtctgttgggttggtttctgtaatgcgaggtctgcgaggggcgtctgtgcaaaagtgcgtgtgtaaaatcgagcggaggcggttaatctgttgtttacttggtcggtttgtgacgctgaagcttctgtgcgtgtgttgcgtcgggccatgtgcgtgcgctgtgctcttccccagaaccacgtgtacacgctgtactatcaccccactgacccagaacgccaatgcgtgccagtg

SEQ ID NO: 87108 - DNA, 86 bp, Zea Mays
gttcttatggtaagtttgtcggcttattacaattattacattaagttcgacggtttgtcaccatgttctttaactagtttcctgtt

SEQ ID NO: 87109 - DNA, 952 bp, Zea Mays
cgacttggtccacccggcttccaacatatgaaacttcttgcgtcttcattaaattgtgctaatataatgtgtgtttcgttttgttttgtcctgccacaggggtgaagtctatgtgggaacactgaacctgcaaccgagatcgtagagattcgacaatatcacaagaggatcatacttctactccatgaaaactgtaacctactagagctgaaagaaatatagagcctataagaaggaaatgtatgagatgcaaccaatgtacagtaagcaacttaccatatttctttatgacattgttccaagaattaataagtattccagtgagcgtctcaaaaatggaatcaagaggtgaggaaagacatcgccccagttctgtagaggatgccttccttttcctcgggttttgttgtgtgtcctgcttaccaagcattgatagcaattcgccgattgatagatgagatggtaactagctgaaaacagtaataattaaaacccaagagcgattttgcgacgccctgctgtgagccgaccctagcagtcaaggcttcgtaaatcagatttatctatcaggtaaagtcacaggaaatgttgtggcaaaggtatggcttaagagaaatcatgtacctagatgatttgttgtctatacgattagatggtgctgttcatcttcaattttgtcaaatttggcaccactccagtcaccaaccatacataaaaaagttttagtgaagtcaatgaagcaaacattttaatatttcattctatcaataaaagtgtagttttgcttccgataagacctccataaacaataaacacgggtaaaggagagtattgatggttggaatgagtggtggtagcagaatgatatctacatacattgattataggtaccagcacctcatttttttataaaaaaatatgtgcgaacttggaactttttaatatgtgagga

SEQ ID NO: 87110 - DNA, 753 bp, Zea Mays
caagtgcaaatgtgcatgggcagcttgaagctgtggagggcgatggtgagggtgcactccgcgtcgtcgcaggggcttggcgccctcggcgccgccggagccagacccgtcgctcctccaccgcctgatcatcagccagcggcggcacggccacggcgcagcgagcaggcggaggtgttcaccatatggatgaagtcgctggttctcaacggcagcggctgcaccgtctacgactccgccggcagcatcgtctaccgcgtcgacaactacggcgcccgccgcgccgccgacgtctgcctcatggacgtcgctggcaacgtcgtcctacagatactcaagaagaagaagctcgggttcgggaggaggtgggagggatacaggtgcgccgatcaggagcagcagcagcaggagcggcagcggccgtggttgaaggtggtccgggcgtgggcgtggcgcgggccgtcgcgctgcacctgcgactgcgagctaggcggcctcggcctaggtggcgactcgacgtcgacgacggccgtgcgctacaggatggacgacgggaggatcgcgccggcgcgcggagccaggatcgtggacggcgccacggggctcgccgtggccgaggtgaagcggaagacgacggccgagggcgtggcgctcggcgccgacgtgctcaccctggcagtggagcctggcgtggaccggtccgtcatcatgggcctcgtgctcgtgcacggcctcatcaaccgcgccatgtga

SEQ ID NO: 87111 - DNA, 91 bp, Zea Mays
aaattgaaatgcatgtgctctatagtctacacaaacacacacgcgggtatgcaggtttacgggcacggtacaacattttcatacccacgag

SEQ ID NO: 87112 - DNA, 333 bp, Zea Mays
atgattgtgagctcctgcagcgaggactggaagttggacaacagccgcgccagctcccgcggccgaatggctaggcggctcgggaaccgtccccggtctagcgacagcgactgcacctcgggctctgcgctgcacacgatccagtacgtcttcctcacaccattgaggcagtggagggtgatctggagcttgggtgcgtcgggttctgggagggatacggcgagtcggtcgagcgcggcgtgcggcgtgcggaggacggcgagcagggacttgaggaggacgctgcactgcagcggcgtggaagacggtgccgaagccgcggcgtcgaggtga

SEQ ID NO: 87113 - DNA, 504 bp, Zea Mays
tcccgtactcgaaccatcgagccgccgccgccgccgccgcagttgtcttcggtcttccgtgctcaccttcgagagatcaagttgctgctgcggtagtccccaaccatcatcatgcagaacgaggagggtaagacggtggacctctacgtccccaggaagtgctcggccacgaataggatcatcactgccaaggatcatgcctctgtccagatcaacattggccacttggatgcgaatggcctgtacgatggtcacttcaccacgtttgctctctctgggtttgtccgtgctcaggtgatagtccaggatgtgatgcctacatgcaactttctactgcaattccgtgtttattgagttcacatgttggcacctgacacagtgaatgactgaatggatttggaaagaatttttatgtgtggctaaattgactttcagcaaatccaaagttatgatctttatgtgtcgctaggttgaccaccatccactgttaactaacacattttc

SEQ ID NO: 87114 - DNA, 458 bp, Zea Mays
tcccgtactcgaaccatcgagccgccgccgccgccgccgcagttgtcttcggtcttccgtgctcaccttcgagagatcaagttgctgctgcggtagtccccaaccatcatcatgcagaacgaggagggtaagacggtggacctctacgtccccaggaagtgctcggccacgaataggatcatcactgccaaggatcatgcctctgtccagatcaacattggccacttggatgcgaatggcctgtacgatggtcacttcaccacgtttgctctctctgggtttgtccgtgctcagggtgatgctgacagttcgttggacaggctgtggcagaagaagaaggctgagatcaagcagtaggtctttgcacgtagttccaccggtaatggccttttttagatactgctctagctaatgctttagctgggggggggggagtgagacgattctctagaatcgga

SEQ ID NO: 87115 - DNA, 305 bp, Zea Mays
atgtatctgtggtagccgtagctcattcaaagttctagtagccggcatatacagacgcggtgaacatgaacgtatctcgttacaatttacatgttctttctaatcacttgattcagaacagtaaaaagatggaaattaagaaaaggttccgtcactgcacggagaagaggtttgacctctatactaggtggaaatggaatggaaggaagaggggtggtaaacagtaacaggctactctacctctacctatacagccacagagacgtctctctctgatgttgcggtagcgcgcggcgccgcctccc

SEQ ID NO: 87116 - DNA, 267 bp, Zea Mays
atgtggaacttacatgatgagccatacctcatgagtcttgaagacttgattcctgaagattgcaggagaaggactgcagcagggtgttgtagccaccggttgaaatcttggttggagactacagcaggactgcaggagaaggggcggggtgatgtagtcgctggtgtagccaccaacaaatcaggagttcaggactgcaggggcggtgccaagaaaggagaagagaggagaggagacgtgccggttggagactgtgttggcggctag

SEQ ID NO: 87117 - DNA, 1386 bp, Zea Mays
cgaacgcgtccttaaccgaaatggcggaatcggcctcgcagagggatagccggaggcccagaagcgtccggaaagacagcgcacgaagcaatctttccctttccccaagatgggattcggcttcgttcgtctcgccgcccgcgccgcggtttctcgccggggcatgacgccagcaacctccgcccgccgcgcgctcgccccacccgccgtgccggcggagccccgctgcgggccccactggctcgtggccgcccgcggccacgtgggccactcgcaccaccgcggcggggaggacgagggcgagacatccgagaggatctttcgtctgggactcgccgctgacgtcgtactcaccgcggggaaggccgtcacaggctatctctccggcagcaccgccatcgccgccgatgccgcccactccctctcggacatagtgcttagcggggtggctctgctgtcttacagggcggccaaggctcccagagacaaggaacatccctatgggcatggaaagtttgaaagtttaggagctcttggaatttcaagtatgctgttggttacttcaggtgggattgcatggcatgcttttgaagttcttcagggagttatgtcttctgctcctgatataattggcaatacattgcatgcacaccatgaccatggtagcagtgggcatcatcatggaatagatttggaacatccagttcttgcattgagcatgacaactttagcaatatctatcaaagaagggctatactggataacaaaaagagctggggaaaaggaaggcagtggtctgatgaaagctaatgcatggcaccatcgtgcagatgctatttcatctgtcgttgccctagtaggggtaggtggttccattcttgggttgcctcttcttgatccactagctggacttgttgtctctggcatgattctgaaagctggtattaagactggatatgagaggggggtaagacagccctcgggcattatattaagaagaagctctcacgcaggtcgagaaaacccccgaacccctgccccacccatacacagcggcaccgtagcccatgtgagaagcgaccgggacgggacggcgggaccaggaccaggccttagacctgtgctttggcgtgggacagccggggagatttttgtaaccacaccctgaaattcgctcccacggggagtcgaacctaggacctgaggagtgctactcagaccgcctaaccaactcggctagaggctcttccacactgcaatctgattacatctgttgcttgtattaagtgattatttttctgtacttccagaaatattattgtcgatgtgtagctttctgaagccaatggctgaaaatattcatgaaataaaagatgacatatgctc

SEQ ID NO: 87118 - DNA, 2606 bp, Zea Mays
cgaacgcgtccttaaccgaaatggcggaatcggcctcgcagagggatagccggaggcccagaagcgtccggaaagacagcgcacgaagcaatctttccctttccccaagatgggattcggcttcgttcgtctcgccgcccgcgccgcggtttctcgccggggcatgacgccagcaacctccgcccgccgcgcgctcgccccacccgccgtgccggcggagccccgctgcgggccccactggctcgtggccgcccgcggccacgtgggccactcgcaccaccgcggcggggaggacgagggcgagacatccgagaggatctttcgtctgggactcgccgctgacgtcgtactcaccgcggggaaggccgtcacaggctatctctccggcagcaccgccatcgccgccgatgccgcccactccctctcggacatagtgcttagcggggtggctctgctgtcttacagggcggccaaggctcccagagacaaggaacatccctatgggcatggaaagtttgaaagtttaggagctcttggaatttcaagtatgctgttggttacttcagggagttatgtcttctgctcctgatataattggcaatacattgcatgcacaccatgaccatggtagcagtgggcatcatcatggaatagatttggaacatccagttcttgcattgagcatgacaactttagcaatatctatcaaagaagggctatactggataacaaaaagagctggggaaaaggaaggcagtggtctgatgaaagctaatgcatggcaccatcgtgcagatgctatttcatctgtcgttgccctagtaggggtaggtggttccattcttgggttgcctcttcttgatccactagctggacttgttgtctctggcatgattctgaaagctggtattaagactggatatgagagtgttctggaattagttgatgctgctgtggatccttcacttttagaaccaatcaaggaaactattttgagggttcacggtgtgaagggatgtcatcgattgaggggaagaaaagctgggacatcattatatcttgatgtgcatatagaggtatatccttttctgagtgttagtgcagcacatgatatcggtgaaactgttcgtcatcaaattcaaaaggagcacaatcaagttgctgaagttttcatacacatagatccctcgtacttagtaggcccgaccatggacctaaaaaggatcctgaaggactctgatggaacaaattcagaagctatcccacggcaacaaagtgcagaagccatcgtgtctaatattatttcatctcatttttcggaggcccagcgatggagcgatgatggtggtcttgcctcttttgcgggtgcttcagcggatagtcggcctcaggcctcttacaaagaggtgttgctttcctcccgaccccccatccatcatcctgctgctgaggttgatggcgacggttgggtgagagtcaaggatcgtcgtgcatgcttcagggatcatcgtgcctgccagcgtgatcttcgtcaccctggcctctctgcccccaaggctactcctattgacttgcaggggtggtgcttcaattgcttttcctcgtctcatcgtgcaatcagctgttgtcgtcaggacgcctgtccggtggcaccgtctttgagcccgcagatggcagctcttgaccaatcagtgagcgcgctccgaccttgctgtgtcatcaaacattccaggaggattatccaagctgaagagaatctgcggagtgctctgttcgtcaacgtagttgggccagaggattcaggtcgcaccgctgaggtcttgaacgcactcacacagaggtttggttttgaggatgatgtgatcgacctacgtcgcgtcgcgccgaattcctttcccagtgatgatctagctaatcgagtcttcaatggagtaatggcgccattcatttcgttcataactcctacaccggttcatgctgcggttgaggtccatgcctcagttaagtctgcatggttccaggctcctggtgtttcttctaatgcattggtcgagcacttgttgggaaatttgaccgtgtcagctcaggacttcggaatgcctcagattgagaagtgcgttgatggtttgggtgctgtgggtgcagtggttcttcactccccagcattaccttctgttcaggtctcccgatctggatctagcaaaatactgaaagtctatcacagaaggattcggcccaagcttcagcttcaggaggttaatacctgtgacatagctaacaactttatcgagatggtcaccaaacccctatcaactattttgtcgacaccagcatctcctaagccgaagaccagaaagaatatttcaccaaattttgttccaagaagatccaggcgtgtggccaagttacaccctttagtgtttgggttgaagaataagcatggctcactttcttctgctgatctggagcattgtgctcaggaattcagtaagtcagtatcccttaagcaagttaaagttctaagcaaggtggggctgcaggctttatcccccgggattgctgacattgttttccaggattggtggggtgggggggggggtggctga

SEQ ID NO: 87119 - DNA, 1931 bp, Zea Mays
cgaacgcgtccttaaccgaaatggcggaatcggcctcgcagagggatagccggaggcccagaagcgtccggaaagacagcgcacgaagcaatctttccctttccccaagatgggattcggcttcgttcgtctcgccgcccgcgccgcggtttctcgccggggcatgacgccagcaacctccgcccgccgcgcgctcgccccacccgccgtgccggcggagccccgctgcgggccccactggctcgtggccgcccgcggccacgtgggccactcgcaccaccgcggcggggaggacgagggcgagacatccgagaggatctttcgtctgggactcgccgctgacgtcgtactcaccgcggggaaggccgtcacaggctatctctccggcagcaccgccatcgccgccgatgccgcccactccctctcggacatagtgcttagcggggtggctctgctgtcttacagggcggccaaggctcccagagacaaggaacatccctatgggcatggaaagtttgaaagtttaggagctcttggaatttcaagtatgctgttggttacttcaggtgggattgcatggcatgcttttgaagttcttcagggagttatgtcttctgctcctgatataattggcaatacattgcatgcacaccatgaccatggtagcagtgggcatcatcatggaatagatttggaacatccagttcttgcattgagcatgacaactttagcaatatctatcaaagaagggctatactggataacaaaaagagctggggaaaaggaaggcagtggtctgatgaaagctaatgcatggcaccatcgtgcagatgctatttcatctgtcgttgccctagtaggggtaggtggttccattcttgggttgcctcttcttgatccactagctggacttgttgtctctggcatgattctgaaagctggtattaagactggatatgagagtgttctggaattagttgatgctgctgtggatccttcacttttagaaccaatcaaggaaactattttgagggttcacggtgtgaagggatgtcatcgattgaggggaagaaaagctgggacatcattatatcttgatgtgcatatagaggtatatccttttctgagtgttagtgcagcacatgatatcggtgaaactgttcgtcatcaaattcaaaaggagcacaatcaagttgctgaagttttcatacacatagatccctcgtacttagtaggcccgaccatggacctaaaaaggatcctgaaggactctgatggaacaaattcagaagctatcccacggcaacaaagtgcagaagccatcgtgtctaatattatttcatctcatttttcggagaaaatggcgctcgaacatctaatgctgcattacgtgcaaggaagagtgttgctccaggtccaagtttcaatgtctccagaaattttgattcgggatgcaatggaagtcgcgaagcaagccgaagaggagatactcagggctgatgccagcataagccaaatcagcttgcagctaagattgggccaacaaatcaagcaacttcagctagcatcgcaagaacgtcgctgatctacatgcaggagatcactgatccatttgctggctgcttcatgagtctactcgggagtatttccttttgctaatttttctgacatacatgagcttggtctgctgatgaggcagtaggctataggattctaggaaccgactgtgtacattgtaatcagagtgttcggagacgtgaagctgagtttgtaataatacacaagcagccttgctcagaaatgtactgggcaacaaattgtctgccacatactgtcaatgtaaaatgtatgaacaagttcctcactggccccgctataataacaacgaaccatggctactgatgcaaaataaaatgaatattgtttttttt

SEQ ID NO: 87120 - DNA, 1827 bp, Zea Mays
cgaacgcgtccttaaccgaaatggcggaatcggcctcgcagagggatagccggaggcccagaagcgtccggaaagacagcgcacgaagcaatctttccctttccccaagatgggattcggcttcgttcgtctcgccgcccgcgccgcggtttctcgccggggcatgacgccagcaacctccgcccgccgcgcgctcgccccacccgccgtgccggcggagccccgctgcgggccccactggctcgtggccgcccgcggccacgtgggccactcgcaccaccgcggcggggaggacgagggcgagacatccgagaggatctttcgtctgggactcgccgctgacgtcgtactcaccgcggggaaggccgtcacaggctatctctccggcagcaccgccatcgccgccgatgccgcccactccctctcggacataggcatggaaagtttgaaagtttaggagctcttggaatttcaagtatgctgttggttacttcagggagttatgtcttctgctcctgatataattggcaatacattgcatgcacaccatgaccatggtagcagtgggcatcatcatggaatagatttggaacatccagttcttgcattgagcatgacaactttagcaatatctatcaaagaagggctatactggataacaaaaagagctggggaaaaggaaggcagtggtctgatgaaagctaatgcatggcaccatcgtgcagatgctatttcatctgtcgttgccctagtaggggtaggtggttccattcttgggttgcctcttcttgatccactagctggacttgttgtctctggcatgattctgaaagctggtattaagactggatatgagagtgttctggaattagttgatgctgctgtggatccttcacttttagaaccaatcaaggaaactattttgagggttcacggtgtgaagggatgtcatcgattgaggggaagaaaagctgggacatcattatatcttgatgtgcatatagaggtatatccttttctgagtgttagtgcagcacatgatatcggtgaaactgttcgtcatcaaattcaaaaggagcacaatcaagttgctgaagttttcatacacatagatccctcgtacttagtaggcccgaccatggacctaaaaaggatcctgaaggactctgatggaacaaattcagaagctatcccacggcaacaaagtgcagaagccatcgtgtctaatattatttcatctcatttttcggagaaaatggcgctcgaacatctaatgctgcattacgtgcaaggaagagtgttgctccaggtccaagtttcaatgtctccagaaattttgattcgggatgcaatggaagtcgcgaagcaagccgaagaggagatactcagggctgatgccagcataagccaaatcagcttgcagctaagattgggccaacaaatcaagcaacttcagctagcatcgcaagaacgtcgctgatctacatgcaggagatcactgatccatttgctggctgcttcatgagtctactcgggagtatttccttttgctaatttttctgacatacatgagcttggtctgctgatgaggcagtaggctataggattctaggaaccgactgtgtacattgtaatcagagtgttcggagacgtgaagctgagtttgtaataatacacaagcagccttgctcagaaatgtactgggcaacaaattgtctgccacatactgtcaatgtaaaatgtatgaacaagttcctcactggccccgctataataacaacgaaccatggctactgatgcaaaataaaatgaatattgttttttttc

SEQ ID NO: 87121 - DNA, 800 bp, Zea Mays
ccaaatcaagctgtaatatcccttaacagttatttatacagctgtgttaagtctgcagctacagtgcctctaaagtgcttgattgcatgaattgcagatccctcgtacttagtaggcccgaccatggacctaaaaaggatcctgaaggactctgatggaacaaattcagaagctatcccacggcaacaaagtgcagaagccatcgtgtctaatattatttcatctcatttttcggagaaaatggcgctcgaacatctaatgctgcattacgtgcaaggaagagtgttgctccaggtccaagtttcaatgtctccagaaattttgattcgggatgcaatggaagtcgcgaagcaagccgaagaggagatactcagggctgatgccagcataagccaaatcagcttgcagctaagattgggccaacaaatcaagcaacttcagctagcatcgcaagaacgtcgctgatctacatgcaggagatcactgatccatttgctggctgcttcatgagtctactcgggagtatttccttttgctaatttttctgacatacatgagcttggtctgctgatgaggcagtaggctataggattctaggaaccgactgtgtacattgtaatcagagtgttcggagacgtgaagctgagtttgtaataatacacaagcagccttgctcagaaatgtactgggcaacaaattgtctgccacatactgtcaatgtaaaatgtatgaacaagttcctcactggccccgctataataacaacgaaccatggctactgatgcaaaataaaatgaata

SEQ ID NO: 87122 - DNA, 699 bp, Zea Mays
ccagaaacgaaaaacctgcgacacgaaccaaaaccctcctctccctcagtccctctcgagcctcgatccgcctccgccccacgcacccgacatcgctcgctacgcccacttcatcgccgcgggcgcaatgagcgcgggctggaggacgctgttgctgcgcatcggcgatagatgcgccgagtatgggggctccgccgaccacaaggaacacatcgaaacttgttatggtgtactatcccgagaatatgaacactccagagatgcaatatttgagtttctccttcaatgcacagaacaattgcctcacaagattcctttctttggagttttgattggtttgataaacttagaaaatgaagacttcagtaaggctattgtagataccacacaggctaacctagaggatgccttgcacaatgaaaatcgtgataggattaggatattgctgcgatttctcagtggtctgatgtgcagcaaagttgtagttccaagttcaatcatcgagacatttgagactctattatcatctgctgtaacaatattagatgatgagactggcaatccttcgtggcaacctcgtgcggacttctatgtttattgtattttggcttcacttccatgggctggtccagaattgtttgaggtaactctgagttacatatgtcactgactgtttagatgaatctccttgcgtcacac

SEQ ID NO: 87123 - DNA, 2970 bp, Zea Mays
ccagaaacgaaaaacctgcgacacgaaccaaaaccctcctctccctcagtccctctcgagcctcgatccgcctccgccccacgcacccgacatcgctcgctacgcccacttcatcgccgcgggcgcaatgagcgcgggctggaggacgctgttgctgcgcatcggcgatagatgcgccgagtatgggggctccgccgaccacaaggaacacatcgaaacttgttatggtgtactatcccgagaatatgaacactccagagatgcaatatttgagtttctccttcaatgcacagaacaattgcctcacaagattcctttctttggagttttgattggtttgataaacttagaaaatgaagacttcagtaaggctattgtagataccacacaggctaacctagaggatgccttgcacaatgaaaatcgtgataggattaggatattgctgcgatttctcagtggtctgatgtgcagcaaagttgtagttccaagttcaatcatcgagacatttgagactctattatcatctgctgtaacaatattagatgatgagactggcaatccttcgtggcaacctcgtgcggacttctatgtttattgtattttggcttcacttccatgggctggtccagaattgtttgagcaagttccagatgagttcgagagagttttatttggtatacagtcttacataagtatcaggaggcattttgatgatattgctttctctgtctttgagacagatgaaggccactctcctaacaaaaaggattttatggaagatctgtgggagcgcattcaagctctttcccgtaatggatggaaagttaaaagcgttccaaaaccccacttgccatttgaagctcagctggtggccgggaaatcacatcgcctttcccctataagttgccctccacccactccctcgcagtcatcttctgaaatgttaaaaggtcaggagaaacatgaagccgatatgaagtatcctcagagacttcgtagactacatatcttcccaatgaataaagctgagaacatgcagcctgtagatcgttttgttgtggaagaatgcattttggatgtgctacttttcttcaatggatgtcggaaagaatgtgcattttatctggtcagcttgcctgtgtcttatcgctatgaatacctgatggcggaaaccatattttcacagctactattgttgccgaatccaccattcaagccaatttactatacactggttatcattgatctttgcaaggcattaccaggtgcattcccttcagttgtggtaggagcagtgcatgctctttttgacagaattagtaacatggatatggagtgccgcaccagacttatactatggttttcacaccacttgtcaaactttcaattcatttggccttggcaggagtggtcttatgtcaaggacctcccaaaatgggctccacaacgggtttttgtccaggaagtactggaaagggaagttcgcttgtcgtactttgaaaaaatcaagcagagtatcgaggatgctgctgagttagaagaactgctacccccaaaagctgggcctaatttcaaattccatagcgatgaaagcaacgaaagcactgatggcctgaagttatccaaggaacttattggcttgattagaggaaagaagtctacatatgatattattttatgggttgaggaacaaataattccaaaaaatggtactgaatttgcacttgatgttgttagccagacgcttcttgacatgggttcaaaaagtttcacccatcttgtcactattttggagagatataataagataatctctaagctatgtccaaatgaggaaatgcagctactgttaatgaatggagtcagtgcttattggaagaacagtacccagatgactgctatagctattgacagaatgatgggttatcgcctgatatccaatttggctatagtcaaatgggttttttctcctgccaatgttgagcaatttcatgtttctgatcgaccatgggagattcttagaaatgctgttagtaaaacatacaatcggatcagtgacctccgcaaagaaattcaatcactcaagaagggtcttcaagttgctaaagaggctagtgcaaaaaacagaaaggagctggaggaggccaaatcagtgcttgagattgtagaggggcaacctgcaccagctgaaagaccaggtaggataaggcgactagaatcacatgtcaaaaatgcagaggatgaggaaagaactcttgaagaatctttagaagcgaagggagttctccttgctcgggctcatgaggaaagcaaggacttgcttaagctactctttaagagctttgttgacgtgctcactgaacgtttgccgcctgtctctgttgatggggaaattcctaatctgcgcagtggagatcaaaatgtaaattttgcagctcaaaattctgaagcagcaacaatggagattgacaatgaaaatggagcagataataatagtgaaccgaatgagcgaaacacaaaaaatgcatataatgttggagagcttgagcagtggtgtctctgtacactgggttatctcaagtcattttcccgccaatatgcaagtgagatttggtcaaacatagcaatgttggatgaggtcttcgttggggatgttcacccacttatccgaaaagctgctttctctggtttgcgcagatttaccaatgaagggtctcatccttgaatttgacaccatacccatattctttatagaactgagtgtattgtacctgtatgatagaggacaacttttctccttgtttaactaatcaaataggcataaacatttttccttggtttcgtatgcctttttttctgttcccttgcttctcggccactaaatgaaaatttttaccaggtaactaagttaatgttcttttctgaagtaacatcagaatatgcatggttcagtgttaatttaaccta

SEQ ID NO: 87124 - DNA, 326 bp, Zea Mays
ggattcatacaatatttgatgtatatgtattatatatgtatctagattcattactatccatttgaatatggtcacaaaactaaggtgctaaaacgaacaatatattgagactgagcgcgtactagttttacagaacttctagagatgctcttatcatgcacattagagcaaatcagtttgaaagaaatctttcactataagttgtgtaaaaggggcggaaagggtaaaaacatgcttcccgttagactctccagcgccttacccattcacatacccatattcaaacttcactctgtgaacaatgcagtctacaatgcaaaaagaat

SEQ ID NO: 87125 - DNA, 1406 bp, Zea Mays
cgactgccgtcccggcatcctgttgttgcccatctcatcgcccgcggccggccgcccagtgccgcacaaccaccatatctccctcacagtcacagcctcactccatgacgctcgttgcctgccagccagcctaatctataagctcatcgccgtcgaggcagtgcccagctgctctcttctatttctacaagcggtcaggtagtattattagtatgttgtatggctaatggctaatggctaatggccgatggcctgcgagacaacaccaactgcgccgagctgccgcagacaacaccaactgcacactgctgcataggaggtcaggagaaggcgctccagcgcagcacggcagcagggatttctggacggatctgattgaataaaccgtgaaggagatgccctggaatagattcatgcccttcctttcaaaatgttgtacttctaccgttcagacatcttcatcatattcatctttttcctcgtccttctccccgatacaaccatggttatttgtgggtcttggcaaccctggtgagaagtatcaatccaccaggcacaacgtgggttttgatatgatagatgcatttgcgcaatcccagggtatacccctgactacacattacttcaaagcactctttggtgaagggatggttgatggagtccctgttcttcttgccaagccccagacttatatgaatctcagtggagaatctgtcggcccacttgctgcctattataaactgccacttaatcgtgtcctagtggcgtttgatgacatggacttgccatgtggagttctccgtctacagccaaaaggaggttctggacgacacaatggatcgattcagccgtgagagagggtgtcgatattctgaagatggtggctgcgaggggtttgacagaggcggcaaaactgacaaatgcggaccagaagtataagcatctgagatcacatggtatccagactaacgatgactagacaaagcttactaggggggctactcttttcagcacatctctcgatattcagactaaagacgaaactcgttttatggcctgttgagaaacaggcgttcgatgagcccctttagaccgtcgctgaacgtgaacgcgtccttgttgtcaccgtacatcaacggcatgctggcggttatgtcggcaactcgctgcactgctggaagtagtttgctgttctcaaagcgtgctccgtttatagttttccatgcatcttcaatcagggagcttatctgtgcaaaggcaacctcagctgtgacgccatgctcactgatgtagcattcgaccgagctgtccacgtcgtttttgttctttccacgctgcgaaagaacacatccatttatttatttatttattactgggcaacaatccaaaggacaagaatacttaat

SEQ ID NO: 87126 - DNA, 1550 bp, Zea Mays
cgactgccgtcccggcatcctgttgttgcccatctcatcgcccgcggccggccgcccagtgccgcacaaccaccatatctccctcacagtcacagcctcactccatgacgctcgttgcctgccagccagcctaatctataagctcatcgccgtcgaggcagtgcccagctgctctcttctatttctacaagcggtcaggtagtattattagtatgttgtatggctaatggctaatggctaatggccgatggcctgcgagacaacaccaactgcgccgagctgccgcagacaacaccaactgcacactgctgcataggaggtcaggagaaggcgctccagcgcagcacggcagcagggatttctggacggatctgattgaataaaccgtgaaggagatgccctggaatagattcatgcccttcctttcaaaatgttgtacttctaccgttcagacatcttcatcatattcatctttttcctcgtccttctccccgatacaaccatggttatttgtgggtcttggcaaccctggtgagaagtatcaatccaccaggcacaacgtgggttttgatatgatagatgcatttgcgcaatcccagggtatacccctgactacacattacttcaaagcactctttggtgaagggatggttgatggagtccctgttcttcttgccaagccccagacttatatgaatctcagtggagaatctgtcggcccacttgctgcctattataaactgccacttaatcgtgtcctagtggcgtttgatgacatggacttgccatgtggagttctccgtctacagccaaaaggaggttctggacgacacaatggtctatcaggttgaagagtgttatataccactttcgtaagaatcgagaattttgccgattaaggattggaattggacggccagctggccagatggatcctaaagcctttgttcttcagaagttcaataggactggtcgtgaacggatcgattcagccgtgagagagggtgtcgatattctgaagatggtggctgcgaggggtttgacagaggcggcaaaactgacaaatgcggaccagaagtataagcatctgagatcacatggtatccagactaacgatgactagacaaagcttactaggggggctactcttttcagcacatctctcgatattcagactaaagacgaaactcgttttatggcctgttgagaaacaggcgttcgatgagcccctttagaccgtcgctgaacgtgaacgcgtccttgttgtcaccgtacatcaacggcatgctggcggttatgtcggcaactcgctgcactgctggaagtagtttgctgttctcaaagcgtgctccgtttatagttttccatgcatcttcaatcagggagcttatctgtgcaaaggcaacctcagctgtgacgccatgctcactgatgtagcattcgaccgagctgtccacgtcgtttttgttctttccacgctgcgaaagaacacatccatttatttatttatttattactgggcaacaatccaaaggacaagaatacttaat

SEQ ID NO: 87127 - DNA, 1542 bp, Zea Mays
cgactgccgtcccggcatcctgttgttgcccatctcatcgcccgcggccggccgcccagtgccgcacaaccaccatatctccctcacagtcacagcctcactccatgacgctcgttgcctgccagccagcctaatctataagctcatcgccgtcgaggcagtgcccagctgctctcttctatttctacaagcggtcaggtagtattattagtatgttgtatggctaatggctaatggctaatggccgatggcctgcgagacaacaccaactgcgccgagctgccgcagacaacaccaactgcacactgctgcataggaggtcaggagaaggcgctccagcgcagcacggcagcagggatttctggacggatctgattgaataaaccgtgaaggagatgccctggaatagattcatgcccttcctttcaaaatgttgtacttctaccgttcagacatcttcatcatattcatctttttcctcgtccttctccccgatacaaccatggttatttgtgggtcttggcaaccctggtgagaagtatcaatccaccaggcacaacgtgggttttgatatgatagatgcatttgcgcaatcccagggtatacccctgactacacattacttcaaagcactctttggtgaagggatggttgatggagtccctgttcttcttgccaagccccagacttatatgaatctcagtggagaatctgtcggcccacttgctgcctattataaactgccacttaatcgtgtcctagtggcgtttgatgacatggacttgccatgtggagttctccgtctacagccaaaaggaggttctggacgacacaatgggttgaagagtgttatataccactttcgtaagaatcgagaattttgccgattaaggattggaattggacggccagctggccagatggatcctaaagcctttgttcttcagaagttcaataggactggtcgtgaacggatcgattcagccgtgagagagggtgtcgatattctgaagatggtggctgcgaggggtttgacagaggcggcaaaactgacaaatgcggaccagaagtataagcatctgagatcacatggtatccagactaacgatgactagacaaagcttactaggggggctactcttttcagcacatctctcgatattcagactaaagacgaaactcgttttatggcctgttgagaaacaggcgttcgatgagcccctttagaccgtcgctgaacgtgaacgcgtccttgttgtcaccgtacatcaacggcatgctggcggttatgtcggcaactcgctgcactgctggaagtagtttgctgttctcaaagcgtgctccgtttatagttttccatgcatcttcaatcagggagcttatctgtgcaaaggcaacctcagctgtgacgccatgctcactgatgtagcattcgaccgagctgtccacgtcgtttttgttctttccacgctgcgaaagaacacatccatttatttatttatttattactgggcaacaatccaaaggacaagaatacttaat

SEQ ID NO: 87128 - DNA, 201 bp, Zea Mays
ggtagcctgatggtttccctcaaagcatctacagtttgcccagctcgagctagcctataaatatggagaatagcttcaagctgtctcagcacagtttgttgctcagaaatgaggtccttctcttgaatgctgcaagcaaaagagtatctagctgtctccaaaatttcattgccagaatgaattagggcagcagcacgactc

SEQ ID NO: 87129 - DNA, 2490 bp, Zea Mays
ccagacaagtgcacctgctctcttcccagatcccgtccccgtcgaagtcgaaccatggcgaagctgctgctgctccgtggcttttgttctctccttcccctacggccctaccctcccgagcaacgaccattgcgaccccttctcttcgtccttgtcccctctccgaaagcgaccacaccgcatgacctccctccctgcgccgctgcgcgcgtaggtactacgacctcgtcccgagtgcctttgccaactgccatcacgtcgagaaacaaaaagagcttctcgcggcaaagatcacgagtcggcgccgtgccgtgcctgtgcggggtcaccgagtcatcggtcacgtacacccgatggccgatgcggtgacaaggtaaccgacgagatgacgggacacctgcccagtccagcgcaaagcttcgcgccttcgcggggagtcgccgagcagacaagtagcagcacacggtagacggtacaggcacagggggcggggcgagcctctggctctccgctctcgttcttccgtccttcgtcgacgtcgtgcgttgcgcctccctttcaggctgtccctttcagcatttacggcgctcacgtttctcgctccagtccagtctccaccttcttatcccccaagcaaagccggtcggggcaaacggaagcgaaacagggcccgtctcttccaccactccgcagaggcgcagactaccgtctcatcctactactctagcccagtctcacgatccagcactcagtcactagcgcttgtcgtcgccagtacaacaacggcatgggtgagggtgacgacgaccggcgggacgagttgttgggcgcggggcgggaccatgaaccagagccggcggacgcggaggaggccaagaaacccgcacccggcgaggcggaggccggcaacggcgccggcgcggaggcggcgacctgcgactactgcgggaccgcggcggcggcggtctactgccgcgccgactccgccaggctctgcctgccgtgcgaccgcctcgtgcacggcgccaacggggtctgctcccgccacgcccgcgccccgctctgcgccggctgctgcgccgccggggccgtcttccgccgcgcctcgacctccgccttcctctgctccaactgcgacttcgggaggcaccgggatggcggtgacccgccgctccacgaccgctgcgccgtgcagccctattccgggtgccctccggcgagcgacctcgccgcgctcctcgcggtgcccctcttcgacaagccggccgccgaagatggtgcctggtggaacatctgggaggagccccaggtgctgagtttggaggatctcatcgtgcccaccaccccttgccatggattcgaacccctcctaacgccgccctcgcccaagaaccggagcatctcgccggaccggaaggtgaacgaggagattcttcggcagctgggggagctcgcagagtctgatggcggtatgcaggcatcagcaggtcgtgaggaggcagagcaagctggtggagaccagttcccttcctgggcgtcaccacagtatgccactggacatggcaattttggaacagaggacaaccatgagaatggcagatggaacaacagtgaatatcatgatctaaatgatgcatgtaagctcgaggtcacatatgatcaggctccagtcaactcggctgaaccgtgcttgtcttcatttgctccactgtcggaaatctgccccagcatgagcaatggtagcagtaaggaagataaccaccaggctaatcctggcattggcatgccaatgcaaggtctacccaaaaggagtggatttgatgttgtcccatgccctgaccgtgactcggtcatttcgcgctataaagcgaagaggaagacaagaagatttgacaggcaggtccggtatgagtcgcgcaaagttcgtgctgatggcaggctcaggatcaaggggcgttttgcaaaggcaaaccagacatgaacctaaatctgcagttctgcactatcctaagcatctttcctcaagaaatatgctaagtatcttccaacacgaagaagaaaactggtcaggggcgatgataatgcaaaaatgtgccagaattttgtttgccttcagttcaatagctgataaccatagctccatatacagttgaattgaatgacgtgtgtatatattgctgtcatgtgactagtagctacattgctttgagagatcaaaacctgtatatgcacctacacatgtgattttgccatgacggacataataatagaaccactgcgtttgattgatgtagttattaacttattttgcaatttgatttccaatgcaaaagcttctttcactgatgagcaataaacaccgttgtgatgcaagaactgagaaatgatgtttgctagatattttataggatgaggaattgtaatcagatagatgttttgattctgaaaatatactagaatctactttaaatatgtattgtatttatttag

SEQ ID NO: 87130 - DNA, 1369 bp, Zea Mays
ctccgcagaagaagccctagcttccgccgccgccgccgtttcttaccttggtctgctgggtgctgctgcggcttctttcaacctccagagacttccgacctccatctctcaactaggatcgctcggggcactgtttcgttcctttctttgtttccccgtcgatccgttttcattgaggtttgattcctcccgatttttcgcttccctgtcgatacgtttcaacatctccggggagttggatagattttctcgtgtccccccctctcgaacgcctatttttctcgtgtccatattctaaacagttaagcgactatggattttgctggattggtttgatgtgcgggttggctttcgatgtcgttgccggtgatgacagcgtatggcatgagtctcggtaactattttgcgcttcgggtaatcttttgcccgagttatcggcgactaagattaatgtgccaaaatgctaatctgaggccaaacacatactgcattttttaatgcaacaaacatatttttgtactcggctggattctcattgctatatagtttacgcaagtctttgcagcatcattcatttgagggcgatccacctcataaaggttgatgtgttcgtattctggatggattgtgtcgatgtcatatctttttttaagaatatctgaggatttttgatacaggaatgctttgaatctggatttttgtaccgtacaagcgttcaaaactcggggacggggccaaggctagaataatttaagtccctgggtagcctaagttcctcctttactgcagaaactctgaaaggatgagtttacatgaaaactaaaaaaatgcttttgtgaacttaacttcattgaaatgctataattagttcctcgcagtcaagaactttttagaaaatctttaaaacatacacctcaattaaatattctctaatgatgtacctcagacaaacatgttcaagggctttattcccctttaacaaacaaacatgctataaggtggtctccagtttctcgatctgattcactattttaaactgtataatctacattacaatatagtgttttgcaggatcatgtatactctttgctgatcagattttaggggtgttatgaagacttgtgtcttagggtgttatgatgattacatttacttgaggcagttcttccctcaagcactaaccacatagatgtttggagaccttcgctgctccttaagtcctaaaagggccatgcctcatgaaaccgattgggctttgaactctttggggttcgaagcccatgagaataagggacatggtctctttttgttggatgtaccttggccgttataacgggtttttaataatcgaatgctttgtttcatagtc

SEQ ID NO: 87131 - DNA, 919 bp, Zea Mays
gacgggcgagagcggggtggcgtggcagcgcgcatcattcatagggaatcacgagcgaggcggagaaaaatctgcgcggtttcgtaagggacgtggcgtggctgactcccgaatcctcgcgcgcgcccggccctcggctggcccaggcgcaggcgcaggccctcgaggcccggggccggggcgagcggctatataagaaatgggggaagcgccggagcggtttgcgaaacagaagcacggcaatctcgatctcgttcgttcccctgagcggcagtcagtgcgagcgagcgcgcacacagacaactcatcctctcccctctctctctcacacacacacatccatcatcccatccctgtgacgggcgatccgagggcctaccgacgatggtgtccgccgtgctccggaccatcctcgtgacgggcggcgccgggtacatcggcagccacacggtgctgcagctgctgcagcagggcttccgcgtcgtcgtcgtcgacaacctcgacaacgcctccgaggccgccctcgcccgcgtcgccgagctcgccgggcacgacggcgccaacctcgtcttccacaaggttgaccttcgcgacaggcacgcgttggtggacatcttctcgtcgcacaggtaaccgacaacgcccaattcccaagagatggaaccaatcgcattgtttgccaattgccatagtacatttgtatgggtggcctctaagggcatgtacagtggtgtttaatgtggaggctcttaaggtgtttaagggggttatttgcaaaaaaatcttagagccgtctctccgtgaagagacgcctctggctcgtaaaccaagtagcaacagacgcctcacttcccactgtacgaatttgtcgtctgttctatcgatctgatgctatacaaatacatttaattctgtattt

SEQ ID NO: 87132 - DNA, 1101 bp, Zea Mays
gacgggcgagagcggggtggcgtggcagcgcgcatcattcatagggaatcacgagcgaggcggagaaaaatctgcgcggtttcgtaagggacgtggcgtggctgactcccgaatcctcgcgcgcgcccggccctcggctggcccaggcgcaggcgcaggccctcgaggcccggggccggggcgagcggctatataagaaatgggggaagcgccggagcggtttgcgaaacagaagcacggcaatctcgatctcgttcgttcccctgagcggcagtcagtgcgagcgagcgcgcacacagacaactcatcctctcccctctctctctcacacacacacatccatcatcccatccctgtgacgggcgatccgagggcctaccgacgatggtgtccgccgtgctccggaccatcctcgtgacgggcggcgccgggtacatcggcagccacacggtgctgcagctgctgcagcagggcttccgcgtcgtcgtcgtcgacaacctcgacaacgcctccgaggccgccctcgcccgcgtcgccgagctcgccgggcacgacggcgccaacctcgtcttccacaaggttgaccttcgcgacaggcacgcgttggtggacatcttctcgtcgcacaggttcgaggctgtcattcactttgctgggctcaaggctgttggggagagcgtgcacaagcccctactttactacgacaacaacctggtcggcaccatcaccctcctggaggtgatggctgcgaacggctgcaagaagctggtgttctcgtcatctgcaactgtctatgggtggcccaaggaagtaccctgcaccgaagaattcccgctctgcgccaccaatccctatgggcggacaaaggttcctcttctgtcttcaaagattctagcacagaccaatccggccttttgttgttcaaatgatcatgacacaattagttacataaaaaaataaaagtaatatgatgatgacgccgtgctctgcagcttgtgattgaagacatctgccgcgacgtccaccgctccgaccccgactggaagatcatactgctcaggtacttcaaccccgttggcgctcatccaagcgggtacatcg

SEQ ID NO: 87133 - DNA, 1811 bp, Zea Mays
gacgggcgagagcggggtggcgtggcagcgcgcatcattcatagggaatcacgagcgaggcggagaaaaatctgcgcggtttcgtaagggacgtggcgtggctgactcccgaatcctcgcgcgcgcccggccctcggctggcccaggcgcaggcgcaggccctcgaggcccggggccggggcgagcggctatataagaaatgggggaagcgccggagcggtttgcgaaacagaagcacggcaatctcgatctcgttcgttcccctgagcggcagtcagtgcgagcgagcgcgcacacagacaactcatcctctcccctctctctctcacacacacacatccatcatcccatccctgtgacgggcgatccgagggcctaccgacgatggtgtccgccgtgctccggaccatcctcgtgacgggcggcgccgggtacatcggcagccacacggtgctgcagctgctgcagcagggcttccgcgtcgtcgtcgtcgacaacctcgacaacgcctccgaggccgccctcgcccgcgtcgccgagctcgccgggcacgacggcgccaacctcgtcttccacaaggttgaccttcgcgacaggcacgcgttggtggacatcttctcgtcgcacaggttcgaggctgtcattcactttgctgggctcaaggctgttggggagagcgtgcacaagcccctactttactacgacaacaacctggtcggcaccatcaccctcctggaggtgatggctgcgaacggctgcaagaagctggtgttctcgtcatctgcaactgtctatgggtggcccaaggaagtaccctgcaccgaagaattcccgctctgcgccaccaatccctatgggcggacaaagcttgtgattgaagacatctgccgcgacgtccaccgctccgaccccgactggaagatcatactgctcaggtacttcaaccccgttggcgctcatccaagcgggtacatcggcgaagacccctgcggtgtcccgaacaacctgatgccctacgtgcagcaagtcgctgttgggaggttacctcacctcacggtctacgggacggactacagcaccaaggatgggactggggtgcgtgattacatccacgttgtcgacctggctgacggccacatagcagccctgaggaagctctacgaagactccgacaaaataggctgtgaagtgtacaacttggggactggaaaggggacgtcggtgttggaaatggtggctgcattcgagaaggcttctgggaagaaaatccctctggtgttcgctgggcgaagacccggagacgcagagatcgtctacgccgcaactgccaaggcagagaaggagctcaaatggaaggccaagtacgggatcgaggagatgtgcagagatctgtggaactgggcgagcaagaacccgtacgggtacgctgggtcacgcgacaacagcaaatgaaccacccatccatgcatcccatcctgcagtaggagcaagcagcagccttatagcctatgctaccataattagtaactcatcaatcatgcatacataatcagccagtcatctgattaggggtactgcgatgggcctcgcttcttcagtgtatagagggaggaggaggggggtcatcttgatattcttttttttatcattcccgaatgattattattagtagccagttcgatattactccatggttggttgctagagaaggaataagctccattcatatacctaactaaagatatatatatacatgcattcactgtgactgtctctgtctgctactaatatgatactgtacttgactgttg

SEQ ID NO: 87134 - DNA, 1305 bp, Zea Mays
cgcgaaagccgcgggcgccgcccgggtcttcgctggcgtgccctctagtctagtggatggaaactggaaatgggttgaccttcgcgacaggcacgcgttggtggacatcttctcgtcgcacaggttcgaggctgtcattcactttgctgggctcaaggctgttggggagagcgtgcacaagcccctactttactacgacaacaacctggtcggcaccatcaccctcctggaggtgatggctgcgaacggctgcaagaagctggtgttctcgtcatctgcaactgtctatgggtggcccaaggaagtaccctgcaccgaagaattcccgctctgcgccaccaatccctatgggcggacaaagcttgtgattgaagacatctgccgcgacgtccaccgctccgaccccgactggaagatcatactgctcaggtacttcaaccccgttggcgctcatccaagcgggtacatcggcgaagacccctgcggtgtcccgaacaacctgatgccctacgtgcagcaagtcgctgttgggaggttacctcacctcacggtctacgggacggactacagcaccaaggatgggactggggtgcgtgattacatccacgttgtcgacctggctgacggccacatagcagccctgaggaagctctacgaagactccgacaaaataggctgtgaagtgtacaacttggggactggaaaggggacgtcggtgttggaaatggtggctgcattcgagaaggcttctgggaagaaaatccctctggtgttcgctgggcgaagacccggagacgcagagatcgtctacgccgcaactgccaaggcagagaaggagctcaaatggaaggccaagtacgggatcgaggagatgtgcagagatctgtggaactgggcgagcaagaacccgtacgggtacgctgggtcacgcgacaacagcaaatgaaccacccatccatgcatcccatcctgcagtaggagcaagcagcagccttatagcctatgctaccataattagtaactcatcaatcatgcatacataatcagccagtcatctgattaggggtactgcgatgggcctcgcttcttcagtgtatagagggaggaggaggggggtcatcttgatattcttttttttatcattcccgaatgattattattagtagccagttcgatattactccatggttggttgctagagaaggaataagctccattcatatacctaactaaagatatatatatacatgcattcactgtgactgtctctgtctgctactaatatgatactgtacttgactgttg

SEQ ID NO: 87135 - DNA, 1330 bp, Zea Mays
ataaataagtaaatacaccatggaacgcgtcgtcgtgccggcctcgcctcgttatgctctgccgcctcctctgcctctgcctctgcccagatccacaggttgaccttcgcgacaggcacgcgttggtggacatcttctcgtcgcacaggttcgaggctgtcattcactttgctgggctcaaggctgttggggagagcgtgcacaagcccctactttactacgacaacaacctggtcggcaccatcaccctcctggaggtgatggctgcgaacggctgcaagaagctggtgttctcgtcatctgcaactgtctatgggtggcccaaggaagtaccctgcaccgaagaattcccgctctgcgccaccaatccctatgggcggacaaagcttgtgattgaagacatctgccgcgacgtccaccgctccgaccccgactggaagatcatactgctcaggtacttcaaccccgttggcgctcatccaagcgggtacatcggcgaagacccctgcggtgtcccgaacaacctgatgccctacgtgcagcaagtcgctgttgggaggttacctcacctcacggtctacgggacggactacagcaccaaggatgggactggggtgcgtgattacatccacgttgtcgacctggctgacggccacatagcagccctgaggaagctctacgaagactccgacaaaataggctgtgaagtgtacaacttggggactggaaaggggacgtcggtgttggaaatggtggctgcattcgagaaggcttctgggaagaaaatccctctggtgttcgctgggcgaagacccggagacgcagagatcgtctacgccgcaactgccaaggcagagaaggagctcaaatggaaggccaagtacgggatcgaggagatgtgcagagatctgtggaactgggcgagcaagaacccgtacgggtacgctgggtcacgcgacaacagcaaatgaaccacccatccatgcatcccatcctgcagtaggagcaagcagcagccttatagcctatgctaccataattagtaactcatcaatcatgcatacataatcagccagtcatctgattaggggtactgcgatgggcctcgcttcttcagtgtatagagggaggaggaggggggtcatcttgatattcttttttttatcattcccgaatgattattattagtagccagttcgatattactccatggttggttgctagagaaggaataagctccattcatatacctaactaaagatatatatatacatgcattcactgtgactgtctctgtctgctactaatatgatactgtacttgactgttg

SEQ ID NO: 87136 - DNA, 1309 bp, Zea Mays
gttgctcgtgtctcgggccatccacccgtctagcgtttctgttcactagtgctagtgtgctgcgactgcgatgctatttttctgtggctagcagctaggagctgcaaaaaatggcgatccttgctcccaacagatggattgttcttgtttaatagtacctcagcactcgtttcagcttatataatataatcctcgcatgaatacagcagggggcctggtctctgcaaaagctaactactgaacatgtttccttgtcattacagctggtgttctcgtcatctgcaactgtctatgggtggcccaaggaagtaccctgcaccgaagaattcccgctctgcgccaccaatccctatgggcggacaaagcttgtgattgaagacatctgccgcgacgtccaccgctccgaccccgactggaagatcatactgctcaggtacttcaaccccgttggcgctcatccaagcgggtacatcggcgaagacccctgcggtgtcccgaacaacctgatgccctacgtgcagcaagtcgctgttgggaggttacctcacctcacggtctacgggacggactacagcaccaaggatgggactggggtgcgtgattacatccacgttgtcgacctggctgacggccacatagcagccctgaggaagctctacgaagactccgacaaaataggctgtgaagtgtacaacttggggactggaaaggggacgtcggtgttggaaatggtggctgcattcgagaaggcttctgggaagaaaatccctctggtgttcgctgggcgaagacccggagacgcagagatcgtctacgccgcaactgccaaggcagagaaggagctcaaatggaaggccaagtacgggatcgaggagatgtgcagagatctgtggaactgggcgagcaagaacccgtacgggtacgctgggtcacgcgacaacagcaaatgaaccacccatccatgcatcccatcctgcagtaggagcaagcagcagccttatagcctatgctaccataattagtaactcatcaatcatgcatacataatcagccagtcatctgattaggggtactgcgatgggcctcgcttcttcagtgtatagagggaggaggaggggggtcatcttgatattcttttttttatcattcccgaatgattattattagtagccagttcgatattactccatggttggttgctagagaaggaataagctccattcatatacctaactaaagatatatatatacatgcattcactgtgactgtctctgtctgctactaatatgatactgtacttgactgttg

SEQ ID NO: 87137 - DNA, 171 bp, Zea Mays
agtgtttgcgtgaaaatgattgctgccggtgccgaacatactgctgcagtaactgaagacggtgacctctacggatggggttggggtcgatatggaaacttaggtcttggtgaccgtaatgaccgtttgcttcctgaaaaagtatcttctgtggaggtaaattatctaatt

SEQ ID NO: 87138 - DNA, 961 bp, Zea Mays
atgcataatgatcacccatggttacagaacattaagaaggctccaaatgtcaatttgggcgaaactgttaaggccagacttcaacaattctctgtgatgaacaagttcaagaagcatgcacttagggtcatagctgagcatctttcagtagaagaggctgctgacataaaggatatgtttgagaagatggatcttaacaaggatcaaatgcttaatttcgatgagctgaagcttggtctgcataaatttggtcaccaaatccctgatgcagatgttcaaatactaatggaagctgcggatgctgatggaaacgggtccttggattatggagaatttgttacactatctgttcatctaagaaagattggaaatgatgagcatcttcataaggcatttgcatactttgaccggaatcagagtggttatattgaaatcgatgaactccgtgagtcattagctgatgatcttggacagaatcatgaagaggttatcaatgcaattatccgtgacgtagacaccgataaggatggcaagataagctacgatgagtttgcagcgatgatgaaggccggaacagactggaggaaagcgtcgagacagtattcgagagagcggttcaccagcctgagccttaagctgcaaaaggatggatcgttgcagatggagagtacgcagtagtcgataacacccataggcaagttgtgaattacagaaggaaaccctgtgtagattttctggttgtttgttgacagctcttctgctcgtcctgatcttctattgctttctattcttcactcgtctgtttgaagcattggggggattgttgatgccgtgattgtatttagactgcatgatccatgcctcactgatttccacgccttagggcaaagtgtactgtacaagagaaagaggggaaaatgattaggagtttgtacacatttcttaacttctgtggacccat

SEQ ID NO: 87139 - DNA, 1900 bp, Zea Mays
cgcgccccgacgaattgggagggaaaatacactacgaccaccaccaagcgaacgaaccaacgatcgacgctccccgaccagcgtggtgaacaggacagcagtcagcagccaatggaggcagcactgacgcagcaggcggcagcgacggcgacggcgacaccgacgaggtggcggtgcgtgggggacgcgtcgctggctagccatggccagggccagcagcgagcaggcgccgtccggctcggagcggcgcggcgtgcggtcagcggggctgtccgggctagcagcagcaggcatctgggccccgtgcgggcgctcgtctccgaggccgccggcggcgagcgggcggcggagggcgagggaatggacaccgcggtgaggctgttcgtgggcctccccgcggacgcggtggtctccgacggccgcggcgtgggccgccccagggccgtctcggcggcgctgcgcgcgctcaagctgctcggcgtcgacggcgtggagctgccggtgtcctgggccgtcgcgcagcccgggcccgggggctggttcgagtgggccgggtaccgcgccgtcgccgccatggtccgcgacgcggggctcgacctccgcgtctcgctccgcaccgacggcgacgcgctccccggatgggtggccgacgcggcggccgccgaccccgacgtcctcttcaccgaccgctccggccaccgccgcatgggctgcctctcctttgccgtcgacgagctccccgtgctcgtcggcaagtcgccgctccaggcctacgaggccttcttccgcagctttgctgaagagttcgatgacttgttcgggtcaacgatcacggatgtgactatcagcctgggtcctaacggcgagctacagtacccgtcatacccgccggggaaccagggttcccgtggcttcgacggcgtcggcgagttccagtgctacgacaagtacatgctggcacggctgaagcgtcacgccgagtcgtcggggcagccactgtggggcctgtcgggtccacacgacgggccgcggtacgacgacgagtcgccggagtcgtccgccttcttcagagagctggggggctcgtggaagtcggcctacggggagttcttcctgtcctggtacaccggggagctcctggcgcacggcgaccgtgtcctggccgcggcgtccagcgcgttccgcggcaagcccgtggagctgtccgccaaggtgccactcctgcgagggccggggacgggcccgagccccgcggacgccaccgcgggattccacggcgggtacggcccggtcgccgagatgttcgcgcgccacggttgcgcggtgatcgcggccggcgtggaggcgcggccggacgccacggcggaggagcgcctggcccaggtcaaggccgcctgcacggagcacggcgtgcatctcgcggcggagagcgcgcctctcgccgtggcgcgcggcagcgacggcgacggccccacgcgcgtcgtctggctgtccgccgggcgcacccggccgtgccagttcacgtaccagcggatgggcgcagagttcttctcgccgggccactggccgctgttcgtgcagttcgtgcgcgcgctggagtgccccgaggaggcccatgaggacgacctgccagccagcgctgacggcggcgagcggctcactgtgccgtccgcggccgcggcggccccaaaggaccaagcgacaagggaggtgcaaaccgtgtgaatggcaaatcatttgtcgcgcattcttaatgtacagtacttcctccgttgtttagttcaaaataaacgggcgggtgataaatattcgagaatggagatggtatatagagcatctctaacctttatgtaaaaagttcctaaatcttagtttaatgagttattagaaaaaaagacaa

SEQ ID NO: 87140 - DNA, 2720 bp, Zea Mays
cgcgccccgacgaattgggagggaaaatacactacgaccaccaccaagcgaacgaaccaacgatcgacgctccccgaccagcgtggtgaacaggacagcagtcagcagccaatggaggcagcactgacgcagcaggcggcagcgacggcgacggcgacaccgacgaggtggcggtgcgtgggggacgcgtcgctggctagccatggccagggccagcagcgagcaggcgccgtccggctcggagcggcgcggcgtgcggtcagcggggctgtccgggctagcagcagcaggcatctgggccccgtgcgggcgctcgtctccgaggccgccggcggcgagcgggcggcggagggcgagggaatggacaccgcggtgaggctgttcgtgggcctccccgcggacgcggtggtctccgacggccgcggcgtgggccgccccagggccgtctcggcggcgctgcgcgcgctcaagctgctcggcgtcgacggcgtggagctgccggtgtcctgggccgtcgcgcagcccgggcccgggggctggttcgagtgggccgggtaccgcgccgtcgccgccatggtccgcgacgcggggctcgacctccgcgtctcgctccgcaccgacggcgacgcgctccccggatgggtggccgacgcggcggccgccgaccccgacgtcctcttcaccgaccgctccggccaccgccgcatgggctgcctctcctttgccgtcgacgagctccccgtgctcgtcggcaagtcgccgctccaggcctacgaggccttcttccgcagctttgctgaagagttcgatgacttgttcgggtcaacgatcacggatgtgactatcagcctgggtcctaacggcgagctacagtacccgtcatacccgccggggaaccagggttcccgtggcttcgacggcgtcggcgagttccagtgctacgacaagtacatgctggcacggctgaagcgtcacgccgagtcgtcggggcagccactgtggggcctgtcgggtccacacgacgggccgcggtacgacgacgagtcgccggagtcgtccgccttcttcagagagctggggggctcgtggaagtcggcctacggggagttcttcctgtcctggtacaccggggagctcctggcgcacggcgaccgtgtcctggccgcggcgtccagcgcgttccgcggcaagcccgtggagctgtccgccaaggtgccactcctgcgagggccggggacgggcccgagccccgcggacgccaccgcgggattccacggcgggtacggcccggtcgccgagatgttcgcgcgccacggttgcgcggtgatcgcggccggcgtggaggcgcggccggacgccacggcggaggagcgcctggcccaggtcaaggccgcctgcacggagcacggcgtgcatctcgcggcggagagcgcgcctctcgccgtggcgcgcggcagcgacggcgacggccccacgcgcgtcgtctggctgtccgccgggcgcacccggccgtgccagttcacgtaccagcggatgggcgcagagttcttctcgccgggccactggccgctgttcgtgcagttcgtgcgcgcgctggagtgccccgaggaggcccatgaggacgacctgccagccagcgctgacggcggcgagcggctcactgtgccgtccgcggccgcggcggccccaaaggaccaagcgacaagggaggtgcaaaccgtgtgaatggcaaatcatttgtcgcgcattcttaatgtacagtacttcctccgttgtttagttcaaaataaacgggcgggtgataaatattcgagaatggagatggtatatagagcatctctaacctttatgtaaaaagttcctaaatcttagtttaatgagttattagaaaaaaagacaagtctccaatagtaccctaaacgatattgctaaatttaagaagttgttatttatcttttcttgttcccgcatttggtaatcttagagcatttctaatagttatgtaaattgagcaccccaaattatagatttaagaagttgctaaaacactttaaggagtagaaaaatatatgtgctcaaatagttccctattttattggttttaatttttaaagttgcctacgccaacaaaaaataagcgagcatgctttctattttgattgagcttgcagtagaaatcaaatatcaacaaccttctctaatgtcttgagaggtcaataatttttaaagttgcctacgccaacaaaaaataagcgagcatgctttctattttgattgagcttgcagtagaaatcaaatatcaacaaccttctctaatgtcttgagaggtcaaagttatcgtggaagaccaaacgatcgcggcgatggcgtgaagacatcatatgatatgctctgacgatgcctcggtatacgaggttgtctagtcgtggcgtcatcaagacatctgggcactggagatggatttgtggtcaacaggacattaggacagtgcaaaatagtgacaaaaagtatgattttcacgatggatttagtaccaatgttgatttagggagtcccaacaaggttggtaaatgtaaagatgaaattgggttttgtagagagtttgtaaatttagtgaactggtttacataactgttggagaagagtttttctcgaaaacttgtaaaattcatatttagggacttgtttccataactaatggagatgctcttaaagggact

SEQ ID NO: 87141 - DNA, 189 bp, Zea Mays
atgtgtctgtgtacgcaccgagaatcacccaccagccgagctgacgccaccaaatctcacatcttagttatggtcgcccatgcagaaatccttctgtctgcaacaaggcacagatttgagctggagctaggcccaattcctcgccttggcgcctggaccaagcaagaatcaccgggtaccagactctag

SEQ ID NO: 87142 - DNA, 963 bp, Zea Mays
agagagaacctgctggtcgtcgaggaagcaacgcaacttgactgctctgtccggctgcgcctacaaatccagcacacaggcgcgcacggcgcatcccgctcctccacctcgtcgcagcccccaaggccccaactacccccagtctcggaagagaactatccagaagcgcaagactccaaagccgtcgccttcctatccatcccttcctcgccgcgggggtcgcctgagatcacataaacaatggtgaaggctgttgctgtgcttggtagcagcgatggtgtcaagggcaccatcttcttcacccaagagggagatggccctaccactgtcaccggaagtgtctctggcctcaagcctggcctccatgggttccatgtgcatgcacttggtgacaccaccaatggctgcatgtcaactggaccacactacaatcctgcgagcaaggaacatggagcaccagaagatgagaaccgccatgccggtgatcttggaaatgtgacagctggagcagatggtgttgcaaacattaatgttaccgacagccagatcccactgactgggccaaactcaatcattggcagagctgttgttgttcacgctgatcccgatgatcttggaaagggtggacacgagctcaggaagagcaccggaaacgctggcggccgtgttgcttgtgggatcatcggactccagggctgaactgaaacaaatggtcgttggacttcgggggcgcctgggagtgccgtcaccagcaggctagaataacatcccgaagacatcgtgaaataataataataagagcgcctgatatgtgatcagtggtgtactcgccattaagcacctgtggcaaccgatgagctgaactgtgttggactgttggctaaaatgctggttcgcctgagcatgtgtcacatgtctgtcggttttgatggcattccgaccgtttcgttgtgctttgcgctt

SEQ ID NO: 87143 - DNA, 855 bp, Zea Mays
tcgtcgaggaagcaacgcaacttgactgctctgtccggctgcgcctacaaatccagcacacaggcgcgcacggcgcatcccgctcctccacctcgtcgcagcccccaaggccccaactacccccagtctcggaagagaactatccagaagcgcaagactccaaagccgtcgccttcctatccatcccttcctcgccgcgggggtcgcctgagatcacataaacaatggtgaaggctgttgctgtgcttggtagcagcgatggtgtcaagggcaccatcttcttcacccaagagggagatggccctaccactgtcaccggaagtgtctctggcctcaagcctggcctccatgggttccatgtgcatgcacttggtgacaccaccaatggctgcatgtcaactggaccacactacaatcctgcgagcaaggaacatggagcaccagaagatgagaaccgccatgccggtgatcttggaaatgtgacagctggagcagatggtaaagatctctgcccttctttttctgatctgttctacatgcccatgtagtaactggttgctagtacttgggctaaggaagctgtgttacttctgtgatcctttaaccacagtccgtaattccattcacatgctgtgcatatgataacatactatcttgtcactgagtttgtttctctgctgccaggtgttgcaaacattaatgttaccgacagccagatcccactgactgggccaaactcaatcattggcagagctgttgttgttcacgctgatcccgatgatcttggaaagggtaatgatattatttgtgtccgcttttgtgtttttgtgtgtgttgaatgtggcggcgcttttc

SEQ ID NO: 87144 - DNA, 1546 bp, Zea Mays
tcgtcgaggaagcaacgcaacttgactgctctgtccggctgcgcctacaaatccagcacacaggcgcgcacggcgcatcccgctcctccacctcgtcgcagcccccaaggccccaactacccccagtctcggaagagaactatccagaagcgcaagactccaaagccgtcgccttcctatccatcccttcctcgccgcgggggtcgcctgagatcacataaacaatggtgaaggctgttgctgtgcttggtagcagcgatggtgtcaagggcaccatcttcttcacccaagagggagatggccctaccactgtcaccggaagtgtctctggcctcaagcctggcctccatgggttccatgtgcatgcacttggtgacaccaccaatggctgcatgtcaactggaccacactacaatcctgcgagcaaggaacatggagcaccagaagatgagaaccgccatgccggtgatcttggaaatgtgacagctggagcagatggtgttgcaaacattaatgttaccgacagccagatcccactgactgggccaaactcaatcattggcagagctgttgttgttcacgctgatcccgatgatcttggaaagggtaatgatattatttgtgtccgcttttgtgtttttgtgtgtgttgaatgtggcggcgcttttcctctgttttgagctatgtttttcacattggttctgagttcagatagtcttataatcactatatataggagtgtaattttatctgattattcaatggcggagagagaaaaaatttggtaaggctatgcttgtactgtcctataattcccttgaaaaactccagtttttactgttttcgtcatttttaagtcagggtaaaggatacttaaactccaaatgagttttacaattgagatccatttggctatcctttggtctgctgatctgaatcttctgtaaagaactttggctttccacaatgccatctttaatcttgtttgggcttatggtgcatattattcttgtaaaaggttgtctatgttatggtgcatgtcactgatcattccacatttgcttgtgtatttaaacaccttgtttgtgtacattgccagattttgttgccttatcctaagttttcagaccgaatcctgtactgttgggtttgattcaaagacattctcctaaatggctaaatggcccatctcagatagttatagcttaacatctgttgattttttttctttctgtttgtacattcaggtggacacgagctcaggaagagcaccggaaacgctggcggccgtgttgcttgtgggatcatcggactccagggctgaactgaaacaaatggtcgttggacttcgggggcgcctgggagtgccgtcaccagcaggctagaataacatcccgaagacatcgtgaaataataataataagagcgcctgatatgtgatcagtggtgtactcgccattaagcacctgtggcaaccgatgagctgaactgtgttggactgttggctaaaatgctggttcgcctgagcatgtgtcacatgtctgtc

SEQ ID NO: 87145 - DNA, 1024 bp, Zea Mays
tcgtcgaggaagcaacgcaacttgactgctctgtccggctgcgcctacaaatccagcacacaggcgcgcacggcgcatcccgctcctccacctcgtcgcagcccccaaggccccaactacccccagtctcggaagagaactatccagaagcgcaagactccaaagccgtcgccttcctatccatcccttcctcgccgcgggggtcgcctgaggtatgctacctaccaaaaccctcacggatccctggcatttcgatcgcctcactctgtaccccggacgagttgcagttggatctcagatcggtgatcacataaacaatggtgaaggctgttgctgtgcttggtagcagcgatggtgtcaagggcaccatcttcttcacccaagagggagatggccctaccactgtcaccggaagtgtctctggcctcaagcctggcctccatgggttccatgtgcatgcacttggtgacaccaccaatggctgcatgtcaactggaccacactacaatcctgcgagcaaggaacatggagcaccagaagatgagaaccgccatgccggtgatcttggaaatgtgacagctggagcagatggtgttgcaaacattaatgttaccgacagccagatcccactgactgggccaaactcaatcattggcagagctgttgttgttcacgctgatcccgatgatcttggaaagggtggacacgagctcaggaagagcaccggaaacgctggcggccgtgttgcttgtgggatcatcggactccagggctgaactgaaacaaatggtcgttggacttcgggggcgcctgggagtgccgtcaccagcaggctagaataacatcccgaagacatcgtgaaataataataataagagcgcctgatatgtgatcagtggtgtactcgccattaagcacctgtggcaaccgatgagctgaactgtgttggactgttggctaaaatgctggttcgcctgagcatgtgtcacatgtctgtcggttttgatggcattccgaccgtttc

SEQ ID NO: 87146 - DNA, 742 bp, Zea Mays
atggccgccgtgcagccgcgcgtagccccacgccggcacccgccgccgcctccgccgcttcggccgctcccagcagcgccgccggctgcccggccgcagcttccgtgcaagaggagccgcgccgacgccgccgtcgcccactgcaggaaggagagggtggccgagtcgtgctgcctgtcgcggccggaccaggtggagctggtgctggtcgacgacgacagcggcgaggaggacgacggctgcggcagctgcgtcgacggtgccggcggcggacaggccgaggaggaggatgaggaggaggaggggagcggcggtgtcgccgccgcctggtggagcgaggagagcggcggccgctgttccctctgggcgagcgggaggagaagagcagatgaagaaggcggccgccaattacgcgccgacgacagcgagagcgacgacgaggaccccgcggcggcggcggcgaggcggcaggaggaggaccgcaagttctgggaggcgtgcctggcgtcgggctacccctgagcctgcaggagcagcaggacaggacgcgcagatcgatggatcgatcgatcagtggccaggccatgcatgcatgcgcgcgctcgtgtttcttgattaggactatgtacagtggtttttgttttgttttgtttgatttatttgcttgtgctttggacagcgtttacaagtttgtgcatatatggcgtgtaaaatgcgaccatgcatgaaacagagatgcaag

SEQ ID NO: 87147 - DNA, 1093 bp, Zea Mays
ggcggtgaccgagggacatgtaaattctaaactaatggaggtgtttattgtgattcaaccttgaataaataatgcggcagagcaaagaaccccctttcccttccccttccgctcgagtctgctctagggtttttgccaagccgccgtcgccgtcgctctgccctcgtatcccctcccacgacaccgagacaccaagatgacggcgcagaccgcggaggagctcgccacccagatcgagcagcagaagctcgaggagcagaagaccgaggcagaggaagttgtggtggaggatgaggaggaggaagatgaggacgatgacgatgatgacaaggatgatgatgaactcgatgaaggggatgccagtggcaagtcaaagcaaagcaggagtgagaagaagagccgcaaggccatgctgaagcttggcatgaagcccatcactggtgtcagccgcgtcactgtaaagaaaagcaagaatatactctttgtcatctccaaaccagatgtgttcaagagcccgaattccgacacgtatgtcatattcggcgaggctaagatcgaggacctcagctcccagctgcagacccaggcagcagagcagttcaaggctcctgacttgagccagatgatcttgaatccagagacgtctggcccgggacaggaggacaatgatgaggaggtcgacgaaactggtgttgaggccaaggacattgagctggtgatgacccaggcatctgtttcaaggcccaaggctgtcaaggccctcaaggcttctaatggggacattgtcactgccatcatggatctgacaacctagggtgatatttctgtccgtgccacttttgttttggagtgctattgcaacttgagtgttatatgtggacctatgcttcgatgatgttacatgattgcttcttgggtcaaggtcattcaaacaaggtttcatctttgctggcttgaaacctggcagtagtttatagcccagaatgtttgtctgtggttctggtgtttcagtaatgtcacagttatcaatggctcttaagtttctgcaatatcacagttttcttacatttttctttaccgatatttattccct

SEQ ID NO: 87148 - DNA, 1090 bp, Zea Mays
ggcggtgaccgagggacatgtaaattctaaactaatggaggtgtttattgtgattcaaccttgaataaataatgcggcagagcaaagaaccccctttcccttccccttccgctcgagtctgctctagggtttttgccaagccgccgtcgccgtcgctctgccctcgtatcccctcccacgacaccgagacaccaagatgacggcgcagaccgcggaggagctcgccacccagatcgagcagcagaagctcgaggagcagaagaccgaggcagaggaagttgtggtggaggatgaggaggaggaagatgaggacgatgacgatgatgacaaggatgatgatgaactcgatggggatgccagtggcaagtcaaagcaaagcaggagtgagaagaagagccgcaaggccatgctgaagcttggcatgaagcccatcactggtgtcagccgcgtcactgtaaagaaaagcaagaatatactctttgtcatctccaaaccagatgtgttcaagagcccgaattccgacacgtatgtcatattcggcgaggctaagatcgaggacctcagctcccagctgcagacccaggcagcagagcagttcaaggctcctgacttgagccagatgatcttgaatccagagacgtctggcccgggacaggaggacaatgatgaggaggtcgacgaaactggtgttgaggccaaggacattgagctggtgatgacccaggcatctgtttcaaggcccaaggctgtcaaggccctcaaggcttctaatggggacattgtcactgccatcatggatctgacaacctagggtgatatttctgtccgtgccacttttgttttggagtgctattgcaacttgagtgttatatgtggacctatgcttcgatgatgttacatgattgcttcttgggtcaaggtcattcaaacaaggtttcatctttgctggcttgaaacctggcagtagtttatagcccagaatgtttgtctgtggttctggtgtttcagtaatgtcacagttatcaatggctcttaagtttctgcaatatcacagttttcttacatttttctttaccgatatttattccct

SEQ ID NO: 87149 - DNA, 653 bp, Zea Mays
acaatgcctgccaacaattagacgtaccaaagaatattatctcacaacgcatgatccacaaaaagaaattgaaagctttcttatcacagatagataaaacaggatgcataaagacctatgcggcggtcagcagacggtgcctccagcaaccttgatctttttctcggtggtcttggcgatgaccttggcccagaagacgatgggcttggacgacagcatccccttttcgagcaccttgaagcaaccgaactatgtcacatgcacgagcgggtgggatttatagccagatcgatcaacgagaaatggccgaatccagttgggtaaaagaggctgcttacctcgctttgacatggcggcaaatggtgttggacccgattggtacgaggcaagctagggagagggaaacgggcgggaatctcagccaccgcgtaggggagaagaagaggatgatggccgacagaagtggggccatgcggtggaggaacgggagacggtggatgagcggacaaagaagaggtggagaatcgcaagctcaccctggtgaagtgaaggggcgaggggaggagcagtcggcggcagaagaggcgacgcagcagctcctcgcgttggtggcggtgactcaagaggagcatggagtgggcatcgatggttga

SEQ ID NO: 87150 - DNA, 1689 bp, Zea Mays
ctcctgtcaaaaccctagtttcccaacatcgtcggctcctctctttcccaccgccttcttccactactcttcaccctcccctcctccccatcgcgaactcacaagagaaccaagtagacgagggagaaggagatggcgaagaagaaggagaaggcggtgaacgtgtcgggcaagccgcggcactcgaacgacgtcaaccgccccaatgacaagaagggcgcgggcggcggcgccggtggcgggagccggtccgcggctaccgtgcggcggctcaagatgtacaagacgcggcccaagagggaccgcgccgggaaggtgctcaggaacgatttccagtctaaagagctccccaacacccgcatcgagcccgaccgccggtggttcggcaatactcgcgttgtgggccagccacagcttgaaatgttccgggaggaactccagagtcggctttccgacaacttcagtgtcatcctgaaagaacggaagctgccactatcgctcctgcaagatcatcaaaagcaagcgaaggcacatctgcttgaagttgaaccttttgagcatgcttttgggccaaagggcaagaggaaacgtccgaaactaactgctcttgactacgaatctttgctgaagagagctgatgattcccaagatgtgtttgagcaaaagtatgcttcatcaaagttgccaagggaggaagaagaagatggcttacgtgatctagtgaggcatacaatgtttgagaagggacagagcaaaagaatctggggtgaactatacaaagttattgactcttcggacgttgttgtgcaggtgttggacgccagggatccaatgggcactcgatgctaccatctagagagacatctaaaagagaactgcaagcacaaacacttggttttcttactaaataagtgtgatctaatccctgcttgggctacaaaaggatggttaaggaccctttcgaaggactatcccaccctagcattccatgcaagcatcaacaagtcatttggcaaaggatctcttctgtcagtattgaggcaatttgctcgtttgaagaatgacaaacaagctatttctgtcgggtttgttgggtaccccaatgttgggaagtcatcagttattaacacactacggtcgaagagtgtctgcaaggttgctccaatacctggagagacaaaagtgtggcagtacatcactctcactaaaaagatatttttgattgattgtcccggtgttgtatatcaaaacaatgattcagaaactgatatagttctgaagggtgtggtatgtatcttcagctgtgcaatttgcaaatgttttttttacctgggtagtgctggaggctcccgcatgagtgaggtctgggaaagagatgaaccgaggcaagcatcccccgcaaatgtggagagtctgcttcgaaccctaaacctggtgactcagggacagctctcacactgcaccatgcctgctcttgttctttttacttgtggctggcaaaaataattatttcaagcttgtagtgccccctccccctaccttgaatatatatcagaaagtattttagttcaagatgatgtttattcctgggatacatgtaaaacaatgtttagctcatacacttttccaagtggagttgacgatgaccagtcctgttctgtattaaatatatttgatgtcaactactca

SEQ ID NO: 87151 - DNA, 2354 bp, Zea Mays
ctcctgtcaaaaccctagtttcccaacatcgtcggctcctctctttcccaccgccttcttccactactcttcaccctcccctcctccccatcgcgaactcacaagagaaccaagtagacgagggagaaggagatggcgaagaagaaggagaaggcggtgaacgtgtcgggcaagccgcggcactcgaacgacgtcaaccgccccaatgacaagaagggcgcgggcggcggcgccggtggcgggagccggtccgcggctaccgtgcggcggctcaagatgtacaagacgcggcccaagagggaccgcgccgggaaggtgctcaggaacgatttccagtctaaagagctccccaacacccgcatcgagcccgaccgccggtggttcggcaatactcgcgttgtgggccagccacagcttgaaatgttccgggaggaactccagagtcggctttccgacaacttcagtgtcatcctgaaagaacggaagctgccactatcgctcctgcaagatcatcaaaagcaagcgaaggcacatctgcttgaagttgaaccttttgagcatgcttttgggccaaagggcaagaggaaacgtccgaaactaactgctcttgactacgaatctttgctgaagagagctgatgattcccaagatgtgtttgagcaaaagtatgcttcatcaaagttgccaagggaggaagaagaagatggcttacgtgatctagtgaggcatacaatgtttgagaagggacagagcaaaagaatctggggtgaactatacaaagttattgactcttcggacgttgttgtgcaggtgttggacgccagggatccaatgggcactcgatgctaccatctagagagacatctaaaagagaactgcaagcacaaacacttggttttcttactaaataagtgtgatctaatccctgcttgggctacaaaaggatggttaaggaccctttcgaaggactatcccaccctagcattccatgcaagcatcaacaagtcatttggcaaaggatctcttctgtcagtattgaggcaatttgctcgtttgaagaatgacaaacaagctatttctgtcgggtttgttgggtaccccaatgttgggaagtcatcagttattaacacactacggtcgaagagtgtctgcaaggttgctccaatacctggagagacaaaagtgtggcagtacatcactctcactaaaaagatatttttgattgattgtcccggtgttgtatatcaaaacaatgattcagaaactgatatagttctgaagggtgtggtccgggtgacaaatttggcggatgctgctgagcacattggtgaagttcttaggcgtgttaaaaaggagcatctccaaagagcgtacaaaattcaagattggtctgatgataacgattttcttgtccagctgtgcaggaccactggaaaacttctcaagggcggggagcctgatctgacaacagctgccaagatgatacttcatgactggcagaggggtaaaatccccttctttgtaccccctccgcagcaaagcgacggcggtgcatctgaaagtgctgaacctattgggattaccaaagaggacggagtaagcagcgacaggactgccgcagccatgaaagccattgcaggaataatctcgtcacagcagaacatgaatgtgccctgccataaggaaaacaatgcagacaatgaagacactactgaaaatgcagataacgaagacattgagagttcagataacgaagacaatgatgacatcgagcctgcagagcgatctgagtgatctttgggtacagatgtggattattagagttgatatgtcaaggctaattaatttgtcagcccaggtgttgtgtagctacttgaccatatcactggcgtgctagaaaaaaaggatcatgttgagttgcactttttgtaactatcgtacctgaatctttgtaatagggcaagatcagttttgctaggtacctggttgtatcgggatggttatctgtgctgtctactacaaatacagttacatctattttacttaaatcaagtggaagttatctctaaatttttattgcggcttcatgaatttttgcgtacctacatatttcaagccccatcttttcgattgtgccacgtagaggtcgataagctaaaaatgatcgcagaggtttagaggtatctttgttgaggaacaattgtttgtcctaatatgagatgattaattgtgtcgcattcaaattttatttgtgatactgtgattgaaaggtaactgccaatggaactaacatgtttttcgatacaggagaagccaaaaaagcagagacaaagattggattgaattaaaaaaaa

SEQ ID NO: 87152 - DNA, 904 bp, Zea Mays
caggttttgcatccacaatcgatgagacctgctagagaaggtgatattccagttagggttaagaattcatacaaccctaaagctccaggaacccttattagttattaccagacaaagggacatggataaggttgtactaactagcatagtgctcaagtcaaatgtcactatgttggacattgtgagcactcggatgcttggtcagtatggttttctggcaagggtatttgctatatttgaagatctatgtatatctgtggattgtgttgctaccagtgaagttagtgtttctgtgtcacttgatccatcaaagatctggagtagggaactgaaagggcacgaacttgaccatgtagttgaagagcttgagaaaatagcaatcgttcgtctacttcagcagagggcgataatttcacttatcggaaatgtggagcaatcgtctctcatactagaataacgggacatgtgctgaggaaaagtggggttaatgttcagatgatctctcaaggagcgtcaaaggttaacatgtcgctgatagtccatgatagcgatgcaaaggcactcgtagaagcccttcaggcgttctttgaagacgatgtcctggcacaagtcaaagcggagaacctactcgtgggttgatcaacgtaggctttgctgggtccaggcggtgttatctgttataggttcccactcacctccatgaacgacatgagcattggatcattgatcatgttttgcttgaaacaagtatttgtcttccaggttctcagccaatgactgcaaaattgtgtttctgtttctagaactgtttgcagacaccagcgagcaccgattgtcaacaaaatggcaagcctgtgatataattccaactgtctctaatcaatatatataataaacattatca

SEQ ID NO: 87153 - DNA, 4107 bp, Zea Mays
atggatccgcgccgcgcacccccgcggggcggcggcgggctctcttactccacgctgttcaacctcgagcctttgcagaacttaagggttcctgtaccagaaaatctcgcccgctacgggaacagcagctcaaatgggagtccaagcagtgagggtcaaggatccttgttggatcagtacaatggtgtacatgatgcttcccatggcttgcatcggaagcgaaaaaagcaccctgatggtgccggcgatgatgatcatgcagatgcctatagtaacaaaatgatggaggatcactaccgtgcgatgctcagtgaacatgtccagaagtaccgaaggtcaaagtttaaggagggtgcttttatttccgatccttctcaggtggcaatcccccaaataaaacacaaaaacggtggtaaaaaagttatgaagcacattagtaatttcagggatattgcggcattaaatgggatagaagcttcacatgagtataattggatagaatgtattgaaactcatggtggttttaataagcttgtagcatccgttgattccacctatttagatatgggggataatatacactacttagttccagagggttatgataagttagcattatcccttaacctccctatttcttctgatatacgtgttgaggagcacttcttgaagggcgcactagatttgtgcaccctatcagcaatgcttggtactgaccaaaggtttgaggcttccagccatggtggattatctgaacccctgccacaatttgaatctctcaaggaaagggtaaaggtgcagaaattttctcttcaagttaccgaggacccctttgcaattccggaaggagcagctgggaggatacgaaggtctattatatcagaaactggcaatttgcaggtccattacgtcaaagtcttggaaaaaggagatacatatgagattattgagcgcagcttaccaaagaagcaaatagtaaagaaggaaccttttgtaatcgtgaaagaagagtctgaaaagacttacaaactctggcagtatcttgctactaaaagcattccaaagcatcacaggaattttacttctttgatgaagaaacgacaagtagatgcgaagcgcttctctgatagttgtcaacgagaggtaaaattcaaagtaaggaggtcactgaaactgatgagatgtgctgcaatacgtacaaggcagttggctagggatatgctgatattttggaaacgagtagacaaagagcagtatgagttgagaaaaaaagaggaaagagaagctgctgaagctttaaaacgtgaggaggagcttcgtgaagccaaaagacaacaacagaggctaaactttctgctgtcacaaacggagctttatagtcatttcatgcagaacaaggctggtggctcagcgccacctgatgaggaagatgtccctgatgaagatgaggaagaagatcctgaagaagctcaattgaaaagagaggccttgagggcagctcagcatgccgtttctcaacaaaagatgaggactaatgcatttgatagtgaaactgtgaggcttcgtcaaacttctgagtctgttcttccaactgatgattcatctagcatggatcctagtaagattgatctattacacccttcaacaatgcctgagaagtcatctgtgcaaacaccagagttgtttaagggtgtattaaaagaatatcagttaaaaggcttacaatggctggttaattgttatgaacaggggttgaatggcattcttgctgatgagatgggtcttggcaaaactgttcaggctatggcattcctgtctcatttggctgaggacaaaaacatatggggcccctttctagtggtggctcctgcatctgttgtgaataactgggctgaggagttgattagattctgccctgacctaaagatacttccttactggggcccagagaggatgattcttcgaaagaacatcaaccccaagcgtttgtatcgcagagatgctagcttccacattcttattacaaactatcagatacttgtgaatgaagagaagcttttgagacgtgttaagtggcaatacatggtactggatgaggcccaggctatcaaaagttcaagcagccagcgctggaagacattactgagctttagctgtagaaatcgtctacttcttactgggacaccaatacagaacaatatggctgagttatgggcacttcttcatttcatcatgcccactctatttgacagccatgaacagttcaacgagtggttctcaaagggtattgagggtcatgctgagcatggaggagctttgaatgaacatcagcttagtagattgcatgctattttgaagcccttcatgctccgccgggttaagattgatgtcattgctgaaatgaccaaaaagaaagaagaaattgttccctgcaaattgagttctcgtcaacaaattttctatcaagctataaaaaataagatctcgcttaacgagttgcttgatggaagtcgtggcaatctaaatgacaagaagttacttagcctgatgaatattgtcatgcagctacggaaggtctgcaatcacccggagctgtttgagcgcaatgagggaagctcttacttttactttgctgatatcccaaactcacttctttctcccccgtttggggcattacaagatgtacattatgcaggcaagagaaatcctataatctttgagatcccaaagttagtttatgatggaatcatctgcaacacagaaaattctggaagcatctgtggatttcagaatggatatttgaacaggttgtttaatatatttttgccaagcaatatccatcgctcagccattccagaagttaattcatcaaatgagtctgttttatcatctggtgcatttggctttacacgtttgtcaaacctgtgcccagttgaagctttcttcctggccacttcatcattctttgagggactagcattttcagtaatgcgatggaataggaactacactgatgaaattatggatgcattccttgattcagaagatactgacatccagttcagtcagaatgattccacaagagttcgtgcagttgcccggttgttgctttcttctacaaaggccaagcccagcttacttaggacaaagattggaactggcccaagtgaaggcccatatgaagcactggtgctttctcatcatgacaggcttgcttcgaacataagggttcttcgttcagcatacacttatattccgccagctagagcaccacctataaatgtttcatgtgctgatcgaaattttgcctataagttcactgatgagatgtatgatccttgggtcatgaaactgttcctgggatttgctcgtacttccgagttcaatggtcctagacaaccagttgctcttcatcctttgatacaagaactcaatactgatttgcctatccttgagccgatgctgcagctaccctataggatatttgggtcttctccaccgatgagtaattttgatccagctaaaatgctcactgattctgggaagctccacaccttggatatgctactacggcgccttcgagctgaaggtcaccgtgtgcttctttttgctcagatgactaaaatgctggacattcttgaggattacatgaattttagaaaattcaagtatttcagacttgatgggtcttctgcaatctcagaccgccgtgacatggtccgagctttccagaacaggaatgatgtatttgttttcttgttaagcacaagagctggggggcttggtattaatttgactgctgctgatactgttattttttatgaaattgactggaatccaacacaagaccagcaggcaatggatagaacacacagacttggtcaaacaaaggaggtaactgtgtacaggcttatatgcaaagatactatcgaggagaaaatattgcaaagagcaaagcagaaaaatgcagtgcaagagttggttatgaaggggaaacatgttcaggacgatcatttgttgagacaagaggatgttgtttcattacttattgatgacacacaaattgcacataagttgaaagaaatatccatgcaggtaaacatcaca

SEQ ID NO: 87154 - DNA, 1171 bp, Zea Mays
gtgaaatgaactagaccaatttccttgcagagagtactgttttggcgatggacgttgccttaagcaccattgtgtttgtcatcgccattttcatcccggcactgctgacgctggtgcaaagaagccgtagccggcacgccggccataacccaccacctccgccggagcccagagccattcccctggtcggccacctccaccacctcctgagaaagaagccactccaccgctgcctcgcccacctcgctgagcgccatggagacgtcctggggctccggttcggttccagccgagtcgcagttgtgtcctctgcctcagtcgcccagcagtgccttgtcgcactggacacctcgttcggcaaccgtccacggctgccgtccgcgaggatcctctcctatgagtggtcgaccatgggccattccaactgcgggccgtactggcgccaagctcggcgcaccaccagcacggagttctcctccgtggaacgagtgcagcacttcgctgatgtccacgagcaggaggcgcgggccatggcacgccgcctttgtcgtgtggcacatgcttctgggggacgcgctcttgtagacgtcaagtcgcgactgttggagatgctaatgaacggcttactggacatgctcttcaggaggacaacctctcggagtcggagtagtgacgaaaaggacgaggccgtggaagtgagcgaggaggcccgatgcttcatggccatggcggaggagacgatggagctcacgctgacggtgtgggacttcctgccgccactggcgcggtggctggacgtcgacgcggtgggccgccggttacagcgactgcaagcaaacaggacggagtttttgcagaggttgatcgaggaacacaaggagatggagaagagcggtcaagtcacacgcaggacgttggtcggggtgatgctggagctgcaggacaaggatcccgaagcctacacggatcagctcatccgctccttgtgtgttgtgagtattatattatacgtacattcgatccaccaatttcttatttagaaaaataagcatctgtgatatgttccagtatggtgggccttaaatttatctcattttgaatctgatggatctgtatattggatacactgctaatcatttgttttcaaatctatgtcattttgaagagtgca

SEQ ID NO: 87155 - DNA, 1888 bp, Zea Mays
gtgaaatgaactagaccaatttccttgcagagagtactgttttggcgatggacgttgccttaagcaccattgtgtttgtcatcgccattttcatcccggcactgctgacgctggtgcaaagaagccgtagccggcacgccggccataacccaccacctccgccggagcccagagccattcccctggtcggccacctccaccacctcctgagaaagaagccactccaccgctgcctcgcccacctcgctgagcgccatggagacgtcctggggctccggttcggttccagccgagtcgcagttgtgtcctctgcctcagtcgcccagcagtgccttgtcgcactggacacctcgttcggcaaccgtccacggctgccgtccgcgaggatcctctcctatgagtggtcgaccatgggccattccaactgcgggccgtactggcgccaagctcggcgcaccaccagcacggagttctcctccgtggaacgagtgcagcacttcgctgatgtccacgagcaggaggcgcgggccatggcacgccgcctttgtcgtgtggcacatgcttctgggggacgcgctcttgtagacgtcaagtcgcgactgttggagatgctaatgaacggcttactggacatgctcttcaggaggacaacctctcggagtcggagtagtgacgaaaaggacgaggccgtggaagtgagcgaggaggcccgatgcttcatggccatggcggaggagacgatggagctcacgctgacggtgtgggacttcctgccgccactggcgcggtggctggacgtcgacgcggtgggccgccggttacagcgactgcaagcaaacaggacggagtttttgcagaggttgatcgaggaacacaaggagatggagaagagcggtcaagtcacacgcaggacgttggtcggggtgatgctggagctgcaggacaaggatcccgaagcctacacggatcagctcatccgctccttgtgtgttagtgcactcgaagctgggacactcagtacaggctatacaatcgagtgggtgatgtctctcttgctaaacaaccctcacatcatgaagaaagctcgcgacgaaattgacgcatgcgtcggggaacccaaacgcctactggacgcgactgatctcccaaagctgccgtaccttcgatgcattatcctggagacgcttcggctgtaccctgtggtaccccttctagttcctcgtgaatcatctaccaactgcacggtcaacgggtttaatatcgccaaaggaacgatgcttcttgtgaatacgtttgctatccatagggatcctaggacatgggatgacccagaaaccttcctcccggaaaggtttgaggatggcagtaaccaatcagggaagacgacgatggatctgtcgtttggcatggggagacgacgctgcccagcagagaacctggggatgcagctggcaggcattgctttggggactatgatacagtgcttcaactgggaacgagtgggcacggagcttgtggacatggctgagggctctggcctaaccatggcaaagaaggttcctttggaggccttctgtcaacctcgtgcttctatggtcgatctccttgcaaacatctagagctgctatatatatatatatatatatatatatatatatatatatatatacaagttgtactaccaagacaatgcaagcacacgtcattatgaattctcgttgttattacagaataagtcaaaagcgctgctgcttttatataaaatcaccctagctatgtatgtatgttcatgtagaaacctactatcaaataatgtgtcgtgtacagcctcatatagcatgaaatgaaagtatattgtgaggcagagaatatgattctatcgtaaata

SEQ ID NO: 87156 - DNA, 1822 bp, Zea Mays
gttttggcgatggacgttgccttaagcaccattgtgtttgtcatcgccattttcatcccggcactgctgacgctggtgcaaagaagccgtagccggcacgccggccataacccaccacctccgccggagcccagagccattcccctggtcggccacctccaccacctcctgagaaagaagccactccaccgctgcctcgcccacctcgctgagcgccatggagacgtcctggggctccggttcggttccagccgagtcgcagttgtgtcctctgcctcagtcgcccagcagtgccttgtcgcactggacacctcgttcggcaaccgtccacggctgccgtccgcgaggatcctctcctatgagtggtcgaccatgggccattccaactgcgggccgtactggcgccaagctcggcgcaccaccagcacggagttctcctccgtggaacgagtgcagcacttcgctgatgtccacgagcaggaggcgcgggccatggcacgccgcctttgtcgtgtggcacatgcttctgggggacgcgctcttgtagacgtcaagtcgcgactgttggagatgctaatgaacggcttactggacatgctcttcaggaggacaacctctcggagtcggagtagtgacgaaaaggacgaggccgtggaagtgagcgaggaggcccgatgcttcatggccatggcggaggagacgatggagctcacgctgacggtgtgggacttcctgccgccactggcgcggtggctggacgtcgacgcggtgggccgccggttacagcgactgcaagcaaacaggacggagtttttgcagaggttgatcgaggaacacaaggagatggagaagagcggtcaagtcacacgcaggacgttggtcggggtgatgctggagctgcaggacaaggatcccgaagcctacacggatcagctcatccgctccttagtgcactcgaagctgggacactcagtacaggctatacaatcgagtgggtgatgtctctcttgctaaacaaccctcacatcatgaagaaagctcgcgacgaaattgacgcatgcgtcggggaacccaaacgcctactggacgcgactgatctcccaaagctgccgtaccttcgatgcattatcctggagacgcttcggctgtaccctgtggtaccccttctagttcctcgtgaatcatctaccaactgcacggtcaacgggtttaatatcgccaaaggaacgatgcttcttgtgaatacgtttgctatccatagggatcctaggacatgggatgacccagaaaccttcctcccggaaaggtttgaggatggcagtaaccaatcagggaagacgacgatggatctgtcgtttggcatggggagacgacgctgcccagcagagaacctggggatgcagctggcaggcattgctttggggactatgatacagtgcttcaactgggaacgagtgggcacggagcttgtggacatggctgagggctctggcctaaccatggcaaagaaggttcctttggaggccttctgtcaacctcgtgcttctatggtcgatctccttgcaaacatctagagctgctatatatatatatatatatatatatatatatatatatatatatacaagttgtactaccaagacaatgcaagcacacgtcattatgaattctcgttgttattacagaataagtcaaaagcgctgctgcttttatataaaatcaccctagctatgtatgtatgttcatgtagaaacctactatcaaataatgtgtcgtgtacagcctcatatagcatgaaatgaaagtatattgtgaggcagag

SEQ ID NO: 87157 - DNA, 2115 bp, Zea Mays
tcattctctagggagctcttggagatgctctaagaattgtggaaaccacaaaacggcagaagtttaggaagccataatatcgttgaacactaggctcatttggctgagctccggcttaggattatctagctcgaaagtcgatcttttaatagagtgatttcgagtgattctctagcaaaaccgaatctatttgacgaaaattgtttgataaataggttgtgaagtgatttttgaggaattagagagtgtggagcaggttgagagcggtgggacgccttcttaaacggtgggtgttaccacttcctcgcagatcgagctccaaaccactgatggcaaacctgctagcacatcagttggtgtatgagctgagctccccacgagcatggatgctcctcctcttctgcgtcttggtcgcatatgcacgctactctttggccacgttcagtgccaagagagcgaggaacaggatgcaggcgcaagcgcagcaccacgtccacgatgacaactacaacaacctgctcccaccgccttcgcctccggctctgcccgtcttgggccacctccacctcgttggttcgctcccccacgtctccctccgcaggctcgccaggaagcactgctccgacgtcatgctcctccgcctcggcgccatgccggtgctcgtcgtgtcgtcgccgcgcgccgccgaggcggtgctgcggacgcacgaccgcgtgtgcgcgtcccggccgtactccctcgtgggcgaggtggtcatgtacgggtcctccgacgtcggcttcgcgccgtacggggactactggcggcggaccaggaagctcatcaccacgcacctgctcaccgtaaggagggtgcaggcgctccgcatcgcccgcgaagaagaggtgagcgcggtgatggccaggattggcgaggctgcagcggcaggagcggcggtggacatgggtgagctgctcggctcgtatgccaacgacctgtcgtgccgcgcagtcatgggcaagtccttccggggcgagggccgaaacaagctgttccgggagctcgtcagcgacacctcgccgctgctgggcggcttcaacgttgaggagttcttcccgttcctggctcgcttcggcgtgctcagtcgggcggtccgcgccaaatctgaggggttgaggaggcggtgggacgaacagctggacaggattattcaggaccacgaatcaacggcgacggcgagaagtcctagcaacgacgacgaggatgatgacttcatacataccttgctcaccgttcgacacgagtacggcctcaccagagatcagatgaaagctatcctgcttgacgtgttcttcgggggaataagcacagcagccacggcactcgaattcaccgtcgctgagctcatgcggaacccagatgcaatgaggaaactgcaagccgaggtacggagcgtagtacccaagggacaaggtcccgtcagcaacgacagcctgcgcgacatggcctacctgaaagcggtgataaaggagtcgctccggctacacccgccgacgccgatcctgacggcgcacttcaccatggccagctgcagcgtcgacgggttcgcggtgccggccggcgtgagcgtcctggtcaactcctgggctatctccacggacgcgcgtttctgggaggacccggaggccttcgtgcccgagaggttcttcggcggcggcggcgcggcgggcgttgacttcaggggggccgacttccggctcctgccctttggctcctgccgtcccaaagctgacggtcgtcagtctttgccgagagccaacgactgacactcggcaaagaggctttgccgagatgccaagttcacgaccatgtttagtgagcatgttgctcgaagttttcggtacgcttctgcaatcggtcgtaacttatgctaagtaacatgaatatcattttttcatgcacggttttccaagtttcgagtgacctgcagttcaaatttgaattttccgaagaaattcaaataaacgaactaaatctactaacgattgaaactatgttataattgtccataaatgatacatgtaggtctacatagtgtaggaacataccacaaaaagtttgggagacaaaataaaa

SEQ ID NO: 87158 - DNA, 1145 bp, Zea Mays
accgcactggcctcatttcgggcaatacacacaggttgtctctttatggaatggagtccgttgtttgcactgcattaccaagtgataataacggatctcattcagcctctctatagcataggaccaagatcatagtgccgtccctgccggcagagagcaagatggtctcacactcactctcagcatggctcatgtcctcggcgccgccgccggcgtggttcgccgccctggtcgccgtgggcatgtacacggcgctgcggtccgccgccaccttcctggcgtggctccaccgcgcgttcctgcggccaggccgggacctggcggggcggtacgggacgtgggcggtggtgaccggggccacggacggcatcgggcgcgcggtggcgctggagctggcgcgcgcggggctccacctcgtgctggtggggcggagccccgacaagctggcgcgggtggcgaaggagctcgcggccgccgcgccggcgtgcaaggtgcggagcgtggcgttcgacctcgccgtgaccggggacgccgcgcggcgcggggtggcgcgggtggcggccgccgtggagggccgcgacgtgggcgtgctcgtcaacaacgccggcgcgacgtacccgtgcgccgcctacttccacgaggtggagggccccgtgtgggaggccgtgctgcgggtcaacgtcgaggccgccacgcggatcacgcgcgccctgctgccggcgatggcggccaggggcaggggcgccgtcgtcaacgtgggctccggctccagcgtcgtcgtcccggccttcccgctctacgccgtctacgcggccagcaaagcgtacgtcgaccagttttctcgaagcctgagtgtggaatacaaacaatacggcgtagacgtgcagtgccagatacccctgtacgtcgctaccaagatgtcgcccgtgaagggcgcgtctccgttcataccgtcgcccgaggagtacgccagggccgcccttcgctgcgttggctacgaggcgaggtgcgtcccgtactggcgccactcggtccagtggttcttggcgtccctagcgccggacgctgctctcaaccactggcgcctccaaactggcctccagaagaggaacgagacgaaggctctgctcgggggaaaagactgc

SEQ ID NO: 87159 - DNA, 1115 bp, Zea Mays
accgcactggcctcatttcgggcaatacacacaggttgtctctttatggaatggagtccgttgtttgcactgcattaccaagtgataataacggatctcattcagcctctctatagcataggaccaagatcatagtgccgtccctgccggcagagagcaagatggtctcacactcactctcagcatggctcatgtcctcggcgccgccgccggcgtggttcgccgccctggtcgccgtgggcatgtacacggcgctgcggtccgccgccaccttcctggcgtggctccaccgcgcgttcctgcggccaggccgggacctggcggggcggtacgggacgtgggcggtggtgaccggggccacggacggcatcgggcgcgcggtggcgctggagctggcgcgcgcggggctccacctcgtgctggtggggcggagccccgacaagctggcgcgggtggcgaaggagctcgcggccgccgcgccggcgtgcaaggtgcggagcgtggcgttcgacctcgccgtgaccggggacgccgcgcggcgcggggtggcgcgggtggcggccgccgtggagggccgcgacgtgggcgtgctcgtcaacaacgccggcgcgacgtacccgtgcgccgcctacttccacgaggtggagggccccgtgtgggaggccgtgctgcgggtcaacgtcgaggccgccacgcggatcacgcgcgccctgctgccggcgatggcggccaggggcaggggcgccgtcgtcaacgtgggctccggctccagcgtcgtcgtcccggccttcccgctctacgccgtctacgcggccagcaaagcgtacgtcgaccagttttctcgaagcctgagtgtggaatacaaacaatacggcgtagacgtgcagtgccagatacccctgtacgtcgctaccaagatgtcgcccgtgaagggcgcgtctccgttcataccgtcgcccgaggagtacgccagggccgcccttcgctgcgttggctacgaggcgagattggattattatagccttccagacagtactcgcgatcgtgcacttatttatctgtcagctctattccgtacatacgcgaacccatgggggcggagtccagtttattaa

SEQ ID NO: 87160 - DNA, 155 bp, Zea Mays
tattctttttttttcctttttctgttttcttttcttttatatttttttgtttttgtttttttttcaatttcaaattttcaaactcaaatctatatcatccatttgaattcaaatgcatcaatacaataacgccaacatgatatgcacatctctac

SEQ ID NO: 87161 - DNA, 2042 bp, Zea Mays
gtccgctcgtcaatcgtcctccttcgggcttcggcacagcaagcaccacccccttcgccaccgccaccatcaccgctaccgctacggcttcccacctcaaaaccctaaccctaaaccccctccgcgcgggagccctcgcccatggagaaccccaggccccaggccccagcactcacccctcccatggccccgctccccgtccccatccacccgccaatcgccccaatccccgtccctccgccccgcgtgcccgcccccgccccagccgccgccgcttccatggcctccacacccactccctccactggggacggaggcgaggccgagtacgaagtctccgacgaccaccgcgccgcgcgggagcgccacgagcgcgcggtgcaggagctcctccagcggcgccgcgcctacgccatggccgtacccaccaacgactccgctgtgcgggcccgcctccgccgcctcggcgagcccatcacgctattcggcgagcgcgagatggagcgccgcgaccgcctccgagccctcatggtccggctcgaggccgatggccaggtcgaccgtctcctccgcgcgcaggaggacgaccaggccgcgcgcatcggcgaggaggaggaggaggagcagatcgagtaccccttcttcaccgagggctcgcaggagcttctcaaggcgcgccttgacattgcacggtactcgctgccccgtgccaaggccaggatcgagagggccaagcgacgccacgaggaccctgatgaggatccagaggcggaggccgaactcgtcgtcaagcaggccggggagtttgtgctcgagtgcagtgagattggagatgatcgcccgctcactggctgttccttctctcgtgatgcatcgatgctcgccacaagttcctggagtggaatagtcaaagtatggagcatgccacaaataactaaggttgcaaccttgaaaggtcacacagaacgtgcaactgatgttgtcttctctcctgctgatgactgcttagcaacagcttcagctgatagaactgcaaaattatggaaaccagatgggtcacttttgatgtcttttgatggccaccttgatcgtcttgctcgccttgcttttcatccatctggaaagtaccttggtacagctagctttgacaagacttggagattgtgggacatcaatactggcaaggaactgctactccaagaggggcacagcagaagtgtatatggagttagctttcaccctgatggttctttggcagcatcttgtggtcttgatgcatatgctcgagtatgggatctgagatctggaagattgttctttacactcaagggccatgtgaaacctgtcctaggagtcagcttctctcctaatggttatctggttgcaactggaagtgaagacaatttctgtcggatatgggatttgaggaaaaggcaaatgttgtattctattccagctcataagagtattatttcacatgtgaaatttgaaccccaagaagggtattatttagcgacttcttcctatgacaccaaagcagccctgtggtcagctcgtgattacaaaccaatcaaaagtttggtgggccatgagtcgaaggttactagtttggatattagtggagatggacagaagattgtgactgtgtcgcttgatcgtacgataaaaatttggtcatgcagaagtagcacacaagataatgagatggaactggattgagacaattgggttcattgttgccagccccgcttctctattcatcagctagaagtagatattctccctttttgctgatcagacattccaatcagtcattggtgctattgcacggaactatttcatagcatgtataaacccttggcttgagaaatatgttctgcacttactttgctgatattccttgtcatatactagggctagtttggctaccccattttttaagggattttcatttttctaacgacccgtttggatcattagaatttaacaatagtaattttggcatatattaattaagctaattcagttttatacaaaatata

SEQ ID NO: 87162 - DNA, 1997 bp, Zea Mays
gaggcgctgacgacagccatggcgccgaagactgtgtgggggtatttcttcatcgattatatcccagaaccattacaggtttcagacaaacagagagtcgtggaactgaaaggggaggtggcacgcctcttcgaggactgcaactgcaaggatgtcgtggagagaatgaacctagttgatgtggtccagcgtctgggaatagatcaccatttcaaggaacagatagacacggccttgaagaacattcaaggagctgagttcaatagctcggatctccatgaggtctccctccgttttcgcctgctaaggcagcacgggctttgggttccagcagatcaattcgacaagttcagacgacaggaagacgggagcttcagcagcgacatagctgacgacccaaagggcttgttaggcctatacaacgcagctagccttttgatccacggcgaggaggtgctcgaagaagcgctcctgtttgcgaggcggcacctggaatcgatacgacggggtggtggcctccacgactccccttatttgtcggaacaagtcgggcgctcccttaagatcccactgccaaggaccctcaagaggctggaagcagtgtcctatatcccggaatacagcagtgccgacgacacaacgtacatccaccctgagatactggagctcgccaggctagattttaacctcctgcagcatgttcaccagaatgagctgaggacagttactcagtggtggaagggtctttgtgatgtcattgggccagactacgggagggatcggattgttgagtgctacttctgggctttcagtatgtactacgaggaagagcatgcacgggcacggatgatccttgccaggttgatcatgctagcatctttgttagatgacactttcgatgatcgtgctactttgcaggagtgtcgggagctcaacaaggctatagaaagatgggatgagagtgatgatatttctcttctacctgagtgcatacagaagttcttcctggaggtgataaggaacttcgcagagtttgaggatgagctggaagcgcacgagaagtaccgcgttgcttacgctaggaaagcgtaccagctcctatccaaaagctatctccaagaggtggaatggtgccaccagggctacacaccaagcttcgatgaccatgtcagcgtgtccactgcgtcggcaggtattcaggtgctgtgtgttgggatgcttgtgggcatgggcgatgccgccaccaaggaggtattcgagtggatgattggtagcaataaccgtgtcgtacgagcgtgtgcagaggtgacacgattcatggacgacatggcagatttcaagagaggaaagaacaaaaccgatgtcgccaccaccgtggagtgctacatgaaggagcagaatgtcacgggcgaggtcgcctttgacaagattgggtcctttgttgaggacgcatggaagacactaaaccaagcagcgctcgttggggaccgtgctctgcttccggttgtgcaacgagtcgccggcctcgcgatgagcatgatggtgtttttccacggcaagattgaccgttatacggacagcgagcatctcaaggaaacgctggaagacctgttcgtcaaccatgttcccctctgctagctagtacgcactagctagcggtggccggagtatatatggattatacttaccgtacgtaccatctatgttgtgtgtgtgaaggatgttggtaataaactaataatacacagaccttggtaaatgggacatgaggatatatatccattgtacttacgtgtttgcatgggaaacctatatatattatcttgtcttagtttgttcttatgtgtctccatgtattgttgtgttctattgatatcattcttaaactcataatggagagctagattatcctttggcatgctaccaattatttaatatggtaccacataggacaatgtcaataacgttaaggaaagaagagatgaaaactaaaaaaa

SEQ ID NO: 87163 - DNA, 2195 bp, Zea Mays
cgggcgcgtctcgcgagtcttgcctcgtctctctgcaaatgggtgccgtccatatataaactggacgcggcagtggtcctcagtcttcacactccccactcctctctctctttctccctccctcgtcgtcccatcggaactcggatggggagcgggagcgaggcgcatctgccgcggagccgttcggtctccgcgcagccttgagcgccgcaccgtgtcttcgggctgtccagcttgcgtcgcgaggggcgagacgctacgcgagagcgcgacagggctcttggatccccccagagggccacagagcccacacaacagcagatacccgccgcgcagtggagcctagatagagagagagagagagagtagtgcagccgctaccgctctcgctcgctcggccgtcggcgacatggacaaggagaagaggaggaggagctggatcgagcgcatcaggcggctcttcaccacctcgtcgtccgaccccaagcccgcgcccaaaccagcaccagacaagaaggccaagagcaagcggtggctgccggggaagctgcgcgcgcagcagtcgttcgcgctcccggcgcccgcgcccgcggccacggaaccggaccagatcaggcgggcggaggacgagcagagcaagcacgccgtggccgtcgccctcgccaccgcggccgccgccgaggccgctgtcgccgccgcgcacgccgccgcccacgtggtccgcctcaccggccaggcgccggtggtgccgcccttgccccggcaggtgcgggggcaggagaaggagcgggagcaggccgccgtcgccatccagtcggcttaccgcggatacctggctcggcgggcgctgcgcgcgctcaagggcctggtgcggctgcaggcgctgatccgggggcaggcggtgcggcggcagacggcggccacgctgcgcggcctcgaatccctcatgcggatccaggcccgccaccggtccagggccggcggcgtcgaccaccaccagcagcaggcggcggacgacgacgacgccctgctgctgcggcgcggcagggagctctttgccgctgccgccgccgtccacgagcagcagcaggcgagcaacaagcggtgggacagcagcatcttctccaaggaagagatgagcgccatgacgaggagcaaggaggaggcggccctcaagcgcgtgcgcgcgctgcagtacgcctccctgcacaacgagaagctgggcctccggcggccgccctccccctccatgtccagggacgacgaggcggacgcgctgaacaaccagcgctggagctggctggaggagtgggtcggctcgcagcccttcgacaaggacgtccccgtggcgcaccagtccccgtacacccgcagcgccagcaggggtgagcacgacgacgtcgtcgaccggctcggctgctcggcccgccgctccttcgcccggccgacgcgcacgccgccgaggggggactgctacggcgacgcggcgcagttcccggggtacatggcctccaccgcgtccgccaaggccaagttcaggtccatgagcacgcccaaggagcgctccgccgccggctacgacgcctactcggagcactgcttcccgttcgccgaccgcctgctctcgccgatcccgtccatgtcgcccatcccctccgtcgccagcgacatgggcttcgccaggccgcccgtcgcgcagcggtcgccgcgggtgccggccaagagccccatgacgcccgcgagggcgcgcacgcggaggtcgcacggcggccaccacagcttcggctccgaggctgcgctgcaccagctgcagatggagcactacaccccagtccgctgaacgtttgctctttttctgatgatgcgatgcaacgagcaacgatgccgtccgtcggtcctttgtgaagatacaattcttttgtttgttcgacttccttaccataaattggtgggttcaaatgttggatgcaagacgatggaactttcaatcgcactgtaggtgacaatgcaccgtggatccatgatgtaagagcgcaaactatatgaattgtgatctgggcctagtcagtcctgaacagaggcacggtcccctttcccactgtctagggaataagagtcgccaacaggagtatgtaaactccttgattgcacgcttcctgagtcgccaacagggaataagcacaataattatcttc

SEQ ID NO: 87164 - DNA, 1980 bp, Zea Mays
gttggagctgcaaatgtttttgtggccctaaactttttaaataaggtcttattttaattttgaggactcacttcttgttgaacacaaattgcttgatttcttgattgaatttggataaaaaaaaaagagtgcaaaaggaacaaaaccgatagcattagctgatcataattcataaacaagcattggacgaacatttctggaggtgaagtcaaatactcgtagtagtgacgagcatagatagtgatgtcattcatttaattgaacaaagccaatccttttcttattcggacattatagcgaccttatttaatgaaccattatcaggtagtccctcagtcccataaaataattatggcaggtactatttatttttataaagactgtcatctaaatcgataaaaaatattaacaccgttggtacaaagcttcatcgccatcgccagttcgtcaccaacgaggcaacagcctaactcacaaaccaccagacgactggacccaagtacaaaacccgccttcctctcattccccaatcgccacaactctcgtcggagctccgagccctaaacaacagccttcgccggccgactcccgggcggaggaggcggccggggagatggacgacatcggcggcggcgcaccgggtgcctgccccaagaacaagaagccccggcacctgtcccgctcgctgacctaccaccaccacccgtaccaggggcgccaggtgctgccggcgccggcgcccaacccgcagcgcccgcagtcggtggtcctgtacacgacgtcgctccgcggcgtgcgccgcacgttcgcggactgctgcgcggtgcgcgccgcgctgcggggcctccgcgtcgccgtggacgagcgcgacgtctccatggacgcggcgctccggcgcgagctgcaggggatcctcgcggcacggggccgcgggttctcgctcccgcagctcctggtcgggggcgcgctcgtcggcggcgccgacgaggtccgccggctgcacgagtccggcgagctccgccgcgtcctcgaaggcgcccccgggcaggaccccgccttcgtctgcggcgcctgcggcgggttccggttcgcgccctgtccggcctgcgacggctcccgcaaggtgttcgtggaggaagaggggcgagcccgccgctgcctggagtgcaacgaaaacggcttggtacgctgccccaattgctgttcttgatagcttgtttaagttgagtgtatacgagaacttaaggattgcttgattagaggtagtgggagaggaaaagagcatttcttgtgttctttggctgctgtatattgtggacgcagttgggaggataggtattgggtatgccatcagtgttttgaaaggatagcgaatgggttcttggccctcaagttatcacatctggagtaccatcgatggtaaggtgccatctcatagtacttcatgtacatgtgtgtgtctgtgaatgtgtattgatagaccttcatgttggaaaagaaggcccaaagcaaagggttagagatttagaggttgtgctacatagtggcaagaaaaggtggagccttccttgattctttgggcgtgctattagcattctgagaagggcaatatggcttctggccctatagtttgagattgtataaaatatgtatattatacattgataaccagagtgggtttgatgaatatgaataagggatccatataagtaatggagactgtgtgctacaaatggttcatttcatatctccccttacttagcctttggttttaaagatgcttgctgggctcctggtagcatctactgctagacggtaaacatttgttgtgcttctgaaacatgtgtgggccttttgcacttatcttactaacaactgagttggaacttggaacaaaccatcttacatctatgcatgataatatatgattggcgaacttgtagttcagtaccttgtgcaattcttttctgagcagttgtt

SEQ ID NO: 87165 - DNA, 1827 bp, Zea Mays
atggcgacatcgccaccgcagaaccctagctccggcgagccctccgatgcgtcgagcctcgcagccgcggcgctcgaggcgcccgtgcgcgtatggagatccctcgtcgcgcgcttccctcccctcccggactcctccagcttccttgctggcgtctccgacctccagctccgctacttcggcaacagccggccccgccgccgcaggcgctccgctctacctctccctctccgcccggtggccgcgcactctgctcggattgctggtgagatgcccaaagcctttgtgatcttagatgatgttgtgcaacacaccctgactaatttgcacagtattcacaaaagcttactattttggcaggccaaggctgagggaacaaattctcagaaagtgtactttatgatatttgagagaggtccaagggcctttgttgatgcaacatatcaaacactcactagactcgggagcaatggacgccctgtccaatacattttgcattctgcatctgatatggtgtcaacaaaactcgctgccctgacaagtatgcaacactgcttggccgcttttcttgcagaggttcattctgaagttgataaatgcagggaaggattaactgaaaactcagataaatcgctacatacattattcattgttttgaataccacattctccaagttggaggtatcacttagaaatgcttgtgagggtcaagatgaactatttatagatgatggaaacttgcatgaactgtttgggaaattaccagaagttgatgtagagagttcagaatggacagaggccttggcaacagatggtacaagtttaatctatcaaaaccttcagaagctagatagttttctgtcctctcagctctcaagccataaaagaccaaacaaattgaccatatattggttaccctatacatgtggagcagtaggtctctctgtgtgttctctgtggcttttacgccatagcagtttgatgggaagccctgatatcgacaattggattcgagatgctaaggagtctgtggctggattttgggatgaacatgttgagaaaccaatcatttccattagagatgagcttttcgagacattcaagcaaagagataaaggtgtaatggaaaagcaagaggtccaactaactgaagattcattgcgcaggatgttagttgccttttgtgagcaaacagagggtcaaaagttgctggaagatttaccagtgcaggcgatgttggagactctcacaaagagatacgagaaggaattgatacacccaattcaaaacctgttcagtggagaattagcccgtgctatgcttattcagattcaaaagcttaaactggaccttgaatcgggactactggaaatggatcagattctaagggcaaatgctataaactttgctgttcttgcagcgcttcctgcttttggtctttcacttctgttgcttgtgttactgcgagcatgggttcagcgtgaccatggtgctgagggaagaggtaatattgcacgatgtcaacggaggctgcttcttgttgatgtagagagaaggcttatggagtttcaacattacagggataatggaatggaggaagaggcacggtgcaagtttggcttagtactttacacgcttgatagactctgcaaagctgttgagtcacacgcaaaagaaacaggcgaatggttaagcttgagacaagatatttttgatctgtcgaagctcgacatgggaatgccagataagatgattgtcgtttcacggttgaagtggatgtataactgcttgcttccattctcatcgagccgtttgccacgcctctag

SEQ ID NO: 87166 - DNA, 1323 bp, Zea Mays
gaaagaaaaaagaaaacccttcccaagacgtgaagaaaagcaatgcgatgctgatgcacgttactactctactaccaggcacaccgcacacccaatacggaaagaccaccgcaaacgccaccacgcccacgcctcgccgcgcaccacatctgaaacctccagcccgacgccggcgccggcgccgctgctcgcctgctcgtcacatttcctggtgcccgccaagccccgcgacctgggctccccagctccatccatcaaccgcctgcagccgcggaaatggcagcgccgacgacgctgcgctcggcggcggcgcgggcgcgcgcgcgcgcagcggagctcgtgagagggcggtggccgcagcggcgtctggggacgacgtccgcggcggagacggagagcaaaaagaataaggaggaggaggaggagggggccgggtgggagctctcggcggcgcgggagtactacgactaccgcaagtctatctacggcgacgtcacgcaccgcgccctcctcgtcgacgccgtcggcaccctcgtcgtccccgcccagcccaccgcgcaggtgtataagagcattggtgagaagtatggagtgaagtactcggaagacgagatcctgatgagataccggcgggcatacgagcaaccatggggtggatcacgtctcaggtatgtggatgatgggagaaccttttggcagcacatagtcacttcttctacaggatgttcagatgcacagtactttgaggaactctatcaatactttatgacagaaaaggcctggaagctttgtgaccccgatgccgaaagtgtatttaaagctttgaggaaagctggcgttaaaactgcagtcgtctccaatttcgatacccgtctacggccactcctgcaggccttgaaatgtgaccactggtttgatgcagttgcagtctctgcagaggttgcagcagagaagccgaatccaataatattcttgaaggcctgtgagttactgggcgtgaagcctgaagaagctgtgcacgttggcgacgatcgtagaaatgatatatggggagcgagagatgcaggctgcgatgcttggctctggggcagcgacgttcgctctttcaaggaggtatttctattttttttttcttgacacctcgttttagaggtctatcttgacaccaagataatagattccagcaacagagcgcagccatcaccgattattggattggactagtgacagtaggataattgtggacacgctgcgctgcattgctgcactctttactctttctgcgtgggagctgaatgaaggaaagaccaagttgcttgcttc

SEQ ID NO: 87167 - DNA, 1474 bp, Zea Mays
gaaagaaaaaagaaaacccttcccaagacgtgaagaaaagcaatgcgatgctgatgcacgttactactctactaccaggcacaccgcacacccaatacggaaagaccaccgcaaacgccaccacgcccacgcctcgccgcgcaccacatctgaaacctccagcccgacgccggcgccggcgccgctgctcgcctgctcgtcacatttcctggtgcccgccaagccccgcgacctgggctccccagctccatccatcaaccgcctgcagccgcggaaatggcagcgccgacgacgctgcgctcggcggcggcgcgggcgcgcgcgcgcgcagcggagctcgtgagagggcggtggccgcagcggcgtctggggacgacgtccgcggcggagacggagagcaaaaagaataaggaggaggaggaggagggggccgggtgggagctctcggcggcgcgggagtactacgactaccgcaagtctatctacggcgacgtcacgcaccgcgccctcctcgtcgacgccgtcggcaccctcgtcgtccccgcccagcccaccgcgcaggtgtataagagcattggtgagaagtatggagtgaagtactcggaagacgagatcctgatgagataccggcgggcatacgagcaaccatggggtggatcacgtctcaggtatgtggatgatgggagaaccttttggcagcacatagtcacttcttctacaggatgttcagatgcacagtactttgaggaactctatcaatactttatgacagaaaaggcctggaagctttgtgaccccgatgccgaaagtgtatttaaagctttgaggaaagctggcgttaaaactgcagtcgtctccaatttcgatacccgtctacggccactcctgcaggccttgaaatgtgaccactggtttgatgcagttgcagtctctgcagaggttgcagcagagaagccgaatccaataatattcttgaaggcctgtgagttactgggcgtgaagcctgaagaagctgtgcacgttggcgacgatcgtagaaatgatatatggggagcgagagatgcaggctgcgatgcttggctctggggcagcgacgttcgctctttcaaggaggttgccgagcggatcggtgttgaggtgacgaagtgactaagtgagctaggatggtgaatatacggaggcagaggtagtacccaggatcgcggtcgtcaaggaagccagtgaccccatccttgtggtgaaattcctgtgctggtttgtaggcttgtagctgtatgtatgacaacttattagggttccgttgaacctgctatgcatgcatgcttgctgccctgacagtgacaggcgaatgcgtcccatgcacttgaatatgagggtctgggttctggacttctgggactcttgagttattgaattattgtcgcctagttagacacaaagttatctgccatgcacttaaaaattgaaggtctgg

SEQ ID NO: 87168 - DNA, 1780 bp, Zea Mays
gaaagaaaaaagaaaacccttcccaagacgtgaagaaaagcaatgcgatgctgatgcacgttactactctactaccaggcacaccgcacacccaatacggaaagaccaccgcaaacgccaccacgcccacgcctcgccgcgcaccacatctgaaacctccagcccgacgccggcgccggcgccgctgctcgcctgctcgtcacatttcctggtgcccgccaagccccgcgacctgggctccccagctccatccatcaaccgcctgcagccgcggaaatggcagcgccgacgacgctgcgctcggcggcggcgcgggcgcgcgcgcgcgcagcggagctcgtgagagggcggtggccgcagcggcgtctggggacgacgtccgcggcggagacggagagcaaaaagaataaggaggaggaggaggagggggccgggtgggagctctcggcggcgcgggagtactacgactaccgcaagtctatctacggcgacgtcacgcaccgcgccctcctcgtcgacgccgtcggcaccctcgtcgtccccgcccagcccaccgcgcaggtcagccccgttacctgtaggagaacatccaattcccctcacccagtcctgctgcgcgcctgcccgcgttagcgacctttacctccgggcgtagtgtcatactgcgatgtggagtcctgggtggtggtcactgggctgtcctttggtagcatagcacgatgggttctcctgtcatcatcgcagcttggattggattgttgggcctgaactttacactgccttcatgtgggttctgtggtttatgacacagatttgtctgtaaaagtttctattctgaatgattaactgtgcgctccctctgtttaggtgtataagagcattggtgagaagtatggagtgaagtactcggaagacgagatcctgatgagataccggcgggcatacgagcaaccatggggtggatcacgtctcaggtatgtggatgatgggagaaccttttggcagcacatagtcacttcttctacaggatgttcagatgcacagtactttgaggaactctatcaatactttatgacagaaaaggcctggaagctttgtgaccccgatgccgaaagtgtatttaaagctttgaggaaagctggcgttaaaactgcagtcgtctccaatttcgatacccgtctacggccactcctgcaggccttgaaatgtgaccactggtttgatgcagttgcagtctctgcagaggttgcagcagagaagccgaatccaataatattcttgaaggcctgtgagttactgggcgtgaagcctgaagaagctgtgcacgttggcgacgatcgtagaaatgatatatggggagcgagagatgcaggctgcgatgcttggctctggggcagcgacgttcgctctttcaaggaggttgccgagcggatcggtgttgaggtgacgaagtgactaagtgagctaggatggtgaatatacggaggcagaggtagtacccaggatcgcggtcgtcaaggaagccagtgaccccatccttgtggtgaaattcctgtgctggtttgtaggcttgtagctgtatgtatgacaacttattagggttccgttgaacctgctatgcatgcatgcttgctgccctgacagtgacaggcgaatgcgtcccatgcacttgaatatgagggtctgggttctggacttctgggactcttgagttattgaattattgtcgcctagttagacacaaagttatctgccatgcacttaaaaattgaaggtctgg

SEQ ID NO: 87169 - DNA, 1413 bp, Zea Mays
atgccgccgcccacgggtggcgaggaccccgaggccgacgcggcgccctcctgcagtggctcagccgacgaagccgacccccacgagcaggtgctccccaacggcgacatctacacgggccagtggcgcggcgccgtgccccacggcgccggcaagtacctctgggcggacgggtgcatgtatgagggcgagtggcgccgcggcaaggccaccggccgcggcaggttctcctggccctcgggcgccacctacgagggcgagttcctcgacggcttcatgcacggcgccggcacctacgttggtgcctcgggggacacctaccgcggcgtctgggccaagaacctcgagcatggcgccggcgagaaacgctacgctaacggcgactgctacgacggcgagtggcgcgcggggctccccgatggttgcggacgctacgcctggcgcgacggcaccgagtacgccggcggctggcgcgctgggctcatccacggccgcggcacgctcgtctgggccaatggcaatcgctacgatggcggttgggagggcggccgaccccgcgggcagggcacgttccgctgggccgacggcagcctctacgttggcttctggggccgcgaggcgcccagcggcgccgtccaccagaagggcgtttactacccgtccccggcggcgatgggcaactccccccgggcgcgcgacccgagggaggtgtttgcacgtgacctgccggagtgcgtgcgctccggaaccgaggcccaatcagcgctcacgtctctgagatccctcaaatggctgatgcggtcggtcagcgggcgcggcagctcgtcgtctggctggagcaatggctcgggaggcagcctcgtgcacttctgggggtcggacggggaggtcaagtgcgaccttggggacgactggagacggcggagcgtcagagaagggagggggctgccaccaccgtcgcccgctctggttccatacctgcccaacggcgcgcccctgcggttgtccaagaagcagggggtgaccattgccaaagggcataagaactatgagctaatgctcaatctgcagctcgggatcaggcatgcagtaggaaggcaaggtcaagttttattagatctgaaatcatcagcatttgatccaaaagagaaagtgtggacaaaattccctcctgaaggctcaaaacatacccctccacacaattcttgtgatttcaaatggaaggattactgcccaaaggtgttccgaacactccgtaagctgttcaaggttgacccagctgattatatgttgtccctctgtggagatgatgctcttcgtgagctctcatcccctggtaagagtggaagcttcttttacttgacaaatgatgatcgttacatgataaaaacaatgaagaaaggtgaagtgaag

SEQ ID NO: 87170 - DNA, 1044 bp, Zea Mays
atactatccataggcgatttgatctgaaaggatcatctcttggccgtataactgacaagccaccagcagaaattgatgagtatacaactctgaaagaccttgatcttaactttatctttcggttacagaaacaatggtaccaagagtttcaaaggcaagtggacaaggactgtgagttcctcgagcaggagaagattatggattacagtctattggtgggtgtacattttagaggtgccattgacattgatggtgacaaacccgcaacacctcgcgtttcaagatgggacagagatcattttcgttctgatccaaataggtggtcaaaaattaagcttggagcaaacatgctgtcaagagctgaactgacaatccgaaagaacgacagtgatgtttttggagagccaaccggggagtactgtgacgttatcttatacttcgggattatagacatacttcaagactatgatattggcaaaaggctagagcatgcctacaaatcttttcagtatgattcgacgtccatttcagcggttgatccaaaacagtattccaggcgcttcaaagatttcatatacaaagctttccaagaagataaactagacagctgagaacagtgcattgcgacattggatttggcaggaattcggcagcttctttagggaaaggagtccgggtgattggggtcgctggagcacctggtggccccacagtttccaggaaacagattggccgtcatgtacatactacaaagcaacatgcacagatacggagtccagtcagtcattcacaaagagtaggaaatgtaacttgcagaatcaaattatacatagaaacatgtaatcgaatgtcccgagccgagccttcaggggttgtaaatgctctttgtttcagaggataccattcttgtcttgtatcggtagtcgttactttcttcgatagaattgggggccagttttgcctttgcactttcttttctttgaacaaagcacgacgtactgaggtgcttatttgattgatagaggcacgtcacacctgagaata

SEQ ID NO: 87171 - DNA, 1564 bp, Zea Mays
atggggacaacacgtgcggcattgccgagaggaggtgcgagagcgacgcttttggagaaggacgaagacgacgacgagggggcgcgccgcgacgggccctacgccggcggtcggcgcgggccgcggcggcagggcgagaccatagccaagggccacaagaactacgagctcatgctgaacctgcagctcggcatcaggcacgcagtaggaaagcaaggcccaattacacttgatctcaagtcatcagcattcgaccccaaggagaaagtatggacaaggttcccaccggaaggctcgaaatacactcctccacacagttcgtgcgacttcagatggaaggactactgcccgcaagtattccggacgttgcgcaagctgttcaaggtcgatgccgcggactacatgctgtctctctgtggagaccaggctctccgggagctctcgtctccgggcaagagtgggagcttcttctatctcacgagcaacgaccagtacatgatcaagacgatgaagaaatctgaagtgaagatatttctgaagatgattcgagcttattacaaccatgtcagagcgttcgagagcactctggtcaccaagttcttcggtcttcactgtgtcaagttagctggagcgaaccaaaagaaggtccgttttgtcataatgggaaacctgttctgctccgactactccatccataggcggtttgacctgaaaggttcgtcactgggacggacgacggataagccacagacggagattgacgagtacactaccctgaaggatcttgatcttaacttcgtgttccggttgcaaaagcactggtaccaggagttccaaagacaggtcgacagggactgcgagtttctggagcaggaaaatatcatggactatagtcttctggttggtgtacattttagggacactagggataggctattgaccggaggttcattcgatagcgactgcagcagaggatcgtcgcctcacttgtctcgaggagatacggatccaaacaggttagccaagataaaacttgggtctaacatgccgacgagagccgaacggacgatacgaaagggtgactgtgaggtgcagatcatgggagagcctacgggggagttgtacgatgtcatactgtacttcgggatcatagacatcctccaggactacgacatcagcaagaagctcgagcacgcgtacaagtccttccagtacgacccgacgtccatttcggcggtggatccgaagcagtactcgaggcgcttcagggatttcgtgttcaaagcgttccaggaagacaggttcgacttgtgaagggacgcgtgggaagctcgatcgggaggctaccgttgccgctgacacgggttaaccagtgttgagatccgcactgcagcagagcttttggtgaccctacttccacttgcactcgccggattgatgaagctcctgcatgcattgcatgcggagtctccaaggggatttcagctggcactcatgcattcaagtaaaggctccaattcgagataccggtgcgtttcaataagcaggttcaacagtatctttc

SEQ ID NO: 87172 - DNA, 3805 bp, Zea Mays
cttcgtccccggcctctcgccttcctccacccccctctcctctctctcgctggctcgtggccaacccacccacccacctccgctccgccccgcttccatcgatccattccgcgatcggccttacacgtctaacagtacatgagtttctaactggtgcgagcccaagtaaagttctgtaattagtcacattcctgcacaatgtcgactgcgaaagtggtgcttgagcctgcatttcaaggagctggccataaaccagggacagagatatggaggatcgaggatttcaagccagtcgctttgccaaaatcagactatggcaaattctactgtggagattcttatatagttctgcagacgacatgtaaaggaggtgcttttatttttgacatccatttctggatcggaaaagattccagccaggatgaagctggaactgcggcgatcaagacagttgagcttgacagcatgctcgggggccgtgcggtgcagcacagggagccacagtgctacgagtctgataaattcctctcgtattttaaaccgtgcatcatacccatggagggcggctttgcttctgggttcaaaaagccagaagtggacaagtttgaaacacgtctatatatctgcaaagggaagagagctatcagagttaaagaggttccattttctcgttcatcgttgaaccatgatgatgtctttatcttggatactgagaacaaaatatatcaattcaacggtgcaaactccaacatccaagaaagagccaaagccttggaagtgatccagcatttaaaggaggaataccatgacggagtgtgcgctgttgcaatcgtcgatgatgggaaactgcaagcagaatcagattcaggagaattctgggtcctttttggaggttttgcgccaatagggaaaaaagcaataagtgatgatgatgttgttcttgaaactacatcaccaaagcttttcagtatcagtaacggccaactgaagttagaagacgctgtccttacaaaatcaattttggagaacaccaagtgctttttacttgactgcggggctgagctattcgtgtgggttggtcgggtaacacaggtagaggacaggaaagctgccagtgcagcagttgagaaatacattattaaagaaaatagaccaaagacaacaagaataactcaagtgatccaaggttacgagaatcatacgttcaagtctaagtttgagtcatggcctgtaagtaacacgtcagggagtgccagcacggaggaaggccgagggaaagttacagcactcttgaagcagaaaggtgttgatgtcaaaggaatctcaaaaactagtgtgccagtaaatgacgaagttcctcctttgctggatggcggtggaaagcttgaggtttggtgtattgatggcagtgccaagactgctcttccaaaggaagaacttggaaaattctacagcggagactgctatgttgttctctacacttatcattctgctgaaaaaaaagaagagttctatctagcttattggattgggaaaaatagtgtacaggaagatcaagaggcggcttttcaaatagctaatacaacttttaattctttgaaaggaagacctgtccagggtcgtatttatcaaggaaaagagccaccacaatttgtggctattttccagccaatggttattcttaagggtggtactagctctggttataagaaatttgtagaagagaagggtctgaaagatgaaacgtattgttctgatggcactgctctcattcaaatttctggaacagcggttcataacaataaaacgcttcaagttgatgcggtcgcaacatccttgagttccacagattgttttgttttgcaagctaaaaactcgatgtttatatggaatgggaatgcaagttcttttgaacaacaacagtgggctgctaaagttgctgaatttctgaagataggattagatttgggtcaactagagaccggtgttgctgtcaagcattgcaaggagggcactgagagctctattttctggtcttctattggtggaaagcagagttatacaaatagaaatgctgcacctgatgttgttattagagagcctcatttgtataccttctctctgaggaatgtgaccctaatttttcattttcattttttggcttcaatcgcgataacatcgtcaccatttgtcagggaagctggagatgatctgttgaccgaagacatgatgatacttgatacacactgtgaggtttttgtttggatgggtcagtgtgtggagacaaaagaaaaacagaaagcatttgacattggccagaaatacgtacaacatgccgtggcctttgaaggtatttctcctgatgtgcctctctataaagtcaatgaagggaatgaaccttgcttcttcaggacatacttctcctgggatagcgcacgatccgtgggtggcaataagggctcaggtgatggtgggccaactcaaagggcatcagccttggccgctctttcatctgcattgaatccatcgtcgcaaggaaaacagtcagatgagaagcccacaagctcagatgacagcgagcatactcaacgagcttcagcaatggctgccttgtcctctgcccttaatccatcgacaaaacctagcagcacacagacacaatctcattcaggtcaagggtctcaaagagccgctgctgttgcagcactgtccaatgttttgactgcagagggatctcatagcccccgccacagtaggtcgtccccaacagcagatgcagacaagactgaattagttcctacttctccccatcaattagaaacagggactgcagaagatgtccgaacagagcctgatgtctcacaggaacaaacagctaaagaaaatggaggccagacaacctttagctatgaacgattgatatcaaagtccactgaccctgttagtgggataaacaacaagcgcagagaggcaaggttattcacaataaagagtaaatggacatatttggtggacagtgaattcgagaccgtatttggcatgactaaggaggagttctacgagcagccaaggtggaagcaagagttgcagaaaaagaaagccgatcttttctgagacaaggctggcttcgaactaataaaagcccttacgtcgcacaggattgtccagcattctcatcatgctcgttccgcgtatgatgatcgatcaccagcagctttatccgtgagttgtataggctactcttttatctgcacatggtttgggagcattatatatatatcccccttgcccgtccattattctgaggtcgttcttgatgttgacctttcacgtgttttctttttttattgtattataaaaaatcaaactggtgtaaatggcattactagtgagatttttgtaagtaatggtgcatgggcaccaaggtgtatgcaacatatttttgttgtaagacttcagcttctattgttctggtggtgttctattgaccactggtctaatcatctttactggcttaggtaatggccaacatatcatggaccatgcaaaacactgtttcacattatagattactttatttataaaataaagtttgaaataaaagacgtagataagtaagctgctggagatagcattaccgctgagcactgcagctgtgctcaatgatgatatggttggtttgacaccctactagtcttcttgatggtgtggctgcggctctggaaggagaggaacaggctattttcaaagtatgaatctgtatggtgatgataaaaatttccaattagcctttcataaaaaagaa

SEQ ID NO: 87173 - DNA, 334 bp, Zea Mays
gtctggctcgaggctgatggccaggtcgaccatctcctccatgcataggacgacgatcaggccgcacacatcgttgaggagaagcaacaacagatcgagtaccccttcttcactgagggctcgtaggagcttctcaaggcgtgtgtcgacattgtatagtacttgctgccctaggacaaacgacaccacgaggacctcaatgaggatacagaggcggaggccaaactcgtcgtcaagaaggctgggcagctttgtgctcgagtggagcaagattggagatgatttctcgctcactggctgttccttctctcgtgatgcatcaatgcttaccaca

SEQ ID NO: 87174 - DNA, 87 bp, Zea Mays
gttatacatgatgtgtcaagaaaatacaaatactttataattcaagttttcttcattgcatttatacaactgcagtgaaaacatgta

SEQ ID NO: 87175 - DNA, 270 bp, Zea Mays
atgacattgtccgagttcacggtgaatgcagcggactcggcgtcgtcggaagaggcagactcatgggagatggaggtcctggcgcctatgcctggcagtgccgcgtgccgcggtgcggcctggccggtggctggtcgtgagccgcaagcgcgcagcgacgcggcgctggagaggagacacggcgcgggcgttggagagcaggagaggaggcgctgcgctggagaggagaggagggcaagagcagctgagcagcggagcaagaggcgctga

SEQ ID NO: 87176 - DNA, 1150 bp, Zea Mays
cggcgacaggcccagcacttggtccgccgcctgccggcacggcgggtagtagttcacccgcatgccctgcacctgcccttggaacatgccctgcagcgacgccgggtcggcacccacgccccttgccatgaactccagcaggcggtacgctagcttcgaagcttccaaggagtacgcgtccacggaatccctggaatcggttcaggtacggttaaaaggaagctggagcagttgaatatatggatcattcatctcggactcggcggactacggtcacctgaaggactcagggcgcgtcggccagaagcgcatgtccctggcctccctcggccgcacgatgaggaagagcatgtccgcccagtccagcttctggtcctccgacacgacgaaggcctggccgtagccttcgatgctgccggcctgctgcgcgcactccttcttggcttccagcggctgcctgaagaacccagctacgtccttcatcaggttcccagtcacctcggccggaacgccatggtggtacgtacctggaagaatccccagtggtggcacgcggctcccagcctggcgcactcctcctcgtacgaccccggatcgagcagcttgcggaaatcgatgaccggaatcgtgcaggcgctgtcgccggcggctacgacctcctcggcgctaggatccttgatgaggtacctcccgggcaccggcgcatcggctccgttgtcgttgcaagactccgcaagcgcctgcacgttagccaccgggagagacgaagacccgaggcctctggctgcgtccgccattcctcctcctcctcctctccttcagttcgttcggacttgttctgaaatattatgttttgaccatagcgcgctgctagcctgctacggtgtatttatgtacgtcaggaaaatttagtattaccaattaatgcgatagatcaacatatggtggtggtcgctggtcgagtccgagtgtagagtcgtctattgcgggtttgtcagttactcgtagcatgcttattttgaccaccatgtttcaccagcgacattattggtttgagtcgatttaacacttgcgttgcgtgtggtcggacgtacggccatgtggtaacctgtatcccaacgttctctaattttcgttctctaaagagata

SEQ ID NO: 87177 - DNA, 201 bp, Zea Mays
atgagctactgtgtactgcgggtcgaaaacttgacaaggatctcctgccagcgaattccaccaactgaaaacagaagggctcagacttcgtcagaagcatcatcctccgcgtcctccagctgctgcttcggcggaggcgtgccctcagtattcctgaccgcggccggcttctctgccagcctctgctctagtgccctctga

SEQ ID NO: 87178 - DNA, 204 bp, Zea Mays
gcccgtgtcattgttttcagaccgattatgtatccaggtatggacttgaagtttaatgccacacctgctctaggagagcagacaaccttcaagtgggtcattgatcatgggtgtaaaatggtatggttaccattgttgatattttatatctctggttaaattgcttccttcgtacaaccatagctattcaatgttttctttgag

SEQ ID NO: 87179 - DNA, 576 bp, Zea Mays
atgtcgttctgttttgtcattttatttttgttatatcttggaggtgttgagctagatcaatattttgccattgaatttatgagcggcctatatgttcactgtttgcccatttcttcagttaagctgaatgcaaaccgtcgagatggtcttggtcgaggacctccatggcacctacgttggtatgaagttgctaaatccaagcaatcaactgtctccacaaaaacaaagaagtttaaggaaattcaatttcagaaacttcagagattgccagatgggtgccatcctgtttttgataatgatcatctgtgttctataaataatcatgacctgcttcctaaaatgagtactccaagtgctgaccttcatctacttcctgagacaggagtggaaaacatgaggacacctaaaagtcttcacgctgaacttaagcgtgagctgtcaaagctaaatacggtgttaaagctaccatgttggtgtgctgcttcttttctgaaatacactgagttggatcatcgagaatcacttgcccttgcttcagatggattgaattatgaatgcaatgaggctccatcatag

SEQ ID NO: 87180 - DNA, 351 bp, Zea Mays
gtgcaggtagcaagtgcatttcacttgaaccctgtagtaattgctaaattctttgttatctatgtaaacttattaaccctctccatgtttttgcagtatctgaccgagaacaattatttcatgatgattggggtaattgggctgcccggtgtaggcaagtcaaccatcatgaacgagctttattaatatgatgcaagctacctggtacgatacagcttcgcttttgttgtgctctttctgatttgaaggaaaataagtagtgtagactcattatgttcttattagtgatagagaacaatcttagagacttagactattttgttttagcacatgatgtcttattcttctatc

SEQ ID NO: 87181 - DNA, 904 bp, Zea Mays
agagtattagccaacttagacgcatacgagcgcatgccagcgcaatggcttattgcgtttataatctccagcagtatcctgtttcgaataacaatgactgagtgttgtttggttcgcgaaatgtaacgtaaagggtaatggtttacactcgattactggccgtaacaagtttgaatagttcggtatcaatttttagtatgatatctgattacggttggactaaaacaaacataatttaacgttatcacttacccattacgttacaaatatgtgaaccaaacggcaccatggtgtctttgaacatcagtgatcaatgcagattattaatttattgttgcgctagcctgatatcattgagctccttgggggactgatcctaactagataaagggatgcatcttagacaattacacctcagcaacccccggtatcggtactccttgccctgctgtcaggatcttgtatgccttctggatttgtctagtgactggaccaattttcccgtcgccgatttcacgtccatcaatcattacaaccggtgtgatttcacccattgttccggtttaccatacctcatctgcagcatggaattctgacagactaatgcgtcgttcatgtaacacaaagttttctttcaccacaagatccatgacctttgctcgcgtaatgcctggaaggcaatagtcagcatgaggtgtcaatacaattccctttttgaccataaactgcagttgacattgacacaatgcagtttagagcagtcatgtatcaagtgtctactagtcgttttgataaaggtatgtatgcttacaatatttgttgcgtttgtttctgatacaaagccatccttatctagcataatggcatcctcagcctgggcaagattaccttctatctgcacgag

SEQ ID NO: 87182 - DNA, 100 bp, Zea Mays
tttttttttgctactagactatagtcgtattgctcaccagcagaacgggcatagcaagcattcatgtcaaatcagcccggtggcccggtccgtagaatgc

SEQ ID NO: 87183 - DNA, 2602 bp, Zea Mays
cgtgttgaagtcatagtggccagtgggggtggaccggacgcctggaccgcagatggcgtatcaaaaataaaaattcgatgccgccaaaaagctaatatatgggagggatatgtatttccttctccgatatgttaggacggcagttcccacaacatcttccccaacctcgtacgagccggctgcgagatccaacgacctccgcacggcagttccattagagatgcctctagggaagagatccacacgactatcctagaaatccgaaggtaattttgtttaactgttcatctttgttcgtcactcactggatctaggcttgaaaggcagcacgcaatcttgctgggccaatcctcaatccttgacacccccgccacacctccagaggccgcaagccatagccgacgaccgcccactgcaccgccggttcggtagccatcgcgccttgtccgcttctccatgcctcacctcctcctcttctctgttgcctgcctcgtcctcaccatcacggcgccgcgcgtatgactcgcgagcgcctggcgcttgcttctctcaatcgcttccgatcctggagctggcggctggccacccacccggtgcgcccgtgcgagcttttactgctccctccccttacggcctcataggaaccctcgttatggttgtgtcctgatgctgctcaggcttgccgactcgagaccggggtacggttgattttattactgcctctggcccccttgctgctatagctatatactagtcaatagtcatttactcctgctagtatgagctagtagcattcaacactactggaattcacaattattgtgttcattagggacataattagatacaactagcgtagctttgaaagccgcctaaggggccagtactattggttaatccattcagtaacatttctagctgtggtatgatcagttaatatgttgcttgtgtggctagtgttccctacattttctgctaataaggttacttgtatgatattttctatgattagtaacatttctagctgctagcctgctaccatggtatgatcagtaacattttctgttgccttccactgtggccgcgcgaatgactcgctccgagccttcagcggcctcctcgctcggcaaattctccgccgacgacagggagaaggtgctcactgccgttggagtacacacggcgatatctattgcacaacctacttcccagatacaggaggagggtgataaccacactgggaatcaagaaatcataccaaggtcaaatagaatgggcaggcaacttgaatcgttaagcagaggactgggaatcaagattccaacccaaatcactgaagggaacaaaagccagagccacctattcaagctactaagtttgcattagagggatggtcgccaaggccagggatttactgtcgaggtgtacaagtccatggcagtggctgtttgtgcagattagaagctgatgagggagtctcgtagcagaacttcaatgttgagatatggaaaagctacctatgtatcaagatatgtgaagactgcccgcctcaaacaagaggaatattttggtggagcgaagtttatgaagggcatggaggtactgctggtaacaagttctgaatgtcattaggtctaccattgatagctactgtgaattgtgctggtaacactggagccaagaacctctacatcatttctgtgaagggaatcaagggcgccttaacaggcgtccttctgcctgtgttggtgaccatggagaatggaaagcctaaccttaggaagaaggtgatgccagctgtcattgtgaggtagcgcaagccatggtgctgaaaggatgacgtctacatgtactttgaagaagcaagacaaatataaggatgctgaacctagtgcaatagatctttttaaggagatgcattgcagcaaaaagaaaggttttagcaaaaatgttcagaaagctattgttgatatggaagaaatggtggtaacatcagttcaagatggacaacaaccaaaatatcctacagaagttgtttatagtgtgcaactgggctccagtgtgttcttatgcaatcttggtctttagtccgtctccaagaaaatctcaacatcaatagtttctataaaggttcaacaacttcaggatcgactggaggccaagaagcaagaaaaagatagactttgggaagaagtgtaaaccttaaatgctcaggcagtcatctcaggagaccattgatagtatgaagaggtcgaccgaagaaaataacaatctccttagtcaactattaagcttcaatagaggccaagtgcctccatctcaagtctacttaaccattataggatctgcagccttatggttgctatagtagctagttacaatagctctggatttgaagagtagctctggatttgaagttataggattattttcaattaagcttaatgtttaattccttgagttgaagttataggattttctttggatcttatgtaaaaggatttgtagatatatgttttgaagttatatgattctttgttggatgaaatatttgtgttaaacaaattcataagatattttggttgtgatgtgtaatattcta

SEQ ID NO: 87184 - DNA, 1519 bp, Zea Mays
atgttaggacggcagttcccacaacatcttccccaacctcgtacgagccggctgcgagatccaacgacctccgcacggcagttccattagagatgcctctagggaagagatccacacgactatcctagaaatccgaagcggcctcctcgctcggcaaattctccgccgacgacagggagaaggtgctcactgccgttggagtacacacggcgatatctattgcacaacctacttcccagatacaggaggagggtgataaccacactgggaatcaagaaatcataccaaggtcaaatagaatgggcaggcaacttgaatcgttaagcagaggactgggaatcaagattccaacccaaatcactgaagggaacaaaagccagagccacctattcaagctactaagtttgcattagagggatggtcgccaaggccagggatttactgtcgaggtgtacaagtccatggcagtggctgtttgtgcagattagaagctgatgagggagtctcgtagcagaacttcaatgttgagatgtactgacttaactatgttcatgtagtatatcatgttactttttttattaaactagcaaaaggttgtgttaataattcatggtgtactaaatgtgataccatcttcattttgtctaattggatgattaatgccatgcacattaaagatggaaaagctacctatgtatcaagatatgtgaagactgcccgcctcaaacaagaggaatattttggtggagcgaagtttatgaaggtaaaaatacttgtttcactcaaaacctaagcattttattagcagatgaccatttaacgttgtaacatctatttatctccatctccaaaatctgctctttttagctaaccatagtgtgacttttctctctcgattcactaagattctgaaatctgaatacatactagggttttgttttggttcaccattttgctatggaaatatatgtttctgaaaccagcttagatttcaatgctatatcaaaagctccaaatcgaagaccatcatcttgtagtatggatatcccttttggttaatttcctttgcttataagttgtcatatattcatgttcataatgacttattttgtgatgtcatctttgtttctttgctactatattgatagcatgtttggattgagagcccagtttattcttggttatggcatcaataagtagacaatagtatcatagaaatcatcttgagatcttaccatctgacagttcaatgatcctaatgtaccaattcaaacccatgaagagtcagtttaactatttaagccttttagtgtaattcctatctaagcgagctcacctggctgtcctccttcagtctttacccgttacaatcaacttcctgcagaatcatattgttacgttgaattgctagactctgttcctgcttgtacacttcaatgctttgcttggtgagtgatatgcaaacctgtggacttgtagagtaatagcattatgaaaacataagcctactttgaattag

SEQ ID NO: 87185 - DNA, 1065 bp, Zea Mays
atgttaggacggcagttcccacaacatcttccccaacctcgtacgagccggctgcgagatccaacgacctccgcacggcagttccattagagatgcctctagggaagagatccacacgactatcctagaaatccgaagcggcctcctcgctcggcaaattctccgccgacgacagggagaaggtgctcactgccgttggagtacacacggcgatatctattgcacaacctacttcccagatacaggaggagggtgataaccacactgggaatcaagaaatcataccaaggtcaaatagaatgggcaggcaacttgaatcgttaagcagaggactgggaatcaagattccaacccaaatcactgaagggaacaaaagccagagccacctattcaagctactaagtttgcattagagggatggtcgccaaggccagggatttactgtcgaggtgtacaagtccatggcagtggctgtttgtgcagattagaagctgatgagggagtctcgtagcagaacttcaatgttgagatatggaaaagctacctatgtatcaagatatgtgaagactgcccgcctcaaacaagaggaatattttggtggagcgaagtttatgaagggcatggaggtactgctggtaacaagttctgaatgtcattaggtctaccattgatagctactgtgaattgtgctggtaacactggagccaagaacctctacatcatttctgtgaagggaatcaagggcgccttaacaggcgtccttctgcctgtgttggtgaccatggagaatggaaagcctaaccttaggaagaaggtgatgccagctgtcattgtgaggtagcgcaagccatggtgctgaaaggatgacgtctacatgtactttgaagaagcaagacaaatataaggatgctgaacctagtgcaatagatctttttaaggagatgcattgcagcaaaaagaaaggttttagcaaaaatgttcagaaagctattgtaagtgcttattttccttgcatgttcgtactcacaacttgcaacttgcggtatactatcctgatgaataacc

SEQ ID NO: 87186 - DNA, 1629 bp, Zea Mays
atgttaggacggcagttcccacaacatcttccccaacctcgtacgagccggctgcgagatccaacgacctccgcacggcagttccattagagatgcctctagggaagagatccacacgactatcctagaaatccgaagggagaaggtgctcactgccgttggagtacacacggcgatatctattgcacaacctacttcccagatacaggaggagggtgataaccacactgggaatcaagaaatcataccaaggtcaaatagaatgggcaggcaacttgaatcgttaagcagaggactgggaatcaagattccaacccaaatcactgaagggaacaaaagccagagccacctattcaagctactaagtttgcattagagggatggtcgccaaggccagggatttactgtcgaggtgtacaagtccatggcagtggctgtttgtgcagattagaagctgatgagggagtctcgtagcagaacttcaatgttgagatatggaaaagctacctatgtatcaagatatgtgaagactgcccgcctcaaacaagaggaatattttggtggagcgaagtttatgaagggcatggaggtactgctggtaacaagttctgaatgtcattaggtctaccattgatagctactgtgaattgtgctggtaacactggagccaagaacctctacatcatttctgtgaagggaatcaagggcgccttaacaggcgtccttctgcctgtgttggtgaccatggagaatggaaagcctaaccttaggaagaaggtgatgccagctgtcattgtgaggtagcgcaagccatggtgctgaaaggatgacgtctacatgtactttgaagaagcaagacaaatataaggatgctgaacctagtgcaatagatctttttaaggagatgcattgcagcaaaaagaaaggttttagcaaaaatgttcagaaagctattgttgatatggaagaaatggtggtaacatcagttcaagatggacaacaaccaaaatatcctacagaagttgtttatagtgtgcaactgggctccagtgtgttcttatgcaatcttggtctttagtccgtctccaagaaaatctcaacatcaatagtttctataaaggttcaacaacttcaggatcgactggaggccaagaagcaagaaaaagatagactttgggaagaagtgtaaaccttaaatgctcaggcagtcatctcaggagaccattgatagtatgaagaggtcgaccgaagaaaataacaatctccttagtcaactattaagcttcaatagaggccaagtgcctccatctcaagtctacttaaccattataggatctgcagccttatggttgctatagtagctagttacaatagctctggatttgaagagtagctctggatttgaagttataggattattttcaattaagcttaatgtttaattccttgagttgaagttataggattttctttggatcttatgtaaaaggatttgtagatatatgttttgaagttatatgattctttgttggatgaaatatttgtgttaaacaaattcataagatattttggttgtgatgtgtaatattctatgacgatatgaatttatatgacatgttccttctgatg

SEQ ID NO: 87187 - DNA, 765 bp, Zea Mays
gcggcgagcgctccagttttgtgcgtgatgcagatgcaggcagcaggcaaggagcctgcggccgcggcggtccctgccgccaacaagccaccgagcatctgcgacaggctccaaagggccttcgctgcccggccggcgttccgccccctccgccgtatcaccgtcggccgccaccaggacggcggagctgccaagcctgctggtgccggtgatggagtcagcgcagcgtttgggccagctcctaataaacacagcggcccgccattgccggctccgccggccacagtagcaccgcagtgtgagcagccggttcccgtgcgtttaccagccgtcgccagcaaggtggcggcgggcggcgcgccaacggggccgccggtgcctgtgccaccgccggacgttatggccggggacatgggccagcagatccaagggaagaccagggtgggctccagggtccgcaaccgcaaggcgctctccaagtagtagagaggtgaacacggtggccggtgggatttaggaagaagctaatgatcctggtcgtttatgcagcagcgatccttacatttgattatggatatcaggatgtggtttaatctctgtgagatcctttctgtgagcgtgagaacgttgatatcctatcaaagttctcggaatatacaatcactacaaatgtaaaatatcatgcttctagtgtactagctggatgtccgtgcgttgcaacgggaatatataataccagtatactacgataacttatatacaaaa

SEQ ID NO: 87188 - DNA, 864 bp, Zea Mays
atggagaccccggcagcggccctcgacgttgtcgccgccgagcccgtgctggttccaccggtggtccaccgcccggatgtggccggcgaagacgagcaggaacggtggcagcgagccgaggtggtagatccgccgccgcttctgcacggccatccactcctccacccggcgcgtgtacccgccggcgcgccacttgtcgacgtccatgaccatgacgcccgtgttgaagtagcatgggcggcgcccgtggaaggtgccgttgagcgccgggtgcgaccagaaggcgtccgtgaagtagttgctgaagttggcgtggcagtactcgggcgccgccaccacgtggcccgcgaggtccacggacgccagcgtccggacgtcgtccaccacgaccacgtcggagtcgaggtacgtgacgcggcgcacgtcgcgcggcagcgtgtcggcgaggtagacgcgcgcgtagttgagcggctggtccagctcctggcgcaccgaccgcgagatacggtcgcggacgcgcgacgggtcgaagcggtacacccgcaggtcgaggaacgggaacgaggcgcgcagcgcggcggagaggccgtggccgtcggcgtcggcgtcggcggtgaggaagtggaacgctacgctctcggggcacgccgtgtgctgcaggatggacagcaccgcggccatggtgccgcggaggtagttagcgtccagcgtcatggcgatgtccacccggccgtccgcgccgcagtcggggccgttccggaacgcgggcgcctcctgtttgttgtatggcgccgctggagaggggacacacaaggaccgaaaggcggtcggccgattggggctgccgaatgcgaagccgggtag

SEQ ID NO: 87189 - DNA, 759 bp, Zea Mays
atgtccagcccgttctttccccatgacccctcccaacacccaccgacgctgccagatgtggatgcgcccgtgtcgccaccgctgcagccgagcgacaccctcgacgacgacaaggacgacgaggacgacgagttcgacccgctgttctcggagaccaccagcggcgcgaggtgtgcttcagctatgcagttcagcagcgtgcttcccctagacggaaaagcgtgtatgagcccagtgaggagaggcagtggaggttatgggagtgagaggatgaggatcaactgctgcagcatcagacgcaacaaggcactgaggaggatgtgtttcagtgcaaggggtgctgtgagcagcacccagtgtgtgctcacatcagatgctggcccagacactcttgttcctattggaggatgttacaggcttattgatatccccatgaacaactgtttcaacagtggcataaacaagatatttgttatgactcagttcaactcagcttctcttaaccgtcacattcatcgtacctatcttggtggggggatcaacttcactgatggatctgttgaggtgctggctgcaacacaaatgcctggggaggctgctggttggttccagggcacagcagacgccgttagaaaatttatctgggtacttgaggattattacaagcataaagctatagaacacattttgattttgtcaggagatcaactctatcgtatggattacatggagcttgtgcagaaacagtcaatggggtga

SEQ ID NO: 87190 - DNA, 1432 bp, Zea Mays
gtacaaggactatcattttaactcttggtgtagtcataatcacttcgattggtttgtttccttacaacatttattcataccaaattcctcaaaataatgctatcccaaagactctggtttcttgaaccattctgcagtttttgtctcactacttgtatctacgttttttatctttattatttgacctgtttcaaactatcagtccatctcaatctatattagttcttgaaggaatagtaaatggttctattgatggaaattggaattgagaatacatgccttgacatatataagaacctgtttgttgtttgatgaactaggaaataactaaaaattatttggacagagacatcacaaatggatctgatcacaaatcacaaatgtgacaagcttgctaaggtgaaactgctgaagatgttgtatgactactatgccgcgggcacatgacatcaattgactcaaggagaaaagagaggcgtcatccaaaattctgagtttgttcgctctattagagtccagaggcggtactgggcgaggagctatgctggatggataaggtttaggagagcacaaccaaatgcagcccattacgctccttccctttcatctgtctgcgcgccttcactttcatctggcactgggagttcctgtacatagacttgtaaaagctgccgactcagtttcggtatgcctatctaaagggttaggcgcacccatcagatcagttgttgttggttcagaggccttcatcgacaaggctagaattcttaggaagaccctaggcggtgggatgagacaggttggatttctttgtgctgctgcttatgttgctgttcgtgacaccgtgggaaagcttgcggatgatcacaggaaggctaaagccttggcagagggcctgacgaaaattaaacagttcacggtggattcatcttcggtcgagaccaatatggtgttcttcgatatcgtggatccacacatttcaccgagcaagctatgccaagtcttggaacaacgcaatgttcttgcaatgccagcaagttcaaaaagtgtcaggttcgtcatccattaccagattttagacagtgatgttcaatatgcattgacatgtgtcgagatgccaaaaggcccaaaccagagtaacactttaaagcagacacaataatcaaaagtcatggctacaatgaatggcccaacacacgtgtatttgcaacgtgcaagggtgacaagaatatgagcactctaatgcaccacccttttggtaactgggctgatacagtgagtcgctatttcgcaagatcgtcgtggccctattgggaacggagatgctcttaatgaagtaggaggaccgaccaatccaactagcaacagcaggcagggagtggatgcgcctgctagaagagtgctagctccgcgcatacgctcgctcgacaaa

SEQ ID NO: 87191 - DNA, 621 bp, Zea Mays
cccatgttctagttagtgacaaaaagaaagtgtgtctgccgttactacgtgcctcggtgcctgcatcatagtcattcgtactcgtacatatcctcctctgctgtcctggcgtttgcgggcccggtgctttctcttccttccggccgcggcaatggcgtcggggaacaacaacaagcagaggagcgaggaggagtggcgcgtcgtactctcccctgagcagttccgcatcctccgcctcaagggcaccgagttacccgggacaggagagtacaacaaattctacggcgacggggtttataactgcgctggctgcgggactcccctgtacaagtccgccacaaaatttgattctggctgcggctggcctgcattctttgaggggcttccaggagccataaaccgaacaccagatcctgatggtaggagggtagagatcacatgtgcagcctgcggtggccatctgggccatgtgttcaagggtgaaggcttcaagacacctactgatgagcgccactgcgtgaatagcgtctcgatcaagttcagtcctggctcctcctagatcatcttgagattctcgtgtcatggaactgcgggaagtacgacgaataagatttatgagga

SEQ ID NO: 87192 - DNA, 639 bp, Zea Mays
cccatgttctagttagtgacaaaaagaaagtgtgtctgccgttactacgtgcctcggtgcctgcatcatagtcattcgtactcgtacatatcctcctctgctgtcctggcgtttgcgggcccggtgctttctcttccttccggccgcggcaatggcgtcggggaacaacaacaagcagaggagcgaggaggagtggcgcgtcgtactctcccctgagcagttccgcatcctccgcctcaagggcaccgagctcacattgatgtccaggttacccgggacaggagagtacaacaaattctacggcgacggggtttataactgcgctggctgcgggactcccctgtacaagtccgccacaaaatttgattctggctgcggctggcctgcattctttgaggggcttccaggagccataaaccgaacaccagatcctgatggtaggagggtagagatcacatgtgcagcctgcggtggccatctgggccatgtgttcaagggtgaaggcttcaagacacctactgatgagcgccactgcgtgaatagcgtctcgatcaagttcagtcctggctcctcctagatcatcttgagattctcgtgtcatggaactgcgggaagtacgacgaataagatttatgagga

SEQ ID NO: 87193 - DNA, 1755 bp, Zea Mays
gacaacctaaaagcagaaagtataactgtataagtaatgccatcagctccgtacttgacgtagaattccaatggaaatggaactagaccctttcctgggcgtcgtgctcgccaccgccgtcctcctcgtcgccgtcctccgccggaagcgcggctccagccgcaagtacaagatgccacccgggcctaggccgtggccggtgatcggcaacctcaacctgatcggcgcgctcccgcaccgctccatccacgcgctctccgcgcggcacggcgcgttcatgtcgctccgcttcggctccgtccccgtcgtcgtcggctcctccgtggaagcggccaggttcttcctcaggaccagcgacacgtcgttcatcgaccgccccaggatggcggccgggaagtacaccgcctacgactactccgacatcgtctggtcgccctgcggggcgtactggcgccaggcgcgcaagctctggaaggcccatctgttcagcgacaggcagctcaggtcgcaggagcacgtccgcagcgaggagctgcgcgtcctgctgcgcgccctgtcgtcgtcgtcctccgcgggcgcggccgggcgcggccggcgggccgtcgcgctcaaggagcacctgctcatgtacagcctcaacgtgatctcgcgcatggcgctgggcgggaagtacgtcggcgagggcggcaccgcgggctcgccgatctcgccggccgagttcagctggatggtcgacgagctcttcctcctcaacggcgtgttctgcgtcggggacttcatcccgtggctcggctggctggacctccagggctacgtcgggaggatgaagaggctgggcaagatgttcgatcgcttcctggagcacgtggtggacgagcacgaccagcggcggcggcgggagggcggcgggttcgtccccgcggacatggtggacctgctgctggagctcgccgacgaccccaaactcgaggtccccatcgaacgggatggcgtcaagggattcgcgctggacctgatcgctggcggcacggactccacggcggtgaccatcgagtgggccatgtcggagctcctgcggaagcccgaggtcctcgccaaggtcaccgaggagctggacggcgtcatcggccacggccgcctggtcaccgagcaggacatcccggacctgccgtacctggaggccgtcgtgaaggagaccctccgcctgcacccggtgacgccgctgctggcgccgcggctgtgccgcgaggacgcgtccacgggcagctacgacatcccgcggggcacgctcgtgttcgtcaacgtctgggccatcggccgcgaccccgccgtgtggggccacgacgcggaggagttccgcccggagaggttcgtcggcagcgccgtggacgtgaagggccacgacctggagctgctccccgttcgggtccggccgccggatgtgcccgggctacgtcctcgggctcaagatggtgcaggtcaccctggccaacctgctgcacgccttctcgtggaggctgcctgatagcgtggcgccggagaagctgaacatgcaggagaagttcgggctcgccgtgccgcgcttggtcccgctcgaggccgtcgccgtgcccaggctgccaccacacctgtatgccgggccatgatgcatgtctatgtttgtttttgtaggcgcatacaactgtctcgtaataaaagatacatatcttttctctgtacatatacacctaataaagagacaaacaatatcgtcta

SEQ ID NO: 87194 - DNA, 78 bp, Zea Mays
gacaaacggattgacaccgacacataaaaaacacctttttagacatttctcgagaccaccactactcgtgcccatgcg

SEQ ID NO: 87195 - DNA, 1477 bp, Zea Mays
ctcagataaagagtggactgagcagtgaagcgtcgatagaaaaatagatcaaaacctagttttaattagaatagatttgtccacgctaactatacaaaaaattgtttattttggtgtgtacctaaacctatgtataaggggttaaaaaattgaggtggggccatggcccaccttgcccaccccttggatctgccactgcatgcggtggttcgaccagatccatctcacacccttatcctctttacgcctcaccactacagagaaaaagagaaacctgcgagcgacggggactatggccgccacccgcaccgccctggccctgctagggcacgagggcatggaatctgggcccaggccggcggcgccgcgccgcagcaggctacgcgtcgtcgccgtcgcgctgcggaccaggcccaccagcctcgcggccccgggtctcccgcccgcggcgccggagcccgtgctgccgtcgccgcccgtggccgcgggcgccgcggcggtgctgctcgaggcgggcgtgccgcctgccgacctccggcgcgcggcggggatgtgcccggagctgctgtccgtgtccgcggaagccgtcgaggccgcgctccggttcctcacggaggaggcgggcgtcgccgaggccgacctcccgcgcgtgctccggcggcgcccgcgcctgctcgtgtctcccgtggcggcgcggctgcggcccacgctctacttcctgcgcgcgctcggcgtgcccgacctgcaccgccgcgccgacctgctgtccttctccgtggagggcaagctgctgccgcggctcgagttcctcgagtcgctgggcctgccggcgcgcgccgcgcgctccatggcgcgccgcttccccgcgctcttcggctacggcgtggaggggaacatgcggcccaaggcggactacctcctgggcgccatggcccgccgcgccgacgagctgtacgacttccccgagtacttctcctacgcgctggccacgcgcatcgtgccgcgttacgaggcctgcgccgcgcgcggggtcagcaggctgccgcttcccgccatgctccgccccggggacgccaagttccgctccactctcaccagctgcgtcgggtccatgctgccccggaggcggtcggcgctgtggcacgccacgtgggtggatgacgacgcggcggcggcggcggcggcgaaggagaccacggtgtgacgtgcgcattggtagcgagcgagaggctcttgcctcttggtggtgtaacatatgtccataaggatttgcattggctgcttgtaaagtatgatagccatgatgaattatctagttggttcctcccagtgaacaatggcactgttggctatacttgcttatgcttatatatatacaggtccctacggccctacctatgcttttcgggtcctggcgcaaaagacacactgatgtcatataaaagaaaaatataaatatacacattatcaaagtata

SEQ ID NO: 87196 - DNA, 2087 bp, Zea Mays
ggttataacaatctagataaatattccttctaatccttttctggattgacctaacggaacaagcgagaaaggggactagtatcaaaaaaaagggctcgtcgcacacccctactggtacgtcccaactcccaagtccccatggagctaccagcaccgtcctccgcatccttcttcctcgtcgccgtagtggctggcgccactctcttcctcgtaaccgttctccggctccgcgcgcgctcgacgcgcaagtacaggctcccaccaggcccgcggccgtggccggtgatcggcaacctgaacctgatcggcccgctgcctcaccactccgtccacgagctctccaagaggtacggcccgctcatgtccctgcggttcggctcctttcccgtcgtcgtcgcgtcgtcgatcgacacggcgaggctcatcctcaagacccacgacctggccttcatcgaccgtcctcagacggcggccggcaggtacaccacctacaactgcgctggcctcttctaccagccctacggcgcgtactggcgtcaggcgcgcaggctttgccaggccgagctcttcagcgcgaggcggctcatgtcgctcgagcacgtccgcagcgacgaggtgcgcgccatgctgagcgacctgcgtgcggcggcgtcggcgccggccggcggccacgacgcggtgacgctcagggagcacctctacatggtgaacctcagcgtcgtctcgcgcatgctgctgggcaagaagtacgtcgtcgaggggtctagctcgccggcgacgcccgaggagttcaggtggctgatcgacgagcacttctttctcaacggcgtgctcaacgtcgcggacatgatcccgtggctcagccccctggacccgcaagggtacgtcaagaggatgaagaggtcggccaagatgctggaccggttcctggagcacgtggtggacgagcacaacgagcggcggcgccgagaaggagaggatttcgtcgccatggacatgatggacgtgctcttggagctcgctgacgaccccagccagctcgaggtccccatcacgcgggataatgtgaaggggttcactctagacctgatgggcggcggcaccgacacctcggcggtgactgtggagtgggccatgtcagagctcctgaggaacccagaggtcctcgccaaggccaccgaggagctggaccgtgtcgtcggccgcaaccgtcttgtggcagagggggacatcccaagcctcccgtacctcgacgccgtcgtgaaggagaccttgcgcctgcacccagtcgcgccgctcctgactccgcggctgtgtcgggaggacgtgtccgtgggcggctacgacatcccggcgggcgcgcgcgtcttcgtcaacgcctgggccatcggccgtgacccggcggtgtgggaagctcccctggagttccggccggagcggttcgccggaagcggcgtggacgtcaaagggcagcacttcgagctgctgccgttcgggtccggccgccgcatgtgccccggcatgggcctcgccctcaggatggtgcctacgatcctgggcaacctgctgcacgccttcgcttggcggctccccgacggcgtggcggccgaggagctgggcatggaagaaacgttcgggctcaccgtgccgcgcttggttccgctccaggccgtcgctgagcccaagcttcctgctcgcctgtatgctgtcctgtgatgcatgcaagcctatcttgctctgcctaatatttttctcttagtaattaagtggtttagtcgtttagaacatcgtatcctgggtctttatatcatctgaataaagcattgcacgtgaaagctagcagagatatcacaagactatcaccgagattcgaaggcttggaatttttgtttggaaaatctcggtatacttcaattgaactctcaatcattagaccattttcagtgaaagttctactctcatttaaatgtaacactagtcagttactcgtgctttgctacggtatttttctaaaaactggttggactaaatttatttggtctgtgttgtaacttagcaatatatacagcacatgttcatttgtcgct

SEQ ID NO: 87197 - DNA, 3368 bp, Zea Mays
atggagctggagtcgcagccgaggagacaggagagcatgcgcatgcggtgcgggtctgcagatcagcgggtggaccgtccagagtccacgagctggagcgcagccgcagcgtccgccggcctggcttccttcctgccctctgcgtctccgccgcgatgtgcagcggtcaagaaatcaggctccgcgtccgccgtggacgtgtggataaggaaggacgagaggtcgggacgtggtccgtgtccccaagtcggaacgagccgagacgtgcgtgcagcaggcgagttgactgttggcgctgaatccttgatccagtcggcgtcaacagttctcgattcctccttgcccaagtttccaattccagttctcgagagaaaacgtcgtgcagtgcagcgcaactgggtcgcccttctcttcgacttcttgagtcgcccttttcgtccccttgttgtcggagtcgcgcgagggattcccccttcttttccccctcctcctttctcgggatcagcgagcctaggcctagctgaggtgttggcgccagccagcatgaagtacaagaagagccgcgacgccacgggcctcgggtccaacggcgacggcggctggcagaaaggcggtggcgatgtgccgccgagcatccagctggacatcatggagcaccgtggcgccgccgccacaaccgggctcgggaccggaggcaccgccggctcggcgtccttcttcgagccgtggcgcgagcggacgccgggcagcagcggaagcgggcgcggcagctccggcggagggggcgacggccgggagccgcccgagaagcggctcacgctgttcgccctccggctggccgtgttggagaaagcggcgagcgggctcgggaagctcgacttcgtctgggccaccgtcgtgctcctcggcggcttcgcgagcaccctcagcatcaccgacttctggtgcgtcaccgtcatcctcgtcggcgagggcgcgcgcgtcttcggccgcagccacgagctggagtggcagcagcacgccacgcagacctccaccgccggcggcgcgctgcgctccagctcccgcttcttccgccacatcgtgcacgccctcgtcgacccggccgcggcggccgctggcggccgccgcaacgacgacgacgacgcgcgcgccagggccgcgctgttccagcgccagatcgtcgcgttcatgaggcgccgcgcctggcacgcgccggacgtgtcgctgctcccctacaccggctgggtcttcgtctccaggaagatcggcaggctgctcaactggatgcaggtgctctccgccctggcctgcgtcgtgctctcggtgatgcgtctctggaagcaggacttcggcggccgcgacagccgcaacatgaggccggcgctcctgctcttctacaccctggcgctcgtggaggcgtcgctcttcctgttcgagaaggcgtactggacgtggaaggtctccgtctgcaagctgctccaccaggtgagcgccgagtgcgagctgggcccgtacgggctcgtctccctcaagcgcttcttctacgacgcctactcgcggtgcatcgccgggagcatcttcgacggcatcaagatggacctcgtcaccttcgccgaggacctcatcctctcggacttcctcgacgagcagatcatcggcgtgcgcatcctgcagcagttcgccaacagcgagcgctccgcgagcgacacgctgcgcaaggtcggcaccaccccgaggtccatcgaccggctcgtcgagatgctcaactggaagcgtaccgaagaggatgaggtgcgactgtgcgccgccgagatcgtgtccaagctcgccagcaagcgtcagaacgcgctccgcgtgtccggcatccctggggccatcgagtccgtcacgtccctgctctacaccgccacgagtccacccgtgtccggaacgcacccgcagctgcccggtgctcccgccgagcacggagcctcaccgccggcggcgagccgcggctacgaccacctgcagttcaacttgctgggcctgctcatcctcaaaaggctcgccagggaccacgacaactgcggcaagatcggtaacgcgcgaggcctgctcgccaaggtcatcaacttcacgcaggcgtcgcgggctctcctccagaacccgcacgtcaccgactcgcaggtgcgcgccatgaagcgcgcgctcaaggtggtcaagatgctcgtgtccacgacgggtagcaccgggaaggcgctccgggagagcgtcgcggagaacgtcttcacggtgagcaacctgcgcggcatactgcggtacgggcagcagcacagggagctgcagaagcttgccacggacgtgctcactgggctggccatgcacgacagcggcaaggaggccatcgtggccacgggaggcgtcgtcaagctgctgctttcgatattcttcaatgtccaagacacggaactcggtcgcgaggccggcgaagcgctggcgatgctggctctggagagcgaggccggatgcgcggcgatactcaggcagaccgacgtgctggaccagctcgtgtcggcattgcaggacggcgacgcacggcggcgcctcaacgcggcgagggtcctgcggaacctgtgcgcgtactcggggcaacagcagagggagcggctgcgcgtggtgaccaaggccttgccggcggtgctgaacgccaccaaggtggacaaagacagaatactcgaggtgtccgtcggcctgtcgacggagatctgccagttcatcgacggcgagcagtttgccgccgagctgcgcggcgccggcgtggcggacgaacgcgcatacgtggagctgctggcgagcatcctgaagcagtacaggtatccggacatcagggtcccacgaatgcgacggttcgtggtgcagcaagtcatctggctgatgacgagttcgggcggaggcggtgaccacagcggcgggtacgttcagctcctcagggaggtgggcatgaagcggctgctagagtccatcgctgacaccacgtcggagctggagtgctaccacgttttctcaggaagcgtcggcatcagcaagcaccgtgagagcttctccgccatcgtggactccgcgctggagctgatcgccggcagcggtgatggagcccgagctgaagactgaaaggttgcatggaattatgaaaatacataaaagggcagctgaagtctgcactctgcactcgtgtagaatgtaaaaagaatgtaaagaagtatgaaaattacaagggacaccgtgtagaatttaaagttttgtacagagagagagagacttgcatgccatgccaaacgaggatggtttcatcaagtagagaatatataatagttccaagcccaact

SEQ ID NO: 87198 - DNA, 2967 bp, Zea Mays
tgctcatgcgctccattccgatcctggcttggaataacagtgagcctgtgcatacacgttgggcgccatgatgtacaggaagggccgcgactccaacggcgacaagtcacaggaaggcggcggcgatgtgccgccgagcatcaagcttgacattacggatcaccctgctagcggcggcggcaagacggcgtccttctccgagccgtggacgccgacgcctggaagtggtagttgtcgtggcagcagcagcagcagttctggtaggagcgacccgccggagaagcagctcacgctgttggcgctacgcgtggctatcctcgagaaggcggcgagcgggctcgggaagctcgacttcgtgtgggccaccgtcgtgctcctcggcggtttcgtgagcacgctcaacatcaccgacttctggtgcatcaccgtgatcctcgtcggcgagggcgcgcgcgtcttcagccgcagccacgagctggagtggcagcaccacgccacggaaacgtccaccgctggcggcgggctgctccgctccagctcccggttctttcgccgcatcctgcacgccttcgtcgaccataccggcggcggcggccgtaacgaagaggagccgcatcagcacgccacgccaaccaccgacgctggcggcgtgctgccactgccaccgctgcgctcttgccgccggttcttccgccgcgccgtgcacgccctggcccacccgggagcgggcggtgcagatgtcggcggcgacgcgatcacgacgtcggcaatgttccagaaccagatcgtggccgtcgtgaagaagcgcactgggcacgcgccgaacgatgtgtcgctgatcccctacaccggccggatgttcacctataggaacatcggccggttgctcaactgcctgcaggtgctctcggcgttcgcctgcgtcgcgctctcgctgatgcgcctctggaagcacgacttcggcagcggcggcaacatgaggcctgcgctcctgctcttctacaccctggcgttgctggaggcgctgctcttccttctggaacaggcctactggacatggaagttctccttctgcaagctgctccgtcatgtgagcgaggactgccagctgggcgcgtacggtcacgtctccctcacgcgcttcttctacgacgcctactcgcggtgcgtcactggcagcatcttcgacggcatcaagatggacctcgtcaccttcgctgaggacctcatcctgtctgatttcctggacgagcagctcatcggcgtgcgcatcctagagcagttcgccatgaaggtgaactcggcgggcgatacgctgcgcaaggtcggtactagcccccggtccgtcgagcggctcgtcgagatgctcaactggaagcggcctgacgaggtggaggtgcgccagttagcggcggaggtcgtttgcaagctcgccggcgagcgccagaacgcactccgcttgtccgccatccccggcgccatcgagtccgtcatgtccctgctctacacaggccggagcgccgccgtttccggcatgcacccgcaaccgaaccatgctgccggtgagggccgcgacttcgacaacgactacctgccgctcaacctgctggggctaagcatcctcgagaagctcgccaaagatcaggacaactgcgggaagatcagcaacgcgcgcggcctgctcgccaagatcatcgatttcacgcagacgtccaaggatctcctcggcagccaatgcgtgtcggattcggcggtgagcgccgtgaagtgcgcgctccaggtggtgaggatgctggtgtccacgacgggcaacacgggccacgcgctccggcagggcgtcgcggagaacgtgttcgctgtgtgcaacctgcgcgggatactgcggtacgggcagcggcacaaagagctgcagatgctgaccatcgacgtcctcaccgcgctggccctggacgacagcggaaaggaagcgatcatgggcaccggagggttggtcaagcttctgctctcgatattcatcagcgccgaggagggagagctcggccacggagccggcgaggcgctggcgatgctagcgctggagagcgagacgggttgcgcggcaatactcaagcgagccgacgtgctccagctcgtctcggcgttgctggacggtgacgacgcccgccgactgcacgcggcgagggtgctgcggagcctgtgcgcgtactcgggcccagaatacagggagcgactgcgcgtggtgaccaagttgttgccggtggtgctgggtatcaccatgacgaagagcaacaaggtcctggaggtgtgcatcggcctgacgacacagatctgcacgttcatcgacggtgaccggttcgctgccgagctgcgcggtgccggcgtggaggagggggcgtatgtgcatcggctggcgacaatcctgggggagaacgagtacccgaaggtcaagatcccccggatgcgacggttcgtggtgcagcaggtcatctggttgatggcatgctcgggtggtggcagttacatggagctgctgaggggagttgggatggagaggctgctcgagtccatcgcagataccacatcggagctcgagtgctaccatgtcttctcgggcagcgtcggtattggcaagcaccgtgagagcttcccagacattgtggactccgcgcttgagctgatcaaaggcggtggtgacagagctccagctccagctccagctccagctgaaaagtgaacagattcatcaaatgtaatatagtcttccgaattatattaaaaattcatggtacatatgaggcaatgtgatcagggaaaggcagaatagttggtttacattagctagattcatcaagtacaagagtagaatgtatatagcagtagtgtcgtgcataagagttctctgtatcatggactatccaataaagagataagctagtcttggcattgctaaggagacatgaaacaaga

SEQ ID NO: 87199 - DNA, 1374 bp, Zea Mays
atggaagatatatactccggtccagcgagtaaaagagaagaaaatccggtctgtaccgtaccagacggcccagaaggccagaaagggaaagacggcccatctagtactgctagacaaggcgacaagctgcgacgccggcggctagaactccgggaccgggactcattcggtgccgcgcgtctactgctgatggaggctatggatttcaccgtcgccagcgccgacacggggtgccaggaacctccgaatacgctggtggactgggcgctggagatcctctccacagccgatccggacgagaaggcccgcctcggggacctcgccgcgtcgcggtggctgcgcggcgacatcccgcttccctacgacccgtcccgccccgcgcgcccgccgcccgaccgccccgcccggagcgccgaggtgcggctgctcccgccgtcgcggatgccgaagctgggcaagggcggcagcgcgcagagccgtttggccatgctccactcgctggcgcacaccgagagctgggctgtcgacctttcctgggacatcgtcgcccggttcggcgcggccatgcggatgccccgcgacttcttcgacgacttcgcgcgcgtcgcgcaagacgaggggaggcactacacggtgctctcagcgcggctgagggagctcgggtcgcattacggcgccctcccggcgcacgacgggctatgggactcggcgatgcgcacctcgcatagccttctcgcgcgcctcgccgtcgagcactgtgtccacgaggctaggggattagatgtccttccaacaaccatatcaagattccgagcaggtggggatgagcaaacagcaagactactagaagatattatttatcctgaagaggtgacacattgctcagctggtgttagatggttcagatacctgtgccttaggtcccacggtaatcacccaacctcatgttcagttcctggactggaaccccgttcctctgggctgccgggggatggcactgctgatggtaagacagctagggaggctgaaggtgaacctacacccaaactggcgaaagacgtcaggggtgacgacaagatggtccagcaggtggaagatgaactgccatccaggattgcacaggatgctaatggtcgatctaaggtgaccgaacacgtcgaggacggattagcaaagtgcaaacttgatgacagtattgagaaatacgaagagttggtcattaggactttccacagggtggtaagagagtattttcggggacccctgaagccgcccttcaacacggaggcgaggaaagctgccggctttgagcctgcctggtatgaacccctggcagtgaaggaggcatgcatagagggggagacaattgagtga

SEQ ID NO: 87200 - DNA, 802 bp, Zea Mays
gagggagcggggataagcgagggaggagggggaaaccgaagatgctcctgctgcgcggcgccagggcggcgtcggcgtgggcggcatccaccgcggtgtccgcaggcgccagcagcagcaggtccatatccattcggctggcccccgtcgccgcattgtcctcgggcggaaggaagaggaagggccagcggcggggcgaggccaagcccccgagcccgccgccgccgccgcccctacctcggcagggcgagaccccgagcagcaagaagaagtccggcgcgaggccgtcgggcgagggaaagaagagccgcttggtggagctggaagaagcgcgcggcccgcggaggccggagggcggcgaggcgaggaaggggaatacgcagcagcagcagcagcaggaggagaaggcgaaggcgaaaaggctggtgaagtggaagtgcgcgagcgggtgcggtgcgtgttgcaagctagacaaggggcccgacttccctattcccgacgagatcttcgccgaccatcccgatgacctccagctgtacaggagtatgatcggctctgatggatggtgcattaactacgacaaggccacccgcacctgcaacatctaccaagaccgaccttccttctgcagggtggaaccaaagatttttgatgaattatttggcgtgccacgcagcagatttgaccgggaagcttgcagtgcttgtgtggataccatcaagatggtgtatggtgatgactctgcagaactcagtaatttcaagcgtgtgataagggaggaaagtaacaagctgaagggcga

SEQ ID NO: 87201 - DNA, 2067 bp, Zea Mays
ctggcagtatgaaatgtctctcaaagcattactcaaagagccttggacattattctcgaactgaatggtacaagctgacaactattttgactcttcaccaaaaaaaaaatctacactgacctataggagccacagcactttgataagctccaccacaactgcaaaaaatgctagagtaagagccgattacaagccagcaataacattaaaattgtctcatctccaaaatcttctgctggaaggcatttcagcacttgaagacagcacccacaaaaaaaatgccttgatgaacgcatgtcttgggggagccaaggaaacataacatcattcgcaaggcaattgattgctactggttgctgaccaaaatattatccagttggtgggagtaaagatacattgcttgtgcacggcttctcggcaagtacggtgcaagcaaatgtgcctatttcaaatccaaccttgaacattatattcaggaccagcaacacatcgtccaatcgcccagaggtgctcaacgactccaccaagtaatcaaatgtctgtctttggggtcttatgttgtccttcaacatacctgccaaccatgccatgccctcatcagacagattgatcttacaaaagccactgatgatgtgatcgtttgtccacaccggtggctccaagcccttggtccgcatcgacttgatcaggtctactgcagcatgcacctgtccgttctcacacatggcacatataagacgaccgaaggttgacgatgttggctccaaaccagatgatagcaaccactcgtacatccgcatcgccaagtccaacttcccagctttgaataggccattgatcaatgtgtcgtacgtgatcacatcatgcttgattcccttgatggacatttcctcgaacacctcaagtgcgtcgtacaccctcccatgaacacagaatcctttgatgagaatgttacagctaacagtagtctgcttgaaccccttctcaagcatttcatcatataccttgcgggccttgtcgagatcaccaactctgcaatagtaagtgacaagggagcagtaggcatactcattgggggcgatgcccctgcccaccatctcatcccacatctgctgtgcaactccaatcagccgcatttcgcataacccatggatcaccgtggtatatgtaactccgtcaatgtcatagccacgctgcttgatctctctgaacacacgcagggcctctccacccatcctccgcctgaagagcccgtgtatgacccgctggtagatcaccttgtccggggtgcacccggtggcaatcatgaggtgcagcgtgtcggagaccttgccgaagttgccctcggctgcgaaggcgccgatgaggtcagcaactgcgtcggcgggcggaggggacccacggcgcgcggcgtcgcggaggaggccgaggccgtcgagggggcggccctcggcggcgtaggcccgggcgaggcagccgacggtagtggcattgccggggaattctggcgaggaagagaaggcggagaagaagcggaagacgaggtctgggcgggccgcgcggagtgcggaacaggacgcgacattgaaggcacggagggaaaggtggatgcggaggtaagagctgaggagctcggcgacgtctgcggcgaggtgcggtgggaggcggaggaggaacttgtcgaccccgggcagcggaggggagacgttcaccggggcggtgtcaggggcggggccggggaggtgtggagacagagcgcgtaggaagcggagcgatggagccacggccggaagaaggcaggagagcgtgaggcgagcaaagtctggatggaggaggacggcgcgggggaccaaggagaggaggcggggctcgagccgcggcgtgcggagggcggcggccgcggcgagggcagcagcgtttgagatcgtggacgaagtcggagcgccggcgggatcggatgccgtggcggagcataagtgcctggcgaaacggagtcgaggcgggggcatggcggtgccggccgggcggcggcggcagagctgacgcaagaggcggggtagactgttg

SEQ ID NO: 87202 - DNA, 468 bp, Zea Mays
aagaggaaccctagtccctagcaacgcctacagcgtcacggaacaccggcgaaccaaacctcggagaaaccctagcaaggccgcttgcccctctcaggcgcgacacagcatcggcgactagcgatgacaggatatcgcagccgcagtccgagccgaagctacagcccacggaggcggtacagccggagccctcctaggcgcaagcgctacgacgatccacgcgaccgctaccgctgggccggggccggcggaggcggggaccgacgtggttacggtcggccgttggcgcagtccggtctcctcatccgtaatatctccctcacagccaggcaattatatattgtcgattcgattgagcattggctctttcacatcaaataatccaatcctctcatgtcagataaaaatttggatgtttctgcatcttattgccactgtatgacccttacggtttgatggactttttaa

SEQ ID NO: 87203 - DNA, 611 bp, Zea Mays
aatttcaatagtttatgctgaggagaatcgaaaaacgccacaagaaatgcgcatgagaacaagaactagtggtaggtacatggatgaaagatacacaagactgtcaagatctccaaggtctcgttcccactttaggcgtgacttcaggggcagggagcgcccggatagttattcccctcagtactcgcactctccacgccctcgggacagcaggcaccacaggtcagatggtcgctctccaactccaagcctagatgaccacaaacctaaggcgacaccagtcaatggtggacatggtccagcagttgcatccagatagtatgatgccattatggatgccttgaattgtgttcggaggctggagactgcagactatcttttcaccaatcttctctaagagatgagtagggttgtagtaaacagatacttggtagttgtattacaggtgatggtttcggttatgaggtgcgctgttgcttttgtgacgctgctttaatgctttcccaaccgagggtagtagggtaccgtcgtggaattttgcgtgtttgttttttggctacaatattactaatactagtaacttgctcgcttcgagcgcgagtctttatcta

SEQ ID NO: 87204 - DNA, 973 bp, Zea Mays
ttttcaatattatatccttagacttgctcacaaagaagtactttcaagactgaaaatgattgtggtgctcgtccagattggtaatttcatttggttttttttatatttacaattggatgtgaatgacaacaatgtggttttgttagattatttgataactgttgatatcatgtgttcttgaaacaaggccttgaattttgctctgaattgtgttgctttggttatgtctactatccagtcaacaaagaatatagagtatctaaaagaccaaaagacaaccataatgtttggagattaaaagccaaagtgaaagtaccatggcttccagggttgagcatgtgaaaggcattattgttaaagataaagtggtgctgtcagtcaagagtttaatgataatcttggctaagatacctgacggaaagagtatgttgaagttgagccagcgccttaatgcattgcacaattgcatgtttggatcaaagtgggtagcttttattgatatggggcaggggcagggagcgcccggatagttattcccctcagtactcgcactctccacgccctcgggacagcaggcaccacaggtcagatggtcgctctccaactccaagcctagatgaccacaaacctaaggcgacaccagtcaatggtggacatggtccagcagttgcatccagatagtatgatgccattatggatgccttgaattgtgttcggaggctggagactgcagactatcttttcaccaatcttctctaagagatgagtagggttgtagtaaacagatacttggtagttgtattacaggtgatggtttcggttatgaggtgcgctgttgcttttgtgacgctgctttaatgctttcccaaccgagggtagtagggtaccgtcgtggaattttgcgtgtttgttttttggctacaatattactaatactagtaacttgctcgcttcgagcgcgagtctttatcta

SEQ ID NO: 87205 - DNA, 825 bp, Zea Mays
gtggcgaaacagctcaccacaactaaatcgcctcgaatccgagagatcgacaacaacctccggttgagacgttccaccaagcacccggcgggcgttacctttagaacttcgagctcttcgccctccaacaccggaagtttctccttcaagccacatatacaaacacgcaaaatacatcatctagatacaagtatcagcgaagaatactcgcaaaagaaatgacaagtcctcaccgaggcggacaacgcaccatggttggcggcttgagaacaagctgcaggggcatggggatggagacctaggtaccatggatgaagagacgtcgaccatcaacagaggggggttaagtgcttcaacatgggaggaaaggaaaagggatcatcaggttgctgcaggaaatggacaagcagaggcgggaggcgagttccagggaggggcagcaccagaggtgttttcgaccaagggaaaaagaccaggcgctatttggggggatcctgcagggagaaaactcaaccatggagatccagggcggccatgggagctaggcatcggtctgggcgaacatgccaggaacctagcaggggcatcgagtaaaggggctggcatccagggcaccatggaaaaactcagctagggcttgagggaggagggcagagggcggccatggcagaggcgagctccacggatggaggttgaagacgacctggcggctagcgcacgtaggaaggagctccacagcgctagagaccagagagaggcggtcgagctagctgagggagatgagtgcgcagcaaatatcccagggagtcggcgtcactagaagat

SEQ ID NO: 87206 - DNA, 1885 bp, Zea Mays
catcagaatggaggtggagtggccggggacggggagtgccagccaaggcgaggcccgtgctagctgccatgacatgagcgcacacagcacaattgtcttgcctgaaacgatacggggagtggttcggagcagttgggtgtgctggtgtgtgttggaacggttgtccctccggcctgggggggtcctcttgcttgctgctatatgatccccacgcctcccgcgccactctaaccaccgcatccactctcgtcccgtcccgtatctacctacctgctctctcgtcttctgctcacacgctgacgcgcacgctccgagtccgagctaagctagctagctagctacttccggcgcggcacagccacagctgtttaggtagtagctagacgtacgtacgtacgcacaccacgatgacgaaggcgtggaggccgatgctggcgtcggccaccaagtgctgcgcggcggaggacgcggcggtggcccccgacggcctggcgcggtgccggccgcagcagtcggagctctcgcggcggctggcgtccttcaggcgcctgtcgtcgctggccaacagcccggcgtcggcggcgggcacggacaaggacggcggcagcgtcaagcaggccggggagatggcgggcccgctgcagctgcactccttcggcctaggcgagctccgcggcgtcacgcacgacttcgccagcagcttcctgctcggagagggcggcttcggcgccgtgtacaagggcttcgtggacgccggcatgcgcccgggcctcgccgcccagcccgtcgccgtaaagcagctcaacgccgcgggcttccagggccaccgggagtggctcgccgaggtcatcttcctgggccagttccgccactcgcacctcgtccgcctgctggggtactgctgcgaggacgaggagcgcctgctcgtctacgagttcatgccgcgcgggagcctcgagaaccacctcttcaggagtagggatctcggcgacgctaccgtggggcacccggctcaaggtggccatcggcgccgccaagggtctggccttcctccacgccgccagcacgcccgtcatctacagggacttcaaggcctccaacatcctgctcgactcggacttcaccgccaagctgtcggacttcgggctggccaagatggggcccgagggcgaggacacgcacgtgacgacgcgcgtgatgggcacccacggctacgcggcgccggagtacgtgcagacgggccacctgaacgtgaagagcgacgtgtacagcttcggcgtcgtgctcctggagctcctcacggggcggcgcgccatggagcacgtccgcgggcgcagcgcacacgccgaccagcagctgaagctcgtggactggacccgcccctacctcagcggcggcagccgccgcctgcgctgcatcatggaccagaggctggcgggccactactccgtcaagggcgcgcgcgccgtggcgcagctggccgtgcagtgcaccgcgcagcagccgcgggacaggccgcgcatggtggccgtcgtcgacgcgctcgacaagctgcaggggctcaaggacatggccgtcaccgtcggcctctggcccgccaccgcgcccgtcgccggacggaacgccatctccgccaagatccgcgcggaggtcaagggcgccgccggcgcagggtcgcgccggaggagcgcgtcctccaagctgccttagtaatcttgacggctggaccacctgcgtgccacgtcgtacatgtcccctagctagctcgtgtgtaccccgggtgtaggaatcgtcttgtgtgttttgtgccacgtcgtcggtgtgtgtatatagtacatactactgtaccgtctagtttaggcgcgttgagattggtgaggcagag

SEQ ID NO: 87207 - DNA, 2013 bp, Zea Mays
catcagaatggaggtggagtggccggggacggggagtgccagccaaggcgaggcccgtgctagctgccatgacatgagcgcacacagcacaattgtcttgcctgaaacgatacggggagtggttcggagcagttgggtgtgctggtgtgtgttggaacggttgtccctccggcctgggggggtcctcttgcttgctgctatatgatccccacgcctcccgcgccactctaaccaccgcatccactctcgtcccgtcccgtatctacctacctgctctctcgtcttctgctcacacgctgacgcgcacgctccgagtccgagctaagctagctagctagctacttccggcgcggcacagccacagctgtttaggtagtagctagacgtacgtacgtacgcacaccacgatgacgaaggcgtggaggccgatgctggcgtcggccaccaagtgctgcgcggcggaggacgcggcggtggcccccgacggcctggcgcggtgccggccgcagcagtcggagctctcgcggcggctggcgtccttcaggcgcctgtcgtcgctggccaacagcccggcgtcggcggcgggcacggacaaggacggcggcagcgtcaagcaggccggggagatggcgggcccgctgcagctgcactccttcggcctaggcgagctccgcggcgtcacgcacgacttcgccagcagcttcctgctcggagagggcggcttcggcgccgtgtacaagggcttcgtggacgccggcatgcgcccgggcctcgccgcccagcccgtcgccgtaaagcagctcaacgccgcgggcttccagggccaccgggagtggctcgccgaggtcatcttcctgggccagttccgccactcgcacctcgtccgcctgctggggtactgctgcgaggacgaggagcgcctgctcgtctacgagttcatgccgcgcgggagcctcgagaaccacctcttcaggaggatctcggcgacgctaccgtggggcacccggctcaaggtggccatcggcgccgccaagggtctggccttcctccacgccgccagcacgcccgtcatctacagggacttcaaggcctccaacatcctgctcgactcggacttcaccgccaagctgtcggacttcgggctggccaagatggggcccgagggcgaggacacgcacgtgacgacgcgcgtgatgggcacccacggctacgcggcgccggagtacgtgcagacgggccacctgaacgtgaagagcgacgtgtacagcttcggcgtcgtgctcctggagctcctcacggggcggcgcgccatggagcacgtccgcgggcgcagcgcacacgccgaccagcagctgaagctcgtggactggacccgcccctacctcagcggcggcagccgccgcctgcgctgcatcatggaccagaggctggcgggccactactccgtcaagggcgcgcgcgccgtggcgcagctggccgtgcagtgcaccgcgcagcagccgcgggacaggccgcgcatggtggccgtcgtcgacgcgctcgacaagctgcaggggctcaaggacatggccgtcaccgtcggcctctggcccgccaccgcgcccgtcgccggacggaacgccatctccgccaagatccgcgcggaggtcaagggcgccgccggcgcagggtcgcgccggaggagcgcgtcctccaagctgccttagtaatcttgacggctggaccacctgcgtgccacgtcgtacatgtcccctagctagctcgtgtgtaccccgggtgtaggaatcgtcttgtgtgttttgtgccacgtcgtcggtgtgtgtatatagtacatactactgtaccgtctagtttaggcgcgttgagattggtgaggcagagagatgttcctccatgcactcactagtacgtacgatccatacctattgctcctggattcatgagatcgttaatagaggtgatgtaaaactttgcaaagtacacatgaatttgaattttgatgatcggttgacg

SEQ ID NO: 87208 - DNA, 513 bp, Zea Mays
ttgtggacggtgatagtaataataaccagtatttgggcacacatgttacctagcattgcttcaacaccaacgctaacacgtcaaacacaattaattagacgtgtaccgcaccaagcttacattactgtcgcatctcctagcaacagattacaacccacccgactgaaaaaaaaaacacagcacagcgagatggaaaggcggcgccgaggcggttaaaacggtgcgcacggcgccttcacacagaacagcacagcacagcccagactgcatggtttttaaagcggtaaggcggtccaaggcgttggaggaccgcctggacgcctaggcgaggtaggcgggcaaggcgcctaggcgttagaccaccgcccggacgcctaggcgacgcctaggcgacgccttaaaaacagagccagactgacgaggaaggaaaatcagaggaactggtgcaagcaagctgtgcgaatcgcggattgttaagagtggtggggattggcagagcagcacaggtgccat

SEQ ID NO: 87209 - DNA, 2624 bp, Zea Mays
gagaaggagagcgcaacggaaagcaacccaaggtctctccttttccgccacacaggactcacgcgctcttcaatcgctcgctccgtttctacctcctctcgccttccttccttccttcgatcccgctttgtttgtcgtcatcgcccgcccccgaagctccgacctttcccccactttcccttggcgtctacggccttgtccggtgtagaaaacaacgggtttcgtttgtgttgttttgctgcggtttttgtccgctcctgggagttcaatccctgctccatctcttaagagcactcctcccctcccactcagtgtgctttgctgttcactttggattccgcggctttgtttcgggttcttgattaggaaggttcggttcctggtttgggaaggtcccccttccgaggcgaggaatttggtgcgggttgatgcgtcttgccaggaatccgcgatgcaatgataggttgttgaagccgaggtgaatctttgacctgcagaatttcctagctgaagtcccaccgcttctcgatcagccgggcgccatgggcctctgcctgggcaagtcggcagcggtccaggagccggcggtggcggaagacaacagcgtagccgatggcgcggcggcgggctgcggcgatgggccgcccgtgaaggcgcctcggacgcccaagcagcccaagttctccttctacctgccgagcccgctccagccctccagctacaagggctcgccggccaactccagcgccgcgtccacgccggcgcgcggcgggttcaagcgcccattcccgccgccgtcgcctgccaagcacatccgtgcgctgctggcgcggcgccacggctcggtcaagcctaacgaggcgtccatccccgaaggcggcgagctggacctggggctggacaagagcttcggctactccaggcacttcgcggccaagtacgaccttggccgggaggtggggcgcggccactttggcttcacctgcgctgccaagtgcaagaagggcgagctcaagggggaggacgtcgccgtcaaggtccttcccaaggccaagatgactactgctattgccattgaagatgtcagacgagaagtcagaatattgagttctttggcaggccacattaacctagtgcaattttatgatgcttttgaggatgaagaaaatgtatatgttgttatggaattatgcaaaggaggtgaactgctggacagaattttggctagaggtggcaaatattctgagggcgatgctaaggttattattcaccaaattctaagtgttgcttcattttgtcatcttcagggtgttgttcaccgggatctgaaaccagagaattttcttttcatgtcaaaggatgagaattctgccttgaaagtcatagactttggtttgtctgactttgttaaaccagatgacagacttaatgacattgttggaagtgcatattatgttgctcctgaagttctccatcgatcttatggcacagaggctgatatgtggagcattggagtaattgcatatattttgctttgtggaagccgccctttctgggcacgaactgagtcaggaatttttcgagctgtcctaaaagcagagcctagttttgatgaaattccatggcctaccctttctgctgaggcgaaagactttgtaagaaggctactcaataaggattaccgtaagcggatgactgctgcacaagccctctgccatccatggatccgtggcacacaggaagttaagattaatctagacatgataatctacaggcttatgagggcttacataagttcatcttctctacggaaatctgcattgagggctcttgcaaaggcactgacgacagatcaactcttctacctaagagagcagtttacattattaggtccaaacaagagtggccatatatcattgcaaaatatgaagacggccttgattaaaaattcctcgggtgcaatgaatgattctaggattcttgactttgttaactcaatatgcaatatccaatatggcatgattgattttgaagagttctctgctgcggccattagtgtatatcaaatggagggcctggagacctgggaagaacatgctcaacaagcatatgaattgtttgacaaggagggcaaccgaccaattgtgattgaagaacttgcatcggaacttggacttggcccttcgatctcacttcatgttgttctcaaagattggatcagacattcagatggaaacctcagtttcctcgggttcataaaactactgcatggagtttcttcacgcgcaatcaccaaagtataagataaccatttgcatcgagcaatccctgatctctggctagtgcatgccatggctggttgtagaagttgcatgaaaccaatacaaagattaacagatcatcttagcgcaataggtactctcagtaggtgtatatttgccctgcttttcgcaacatggatcgacattgtcctcaagatgttgagaggaatgtacagatttgatttgggaagaatggaaaccctgaaggatttgaggctgttattttgtttgttagttccagtaatgcaggcattgccttcatttgtgttgtgcacctatgccgcttaatgctccatttacata

SEQ ID NO: 87210 - DNA, 2221 bp, Zea Mays
caggactcacgcgctcttcaatcgctcgctccgtttctacctcctctcgccttccttccttccttcgatcccgctttgtttgtcgtcatcgcccgcccccgaagctccgacctttcccccactttcccttggcgtctacggccttgtccggtgtagaaaacaacgggtttcgtttgtgttgttttgctgcggtttttgtccgctcctgggagttcaatccctgctccatctcttaagagcactcctcccctcccactcagtgtgctttgctgttcactttggattccgcggctttgtttcgggttcttgattaggaaggttcggttcctggtttgggaaggtcccccttccgaggcgaggaatttggtgcgggttgatgcgtcttgccaggaatccgcgatgcaatgataggttgttgaagccgaggtgaatctttgacctgcagaatttcctagctgaagtcccaccgcttctcgatcagccgggcgccatgggcctctgcctgggcaagtcggcagcggtccaggagccggcggtggcggaagacaacagcgtagccgatggcgcggcggcgggctgcggcgatgggccgcccgtgaaggcgcctcggacgcccaagcagcccaagttctccttctacctgccgagcccgctccagccctccagctacaagggctcgccggccaactccagcgccgcgtccacgccggcgcgcggcgggttcaagcgcccattcccgccgccgtcgcctgccaagcacatccgtgcgctgctggcgcggcgccacggctcggtcaagcctaacgaggcgtccatccccgaaggcggcgagctggacctggggctggacaagagcttcggctactccaggcacttcgcggccaagtacgaccttggccgggaggtggggcgcggccactttggcttcacctgcgctgccaagtgcaagaagggcgagctcaagggggaggacgtcgccgtcaaggtccttcccaaggccaaggtgcgagcatatcctctctccctgcttagttttgtgctggattggatcttcctgtttccatggcttcttgcattctttaatagatcagctcgagtaatgctaccctgcgcattctgtcctaaaatctgattctttgtagattcacatgagtccaccttgtgcttctttggttatatactttcacttgatatatgcttgggacttcttaaaaccttttaggttcatattgcagtactcggagaaagatagggatcatgtagtgggtgtatactgtggcaccccacactaaaattatcagactgttcggtgcaaatatgttgctacttgcttgactgggattaaaatctccggttgaagagtatgaatttgatttcttgagttactggggcagttcctggttattagttgggacagggaccatgatgtggccagcaaagcttgcttgcttattcaaaacctttattcaaaagttctgtaagtgcccccccctctggttggatgtagagaacttgctcattaaattgatgccatgtgatcataatggtatcgttggctatctgattctcctttcccacttggtgatgtgatcttattttaaaaacatcatggttgttagatttctgagtcaaaggtagcaaggtgtacggttgctatgcaagtccagtctggtcacgcgctgattttcatctctgttgaaatattcacatttgacccattgtaggacctttcagttctgttgctggagcccccctttttttactaaatacttctctagaggtttgaggctcttagtcttatcctctatacatacattatcaatttcaattcatcatcatagtaaccctgcgcatgcaattggcaactccaatcaggtaagtcgatggcaattggggccactttagtggtattaattttactaattggggacattaatgctgacatagtgattatatggtcatgtttaatgtgttactagtattaattgctggacgaagagaacacaaaacaaacaggagcattagttgcagtttattggatgtccagaatcaaatggggtgatattagttagcgtattgaaggctgggctggtcaacagttgacggatactattacttttcaattcattatgttattcatcaagatcaaagtaatgtaggtttcctgaatttaatacagggaagtaaaatctccaaattgatatacatgtaaagaaaaggc

SEQ ID NO: 87211 - DNA, 1547 bp, Zea Mays
cgcactcctatggcgatccctccccggatcacggcggccggtggcggcggtcgcaagacgagggtgccgccgctcccaccggcgagaactctcctgacagcctttgccgcggcggtggcgctggctatcctttgcttcctctcctcgtcccccaccgccacgctgtcgggttcatggagatccggggccagaagcggtgacaagtacctctactggggcagccgcgtggactgccccggcaaacactgcggctcctgcgcggggctcgggcaccaggagtccagcctccgctgtgctctcgaggaggcccttttcctcggcagaatatttgtgatgccctcaagaatgtgcctaagttcactgcataacaccaagggaattatccaaaatggtgcaactacaaaacagagatgggaagaaagttcatgtgcaatggaatctctatatgatatagatcagatctcaagaacagtaccagttattctggacaactcaaaaaactggcacgatatagtatcaagaagcatgaaactagaagtgggaggtgtggcacatgtgcaaggaattagcagaggtttatggagtgcaaggatcgcaagaatcgtagctcagtgatgttatcctacaactttttgccaagtatgccagcggaaaaactgaggaatgcagcaaataagatgaaagaaatacttggtgattatgatgctattcatgtgagacgtggtgatctattgaaaaatcggaaagatagatttggtgttgaacggagccttcatcctcatctagacagagacacccgacctgagtacattagaaaaagaattgcacaatggattccaccaggtcgaacattattcattgcatcaaatgaaagaactccaggcttcttttcccctctgtcagacaggtacaagttagcgtactcgtccaacttcagtagcatattggagccaataattgagaataactatcagttattcatggtagagaggctaatgatgcaaggagcaaagacatttatcaagacaatgcgagaatttgggagtgatttaaccctttgtgatgatcccaaaaagaacaccaaagtctggcaaaagccagtatatacagatgattgacgttagttggtcgtcaaatataatgcagacttgcagagctcactcttttagcaacctgatggcctgacatggacagctgattaaacctgaagctggcatggtagtgtttgctgttattgcagaagccgtctaaaatcagccagcagtggtggacactacacctacggttcatttcagcgcatctattcatactaccacgtgtacttataatctggaaaaagccaaaaagtcatgacctttttttttcataattttacaattaggaagtagttcacaacttacaagagaagatttgtttgcagatttagaatgcatatacatgtcacatccttctgtacagcatgtgtaagaatgaaccagcactgtgaggcttatgtgtggagaatatcagtaattgttattatcttttaattcgtatgggtgtgtaag

SEQ ID NO: 87212 - DNA, 1617 bp, Zea Mays
cgcactcctatggcgatccctccccggatcacggcggccggtggcggcggtcgcaagacgagggtgccgccgctcccaccggcgagaactctcctgacagcctttgccgcggcggtggcgctggctatcctttgcttcctctcctcgtcccccaccgccacgctgtcgggttcatggagatccggggccagaagcggtgacaagtacctctactggggcagccgcgtggactgccccggcaaacactgcggctcctgcgcggggctcgggcaccaggagtccagcctccgctgtgctctcgaggaggcccttttcctcggcagaatatttgtgatgccctcaagaatgtgcctaagttcactgcataacaccaagggaattatccaaaatggtgcaactacaaaacagagatgggaagaaagttcatgtgcaatggaatctctatatgatatagatcagatctcaagaacagtaccagttattctggacaactcaaaaaactggcacgatatagtatcaagaagcatgaaactagaagtgggaggtgtggcacatgtgcaaggaattagcagaggtgaactcaaacaaaattccatatactcaacagctctcataataaatcgcactgcaagtccccttgcttggtttatggagtgcaaggatcgcaagaatcgtagctcagtgatgttatcctacaactttttgccaagtatgccagcggaaaaactgaggaatgcagcaaataagatgaaagaaatacttggtgattatgatgctattcatgtgagacgtggtgatctattgaaaaatcggaaagatagatttggtgttgaacggagccttcatcctcatctagacagagacacccgacctgagtacattagaaaaagaattgcacaatggattccaccaggtcgaacattattcattgcatcaaatgaaagaactccaggcttcttttcccctctgtcagacaggtacaagttagcgtactcgtccaacttcagtagcatattggagccaataattgagaataactatcagttattcatggtagagaggctaatgatgcaaggagcaaagacatttatcaagacaatgcgagaatttgggagtgatttaaccctttgtgatgatcccaaaaagaacaccaaagtctggcaaaagccagtatatacagatgattgacgttagttggtcgtcaaatataatgcagacttgcagagctcactcttttagcaacctgatggcctgacatggacagctgattaaacctgaagctggcatggtagtgtttgctgttattgcagaagccgtctaaaatcagccagcagtggtggacactacacctacggttcatttcagcgcatctattcatactaccacgtgtacttataatctggaaaaagccaaaaagtcatgacctttttttttcataattttacaattaggaagtagttcacaacttacaagagaagatttgtttgcagatttagaatgcatatacatgtcacatccttctgtacagcatgtgtaagaatgaaccagcactgtgaggcttatgtgtggagaatatcagtaattgttattatcttttaattcgtatgggtgtgtaag

SEQ ID NO: 87213 - DNA, 1622 bp, Zea Mays
cgcactcctatggcgatccctccccggatcacggcggccggtggcggcggtcgcaagacgagggtgccgccgctcccaccggcgagaactctcctgacagcctttgccgcggcggtggcgctggctatcctttgcttcctctcctcgtcccccaccgccacgctgtcgggttcatggagatccggggccagaagcggtgacaagtacctctactggggcagccgcgtggactgccccggcaaacactgcggctcctgcgcggggctcgggcaccaggagtccagcctccgctgtgctctcgaggaggcccttttcctcggcagaatatttgtgatgccctcaagaatgtgcctaagttcactgcataacaccaagggaattatccaaaatggtgcaactacaaaacagagatgggaagaaagttcatgtgcaatggaatctctatatgatatagatcagatctcaagaacagtaccagttattctggacaactcaaaaaactggcacgatatagtatcaagaagcatgaaactagaagtgggaggtgtggcacatgtgcaaggaattagcagaggtgaactcaaacaaaattccatatactcaacagctctcataataaatcgcactgcaagtccccttgcttggtttatggagtgcaaggatcgcaagaatcgtagctcagtgatgttatcctacaactttttgccaagtatgccagcggaaaaactgaggaatgcagcaaataagatgaaagaaatacttggtgattatgatgctattcatgtgagacgtggtgatctattgaaaaatcggaaagatagatttggtgttgaacggagccttcatcctcatctagacagagacacccgacctgagtacattagaaaaagaattgcacaatggattccaccaggtcgaacattattcattgcatcaaatgaaagaactccaggcttcttttcccctctgtcagacaggtttctacctctatgtgtgctattatatcaagaaccactttgtgcttaccgaaagtgtttgctcattcatttggcaacaattcagagaggctaatgatgcaaggagcaaagacatttatcaagacaatgcgagaatttgggagtgatttaaccctttgtgatgatcccaaaaagaacaccaaagtctggcaaaagccagtatatacagatgattgacgttagttggtcgtcaaatataatgcagacttgcagagctcactcttttagcaacctgatggcctgacatggacagctgattaaacctgaagctggcatggtagtgtttgctgttattgcagaagccgtctaaaatcagccagcagtggtggacactacacctacggttcatttcagcgcatctattcatactaccacgtgtacttataatctggaaaaagccaaaaagtcatgacctttttttttcataattttacaattaggaagtagttcacaacttacaagagaagatttgtttgcagatttagaatgcatatacatgtcacatccttctgtacagcatgtgtaagaatgaaccagcactgtgaggcttatgtgtggagaatatcagtaattgttattatcttttaattcgtatgggtgtgtaag

SEQ ID NO: 87214 - DNA, 264 bp, Zea Mays
atggcccagaggatcggatgtgctagcattcaagtattcgtggttcaacgacaggatgcatggtacacagccagtgccatcatcgatcaggaagcggaggaacttctccctgcggtcgcacgagacaacaattccaacaagctccgcacgagacaacaattccaacaagctccgcacgagcaaccgtacggccacagcggagaaatgccggtggcaaagtgtgctgtatggttaaagagagaagatctgcagcaagattcttga

SEQ ID NO: 87215 - DNA, 558 bp, Zea Mays
atggctcacgaagttggcgacaacggcggcgaactcccgccgcccgcgaagaagaagtcgcccgccgaggaggaggccgagaagaggaggaagaagcttacacctgggagcttgatgaagggcatcatacggtctgggagtggtgatgccacccctgcagagggcgatcaggttatacttcattgcactactcggacgatggatggtattattgtcaattctacaagaagggagcacggaggtaaaggaatcccactcagatttgttttagggaagagcaagatgatcctaggctttgctgaaggcttcccaacaatgctgaagggtgaaattgctatgttcaaaatgcagcctaaaattcactacgctgaggttgattgtccagttgcagctccagatggcttcccgaaagatgatgaacttcaatttgagattgaaatgttggatttctttaaagccaaggttgtggcagaggatttgggggtggtaaagaagatagttgaagaaggcaagggatgggaaacacctagagagccatatgaaataacagcacggtaa

SEQ ID NO: 87216 - DNA, 249 bp, Zea Mays
atggccctcagcctctacaagctgacgagcgagagcatccacaacgatacatttctgttgccaaatgagggtcgtgacgcgcatgcgctcttgagtggctgctacaatagccttggtagccgcaagggcgagaacaagtgtagaatgggcagcaattgcgtcatgtggaagaggttcaaccgtcgcggaaccgtagagatggacatcggtggatccatgaccgagaggctagatgggagggtatgctag

SEQ ID NO: 87217 - DNA, 459 bp, Zea Mays
atggaaggtgaatttccaatggactgtcctcttcatgacagcttattaagagtgcattataagggtattctccttgatgaaccaaagtcagtgttttatgatacacgtgccgataatgatggtgaaccgttggaattctgttccggagaaggcttggttccagagggatttgaaatgtgtgttcggctaatgcttcctggtgaaaaatctgttgtcacctgcccaccagattttgcatatgataagttcccaaggccagcaaatgttcctgaaggagctcatgttcagtgggaaattgaactacttgggtttgaaatgcccaaggattggactggcttaactttcgaagaaatcatggatgaggcagacaaaataaagaacacgggtaacagactgtttaaagaaggaaagttcgaacttgcaaaggcgaaatatgataaggtatggcttccactggat

SEQ ID NO: 87218 - DNA, 232 bp, Zea Mays
agaacacttaaccttgcatatttctcgtttgatgaaacaacgttgatgtccaacgcaaccttatcaggcaccttagttcctgatagtagtatgctaccattgtggagcaggactaataatcaagtggggccaaatttttcgtagataatataaaaccagcattataaccagactaaccgcatgtttgtggaagctaactactagtacttgatggatagattatagacgggcc

SEQ ID NO: 87219 - DNA, 846 bp, Zea Mays
cctctatgcgtgcaggtgcttagggaatataaccacgtgcatcctcatgatgatgaagagggaaaaatctttgctaattcaagaaattccctacatctaaatgtagctttttgctaccagaagatgggtgaatacagaaaatccattgaaacatgcaataaggtgctggacacaaatcctgtgcatgcgaaagctctttaccgccaaggaatgtcctacatgttactcggggaatttgatgatgcgaggaatgattttgagaagatgattaccgttgacaagtcatcagaaccggacgctacagctgccctccttaaacttaagcagaaggaacaggaagctgaaaagaaggcgaggaagcagttcaaagggctctttgacaagaagccgggagagatatctgaagttggtgtagaatcagagggtggaaaggatgcgggtgatgcaaggggctctggtgaggcaacaagtgctgatagaggtgcaaatacaatggatagtccgaccagagaatcagagtacgcattcgaggaagagaggcctgggcttcttggccgcttgtggccttctgcgaggaggatcttctcgtctgttggcataaacaggtgtacaatactataaggtgtttaattcctactagggtgactttggaaatcatggtggtgaagatgaactgccccgaggtttgtggtgtttattagagtttcctgacgacgaaaaaaatggcgaggaatgtttggatgtatggaaaacgaaccgtgtgcatgataatgtaaaaaatgagaaataaattgcagggaattttattcgtagtttggatggtgcgttttagtgacggtgatgcca

SEQ ID NO: 87220 - DNA, 1134 bp, Zea Mays
gagtcagaaaagccgctcttcttccgttccgcccgcccgcccgcttctctctcccgccccaacccgcgagaccgccggcagctcagggcaggaggaggagcggcttcaattcgtccccgcgccgcgcgctcaggacccgcccccgctgcctctcccgagggttccaggttctcatcaggcagaggcagaggtcaccttctgctgctcaacgcaacactgcacatacatacatacagatgggttccgacttccgaggggccttctcccgtcaccaccaccgtccacgtcactgggttcaagaagttccacggagtcgccgacaaccccaccgagaagatcgtgcgcaacctcgcgtcgttcatggacaccagagggctgcccaagggcctggtgctcgggagctgcaccgtcctcgaggccgccgggcagggcgcgcttggcccactgtaccaactgctggagtccaccgtcgtctccggccggggacgtgggatgccggctcaggagcgagtgattctgctccattttggcgccaacagtggttcacataggtttgcgcttgagaatcgagctgtcaatgaagctactttccgttgccctgatgagctaggatggaaaccacagaggacgcctatcatatcatccgatggaaacatcttacacgcaagacagaccacactgccactgaaggaaataagcaagtctctccagcaaatgggatatgatgtgatgccttcagatgacgctggtcgatttgtgtgcaactatgtctattaccactcgcttaagtttgcagagaagcatggcatcacgtctctcttcgttcatttccccctcttcctggcaattgatgaggaagttcagatgcaatttgttgcctcccttcttgaagtcctcgcttccttgaacttctagtagtaacctgatggtagatctatctcttccagcggtgtattgttcccaatttatttggaagggttcccaatttacatgtggagtgaataagaatgaggaatcattcatggagttatgtgtgcttcaaaatgtgtaaaaaaacagctcttctcaaagaacatgtccaggcagtacagatgtacaaatatccaaagtggtttatatgacaggtgctattgt

SEQ ID NO: 87221 - DNA, 1316 bp, Zea Mays
gagtcagaaaagccgctcttcttccgttccgcccgcccgcccgcttctctctcccgccccaacccgcgagaccgccggcagctcagggcaggaggaggagcggcttcaattcgtccccgcgccgcgcgctcaggacccgcccccgctgcctctcccgagggttccaggttctcatcaggcagaggcagaggtcaccttctgctgctcaacgcaacactgcacatacatacatacagatgggttccgacttccgaggggccttctcccgtcaccaccaccgtccacgtcactgggttcaagaagttccacggagtcgccgacaaccccaccgagaagatcgtgcgcaacctcgcgtcgttcatggacaccagagggctgcccaagggcctggtgctcgggagctgcaccgtcctcgaggccgccgggcagggcgcgcttggcccactgtaccaactgctggagtccaccgtcgtctccggccggggacgtgggatgccggctcaggagcgagtgattctgctccattttggcgccaacagtggttcacataggtttgcgcttgagaatcgagctgtcaatgaagctactttccgttgccctgatgagctaggatggaaaccacaggtttgctataattttacggttgctctcatgtacaagcatgttaattctttgtgtcattatatcttcttggtttctttacactccagaggacgcctatcatatcatccgatggaaacatcttacacgcaagacagaccacactgccactgaaggaaataagcaagtctctccagcaaatgggatatgatgtgatgccttcagatgacgctggtcgatttgtgtgcaactatgtctattaccactcgcttaagtttgcagagaagcatggcatcacgtctctcttcgttcatttccccctcttcctggcaattgatgaggaagttcagatgcaatttgttgcctcccttcttgaagtcctcgcttccttgaacttctagtagtaacctgatggtagatctatctcttccagcggtgtattgttcccaatttatttggaagggttcccaatttacatgtggagtgaataagaatgaggaatcattcatggagttatgtgtgcttcaaaatgtgtaaaaaaacagctcttctcaaagaacatgtccaggcagtacagatgtacaaatatccaaagtggtttatatgacaggtgctattgttctcagagatgtgtttcactctgttctttgacatttacagaaacatttttctgatcatcagatcatatgtaataaagtaacttacaaacatggtgc

SEQ ID NO: 87222 - DNA, 1399 bp, Zea Mays
aactcgatcatctcccatcacttcctagtccttcttactcaacacattattcgatcttgagtggaagcaagcaggctagacatggcggcagctactgcaccaaagacgatgccgtcgtccgttttcgccgccgcactgctgctcctagccgcggcggcgtgccaggccagcccttactaccctctggagctagggtactaccgttacacttgtccccaggccgaggctatcgtcaaggccagcatggagaaggccatcgcccagaaccctggcaatggcgccgccgtcatccgcatgctcttccatgactgcttcgtcgagggctgcgacgcttccgtgcttctcgacccgaccccgttcagcccgacgccggagaagctggccgcgcccaacaacccgagcctgcgcgggttcgagctgatcgacgccatcaaggacgccctcgaggccgcgtgcccaggggtcgtctcctgcgccgacatcatcgccttcgcggcgcgcgacgcgtcctgcttcctgagccagggcaaggtctccttcgacatgccgtcgggccgcctcgacggcaccttctccaacgcctccgagtcggtcaagttcctcgtcccgcccacgtccaacctcagcgacctcgcctccagcttcgccgtcaagggcatgtcgctggaggacctggtcgtcctctccggcgcgcacaccgtcggccgctcccactgctcctccttcgtctccgaccgcctcgacgtcccctccgacatcaaccctgcgctggccgccttcctcaggacccgctgcccggccaacacgacgaccagcgacgaccccaccgtgatgcaggacgtggtcacgcccaacgccatggacaaccagtactacaagaacgtgctctcgcacaccgtgctcttcacctccgacgccgcgctcctcacgtcgccggagacggccaagttggtgctggacaacgccaagatccccgggtggtgggaggacaagttcgagaaggccatggtcaagatggccagcctcgaagtcaagactgggcaccaaggacaggtcaggaagaactgcagggcgatcaatcactactagcaaacagctggttgttgatcagcttgcaccactgcaatgtggaagaccttcagaaaaagaaaaactgcacagtacgggtgatggatggtgaaggatcaatcggttcagttgtgttggtgtttaatttgttcatgacctgcaagcgtgtggtttgttgtatgatatggcaactgttgttattatctttccatttgcctttgatttgttgaaaacctggagaggtttgtatctgttattattctttggtttgtgtttctatatttggattatcaaataaagttgaatatataagttcagttcttttatatat

SEQ ID NO: 87223 - DNA, 2567 bp, Zea Mays
agcaagcatgctcactatctatcctcaattggtcttcaaaataaacgagatatcaaccgcatacagcatcaatcctttcatgagtggcttaggttgcatgtggaagaaacgtgtgaagaagcatcaggcgagattaaaattttagccaaggcaccaatgatggttgcacacaagtataatagctagctataccataaatggattcaatttccacacacactcctatgatgatggtagagctattcaaaatagtggggttgttgtagttgcagagtcaacaagctttgacaggggtaataatgataatgtcataataggaaataagacctattttggtattatcaatgaaattgttgaactaaactataaccacaaaggtatggtcgtgcttttcaaatgtgattgggttgacaaccgtgtgcagcacaagtgggtgaaaactgaccagttaggtatcacatctgtcaattttaagcacttgttcaatacaagtgacaaattaccagatgagcctttcattctagcatcacaagcggtccaagtatactatgttcctgatccaattgatattgagtgggctgctgttgttcaatctaaagcaagagatgtgtatgacctggataatttggagaacgagcacatagataatgataatcagttttttgccccactagttgatctaaatggcaatgtgactattgatattgttaatgggattgtccctgctgttagaagagacatagatggttacctagttgatcctaaaacatctaaaacaagacaaaatggcaaacaaaagaagaaaagaactcacaacaccagtggtgctgcaactgaaggtcataatttgcgtccaaggacacaaagaaatttatctgagaatgcaaatgagcagattgatacaaatattggttgtgattcaattggagattttctgtgtgacaatgattgtaattattctgttgttgcatatactttttcaccttgctatagtacaactaatgtgtttaaattaatggaatcccatagtccacaaaagaagagaaaaggaaggggtattacaaaattggaggacatatttgcaaggggatctgagatggcaaaaattaagatagaactgaatgaatttggtcaacctattggaaacaattcaagtaagttttctagtgctattgggtgtcatgtgagaaagaagttgtcagttagcagtgttgaccggagactagtggatggtgagaagaagtatgaagtctggaccgacctaaagaaaatcttcgatgtagatgatgctgcctttaactggtttttaaccactgctggaaggaaatggaaggattttaagtcaaccctaaaggcgcagtattttaatgagaatttaacagaagaggacataaagaacaagcatagtggaagggttagtgatgaggatttgaagtttctttctaaatattgggtgtctcctgaatgtgaaggaaagacaaaaaagccaaatttagtcgttcaaaggttggggtacttcatacatctggtagcaagagctttgctcgctctggccatgaaatgtctaaggaactaggtcaccctcctcgaagagatgaactctatatcaaaaacacataccagaaagaatggagttccaacaagacttgttgaaccagttattaacaaacttaaagaatatgttgaggcccatccagagttgaaggaaagaacaattcaagaaggtgatgcttttgctgctatttgtggagagaaagagccaagaggacgtgtccgagttttgggtctaggaccaactccccaggtattggtaccccgggcttgagaagttacacacctacaagactccaaatggaagtcctagcccgcaaaaaggctgaacgtgagaaagctgctctagaacaacgcatagcagaaatggaggagaaaatgcgggagcgaaggatggctcatgaaatgagagatgtggaaatcatctcgcatgatggttctaatacacgacaccatccggtaaagtagctgaacatcttagagatgcatgtgatcttatatgccatattgagagatcatcctgtggctaagggaacaattatttcaactaatccaagcttagtgctaggaggagttgctctaggaaagcaatattgtgaggttgttgtgaatgttgtgctgaaaagggatgcccttctaccttgcccatatggttatttggaggagatgggtgatgctgatcggatgtcgatcgcatggccgtacaagagagtaataagctatctctttgttgttttttcatatatggtgattgcatattttctaactaatggtttctatgattatatagctaaaggtgagcaagacatcaaaatcatcccagagtgctacaggagggaggtcctaggggtagtaagtcacttgtttactccatgatgacaatagcaagcagatcgcggtggtgcctatggatgctacaacaagaaagatcaaaagttcttttggatagatgcagctagatattttgttttgtattttctccaaaagagaaatttgcaagtgaacttaaaattgtg

SEQ ID NO: 87224 - DNA, 1438 bp, Zea Mays
acgcgtcgtacctgcccagtttatataacaacgctctctgctctcgtcaacgacaagcatcacattagctgtattcatcaatacatgccgactagctagctagttgccctaaagaaacattctcaagccacccgtccagaaaccctatcaagaattcgagctataaataggagcggcggcaagcaaacagcgcctcaccaccactcagcttcttctcacttgagttgagagacacatgcagttaagtttgtgatattgtggctagagcaagcgcgatggcgagcaaggtgcctgctgcactgctctcatgtgctttcttgctcctaggagccgtattccaagcagcagctggtcactacagtcctccgagtcctgcttcgtgcgggctcaaggtggggtactacgaccacaagtgtccgcccgccgaggccatcgtcaagagcgtcgtcagagccgccgtccggcggaaccccggcatcggcgccggcctcatccgcatgctcttccacgactgcttcgtcgagggctgcgacgcctccgtgctcctggacccgacgccggccaacccgcagccggagaagctcggcccgcccaacaaccccagcctccggggcttcgaggtcatcgacgccgccaaggccgcggtggagcgggcgtgcccgggcgtcgtctcgtgcgcggacatcgtcgcctttgccgcccgcgacgcctcctccttcctcggcggccgccgggtcgacttcgacatgcccgccggccgcctcgacggccgcgcctccaacgcctcgcgcacgctcgacttcctcccgccgccgacctccagcctccccgagctcgtccagagcttcgccgccaagggcctctccgccgaggacatggtcgcgctctcgggcgcgcacaccgtcggccggtcccactgctcgtccttcgtctccgaccgcctcgcagtgccctccgacatcatcgcctccttcgccgcgtccctgagaggccagtgccccgcgagccccagctccagcgacgaccctaccgtcgtgcaggacgtcgtgacgccggacaggctagacaaccagtattacaagaacgtgctggcgcacagagtcctcttccacgtcggacgccacactcctcacgtcgccggcgacggcgaagctggtggatgacaacgccaacgtccccgggtggtgggaggacagcttcaaggtggccatggtgaagatggccagtgtcgaggtgaagaccggcaatagcggcgagatcaggaggaactgccgtctcgtcaactagctgttctgatgatatacatcagcagcaaccataataattcctgttcataattccatcttgttgcattgcattgttttgtttcattataaatatatgtcgacttcattttgtacatggttgcaaatttggtattggatgatcgataattaat

SEQ ID NO: 87225 - DNA, 129 bp, Zea Mays
gactacttgcattagctttttttctacgggtcaattatgttatgttttatttgtgtacatgtttgagatatgctaccaaatagctctagcaataaaaaaactacctacattttggttgtacgtgtttca

SEQ ID NO: 87226 - DNA, 978 bp, Zea Mays
agctagtaccatgcatgagatgtcgtcgtcttcactgacgccacgcgcgcccacgccgcaatgctatatatacacgcgcagggctgcgacgcctccgtgctgctggacccgacgccggccaacccgcagccggagaagctcggcccgcccaacaaccccagcctccggggcttcgaggtcatcgacgccgccaaggccgcggtggagcgggcgtgcccgggcgtcgtctcgtgcgcggacatcgtcgccttcgccgcccgcgacgcctcctccttcctcggcggccgccgggtcgacttcgacatgcccgccggccgcctcgacggccgcgcctccaacgcctcgcgcacgctcgacttcctcccgcccccgacatccagcctccccgagctcgtccagagcttcgccgccaagggcctctccgccgaggacatggtcgcgctctcgggcgcgcacaccgtcggccggtcccactgctcgtccttcgtccccgaccgcctcgcagtgccctccgacatcagcgcctccttcgccgcgtccctgaggggccagtgccccgcgagccccagctccagcaacgaccctaccgtcgtgcaggacgtcgtgacaccggacaagctggacaaccagtattacaagaatgtgctggcgcacagagtcctcttcacgtcggacgcctcactcctcacgtcgccggcgacggcgaagctggtggatgacaacgccaacgtccccggatggtgggaggacagcttcaaggtggccatggtgaagatggccagtgtcgaggtgaagaccggcaacagcggcgagatcaggaggaactgccgtcttgtcaactagctgttctgatgatatacatcagcagcaaccataataattcctgttcataatttcatcttgttgcattgccattgttttgtttcattataagtatatgtcgacttcattttgtatattgttgcaaatttggtattg

SEQ ID NO: 87227 - DNA, 307 bp, Zea Mays
ttccttatatgcatgatttatgcacatttctacatatttttatgtgtgtgtatatcgtctgtcacgtctcatccaggattcgtggctatcatatgcatggctaacgcatgctcgcgtacagtgggccaaccgcgacctggttggcgtcctgactggggcttcccccactaacgaaagcccagggcttccattacctattctctctctatatatatatcaatcctttgaaaaaatactgagcttatgataaccggatatagactatgaagtaactatgctgtctattgtgtataaaataaatacagag

SEQ ID NO: 87228 - DNA, 1014 bp, Zea Mays
atggcgagcaaggtgcctgctgcactgctctcatgtgctttcttgctcctactaggagccgcatgccaagcagcagctggtcactacagtcctccgagtcctgcttcgtgcgggctcaaggtggggtactacgaccacaagtgtccgcctgccgaggccatcgtcaagagcgtcgtcagagccgccgtccggcggaaccccggcatcggcgccggcctcatccgcatgctcttccacgactgcttcgtcgagggctgcgacgcctccgtgctgctggacccgacgccggccaacccgcagccggagaagctcggcccgcccaacaaccccagcctccggggcttcgaggtcatcgacgccgccaaggccgcggtggagcgggcgtgcccgggcgtcgtctcgtgcgcggacatcgtcgccttcgccgcccgcgacgcctcctccttcctcggcggccgccgggtcgacttcgacatgcccgccggccgcctcgacggccgcgcctccaacgcctcgcgcacgctcgacttcctcccgccgccgacctccagcctccccgagctcgtccagagcttcgccgccaagggcctctccgccgaggacatggtcgcgctctcgggcgcgcacaccgtcggccggtcccactgctcgtccttcgtccccgaccgcctcgcagtgccctccgacatcagcgcctccttcgccgcgtccctgaagggacagtgccccgcgagccccagctccagcgacgaccctaccgtcgtgcaggacgtcgtgacgccggacaggctggacaaccagtattacaagaacgtgctggcgcacagagtcctcttcacgtcggacgcctcactcctcacgtcgccggcgacggcgaagctggtggatgacaacgccaacgtccccgggtggtgggaggacagcttcaaggtggccatggtgaagatggccagtgtcgaggtgaagaccggcaacagcggcgagatcaggaggaactgccgtctcgtcaactag

SEQ ID NO: 87229 - DNA, 288 bp, Zea Mays
atggcaaacaggacaagggtgtatagttatgaactacaaaagaatgaaccattcacatcctcatgtgagaattgtcttgggaaatattttatagttcaggcccctttagatgtcaatcagttcctcttaaccaggtatgaacacagaagtggccaagtcggggacgatagtttgctctgcaacccagggacatcgtccaaaatcgttggtcagggtcaagcaggaccgactactgattctgcccagatcaccgctcctgcgctccacattgagaaacatgggagatga

SEQ ID NO: 87230 - DNA, 465 bp, Zea Mays
atggcgaggggaaaggagctgcttgctgctgggcggggagagcgagctcggctagggctgcagacagccatgggagcagccgtgagggagatgtttttttttcccggggaccgacgagcagggagaacgaggacgccggcaaggggaacgcacagccagccacctgcgctggggagctgggaaagatggcaaccaacaaagggacaagatgctcggaggggcacgcgttcaaggagctgctgggcgtggccgagcagcctggccctgagatgggaggcgaggaggaagatgcaccaggaagtgggcgagctcgagcaaggagagcatgcggcgaagaagaggccgatggccacgggctggggcgcggcttgctgtggacaggaagcgagagataaggctgacagggagagatgcgtaccacttgaagagataaggctggggtggtatgaaggagaccccgtatag

SEQ ID NO: 87231 - DNA, 790 bp, Zea Mays
cccaaccctggccaagaactcgcagccctgcctccatcccgtggtgggcgcggatggcggcggtgagcgccggcgcaagggcggcctcggcggcggcgaagaaggtcggcgcggcggaggcgtcgtccgggaggagggagaagtcctcgtacccgccggggcagcggagcggcgccgcgtggactggcacggacgccggtgcgagggccgcgaagtgtgccgtggtgacgatggcggccgtggtggtggcggcgacctcgtgctctgtaccggcggctgcggaggaggccgctttggccgcgagcggggcgaagtggctgcgctcgaggaatggcacgaagacgaggtggagaggcgagcggggcgaggtggctgcgctttgtggtttctgtagttctatatgcattaggtggcactagggtccagattcagaatatgagtactggtatgtattttccattttatattttttcagtattgccactatatctgtatcctactcaatcataaatcaagatcttgcacttggttgcttccccggtgtgaagatggtccacatcagactgcaatctaaattgtttactgtgaactagaacttctgcatacacatacgtggatttgtacatgtacaaaatctgcaatgcctcagattttatgcaccctcggcaactggcggaatccaaggtggcctggtagaaaaggggcctccaccgctcatcttgtaggctacagctacaaatcagataataaaactctattagaaaatgctagatgttgaaggtagcgagaa

SEQ ID NO: 87232 - DNA, 1945 bp, Zea Mays
atcgcggtggcctacactcgtcgccgcttcactaccgcgctctccccctcttcgtcgttgccgtcgccgcagtccccatccatccgtcgaggcatccatccatccacccattccattttcgctctcctcttccgtcacacctccctcctcctcgtccccccctcctgcggcgcacttatatatataccaccacgtcgatgcgccactcagctggcatcgccatcgacggcgtgccgccatagacggcctgacacccccccgctcccgcccccgccctattcatcccttcatcatcccaatttccacaaacctcgcgcgcggcggagggagaaggaaggatggcgtcggagccggtggcgcgggcggtggcggaggaggtggcgcgctggggcgcgatgcgccagaccggggtcagcctgcgctacatgatggagttcggggcgcgccccacggagcggaccctccttctcgccgcgcagttcctgcacaaggagctccccatccgcatcgcgcgacgggcgctcgacctcgactcgctccccttcggcctctccaccaagcccgccatcctcaaggtgaaagattggtatgtggagtcattccgtgaaatccggtcctttccagaggtgaggaaccagaaagatgagctcgccttcacccagatgatcaaaatgatcagggtacgacacaccaatgtggtgcctgcgattgcattgggtgtgcagcagctgaagaaggacttgggcggtccaaaggcgttcccccccggaatccatgagatccatcagtttcttgaccgcttctacatgtcaaggattgggatccggatgctgatagttgctcgaattgctagtgaagatgcacgtgctatttgcatgcgggagtatggatcatctcctgatgtcgacatatatggtgatccgggttttacatttccatatgttacaccacatctacatctcatgattttcgagctggtgaagaactcccttcgcgcggtacaggaacggtatatggattctgataagcttgcacctccagttcgaatcatagttgctgatggagcagaggatgtaactattaagattagtgatgaaggtggtggaataccaaggagtgggctctcaagaatttttacgtatctctatagtacagcagaaaaccctcctgatctggacggacataatgaaggagtaactatggctggatatggttatgggatccctattagtcgcctttatgctcgatatttcggtggggacttgcagatcatctctatggaaggatatggaactgatgcttacctccacctttcacggctgggagattcggaggaacccttgccgtaatttattcaaaagaaccattcctgtaattaggatattgcttctgtgctggtatgcaagtatagttctgaaggccagccacctgttcagctgttcgtgtccctacttgttgtctttattgttcattcatcatcttaatggattgtgatcgtaattcctaatcgttttatgactgatttgtactgtcattataattgtcgaacctccaaaaaaaaaagttgccgtcgagcatccgaggtatttattagtttgagtgagtaatgggattcaccataacactgtaagcctgttactccaatgcctctaaagcatgtttttttcagtctcagcttgttcgatataatatgaggaatgatctttcactgaaattattcgatgaatattaatgttaaaatggatcgattcaatgcagaatgtgtaattctttgaaccaaatgcctgccaaaagtgtgtcattggttggagggagggtgagaagtgagattgtttttcccagtgcagctgatttcatcctctcgtcgacgtgtcagcttcagaatgcaacatttctggtgtccagttatcgtgcacatagcgtggatttggtcaagtttattcgg

SEQ ID NO: 87233 - DNA, 1845 bp, Zea Mays
atcgcggtggcctacactcgtcgccgcttcactaccgcgctctccccctcttcgtcgttgccgtcgccgcagtccccatccatccgtcgaggcatccatccatccacccattccattttcgctctcctcttccgtcacacctccctcctcctcgtccccccctcctgcggcgcacttatatatataccaccacgtcgatgcgccactcagctggcatcgccatcgacggcgtgccgccatagacggcctgacacccccccgctcccgcccccgccctattcatcccttcatcatcccaatttccacaaacctcgcgcgcggcggagggagaaggaaggatggcgtcggagccggtggcgcgggcggtggcggaggaggtggcgcgctggggcgcgatgcgccagaccggggtcagcctgcgctacatgatggagttcggggcgcgccccacggagcggaccctccttctcgccgcgcagttcctgcacaaggagctccccatccgcatcgcgcgacgggcgctcgacctcgactcgctccccttcggcctctccaccaagcccgccatcctcaaggtgaaagattggtatgtggagtcattccgtgaaatccggtcctttccagaggtgaggaaccagaaagatgagctcgccttcacccagatgatcaaaatgatcagggtacgacacaccaatgtggtgcctgcgattgcattgggtgtgcagcagctgaagaaggacttgggcggtccaaaggcgttcccccccggaatccatgagatccatcagtttcttgaccgcttctacatgtcaaggattgggatccggatgctgatagatatgttacaccacatctacatctcatgattttcgagctggtgaagaactcccttcgcgcggtacaggaacggtatatggattctgataagcttgcacctccagttcgaatcatagttgctgatggagcagaggatgtaactattaagattagtgatgaaggtggtggaataccaaggagtgggctctcaagaatttttacgtatctctatagtacagcagaaaaccctcctgatctggacggacataatgaaggagtaactatggctggatatggttatgggatccctattagtcgcctttatgctcgatatttcggtggggacttgcagatcatctctatggaaggatatggaactgatgcttacctccacctttcacggctgggagattcggaggaacccttgccgtaatttattcaaaagaaccattcctgtaattaggatattgcttctgtgctggtatgcaagtatagttctgaaggccagccacctgttcagctgttcgtgtccctacttgttgtctttattgttcattcatcatcttaatggattgtgatcgtaattcctaatcgttttatgactgatttgtactgtcattataattgtcgaacctccaaaaaaaaaagttgccgtcgagcatccgaggtatttattagtttgagtgagtaatgggattcaccataacactgtaagcctgttactccaatgcctctaaagcatgtttttttcagtctcagcttgttcgatataatatgaggaatgatctttcactgaaattattcgatgaatattaatgttaaaatggatcgattcaatgcagaatgtgtaattctttgaaccaaatgcctgccaaaagtgtgtcattggttggagggagggtgagaagtgagattgtttttcccagtgcagctgatttcatcctctcgtcgacgtgtcagcttcagaatgcaacatttctggtgtccagttatcgtgcacatagcgtggatttggtcaagtttattcgg

SEQ ID NO: 87234 - DNA, 2016 bp, Zea Mays
cctacactcgtcgccgcttcactaccgcgctctccccctcttcgtcgttgccgtcgccgcagtccccatccatccgtcgaggcatccatccatccacccattccattttcgctctcctcttccgtcacacctccctcctcctcgtccccccctcctgcggcgcacttatatatataccaccacgtcgatgcgccactcagctggcatcgccatcgacggcgtgccgccatagacggcctgacacccccccgctcccgcccccgccctattcatcccttcatcatcccaatttccacaaacctcgcgcgcggcggagggagaaggaaggatggcgtcggagccggtggcgcgggcggtggcggaggaggtggcgcgctggggcgcgatgcgccagaccggggtcagcctgcgctacatgatggagttcggggcgcgccccacggagcggaccctccttctcgccgcgcagttcctgcacaaggagctccccatccgcatcgcgcgacgggcgctcgacctcgactcgctccccttcggcctctccaccaagcccgccatcctcaaggtgaaagattggtatgtggagtcattccgtgaaatccggtcctttccagaggtgaggaaccagaaagatgagctcgccttcacccagatgatcaaaatgatcagggtacgacacaccaatgtggtgcctgcgattgcattgggtgtgcagcagctgaagaaggacttgggcggtccaaaggcgttcccccccggaatccatgagatccatcagtttcttgaccgcttctacatgtcaaggattgggatccggatgctgatagggcagcacgtcgctttgcatgaccctgatccagagcctggtgtgatagggcttataaacacaaaaatgtcacccatgacagttgctcgaattgctagtgaagatgcacgtgctatttgcatgcgggagtatggatcatctcctgatgtcgacatatatggtgatccgggttttacatttccatatgttacaccacatctacatctcatgattttcgagctggtgaagaactcccttcgcgcggtacaggaacggtatatggattctgataagcttgcacctccagttcgaatcatagttgctgatggagcagaggatgtaactattaagattagtgatgaaggtggtggaataccaaggagtgggctctcaagaatttttacgtatctctatagtacagcagaaaaccctcctgatctggacggacataatgaaggagtaactatggctggatatggttatgggatccctattagtcgcctttatgctcgatatttcggtggggacttgcagatcatctctatggaaggatatggaactgatgcttacctccacctttcacggctgggagattcggaggaacccttgccgtaatttattcaaaagaaccattcctgtaattaggatattgcttctgtgctggtatgcaagtatagttctgaaggccagccacctgttcagctgttcgtgtccctacttgttgtctttattgttcattcatcatcttaatggattgtgatcgtaattcctaatcgttttatgactgatttgtactgtcattataattgtcgaacctccaaaaaaaaaagttgccgtcgagcatccgaggtatttattagtttgagtgagtaatgggattcaccataacactgtaagcctgttactccaatgcctctaaagcatgtttttttcagtctcagcttgttcgatataatatgaggaatgatctttcactgaaattattcgatgaatattaatgttaaaatggatcgattcaatgcagaatgtgtaattctttgaaccaaatgcctgccaaaagtgtgtcattggttggagggagggtgagaagtgagattgtttttcccagtgcagctgatttcatcctctcgtcgacgtgtcagcttcagaatgcaacatttctggtgtccagttatcgtgcacatagcgtggatttggtcaagtttattcgg

SEQ ID NO: 87235 - DNA, 1933 bp, Zea Mays
ccctcttcgtcgttgccgtcgccgcagtccccatccatccgtcgaggcatccatccatccacccattccattttcgctctcctcttccgtcacacctccctcctcctcgtccccccctcctgcggcgcacttatatatataccaccacgtcgatgcgccactcagctggcatcgccatcgacggcgtgccgccatagacggcctgacacccccccgctcccgcccccgccctattcatcccttcatcatcccaatttccacaaacctcgcgcgcggcggagggagaaggaaggatggcgtcggagccggtggcgcgggcggtggcggaggaggtggcgcgctggggcgcgatgcgccagaccggggtcagcctgcgctacatgatggagttcggggcgcgccccacggagcggaccctccttctcgccgcgcagttcctgcacaaggagctccccatccgcatcgcgcgacgggcgctcgacctcgactcgctccccttcggcctctccaccaagcccgccatcctcaaggtgaaagattggtatgtggagtcattccgtgaaatccggtcctttccagaggtgaggaaccagaaagatgagctcgccttcacccagatgatcaaaatgatcagggtacgacacaccaatgtggtgcctgcgattgcattgggtgtgcagcagctgaagaaggacttgggcggtccaaaggcgttcccccccggaatccatgagatccatcagtttcttgaccgcttctacatgtcaaggattgggatccggatgctgatagggcttataaacacaaaaatgtcacccatgacagttgctcgaattgctagtgaagatgcacgtgctatttgcatgcgggagtatggatcatctcctgatgtcgacatatatggtgatccgggttttacatttccatatgttacaccacatctacatctcatgattttcgagctggtgaagaactcccttcgcgcggtacaggaacggtatatggattctgataagcttgcacctccagttcgaatcatagttgctgatggagcagaggatgtaactattaagattagtgatgaaggtggtggaataccaaggagtgggctctcaagaatttttacgtatctctatagtacagcagaaaaccctcctgatctggacggacataatgaaggagtaactatggctggatatggttatgggatccctattagtcgcctttatgctcgatatttcggtggggacttgcagatcatctctatggaaggatatggaactgatgcttacctccacctttcacggctgggagattcggaggaacccttgccgtaatttattcaaaagaaccattcctgtaattaggatattgcttctgtgctggtatgcaagtatagttctgaaggccagccacctgttcagctgttcgtgtccctacttgttgtctttattgttcattcatcatcttaatggattgtgatcgtaattcctaatcgttttatgactgatttgtactgtcattataattgtcgaacctccaaaaaaaaaagttgccgtcgagcatccgaggtatttattagtttgagtgagtaatgggattcaccataacactgtaagcctgttactccaatgcctctaaagcatgtttttttcagtctcagcttgttcgatataatatgaggaatgatctttcactgaaattattcgatgaatattaatgttaaaatggatcgattcaatgcagaatgtgtaattctttgaaccaaatgcctgccaaaagtgtgtcattggttggagggagggtgagaagtgagattgtttttcccagtgcagctgatttcatcctctcgtcgacgtgtcagcttcagaatgcaacatttctggtgtccagttatcgtgcacatagcgtggatttggtcaagtttattcgg

SEQ ID NO: 87236 - DNA, 2458 bp, Zea Mays
aatcgtactttgtccaacttgtcatcttatagacatgtgcgggctgctcattcacaagcagaagcaacaatccagcctgtccgtgctgataagccaggcatatcaactgggtgtttgccaagaaatgaaactcttagttttggtgtttataatggtcaatgtaatcgaatgtctcagcatttgagatactctgaagtgcagaataagcttcattctgagtttacaacagacagtaatatgggaaaggcagtcaatcgtcatgggttgaagccacttcagatgtatgtaaagaagacaaacaccacatttggttctgctaacaagccggttggttcaattggtgttcctgaatgtcctgtagggaagaatagaattgagctagacaaagcttctattttagcatcgccaacttctacttggtcccattcatcagctcaaaaacctatagcttctgctcatttgcatcaaatgagagcaccacatgaatccatccttggtaagaagcctaacatatcagttgagttgcatcaagtgaaagtaccacatgaaaccatccttgatgagaagtctagcatatcagttgagttagtgagagtaccacatgagtccatccttagtaaaaagcctagcccatcagctgagcatgcatcaagtagggcgcatgattctgaagtttgtggcatcaattataatccaacatgtcagcaattcaaatcttctgaagcccagaataagctccactcttgctctaatgtcggtgatagcagtgggaggttaggaaatgaatataagaccaataaagagcaaccatatgcagaatgtataaatattttcacaacttcagcaagcaatgaaataaatccgtctactagaacttttgataattctaacggaagtactttgagatatccaaaacaatctttgtcagcatcgtcaagctctaaattgcttcagagtgcaaaggtgaatggctcaaatctgatgttatcggatcatatatctttacttgctgataatttgcatcaggatggagcaacaaccatttttggtaagaatagcacatcatttcagtgcactgccaaaagtagaacttttgtttttggtgctagtagtggccagtaccatcagacatatcagcaatcccagtcttctctgctatcagagcaacataattcaggtactagtatggagcatggtcattctgactcaataaattcgcatagaggcagcgctgcttcgccatcagtagagcataatggtgttccttttgcacaaacacgaacattctccagtggctcagcttttgaaggtttggatgatatttgcaatggttttactacactgaatatttctgaatgccctcaaggaactactgagaccagggctcaagatccacctactaatggtccttcaatgtgcatgctagataattatgaacatcctgtagtttttcgcgagaacagatcaacttttgacttggattctaaccccagctgctatcagaatcactctagtgatcctcaaagtggccaacctcctttcagcgactatatttggcaccaacctaatctgtccagtgatatgcaaagctcctctgagctctctggagataagccaagacatctgccaaattctactgagcctaaagttggaataatattgcaagctttgggcatattgaagactgagaagatattcccaacagaaactaacattgcagactgtatatgttacggagagctgaatttaacaggttttgatgttaagaaggctcttgaacttgccattcgccatgaagctgtcgttatgaagaaattactaaacgacatgccgttatttgttgcaaaagacgagagcctctggaaatgcgtgaacgtaacaaataccaaatcaaagaatcccatagaggagctaggaacagtttataactacatttcatctccagacggccgctctgcaatgatgaattctcagtcaaggtaccaagctgcaatgatcttgaagaggtcgtgcatgcagcagtgtgcactgggcgacattctccaggttctgcatatcgttgttgttcgaaagaaatggctcgtgcctcattcttcaggctggcagccgctgtccttaaaacgcaacagcggatcctgcaactactgatggtacaggaaaagttaaatcttcttttcctgtggccgtctaggattctgcaactactgatactactgaactactgatgagtggcagcaagaaaaaggtgaaatgattagtcataatattagtattaagttatcgagtaggtagtttgtgtgacagtgataggtcaatcaagggaggtatcaggtctgtgtatcaaaggacgtgaatggatttgcccccggtactaccggagcaacgcaggtcccagcatttttgctatctgcataggaagttctatattattttgagaagagcaagacagaaaagtaaa

SEQ ID NO: 87237 - DNA, 2011 bp, Zea Mays
gttatttaatttggagcagttctctctcgtctcgacactgcacggcagtgacggcacggaggagttaaaaagacggcagcgcaccggcacctcctctcacacaggcagtcccccctccccccacccacccagcgtgcgaggcgatcaaaccgtgtgcgggcatggcggccacgctgctcctggcctcggcgaccgcgctcctggcgctggcggcggcgtggctctgggactacgtcgtggtgcgcctcctttggcggccccgcgcagtggccggcatgttcagggcgcagggggtccgcgggccgccctacagcttcctcagcggctgcaaccgcgagatgaggaggatgaaggcggaggccgacgacgggctccggctggacgtccgcgaccacaactacctccccagggtgatgccccacttcctcgcctggaagcagcagtacggggagccattcctgtactggatgggtccgcggccccgggtctgcctcttcgactacgagtcggtaaggcaggttcttttcaacaagtcgggtcatttcttcaaggacgacgcccacccgactatcctggcaatgctcggcaaagggctggtcctggtggaaggcaccgactgggtgcgccatcggagggtggtcaacccagccttcgccatggacaagctcaagatgatgacggagacgatggtcagctgtgctgagccactgatcaagcggtgggaacagctcgcagccagcagatccagcgaggacggtgggaggggagaagtgcaagtggagttcagcaagcagttccaggacctgacggcggacgttatctcccacaccggtttcggaagcagctacaaggagggcaaagaggtgttccatacgcagaagcagctcctggcgctcgccatggcgactctcctcaacgtgcagctgccaggattcaagtatctccctaccaagaacaacaggctcaagtgggcgctagaaaagaagatgaagacgacgctcacggcgatcatacagtcgcgggtggcatccaatgggaggagtagtggatacggagacgacctgctcggcctgatgctcgaggcctggctcacagcggaacgaggaggaggggaacgggacgagtcgagcctgaccatggacgagatcatagacgagtgcaagacattcttcttcgcaggccacgagaccacgtcccatctgctcacctggacaatgttcttgctcagcgtgtacccggaatggcagcaacggctaagggacgaggtcctgagagagtgtggacaggcaaaccctactgcagacacgcttaacaaattcaatgagatgacgatggtgctcctcgagacactgagactctacggccctgtcatgctcatgctaagaaagcctacctccgacataaggctgggcagcctcagcataccgaaaggcaacgggatcgccatacctgtcccgttcctccaccgagacagagaggtctggggcgacaacgccaatgacttcgatccgttgaggtttcagaacggggtcacgaacgcggccaagaccccgcaggctcttctgtcgttctcgatcgggccgagggcatgcatcggccagaacttcgcgatgctggaagccaagtcggtgatggccatgatcctgaagaagttctccttcacgctttcctcgagctacgtgcacgcgcctgtggattatatcacgctccagcctaagttcggccttcccatagttttgaggccactcccggatgtatgatgtgaaatggatctgtagcctgatagctgatttttttggggggtctaactgtctaagtatgcataagaggtcagtattcaggacttggtttcatccgccaaacagtaaggctaaagaaccaaaacttgttgaaaactggtaactttctgggattttatgcccgtattatgtatataaatatataatgctacatagaactttgtattcggagttggttctgagttgaattacccgagctgacaaaatcttgc

SEQ ID NO: 87238 - DNA, 2010 bp, Zea Mays
gttatttaatttggagcagttctttcttatctcgacactgcacggcacggaggagttaaagggacggcagcgcaccggcacctcctctcacacaggcagtccccccacccacccagcgtgcgaggcgatcaaaccgtgtgcggccgtgcgggcatggcggccacgctgctcctggcctcggcgaccgcgctcctggcgctggcggcggcgtggttctgggactacgtcgtggtgcgcctcctttggcggccccgcgccgtggccggcatgttcagggcgcagggggtccgcgggccgccctacagcttcctcagcggctgcaaccgcgagatgaggaggatgaaggcggaggccgacgacgggctccggctggacgtccgcgaccacaactacctccccagggtgatgccccacttcctcgcctggaagcagcagtacggggagccattcctgtactggatgggtccgcggccccgggtctgcctcttcgactacgagtcggtaaggcaagttcttttcaacaagtccggccatttcttcaaggacgacgcccacccgactatcctggcaatgatgggcaaagggctggtcctggtggaaggcaccgactgggtgcgccatcggagggtggtcaacccagccttcgccatggacaagctcaagatgatgacggagacgatggtcagctgtgctgagccactgatcaagcggtgggaacagctcgcagcagccagcagatccagcgaggacggtgggaggggagaagtgcaagtggagttcagcaagcagttccaggacctgacggcggacgttatcgcccacaccggtttcggaagcagctacaaggagggcaaagaggtgttccatacgcagaagcagctcctggcgctcgccatggcgactctcctcaacgtgcagctgccaggattcaagtatctccctaccaagaacaacaggctaaagtgggcgctagaaaagaagatgaagacaacgctcatggcgatcatacagttgcgggtggcatccaatggaaggagtagtggatacggaaacgacctgctcggcctgatgctcgaggcctggctcacagcggaacgaggaggggaacgggacgagttgagcctgaccatggacgagatcatagacgagtgcaagacattcttcttcgcaggccacgagaccacgtcccatctgctcacctggacaatgttcttgctcagcgtgtacccggaatggcagcaacggctaagggacgaggtcctgagagagtgcggacaggcaaaccctactgcagacacgcttaacaaattcaatgagatgacgatggtgctcctcgagacactgagactctacggccctgtcatgctcatgctaagaaagcctacctccgacataaggctgggcagcctcagcataccgaaaggcaacgggatcgccatacctgtcccgttcctccaccgagacagagaggtctggggcgacaacgccaatgacttcgacccgttgaggtttcagaacggggtcacgaacgcggccaagaccccgcaggctcttctgtcgttctcgatcgggccgagggcatgcatcggccagaacttcgcgatgctggaagcgaagtcggtgatggccatgatcctgaagaagttctccttcacgctttcctcgagctacgtgcacgcgcctgtggattatatcacgctccagcctaagttcggccttcccatagttttgaggccactcccggatgtatgatgatgtgaaatggatgtgtgtatgtgtgtagcctgatagctgattttttttttggggtctaagtatacataagaggtcagtattcaggacttggtttcatccgccaaacagtaaggctaaagaaccaaaacttgttgaaaactggtaactttctgggattttatgcccgtattatgtatataaatatataatgctacatagaactttgtattcggagttggttctgagttgaattacccgagctgacaaactcttgca

SEQ ID NO: 87239 - DNA, 2001 bp, Zea Mays
tatatagcatattattatgaatacaaagcatgacactccacccacatggtagccgcacggcatggtactgtgtgtggcaataaaaaggacctctgatcaagcctcatttcgcatcggcggacatggtggtggccgtgcagctggccgctcttctcgcgctgctgctcgcgctgtggcgcctggtgtggcggccgcacgccgtggcgcggtcgttcgccaggcagggcatccggggcccgccctacacgttcctggcagggtccttgccggaggcgaagcggctgctgatggccggccggagagggacggcgcccctggacgccggctgccacgacatcatgcccgtcctcttgccgcagtttcacagatgggtcgcggactatgggagaacgttgctgttctggatcgggccgattcccgctgtcttgtctactgatctacagctgattaagcaggttctgacagacaggacgggcctgtatcagaaggacttcatgatccccgtgctcaagttcctcttcggcaacggtgtcatattgataaacggagacgattggaagcggcaccgcaaagtggtcctccctgcgttcaaccatgagacgatcaagagcatgtcggcggtgacggcagaggtaacggagcagatgatgcagcaatggcgcggccagatacacggaagcgaagaggaatccgccgagatagacatgatccacgccttcaacgacctgacctccaaggtcaatggccgcgtcgccttcggcacgagccaccgggaagtcgaggaggtcattgtactgatgcgggagatgcagaagctcgccactgcggccacgctcgatgctccaatactctggtatctgccaactcggcgtaacctgcacgtccggcgtctgaacaaacagctgagaagcaagatcatgtccatcatgcaggcgcggctggccgccgacggagctgataggcgtggtgggcgcggcggcgccgtttccggcggaggcgacctacttgggctgttgctagaggcgtggacgccgcagccgcagcacgggaacggcggcgagacgctgacaaccgacgaggtgatcgacgagtgcaagaccttcttcgccgcggggcaggaaaccacagctacgctcctggtctgggccatgttcctgctcgccgtgcacccggaatggcaggacaaagtcagggaggaggtcgtcagggaattctgcaccagcgacgacggcgaggttccccatgccgatgtcctcgccaagctcaagctgctatacatggtgttgctggagacgtcgcggctctacccgccgatcgtgtacatacagcggagggctgcctgggacgccgtccttggaggcatcaaggtgccccagggcaccgtcatctccatccccattgccatgctgcaccgggacaagcaggtctggggccccgacgccgatgagttcaacccgatgaggttcgagcatggcctcacaaaggccgccaaggatcccaaggcgctgctgtctttctccctgggcccaagagtgtgcactggccagagcttcggcatcgtagaagtgcaggtcgtcatggcgatgatcctcaggaggttctccttctccctctccccaaagtatgttcacaagcccaagtatctcctgtccttgacacccaagcttgggatgcctctcatcgtcaggaatgtggatggctgagagggataatattgtaaaagctcgttttgtgtgtgaaaatgaatacatgactagtgtgtgacaaatggtactctctttgtgttactactgctgtaacaagcccgacagaagaaccatccaatgcaggcccacgaaggggatccagtctgcgccggcctagtactcggcttagggagtttgtgtgagttgtaattgagatataagggaatattgattagggaaaagacatcagacttgtaataagaattctggacagactgtcgctctgcctatctactctgccatctactcttcttcc

SEQ ID NO: 87240 - DNA, 4096 bp, Zea Mays
cgagggaccagcgtgcaaagcgaaggcgaccaagcaggcaagcctccctgccgaccagcgactggcgtgctgcgtgccggacagacggaggaggaggaaagccgaaagcaccaactccccctctcgagtctcgtctcctccactccactgcactcggcgctccactccacttcctccctcggtcgcttacgcagcttccaacgattccattcccagctccctcctcatcctttccgttcctcccatcccccacccaacccgtttcaaatcgcaccaaaacccccctcgaagacctggagcgaggcctgccccttccgcgctcgcccctgccaggtgtagatcccccattcctgtcgctcgctcgccgccggccggattcctgatccgacgggaggtcttgtgcggaggcgggaggcgctgttgcgtgcctgcctgatcggttcctgcttcctgcgagttggtggtggtgcggcggcggcggcgggttctggcatggggttgcgctgccggggcatttcctcgaccaggcggtgggcggcggcctaagatgcgagggcggctggcccggggagtggggcaccaggtcggggatagcttctcgccgtgcgccagcctccgcctgctcatgctgccggccgcccggggccctcggcgacgggcattggggcgcgctctccccgcgaggtgctgacgctgacgcgcgcgcggcgctactagccgccagccgcccgccatgggcaacagcacgtcccgggtcgtcggctgcttcgcgccgcccgacaaggccggcggcatcgacctcgacttcctcgagccgctcgacgaagggctcggccactccttctgctacgtccgcccgggcgccgtcgccgactcgcccgcgatcacgccctccaactccgagcgctacacgctcgactccagcgtcatggactcggagacccgcagcgggtccttccgccaggagcccgccgacgacctggccgccgccgcagccgccggcctgcagcggccctgcaggagcttcggcgagaccaccttccggaccatctcgggggcctccgtcagcgcgaacgcgtcctccgccaggacgggcaccctcaccgtctcccttatacgtgacgtgcaggagcccgccgccgcgttcgagagcaccgcctccttcgccgccgtgcccttgcagccggtgccgcgggggtcgggcccgctcaacaccttcttgtcggggccgctggagagagggttcgcctccggcccgctggacaaaggctccggcttcatgtctgggccattggacaagggagccttcatgtcaggccccatcgatgctggcagcagaagcaacttctcagcacctctttcctatggacggaggaagcctcgtctgaggcttcttgtacataggattagtagacccatgaaaaccgcactgtccagaacattcagcaggagctcacaaaatccaggctgggttcaaaagtttctgtcgcatcctatgtctcaactgccctgggcaagggacgcaaagtccagatcagaaggttcacaggatggattggaatctgggatacccgagcctgagtataacgtgacaaggaaccttcagtgggcacatggaaaggcaggggaagatagggttcatgttgttctatccgaagagcaaggatggttgttcattggaatttatgatggatttagtggccctgatgtgcctgactttttaatgagcaatctatacaaggccattgatagagaactggaaggattgctctgggtttatgaagacagctctgaaaggagtgatcatgtatcgactcatgaagagggtggattggttgctgcttctgtggatgctcctcatgatgatagtggccagtgccagagtgacagtgggagacaagaacttggtaattttggaaaacaaaatgtatcacctggaaagggttgtgatgatagtgccttgcaatttcagccaaactgtaccagcagtgaagagaaagatttggctccacatggttcaagtagtgagatgttgggcagggatgagatagttgaggaaatggttgaagctgatctgggaaatgatctccaaagtagagaaccccacagctcgaacagagatctttcaggtacagatctaaacaccagctgcagatgtgcaacagaaaccagttcctattgtgatcagcatgccaaattcttgaaaggaaacagaaaaagcaagcgtctctttgagcttcttcagatggaactgctgcaagattataacacaaggttatctaaggagccaccagaggaaagtaaaataccaaacttgcatgttacacaggcagacactgcagaagcgcgctcaagaaacacagctgaggtctccaggtgttcattggcagcaactggagaatgttttgatgattctgaaggtcttggaagttcaagacacgctgatagtgtacttggcataggtattaaagagtgtacagggtgttctatatctacatcttcatcagggcacaagcaagttacgagaagaattttaatcggatcaaagttgaggaagatgtacaaaaagcaaaaaatgttgcagaagaagtttttcccatggaactatgattggcacagagatcaacctcatgttgatgaaagtgttataaaatcttcagaagtcactaggagatgtaagtcgggaccagtagaacatgatgctgtattgagggcaatgtcacgggcacttgaaataacagaggaagcgtacatgaaaattgtggaaaaggagcttgatagatacccagagcttgcattaatgggttcgtgtgtccttgtaatgttaatgaaggaccaggatgtatatgtcatgaatcttggcgacagccgagctatcttggcacaggacaatgatcactttgatcagtacgatagctcaagtttctcaaaaggagatttacaacatcgaaataggtcaagggagtcacttgtccgtgtggagcttgataggatatcggaagagtcgccgatgcataatcctaacagtcacctaaacagcaacgcaaaagctaaggaactgtcaatatgtagactaaaaatgagagcggttcaattgtcaactgaccatagcacgagtattgaggaggaagtcttgaggattaaagtagaacatcctgatgatccacaagctgtctttaatggtagagtgaagggacagctgaaggttacaagagcttttggtgctggttttctaaagaagccaaaatttaacgaggcactacttgagatgttccgcatcgactatgttggaacatcaccatatatcagctgcaatcctgctgtacttcaccaccgtctctgcgcaaatgataggtttcttgtgctgtcttcagatggattgtatcaatatttcagcaatgatgaggtagtttcgcatgtgctttggttcatggaaaatgtaccagagggagacccagcgcaataccttgtagctgaacttctttgtcgggcagccaagaagaatggaatgaattttcacgagctactggatatcccccagggcgatcgtcggaaataccatgacgatgtttctgttatggtagtctcgcttgaaggaagaatctggcgatcttctggatgagtgtttgaaacatgacctggtctgttccttgcagccttacttagtggtagtaaatctcaatcaggaaaggcaccaatgtcttgctctgtcttaatttttcaaccatgtttcaaattctggcagtccatgtgccttttcttgtcttctgcgttttgaacttgcgctgcattcttgggcggtctgaattgacgtatacagttttttcacttttgatattagggaaaaaaggggttcttttgagggcagatgtcttttcctggcgttctctttagtgctagtttggcaactccatttttcaagggatttttatttttcctaaactaattttccttgacaaaataaaaatcccttgggaaaatgggggtttcaaactagccctaaaatctatttttgtgttgtggggttaatatttattctgtttgctatatttttgtcgctgtcgaaaaggaccgttctttttccaagacattcggg

SEQ ID NO: 87241 - DNA, 300 bp, Zea Mays
gagattacgcttcctgccagcgcagatcacggattccgtttggtggtcggcgagtacttcgcgggggcgcttccattgaactcggccgcggagtccgcgacggaggcgatcctggcagcagtggcccaccagccagcggagaaattgacacaggcgcgtgaagctcgattttatcctccgcagaggccagcgagcggcaccagcgagatccccgcgcgcggatccagcgtttgcgaacggaagagctgggagaagatcctgggtgaaggggcccgcatgccagtgactgctcacccgcac

SEQ ID NO: 87242 - DNA, 408 bp, Zea Mays
atgcccaggatcagaagcggcgacctcgctcttgccgctcaagcacgaaagaagccccgtcgagccggaggccgcgtgtcgtgttccggccctcgacgccgtgctcgaccgcaatacgaccttcctcttccttcgccgagtgtgatcgttcctggcttccctcctgcatccgcatcggatccccatgccgaggctggaaagctgtacgaccttcgcactccgctacgcgcaagtggcggcctcgctcctgccgctcaagcacgaaagaagcccatcgagccaaaggccgtgcgatgtgttccagccctcgacgccgtgctcgaccatgatacgcccttccgcttccttcgccaagtgtgctcgttcctggcttccttcgccagagtaatatctgagtcagcaacttga

SEQ ID NO: 87243 - DNA, 644 bp, Zea Mays
atcctcaaaacgccggaggccatggggttcgactgcgcgcaccgctctgcactggatgccatgggattcgactacgtgcaccgctctgctgtagacatcgtcatcgtcgatgtcctcctccgctacatcacccacctggactggtctgccgccttccatgccaacctcgccggccacgcactcgccaacgagctcgacgttgtacaggtgctcgcaggtggtcggcaccgacacggacggcttcgcgggcgcggcggccacggaccgctgcctcgttggcttcggtgtaattagagacctcatggtgttcgtcgacaactaactcgatgattaccgaaggatggatgagcacgatcaatatgagtcaattggtttagatgattcactcgaggatgagaggaatcttgatgaaaccatggctgatcgaagggtcgtagaagtagagcctaatgcaagggatgtgaggactggtgtagcagatgacaagaagtatgccttcaagacaagttttagttactgtatgatattagagaaattatcatatttatattctagattaatgatcttgattgaactaccgaatgagtatttggtatgtgaacttatgttgcatcttttggctctcgtgaattattgcttagggc

SEQ ID NO: 87244 - DNA, 597 bp, Zea Mays
atggggttcgactgcgcgcaccgctctgcactggatgccatgggattcgactacgtgcaccgctctgctgtagacatcgtcatcgtcgatgtcctcctccgctacatcacccacctggactggtctgccgccttccatgccaacctcgccggccacgcactcgccaacgagctcgacgttgtacaggtgctcgcagagggagtacatggggaagaatcttgtgcttggagtagtgattaccgaaggatggatgagcacgatcaatatgagtcaattggtttagatgattcactcgaggatgagaggaatcttgatgaaaccatggctgatcgaagggtcgtagaagtagagcctaatgcaagggatgtgaggactggtgtagcagatgacaagaagtatgccttcaagacaagttttagttactgtatgatattagagaaattatcatatttatattctagattaatgatcttgattgaactaccgaatgagtatttgctactatctcaccttcctgattgagcaagataaatcttttgtatggttcttatataaatattatattttcagtaccttatatttaaatgtataaattgc

SEQ ID NO: 87245 - DNA, 103 bp, Zea Mays
ctggtcatcacttccgttttatttgagcaaacacaagatgtagtgtttcggcttcactatgaagaaagtgatgtttgttctcaccttgtcggtgtgcctaaag

SEQ ID NO: 87246 - DNA, 91 bp, Zea Mays
ctcatccataagtaacaaaaattcatgtcaaactaacagagcatgcaccaattcgactcatgcttcactcaaagtttgtttacaaacaaca

SEQ ID NO: 87247 - DNA, 2535 bp, Zea Mays
ctctctggctctctctccctgcccctgccctcgtcacgcactggtcctccagtccacgctgctgttggcacctgctcgctccatcagatttcggggagttcaccaaataagcatcccccccgatcgaggcaggcttagctaggccttcgtactgtttcgtccggaagaagcaagctatagctatagctgcaggaagcagacgagatcggatcatccgaggccatcgggaacgggagctccagacccgccgagttgccggaggagtgccttggatcgcaccatctttggatgatgtcgtcgcagaaacgacggaagggatgcatcttcttctccctcgccttgcttctctgcagcgcgtcaggaggcgtaccgtcgctggcttcagaaaactctccgtcagagttcgccaagatcgtccagtctaagcagacgaggcacgcccgcgtgtgcggggcggaccctcagctgctgagctcgctggcaggcagcggcgcggaggtcatgctcaccgtccccaacgagcagctggagcacgtggccgagttccaggaggaggccgacctctgggtggccgccagcgtggcgcggttcgtcccggcgaccaggatcacgcacgtcctggcgggcgacgacgcgccggcgcgctccccgcccagcgcccacttcctggtcccggcgatggccaacctccgctcggcgctcgccgccgcggggctcgccggccgcgtcagcgtgtccagcgcgctgtccgccgagacgctggccgccccggacccggactggtcgggcgtcgtgggccgcgtcctccggtcccttgcgtcggccggctcgccgctggtcctcaagtcgtcaggcccgtcggaggccagcgacgccagggccgacgccgcgtacgccgccatgcgcgcgctgggggtctccggcgtccccgtcatcgcggcggacctcgcggccgccgccgccgacgtcgtgccgtactactactacggctacggctacgccgacggtcacagccacccgggcgtgcagcggcggtcgctggcgacgggcacgttctgcgtggcgctgcagaacgcggacccggcggcgctgcaggccgggctcagctgggcgtgcggcccgggccacgccgactgctccgccatccagccaggcggcgcctgctaccagcagaacaacctgccggcgctcgcgtcctacgcctacaacgactactaccagaggatggccagcaccggcgccacctgctccttcaacggcaccgccaccacgaccaccaacgacccaagctcaggatcttgcgttttcgcgggaagctccaactcgagcgtgccggtgggagcgagcccgccgaccagcctctcccctccgacgggcttcacacctccagtcggctccagccccccgtcgtcgtcggagttcggccccccagcggccggcaccaccccgccggctggaggcggccttggacctggattcggcaccccgccgggctccttcaatggcaccgggtcgttcgggcccagcggcacgctcaacccttacaacggcgtgtcccgtgggttgccgcgcgcgggcttgttcacggctctgtccgccgctgcggtcgccgttcttctcgtgtccgtggatgccatgtgaattgtcgatgcagatatcatatatatatatatatatgtggattacctctagtactagacattccttctcgagcccacatcatgttctttattgagctactggtcatgtagatagatctcaggtcggatctgtatcatatacgtataggagtcgtaactacgaagcgaatatgtatctgcacgtgatctgggacagttctgatgagcgtatgcatgtattacatgatgaattacacttttacatgtttggaatcagaaatgtaggacgcaacatcctgtttttttcgtatcgattggtctgcctgcgtcgtgatagttcaatcttcaaacttaggactcaaaccgtgtgtgcaggtgcagcagcatgacccccctgtcctcgctgctggccttcgaacttgagccacctcttggccctgcacagcctcatggagccgtgcaagccgacgccgagcgccgtgagcgcgccggcgagcgcgaacaccctccacccggccacggcgcacacgtacgccaggaacgcggacggcacggcgcacatggcggccagcgcgggcagcgacgacagcggcacgcggtacggccgcttcaggtccggctgcctggcgcggagccagaggaaggcggcgaactccagcagcgtgcccaggctgtagaggaagttggcggtggccacgacctcgtcgaacgccaggaaggacacggccagggtcacggcggaggagacggcgacggcgacccacggggtgcggaggcgcgcgaagacggccgggaggaggcccaggtccgccatgcccagcagctggaacgcgccgctgctcagctgggcctcgaacatgccgacggacgacagcaccgcgccggcctgggtccagaacttgagccatgggcctcc

SEQ ID NO: 87248 - DNA, 531 bp, Zea Mays
atggcgctgggtgctcgccggagccagctggctggccaccgcacagccggaggggaggctgactggtctggccgcagccgtgctgcagggggcacgctggctgccggctggccttgcaggcagcacgacggtgatggattcagaggggcaagcagcacgcggaggcacatacgcgcaccgtctcgccgaaggacccggaggcgaggcgaggacgttgccatgggggctgaaggagacgcagaagacgtagttggtgtggcccgtgagcgtcttggggaggcgggctcctccgccgacggcgagatcccagatgtggatggtgcggtcatcagatgtgggggcaagccggcaaggaggcggccgtcgggggagaaagagaggtccgagacactctctccatggctcttgagctccgcaacgggggtgagatcggaggaagaccacacgcgaagaagcttgtcggcggaggcgagcgtggctgcgacagcgcgcatgaccaggcaaagaagggagagacgatttcatttttag

SEQ ID NO: 87249 - DNA, 965 bp, Zea Mays
ctgtgcacccccaaccgccgcctcatcctcccatcgccatccacctagatctcccatcacctcctcctcgtagggcgcccataggtagttcacggagcacgactggcgagcgtcgaggcagatccacgacttacccttgccgctccagtgaaggaggttgatatggccctgatggagaccccgacagcggccctcgacgttgtcgccgccgagctcgtgctagttccaccagtggtccaccacccagatgtggcccgcaaagacgagcaggaacggcggcagcgaggcgaggtggtagatccagcaccgctttggcacggccatccattcctccacccagagcgtgtacccaggcctgcctctcctcgaggaacatcgtcgaggtcgtccggctggagcagaaggcggcgtcgctcggcaagctggtcgaggagcagtgcgagagcatagacgatctcaagtccaaggctagtgctgatctccttcccctatttatgagctgcattgagtcgcgtgcgagtttcagttgttgataatttattcacggtggtaactagtgttggaaaacaaaagtttaccccaccttttctgctgcctctacggacgaaatgatgaatctgtgacgcggagaaacagttactgcaggccacatcaataaaactgacaagcaaatataaggtggtgaaagtctctgctactttacaaggttcagtatgtaattaaaaaagaatgatctggatatggatgtactgtctgtataaatgcaccttatcctatttctttcaggaatcataaaagcatatggaggaactatgtataggctacaaagaagcataagaagcatttttatagcagaagccaagtgttttgatgattttgttttttcaattgtattttctgttattggttcagcatgcacatatattgacatgatttatggcatggcatctgccatctttgttata

SEQ ID NO: 87250 - DNA, 99 bp, Zea Mays
gttggtgggctagaggatgtgaaaaggattcttctagatactattctggtaaattggacttggttcagcagtaaatatcagcaacaccattatgacgct

SEQ ID NO: 87251 - DNA, 86 bp, Zea Mays
gactaaaaaaagttccagctacccaaagtttcggatattagctactcacaccaaagtatatatttataaccgattaagttagaaag

SEQ ID NO: 87252 - DNA, 761 bp, Zea Mays
aacctggagaagttcgtctccactaatggcacatgcggggatatgatcattactaaggacacgtatttgtgcaccagtctcactgcggattccttggatgatctgcccaccttttccaataatgcatccaatctggtctgatggcacaagcaagcgaacagtaacttgaggtgaaatttcttcgctgtcttcgttcccaagaccctcatcactggcaagcctctcatgaactctaaagagggcatcctgagcagggcaaacctcatcttcagcaccatcgatggtattagttttcctgcttgtgctaaatatggtaacaactcgctcatcacatccagggacactctcgccaatcctgatcttagcttgggtctcagtcctcaactgctttgcaatttctccacccctgccaatgatactcccaatttttctagaggcacagaggtagcgatacacagtgtcatcaggaccaggtgcatatgtatcatcgccaggatttcttctcttactgcctccattttcagtaaaatcagactggcgctttccatgactgtttcggtggccagccattatctggaagcagagccggcggaggggcactgacctcggcggtctggggcagcgtcgcgagagagacgatgcggcccttgcggcggaacgatagatgccgccgtaaccaggagcttgcgaaatcgaggaggacagccgggcagggggaggctagggacaccgatcgacgaagagggttagccagccacgga

SEQ ID NO: 87253 - DNA, 1728 bp, Zea Mays
ccgccgcagcacgaaaccctagcttctgcatctccgccccctccacctcccctccgcgaagcaggcgagatgtcgtcgggcggcggtggggggcagcagttccgctacacgcagacgccgtccaaggtgctgcacctgcggaaccttccgtgggagtgcgcggaagaggagctcgttgagctctgcaagcccttcggccgcatcatcaacacaaagagcggcgtcggcgccaaccgcaaccaggccttcgtcgagttcactgacgttaatcaggcaatctcgatggtttcttactttgcatcatcttcagaaccagcacaaatacgaggcaagactgtttacattcagtattcaaacaggcaagaaataattaacaacaagagtcctggagagactgctggaaatgtcttgcttgttactatagagggtgttcaagctagtgacgtcaccattgatgtgatccatatggttttctcggcctttgggtatgttcataaaatagccacctttgaaaaggctgcaggttttcaggcattgatccagtacactgatgcagatactgcttcagctgctagagaagccttagatggaaggagcatcccaagttacttgcttccagagcacgtgacatcctgctgcctgcggatttctttttctgcacataaggatttaaacatcaagtttcagtcaaaccgcagcagggattataataatccatatcttccaattaattattctgccatggatggtacattgcagcctgctgttggatctgacggaaggaaagtggaggctcaaggcaatgttcttcttgcatcaattgagaatatgcaatatgctgtttctgtagacgtgcttcatactgtgttctcatcatttggtacagtccagaaaattgctatttttgagaagaatgggggaacacaagctttgattcagtaccctgatgtaaatactgccgctgtagcgaaggaagcattggaagggcattgcatctacgatggcggctactgtaagcttcacctgtcatactcccgtcatactgatctgaatgtgaaggcacatggtgacaagagcagagattatacaattccagctggcgtaatccaaggggcgccacaaccacctggtatacaagccacgtcccctgggtggcaaggtaaccttcaagcagcagggccatatgccccacccggtgcccctcctcaaaatcacagtgccaatggacaagtgccgaactggactcctggcaattcagggtattccccagccccaggaacatatccaggccagatgtactcatctccggcacagtatgtagcatcagggagcttccttaatacctcagcggccactccgcctcagtatgcaacctcagggggcttccctaataccccatccaccgctccgtcacagtatgcagcatcaaggggcttccctaacaccacacctgccgcccctcctggtgctccatcacaaacgccgcacgcttcccagcagatgccgcatcagcatggaaatcattcaggaggaggcacgcccggaactagccaaccgccactgccagcatcatattaccgttaagttggatcttcttttgctattgtacttgacctgtgttttgaactgagtaatcatgtaatactgcaataacctgcggtctgtaactgtgtttagatgtgatagcagatggatacgagtgaggaatacatgaatatgtttggggtt

SEQ ID NO: 87254 - DNA, 645 bp, Zea Mays
aaaaaccatgtaaaaatatatctaaataaaatataaaataaaaggctcgacgtcgtcgtcacctctctcgccgtccacgagtcacggcgggcgggcggcggcggcggccgggggtcccggttgcacacggctcgccaccatgcctgaccccaccaccaaactcccctctccacgcccccgccggcgccgcaggctcttcagcctctgcctcggcacagcgctcctcgcgctcatcgtctccgcgctcgtccacgtcgtcgcccagccgccgggtcccgctcccgcctccgcgcgcttctccgtcatcatagacggaggcagcacgggcacccgggcccacgtcttcgcggcggggcccgacggccgcccggatctggcgcgctccaccgtgatgcgcgtctccccgggcctctcgtccttcgccgccgacccggcgcgggccggggagtccctgaagcctctgttagattttgcgagggataagattggcggcgccgttagggaggcggaggtgcggctcatggccaccgcagggctgcgcctgctcgaggagcgcgcccaggaggcgatcttagcgtcttgtagggacgttctacgagcctctgggttccggttcgaggacgcgtgggccaaggtgatcccagg

SEQ ID NO: 87255 - DNA, 1062 bp, Zea Mays
cttttggtgaaacaacatacactctctataccaacagctttttaaactttggtcaaaatgcagctcaagactcattccatgaaatgctgaggtcaagaggctctttcaaaaatggtacacttgctgatccttgtgctcccagaggatattcacgcaatgaaggtgcttcaaggtcaacattagagaaccagtatgttaataatgggactggaaactttacagagtgcatatcttcttcacaacttttactgcaaaaaggaaaggaaaagtgccagtatcaacaatgtcacctgggatctacttttgtacctgagctgcgtggatacttcttgggaactgaaaatttatattttacttcaaagttctttggacttaagaagtcttcatcactatctgatttcatgtttgctggagaacaattttgcaaccagcatttgtcgagtcttagaaaaaggcatcctaataggtcagatgaggatttttcacggtattgcttctcgatggcatacattgtggctctactgcatgacagtcttggtgtaccactggatgacaagaggattgagtattcaaaccaggttggagacattcaggttgaatgggctctaggagctttcatcacactgatgcaaaatacgagtttaaagccattacacaccaccgcagaatcaacccatagcaatagaccattgtttgctgtgctgggaatgtttcttttatgtggagtactctttgtatcaagatggaggaagcccaagacgaaaatcatatacgacttagagaaaggccgatacatcataacacgcatcagctgacgctaaatcttgtgcagaagaactatatttatacgacatgaatagatgctgtgttgtgcaacaatgtacgagttcaattctttgtgtttttacctttaggtagcagagctgggtgggtggagcaggaagatagcgcatttgtgcgtatagaagaatgatgtgtagaacaaattgccatgtgttaattgaattatttgatgaataattatagttgctttgttcatctaatgaggtcgatatttctcac

SEQ ID NO: 87256 - DNA, 192 bp, Zea Mays
caaaaatggattgccaaagcatccacatcatcgtctttattctcagccgccagatctcctagcaacggccacgaaccgcattaaacggctaaagcaacttcctcttgataatgttgctacaacacccacaaactgcattatacgagattctttcagagaggaaatgaagggcgttgggaaaagaaaaacaaa

SEQ ID NO: 87257 - DNA, 92 bp, Zea Mays
cgtcttcctccttccactggatgtgcaagtatgcacgtcatgcaagacaacaacctgcaagttgtcggtttacgatttagtaaccaacaaac

SEQ ID NO: 87258 - DNA, 1942 bp, Zea Mays
aatgccgttcgttctccgccttcgcttttcaccgtccaaggacccggcgccatcgagcagcttctggaggtagcgcagggatcgcgatgtggtcgtcgaagggatcttcgtcggctcgtcgccccctccttcttcggccactgcgcacgagggcgacggcgatggctgctgctgccacattgatgtgggagggagcagacggagaagccactgactctgactagagagcggccggagtgaaagttgttgaaagcgggagcgggagccttaccaaactgggctggcaaggcgtcgtcgcaggttgccggttcgccgctgccagcgaagcactcacctcgccgtcgtcctccggctgccgttcctgcggtcatatgtgacgccttacctgcagttctcctcgtccctcacgcctcaactcccgcacctctgagtctcgatggaggaccgcctcttcgataagtccctgaacccgaataagcttttgaaggaacaattcgtcagcaacttgacggggtcttccctgctggagatcgcggcgctctccaccgtcgtgccggcattggtagttctcagaaagtggagcagcagagataattctaggaaggattcagcaaagaaaaacgatgatcaagttcaccctgttggtaaagattggatgcaatacttctctacactagctgtagactatctcactgttgtattgccaattattgtggttttcacagtcttatctgaatgggcttttggttgtgctatttctcttgcaatcctgatatacatctacgtcatgtttaaaaggcctcagctttatcttaaagatgggttcagccagttgccttcgatgagggcagacatatcttcttaccgtgtctcagtggttctggtgacatgtttgtgcattttagctgtggacttcaaaatatttccaagacgctatgccaaggctgaaacatatggtagtggcatcatggatcttggagtaggatcatttgtagtggctaatgcactggtatctagacaagcacgaaacatagcctcaatgagtttcaaggcggctctgagttccataagtccactagtatttcttggctttgctcgcattatatccacatggggtgttgattatcaggtccatgtaggagaatatggtgttcattggaacttctttttcaccctcgcagctgtttctatccttacatccattgtcaggattcatccaaaacattgtggcttagttggtctgcttatccttgctggataccagatttggctatcttctggattaaatgagtacctcatttctgataaaagaagtgctgatataatcagccagaataaggagggcatttatagcatccttggatactggggtatgtttctaattggtgtttctttgggtttctatctgttttttgacactagttcaaagggcaagaacaggaacactcaagtcatgaaaatctgggttcttgctgcgttgttttggattttggcaatcatctttgatagctatattgagagagtttctcggcgaatgtgcaactttgcttatgttatgcttgtttttggccagaattttcaggttttatgtatcctcacattagctgggttcgtctcatataaaaagaacttggttcttgaagatgcattcaatcaaaatatgctcggttcattccttctggcaaatatccttactggtctggttaatctctcagttaacacgctctctgcttcttccctcaccgccttcatgattctgtcagtatacacctttgctttatgcatggttactggccttatccatttttgtggtgttagaatgaaattctggtgaattgtaagctaccatttgatatgatgtatgcattcattaacttgtcagcgaactagtagctagcttgcttgaaatataatgatttttaggggggggggggggggaaat

SEQ ID NO: 87259 - DNA, 2395 bp, Zea Mays
gagtttggcctttctttatttttccaaattgtcgaagccctcccgttcgtcgaatccacctctgctgtgttttataatggaaaatttctcccagatgtgggagggagcagacggagaagccactgactctgactagagagcggccggagtgaaagttgttgaaagcgggagcgggagccttaccaaactgggctggcaaggcgtcgtcgcaggttgccggttcgccgctgccagcgaagcactcacctcgccgtcgtcctccggctgccgttcctgcggtcatatgtgacgccttacctgcagttctcctcgtccctcacgcctcaactcccgcacctctgagtctcgatggaggaccgcctcttcgataagtccctgaacccgaataagcttttgaaggaacaattcgtcagcaacttgacggggtcttccctgctggagatcgcggcgctctccaccgtcgtgccggcattggtagttctcagaaagtggagcagcagagataattctaggaaggattcagcaaagaaaaacgatgatcaagttcaccctgttggtaaagattggatgcaatacttctctacactagctgtagactatctcactgttgtattgccaattattgtggttttcacagtcttatctgaatgggcttttggttgtgctatttctcttgcaatcctgatatacatctacgtcatgtttaaaaggcctcagctttatcttaaagatgggttcagccagttgccttcgatgagggcagacatatcttcttaccgtgtctcagtggttctggtgacatgtttgtgcattttagctgtggacttcaaaatatttccaagacgctatgccaaggctgaaacatatggtagtggcatcatggatcttggagtaggatcatttgtagtggctaatgcactggtatctagacaagcacgaaacatagcctcaatgagtttcaaggcggctctgagttccataagtccactagtatttcttggctttgctcgcattatatccacatggggtgttgattatcaggtccatgtaggagaatatggtgttcattggaacttctttttcaccctcgcagctgtttctatccttacatccattgtcaggattcatccaaaacattgtggcttagttggtctgcttatccttgctggataccagatttggctatcttctggattaaatgagtacctcatttctgataaaagaagtgctgatataatcagccagaataaggagggcatttatagcatccttggatactggggtatgtttctaattggtgtttctttgggtttctatctgttttttgacactagttcaaagggcaagaacaggaacactcaagtcatgaaaatctgggttcttgctgcgttgttttggattttggcaatcatctttgatagctatattgagagagtttctcggcgaatgtgcaactttgcttatgttatgcttgtttttggccagaattttcaggttttatgtatcctcacattagctgggttcgtctcatataaaaagaacttggttcttgaagatgcattcaatcaaaatatgctcggttcattccttctggcaaatatccttactggtctggttaatctctcagttaacacgctctctgcttcttccctcaccgccttcatgattctatgacctgacgtatcccactgacgacctagctggaggtgcgtgggcattcggccctctttccgcgtggcgtttcttcgtgcctgaggcgacgacggtttggcaccggctctctgccgtcgagagagaatggcaccagccaccagctcgtgtcaccactgccggcataggtggtctgttcctcttcagctcgctgcttatttaagaaaccgtgacagagaatgcctttgaccttaaatctgttgaaccaatgtaccgggggaggaggtaaccagtgcatcagtactccggcccctcagctccacttcagatcagatctcctgaattgcacgtttgagatcgagatctatcaggccatgctaagagagtaagaggtgatcaaatgacagtactgaaaagtgtagcaacaaccacgcttgcttgtgtgtgatggtggagtgagagacaaggagagctggatccaccaccctgtcctctggagacttgatgagtcggacgcatcaaattgcgttgcgtgatcggacgggtccaaatggtattaactcgcagcccatggattgcgagccttcatggaatggtttccggatcacgatggatcaatcgttcatcgctgacgaactagtacgtggtatttgtattgcaccgaccttgtgtggcccatagtactacttcctttaacttgttttcggtactctcgtttctgaaattgatgttgctaggttattct

SEQ ID NO: 87260 - DNA, 733 bp, Zea Mays
ttactattgcccgcttccctcagggagcagggcgaaccctagccaccagctctctctctctctctctctctctctcgattagccacggtgccctccgtcgtgcacactgccggcgacaacgcagccgccacccccttcttcctcccctcgcttgcagccctaaccgtgaacagtactcgccggtactgtagcgcgggtgctgtagcatgagtattgtagcgcccctgttctctcgctttctgccggccacaccgagccatggcgctccagcgccgtgatcgctgtcgggctccagcacctcatcgctattcccttcgccacatccccgtgcaactttgcttatgttatgcttgtttttggccagaattttcaggttttatgtatcctcacattagctgggttcgtctcatataaaaagaacttggttcttgaagatgcattcaatcaaaatatgctcggttcattccttctggcaaatatccttactggtctggttaatctctcagttaacacgctctctgcttcttccctcaccgccttcatgattctgtcagtatacacctttgctttatgcatggttactggccttatccatttttgtggtgttagaatgaaattctggtgaattgtaagctaccatttgatatgatgtatgcattcattaacttgtcagcgaactagtagctagcttgcttgaaatataatgatttttaggggggggggggggggaaat
